United States Patent Application Publication US 2022/0213167 A1 - sequence listing, part 10

SEQ ID NO: 196559 - protein, 22 aa, Homo sapiens
  CDR3 for alpha chain variable domain of TCR clone 98280 (TRAV12-2, TRAJ53)
SPVIQPPTSVPPILSSNYKLTF

SEQ ID NO: 196560 - protein, 15 aa, Homo sapiens
  CDR3 for beta chain variable domain of TCR clone 98280 (TRBV5-8, TRBJ1-1)
CASSFSGTSLKGAFF

SEQ ID NO: 196561 - protein, 14 aa, Homo sapiens
  CDR3 for alpha chain variable domain of TCR clone 98281 (TRAV12-2, TRAJ13)
CAVKKTGGYQKVTF

SEQ ID NO: 196562 - protein, 15 aa, Homo sapiens
  CDR3 for beta chain variable domain of TCR clone 98281 (TRBV12-4, TRBJ2-5)
CASSPPTGLQETQYC

SEQ ID NO: 196563 - protein, 14 aa, Homo sapiens
  CDR3 for alpha chain variable domain of TCR clone 98282 (TRAV4, TRAJ10)
CLVGDTGGGNKLTF

SEQ ID NO: 196564 - protein, 12 aa, Homo sapiens
  CDR3 for beta chain variable domain of TCR clone 98282 (TRBV24-1, TRBJ1-1)
CATSDSDRGAFF

SEQ ID NO: 196565 - protein, 18 aa, Homo sapiens
  CDR3 for alpha chain variable domain of TCR clone 98283 (TRAV21, TRAJ52)
CAVRPSPADGTSYGKLTF

SEQ ID NO: 196566 - protein, 17 aa, Homo sapiens
  CDR3 for beta chain variable domain of TCR clone 98283 (TRBV14, TRBJ2-3)
CASSQEPSGLSTDTQYF

SEQ ID NO: 196567 - protein, 18 aa, Homo sapiens
  CDR3 for alpha chain variable domain of TCR clone 98284 (TRAV1-2, TRAJ18)
CAVRDMGDRGSTLGRLYF

SEQ ID NO: 196568 - protein, 16 aa, Homo sapiens
  CDR3 for beta chain variable domain of TCR clone 98284 (TRBV29-1, TRBJ1-2)
CSVAANRDIANYGYTF

SEQ ID NO: 196569 - protein, 14 aa, Homo sapiens
  CDR3 for alpha chain variable domain of TCR clone 98285 (TRAV16, TRAJ44)
CALSTTATASKLTF

SEQ ID NO: 196570 - protein, 14 aa, Homo sapiens
  CDR3 for beta chain variable domain of TCR clone 98285 (TRBV20-1, TRBJ2-7)
CSAISREASYEQYF

SEQ ID NO: 196571 - protein, 19 aa, Homo sapiens
  CDR3 for alpha chain variable domain of TCR clone 98286 (TRAV17, TRAJ40)
TASRAADTASYFCARKYIF

SEQ ID NO: 196572 - protein, 17 aa, Homo sapiens
  CDR3 for beta chain variable domain of TCR clone 98286 (TRBV11-2, TRBJ2-4)
CASSFLALGGAGDIQYF

SEQ ID NO: 196573 - protein, 15 aa, Homo sapiens
  CDR3 for alpha chain variable domain of TCR clone 98287 (TRAV8-3, TRAJ45)
CALSYSGGGADGRTF

SEQ ID NO: 196574 - protein, 13 aa, Homo sapiens
  CDR3 for beta chain variable domain of TCR clone 98287 (TRBV10-3, TRBJ2-7)
CASKLAVNYEQYF

SEQ ID NO: 196575 - protein, 16 aa, Homo sapiens
  CDR3 for alpha chain variable domain of TCR clone 98288 (TRAV35, TRAJ28)
CAGQKYSGAGSYQLTF

SEQ ID NO: 196576 - protein, 14 aa, Homo sapiens
  CDR3 for beta chain variable domain of TCR clone 98288 (TRBV12-4, TRBJ1-1)
CASTWTGHDTEAFF

SEQ ID NO: 196577 - protein, 13 aa, Homo sapiens
  CDR3 for alpha chain variable domain of TCR clone 98289 (TRAV13-1, TRAJ11)
CAASIRGYSTLTF

SEQ ID NO: 196578 - protein, 17 aa, Homo sapiens
  CDR3 for beta chain variable domain of TCR clone 98289 (TRBV4-3, TRBJ1-2)
CASSSRLQAGGSVGDTF

SEQ ID NO: 196579 - protein, 12 aa, Homo sapiens
  CDR3 for alpha chain variable domain of TCR clone 98290 (TRAV12-3, TRAJ34)
CAMGYNTDKLIF

SEQ ID NO: 196580 - protein, 14 aa, Homo sapiens
  CDR3 for beta chain variable domain of TCR clone 98290 (TRBV5-7, TRBJ1-5)
CASSRTGGGQHQHF

SEQ ID NO: 196581 - protein, 12 aa, Homo sapiens
  CDR3 for alpha chain variable domain of TCR clone 98291 (TRAV2, TRAJ31)
CAVEDNNARLMF

SEQ ID NO: 196582 - protein, 14 aa, Homo sapiens
  CDR3 for beta chain variable domain of TCR clone 98291 (TRBV7-3, TRBJ1-1)
CASSAQGGNTEAFF

SEQ ID NO: 196583 - protein, 17 aa, Homo sapiens
  CDR3 for alpha chain variable domain of TCR clone 98292 (TRAV26-1, TRAJ37)
CIVRVITVSSNTGKLIF

SEQ ID NO: 196584 - protein, 14 aa, Homo sapiens
  CDR3 for beta chain variable domain of TCR clone 98292 (TRBV4-1, TRBJ2-2)
CASSQAVNTGELFF

SEQ ID NO: 196585 - protein, 14 aa, Homo sapiens
  CDR3 for alpha chain variable domain of TCR clone 98293 (TRAV2, TRAJ9)
CAVEGRSGGFKTIF

SEQ ID NO: 196586 - protein, 12 aa, Homo sapiens
  CDR3 for beta chain variable domain of TCR clone 98293 (TRBV12-5, TRBJ2-5)
CASGQGVETQYF

SEQ ID NO: 196587 - protein, 14 aa, Homo sapiens
  CDR3 for alpha chain variable domain of TCR clone 98294 (TRAV1-2, TRAJ16)
CAVNRFSDGQKLLF

SEQ ID NO: 196588 - protein, 15 aa, Homo sapiens
  CDR3 for beta chain variable domain of TCR clone 98294 (TRBV2, TRBJ2-1)
CASSEEREGDNEQFL

SEQ ID NO: 196589 - protein, 14 aa, Homo sapiens
  CDR3 for alpha chain variable domain of TCR clone 98295 (TRAV20, TRAJ20)
CAVRRGYNDYTLSF

SEQ ID NO: 196590 - protein, 13 aa, Homo sapiens
  CDR3 for beta chain variable domain of TCR clone 98295 (TRBV19, TRBJ2-5)
CASSETAPETQYF

SEQ ID NO: 196591 - protein, 16 aa, Homo sapiens
  CDR3 for alpha chain variable domain of TCR clone 98296 (TRAV3, TRAJ10)
CAVRDMRAGGGNKPTF

SEQ ID NO: 196592 - protein, 15 aa, Homo sapiens
  CDR3 for beta chain variable domain of TCR clone 98296 (TRBV20-1, TRBJ2-1)
CSASSAGSSYNEQFF

SEQ ID NO: 196593 - protein, 14 aa, Homo sapiens
  CDR3 for alpha chain variable domain of TCR clone 98297 (TRAV1-2, TRAJ16)
CAVNRFSDGQKLLF

SEQ ID NO: 196594 - protein, 16 aa, Homo sapiens
  CDR3 for beta chain variable domain of TCR clone 98297 (TRBV12-4, TRBJ1-5)
CASSRPVGGSNQHQHF

SEQ ID NO: 196595 - protein, 11 aa, Homo sapiens
  CDR3 for alpha chain variable domain of TCR clone 98298 (TRAV17, TRAJ36)
CAPTGANNLFF

SEQ ID NO: 196596 - protein, 15 aa, Homo sapiens
  CDR3 for beta chain variable domain of TCR clone 98298 (TRBV6-1, TRBJ1-5)
CASSELREGNQPQHF

SEQ ID NO: 196597 - protein, 12 aa, Homo sapiens
  CDR3 for alpha chain variable domain of TCR clone 98299 (TRAV13-2, TRAJ23)
CAERPRGGKLIF

SEQ ID NO: 196598 - protein, 16 aa, Homo sapiens
  CDR3 for beta chain variable domain of TCR clone 98299 (TRBV7-2, TRBJ2-6)
CAILSGVSSGANVLTF

SEQ ID NO: 196599 - protein, 14 aa, Homo sapiens
  CDR3 for alpha chain variable domain of TCR clone 98300 (TRAV12-2, TRAJ13)
CAVKKTGGYQKVTF

SEQ ID NO: 196600 - protein, 15 aa, Homo sapiens
  CDR3 for beta chain variable domain of TCR clone 98300 (TRBV9, TRBJ1-6)
CASGVAGTGDSPLHF

SEQ ID NO: 196601 - protein, 11 aa, Homo sapiens
  CDR3 for alpha chain variable domain of TCR clone 98301 (TRAV29/DV5, TRAJ37)
CATSNTGKLIF

SEQ ID NO: 196602 - protein, 13 aa, Homo sapiens
  CDR3 for beta chain variable domain of TCR clone 98301 (TRBV20-1, TRBJ1-1)
CSARGGGNTEAFF

SEQ ID NO: 196603 - protein, 11 aa, Homo sapiens
  CDR3 for alpha chain variable domain of TCR clone 98302 (TRAV20, TRAJ34)
CTRDNTDKLIF

SEQ ID NO: 196604 - protein, 15 aa, Homo sapiens
  CDR3 for beta chain variable domain of TCR clone 98302 (TRBV2, TRBJ2-1)
CASSVTSEGTDGQFF

SEQ ID NO: 196605 - protein, 14 aa, Homo sapiens
  CDR3 for alpha chain variable domain of TCR clone 98303 (TRAV8-3, TRAJ4)
CAVPLGGGYNKLIF

SEQ ID NO: 196606 - protein, 15 aa, Homo sapiens
  CDR3 for beta chain variable domain of TCR clone 98303 (TRBV6-3, TRBJ2-7)
CASSSPGTVLYEQYF

SEQ ID NO: 196607 - protein, 15 aa, Homo sapiens
  CDR3 for alpha chain variable domain of TCR clone 98304 (TRAV4, TRAJ39)
CLVGPNNNAGNMLTF

SEQ ID NO: 196608 - protein, 14 aa, Homo sapiens
  CDR3 for beta chain variable domain of TCR clone 98304 (TRBV19, TRBJ2-7)
CASDFRDTFTGMYF

SEQ ID NO: 196609 - protein, 12 aa, Homo sapiens
  CDR3 for alpha chain variable domain of TCR clone 98305 (TRAV13-2, TRAJ23)
CAERHRGGKLIF

SEQ ID NO: 196610 - protein, 15 aa, Homo sapiens
  CDR3 for beta chain variable domain of TCR clone 98305 (TRBV10-3, TRBJ1-4)
CAISENSPSGEKLFF

SEQ ID NO: 196611 - protein, 18 aa, Homo sapiens
  CDR3 for alpha chain variable domain of TCR clone 98306 (TRAV27, TRAJ13)
CAGAKAILGVTRKLPLEL

SEQ ID NO: 196612 - protein, 15 aa, Homo sapiens
  CDR3 for beta chain variable domain of TCR clone 98306 (TRBV29-1, TRBJ2-1)
CSVGRHALFYNEQFF

SEQ ID NO: 196613 - protein, 11 aa, Homo sapiens
  CDR3 for alpha chain variable domain of TCR clone 98307 (TRAV20, TRAJ34)
CTRDKTDKLIF

SEQ ID NO: 196614 - protein, 15 aa, Homo sapiens
  CDR3 for beta chain variable domain of TCR clone 98307 (TRBV2, TRBJ2-1)
CASSVTSEGTDEQFF

SEQ ID NO: 196615 - protein, 12 aa, Homo sapiens
  CDR3 for alpha chain variable domain of TCR clone 98308 (TRAV13-1, TRAJ21)
CAAKEGFNKFYF

SEQ ID NO: 196616 - protein, 15 aa, Homo sapiens
  CDR3 for beta chain variable domain of TCR clone 98308 (TRBV7-9, TRBJ1-6)
CASSSPGLGNSPLHF

SEQ ID NO: 196617 - protein, 18 aa, Homo sapiens
  CDR3 for alpha chain variable domain of TCR clone 98309 (TRAV12-3, TRAJ52)
CAMSVGGAGGTSYGKLTF

SEQ ID NO: 196618 - protein, 15 aa, Homo sapiens
  CDR3 for beta chain variable domain of TCR clone 98309 (TRBV27, TRBJ1-6)
CARSFDRGLGSPLHF

SEQ ID NO: 196619 - protein, 15 aa, Homo sapiens
  CDR3 for alpha chain variable domain of TCR clone 98310 (TRAV26-1, TRAJ29)
CIVRVAGSGNTPLVF

SEQ ID NO: 196620 - protein, 15 aa, Homo sapiens
  CDR3 for beta chain variable domain of TCR clone 98310 (TRBV7-9, TRBJ1-5)
CASSQGHQPNQTQHF

SEQ ID NO: 196621 - protein, 15 aa, Homo sapiens
  CDR3 for alpha chain variable domain of TCR clone 98311 (TRAV3, TRAJ4)
CAVRDGTGGYNKLIF

SEQ ID NO: 196622 - protein, 13 aa, Homo sapiens
  CDR3 for beta chain variable domain of TCR clone 98311 (TRBV12-5, TRBJ1-2)
CASGARTGNGYTF

SEQ ID NO: 196623 - protein, 13 aa, Homo sapiens
  CDR3 for alpha chain variable domain of TCR clone 98312 (TRAV16, TRAJ48)
CSPLNFGNEKLTF

SEQ ID NO: 196624 - protein, 11 aa, Homo sapiens
  CDR3 for beta chain variable domain of TCR clone 98312 (TRBV7-9, TRBJ2-3)
CASSPTDTQYF

SEQ ID NO: 196625 - protein, 14 aa, Homo sapiens
  CDR3 for alpha chain variable domain of TCR clone 98313 (TRAV13-1, TRAJ9)
CAASALPGGFKTIF

SEQ ID NO: 196626 - protein, 16 aa, Homo sapiens
  CDR3 for beta chain variable domain of TCR clone 98313 (TRBV7-8, TRBJ2-4)
CASSAERTLAKNIQYF

SEQ ID NO: 196627 - protein, 16 aa, Homo sapiens
  CDR3 for alpha chain variable domain of TCR clone 98314 (TRAV30, TRAJ24)
CGTEIVDADSWGKFQF

SEQ ID NO: 196628 - protein, 14 aa, Homo sapiens
  CDR3 for beta chain variable domain of TCR clone 98314 (TRBV7-2, TRBJ2-7)
CASSPKASFYEQYF

SEQ ID NO: 196629 - protein, 17 aa, Homo sapiens
  CDR3 for alpha chain variable domain of TCR clone 98315 (TRAV3, TRAJ38)
CAVRDCLNAGNNRKLIW

SEQ ID NO: 196630 - protein, 14 aa, Homo sapiens
  CDR3 for beta chain variable domain of TCR clone 98315 (TRBV5-5, TRBJ1-5)
CASSGQGVEQPQHF

SEQ ID NO: 196631 - protein, 13 aa, Homo sapiens
  CDR3 for alpha chain variable domain of TCR clone 98316 (TRAV29/DV5, TRAJ44)
CAASTGTASKLTF

SEQ ID NO: 196632 - protein, 15 aa, Homo sapiens
  CDR3 for beta chain variable domain of TCR clone 98316 (TRBV11-3, TRBJ2-3)
CASLKDGREGDTQYF

SEQ ID NO: 196633 - protein, 11 aa, Homo sapiens
  CDR3 for alpha chain variable domain of TCR clone 98317 (TRAV2, TRAJ13)
CASGGYQKVTF

SEQ ID NO: 196634 - protein, 14 aa, Homo sapiens
  CDR3 for beta chain variable domain of TCR clone 98317 (TRBV19, TRBJ2-2)
CASSGQGIAGELFF

SEQ ID NO: 196635 - protein, 14 aa, Homo sapiens
  CDR3 for alpha chain variable domain of TCR clone 98318 (TRAV13-1, TRAJ35)
CAASKGGFGNVLHC

SEQ ID NO: 196636 - protein, 14 aa, Homo sapiens
  CDR3 for beta chain variable domain of TCR clone 98318 (TRBV7-9, TRBJ1-2)
CASSRQGANYGYTF

SEQ ID NO: 196637 - protein, 17 aa, Homo sapiens
  CDR3 for alpha chain variable domain of TCR clone 98319 (TRAV3, TRAJ6)
CAVRDGPRAGGSYIPTF

SEQ ID NO: 196638 - protein, 12 aa, Homo sapiens
  CDR3 for beta chain variable domain of TCR clone 98319 (TRBV19, TRBJ2-1)
CASSRQGAEQFF

SEQ ID NO: 196639 - protein, 13 aa, Homo sapiens
  CDR3 for alpha chain variable domain of TCR clone 98320 (TRAV12-1, TRAJ17)
CVVNKAAGNKLTF

SEQ ID NO: 196640 - protein, 12 aa, Homo sapiens
  CDR3 for beta chain variable domain of TCR clone 98320 (TRBV29-1, TRBJ2-2)
CSVDKYTGELFF

SEQ ID NO: 196641 - protein, 14 aa, Homo sapiens
  CDR3 for alpha chain variable domain of TCR clone 98321 (TRAV2, TRAJ9)
CAVEDRSGGFKTIL

SEQ ID NO: 196642 - protein, 17 aa, Homo sapiens
  CDR3 for beta chain variable domain of TCR clone 98321 (TRBV7-8, TRBJ2-6)
CASSAGTGGAGANVLTF

SEQ ID NO: 196643 - protein, 16 aa, Homo sapiens
  CDR3 for alpha chain variable domain of TCR clone 98322 (TRAV8-3, TRAJ13)
CAVGAYPSGGYQNVTF

SEQ ID NO: 196644 - protein, 14 aa, Homo sapiens
  CDR3 for beta chain variable domain of TCR clone 98322 (TRBV18, TRBJ2-5)
CASSPRASSETQYF

SEQ ID NO: 196645 - protein, 14 aa, Homo sapiens
  CDR3 for alpha chain variable domain of TCR clone 98323 (TRAV1-2, TRAJ8)
CAVREDTGFQKLVF

SEQ ID NO: 196646 - protein, 14 aa, Homo sapiens
  CDR3 for beta chain variable domain of TCR clone 98323 (TRBV29-1, TRBJ1-4)
CSVTGTGGDEKLFF

SEQ ID NO: 196647 - protein, 17 aa, Homo sapiens
  CDR3 for alpha chain variable domain of TCR clone 98324 (TRAV8-6, TRAJ58)
CAVSSWVGETSGSRLTF

SEQ ID NO: 196648 - protein, 14 aa, Homo sapiens
  CDR3 for beta chain variable domain of TCR clone 98324 (TRBV19, TRBJ2-1)
CASPTFILSGEQFF

SEQ ID NO: 196649 - protein, 14 aa, Homo sapiens
  CDR3 for alpha chain variable domain of TCR clone 98325 (TRAV17, TRAJ57)
CATDPQGGSEKLVF

SEQ ID NO: 196650 - protein, 13 aa, Homo sapiens
  CDR3 for beta chain variable domain of TCR clone 98325 (TRBV7-2, TRBJ2-2)
CASSSVRAGELFF

SEQ ID NO: 196651 - protein, 14 aa, Homo sapiens
  CDR3 for alpha chain variable domain of TCR clone 98326 (TRAV8-3, TRAJ17)
CAVGAQTAGNKLTF

SEQ ID NO: 196652 - protein, 13 aa, Homo sapiens
  CDR3 for beta chain variable domain of TCR clone 98326 (TRBV7-2, TRBJ2-4)
CASSREHANIQYF

SEQ ID NO: 196653 - protein, 14 aa, Homo sapiens
  CDR3 for alpha chain variable domain of TCR clone 98327 (TRAV1-2, TRAJ16)
CAVNRFSDGKKLLF

SEQ ID NO: 196654 - protein, 12 aa, Homo sapiens
  CDR3 for beta chain variable domain of TCR clone 98327 (TRBV28, TRBJ2-6)
CAIQAGANVLTF

SEQ ID NO: 196655 - protein, 13 aa, Homo sapiens
  CDR3 for alpha chain variable domain of TCR clone 98328 (TRAV12-1, TRAJ29)
CVVRNSGNTPLVF

SEQ ID NO: 196656 - protein, 14 aa, Homo sapiens
  CDR3 for beta chain variable domain of TCR clone 98328 (TRBV7-2, TRBJ2-7)
CASRAQGAAYEQYF

SEQ ID NO: 196657 - protein, 16 aa, Homo sapiens
  CDR3 for alpha chain variable domain of TCR clone 98329 (TRAV17, TRAJ53)
CATDALSGGSNYKLTF

SEQ ID NO: 196658 - protein, 14 aa, Homo sapiens
  CDR3 for beta chain variable domain of TCR clone 98329 (TRBV4-1, TRBJ2-2)
CASSQAVNTGELFF

SEQ ID NO: 196659 - protein, 15 aa, Homo sapiens
  CDR3 for alpha chain variable domain of TCR clone 98330 (TRAV8-3, TRAJ11)
CAVGLLNSGYSTLTF

SEQ ID NO: 196660 - protein, 16 aa, Homo sapiens
  CDR3 for beta chain variable domain of TCR clone 98330 (TRBV7-3, TRBJ2-1)
CASSLEGYRSYNEQFF

SEQ ID NO: 196661 - protein, 16 aa, Homo sapiens
  CDR3 for alpha chain variable domain of TCR clone 98331 (TRAV26-1, TRAJ28)
CIVRVGLWGWELPTPF

SEQ ID NO: 196662 - protein, 16 aa, Homo sapiens
  CDR3 for beta chain variable domain of TCR clone 98331 (TRBV20-1, TRBJ1-2)
CSASMGQGVANYGYTF

SEQ ID NO: 196663 - protein, 15 aa, Homo sapiens
  CDR3 for alpha chain variable domain of TCR clone 98332 (TRAV12-1, TRAJ9)
CVVSVGDTGGFKTIF

SEQ ID NO: 196664 - protein, 13 aa, Homo sapiens
  CDR3 for beta chain variable domain of TCR clone 98332 (TRBV2, TRBJ1-4)
CASSERAGEKLFF

SEQ ID NO: 196665 - protein, 16 aa, Homo sapiens
  CDR3 for alpha chain variable domain of TCR clone 98333 (TRAV4, TRAJ22)
CLVGDLYSGSARQLTF

SEQ ID NO: 196666 - protein, 20 aa, Homo sapiens
  CDR3 for beta chain variable domain of TCR clone 98333 (TRBV28, TRBJ2-1)
CASTPIGRSPGLAGGNEQFF

SEQ ID NO: 196667 - protein, 15 aa, Homo sapiens
  CDR3 for alpha chain variable domain of TCR clone 98334 (TRAV3, TRAJ4)
CAVRDGTGGYNKLIF

SEQ ID NO: 196668 - protein, 14 aa, Homo sapiens
  CDR3 for beta chain variable domain of TCR clone 98334 (TRBV7-2, TRBJ2-7)
CASSLYPGRYEQYF

SEQ ID NO: 196669 - protein, 14 aa, Homo sapiens
  CDR3 for alpha chain variable domain of TCR clone 98335 (TRAV17, TRAJ35)
CATDRPGVGNVLHC

SEQ ID NO: 196670 - protein, 15 aa, Homo sapiens
  CDR3 for beta chain variable domain of TCR clone 98335 (TRBV28, TRBJ2-5)
CASSSGRVIQETQYF

SEQ ID NO: 196671 - protein, 12 aa, Homo sapiens
  CDR3 for alpha chain variable domain of TCR clone 98336 (TRAV8-3, TRAJ20)
CAVGANDYKLSF

SEQ ID NO: 196672 - protein, 16 aa, Homo sapiens
  CDR3 for beta chain variable domain of TCR clone 98336 (TRBV7-7, TRBJ2-1)
CASSLASGTSYNEQFF

SEQ ID NO: 196673 - protein, 20 aa, Homo sapiens
  CDR3 for alpha chain variable domain of TCR clone 98337 (TRAV25, TRAJ21)
TATQTTDVGTYPLSFNKFYF

SEQ ID NO: 196674 - protein, 17 aa, Homo sapiens
  CDR3 for beta chain variable domain of TCR clone 98337 (TRBV20-1, TRBJ2-2)
CSASGSGQGGLTGELFF

SEQ ID NO: 196675 - protein, 11 aa, Homo sapiens
  CDR3 for alpha chain variable domain of TCR clone 98338 (TRAV29/DV5, TRAJ31)
CAASYRDRLMF

SEQ ID NO: 196676 - protein, 15 aa, Homo sapiens
  CDR3 for beta chain variable domain of TCR clone 98338 (TRBV4-1, TRBJ1-4)
CASSDTGGTNEKLFF

SEQ ID NO: 196677 - protein, 18 aa, Homo sapiens
  CDR3 for alpha chain variable domain of TCR clone 98339 (TRAV12-3, TRAJ52)
CAMSVGGAGGTSYGKLTF

SEQ ID NO: 196678 - protein, 14 aa, Homo sapiens
  CDR3 for beta chain variable domain of TCR clone 98339 (TRBV2, TRBJ2-7)
CASSLTSGGYEQYF

SEQ ID NO: 196679 - protein, 14 aa, Homo sapiens
  CDR3 for alpha chain variable domain of TCR clone 98340 (TRAV12-2, TRAJ13)
CVVKKTGGYQKVTF

SEQ ID NO: 196680 - protein, 14 aa, Homo sapiens
  CDR3 for beta chain variable domain of TCR clone 98340 (TRBV6-1, TRBJ1-3)
CASVQGGGGNTIYF

SEQ ID NO: 196681 - protein, 14 aa, Homo sapiens
  CDR3 for alpha chain variable domain of TCR clone 98341 (TRAV12-2, TRAJ13)
CAVKKTGGYQKVTF

SEQ ID NO: 196682 - protein, 14 aa, Homo sapiens
  CDR3 for beta chain variable domain of TCR clone 98341 (TRBV4-2, TRBJ2-3)
CASRETRAPGMQYF

SEQ ID NO: 196683 - protein, 15 aa, Homo sapiens
  CDR3 for alpha chain variable domain of TCR clone 98342 (TRAV12-1, TRAJ40)
CVVNMHFPGTYKYIF

SEQ ID NO: 196684 - protein, 14 aa, Homo sapiens
  CDR3 for beta chain variable domain of TCR clone 98342 (TRBV7-2, TRBJ2-7)
CASSLYPGRYEQYF

SEQ ID NO: 196685 - protein, 16 aa, Homo sapiens
  CDR3 for alpha chain variable domain of TCR clone 98343 (TRAV30, TRAJ24)
CGTEIVDADSWGKFQF

SEQ ID NO: 196686 - protein, 12 aa, Homo sapiens
  CDR3 for beta chain variable domain of TCR clone 98343 (TRBV7-2, TRBJ1-5)
CASSLWSQPQHF

SEQ ID NO: 196687 - protein, 11 aa, Homo sapiens
  CDR3 for alpha chain variable domain of TCR clone 98344 (TRAV3, TRAJ21)
CAVGNFNKFYF

SEQ ID NO: 196688 - protein, 16 aa, Homo sapiens
  CDR3 for beta chain variable domain of TCR clone 98344 (TRBV19, TRBJ2-1)
CASSKAGPSPYNEQFF

SEQ ID NO: 196689 - protein, 11 aa, Homo sapiens
  CDR3 for alpha chain variable domain of TCR clone 98345 (TRAV21, TRAJ34)
CAHYNTDKLIF

SEQ ID NO: 196690 - protein, 14 aa, Homo sapiens
  CDR3 for beta chain variable domain of TCR clone 98345 (TRBV4-1, TRBJ2-2)
CASSQAVNTGELFF

SEQ ID NO: 196691 - protein, 14 aa, Homo sapiens
  CDR3 for alpha chain variable domain of TCR clone 98346 (TRAV8-2, TRAJ37)
CVVSISRNTGKLIF

SEQ ID NO: 196692 - protein, 11 aa, Homo sapiens
  CDR3 for beta chain variable domain of TCR clone 98346 (TRBV18, TRBJ2-5)
CASSPRETQYF

SEQ ID NO: 196693 - protein, 17 aa, Homo sapiens
  CDR3 for alpha chain variable domain of TCR clone 98347 (TRAV3, TRAJ12)
CAVRDGGRMDSSYKLIF

SEQ ID NO: 196694 - protein, 14 aa, Homo sapiens
  CDR3 for beta chain variable domain of TCR clone 98347 (TRBV7-9, TRBJ1-2)
CASSRQGANYGYTL

SEQ ID NO: 196695 - protein, 20 aa, Homo sapiens
  CDR3 for alpha chain variable domain of TCR clone 98348 (TRAV26-1, TRAJ42)
CCVLLHRQTYYGGSQGNLIF

SEQ ID NO: 196696 - protein, 16 aa, Homo sapiens
  CDR3 for beta chain variable domain of TCR clone 98348 (TRBV7-3, TRBJ2-2)
CASSIKRGTLSGELFF

SEQ ID NO: 196697 - protein, 13 aa, Homo sapiens
  CDR3 for alpha chain variable domain of TCR clone 98349 (TRAV8-6, TRAJ48)
CAGVNFGNEKLTF

SEQ ID NO: 196698 - protein, 16 aa, Homo sapiens
  CDR3 for beta chain variable domain of TCR clone 98349 (TRBV4-2, TRBJ2-6)
CASSQARASGANVLTF

SEQ ID NO: 196699 - protein, 11 aa, Homo sapiens
  CDR3 for alpha chain variable domain of TCR clone 98350 (TRAV17, TRAJ9)
CATTGGFKTIY

SEQ ID NO: 196700 - protein, 14 aa, Homo sapiens
  CDR3 for beta chain variable domain of TCR clone 98350 (TRBV7-9, TRBJ2-2)
CASSGLADTGELFF

SEQ ID NO: 196701 - protein, 15 aa, Homo sapiens
  CDR3 for alpha chain variable domain of TCR clone 98351 (TRAV1-2, TRAJ28)
CAAQYSGAGSYQLTF

SEQ ID NO: 196702 - protein, 13 aa, Homo sapiens
  CDR3 for beta chain variable domain of TCR clone 98351 (TRBV20-1, TRBJ2-7)
CSATHTSGYEQYF

SEQ ID NO: 196703 - protein, 11 aa, Homo sapiens
  CDR3 for alpha chain variable domain of TCR clone 98352 (TRAV12-1, TRAJ43)
CVEYDNNDMRF

SEQ ID NO: 196704 - protein, 16 aa, Homo sapiens
  CDR3 for beta chain variable domain of TCR clone 98352 (TRBV10-3, TRBJ2-7)
CAISADFADRPYEQYF

SEQ ID NO: 196705 - protein, 13 aa, Homo sapiens
  CDR3 for alpha chain variable domain of TCR clone 98353 (TRAV26-1, TRAJ54)
CIVRVKGAHKLVF

SEQ ID NO: 196706 - protein, 15 aa, Homo sapiens
  CDR3 for beta chain variable domain of TCR clone 98353 (TRBV20-1, TRBJ2-1)
CSAQPGGGPYNEQFF

SEQ ID NO: 196707 - protein, 14 aa, Homo sapiens
  CDR3 for alpha chain variable domain of TCR clone 98354 (TRAV13-1, TRAJ45)
CAAIGGGGADGLTF

SEQ ID NO: 196708 - protein, 16 aa, Homo sapiens
  CDR3 for beta chain variable domain of TCR clone 98354 (TRBV7-2, TRBJ1-1)
CASSFGAGWTNTEAFF

SEQ ID NO: 196709 - protein, 13 aa, Homo sapiens
  CDR3 for alpha chain variable domain of TCR clone 98355 (TRAV38-1, TRAJ42)
CARWGGSQGNLIF

SEQ ID NO: 196710 - protein, 12 aa, Homo sapiens
  CDR3 for beta chain variable domain of TCR clone 98355 (TRBV7-8, TRBJ2-7)
CASSLGDREQYF

SEQ ID NO: 196711 - protein, 10 aa, Homo sapiens
  CDR3 for alpha chain variable domain of TCR clone 98356 (TRAV13-2, TRAJ29)
CAEIPPHKTF

SEQ ID NO: 196712 - protein, 15 aa, Homo sapiens
  CDR3 for beta chain variable domain of TCR clone 98356 (TRBV19, TRBJ1-1)
CASTSGQIQNTEAFF

SEQ ID NO: 196713 - protein, 14 aa, Homo sapiens
  CDR3 for alpha chain variable domain of TCR clone 98357 (TRAV1-2, TRAJ16)
CAVNRFSDGQKLLF

SEQ ID NO: 196714 - protein, 15 aa, Homo sapiens
  CDR3 for beta chain variable domain of TCR clone 98357 (TRBV7-6, TRBJ2-1)
CASSFLAGEGNEQFF

SEQ ID NO: 196715 - protein, 15 aa, Homo sapiens
  CDR3 for alpha chain variable domain of TCR clone 98358 (TRAV2, TRAJ11)
CAVGGRNSGYSTLTF

SEQ ID NO: 196716 - protein, 12 aa, Homo sapiens
  CDR3 for beta chain variable domain of TCR clone 98358 (TRBV5-4, TRBJ2-7)
CASSLEAYERYF

SEQ ID NO: 196717 - protein, 16 aa, Homo sapiens
  CDR3 for alpha chain variable domain of TCR clone 98359 (TRAV3, TRAJ21)
CAVRDIERGNFNKFYF

SEQ ID NO: 196718 - protein, 11 aa, Homo sapiens
  CDR3 for beta chain variable domain of TCR clone 98359 (TRBV29-1, TRBJ2-5)
CSEDRTGTQYF

SEQ ID NO: 196719 - protein, 18 aa, Homo sapiens
  CDR3 for alpha chain variable domain of TCR clone 98360 (TRAV13-1, TRAJ52)
CAASKRSAGGTSYGKLTF

SEQ ID NO: 196720 - protein, 14 aa, Homo sapiens
  CDR3 for beta chain variable domain of TCR clone 98360 (TRBV7-8, TRBJ2-1)
CATERERSYNERFF

SEQ ID NO: 196721 - protein, 11 aa, Homo sapiens
  CDR3 for alpha chain variable domain of TCR clone 98361 (TRAV17, TRAJ9)
CGFTGGFKTIF

SEQ ID NO: 196722 - protein, 15 aa, Homo sapiens
  CDR3 for beta chain variable domain of TCR clone 98361 (TRBV27, TRBJ2-1)
CASSNGGGSSNEQFF

SEQ ID NO: 196723 - protein, 12 aa, Homo sapiens
  CDR3 for alpha chain variable domain of TCR clone 98362 (TRAV12-3, TRAJ17)
CAMTLTGNKLNF

SEQ ID NO: 196724 - protein, 16 aa, Homo sapiens
  CDR3 for beta chain variable domain of TCR clone 98362 (TRBV19, TRBJ2-1)
CASSKAGPSSYNEQFF

SEQ ID NO: 196725 - protein, 15 aa, Homo sapiens
  CDR3 for alpha chain variable domain of TCR clone 98363 (TRAV3, TRAJ5)
CAVRDLDTGRRALTF

SEQ ID NO: 196726 - protein, 15 aa, Homo sapiens
  CDR3 for beta chain variable domain of TCR clone 98363 (TRBV11-3, TRBJ2-3)
CASLKDGREGYTQYF

SEQ ID NO: 196727 - protein, 11 aa, Homo sapiens
  CDR3 for alpha chain variable domain of TCR clone 98364 (TRAV12-3, TRAJ43)
CAMSVSNDMRI

SEQ ID NO: 196728 - protein, 13 aa, Homo sapiens
  CDR3 for beta chain variable domain of TCR clone 98364 (TRBV20-1, TRBJ1-1)
CSAPLGGGTEAFF

SEQ ID NO: 196729 - protein, 15 aa, Homo sapiens
  CDR3 for alpha chain variable domain of TCR clone 98365 (TRAV3, TRAJ22)
CAVRDRGGSARQLTF

SEQ ID NO: 196730 - protein, 16 aa, Homo sapiens
  CDR3 for beta chain variable domain of TCR clone 98365 (TRBV6-1, TRBJ1-2)
CASSGAWQGRSHGYTF

SEQ ID NO: 196731 - protein, 13 aa, Homo sapiens
  CDR3 for alpha chain variable domain of TCR clone 98366 (TRAV12-3, TRAJ33)
CAMSVNSNYQLIW

SEQ ID NO: 196732 - protein, 18 aa, Homo sapiens
  CDR3 for beta chain variable domain of TCR clone 98366 (TRBV7-9, TRBJ2-7)
CASSLTTSGSRTWYEQYF

SEQ ID NO: 196733 - protein, 12 aa, Homo sapiens
  CDR3 for alpha chain variable domain of TCR clone 98367 (TRAV1-1, TRAJ39)
CAVPVAGNMLTF

SEQ ID NO: 196734 - protein, 13 aa, Homo sapiens
  CDR3 for beta chain variable domain of TCR clone 98367 (TRBV4-1, TRBJ1-1)
CASSRKMNTEAFF

SEQ ID NO: 196735 - protein, 14 aa, Homo sapiens
  CDR3 for alpha chain variable domain of TCR clone 98368 (TRAV1-2, TRAJ16)
CAVNRFSDGQKLLF

SEQ ID NO: 196736 - protein, 13 aa, Homo sapiens
  CDR3 for beta chain variable domain of TCR clone 98368 (TRBV5-1, TRBJ1-2)
CASSLQGNYGYTF

SEQ ID NO: 196737 - protein, 13 aa, Homo sapiens
  CDR3 for alpha chain variable domain of TCR clone 98369 (TRAV12-2, TRAJ49)
CAVKPNTGNQFYF

SEQ ID NO: 196738 - protein, 14 aa, Homo sapiens
  CDR3 for beta chain variable domain of TCR clone 98369 (TRBV5-1, TRBJ2-7)
CASSRGESLYEQYF

SEQ ID NO: 196739 - protein, 13 aa, Homo sapiens
  CDR3 for alpha chain variable domain of TCR clone 98370 (TRAV23/DV6, TRAJ27)
CAASKPMQANQPL

SEQ ID NO: 196740 - protein, 19 aa, Homo sapiens
  CDR3 for beta chain variable domain of TCR clone 98370 (TRBV19, TRBJ2-5)
CASSIGQVTDFFLGETQYF

SEQ ID NO: 196741 - protein, 13 aa, Homo sapiens
  CDR3 for alpha chain variable domain of TCR clone 98371 (TRAV13-2, TRAJ40)
CAELISGTYKYIF

SEQ ID NO: 196742 - protein, 14 aa, Homo sapiens
  CDR3 for beta chain variable domain of TCR clone 98371 (TRBV7-9, TRBJ2-3)
CASSPSGRAGTQYF

SEQ ID NO: 196743 - protein, 16 aa, Homo sapiens
  CDR3 for alpha chain variable domain of TCR clone 98372 (TRAV3, TRAJ37)
CAVRGKGSGNTGKLIF

SEQ ID NO: 196744 - protein, 13 aa, Homo sapiens
  CDR3 for beta chain variable domain of TCR clone 98372 (TRBV14, TRBJ2-7)
CTSSQDRRYEQYF

SEQ ID NO: 196745 - protein, 18 aa, Homo sapiens
  CDR3 for alpha chain variable domain of TCR clone 98373 (TRAV17, TRAJ45)
CATSLDLYSGGGADGLTF

SEQ ID NO: 196746 - protein, 15 aa, Homo sapiens
  CDR3 for beta chain variable domain of TCR clone 98373 (TRBV11-2, TRBJ2-1)
CASSKDRGLIYEQFF

SEQ ID NO: 196747 - protein, 14 aa, Homo sapiens
  CDR3 for alpha chain variable domain of TCR clone 98374 (TRAV26-1, TRAJ24)
CIVSPTDSWGKFQF

SEQ ID NO: 196748 - protein, 14 aa, Homo sapiens
  CDR3 for beta chain variable domain of TCR clone 98374 (TRBV7-8, TRBJ2-3)
CASSLEAGTDTQYF

SEQ ID NO: 196749 - protein, 16 aa, Homo sapiens
  CDR3 for alpha chain variable domain of TCR clone 98375 (TRAV12-3, TRAJ53)
CAMIPGSGGSNYKLTF

SEQ ID NO: 196750 - protein, 14 aa, Homo sapiens
  CDR3 for beta chain variable domain of TCR clone 98375 (TRBV4-2, TRBJ2-1)
CASGLDRAYNEQFF

SEQ ID NO: 196751 - protein, 11 aa, Homo sapiens
  CDR3 for alpha chain variable domain of TCR clone 98376 (TRAV13-1, TRAJ43)
CAAHNNNDTRF

SEQ ID NO: 196752 - protein, 15 aa, Homo sapiens
  CDR3 for beta chain variable domain of TCR clone 98376 (TRBV6-1, TRBJ2-2)
CASSRLRGDTGELFF

SEQ ID NO: 196753 - protein, 14 aa, Homo sapiens
  CDR3 for alpha chain variable domain of TCR clone 98377 (TRAV1-2, TRAJ27)
CAPAEYTNAGKSTF

SEQ ID NO: 196754 - protein, 18 aa, Homo sapiens
  CDR3 for beta chain variable domain of TCR clone 98377 (TRBV28, TRBJ1-2)
CASRQQQGKRGSNYSYTF

SEQ ID NO: 196755 - protein, 12 aa, Homo sapiens
  CDR3 for alpha chain variable domain of TCR clone 98378 (TRAV29/DV5, TRAJ49)
CAATDTGNQFYF

SEQ ID NO: 196756 - protein, 14 aa, Homo sapiens
  CDR3 for beta chain variable domain of TCR clone 98378 (TRBV7-3, TRBJ1-1)
CASSLGTGYTEAFF

SEQ ID NO: 196757 - protein, 14 aa, Homo sapiens
  CDR3 for alpha chain variable domain of TCR clone 98379 (TRAV21, TRAJ21)
CAVKGFGNFNKFYF

SEQ ID NO: 196758 - protein, 13 aa, Homo sapiens
  CDR3 for beta chain variable domain of TCR clone 98379 (TRBV18, TRBJ1-1)
CASSPETKPEAVF

SEQ ID NO: 196759 - protein, 19 aa, Homo sapiens
  CDR3 for alpha chain variable domain of TCR clone 98380 (TRAV26-1, TRAJ52)
CIVRVANNAGGTSYGKLTF

SEQ ID NO: 196760 - protein, 12 aa, Homo sapiens
  CDR3 for beta chain variable domain of TCR clone 98380 (TRBV7-9, TRBJ1-5)
CASSPQGQPQHF

SEQ ID NO: 196761 - protein, 16 aa, Homo sapiens
  CDR3 for alpha chain variable domain of TCR clone 98381 (TRAV22, TRAJ45)
CAVERGKRGVADGLTF

SEQ ID NO: 196762 - protein, 13 aa, Homo sapiens
  CDR3 for beta chain variable domain of TCR clone 98381 (TRBV27, TRBJ1-1)
CASSLSIGAEAFF

SEQ ID NO: 196763 - protein, 12 aa, Homo sapiens
  CDR3 for alpha chain variable domain of TCR clone 98382 (TRAV38-1, TRAJ47)
CAFETYGNKLVF

SEQ ID NO: 196764 - protein, 14 aa, Homo sapiens
  CDR3 for beta chain variable domain of TCR clone 98382 (TRBV20-1, TRBJ2-2)
CSAPDTANNGELFF

SEQ ID NO: 196765 - protein, 13 aa, Homo sapiens
  CDR3 for alpha chain variable domain of TCR clone 98383 (TRAV29/DV5, TRAJ31)
CAASRNNNARLML

SEQ ID NO: 196766 - protein, 15 aa, Homo sapiens
  CDR3 for beta chain variable domain of TCR clone 98383 (TRBV2, TRBJ2-1)
CASSELAGSYNEQFF

SEQ ID NO: 196767 - protein, 13 aa, Homo sapiens
  CDR3 for alpha chain variable domain of TCR clone 98384 (TRAV1-1, TRAJ9)
RAAKNTGGFKTIF

SEQ ID NO: 196768 - protein, 15 aa, Homo sapiens
  CDR3 for beta chain variable domain of TCR clone 98384 (TRBV4-1, TRBJ2-5)
CASSQWDLYQETQYF

SEQ ID NO: 196769 - protein, 17 aa, Homo sapiens
  CDR3 for alpha chain variable domain of TCR clone 98385 (TRAV8-6, TRAJ58)
CAVSSWVGETSGSRLTF

SEQ ID NO: 196770 - protein, 14 aa, Homo sapiens
  CDR3 for beta chain variable domain of TCR clone 98385 (TRBV4-2, TRBJ2-1)
CASGLDRAHNEQFF

SEQ ID NO: 196771 - protein, 16 aa, Homo sapiens
  CDR3 for alpha chain variable domain of TCR clone 98386 (TRAV27, TRAJ13)
CAGAKSDSGGYQKVTF

SEQ ID NO: 196772 - protein, 15 aa, Homo sapiens
  CDR3 for beta chain variable domain of TCR clone 98386 (TRBV29-1, TRBJ2-1)
CSAGRHALFYNEQFF

SEQ ID NO: 196773 - protein, 13 aa, Homo sapiens
  CDR3 for alpha chain variable domain of TCR clone 98387 (TRAV12-2, TRAJ12)
CAGPEDSSYKLIF

SEQ ID NO: 196774 - protein, 13 aa, Homo sapiens
  CDR3 for beta chain variable domain of TCR clone 98387 (TRBV28, TRBJ2-1)
CASSLIGGDEQFF

SEQ ID NO: 196775 - protein, 19 aa, Homo sapiens
  CDR3 for alpha chain variable domain of TCR clone 98388 (TRAV13-1, TRAJ52)
CAASPYQNAGGTSYGKLTF

SEQ ID NO: 196776 - protein, 13 aa, Homo sapiens
  CDR3 for beta chain variable domain of TCR clone 98388 (TRBV12-4, TRBJ1-1)
CASSPGTGFEAFF

SEQ ID NO: 196777 - protein, 13 aa, Homo sapiens
  CDR3 for alpha chain variable domain of TCR clone 98389 (TRAV12-1, TRAJ38)
CVVPAGNNRKLIW

SEQ ID NO: 196778 - protein, 11 aa, Homo sapiens
  CDR3 for beta chain variable domain of TCR clone 98389 (TRBV11-2, TRBJ2-2)
CASSLPGELFF

SEQ ID NO: 196779 - protein, 12 aa, Homo sapiens
  CDR3 for alpha chain variable domain of TCR clone 98390 (TRAV21, TRAJ3)
CCFYSGASKIIF

SEQ ID NO: 196780 - protein, 16 aa, Homo sapiens
  CDR3 for beta chain variable domain of TCR clone 98390 (TRBV19, TRBJ2-1)
CASSKAGPSSYNEQFF

SEQ ID NO: 196781 - protein, 13 aa, Homo sapiens
  CDR3 for alpha chain variable domain of TCR clone 98391 (TRAV9-2, TRAJ53)
CALSGGSNHKLTF

SEQ ID NO: 196782 - protein, 17 aa, Homo sapiens
  CDR3 for beta chain variable domain of TCR clone 98391 (TRBV11-2, TRBJ2-1)
CASSLYPPGVEYNEQFF

SEQ ID NO: 196783 - protein, 11 aa, Homo sapiens
  CDR3 for alpha chain variable domain of TCR clone 98392 (TRAV13-1, TRAJ48)
CSKLWNEKLTF

SEQ ID NO: 196784 - protein, 15 aa, Homo sapiens
  CDR3 for beta chain variable domain of TCR clone 98392 (TRBV9, TRBJ2-3)
CASSLEGGLTDTQYF

SEQ ID NO: 196785 - protein, 14 aa, Homo sapiens
  CDR3 for alpha chain variable domain of TCR clone 98393 (TRAV8-1, TRAJ13)
CAVKSSGGYQKVTF

SEQ ID NO: 196786 - protein, 12 aa, Homo sapiens
  CDR3 for beta chain variable domain of TCR clone 98393 (TRBV14, TRBJ1-1)
CASRPYETEAFF

SEQ ID NO: 196787 - protein, 16 aa, Homo sapiens
  CDR3 for alpha chain variable domain of TCR clone 98394 (TRAV27, TRAJ53)
CAAPEGSGGSHYKLTF

SEQ ID NO: 196788 - protein, 14 aa, Homo sapiens
  CDR3 for beta chain variable domain of TCR clone 98394 (TRBV4-3, TRBJ1-5)
CASSQGGQGWPQHF

SEQ ID NO: 196789 - protein, 13 aa, Homo sapiens
  CDR3 for alpha chain variable domain of TCR clone 98395 (TRAV8-4, TRAJ34)
CAVTLYNTDKLIF

SEQ ID NO: 196790 - protein, 17 aa, Homo sapiens
  CDR3 for beta chain variable domain of TCR clone 98395 (TRBV7-2, TRBJ2-2)
CASSPFWRGGGTGELFF

SEQ ID NO: 196791 - protein, 13 aa, Homo sapiens
  CDR3 for alpha chain variable domain of TCR clone 98396 (TRAV13-2, TRAJ53)
CAENMGSNYKLTF

SEQ ID NO: 196792 - protein, 13 aa, Homo sapiens
  CDR3 for beta chain variable domain of TCR clone 98396 (TRBV7-6, TRBJ2-1)
CQQLGGGADEQFF

SEQ ID NO: 196793 - protein, 16 aa, Homo sapiens
  CDR3 for alpha chain variable domain of TCR clone 98397 (TRAV13-2, TRAJ22)
CAESRGSSGSARQLAF

SEQ ID NO: 196794 - protein, 17 aa, Homo sapiens
  CDR3 for beta chain variable domain of TCR clone 98397 (TRBV14, TRBJ2-1)
CASSQDRRVSSYNEQFF

SEQ ID NO: 196795 - protein, 15 aa, Homo sapiens
  CDR3 for alpha chain variable domain of TCR clone 98398 (TRAV26-1, TRAJ44)
CIVRIGTGTASKLTF

SEQ ID NO: 196796 - protein, 13 aa, Homo sapiens
  CDR3 for beta chain variable domain of TCR clone 98398 (TRBV12-4, TRBJ1-2)
CASRTDGNYGYTF

SEQ ID NO: 196797 - protein, 10 aa, Homo sapiens
  CDR3 for alpha chain variable domain of TCR clone 98399 (TRAV8-4, TRAJ43)
CAVSADDMRF

SEQ ID NO: 196798 - protein, 14 aa, Homo sapiens
  CDR3 for beta chain variable domain of TCR clone 98399 (TRBV7-2, TRBJ2-7)
CASRSQGAAYEQYF

SEQ ID NO: 196799 - protein, 15 aa, Homo sapiens
  CDR3 for alpha chain variable domain of TCR clone 98400 (TRAV3, TRAJ13)
CAVRVYAGGYQKVTF

SEQ ID NO: 196800 - protein, 15 aa, Homo sapiens
  CDR3 for beta chain variable domain of TCR clone 98400 (TRBV5-7, TRBJ1-2)
CASSLGVAANYGYTF

SEQ ID NO: 196801 - protein, 12 aa, Homo sapiens
  CDR3 for alpha chain variable domain of TCR clone 98401 (TRAV21, TRAJ3)
CCFYRSASKIIF

SEQ ID NO: 196802 - protein, 16 aa, Homo sapiens
  CDR3 for beta chain variable domain of TCR clone 98401 (TRBV19, TRBJ2-1)
CASSKAGPSSYNEQFF

SEQ ID NO: 196803 - protein, 16 aa, Homo sapiens
  CDR3 for alpha chain variable domain of TCR clone 98402 (TRAV12-3, TRAJ53)
RAMSPGSGGSNYKLTF

SEQ ID NO: 196804 - protein, 15 aa, Homo sapiens
  CDR3 for beta chain variable domain of TCR clone 98402 (TRBV25-1, TRBJ1-4)
CASSKRIATNEKLFF

SEQ ID NO: 196805 - protein, 19 aa, Homo sapiens
  CDR3 for alpha chain variable domain of TCR clone 98403 (TRAV12-3, TRAJ40)
SPVIQPPTSVQDRTYKYIF

SEQ ID NO: 196806 - protein, 15 aa, Homo sapiens
  CDR3 for beta chain variable domain of TCR clone 98403 (TRBV20-1, TRBJ2-7)
CSARDRVSGMDEQYF

SEQ ID NO: 196807 - protein, 21 aa, Homo sapiens
  CDR3 for alpha chain variable domain of TCR clone 98404 (TRAV8-3, TRAJ10)
CAVGHTHGRRKQTYLWDRHSA

SEQ ID NO: 196808 - protein, 10 aa, Homo sapiens
  CDR3 for beta chain variable domain of TCR clone 98404 (TRBV20-1, TRBJ2-5)
CSARFETQYF

SEQ ID NO: 196809 - protein, 12 aa, Homo sapiens
  CDR3 for alpha chain variable domain of TCR clone 98405 (TRAV20, TRAJ37)
CALPSNTGKLIF

SEQ ID NO: 196810 - protein, 14 aa, Homo sapiens
  CDR3 for beta chain variable domain of TCR clone 98405 (TRBV25-1, TRBJ1-1)
CASTHLGGNTEAFF

SEQ ID NO: 196811 - protein, 14 aa, Homo sapiens
  CDR3 for alpha chain variable domain of TCR clone 98406 (TRAV38-1, TRAJ54)
CAFMSPSGAQKLVF

SEQ ID NO: 196812 - protein, 16 aa, Homo sapiens
  CDR3 for beta chain variable domain of TCR clone 98406 (TRBV28, TRBJ2-1)
CASSLGGSGSCNEQFF

SEQ ID NO: 196813 - protein, 18 aa, Homo sapiens
  CDR3 for alpha chain variable domain of TCR clone 98407 (TRAV21, TRAJ52)
CAVRPSPAGGTSYGKLTF

SEQ ID NO: 196814 - protein, 15 aa, Homo sapiens
  CDR3 for beta chain variable domain of TCR clone 98407 (TRBV20-1, TRBJ1-5)
CSAFKNGQRNQTQHF

SEQ ID NO: 196815 - protein, 11 aa, Homo sapiens
  CDR3 for alpha chain variable domain of TCR clone 98408 (TRAV13-1, TRAJ40)
CAVSGTYKYIF

SEQ ID NO: 196816 - protein, 14 aa, Homo sapiens
  CDR3 for beta chain variable domain of TCR clone 98408 (TRBV7-9, TRBJ2-2)
CASSLVQDTGELFF

SEQ ID NO: 196817 - protein, 16 aa, Homo sapiens
  CDR3 for alpha chain variable domain of TCR clone 98409 (TRAV21, TRAJ52)
CALTNAGGTSYGKLTF

SEQ ID NO: 196818 - protein, 13 aa, Homo sapiens
  CDR3 for beta chain variable domain of TCR clone 98409 (TRBV20-1, TRBJ2-3)
CSARLAGTDTQYF

SEQ ID NO: 196819 - protein, 14 aa, Homo sapiens
  CDR3 for alpha chain variable domain of TCR clone 98410 (TRAV26-1, TRAJ38)
CIADNAGNNRKLIW

SEQ ID NO: 196820 - protein, 15 aa, Homo sapiens
  CDR3 for beta chain variable domain of TCR clone 98410 (TRBV20-1, TRBJ2-7)
CSARGRVSGMDEQYF

SEQ ID NO: 196821 - protein, 14 aa, Homo sapiens
  CDR3 for alpha chain variable domain of TCR clone 98411 (TRAV12-3, TRAJ10)
SHLPLTGGGDKLTF

SEQ ID NO: 196822 - protein, 14 aa, Homo sapiens
  CDR3 for beta chain variable domain of TCR clone 98411 (TRBV7-6, TRBJ2-3)
CASSLGTVTDTQYF

SEQ ID NO: 196823 - protein, 12 aa, Homo sapiens
  CDR3 for alpha chain variable domain of TCR clone 98412 (TRAV12-3, TRAJ17)
CAMTLTGNKLTF

SEQ ID NO: 196824 - protein, 13 aa, Homo sapiens
  CDR3 for beta chain variable domain of TCR clone 98412 (TRBV28, TRBJ1-1)
CASSKQGWTEAFF

SEQ ID NO: 196825 - protein, 15 aa, Homo sapiens
  CDR3 for alpha chain variable domain of TCR clone 98413 (TRAV26-1, TRAJ40)
CIVIVTTSGTYKYIF

SEQ ID NO: 196826 - protein, 12 aa, Homo sapiens
  CDR3 for beta chain variable domain of TCR clone 98413 (TRBV7-9, TRBJ1-4)
CASSTDREKLFF

SEQ ID NO: 196827 - protein, 13 aa, Homo sapiens
  CDR3 for alpha chain variable domain of TCR clone 98414 (TRAV12-2, TRAJ47)
CAVFMEYGNKLVF

SEQ ID NO: 196828 - protein, 14 aa, Homo sapiens
  CDR3 for beta chain variable domain of TCR clone 98414 (TRBV4-1, TRBJ1-5)
CASSQGPTKQPQHF

SEQ ID NO: 196829 - protein, 17 aa, Homo sapiens
  CDR3 for alpha chain variable domain of TCR clone 98415 (TRAV3, TRAJ4)
CAVRDIMFSGGYNKLIF

SEQ ID NO: 196830 - protein, 13 aa, Homo sapiens
  CDR3 for beta chain variable domain of TCR clone 98415 (TRBV28, TRBJ2-1)
CASSVIGRDEQFF

SEQ ID NO: 196831 - protein, 15 aa, Homo sapiens
  CDR3 for alpha chain variable domain of TCR clone 98416 (TRAV12-3, TRAJ42)
CAMSGHGGSQGNLIF

SEQ ID NO: 196832 - protein, 16 aa, Homo sapiens
  CDR3 for beta chain variable domain of TCR clone 98416 (TRBV7-2, TRBJ2-3)
CASSLVALYSTDTQYF

SEQ ID NO: 196833 - protein, 15 aa, Homo sapiens
  CDR3 for alpha chain variable domain of TCR clone 98417 (TRAV2, TRAJ9)
CAVEDRGTGGFKTIF

SEQ ID NO: 196834 - protein, 16 aa, Homo sapiens
  CDR3 for beta chain variable domain of TCR clone 98417 (TRBV24-1, TRBJ2-3)
CATSDPGTGATHTQYF

SEQ ID NO: 196835 - protein, 16 aa, Homo sapiens
  CDR3 for alpha chain variable domain of TCR clone 98418 (TRAV12-2, TRAJ32)
CAVNLGQGGATNKLIF

SEQ ID NO: 196836 - protein, 13 aa, Homo sapiens
  CDR3 for beta chain variable domain of TCR clone 98418 (TRBV14, TRBJ1-1)
CASSQEAGTEAFF

SEQ ID NO: 196837 - protein, 14 aa, Homo sapiens
  CDR3 for alpha chain variable domain of TCR clone 98419 (TRAV8-3, TRAJ4)
CAVGAAGGYNKLIF

SEQ ID NO: 196838 - protein, 13 aa, Homo sapiens
  CDR3 for beta chain variable domain of TCR clone 98419 (TRBV18, TRBJ2-5)
CASSLQGQETQYF

SEQ ID NO: 196839 - protein, 13 aa, Homo sapiens
  CDR3 for alpha chain variable domain of TCR clone 98420 (TRAV13-2, TRAJ48)
CAEMDFGNEKLTF

SEQ ID NO: 196840 - protein, 13 aa, Homo sapiens
  CDR3 for beta chain variable domain of TCR clone 98420 (TRBV7-9, TRBJ1-2)
CASGLKQNYGYTF

SEQ ID NO: 196841 - protein, 16 aa, Homo sapiens
  CDR3 for alpha chain variable domain of TCR clone 98421 (TRAV8-4, TRAJ5)
CAVSPLTDTGRRALTF

SEQ ID NO: 196842 - protein, 14 aa, Homo sapiens
  CDR3 for beta chain variable domain of TCR clone 98421 (TRBV19, TRBJ1-6)
CASSTDGWNSPLLF

SEQ ID NO: 196843 - protein, 13 aa, Homo sapiens
  CDR3 for alpha chain variable domain of TCR clone 98422 (TRAV1-2, TRAJ9)
CAASNTGGFKTIF

SEQ ID NO: 196844 - protein, 15 aa, Homo sapiens
  CDR3 for beta chain variable domain of TCR clone 98422 (TRBV6-3, TRBJ2-7)
CASSSPGTVFYEQYF

SEQ ID NO: 196845 - protein, 14 aa, Homo sapiens
  CDR3 for alpha chain variable domain of TCR clone 98423 (TRAV12-2, TRAJ40)
CAVKIPSGTYKYIF

SEQ ID NO: 196846 - protein, 17 aa, Homo sapiens
  CDR3 for beta chain variable domain of TCR clone 98423 (TRBV20-1, TRBJ2-1)
CSAFSGTSGSLHNEQFF

SEQ ID NO: 196847 - protein, 12 aa, Homo sapiens
  CDR3 for alpha chain variable domain of TCR clone 98424 (TRAV12-3, TRAJ17)
CAMTLTGNKLTF

SEQ ID NO: 196848 - protein, 18 aa, Homo sapiens
  CDR3 for beta chain variable domain of TCR clone 98424 (TRBV27, TRBJ2-1)
CASGNRAVGVGSKNEQFF

SEQ ID NO: 196849 - protein, 14 aa, Homo sapiens
  CDR3 for alpha chain variable domain of TCR clone 98425 (TRAV12-3, TRAJ57)
CARALEGGSEKLVF

SEQ ID NO: 196850 - protein, 11 aa, Homo sapiens
  CDR3 for beta chain variable domain of TCR clone 98425 (TRBV20-1, TRBJ2-7)
CSARLSYEQYF

SEQ ID NO: 196851 - protein, 15 aa, Homo sapiens
  CDR3 for alpha chain variable domain of TCR clone 98426 (TRAV23/DV6, TRAJ30)
CAASIQESRDDKIIF

SEQ ID NO: 196852 - protein, 17 aa, Homo sapiens
  CDR3 for beta chain variable domain of TCR clone 98426 (TRBV4-3, TRBJ2-1)
CASSQFSSGRASGEQFF

SEQ ID NO: 196853 - protein, 15 aa, Homo sapiens
  CDR3 for alpha chain variable domain of TCR clone 98427 (TRAV17, TRAJ57)
CATGPSQGGSEKLVF

SEQ ID NO: 196854 - protein, 14 aa, Homo sapiens
  CDR3 for beta chain variable domain of TCR clone 98427 (TRBV12-5, TRBJ2-5)
CASCSRTHQETQYF

SEQ ID NO: 196855 - protein, 14 aa, Homo sapiens
  CDR3 for alpha chain variable domain of TCR clone 98428 (TRAV1-2, TRAJ8)
CAVREDTGFQKLVF

SEQ ID NO: 196856 - protein, 13 aa, Homo sapiens
  CDR3 for beta chain variable domain of TCR clone 98428 (TRBV12-4, TRBJ1-2)
CASSLRQGKGYTL

SEQ ID NO: 196857 - protein, 14 aa, Homo sapiens
  CDR3 for alpha chain variable domain of TCR clone 98429 (TRAV1-2, TRAJ16)
CAVNRFSDGQKLLF

SEQ ID NO: 196858 - protein, 16 aa, Homo sapiens
  CDR3 for beta chain variable domain of TCR clone 98429 (TRBV19, TRBJ2-1)
CAISEILAGDGNEQFF

SEQ ID NO: 196859 - protein, 11 aa, Homo sapiens
  CDR3 for alpha chain variable domain of TCR clone 98430 (TRAV3, TRAJ31)
CAVGNFNKFYF

SEQ ID NO: 196860 - protein, 15 aa, Homo sapiens
  CDR3 for beta chain variable domain of TCR clone 98430 (TRBV19, TRBJ2-7)
CASSIGGGLVNEQYF

SEQ ID NO: 196861 - protein, 15 aa, Homo sapiens
  CDR3 for alpha chain variable domain of TCR clone 98431 (TRAV8-6, TRAJ6)
CAVSGESGGSYIPTF

SEQ ID NO: 196862 - protein, 14 aa, Homo sapiens
  CDR3 for beta chain variable domain of TCR clone 98431 (TRBV9, TRBJ2-4)
CASSPSGTSGLQYF

SEQ ID NO: 196863 - protein, 14 aa, Homo sapiens
  CDR3 for alpha chain variable domain of TCR clone 98432 (TRAV1-2, TRAJ16)
CAVNRFSDGQKLLF

SEQ ID NO: 196864 - protein, 15 aa, Homo sapiens
  CDR3 for beta chain variable domain of TCR clone 98432 (TRBV7-9, TRBJ1-2)
CASSSFGDTNYGYTF

SEQ ID NO: 196865 - protein, 13 aa, Homo sapiens
  CDR3 for alpha chain variable domain of TCR clone 98433 (TRAV27, TRAJ27)
CAGGITNAGQSTF

SEQ ID NO: 196866 - protein, 13 aa, Homo sapiens
  CDR3 for beta chain variable domain of TCR clone 98433 (TRBV20-1, TRBJ1-2)
CSASLGVGYGYTF

SEQ ID NO: 196867 - protein, 12 aa, Homo sapiens
  CDR3 for alpha chain variable domain of TCR clone 98434 (TRAV13-1, TRAJ45)
CAATRGADGLTF

SEQ ID NO: 196868 - protein, 15 aa, Homo sapiens
  CDR3 for beta chain variable domain of TCR clone 98434 (TRBV27, TRBJ2-1)
CASSNGGGSSNEQFF

SEQ ID NO: 196869 - protein, 14 aa, Homo sapiens
  CDR3 for alpha chain variable domain of TCR clone 98435 (TRAV17, TRAJ16)
CATADFSDGQKLLF

SEQ ID NO: 196870 - protein, 15 aa, Homo sapiens
  CDR3 for beta chain variable domain of TCR clone 98435 (TRBV18, TRBJ2-1)
CASSPPSASYNEQVF

SEQ ID NO: 196871 - protein, 14 aa, Homo sapiens
  CDR3 for alpha chain variable domain of TCR clone 98436 (TRAV38-1, TRAJ45)
GASHSGGGADGLTF

SEQ ID NO: 196872 - protein, 13 aa, Homo sapiens
  CDR3 for beta chain variable domain of TCR clone 98436 (TRBV10-3, TRBJ1-2)
CAISERDSYGYTF

SEQ ID NO: 196873 - protein, 10 aa, Homo sapiens
  CDR3 for alpha chain variable domain of TCR clone 98437 (TRAV8-2, TRAJ29)
CTGGNTPLVF

SEQ ID NO: 196874 - protein, 13 aa, Homo sapiens
  CDR3 for beta chain variable domain of TCR clone 98437 (TRBV20-1, TRBJ1-1)
CSARGGGNTEASF

SEQ ID NO: 196875 - protein, 12 aa, Homo sapiens
  CDR3 for alpha chain variable domain of TCR clone 98438 (TRAV13-2, TRAJ23)
CAERHRGGKLIF

SEQ ID NO: 196876 - protein, 15 aa, Homo sapiens
  CDR3 for beta chain variable domain of TCR clone 98438 (TRBV12-4, TRBJ2-5)
RASSPPTGLQETQYF

SEQ ID NO: 196877 - protein, 16 aa, Homo sapiens
  CDR3 for alpha chain variable domain of TCR clone 98439 (TRAV3, TRAJ37)
CAVRGKGSGNTGKLIF

SEQ ID NO: 196878 - protein, 13 aa, Homo sapiens
  CDR3 for beta chain variable domain of TCR clone 98439 (TRBV7-9, TRBJ2-1)
CASSLDVGNEQFF

SEQ ID NO: 196879 - protein, 15 aa, Homo sapiens
  CDR3 for alpha chain variable domain of TCR clone 98440 (TRAV2, TRAJ9)
CAVEDRGTGGFKTIF

SEQ ID NO: 196880 - protein, 16 aa, Homo sapiens
  CDR3 for beta chain variable domain of TCR clone 98440 (TRBV24-1, TRBJ2-3)
CATSDPGTGASDTQYF

SEQ ID NO: 196881 - protein, 12 aa, Homo sapiens
  CDR3 for alpha chain variable domain of TCR clone 98441 (TRAV12-3, TRAJ17)
CAMTLTGNKLTF

SEQ ID NO: 196882 - protein, 13 aa, Homo sapiens
  CDR3 for beta chain variable domain of TCR clone 98441 (TRBV7-8, TRBJ2-3)
CASSLRGPDTQYF

SEQ ID NO: 196883 - protein, 21 aa, Homo sapiens
  CDR3 for alpha chain variable domain of TCR clone 98442 (TRAV2, TRAJ26)
CAGSPGRLWSEFCLCSRNQIV

SEQ ID NO: 196884 - protein, 13 aa, Homo sapiens
  CDR3 for beta chain variable domain of TCR clone 98442 (TRBV7-9, TRBJ1-2)
CASSLKQNYGYTF

SEQ ID NO: 196885 - protein, 14 aa, Homo sapiens
  CDR3 for alpha chain variable domain of TCR clone 98443 (TRAV35, TRAJ56)
CAGQLTGANSKLTF

SEQ ID NO: 196886 - protein, 13 aa, Homo sapiens
  CDR3 for beta chain variable domain of TCR clone 98443 (TRBV7-3, TRBJ1-1)
CASSQDWGAEAFF

SEQ ID NO: 196887 - protein, 12 aa, Homo sapiens
  CDR3 for alpha chain variable domain of TCR clone 98444 (TRAV3, TRAJ43)
CAVRDPNNDMRF

SEQ ID NO: 196888 - protein, 15 aa, Homo sapiens
  CDR3 for beta chain variable domain of TCR clone 98444 (TRBV5-7, TRBJ2-7)
CASSLPGQVFYEQYF

SEQ ID NO: 196889 - protein, 14 aa, Homo sapiens
  CDR3 for alpha chain variable domain of TCR clone 98445 (TRAV1-2, TRAJ16)
CAVNRFSDGQKLLS

SEQ ID NO: 196890 - protein, 14 aa, Homo sapiens
  CDR3 for beta chain variable domain of TCR clone 98445 (TRBV12-4, TRBJ1-1)
CASSLGTGGTEAFF

SEQ ID NO: 196891 - protein, 15 aa, Homo sapiens
  CDR3 for alpha chain variable domain of TCR clone 98446 (TRAV3, TRAJ5)
CAVRDRKTGRRALTF

SEQ ID NO: 196892 - protein, 13 aa, Homo sapiens
  CDR3 for beta chain variable domain of TCR clone 98446 (TRBV7-9, TRBJ1-2)
CASSLKQNYGYTF

SEQ ID NO: 196893 - protein, 13 aa, Homo sapiens
  CDR3 for alpha chain variable domain of TCR clone 98447 (TRAV21, TRAJ57)
CAVTQGGSEKLVF

SEQ ID NO: 196894 - protein, 15 aa, Homo sapiens
  CDR3 for beta chain variable domain of TCR clone 98447 (TRBV20-1, TRBJ2-1)
CSARGIGGTYNEQFF

SEQ ID NO: 196895 - protein, 16 aa, Homo sapiens
  CDR3 for alpha chain variable domain of TCR clone 98448 (TRAV3, TRAJ10)
CAVRDMKAGGGNKLTF

SEQ ID NO: 196896 - protein, 16 aa, Homo sapiens
  CDR3 for beta chain variable domain of TCR clone 98448 (TRBV6-3, TRBJ1-2)
CASSYSRRASNYGYTF

SEQ ID NO: 196897 - protein, 14 aa, Homo sapiens
  CDR3 for alpha chain variable domain of TCR clone 98449 (TRAV12-3, TRAJ10)
SHLPLTGGGNKLTF

SEQ ID NO: 196898 - protein, 10 aa, Homo sapiens
  CDR3 for beta chain variable domain of TCR clone 98449 (TRBV28, TRBJ1-2)
CASSSDRAVF

SEQ ID NO: 196899 - protein, 15 aa, Homo sapiens
  CDR3 for alpha chain variable domain of TCR clone 98450 (TRAV21, TRAJ53)
CATLNSGGSNYKLTF

SEQ ID NO: 196900 - protein, 16 aa, Homo sapiens
  CDR3 for beta chain variable domain of TCR clone 98450 (TRBV20-1, TRBJ1-2)
CIASMGQGVANYGYTF

SEQ ID NO: 196901 - protein, 16 aa, Homo sapiens
  CDR3 for alpha chain variable domain of TCR clone 98451 (TRAV20, TRAJ38)
CAVQASNAGNNRKPIW

SEQ ID NO: 196902 - protein, 16 aa, Homo sapiens
  CDR3 for beta chain variable domain of TCR clone 98451 (TRBV7-8, TRBJ2-6)
CAPRVGDSSGANVLTF

SEQ ID NO: 196903 - protein, 18 aa, Homo sapiens
  CDR3 for alpha chain variable domain of TCR clone 98452 (TRAV13-1, TRAJ52)
CAASKRSAGGTSYGKLTF

SEQ ID NO: 196904 - protein, 12 aa, Homo sapiens
  CDR3 for beta chain variable domain of TCR clone 98452 (TRBV19, TRBJ2-1)
CASSMQDTEQFF

SEQ ID NO: 196905 - protein, 12 aa, Homo sapiens
  CDR3 for alpha chain variable domain of TCR clone 98453 (TRAV13-1, TRAJ21)
CAAKKGFNKFYF

SEQ ID NO: 196906 - protein, 15 aa, Homo sapiens
  CDR3 for beta chain variable domain of TCR clone 98453 (TRBV15, TRBJ1-5)
CATSRDPVSNQPQHF

SEQ ID NO: 196907 - protein, 15 aa, Homo sapiens
  CDR3 for alpha chain variable domain of TCR clone 98454 (TRAV3, )
CAVRDCLNAGNNYIQ

SEQ ID NO: 196908 - protein, 19 aa, Homo sapiens
  CDR3 for beta chain variable domain of TCR clone 98454 (TRBV7-2, TRBJ2-3)
CASSFLSRNWGGGTDTQYF

SEQ ID NO: 196909 - protein, 16 aa, Homo sapiens
  CDR3 for alpha chain variable domain of TCR clone 98455 (TRAV8-4, TRAJ5)
CAASPLTDTGRRALTF

SEQ ID NO: 196910 - protein, 14 aa, Homo sapiens
  CDR3 for beta chain variable domain of TCR clone 98455 (TRBV19, TRBJ1-6)
CASSTDGWNSPLHF

SEQ ID NO: 196911 - protein, 14 aa, Homo sapiens
  CDR3 for alpha chain variable domain of TCR clone 98456 (TRAV13-1, TRAJ13)
CAASRVGGYQKVTF

SEQ ID NO: 196912 - protein, 13 aa, Homo sapiens
  CDR3 for beta chain variable domain of TCR clone 98456 (TRBV28, TRBJ2-7)
CASKAGGVYEQYF

SEQ ID NO: 196913 - protein, 13 aa, Homo sapiens
  CDR3 for alpha chain variable domain of TCR clone 98457 (TRAV29/DV5, TRAJ31)
CAASRNNTARLMF

SEQ ID NO: 196914 - protein, 12 aa, Homo sapiens
  CDR3 for beta chain variable domain of TCR clone 98457 (TRBV14, TRBJ2-5)
CASSHLKETQYF

SEQ ID NO: 196915 - protein, 14 aa, Homo sapiens
  CDR3 for alpha chain variable domain of TCR clone 98458 (TRAV26-1, TRAJ26)
CIVSATFLGQNFVF

SEQ ID NO: 196916 - protein, 16 aa, Homo sapiens
  CDR3 for beta chain variable domain of TCR clone 98458 (TRBV12-4, TRBJ2-7)
CASRSTGTGPSYEQYF

SEQ ID NO: 196917 - protein, 14 aa, Homo sapiens
  CDR3 for alpha chain variable domain of TCR clone 98459 (TRAV2, TRAJ9)
CAVEDRSGGFKTIF

SEQ ID NO: 196918 - protein, 15 aa, Homo sapiens
  CDR3 for beta chain variable domain of TCR clone 98459 (TRBV5-6, TRBJ1-5)
CASSYGKLWDQPQHF

SEQ ID NO: 196919 - protein, 15 aa, Homo sapiens
  CDR3 for alpha chain variable domain of TCR clone 98460 (TRAV20, TRAJ6)
CAVRLQSGGSYIPTF

SEQ ID NO: 196920 - protein, 12 aa, Homo sapiens
  CDR3 for beta chain variable domain of TCR clone 98460 (TRBV11-2, TRBJ2-1)
CASSPGNNEQFF

SEQ ID NO: 196921 - protein, 13 aa, Homo sapiens
  CDR3 for alpha chain variable domain of TCR clone 98461 (TRAV27, TRAJ41)
CAGEGNSGYALNF

SEQ ID NO: 196922 - protein, 14 aa, Homo sapiens
  CDR3 for beta chain variable domain of TCR clone 98461 (TRBV7-2, TRBJ1-1)
CASSFLTGTTEAFY

SEQ ID NO: 196923 - protein, 12 aa, Homo sapiens
  CDR3 for alpha chain variable domain of TCR clone 98462 (TRAV17, TRAJ53)
CATEGSNYKLTF

SEQ ID NO: 196924 - protein, 19 aa, Homo sapiens
  CDR3 for beta chain variable domain of TCR clone 98462 (TRBV5-1, TRBJ2-3)
CASSLWTSWGITTPDTQYF

SEQ ID NO: 196925 - protein, 17 aa, Homo sapiens
  CDR3 for alpha chain variable domain of TCR clone 98463 (TRAV3, TRAJ42)
CAVRARDYGGSQGNLIF

SEQ ID NO: 196926 - protein, 14 aa, Homo sapiens
  CDR3 for beta chain variable domain of TCR clone 98463 (TRBV25-1, TRBJ1-1)
CASTHLGGNTEAFF

SEQ ID NO: 196927 - protein, 18 aa, Homo sapiens
  CDR3 for alpha chain variable domain of TCR clone 98464 (TRAV13-1, TRAJ52)
CAAKNPNAGGTSYGKLTF

SEQ ID NO: 196928 - protein, 14 aa, Homo sapiens
  CDR3 for beta chain variable domain of TCR clone 98464 (TRBV7-3, TRBJ2-2)
CASSSGGYTGELFF

SEQ ID NO: 196929 - protein, 12 aa, Homo sapiens
  CDR3 for alpha chain variable domain of TCR clone 98465 (TRAV21, TRAJ11)
CAATSGYSTLTF

SEQ ID NO: 196930 - protein, 13 aa, Homo sapiens
  CDR3 for beta chain variable domain of TCR clone 98465 (TRBV20-1, TRBJ2-7)
QCPELVGVGEQYF

SEQ ID NO: 196931 - protein, 14 aa, Homo sapiens
  CDR3 for alpha chain variable domain of TCR clone 98466 (TRAV14/DV4, TRAJ41)
CARGGPDSGYARNF

SEQ ID NO: 196932 - protein, 15 aa, Homo sapiens
  CDR3 for beta chain variable domain of TCR clone 98466 (TRBV19, TRBJ2-1)
CASSIQATSYNEQFF

SEQ ID NO: 196933 - protein, 14 aa, Homo sapiens
  CDR3 for alpha chain variable domain of TCR clone 98467 (TRAV12-2, TRAJ53)
CAVKGGGSNYKLKF

SEQ ID NO: 196934 - protein, 15 aa, Homo sapiens
  CDR3 for beta chain variable domain of TCR clone 98467 (TRBV11-2, TRBJ2-2)
CASSLDTGNTGELFF

SEQ ID NO: 196935 - protein, 12 aa, Homo sapiens
  CDR3 for alpha chain variable domain of TCR clone 98468 (TRAV1-2, TRAJ17)
CAVRAAGNKLTF

SEQ ID NO: 196936 - protein, 16 aa, Homo sapiens
  CDR3 for beta chain variable domain of TCR clone 98468 (TRBV20-1, TRBJ2-1)
CSAPGLAGSYSDEQSF

SEQ ID NO: 196937 - protein, 16 aa, Homo sapiens
  CDR3 for alpha chain variable domain of TCR clone 98469 (TRAV3, TRAJ37)
CAVRGKGSGNTGKLIF

SEQ ID NO: 196938 - protein, 14 aa, Homo sapiens
  CDR3 for beta chain variable domain of TCR clone 98469 (TRBV4-2, TRBJ1-4)
CASSQGATNEKLFF

SEQ ID NO: 196939 - protein, 17 aa, Homo sapiens
  CDR3 for alpha chain variable domain of TCR clone 98470 (TRAV3, TRAJ6)
CAVRDGPRAGGSYIPTF

SEQ ID NO: 196940 - protein, 17 aa, Homo sapiens
  CDR3 for beta chain variable domain of TCR clone 98470 (TRBV15, TRBJ1-4)
CATSRYGTGDPNEKLFF

SEQ ID NO: 196941 - protein, 14 aa, Homo sapiens
  CDR3 for alpha chain variable domain of TCR clone 98471 (TRAV13-1, TRAJ9)
CAASALTGGSKTIF

SEQ ID NO: 196942 - protein, 16 aa, Homo sapiens
  CDR3 for beta chain variable domain of TCR clone 98471 (TRBV7-8, TRBJ2-4)
CASSAERTLAKNIQYF

SEQ ID NO: 196943 - protein, 15 aa, Homo sapiens
  CDR3 for alpha chain variable domain of TCR clone 98472 (TRAV27, TRAJ38)
CAARRNAGNNRKLIW

SEQ ID NO: 196944 - protein, 16 aa, Homo sapiens
  CDR3 for beta chain variable domain of TCR clone 98472 (TRBV11-3, TRBJ2-3)
CASSSGSGGGTDTQYF

SEQ ID NO: 196945 - protein, 11 aa, Homo sapiens
  CDR3 for alpha chain variable domain of TCR clone 98473 (TRAV13-2, TRAJ20)
CADSNDYKLSF

SEQ ID NO: 196946 - protein, 15 aa, Homo sapiens
  CDR3 for beta chain variable domain of TCR clone 98473 (TRBV6-1, TRBJ2-2)
CASSAGQGYTGELFF

SEQ ID NO: 196947 - protein, 12 aa, Homo sapiens
  CDR3 for alpha chain variable domain of TCR clone 98474 (TRAV14/DV4, TRAJ44)
CNERGPESKLTF

SEQ ID NO: 196948 - protein, 15 aa, Homo sapiens
  CDR3 for beta chain variable domain of TCR clone 98474 (TRBV7-9, TRBJ1-5)
CASSQGHQPNQPQHF

SEQ ID NO: 196949 - protein, 12 aa, Homo sapiens
  CDR3 for alpha chain variable domain of TCR clone 98475 (TRAV12-2, TRAJ10)
WGVTGGGNKLTS

SEQ ID NO: 196950 - protein, 14 aa, Homo sapiens
  CDR3 for beta chain variable domain of TCR clone 98475 (TRBV19, TRBJ2-3)
CASSAPRGTDTQYF

SEQ ID NO: 196951 - protein, 13 aa, Homo sapiens
  CDR3 for alpha chain variable domain of TCR clone 98476 (TRAV38-2/DV8, TRAJ34)
CAYRTWNTDKLIF

SEQ ID NO: 196952 - protein, 15 aa, Homo sapiens
  CDR3 for beta chain variable domain of TCR clone 98476 (TRBV4-1, TRBJ2-3)
CASRSTRAGTDTQYF

SEQ ID NO: 196953 - protein, 11 aa, Homo sapiens
  CDR3 for alpha chain variable domain of TCR clone 98477 (TRAV12-1, TRAJ34)
CVVNKGRALIF

SEQ ID NO: 196954 - protein, 12 aa, Homo sapiens
  CDR3 for beta chain variable domain of TCR clone 98477 (TRBV2, TRBJ2-1)
CAYGPPGNEQFF

SEQ ID NO: 196955 - protein, 11 aa, Homo sapiens
  CDR3 for alpha chain variable domain of TCR clone 98478 (TRAV23/DV6, TRAJ58)
CAARLLRGETS

SEQ ID NO: 196956 - protein, 16 aa, Homo sapiens
  CDR3 for beta chain variable domain of TCR clone 98478 (TRBV7-3, TRBJ2-2)
CASSLKRGTLSGELFF

SEQ ID NO: 196957 - protein, 13 aa, Homo sapiens
  CDR3 for alpha chain variable domain of TCR clone 98479 (TRAV12-3, TRAJ33)
CAMSVNSNYQLIW

SEQ ID NO: 196958 - protein, 14 aa, Homo sapiens
  CDR3 for beta chain variable domain of TCR clone 98479 (TRBV2, TRBJ2-3)
CASSEGQNTDTQYF

SEQ ID NO: 196959 - protein, 13 aa, Homo sapiens
  CDR3 for alpha chain variable domain of TCR clone 98480 (TRAV8-3, TRAJ36)
CAVGATGANNLFF

SEQ ID NO: 196960 - protein, 14 aa, Homo sapiens
  CDR3 for beta chain variable domain of TCR clone 98480 (TRBV11-2, TRBJ2-5)
CASSRTGGIETQYF

SEQ ID NO: 196961 - protein, 16 aa, Homo sapiens
  CDR3 for alpha chain variable domain of TCR clone 98481 (TRAV24, TRAJ53)
CAFNMGGGGSNYKLTF

SEQ ID NO: 196962 - protein, 14 aa, Homo sapiens
  CDR3 for beta chain variable domain of TCR clone 98481 (TRBV18, TRBJ2-3)
CASSGLADTDTQYF

SEQ ID NO: 196963 - protein, 15 aa, Homo sapiens
  CDR3 for alpha chain variable domain of TCR clone 98482 (TRAV2, TRAJ22)
CAVGFLSGSARQLTF

SEQ ID NO: 196964 - protein, 15 aa, Homo sapiens
  CDR3 for beta chain variable domain of TCR clone 98482 (TRBV2, TRBJ2-1)
CASSELAGGYNEQFF

SEQ ID NO: 196965 - protein, 14 aa, Homo sapiens
  CDR3 for alpha chain variable domain of TCR clone 98483 (TRAV27, TRAJ22)
CAGLPSGSARQLTF

SEQ ID NO: 196966 - protein, 16 aa, Homo sapiens
  CDR3 for beta chain variable domain of TCR clone 98483 (TRBV7-9, TRBJ1-2)
CASSLGFSSGEDGYTF

SEQ ID NO: 196967 - protein, 13 aa, Homo sapiens
  CDR3 for alpha chain variable domain of TCR clone 98484 (TRAV8-3, TRAJ28)
CAMGAVGSYQLTF

SEQ ID NO: 196968 - protein, 14 aa, Homo sapiens
  CDR3 for beta chain variable domain of TCR clone 98484 (TRBV7-2, TRBJ2-7)
CASRSQGAAYEQCF

SEQ ID NO: 196969 - protein, 17 aa, Homo sapiens
  CDR3 for alpha chain variable domain of TCR clone 98485 (TRAV8-1, TRAJ42)
CAVKWGNYGGSQGNIIF

SEQ ID NO: 196970 - protein, 15 aa, Homo sapiens
  CDR3 for beta chain variable domain of TCR clone 98485 (TRBV9, TRBJ1-6)
CASSVAGTGDSPLHF

SEQ ID NO: 196971 - protein, 13 aa, Homo sapiens
  CDR3 for alpha chain variable domain of TCR clone 98486 (TRAV25, TRAJ10)
CAGRTGRGNKLTF

SEQ ID NO: 196972 - protein, 15 aa, Homo sapiens
  CDR3 for beta chain variable domain of TCR clone 98486 (TRBV19, TRBJ1-5)
CASSIVWADNQPQHF

SEQ ID NO: 196973 - protein, 17 aa, Homo sapiens
  CDR3 for alpha chain variable domain of TCR clone 98487 (TRAV4, TRAJ42)
CLVGVLNYGGSQGNLIF

SEQ ID NO: 196974 - protein, 13 aa, Homo sapiens
  CDR3 for beta chain variable domain of TCR clone 98487 (TRBV9, TRBJ2-2)
CASSTFSSGELFS

SEQ ID NO: 196975 - protein, 15 aa, Homo sapiens
  CDR3 for alpha chain variable domain of TCR clone 98488 (TRAV12-2, TRAJ53)
CAVNGGVGSNYKLTF

SEQ ID NO: 196976 - protein, 17 aa, Homo sapiens
  CDR3 for beta chain variable domain of TCR clone 98488 (TRBV7-3, TRBJ2-3)
RASSLMKRMRGADTQYF

SEQ ID NO: 196977 - protein, 16 aa, Homo sapiens
  CDR3 for alpha chain variable domain of TCR clone 98489 (TRAV30, TRAJ49)
SAAQRVGPNTGNQFYF

SEQ ID NO: 196978 - protein, 14 aa, Homo sapiens
  CDR3 for beta chain variable domain of TCR clone 98489 (TRBV2, TRBJ1-5)
CASSENRGGQPQHF

SEQ ID NO: 196979 - protein, 13 aa, Homo sapiens
  CDR3 for alpha chain variable domain of TCR clone 98490 (TRAV12-3, TRAJ33)
GAMSVNSNYQLIW

SEQ ID NO: 196980 - protein, 13 aa, Homo sapiens
  CDR3 for beta chain variable domain of TCR clone 98490 (TRBV7-2, TRBJ2-2)
CASSLAVTGELFF

SEQ ID NO: 196981 - protein, 14 aa, Homo sapiens
  CDR3 for alpha chain variable domain of TCR clone 98491 (TRAV13-1, TRAJ44)
CAAKATGTASKLTF

SEQ ID NO: 196982 - protein, 14 aa, Homo sapiens
  CDR3 for beta chain variable domain of TCR clone 98491 (TRBV4-1, TRBJ1-4)
CASSQERKNEKLFF

SEQ ID NO: 196983 - protein, 13 aa, Homo sapiens
  CDR3 for alpha chain variable domain of TCR clone 98492 (TRAV26-1, TRAJ33)
CIVRVEGKYQLIW

SEQ ID NO: 196984 - protein, 16 aa, Homo sapiens
  CDR3 for beta chain variable domain of TCR clone 98492 (TRBV15, TRBJ2-7)
CATSRDRGRRRGEQYF

SEQ ID NO: 196985 - protein, 17 aa, Homo sapiens
  CDR3 for alpha chain variable domain of TCR clone 98493 (TRAV12-2, TRAJ48)
CASNEKLTSGTGTRLTI

SEQ ID NO: 196986 - protein, 14 aa, Homo sapiens
  CDR3 for beta chain variable domain of TCR clone 98493 (TRBV5-1, TRBJ2-5)
CASSLAGKQETQYF

SEQ ID NO: 196987 - protein, 15 aa, Homo sapiens
  CDR3 for alpha chain variable domain of TCR clone 98494 (TRAV23/DV6, TRAJ10)
CAARGFTGGGNKLTF

SEQ ID NO: 196988 - protein, 18 aa, Homo sapiens
  CDR3 for beta chain variable domain of TCR clone 98494 (TRBV11-2, TRBJ2-3)
CASSLGGASRGAPNTQYF

SEQ ID NO: 196989 - protein, 13 aa, Homo sapiens
  CDR3 for alpha chain variable domain of TCR clone 98495 (TRAV13-1, TRAJ5)
CAASDTGRRALTF

SEQ ID NO: 196990 - protein, 14 aa, Homo sapiens
  CDR3 for beta chain variable domain of TCR clone 98495 (TRBV28, TRBJ2-1)
CASSLNGRNNEQFF

SEQ ID NO: 196991 - protein, 10 aa, Homo sapiens
  CDR3 for alpha chain variable domain of TCR clone 98496 (TRAV1-2, TRAJ34)
CAVNTDKLIF

SEQ ID NO: 196992 - protein, 18 aa, Homo sapiens
  CDR3 for beta chain variable domain of TCR clone 98496 (TRBV7-9, TRBJ2-7)
CASSLTTSGSRTWYEQYS

SEQ ID NO: 196993 - protein, 13 aa, Homo sapiens
  CDR3 for alpha chain variable domain of TCR clone 98497 (TRAV12-1, TRAJ6)
CVVFPGGSDIPTF

SEQ ID NO: 196994 - protein, 12 aa, Homo sapiens
  CDR3 for beta chain variable domain of TCR clone 98497 (TRBV11-2, TRBJ2-2)
CASSLGGGELFF

SEQ ID NO: 196995 - protein, 11 aa, Homo sapiens
  CDR3 for alpha chain variable domain of TCR clone 98498 (TRAV26-1, TRAJ37)
CIVRVGRKLIF

SEQ ID NO: 196996 - protein, 13 aa, Homo sapiens
  CDR3 for beta chain variable domain of TCR clone 98498 (TRBV19, TRBJ2-7)
CASRKAGGSEQYF

SEQ ID NO: 196997 - protein, 13 aa, Homo sapiens
  CDR3 for alpha chain variable domain of TCR clone 98499 (TRAV8-3, TRAJ36)
CAVGATGANNLFF

SEQ ID NO: 196998 - protein, 13 aa, Homo sapiens
  CDR3 for beta chain variable domain of TCR clone 98499 (TRBV10-2, TRBJ2-7)
CASGASGGYEQYF

SEQ ID NO: 196999 - protein, 12 aa, Homo sapiens
  CDR3 for alpha chain variable domain of TCR clone 98500 (TRAV12-3, TRAJ41)
CAMSYSGYALNF

SEQ ID NO: 197000 - protein, 16 aa, Homo sapiens
  CDR3 for beta chain variable domain of TCR clone 98500 (TRBV18, TRBJ1-5)
CASSPSTGNSNQPQHF

SEQ ID NO: 197001 - protein, 17 aa, Homo sapiens
  CDR3 for alpha chain variable domain of TCR clone 98501 (TRAV4, TRAJ13)
CLVGVQGSSGGYQKVTC

SEQ ID NO: 197002 - protein, 18 aa, Homo sapiens
  CDR3 for beta chain variable domain of TCR clone 98501 (TRBV15, TRBJ2-3)
CATSRDGARSWDTDTQYF

SEQ ID NO: 197003 - protein, 14 aa, Homo sapiens
  CDR3 for alpha chain variable domain of TCR clone 98502 (TRAV13-1, TRAJ9)
CAASALTGGFKTIF

SEQ ID NO: 197004 - protein, 16 aa, Homo sapiens
  CDR3 for beta chain variable domain of TCR clone 98502 (TRBV6-1, TRBJ2-5)
CASSETLDRGAETQYF

SEQ ID NO: 197005 - protein, 12 aa, Homo sapiens
  CDR3 for alpha chain variable domain of TCR clone 98503 (TRAV35, TRAJ30)
CAGLNRDDKLIF

SEQ ID NO: 197006 - protein, 15 aa, Homo sapiens
  CDR3 for beta chain variable domain of TCR clone 98503 (TRBV18, TRBJ2-3)
CASSPLAGETDTQYF

SEQ ID NO: 197007 - protein, 17 aa, Homo sapiens
  CDR3 for alpha chain variable domain of TCR clone 98504 (TRAV3, TRAJ12)
CAVRDGGGMDSSYKLIF

SEQ ID NO: 197008 - protein, 12 aa, Homo sapiens
  CDR3 for beta chain variable domain of TCR clone 98504 (TRBV27, TRBJ2-7)
CASSGGFYEQYF

SEQ ID NO: 197009 - protein, 14 aa, Homo sapiens
  CDR3 for alpha chain variable domain of TCR clone 98505 (TRAV17, TRAJ39)
CATDPVRAGNMLTF

SEQ ID NO: 197010 - protein, 15 aa, Homo sapiens
  CDR3 for beta chain variable domain of TCR clone 98505 (TRBV13, TRBJ1-5)
CASSFGQGCVQPQHF

SEQ ID NO: 197011 - protein, 16 aa, Homo sapiens
  CDR3 for alpha chain variable domain of TCR clone 98506 (TRAV27, TRAJ13)
CAGAKSDSGGYQKVTF

SEQ ID NO: 197012 - protein, 15 aa, Homo sapiens
  CDR3 for beta chain variable domain of TCR clone 98506 (TRBV29-1, TRBJ2-1)
CSVGRHALFYNVQFF

SEQ ID NO: 197013 - protein, 13 aa, Homo sapiens
  CDR3 for alpha chain variable domain of TCR clone 98507 (TRAV21, TRAJ20)
CAVGLRVDYKLSF

SEQ ID NO: 197014 - protein, 13 aa, Homo sapiens
  CDR3 for beta chain variable domain of TCR clone 98507 (TRBV12-4, TRBJ1-5)
CASSPDRAQPQHF

SEQ ID NO: 197015 - protein, 12 aa, Homo sapiens
  CDR3 for alpha chain variable domain of TCR clone 98508 (TRAV12-1, TRAJ40)
CVFYSGTYKYIF

SEQ ID NO: 197016 - protein, 12 aa, Homo sapiens
  CDR3 for beta chain variable domain of TCR clone 98508 (TRBV6-5, TRBJ2-7)
CASSDRQNEQYF

SEQ ID NO: 197017 - protein, 11 aa, Homo sapiens
  CDR3 for alpha chain variable domain of TCR clone 98509 (TRAV22, TRAJ30)
CAGNRDDKIIF

SEQ ID NO: 197018 - protein, 17 aa, Homo sapiens
  CDR3 for beta chain variable domain of TCR clone 98509 (TRBV7-2, TRBJ2-3)
CASSLAGGLAGTAGQYF

SEQ ID NO: 197019 - protein, 12 aa, Homo sapiens
  CDR3 for alpha chain variable domain of TCR clone 98510 (TRAV23/DV6, TRAJ17)
CARGSCRHQANF

SEQ ID NO: 197020 - protein, 14 aa, Homo sapiens
  CDR3 for beta chain variable domain of TCR clone 98510 (TRBV7-2, TRBJ1-2)
CASSQTGSTYGYTF

SEQ ID NO: 197021 - protein, 14 aa, Homo sapiens
  CDR3 for alpha chain variable domain of TCR clone 98511 (TRAV8-2, TRAJ11)
CVVSEKSGYSTLTF

SEQ ID NO: 197022 - protein, 16 aa, Homo sapiens
  CDR3 for beta chain variable domain of TCR clone 98511 (TRBV28, TRBJ2-1)
CASSSPEYPRDNEQFC

SEQ ID NO: 197023 - protein, 14 aa, Homo sapiens
  CDR3 for alpha chain variable domain of TCR clone 98512 (TRAV1-2, TRAJ6)
CAVSLSGGSYIPTF

SEQ ID NO: 197024 - protein, 16 aa, Homo sapiens
  CDR3 for beta chain variable domain of TCR clone 98512 (TRBV3-1, TRBJ2-5)
CASSPGQSNGFGTQYF

SEQ ID NO: 197025 - protein, 15 aa, Homo sapiens
  CDR3 for alpha chain variable domain of TCR clone 98513 (TRAV8-1, TRAJ37)
CAVKKGSGNTGKLTF

SEQ ID NO: 197026 - protein, 17 aa, Homo sapiens
  CDR3 for beta chain variable domain of TCR clone 98513 (TRBV12-4, TRBJ1-1)
CASSLSGFRTMNTEAFF

SEQ ID NO: 197027 - protein, 17 aa, Homo sapiens
  CDR3 for alpha chain variable domain of TCR clone 98514 (TRAV13-1, TRAJ52)
CAAGRNAGGTSYGKLTF

SEQ ID NO: 197028 - protein, 17 aa, Homo sapiens
  CDR3 for beta chain variable domain of TCR clone 98514 (TRBV7-8, TRBJ2-6)
CASSAGTGGAGANVLTF

SEQ ID NO: 197029 - protein, 13 aa, Homo sapiens
  CDR3 for alpha chain variable domain of TCR clone 98515 (TRAV13-1, TRAJ11)
CAAVLAGYSTLTF

SEQ ID NO: 197030 - protein, 17 aa, Homo sapiens
  CDR3 for beta chain variable domain of TCR clone 98515 (TRBV25-1, TRBJ2-7)
CASSDAGVVFSSYEQYF

SEQ ID NO: 197031 - protein, 15 aa, Homo sapiens
  CDR3 for alpha chain variable domain of TCR clone 98516 (TRAV38-1, TRAJ37)
CAFIFGSGNTGKLIF

SEQ ID NO: 197032 - protein, 17 aa, Homo sapiens
  CDR3 for beta chain variable domain of TCR clone 98516 (TRBV13, TRBJ2-3)
CASSLSRVAGGRNTQYF

SEQ ID NO: 197033 - protein, 16 aa, Homo sapiens
  CDR3 for alpha chain variable domain of TCR clone 98517 (TRAV12-2, TRAJ52)
CAVNNRGGTSYGKLTF

SEQ ID NO: 197034 - protein, 15 aa, Homo sapiens
  CDR3 for beta chain variable domain of TCR clone 98517 (TRBV6-5, TRBJ2-1)
CASSYDAGAGNEQFF

SEQ ID NO: 197035 - protein, 14 aa, Homo sapiens
  CDR3 for alpha chain variable domain of TCR clone 98518 (TRAV12-1, TRAJ43)
WVVNGRSNNNDMRF

SEQ ID NO: 197036 - protein, 13 aa, Homo sapiens
  CDR3 for beta chain variable domain of TCR clone 98518 (TRBV27, TRBJ1-1)
CASSLSIGAEAFF

SEQ ID NO: 197037 - protein, 14 aa, Homo sapiens
  CDR3 for alpha chain variable domain of TCR clone 98519 (TRAV1-2, TRAJ8)
CAVREDTGFQNLVF

SEQ ID NO: 197038 - protein, 16 aa, Homo sapiens
  CDR3 for beta chain variable domain of TCR clone 98519 (TRBV7-9, TRBJ2-1)
CASSDVAGGSYNEQFF

SEQ ID NO: 197039 - protein, 14 aa, Homo sapiens
  CDR3 for alpha chain variable domain of TCR clone 98520 (TRAV9-2, TRAJ39)
CALYIYNAGNMLTF

SEQ ID NO: 197040 - protein, 13 aa, Homo sapiens
  CDR3 for beta chain variable domain of TCR clone 98520 (TRBV6-3, TRBJ2-3)
CASTLQGIDTQYF

SEQ ID NO: 197041 - protein, 23 aa, Homo sapiens
  CDR3 for alpha chain variable domain of TCR clone 98521 (TRAV8-3, TRAJ38)
CAVGASNAGNNHIQNPDPAVYQL

SEQ ID NO: 197042 - protein, 15 aa, Homo sapiens
  CDR3 for beta chain variable domain of TCR clone 98521 (TRBV11-3, TRBJ1-3)
CASSLFGPSGNTMYF

SEQ ID NO: 197043 - protein, 11 aa, Homo sapiens
  CDR3 for alpha chain variable domain of TCR clone 98522 (TRAV21, TRAJ34)
CAHYNTDKLIF

SEQ ID NO: 197044 - protein, 15 aa, Homo sapiens
  CDR3 for beta chain variable domain of TCR clone 98522 (TRBV11-1, TRBJ1-3)
CASTDPRAFGNTIYF

SEQ ID NO: 197045 - protein, 14 aa, Homo sapiens
  CDR3 for alpha chain variable domain of TCR clone 98523 (TRAV8-1, TRAJ22)
CAAPSSGSARQLTF

SEQ ID NO: 197046 - protein, 13 aa, Homo sapiens
  CDR3 for beta chain variable domain of TCR clone 98523 (TRBV7-9, TRBJ1-2)
CASSLKQNYGYTF

SEQ ID NO: 197047 - protein, 14 aa, Homo sapiens
  CDR3 for alpha chain variable domain of TCR clone 98524 (TRAV13-1, TRAJ35)
CAASKGGFGNVLHC

SEQ ID NO: 197048 - protein, 14 aa, Homo sapiens
  CDR3 for beta chain variable domain of TCR clone 98524 (TRBV19, TRBJ2-1)
CASGKSTQYNEQFF

SEQ ID NO: 197049 - protein, 14 aa, Homo sapiens
  CDR3 for alpha chain variable domain of TCR clone 98525 (TRAV1-2, TRAJ8)
CAVREDTGFQKLVF

SEQ ID NO: 197050 - protein, 14 aa, Homo sapiens
  CDR3 for beta chain variable domain of TCR clone 98525 (TRBV7-3, TRBJ2-2)
CASRSGGYTGELFF

SEQ ID NO: 197051 - protein, 13 aa, Homo sapiens
  CDR3 for alpha chain variable domain of TCR clone 98526 (TRAV6, TRAJ37)
CSGGSGNTGKLIF

SEQ ID NO: 197052 - protein, 14 aa, Homo sapiens
  CDR3 for beta chain variable domain of TCR clone 98526 (TRBV19, TRBJ1-4)
CASAIEAEGEKLFF

SEQ ID NO: 197053 - protein, 12 aa, Homo sapiens
  CDR3 for alpha chain variable domain of TCR clone 98527 (TRAV35, TRAJ39)
LAPNNAGNMLTF

SEQ ID NO: 197054 - protein, 13 aa, Homo sapiens
  CDR3 for beta chain variable domain of TCR clone 98527 (TRBV27, TRBJ2-1)
CASRTLGVGEQFF

SEQ ID NO: 197055 - protein, 14 aa, Homo sapiens
  CDR3 for alpha chain variable domain of TCR clone 98528 (TRAV3, TRAJ22)
CAVRDYGSARQLTF

SEQ ID NO: 197056 - protein, 13 aa, Homo sapiens
  CDR3 for beta chain variable domain of TCR clone 98528 (TRBV11-2, TRBJ2-5)
CASGHGAKKTQYF

SEQ ID NO: 197057 - protein, 14 aa, Homo sapiens
  CDR3 for alpha chain variable domain of TCR clone 98529 (TRAV17, TRAJ35)
CATDRPGFGNVLHC

SEQ ID NO: 197058 - protein, 19 aa, Homo sapiens
  CDR3 for beta chain variable domain of TCR clone 98529 (TRBV11-3, TRBJ2-2)
CASSTRPGAKTTSTGELFF

SEQ ID NO: 197059 - protein, 13 aa, Homo sapiens
  CDR3 for alpha chain variable domain of TCR clone 98530 (TRAV35, TRAJ42)
CAGFPGSQGNLIF

SEQ ID NO: 197060 - protein, 13 aa, Homo sapiens
  CDR3 for beta chain variable domain of TCR clone 98530 (TRBV7-8, TRBJ2-3)
CASSLRGPDTQYF

SEQ ID NO: 197061 - protein, 14 aa, Homo sapiens
  CDR3 for alpha chain variable domain of TCR clone 98531 (TRAV1-2, TRAJ16)
CAVNRFSDGQKLLF

SEQ ID NO: 197062 - protein, 18 aa, Homo sapiens
  CDR3 for beta chain variable domain of TCR clone 98531 (TRBV6-5, TRBJ1-1)
CASSYSAPGGTGGTEAFF

SEQ ID NO: 197063 - protein, 11 aa, Homo sapiens
  CDR3 for alpha chain variable domain of TCR clone 98532 (TRAV3, TRAJ21)
CAVGNFNKFYF

SEQ ID NO: 197064 - protein, 16 aa, Homo sapiens
  CDR3 for beta chain variable domain of TCR clone 98532 (TRBV19, TRBJ2-1)
CASSRAGTSSYNEQFF

SEQ ID NO: 197065 - protein, 12 aa, Homo sapiens
  CDR3 for alpha chain variable domain of TCR clone 98533 (TRAV1-2, TRAJ24)
CAVGGSWGKFQF

SEQ ID NO: 197066 - protein, 15 aa, Homo sapiens
  CDR3 for beta chain variable domain of TCR clone 98533 (TRBV5-1, TRBJ2-7)
CASSLMTSGSNEQYF

SEQ ID NO: 197067 - protein, 14 aa, Homo sapiens
  CDR3 for alpha chain variable domain of TCR clone 98534 (TRAV8-4, TRAJ37)
CAVSESSNTGKLVF

SEQ ID NO: 197068 - protein, 14 aa, Homo sapiens
  CDR3 for beta chain variable domain of TCR clone 98534 (TRBV7-2, TRBJ2-5)
CASSLFGREETQYF

SEQ ID NO: 197069 - protein, 13 aa, Homo sapiens
  CDR3 for alpha chain variable domain of TCR clone 98535 (TRAV1-1, TRAJ13)
CAVNSGGYQKVTF

SEQ ID NO: 197070 - protein, 16 aa, Homo sapiens
  CDR3 for beta chain variable domain of TCR clone 98535 (TRBV4-1, TRBJ1-1)
CASSQDAGMGNTEAFF

SEQ ID NO: 197071 - protein, 13 aa, Homo sapiens
  CDR3 for alpha chain variable domain of TCR clone 98536 (TRAV21, TRAJ27)
CAARPGNAGKSTF

SEQ ID NO: 197072 - protein, 14 aa, Homo sapiens
  CDR3 for beta chain variable domain of TCR clone 98536 (TRBV11-2, TRBJ2-7)
CASSLGAGVYEQYF

SEQ ID NO: 197073 - protein, 17 aa, Homo sapiens
  CDR3 for alpha chain variable domain of TCR clone 98537 (TRAV26-1, TRAJ53)
CIVRVDDSVGSNYKLTF

SEQ ID NO: 197074 - protein, 15 aa, Homo sapiens
  CDR3 for beta chain variable domain of TCR clone 98537 (TRBV20-1, TRBJ2-7)
CSARVPAAYFYEQYF

SEQ ID NO: 197075 - protein, 14 aa, Homo sapiens
  CDR3 for alpha chain variable domain of TCR clone 98538 (TRAV12-1, TRAJ34)
CVVNLDYNTDKLIF

SEQ ID NO: 197076 - protein, 20 aa, Homo sapiens
  CDR3 for beta chain variable domain of TCR clone 98538 (TRBV7-3, TRBJ2-7)
CASSPRGLAGMGAVLRAGHQ

SEQ ID NO: 197077 - protein, 11 aa, Homo sapiens
  CDR3 for alpha chain variable domain of TCR clone 98539 (TRAV3, TRAJ21)
CAVGNFNKFYF

SEQ ID NO: 197078 - protein, 16 aa, Homo sapiens
  CDR3 for beta chain variable domain of TCR clone 98539 (TRBV7-6, TRBJ2-1)
CASSAPGPSAYNEQFF

SEQ ID NO: 197079 - protein, 15 aa, Homo sapiens
  CDR3 for alpha chain variable domain of TCR clone 98540 (TRAV17, TRAJ56)
CATEPFTGSNSKLTF

SEQ ID NO: 197080 - protein, 14 aa, Homo sapiens
  CDR3 for beta chain variable domain of TCR clone 98540 (TRBV19, TRBJ2-1)
CASPTFVLSGEQFF

SEQ ID NO: 197081 - protein, 14 aa, Homo sapiens
  CDR3 for alpha chain variable domain of TCR clone 98541 (TRAV13-1, TRAJ5)
CAASPGSRRRALTF

SEQ ID NO: 197082 - protein, 14 aa, Homo sapiens
  CDR3 for beta chain variable domain of TCR clone 98541 (TRBV11-2, TRBJ2-7)
FASSLGNSLYEQYF

SEQ ID NO: 197083 - protein, 15 aa, Homo sapiens
  CDR3 for alpha chain variable domain of TCR clone 98542 (TRAV20, TRAJ4)
CAVEGSSGGYNKLIC

SEQ ID NO: 197084 - protein, 14 aa, Homo sapiens
  CDR3 for beta chain variable domain of TCR clone 98542 (TRBV7-8, TRBJ2-7)
CASTLGGALGEQYF

SEQ ID NO: 197085 - protein, 15 aa, Homo sapiens
  CDR3 for alpha chain variable domain of TCR clone 98543 (TRAV3, TRAJ10)
CAVRDGTGGGNKLTF

SEQ ID NO: 197086 - protein, 15 aa, Homo sapiens
  CDR3 for beta chain variable domain of TCR clone 98543 (TRBV4-2, TRBJ1-4)
CASSLVRREVEKLFF

SEQ ID NO: 197087 - protein, 12 aa, Homo sapiens
  CDR3 for alpha chain variable domain of TCR clone 98544 (TRAV13-2, TRAJ23)
CAERHRGGKLIF

SEQ ID NO: 197088 - protein, 15 aa, Homo sapiens
  CDR3 for beta chain variable domain of TCR clone 98544 (TRBV11-3, TRBJ2-2)
CASSLGGRPTGELFF

SEQ ID NO: 197089 - protein, 15 aa, Homo sapiens
  CDR3 for alpha chain variable domain of TCR clone 98545 (TRAV23/DV6, TRAJ13)
CAAWPGGGGNQKVTF

SEQ ID NO: 197090 - protein, 14 aa, Homo sapiens
  CDR3 for beta chain variable domain of TCR clone 98545 (TRBV7-2, TRBJ1-1)
CASSFLTGTTEAFF

SEQ ID NO: 197091 - protein, 14 aa, Homo sapiens
  CDR3 for alpha chain variable domain of TCR clone 98546 (TRAV1-2, TRAJ8)
CAVREDTGFQKLVF

SEQ ID NO: 197092 - protein, 15 aa, Homo sapiens
  CDR3 for beta chain variable domain of TCR clone 98546 (TRBV7-9, TRBJ1-4)
CASSARTGGDEKLFF

SEQ ID NO: 197093 - protein, 13 aa, Homo sapiens
  CDR3 for alpha chain variable domain of TCR clone 98547 (TRAV2, TRAJ47)
CAVDREYGNKLVF

SEQ ID NO: 197094 - protein, 17 aa, Homo sapiens
  CDR3 for beta chain variable domain of TCR clone 98547 (TRBV15, TRBJ1-5)
CATSSVKGIYSNQPQHF

SEQ ID NO: 197095 - protein, 14 aa, Homo sapiens
  CDR3 for alpha chain variable domain of TCR clone 98548 (TRAV13-1, TRAJ12)
CAARYMDSSYKLIF

SEQ ID NO: 197096 - protein, 13 aa, Homo sapiens
  CDR3 for beta chain variable domain of TCR clone 98548 (TRBV2, TRBJ2-5)
CASSDGIQETQYF

SEQ ID NO: 197097 - protein, 17 aa, Homo sapiens
  CDR3 for alpha chain variable domain of TCR clone 98549 (TRAV3, TRAJ6)
CAVRDGPRAGGSYIPTF

SEQ ID NO: 197098 - protein, 15 aa, Homo sapiens
  CDR3 for beta chain variable domain of TCR clone 98549 (TRBV10-1, TRBJ2-3)
CASSATSGGFDTQYF

SEQ ID NO: 197099 - protein, 11 aa, Homo sapiens
  CDR3 for alpha chain variable domain of TCR clone 98550 (TRAV12-2, TRAJ39)
CAVNNMLTFGG

SEQ ID NO: 197100 - protein, 15 aa, Homo sapiens
  CDR3 for beta chain variable domain of TCR clone 98550 (TRBV20-1, TRBJ2-7)
CSARDRVSGMDEQYF

SEQ ID NO: 197101 - protein, 12 aa, Homo sapiens
  CDR3 for alpha chain variable domain of TCR clone 98551 (TRAV13-2, TRAJ8)
CAPWLGFQKLVF

SEQ ID NO: 197102 - protein, 18 aa, Homo sapiens
  CDR3 for beta chain variable domain of TCR clone 98551 (TRBV11-2, TRBJ2-3)
CASSLGGATRGAPNTQYF

SEQ ID NO: 197103 - protein, 13 aa, Homo sapiens
  CDR3 for alpha chain variable domain of TCR clone 98552 (TRAV12-2, TRAJ6)
WGVTGGGSYIPTF

SEQ ID NO: 197104 - protein, 13 aa, Homo sapiens
  CDR3 for beta chain variable domain of TCR clone 98552 (TRBV10-2, TRBJ2-7)
CASGASGGYEQYF

SEQ ID NO: 197105 - protein, 15 aa, Homo sapiens
  CDR3 for alpha chain variable domain of TCR clone 98553 (TRAV9-2, TRAJ49)
CALSPPDHTGNQVYF

SEQ ID NO: 197106 - protein, 14 aa, Homo sapiens
  CDR3 for beta chain variable domain of TCR clone 98553 (TRBV12-4, TRBJ1-1)
CASSLGTGGTEAFF

SEQ ID NO: 197107 - protein, 14 aa, Homo sapiens
  CDR3 for alpha chain variable domain of TCR clone 98554 (TRAV1-2, TRAJ16)
CAGNRFSDGQKLLF

SEQ ID NO: 197108 - protein, 14 aa, Homo sapiens
  CDR3 for beta chain variable domain of TCR clone 98554 (TRBV25-1, TRBJ1-1)
CASTHLGGNTEAFF

SEQ ID NO: 197109 - protein, 18 aa, Homo sapiens
  CDR3 for alpha chain variable domain of TCR clone 98555 (TRAV17, TRAJ45)
CATSLDLSSGGGADGLTF

SEQ ID NO: 197110 - protein, 15 aa, Homo sapiens
  CDR3 for beta chain variable domain of TCR clone 98555 (TRBV11-2, TRBJ2-1)
CASSKNRGLIYEQFF

SEQ ID NO: 197111 - protein, 14 aa, Homo sapiens
  CDR3 for alpha chain variable domain of TCR clone 98556 (TRAV1-1, TRAJ33)
CAVRPDDSNYQLIW

SEQ ID NO: 197112 - protein, 15 aa, Homo sapiens
  CDR3 for beta chain variable domain of TCR clone 98556 (TRBV20-1, TRBJ2-1)
CSARSPGGPGNEQFF

SEQ ID NO: 197113 - protein, 15 aa, Homo sapiens
  CDR3 for alpha chain variable domain of TCR clone 98557 (TRAV27, TRAJ38)
CAARRNAGNNRKLIW

SEQ ID NO: 197114 - protein, 14 aa, Homo sapiens
  CDR3 for beta chain variable domain of TCR clone 98557 (TRBV19, TRBJ2-1)
CASPTSVLSGEQFF

SEQ ID NO: 197115 - protein, 13 aa, Homo sapiens
  CDR3 for alpha chain variable domain of TCR clone 98558 (TRAV12-3, TRAJ13)
CAMSSGGYQKVTF

SEQ ID NO: 197116 - protein, 16 aa, Homo sapiens
  CDR3 for beta chain variable domain of TCR clone 98558 (TRBV4-1, TRBJ2-7)
CASSRGDMLNSYEQYF

SEQ ID NO: 197117 - protein, 14 aa, Homo sapiens
  CDR3 for alpha chain variable domain of TCR clone 98559 (TRAV12-2, TRAJ17)
CAALFKAAGNNLTF

SEQ ID NO: 197118 - protein, 16 aa, Homo sapiens
  CDR3 for beta chain variable domain of TCR clone 98559 (TRBV20-1, TRBJ2-2)
CSASASGIPGAGELFF

SEQ ID NO: 197119 - protein, 23 aa, Homo sapiens
  CDR3 for alpha chain variable domain of TCR clone 98560 (TRAV26-1, TRAJ38)
CIADNAGNNHIQNPDPAVYQLRD

SEQ ID NO: 197120 - protein, 12 aa, Homo sapiens
  CDR3 for beta chain variable domain of TCR clone 98560 (TRBV11-2, TRBJ2-2)
CASRLGGGELFF

SEQ ID NO: 197121 - protein, 15 aa, Homo sapiens
  CDR3 for alpha chain variable domain of TCR clone 98561 (TRAV27, TRAJ28)
CAGAYSGAGSYQLTF

SEQ ID NO: 197122 - protein, 17 aa, Homo sapiens
  CDR3 for beta chain variable domain of TCR clone 98561 (TRBV7-8, TRBJ2-6)
CASSAGTGGAGANVLTF

SEQ ID NO: 197123 - protein, 14 aa, Homo sapiens
  CDR3 for alpha chain variable domain of TCR clone 98562 (TRAV8-1, TRAJ5)
CAVSMDTGRRALTF

SEQ ID NO: 197124 - protein, 17 aa, Homo sapiens
  CDR3 for beta chain variable domain of TCR clone 98562 (TRBV28, TRBJ2-3)
CASSPTPAGGRVDTQYF

SEQ ID NO: 197125 - protein, 13 aa, Homo sapiens
  CDR3 for alpha chain variable domain of TCR clone 98563 (TRAV1-1, TRAJ9)
CAAKNTGGFKTIL

SEQ ID NO: 197126 - protein, 17 aa, Homo sapiens
  CDR3 for beta chain variable domain of TCR clone 98563 (TRBV13, TRBJ2-3)
CASSLSRVAGGRNTQYF

SEQ ID NO: 197127 - protein, 11 aa, Homo sapiens
  CDR3 for alpha chain variable domain of TCR clone 98564 (TRAV2, TRAJ20)
CAVVHDYKLSF

SEQ ID NO: 197128 - protein, 17 aa, Homo sapiens
  CDR3 for beta chain variable domain of TCR clone 98564 (TRBV28, TRBJ1-1)
CASSLSGTGYENTEAFF

SEQ ID NO: 197129 - protein, 17 aa, Homo sapiens
  CDR3 for alpha chain variable domain of TCR clone 98565 (TRAV3, TRAJ38)
CAVRDCLNAGNNRKPIW

SEQ ID NO: 197130 - protein, 15 aa, Homo sapiens
  CDR3 for beta chain variable domain of TCR clone 98565 (TRBV27, TRBJ2-1)
CASSNGGGSSNEQFF

SEQ ID NO: 197131 - protein, 18 aa, Homo sapiens
  CDR3 for alpha chain variable domain of TCR clone 98566 (TRAV16, TRAJ45)
CAQASYPSSGGGADGLTF

SEQ ID NO: 197132 - protein, 14 aa, Homo sapiens
  CDR3 for beta chain variable domain of TCR clone 98566 (TRBV19, TRBJ2-1)
CASPTFVLSGEQFF

SEQ ID NO: 197133 - protein, 14 aa, Homo sapiens
  CDR3 for alpha chain variable domain of TCR clone 98567 (TRAV26-1, TRAJ38)
CIADNAGNNRKLIW

SEQ ID NO: 197134 - protein, 17 aa, Homo sapiens
  CDR3 for beta chain variable domain of TCR clone 98567 (TRBV7-9, TRBJ2-3)
CASSPTVAGDLTDTQYC

SEQ ID NO: 197135 - protein, 11 aa, Homo sapiens
  CDR3 for alpha chain variable domain of TCR clone 98568 (TRAV13-2, TRAJ20)
CADSNDYKLSF

SEQ ID NO: 197136 - protein, 15 aa, Homo sapiens
  CDR3 for beta chain variable domain of TCR clone 98568 (TRBV4-1, TRBJ1-4)
CASSDTGGTNENLFF

SEQ ID NO: 197137 - protein, 14 aa, Homo sapiens
  CDR3 for alpha chain variable domain of TCR clone 98569 (TRAV1-2, TRAJ16)
CAVNRFSDGQKLLF

SEQ ID NO: 197138 - protein, 17 aa, Homo sapiens
  CDR3 for beta chain variable domain of TCR clone 98569 (TRBV5-1, TRBJ1-1)
CASRPIRTGGVNTEAFF

SEQ ID NO: 197139 - protein, 11 aa, Homo sapiens
  CDR3 for alpha chain variable domain of TCR clone 98570 (TRAV2, TRAJ13)
CASGGYQKVTF

SEQ ID NO: 197140 - protein, 18 aa, Homo sapiens
  CDR3 for beta chain variable domain of TCR clone 98570 (TRBV19, TRBJ2-6)
CASIGPTSGGSGANDLTF

SEQ ID NO: 197141 - protein, 11 aa, Homo sapiens
  CDR3 for alpha chain variable domain of TCR clone 98571 (TRAV1-2, TRAJ31)
CAVNNNARLMF

SEQ ID NO: 197142 - protein, 15 aa, Homo sapiens
  CDR3 for beta chain variable domain of TCR clone 98571 (TRBV27, TRBJ2-1)
CASSNGGGSSNEQFF

SEQ ID NO: 197143 - protein, 16 aa, Homo sapiens
  CDR3 for alpha chain variable domain of TCR clone 98572 (TRAV35, TRAJ28)
CAGQRYSGARSYQLTF

SEQ ID NO: 197144 - protein, 13 aa, Homo sapiens
  CDR3 for beta chain variable domain of TCR clone 98572 (TRBV19, TRBJ1-2)
CASSQGQVYGYTF

SEQ ID NO: 197145 - protein, 12 aa, Homo sapiens
  CDR3 for alpha chain variable domain of TCR clone 98573 (TRAV21, TRAJ33)
CAKMDSNYQLIW

SEQ ID NO: 197146 - protein, 14 aa, Homo sapiens
  CDR3 for beta chain variable domain of TCR clone 98573 (TRBV7-2, TRBJ1-1)
CASSFLTGTTEAFF

SEQ ID NO: 197147 - protein, 13 aa, Homo sapiens
  CDR3 for alpha chain variable domain of TCR clone 98574 (TRAV8-3, TRAJ44)
CAVAPGTASKLTF

SEQ ID NO: 197148 - protein, 14 aa, Homo sapiens
  CDR3 for beta chain variable domain of TCR clone 98574 (TRBV11-2, TRBJ2-3)
CASSRLARTDTQYF

SEQ ID NO: 197149 - protein, 14 aa, Homo sapiens
  CDR3 for alpha chain variable domain of TCR clone 98575 (TRAV38-1, TRAJ45)
CASHSGGGADGLPF

SEQ ID NO: 197150 - protein, 16 aa, Homo sapiens
  CDR3 for beta chain variable domain of TCR clone 98575 (TRBV27, TRBJ2-2)
CASSFRGLVRTGELFF

SEQ ID NO: 197151 - protein, 14 aa, Homo sapiens
  CDR3 for alpha chain variable domain of TCR clone 98576 (TRAV22, TRAJ40)
CAVAPTSGTYKYIF

SEQ ID NO: 197152 - protein, 16 aa, Homo sapiens
  CDR3 for beta chain variable domain of TCR clone 98576 (TRBV5-1, TRBJ2-7)
CASSFTTGTSLVEQYF

SEQ ID NO: 197153 - protein, 13 aa, Homo sapiens
  CDR3 for alpha chain variable domain of TCR clone 98577 (TRAV23/DV6, TRAJ57)
ATLSQGGSEKLVF

SEQ ID NO: 197154 - protein, 14 aa, Homo sapiens
  CDR3 for beta chain variable domain of TCR clone 98577 (TRBV25-1, TRBJ1-1)
CASTHLGGNTEAFF

SEQ ID NO: 197155 - protein, 13 aa, Homo sapiens
  CDR3 for alpha chain variable domain of TCR clone 98578 (TRAV20, TRAJ6)
CAVSAGGSYIPTF

SEQ ID NO: 197156 - protein, 14 aa, Homo sapiens
  CDR3 for beta chain variable domain of TCR clone 98578 (TRBV7-3, TRBJ1-1)
CASSPTGGVSEAFF

SEQ ID NO: 197157 - protein, 16 aa, Homo sapiens
  CDR3 for alpha chain variable domain of TCR clone 98579 (TRAV14/DV4, TRAJ53)
CAMREGGGGSNYKLTF

SEQ ID NO: 197158 - protein, 13 aa, Homo sapiens
  CDR3 for beta chain variable domain of TCR clone 98579 (TRBV5-4, TRBJ2-5)
CASSPVSQETQYF

SEQ ID NO: 197159 - protein, 22 aa, Homo sapiens
  CDR3 for alpha chain variable domain of TCR clone 98580 (TRAV27, TRAJ41)
CAVRTQIPDIQNPDPALYQLRD

SEQ ID NO: 197160 - protein, 16 aa, Homo sapiens
  CDR3 for beta chain variable domain of TCR clone 98580 (TRBV5-1, TRBJ2-3)
CASSLGLAVYTDTQYF

SEQ ID NO: 197161 - protein, 16 aa, Homo sapiens
  CDR3 for alpha chain variable domain of TCR clone 98581 (TRAV22, TRAJ45)
CAVERGKRGGADGLTF

SEQ ID NO: 197162 - protein, 13 aa, Homo sapiens
  CDR3 for beta chain variable domain of TCR clone 98581 (TRBV11-2, TRBJ2-1)
CASSLDLVNEQFF

SEQ ID NO: 197163 - protein, 14 aa, Homo sapiens
  CDR3 for alpha chain variable domain of TCR clone 98582 (TRAV12-3, TRAJ10)
SHLPLTGVGNKLTF

SEQ ID NO: 197164 - protein, 12 aa, Homo sapiens
  CDR3 for beta chain variable domain of TCR clone 98582 (TRBV11-2, TRBJ2-2)
CASSLGGGELFF

SEQ ID NO: 197165 - protein, 12 aa, Homo sapiens
  CDR3 for alpha chain variable domain of TCR clone 98583 (TRAV1-1, TRAJ16)
CAEMARSCSLQG

SEQ ID NO: 197166 - protein, 14 aa, Homo sapiens
  CDR3 for beta chain variable domain of TCR clone 98583 (TRBV7-3, TRBJ2-1)
CASSLAGGTNEQFF

SEQ ID NO: 197167 - protein, 13 aa, Homo sapiens
  CDR3 for alpha chain variable domain of TCR clone 98584 (TRAV13-1, TRAJ39)
CSKYSNAGNMLTF

SEQ ID NO: 197168 - protein, 18 aa, Homo sapiens
  CDR3 for beta chain variable domain of TCR clone 98584 (TRBV10-2, TRBJ2-2)
CISAPAVHRQADAGGLFF

SEQ ID NO: 197169 - protein, 13 aa, Homo sapiens
  CDR3 for alpha chain variable domain of TCR clone 98585 (TRAV8-3, TRAJ28)
CAVGAVGSYQLTF

SEQ ID NO: 197170 - protein, 13 aa, Homo sapiens
  CDR3 for beta chain variable domain of TCR clone 98585 (TRBV19, TRBJ2-7)
CASRKAGGSEQYF

SEQ ID NO: 197171 - protein, 12 aa, Homo sapiens
  CDR3 for alpha chain variable domain of TCR clone 98586 (TRAV12-3, TRAJ40)
CAMSSGTYKYIF

SEQ ID NO: 197172 - protein, 15 aa, Homo sapiens
  CDR3 for beta chain variable domain of TCR clone 98586 (TRBV7-3, TRBJ2-2)
CASSETGEGTGELFF

SEQ ID NO: 197173 - protein, 14 aa, Homo sapiens
  CDR3 for alpha chain variable domain of TCR clone 98587 (TRAV13-1, TRAJ48)
CAASRSFGNEKLTF

SEQ ID NO: 197174 - protein, 16 aa, Homo sapiens
  CDR3 for beta chain variable domain of TCR clone 98587 (TRBV10-3, TRBJ2-1)
CAISGVGDGGGGEQFF

SEQ ID NO: 197175 - protein, 11 aa, Homo sapiens
  CDR3 for alpha chain variable domain of TCR clone 98588 (TRAV21, TRAJ34)
CAVTNTDKLIF

SEQ ID NO: 197176 - protein, 12 aa, Homo sapiens
  CDR3 for beta chain variable domain of TCR clone 98588 (TRBV11-2, TRBJ2-2)
CASSLPTGELFF

SEQ ID NO: 197177 - protein, 14 aa, Homo sapiens
  CDR3 for alpha chain variable domain of TCR clone 98589 (TRAV12-3, TRAJ10)
SHLPLTGGGNKLTF

SEQ ID NO: 197178 - protein, 14 aa, Homo sapiens
  CDR3 for beta chain variable domain of TCR clone 98589 (TRBV11-3, TRBJ2-7)
CASSPAVPPYEQYF

SEQ ID NO: 197179 - protein, 12 aa, Homo sapiens
  CDR3 for alpha chain variable domain of TCR clone 98590 (TRAV2, TRAJ31)
CAVEDNNARLMF

SEQ ID NO: 197180 - protein, 16 aa, Homo sapiens
  CDR3 for beta chain variable domain of TCR clone 98590 (TRBV10-3, TRBJ2-1)
CAISGVWDGGGGEQFF

SEQ ID NO: 197181 - protein, 13 aa, Homo sapiens
  CDR3 for alpha chain variable domain of TCR clone 98591 (TRAV26-1, TRAJ48)
FIVRVVGDEKLTF

SEQ ID NO: 197182 - protein, 19 aa, Homo sapiens
  CDR3 for beta chain variable domain of TCR clone 98591 (TRBV11-3, TRBJ2-2)
CASSTRPGAKTTNTGELFF

SEQ ID NO: 197183 - protein, 15 aa, Homo sapiens
  CDR3 for alpha chain variable domain of TCR clone 98592 (TRAV17, TRAJ37)
CATDGGSSNTGKLIF

SEQ ID NO: 197184 - protein, 13 aa, Homo sapiens
  CDR3 for beta chain variable domain of TCR clone 98592 (TRBV19, TRBJ1-2)
CASSVPGQDGYTF

SEQ ID NO: 197185 - protein, 11 aa, Homo sapiens
  CDR3 for alpha chain variable domain of TCR clone 98593 (TRAV3, TRAJ21)
CAVGNVNKFYF

SEQ ID NO: 197186 - protein, 15 aa, Homo sapiens
  CDR3 for beta chain variable domain of TCR clone 98593 (TRBV19, TRBJ1-2)
CASSVGQVLNYGYTF

SEQ ID NO: 197187 - protein, 16 aa, Homo sapiens
  CDR3 for alpha chain variable domain of TCR clone 98594 (TRAV23/DV6, TRAJ9)
FAASIGGNTGGFKTIF

SEQ ID NO: 197188 - protein, 14 aa, Homo sapiens
  CDR3 for beta chain variable domain of TCR clone 98594 (TRBV9, TRBJ2-7)
CASSVGVGSYEQYF

SEQ ID NO: 197189 - protein, 14 aa, Homo sapiens
  CDR3 for alpha chain variable domain of TCR clone 98595 (TRAV26-1, TRAJ22)
CIVRVYGSARHLTF

SEQ ID NO: 197190 - protein, 17 aa, Homo sapiens
  CDR3 for beta chain variable domain of TCR clone 98595 (TRBV7-3, TRBJ2-3)
CASSPGGLAGFGDTQYF

SEQ ID NO: 197191 - protein, 13 aa, Homo sapiens
  CDR3 for alpha chain variable domain of TCR clone 98596 (TRAV12-2, TRAJ13)
CAVTAGGYQKVTF

SEQ ID NO: 197192 - protein, 15 aa, Homo sapiens
  CDR3 for beta chain variable domain of TCR clone 98596 (TRBV7-2, TRBJ1-2)
CASSLVSGGDYGYTF

SEQ ID NO: 197193 - protein, 15 aa, Homo sapiens
  CDR3 for alpha chain variable domain of TCR clone 98597 (TRAV13-1, TRAJ17)
CAASIEKAAGNKLTF

SEQ ID NO: 197194 - protein, 14 aa, Homo sapiens
  CDR3 for beta chain variable domain of TCR clone 98597 (TRBV4-1, TRBJ2-2)
CASSQAVNTGELFF

SEQ ID NO: 197195 - protein, 15 aa, Homo sapiens
  CDR3 for alpha chain variable domain of TCR clone 98598 (TRAV8-3, TRAJ45)
CAPSYSGGGADGLTF

SEQ ID NO: 197196 - protein, 13 aa, Homo sapiens
  CDR3 for beta chain variable domain of TCR clone 98598 (TRBV10-3, TRBJ2-7)
CASKLSVSYEQYF

SEQ ID NO: 197197 - protein, 14 aa, Homo sapiens
  CDR3 for alpha chain variable domain of TCR clone 98599 (TRAV12-2, TRAJ17)
CAVLFKAAGNKLTL

SEQ ID NO: 197198 - protein, 17 aa, Homo sapiens
  CDR3 for beta chain variable domain of TCR clone 98599 (TRBV20-1, TRBJ2-2)
CSASGSGQGGVTGELFF

SEQ ID NO: 197199 - protein, 16 aa, Homo sapiens
  CDR3 for alpha chain variable domain of TCR clone 98600 (TRAV12-2, TRAJ43)
CAGDDMRFGAGTRLTV

SEQ ID NO: 197200 - protein, 15 aa, Homo sapiens
  CDR3 for beta chain variable domain of TCR clone 98600 (TRBV4-1, TRBJ1-4)
CASSDTGGTNEKLFF

SEQ ID NO: 197201 - protein, 14 aa, Homo sapiens
  CDR3 for alpha chain variable domain of TCR clone 98601 (TRAV1-2, TRAJ16)
CAVNRFSDGQKLLF

SEQ ID NO: 197202 - protein, 15 aa, Homo sapiens
  CDR3 for beta chain variable domain of TCR clone 98601 (TRBV20-1, TRBJ2-7)
CSARDRVSGMDEKYF

SEQ ID NO: 197203 - protein, 12 aa, Homo sapiens
  CDR3 for alpha chain variable domain of TCR clone 98602 (TRAV21, TRAJ3)
CCFYSSASKIIF

SEQ ID NO: 197204 - protein, 18 aa, Homo sapiens
  CDR3 for beta chain variable domain of TCR clone 98602 (TRBV11-2, TRBJ2-7)
CASSWRTVQTGQSYEQYF

SEQ ID NO: 197205 - protein, 17 aa, Homo sapiens
  CDR3 for alpha chain variable domain of TCR clone 98603 (TRAV3, TRAJ38)
CAVRDCLNAGNNRKLIW

SEQ ID NO: 197206 - protein, 15 aa, Homo sapiens
  CDR3 for beta chain variable domain of TCR clone 98603 (TRBV7-9, TRBJ1-1)
CASSLLEQGGTEAFF

SEQ ID NO: 197207 - protein, 13 aa, Homo sapiens
  CDR3 for alpha chain variable domain of TCR clone 98604 (TRAV20, TRAJ37)
CAGCSSNTGKLIF

SEQ ID NO: 197208 - protein, 10 aa, Homo sapiens
  CDR3 for beta chain variable domain of TCR clone 98604 (TRBV12-4, TRBJ2-3)
CSTATDTQYF

SEQ ID NO: 197209 - protein, 15 aa, Homo sapiens
  CDR3 for alpha chain variable domain of TCR clone 98605 (TRAV12-1, TRAJ5)
CVVNMLETGRRALTF

SEQ ID NO: 197210 - protein, 13 aa, Homo sapiens
  CDR3 for beta chain variable domain of TCR clone 98605 (TRBV14, TRBJ1-5)
CASSQDRRGTQHF

SEQ ID NO: 197211 - protein, 18 aa, Homo sapiens
  CDR3 for alpha chain variable domain of TCR clone 98606 (TRAV13-1, TRAJ52)
CAAKNPNAGGTSYGKLTF

SEQ ID NO: 197212 - protein, 13 aa, Homo sapiens
  CDR3 for beta chain variable domain of TCR clone 98606 (TRBV2, TRBJ2-7)
CASSVGGSGEQYF

SEQ ID NO: 197213 - protein, 15 aa, Homo sapiens
  CDR3 for alpha chain variable domain of TCR clone 98607 (TRAV26-1, TRAJ44)
CIVRANTATASKLTF

SEQ ID NO: 197214 - protein, 16 aa, Homo sapiens
  CDR3 for beta chain variable domain of TCR clone 98607 (TRBV7-7, TRBJ2-1)
CASSLASGTSYNEQFF

SEQ ID NO: 197215 - protein, 13 aa, Homo sapiens
  CDR3 for alpha chain variable domain of TCR clone 98608 (TRAV16, TRAJ26)
CITVLCLGQNFVF

SEQ ID NO: 197216 - protein, 12 aa, Homo sapiens
  CDR3 for beta chain variable domain of TCR clone 98608 (TRBV11-2, TRBJ2-1)
CASSPGNNDQFF

SEQ ID NO: 197217 - protein, 12 aa, Homo sapiens
  CDR3 for alpha chain variable domain of TCR clone 98609 (TRAV12-3, TRAJ17)
CAMTLTGNKLTF

SEQ ID NO: 197218 - protein, 16 aa, Homo sapiens
  CDR3 for beta chain variable domain of TCR clone 98609 (TRBV12-4, TRBJ2-5)
CASSFFGRGRQETQYF

SEQ ID NO: 197219 - protein, 16 aa, Homo sapiens
  CDR3 for alpha chain variable domain of TCR clone 98610 (TRAV3, TRAJ37)
CAVRIRGSGNTGKLIF

SEQ ID NO: 197220 - protein, 11 aa, Homo sapiens
  CDR3 for beta chain variable domain of TCR clone 98610 (TRBV11-2, TRBJ2-2)
CASSLPGELFF

SEQ ID NO: 197221 - protein, 14 aa, Homo sapiens
  CDR3 for alpha chain variable domain of TCR clone 98611 (TRAV35, TRAJ13)
CAGSPSGGYQKVTF

SEQ ID NO: 197222 - protein, 14 aa, Homo sapiens
  CDR3 for beta chain variable domain of TCR clone 98611 (TRBV12-4, TRBJ1-1)
CASSFDRVNTEAFF

SEQ ID NO: 197223 - protein, 15 aa, Homo sapiens
  CDR3 for alpha chain variable domain of TCR clone 98612 (TRAV12-1, TRAJ9)
CVVSFGDTGGVKTIF

SEQ ID NO: 197224 - protein, 15 aa, Homo sapiens
  CDR3 for beta chain variable domain of TCR clone 98612 (TRBV20-1, TRBJ2-7)
CSARDRVSGMDEQYF

SEQ ID NO: 197225 - protein, 14 aa, Homo sapiens
  CDR3 for alpha chain variable domain of TCR clone 98613 (TRAV12-3, TRAJ10)
SHLPLTGGGNKLTF

SEQ ID NO: 197226 - protein, 14 aa, Homo sapiens
  CDR3 for beta chain variable domain of TCR clone 98613 (TRBV12-4, TRBJ1-2)
CASSPPGPGGGYTF

SEQ ID NO: 197227 - protein, 14 aa, Homo sapiens
  CDR3 for alpha chain variable domain of TCR clone 98614 (TRAV26-1, TRAJ40)
CIVRLLSGTYKYIF

SEQ ID NO: 197228 - protein, 15 aa, Homo sapiens
  CDR3 for beta chain variable domain of TCR clone 98614 (TRBV7-9, TRBJ1-6)
CASSSPGRGNSPLHF

SEQ ID NO: 197229 - protein, 14 aa, Homo sapiens
  CDR3 for alpha chain variable domain of TCR clone 98615 (TRAV26-1, TRAJ17)
CIVRVEAAGNKLTF

SEQ ID NO: 197230 - protein, 13 aa, Homo sapiens
  CDR3 for beta chain variable domain of TCR clone 98615 (TRBV25-1, TRBJ2-5)
CASSESGRETQYF

SEQ ID NO: 197231 - protein, 15 aa, Homo sapiens
  CDR3 for alpha chain variable domain of TCR clone 98616 (TRAV3, TRAJ5)
CAVRDLDTGRRASTF

SEQ ID NO: 197232 - protein, 13 aa, Homo sapiens
  CDR3 for beta chain variable domain of TCR clone 98616 (TRBV12-4, TRBJ2-7)
CASSPTETYEQYF

SEQ ID NO: 197233 - protein, 13 aa, Homo sapiens
  CDR3 for alpha chain variable domain of TCR clone 98617 (TRAV1-2, TRAJ9)
CAALNTGGFKTIF

SEQ ID NO: 197234 - protein, 14 aa, Homo sapiens
  CDR3 for beta chain variable domain of TCR clone 98617 (TRBV19, TRBJ2-2)
CASTVTANTGELFF

SEQ ID NO: 197235 - protein, 11 aa, Homo sapiens
  CDR3 for alpha chain variable domain of TCR clone 98618 (TRAV35, TRAJ30)
CAPGGDYKIIF

SEQ ID NO: 197236 - protein, 16 aa, Homo sapiens
  CDR3 for beta chain variable domain of TCR clone 98618 (TRBV7-6, TRBJ2-1)
CIAVPAAWGGADEQFF

SEQ ID NO: 197237 - protein, 16 aa, Homo sapiens
  CDR3 for alpha chain variable domain of TCR clone 98619 (TRAV30, TRAJ48)
CGTEIKPNFGNEKLTF

SEQ ID NO: 197238 - protein, 17 aa, Homo sapiens
  CDR3 for beta chain variable domain of TCR clone 98619 (TRBV27, TRBJ2-1)
CASSSERGGQSADEQFF

SEQ ID NO: 197239 - protein, 12 aa, Homo sapiens
  CDR3 for alpha chain variable domain of TCR clone 98620 (TRAV12-2, TRAJ8)
CAVNTGFQKLVF

SEQ ID NO: 197240 - protein, 18 aa, Homo sapiens
  CDR3 for beta chain variable domain of TCR clone 98620 (TRBV18, TRBJ1-3)
CASSPRGGAGPSGNTIYF

SEQ ID NO: 197241 - protein, 14 aa, Homo sapiens
  CDR3 for alpha chain variable domain of TCR clone 98621 (TRAV20, TRAJ56)
CAVQIGGANSKLTF

SEQ ID NO: 197242 - protein, 14 aa, Homo sapiens
  CDR3 for beta chain variable domain of TCR clone 98621 (TRBV20-1, TRBJ2-7)
CSAKRGRSSYEQYF

SEQ ID NO: 197243 - protein, 18 aa, Homo sapiens
  CDR3 for alpha chain variable domain of TCR clone 98622 (TRAV21, TRAJ52)
CAVRPSPAGGTSYGKLTF

SEQ ID NO: 197244 - protein, 15 aa, Homo sapiens
  CDR3 for beta chain variable domain of TCR clone 98622 (TRBV7-2, TRBJ2-7)
CASSLGGAKSGEQYF

SEQ ID NO: 197245 - protein, 15 aa, Homo sapiens
  CDR3 for alpha chain variable domain of TCR clone 98623 (TRAV12-3, TRAJ49)
CAMAVTPNTGNQFYF

SEQ ID NO: 197246 - protein, 18 aa, Homo sapiens
  CDR3 for beta chain variable domain of TCR clone 98623 (TRBV4-1, TRBJ1-5)
CASSQDPRGQGLNQPQHY

SEQ ID NO: 197247 - protein, 13 aa, Homo sapiens
  CDR3 for alpha chain variable domain of TCR clone 98624 (TRAV12-1, TRAJ33)
CGDAPDSNYQLIW

SEQ ID NO: 197248 - protein, 15 aa, Homo sapiens
  CDR3 for beta chain variable domain of TCR clone 98624 (TRBV27, TRBJ2-1)
CASSNGGWSSNEQFF

SEQ ID NO: 197249 - protein, 13 aa, Homo sapiens
  CDR3 for alpha chain variable domain of TCR clone 98625 (TRAV30, TRAJ24)
CGTVTDSWGKLQF

SEQ ID NO: 197250 - protein, 16 aa, Homo sapiens
  CDR3 for beta chain variable domain of TCR clone 98625 (TRBV7-3, TRBJ2-2)
CASSLRRGTLSGELFF

SEQ ID NO: 197251 - protein, 14 aa, Homo sapiens
  CDR3 for alpha chain variable domain of TCR clone 98626 (TRAV1-2, TRAJ16)
CAVNRFSDGQKLLF

SEQ ID NO: 197252 - protein, 18 aa, Homo sapiens
  CDR3 for beta chain variable domain of TCR clone 98626 (TRBV20-1, TRBJ2-3)
CSASGLAGGPGTTYTQYF

SEQ ID NO: 197253 - protein, 14 aa, Homo sapiens
  CDR3 for alpha chain variable domain of TCR clone 98627 (TRAV13-1, TRAJ44)
CAAKATGTASKLTF

SEQ ID NO: 197254 - protein, 14 aa, Homo sapiens
  CDR3 for beta chain variable domain of TCR clone 98627 (TRBV11-2, TRBJ2-7)
CASSLGAGAYEQYF

SEQ ID NO: 197255 - protein, 13 aa, Homo sapiens
  CDR3 for alpha chain variable domain of TCR clone 98628 (TRAV41, TRAJ58)
CAVEETSGSRLTF

SEQ ID NO: 197256 - protein, 16 aa, Homo sapiens
  CDR3 for beta chain variable domain of TCR clone 98628 (TRBV12-4, TRBJ1-5)
CASSRPVGGSNQPQHF

SEQ ID NO: 197257 - protein, 15 aa, Homo sapiens
  CDR3 for alpha chain variable domain of TCR clone 98629 (TRAV4, TRAJ28)
CLFIWGWELPTHFRE

SEQ ID NO: 197258 - protein, 14 aa, Homo sapiens
  CDR3 for beta chain variable domain of TCR clone 98629 (TRBV7-9, TRBJ2-5)
CASSLDTAQETQYF

SEQ ID NO: 197259 - protein, 13 aa, Homo sapiens
  CDR3 for alpha chain variable domain of TCR clone 98630 (TRAV3, TRAJ8)
CAVRFTGFQKLVF

SEQ ID NO: 197260 - protein, 15 aa, Homo sapiens
  CDR3 for beta chain variable domain of TCR clone 98630 (TRBV20-1, TRBJ2-7)
CSASDRVSGMDEQYF

SEQ ID NO: 197261 - protein, 12 aa, Homo sapiens
  CDR3 for alpha chain variable domain of TCR clone 98631 (TRAV1-2, TRAJ33)
CAALGSNYQLIW

SEQ ID NO: 197262 - protein, 17 aa, Homo sapiens
  CDR3 for beta chain variable domain of TCR clone 98631 (TRBV13, TRBJ2-3)
CASSLSRVAGGRNTQYF

SEQ ID NO: 197263 - protein, 13 aa, Homo sapiens
  CDR3 for alpha chain variable domain of TCR clone 98632 (TRAV21, TRAJ27)
CAARPGNAGKSTF

SEQ ID NO: 197264 - protein, 13 aa, Homo sapiens
  CDR3 for beta chain variable domain of TCR clone 98632 (TRBV4-1, TRBJ2-7)
CASSQGQAYEQYF

SEQ ID NO: 197265 - protein, 19 aa, Homo sapiens
  CDR3 for alpha chain variable domain of TCR clone 98633 (TRAV2, TRAJ20)
ILQVREADAAAYRDCKLSF

SEQ ID NO: 197266 - protein, 12 aa, Homo sapiens
  CDR3 for beta chain variable domain of TCR clone 98633 (TRBV11-2, TRBJ2-2)
CASSLGGGELFF

SEQ ID NO: 197267 - protein, 15 aa, Homo sapiens
  CDR3 for alpha chain variable domain of TCR clone 98634 (TRAV12-1, TRAJ13)
CVVNPNSGGYQKVTF

SEQ ID NO: 197268 - protein, 15 aa, Homo sapiens
  CDR3 for beta chain variable domain of TCR clone 98634 (TRBV5-7, TRBJ2-7)
CASSLGPGRGHEQYF

SEQ ID NO: 197269 - protein, 13 aa, Homo sapiens
  CDR3 for alpha chain variable domain of TCR clone 98635 (TRAV8-3, TRAJ48)
CAVVPFGNEQLTF

SEQ ID NO: 197270 - protein, 12 aa, Homo sapiens
  CDR3 for beta chain variable domain of TCR clone 98635 (TRBV11-2, TRBJ2-2)
CASSLGGGELFF

SEQ ID NO: 197271 - protein, 12 aa, Homo sapiens
  CDR3 for alpha chain variable domain of TCR clone 98636 (TRAV12-1, TRAJ40)
CVVYSGTYKYIF

SEQ ID NO: 197272 - protein, 18 aa, Homo sapiens
  CDR3 for beta chain variable domain of TCR clone 98636 (TRBV11-2, TRBJ2-3)
CASSLGGVSRGAPNTQYF

SEQ ID NO: 197273 - protein, 12 aa, Homo sapiens
  CDR3 for alpha chain variable domain of TCR clone 98637 (TRAV12-3, TRAJ42)
CAPGGSQGNLIF

SEQ ID NO: 197274 - protein, 13 aa, Homo sapiens
  CDR3 for beta chain variable domain of TCR clone 98637 (TRBV19, TRBJ1-3)
CASRLSLGNTIYF

SEQ ID NO: 197275 - protein, 13 aa, Homo sapiens
  CDR3 for alpha chain variable domain of TCR clone 98638 (TRAV2, TRAJ40)
CAVVTSGTYKYIF

SEQ ID NO: 197276 - protein, 14 aa, Homo sapiens
  CDR3 for beta chain variable domain of TCR clone 98638 (TRBV19, TRBJ2-3)
CASSAPRGTDTQCF

SEQ ID NO: 197277 - protein, 13 aa, Homo sapiens
  CDR3 for alpha chain variable domain of TCR clone 98639 (TRAV16, TRAJ34)
CALTGYNTDKLIF

SEQ ID NO: 197278 - protein, 13 aa, Homo sapiens
  CDR3 for beta chain variable domain of TCR clone 98639 (TRBV6-1, TRBJ2-1)
CASREDVGHEQFF

SEQ ID NO: 197279 - protein, 16 aa, Homo sapiens
  CDR3 for alpha chain variable domain of TCR clone 98640 (TRAV3, TRAJ10)
CAVRDMRAEGGNKLTF

SEQ ID NO: 197280 - protein, 15 aa, Homo sapiens
  CDR3 for beta chain variable domain of TCR clone 98640 (TRBV20-1, TRBJ2-1)
CSAEGGLLAGDEQFF

SEQ ID NO: 197281 - protein, 15 aa, Homo sapiens
  CDR3 for alpha chain variable domain of TCR clone 98641 (TRAV38-2/DV8, TRAJ48)
CAYRSGGFGNEKLTF

SEQ ID NO: 197282 - protein, 16 aa, Homo sapiens
  CDR3 for beta chain variable domain of TCR clone 98641 (TRBV28, TRBJ2-7)
CASSPWVAAGDLSQYF

SEQ ID NO: 197283 - protein, 11 aa, Homo sapiens
  CDR3 for alpha chain variable domain of TCR clone 98642 (TRAV2, TRAJ13)
CASGGYQKVTF

SEQ ID NO: 197284 - protein, 14 aa, Homo sapiens
  CDR3 for beta chain variable domain of TCR clone 98642 (TRBV7-3, TRBJ2-1)
CASSLAGGTNEQLF

SEQ ID NO: 197285 - protein, 13 aa, Homo sapiens
  CDR3 for alpha chain variable domain of TCR clone 98643 (TRAV21, TRAJ20)
CAVGLRVDYKLSF

SEQ ID NO: 197286 - protein, 13 aa, Homo sapiens
  CDR3 for beta chain variable domain of TCR clone 98643 (TRBV7-2, TRBJ2-5)
CASSQTSVETQYF

SEQ ID NO: 197287 - protein, 18 aa, Homo sapiens
  CDR3 for alpha chain variable domain of TCR clone 98644 (TRAV13-1, TRAJ45)
CAAPPQEYSGGGADGLTF

SEQ ID NO: 197288 - protein, 14 aa, Homo sapiens
  CDR3 for beta chain variable domain of TCR clone 98644 (TRBV7-2, TRBJ1-1)
CASSFLTGTTEAFF

SEQ ID NO: 197289 - protein, 11 aa, Homo sapiens
  CDR3 for alpha chain variable domain of TCR clone 98645 (TRAV21, TRAJ11)
CAVNGYSTLTF

SEQ ID NO: 197290 - protein, 16 aa, Homo sapiens
  CDR3 for beta chain variable domain of TCR clone 98645 (TRBV5-1, TRBJ1-1)
CASSSGGNSLNTEAFF

SEQ ID NO: 197291 - protein, 15 aa, Homo sapiens
  CDR3 for alpha chain variable domain of TCR clone 98646 (TRAV25, TRAJ52)
CAGRPGGTSYGKLTF

SEQ ID NO: 197292 - protein, 13 aa, Homo sapiens
  CDR3 for beta chain variable domain of TCR clone 98646 (TRBV2, TRBJ2-7)
CASSVGGSGEQYF

SEQ ID NO: 197293 - protein, 15 aa, Homo sapiens
  CDR3 for alpha chain variable domain of TCR clone 98647 (TRAV8-3, TRAJ45)
CASSYSGGGADGLTF

SEQ ID NO: 197294 - protein, 13 aa, Homo sapiens
  CDR3 for beta chain variable domain of TCR clone 98647 (TRBV10-1, TRBJ2-1)
CASSAGPDNEQFF

SEQ ID NO: 197295 - protein, 14 aa, Homo sapiens
  CDR3 for alpha chain variable domain of TCR clone 98648 (TRAV39, TRAJ42)
CSVDIARSQGNLIF

SEQ ID NO: 197296 - protein, 15 aa, Homo sapiens
  CDR3 for beta chain variable domain of TCR clone 98648 (TRBV27, TRBJ2-7)
CASSLFGTGLDEQYF

SEQ ID NO: 197297 - protein, 17 aa, Homo sapiens
  CDR3 for alpha chain variable domain of TCR clone 98649 (TRAV3, TRAJ28)
CAVREAYSGAGSYQLTF

SEQ ID NO: 197298 - protein, 12 aa, Homo sapiens
  CDR3 for beta chain variable domain of TCR clone 98649 (TRBV28, TRBJ2-1)
CASSFRGNEQFF

SEQ ID NO: 197299 - protein, 13 aa, Homo sapiens
  CDR3 for alpha chain variable domain of TCR clone 98650 (TRAV12-3, TRAJ35)
CAMAIGFGNVLHC

SEQ ID NO: 197300 - protein, 15 aa, Homo sapiens
  CDR3 for beta chain variable domain of TCR clone 98650 (TRBV20-1, TRBJ2-1)
CSARRSGTYYNEQFF

SEQ ID NO: 197301 - protein, 14 aa, Homo sapiens
  CDR3 for alpha chain variable domain of TCR clone 98651 (TRAV16, TRAJ33)
CALSAMDSNYQLIW

SEQ ID NO: 197302 - protein, 12 aa, Homo sapiens
  CDR3 for beta chain variable domain of TCR clone 98651 (TRBV5-1, TRBJ1-2)
CASSQDTYGYTS

SEQ ID NO: 197303 - protein, 13 aa, Homo sapiens
  CDR3 for alpha chain variable domain of TCR clone 98652 (TRAV13-1, TRAJ9)
CAARGTGGFKTIC

SEQ ID NO: 197304 - protein, 12 aa, Homo sapiens
  CDR3 for beta chain variable domain of TCR clone 98652 (TRBV2, TRBJ2-1)
CAYGPPGNEQFF

SEQ ID NO: 197305 - protein, 16 aa, Homo sapiens
  CDR3 for alpha chain variable domain of TCR clone 98653 (TRAV30, TRAJ24)
CGTEIVDADSWGRFQF

SEQ ID NO: 197306 - protein, 15 aa, Homo sapiens
  CDR3 for beta chain variable domain of TCR clone 98653 (TRBV9, TRBJ1-6)
CASSVAGTGDSPLHF

SEQ ID NO: 197307 - protein, 14 aa, Homo sapiens
  CDR3 for alpha chain variable domain of TCR clone 98654 (TRAV35, TRAJ35)
CAGRAEALGMCCIA

SEQ ID NO: 197308 - protein, 15 aa, Homo sapiens
  CDR3 for beta chain variable domain of TCR clone 98654 (TRBV6-1, TRBJ1-5)
CASSELREGNQHQHF

SEQ ID NO: 197309 - protein, 12 aa, Homo sapiens
  CDR3 for alpha chain variable domain of TCR clone 98655 (TRAV13-1, TRAJ53)
AASGGSNYKLTF

SEQ ID NO: 197310 - protein, 14 aa, Homo sapiens
  CDR3 for beta chain variable domain of TCR clone 98655 (TRBV3-1, TRBJ2-5)
CASSQGPDQETQYF

SEQ ID NO: 197311 - protein, 13 aa, Homo sapiens
  CDR3 for alpha chain variable domain of TCR clone 98656 (TRAV12-1, TRAJ7)
CVVNMRGNNRLAF

SEQ ID NO: 197312 - protein, 14 aa, Homo sapiens
  CDR3 for beta chain variable domain of TCR clone 98656 (TRBV7-2, TRBJ1-2)
CASSQTGSTYGYTF

SEQ ID NO: 197313 - protein, 23 aa, Homo sapiens
  CDR3 for alpha chain variable domain of TCR clone 98657 (TRAV8-4, TRAJ38)
CARLNAGNNHIKNPDPAVYQLRD

SEQ ID NO: 197314 - protein, 12 aa, Homo sapiens
  CDR3 for beta chain variable domain of TCR clone 98657 (TRBV6-1, TRBJ2-7)
CASSEPLYEQYF

SEQ ID NO: 197315 - protein, 14 aa, Homo sapiens
  CDR3 for alpha chain variable domain of TCR clone 98658 (TRAV1-2, TRAJ16)
CAVNRFSDGQKLPF

SEQ ID NO: 197316 - protein, 14 aa, Homo sapiens
  CDR3 for beta chain variable domain of TCR clone 98658 (TRBV5-4, TRBJ2-7)
CASSLIGQGYEQYF

SEQ ID NO: 197317 - protein, 12 aa, Homo sapiens
  CDR3 for alpha chain variable domain of TCR clone 98659 (TRAV38-1, TRAJ20)
CAFIWDDYKLSF

SEQ ID NO: 197318 - protein, 14 aa, Homo sapiens
  CDR3 for beta chain variable domain of TCR clone 98659 (TRBV19, TRBJ2-1)
CASSMGSGATEQFF

SEQ ID NO: 197319 - protein, 16 aa, Homo sapiens
  CDR3 for alpha chain variable domain of TCR clone 98660 (TRAV3, TRAJ37)
CAVRGKGSGNTGKLIF

SEQ ID NO: 197320 - protein, 14 aa, Homo sapiens
  CDR3 for beta chain variable domain of TCR clone 98660 (TRBV18, TRBJ2-7)
CASSPRGGVYEQYF

SEQ ID NO: 197321 - protein, 15 aa, Homo sapiens
  CDR3 for alpha chain variable domain of TCR clone 98661 (TRAV17, TRAJ48)
CATDETNFGNEKLTF

SEQ ID NO: 197322 - protein, 13 aa, Homo sapiens
  CDR3 for beta chain variable domain of TCR clone 98661 (TRBV27, TRBJ1-1)
CASTQRVNTEAFF

SEQ ID NO: 197323 - protein, 11 aa, Homo sapiens
  CDR3 for alpha chain variable domain of TCR clone 98662 (TRAV12-3, TRAJ43)
CAMSVSNDMRF

SEQ ID NO: 197324 - protein, 16 aa, Homo sapiens
  CDR3 for beta chain variable domain of TCR clone 98662 (TRBV20-1, TRBJ2-1)
CSARDYLGAVYNEQFF

SEQ ID NO: 197325 - protein, 13 aa, Homo sapiens
  CDR3 for alpha chain variable domain of TCR clone 98663 (TRAV17, TRAJ5)
CAPMDTGRRALTF

SEQ ID NO: 197326 - protein, 14 aa, Homo sapiens
  CDR3 for beta chain variable domain of TCR clone 98663 (TRBV19, TRBJ2-2)
CASSGQGIAGELFF

SEQ ID NO: 197327 - protein, 14 aa, Homo sapiens
  CDR3 for alpha chain variable domain of TCR clone 98664 (TRAV17, TRAJ35)
CATDRPGFGNVLHC

SEQ ID NO: 197328 - protein, 15 aa, Homo sapiens
  CDR3 for beta chain variable domain of TCR clone 98664 (TRBV28, TRBJ2-5)
CAGSSGRVIQETQYF

SEQ ID NO: 197329 - protein, 12 aa, Homo sapiens
  CDR3 for alpha chain variable domain of TCR clone 98665 (TRAV17, TRAJ36)
CATLTGANNLFF

SEQ ID NO: 197330 - protein, 15 aa, Homo sapiens
  CDR3 for beta chain variable domain of TCR clone 98665 (TRBV19, TRBJ1-2)
CASSNKTDTNYGYTF

SEQ ID NO: 197331 - protein, 14 aa, Homo sapiens
  CDR3 for alpha chain variable domain of TCR clone 98666 (TRAV1-2, TRAJ8)
CAVRGDTGFQKLVF

SEQ ID NO: 197332 - protein, 16 aa, Homo sapiens
  CDR3 for beta chain variable domain of TCR clone 98666 (TRBV5-7, TRBJ2-5)
CASTLAPAGGRETQYF

SEQ ID NO: 197333 - protein, 14 aa, Homo sapiens
  CDR3 for alpha chain variable domain of TCR clone 98667 (TRAV20, TRAJ42)
CAVQAGGSQGTLIF

SEQ ID NO: 197334 - protein, 14 aa, Homo sapiens
  CDR3 for beta chain variable domain of TCR clone 98667 (TRBV28, TRBJ1-2)
CASRIQGANYGYTF

SEQ ID NO: 197335 - protein, 12 aa, Homo sapiens
  CDR3 for alpha chain variable domain of TCR clone 98668 (TRAV13-2, TRAJ23)
CAERHRGGKLIF

SEQ ID NO: 197336 - protein, 14 aa, Homo sapiens
  CDR3 for beta chain variable domain of TCR clone 98668 (TRBV5-7, TRBJ1-1)
CASSLAGDWTEAFF

SEQ ID NO: 197337 - protein, 14 aa, Homo sapiens
  CDR3 for alpha chain variable domain of TCR clone 98669 (TRAV17, TRAJ11)
CATDARSGYSTLTF

SEQ ID NO: 197338 - protein, 15 aa, Homo sapiens
  CDR3 for beta chain variable domain of TCR clone 98669 (TRBV10-2, TRBJ2-6)
CASSEQGTGANVLTF

SEQ ID NO: 197339 - protein, 14 aa, Homo sapiens
  CDR3 for alpha chain variable domain of TCR clone 98670 (TRAV12-2, TRAJ24)
CAVTPAYSWGKLQF

SEQ ID NO: 197340 - protein, 13 aa, Homo sapiens
  CDR3 for beta chain variable domain of TCR clone 98670 (TRBV6-4, TRBJ1-5)
CASSADLNQPQHF

SEQ ID NO: 197341 - protein, 13 aa, Homo sapiens
  CDR3 for alpha chain variable domain of TCR clone 98671 (TRAV26-1, TRAJ43)
CIVRVAFNNDMRF

SEQ ID NO: 197342 - protein, 14 aa, Homo sapiens
  CDR3 for beta chain variable domain of TCR clone 98671 (TRBV7-8, TRBJ2-7)
CASTLGGALGEQYF

SEQ ID NO: 197343 - protein, 15 aa, Homo sapiens
  CDR3 for alpha chain variable domain of TCR clone 98672 (TRAV38-1, TRAJ37)
CAFIFGSGNTDKLIF

SEQ ID NO: 197344 - protein, 12 aa, Homo sapiens
  CDR3 for beta chain variable domain of TCR clone 98672 (TRBV7-9, TRBJ2-7)
CASSLEGYEQYF

SEQ ID NO: 197345 - protein, 12 aa, Homo sapiens
  CDR3 for alpha chain variable domain of TCR clone 98673 (TRAV13-2, TRAJ16)
CAENIVGQKLLF

SEQ ID NO: 197346 - protein, 20 aa, Homo sapiens
  CDR3 for beta chain variable domain of TCR clone 98673 (TRBV7-8, TRBJ2-2)
CANSHLFPGPTIHITGELFF

SEQ ID NO: 197347 - protein, 12 aa, Homo sapiens
  CDR3 for alpha chain variable domain of TCR clone 98674 (TRAV1-2, TRAJ33)
CAALDSNYQLIW

SEQ ID NO: 197348 - protein, 13 aa, Homo sapiens
  CDR3 for beta chain variable domain of TCR clone 98674 (TRBV19, TRBJ2-7)
CASINAGGSEQYF

SEQ ID NO: 197349 - protein, 14 aa, Homo sapiens
  CDR3 for alpha chain variable domain of TCR clone 98675 (TRAV12-3, TRAJ10)
SHLPLTGGGNKLTF

SEQ ID NO: 197350 - protein, 13 aa, Homo sapiens
  CDR3 for beta chain variable domain of TCR clone 98675 (TRBV2, TRBJ2-5)
CASGTPYQETQYF

SEQ ID NO: 197351 - protein, 11 aa, Homo sapiens
  CDR3 for alpha chain variable domain of TCR clone 98676 (TRAV1-2, TRAJ20)
CAVANDYKLSF

SEQ ID NO: 197352 - protein, 14 aa, Homo sapiens
  CDR3 for beta chain variable domain of TCR clone 98676 (TRBV25-1, TRBJ1-1)
CASTHLGGNTEAFF

SEQ ID NO: 197353 - protein, 16 aa, Homo sapiens
  CDR3 for alpha chain variable domain of TCR clone 98677 (TRAV8-6, TRAJ58)
CAVSDHTETSGSRLTF

SEQ ID NO: 197354 - protein, 14 aa, Homo sapiens
  CDR3 for beta chain variable domain of TCR clone 98677 (TRBV7-2, TRBJ1-5)
CASSTRGGPQPQHF

SEQ ID NO: 197355 - protein, 12 aa, Homo sapiens
  CDR3 for alpha chain variable domain of TCR clone 98678 (TRAV8-3, TRAJ20)
CAVGANDYKLSF

SEQ ID NO: 197356 - protein, 16 aa, Homo sapiens
  CDR3 for beta chain variable domain of TCR clone 98678 (TRBV19, TRBJ2-2)
CASRSRGTGATGELFF

SEQ ID NO: 197357 - protein, 10 aa, Homo sapiens
  CDR3 for alpha chain variable domain of TCR clone 98679 (TRAV8-2, TRAJ29)
CTGGNTPPVF

SEQ ID NO: 197358 - protein, 17 aa, Homo sapiens
  CDR3 for beta chain variable domain of TCR clone 98679 (TRBV2, TRBJ2-7)
CASSQALTGWDSYEQYF

SEQ ID NO: 197359 - protein, 13 aa, Homo sapiens
  CDR3 for alpha chain variable domain of TCR clone 98680 (TRAV8-3, TRAJ43)
CAVVPYNNNDMRF

SEQ ID NO: 197360 - protein, 16 aa, Homo sapiens
  CDR3 for beta chain variable domain of TCR clone 98680 (TRBV7-2, TRBJ2-5)
RASSPFPTGGEETQYF

SEQ ID NO: 197361 - protein, 17 aa, Homo sapiens
  CDR3 for alpha chain variable domain of TCR clone 98681 (TRAV2, TRAJ22)
ILQVREADSAEQRQLTF

SEQ ID NO: 197362 - protein, 16 aa, Homo sapiens
  CDR3 for beta chain variable domain of TCR clone 98681 (TRBV2, TRBJ2-5)
CASSETQGVGEETQYF

SEQ ID NO: 197363 - protein, 14 aa, Homo sapiens
  CDR3 for alpha chain variable domain of TCR clone 98682 (TRAV12-2, TRAJ13)
CAVKKTGGYQKVTF

SEQ ID NO: 197364 - protein, 15 aa, Homo sapiens
  CDR3 for beta chain variable domain of TCR clone 98682 (TRBV19, TRBJ1-6)
CASSTQGAVGSPLLF

SEQ ID NO: 197365 - protein, 19 aa, Homo sapiens
  CDR3 for alpha chain variable domain of TCR clone 98683 (TRAV1-2, TRAJ26)
CLLPLCCERPYNYGQNFVF

SEQ ID NO: 197366 - protein, 15 aa, Homo sapiens
  CDR3 for beta chain variable domain of TCR clone 98683 (TRBV9, TRBJ1-6)
CASSVAGTGDSPLHF

SEQ ID NO: 197367 - protein, 14 aa, Homo sapiens
  CDR3 for alpha chain variable domain of TCR clone 98684 (TRAV12-3, TRAJ35)
CAMSLIGFGNVLHC

SEQ ID NO: 197368 - protein, 12 aa, Homo sapiens
  CDR3 for beta chain variable domain of TCR clone 98684 (TRBV12-4, TRBJ1-1)
RASSLAGLEAFF

SEQ ID NO: 197369 - protein, 14 aa, Homo sapiens
  CDR3 for alpha chain variable domain of TCR clone 98685 (TRAV13-2, TRAJ17)
CAENSKAAGNKLTF

SEQ ID NO: 197370 - protein, 17 aa, Homo sapiens
  CDR3 for beta chain variable domain of TCR clone 98685 (TRBV7-3, TRBJ2-3)
CASSLMKRMRGADTQYF

SEQ ID NO: 197371 - protein, 16 aa, Homo sapiens
  CDR3 for alpha chain variable domain of TCR clone 98686 (TRAV3, TRAJ37)
CAVRPHGSGNTGKLIF

SEQ ID NO: 197372 - protein, 17 aa, Homo sapiens
  CDR3 for beta chain variable domain of TCR clone 98686 (TRBV7-3, TRBJ2-3)
CASSLMKRMRGADTQYF

SEQ ID NO: 197373 - protein, 14 aa, Homo sapiens
  CDR3 for alpha chain variable domain of TCR clone 98687 (TRAV17, TRAJ43)
CATDHPYNNNDMRF

SEQ ID NO: 197374 - protein, 16 aa, Homo sapiens
  CDR3 for beta chain variable domain of TCR clone 98687 (TRBV25-1, TRBJ2-7)
CASSELTGGGIYEQYF

SEQ ID NO: 197375 - protein, 17 aa, Homo sapiens
  CDR3 for alpha chain variable domain of TCR clone 98688 (TRAV4, TRAJ18)
CLVGERSVGSTLGRLYF

SEQ ID NO: 197376 - protein, 15 aa, Homo sapiens
  CDR3 for beta chain variable domain of TCR clone 98688 (TRBV2, TRBJ2-1)
CASSELAGSYNEQFF

SEQ ID NO: 197377 - protein, 13 aa, Homo sapiens
  CDR3 for alpha chain variable domain of TCR clone 98689 (TRAV3, TRAJ33)
CAVRDRSNYQLIW

SEQ ID NO: 197378 - protein, 16 aa, Homo sapiens
  CDR3 for beta chain variable domain of TCR clone 98689 (TRBV4-2, TRBJ2-7)
CASSQDRVTSSYEQYF

SEQ ID NO: 197379 - protein, 15 aa, Homo sapiens
  CDR3 for alpha chain variable domain of TCR clone 98690 (TRAV12-1, TRAJ44)
CVVDEYTGTSSKLTF

SEQ ID NO: 197380 - protein, 14 aa, Homo sapiens
  CDR3 for beta chain variable domain of TCR clone 98690 (TRBV5-1, TRBJ1-2)
CASSLEPVNYGYTF

SEQ ID NO: 197381 - protein, 16 aa, Homo sapiens
  CDR3 for alpha chain variable domain of TCR clone 98691 (TRAV30, TRAJ24)
CGTVIVDADSWGKFQF

SEQ ID NO: 197382 - protein, 18 aa, Homo sapiens
  CDR3 for beta chain variable domain of TCR clone 98691 (TRBV7-9, TRBJ2-7)
CASSLTTSGSRTWYEQYF

SEQ ID NO: 197383 - protein, 10 aa, Homo sapiens
  CDR3 for alpha chain variable domain of TCR clone 98692 (TRAV30, TRAJ48)
CGIGNEKLTF

SEQ ID NO: 197384 - protein, 14 aa, Homo sapiens
  CDR3 for beta chain variable domain of TCR clone 98692 (TRBV7-2, TRBJ2-7)
CASSPKASFYEQYF

SEQ ID NO: 197385 - protein, 14 aa, Homo sapiens
  CDR3 for alpha chain variable domain of TCR clone 98693 (TRAV2, TRAJ22)
CAVEDSGSARQLTF

SEQ ID NO: 197386 - protein, 13 aa, Homo sapiens
  CDR3 for beta chain variable domain of TCR clone 98693 (TRBV7-3, TRBJ1-1)
CASSQDWGAEAFF

SEQ ID NO: 197387 - protein, 18 aa, Homo sapiens
  CDR3 for alpha chain variable domain of TCR clone 98694 (TRAV12-3, TRAJ52)
CAMSRTNAGGTSYGKLTF

SEQ ID NO: 197388 - protein, 15 aa, Homo sapiens
  CDR3 for beta chain variable domain of TCR clone 98694 (TRBV7-2, TRBJ2-1)
CDSSLVAGGHNEQFF

SEQ ID NO: 197389 - protein, 13 aa, Homo sapiens
  CDR3 for alpha chain variable domain of TCR clone 98695 (TRAV17, TRAJ22)
CAHHSGSARQLTF

SEQ ID NO: 197390 - protein, 15 aa, Homo sapiens
  CDR3 for beta chain variable domain of TCR clone 98695 (TRBV4-1, TRBJ2-7)
CASSQNTGRLYEQYF

SEQ ID NO: 197391 - protein, 15 aa, Homo sapiens
  CDR3 for alpha chain variable domain of TCR clone 98696 (TRAV13-1, TRAJ44)
CAASRGGGTVSKLTF

SEQ ID NO: 197392 - protein, 14 aa, Homo sapiens
  CDR3 for beta chain variable domain of TCR clone 98696 (TRBV7-2, TRBJ2-5)
CASSPRGSSETQYF

SEQ ID NO: 197393 - protein, 12 aa, Homo sapiens
  CDR3 for alpha chain variable domain of TCR clone 98697 (TRAV22, TRAJ22)
CAPGGSARQLTF

SEQ ID NO: 197394 - protein, 14 aa, Homo sapiens
  CDR3 for beta chain variable domain of TCR clone 98697 (TRBV19, TRBJ2-1)
CASPTFVLSGEQFF

SEQ ID NO: 197395 - protein, 12 aa, Homo sapiens
  CDR3 for alpha chain variable domain of TCR clone 98698 (TRAV29/DV5, TRAJ49)
CAATDTGNQFYF

SEQ ID NO: 197396 - protein, 17 aa, Homo sapiens
  CDR3 for beta chain variable domain of TCR clone 98698 (TRBV15, TRBJ1-4)
CATSRYGTGDPNEKLFF

SEQ ID NO: 197397 - protein, 12 aa, Homo sapiens
  CDR3 for alpha chain variable domain of TCR clone 98699 (TRAV21, TRAJ30)
CAVMNRDDKIIF

SEQ ID NO: 197398 - protein, 17 aa, Homo sapiens
  CDR3 for beta chain variable domain of TCR clone 98699 (TRBV5-1, TRBJ1-1)
CASRPIRTGGVNTEVFF

SEQ ID NO: 197399 - protein, 13 aa, Homo sapiens
  CDR3 for alpha chain variable domain of TCR clone 98700 (TRAV2, TRAJ21)
CAVEDLNFNKFYF

SEQ ID NO: 197400 - protein, 17 aa, Homo sapiens
  CDR3 for beta chain variable domain of TCR clone 98700 (TRBV11-2, TRBJ2-1)
CASSLYPPGVEYNEQFF

SEQ ID NO: 197401 - protein, 14 aa, Homo sapiens
  CDR3 for alpha chain variable domain of TCR clone 98701 (TRAV38-1, TRAJ45)
CASHSGGGADGLTF

SEQ ID NO: 197402 - protein, 14 aa, Homo sapiens
  CDR3 for beta chain variable domain of TCR clone 98701 (TRBV7-6, TRBJ2-3)
CASSLGTVTDTQYF

SEQ ID NO: 197403 - protein, 14 aa, Homo sapiens
  CDR3 for alpha chain variable domain of TCR clone 98702 (TRAV26-1, TRAJ17)
CIVRSSVSGNKLTF

SEQ ID NO: 197404 - protein, 14 aa, Homo sapiens
  CDR3 for beta chain variable domain of TCR clone 98702 (TRBV11-2, TRBJ2-5)
CASSRTGGIETQYF

SEQ ID NO: 197405 - protein, 13 aa, Homo sapiens
  CDR3 for alpha chain variable domain of TCR clone 98703 (TRAV13-2, TRAJ53)
CADNMGSNYKLTF

SEQ ID NO: 197406 - protein, 13 aa, Homo sapiens
  CDR3 for beta chain variable domain of TCR clone 98703 (TRBV4-1, TRBJ2-2)
CASSQENTGELFF

SEQ ID NO: 197407 - protein, 12 aa, Homo sapiens
  CDR3 for alpha chain variable domain of TCR clone 98704 (TRAV26-1, TRAJ36)
CIVRVRADNLFF

SEQ ID NO: 197408 - protein, 13 aa, Homo sapiens
  CDR3 for beta chain variable domain of TCR clone 98704 (TRBV11-2, TRBJ2-5)
CASSRGPSETQCF

SEQ ID NO: 197409 - protein, 16 aa, Homo sapiens
  CDR3 for alpha chain variable domain of TCR clone 98705 (TRAV3, TRAJ10)
CAVRDMRAGGGNKLTF

SEQ ID NO: 197410 - protein, 14 aa, Homo sapiens
  CDR3 for beta chain variable domain of TCR clone 98705 (TRBV11-2, TRBJ1-5)
CASSLDRGRQPQHF

SEQ ID NO: 197411 - protein, 14 aa, Homo sapiens
  CDR3 for alpha chain variable domain of TCR clone 98706 (TRAV13-1, TRAJ10)
CAAKEPGGGNKLTF

SEQ ID NO: 197412 - protein, 13 aa, Homo sapiens
  CDR3 for beta chain variable domain of TCR clone 98706 (TRBV7-2, TRBJ2-2)
CASSLAVTGELFF

SEQ ID NO: 197413 - protein, 13 aa, Homo sapiens
  CDR3 for alpha chain variable domain of TCR clone 98707 (TRAV8-3, TRAJ37)
CAVGSGNTGKLVF

SEQ ID NO: 197414 - protein, 11 aa, Homo sapiens
  CDR3 for beta chain variable domain of TCR clone 98707 (TRBV29-1, TRBJ1-1)
CSLQQNTEAFF

SEQ ID NO: 197415 - protein, 14 aa, Homo sapiens
  CDR3 for alpha chain variable domain of TCR clone 98708 (TRAV12-1, TRAJ12)
CVVTRMDSSYKLIF

SEQ ID NO: 197416 - protein, 13 aa, Homo sapiens
  CDR3 for beta chain variable domain of TCR clone 98708 (TRBV7-2, TRBJ2-2)
CASSLAVTGELFF

SEQ ID NO: 197417 - protein, 13 aa, Homo sapiens
  CDR3 for alpha chain variable domain of TCR clone 98709 (TRAV16, TRAJ11)
CALTQSGYSTLTF

SEQ ID NO: 197418 - protein, 14 aa, Homo sapiens
  CDR3 for beta chain variable domain of TCR clone 98709 (TRBV19, TRBJ2-7)
CASSTTRGSYEQYF

SEQ ID NO: 197419 - protein, 12 aa, Homo sapiens
  CDR3 for alpha chain variable domain of TCR clone 98710 (TRAV13-1, TRAJ5)
CAAKAGRRELTF

SEQ ID NO: 197420 - protein, 13 aa, Homo sapiens
  CDR3 for beta chain variable domain of TCR clone 98710 (TRBV7-9, TRBJ1-2)
CASSLKQNYGYTF

SEQ ID NO: 197421 - protein, 12 aa, Homo sapiens
  CDR3 for alpha chain variable domain of TCR clone 98711 (TRAV2, TRAJ9)
CAVGAGGFKTIF

SEQ ID NO: 197422 - protein, 16 aa, Homo sapiens
  CDR3 for beta chain variable domain of TCR clone 98711 (TRBV13, TRBJ2-2)
CASSTRTGENTGELFF

SEQ ID NO: 197423 - protein, 14 aa, Homo sapiens
  CDR3 for alpha chain variable domain of TCR clone 98712 (TRAV13-1, TRAJ26)
CAAPKGPDGQNFVF

SEQ ID NO: 197424 - protein, 15 aa, Homo sapiens
  CDR3 for beta chain variable domain of TCR clone 98712 (TRBV28, TRBJ2-5)
CASSFRQGALETQHF

SEQ ID NO: 197425 - protein, 15 aa, Homo sapiens
  CDR3 for alpha chain variable domain of TCR clone 98713 (TRAV29/DV5, TRAJ36)
CAARRKTGANNLLGL

SEQ ID NO: 197426 - protein, 14 aa, Homo sapiens
  CDR3 for beta chain variable domain of TCR clone 98713 (TRBV12-5, TRBJ2-5)
CASGSRTHQETQYF

SEQ ID NO: 197427 - protein, 13 aa, Homo sapiens
  CDR3 for alpha chain variable domain of TCR clone 98714 (TRAV8-3, TRAJ28)
CAVGAVGSYQLTF

SEQ ID NO: 197428 - protein, 12 aa, Homo sapiens
  CDR3 for beta chain variable domain of TCR clone 98714 (TRBV28, TRBJ2-3)
CASSLYRDTQYF

SEQ ID NO: 197429 - protein, 13 aa, Homo sapiens
  CDR3 for alpha chain variable domain of TCR clone 98715 (TRAV21, TRAJ27)
CAARPGNAANQPL

SEQ ID NO: 197430 - protein, 14 aa, Homo sapiens
  CDR3 for beta chain variable domain of TCR clone 98715 (TRBV7-6, TRBJ2-3)
CASSLGTVTDTQYF

SEQ ID NO: 197431 - protein, 13 aa, Homo sapiens
  CDR3 for alpha chain variable domain of TCR clone 98716 (TRAV29/DV5, TRAJ31)
CAASRNNNARLMF

SEQ ID NO: 197432 - protein, 12 aa, Homo sapiens
  CDR3 for beta chain variable domain of TCR clone 98716 (TRBV14, TRBJ1-1)
CASSQLKGLAFC

SEQ ID NO: 197433 - protein, 14 aa, Homo sapiens
  CDR3 for alpha chain variable domain of TCR clone 98717 (TRAV13-1, TRAJ44)
CAAKATGTARKLTF

SEQ ID NO: 197434 - protein, 22 aa, Homo sapiens
  CDR3 for beta chain variable domain of TCR clone 98717 (TRBV19, TRBJ2-1)
CASSVRDRVTGTSGRIYNEQFF

SEQ ID NO: 197435 - protein, 15 aa, Homo sapiens
  CDR3 for alpha chain variable domain of TCR clone 98718 (TRAV8-6, TRAJ10)
CALSSKGGGGNKLTF

SEQ ID NO: 197436 - protein, 15 aa, Homo sapiens
  CDR3 for beta chain variable domain of TCR clone 98718 (TRBV28, TRBJ1-2)
CASSSHSIANYGYTF

SEQ ID NO: 197437 - protein, 14 aa, Homo sapiens
  CDR3 for alpha chain variable domain of TCR clone 98719 (TRAV16, TRAJ33)
CALSAMDSNYQLIW

SEQ ID NO: 197438 - protein, 20 aa, Homo sapiens
  CDR3 for beta chain variable domain of TCR clone 98719 (TRBV28, TRBJ2-1)
CASTPIGRSPGLAGGNEQFF

SEQ ID NO: 197439 - protein, 17 aa, Homo sapiens
  CDR3 for alpha chain variable domain of TCR clone 98720 (TRAV13-1, TRAJ52)
CAAGRNAGGTSYGKLTF

SEQ ID NO: 197440 - protein, 13 aa, Homo sapiens
  CDR3 for beta chain variable domain of TCR clone 98720 (TRBV7-2, TRBJ1-1)
CASKLKGAKVAFF

SEQ ID NO: 197441 - protein, 23 aa, Homo sapiens
  CDR3 for alpha chain variable domain of TCR clone 98721 (TRAV30, TRAJ43)
CTLRPPSSVTQEPTSAALSEMRF

SEQ ID NO: 197442 - protein, 13 aa, Homo sapiens
  CDR3 for beta chain variable domain of TCR clone 98721 (TRBV12-4, TRBJ2-2)
CASSITGSGELFF

SEQ ID NO: 197443 - protein, 14 aa, Homo sapiens
  CDR3 for alpha chain variable domain of TCR clone 98722 (TRAV16, TRAJ17)
CAPRIKAAGNKLTF

SEQ ID NO: 197444 - protein, 15 aa, Homo sapiens
  CDR3 for beta chain variable domain of TCR clone 98722 (TRBV20-1, TRBJ2-7)
CSARDRVSGMDEQYF

SEQ ID NO: 197445 - protein, 12 aa, Homo sapiens
  CDR3 for alpha chain variable domain of TCR clone 98723 (TRAV12-3, TRAJ17)
CAMTLTGNKPTF

SEQ ID NO: 197446 - protein, 15 aa, Homo sapiens
  CDR3 for beta chain variable domain of TCR clone 98723 (TRBV20-1, TRBJ2-7)
CSARDRVSGMDEQYF

SEQ ID NO: 197447 - protein, 12 aa, Homo sapiens
  CDR3 for alpha chain variable domain of TCR clone 98724 (TRAV2, TRAJ33)
CAFMDSNYQLIW

SEQ ID NO: 197448 - protein, 14 aa, Homo sapiens
  CDR3 for beta chain variable domain of TCR clone 98724 (TRBV25-1, TRBJ1-1)
CASTHLGGNTEAFF

SEQ ID NO: 197449 - protein, 19 aa, Homo sapiens
  CDR3 for alpha chain variable domain of TCR clone 98725 (TRAV2, TRAJ32)
TTVLSTPPSQGGATNKLIF

SEQ ID NO: 197450 - protein, 12 aa, Homo sapiens
  CDR3 for beta chain variable domain of TCR clone 98725 (TRBV20-1, TRBJ2-7)
CSAITPTKEQYL

SEQ ID NO: 197451 - protein, 15 aa, Homo sapiens
  CDR3 for alpha chain variable domain of TCR clone 98726 (TRAV4, TRAJ39)
CLVGPNNNAGNMLTF

SEQ ID NO: 197452 - protein, 14 aa, Homo sapiens
  CDR3 for beta chain variable domain of TCR clone 98726 (TRBV5-1, TRBJ1-6)
CASRPGTSNSPLHF

SEQ ID NO: 197453 - protein, 12 aa, Homo sapiens
  CDR3 for alpha chain variable domain of TCR clone 98727 (TRAV13-1, TRAJ27)
CAAHTNAGKSTF

SEQ ID NO: 197454 - protein, 12 aa, Homo sapiens
  CDR3 for beta chain variable domain of TCR clone 98727 (TRBV7-9, TRBJ2-7)
CASSIKREEQYF

SEQ ID NO: 197455 - protein, 14 aa, Homo sapiens
  CDR3 for alpha chain variable domain of TCR clone 98728 (TRAV17, TRAJ39)
CATAPVRAGNMLTF

SEQ ID NO: 197456 - protein, 15 aa, Homo sapiens
  CDR3 for beta chain variable domain of TCR clone 98728 (TRBV13, TRBJ1-5)
CASSFGQGGVQPQHF

SEQ ID NO: 197457 - protein, 13 aa, Homo sapiens
  CDR3 for alpha chain variable domain of TCR clone 98729 (TRAV12-1, TRAJ21)
CVVTLYNFNKFYF

SEQ ID NO: 197458 - protein, 19 aa, Homo sapiens
  CDR3 for beta chain variable domain of TCR clone 98729 (TRBV7-8, TRBJ2-1)
CQQLAHRLAGVRSYNEQFF

SEQ ID NO: 197459 - protein, 13 aa, Homo sapiens
  CDR3 for alpha chain variable domain of TCR clone 98730 (TRAV2, TRAJ15)
CSVASQAGTALIF

SEQ ID NO: 197460 - protein, 16 aa, Homo sapiens
  CDR3 for beta chain variable domain of TCR clone 98730 (TRBV5-1, TRBJ1-1)
CASSSGGNSLNTEAFF

SEQ ID NO: 197461 - protein, 13 aa, Homo sapiens
  CDR3 for alpha chain variable domain of TCR clone 98731 (TRAV38-2/DV8, TRAJ34)
CAYRNYNTDTLIF

SEQ ID NO: 197462 - protein, 15 aa, Homo sapiens
  CDR3 for beta chain variable domain of TCR clone 98731 (TRBV20-1, TRBJ2-5)
CSAEGTGGLQETQYF

SEQ ID NO: 197463 - protein, 12 aa, Homo sapiens
  CDR3 for alpha chain variable domain of TCR clone 98732 (TRAV29/DV5, TRAJ49)
CAASAIGNPFYF

SEQ ID NO: 197464 - protein, 17 aa, Homo sapiens
  CDR3 for beta chain variable domain of TCR clone 98732 (TRBV5-1, TRBJ2-2)
CASSRTSGRFSTGELFF

SEQ ID NO: 197465 - protein, 13 aa, Homo sapiens
  CDR3 for alpha chain variable domain of TCR clone 98733 (TRAV40, TRAJ43)
SAVYYRPNNDMRF

SEQ ID NO: 197466 - protein, 12 aa, Homo sapiens
  CDR3 for beta chain variable domain of TCR clone 98733 (TRBV11-2, TRBJ2-2)
CASSLGGGELFF

SEQ ID NO: 197467 - protein, 22 aa, Homo sapiens
  CDR3 for alpha chain variable domain of TCR clone 98734 (TRAV21, )
CAVRQDAGNNHIQNPDPAVYQL

SEQ ID NO: 197468 - protein, 16 aa, Homo sapiens
  CDR3 for beta chain variable domain of TCR clone 98734 (TRBV4-2, TRBJ1-1)
CASRPLDGGGDTEAVF

SEQ ID NO: 197469 - protein, 13 aa, Homo sapiens
  CDR3 for alpha chain variable domain of TCR clone 98735 (TRAV13-2, TRAJ40)
CAEITSGTYKYIF

SEQ ID NO: 197470 - protein, 14 aa, Homo sapiens
  CDR3 for beta chain variable domain of TCR clone 98735 (TRBV10-2, TRBJ1-5)
CASSSTGRNQPQHF

SEQ ID NO: 197471 - protein, 14 aa, Homo sapiens
  CDR3 for alpha chain variable domain of TCR clone 98736 (TRAV35, TRAJ22)
CAGLRPGSARQLTF

SEQ ID NO: 197472 - protein, 15 aa, Homo sapiens
  CDR3 for beta chain variable domain of TCR clone 98736 (TRBV20-1, TRBJ2-7)
CSARDRVAGMDEQYF

SEQ ID NO: 197473 - protein, 14 aa, Homo sapiens
  CDR3 for alpha chain variable domain of TCR clone 98737 (TRAV2, TRAJ9)
CAVEDRSGGFKTIF

SEQ ID NO: 197474 - protein, 13 aa, Homo sapiens
  CDR3 for beta chain variable domain of TCR clone 98737 (TRBV27, TRBJ2-7)
CASSLTTGYEQYF

SEQ ID NO: 197475 - protein, 14 aa, Homo sapiens
  CDR3 for alpha chain variable domain of TCR clone 98738 (TRAV17, TRAJ22)
CATDASGSARQLTF

SEQ ID NO: 197476 - protein, 15 aa, Homo sapiens
  CDR3 for beta chain variable domain of TCR clone 98738 (TRBV20-1, TRBJ2-7)
CSARDRVSGMDEQYF

SEQ ID NO: 197477 - protein, 14 aa, Homo sapiens
  CDR3 for alpha chain variable domain of TCR clone 98739 (TRAV8-4, TRAJ9)
CAVRINTGGFKTIF

SEQ ID NO: 197478 - protein, 17 aa, Homo sapiens
  CDR3 for beta chain variable domain of TCR clone 98739 (TRBV28, TRBJ2-5)
CASSFGGEWGGQETQYF

SEQ ID NO: 197479 - protein, 14 aa, Homo sapiens
  CDR3 for alpha chain variable domain of TCR clone 98740 (TRAV12-1, TRAJ17)
CVVNYQAAGNKLTF

SEQ ID NO: 197480 - protein, 17 aa, Homo sapiens
  CDR3 for beta chain variable domain of TCR clone 98740 (TRBV20-1, TRBJ2-1)
CSASSSGLAGSYNEQFF

SEQ ID NO: 197481 - protein, 14 aa, Homo sapiens
  CDR3 for alpha chain variable domain of TCR clone 98741 (TRAV12-2, TRAJ13)
CAVKKTGGYQKVTF

SEQ ID NO: 197482 - protein, 16 aa, Homo sapiens
  CDR3 for beta chain variable domain of TCR clone 98741 (TRBV7-6, TRBJ2-1)
CASSAPGPSSYNEQFF

SEQ ID NO: 197483 - protein, 16 aa, Homo sapiens
  CDR3 for alpha chain variable domain of TCR clone 98742 (TRAV4, TRAJ22)
CLVGDLYSGSARQLTL

SEQ ID NO: 197484 - protein, 14 aa, Homo sapiens
  CDR3 for beta chain variable domain of TCR clone 98742 (TRBV28, TRBJ2-3)
CASSWRGRADTQYF

SEQ ID NO: 197485 - protein, 15 aa, Homo sapiens
  CDR3 for alpha chain variable domain of TCR clone 98743 (TRAV29/DV5, TRAJ24)
CAASGATDSWGKFQF

SEQ ID NO: 197486 - protein, 20 aa, Homo sapiens
  CDR3 for beta chain variable domain of TCR clone 98743 (TRBV11-2, TRBJ2-2)
LRTRPCISVPAAPLPGSCFF

SEQ ID NO: 197487 - protein, 15 aa, Homo sapiens
  CDR3 for alpha chain variable domain of TCR clone 98744 (TRAV12-2, TRAJ43)
CAFDMRFGAGNRLTV

SEQ ID NO: 197488 - protein, 18 aa, Homo sapiens
  CDR3 for beta chain variable domain of TCR clone 98744 (TRBV20-1, TRBJ2-3)
CSASGLAGGPGTTDTQYF

SEQ ID NO: 197489 - protein, 16 aa, Homo sapiens
  CDR3 for alpha chain variable domain of TCR clone 98745 (TRAV17, TRAJ52)
CATSNAGGTSYGKLTF

SEQ ID NO: 197490 - protein, 14 aa, Homo sapiens
  CDR3 for beta chain variable domain of TCR clone 98745 (TRBV7-2, TRBJ2-7)
CASSPKTSFYEQYF

SEQ ID NO: 197491 - protein, 12 aa, Homo sapiens
  CDR3 for alpha chain variable domain of TCR clone 98746 (TRAV12-2, TRAJ31)
CAVNTHDARLMF

SEQ ID NO: 197492 - protein, 15 aa, Homo sapiens
  CDR3 for beta chain variable domain of TCR clone 98746 (TRBV4-2, TRBJ1-1)
CASSQDQGLNTEAFF

SEQ ID NO: 197493 - protein, 16 aa, Homo sapiens
  CDR3 for alpha chain variable domain of TCR clone 98747 (TRAV30, TRAJ24)
CGTEIVDADSWGKFQF

SEQ ID NO: 197494 - protein, 17 aa, Homo sapiens
  CDR3 for beta chain variable domain of TCR clone 98747 (TRBV19, TRBJ2-6)
CASSTGQVFSGANVLTF

SEQ ID NO: 197495 - protein, 15 aa, Homo sapiens
  CDR3 for alpha chain variable domain of TCR clone 98748 (TRAV12-3, TRAJ49)
CAMAVTPNTGIQFYF

SEQ ID NO: 197496 - protein, 18 aa, Homo sapiens
  CDR3 for beta chain variable domain of TCR clone 98748 (TRBV4-1, TRBJ1-5)
CASSQDPRGQGLNQPQHF

SEQ ID NO: 197497 - protein, 13 aa, Homo sapiens
  CDR3 for alpha chain variable domain of TCR clone 98749 (TRAV17, TRAJ54)
CATSWGGAQKLVF

SEQ ID NO: 197498 - protein, 15 aa, Homo sapiens
  CDR3 for beta chain variable domain of TCR clone 98749 (TRBV4-3, TRBJ2-3)
CASSPSLLSTETQYF

SEQ ID NO: 197499 - protein, 13 aa, Homo sapiens
  CDR3 for alpha chain variable domain of TCR clone 98750 (TRAV23/DV6, TRAJ22)
CAPYSGSARQLTF

SEQ ID NO: 197500 - protein, 15 aa, Homo sapiens
  CDR3 for beta chain variable domain of TCR clone 98750 (TRBV20-1, TRBJ2-7)
CSARVPAAYFYEQYL

SEQ ID NO: 197501 - protein, 15 aa, Homo sapiens
  CDR3 for alpha chain variable domain of TCR clone 98751 (TRAV12-2, TRAJ22)
CAVNGASGSARQLTF

SEQ ID NO: 197502 - protein, 14 aa, Homo sapiens
  CDR3 for beta chain variable domain of TCR clone 98751 (TRBV18, TRBJ2-2)
CQLTPSRIHRGAVF

SEQ ID NO: 197503 - protein, 14 aa, Homo sapiens
  CDR3 for alpha chain variable domain of TCR clone 98752 (TRAV16, TRAJ32)
CALKSGGATNKLIF

SEQ ID NO: 197504 - protein, 15 aa, Homo sapiens
  CDR3 for beta chain variable domain of TCR clone 98752 (TRBV28, TRBJ1-3)
CASSMGWASGNTIYF

SEQ ID NO: 197505 - protein, 15 aa, Homo sapiens
  CDR3 for alpha chain variable domain of TCR clone 98753 (TRAV3, TRAJ32)
CAVSSYGGATNKLIF

SEQ ID NO: 197506 - protein, 13 aa, Homo sapiens
  CDR3 for beta chain variable domain of TCR clone 98753 (TRBV20-1, TRBJ2-7)
CSARPGTNYEQYF

SEQ ID NO: 197507 - protein, 12 aa, Homo sapiens
  CDR3 for alpha chain variable domain of TCR clone 98754 (TRAV13-1, TRAJ27)
CAAHTNAGKSTF

SEQ ID NO: 197508 - protein, 14 aa, Homo sapiens
  CDR3 for beta chain variable domain of TCR clone 98754 (TRBV19, TRBJ2-2)
SASSGQGIAGELFF

SEQ ID NO: 197509 - protein, 13 aa, Homo sapiens
  CDR3 for alpha chain variable domain of TCR clone 98755 (TRAV35, TRAJ22)
CAGLFGSARQLTF

SEQ ID NO: 197510 - protein, 16 aa, Homo sapiens
  CDR3 for beta chain variable domain of TCR clone 98755 (TRBV7-9, TRBJ2-1)
CASSLVLTGQGNEQFF

SEQ ID NO: 197511 - protein, 16 aa, Homo sapiens
  CDR3 for alpha chain variable domain of TCR clone 98756 (TRAV8-3, TRAJ13)
CAVGAYPSGGYQKVTF

SEQ ID NO: 197512 - protein, 10 aa, Homo sapiens
  CDR3 for beta chain variable domain of TCR clone 98756 (TRBV19, TRBJ1-5)
CASSIVWADN

SEQ ID NO: 197513 - protein, 12 aa, Homo sapiens
  CDR3 for alpha chain variable domain of TCR clone 98757 (TRAV17, TRAJ4)
CATDGGYNKLIF

SEQ ID NO: 197514 - protein, 14 aa, Homo sapiens
  CDR3 for beta chain variable domain of TCR clone 98757 (TRBV6-1, TRBJ1-3)
CASVQGGGGNTIYF

SEQ ID NO: 197515 - protein, 14 aa, Homo sapiens
  CDR3 for alpha chain variable domain of TCR clone 98758 (TRAV12-2, TRAJ13)
CAVKKTGGYQKVTF

SEQ ID NO: 197516 - protein, 15 aa, Homo sapiens
  CDR3 for beta chain variable domain of TCR clone 98758 (TRBV6-1, TRBJ2-1)
CASSELRGQYNEQFF

SEQ ID NO: 197517 - protein, 16 aa, Homo sapiens
  CDR3 for alpha chain variable domain of TCR clone 98759 (TRAV14/DV4, TRAJ53)
CAMREGGGGSNYKLTF

SEQ ID NO: 197518 - protein, 22 aa, Homo sapiens
  CDR3 for beta chain variable domain of TCR clone 98759 (TRBV29-1, TRBJ2-5)
TVSNMSPEDSSIYLCSAGTQYF

SEQ ID NO: 197519 - protein, 16 aa, Homo sapiens
  CDR3 for alpha chain variable domain of TCR clone 98760 (TRAV30, TRAJ48)
CGTGIKSNFGNEKLTF

SEQ ID NO: 197520 - protein, 17 aa, Homo sapiens
  CDR3 for beta chain variable domain of TCR clone 98760 (TRBV27, TRBJ2-1)
CASSSERGGQSADEQFF

SEQ ID NO: 197521 - protein, 13 aa, Homo sapiens
  CDR3 for alpha chain variable domain of TCR clone 98761 (TRAV26-1, TRAJ29)
CTVRRSGNTPLVF

SEQ ID NO: 197522 - protein, 16 aa, Homo sapiens
  CDR3 for beta chain variable domain of TCR clone 98761 (TRBV11-2, TRBJ2-7)
CASSLAPTGVNYEQYF

SEQ ID NO: 197523 - protein, 16 aa, Homo sapiens
  CDR3 for alpha chain variable domain of TCR clone 98762 (TRAV26-1, )
CIDIQNTDPAVYQLRD

SEQ ID NO: 197524 - protein, 19 aa, Homo sapiens
  CDR3 for beta chain variable domain of TCR clone 98762 (TRBV19, TRBJ2-5)
CASSIGQVTDFFLGETQYF

SEQ ID NO: 197525 - protein, 13 aa, Homo sapiens
  CDR3 for alpha chain variable domain of TCR clone 98763 (TRAV16, TRAJ31)
CALSAHNNARLMF

SEQ ID NO: 197526 - protein, 17 aa, Homo sapiens
  CDR3 for beta chain variable domain of TCR clone 98763 (TRBV12-4, TRBJ2-1)
CASSPGLAGGRINGQFF

SEQ ID NO: 197527 - protein, 15 aa, Homo sapiens
  CDR3 for alpha chain variable domain of TCR clone 98764 (TRAV26-2, TRAJ16)
CILSLRFSDGQKLLF

SEQ ID NO: 197528 - protein, 13 aa, Homo sapiens
  CDR3 for beta chain variable domain of TCR clone 98764 (TRBV10-3, TRBJ2-7)
CAIRPTEAYEQCF

SEQ ID NO: 197529 - protein, 14 aa, Homo sapiens
  CDR3 for alpha chain variable domain of TCR clone 98765 (TRAV12-2, TRAJ32)
CAVKIPSGTYKYIF

SEQ ID NO: 197530 - protein, 14 aa, Homo sapiens
  CDR3 for beta chain variable domain of TCR clone 98765 (TRBV20-1, TRBJ1-1)
CSAQTRIGGTEAFF

SEQ ID NO: 197531 - protein, 15 aa, Homo sapiens
  CDR3 for alpha chain variable domain of TCR clone 98766 (TRAV21, TRAJ57)
CAVIITQGGSEKLVF

SEQ ID NO: 197532 - protein, 14 aa, Homo sapiens
  CDR3 for beta chain variable domain of TCR clone 98766 (TRBV5-1, TRBJ2-2)
CASSLIRIPGELFF

SEQ ID NO: 197533 - protein, 13 aa, Homo sapiens
  CDR3 for alpha chain variable domain of TCR clone 98767 (TRAV1-1, TRAJ9)
CAAKNTGGFKTIF

SEQ ID NO: 197534 - protein, 16 aa, Homo sapiens
  CDR3 for beta chain variable domain of TCR clone 98767 (TRBV7-2, TRBJ2-5)
CASSSKWLSGQETQYF

SEQ ID NO: 197535 - protein, 13 aa, Homo sapiens
  CDR3 for alpha chain variable domain of TCR clone 98768 (TRAV8-6, TRAJ8)
CAVSNTGFQKLVF

SEQ ID NO: 197536 - protein, 13 aa, Homo sapiens
  CDR3 for beta chain variable domain of TCR clone 98768 (TRBV7-6, TRBJ1-2)
CASSLVADYGYTF

SEQ ID NO: 197537 - protein, 16 aa, Homo sapiens
  CDR3 for alpha chain variable domain of TCR clone 98769 (TRAV26-1, TRAJ33)
CIVPFWGEDSNYQLIW

SEQ ID NO: 197538 - protein, 15 aa, Homo sapiens
  CDR3 for beta chain variable domain of TCR clone 98769 (TRBV7-9, TRBJ1-5)
CASSQGHQPNQPQHF

SEQ ID NO: 197539 - protein, 14 aa, Homo sapiens
  CDR3 for alpha chain variable domain of TCR clone 98770 (TRAV2, TRAJ9)
CAVEDRSGGFKTIF

SEQ ID NO: 197540 - protein, 16 aa, Homo sapiens
  CDR3 for beta chain variable domain of TCR clone 98770 (TRBV15, TRBJ2-7)
CVTSRDGGIPSYEQYF

SEQ ID NO: 197541 - protein, 14 aa, Homo sapiens
  CDR3 for alpha chain variable domain of TCR clone 98771 (TRAV9-2, TRAJ39)
CALYIYNAGNMLTF

SEQ ID NO: 197542 - protein, 13 aa, Homo sapiens
  CDR3 for beta chain variable domain of TCR clone 98771 (TRBV10-2, TRBJ1-1)
CASNDQMNTEAFF

SEQ ID NO: 197543 - protein, 15 aa, Homo sapiens
  CDR3 for alpha chain variable domain of TCR clone 98772 (TRAV22, TRAJ45)
CAAKYSGGGADGLTF

SEQ ID NO: 197544 - protein, 16 aa, Homo sapiens
  CDR3 for beta chain variable domain of TCR clone 98772 (TRBV7-3, TRBJ2-2)
CASSLKRGTLSGELFF

SEQ ID NO: 197545 - protein, 14 aa, Homo sapiens
  CDR3 for alpha chain variable domain of TCR clone 98773 (TRAV17, TRAJ57)
CATDPQGGYEKLVF

SEQ ID NO: 197546 - protein, 13 aa, Homo sapiens
  CDR3 for beta chain variable domain of TCR clone 98773 (TRBV10-3, TRBJ2-7)
CASKLAVNYEQYF

SEQ ID NO: 197547 - protein, 14 aa, Homo sapiens
  CDR3 for alpha chain variable domain of TCR clone 98774 (TRAV26-1, TRAJ38)
CIADNAGNNRELIW

SEQ ID NO: 197548 - protein, 14 aa, Homo sapiens
  CDR3 for beta chain variable domain of TCR clone 98774 (TRBV4-1, TRBJ2-2)
CASSQAVNTGELFF

SEQ ID NO: 197549 - protein, 12 aa, Homo sapiens
  CDR3 for alpha chain variable domain of TCR clone 98775 (TRAV2, TRAJ10)
CASTGGGNKLTF

SEQ ID NO: 197550 - protein, 16 aa, Homo sapiens
  CDR3 for beta chain variable domain of TCR clone 98775 (TRBV6-1, TRBJ2-5)
CASSETLDRGAETQYF

SEQ ID NO: 197551 - protein, 13 aa, Homo sapiens
  CDR3 for alpha chain variable domain of TCR clone 98776 (TRAV26-1, TRAJ48)
CIVRVVGDEKLTF

SEQ ID NO: 197552 - protein, 12 aa, Homo sapiens
  CDR3 for beta chain variable domain of TCR clone 98776 (TRBV11-3, TRBJ2-2)
CASSTRPGLKRR

SEQ ID NO: 197553 - protein, 13 aa, Homo sapiens
  CDR3 for alpha chain variable domain of TCR clone 98777 (TRAV8-3, TRAJ21)
CAVGAYTFNKFYF

SEQ ID NO: 197554 - protein, 16 aa, Homo sapiens
  CDR3 for beta chain variable domain of TCR clone 98777 (TRBV19, TRBJ2-1)
CASSMGGGSSYNEQFF

SEQ ID NO: 197555 - protein, 16 aa, Homo sapiens
  CDR3 for alpha chain variable domain of TCR clone 98778 (TRAV3, TRAJ37)
CAVRTHGSGNTGKLIF

SEQ ID NO: 197556 - protein, 13 aa, Homo sapiens
  CDR3 for beta chain variable domain of TCR clone 98778 (TRBV2, TRBJ1-5)
CASGTGGYQPQHF

SEQ ID NO: 197557 - protein, 15 aa, Homo sapiens
  CDR3 for alpha chain variable domain of TCR clone 98779 (TRAV4, TRAJ39)
CLVGPNNNAGNMLTF

SEQ ID NO: 197558 - protein, 15 aa, Homo sapiens
  CDR3 for beta chain variable domain of TCR clone 98779 (TRBV19, TRBJ2-1)
CASSSPGVPLDEQFF

SEQ ID NO: 197559 - protein, 12 aa, Homo sapiens
  CDR3 for alpha chain variable domain of TCR clone 98780 (TRAV17, TRAJ30)
CVPERRDDKIIF

SEQ ID NO: 197560 - protein, 14 aa, Homo sapiens
  CDR3 for beta chain variable domain of TCR clone 98780 (TRBV7-7, TRBJ2-2)
CASRRDRSTGELFF

SEQ ID NO: 197561 - protein, 14 aa, Homo sapiens
  CDR3 for alpha chain variable domain of TCR clone 98781 (TRAV13-2, TRAJ17)
CAENSKAAGNNLTF

SEQ ID NO: 197562 - protein, 15 aa, Homo sapiens
  CDR3 for beta chain variable domain of TCR clone 98781 (TRBV20-1, TRBJ2-7)
CSARDRASGMDEQYF

SEQ ID NO: 197563 - protein, 11 aa, Homo sapiens
  CDR3 for alpha chain variable domain of TCR clone 98782 (TRAV12-2, TRAJ21)
CAVEGFNKFYF

SEQ ID NO: 197564 - protein, 14 aa, Homo sapiens
  CDR3 for beta chain variable domain of TCR clone 98782 (TRBV25-1, TRBJ1-1)
CASTHLGGNTEAFF

SEQ ID NO: 197565 - protein, 16 aa, Homo sapiens
  CDR3 for alpha chain variable domain of TCR clone 98783 (TRAV12-1, TRAJ13)
CVVNLEVSGGYQKVTF

SEQ ID NO: 197566 - protein, 16 aa, Homo sapiens
  CDR3 for beta chain variable domain of TCR clone 98783 (TRBV24-1, TRBJ2-6)
CATSDRRASGANDLTF

SEQ ID NO: 197567 - protein, 14 aa, Homo sapiens
  CDR3 for alpha chain variable domain of TCR clone 98784 (TRAV24, TRAJ42)
CAQNYGGSQGNLIF

SEQ ID NO: 197568 - protein, 15 aa, Homo sapiens
  CDR3 for beta chain variable domain of TCR clone 98784 (TRBV19, TRBJ1-5)
CASSVPGGAGQPQHF

SEQ ID NO: 197569 - protein, 12 aa, Homo sapiens
  CDR3 for alpha chain variable domain of TCR clone 98785 (TRAV12-2, TRAJ10)
WGVTGGGNKLTF

SEQ ID NO: 197570 - protein, 13 aa, Homo sapiens
  CDR3 for beta chain variable domain of TCR clone 98785 (TRBV6-4, TRBJ1-2)
CASSEAVGTPTMA

SEQ ID NO: 197571 - protein, 14 aa, Homo sapiens
  CDR3 for alpha chain variable domain of TCR clone 98786 (TRAV8-3, TRAJ4)
CAVGASVGYNKLIF

SEQ ID NO: 197572 - protein, 13 aa, Homo sapiens
  CDR3 for beta chain variable domain of TCR clone 98786 (TRBV18, TRBJ2-5)
CASSLQGQETQYF

SEQ ID NO: 197573 - protein, 21 aa, Homo sapiens
  CDR3 for alpha chain variable domain of TCR clone 98787 (TRAV34, )
CLYQYKPYNVFDDVQFMVRFF

SEQ ID NO: 197574 - protein, 16 aa, Homo sapiens
  CDR3 for beta chain variable domain of TCR clone 98787 (TRBV12-5, TRBJ2-5)
CASGPRTSGNQETQYF

SEQ ID NO: 197575 - protein, 11 aa, Homo sapiens
  CDR3 for alpha chain variable domain of TCR clone 98788 (TRAV12-3, TRAJ27)
CAMANAGKSTF

SEQ ID NO: 197576 - protein, 11 aa, Homo sapiens
  CDR3 for beta chain variable domain of TCR clone 98788 (TRBV29-1, TRBJ2-5)
CGEDRTGTQYF

SEQ ID NO: 197577 - protein, 15 aa, Homo sapiens
  CDR3 for alpha chain variable domain of TCR clone 98789 (TRAV3, TRAJ17)
CAVSPKEAAGNKLTL

SEQ ID NO: 197578 - protein, 12 aa, Homo sapiens
  CDR3 for beta chain variable domain of TCR clone 98789 (TRBV7-9, TRBJ1-6)
CASSLMTSPLHF

SEQ ID NO: 197579 - protein, 14 aa, Homo sapiens
  CDR3 for alpha chain variable domain of TCR clone 98790 (TRAV2, TRAJ37)
CAVEDQGNTGKLII

SEQ ID NO: 197580 - protein, 14 aa, Homo sapiens
  CDR3 for beta chain variable domain of TCR clone 98790 (TRBV18, TRBJ2-1)
CASSPQGRFNEQFF

SEQ ID NO: 197581 - protein, 13 aa, Homo sapiens
  CDR3 for alpha chain variable domain of TCR clone 98791 (TRAV21, TRAJ57)
CAVTQGGSEKLVF

SEQ ID NO: 197582 - protein, 16 aa, Homo sapiens
  CDR3 for beta chain variable domain of TCR clone 98791 (TRBV29-1, TRBJ2-7)
CSVEDAEDGTAFEQYF

SEQ ID NO: 197583 - protein, 12 aa, Homo sapiens
  CDR3 for alpha chain variable domain of TCR clone 98792 (TRAV9-2, TRAJ41)
CALTNSGYALNF

SEQ ID NO: 197584 - protein, 14 aa, Homo sapiens
  CDR3 for beta chain variable domain of TCR clone 98792 (TRBV4-1, TRBJ2-2)
CASSQAVNTGELFF

SEQ ID NO: 197585 - protein, 16 aa, Homo sapiens
  CDR3 for alpha chain variable domain of TCR clone 98793 (TRAV12-3, TRAJ53)
CAMSAGSGGSNYKMTF

SEQ ID NO: 197586 - protein, 13 aa, Homo sapiens
  CDR3 for beta chain variable domain of TCR clone 98793 (TRBV29-1, TRBJ2-3)
CSVGPRGTDTQYF

SEQ ID NO: 197587 - protein, 14 aa, Homo sapiens
  CDR3 for alpha chain variable domain of TCR clone 98794 (TRAV12-3, TRAJ42)
CAMNYGGSQGNLIF

SEQ ID NO: 197588 - protein, 16 aa, Homo sapiens
  CDR3 for beta chain variable domain of TCR clone 98794 (TRBV6-4, TRBJ1-2)
CASSEAVGDPNYGYTF

SEQ ID NO: 197589 - protein, 12 aa, Homo sapiens
  CDR3 for alpha chain variable domain of TCR clone 98795 (TRAV3, TRAJ43)
CAVRDPDNDMRF

SEQ ID NO: 197590 - protein, 15 aa, Homo sapiens
  CDR3 for beta chain variable domain of TCR clone 98795 (TRBV27, TRBJ1-5)
CASSPGTGFDQPQHF

SEQ ID NO: 197591 - protein, 13 aa, Homo sapiens
  CDR3 for alpha chain variable domain of TCR clone 98796 (TRAV27, TRAJ8)
CAGGPTGFQKLGF

SEQ ID NO: 197592 - protein, 15 aa, Homo sapiens
  CDR3 for beta chain variable domain of TCR clone 98796 (TRBV6-1, TRBJ2-7)
CASSESMGDFYEQYF

SEQ ID NO: 197593 - protein, 13 aa, Homo sapiens
  CDR3 for alpha chain variable domain of TCR clone 98797 (TRAV8-6, TRAJ21)
CAVSPSSLNKFYF

SEQ ID NO: 197594 - protein, 14 aa, Homo sapiens
  CDR3 for beta chain variable domain of TCR clone 98797 (TRBV7-9, TRBJ2-5)
CAGSLDTAQGTQYF

SEQ ID NO: 197595 - protein, 14 aa, Homo sapiens
  CDR3 for alpha chain variable domain of TCR clone 98798 (TRAV17, TRAJ34)
CATDSLEGTDNLIF

SEQ ID NO: 197596 - protein, 13 aa, Homo sapiens
  CDR3 for beta chain variable domain of TCR clone 98798 (TRBV11-2, TRBJ2-7)
CASSGTRPYEQYF

SEQ ID NO: 197597 - protein, 14 aa, Homo sapiens
  CDR3 for alpha chain variable domain of TCR clone 98799 (TRAV12-2, TRAJ15)
CAPHTGQAGTALIF

SEQ ID NO: 197598 - protein, 22 aa, Homo sapiens
  CDR3 for beta chain variable domain of TCR clone 98799 (TRBV6-1, TRBJ1-3)
CASVQGGGWKHHIFWRGKLAHC

SEQ ID NO: 197599 - protein, 13 aa, Homo sapiens
  CDR3 for alpha chain variable domain of TCR clone 98800 (TRAV36/DV7, TRAJ54)
CAVDIQGAQKRVF

SEQ ID NO: 197600 - protein, 14 aa, Homo sapiens
  CDR3 for beta chain variable domain of TCR clone 98800 (TRBV19, TRBJ2-7)
CASNFRDTFTGMYF

SEQ ID NO: 197601 - protein, 15 aa, Homo sapiens
  CDR3 for alpha chain variable domain of TCR clone 98801 (TRAV8-3, TRAJ27)
CAVGPSKTNAGKSTC

SEQ ID NO: 197602 - protein, 15 aa, Homo sapiens
  CDR3 for beta chain variable domain of TCR clone 98801 (TRBV7-2, TRBJ2-1)
CASSSGLAEGNEQFF

SEQ ID NO: 197603 - protein, 14 aa, Homo sapiens
  CDR3 for alpha chain variable domain of TCR clone 98802 (TRAV12-3, TRAJ9)
CAMSPNTGGFKTIF

SEQ ID NO: 197604 - protein, 12 aa, Homo sapiens
  CDR3 for beta chain variable domain of TCR clone 98802 (TRBV19, TRBJ1-5)
CASSIAQQPQHC

SEQ ID NO: 197605 - protein, 17 aa, Homo sapiens
  CDR3 for alpha chain variable domain of TCR clone 98803 (TRAV3, TRAJ6)
CALRDVPRAGGSYIPTF

SEQ ID NO: 197606 - protein, 14 aa, Homo sapiens
  CDR3 for beta chain variable domain of TCR clone 98803 (TRBV7-2, TRBJ2-7)
CASSPKTSFYEQYF

SEQ ID NO: 197607 - protein, 13 aa, Homo sapiens
  CDR3 for alpha chain variable domain of TCR clone 98804 (TRAV2, TRAJ23)
CAVMGNQGGKLIF

SEQ ID NO: 197608 - protein, 15 aa, Homo sapiens
  CDR3 for beta chain variable domain of TCR clone 98804 (TRBV11-2, TRBJ2-1)
CASSYSTISYNEQFF

SEQ ID NO: 197609 - protein, 14 aa, Homo sapiens
  CDR3 for alpha chain variable domain of TCR clone 98805 (TRAV12-2, TRAJ40)
CAVKIPSGTYKYIF

SEQ ID NO: 197610 - protein, 14 aa, Homo sapiens
  CDR3 for beta chain variable domain of TCR clone 98805 (TRBV20-1, TRBJ1-1)
YSAQTRIGGTEAFF

SEQ ID NO: 197611 - protein, 16 aa, Homo sapiens
  CDR3 for alpha chain variable domain of TCR clone 98806 (TRAV27, TRAJ53)
CAAPEGSGGSNYKLKF

SEQ ID NO: 197612 - protein, 14 aa, Homo sapiens
  CDR3 for beta chain variable domain of TCR clone 98806 (TRBV4-3, TRBJ1-5)
CASSQGGQGWPQHF

SEQ ID NO: 197613 - protein, 14 aa, Homo sapiens
  CDR3 for alpha chain variable domain of TCR clone 98807 (TRAV16, TRAJ37)
CALDISGNTGNLIF

SEQ ID NO: 197614 - protein, 11 aa, Homo sapiens
  CDR3 for beta chain variable domain of TCR clone 98807 (TRBV6-1, TRBJ2-1)
CASISSNEQFF

SEQ ID NO: 197615 - protein, 15 aa, Homo sapiens
  CDR3 for alpha chain variable domain of TCR clone 98808 (TRAV3, TRAJ13)
CAVRVYSGGYQKVTF

SEQ ID NO: 197616 - protein, 15 aa, Homo sapiens
  CDR3 for beta chain variable domain of TCR clone 98808 (TRBV7-2, TRBJ2-1)
CASTHGTGIYNEQFF

SEQ ID NO: 197617 - protein, 15 aa, Homo sapiens
  CDR3 for alpha chain variable domain of TCR clone 98809 (TRAV12-3, TRAJ47)
CAMSALVEYGNKLVF

SEQ ID NO: 197618 - protein, 15 aa, Homo sapiens
  CDR3 for beta chain variable domain of TCR clone 98809 (TRBV12-4, TRBJ2-5)
CASSPPTGLQETQYF

SEQ ID NO: 197619 - protein, 11 aa, Homo sapiens
  CDR3 for alpha chain variable domain of TCR clone 98810 (TRAV1-2, TRAJ40)
CAVPGTYKYIV

SEQ ID NO: 197620 - protein, 16 aa, Homo sapiens
  CDR3 for beta chain variable domain of TCR clone 98810 (TRBV29-1, TRBJ2-7)
CSVEVVGTSGSYEQYF

SEQ ID NO: 197621 - protein, 14 aa, Homo sapiens
  CDR3 for alpha chain variable domain of TCR clone 98811 (TRAV1-2, TRAJ29)
CAVRTDSGNTPLVF

SEQ ID NO: 197622 - protein, 14 aa, Homo sapiens
  CDR3 for beta chain variable domain of TCR clone 98811 (TRBV7-2, TRBJ2-7)
CASSTKTSFYEQYF

SEQ ID NO: 197623 - protein, 19 aa, Homo sapiens
  CDR3 for alpha chain variable domain of TCR clone 98812 (TRAV26-1, TRAJ28)
CIVRVAHAYSGAGSYPLTF

SEQ ID NO: 197624 - protein, 17 aa, Homo sapiens
  CDR3 for beta chain variable domain of TCR clone 98812 (TRBV9, TRBJ2-2)
CASSVGGQGTDTGELFF

SEQ ID NO: 197625 - protein, 16 aa, Homo sapiens
  CDR3 for alpha chain variable domain of TCR clone 98813 (TRAV30, TRAJ24)
CGTEIVDADSWGKFQF

SEQ ID NO: 197626 - protein, 15 aa, Homo sapiens
  CDR3 for beta chain variable domain of TCR clone 98813 (TRBV28, TRBJ2-7)
CASSLVLAGAREQYF

SEQ ID NO: 197627 - protein, 13 aa, Homo sapiens
  CDR3 for alpha chain variable domain of TCR clone 98814 (TRAV8-6, TRAJ40)
CAVSVTGTYKYIF

SEQ ID NO: 197628 - protein, 15 aa, Homo sapiens
  CDR3 for beta chain variable domain of TCR clone 98814 (TRBV4-1, TRBJ2-3)
CASGWGQGIPDTQYF

SEQ ID NO: 197629 - protein, 17 aa, Homo sapiens
  CDR3 for alpha chain variable domain of TCR clone 98815 (TRAV4, TRAJ18)
CLVGERSVGSTLGRLYV

SEQ ID NO: 197630 - protein, 14 aa, Homo sapiens
  CDR3 for beta chain variable domain of TCR clone 98815 (TRBV6-5, TRBJ1-2)
CASSYDGTGGGYTF

SEQ ID NO: 197631 - protein, 14 aa, Homo sapiens
  CDR3 for alpha chain variable domain of TCR clone 98816 (TRAV3, TRAJ7)
CAVREEEREQQTRF

SEQ ID NO: 197632 - protein, 15 aa, Homo sapiens
  CDR3 for beta chain variable domain of TCR clone 98816 (TRBV9, TRBJ1-6)
CASSVAGTGDSPLHF

SEQ ID NO: 197633 - protein, 12 aa, Homo sapiens
  CDR3 for alpha chain variable domain of TCR clone 98817 (TRAV17, TRAJ20)
CATDGDDYKLSF

SEQ ID NO: 197634 - protein, 13 aa, Homo sapiens
  CDR3 for beta chain variable domain of TCR clone 98817 (TRBV19, TRBJ1-2)
CASSQGQVYGYTF

SEQ ID NO: 197635 - protein, 17 aa, Homo sapiens
  CDR3 for alpha chain variable domain of TCR clone 98818 (TRAV17, TRAJ28)
CATDPRRGGAGSYQLTF

SEQ ID NO: 197636 - protein, 16 aa, Homo sapiens
  CDR3 for beta chain variable domain of TCR clone 98818 (TRBV25-1, TRBJ1-1)
CASSGDRDRGRIAAFF

SEQ ID NO: 197637 - protein, 14 aa, Homo sapiens
  CDR3 for alpha chain variable domain of TCR clone 98819 (TRAV1-2, TRAJ15)
CAVRDRQAGTALIF

SEQ ID NO: 197638 - protein, 13 aa, Homo sapiens
  CDR3 for beta chain variable domain of TCR clone 98819 (TRBV7-3, TRBJ1-1)
CASSQDWGAEAFF

SEQ ID NO: 197639 - protein, 12 aa, Homo sapiens
  CDR3 for alpha chain variable domain of TCR clone 98820 (TRAV35, TRAJ54)
CADLQGAQKLVF

SEQ ID NO: 197640 - protein, 17 aa, Homo sapiens
  CDR3 for beta chain variable domain of TCR clone 98820 (TRBV11-2, TRBJ2-1)
CASSLYPPGVEYNEQFF

SEQ ID NO: 197641 - protein, 13 aa, Homo sapiens
  CDR3 for alpha chain variable domain of TCR clone 98821 (TRAV1-2, TRAJ12)
CAVSMDSSYKLIF

SEQ ID NO: 197642 - protein, 15 aa, Homo sapiens
  CDR3 for beta chain variable domain of TCR clone 98821 (TRBV18, TRBJ1-1)
CASSPRQGENTEAFF

SEQ ID NO: 197643 - protein, 14 aa, Homo sapiens
  CDR3 for alpha chain variable domain of TCR clone 98822 (TRAV12-3, TRAJ10)
SHLPLTGGGNKITF

SEQ ID NO: 197644 - protein, 13 aa, Homo sapiens
  CDR3 for beta chain variable domain of TCR clone 98822 (TRBV7-9, TRBJ2-3)
CASSPGSTDTQYF

SEQ ID NO: 197645 - protein, 18 aa, Homo sapiens
  CDR3 for alpha chain variable domain of TCR clone 98823 (TRAV29/DV5, TRAJ52)
CAAGFRGAGGTRYGKLTF

SEQ ID NO: 197646 - protein, 16 aa, Homo sapiens
  CDR3 for beta chain variable domain of TCR clone 98823 (TRBV7-3, TRBJ2-2)
CASSLKRGTLSGELLF

SEQ ID NO: 197647 - protein, 15 aa, Homo sapiens
  CDR3 for alpha chain variable domain of TCR clone 98824 (TRAV21, TRAJ53)
CATLNSGGSNYKLTF

SEQ ID NO: 197648 - protein, 16 aa, Homo sapiens
  CDR3 for beta chain variable domain of TCR clone 98824 (TRBV9, TRBJ2-1)
CASSVGGWGNYNEQFF

SEQ ID NO: 197649 - protein, 15 aa, Homo sapiens
  CDR3 for alpha chain variable domain of TCR clone 98825 (TRAV35, TRAJ58)
CAGRRQETSGSRLTV

SEQ ID NO: 197650 - protein, 11 aa, Homo sapiens
  CDR3 for beta chain variable domain of TCR clone 98825 (TRBV11-2, TRBJ1-1)
CASSINTEAFF

SEQ ID NO: 197651 - protein, 13 aa, Homo sapiens
  CDR3 for alpha chain variable domain of TCR clone 98826 (TRAV35, TRAJ57)
CAGSQGGSEKLVF

SEQ ID NO: 197652 - protein, 15 aa, Homo sapiens
  CDR3 for beta chain variable domain of TCR clone 98826 (TRBV19, TRBJ2-1)
CASSSPGVPLDEQFF

SEQ ID NO: 197653 - protein, 12 aa, Homo sapiens
  CDR3 for alpha chain variable domain of TCR clone 98827 (TRAV13-1, TRAJ21)
CAAKEGFNKFYF

SEQ ID NO: 197654 - protein, 13 aa, Homo sapiens
  CDR3 for beta chain variable domain of TCR clone 98827 (TRBV19, TRBJ1-2)
CGSSVPGQDGYTF

SEQ ID NO: 197655 - protein, 14 aa, Homo sapiens
  CDR3 for alpha chain variable domain of TCR clone 98828 (TRAV17, TRAJ16)
CATADFSDGQKLLF

SEQ ID NO: 197656 - protein, 15 aa, Homo sapiens
  CDR3 for beta chain variable domain of TCR clone 98828 (TRBV18, TRBJ2-1)
YASSPPSASYNEQFF

SEQ ID NO: 197657 - protein, 15 aa, Homo sapiens
  CDR3 for alpha chain variable domain of TCR clone 98829 (TRAV8-3, TRAJ6)
CAGGPLGGGSYIPTF

SEQ ID NO: 197658 - protein, 14 aa, Homo sapiens
  CDR3 for beta chain variable domain of TCR clone 98829 (TRBV19, TRBJ2-2)
CASSTGQGAGELFF

SEQ ID NO: 197659 - protein, 14 aa, Homo sapiens
  CDR3 for alpha chain variable domain of TCR clone 98830 (TRAV1-2, TRAJ16)
CAVNLFSDGQKLLF

SEQ ID NO: 197660 - protein, 14 aa, Homo sapiens
  CDR3 for beta chain variable domain of TCR clone 98830 (TRBV7-2, TRBJ2-7)
CASSPKTSFYEQYF

SEQ ID NO: 197661 - protein, 20 aa, Homo sapiens
  CDR3 for alpha chain variable domain of TCR clone 98831 (TRAV12-1, TRAJ42)
SSVIQPPTSVKGGSQGNLIF

SEQ ID NO: 197662 - protein, 13 aa, Homo sapiens
  CDR3 for beta chain variable domain of TCR clone 98831 (TRBV20-1, TRBJ1-1)
CSAPLGGGTEAFF

SEQ ID NO: 197663 - protein, 15 aa, Homo sapiens
  CDR3 for alpha chain variable domain of TCR clone 98832 (TRAV25, TRAJ10)
CAGPLLTGGGNKLTF

SEQ ID NO: 197664 - protein, 15 aa, Homo sapiens
  CDR3 for beta chain variable domain of TCR clone 98832 (TRBV12-5, TRBJ2-2)
CASGRLGGDTGELFF

SEQ ID NO: 197665 - protein, 16 aa, Homo sapiens
  CDR3 for alpha chain variable domain of TCR clone 98833 (TRAV8-3, TRAJ44)
CAVGASNTGTASKLTF

SEQ ID NO: 197666 - protein, 15 aa, Homo sapiens
  CDR3 for beta chain variable domain of TCR clone 98833 (TRBV27, TRBJ1-5)
CASTFNRGSNQTQHF

SEQ ID NO: 197667 - protein, 13 aa, Homo sapiens
  CDR3 for alpha chain variable domain of TCR clone 98834 (TRAV21, TRAJ27)
CAARPGNAGKSTF

SEQ ID NO: 197668 - protein, 14 aa, Homo sapiens
  CDR3 for beta chain variable domain of TCR clone 98834 (TRBV7-9, TRBJ1-1)
CASTPLQSYTEAFF

SEQ ID NO: 197669 - protein, 14 aa, Homo sapiens
  CDR3 for alpha chain variable domain of TCR clone 98835 (TRAV12-3, TRAJ10)
SHLPLTGGGNKLTF

SEQ ID NO: 197670 - protein, 18 aa, Homo sapiens
  CDR3 for beta chain variable domain of TCR clone 98835 (TRBV6-7, TRBJ1-1)
CASSYSRLAGARNTEAFF

SEQ ID NO: 197671 - protein, 14 aa, Homo sapiens
  CDR3 for alpha chain variable domain of TCR clone 98836 (TRAV12-2, TRAJ13)
CAVKKTGGYQKVTF

SEQ ID NO: 197672 - protein, 13 aa, Homo sapiens
  CDR3 for beta chain variable domain of TCR clone 98836 (TRBV5-7, TRBJ1-2)
CASSLIRAPGYTF

SEQ ID NO: 197673 - protein, 12 aa, Homo sapiens
  CDR3 for alpha chain variable domain of TCR clone 98837 (TRAV1-1, TRAJ9)
CAVDTGGFKTIF

SEQ ID NO: 197674 - protein, 15 aa, Homo sapiens
  CDR3 for beta chain variable domain of TCR clone 98837 (TRBV6-3, TRBJ2-7)
CASSSPGTVFYEQYF

SEQ ID NO: 197675 - protein, 13 aa, Homo sapiens
  CDR3 for alpha chain variable domain of TCR clone 98838 (TRAV8-3, TRAJ43)
CAVGPDNNNDMRF

SEQ ID NO: 197676 - protein, 12 aa, Homo sapiens
  CDR3 for beta chain variable domain of TCR clone 98838 (TRBV11-2, TRBJ2-1)
CASSPGNNEQFF

SEQ ID NO: 197677 - protein, 14 aa, Homo sapiens
  CDR3 for alpha chain variable domain of TCR clone 98839 (TRAV3, TRAJ9)
CAVRGNTGGFKTIF

SEQ ID NO: 197678 - protein, 12 aa, Homo sapiens
  CDR3 for beta chain variable domain of TCR clone 98839 (TRBV19, TRBJ1-1)
CASLTGNTEAFF

SEQ ID NO: 197679 - protein, 15 aa, Homo sapiens
  CDR3 for alpha chain variable domain of TCR clone 98840 (TRAV21, TRAJ32)
CAAAPYGGATNKLIF

SEQ ID NO: 197680 - protein, 17 aa, Homo sapiens
  CDR3 for beta chain variable domain of TCR clone 98840 (TRBV18, TRBJ2-3)
CASSLFGDGGFTDTQYF

SEQ ID NO: 197681 - protein, 16 aa, Homo sapiens
  CDR3 for alpha chain variable domain of TCR clone 98841 (TRAV22, TRAJ45)
CAVERGKRGGADGLTF

SEQ ID NO: 197682 - protein, 11 aa, Homo sapiens
  CDR3 for beta chain variable domain of TCR clone 98841 (TRBV29-1, TRBJ2-5)
RSEDRTGTQYF

SEQ ID NO: 197683 - protein, 14 aa, Homo sapiens
  CDR3 for alpha chain variable domain of TCR clone 98842 (TRAV8-4, TRAJ17)
CAVSEGAAGNKLTL

SEQ ID NO: 197684 - protein, 13 aa, Homo sapiens
  CDR3 for beta chain variable domain of TCR clone 98842 (TRBV19, TRBJ2-1)
CASSMYRVNEQFF

SEQ ID NO: 197685 - protein, 17 aa, Homo sapiens
  CDR3 for alpha chain variable domain of TCR clone 98843 (TRAV13-1, TRAJ31)
CAPRDKLMFGDGTQLVV

SEQ ID NO: 197686 - protein, 12 aa, Homo sapiens
  CDR3 for beta chain variable domain of TCR clone 98843 (TRBV7-9, TRBJ2-7)
CASSLEGYEQYF

SEQ ID NO: 197687 - protein, 14 aa, Homo sapiens
  CDR3 for alpha chain variable domain of TCR clone 98844 (TRAV1-2, TRAJ8)
CAVREDTGFQKLVF

SEQ ID NO: 197688 - protein, 15 aa, Homo sapiens
  CDR3 for beta chain variable domain of TCR clone 98844 (TRBV28, TRBJ2-4)
CAAGSGALLMGIQYF

SEQ ID NO: 197689 - protein, 14 aa, Homo sapiens
  CDR3 for alpha chain variable domain of TCR clone 98845 (TRAV4, TRAJ9)
CLVGSGTGGFKTIF

SEQ ID NO: 197690 - protein, 13 aa, Homo sapiens
  CDR3 for beta chain variable domain of TCR clone 98845 (TRBV11-2, TRBJ2-5)
CASSFSSQETQYF

SEQ ID NO: 197691 - protein, 11 aa, Homo sapiens
  CDR3 for alpha chain variable domain of TCR clone 98846 (TRAV5, TRAJ31)
CAESNNARLMF

SEQ ID NO: 197692 - protein, 15 aa, Homo sapiens
  CDR3 for beta chain variable domain of TCR clone 98846 (TRBV2, TRBJ2-1)
CASSEEREGDNEQFF

SEQ ID NO: 197693 - protein, 16 aa, Homo sapiens
  CDR3 for alpha chain variable domain of TCR clone 98847 (TRAV3, TRAJ10)
CAVRDMRAGGGNKLTF

SEQ ID NO: 197694 - protein, 13 aa, Homo sapiens
  CDR3 for beta chain variable domain of TCR clone 98847 (TRBV27, TRBJ2-1)
CASRTLGVGEQFF

SEQ ID NO: 197695 - protein, 13 aa, Homo sapiens
  CDR3 for alpha chain variable domain of TCR clone 98848 (TRAV27, TRAJ29)
CAGAHSGNTPLVF

SEQ ID NO: 197696 - protein, 11 aa, Homo sapiens
  CDR3 for beta chain variable domain of TCR clone 98848 (TRBV3-1, TRBJ2-4)
CASSRSDIQYF

SEQ ID NO: 197697 - protein, 14 aa, Homo sapiens
  CDR3 for alpha chain variable domain of TCR clone 98849 (TRAV26-1, TRAJ21)
CIVRPPYNFDKFYF

SEQ ID NO: 197698 - protein, 14 aa, Homo sapiens
  CDR3 for beta chain variable domain of TCR clone 98849 (TRBV19, TRBJ2-1)
CASPTFVLSGEQFF

SEQ ID NO: 197699 - protein, 18 aa, Homo sapiens
  CDR3 for alpha chain variable domain of TCR clone 98850 (TRAV13-1, TRAJ52)
CAAKNPNAGGTSYGKLTF

SEQ ID NO: 197700 - protein, 16 aa, Homo sapiens
  CDR3 for beta chain variable domain of TCR clone 98850 (TRBV15, TRBJ2-6)
CATSVNGGFLANVLTF

SEQ ID NO: 197701 - protein, 15 aa, Homo sapiens
  CDR3 for alpha chain variable domain of TCR clone 98851 (TRAV4, TRAJ39)
CLVGPNHNAGNMLTF

SEQ ID NO: 197702 - protein, 16 aa, Homo sapiens
  CDR3 for beta chain variable domain of TCR clone 98851 (TRBV13, TRBJ2-2)
CASSPRTGEHTGELFF

SEQ ID NO: 197703 - protein, 11 aa, Homo sapiens
  CDR3 for alpha chain variable domain of TCR clone 98852 (TRAV1-1, TRAJ23)
CAVRQGGKLIF

SEQ ID NO: 197704 - protein, 16 aa, Homo sapiens
  CDR3 for beta chain variable domain of TCR clone 98852 (TRBV19, TRBJ2-1)
CASSKAGPSSYNEQFF

SEQ ID NO: 197705 - protein, 15 aa, Homo sapiens
  CDR3 for alpha chain variable domain of TCR clone 98853 (TRAV38-1, TRAJ37)
CALIHGSGNTGKLIF

SEQ ID NO: 197706 - protein, 12 aa, Homo sapiens
  CDR3 for beta chain variable domain of TCR clone 98853 (TRBV7-9, TRBJ2-7)
CASSFGSCEQYF

SEQ ID NO: 197707 - protein, 11 aa, Homo sapiens
  CDR3 for alpha chain variable domain of TCR clone 98854 (TRAV3, TRAJ21)
CAVGNFNKFYF

SEQ ID NO: 197708 - protein, 16 aa, Homo sapiens
  CDR3 for beta chain variable domain of TCR clone 98854 (TRBV7-2, TRBJ1-4)
CASSLAPGRRDEKLFF

SEQ ID NO: 197709 - protein, 16 aa, Homo sapiens
  CDR3 for alpha chain variable domain of TCR clone 98855 (TRAV14/DV4, TRAJ53)
CAMREGGGGSNYKLTF

SEQ ID NO: 197710 - protein, 14 aa, Homo sapiens
  CDR3 for beta chain variable domain of TCR clone 98855 (TRBV7-3, TRBJ1-1)
CASSLKGGNTEAFF

SEQ ID NO: 197711 - protein, 18 aa, Homo sapiens
  CDR3 for alpha chain variable domain of TCR clone 98856 (TRAV29/DV5, TRAJ52)
CAAVFRGAGGTSYGKLTF

SEQ ID NO: 197712 - protein, 16 aa, Homo sapiens
  CDR3 for beta chain variable domain of TCR clone 98856 (TRBV7-3, TRBJ2-2)
CASSLKRGTLSGELFF

SEQ ID NO: 197713 - protein, 16 aa, Homo sapiens
  CDR3 for alpha chain variable domain of TCR clone 98857 (TRAV23/DV6, TRAJ18)
CAAKNDRGSTLGRLYF

SEQ ID NO: 197714 - protein, 15 aa, Homo sapiens
  CDR3 for beta chain variable domain of TCR clone 98857 (TRBV15, TRBJ2-3)
CATSRDPRGTDTQYF

SEQ ID NO: 197715 - protein, 15 aa, Homo sapiens
  CDR3 for alpha chain variable domain of TCR clone 98858 (TRAV27, TRAJ22)
CARAPLKGSARQLTF

SEQ ID NO: 197716 - protein, 16 aa, Homo sapiens
  CDR3 for beta chain variable domain of TCR clone 98858 (TRBV19, TRBJ2-2)
CASTLGASGAPGELFF

SEQ ID NO: 197717 - protein, 14 aa, Homo sapiens
  CDR3 for alpha chain variable domain of TCR clone 98859 (TRAV23/DV6, TRAJ13)
CAASETGGYQKVTF

SEQ ID NO: 197718 - protein, 13 aa, Homo sapiens
  CDR3 for beta chain variable domain of TCR clone 98859 (TRBV29-1, TRBJ2-1)
CSVEDGRVNEQFF

SEQ ID NO: 197719 - protein, 13 aa, Homo sapiens
  CDR3 for alpha chain variable domain of TCR clone 98860 (TRAV2, TRAJ29)
CAVEPTGNTPLVF

SEQ ID NO: 197720 - protein, 14 aa, Homo sapiens
  CDR3 for beta chain variable domain of TCR clone 98860 (TRBV7-3, TRBJ2-2)
CASGLLGSTGELFF

SEQ ID NO: 197721 - protein, 12 aa, Homo sapiens
  CDR3 for alpha chain variable domain of TCR clone 98861 (TRAV27, TRAJ49)
CAGARLGNQFYF

SEQ ID NO: 197722 - protein, 15 aa, Homo sapiens
  CDR3 for beta chain variable domain of TCR clone 98861 (TRBV20-1, TRBJ2-7)
CSARDRVSGMDEQYF

SEQ ID NO: 197723 - protein, 11 aa, Homo sapiens
  CDR3 for alpha chain variable domain of TCR clone 98862 (TRAV27, TRAJ47)
SIVEYGNKVVF

SEQ ID NO: 197724 - protein, 18 aa, Homo sapiens
  CDR3 for beta chain variable domain of TCR clone 98862 (TRBV2, TRBJ2-1)
CASRGLAGGPRTYNEQFF

SEQ ID NO: 197725 - protein, 18 aa, Homo sapiens
  CDR3 for alpha chain variable domain of TCR clone 98863 (TRAV13-1, TRAJ52)
CAAKNPNAGGTSYGKLTF

SEQ ID NO: 197726 - protein, 14 aa, Homo sapiens
  CDR3 for beta chain variable domain of TCR clone 98863 (TRBV6-5, TRBJ1-1)
CASSSGEGLTEAFF

SEQ ID NO: 197727 - protein, 14 aa, Homo sapiens
  CDR3 for alpha chain variable domain of TCR clone 98864 (TRAV13-1, TRAJ44)
CAAKATGNASKLTF

SEQ ID NO: 197728 - protein, 12 aa, Homo sapiens
  CDR3 for beta chain variable domain of TCR clone 98864 (TRBV7-8, TRBJ2-7)
CASSLGDREQYF

SEQ ID NO: 197729 - protein, 14 aa, Homo sapiens
  CDR3 for alpha chain variable domain of TCR clone 98865 (TRAV12-2, TRAJ13)
CAVKKIGGYQKVTF

SEQ ID NO: 197730 - protein, 15 aa, Homo sapiens
  CDR3 for beta chain variable domain of TCR clone 98865 (TRBV10-2, TRBJ1-1)
CASSEFRPSSTEAFF

SEQ ID NO: 197731 - protein, 14 aa, Homo sapiens
  CDR3 for alpha chain variable domain of TCR clone 98866 (TRAV1-2, TRAJ10)
RAVRVTGGGNKLTF

SEQ ID NO: 197732 - protein, 12 aa, Homo sapiens
  CDR3 for beta chain variable domain of TCR clone 98866 (TRBV5-4, TRBJ1-1)
CASSFGQTEAFF

SEQ ID NO: 197733 - protein, 12 aa, Homo sapiens
  CDR3 for alpha chain variable domain of TCR clone 98867 (TRAV8-4, TRAJ31)
CAVSDSNARLMF

SEQ ID NO: 197734 - protein, 15 aa, Homo sapiens
  CDR3 for beta chain variable domain of TCR clone 98867 (TRBV13, TRBJ2-7)
CASRFWGQGADEQYF

SEQ ID NO: 197735 - protein, 17 aa, Homo sapiens
  CDR3 for alpha chain variable domain of TCR clone 98868 (TRAV26-1, TRAJ37)
CIVRVITVSSDTGKLIF

SEQ ID NO: 197736 - protein, 15 aa, Homo sapiens
  CDR3 for beta chain variable domain of TCR clone 98868 (TRBV10-1, TRBJ2-3)
CASSATSGGFDTQYF

SEQ ID NO: 197737 - protein, 16 aa, Homo sapiens
  CDR3 for alpha chain variable domain of TCR clone 98869 (TRAV30, TRAJ24)
CGTEIVDADSWGKFQF

SEQ ID NO: 197738 - protein, 12 aa, Homo sapiens
  CDR3 for beta chain variable domain of TCR clone 98869 (TRBV7-6, TRBJ2-7)
CASSLADSEQYF

SEQ ID NO: 197739 - protein, 14 aa, Homo sapiens
  CDR3 for alpha chain variable domain of TCR clone 98870 (TRAV13-2, TRAJ43)
CAEIPTYNNNDMRF

SEQ ID NO: 197740 - protein, 15 aa, Homo sapiens
  CDR3 for beta chain variable domain of TCR clone 98870 (TRBV7-9, TRBJ2-2)
CASGPLDTFPWELFF

SEQ ID NO: 197741 - protein, 10 aa, Homo sapiens
  CDR3 for alpha chain variable domain of TCR clone 98871 (TRAV30, TRAJ32)
CGTEKDMVVL

SEQ ID NO: 197742 - protein, 13 aa, Homo sapiens
  CDR3 for beta chain variable domain of TCR clone 98871 (TRBV10-3, TRBJ2-7)
CASNLAVNYEQYF

SEQ ID NO: 197743 - protein, 19 aa, Homo sapiens
  CDR3 for alpha chain variable domain of TCR clone 98872 (TRAV2, TRAJ20)
ILQVREADAAVYRDCKLSF

SEQ ID NO: 197744 - protein, 15 aa, Homo sapiens
  CDR3 for beta chain variable domain of TCR clone 98872 (TRBV11-3, TRBJ2-3)
CASLKDGREGDTQYF

SEQ ID NO: 197745 - protein, 11 aa, Homo sapiens
  CDR3 for alpha chain variable domain of TCR clone 98873 (TRAV2, TRAJ21)
CAVFNFNKFYF

SEQ ID NO: 197746 - protein, 12 aa, Homo sapiens
  CDR3 for beta chain variable domain of TCR clone 98873 (TRBV6-3, TRBJ2-7)
CASSRQGYEQYF

SEQ ID NO: 197747 - protein, 16 aa, Homo sapiens
  CDR3 for alpha chain variable domain of TCR clone 98874 (TRAV30, TRAJ24)
CGTEIVDADSWGKFQF

SEQ ID NO: 197748 - protein, 15 aa, Homo sapiens
  CDR3 for beta chain variable domain of TCR clone 98874 (TRBV20-1, TRBJ1-1)
CSARKAETSNTEAFF

SEQ ID NO: 197749 - protein, 14 aa, Homo sapiens
  CDR3 for alpha chain variable domain of TCR clone 98875 (TRAV1-2, TRAJ16)
YAVNRFSDGQKLLF

SEQ ID NO: 197750 - protein, 13 aa, Homo sapiens
  CDR3 for beta chain variable domain of TCR clone 98875 (TRBV7-9, TRBJ1-2)
CAGSLKQNYGYTF

SEQ ID NO: 197751 - protein, 21 aa, Homo sapiens
  CDR3 for alpha chain variable domain of TCR clone 98876 (TRAV36/DV7, TRAJ39)
TATQTGDSAIYLPNAGNMLTF

SEQ ID NO: 197752 - protein, 15 aa, Homo sapiens
  CDR3 for beta chain variable domain of TCR clone 98876 (TRBV11-2, TRBJ2-1)
CASSLTSGGYNEQFF

SEQ ID NO: 197753 - protein, 14 aa, Homo sapiens
  CDR3 for alpha chain variable domain of TCR clone 98877 (TRAV12-3, TRAJ22)
CAMSLFGSARQLTF

SEQ ID NO: 197754 - protein, 11 aa, Homo sapiens
  CDR3 for beta chain variable domain of TCR clone 98877 (TRBV20-1, TRBJ2-7)
CSARTSYEQYF

SEQ ID NO: 197755 - protein, 14 aa, Homo sapiens
  CDR3 for alpha chain variable domain of TCR clone 98878 (TRAV1-2, TRAJ16)
CAVNRFSDGQKLLF

SEQ ID NO: 197756 - protein, 13 aa, Homo sapiens
  CDR3 for beta chain variable domain of TCR clone 98878 (TRBV10-3, TRBJ1-2)
CAISERDSYGYSF

SEQ ID NO: 197757 - protein, 16 aa, Homo sapiens
  CDR3 for alpha chain variable domain of TCR clone 98879 (TRAV23/DV6, TRAJ9)
CAASIGGNTGGFKTIF

SEQ ID NO: 197758 - protein, 13 aa, Homo sapiens
  CDR3 for beta chain variable domain of TCR clone 98879 (TRBV10-3, TRBJ2-7)
CASKLAVNYEQYL

SEQ ID NO: 197759 - protein, 18 aa, Homo sapiens
  CDR3 for alpha chain variable domain of TCR clone 98880 (TRAV21, TRAJ52)
CAVRPSPAGGTSYGKLTF

SEQ ID NO: 197760 - protein, 13 aa, Homo sapiens
  CDR3 for beta chain variable domain of TCR clone 98880 (TRBV10-3, TRBJ2-7)
CAISEKGGYEQYF

SEQ ID NO: 197761 - protein, 11 aa, Homo sapiens
  CDR3 for alpha chain variable domain of TCR clone 98881 (TRAV12-2, TRAJ36)
CAVAGANNLFF

SEQ ID NO: 197762 - protein, 13 aa, Homo sapiens
  CDR3 for beta chain variable domain of TCR clone 98881 (TRBV28, TRBJ2-5)
CAGVSRGEETQYF

SEQ ID NO: 197763 - protein, 12 aa, Homo sapiens
  CDR3 for alpha chain variable domain of TCR clone 98882 (TRAV1-2, TRAJ33)
CAALDSNYQLIW

SEQ ID NO: 197764 - protein, 17 aa, Homo sapiens
  CDR3 for beta chain variable domain of TCR clone 98882 (TRBV11-2, TRBJ2-3)
CASSLEANGLAGDTQYF

SEQ ID NO: 197765 - protein, 13 aa, Homo sapiens
  CDR3 for alpha chain variable domain of TCR clone 98883 (TRAV20, TRAJ3)
CARRYSSASKIIF

SEQ ID NO: 197766 - protein, 12 aa, Homo sapiens
  CDR3 for beta chain variable domain of TCR clone 98883 (TRBV28, TRBJ2-1)
CASSLRGNEQFF

SEQ ID NO: 197767 - protein, 11 aa, Homo sapiens
  CDR3 for alpha chain variable domain of TCR clone 98884 (TRAV1-1, TRAJ16)
CAAGDGQNLLF

SEQ ID NO: 197768 - protein, 15 aa, Homo sapiens
  CDR3 for beta chain variable domain of TCR clone 98884 (TRBV28, TRBJ1-2)
CASIPQGSDDYGYTF

SEQ ID NO: 197769 - protein, 14 aa, Homo sapiens
  CDR3 for alpha chain variable domain of TCR clone 98885 (TRAV1-2, TRAJ16)
CAVNRVSDGQKLLF

SEQ ID NO: 197770 - protein, 11 aa, Homo sapiens
  CDR3 for beta chain variable domain of TCR clone 98885 (TRBV11-2, TRBJ2-2)
CASSLPGELFF

SEQ ID NO: 197771 - protein, 15 aa, Homo sapiens
  CDR3 for alpha chain variable domain of TCR clone 98886 (TRAV27, TRAJ24)
CAGSMTTDSWGKLQF

SEQ ID NO: 197772 - protein, 15 aa, Homo sapiens
  CDR3 for beta chain variable domain of TCR clone 98886 (TRBV6-6, TRBJ1-5)
CASSSPRGQGQAQHF

SEQ ID NO: 197773 - protein, 12 aa, Homo sapiens
  CDR3 for alpha chain variable domain of TCR clone 98887 (TRAV1-1, TRAJ8)
CAGGTGFQTLVF

SEQ ID NO: 197774 - protein, 13 aa, Homo sapiens
  CDR3 for beta chain variable domain of TCR clone 98887 (TRBV7-3, TRBJ1-1)
CASSQDWGAEAFF

SEQ ID NO: 197775 - protein, 13 aa, Homo sapiens
  CDR3 for alpha chain variable domain of TCR clone 98888 (TRAV21, TRAJ44)
CAAHTGTASKLTF

SEQ ID NO: 197776 - protein, 15 aa, Homo sapiens
  CDR3 for beta chain variable domain of TCR clone 98888 (TRBV18, TRBJ1-5)
CASSPQARSNQPQHF

SEQ ID NO: 197777 - protein, 14 aa, Homo sapiens
  CDR3 for alpha chain variable domain of TCR clone 98889 (TRAV8-3, TRAJ6)
CAVGASGGSYIHTF

SEQ ID NO: 197778 - protein, 17 aa, Homo sapiens
  CDR3 for beta chain variable domain of TCR clone 98889 (TRBV18, TRBJ2-2)
CASSPSDPWQNTGELFF

SEQ ID NO: 197779 - protein, 12 aa, Homo sapiens
  CDR3 for alpha chain variable domain of TCR clone 98890 (TRAV13-2, TRAJ54)
CGAHEGARKLVF

SEQ ID NO: 197780 - protein, 16 aa, Homo sapiens
  CDR3 for beta chain variable domain of TCR clone 98890 (TRBV12-5, TRBJ2-5)
CASGPRTSGNQETQYF

SEQ ID NO: 197781 - protein, 12 aa, Homo sapiens
  CDR3 for alpha chain variable domain of TCR clone 98891 (TRAV17, TRAJ30)
CVPERRDDKIIF

SEQ ID NO: 197782 - protein, 14 aa, Homo sapiens
  CDR3 for beta chain variable domain of TCR clone 98891 (TRBV7-7, TRBJ2-2)
CASSRGRSTGELFF

SEQ ID NO: 197783 - protein, 13 aa, Homo sapiens
  CDR3 for alpha chain variable domain of TCR clone 98892 (TRAV17, TRAJ21)
CATDGGNFNKFYF

SEQ ID NO: 197784 - protein, 14 aa, Homo sapiens
  CDR3 for beta chain variable domain of TCR clone 98892 (TRBV5-1, TRBJ2-3)
CASRGQTSTDTQYF

SEQ ID NO: 197785 - protein, 14 aa, Homo sapiens
  CDR3 for alpha chain variable domain of TCR clone 98893 (TRAV17, TRAJ54)
CATDANQGAQKLVF

SEQ ID NO: 197786 - protein, 15 aa, Homo sapiens
  CDR3 for beta chain variable domain of TCR clone 98893 (TRBV28, TRBJ1-3)
CASSMGWASGNTIYF

SEQ ID NO: 197787 - protein, 12 aa, Homo sapiens
  CDR3 for alpha chain variable domain of TCR clone 98894 (TRAV12-3, TRAJ42)
CAPEGSQGNLIF

SEQ ID NO: 197788 - protein, 16 aa, Homo sapiens
  CDR3 for beta chain variable domain of TCR clone 98894 (TRBV11-2, TRBJ2-1)
CASSPRLAGVYNEQFF

SEQ ID NO: 197789 - protein, 11 aa, Homo sapiens
  CDR3 for alpha chain variable domain of TCR clone 98895 (TRAV27, TRAJ47)
CAGASGNKLVF

SEQ ID NO: 197790 - protein, 13 aa, Homo sapiens
  CDR3 for beta chain variable domain of TCR clone 98895 (TRBV12-4, TRBJ1-1)
CASSPGTGFEAFF

SEQ ID NO: 197791 - protein, 18 aa, Homo sapiens
  CDR3 for alpha chain variable domain of TCR clone 98896 (TRAV21, TRAJ52)
CAVRPSPAGGTSYGKLTF

SEQ ID NO: 197792 - protein, 17 aa, Homo sapiens
  CDR3 for beta chain variable domain of TCR clone 98896 (TRBV13, TRBJ2-3)
CASSLSRVAGGRNTEYF

SEQ ID NO: 197793 - protein, 13 aa, Homo sapiens
  CDR3 for alpha chain variable domain of TCR clone 98897 (TRAV12-1, TRAJ21)
YVVTLYNFNKFYF

SEQ ID NO: 197794 - protein, 20 aa, Homo sapiens
  CDR3 for beta chain variable domain of TCR clone 98897 (TRBV7-8, TRBJ2-1)
CASSLAHRLAGVRSYNEQFF

SEQ ID NO: 197795 - protein, 14 aa, Homo sapiens
  CDR3 for alpha chain variable domain of TCR clone 98898 (TRAV16, TRAJ33)
CALSAMDSNYQLIW

SEQ ID NO: 197796 - protein, 15 aa, Homo sapiens
  CDR3 for beta chain variable domain of TCR clone 98898 (TRBV6-3, TRBJ2-7)
CASSSPGTVFYEQYF

SEQ ID NO: 197797 - protein, 12 aa, Homo sapiens
  CDR3 for alpha chain variable domain of TCR clone 98899 (TRAV27, TRAJ35)
CAGADFGNVLHC

SEQ ID NO: 197798 - protein, 13 aa, Homo sapiens
  CDR3 for beta chain variable domain of TCR clone 98899 (TRBV7-3, TRBJ1-1)
CASSQDWGAEAFC

SEQ ID NO: 197799 - protein, 12 aa, Homo sapiens
  CDR3 for alpha chain variable domain of TCR clone 98900 (TRAV21, TRAJ58)
CALSASGSRLTF

SEQ ID NO: 197800 - protein, 13 aa, Homo sapiens
  CDR3 for beta chain variable domain of TCR clone 98900 (TRBV5-7, TRBJ1-2)
CASSVGVFNGYTF

SEQ ID NO: 197801 - protein, 13 aa, Homo sapiens
  CDR3 for alpha chain variable domain of TCR clone 98901 (TRAV12-2, TRAJ50)
CAVIVTSYYKVIF

SEQ ID NO: 197802 - protein, 14 aa, Homo sapiens
  CDR3 for beta chain variable domain of TCR clone 98901 (TRBV9, TRBJ2-1)
CASSVDPRGKEQFF

SEQ ID NO: 197803 - protein, 11 aa, Homo sapiens
  CDR3 for alpha chain variable domain of TCR clone 98902 (TRAV12-3, TRAJ27)
CAMANAGKSTF

SEQ ID NO: 197804 - protein, 13 aa, Homo sapiens
  CDR3 for beta chain variable domain of TCR clone 98902 (TRBV4-1, TRBJ2-2)
CASSQENTGELFF

SEQ ID NO: 197805 - protein, 15 aa, Homo sapiens
  CDR3 for alpha chain variable domain of TCR clone 98903 (TRAV12-1, TRAJ44)
CVADLPTGTASRLTF

SEQ ID NO: 197806 - protein, 13 aa, Homo sapiens
  CDR3 for beta chain variable domain of TCR clone 98903 (TRBV6-5, TRBJ2-5)
CASSPQGGETQYF

SEQ ID NO: 197807 - protein, 15 aa, Homo sapiens
  CDR3 for alpha chain variable domain of TCR clone 98904 (TRAV16, TRAJ16)
CALQGGGSDGQKLLF

SEQ ID NO: 197808 - protein, 15 aa, Homo sapiens
  CDR3 for beta chain variable domain of TCR clone 98904 (TRBV20-1, TRBJ2-7)
CSARDRVSGMDEQHF

SEQ ID NO: 197809 - protein, 16 aa, Homo sapiens
  CDR3 for alpha chain variable domain of TCR clone 98905 (TRAV3, TRAJ13)
CAVRDPNSGGYHKVTF

SEQ ID NO: 197810 - protein, 13 aa, Homo sapiens
  CDR3 for beta chain variable domain of TCR clone 98905 (TRBV7-9, TRBJ2-7)
CASSLQGSYEQYF

SEQ ID NO: 197811 - protein, 15 aa, Homo sapiens
  CDR3 for alpha chain variable domain of TCR clone 98906 (TRAV13-2, TRAJ45)
CAESDSGGGADGLTF

SEQ ID NO: 197812 - protein, 14 aa, Homo sapiens
  CDR3 for beta chain variable domain of TCR clone 98906 (TRBV7-2, TRBJ1-1)
CASSFLTGTTEAFF

SEQ ID NO: 197813 - protein, 12 aa, Homo sapiens
  CDR3 for alpha chain variable domain of TCR clone 98907 (TRAV13-1, TRAJ21)
CAAKEGFNKFYF

SEQ ID NO: 197814 - protein, 17 aa, Homo sapiens
  CDR3 for beta chain variable domain of TCR clone 98907 (TRBV20-1, TRBJ2-1)
GSASSSGLAGSYNEQFF

SEQ ID NO: 197815 - protein, 16 aa, Homo sapiens
  CDR3 for alpha chain variable domain of TCR clone 98908 (TRAV3, TRAJ3)
WAVRDRAKSSASKIIF

SEQ ID NO: 197816 - protein, 16 aa, Homo sapiens
  CDR3 for beta chain variable domain of TCR clone 98908 (TRBV20-1, TRBJ2-4)
CSATSLAELAKNIQYF

SEQ ID NO: 197817 - protein, 16 aa, Homo sapiens
  CDR3 for alpha chain variable domain of TCR clone 98909 (TRAV12-3, TRAJ22)
CVVNTISSGSARQLTF

SEQ ID NO: 197818 - protein, 13 aa, Homo sapiens
  CDR3 for beta chain variable domain of TCR clone 98909 (TRBV19, TRBJ2-1)
CASNGGVFSEQFF

SEQ ID NO: 197819 - protein, 10 aa, Homo sapiens
  CDR3 for alpha chain variable domain of TCR clone 98910 (TRAV36/DV7, TRAJ56)
CAGPAVELTF

SEQ ID NO: 197820 - protein, 16 aa, Homo sapiens
  CDR3 for beta chain variable domain of TCR clone 98910 (TRBV12-4, TRBJ2-1)
CASSAVGQGNGDEQFF

SEQ ID NO: 197821 - protein, 14 aa, Homo sapiens
  CDR3 for alpha chain variable domain of TCR clone 98911 (TRAV1-2, TRAJ16)
RAVNRFSDGQKLLF

SEQ ID NO: 197822 - protein, 14 aa, Homo sapiens
  CDR3 for beta chain variable domain of TCR clone 98911 (TRBV7-9, TRBJ2-3)
CASSLEDGTGTQYF

SEQ ID NO: 197823 - protein, 12 aa, Homo sapiens
  CDR3 for alpha chain variable domain of TCR clone 98912 (TRAV21, TRAJ31)
CAVSPARGRLMF

SEQ ID NO: 197824 - protein, 14 aa, Homo sapiens
  CDR3 for beta chain variable domain of TCR clone 98912 (TRBV28, TRBJ2-7)
CASSLLRISYEQYL

SEQ ID NO: 197825 - protein, 17 aa, Homo sapiens
  CDR3 for alpha chain variable domain of TCR clone 98913 (TRAV3, TRAJ6)
CAVRDGPRAGGSYIPTF

SEQ ID NO: 197826 - protein, 14 aa, Homo sapiens
  CDR3 for beta chain variable domain of TCR clone 98913 (TRBV5-5, TRBJ1-4)
CASSPRGYNEKLFF

SEQ ID NO: 197827 - protein, 13 aa, Homo sapiens
  CDR3 for alpha chain variable domain of TCR clone 98914 (TRAV8-2, TRAJ36)
CVVSHLPTNNPFF

SEQ ID NO: 197828 - protein, 18 aa, Homo sapiens
  CDR3 for beta chain variable domain of TCR clone 98914 (TRBV7-9, TRBJ2-6)
CASSFPGAGISGANVLTF

SEQ ID NO: 197829 - protein, 14 aa, Homo sapiens
  CDR3 for alpha chain variable domain of TCR clone 98915 (TRAV21, TRAJ37)
CAVKGSSNTGKLIF

SEQ ID NO: 197830 - protein, 14 aa, Homo sapiens
  CDR3 for beta chain variable domain of TCR clone 98915 (TRBV7-2, TRBJ2-1)
CTSSRGGARNEQFF

SEQ ID NO: 197831 - protein, 14 aa, Homo sapiens
  CDR3 for alpha chain variable domain of TCR clone 98916 (TRAV4, TRAJ43)
CLVGPMYNNNDMRF

SEQ ID NO: 197832 - protein, 14 aa, Homo sapiens
  CDR3 for beta chain variable domain of TCR clone 98916 (TRBV12-5, TRBJ2-5)
CASGSRTHQETQYF

SEQ ID NO: 197833 - protein, 12 aa, Homo sapiens
  CDR3 for alpha chain variable domain of TCR clone 98917 (TRAV12-1, TRAJ40)
CVVNGETYKYIF

SEQ ID NO: 197834 - protein, 14 aa, Homo sapiens
  CDR3 for beta chain variable domain of TCR clone 98917 (TRBV7-9, TRBJ1-1)
CASSSMKGNTEAFF

SEQ ID NO: 197835 - protein, 15 aa, Homo sapiens
  CDR3 for alpha chain variable domain of TCR clone 98918 (TRAV8-6, TRAJ10)
CAVSSKGGGGNKLTF

SEQ ID NO: 197836 - protein, 15 aa, Homo sapiens
  CDR3 for beta chain variable domain of TCR clone 98918 (TRBV28, TRBJ1-2)
CASSSHSIANYGDTF

SEQ ID NO: 197837 - protein, 12 aa, Homo sapiens
  CDR3 for alpha chain variable domain of TCR clone 98919 (TRAV21, TRAJ8)
CAVNTGFQKLVF

SEQ ID NO: 197838 - protein, 13 aa, Homo sapiens
  CDR3 for beta chain variable domain of TCR clone 98919 (TRBV6-3, TRBJ2-1)
CASSYDKYNEQFF

SEQ ID NO: 197839 - protein, 12 aa, Homo sapiens
  CDR3 for alpha chain variable domain of TCR clone 98920 (TRAV12-3, TRAJ17)
CAMTLTGNKLTF

SEQ ID NO: 197840 - protein, 15 aa, Homo sapiens
  CDR3 for beta chain variable domain of TCR clone 98920 (TRBV20-1, TRBJ2-5)
CSAEGTGGLQETQYF

SEQ ID NO: 197841 - protein, 19 aa, Homo sapiens
  CDR3 for alpha chain variable domain of TCR clone 98921 (TRAV26-1, TRAJ52)
CIVRAHRNAGGTSYGKLTF

SEQ ID NO: 197842 - protein, 15 aa, Homo sapiens
  CDR3 for beta chain variable domain of TCR clone 98921 (TRBV5-7, TRBJ2-7)
CASSLGPGRGHEQYF

SEQ ID NO: 197843 - protein, 14 aa, Homo sapiens
  CDR3 for alpha chain variable domain of TCR clone 98922 (TRAV12-2, TRAJ17)
CAVLFKAAGNKLTF

SEQ ID NO: 197844 - protein, 15 aa, Homo sapiens
  CDR3 for beta chain variable domain of TCR clone 98922 (TRBV20-1, TRBJ2-7)
RSARDRVSGMDEQYF

SEQ ID NO: 197845 - protein, 12 aa, Homo sapiens
  CDR3 for alpha chain variable domain of TCR clone 98923 (TRAV12-3, TRAJ54)
CAMSVGAQKLVF

SEQ ID NO: 197846 - protein, 16 aa, Homo sapiens
  CDR3 for beta chain variable domain of TCR clone 98923 (TRBV19, TRBJ2-1)
CASSKAEPSSYNEQFF

SEQ ID NO: 197847 - protein, 14 aa, Homo sapiens
  CDR3 for alpha chain variable domain of TCR clone 98924 (TRAV12-2, TRAJ17)
CAVLFKAAGNKLTF

SEQ ID NO: 197848 - protein, 14 aa, Homo sapiens
  CDR3 for beta chain variable domain of TCR clone 98924 (TRBV4-1, TRBJ2-2)
CASSPAVNTGELFF

SEQ ID NO: 197849 - protein, 14 aa, Homo sapiens
  CDR3 for alpha chain variable domain of TCR clone 98925 (TRAV35, TRAJ13)
CAGSPSGGYQKVTF

SEQ ID NO: 197850 - protein, 13 aa, Homo sapiens
  CDR3 for beta chain variable domain of TCR clone 98925 (TRBV29-1, TRBJ1-1)
CSVGDSRNTEVFF

SEQ ID NO: 197851 - protein, 17 aa, Homo sapiens
  CDR3 for alpha chain variable domain of TCR clone 98926 (TRAV8-6, TRAJ58)
CAVSSWVGETSGPRLTF

SEQ ID NO: 197852 - protein, 17 aa, Homo sapiens
  CDR3 for beta chain variable domain of TCR clone 98926 (TRBV4-3, TRBJ1-2)
CASSSRLQAGGSVGYTF

SEQ ID NO: 197853 - protein, 15 aa, Homo sapiens
  CDR3 for alpha chain variable domain of TCR clone 98927 (TRAV2, TRAJ13)
CATPSYSGGYQKVTF

SEQ ID NO: 197854 - protein, 14 aa, Homo sapiens
  CDR3 for beta chain variable domain of TCR clone 98927 (TRBV5-1, TRBJ2-7)
CASSRGESLYEQYF

SEQ ID NO: 197855 - protein, 14 aa, Homo sapiens
  CDR3 for alpha chain variable domain of TCR clone 98928 (TRAV1-2, TRAJ16)
CAVNRFSDGQRLLF

SEQ ID NO: 197856 - protein, 13 aa, Homo sapiens
  CDR3 for beta chain variable domain of TCR clone 98928 (TRBV20-1, TRBJ1-6)
CSAPTGLGSPLHF

SEQ ID NO: 197857 - protein, 15 aa, Homo sapiens
  CDR3 for alpha chain variable domain of TCR clone 98929 (TRAV3, TRAJ3)
CAVRDMSSSASKIIF

SEQ ID NO: 197858 - protein, 12 aa, Homo sapiens
  CDR3 for beta chain variable domain of TCR clone 98929 (TRBV5-1, TRBJ1-2)
CASSQDTYGYTF

SEQ ID NO: 197859 - protein, 14 aa, Homo sapiens
  CDR3 for alpha chain variable domain of TCR clone 98930 (TRAV8-6, TRAJ34)
CAVSDQGNTDKLIF

SEQ ID NO: 197860 - protein, 17 aa, Homo sapiens
  CDR3 for beta chain variable domain of TCR clone 98930 (TRBV4-2, TRBJ1-1)
CASTQFGGGSGNTEAFF

SEQ ID NO: 197861 - protein, 14 aa, Homo sapiens
  CDR3 for alpha chain variable domain of TCR clone 98931 (TRAV8-2, TRAJ4)
CVVSPSGGYNKLIF

SEQ ID NO: 197862 - protein, 19 aa, Homo sapiens
  CDR3 for beta chain variable domain of TCR clone 98931 (TRBV7-2, TRBJ2-3)
CASSFLSRNWGGGTDTQYF

SEQ ID NO: 197863 - protein, 15 aa, Homo sapiens
  CDR3 for alpha chain variable domain of TCR clone 98932 (TRAV21, TRAJ53)
CATLNSGGSNYKLTF

SEQ ID NO: 197864 - protein, 13 aa, Homo sapiens
  CDR3 for beta chain variable domain of TCR clone 98932 (TRBV3-1, TRBJ2-2)
CASLARGSGELFF

SEQ ID NO: 197865 - protein, 14 aa, Homo sapiens
  CDR3 for alpha chain variable domain of TCR clone 98933 (TRAV8-6, TRAJ53)
CAALVLSSNYKLTF

SEQ ID NO: 197866 - protein, 15 aa, Homo sapiens
  CDR3 for beta chain variable domain of TCR clone 98933 (TRBV20-1, TRBJ2-3)
CSAEPLAGHGDTQYF

SEQ ID NO: 197867 - protein, 15 aa, Homo sapiens
  CDR3 for alpha chain variable domain of TCR clone 98934 (TRAV29/DV5, TRAJ29)
CAASERSSGNTPLVF

SEQ ID NO: 197868 - protein, 14 aa, Homo sapiens
  CDR3 for beta chain variable domain of TCR clone 98934 (TRBV6-1, TRBJ1-3)
CASVQGGGGNTIYF

SEQ ID NO: 197869 - protein, 11 aa, Homo sapiens
  CDR3 for alpha chain variable domain of TCR clone 98935 (TRAV13-1, TRAJ43)
CAASMRNDMRF

SEQ ID NO: 197870 - protein, 15 aa, Homo sapiens
  CDR3 for beta chain variable domain of TCR clone 98935 (TRBV28, TRBJ2-1)
CASSIIAGGRSEQFF

SEQ ID NO: 197871 - protein, 16 aa, Homo sapiens
  CDR3 for alpha chain variable domain of TCR clone 98936 (TRAV30, TRAJ24)
CGTGIVDADSWGKFQF

SEQ ID NO: 197872 - protein, 18 aa, Homo sapiens
  CDR3 for beta chain variable domain of TCR clone 98936 (TRBV20-1, TRBJ2-6)
CSAETTPTHGSGANVLTF

SEQ ID NO: 197873 - protein, 13 aa, Homo sapiens
  CDR3 for alpha chain variable domain of TCR clone 98937 (TRAV39, TRAJ33)
CAANPDSNYQLIW

SEQ ID NO: 197874 - protein, 13 aa, Homo sapiens
  CDR3 for beta chain variable domain of TCR clone 98937 (TRBV18, TRBJ1-1)
CASSGGRSTEAFF

SEQ ID NO: 197875 - protein, 15 aa, Homo sapiens
  CDR3 for alpha chain variable domain of TCR clone 98938 (TRAV12-3, TRAJ6)
CAMSATTGGSYIPTF

SEQ ID NO: 197876 - protein, 16 aa, Homo sapiens
  CDR3 for beta chain variable domain of TCR clone 98938 (TRBV7-9, TRBJ1-2)
CASSLGFSSGEDGYTF

SEQ ID NO: 197877 - protein, 13 aa, Homo sapiens
  CDR3 for alpha chain variable domain of TCR clone 98939 (TRAV2, TRAJ47)
CAVDREYGTKLVF

SEQ ID NO: 197878 - protein, 17 aa, Homo sapiens
  CDR3 for beta chain variable domain of TCR clone 98939 (TRBV15, TRBJ1-5)
CATSRVKGIYSNQPQHF

SEQ ID NO: 197879 - protein, 15 aa, Homo sapiens
  CDR3 for alpha chain variable domain of TCR clone 98940 (TRAV12-3, TRAJ6)
CAMSATTGGSYIPTF

SEQ ID NO: 197880 - protein, 14 aa, Homo sapiens
  CDR3 for beta chain variable domain of TCR clone 98940 (TRBV28, TRBJ2-3)
CAGSFVQGTDTQYF

SEQ ID NO: 197881 - protein, 20 aa, Homo sapiens
  CDR3 for alpha chain variable domain of TCR clone 98941 (TRAV26-1, TRAJ42)
CCVLLHRQTYYGGSQGNLIF

SEQ ID NO: 197882 - protein, 16 aa, Homo sapiens
  CDR3 for beta chain variable domain of TCR clone 98941 (TRBV7-3, TRBJ2-2)
CASSLKRGTLSGDLFF

SEQ ID NO: 197883 - protein, 12 aa, Homo sapiens
  CDR3 for alpha chain variable domain of TCR clone 98942 (TRAV12-3, TRAJ17)
CAMTLAGNKLTF

SEQ ID NO: 197884 - protein, 15 aa, Homo sapiens
  CDR3 for beta chain variable domain of TCR clone 98942 (TRBV4-1, TRBJ2-7)
CASSQNTGRLYEQYF

SEQ ID NO: 197885 - protein, 11 aa, Homo sapiens
  CDR3 for alpha chain variable domain of TCR clone 98943 (TRAV3, TRAJ21)
RAVGNFNKFYF

SEQ ID NO: 197886 - protein, 16 aa, Homo sapiens
  CDR3 for beta chain variable domain of TCR clone 98943 (TRBV19, TRBJ2-1)
CASSKAGPSSYNEQFF

SEQ ID NO: 197887 - protein, 13 aa, Homo sapiens
  CDR3 for alpha chain variable domain of TCR clone 98944 (TRAV12-1, TRAJ7)
CVVNMRGNNRLAF

SEQ ID NO: 197888 - protein, 15 aa, Homo sapiens
  CDR3 for beta chain variable domain of TCR clone 98944 (TRBV19, TRBJ1-2)
CASSVGQVLNYGYTF

SEQ ID NO: 197889 - protein, 12 aa, Homo sapiens
  CDR3 for alpha chain variable domain of TCR clone 98945 (TRAV3, TRAJ20)
CAVRDGDYKLSF

SEQ ID NO: 197890 - protein, 12 aa, Homo sapiens
  CDR3 for beta chain variable domain of TCR clone 98945 (TRBV28, TRBJ2-3)
CASSLYRDTQYF

SEQ ID NO: 197891 - protein, 13 aa, Homo sapiens
  CDR3 for alpha chain variable domain of TCR clone 98946 (TRAV8-6, TRAJ50)
CAVIKTSYEKVIF

SEQ ID NO: 197892 - protein, 15 aa, Homo sapiens
  CDR3 for beta chain variable domain of TCR clone 98946 (TRBV7-2, TRBJ2-2)
CASRRPGQNTGELFF

SEQ ID NO: 197893 - protein, 11 aa, Homo sapiens
  CDR3 for alpha chain variable domain of TCR clone 98947 (TRAV38-2/DV8, TRAJ31)
CAYFSNARLMF

SEQ ID NO: 197894 - protein, 13 aa, Homo sapiens
  CDR3 for beta chain variable domain of TCR clone 98947 (TRBV20-1, TRBJ2-7)
CSARGGKSYEQYF

SEQ ID NO: 197895 - protein, 13 aa, Homo sapiens
  CDR3 for alpha chain variable domain of TCR clone 98948 (TRAV23/DV6, TRAJ15)
CAALPAGRNCSDL

SEQ ID NO: 197896 - protein, 14 aa, Homo sapiens
  CDR3 for beta chain variable domain of TCR clone 98948 (TRBV7-9, TRBJ1-2)
CASRRQGANYGYTF

SEQ ID NO: 197897 - protein, 13 aa, Homo sapiens
  CDR3 for alpha chain variable domain of TCR clone 98949 (TRAV25, TRAJ30)
CAGRVDRDDKIIC

SEQ ID NO: 197898 - protein, 17 aa, Homo sapiens
  CDR3 for beta chain variable domain of TCR clone 98949 (TRBV7-9, TRBJ2-6)
CASSFGAGYSGANVLTF

SEQ ID NO: 197899 - protein, 13 aa, Homo sapiens
  CDR3 for alpha chain variable domain of TCR clone 98950 (TRAV2, TRAJ10)
CAVETGGGNKLTF

SEQ ID NO: 197900 - protein, 14 aa, Homo sapiens
  CDR3 for beta chain variable domain of TCR clone 98950 (TRBV20-1, TRBJ2-3)
CSAGGRRGADTQYF

SEQ ID NO: 197901 - protein, 18 aa, Homo sapiens
  CDR3 for alpha chain variable domain of TCR clone 98951 (TRAV1-2, TRAJ18)
CAVRDMGDRGSTLGRLYF

SEQ ID NO: 197902 - protein, 16 aa, Homo sapiens
  CDR3 for beta chain variable domain of TCR clone 98951 (TRBV29-1, TRBJ1-2)
CSVEANRDIANYGYTF

SEQ ID NO: 197903 - protein, 13 aa, Homo sapiens
  CDR3 for alpha chain variable domain of TCR clone 98952 (TRAV12-2, TRAJ20)
CAVYPSNDYKLSF

SEQ ID NO: 197904 - protein, 15 aa, Homo sapiens
  CDR3 for beta chain variable domain of TCR clone 98952 (TRBV27, TRBJ2-5)
CASSLHPRGGETQYF

SEQ ID NO: 197905 - protein, 16 aa, Homo sapiens
  CDR3 for alpha chain variable domain of TCR clone 98953 (TRAV12-2, TRAJ32)
CAVNLGQGGTTNKLIF

SEQ ID NO: 197906 - protein, 15 aa, Homo sapiens
  CDR3 for beta chain variable domain of TCR clone 98953 (TRBV20-1, TRBJ2-7)
CSARGPLAGGREQYF

SEQ ID NO: 197907 - protein, 19 aa, Homo sapiens
  CDR3 for alpha chain variable domain of TCR clone 98954 (TRAV13-1, TRAJ52)
CAASPYQNAGVTSYGKLTF

SEQ ID NO: 197908 - protein, 13 aa, Homo sapiens
  CDR3 for beta chain variable domain of TCR clone 98954 (TRBV29-1, TRBJ2-5)
CSATTSGGETQYF

SEQ ID NO: 197909 - protein, 17 aa, Homo sapiens
  CDR3 for alpha chain variable domain of TCR clone 98955 (TRAV12-2, TRAJ4)
CAVNVRPVSGGYNKLIF

SEQ ID NO: 197910 - protein, 13 aa, Homo sapiens
  CDR3 for beta chain variable domain of TCR clone 98955 (TRBV7-3, TRBJ1-1)
CASSQDWGAEAFF

SEQ ID NO: 197911 - protein, 13 aa, Homo sapiens
  CDR3 for alpha chain variable domain of TCR clone 98956 (TRAV8-3, TRAJ21)
CAVGAYDFNKFYF

SEQ ID NO: 197912 - protein, 16 aa, Homo sapiens
  CDR3 for beta chain variable domain of TCR clone 98956 (TRBV19, TRBJ2-1)
CASSMGGGSSYNEQFF

SEQ ID NO: 197913 - protein, 18 aa, Homo sapiens
  CDR3 for alpha chain variable domain of TCR clone 98957 (TRAV26-1, TRAJ23)
CIVRVGLEVWNQGGKLIF

SEQ ID NO: 197914 - protein, 14 aa, Homo sapiens
  CDR3 for beta chain variable domain of TCR clone 98957 (TRBV7-2, TRBJ2-2)
CASRGQGAAGELFF

SEQ ID NO: 197915 - protein, 16 aa, Homo sapiens
  CDR3 for alpha chain variable domain of TCR clone 98958 (TRAV3, TRAJ37)
CAVRPHGSGNTGKLIF

SEQ ID NO: 197916 - protein, 16 aa, Homo sapiens
  CDR3 for beta chain variable domain of TCR clone 98958 (TRBV9, TRBJ1-2)
CARSVEEKVSPYGYTF

SEQ ID NO: 197917 - protein, 16 aa, Homo sapiens
  CDR3 for alpha chain variable domain of TCR clone 98959 (TRAV3, TRAJ37)
CAVRVRGSGNTGKLIF

SEQ ID NO: 197918 - protein, 17 aa, Homo sapiens
  CDR3 for beta chain variable domain of TCR clone 98959 (TRBV20-1, TRBJ2-2)
CSASGSGQGGLTGELFF

SEQ ID NO: 197919 - protein, 11 aa, Homo sapiens
  CDR3 for alpha chain variable domain of TCR clone 98960 (TRAV12-2, TRAJ33)
CAVGSNYQLIR

SEQ ID NO: 197920 - protein, 14 aa, Homo sapiens
  CDR3 for beta chain variable domain of TCR clone 98960 (TRBV6-1, TRBJ2-2)
CASVEHIESGELFF

SEQ ID NO: 197921 - protein, 14 aa, Homo sapiens
  CDR3 for alpha chain variable domain of TCR clone 98961 (TRAV8-3, TRAJ4)
CAVGAAGGYNKLIF

SEQ ID NO: 197922 - protein, 14 aa, Homo sapiens
  CDR3 for beta chain variable domain of TCR clone 98961 (TRBV6-5, TRBJ2-1)
CQQLRCGSGNEQFF

SEQ ID NO: 197923 - protein, 13 aa, Homo sapiens
  CDR3 for alpha chain variable domain of TCR clone 98962 (TRAV12-3, TRAJ7)
CAMIASGNNRLAF

SEQ ID NO: 197924 - protein, 14 aa, Homo sapiens
  CDR3 for beta chain variable domain of TCR clone 98962 (TRBV13, TRBJ2-5)
CASSLGPRGETQYF

SEQ ID NO: 197925 - protein, 11 aa, Homo sapiens
  CDR3 for alpha chain variable domain of TCR clone 98963 (TRAV26-2, TRAJ8)
CILTGFQKLVF

SEQ ID NO: 197926 - protein, 15 aa, Homo sapiens
  CDR3 for beta chain variable domain of TCR clone 98963 (TRBV4-1, TRBJ1-4)
CASSDTGGTNEKLFF

SEQ ID NO: 197927 - protein, 12 aa, Homo sapiens
  CDR3 for alpha chain variable domain of TCR clone 98964 (TRAV4, TRAJ26)
CLVGDYGQNFVF

SEQ ID NO: 197928 - protein, 13 aa, Homo sapiens
  CDR3 for beta chain variable domain of TCR clone 98964 (TRBV14, TRBJ1-1)
CASSREFGTEAFF

SEQ ID NO: 197929 - protein, 12 aa, Homo sapiens
  CDR3 for alpha chain variable domain of TCR clone 98965 (TRAV16, TRAJ27)
CALNTNAGKPTF

SEQ ID NO: 197930 - protein, 17 aa, Homo sapiens
  CDR3 for beta chain variable domain of TCR clone 98965 (TRBV24-1, TRBJ2-4)
CATSDAEARGVRNIQYF

SEQ ID NO: 197931 - protein, 12 aa, Homo sapiens
  CDR3 for alpha chain variable domain of TCR clone 98966 (TRAV16, TRAJ26)
CASKDGGQNFVL

SEQ ID NO: 197932 - protein, 13 aa, Homo sapiens
  CDR3 for beta chain variable domain of TCR clone 98966 (TRBV25-1, TRBJ1-1)
CASSDRGRAEAFF

SEQ ID NO: 197933 - protein, 14 aa, Homo sapiens
  CDR3 for alpha chain variable domain of TCR clone 98967 (TRAV12-3, TRAJ10)
SHLPLTGGGNKLTF

SEQ ID NO: 197934 - protein, 15 aa, Homo sapiens
  CDR3 for beta chain variable domain of TCR clone 98967 (TRBV10-2, TRBJ2-6)
CASSEQGTGANALTF

SEQ ID NO: 197935 - protein, 13 aa, Homo sapiens
  CDR3 for alpha chain variable domain of TCR clone 98968 (TRAV29/DV5, TRAJ31)
CAASRNNNARLMF

SEQ ID NO: 197936 - protein, 16 aa, Homo sapiens
  CDR3 for beta chain variable domain of TCR clone 98968 (TRBV15, TRBJ1-2)
CATSRGPRTGGGGYTF

SEQ ID NO: 197937 - protein, 13 aa, Homo sapiens
  CDR3 for alpha chain variable domain of TCR clone 98969 (TRAV30, TRAJ24)
CGTVTDSWGKLQF

SEQ ID NO: 197938 - protein, 15 aa, Homo sapiens
  CDR3 for beta chain variable domain of TCR clone 98969 (TRBV4-1, TRBJ2-1)
CASSQAPGNYNEQFF

SEQ ID NO: 197939 - protein, 18 aa, Homo sapiens
  CDR3 for alpha chain variable domain of TCR clone 98970 (TRAV3, TRAJ17)
CAVRARRGGRSCRQQATF

SEQ ID NO: 197940 - protein, 14 aa, Homo sapiens
  CDR3 for beta chain variable domain of TCR clone 98970 (TRBV4-1, TRBJ2-2)
CASSQAVNTGELFF

SEQ ID NO: 197941 - protein, 22 aa, Homo sapiens
  CDR3 for alpha chain variable domain of TCR clone 98971 (TRAV3, TRAJ38)
CAVRDCLNAGNNHIQNPDPAVY

SEQ ID NO: 197942 - protein, 13 aa, Homo sapiens
  CDR3 for beta chain variable domain of TCR clone 98971 (TRBV19, TRBJ2-5)
CASSGRAGETQYF

SEQ ID NO: 197943 - protein, 13 aa, Homo sapiens
  CDR3 for alpha chain variable domain of TCR clone 98972 (TRAV38-1, TRAJ42)
CARWGGSQGNLIF

SEQ ID NO: 197944 - protein, 10 aa, Homo sapiens
  CDR3 for beta chain variable domain of TCR clone 98972 (TRBV2, TRBJ2-5)
CASGAATQYF

SEQ ID NO: 197945 - protein, 13 aa, Homo sapiens
  CDR3 for alpha chain variable domain of TCR clone 98973 (TRAV27, TRAJ49)
CAPRPYTGNQFYF

SEQ ID NO: 197946 - protein, 16 aa, Homo sapiens
  CDR3 for beta chain variable domain of TCR clone 98973 (TRBV4-1, TRBJ1-2)
FASSQDAGQVLYGYTF

SEQ ID NO: 197947 - protein, 12 aa, Homo sapiens
  CDR3 for alpha chain variable domain of TCR clone 98974 (TRAV8-3, TRAJ26)
CAGDNYGQNFVF

SEQ ID NO: 197948 - protein, 15 aa, Homo sapiens
  CDR3 for beta chain variable domain of TCR clone 98974 (TRBV6-1, TRBJ2-3)
CASSERGGITDTQYF

SEQ ID NO: 197949 - protein, 16 aa, Homo sapiens
  CDR3 for alpha chain variable domain of TCR clone 98975 (TRAV3, TRAJ10)
CAVRDMRAGGGNKLTF

SEQ ID NO: 197950 - protein, 15 aa, Homo sapiens
  CDR3 for beta chain variable domain of TCR clone 98975 (TRBV11-2, TRBJ1-6)
CASIGFGTAVSPLHF

SEQ ID NO: 197951 - protein, 16 aa, Homo sapiens
  CDR3 for alpha chain variable domain of TCR clone 98976 (TRAV30, TRAJ24)
CGTEIVDADSWGKFQL

SEQ ID NO: 197952 - protein, 14 aa, Homo sapiens
  CDR3 for beta chain variable domain of TCR clone 98976 (TRBV7-2, TRBJ1-1)
CASSFLTGTTEAFF

SEQ ID NO: 197953 - protein, 14 aa, Homo sapiens
  CDR3 for alpha chain variable domain of TCR clone 98977 (TRAV1-2, TRAJ8)
CAVREGTGFQKLVF

SEQ ID NO: 197954 - protein, 12 aa, Homo sapiens
  CDR3 for beta chain variable domain of TCR clone 98977 (TRBV24-1, TRBJ1-1)
CATLYPDTEAFF

SEQ ID NO: 197955 - protein, 14 aa, Homo sapiens
  CDR3 for alpha chain variable domain of TCR clone 98978 (TRAV12-1, TRAJ30)
CVVNIGGRADKIIF

SEQ ID NO: 197956 - protein, 13 aa, Homo sapiens
  CDR3 for beta chain variable domain of TCR clone 98978 (TRBV12-5, TRBJ2-1)
CASGLGRGNEQFF

SEQ ID NO: 197957 - protein, 15 aa, Homo sapiens
  CDR3 for alpha chain variable domain of TCR clone 98979 (TRAV23/DV6, TRAJ30)
CAASSQESRDDKIIF

SEQ ID NO: 197958 - protein, 15 aa, Homo sapiens
  CDR3 for beta chain variable domain of TCR clone 98979 (TRBV7-9, TRBJ1-4)
CASSARTGGNEKLFF

SEQ ID NO: 197959 - protein, 16 aa, Homo sapiens
  CDR3 for alpha chain variable domain of TCR clone 98980 (TRAV3, TRAJ37)
CAVRGQGSGNTGKLIF

SEQ ID NO: 197960 - protein, 13 aa, Homo sapiens
  CDR3 for beta chain variable domain of TCR clone 98980 (TRBV14, TRBJ2-7)
CASSQDRRYEQYF

SEQ ID NO: 197961 - protein, 13 aa, Homo sapiens
  CDR3 for alpha chain variable domain of TCR clone 98981 (TRAV16, TRAJ28)
CALSGAGSYQLTF

SEQ ID NO: 197962 - protein, 16 aa, Homo sapiens
  CDR3 for beta chain variable domain of TCR clone 98981 (TRBV28, TRBJ1-1)
CASSLPGTGWNTEAFF

SEQ ID NO: 197963 - protein, 13 aa, Homo sapiens
  CDR3 for alpha chain variable domain of TCR clone 98982 (TRAV8-3, TRAJ28)
CAVGAVGSYQLTF

SEQ ID NO: 197964 - protein, 14 aa, Homo sapiens
  CDR3 for beta chain variable domain of TCR clone 98982 (TRBV12-4, TRBJ1-1)
CASSLGTGGTEAFF

SEQ ID NO: 197965 - protein, 11 aa, Homo sapiens
  CDR3 for alpha chain variable domain of TCR clone 98983 (TRAV2, TRAJ21)
CAVFNFNKFYF

SEQ ID NO: 197966 - protein, 14 aa, Homo sapiens
  CDR3 for beta chain variable domain of TCR clone 98983 (TRBV15, TRBJ2-3)
CAPRSGTSTDTQYF

SEQ ID NO: 197967 - protein, 12 aa, Homo sapiens
  CDR3 for alpha chain variable domain of TCR clone 98984 (TRAV12-3, TRAJ17)
CAMTLTGNKLTF

SEQ ID NO: 197968 - protein, 15 aa, Homo sapiens
  CDR3 for beta chain variable domain of TCR clone 98984 (TRBV20-1, TRBJ2-1)
CSARGIGGTYNEQFF

SEQ ID NO: 197969 - protein, 11 aa, Homo sapiens
  CDR3 for alpha chain variable domain of TCR clone 98985 (TRAV2, TRAJ33)
YAVDSNYQLIW

SEQ ID NO: 197970 - protein, 15 aa, Homo sapiens
  CDR3 for beta chain variable domain of TCR clone 98985 (TRBV19, TRBJ1-2)
CASSVGQVLNYGYTF

SEQ ID NO: 197971 - protein, 12 aa, Homo sapiens
  CDR3 for alpha chain variable domain of TCR clone 98986 (TRAV1-2, TRAJ33)
CAALDSNYQLIW

SEQ ID NO: 197972 - protein, 16 aa, Homo sapiens
  CDR3 for beta chain variable domain of TCR clone 98986 (TRBV6-4, TRBJ1-2)
CASSEAVGDPNYGYIF

SEQ ID NO: 197973 - protein, 13 aa, Homo sapiens
  CDR3 for alpha chain variable domain of TCR clone 98987 (TRAV13-1, TRAJ21)
CAASIYNFNKFYF

SEQ ID NO: 197974 - protein, 11 aa, Homo sapiens
  CDR3 for beta chain variable domain of TCR clone 98987 (TRBV12-4, TRBJ2-3)
CASTATDTQYF

SEQ ID NO: 197975 - protein, 14 aa, Homo sapiens
  CDR3 for alpha chain variable domain of TCR clone 98988 (TRAV1-2, TRAJ16)
CAVNRVSDGQKLLF

SEQ ID NO: 197976 - protein, 12 aa, Homo sapiens
  CDR3 for beta chain variable domain of TCR clone 98988 (TRBV7-9, TRBJ2-7)
CASSLEGYEQYF

SEQ ID NO: 197977 - protein, 16 aa, Homo sapiens
  CDR3 for alpha chain variable domain of TCR clone 98989 (TRAV26-1, TRAJ37)
CIVRGDGSGTTGKLIF

SEQ ID NO: 197978 - protein, 17 aa, Homo sapiens
  CDR3 for beta chain variable domain of TCR clone 98989 (TRBV4-1, TRBJ2-7)
CASSRDPLGVRGGEQYF

SEQ ID NO: 197979 - protein, 17 aa, Homo sapiens
  CDR3 for alpha chain variable domain of TCR clone 98990 (TRAV3, TRAJ6)
CAVRDGPRAGGSYIPTF

SEQ ID NO: 197980 - protein, 16 aa, Homo sapiens
  CDR3 for beta chain variable domain of TCR clone 98990 (TRBV27, TRBJ2-5)
CASSYGPGGQKETQYF

SEQ ID NO: 197981 - protein, 14 aa, Homo sapiens
  CDR3 for alpha chain variable domain of TCR clone 98991 (TRAV12-3, TRAJ10)
SHLPLTGGGNKLTF

SEQ ID NO: 197982 - protein, 12 aa, Homo sapiens
  CDR3 for beta chain variable domain of TCR clone 98991 (TRBV19, TRBJ1-5)
CASKDGDQPQHF

SEQ ID NO: 197983 - protein, 14 aa, Homo sapiens
  CDR3 for alpha chain variable domain of TCR clone 98992 (TRAV1-2, TRAJ16)
CAVNRFSDGQKLLC

SEQ ID NO: 197984 - protein, 11 aa, Homo sapiens
  CDR3 for beta chain variable domain of TCR clone 98992 (TRBV29-1, TRBJ2-5)
CSEDRTGTQYF

SEQ ID NO: 197985 - protein, 11 aa, Homo sapiens
  CDR3 for alpha chain variable domain of TCR clone 98993 (TRAV4, TRAJ23)
CLVAPGGKHIF

SEQ ID NO: 197986 - protein, 13 aa, Homo sapiens
  CDR3 for beta chain variable domain of TCR clone 98993 (TRBV7-9, TRBJ1-2)
CASSLKQNYGYTF

SEQ ID NO: 197987 - protein, 12 aa, Homo sapiens
  CDR3 for alpha chain variable domain of TCR clone 98994 (TRAV3, TRAJ21)
CAVSYNFNKFYF

SEQ ID NO: 197988 - protein, 14 aa, Homo sapiens
  CDR3 for beta chain variable domain of TCR clone 98994 (TRBV7-8, TRBJ2-3)
CASSLEAGTDTQYF

SEQ ID NO: 197989 - protein, 13 aa, Homo sapiens
  CDR3 for alpha chain variable domain of TCR clone 98995 (TRAV8-2, TRAJ49)
CVVAPNTGNQFYF

SEQ ID NO: 197990 - protein, 15 aa, Homo sapiens
  CDR3 for beta chain variable domain of TCR clone 98995 (TRBV11-2, TRBJ2-1)
CASSLTSGGYNEQFF

SEQ ID NO: 197991 - protein, 18 aa, Homo sapiens
  CDR3 for alpha chain variable domain of TCR clone 98996 (TRAV26-2, TRAJ45)
CILRVDKYSGGGADGLTF

SEQ ID NO: 197992 - protein, 17 aa, Homo sapiens
  CDR3 for beta chain variable domain of TCR clone 98996 (TRBV7-8, TRBJ2-6)
CASSAGTGGAGANVLTF

SEQ ID NO: 197993 - protein, 14 aa, Homo sapiens
  CDR3 for alpha chain variable domain of TCR clone 98997 (TRAV8-4, TRAJ37)
CAVSEPSNTGKLIF

SEQ ID NO: 197994 - protein, 14 aa, Homo sapiens
  CDR3 for beta chain variable domain of TCR clone 98997 (TRBV28, TRBJ2-1)
CAIHRTGARTEQLF

SEQ ID NO: 197995 - protein, 13 aa, Homo sapiens
  CDR3 for alpha chain variable domain of TCR clone 98998 (TRAV26-1, TRAJ9)
CIATYTGGFKTIF

SEQ ID NO: 197996 - protein, 15 aa, Homo sapiens
  CDR3 for beta chain variable domain of TCR clone 98998 (TRBV7-2, TRBJ1-3)
CASSPQGGSGNTMYF

SEQ ID NO: 197997 - protein, 13 aa, Homo sapiens
  CDR3 for alpha chain variable domain of TCR clone 98999 (TRAV1-2, TRAJ9)
CAALNTGGFKTIF

SEQ ID NO: 197998 - protein, 14 aa, Homo sapiens
  CDR3 for beta chain variable domain of TCR clone 98999 (TRBV7-3, TRBJ2-7)
CASSLKADSYEQYF

SEQ ID NO: 197999 - protein, 14 aa, Homo sapiens
  CDR3 for alpha chain variable domain of TCR clone 99000 (TRAV1-1, TRAJ27)
CAVIYNTNAGKSTF

SEQ ID NO: 198000 - protein, 15 aa, Homo sapiens
  CDR3 for beta chain variable domain of TCR clone 99000 (TRBV7-2, TRBJ2-1)
CASSSGLAGGNEHFF

SEQ ID NO: 198001 - protein, 16 aa, Homo sapiens
  CDR3 for alpha chain variable domain of TCR clone 99001 (TRAV12-3, TRAJ53)
CAMSPGSGGSNYKLIF

SEQ ID NO: 198002 - protein, 11 aa, Homo sapiens
  CDR3 for beta chain variable domain of TCR clone 99001 (TRBV29-1, TRBJ2-5)
CSEDRMGTQYF

SEQ ID NO: 198003 - protein, 11 aa, Homo sapiens
  CDR3 for alpha chain variable domain of TCR clone 99002 (TRAV2, TRAJ13)
CASGGYQKVTF

SEQ ID NO: 198004 - protein, 13 aa, Homo sapiens
  CDR3 for beta chain variable domain of TCR clone 99002 (TRBV2, TRBJ1-4)
CASSERAGEKLFF

SEQ ID NO: 198005 - protein, 13 aa, Homo sapiens
  CDR3 for alpha chain variable domain of TCR clone 99003 (TRAV2, TRAJ21)
CAVEDLNFNKFYF

SEQ ID NO: 198006 - protein, 15 aa, Homo sapiens
  CDR3 for beta chain variable domain of TCR clone 99003 (TRBV28, TRBJ2-5)
CASSPGQGSIEIQYF

SEQ ID NO: 198007 - protein, 15 aa, Homo sapiens
  CDR3 for alpha chain variable domain of TCR clone 99004 (TRAV26-1, TRAJ22)
CIVRVSFWFCKATDL

SEQ ID NO: 198008 - protein, 14 aa, Homo sapiens
  CDR3 for beta chain variable domain of TCR clone 99004 (TRBV28, TRBJ2-1)
CASSLVAPYNEQFF

SEQ ID NO: 198009 - protein, 13 aa, Homo sapiens
  CDR3 for alpha chain variable domain of TCR clone 99005 (TRAV13-1, TRAJ21)
YAASIYNFNKFYF

SEQ ID NO: 198010 - protein, 13 aa, Homo sapiens
  CDR3 for beta chain variable domain of TCR clone 99005 (TRBV27, TRBJ1-4)
CASSLMGDEKLFF

SEQ ID NO: 198011 - protein, 14 aa, Homo sapiens
  CDR3 for alpha chain variable domain of TCR clone 99006 (TRAV12-2, TRAJ40)
CAVKIPSGTYKYIF

SEQ ID NO: 198012 - protein, 15 aa, Homo sapiens
  CDR3 for beta chain variable domain of TCR clone 99006 (TRBV28, TRBJ2-5)
CASSPPWSYQETQYF

SEQ ID NO: 198013 - protein, 14 aa, Homo sapiens
  CDR3 for alpha chain variable domain of TCR clone 99007 (TRAV38-1, TRAJ29)
CAFITPSGNTPLVF

SEQ ID NO: 198014 - protein, 14 aa, Homo sapiens
  CDR3 for beta chain variable domain of TCR clone 99007 (TRBV18, TRBJ2-7)
CASSPRGGAYEQSF

SEQ ID NO: 198015 - protein, 11 aa, Homo sapiens
  CDR3 for alpha chain variable domain of TCR clone 99008 (TRAV23/DV6, TRAJ49)
CAARAGNQFYF

SEQ ID NO: 198016 - protein, 17 aa, Homo sapiens
  CDR3 for beta chain variable domain of TCR clone 99008 (TRBV7-8, TRBJ2-1)
CASSPPTGTLAYNEQFF

SEQ ID NO: 198017 - protein, 13 aa, Homo sapiens
  CDR3 for alpha chain variable domain of TCR clone 99009 (TRAV13-1, TRAJ13)
CAASKGGYQKVTF

SEQ ID NO: 198018 - protein, 16 aa, Homo sapiens
  CDR3 for beta chain variable domain of TCR clone 99009 (TRBV18, TRBJ1-2)
CASSPPERVTIYGYTV

SEQ ID NO: 198019 - protein, 15 aa, Homo sapiens
  CDR3 for alpha chain variable domain of TCR clone 99010 (TRAV23/DV6, TRAJ33)
CAASNSGGGNYQLIW

SEQ ID NO: 198020 - protein, 15 aa, Homo sapiens
  CDR3 for beta chain variable domain of TCR clone 99010 (TRBV7-6, TRBJ1-4)
CASSLGAGAGEKLFF

SEQ ID NO: 198021 - protein, 19 aa, Homo sapiens
  CDR3 for alpha chain variable domain of TCR clone 99011 (TRAV26-1, TRAJ22)
CCVLLHRWVFSGSARQLTF

SEQ ID NO: 198022 - protein, 19 aa, Homo sapiens
  CDR3 for beta chain variable domain of TCR clone 99011 (TRBV19, TRBJ2-5)
CASSIGQVTDFFHGETQYF

SEQ ID NO: 198023 - protein, 14 aa, Homo sapiens
  CDR3 for alpha chain variable domain of TCR clone 99012 (TRAV16, TRAJ3)
CALSQYSSASKIIF

SEQ ID NO: 198024 - protein, 16 aa, Homo sapiens
  CDR3 for beta chain variable domain of TCR clone 99012 (TRBV11-2, TRBJ2-2)
CASSLRTGNLIGELFF

SEQ ID NO: 198025 - protein, 15 aa, Homo sapiens
  CDR3 for alpha chain variable domain of TCR clone 99013 (TRAV12-3, TRAJ6)
CAMSAATGGSYIPTF

SEQ ID NO: 198026 - protein, 15 aa, Homo sapiens
  CDR3 for beta chain variable domain of TCR clone 99013 (TRBV7-9, TRBJ1-6)
CASSSPGRGNSPLHF

SEQ ID NO: 198027 - protein, 15 aa, Homo sapiens
  CDR3 for alpha chain variable domain of TCR clone 99014 (TRAV17, TRAJ3)
CATDGPHSSASKIIF

SEQ ID NO: 198028 - protein, 17 aa, Homo sapiens
  CDR3 for beta chain variable domain of TCR clone 99014 (TRBV2, TRBJ2-7)
CASSQALTGWDSYEQYF

SEQ ID NO: 198029 - protein, 13 aa, Homo sapiens
  CDR3 for alpha chain variable domain of TCR clone 99015 (TRAV17, TRAJ9)
CATDYTGGFKTIF

SEQ ID NO: 198030 - protein, 13 aa, Homo sapiens
  CDR3 for beta chain variable domain of TCR clone 99015 (TRBV24-1, TRBJ2-1)
CATSAGPYNEQFF

SEQ ID NO: 198031 - protein, 12 aa, Homo sapiens
  CDR3 for alpha chain variable domain of TCR clone 99016 (TRAV8-6, TRAJ36)
CAVSDWLGQTTS

SEQ ID NO: 198032 - protein, 15 aa, Homo sapiens
  CDR3 for beta chain variable domain of TCR clone 99016 (TRBV20-1, TRBJ2-7)
CSARDRVSGMDEQYF

SEQ ID NO: 198033 - protein, 13 aa, Homo sapiens
  CDR3 for alpha chain variable domain of TCR clone 99017 (TRAV1-2, TRAJ24)
CAVRADSWGKFEF

SEQ ID NO: 198034 - protein, 13 aa, Homo sapiens
  CDR3 for beta chain variable domain of TCR clone 99017 (TRBV20-1, TRBJ2-1)
CSATGLAGDEQFF

SEQ ID NO: 198035 - protein, 15 aa, Homo sapiens
  CDR3 for alpha chain variable domain of TCR clone 99018 (TRAV17, TRAJ4)
CATGTWSGGYNKMIF

SEQ ID NO: 198036 - protein, 13 aa, Homo sapiens
  CDR3 for beta chain variable domain of TCR clone 99018 (TRBV6-6, TRBJ2-7)
CASSPKHLAEQYF

SEQ ID NO: 198037 - protein, 15 aa, Homo sapiens
  CDR3 for alpha chain variable domain of TCR clone 99019 (TRAV12-3, TRAJ49)
CAMTAPGNTGNQFYF

SEQ ID NO: 198038 - protein, 16 aa, Homo sapiens
  CDR3 for beta chain variable domain of TCR clone 99019 (TRBV11-2, TRBJ2-3)
CASSSRTSGGAGTQYF

SEQ ID NO: 198039 - protein, 13 aa, Homo sapiens
  CDR3 for alpha chain variable domain of TCR clone 99020 (TRAV1-2, TRAJ9)
CAVLNTGGFKTIF

SEQ ID NO: 198040 - protein, 14 aa, Homo sapiens
  CDR3 for beta chain variable domain of TCR clone 99020 (TRBV11-2, TRBJ2-7)
CASSLGAGAYEQYF

SEQ ID NO: 198041 - protein, 16 aa, Homo sapiens
  CDR3 for alpha chain variable domain of TCR clone 99021 (TRAV3, TRAJ37)
CAVRPHGSGNTGKLIF

SEQ ID NO: 198042 - protein, 16 aa, Homo sapiens
  CDR3 for beta chain variable domain of TCR clone 99021 (TRBV9, TRBJ1-2)
CASSVEEKVSPDGYTF

SEQ ID NO: 198043 - protein, 15 aa, Homo sapiens
  CDR3 for alpha chain variable domain of TCR clone 99022 (TRAV29/DV5, TRAJ57)
CAASLLRGGAEKLVF

SEQ ID NO: 198044 - protein, 15 aa, Homo sapiens
  CDR3 for beta chain variable domain of TCR clone 99022 (TRBV5-1, TRBJ1-3)
CASSLEGGSGNTIYF

SEQ ID NO: 198045 - protein, 14 aa, Homo sapiens
  CDR3 for alpha chain variable domain of TCR clone 99023 (TRAV12-3, TRAJ57)
CARAREGGSEKLVF

SEQ ID NO: 198046 - protein, 17 aa, Homo sapiens
  CDR3 for beta chain variable domain of TCR clone 99023 (TRBV11-3, TRBJ2-3)
CASSLGLTGGGTDTQYF

SEQ ID NO: 198047 - protein, 13 aa, Homo sapiens
  CDR3 for alpha chain variable domain of TCR clone 99024 (TRAV1-2, TRAJ12)
CAVSMDSSYKLIF

SEQ ID NO: 198048 - protein, 12 aa, Homo sapiens
  CDR3 for beta chain variable domain of TCR clone 99024 (TRBV3-1, TRBJ2-5)
CASSQRGETQYF

SEQ ID NO: 198049 - protein, 16 aa, Homo sapiens
  CDR3 for alpha chain variable domain of TCR clone 99025 (TRAV3, TRAJ37)
CAVRPHGSGNTGKLIF

SEQ ID NO: 198050 - protein, 12 aa, Homo sapiens
  CDR3 for beta chain variable domain of TCR clone 99025 (TRBV19, TRBJ2-3)
CATTSSTDTQYF

SEQ ID NO: 198051 - protein, 11 aa, Homo sapiens
  CDR3 for alpha chain variable domain of TCR clone 99026 (TRAV12-3, TRAJ27)
CAMANAGKSTF

SEQ ID NO: 198052 - protein, 16 aa, Homo sapiens
  CDR3 for beta chain variable domain of TCR clone 99026 (TRBV13, TRBJ2-2)
CASSPRTGEHTGELFF

SEQ ID NO: 198053 - protein, 16 aa, Homo sapiens
  CDR3 for alpha chain variable domain of TCR clone 99027 (TRAV23/DV6, TRAJ52)
CAASMNGGTSYGKLTF

SEQ ID NO: 198054 - protein, 16 aa, Homo sapiens
  CDR3 for beta chain variable domain of TCR clone 99027 (TRBV27, TRBJ2-2)
CASSFRGLVRTGELFF

SEQ ID NO: 198055 - protein, 11 aa, Homo sapiens
  CDR3 for alpha chain variable domain of TCR clone 99028 (TRAV17, TRAJ9)
CATIGGFKTIF

SEQ ID NO: 198056 - protein, 14 aa, Homo sapiens
  CDR3 for beta chain variable domain of TCR clone 99028 (TRBV7-9, TRBJ2-2)
CASSGLADTGELFF

SEQ ID NO: 198057 - protein, 13 aa, Homo sapiens
  CDR3 for alpha chain variable domain of TCR clone 99029 (TRAV2, TRAJ15)
CAVASQAGTALIF

SEQ ID NO: 198058 - protein, 14 aa, Homo sapiens
  CDR3 for beta chain variable domain of TCR clone 99029 (TRBV19, TRBJ2-7)
CASSMGQGAIEQYF

SEQ ID NO: 198059 - protein, 18 aa, Homo sapiens
  CDR3 for alpha chain variable domain of TCR clone 99030 (TRAV21, TRAJ52)
CAVRPSTAGGTSYGKLTF

SEQ ID NO: 198060 - protein, 14 aa, Homo sapiens
  CDR3 for beta chain variable domain of TCR clone 99030 (TRBV7-2, TRBJ2-1)
CASSLEGGYNEQFF

SEQ ID NO: 198061 - protein, 14 aa, Homo sapiens
  CDR3 for alpha chain variable domain of TCR clone 99031 (TRAV1-2, TRAJ16)
CAVNRFSDGQKLLF

SEQ ID NO: 198062 - protein, 16 aa, Homo sapiens
  CDR3 for beta chain variable domain of TCR clone 99031 (TRBV18, TRBJ1-6)
CASSQTEISYNSPLHF

SEQ ID NO: 198063 - protein, 14 aa, Homo sapiens
  CDR3 for alpha chain variable domain of TCR clone 99032 (TRAV13-2, TRAJ17)
CAENSKAAGNKLTF

SEQ ID NO: 198064 - protein, 15 aa, Homo sapiens
  CDR3 for beta chain variable domain of TCR clone 99032 (TRBV6-5, TRBJ1-2)
CASSYSQAFNYGYTF

SEQ ID NO: 198065 - protein, 19 aa, Homo sapiens
  CDR3 for alpha chain variable domain of TCR clone 99033 (TRAV26-1, TRAJ28)
CIIRVAHAYSGAGSYQLTF

SEQ ID NO: 198066 - protein, 17 aa, Homo sapiens
  CDR3 for beta chain variable domain of TCR clone 99033 (TRBV9, TRBJ2-2)
CASSVGGQGTDTGELFF

SEQ ID NO: 198067 - protein, 12 aa, Homo sapiens
  CDR3 for alpha chain variable domain of TCR clone 99034 (TRAV1-1, TRAJ8)
CAGGTGFQKPVF

SEQ ID NO: 198068 - protein, 16 aa, Homo sapiens
  CDR3 for beta chain variable domain of TCR clone 99034 (TRBV12-4, TRBJ1-5)
CASSRPVGGSNQPQHF

SEQ ID NO: 198069 - protein, 16 aa, Homo sapiens
  CDR3 for alpha chain variable domain of TCR clone 99035 (TRAV20, TRAJ22)
CAVQASSSGSARQLTF

SEQ ID NO: 198070 - protein, 13 aa, Homo sapiens
  CDR3 for beta chain variable domain of TCR clone 99035 (TRBV7-2, TRBJ2-5)
CANSQTSVETQYF

SEQ ID NO: 198071 - protein, 23 aa, Homo sapiens
  CDR3 for alpha chain variable domain of TCR clone 99036 (TRAV26-1, TRAJ38)
CIADNAGNNHIQNPDPAVYQLRD

SEQ ID NO: 198072 - protein, 14 aa, Homo sapiens
  CDR3 for beta chain variable domain of TCR clone 99036 (TRBV7-6, TRBJ2-3)
CASSLGTVTDTQYF

SEQ ID NO: 198073 - protein, 16 aa, Homo sapiens
  CDR3 for alpha chain variable domain of TCR clone 99037 (TRAV21, TRAJ37)
CAVRTAGSSDTGKLIF

SEQ ID NO: 198074 - protein, 13 aa, Homo sapiens
  CDR3 for beta chain variable domain of TCR clone 99037 (TRBV7-9, TRBJ2-5)
CASLPSGRGTQYF

SEQ ID NO: 198075 - protein, 12 aa, Homo sapiens
  CDR3 for alpha chain variable domain of TCR clone 99038 (TRAV2, TRAJ33)
CAFMDSNYQLIW

SEQ ID NO: 198076 - protein, 16 aa, Homo sapiens
  CDR3 for beta chain variable domain of TCR clone 99038 (TRBV2, TRBJ2-7)
CASSEPWTGPSHEQYF

SEQ ID NO: 198077 - protein, 14 aa, Homo sapiens
  CDR3 for alpha chain variable domain of TCR clone 99039 (TRAV13-1, TRAJ44)
CTAKATGTASKLTF

SEQ ID NO: 198078 - protein, 17 aa, Homo sapiens
  CDR3 for beta chain variable domain of TCR clone 99039 (TRBV7-3, TRBJ2-3)
CASSLMKRMRGADTQYF

SEQ ID NO: 198079 - protein, 15 aa, Homo sapiens
  CDR3 for alpha chain variable domain of TCR clone 99040 (TRAV17, TRAJ52)
CATEAGGTSYGKLTF

SEQ ID NO: 198080 - protein, 16 aa, Homo sapiens
  CDR3 for beta chain variable domain of TCR clone 99040 (TRBV12-5, TRBJ2-5)
CASGPRTSGNQETQYF

SEQ ID NO: 198081 - protein, 15 aa, Homo sapiens
  CDR3 for alpha chain variable domain of TCR clone 99041 (TRAV36/DV7, TRAJ53)
WEGENSGGSNYKLTF

SEQ ID NO: 198082 - protein, 13 aa, Homo sapiens
  CDR3 for beta chain variable domain of TCR clone 99041 (TRBV12-4, TRBJ1-2)
CASSLRQGKGYTF

SEQ ID NO: 198083 - protein, 14 aa, Homo sapiens
  CDR3 for alpha chain variable domain of TCR clone 99042 (TRAV26-1, TRAJ5)
FIVRVRFNRRALTF

SEQ ID NO: 198084 - protein, 17 aa, Homo sapiens
  CDR3 for beta chain variable domain of TCR clone 99042 (TRBV29-1, TRBJ2-3)
CSVEVLAGETSTDTQYF

SEQ ID NO: 198085 - protein, 12 aa, Homo sapiens
  CDR3 for alpha chain variable domain of TCR clone 99043 (TRAV6, TRAJ9)
CALVTGGFKTIF

SEQ ID NO: 198086 - protein, 18 aa, Homo sapiens
  CDR3 for beta chain variable domain of TCR clone 99043 (TRBV7-9, TRBJ2-7)
CASSLTTSGSRTWYEQYF

SEQ ID NO: 198087 - protein, 11 aa, Homo sapiens
  CDR3 for alpha chain variable domain of TCR clone 99044 (TRAV12-2, TRAJ29)
CAVTLRSPLVF

SEQ ID NO: 198088 - protein, 16 aa, Homo sapiens
  CDR3 for beta chain variable domain of TCR clone 99044 (TRBV2, TRBJ2-3)
CASSTSVEGVTDTQYF

SEQ ID NO: 198089 - protein, 15 aa, Homo sapiens
  CDR3 for alpha chain variable domain of TCR clone 99045 (TRAV3, TRAJ20)
CAMRDIKLSDYKLSF

SEQ ID NO: 198090 - protein, 18 aa, Homo sapiens
  CDR3 for beta chain variable domain of TCR clone 99045 (TRBV20-1, TRBJ2-5)
CSQTGDSGRLGGKETQYF

SEQ ID NO: 198091 - protein, 13 aa, Homo sapiens
  CDR3 for alpha chain variable domain of TCR clone 99046 (TRAV35, TRAJ42)
CAGFLGSQGNLIF

SEQ ID NO: 198092 - protein, 14 aa, Homo sapiens
  CDR3 for beta chain variable domain of TCR clone 99046 (TRBV4-1, TRBJ2-2)
CASSQAVNTGELFF

SEQ ID NO: 198093 - protein, 15 aa, Homo sapiens
  CDR3 for alpha chain variable domain of TCR clone 99047 (TRAV21, TRAJ53)
CATLNSGGSNDKLTF

SEQ ID NO: 198094 - protein, 16 aa, Homo sapiens
  CDR3 for beta chain variable domain of TCR clone 99047 (TRBV29-1, TRBJ1-2)
CSVEANRDIANYGYTF

SEQ ID NO: 198095 - protein, 10 aa, Homo sapiens
  CDR3 for alpha chain variable domain of TCR clone 99048 (TRAV8-3, TRAJ33)
CAVGAIATIS

SEQ ID NO: 198096 - protein, 14 aa, Homo sapiens
  CDR3 for beta chain variable domain of TCR clone 99048 (TRBV12-5, TRBJ2-5)
CASGSRTHQETQYF

SEQ ID NO: 198097 - protein, 15 aa, Homo sapiens
  CDR3 for alpha chain variable domain of TCR clone 99049 (TRAV13-1, TRAJ52)
SYYNAGGTSYGKLTF

SEQ ID NO: 198098 - protein, 16 aa, Homo sapiens
  CDR3 for beta chain variable domain of TCR clone 99049 (TRBV6-5, TRBJ2-1)
CASSYSLSGGYNEQFF

SEQ ID NO: 198099 - protein, 15 aa, Homo sapiens
  CDR3 for alpha chain variable domain of TCR clone 99050 (TRAV12-2, TRAJ53)
CAVNGGGGSNYKLTF

SEQ ID NO: 198100 - protein, 12 aa, Homo sapiens
  CDR3 for beta chain variable domain of TCR clone 99050 (TRBV11-2, TRBJ2-2)
CASSLGGGGLFL

SEQ ID NO: 198101 - protein, 10 aa, Homo sapiens
  CDR3 for alpha chain variable domain of TCR clone 99051 (TRAV13-1, TRAJ52)
CAAKTPMLVV

SEQ ID NO: 198102 - protein, 14 aa, Homo sapiens
  CDR3 for beta chain variable domain of TCR clone 99051 (TRBV6-5, TRBJ1-1)
CASSLGQGLTEAFF

SEQ ID NO: 198103 - protein, 13 aa, Homo sapiens
  CDR3 for alpha chain variable domain of TCR clone 99052 (TRAV17, TRAJ31)
CATDENNNSRLMF

SEQ ID NO: 198104 - protein, 14 aa, Homo sapiens
  CDR3 for beta chain variable domain of TCR clone 99052 (TRBV11-2, TRBJ2-1)
CASSPSRQGGGQFF

SEQ ID NO: 198105 - protein, 17 aa, Homo sapiens
  CDR3 for alpha chain variable domain of TCR clone 99053 (TRAV4, TRAJ13)
CLVGVQGSSGGYQKVTF

SEQ ID NO: 198106 - protein, 14 aa, Homo sapiens
  CDR3 for beta chain variable domain of TCR clone 99053 (TRBV11-2, TRBJ2-7)
CASSSTGEGYEQYF

SEQ ID NO: 198107 - protein, 14 aa, Homo sapiens
  CDR3 for alpha chain variable domain of TCR clone 99054 (TRAV26-1, TRAJ44)
CIVRPTGTASKLTF

SEQ ID NO: 198108 - protein, 14 aa, Homo sapiens
  CDR3 for beta chain variable domain of TCR clone 99054 (TRBV9, TRBJ2-7)
CASSVGVGSYEQYF

SEQ ID NO: 198109 - protein, 15 aa, Homo sapiens
  CDR3 for alpha chain variable domain of TCR clone 99055 (TRAV14/DV4, TRAJ10)
CSMRELTGGGNKLTF

SEQ ID NO: 198110 - protein, 18 aa, Homo sapiens
  CDR3 for beta chain variable domain of TCR clone 99055 (TRBV7-9, TRBJ2-7)
CASSLTTSGSRTWYEQYF

SEQ ID NO: 198111 - protein, 14 aa, Homo sapiens
  CDR3 for alpha chain variable domain of TCR clone 99056 (TRAV26-1, TRAJ45)
CIVRVVGGADGLTF

SEQ ID NO: 198112 - protein, 16 aa, Homo sapiens
  CDR3 for beta chain variable domain of TCR clone 99056 (TRBV7-9, TRBJ1-1)
CASSLTQVRPNTEAFF

SEQ ID NO: 198113 - protein, 13 aa, Homo sapiens
  CDR3 for alpha chain variable domain of TCR clone 99057 (TRAV29/DV5, TRAJ26)
CSKRKPEGQNFVF

SEQ ID NO: 198114 - protein, 17 aa, Homo sapiens
  CDR3 for beta chain variable domain of TCR clone 99057 (TRBV20-1, TRBJ2-2)
CSASGSGQGGLTGELFF

SEQ ID NO: 198115 - protein, 13 aa, Homo sapiens
  CDR3 for alpha chain variable domain of TCR clone 99058 (TRAV3, TRAJ36)
CAVRDTGATNLFF

SEQ ID NO: 198116 - protein, 15 aa, Homo sapiens
  CDR3 for beta chain variable domain of TCR clone 99058 (TRBV24-1, TRBJ2-1)
CATSGSGGFYNEQFF

SEQ ID NO: 198117 - protein, 10 aa, Homo sapiens
  CDR3 for alpha chain variable domain of TCR clone 99059 (TRAV1-2, TRAJ31)
CAVNNNATHV

SEQ ID NO: 198118 - protein, 15 aa, Homo sapiens
  CDR3 for beta chain variable domain of TCR clone 99059 (TRBV28, TRBJ2-1)
CASSIIAGGRSEQFF

SEQ ID NO: 198119 - protein, 12 aa, Homo sapiens
  CDR3 for alpha chain variable domain of TCR clone 99060 (TRAV26-1, TRAJ43)
CIVRGNNNDMRF

SEQ ID NO: 198120 - protein, 16 aa, Homo sapiens
  CDR3 for beta chain variable domain of TCR clone 99060 (TRBV27, TRBJ2-2)
CASSFRGLVRTGELFF

SEQ ID NO: 198121 - protein, 14 aa, Homo sapiens
  CDR3 for alpha chain variable domain of TCR clone 99061 (TRAV26-1, TRAJ38)
CIADNAGSNRKLIW

SEQ ID NO: 198122 - protein, 14 aa, Homo sapiens
  CDR3 for beta chain variable domain of TCR clone 99061 (TRBV18, TRBJ2-7)
CASSPRGGSYEQYF

SEQ ID NO: 198123 - protein, 17 aa, Homo sapiens
  CDR3 for alpha chain variable domain of TCR clone 99062 (TRAV13-1, TRAJ52)
CAASSGAGGTSYGKLTF

SEQ ID NO: 198124 - protein, 15 aa, Homo sapiens
  CDR3 for beta chain variable domain of TCR clone 99062 (TRBV2, TRBJ2-1)
CASSALAGSYNEQFF

SEQ ID NO: 198125 - protein, 16 aa, Homo sapiens
  CDR3 for alpha chain variable domain of TCR clone 99063 (TRAV1-2, TRAJ10)
CAVRGVLTGGGNKLTF

SEQ ID NO: 198126 - protein, 12 aa, Homo sapiens
  CDR3 for beta chain variable domain of TCR clone 99063 (TRBV7-8, TRBJ2-7)
CASSLGVREQYF

SEQ ID NO: 198127 - protein, 13 aa, Homo sapiens
  CDR3 for alpha chain variable domain of TCR clone 99064 (TRAV29/DV5, TRAJ47)
CAASAEYGNKLVF

SEQ ID NO: 198128 - protein, 17 aa, Homo sapiens
  CDR3 for beta chain variable domain of TCR clone 99064 (TRBV7-8, TRBJ2-6)
CASSAGTGGAGANVLTF

SEQ ID NO: 198129 - protein, 15 aa, Homo sapiens
  CDR3 for alpha chain variable domain of TCR clone 99065 (TRAV3, TRAJ5)
CAVRDLDTGRRALTF

SEQ ID NO: 198130 - protein, 13 aa, Homo sapiens
  CDR3 for beta chain variable domain of TCR clone 99065 (TRBV12-4, TRBJ2-7)
CASSPRETYEQYF

SEQ ID NO: 198131 - protein, 14 aa, Homo sapiens
  CDR3 for alpha chain variable domain of TCR clone 99066 (TRAV23/DV6, TRAJ37)
CAASTSSNTGKLIF

SEQ ID NO: 198132 - protein, 14 aa, Homo sapiens
  CDR3 for beta chain variable domain of TCR clone 99066 (TRBV11-2, TRBJ2-5)
CASRPLAGRETQYF

SEQ ID NO: 198133 - protein, 16 aa, Homo sapiens
  CDR3 for alpha chain variable domain of TCR clone 99067 (TRAV30, TRAJ24)
CGTEIVDADSWGKLQF

SEQ ID NO: 198134 - protein, 16 aa, Homo sapiens
  CDR3 for beta chain variable domain of TCR clone 99067 (TRBV7-3, TRBJ2-2)
CASSLKRGTLSGELFF

SEQ ID NO: 198135 - protein, 15 aa, Homo sapiens
  CDR3 for alpha chain variable domain of TCR clone 99068 (TRAV21, TRAJ53)
CATLNSGGSNYKLTF

SEQ ID NO: 198136 - protein, 16 aa, Homo sapiens
  CDR3 for beta chain variable domain of TCR clone 99068 (TRBV20-1, TRBJ1-4)
CSAPGQGLLTSEKLFF

SEQ ID NO: 198137 - protein, 13 aa, Homo sapiens
  CDR3 for alpha chain variable domain of TCR clone 99069 (TRAV1-2, TRAJ9)
CAALNTGGFKTIF

SEQ ID NO: 198138 - protein, 11 aa, Homo sapiens
  CDR3 for beta chain variable domain of TCR clone 99069 (TRBV25-1, TRBJ2-7)
CASSTSYEQYF

SEQ ID NO: 198139 - protein, 12 aa, Homo sapiens
  CDR3 for alpha chain variable domain of TCR clone 99070 (TRAV1-1, TRAJ30)
SALRGRDDKIIF

SEQ ID NO: 198140 - protein, 13 aa, Homo sapiens
  CDR3 for beta chain variable domain of TCR clone 99070 (TRBV11-3, TRBJ2-7)
CASSLDKLYEQYF

SEQ ID NO: 198141 - protein, 17 aa, Homo sapiens
  CDR3 for alpha chain variable domain of TCR clone 99071 (TRAV3, TRAJ6)
CAVSRRTDTGGSYIPTF

SEQ ID NO: 198142 - protein, 16 aa, Homo sapiens
  CDR3 for beta chain variable domain of TCR clone 99071 (TRBV3-1, TRBJ2-5)
CASSPQRGYAPETQYF

SEQ ID NO: 198143 - protein, 14 aa, Homo sapiens
  CDR3 for alpha chain variable domain of TCR clone 99072 (TRAV12-2, TRAJ45)
CAVNNGGGADGLTF

SEQ ID NO: 198144 - protein, 14 aa, Homo sapiens
  CDR3 for beta chain variable domain of TCR clone 99072 (TRBV20-1, TRBJ1-1)
CSAMGGTANTEAFF

SEQ ID NO: 198145 - protein, 15 aa, Homo sapiens
  CDR3 for alpha chain variable domain of TCR clone 99073 (TRAV12-1, TRAJ15)
CVVNSYGQAGTALIF

SEQ ID NO: 198146 - protein, 14 aa, Homo sapiens
  CDR3 for beta chain variable domain of TCR clone 99073 (TRBV28, TRBJ1-5)
CASSPTAGNQPQHF

SEQ ID NO: 198147 - protein, 15 aa, Homo sapiens
  CDR3 for alpha chain variable domain of TCR clone 99074 (TRAV13-1, TRAJ18)
CAASGGGSTLGRLYL

SEQ ID NO: 198148 - protein, 13 aa, Homo sapiens
  CDR3 for beta chain variable domain of TCR clone 99074 (TRBV18, TRBJ2-1)
CASGLASNNEQFF

SEQ ID NO: 198149 - protein, 19 aa, Homo sapiens
  CDR3 for alpha chain variable domain of TCR clone 99075 (TRAV1-2, TRAJ26)
CLLPLCCERPDNYGQNFVF

SEQ ID NO: 198150 - protein, 16 aa, Homo sapiens
  CDR3 for beta chain variable domain of TCR clone 99075 (TRBV12-4, TRBJ1-5)
CASSRPVGGSNQPQHF

SEQ ID NO: 198151 - protein, 13 aa, Homo sapiens
  CDR3 for alpha chain variable domain of TCR clone 99076 (TRAV13-1, TRAJ5)
CAARVTGRRALTF

SEQ ID NO: 198152 - protein, 15 aa, Homo sapiens
  CDR3 for beta chain variable domain of TCR clone 99076 (TRBV28, TRBJ2-7)
CASSPGGSGFYEQYF

SEQ ID NO: 198153 - protein, 14 aa, Homo sapiens
  CDR3 for alpha chain variable domain of TCR clone 99077 (TRAV3, TRAJ21)
CAVESQANFNKFYF

SEQ ID NO: 198154 - protein, 18 aa, Homo sapiens
  CDR3 for beta chain variable domain of TCR clone 99077 (TRBV7-9, TRBJ2-1)
CASSLAVSGASGRNEQFF

SEQ ID NO: 198155 - protein, 13 aa, Homo sapiens
  CDR3 for alpha chain variable domain of TCR clone 99078 (TRAV3, TRAJ21)
CAAREPDFNKFYF

SEQ ID NO: 198156 - protein, 16 aa, Homo sapiens
  CDR3 for beta chain variable domain of TCR clone 99078 (TRBV27, TRBJ2-2)
CASSFRGLVRTGELFF

SEQ ID NO: 198157 - protein, 13 aa, Homo sapiens
  CDR3 for alpha chain variable domain of TCR clone 99079 (TRAV13-1, TRAJ13)
CAASQGGYQKVTF

SEQ ID NO: 198158 - protein, 16 aa, Homo sapiens
  CDR3 for beta chain variable domain of TCR clone 99079 (TRBV18, TRBJ1-2)
CASSPPERVTIYGYTF

SEQ ID NO: 198159 - protein, 15 aa, Homo sapiens
  CDR3 for alpha chain variable domain of TCR clone 99080 (TRAV17, TRAJ56)
CATEPFTGANSKLTF

SEQ ID NO: 198160 - protein, 15 aa, Homo sapiens
  CDR3 for beta chain variable domain of TCR clone 99080 (TRBV28, TRBJ1-5)
CASSRTGGYVQPQYF

SEQ ID NO: 198161 - protein, 14 aa, Homo sapiens
  CDR3 for alpha chain variable domain of TCR clone 99081 (TRAV14/DV4, TRAJ42)
CPRGSLRSQGNLIF

SEQ ID NO: 198162 - protein, 18 aa, Homo sapiens
  CDR3 for beta chain variable domain of TCR clone 99081 (TRBV14, TRBJ2-3)
CASSQGRGVSQIRSILAQ

SEQ ID NO: 198163 - protein, 15 aa, Homo sapiens
  CDR3 for alpha chain variable domain of TCR clone 99082 (TRAV21, TRAJ53)
CATLNSGGSNYKLTF

SEQ ID NO: 198164 - protein, 13 aa, Homo sapiens
  CDR3 for beta chain variable domain of TCR clone 99082 (TRBV20-1, TRBJ1-1)
CSARGGGNTEAFF

SEQ ID NO: 198165 - protein, 15 aa, Homo sapiens
  CDR3 for alpha chain variable domain of TCR clone 99083 (TRAV8-3, TRAJ27)
CAVGPSKTNAGKSTF

SEQ ID NO: 198166 - protein, 15 aa, Homo sapiens
  CDR3 for beta chain variable domain of TCR clone 99083 (TRBV7-2, TRBJ2-1)
CASSSGLVGGNEQFF

SEQ ID NO: 198167 - protein, 14 aa, Homo sapiens
  CDR3 for alpha chain variable domain of TCR clone 99084 (TRAV8-3, TRAJ4)
CAVGAAGGYNKLIF

SEQ ID NO: 198168 - protein, 14 aa, Homo sapiens
  CDR3 for beta chain variable domain of TCR clone 99084 (TRBV6-5, TRBJ2-1)
CQQYDAGAGNEQFF

SEQ ID NO: 198169 - protein, 13 aa, Homo sapiens
  CDR3 for alpha chain variable domain of TCR clone 99085 (TRAV23/DV6, TRAJ41)
CAAIGDSGYALNF

SEQ ID NO: 198170 - protein, 17 aa, Homo sapiens
  CDR3 for beta chain variable domain of TCR clone 99085 (TRBV7-3, TRBJ2-3)
RASSLMKRMRGADTQYF

SEQ ID NO: 198171 - protein, 17 aa, Homo sapiens
  CDR3 for alpha chain variable domain of TCR clone 99086 (TRAV3, TRAJ42)
CAVRVHNYGGSQGNLIF

SEQ ID NO: 198172 - protein, 14 aa, Homo sapiens
  CDR3 for beta chain variable domain of TCR clone 99086 (TRBV20-1, TRBJ2-7)
CSARDRAGDYEQYF

SEQ ID NO: 198173 - protein, 17 aa, Homo sapiens
  CDR3 for alpha chain variable domain of TCR clone 99087 (TRAV3, TRAJ6)
CAVRDGPRAGGNYIPTF

SEQ ID NO: 198174 - protein, 14 aa, Homo sapiens
  CDR3 for beta chain variable domain of TCR clone 99087 (TRBV7-2, TRBJ2-7)
CASCPKTSFYEQYF

SEQ ID NO: 198175 - protein, 11 aa, Homo sapiens
  CDR3 for alpha chain variable domain of TCR clone 99088 (TRAV6, TRAJ41)
CALNSGYALNF

SEQ ID NO: 198176 - protein, 15 aa, Homo sapiens
  CDR3 for beta chain variable domain of TCR clone 99088 (TRBV20-1, TRBJ1-5)
CSAFKNGRRNQPQHF

SEQ ID NO: 198177 - protein, 14 aa, Homo sapiens
  CDR3 for alpha chain variable domain of TCR clone 99089 (TRAV8-3, TRAJ10)
CAVGNAGGGNKLNF

SEQ ID NO: 198178 - protein, 16 aa, Homo sapiens
  CDR3 for beta chain variable domain of TCR clone 99089 (TRBV11-2, TRBJ1-2)
CASSLDTGGADYGYTF

SEQ ID NO: 198179 - protein, 11 aa, Homo sapiens
  CDR3 for alpha chain variable domain of TCR clone 99090 (TRAV2, TRAJ33)
GAVESNYQLIW

SEQ ID NO: 198180 - protein, 15 aa, Homo sapiens
  CDR3 for beta chain variable domain of TCR clone 99090 (TRBV19, TRBJ1-1)
CASTSGQIQNTEAFF

SEQ ID NO: 198181 - protein, 13 aa, Homo sapiens
  CDR3 for alpha chain variable domain of TCR clone 99091 (TRAV27, TRAJ41)
FAGEGNSGYALNF

SEQ ID NO: 198182 - protein, 14 aa, Homo sapiens
  CDR3 for beta chain variable domain of TCR clone 99091 (TRBV25-1, TRBJ1-1)
CASTHLGGNTEAFF

SEQ ID NO: 198183 - protein, 11 aa, Homo sapiens
  CDR3 for alpha chain variable domain of TCR clone 99092 (TRAV3, TRAJ7)
YSVYGNNRLAF

SEQ ID NO: 198184 - protein, 15 aa, Homo sapiens
  CDR3 for beta chain variable domain of TCR clone 99092 (TRBV12-4, TRBJ2-1)
CASSLGTSAVNEQFF

SEQ ID NO: 198185 - protein, 15 aa, Homo sapiens
  CDR3 for alpha chain variable domain of TCR clone 99093 (TRAV12-3, TRAJ6)
CAMSATTGGSYIPTF

SEQ ID NO: 198186 - protein, 16 aa, Homo sapiens
  CDR3 for beta chain variable domain of TCR clone 99093 (TRBV20-1, TRBJ1-2)
CSASMGQGVANDGYTF

SEQ ID NO: 198187 - protein, 13 aa, Homo sapiens
  CDR3 for alpha chain variable domain of TCR clone 99094 (TRAV1-1, TRAJ9)
CAAKNTGGFKTIF

SEQ ID NO: 198188 - protein, 14 aa, Homo sapiens
  CDR3 for beta chain variable domain of TCR clone 99094 (TRBV20-1, TRBJ2-1)
CSAQIGGSANEQFI

SEQ ID NO: 198189 - protein, 17 aa, Homo sapiens
  CDR3 for alpha chain variable domain of TCR clone 99095 (TRAV12-3, TRAJ6)
CAMSARGGAGGSYIPTF

SEQ ID NO: 198190 - protein, 15 aa, Homo sapiens
  CDR3 for beta chain variable domain of TCR clone 99095 (TRBV6-3, TRBJ2-7)
CASSSPGTVFYEQYF

SEQ ID NO: 198191 - protein, 14 aa, Homo sapiens
  CDR3 for alpha chain variable domain of TCR clone 99096 (TRAV35, TRAJ22)
CAGLSPGSARQLTF

SEQ ID NO: 198192 - protein, 13 aa, Homo sapiens
  CDR3 for beta chain variable domain of TCR clone 99096 (TRBV20-1, TRBJ1-1)
CSARGGGNTEAFF

SEQ ID NO: 198193 - protein, 14 aa, Homo sapiens
  CDR3 for alpha chain variable domain of TCR clone 99097 (TRAV1-2, TRAJ16)
CAVNRFSDGQKPLF

SEQ ID NO: 198194 - protein, 16 aa, Homo sapiens
  CDR3 for beta chain variable domain of TCR clone 99097 (TRBV4-1, TRBJ1-1)
CASSQDAGMGNTEAFF

SEQ ID NO: 198195 - protein, 11 aa, Homo sapiens
  CDR3 for alpha chain variable domain of TCR clone 99098 (TRAV8-4, TRAJ26)
CAGGEGQNVVF

SEQ ID NO: 198196 - protein, 17 aa, Homo sapiens
  CDR3 for beta chain variable domain of TCR clone 99098 (TRBV7-9, TRBJ2-3)
CASSPTVAGDLTDTQYF

SEQ ID NO: 198197 - protein, 14 aa, Homo sapiens
  CDR3 for alpha chain variable domain of TCR clone 99099 (TRAV12-3, TRAJ10)
SHLPLTVGGNKLTF

SEQ ID NO: 198198 - protein, 15 aa, Homo sapiens
  CDR3 for beta chain variable domain of TCR clone 99099 (TRBV27, TRBJ1-5)
CASSLGTGFDQPQHF

SEQ ID NO: 198199 - protein, 12 aa, Homo sapiens
  CDR3 for alpha chain variable domain of TCR clone 99100 (TRAV1-2, TRAJ33)
CAALDSNYQLIW

SEQ ID NO: 198200 - protein, 18 aa, Homo sapiens
  CDR3 for beta chain variable domain of TCR clone 99100 (TRBV18, TRBJ2-3)
CASSYTSGAAGGTDTQYF

SEQ ID NO: 198201 - protein, 12 aa, Homo sapiens
  CDR3 for alpha chain variable domain of TCR clone 99101 (TRAV1-1, TRAJ39)
CAVPVVGNMLTF

SEQ ID NO: 198202 - protein, 15 aa, Homo sapiens
  CDR3 for beta chain variable domain of TCR clone 99101 (TRBV10-1, TRBJ2-3)
CASSATSGGFDTQYF

SEQ ID NO: 198203 - protein, 13 aa, Homo sapiens
  CDR3 for alpha chain variable domain of TCR clone 99102 (TRAV29/DV5, TRAJ31)
CAASRNNNASLMF

SEQ ID NO: 198204 - protein, 15 aa, Homo sapiens
  CDR3 for beta chain variable domain of TCR clone 99102 (TRBV2, TRBJ2-1)
CASSELAGSYNEQFF

SEQ ID NO: 198205 - protein, 12 aa, Homo sapiens
  CDR3 for alpha chain variable domain of TCR clone 99103 (TRAV1-1, TRAJ9)
CAVDTGGFKTIF

SEQ ID NO: 198206 - protein, 13 aa, Homo sapiens
  CDR3 for beta chain variable domain of TCR clone 99103 (TRBV10-3, TRBJ2-7)
CASKLAVNYEQYF

SEQ ID NO: 198207 - protein, 12 aa, Homo sapiens
  CDR3 for alpha chain variable domain of TCR clone 99104 (TRAV1-2, TRAJ29)
CAVPSGNTPLVF

SEQ ID NO: 198208 - protein, 12 aa, Homo sapiens
  CDR3 for beta chain variable domain of TCR clone 99104 (TRBV12-4, TRBJ2-7)
CVSSLGGYEQYF

SEQ ID NO: 198209 - protein, 14 aa, Homo sapiens
  CDR3 for alpha chain variable domain of TCR clone 99105 (TRAV8-4, TRAJ13)
CAVTISGGYQKVTF

SEQ ID NO: 198210 - protein, 16 aa, Homo sapiens
  CDR3 for beta chain variable domain of TCR clone 99105 (TRBV5-7, TRBJ1-4)
CASSPSGGLKTEKLFF

SEQ ID NO: 198211 - protein, 14 aa, Homo sapiens
  CDR3 for alpha chain variable domain of TCR clone 99106 (TRAV1-2, TRAJ8)
CAVREDTGFQKLVF

SEQ ID NO: 198212 - protein, 16 aa, Homo sapiens
  CDR3 for beta chain variable domain of TCR clone 99106 (TRBV27, TRBJ2-2)
CASSFRGLVRTGELFL

SEQ ID NO: 198213 - protein, 16 aa, Homo sapiens
  CDR3 for alpha chain variable domain of TCR clone 99107 (TRAV12-2, TRAJ40)
CAVIRGDTSGTYKYIF

SEQ ID NO: 198214 - protein, 14 aa, Homo sapiens
  CDR3 for beta chain variable domain of TCR clone 99107 (TRBV20-1, TRBJ2-5)
CSARDGRAGETQYF

SEQ ID NO: 198215 - protein, 16 aa, Homo sapiens
  CDR3 for alpha chain variable domain of TCR clone 99108 (TRAV1-2, TRAJ10)
CAVRGVLTGGGNKLTF

SEQ ID NO: 198216 - protein, 14 aa, Homo sapiens
  CDR3 for beta chain variable domain of TCR clone 99108 (TRBV19, TRBJ2-1)
CARGARSFPWEQFF

SEQ ID NO: 198217 - protein, 12 aa, Homo sapiens
  CDR3 for alpha chain variable domain of TCR clone 99109 (TRAV12-3, TRAJ17)
CAMTLTGNKLTF

SEQ ID NO: 198218 - protein, 16 aa, Homo sapiens
  CDR3 for beta chain variable domain of TCR clone 99109 (TRBV18, TRBJ2-2)
CASSRAGPTNTGELFF

SEQ ID NO: 198219 - protein, 14 aa, Homo sapiens
  CDR3 for alpha chain variable domain of TCR clone 99110 (TRAV3, TRAJ21)
CAVESQANFNKFYF

SEQ ID NO: 198220 - protein, 18 aa, Homo sapiens
  CDR3 for beta chain variable domain of TCR clone 99110 (TRBV7-9, TRBJ2-1)
CASSFAVSGTSGRNEQFF

SEQ ID NO: 198221 - protein, 15 aa, Homo sapiens
  CDR3 for alpha chain variable domain of TCR clone 99111 (TRAV21, TRAJ37)
CAVRPTLSNTGKLIF

SEQ ID NO: 198222 - protein, 16 aa, Homo sapiens
  CDR3 for beta chain variable domain of TCR clone 99111 (TRBV5-1, TRBJ2-1)
CASSLTLAGGRNEQFF

SEQ ID NO: 198223 - protein, 15 aa, Homo sapiens
  CDR3 for alpha chain variable domain of TCR clone 99112 (TRAV14/DV4, TRAJ12)
CAMREERDSSYKLIF

SEQ ID NO: 198224 - protein, 16 aa, Homo sapiens
  CDR3 for beta chain variable domain of TCR clone 99112 (TRBV11-2, TRBJ1-2)
CASSLDTGGAEYGYTF

SEQ ID NO: 198225 - protein, 15 aa, Homo sapiens
  CDR3 for alpha chain variable domain of TCR clone 99113 (TRAV23/DV6, TRAJ33)
CAASNSGGGNYQLIW

SEQ ID NO: 198226 - protein, 12 aa, Homo sapiens
  CDR3 for beta chain variable domain of TCR clone 99113 (TRBV11-3, TRBJ2-2)
CASSLGGGELFF

SEQ ID NO: 198227 - protein, 14 aa, Homo sapiens
  CDR3 for alpha chain variable domain of TCR clone 99114 (TRAV17, TRAJ16)
CATADFSDGQKLLF

SEQ ID NO: 198228 - protein, 12 aa, Homo sapiens
  CDR3 for beta chain variable domain of TCR clone 99114 (TRBV24-1, TRBJ1-1)
CATLYPDTEAFF

SEQ ID NO: 198229 - protein, 17 aa, Homo sapiens
  CDR3 for alpha chain variable domain of TCR clone 99115 (TRAV12-1, TRAJ13)
CVVNKRGEFWGLPESYL

SEQ ID NO: 198230 - protein, 15 aa, Homo sapiens
  CDR3 for beta chain variable domain of TCR clone 99115 (TRBV11-3, TRBJ2-3)
CASLKDGREGDTQYF

SEQ ID NO: 198231 - protein, 11 aa, Homo sapiens
  CDR3 for alpha chain variable domain of TCR clone 99116 (TRAV3, TRAJ18)
CAVRDGRGSTL

SEQ ID NO: 198232 - protein, 17 aa, Homo sapiens
  CDR3 for beta chain variable domain of TCR clone 99116 (TRBV5-1, TRBJ2-3)
CASSKIGLADRTDTQYF

SEQ ID NO: 198233 - protein, 15 aa, Homo sapiens
  CDR3 for alpha chain variable domain of TCR clone 99117 (TRAV8-4, TRAJ15)
CAVSDPVQAGTALVF

SEQ ID NO: 198234 - protein, 14 aa, Homo sapiens
  CDR3 for beta chain variable domain of TCR clone 99117 (TRBV7-2, TRBJ1-3)
CASSLSRSGNTIYF

SEQ ID NO: 198235 - protein, 14 aa, Homo sapiens
  CDR3 for alpha chain variable domain of TCR clone 99118 (TRAV12-3, TRAJ10)
SHLPLTGGGNKLTF

SEQ ID NO: 198236 - protein, 15 aa, Homo sapiens
  CDR3 for beta chain variable domain of TCR clone 99118 (TRBV28, TRBJ2-7)
CASKKPSGRAYEQYF

SEQ ID NO: 198237 - protein, 14 aa, Homo sapiens
  CDR3 for alpha chain variable domain of TCR clone 99119 (TRAV1-2, TRAJ29)
CAVRELTSATPLVF

SEQ ID NO: 198238 - protein, 13 aa, Homo sapiens
  CDR3 for beta chain variable domain of TCR clone 99119 (TRBV18, TRBJ1-2)
CASSASATEGYTF

SEQ ID NO: 198239 - protein, 13 aa, Homo sapiens
  CDR3 for alpha chain variable domain of TCR clone 99120 (TRAV12-2, TRAJ39)
CAVNNNAGNMLTF

SEQ ID NO: 198240 - protein, 12 aa, Homo sapiens
  CDR3 for beta chain variable domain of TCR clone 99120 (TRBV5-1, TRBJ2-7)
CASSCRGYEQYF

SEQ ID NO: 198241 - protein, 14 aa, Homo sapiens
  CDR3 for alpha chain variable domain of TCR clone 99121 (TRAV9-2, TRAJ39)
CALYIYNAGNMLTF

SEQ ID NO: 198242 - protein, 15 aa, Homo sapiens
  CDR3 for beta chain variable domain of TCR clone 99121 (TRBV29-1, TRBJ2-1)
CSVPTGLALYNEQFF

SEQ ID NO: 198243 - protein, 14 aa, Homo sapiens
  CDR3 for alpha chain variable domain of TCR clone 99122 (TRAV12-1, TRAJ9)
CVVNRRTGGFKTIF

SEQ ID NO: 198244 - protein, 12 aa, Homo sapiens
  CDR3 for beta chain variable domain of TCR clone 99122 (TRBV7-8, TRBJ2-1)
CASSLGHNEQFF

SEQ ID NO: 198245 - protein, 16 aa, Homo sapiens
  CDR3 for alpha chain variable domain of TCR clone 99123 (TRAV3, TRAJ37)
CAVRGKGSGNTGKLIF

SEQ ID NO: 198246 - protein, 19 aa, Homo sapiens
  CDR3 for beta chain variable domain of TCR clone 99123 (TRBV28, TRBJ2-7)
CASSYSGTSRLGWVYEQYF

SEQ ID NO: 198247 - protein, 13 aa, Homo sapiens
  CDR3 for alpha chain variable domain of TCR clone 99124 (TRAV21, TRAJ27)
CAARPGNAGNSTF

SEQ ID NO: 198248 - protein, 15 aa, Homo sapiens
  CDR3 for beta chain variable domain of TCR clone 99124 (TRBV12-4, TRBJ2-5)
CASSPPTGLQETQYF

SEQ ID NO: 198249 - protein, 13 aa, Homo sapiens
  CDR3 for alpha chain variable domain of TCR clone 99125 (TRAV8-6, TRAJ49)
CAVITNTGNQIYF

SEQ ID NO: 198250 - protein, 14 aa, Homo sapiens
  CDR3 for beta chain variable domain of TCR clone 99125 (TRBV5-1, TRBJ2-7)
CASSRGESLYEQYF

SEQ ID NO: 198251 - protein, 14 aa, Homo sapiens
  CDR3 for alpha chain variable domain of TCR clone 99126 (TRAV35, TRAJ46)
CAGPQKSSGDKLTF

SEQ ID NO: 198252 - protein, 14 aa, Homo sapiens
  CDR3 for beta chain variable domain of TCR clone 99126 (TRBV5-5, TRBJ1-2)
CASSLDPYNYGYTF

SEQ ID NO: 198253 - protein, 12 aa, Homo sapiens
  CDR3 for alpha chain variable domain of TCR clone 99127 (TRAV20, TRAJ39)
CAVCNAGNMLTF

SEQ ID NO: 198254 - protein, 17 aa, Homo sapiens
  CDR3 for beta chain variable domain of TCR clone 99127 (TRBV4-1, TRBJ2-3)
CASSQGYVSGGTDTQYF

SEQ ID NO: 198255 - protein, 13 aa, Homo sapiens
  CDR3 for alpha chain variable domain of TCR clone 99128 (TRAV3, TRAJ20)
CAVRATPRYKLSF

SEQ ID NO: 198256 - protein, 16 aa, Homo sapiens
  CDR3 for beta chain variable domain of TCR clone 99128 (TRBV20-1, TRBJ2-7)
CSARAPGLALSYEQYF

SEQ ID NO: 198257 - protein, 12 aa, Homo sapiens
  CDR3 for alpha chain variable domain of TCR clone 99129 (TRAV27, TRAJ35)
CAGADFGNVLHC

SEQ ID NO: 198258 - protein, 15 aa, Homo sapiens
  CDR3 for beta chain variable domain of TCR clone 99129 (TRBV4-1, TRBJ1-2)
CASSLNTGQGYGYTF

SEQ ID NO: 198259 - protein, 12 aa, Homo sapiens
  CDR3 for alpha chain variable domain of TCR clone 99130 (TRAV12-2, TRAJ9)
CAVNTGGFKTIF

SEQ ID NO: 198260 - protein, 15 aa, Homo sapiens
  CDR3 for beta chain variable domain of TCR clone 99130 (TRBV4-2, TRBJ1-3)
CASSQDGAQGNTMYF

SEQ ID NO: 198261 - protein, 14 aa, Homo sapiens
  CDR3 for alpha chain variable domain of TCR clone 99131 (TRAV2, TRAJ9)
CAVEDRSGGFKTIF

SEQ ID NO: 198262 - protein, 12 aa, Homo sapiens
  CDR3 for beta chain variable domain of TCR clone 99131 (TRBV12-4, TRBJ2-4)
CASSSYGNIQYF

SEQ ID NO: 198263 - protein, 14 aa, Homo sapiens
  CDR3 for alpha chain variable domain of TCR clone 99132 (TRAV1-2, TRAJ16)
CAVNRFSDGQKLLF

SEQ ID NO: 198264 - protein, 16 aa, Homo sapiens
  CDR3 for beta chain variable domain of TCR clone 99132 (TRBV7-3, TRBJ2-3)
CASSLSGYRPEYTQYF

SEQ ID NO: 198265 - protein, 14 aa, Homo sapiens
  CDR3 for alpha chain variable domain of TCR clone 99133 (TRAV1-1, TRAJ27)
CAVIYNTNAGKSTF

SEQ ID NO: 198266 - protein, 13 aa, Homo sapiens
  CDR3 for beta chain variable domain of TCR clone 99133 (TRBV7-8, TRBJ1-1)
CASSSDANTEAFF

SEQ ID NO: 198267 - protein, 18 aa, Homo sapiens
  CDR3 for alpha chain variable domain of TCR clone 99134 (TRAV21, TRAJ52)
CAVRPSPAGGTSYGKLTF

SEQ ID NO: 198268 - protein, 16 aa, Homo sapiens
  CDR3 for beta chain variable domain of TCR clone 99134 (TRBV7-3, TRBJ2-1)
CDSSLEGYRSYNEQFF

SEQ ID NO: 198269 - protein, 14 aa, Homo sapiens
  CDR3 for alpha chain variable domain of TCR clone 99135 (TRAV3, TRAJ33)
CAVRDMGSNYQLIL

SEQ ID NO: 198270 - protein, 17 aa, Homo sapiens
  CDR3 for beta chain variable domain of TCR clone 99135 (TRBV19, TRBJ2-1)
CASSIWSAQPTHNEQFF

SEQ ID NO: 198271 - protein, 11 aa, Homo sapiens
  CDR3 for alpha chain variable domain of TCR clone 99136 (TRAV3, TRAJ21)
CAVGNFNKFYF

SEQ ID NO: 198272 - protein, 15 aa, Homo sapiens
  CDR3 for beta chain variable domain of TCR clone 99136 (TRBV7-2, TRBJ2-3)
CASTPTSGETDTQYF

SEQ ID NO: 198273 - protein, 13 aa, Homo sapiens
  CDR3 for alpha chain variable domain of TCR clone 99137 (TRAV1-2, TRAJ9)
CAALNTGGFKTIF

SEQ ID NO: 198274 - protein, 13 aa, Homo sapiens
  CDR3 for beta chain variable domain of TCR clone 99137 (TRBV9, TRBJ2-1)
CASSPSGGSEQFF

SEQ ID NO: 198275 - protein, 15 aa, Homo sapiens
  CDR3 for alpha chain variable domain of TCR clone 99138 (TRAV20, TRAJ41)
CAVQANSNSGYALNF

SEQ ID NO: 198276 - protein, 18 aa, Homo sapiens
  CDR3 for beta chain variable domain of TCR clone 99138 (TRBV7-9, TRBJ2-7)
CASSLTTGGSRTWYEQYF

SEQ ID NO: 198277 - protein, 13 aa, Homo sapiens
  CDR3 for alpha chain variable domain of TCR clone 99139 (TRAV2, TRAJ40)
CAVVTSGTYKYIF

SEQ ID NO: 198278 - protein, 14 aa, Homo sapiens
  CDR3 for beta chain variable domain of TCR clone 99139 (TRBV7-8, TRBJ2-3)
CASSSRDSTDTQYF

SEQ ID NO: 198279 - protein, 17 aa, Homo sapiens
  CDR3 for alpha chain variable domain of TCR clone 99140 (TRAV3, TRAJ6)
CAVRDGPRAGGSYIPTF

SEQ ID NO: 198280 - protein, 13 aa, Homo sapiens
  CDR3 for beta chain variable domain of TCR clone 99140 (TRBV20-1, TRBJ1-1)
CSAFDKENTEAFF

SEQ ID NO: 198281 - protein, 16 aa, Homo sapiens
  CDR3 for alpha chain variable domain of TCR clone 99141 (TRAV27, TRAJ34)
CAGGGLGEYNTDKLIF

SEQ ID NO: 198282 - protein, 15 aa, Homo sapiens
  CDR3 for beta chain variable domain of TCR clone 99141 (TRBV9, TRBJ1-4)
CASSVGGSTNEKLFF

SEQ ID NO: 198283 - protein, 12 aa, Homo sapiens
  CDR3 for alpha chain variable domain of TCR clone 99142 (TRAV16, TRAJ34)
CAHSYNTDKLIF

SEQ ID NO: 198284 - protein, 13 aa, Homo sapiens
  CDR3 for beta chain variable domain of TCR clone 99142 (TRBV7-9, TRBJ2-1)
CASSLDVGNEQFF

SEQ ID NO: 198285 - protein, 14 aa, Homo sapiens
  CDR3 for alpha chain variable domain of TCR clone 99143 (TRAV4, TRAJ6)
CLVGEAGGSYIPTV

SEQ ID NO: 198286 - protein, 16 aa, Homo sapiens
  CDR3 for beta chain variable domain of TCR clone 99143 (TRBV7-6, TRBJ2-1)
CASSLNEGPSYNEQFF

SEQ ID NO: 198287 - protein, 15 aa, Homo sapiens
  CDR3 for alpha chain variable domain of TCR clone 99144 (TRAV8-2, TRAJ40)
CVVLGTTSGTYKYIF

SEQ ID NO: 198288 - protein, 12 aa, Homo sapiens
  CDR3 for beta chain variable domain of TCR clone 99144 (TRBV28, TRBJ2-3)
CASSLYRDTQYF

SEQ ID NO: 198289 - protein, 14 aa, Homo sapiens
  CDR3 for alpha chain variable domain of TCR clone 99145 (TRAV1-2, TRAJ8)
CAVREDTGFQKLVF

SEQ ID NO: 198290 - protein, 15 aa, Homo sapiens
  CDR3 for beta chain variable domain of TCR clone 99145 (TRBV7-8, TRBJ1-1)
CASSLGDSRNTEAFF

SEQ ID NO: 198291 - protein, 15 aa, Homo sapiens
  CDR3 for alpha chain variable domain of TCR clone 99146 (TRAV8-3, TRAJ45)
CASSYSGGGADGLTF

SEQ ID NO: 198292 - protein, 16 aa, Homo sapiens
  CDR3 for beta chain variable domain of TCR clone 99146 (TRBV20-1, TRBJ2-2)
RSASASGIPGAGELFF

SEQ ID NO: 198293 - protein, 13 aa, Homo sapiens
  CDR3 for alpha chain variable domain of TCR clone 99147 (TRAV17, TRAJ4)
CATKSGGYNKLIF

SEQ ID NO: 198294 - protein, 14 aa, Homo sapiens
  CDR3 for beta chain variable domain of TCR clone 99147 (TRBV20-1, TRBJ1-5)
CSARDDRGNQPQYF

SEQ ID NO: 198295 - protein, 15 aa, Homo sapiens
  CDR3 for alpha chain variable domain of TCR clone 99148 (TRAV12-1, TRAJ45)
CVVLSGGGGADGLTF

SEQ ID NO: 198296 - protein, 13 aa, Homo sapiens
  CDR3 for beta chain variable domain of TCR clone 99148 (TRBV19, TRBJ1-2)
CASSVPGQDGYTF

SEQ ID NO: 198297 - protein, 13 aa, Homo sapiens
  CDR3 for alpha chain variable domain of TCR clone 99149 (TRAV13-2, TRAJ13)
CAETAGGYQKVTF

SEQ ID NO: 198298 - protein, 18 aa, Homo sapiens
  CDR3 for beta chain variable domain of TCR clone 99149 (TRBV6-6, TRBJ1-3)
CASSYSKWDSISGNTIYF

SEQ ID NO: 198299 - protein, 14 aa, Homo sapiens
  CDR3 for alpha chain variable domain of TCR clone 99150 (TRAV2, TRAJ37)
CAVEDHGNTGKLIF

SEQ ID NO: 198300 - protein, 14 aa, Homo sapiens
  CDR3 for beta chain variable domain of TCR clone 99150 (TRBV18, TRBJ2-1)
CASSPQGRFNEQFF

SEQ ID NO: 198301 - protein, 13 aa, Homo sapiens
  CDR3 for alpha chain variable domain of TCR clone 99151 (TRAV38-2/DV8, TRAJ34)
CAYRNYNTDKLIF

SEQ ID NO: 198302 - protein, 16 aa, Homo sapiens
  CDR3 for beta chain variable domain of TCR clone 99151 (TRBV7-3, TRBJ2-2)
CASSLKRGTLSGELFF

SEQ ID NO: 198303 - protein, 15 aa, Homo sapiens
  CDR3 for alpha chain variable domain of TCR clone 99152 (TRAV12-2, TRAJ5)
CAVTPSGTGRRALTF

SEQ ID NO: 198304 - protein, 15 aa, Homo sapiens
  CDR3 for beta chain variable domain of TCR clone 99152 (TRBV5-8, TRBJ1-1)
CASSLSGTSLKGAFF

SEQ ID NO: 198305 - protein, 12 aa, Homo sapiens
  CDR3 for alpha chain variable domain of TCR clone 99153 (TRAV12-3, TRAJ48)
CAMRIGNEKLTF

SEQ ID NO: 198306 - protein, 12 aa, Homo sapiens
  CDR3 for beta chain variable domain of TCR clone 99153 (TRBV13, TRBJ2-7)
CASSLQTYEQYF

SEQ ID NO: 198307 - protein, 16 aa, Homo sapiens
  CDR3 for alpha chain variable domain of TCR clone 99154 (TRAV26-1, TRAJ56)
CIVRARERGANGKLTF

SEQ ID NO: 198308 - protein, 13 aa, Homo sapiens
  CDR3 for beta chain variable domain of TCR clone 99154 (TRBV7-2, TRBJ1-1)
CASSLRANTEAFF

SEQ ID NO: 198309 - protein, 14 aa, Homo sapiens
  CDR3 for alpha chain variable domain of TCR clone 99155 (TRAV38-1, TRAJ40)
CAVRPTSGTYKYIF

SEQ ID NO: 198310 - protein, 14 aa, Homo sapiens
  CDR3 for beta chain variable domain of TCR clone 99155 (TRBV25-1, TRBJ1-1)
CASTHLGGNTEAFF

SEQ ID NO: 198311 - protein, 16 aa, Homo sapiens
  CDR3 for alpha chain variable domain of TCR clone 99156 (TRAV3, TRAJ21)
CAVRDIERGNFNKFYF

SEQ ID NO: 198312 - protein, 18 aa, Homo sapiens
  CDR3 for beta chain variable domain of TCR clone 99156 (TRBV6-5, TRBJ1-1)
CASSYSAPGGTGGTEAFF

SEQ ID NO: 198313 - protein, 17 aa, Homo sapiens
  CDR3 for alpha chain variable domain of TCR clone 99157 (TRAV27, TRAJ26)
CAGARAPLDNYGQNFVF

SEQ ID NO: 198314 - protein, 15 aa, Homo sapiens
  CDR3 for beta chain variable domain of TCR clone 99157 (TRBV11-2, TRBJ2-5)
CASSPRSGGLETQFF

SEQ ID NO: 198315 - protein, 16 aa, Homo sapiens
  CDR3 for alpha chain variable domain of TCR clone 99158 (TRAV17, TRAJ28)
CATASVSGAGSDQLTF

SEQ ID NO: 198316 - protein, 11 aa, Homo sapiens
  CDR3 for beta chain variable domain of TCR clone 99158 (TRBV7-9, TRBJ2-5)
CASSLGETQYF

SEQ ID NO: 198317 - protein, 15 aa, Homo sapiens
  CDR3 for alpha chain variable domain of TCR clone 99159 (TRAV14/DV4, TRAJ12)
CAMREGRDSSYKLIF

SEQ ID NO: 198318 - protein, 16 aa, Homo sapiens
  CDR3 for beta chain variable domain of TCR clone 99159 (TRBV7-3, TRBJ2-2)
CASSLKRGTLSGELFF

SEQ ID NO: 198319 - protein, 17 aa, Homo sapiens
  CDR3 for alpha chain variable domain of TCR clone 99160 (TRAV3, TRAJ42)
CAVRDRDYGGSQGNLIF

SEQ ID NO: 198320 - protein, 17 aa, Homo sapiens
  CDR3 for beta chain variable domain of TCR clone 99160 (TRBV7-9, TRBJ2-3)
CASSHTVAGDLTDTQYF

SEQ ID NO: 198321 - protein, 14 aa, Homo sapiens
  CDR3 for alpha chain variable domain of TCR clone 99161 (TRAV17, TRAJ22)
CATSPSGSARQLTF

SEQ ID NO: 198322 - protein, 17 aa, Homo sapiens
  CDR3 for beta chain variable domain of TCR clone 99161 (TRBV5-1, TRBJ2-1)
CASSLGQISFSYNEQFF

SEQ ID NO: 198323 - protein, 12 aa, Homo sapiens
  CDR3 for alpha chain variable domain of TCR clone 99162 (TRAV38-1, TRAJ20)
CAFIWNDYKLSF

SEQ ID NO: 198324 - protein, 14 aa, Homo sapiens
  CDR3 for beta chain variable domain of TCR clone 99162 (TRBV19, TRBJ2-1)
CASSMGGGATEQFF

SEQ ID NO: 198325 - protein, 11 aa, Homo sapiens
  CDR3 for alpha chain variable domain of TCR clone 99163 (TRAV12-1, TRAJ21)
CVVYNFNKFYF

SEQ ID NO: 198326 - protein, 14 aa, Homo sapiens
  CDR3 for beta chain variable domain of TCR clone 99163 (TRBV19, TRBJ2-7)
CASSMGQGAIEQYS

SEQ ID NO: 198327 - protein, 16 aa, Homo sapiens
  CDR3 for alpha chain variable domain of TCR clone 99164 (TRAV8-3, TRAJ13)
CAVGAYPSGGYQKVTF

SEQ ID NO: 198328 - protein, 15 aa, Homo sapiens
  CDR3 for beta chain variable domain of TCR clone 99164 (TRBV19, TRBJ1-5)
CASSIVRADNQPQHF

SEQ ID NO: 198329 - protein, 16 aa, Homo sapiens
  CDR3 for alpha chain variable domain of TCR clone 99165 (TRAV27, TRAJ57)
CAGALGTQGGSEKLVF

SEQ ID NO: 198330 - protein, 15 aa, Homo sapiens
  CDR3 for beta chain variable domain of TCR clone 99165 (TRBV7-3, TRBJ2-1)
CASSLSSGSFDEQFF

SEQ ID NO: 198331 - protein, 14 aa, Homo sapiens
  CDR3 for alpha chain variable domain of TCR clone 99166 (TRAV12-2, TRAJ5)
CAVNRSTGRRALTF

SEQ ID NO: 198332 - protein, 12 aa, Homo sapiens
  CDR3 for beta chain variable domain of TCR clone 99166 (TRBV19, TRBJ1-5)
CASSIAHQPQHF

SEQ ID NO: 198333 - protein, 16 aa, Homo sapiens
  CDR3 for alpha chain variable domain of TCR clone 99167 (TRAV30, TRAJ24)
CGTEMVDADSWGKFQF

SEQ ID NO: 198334 - protein, 14 aa, Homo sapiens
  CDR3 for beta chain variable domain of TCR clone 99167 (TRBV12-5, TRBJ2-5)
CAGGSRTHQETQYF

SEQ ID NO: 198335 - protein, 12 aa, Homo sapiens
  CDR3 for alpha chain variable domain of TCR clone 99168 (TRAV21, TRAJ13)
PGPSGGYQKVTF

SEQ ID NO: 198336 - protein, 13 aa, Homo sapiens
  CDR3 for beta chain variable domain of TCR clone 99168 (TRBV7-9, TRBJ1-2)
CASSLKQNHGYTF

SEQ ID NO: 198337 - protein, 13 aa, Homo sapiens
  CDR3 for alpha chain variable domain of TCR clone 99169 (TRAV2, TRAJ24)
CAVEDSGRGRFQF

SEQ ID NO: 198338 - protein, 13 aa, Homo sapiens
  CDR3 for beta chain variable domain of TCR clone 99169 (TRBV10-3, TRBJ2-7)
CASKLAVNYEQYS

SEQ ID NO: 198339 - protein, 13 aa, Homo sapiens
  CDR3 for alpha chain variable domain of TCR clone 99170 (TRAV2, TRAJ20)
CAVEDPSEYKLSF

SEQ ID NO: 198340 - protein, 16 aa, Homo sapiens
  CDR3 for beta chain variable domain of TCR clone 99170 (TRBV25-1, TRBJ2-7)
CASSDLTGGGIYEQYF

SEQ ID NO: 198341 - protein, 15 aa, Homo sapiens
  CDR3 for alpha chain variable domain of TCR clone 99171 (TRAV8-3, TRAJ15)
CAVGAPNQAGIALIF

SEQ ID NO: 198342 - protein, 14 aa, Homo sapiens
  CDR3 for beta chain variable domain of TCR clone 99171 (TRBV20-1, TRBJ2-1)
CSPNDEASYNEQFF

SEQ ID NO: 198343 - protein, 14 aa, Homo sapiens
  CDR3 for alpha chain variable domain of TCR clone 99172 (TRAV13-2, TRAJ47)
CAESSMEYGNKLVF

SEQ ID NO: 198344 - protein, 13 aa, Homo sapiens
  CDR3 for beta chain variable domain of TCR clone 99172 (TRBV7-7, TRBJ2-3)
CASSLSRADTQYF

SEQ ID NO: 198345 - protein, 14 aa, Homo sapiens
  CDR3 for alpha chain variable domain of TCR clone 99173 (TRAV12-2, TRAJ17)
CAALFKAAGNKLTF

SEQ ID NO: 198346 - protein, 15 aa, Homo sapiens
  CDR3 for beta chain variable domain of TCR clone 99173 (TRBV27, TRBJ2-3)
CASSLGLAGPDTQYF

SEQ ID NO: 198347 - protein, 14 aa, Homo sapiens
  CDR3 for alpha chain variable domain of TCR clone 99174 (TRAV2, TRAJ9)
CAVEDRSGGFKTIF

SEQ ID NO: 198348 - protein, 15 aa, Homo sapiens
  CDR3 for beta chain variable domain of TCR clone 99174 (TRBV27, TRBJ1-5)
CASSSSGTGNQPQHF

SEQ ID NO: 198349 - protein, 12 aa, Homo sapiens
  CDR3 for alpha chain variable domain of TCR clone 99175 (TRAV12-1, TRAJ40)
CVVYSGTYKYIF

SEQ ID NO: 198350 - protein, 17 aa, Homo sapiens
  CDR3 for beta chain variable domain of TCR clone 99175 (TRBV7-2, TRBJ1-5)
CASSLSAGGYSNQPQHF

SEQ ID NO: 198351 - protein, 13 aa, Homo sapiens
  CDR3 for alpha chain variable domain of TCR clone 99176 (TRAV21, TRAJ27)
CAQRGGNAGKSTF

SEQ ID NO: 198352 - protein, 14 aa, Homo sapiens
  CDR3 for beta chain variable domain of TCR clone 99176 (TRBV2, TRBJ2-3)
CAVGGTISTDTQYF

SEQ ID NO: 198353 - protein, 14 aa, Homo sapiens
  CDR3 for alpha chain variable domain of TCR clone 99177 (TRAV26-1, TRAJ48)
CIVRVGFGNGKLTF

SEQ ID NO: 198354 - protein, 13 aa, Homo sapiens
  CDR3 for beta chain variable domain of TCR clone 99177 (TRBV11-3, TRBJ2-3)
CASSHDTKDTQYF

SEQ ID NO: 198355 - protein, 14 aa, Homo sapiens
  CDR3 for alpha chain variable domain of TCR clone 99178 (TRAV12-3, TRAJ47)
CAMSVREYGNKLVF

SEQ ID NO: 198356 - protein, 15 aa, Homo sapiens
  CDR3 for beta chain variable domain of TCR clone 99178 (TRBV20-1, TRBJ2-2)
CSARDTRLNTGELFF

SEQ ID NO: 198357 - protein, 13 aa, Homo sapiens
  CDR3 for alpha chain variable domain of TCR clone 99179 (TRAV8-4, TRAJ48)
CAVSLFGNEKLTF

SEQ ID NO: 198358 - protein, 15 aa, Homo sapiens
  CDR3 for beta chain variable domain of TCR clone 99179 (TRBV20-1, TRBJ2-7)
CSAREGLAESYEQYF

SEQ ID NO: 198359 - protein, 18 aa, Homo sapiens
  CDR3 for alpha chain variable domain of TCR clone 99180 (TRAV26-2, TRAJ45)
CILRVDKYSGGGADGRTF

SEQ ID NO: 198360 - protein, 14 aa, Homo sapiens
  CDR3 for beta chain variable domain of TCR clone 99180 (TRBV7-2, TRBJ2-7)
CASRSQGAAYEQYF

SEQ ID NO: 198361 - protein, 12 aa, Homo sapiens
  CDR3 for alpha chain variable domain of TCR clone 99181 (TRAV12-1, TRAJ40)
CVVYSGTYKYIF

SEQ ID NO: 198362 - protein, 15 aa, Homo sapiens
  CDR3 for beta chain variable domain of TCR clone 99181 (TRBV7-9, TRBJ2-7)
CASSSSGLAVYEQYF

SEQ ID NO: 198363 - protein, 14 aa, Homo sapiens
  CDR3 for alpha chain variable domain of TCR clone 99182 (TRAV8-1, TRAJ39)
CAVNASNAGNMLTF

SEQ ID NO: 198364 - protein, 16 aa, Homo sapiens
  CDR3 for beta chain variable domain of TCR clone 99182 (TRBV27, TRBJ2-2)
CASSSSGVSNTGELFF

SEQ ID NO: 198365 - protein, 13 aa, Homo sapiens
  CDR3 for alpha chain variable domain of TCR clone 99183 (TRAV12-1, TRAJ34)
GVVTGYNTDKLIF

SEQ ID NO: 198366 - protein, 13 aa, Homo sapiens
  CDR3 for beta chain variable domain of TCR clone 99183 (TRBV28, TRBJ2-7)
CASKAGGVYEQYF

SEQ ID NO: 198367 - protein, 14 aa, Homo sapiens
  CDR3 for alpha chain variable domain of TCR clone 99184 (TRAV8-1, TRAJ5)
CAVRTDAGRRALTF

SEQ ID NO: 198368 - protein, 12 aa, Homo sapiens
  CDR3 for beta chain variable domain of TCR clone 99184 (TRBV11-2, TRBJ2-1)
CASSPGNNEQFF

SEQ ID NO: 198369 - protein, 14 aa, Homo sapiens
  CDR3 for alpha chain variable domain of TCR clone 99185 (TRAV1-2, TRAJ8)
CAVREDTGFQKLVF

SEQ ID NO: 198370 - protein, 16 aa, Homo sapiens
  CDR3 for beta chain variable domain of TCR clone 99185 (TRBV5-5, TRBJ1-2)
CASSPTWGRGLYGYTF

SEQ ID NO: 198371 - protein, 18 aa, Homo sapiens
  CDR3 for alpha chain variable domain of TCR clone 99186 (TRAV13-1, TRAJ52)
CAAKNPNAGGTSYGKLTF

SEQ ID NO: 198372 - protein, 14 aa, Homo sapiens
  CDR3 for beta chain variable domain of TCR clone 99186 (TRBV11-2, TRBJ2-1)
CASSLSGPYNEQFF

SEQ ID NO: 198373 - protein, 20 aa, Homo sapiens
  CDR3 for alpha chain variable domain of TCR clone 99187 (TRAV25, TRAJ21)
TATQTTDVGTYPFSFNKFYF

SEQ ID NO: 198374 - protein, 14 aa, Homo sapiens
  CDR3 for beta chain variable domain of TCR clone 99187 (TRBV6-1, TRBJ2-1)
CASAKDGFYNEQFF

SEQ ID NO: 198375 - protein, 15 aa, Homo sapiens
  CDR3 for alpha chain variable domain of TCR clone 99188 (TRAV8-3, TRAJ11)
CAVGLLTSGYSTLTF

SEQ ID NO: 198376 - protein, 23 aa, Homo sapiens
  CDR3 for beta chain variable domain of TCR clone 99188 (TRBV7-9, TRBJ1-2)
EAQLEKSRLLSDRFSSGEDGYTF

SEQ ID NO: 198377 - protein, 15 aa, Homo sapiens
  CDR3 for alpha chain variable domain of TCR clone 99189 (TRAV2, TRAJ24)
CAVGVLTDSWGKFQF

SEQ ID NO: 198378 - protein, 14 aa, Homo sapiens
  CDR3 for beta chain variable domain of TCR clone 99189 (TRBV19, TRBJ2-1)
CASSMGSGRRSSSS

SEQ ID NO: 198379 - protein, 12 aa, Homo sapiens
  CDR3 for alpha chain variable domain of TCR clone 99190 (TRAV30, TRAJ43)
CGTEERGNDMRF

SEQ ID NO: 198380 - protein, 15 aa, Homo sapiens
  CDR3 for beta chain variable domain of TCR clone 99190 (TRBV28, TRBJ1-3)
CASSMGWASGNTIYF

SEQ ID NO: 198381 - protein, 14 aa, Homo sapiens
  CDR3 for alpha chain variable domain of TCR clone 99191 (TRAV12-3, TRAJ10)
SHLPLTGGGNKLTF

SEQ ID NO: 198382 - protein, 17 aa, Homo sapiens
  CDR3 for beta chain variable domain of TCR clone 99191 (TRBV19, TRBJ2-6)
CASSTGQVFSGANVLTF

SEQ ID NO: 198383 - protein, 15 aa, Homo sapiens
  CDR3 for alpha chain variable domain of TCR clone 99192 (TRAV12-2, TRAJ43)
CAFDMRFGAGTRLTV

SEQ ID NO: 198384 - protein, 18 aa, Homo sapiens
  CDR3 for beta chain variable domain of TCR clone 99192 (TRBV20-1, TRBJ2-3)
CSASGLAGGPGTTDTQYF

SEQ ID NO: 198385 - protein, 12 aa, Homo sapiens
  CDR3 for alpha chain variable domain of TCR clone 99193 (TRAV21, TRAJ29)
CCEDSGNTPLVF

SEQ ID NO: 198386 - protein, 16 aa, Homo sapiens
  CDR3 for beta chain variable domain of TCR clone 99193 (TRBV19, TRBJ2-1)
CASSKAGPSSYNEQFF

SEQ ID NO: 198387 - protein, 11 aa, Homo sapiens
  CDR3 for alpha chain variable domain of TCR clone 99194 (TRAV17, TRAJ43)
CATPRSNDMRF

SEQ ID NO: 198388 - protein, 15 aa, Homo sapiens
  CDR3 for beta chain variable domain of TCR clone 99194 (TRBV11-2, TRBJ2-1)
CASSLGTSGINEQFF

SEQ ID NO: 198389 - protein, 11 aa, Homo sapiens
  CDR3 for alpha chain variable domain of TCR clone 99195 (TRAV21, TRAJ34)
CAVTNTDKLIF

SEQ ID NO: 198390 - protein, 13 aa, Homo sapiens
  CDR3 for beta chain variable domain of TCR clone 99195 (TRBV6-1, TRBJ1-1)
CASSRQGNTEAFF

SEQ ID NO: 198391 - protein, 10 aa, Homo sapiens
  CDR3 for alpha chain variable domain of TCR clone 99196 (TRAV12-2, TRAJ52)
RSTSYGKLTF

SEQ ID NO: 198392 - protein, 15 aa, Homo sapiens
  CDR3 for beta chain variable domain of TCR clone 99196 (TRBV19, TRBJ1-6)
CASSTQGAVGSPLHF

SEQ ID NO: 198393 - protein, 15 aa, Homo sapiens
  CDR3 for alpha chain variable domain of TCR clone 99197 (TRAV8-3, TRAJ11)
CAVGLLNSGYSTLTF

SEQ ID NO: 198394 - protein, 15 aa, Homo sapiens
  CDR3 for beta chain variable domain of TCR clone 99197 (TRBV7-2, TRBJ2-2)
CASRRPGQNTGELFF

SEQ ID NO: 198395 - protein, 17 aa, Homo sapiens
  CDR3 for alpha chain variable domain of TCR clone 99198 (TRAV3, TRAJ12)
GAVRDGGRMDSSYKLIF

SEQ ID NO: 198396 - protein, 13 aa, Homo sapiens
  CDR3 for beta chain variable domain of TCR clone 99198 (TRBV20-1, TRBJ1-1)
CSAPLGGGTEAFF

SEQ ID NO: 198397 - protein, 16 aa, Homo sapiens
  CDR3 for alpha chain variable domain of TCR clone 99199 (TRAV3, TRAJ10)
CAVRDMRAGGGNKLTF

SEQ ID NO: 198398 - protein, 15 aa, Homo sapiens
  CDR3 for beta chain variable domain of TCR clone 99199 (TRBV11-2, TRBJ1-6)
CASTGFRTAVSPLHF

SEQ ID NO: 198399 - protein, 16 aa, Homo sapiens
  CDR3 for alpha chain variable domain of TCR clone 99200 (TRAV30, TRAJ24)
CGTEIVDADSWGKYQF

SEQ ID NO: 198400 - protein, 15 aa, Homo sapiens
  CDR3 for beta chain variable domain of TCR clone 99200 (TRBV5-1, TRBJ2-2)
CASSSQGGNTGELFF

SEQ ID NO: 198401 - protein, 13 aa, Homo sapiens
  CDR3 for alpha chain variable domain of TCR clone 99201 (TRAV2, TRAJ40)
CAVVTSGTYKYIF

SEQ ID NO: 198402 - protein, 12 aa, Homo sapiens
  CDR3 for beta chain variable domain of TCR clone 99201 (TRBV16, TRBJ2-2)
CASSQSVGELFF

SEQ ID NO: 198403 - protein, 15 aa, Homo sapiens
  CDR3 for alpha chain variable domain of TCR clone 99202 (TRAV29/DV5, TRAJ29)
CAASEMSSGNTPLVF

SEQ ID NO: 198404 - protein, 17 aa, Homo sapiens
  CDR3 for beta chain variable domain of TCR clone 99202 (TRBV4-1, TRBJ1-4)
CASSQEGPRGVEEKLFF

SEQ ID NO: 198405 - protein, 13 aa, Homo sapiens
  CDR3 for alpha chain variable domain of TCR clone 99203 (TRAV17, TRAJ26)
CATVDNYGQNFVF

SEQ ID NO: 198406 - protein, 16 aa, Homo sapiens
  CDR3 for beta chain variable domain of TCR clone 99203 (TRBV2, TRBJ2-1)
CASSVRGSLSYNEQFF

SEQ ID NO: 198407 - protein, 10 aa, Homo sapiens
  CDR3 for alpha chain variable domain of TCR clone 99204 (TRAV8-4, TRAJ43)
CAVSADDMRF

SEQ ID NO: 198408 - protein, 14 aa, Homo sapiens
  CDR3 for beta chain variable domain of TCR clone 99204 (TRBV4-1, TRBJ2-2)
CASSQAVNTGELFF

SEQ ID NO: 198409 - protein, 16 aa, Homo sapiens
  CDR3 for alpha chain variable domain of TCR clone 99205 (TRAV23/DV6, TRAJ9)
CAASIGGNTGGFKTIF

SEQ ID NO: 198410 - protein, 15 aa, Homo sapiens
  CDR3 for beta chain variable domain of TCR clone 99205 (TRBV11-3, TRBJ2-2)
CASSYFSTGTGELFF

SEQ ID NO: 198411 - protein, 14 aa, Homo sapiens
  CDR3 for alpha chain variable domain of TCR clone 99206 (TRAV38-1, TRAJ43)
CAFMKHNNNNGMRF

SEQ ID NO: 198412 - protein, 15 aa, Homo sapiens
  CDR3 for beta chain variable domain of TCR clone 99206 (TRBV9, TRBJ1-6)
CASSVAGTGDSPLHF

SEQ ID NO: 198413 - protein, 13 aa, Homo sapiens
  CDR3 for alpha chain variable domain of TCR clone 99207 (TRAV2, TRAJ40)
CAVVTSGTYKYIF

SEQ ID NO: 198414 - protein, 22 aa, Homo sapiens
  CDR3 for beta chain variable domain of TCR clone 99207 (TRBV19, TRBJ2-1)
CASPTFVLSGEPCPWPEELLTV

SEQ ID NO: 198415 - protein, 15 aa, Homo sapiens
  CDR3 for alpha chain variable domain of TCR clone 99208 (TRAV13-1, TRAJ44)
CAASRNTGTTSKLTF

SEQ ID NO: 198416 - protein, 14 aa, Homo sapiens
  CDR3 for beta chain variable domain of TCR clone 99208 (TRBV2, TRBJ2-7)
CASSLTSGGYEQYF

SEQ ID NO: 198417 - protein, 14 aa, Homo sapiens
  CDR3 for alpha chain variable domain of TCR clone 99209 (TRAV1-2, TRAJ8)
CAVREDTGFQKLVF

SEQ ID NO: 198418 - protein, 17 aa, Homo sapiens
  CDR3 for beta chain variable domain of TCR clone 99209 (TRBV13, TRBJ2-3)
CASSLSRVAGGGNTQYF

SEQ ID NO: 198419 - protein, 17 aa, Homo sapiens
  CDR3 for alpha chain variable domain of TCR clone 99210 (TRAV3, TRAJ42)
CAVRDRDYGGSQGNRIF

SEQ ID NO: 198420 - protein, 13 aa, Homo sapiens
  CDR3 for beta chain variable domain of TCR clone 99210 (TRBV10-3, TRBJ2-7)
CASKLAVNYEQYF

SEQ ID NO: 198421 - protein, 14 aa, Homo sapiens
  CDR3 for alpha chain variable domain of TCR clone 99211 (TRAV1-2, TRAJ16)
CAVSRFSDGQKLLF

SEQ ID NO: 198422 - protein, 12 aa, Homo sapiens
  CDR3 for beta chain variable domain of TCR clone 99211 (TRBV19, TRBJ1-4)
CASKDWPGGLFF

SEQ ID NO: 198423 - protein, 16 aa, Homo sapiens
  CDR3 for alpha chain variable domain of TCR clone 99212 (TRAV3, TRAJ37)
CAVRGTGSGNTGKLIF

SEQ ID NO: 198424 - protein, 15 aa, Homo sapiens
  CDR3 for beta chain variable domain of TCR clone 99212 (TRBV7-9, TRBJ1-6)
CASSSPGRGNSPLHF

SEQ ID NO: 198425 - protein, 15 aa, Homo sapiens
  CDR3 for alpha chain variable domain of TCR clone 99213 (TRAV21, TRAJ24)
CAARSSTDSWGKLQF

SEQ ID NO: 198426 - protein, 13 aa, Homo sapiens
  CDR3 for beta chain variable domain of TCR clone 99213 (TRBV11-2, TRBJ2-5)
CASSTTGEETQYF

SEQ ID NO: 198427 - protein, 14 aa, Homo sapiens
  CDR3 for alpha chain variable domain of TCR clone 99214 (TRAV2, TRAJ37)
CAVDFTSNTGKLIV

SEQ ID NO: 198428 - protein, 15 aa, Homo sapiens
  CDR3 for beta chain variable domain of TCR clone 99214 (TRBV20-1, TRBJ1-1)
CSASRGVTGNTEAVF

SEQ ID NO: 198429 - protein, 20 aa, Homo sapiens
  CDR3 for alpha chain variable domain of TCR clone 99215 (TRAV14/DV4, TRAJ22)
CAMREGPFSISSGSARQLTF

SEQ ID NO: 198430 - protein, 13 aa, Homo sapiens
  CDR3 for beta chain variable domain of TCR clone 99215 (TRBV4-2, TRBJ2-3)
CASSQDWQHTQYC

SEQ ID NO: 198431 - protein, 16 aa, Homo sapiens
  CDR3 for alpha chain variable domain of TCR clone 99216 (TRAV35, TRAJ28)
CAGQKYSGAGSCQLTF

SEQ ID NO: 198432 - protein, 16 aa, Homo sapiens
  CDR3 for beta chain variable domain of TCR clone 99216 (TRBV7-3, TRBJ2-2)
CASSLKRGTLSGELFF

SEQ ID NO: 198433 - protein, 13 aa, Homo sapiens
  CDR3 for alpha chain variable domain of TCR clone 99217 (TRAV13-1, TRAJ9)
CAARGTGGFKTTF

SEQ ID NO: 198434 - protein, 12 aa, Homo sapiens
  CDR3 for beta chain variable domain of TCR clone 99217 (TRBV2, TRBJ2-1)
CAYGPPGNEQFF

SEQ ID NO: 198435 - protein, 12 aa, Homo sapiens
  CDR3 for alpha chain variable domain of TCR clone 99218 (TRAV3, TRAJ43)
CAVRDPNNDMRF

SEQ ID NO: 198436 - protein, 15 aa, Homo sapiens
  CDR3 for beta chain variable domain of TCR clone 99218 (TRBV4-3, TRBJ2-7)
CAGSQGDWGDYEQYF

SEQ ID NO: 198437 - protein, 13 aa, Homo sapiens
  CDR3 for alpha chain variable domain of TCR clone 99219 (TRAV12-3, TRAJ56)
CALATGANSKLTF

SEQ ID NO: 198438 - protein, 15 aa, Homo sapiens
  CDR3 for beta chain variable domain of TCR clone 99219 (TRBV9, TRBJ1-6)
CASSVAGTGDSPLHF

SEQ ID NO: 198439 - protein, 13 aa, Homo sapiens
  CDR3 for alpha chain variable domain of TCR clone 99220 (TRAV13-2, TRAJ22)
CLGWISSARQLNF

SEQ ID NO: 198440 - protein, 15 aa, Homo sapiens
  CDR3 for beta chain variable domain of TCR clone 99220 (TRBV7-2, TRBJ2-3)
CASSSTGLETDTQYF

SEQ ID NO: 198441 - protein, 17 aa, Homo sapiens
  CDR3 for alpha chain variable domain of TCR clone 99221 (TRAV3, TRAJ28)
CAVREAYSGAGSYQLTF

SEQ ID NO: 198442 - protein, 14 aa, Homo sapiens
  CDR3 for beta chain variable domain of TCR clone 99221 (TRBV18, TRBJ2-7)
CASSPRGGAYEQYF

SEQ ID NO: 198443 - protein, 13 aa, Homo sapiens
  CDR3 for alpha chain variable domain of TCR clone 99222 (TRAV3, TRAJ43)
CAVRDTMGGDMRF

SEQ ID NO: 198444 - protein, 15 aa, Homo sapiens
  CDR3 for beta chain variable domain of TCR clone 99222 (TRBV6-5, TRBJ1-5)
CASSYSRRSNQPQHF

SEQ ID NO: 198445 - protein, 13 aa, Homo sapiens
  CDR3 for alpha chain variable domain of TCR clone 99223 (TRAV12-2, TRAJ49)
CAVNMRTGNQFYF

SEQ ID NO: 198446 - protein, 11 aa, Homo sapiens
  CDR3 for beta chain variable domain of TCR clone 99223 (TRBV5-5, TRBJ1-1)
CASSLGGEAFF

SEQ ID NO: 198447 - protein, 12 aa, Homo sapiens
  CDR3 for alpha chain variable domain of TCR clone 99224 (TRAV13-1, TRAJ27)
CAAHTNAGKSTF

SEQ ID NO: 198448 - protein, 14 aa, Homo sapiens
  CDR3 for beta chain variable domain of TCR clone 99224 (TRBV19, TRBJ2-2)
CASSGQGIAVELFL

SEQ ID NO: 198449 - protein, 12 aa, Homo sapiens
  CDR3 for alpha chain variable domain of TCR clone 99225 (TRAV21, TRAJ31)
CAVIPARGRLMF

SEQ ID NO: 198450 - protein, 14 aa, Homo sapiens
  CDR3 for beta chain variable domain of TCR clone 99225 (TRBV28, TRBJ2-7)
CASSLLRISYEQYF

SEQ ID NO: 198451 - protein, 14 aa, Homo sapiens
  CDR3 for alpha chain variable domain of TCR clone 99226 (TRAV12-1, TRAJ12)
CVVNRLDSSYKLIF

SEQ ID NO: 198452 - protein, 15 aa, Homo sapiens
  CDR3 for beta chain variable domain of TCR clone 99226 (TRBV5-1, TRBJ1-1)
CASSLGMGTSTEAFF

SEQ ID NO: 198453 - protein, 12 aa, Homo sapiens
  CDR3 for alpha chain variable domain of TCR clone 99227 (TRAV1-2, TRAJ42)
CVAGGSQGNLIF

SEQ ID NO: 198454 - protein, 11 aa, Homo sapiens
  CDR3 for beta chain variable domain of TCR clone 99227 (TRBV19, TRBJ1-1)
CASSIGSEAFF

SEQ ID NO: 198455 - protein, 14 aa, Homo sapiens
  CDR3 for alpha chain variable domain of TCR clone 99228 (TRAV3, TRAJ9)
CAVRLNTGGFKTIF

SEQ ID NO: 198456 - protein, 12 aa, Homo sapiens
  CDR3 for beta chain variable domain of TCR clone 99228 (TRBV4-2, TRBJ1-4)
CASSKLGEKLFF

SEQ ID NO: 198457 - protein, 13 aa, Homo sapiens
  CDR3 for alpha chain variable domain of TCR clone 99229 (TRAV2, TRAJ21)
CAVEDVNFNKFYF

SEQ ID NO: 198458 - protein, 15 aa, Homo sapiens
  CDR3 for beta chain variable domain of TCR clone 99229 (TRBV28, TRBJ2-5)
CASSPGQGSIETQYF

SEQ ID NO: 198459 - protein, 14 aa, Homo sapiens
  CDR3 for alpha chain variable domain of TCR clone 99230 (TRAV12-3, TRAJ10)
SHLPLTGGGNKLTF

SEQ ID NO: 198460 - protein, 14 aa, Homo sapiens
  CDR3 for beta chain variable domain of TCR clone 99230 (TRBV6-1, TRBJ1-3)
CASVQGVGGNTIYF

SEQ ID NO: 198461 - protein, 15 aa, Homo sapiens
  CDR3 for alpha chain variable domain of TCR clone 99231 (TRAV3, TRAJ5)
CAVRDLDTGRSALTF

SEQ ID NO: 198462 - protein, 14 aa, Homo sapiens
  CDR3 for beta chain variable domain of TCR clone 99231 (TRBV25-1, TRBJ1-4)
CASSGGGQPEKLFF

SEQ ID NO: 198463 - protein, 16 aa, Homo sapiens
  CDR3 for alpha chain variable domain of TCR clone 99232 (TRAV3, TRAJ10)
CAVRDMRAGGGNKLNF

SEQ ID NO: 198464 - protein, 16 aa, Homo sapiens
  CDR3 for beta chain variable domain of TCR clone 99232 (TRBV19, TRBJ2-2)
CASSFPGQGLAGELFF

SEQ ID NO: 198465 - protein, 11 aa, Homo sapiens
  CDR3 for alpha chain variable domain of TCR clone 99233 (TRAV12-2, TRAJ33)
CAVTSNYPLIW

SEQ ID NO: 198466 - protein, 14 aa, Homo sapiens
  CDR3 for beta chain variable domain of TCR clone 99233 (TRBV28, TRBJ2-2)
CASRIRSGTGELFF

SEQ ID NO: 198467 - protein, 14 aa, Homo sapiens
  CDR3 for alpha chain variable domain of TCR clone 99234 (TRAV8-2, TRAJ4)
CVVSPSGGYNKLIF

SEQ ID NO: 198468 - protein, 15 aa, Homo sapiens
  CDR3 for beta chain variable domain of TCR clone 99234 (TRBV7-9, TRBJ2-2)
CASGPLDTFPGELFF

SEQ ID NO: 198469 - protein, 11 aa, Homo sapiens
  CDR3 for alpha chain variable domain of TCR clone 99235 (TRAV3, TRAJ21)
CAVGNFNKFYF

SEQ ID NO: 198470 - protein, 16 aa, Homo sapiens
  CDR3 for beta chain variable domain of TCR clone 99235 (TRBV19, TRBJ2-1)
CASSKAGTGSYNEQFF

SEQ ID NO: 198471 - protein, 16 aa, Homo sapiens
  CDR3 for alpha chain variable domain of TCR clone 99236 (TRAV3, TRAJ21)
CAVRDIERGNFKKFYF

SEQ ID NO: 198472 - protein, 14 aa, Homo sapiens
  CDR3 for beta chain variable domain of TCR clone 99236 (TRBV12-4, TRBJ2-5)
CASSLSSGRETQYF

SEQ ID NO: 198473 - protein, 14 aa, Homo sapiens
  CDR3 for alpha chain variable domain of TCR clone 99237 (TRAV1-1, TRAJ27)
CAVIYNTNAGKSTF

SEQ ID NO: 198474 - protein, 15 aa, Homo sapiens
  CDR3 for beta chain variable domain of TCR clone 99237 (TRBV10-1, TRBJ2-1)
CASSEWRGTYNEQFF

SEQ ID NO: 198475 - protein, 13 aa, Homo sapiens
  CDR3 for alpha chain variable domain of TCR clone 99238 (TRAV21, TRAJ27)
CAARPGNAGKSTF

SEQ ID NO: 198476 - protein, 15 aa, Homo sapiens
  CDR3 for beta chain variable domain of TCR clone 99238 (TRBV11-3, TRBJ2-7)
CASSPGPATPYEQYF

SEQ ID NO: 198477 - protein, 13 aa, Homo sapiens
  CDR3 for alpha chain variable domain of TCR clone 99239 (TRAV8-3, TRAJ44)
SAVVPGTASKLTF

SEQ ID NO: 198478 - protein, 14 aa, Homo sapiens
  CDR3 for beta chain variable domain of TCR clone 99239 (TRBV11-2, TRBJ2-3)
CASSRLARTDTQYF

SEQ ID NO: 198479 - protein, 14 aa, Homo sapiens
  CDR3 for alpha chain variable domain of TCR clone 99240 (TRAV8-6, TRAJ39)
CAVSERDAGNMLTF

SEQ ID NO: 198480 - protein, 12 aa, Homo sapiens
  CDR3 for beta chain variable domain of TCR clone 99240 (TRBV5-5, TRBJ2-5)
CASSYFGETQYF

SEQ ID NO: 198481 - protein, 14 aa, Homo sapiens
  CDR3 for alpha chain variable domain of TCR clone 99241 (TRAV8-1, TRAJ36)
CAVNSPTGANNLFF

SEQ ID NO: 198482 - protein, 14 aa, Homo sapiens
  CDR3 for beta chain variable domain of TCR clone 99241 (TRBV7-2, TRBJ2-7)
CASSPKTSFYEQYF

SEQ ID NO: 198483 - protein, 16 aa, Homo sapiens
  CDR3 for alpha chain variable domain of TCR clone 99242 (TRAV12-2, TRAJ52)
CRLANAGGTSYGKLTF

SEQ ID NO: 198484 - protein, 13 aa, Homo sapiens
  CDR3 for beta chain variable domain of TCR clone 99242 (TRBV10-3, TRBJ2-7)
CASKLAVSYEQYF

SEQ ID NO: 198485 - protein, 13 aa, Homo sapiens
  CDR3 for alpha chain variable domain of TCR clone 99243 (TRAV3, TRAJ21)
CAVREPDFNKFYF

SEQ ID NO: 198486 - protein, 13 aa, Homo sapiens
  CDR3 for beta chain variable domain of TCR clone 99243 (TRBV9, TRBJ2-1)
CASSPSGGKEQFF

SEQ ID NO: 198487 - protein, 11 aa, Homo sapiens
  CDR3 for alpha chain variable domain of TCR clone 99244 (TRAV13-1, TRAJ15)
CAATPGTALIF

SEQ ID NO: 198488 - protein, 16 aa, Homo sapiens
  CDR3 for beta chain variable domain of TCR clone 99244 (TRBV19, TRBJ2-1)
CASSKAGPSSYNEQFF

SEQ ID NO: 198489 - protein, 12 aa, Homo sapiens
  CDR3 for alpha chain variable domain of TCR clone 99245 (TRAV1-2, TRAJ26)
CAVRYYGQNFVF

SEQ ID NO: 198490 - protein, 13 aa, Homo sapiens
  CDR3 for beta chain variable domain of TCR clone 99245 (TRBV4-2, TRBJ1-1)
CASSQAGNTEAFF

SEQ ID NO: 198491 - protein, 12 aa, Homo sapiens
  CDR3 for alpha chain variable domain of TCR clone 99246 (TRAV16, TRAJ21)
CALLCNFNKFYF

SEQ ID NO: 198492 - protein, 15 aa, Homo sapiens
  CDR3 for beta chain variable domain of TCR clone 99246 (TRBV3-1, TRBJ2-2)
CASSQAVRETGELFF

SEQ ID NO: 198493 - protein, 14 aa, Homo sapiens
  CDR3 for alpha chain variable domain of TCR clone 99247 (TRAV12-2, TRAJ40)
CAVKIPSGTYKYIF

SEQ ID NO: 198494 - protein, 16 aa, Homo sapiens
  CDR3 for beta chain variable domain of TCR clone 99247 (TRBV7-7, TRBJ2-1)
CASSLASGTSYNEQFF

SEQ ID NO: 198495 - protein, 15 aa, Homo sapiens
  CDR3 for alpha chain variable domain of TCR clone 99248 (TRAV8-3, TRAJ45)
CASSYPGGGADGLTF

SEQ ID NO: 198496 - protein, 13 aa, Homo sapiens
  CDR3 for beta chain variable domain of TCR clone 99248 (TRBV19, TRBJ1-2)
CASSVPGQDGYTF

SEQ ID NO: 198497 - protein, 12 aa, Homo sapiens
  CDR3 for alpha chain variable domain of TCR clone 99249 (TRAV16, TRAJ26)
CALRSYGQNFVF

SEQ ID NO: 198498 - protein, 14 aa, Homo sapiens
  CDR3 for beta chain variable domain of TCR clone 99249 (TRBV7-2, TRBJ2-1)
CASSPGTFYNEQFF

SEQ ID NO: 198499 - protein, 17 aa, Homo sapiens
  CDR3 for alpha chain variable domain of TCR clone 99250 (TRAV38-2/DV8, TRAJ45)
FAYRSRYSGGGADGLTF

SEQ ID NO: 198500 - protein, 15 aa, Homo sapiens
  CDR3 for beta chain variable domain of TCR clone 99250 (TRBV19, TRBJ2-1)
CASIKGRGPYNEQFF

SEQ ID NO: 198501 - protein, 20 aa, Homo sapiens
  CDR3 for alpha chain variable domain of TCR clone 99251 (TRAV27, TRAJ10)
ASTSVPSRGILTGGGNKLTF

SEQ ID NO: 198502 - protein, 14 aa, Homo sapiens
  CDR3 for beta chain variable domain of TCR clone 99251 (TRBV28, TRBJ2-7)
CASKPGPDLYEQYF

SEQ ID NO: 198503 - protein, 10 aa, Homo sapiens
  CDR3 for alpha chain variable domain of TCR clone 99252 (TRAV23/DV6, TRAJ57)
CAASSTLSQG

SEQ ID NO: 198504 - protein, 13 aa, Homo sapiens
  CDR3 for beta chain variable domain of TCR clone 99252 (TRBV7-7, TRBJ2-3)
CASSLSRADTQYF

SEQ ID NO: 198505 - protein, 14 aa, Homo sapiens
  CDR3 for alpha chain variable domain of TCR clone 99253 (TRAV26-1, TRAJ38)
CIADNAGNNRKLIW

SEQ ID NO: 198506 - protein, 18 aa, Homo sapiens
  CDR3 for beta chain variable domain of TCR clone 99253 (TRBV20-1, TRBJ2-6)
CSAETTPTHGSGANVLTF

SEQ ID NO: 198507 - protein, 16 aa, Homo sapiens
  CDR3 for alpha chain variable domain of TCR clone 99254 (TRAV12-1, TRAJ43)
CVVNPHRFGAGTRLTV

SEQ ID NO: 198508 - protein, 12 aa, Homo sapiens
  CDR3 for beta chain variable domain of TCR clone 99254 (TRBV7-2, TRBJ1-6)
CASSLSSSPLHF

SEQ ID NO: 198509 - protein, 10 aa, Homo sapiens
  CDR3 for alpha chain variable domain of TCR clone 99255 (TRAV3, TRAJ30)
CAVREIDIIF

SEQ ID NO: 198510 - protein, 14 aa, Homo sapiens
  CDR3 for beta chain variable domain of TCR clone 99255 (TRBV15, TRBJ2-3)
CATRSGTSTDTQYF

SEQ ID NO: 198511 - protein, 12 aa, Homo sapiens
  CDR3 for alpha chain variable domain of TCR clone 99256 (TRAV1-1, TRAJ43)
CAPRVSSNDMRF

SEQ ID NO: 198512 - protein, 15 aa, Homo sapiens
  CDR3 for beta chain variable domain of TCR clone 99256 (TRBV5-1, TRBJ2-7)
CASSVGDFTTYEQYF

SEQ ID NO: 198513 - protein, 13 aa, Homo sapiens
  CDR3 for alpha chain variable domain of TCR clone 99257 (TRAV26-2, TRAJ57)
CILSRGRSEKLVF

SEQ ID NO: 198514 - protein, 16 aa, Homo sapiens
  CDR3 for beta chain variable domain of TCR clone 99257 (TRBV18, TRBJ1-5)
CASSPRTGGGNQPQHF

SEQ ID NO: 198515 - protein, 15 aa, Homo sapiens
  CDR3 for alpha chain variable domain of TCR clone 99258 (TRAV12-2, TRAJ52)
CAVTSGGTSYGKLTF

SEQ ID NO: 198516 - protein, 15 aa, Homo sapiens
  CDR3 for beta chain variable domain of TCR clone 99258 (TRBV7-2, TRBJ2-1)
CASSPGFRSGNEQFF

SEQ ID NO: 198517 - protein, 12 aa, Homo sapiens
  CDR3 for alpha chain variable domain of TCR clone 99259 (TRAV13-2, TRAJ8)
CAPWLGFQKLVF

SEQ ID NO: 198518 - protein, 16 aa, Homo sapiens
  CDR3 for beta chain variable domain of TCR clone 99259 (TRBV15, TRBJ1-2)
CATSRGPRTGGGGYTF

SEQ ID NO: 198519 - protein, 14 aa, Homo sapiens
  CDR3 for alpha chain variable domain of TCR clone 99260 (TRAV12-3, TRAJ58)
CATSTETSGSRLTF

SEQ ID NO: 198520 - protein, 15 aa, Homo sapiens
  CDR3 for beta chain variable domain of TCR clone 99260 (TRBV4-1, TRBJ1-4)
CASSDTGGTNEKLFF

SEQ ID NO: 198521 - protein, 12 aa, Homo sapiens
  CDR3 for alpha chain variable domain of TCR clone 99261 (TRAV22, TRAJ29)
CAPPSVNTPLVF

SEQ ID NO: 198522 - protein, 14 aa, Homo sapiens
  CDR3 for beta chain variable domain of TCR clone 99261 (TRBV11-2, TRBJ2-7)
CASSLGAGAYEQYF

SEQ ID NO: 198523 - protein, 11 aa, Homo sapiens
  CDR3 for alpha chain variable domain of TCR clone 99262 (TRAV1-2, TRAJ20)
CAVSNDYKLSF

SEQ ID NO: 198524 - protein, 16 aa, Homo sapiens
  CDR3 for beta chain variable domain of TCR clone 99262 (TRBV19, TRBJ2-1)
CASSKAGPSSYNEQFF

SEQ ID NO: 198525 - protein, 13 aa, Homo sapiens
  CDR3 for alpha chain variable domain of TCR clone 99263 (TRAV29/DV5, TRAJ31)
CAASRTNNARLMF

SEQ ID NO: 198526 - protein, 12 aa, Homo sapiens
  CDR3 for beta chain variable domain of TCR clone 99263 (TRBV11-2, TRBJ2-2)
CASSLGGGELFF

SEQ ID NO: 198527 - protein, 13 aa, Homo sapiens
  CDR3 for alpha chain variable domain of TCR clone 99264 (TRAV1-2, TRAJ20)
CAVRDGNDYKLSF

SEQ ID NO: 198528 - protein, 13 aa, Homo sapiens
  CDR3 for beta chain variable domain of TCR clone 99264 (TRBV7-3, TRBJ1-1)
CASSQDWGAEAFF

SEQ ID NO: 198529 - protein, 13 aa, Homo sapiens
  CDR3 for alpha chain variable domain of TCR clone 99265 (TRAV35, TRAJ33)
CAGQLYGVYQLIW

SEQ ID NO: 198530 - protein, 14 aa, Homo sapiens
  CDR3 for beta chain variable domain of TCR clone 99265 (TRBV7-2, TRBJ2-7)
CASSPKTSFYEQYF

SEQ ID NO: 198531 - protein, 11 aa, Homo sapiens
  CDR3 for alpha chain variable domain of TCR clone 99266 (TRAV2, TRAJ13)
CASGGYQKVTF

SEQ ID NO: 198532 - protein, 15 aa, Homo sapiens
  CDR3 for beta chain variable domain of TCR clone 99266 (TRBV29-1, TRBJ2-7)
CSVEFFDRGSYEQYF

SEQ ID NO: 198533 - protein, 14 aa, Homo sapiens
  CDR3 for alpha chain variable domain of TCR clone 99267 (TRAV26-1, TRAJ54)
CIVRVPQGAQKLVF

SEQ ID NO: 198534 - protein, 15 aa, Homo sapiens
  CDR3 for beta chain variable domain of TCR clone 99267 (TRBV18, TRBJ2-7)
CASSPKSGSGNEQYF

SEQ ID NO: 198535 - protein, 13 aa, Homo sapiens
  CDR3 for alpha chain variable domain of TCR clone 99268 (TRAV12-1, TRAJ16)
CVVNGPDGQKLLF

SEQ ID NO: 198536 - protein, 13 aa, Homo sapiens
  CDR3 for beta chain variable domain of TCR clone 99268 (TRBV24-1, TRBJ2-2)
CATTATRTGELFF

SEQ ID NO: 198537 - protein, 14 aa, Homo sapiens
  CDR3 for alpha chain variable domain of TCR clone 99269 (TRAV2, TRAJ37)
CAVDFTSNTGKLIF

SEQ ID NO: 198538 - protein, 11 aa, Homo sapiens
  CDR3 for beta chain variable domain of TCR clone 99269 (TRBV19, TRBJ1-1)
CASSIGSEAFF

SEQ ID NO: 198539 - protein, 14 aa, Homo sapiens
  CDR3 for alpha chain variable domain of TCR clone 99270 (TRAV1-2, TRAJ16)
CAVNRFSDGQKLLF

SEQ ID NO: 198540 - protein, 13 aa, Homo sapiens
  CDR3 for beta chain variable domain of TCR clone 99270 (TRBV27, TRBJ2-7)
CASSSGDSYEQYF

SEQ ID NO: 198541 - protein, 13 aa, Homo sapiens
  CDR3 for alpha chain variable domain of TCR clone 99271 (TRAV22, TRAJ29)
FAVGGSGNTPLVF

SEQ ID NO: 198542 - protein, 14 aa, Homo sapiens
  CDR3 for beta chain variable domain of TCR clone 99271 (TRBV5-1, TRBJ2-7)
CASSRGESLYEQYF

SEQ ID NO: 198543 - protein, 13 aa, Homo sapiens
  CDR3 for alpha chain variable domain of TCR clone 99272 (TRAV12-2, TRAJ20)
CAVYPSNDYKLSF

SEQ ID NO: 198544 - protein, 11 aa, Homo sapiens
  CDR3 for beta chain variable domain of TCR clone 99272 (TRBV11-2, TRBJ2-2)
CASSLPGELFF

SEQ ID NO: 198545 - protein, 13 aa, Homo sapiens
  CDR3 for alpha chain variable domain of TCR clone 99273 (TRAV8-3, TRAJ28)
CAVGAVGSYQLTF

SEQ ID NO: 198546 - protein, 14 aa, Homo sapiens
  CDR3 for beta chain variable domain of TCR clone 99273 (TRBV7-2, TRBJ2-7)
CASRSQGAAYEPYF

SEQ ID NO: 198547 - protein, 13 aa, Homo sapiens
  CDR3 for alpha chain variable domain of TCR clone 99274 (TRAV13-2, TRAJ49)
CAETLHGGNQFYF

SEQ ID NO: 198548 - protein, 15 aa, Homo sapiens
  CDR3 for beta chain variable domain of TCR clone 99274 (TRBV9, TRBJ1-6)
CASSVAGTGDSPLHF

SEQ ID NO: 198549 - protein, 14 aa, Homo sapiens
  CDR3 for alpha chain variable domain of TCR clone 99275 (TRAV17, TRAJ16)
CATADFSDGQKLLF

SEQ ID NO: 198550 - protein, 15 aa, Homo sapiens
  CDR3 for beta chain variable domain of TCR clone 99275 (TRBV11-2, TRBJ2-1)
CASSKNRGLIYEQFF

SEQ ID NO: 198551 - protein, 13 aa, Homo sapiens
  CDR3 for alpha chain variable domain of TCR clone 99276 (TRAV1-2, TRAJ9)
CAALNTGGFKTIF

SEQ ID NO: 198552 - protein, 12 aa, Homo sapiens
  CDR3 for beta chain variable domain of TCR clone 99276 (TRBV28, TRBJ2-3)
CASSLYRDTQYF

SEQ ID NO: 198553 - protein, 13 aa, Homo sapiens
  CDR3 for alpha chain variable domain of TCR clone 99277 (TRAV2, TRAJ21)
CAVEDLNFNKFYF

SEQ ID NO: 198554 - protein, 15 aa, Homo sapiens
  CDR3 for beta chain variable domain of TCR clone 99277 (TRBV28, TRBJ2-5)
CASSPGQGSIETHYF

SEQ ID NO: 198555 - protein, 14 aa, Homo sapiens
  CDR3 for alpha chain variable domain of TCR clone 99278 (TRAV12-2, TRAJ17)
CAVLFKAAGNKLTF

SEQ ID NO: 198556 - protein, 15 aa, Homo sapiens
  CDR3 for beta chain variable domain of TCR clone 99278 (TRBV7-2, TRBJ1-2)
CASSLVSGGDYGYTF

SEQ ID NO: 198557 - protein, 13 aa, Homo sapiens
  CDR3 for alpha chain variable domain of TCR clone 99279 (TRAV2, TRAJ26)
CAVVGNYGQNLVF

SEQ ID NO: 198558 - protein, 15 aa, Homo sapiens
  CDR3 for beta chain variable domain of TCR clone 99279 (TRBV27, TRBJ2-1)
CASSNGGGSSNEQFF

SEQ ID NO: 198559 - protein, 12 aa, Homo sapiens
  CDR3 for alpha chain variable domain of TCR clone 99280 (TRAV13-2, TRAJ8)
CAPWLGFQKLVF

SEQ ID NO: 198560 - protein, 16 aa, Homo sapiens
  CDR3 for beta chain variable domain of TCR clone 99280 (TRBV11-2, TRBJ2-7)
CASSTVTAPKTYEQYF

SEQ ID NO: 198561 - protein, 14 aa, Homo sapiens
  CDR3 for alpha chain variable domain of TCR clone 99281 (TRAV23/DV6, TRAJ8)
CAAGKATGFQKLAF

SEQ ID NO: 198562 - protein, 15 aa, Homo sapiens
  CDR3 for beta chain variable domain of TCR clone 99281 (TRBV28, TRBJ2-3)
CASSPDRQGANTQYF

SEQ ID NO: 198563 - protein, 12 aa, Homo sapiens
  CDR3 for alpha chain variable domain of TCR clone 99282 (TRAV12-2, TRAJ34)
CAVSYKTDKLIF

SEQ ID NO: 198564 - protein, 16 aa, Homo sapiens
  CDR3 for beta chain variable domain of TCR clone 99282 (TRBV27, TRBJ2-5)
CASSYGPGGQKETQYF

SEQ ID NO: 198565 - protein, 13 aa, Homo sapiens
  CDR3 for alpha chain variable domain of TCR clone 99283 (TRAV12-2, TRAJ24)
CAVSTDSWGKLQF

SEQ ID NO: 198566 - protein, 17 aa, Homo sapiens
  CDR3 for beta chain variable domain of TCR clone 99283 (TRBV20-1, TRBJ2-2)
CSASGSGQGGLTGELFF

SEQ ID NO: 198567 - protein, 12 aa, Homo sapiens
  CDR3 for alpha chain variable domain of TCR clone 99284 (TRAV3, TRAJ31)
CAVRDGNARLMF

SEQ ID NO: 198568 - protein, 18 aa, Homo sapiens
  CDR3 for beta chain variable domain of TCR clone 99284 (TRBV7-2, TRBJ2-3)
CASILKREGSGITDTQYF

SEQ ID NO: 198569 - protein, 14 aa, Homo sapiens
  CDR3 for alpha chain variable domain of TCR clone 99285 (TRAV17, TRAJ22)
CATSPSGSARQPTF

SEQ ID NO: 198570 - protein, 14 aa, Homo sapiens
  CDR3 for beta chain variable domain of TCR clone 99285 (TRBV7-2, TRBJ1-1)
CASSFLTGTTEAFF

SEQ ID NO: 198571 - protein, 14 aa, Homo sapiens
  CDR3 for alpha chain variable domain of TCR clone 99286 (TRAV38-1, TRAJ40)
CALRPTSGTYKYIF

SEQ ID NO: 198572 - protein, 14 aa, Homo sapiens
  CDR3 for beta chain variable domain of TCR clone 99286 (TRBV12-4, TRBJ2-5)
CASSFGASGGTQYF

SEQ ID NO: 198573 - protein, 13 aa, Homo sapiens
  CDR3 for alpha chain variable domain of TCR clone 99287 (TRAV8-3, TRAJ28)
CAVGAVGSYQLTF

SEQ ID NO: 198574 - protein, 17 aa, Homo sapiens
  CDR3 for beta chain variable domain of TCR clone 99287 (TRBV11-2, TRBJ2-1)
CASSLYPPGVEYNEQFL

SEQ ID NO: 198575 - protein, 14 aa, Homo sapiens
  CDR3 for alpha chain variable domain of TCR clone 99288 (TRAV3, TRAJ37)
CAVKESGNTGKLIF

SEQ ID NO: 198576 - protein, 15 aa, Homo sapiens
  CDR3 for beta chain variable domain of TCR clone 99288 (TRBV6-1, TRBJ2-3)
CASSERGGITDTQYF

SEQ ID NO: 198577 - protein, 14 aa, Homo sapiens
  CDR3 for alpha chain variable domain of TCR clone 99289 (TRAV2, TRAJ9)
CAVEDRSGGFKTIF

SEQ ID NO: 198578 - protein, 13 aa, Homo sapiens
  CDR3 for beta chain variable domain of TCR clone 99289 (TRBV7-3, TRBJ1-1)
CASSQDWGAEAVF

SEQ ID NO: 198579 - protein, 12 aa, Homo sapiens
  CDR3 for alpha chain variable domain of TCR clone 99290 (TRAV26-1, TRAJ48)
CIAVFGNEKLTF

SEQ ID NO: 198580 - protein, 17 aa, Homo sapiens
  CDR3 for beta chain variable domain of TCR clone 99290 (TRBV7-6, TRBJ2-1)
CASSSGLAGGTYNEQFF

SEQ ID NO: 198581 - protein, 12 aa, Homo sapiens
  CDR3 for alpha chain variable domain of TCR clone 99291 (TRAV8-3, TRAJ20)
CAVGANDYKLSF

SEQ ID NO: 198582 - protein, 14 aa, Homo sapiens
  CDR3 for beta chain variable domain of TCR clone 99291 (TRBV20-1, TRBJ2-1)
CSAQIGGSANEQFF

SEQ ID NO: 198583 - protein, 14 aa, Homo sapiens
  CDR3 for alpha chain variable domain of TCR clone 99292 (TRAV12-2, TRAJ13)
CAVKKTGGYQKVTF

SEQ ID NO: 198584 - protein, 14 aa, Homo sapiens
  CDR3 for beta chain variable domain of TCR clone 99292 (TRBV19, TRBJ2-1)
CASPTFVSSGEQFF

SEQ ID NO: 198585 - protein, 13 aa, Homo sapiens
  CDR3 for alpha chain variable domain of TCR clone 99293 (TRAV23/DV6, TRAJ16)
CAASISEGQKLLF

SEQ ID NO: 198586 - protein, 15 aa, Homo sapiens
  CDR3 for beta chain variable domain of TCR clone 99293 (TRBV2, TRBJ2-2)
CASSRETVGTGELFF

SEQ ID NO: 198587 - protein, 13 aa, Homo sapiens
  CDR3 for alpha chain variable domain of TCR clone 99294 (TRAV12-3, TRAJ43)
CATIRPNNNDMRF

SEQ ID NO: 198588 - protein, 12 aa, Homo sapiens
  CDR3 for beta chain variable domain of TCR clone 99294 (TRBV11-2, TRBJ2-5)
CASSLGQETQYF

SEQ ID NO: 198589 - protein, 14 aa, Homo sapiens
  CDR3 for alpha chain variable domain of TCR clone 99295 (TRAV12-1, TRAJ43)
CVVNGRSNKNDMRF

SEQ ID NO: 198590 - protein, 13 aa, Homo sapiens
  CDR3 for beta chain variable domain of TCR clone 99295 (TRBV27, TRBJ1-1)
CASSLSIGAEAFF

SEQ ID NO: 198591 - protein, 13 aa, Homo sapiens
  CDR3 for alpha chain variable domain of TCR clone 99296 (TRAV2, TRAJ20)
CAVEDPSEYKLSF

SEQ ID NO: 198592 - protein, 16 aa, Homo sapiens
  CDR3 for beta chain variable domain of TCR clone 99296 (TRBV25-1, TRBJ2-7)
CASSALTGGGIYEQYF

SEQ ID NO: 198593 - protein, 12 aa, Homo sapiens
  CDR3 for alpha chain variable domain of TCR clone 99297 (TRAV3, TRAJ27)
CAVRDEAGKSTF

SEQ ID NO: 198594 - protein, 14 aa, Homo sapiens
  CDR3 for beta chain variable domain of TCR clone 99297 (TRBV5-1, TRBJ1-2)
CASSVDSTNYGYTF

SEQ ID NO: 198595 - protein, 15 aa, Homo sapiens
  CDR3 for alpha chain variable domain of TCR clone 99298 (TRAV13-1, TRAJ17)
CAASIERTAGNKLTF

SEQ ID NO: 198596 - protein, 20 aa, Homo sapiens
  CDR3 for beta chain variable domain of TCR clone 99298 (TRBV7-8, TRBJ2-2)
CASSHLFPGPTIHITGELFF

SEQ ID NO: 198597 - protein, 14 aa, Homo sapiens
  CDR3 for alpha chain variable domain of TCR clone 99299 (TRAV26-1, TRAJ39)
CIVRGSRAGNMLTF

SEQ ID NO: 198598 - protein, 15 aa, Homo sapiens
  CDR3 for beta chain variable domain of TCR clone 99299 (TRBV7-9, TRBJ1-5)
CASSQGHQRNQPQHF

SEQ ID NO: 198599 - protein, 11 aa, Homo sapiens
  CDR3 for alpha chain variable domain of TCR clone 99300 (TRAV3, TRAJ17)
PRGAAGNKLTF

SEQ ID NO: 198600 - protein, 15 aa, Homo sapiens
  CDR3 for beta chain variable domain of TCR clone 99300 (TRBV7-3, TRBJ2-1)
CASSPTGGGEVEQFF

SEQ ID NO: 198601 - protein, 15 aa, Homo sapiens
  CDR3 for alpha chain variable domain of TCR clone 99301 (TRAV8-6, TRAJ10)
CAVSDQAGGGNKLTF

SEQ ID NO: 198602 - protein, 11 aa, Homo sapiens
  CDR3 for beta chain variable domain of TCR clone 99301 (TRBV5-1, TRBJ2-5)
CASSYQETQYF

SEQ ID NO: 198603 - protein, 20 aa, Homo sapiens
  CDR3 for alpha chain variable domain of TCR clone 99302 (TRAV12-3, TRAJ41)
SLFIRDSQPSDSATPEALNF

SEQ ID NO: 198604 - protein, 13 aa, Homo sapiens
  CDR3 for beta chain variable domain of TCR clone 99302 (TRBV14, TRBJ2-7)
CASSQDRRYEQYF

SEQ ID NO: 198605 - protein, 13 aa, Homo sapiens
  CDR3 for alpha chain variable domain of TCR clone 99303 (TRAV1-2, TRAJ9)
CAALNTGGFKTIF

SEQ ID NO: 198606 - protein, 16 aa, Homo sapiens
  CDR3 for beta chain variable domain of TCR clone 99303 (TRBV28, TRBJ2-7)
CASSLFFETGGPEQYF

SEQ ID NO: 198607 - protein, 17 aa, Homo sapiens
  CDR3 for alpha chain variable domain of TCR clone 99304 (TRAV3, TRAJ28)
YAVRPLYSGAGSYQLTF

SEQ ID NO: 198608 - protein, 16 aa, Homo sapiens
  CDR3 for beta chain variable domain of TCR clone 99304 (TRBV4-2, TRBJ1-4)
CASSQARGPTNEKLFF

SEQ ID NO: 198609 - protein, 14 aa, Homo sapiens
  CDR3 for alpha chain variable domain of TCR clone 99305 (TRAV3, TRAJ6)
CAVRDGMGRRKLNT

SEQ ID NO: 198610 - protein, 15 aa, Homo sapiens
  CDR3 for beta chain variable domain of TCR clone 99305 (TRBV5-1, TRBJ2-7)
CASSLGDFTTYEQYF

SEQ ID NO: 198611 - protein, 11 aa, Homo sapiens
  CDR3 for alpha chain variable domain of TCR clone 99306 (TRAV2, TRAJ21)
CAAFNFNKFYF

SEQ ID NO: 198612 - protein, 16 aa, Homo sapiens
  CDR3 for beta chain variable domain of TCR clone 99306 (TRBV12-5, TRBJ2-5)
CASGPRTSGNQETQYF

SEQ ID NO: 198613 - protein, 13 aa, Homo sapiens
  CDR3 for alpha chain variable domain of TCR clone 99307 (TRAV4, TRAJ34)
CLVGDYNTDKLIF

SEQ ID NO: 198614 - protein, 23 aa, Homo sapiens
  CDR3 for beta chain variable domain of TCR clone 99307 (TRBV4-2, TRBJ2-3)
CASSRDPPRASSISGGRGDTQYF

SEQ ID NO: 198615 - protein, 11 aa, Homo sapiens
  CDR3 for alpha chain variable domain of TCR clone 99308 (TRAV16, TRAJ31)
CALFNNARLMF

SEQ ID NO: 198616 - protein, 15 aa, Homo sapiens
  CDR3 for beta chain variable domain of TCR clone 99308 (TRBV11-3, TRBJ2-3)
CASLKDGREGDTQYF

SEQ ID NO: 198617 - protein, 16 aa, Homo sapiens
  CDR3 for alpha chain variable domain of TCR clone 99309 (TRAV8-6, TRAJ28)
CAVTSKPGAGSYQLTF

SEQ ID NO: 198618 - protein, 16 aa, Homo sapiens
  CDR3 for beta chain variable domain of TCR clone 99309 (TRBV12-4, TRBJ2-5)
CASSWRPSGDLEAQYF

SEQ ID NO: 198619 - protein, 10 aa, Homo sapiens
  CDR3 for alpha chain variable domain of TCR clone 99310 (TRAV21, TRAJ31)
CAVDNARIMF

SEQ ID NO: 198620 - protein, 13 aa, Homo sapiens
  CDR3 for beta chain variable domain of TCR clone 99310 (TRBV4-1, TRBJ1-1)
CASSRKMNTEAFF

SEQ ID NO: 198621 - protein, 14 aa, Homo sapiens
  CDR3 for alpha chain variable domain of TCR clone 99311 (TRAV1-2, TRAJ16)
CAVNRFSDGQKLLF

SEQ ID NO: 198622 - protein, 16 aa, Homo sapiens
  CDR3 for beta chain variable domain of TCR clone 99311 (TRBV28, TRBJ2-4)
CASSLIQGSLGNMQYF

SEQ ID NO: 198623 - protein, 16 aa, Homo sapiens
  CDR3 for alpha chain variable domain of TCR clone 99312 (TRAV21, TRAJ37)
CAVRTAGSSNTGKLIF

SEQ ID NO: 198624 - protein, 12 aa, Homo sapiens
  CDR3 for beta chain variable domain of TCR clone 99312 (TRBV7-9, TRBJ2-5)
CQPSVRTRDQYF

SEQ ID NO: 198625 - protein, 11 aa, Homo sapiens
  CDR3 for alpha chain variable domain of TCR clone 99313 (TRAV1-2, TRAJ31)
SAVNNNARLMF

SEQ ID NO: 198626 - protein, 15 aa, Homo sapiens
  CDR3 for beta chain variable domain of TCR clone 99313 (TRBV28, TRBJ2-1)
CASSIIAGGRSEQFF

SEQ ID NO: 198627 - protein, 12 aa, Homo sapiens
  CDR3 for alpha chain variable domain of TCR clone 99314 (TRAV13-1, TRAJ26)
QVQDNYVQNFVF

SEQ ID NO: 198628 - protein, 13 aa, Homo sapiens
  CDR3 for beta chain variable domain of TCR clone 99314 (TRBV7-9, TRBJ2-7)
CASSAGLQYEQYF

SEQ ID NO: 198629 - protein, 14 aa, Homo sapiens
  CDR3 for alpha chain variable domain of TCR clone 99315 (TRAV12-3, TRAJ54)
CAMRGIQGAQKLVF

SEQ ID NO: 198630 - protein, 13 aa, Homo sapiens
  CDR3 for beta chain variable domain of TCR clone 99315 (TRBV19, TRBJ1-1)
CASNPSNGGEAFF

SEQ ID NO: 198631 - protein, 16 aa, Homo sapiens
  CDR3 for alpha chain variable domain of TCR clone 99316 (TRAV30, TRAJ24)
CGTEIVDADSWGKFQF

SEQ ID NO: 198632 - protein, 17 aa, Homo sapiens
  CDR3 for beta chain variable domain of TCR clone 99316 (TRBV11-2, TRBJ2-1)
CASSLYPPGVEYNEQFF

SEQ ID NO: 198633 - protein, 16 aa, Homo sapiens
  CDR3 for alpha chain variable domain of TCR clone 99317 (TRAV12-2, TRAJ40)
CAVIRGGTSGTYKNIF

SEQ ID NO: 198634 - protein, 14 aa, Homo sapiens
  CDR3 for beta chain variable domain of TCR clone 99317 (TRBV20-1, TRBJ2-5)
CSARDGRAGETQYF

SEQ ID NO: 198635 - protein, 14 aa, Homo sapiens
  CDR3 for alpha chain variable domain of TCR clone 99318 (TRAV12-1, TRAJ17)
CVVNYKAARNKLTF

SEQ ID NO: 198636 - protein, 17 aa, Homo sapiens
  CDR3 for beta chain variable domain of TCR clone 99318 (TRBV20-1, TRBJ2-1)
CSASSSGLAGSYNEQFF

SEQ ID NO: 198637 - protein, 14 aa, Homo sapiens
  CDR3 for alpha chain variable domain of TCR clone 99319 (TRAV26-1, TRAJ38)
CIADNAGNNRKLIW

SEQ ID NO: 198638 - protein, 15 aa, Homo sapiens
  CDR3 for beta chain variable domain of TCR clone 99319 (TRBV5-5, TRBJ2-2)
CASSRQASGAGELFF

SEQ ID NO: 198639 - protein, 11 aa, Homo sapiens
  CDR3 for alpha chain variable domain of TCR clone 99320 (TRAV2, TRAJ33)
CAVDSNYQLIW

SEQ ID NO: 198640 - protein, 14 aa, Homo sapiens
  CDR3 for beta chain variable domain of TCR clone 99320 (TRBV11-2, TRBJ2-3)
CASSRLARTDTQDF

SEQ ID NO: 198641 - protein, 13 aa, Homo sapiens
  CDR3 for alpha chain variable domain of TCR clone 99321 (TRAV36/DV7, TRAJ49)
CAGDSNTGNQFYS

SEQ ID NO: 198642 - protein, 12 aa, Homo sapiens
  CDR3 for beta chain variable domain of TCR clone 99321 (TRBV11-2, TRBJ2-2)
CASSLGGGELFF

SEQ ID NO: 198643 - protein, 16 aa, Homo sapiens
  CDR3 for alpha chain variable domain of TCR clone 99322 (TRAV12-3, TRAJ53)
CAMSPGSGGSNYKLTF

SEQ ID NO: 198644 - protein, 13 aa, Homo sapiens
  CDR3 for beta chain variable domain of TCR clone 99322 (TRBV28, TRBJ2-7)
CASTPGLAGEQYF

SEQ ID NO: 198645 - protein, 13 aa, Homo sapiens
  CDR3 for alpha chain variable domain of TCR clone 99323 (TRAV21, TRAJ15)
CSVANQAGTALIF

SEQ ID NO: 198646 - protein, 15 aa, Homo sapiens
  CDR3 for beta chain variable domain of TCR clone 99323 (TRBV27, TRBJ2-7)
CASSLGSSVSPEQYF

SEQ ID NO: 198647 - protein, 15 aa, Homo sapiens
  CDR3 for alpha chain variable domain of TCR clone 99324 (TRAV8-3, TRAJ40)
CAAPSLVSGTYKYIF

SEQ ID NO: 198648 - protein, 16 aa, Homo sapiens
  CDR3 for beta chain variable domain of TCR clone 99324 (TRBV7-3, TRBJ2-3)
CASSLSGYRPEDTQYF

SEQ ID NO: 198649 - protein, 13 aa, Homo sapiens
  CDR3 for alpha chain variable domain of TCR clone 99325 (TRAV2, TRAJ40)
CAVVPSGTYKYIF

SEQ ID NO: 198650 - protein, 16 aa, Homo sapiens
  CDR3 for beta chain variable domain of TCR clone 99325 (TRBV19, TRBJ2-1)
CASSKAGPSSYNEQFF

SEQ ID NO: 198651 - protein, 15 aa, Homo sapiens
  CDR3 for alpha chain variable domain of TCR clone 99326 (TRAV35, TRAJ52)
CAGPRGGTSYGKLTF

SEQ ID NO: 198652 - protein, 14 aa, Homo sapiens
  CDR3 for beta chain variable domain of TCR clone 99326 (TRBV20-1, TRBJ2-7)
CSAWTARSSYEQYF

SEQ ID NO: 198653 - protein, 15 aa, Homo sapiens
  CDR3 for alpha chain variable domain of TCR clone 99327 (TRAV8-3, TRAJ35)
CAVGATIGFGNVLHC

SEQ ID NO: 198654 - protein, 11 aa, Homo sapiens
  CDR3 for beta chain variable domain of TCR clone 99327 (TRBV24-1, TRBJ2-5)
CATSVGETQYF

SEQ ID NO: 198655 - protein, 16 aa, Homo sapiens
  CDR3 for alpha chain variable domain of TCR clone 99328 (TRAV3, TRAJ37)
CAVRGKGSGNTGKLIF

SEQ ID NO: 198656 - protein, 13 aa, Homo sapiens
  CDR3 for beta chain variable domain of TCR clone 99328 (TRBV7-3, TRBJ1-2)
CASSLKRGYGYTF

SEQ ID NO: 198657 - protein, 15 aa, Homo sapiens
  CDR3 for alpha chain variable domain of TCR clone 99329 (TRAV25, TRAJ52)
CAGRPGGTSYGKLTF

SEQ ID NO: 198658 - protein, 15 aa, Homo sapiens
  CDR3 for beta chain variable domain of TCR clone 99329 (TRBV6-3, TRBJ2-7)
CASSSPGTVFYEQYF

SEQ ID NO: 198659 - protein, 14 aa, Homo sapiens
  CDR3 for alpha chain variable domain of TCR clone 99330 (TRAV1-1, TRAJ27)
CAVIITPMQANQPL

SEQ ID NO: 198660 - protein, 15 aa, Homo sapiens
  CDR3 for beta chain variable domain of TCR clone 99330 (TRBV7-2, TRBJ2-1)
CASSSGLAGGNEQFF

SEQ ID NO: 198661 - protein, 14 aa, Homo sapiens
  CDR3 for alpha chain variable domain of TCR clone 99331 (TRAV38-1, TRAJ45)
CAYYSGGGADGLTF

SEQ ID NO: 198662 - protein, 19 aa, Homo sapiens
  CDR3 for beta chain variable domain of TCR clone 99331 (TRBV28, TRBJ2-1)
CSTPIGRSPGLAGGNEQFF

SEQ ID NO: 198663 - protein, 14 aa, Homo sapiens
  CDR3 for alpha chain variable domain of TCR clone 99332 (TRAV8-6, TRAJ12)
CAVKAADSSYKLIF

SEQ ID NO: 198664 - protein, 16 aa, Homo sapiens
  CDR3 for beta chain variable domain of TCR clone 99332 (TRBV19, TRBJ2-1)
CASSKAGPSSYNEQFF

SEQ ID NO: 198665 - protein, 13 aa, Homo sapiens
  CDR3 for alpha chain variable domain of TCR clone 99333 (TRAV8-1, TRAJ28)
CAVSGAGSYQLTF

SEQ ID NO: 198666 - protein, 14 aa, Homo sapiens
  CDR3 for beta chain variable domain of TCR clone 99333 (TRBV7-2, TRBJ2-2)
CASRGQGAAAELFF

SEQ ID NO: 198667 - protein, 13 aa, Homo sapiens
  CDR3 for alpha chain variable domain of TCR clone 99334 (TRAV3, TRAJ36)
CAVSLGGANNLFF

SEQ ID NO: 198668 - protein, 15 aa, Homo sapiens
  CDR3 for beta chain variable domain of TCR clone 99334 (TRBV7-9, TRBJ1-4)
CASSRTGGFNEKLFF

SEQ ID NO: 198669 - protein, 14 aa, Homo sapiens
  CDR3 for alpha chain variable domain of TCR clone 99335 (TRAV13-1, TRAJ13)
CAASRVGGYQKVTF

SEQ ID NO: 198670 - protein, 17 aa, Homo sapiens
  CDR3 for beta chain variable domain of TCR clone 99335 (TRBV15, TRBJ1-5)
CATSRAPPGTRNQAQHF

SEQ ID NO: 198671 - protein, 16 aa, Homo sapiens
  CDR3 for alpha chain variable domain of TCR clone 99336 (TRAV22, TRAJ45)
CAVERGKRGGADGLTF

SEQ ID NO: 198672 - protein, 17 aa, Homo sapiens
  CDR3 for beta chain variable domain of TCR clone 99336 (TRBV7-3, TRBJ2-3)
CASSLMKRMRGADTQYF

SEQ ID NO: 198673 - protein, 12 aa, Homo sapiens
  CDR3 for alpha chain variable domain of TCR clone 99337 (TRAV16, TRAJ10)
CSRTGGGNKLTF

SEQ ID NO: 198674 - protein, 15 aa, Homo sapiens
  CDR3 for beta chain variable domain of TCR clone 99337 (TRBV7-3, TRBJ2-1)
CASSPTGGGEVEQFF

SEQ ID NO: 198675 - protein, 16 aa, Homo sapiens
  CDR3 for alpha chain variable domain of TCR clone 99338 (TRAV12-2, TRAJ18)
CAVTTDRGSTRGRLYF

SEQ ID NO: 198676 - protein, 15 aa, Homo sapiens
  CDR3 for beta chain variable domain of TCR clone 99338 (TRBV9, TRBJ1-6)
CASSVAGTGDSPLHF

SEQ ID NO: 198677 - protein, 13 aa, Homo sapiens
  CDR3 for alpha chain variable domain of TCR clone 99339 (TRAV3, TRAJ29)
WAVRDIIDTPLVF

SEQ ID NO: 198678 - protein, 14 aa, Homo sapiens
  CDR3 for beta chain variable domain of TCR clone 99339 (TRBV27, TRBJ2-1)
CASSATGGYNEQFF

SEQ ID NO: 198679 - protein, 14 aa, Homo sapiens
  CDR3 for alpha chain variable domain of TCR clone 99340 (TRAV4, TRAJ22)
CLARLSGSARQLTF

SEQ ID NO: 198680 - protein, 14 aa, Homo sapiens
  CDR3 for beta chain variable domain of TCR clone 99340 (TRBV4-1, TRBJ2-2)
CASGQAVNTGELFF

SEQ ID NO: 198681 - protein, 11 aa, Homo sapiens
  CDR3 for alpha chain variable domain of TCR clone 99341 (TRAV3, TRAJ21)
CAVGNFNKFYF

SEQ ID NO: 198682 - protein, 12 aa, Homo sapiens
  CDR3 for beta chain variable domain of TCR clone 99341 (TRBV24-1, TRBJ1-1)
CATSDSDRGAFF

SEQ ID NO: 198683 - protein, 18 aa, Homo sapiens
  CDR3 for alpha chain variable domain of TCR clone 99342 (TRAV29/DV5, TRAJ52)
CAAGFRGAGGTSYGKLTF

SEQ ID NO: 198684 - protein, 12 aa, Homo sapiens
  CDR3 for beta chain variable domain of TCR clone 99342 (TRBV7-3, TRBJ2-2)
CASSLKRGDLVR

SEQ ID NO: 198685 - protein, 13 aa, Homo sapiens
  CDR3 for alpha chain variable domain of TCR clone 99343 (TRAV26-1, TRAJ35)
CIVSRRVGEMLHC

SEQ ID NO: 198686 - protein, 16 aa, Homo sapiens
  CDR3 for beta chain variable domain of TCR clone 99343 (TRBV12-5, TRBJ2-5)
CASGPRTSGNQETQYF

SEQ ID NO: 198687 - protein, 14 aa, Homo sapiens
  CDR3 for alpha chain variable domain of TCR clone 99344 (TRAV12-3, TRAJ15)
CAMIPPQAGTALIF

SEQ ID NO: 198688 - protein, 14 aa, Homo sapiens
  CDR3 for beta chain variable domain of TCR clone 99344 (TRBV20-1, TRBJ2-2)
CSARKRLATGDLFF

SEQ ID NO: 198689 - protein, 16 aa, Homo sapiens
  CDR3 for alpha chain variable domain of TCR clone 99345 (TRAV14/DV4, TRAJ54)
CAMREGRIQGAQKLVF

SEQ ID NO: 198690 - protein, 15 aa, Homo sapiens
  CDR3 for beta chain variable domain of TCR clone 99345 (TRBV7-8, TRBJ2-1)
CASSLADSLYNEQFF

SEQ ID NO: 198691 - protein, 15 aa, Homo sapiens
  CDR3 for alpha chain variable domain of TCR clone 99346 (TRAV12-3, TRAJ6)
CAMSATTGGSYIATF

SEQ ID NO: 198692 - protein, 16 aa, Homo sapiens
  CDR3 for beta chain variable domain of TCR clone 99346 (TRBV20-1, TRBJ1-2)
CSASMGQGVANYGYTF

SEQ ID NO: 198693 - protein, 12 aa, Homo sapiens
  CDR3 for alpha chain variable domain of TCR clone 99347 (TRAV8-6, TRAJ8)
CAVTPGFQKLVF

SEQ ID NO: 198694 - protein, 16 aa, Homo sapiens
  CDR3 for beta chain variable domain of TCR clone 99347 (TRBV7-3, TRBJ2-2)
CASSLKRGTLSGELFL

SEQ ID NO: 198695 - protein, 11 aa, Homo sapiens
  CDR3 for alpha chain variable domain of TCR clone 99348 (TRAV2, TRAJ33)
CAVESNYQLIW

SEQ ID NO: 198696 - protein, 15 aa, Homo sapiens
  CDR3 for beta chain variable domain of TCR clone 99348 (TRBV19, TRBJ1-1)
CASTSGQIENTEAFF

SEQ ID NO: 198697 - protein, 13 aa, Homo sapiens
  CDR3 for alpha chain variable domain of TCR clone 99349 (TRAV13-1, TRAJ6)
FAASKGGSYIPTF

SEQ ID NO: 198698 - protein, 14 aa, Homo sapiens
  CDR3 for beta chain variable domain of TCR clone 99349 (TRBV7-2, TRBJ2-1)
CASSLGVGYNEQFF

SEQ ID NO: 198699 - protein, 14 aa, Homo sapiens
  CDR3 for alpha chain variable domain of TCR clone 99350 (TRAV20, TRAJ34)
PVLCTRDNTDKLIF

SEQ ID NO: 198700 - protein, 15 aa, Homo sapiens
  CDR3 for beta chain variable domain of TCR clone 99350 (TRBV2, TRBJ2-1)
CASSVTSEGTDEQFF

SEQ ID NO: 198701 - protein, 12 aa, Homo sapiens
  CDR3 for alpha chain variable domain of TCR clone 99351 (TRAV13-1, TRAJ27)
CAAHTNAGKSPF

SEQ ID NO: 198702 - protein, 14 aa, Homo sapiens
  CDR3 for beta chain variable domain of TCR clone 99351 (TRBV19, TRBJ2-2)
CASSGQGIAGELFF

SEQ ID NO: 198703 - protein, 12 aa, Homo sapiens
  CDR3 for alpha chain variable domain of TCR clone 99352 (TRAV25, TRAJ5)
CAGGGGRRALTF

SEQ ID NO: 198704 - protein, 15 aa, Homo sapiens
  CDR3 for beta chain variable domain of TCR clone 99352 (TRBV19, TRBJ2-4)
CASRGPRRGENMQYF

SEQ ID NO: 198705 - protein, 14 aa, Homo sapiens
  CDR3 for alpha chain variable domain of TCR clone 99353 (TRAV12-3, TRAJ10)
SHLPLTGGGNKLTF

SEQ ID NO: 198706 - protein, 16 aa, Homo sapiens
  CDR3 for beta chain variable domain of TCR clone 99353 (TRBV4-3, TRBJ2-1)
CASSPALGRGVNEQFF

SEQ ID NO: 198707 - protein, 14 aa, Homo sapiens
  CDR3 for alpha chain variable domain of TCR clone 99354 (TRAV1-2, TRAJ16)
CAVNRFSDGQKLLF

SEQ ID NO: 198708 - protein, 15 aa, Homo sapiens
  CDR3 for beta chain variable domain of TCR clone 99354 (TRBV5-1, TRBJ2-3)
CASSVTSGSTDTQYV

SEQ ID NO: 198709 - protein, 14 aa, Homo sapiens
  CDR3 for alpha chain variable domain of TCR clone 99355 (TRAV12-2, TRAJ13)
CAVNPSGGYQKVTF

SEQ ID NO: 198710 - protein, 14 aa, Homo sapiens
  CDR3 for beta chain variable domain of TCR clone 99355 (TRBV12-4, TRBJ1-1)
CASSLGTGGTEAVF

SEQ ID NO: 198711 - protein, 15 aa, Homo sapiens
  CDR3 for alpha chain variable domain of TCR clone 99356 (TRAV1-2, TRAJ15)
CAVDVMGSAGTALIF

SEQ ID NO: 198712 - protein, 14 aa, Homo sapiens
  CDR3 for beta chain variable domain of TCR clone 99356 (TRBV20-1, TRBJ2-1)
CSPNDEASYNEQFF

SEQ ID NO: 198713 - protein, 18 aa, Homo sapiens
  CDR3 for alpha chain variable domain of TCR clone 99357 (TRAV21, TRAJ52)
SAVRPSPAGGTSYGKLTF

SEQ ID NO: 198714 - protein, 13 aa, Homo sapiens
  CDR3 for beta chain variable domain of TCR clone 99357 (TRBV19, TRBJ1-2)
CASSVPGQDGYTF

SEQ ID NO: 198715 - protein, 14 aa, Homo sapiens
  CDR3 for alpha chain variable domain of TCR clone 99358 (TRAV1-2, TRAJ8)
CAVREDTGFQKLVF

SEQ ID NO: 198716 - protein, 13 aa, Homo sapiens
  CDR3 for beta chain variable domain of TCR clone 99358 (TRBV7-3, TRBJ2-7)
CASSSGANYEQYF

SEQ ID NO: 198717 - protein, 15 aa, Homo sapiens
  CDR3 for alpha chain variable domain of TCR clone 99359 (TRAV13-1, TRAJ44)
CAASRGGGTASKITF

SEQ ID NO: 198718 - protein, 14 aa, Homo sapiens
  CDR3 for beta chain variable domain of TCR clone 99359 (TRBV7-2, TRBJ2-5)
CASSPRGSSETQYF

SEQ ID NO: 198719 - protein, 15 aa, Homo sapiens
  CDR3 for alpha chain variable domain of TCR clone 99360 (TRAV1-1, TRAJ24)
CALSGGTDSWGEFQF

SEQ ID NO: 198720 - protein, 16 aa, Homo sapiens
  CDR3 for beta chain variable domain of TCR clone 99360 (TRBV2, TRBJ2-7)
CASSEPWTGPSYEQYF

SEQ ID NO: 198721 - protein, 14 aa, Homo sapiens
  CDR3 for alpha chain variable domain of TCR clone 99361 (TRAV13-2, TRAJ11)
CRESSYSGYSTLTF

SEQ ID NO: 198722 - protein, 16 aa, Homo sapiens
  CDR3 for beta chain variable domain of TCR clone 99361 (TRBV6-5, TRBJ2-1)
CASSETLAGHYNEQFF

SEQ ID NO: 198723 - protein, 15 aa, Homo sapiens
  CDR3 for alpha chain variable domain of TCR clone 99362 (TRAV17, TRAJ22)
CATVAPFGSARQLTF

SEQ ID NO: 198724 - protein, 16 aa, Homo sapiens
  CDR3 for beta chain variable domain of TCR clone 99362 (TRBV10-3, TRBJ2-7)
CAISADFADRPYEQYF

SEQ ID NO: 198725 - protein, 10 aa, Homo sapiens
  CDR3 for alpha chain variable domain of TCR clone 99363 (TRAV5, TRAJ34)
CAEDTDKLIF

SEQ ID NO: 198726 - protein, 12 aa, Homo sapiens
  CDR3 for beta chain variable domain of TCR clone 99363 (TRBV11-2, TRBJ2-2)
CASSLGGGELFS

SEQ ID NO: 198727 - protein, 18 aa, Homo sapiens
  CDR3 for alpha chain variable domain of TCR clone 99364 (TRAV13-1, TRAJ52)
CAAKNPNAGGTSYGKLTF

SEQ ID NO: 198728 - protein, 15 aa, Homo sapiens
  CDR3 for beta chain variable domain of TCR clone 99364 (TRBV6-1, TRBJ2-3)
SASSERGGITDTQYF

SEQ ID NO: 198729 - protein, 14 aa, Homo sapiens
  CDR3 for alpha chain variable domain of TCR clone 99365 (TRAV27, TRAJ45)
CAGAQEEVLTDSPF

SEQ ID NO: 198730 - protein, 15 aa, Homo sapiens
  CDR3 for beta chain variable domain of TCR clone 99365 (TRBV20-1, TRBJ2-7)
CSARDRVSGMDEQYF

SEQ ID NO: 198731 - protein, 10 aa, Homo sapiens
  CDR3 for alpha chain variable domain of TCR clone 99366 (TRAV23/DV6, TRAJ57)
CAASSTLSQV

SEQ ID NO: 198732 - protein, 14 aa, Homo sapiens
  CDR3 for beta chain variable domain of TCR clone 99366 (TRBV7-8, TRBJ2-5)
CASSATGGQETQYF

SEQ ID NO: 198733 - protein, 16 aa, Homo sapiens
  CDR3 for alpha chain variable domain of TCR clone 99367 (TRAV30, TRAJ42)
CGTSKNHGGSQGNLIF

SEQ ID NO: 198734 - protein, 14 aa, Homo sapiens
  CDR3 for beta chain variable domain of TCR clone 99367 (TRBV19, TRBJ1-5)
CASNSYGTHQPQHF

SEQ ID NO: 198735 - protein, 14 aa, Homo sapiens
  CDR3 for alpha chain variable domain of TCR clone 99368 (TRAV2, TRAJ37)
CAVDFTSNTGKLIF

SEQ ID NO: 198736 - protein, 15 aa, Homo sapiens
  CDR3 for beta chain variable domain of TCR clone 99368 (TRBV20-1, TRBJ1-1)
CSASRGVTGNPEAFF

SEQ ID NO: 198737 - protein, 17 aa, Homo sapiens
  CDR3 for alpha chain variable domain of TCR clone 99369 (TRAV3, TRAJ6)
CAVRDGPRAGGSDIPKF

SEQ ID NO: 198738 - protein, 14 aa, Homo sapiens
  CDR3 for beta chain variable domain of TCR clone 99369 (TRBV7-2, TRBJ2-7)
CASSPKTSFYEQYF

SEQ ID NO: 198739 - protein, 13 aa, Homo sapiens
  CDR3 for alpha chain variable domain of TCR clone 99370 (TRAV12-1, TRAJ7)
CVVNLRGNNRLAF

SEQ ID NO: 198740 - protein, 15 aa, Homo sapiens
  CDR3 for beta chain variable domain of TCR clone 99370 (TRBV27, TRBJ2-3)
CASSLGLAATDTQYF

SEQ ID NO: 198741 - protein, 16 aa, Homo sapiens
  CDR3 for alpha chain variable domain of TCR clone 99371 (TRAV3, TRAJ37)
CAVRDSGSGNTGKLIL

SEQ ID NO: 198742 - protein, 12 aa, Homo sapiens
  CDR3 for beta chain variable domain of TCR clone 99371 (TRBV7-2, TRBJ2-5)
CASSLYQETQYF

SEQ ID NO: 198743 - protein, 15 aa, Homo sapiens
  CDR3 for alpha chain variable domain of TCR clone 99372 (TRAV8-3, TRAJ11)
CAVGLLNSGYSTLTF

SEQ ID NO: 198744 - protein, 16 aa, Homo sapiens
  CDR3 for beta chain variable domain of TCR clone 99372 (TRBV7-9, TRBJ1-2)
CASSLGFFSGEDGYTF

SEQ ID NO: 198745 - protein, 14 aa, Homo sapiens
  CDR3 for alpha chain variable domain of TCR clone 99373 (TRAV12-2, TRAJ40)
RAVKIPSGTYKYIF

SEQ ID NO: 198746 - protein, 13 aa, Homo sapiens
  CDR3 for beta chain variable domain of TCR clone 99373 (TRBV12-4, TRBJ1-1)
CASSPGTGFEAFF

SEQ ID NO: 198747 - protein, 14 aa, Homo sapiens
  CDR3 for alpha chain variable domain of TCR clone 99374 (TRAV2, TRAJ23)
CAVGLRNQGGKLIF

SEQ ID NO: 198748 - protein, 12 aa, Homo sapiens
  CDR3 for beta chain variable domain of TCR clone 99374 (TRBV7-9, TRBJ1-5)
CASSPQGQPQHF

SEQ ID NO: 198749 - protein, 14 aa, Homo sapiens
  CDR3 for alpha chain variable domain of TCR clone 99375 (TRAV12-1, TRAJ30)
CVVNIGGRDDKIIF

SEQ ID NO: 198750 - protein, 13 aa, Homo sapiens
  CDR3 for beta chain variable domain of TCR clone 99375 (TRBV12-5, TRBJ2-1)
CASGSGRGNEQFF

SEQ ID NO: 198751 - protein, 11 aa, Homo sapiens
  CDR3 for alpha chain variable domain of TCR clone 99376 (TRAV21, TRAJ34)
CAHYNTDKLIF

SEQ ID NO: 198752 - protein, 14 aa, Homo sapiens
  CDR3 for beta chain variable domain of TCR clone 99376 (TRBV20-1, TRBJ1-1)
CSAQTRIGGTEAFF

SEQ ID NO: 198753 - protein, 14 aa, Homo sapiens
  CDR3 for alpha chain variable domain of TCR clone 99377 (TRAV12-2, TRAJ5)
CAVKGDTGRRALTF

SEQ ID NO: 198754 - protein, 15 aa, Homo sapiens
  CDR3 for beta chain variable domain of TCR clone 99377 (TRBV5-7, TRBJ1-2)
CASSLGVAANYGYTF

SEQ ID NO: 198755 - protein, 15 aa, Homo sapiens
  CDR3 for alpha chain variable domain of TCR clone 99378 (TRAV17, TRAJ57)
CATGPSQGGSEKLVF

SEQ ID NO: 198756 - protein, 14 aa, Homo sapiens
  CDR3 for beta chain variable domain of TCR clone 99378 (TRBV12-4, TRBJ2-5)
CASSLWQKQETQYF

SEQ ID NO: 198757 - protein, 14 aa, Homo sapiens
  CDR3 for alpha chain variable domain of TCR clone 99379 (TRAV12-2, TRAJ40)
CAVKIPSGTYKYIF

SEQ ID NO: 198758 - protein, 17 aa, Homo sapiens
  CDR3 for beta chain variable domain of TCR clone 99379 (TRBV11-2, TRBJ2-6)
CASSQRDIFSGANVLTF

SEQ ID NO: 198759 - protein, 14 aa, Homo sapiens
  CDR3 for alpha chain variable domain of TCR clone 99380 (TRAV12-2, TRAJ13)
CAVKKTGGYQKVTF

SEQ ID NO: 198760 - protein, 15 aa, Homo sapiens
  CDR3 for beta chain variable domain of TCR clone 99380 (TRBV27, TRBJ2-1)
CASSNGVGSSNEQFL

SEQ ID NO: 198761 - protein, 14 aa, Homo sapiens
  CDR3 for alpha chain variable domain of TCR clone 99381 (TRAV12-2, TRAJ13)
CAVKKTGGYQKVTF

SEQ ID NO: 198762 - protein, 14 aa, Homo sapiens
  CDR3 for beta chain variable domain of TCR clone 99381 (TRBV5-1, TRBJ2-1)
CASSLEGPVYEQFF

SEQ ID NO: 198763 - protein, 14 aa, Homo sapiens
  CDR3 for alpha chain variable domain of TCR clone 99382 (TRAV2, TRAJ3)
CAVRPYSSASKIIF

SEQ ID NO: 198764 - protein, 18 aa, Homo sapiens
  CDR3 for beta chain variable domain of TCR clone 99382 (TRBV10-2, TRBJ2-2)
CISAPAVHRQADAGELFF

SEQ ID NO: 198765 - protein, 14 aa, Homo sapiens
  CDR3 for alpha chain variable domain of TCR clone 99383 (TRAV38-1, TRAJ40)
CALRPTSGTYKYIF

SEQ ID NO: 198766 - protein, 13 aa, Homo sapiens
  CDR3 for beta chain variable domain of TCR clone 99383 (TRBV14, TRBJ1-1)
CASSQEAGTEAFF

SEQ ID NO: 198767 - protein, 17 aa, Homo sapiens
  CDR3 for alpha chain variable domain of TCR clone 99384 (TRAV3, TRAJ6)
CAVRDGPRAGGSYIPTF

SEQ ID NO: 198768 - protein, 14 aa, Homo sapiens
  CDR3 for beta chain variable domain of TCR clone 99384 (TRBV7-2, TRBJ2-7)
CASSPKTSFYEQYL

SEQ ID NO: 198769 - protein, 11 aa, Homo sapiens
  CDR3 for alpha chain variable domain of TCR clone 99385 (TRAV12-3, TRAJ43)
CAMSVSNDMRF

SEQ ID NO: 198770 - protein, 13 aa, Homo sapiens
  CDR3 for beta chain variable domain of TCR clone 99385 (TRBV20-1, TRBJ1-1)
SSAPLGGGTEAFF

SEQ ID NO: 198771 - protein, 14 aa, Homo sapiens
  CDR3 for alpha chain variable domain of TCR clone 99386 (TRAV12-3, TRAJ45)
SHLPLTGGGNKLTF

SEQ ID NO: 198772 - protein, 16 aa, Homo sapiens
  CDR3 for beta chain variable domain of TCR clone 99386 (TRBV27, TRBJ2-2)
CASSFRGLVRTGELFF

SEQ ID NO: 198773 - protein, 15 aa, Homo sapiens
  CDR3 for alpha chain variable domain of TCR clone 99387 (TRAV12-3, TRAJ6)
CAMSATTGGSYIPTF

SEQ ID NO: 198774 - protein, 15 aa, Homo sapiens
  CDR3 for beta chain variable domain of TCR clone 99387 (TRBV7-2, TRBJ2-7)
CASSLKGALTYEQYF

SEQ ID NO: 198775 - protein, 11 aa, Homo sapiens
  CDR3 for alpha chain variable domain of TCR clone 99388 (TRAV12-1, TRAJ8)
CVVTGFQKLVF

SEQ ID NO: 198776 - protein, 15 aa, Homo sapiens
  CDR3 for beta chain variable domain of TCR clone 99388 (TRBV6-6, TRBJ2-5)
CASSPGGGLEETQYF

SEQ ID NO: 198777 - protein, 12 aa, Homo sapiens
  CDR3 for alpha chain variable domain of TCR clone 99389 (TRAV12-3, TRAJ42)
CAPVGSQGNLIF

SEQ ID NO: 198778 - protein, 13 aa, Homo sapiens
  CDR3 for beta chain variable domain of TCR clone 99389 (TRBV5-7, TRBJ2-6)
CASTSSGANVLTF

SEQ ID NO: 198779 - protein, 15 aa, Homo sapiens
  CDR3 for alpha chain variable domain of TCR clone 99390 (TRAV21, TRAJ53)
CATLNSGGSNYKLTF

SEQ ID NO: 198780 - protein, 16 aa, Homo sapiens
  CDR3 for beta chain variable domain of TCR clone 99390 (TRBV9, TRBJ2-1)
CASSVGGGGNYNKQFF

SEQ ID NO: 198781 - protein, 15 aa, Homo sapiens
  CDR3 for alpha chain variable domain of TCR clone 99391 (TRAV12-2, TRAJ53)
CAVNGGGGSNYKLTL

SEQ ID NO: 198782 - protein, 14 aa, Homo sapiens
  CDR3 for beta chain variable domain of TCR clone 99391 (TRBV19, TRBJ2-2)
CASSTLHRSGELFF

SEQ ID NO: 198783 - protein, 13 aa, Homo sapiens
  CDR3 for alpha chain variable domain of TCR clone 99392 (TRAV30, TRAJ24)
CGTVTESWGKLQF

SEQ ID NO: 198784 - protein, 15 aa, Homo sapiens
  CDR3 for beta chain variable domain of TCR clone 99392 (TRBV4-1, TRBJ2-1)
CASSQDPGNYNEQFF

SEQ ID NO: 198785 - protein, 11 aa, Homo sapiens
  CDR3 for alpha chain variable domain of TCR clone 99393 (TRAV21, TRAJ48)
CAVDGNEKLTF

SEQ ID NO: 198786 - protein, 16 aa, Homo sapiens
  CDR3 for beta chain variable domain of TCR clone 99393 (TRBV12-4, TRBJ1-5)
CASSSGPRGSSQPQHF

SEQ ID NO: 198787 - protein, 14 aa, Homo sapiens
  CDR3 for alpha chain variable domain of TCR clone 99394 (TRAV12-3, TRAJ10)
SHLPLTGGGNKLTF

SEQ ID NO: 198788 - protein, 14 aa, Homo sapiens
  CDR3 for beta chain variable domain of TCR clone 99394 (TRBV18, TRBJ1-2)
CASSPDRVVYGYTF

SEQ ID NO: 198789 - protein, 12 aa, Homo sapiens
  CDR3 for alpha chain variable domain of TCR clone 99395 (TRAV1-1, TRAJ39)
CAVLVVGNMLTF

SEQ ID NO: 198790 - protein, 18 aa, Homo sapiens
  CDR3 for beta chain variable domain of TCR clone 99395 (TRBV7-9, TRBJ2-7)
CASSLTTSGSRTWYEQYF

SEQ ID NO: 198791 - protein, 13 aa, Homo sapiens
  CDR3 for alpha chain variable domain of TCR clone 99396 (TRAV12-3, TRAJ33)
CAMIVNSNYQLIW

SEQ ID NO: 198792 - protein, 16 aa, Homo sapiens
  CDR3 for beta chain variable domain of TCR clone 99396 (TRBV13, TRBJ2-5)
CASSLRTGGSWETQYF

SEQ ID NO: 198793 - protein, 12 aa, Homo sapiens
  CDR3 for alpha chain variable domain of TCR clone 99397 (TRAV1-2, TRAJ33)
CAALDSNYQIIW

SEQ ID NO: 198794 - protein, 13 aa, Homo sapiens
  CDR3 for beta chain variable domain of TCR clone 99397 (TRBV19, TRBJ2-7)
CASRKAGGSEQYF

SEQ ID NO: 198795 - protein, 12 aa, Homo sapiens
  CDR3 for alpha chain variable domain of TCR clone 99398 (TRAV12-3, TRAJ34)
CAMGYNTDKLIF

SEQ ID NO: 198796 - protein, 15 aa, Homo sapiens
  CDR3 for beta chain variable domain of TCR clone 99398 (TRBV15, TRBJ1-5)
CATSRDPVSNQPQHF

SEQ ID NO: 198797 - protein, 13 aa, Homo sapiens
  CDR3 for alpha chain variable domain of TCR clone 99399 (TRAV8-4, TRAJ9)
CAVSETGGFKTIF

SEQ ID NO: 198798 - protein, 12 aa, Homo sapiens
  CDR3 for beta chain variable domain of TCR clone 99399 (TRBV7-9, TRBJ2-7)
CASSIKREEQYF

SEQ ID NO: 198799 - protein, 15 aa, Homo sapiens
  CDR3 for alpha chain variable domain of TCR clone 99400 (TRAV8-3, TRAJ27)
CAVGPSKTNAGKSTF

SEQ ID NO: 198800 - protein, 15 aa, Homo sapiens
  CDR3 for beta chain variable domain of TCR clone 99400 (TRBV7-2, TRBJ2-1)
CASSSGLEGGNEQFF

SEQ ID NO: 198801 - protein, 14 aa, Homo sapiens
  CDR3 for alpha chain variable domain of TCR clone 99401 (TRAV1-2, TRAJ8)
CAVREDTGFQKFVF

SEQ ID NO: 198802 - protein, 15 aa, Homo sapiens
  CDR3 for beta chain variable domain of TCR clone 99401 (TRBV4-1, TRBJ2-7)
CASSQNTGRLYEQYF

SEQ ID NO: 198803 - protein, 15 aa, Homo sapiens
  CDR3 for alpha chain variable domain of TCR clone 99402 (TRAV21, TRAJ53)
CATLNSGGSNYKLTF

SEQ ID NO: 198804 - protein, 15 aa, Homo sapiens
  CDR3 for beta chain variable domain of TCR clone 99402 (TRBV20-1, TRBJ1-1)
CSASRGVTGNTEAFF

SEQ ID NO: 198805 - protein, 14 aa, Homo sapiens
  CDR3 for alpha chain variable domain of TCR clone 99403 (TRAV12-2, TRAJ13)
CAVKKTGGYQKVTF

SEQ ID NO: 198806 - protein, 13 aa, Homo sapiens
  CDR3 for beta chain variable domain of TCR clone 99403 (TRBV9, TRBJ2-7)
CASSASDSYEQYF

SEQ ID NO: 198807 - protein, 22 aa, Homo sapiens
  CDR3 for alpha chain variable domain of TCR clone 99404 (TRAV38-1, )
CAFMKHGPPPDIQNPDPAVYQL

SEQ ID NO: 198808 - protein, 13 aa, Homo sapiens
  CDR3 for beta chain variable domain of TCR clone 99404 (TRBV7-3, TRBJ2-5)
CASSLMLGGTQYF

SEQ ID NO: 198809 - protein, 16 aa, Homo sapiens
  CDR3 for alpha chain variable domain of TCR clone 99405 (TRAV3, TRAJ37)
CAVRGKGSGNTGKLIF

SEQ ID NO: 198810 - protein, 15 aa, Homo sapiens
  CDR3 for beta chain variable domain of TCR clone 99405 (TRBV28, TRBJ1-2)
CASSSHSIANYGYTF

SEQ ID NO: 198811 - protein, 17 aa, Homo sapiens
  CDR3 for alpha chain variable domain of TCR clone 99406 (TRAV3, TRAJ12)
CAVRDGGRMDSSYKLIF

SEQ ID NO: 198812 - protein, 13 aa, Homo sapiens
  CDR3 for beta chain variable domain of TCR clone 99406 (TRBV15, TRBJ1-6)
CATAGGLNSPLHF

SEQ ID NO: 198813 - protein, 14 aa, Homo sapiens
  CDR3 for alpha chain variable domain of TCR clone 99407 (TRAV20, TRAJ10)
CAVRVEGGGHKLTF

SEQ ID NO: 198814 - protein, 18 aa, Homo sapiens
  CDR3 for beta chain variable domain of TCR clone 99407 (TRBV24-1, TRBJ2-1)
CATSDLMFLGRGVHEQFF

SEQ ID NO: 198815 - protein, 14 aa, Homo sapiens
  CDR3 for alpha chain variable domain of TCR clone 99408 (TRAV17, TRAJ11)
CATDTSRGYSTLTF

SEQ ID NO: 198816 - protein, 13 aa, Homo sapiens
  CDR3 for beta chain variable domain of TCR clone 99408 (TRBV19, TRBJ2-5)
CASRDSGRETQYF

SEQ ID NO: 198817 - protein, 16 aa, Homo sapiens
  CDR3 for alpha chain variable domain of TCR clone 99409 (TRAV12-2, TRAJ32)
CAVNLGQGGATNKLIF

SEQ ID NO: 198818 - protein, 13 aa, Homo sapiens
  CDR3 for beta chain variable domain of TCR clone 99409 (TRBV9, TRBJ2-2)
CASSPRPARELFF

SEQ ID NO: 198819 - protein, 14 aa, Homo sapiens
  CDR3 for alpha chain variable domain of TCR clone 99410 (TRAV8-1, TRAJ23)
CAVGTYNQGGKLIF

SEQ ID NO: 198820 - protein, 15 aa, Homo sapiens
  CDR3 for beta chain variable domain of TCR clone 99410 (TRBV6-5, TRBJ1-6)
CASSLGQGFRSPLHF

SEQ ID NO: 198821 - protein, 13 aa, Homo sapiens
  CDR3 for alpha chain variable domain of TCR clone 99411 (TRAV13-2, TRAJ48)
CAEMDFGNEKLTF

SEQ ID NO: 198822 - protein, 13 aa, Homo sapiens
  CDR3 for beta chain variable domain of TCR clone 99411 (TRBV29-1, TRBJ2-2)
CSTTGVNTGELFF

SEQ ID NO: 198823 - protein, 15 aa, Homo sapiens
  CDR3 for alpha chain variable domain of TCR clone 99412 (TRAV17, TRAJ42)
CATDHYGGSQGSLIF

SEQ ID NO: 198824 - protein, 14 aa, Homo sapiens
  CDR3 for beta chain variable domain of TCR clone 99412 (TRBV7-2, TRBJ2-1)
CASSLSRVDNEQFF

SEQ ID NO: 198825 - protein, 17 aa, Homo sapiens
  CDR3 for alpha chain variable domain of TCR clone 99413 (TRAV8-6, TRAJ52)
CAVTRNAGGTSYGKLTF

SEQ ID NO: 198826 - protein, 15 aa, Homo sapiens
  CDR3 for beta chain variable domain of TCR clone 99413 (TRBV2, TRBJ2-1)
CASSELAGSYNEQFF

SEQ ID NO: 198827 - protein, 18 aa, Homo sapiens
  CDR3 for alpha chain variable domain of TCR clone 99414 (TRAV9-2, TRAJ52)
CALSRHNAGGTSYGKLTF

SEQ ID NO: 198828 - protein, 15 aa, Homo sapiens
  CDR3 for beta chain variable domain of TCR clone 99414 (TRBV20-1, TRBJ2-7)
CSAESGTSGAYEQYF

SEQ ID NO: 198829 - protein, 16 aa, Homo sapiens
  CDR3 for alpha chain variable domain of TCR clone 99415 (TRAV3, TRAJ37)
CAVSGKGSGNTGKLIF

SEQ ID NO: 198830 - protein, 16 aa, Homo sapiens
  CDR3 for beta chain variable domain of TCR clone 99415 (TRBV12-4, TRBJ1-5)
CASSRPVGGSNQPQHF

SEQ ID NO: 198831 - protein, 15 aa, Homo sapiens
  CDR3 for alpha chain variable domain of TCR clone 99416 (TRAV12-1, TRAJ8)
CVVNVENTGFQKLVF

SEQ ID NO: 198832 - protein, 19 aa, Homo sapiens
  CDR3 for beta chain variable domain of TCR clone 99416 (TRBV7-2, TRBJ2-3)
CASSFLSRNWGGGTDTQYF

SEQ ID NO: 198833 - protein, 13 aa, Homo sapiens
  CDR3 for alpha chain variable domain of TCR clone 99417 (TRAV20, TRAJ54)
CAVQAGGAQKMVF

SEQ ID NO: 198834 - protein, 14 aa, Homo sapiens
  CDR3 for beta chain variable domain of TCR clone 99417 (TRBV20-1, TRBJ2-7)
CSAKTGTGGYEQYF

SEQ ID NO: 198835 - protein, 12 aa, Homo sapiens
  CDR3 for alpha chain variable domain of TCR clone 99418 (TRAV3, TRAJ43)
CAVRDPNNDMRF

SEQ ID NO: 198836 - protein, 20 aa, Homo sapiens
  CDR3 for beta chain variable domain of TCR clone 99418 (TRBV7-8, TRBJ2-2)
CASSHLFPGPTIHITGELFF

SEQ ID NO: 198837 - protein, 13 aa, Homo sapiens
  CDR3 for alpha chain variable domain of TCR clone 99419 (TRAV21, TRAJ27)
CAARPGNAGTSTF

SEQ ID NO: 198838 - protein, 13 aa, Homo sapiens
  CDR3 for beta chain variable domain of TCR clone 99419 (TRBV13, TRBJ2-1)
CASILGGRGEQFF

SEQ ID NO: 198839 - protein, 13 aa, Homo sapiens
  CDR3 for alpha chain variable domain of TCR clone 99420 (TRAV21, TRAJ27)
CAARPGTAGTSTF

SEQ ID NO: 198840 - protein, 14 aa, Homo sapiens
  CDR3 for beta chain variable domain of TCR clone 99420 (TRBV7-6, TRBJ2-3)
CASSLGTVTDTQYF

SEQ ID NO: 198841 - protein, 18 aa, Homo sapiens
  CDR3 for alpha chain variable domain of TCR clone 99421 (TRAV21, TRAJ52)
CAVRPSPAGGTSYGKLTF

SEQ ID NO: 198842 - protein, 16 aa, Homo sapiens
  CDR3 for beta chain variable domain of TCR clone 99421 (TRBV12-4, TRBJ2-7)
CASSPEGQGSSYEQYF

SEQ ID NO: 198843 - protein, 13 aa, Homo sapiens
  CDR3 for alpha chain variable domain of TCR clone 99422 (TRAV1-1, TRAJ9)
CAAKNTGGFKTIF

SEQ ID NO: 198844 - protein, 14 aa, Homo sapiens
  CDR3 for beta chain variable domain of TCR clone 99422 (TRBV12-5, TRBJ2-5)
CASVSRTHQETQYF

SEQ ID NO: 198845 - protein, 11 aa, Homo sapiens
  CDR3 for alpha chain variable domain of TCR clone 99423 (TRAV2, TRAJ13)
CASGGYQKVTF

SEQ ID NO: 198846 - protein, 16 aa, Homo sapiens
  CDR3 for beta chain variable domain of TCR clone 99423 (TRBV7-2, TRBJ2-1)
CASSLVAGAGYNEQFF

SEQ ID NO: 198847 - protein, 13 aa, Homo sapiens
  CDR3 for alpha chain variable domain of TCR clone 99424 (TRAV12-1, TRAJ26)
CVVRRNYGQNFVF

SEQ ID NO: 198848 - protein, 15 aa, Homo sapiens
  CDR3 for beta chain variable domain of TCR clone 99424 (TRBV28, TRBJ2-1)
CASSPPGLADHEQFF

SEQ ID NO: 198849 - protein, 18 aa, Homo sapiens
  CDR3 for alpha chain variable domain of TCR clone 99425 (TRAV26-1, TRAJ52)
CIVRVEGAGGTSYGKLTF

SEQ ID NO: 198850 - protein, 13 aa, Homo sapiens
  CDR3 for beta chain variable domain of TCR clone 99425 (TRBV7-3, TRBJ1-2)
CAGSLKRGYGYTF

SEQ ID NO: 198851 - protein, 15 aa, Homo sapiens
  CDR3 for alpha chain variable domain of TCR clone 99426 (TRAV35, TRAJ20)
CAGQLVGSNNYKLSF

SEQ ID NO: 198852 - protein, 13 aa, Homo sapiens
  CDR3 for beta chain variable domain of TCR clone 99426 (TRBV19, TRBJ2-7)
CASSKTGTHEQYF

SEQ ID NO: 198853 - protein, 13 aa, Homo sapiens
  CDR3 for alpha chain variable domain of TCR clone 99427 (TRAV12-3, TRAJ40)
CAMSARGTYKYIF

SEQ ID NO: 198854 - protein, 15 aa, Homo sapiens
  CDR3 for beta chain variable domain of TCR clone 99427 (TRBV12-4, TRBJ2-5)
CASSPPTGLQETQYF

SEQ ID NO: 198855 - protein, 16 aa, Homo sapiens
  CDR3 for alpha chain variable domain of TCR clone 99428 (TRAV14/DV4, TRAJ53)
CAMREGGGGSNYKLTF

SEQ ID NO: 198856 - protein, 14 aa, Homo sapiens
  CDR3 for beta chain variable domain of TCR clone 99428 (TRBV7-2, TRBJ1-6)
CASSLQGANSPLHF

SEQ ID NO: 198857 - protein, 18 aa, Homo sapiens
  CDR3 for alpha chain variable domain of TCR clone 99429 (TRAV12-3, TRAJ52)
CVMSVGGAGGTSYGKLTF

SEQ ID NO: 198858 - protein, 14 aa, Homo sapiens
  CDR3 for beta chain variable domain of TCR clone 99429 (TRBV27, TRBJ2-5)
CASSSLKGWETQYF

SEQ ID NO: 198859 - protein, 13 aa, Homo sapiens
  CDR3 for alpha chain variable domain of TCR clone 99430 (TRAV38-1, TRAJ42)
CARWGGSQGNLIF

SEQ ID NO: 198860 - protein, 17 aa, Homo sapiens
  CDR3 for beta chain variable domain of TCR clone 99430 (TRBV20-1, TRBJ2-1)
CSARDPLAGVWVNEQFF

SEQ ID NO: 198861 - protein, 17 aa, Homo sapiens
  CDR3 for alpha chain variable domain of TCR clone 99431 (TRAV3, TRAJ42)
CVVRDRDYGGSQGNLIF

SEQ ID NO: 198862 - protein, 15 aa, Homo sapiens
  CDR3 for beta chain variable domain of TCR clone 99431 (TRBV6-6, TRBJ2-7)
CASSYLYGGSYEQYF

SEQ ID NO: 198863 - protein, 14 aa, Homo sapiens
  CDR3 for alpha chain variable domain of TCR clone 99432 (TRAV8-4, TRAJ9)
CAVRINTGGFKTIF

SEQ ID NO: 198864 - protein, 15 aa, Homo sapiens
  CDR3 for beta chain variable domain of TCR clone 99432 (TRBV10-2, TRBJ2-6)
CASSEQGTGANFLTF

SEQ ID NO: 198865 - protein, 15 aa, Homo sapiens
  CDR3 for alpha chain variable domain of TCR clone 99433 (TRAV2, TRAJ28)
CAVPYSGAGSYQLPF

SEQ ID NO: 198866 - protein, 17 aa, Homo sapiens
  CDR3 for beta chain variable domain of TCR clone 99433 (TRBV20-1, TRBJ2-4)
CSARDWASGGRENIQYF

SEQ ID NO: 198867 - protein, 14 aa, Homo sapiens
  CDR3 for alpha chain variable domain of TCR clone 99434 (TRAV1-2, TRAJ8)
CAVREDTGFQKLVF

SEQ ID NO: 198868 - protein, 13 aa, Homo sapiens
  CDR3 for beta chain variable domain of TCR clone 99434 (TRBV7-3, TRBJ2-7)
CASSQAGGYEQYF

SEQ ID NO: 198869 - protein, 12 aa, Homo sapiens
  CDR3 for alpha chain variable domain of TCR clone 99435 (TRAV12-2, TRAJ21)
CAVRYNFNKFYF

SEQ ID NO: 198870 - protein, 14 aa, Homo sapiens
  CDR3 for beta chain variable domain of TCR clone 99435 (TRBV20-1, TRBJ2-5)
CSARDGRAGETQYF

SEQ ID NO: 198871 - protein, 15 aa, Homo sapiens
  CDR3 for alpha chain variable domain of TCR clone 99436 (TRAV27, TRAJ38)
CAARRNAGNNRKLIG

SEQ ID NO: 198872 - protein, 13 aa, Homo sapiens
  CDR3 for beta chain variable domain of TCR clone 99436 (TRBV10-3, TRBJ2-7)
CASKLAVNYEQYF

SEQ ID NO: 198873 - protein, 10 aa, Homo sapiens
  CDR3 for alpha chain variable domain of TCR clone 99437 (TRAV1-2, TRAJ18)
CAVRGEAQPW

SEQ ID NO: 198874 - protein, 13 aa, Homo sapiens
  CDR3 for beta chain variable domain of TCR clone 99437 (TRBV20-1, TRBJ1-1)
RSARVGGNTEAFF

SEQ ID NO: 198875 - protein, 16 aa, Homo sapiens
  CDR3 for alpha chain variable domain of TCR clone 99438 (TRAV26-1, TRAJ37)
CIVRGDGSGNTGKLIF

SEQ ID NO: 198876 - protein, 17 aa, Homo sapiens
  CDR3 for beta chain variable domain of TCR clone 99438 (TRBV4-1, TRBJ2-7)
GASSRDPLGVRGGEQYF

SEQ ID NO: 198877 - protein, 13 aa, Homo sapiens
  CDR3 for alpha chain variable domain of TCR clone 99439 (TRAV21, TRAJ57)
CAVTQGGSEKLVF

SEQ ID NO: 198878 - protein, 16 aa, Homo sapiens
  CDR3 for beta chain variable domain of TCR clone 99439 (TRBV29-1, TRBJ2-7)
CSVEDAEDGTAYEKYF

SEQ ID NO: 198879 - protein, 12 aa, Homo sapiens
  CDR3 for alpha chain variable domain of TCR clone 99440 (TRAV13-1, TRAJ9)
CASHTVGFKTIF

SEQ ID NO: 198880 - protein, 13 aa, Homo sapiens
  CDR3 for beta chain variable domain of TCR clone 99440 (TRBV12-4, TRBJ1-2)
CASSSGSKDGYTF

SEQ ID NO: 198881 - protein, 15 aa, Homo sapiens
  CDR3 for alpha chain variable domain of TCR clone 99441 (TRAV17, TRAJ45)
CATAYSGGGADGLTF

SEQ ID NO: 198882 - protein, 11 aa, Homo sapiens
  CDR3 for beta chain variable domain of TCR clone 99441 (TRBV7-8, TRBJ2-7)
RASSLSLEQYF

SEQ ID NO: 198883 - protein, 17 aa, Homo sapiens
  CDR3 for alpha chain variable domain of TCR clone 99442 (TRAV3, TRAJ6)
CAVRGGPRAGGSYIPPF

SEQ ID NO: 198884 - protein, 14 aa, Homo sapiens
  CDR3 for beta chain variable domain of TCR clone 99442 (TRBV7-2, TRBJ2-7)
CASSPKTSFYEQYF

SEQ ID NO: 198885 - protein, 15 aa, Homo sapiens
  CDR3 for alpha chain variable domain of TCR clone 99443 (TRAV13-1, TRAJ45)
QVGRYSGGGADGLTF

SEQ ID NO: 198886 - protein, 13 aa, Homo sapiens
  CDR3 for beta chain variable domain of TCR clone 99443 (TRBV14, TRBJ1-1)
CASSQEAGTEAFF

SEQ ID NO: 198887 - protein, 15 aa, Homo sapiens
  CDR3 for alpha chain variable domain of TCR clone 99444 (TRAV3, TRAJ22)
CAVRDRGGSASQLTF

SEQ ID NO: 198888 - protein, 16 aa, Homo sapiens
  CDR3 for beta chain variable domain of TCR clone 99444 (TRBV11-2, TRBJ2-1)
CASARGSYSHHNEQFF

SEQ ID NO: 198889 - protein, 14 aa, Homo sapiens
  CDR3 for alpha chain variable domain of TCR clone 99445 (TRAV3, TRAJ9)
CAVRLNTGGFKTIF

SEQ ID NO: 198890 - protein, 11 aa, Homo sapiens
  CDR3 for beta chain variable domain of TCR clone 99445 (TRBV19, TRBJ2-5)
CASSIKETQYF

SEQ ID NO: 198891 - protein, 17 aa, Homo sapiens
  CDR3 for alpha chain variable domain of TCR clone 99446 (TRAV3, TRAJ42)
CAVRDRDYGGSQGNLIF

SEQ ID NO: 198892 - protein, 14 aa, Homo sapiens
  CDR3 for beta chain variable domain of TCR clone 99446 (TRBV19, TRBJ1-5)
CASRAPDSFLSQHF

SEQ ID NO: 198893 - protein, 14 aa, Homo sapiens
  CDR3 for alpha chain variable domain of TCR clone 99447 (TRAV38-1, TRAJ43)
CAFMKHNNNNDMRF

SEQ ID NO: 198894 - protein, 15 aa, Homo sapiens
  CDR3 for beta chain variable domain of TCR clone 99447 (TRBV5-1, TRBJ1-1)
CASSSTTGTNTEAFF

SEQ ID NO: 198895 - protein, 14 aa, Homo sapiens
  CDR3 for alpha chain variable domain of TCR clone 99448 (TRAV23/DV6, TRAJ13)
CAASETGVYQKVTF

SEQ ID NO: 198896 - protein, 16 aa, Homo sapiens
  CDR3 for beta chain variable domain of TCR clone 99448 (TRBV5-1, TRBJ1-3)
CASSPWAPSSGNTIYF

SEQ ID NO: 198897 - protein, 12 aa, Homo sapiens
  CDR3 for alpha chain variable domain of TCR clone 99449 (TRAV3, TRAJ27)
CAVRDGAGKSTS

SEQ ID NO: 198898 - protein, 13 aa, Homo sapiens
  CDR3 for beta chain variable domain of TCR clone 99449 (TRBV10-3, TRBJ1-2)
CAINADLNYGYTF

SEQ ID NO: 198899 - protein, 18 aa, Homo sapiens
  CDR3 for alpha chain variable domain of TCR clone 99450 (TRAV21, TRAJ52)
CAVRPSPTGGTSYGKLTF

SEQ ID NO: 198900 - protein, 17 aa, Homo sapiens
  CDR3 for beta chain variable domain of TCR clone 99450 (TRBV25-1, TRBJ2-1)
CASSAYGQGRGVYEQFF

SEQ ID NO: 198901 - protein, 19 aa, Homo sapiens
  CDR3 for alpha chain variable domain of TCR clone 99451 (TRAV1-2, TRAJ26)
CLLPLCCERPDNYGQNFVF

SEQ ID NO: 198902 - protein, 15 aa, Homo sapiens
  CDR3 for beta chain variable domain of TCR clone 99451 (TRBV7-9, TRBJ2-2)
CASGPLDTFPGELFF

SEQ ID NO: 198903 - protein, 13 aa, Homo sapiens
  CDR3 for alpha chain variable domain of TCR clone 99452 (TRAV12-2, TRAJ18)
CAVRGSTLGRLYF

SEQ ID NO: 198904 - protein, 16 aa, Homo sapiens
  CDR3 for beta chain variable domain of TCR clone 99452 (TRBV5-1, TRBJ2-3)
CASSLALAVVSDTQYF

SEQ ID NO: 198905 - protein, 14 aa, Homo sapiens
  CDR3 for alpha chain variable domain of TCR clone 99453 (TRAV8-3, TRAJ39)
CAVGANNAGKMLTF

SEQ ID NO: 198906 - protein, 12 aa, Homo sapiens
  CDR3 for beta chain variable domain of TCR clone 99453 (TRBV28, TRBJ1-3)
CASVSSGNTIYF

SEQ ID NO: 198907 - protein, 15 aa, Homo sapiens
  CDR3 for alpha chain variable domain of TCR clone 99454 (TRAV8-3, TRAJ45)
CASSYSGGGADGLTF

SEQ ID NO: 198908 - protein, 11 aa, Homo sapiens
  CDR3 for beta chain variable domain of TCR clone 99454 (TRBV11-2, TRBJ1-1)
CASSINTEAFF

SEQ ID NO: 198909 - protein, 17 aa, Homo sapiens
  CDR3 for alpha chain variable domain of TCR clone 99455 (TRAV3, TRAJ12)
CAVRDGGRMDSSYKLIF

SEQ ID NO: 198910 - protein, 15 aa, Homo sapiens
  CDR3 for beta chain variable domain of TCR clone 99455 (TRBV11-3, TRBJ2-3)
CASLKDGREGDTQYF

SEQ ID NO: 198911 - protein, 11 aa, Homo sapiens
  CDR3 for alpha chain variable domain of TCR clone 99456 (TRAV21, TRAJ39)
LLVNAGNMLTF

SEQ ID NO: 198912 - protein, 17 aa, Homo sapiens
  CDR3 for beta chain variable domain of TCR clone 99456 (TRBV13, TRBJ2-3)
CASSLSRVAGGRNTQYF

SEQ ID NO: 198913 - protein, 15 aa, Homo sapiens
  CDR3 for alpha chain variable domain of TCR clone 99457 (TRAV17, TRAJ45)
TSVLRTGGGADGLTF

SEQ ID NO: 198914 - protein, 15 aa, Homo sapiens
  CDR3 for beta chain variable domain of TCR clone 99457 (TRBV5-7, TRBJ1-5)
CASSYGKVWDQPQHF

SEQ ID NO: 198915 - protein, 16 aa, Homo sapiens
  CDR3 for alpha chain variable domain of TCR clone 99458 (TRAV30, TRAJ24)
CGTEIVDAGSGGKFQF

SEQ ID NO: 198916 - protein, 14 aa, Homo sapiens
  CDR3 for beta chain variable domain of TCR clone 99458 (TRBV12-5, TRBJ2-5)
CASGSRTHQETQYF

SEQ ID NO: 198917 - protein, 14 aa, Homo sapiens
  CDR3 for alpha chain variable domain of TCR clone 99459 (TRAV17, TRAJ11)
CATDTSRGYSTLTF

SEQ ID NO: 198918 - protein, 15 aa, Homo sapiens
  CDR3 for beta chain variable domain of TCR clone 99459 (TRBV19, TRBJ1-1)
CASTSGQIQNTEAFF

SEQ ID NO: 198919 - protein, 16 aa, Homo sapiens
  CDR3 for alpha chain variable domain of TCR clone 99460 (TRAV8-3, TRAJ13)
CAVGAYPSGGYQKVTF

SEQ ID NO: 198920 - protein, 15 aa, Homo sapiens
  CDR3 for beta chain variable domain of TCR clone 99460 (TRBV7-9, TRBJ1-6)
CASSSPGRGNSPLHF

SEQ ID NO: 198921 - protein, 16 aa, Homo sapiens
  CDR3 for alpha chain variable domain of TCR clone 99461 (TRAV35, TRAJ28)
CAGQRHSGAGSYQLTF

SEQ ID NO: 198922 - protein, 13 aa, Homo sapiens
  CDR3 for beta chain variable domain of TCR clone 99461 (TRBV19, TRBJ1-2)
CASSQGQVYGYTF

SEQ ID NO: 198923 - protein, 15 aa, Homo sapiens
  CDR3 for alpha chain variable domain of TCR clone 99462 (TRAV12-2, TRAJ57)
CAVSRGQGGSEKLVF

SEQ ID NO: 198924 - protein, 14 aa, Homo sapiens
  CDR3 for beta chain variable domain of TCR clone 99462 (TRBV27, TRBJ2-1)
CASRHLGGGKEQFF

SEQ ID NO: 198925 - protein, 18 aa, Homo sapiens
  CDR3 for alpha chain variable domain of TCR clone 99463 (TRAV21, TRAJ52)
CAVRPSPAGGTSYGKLTF

SEQ ID NO: 198926 - protein, 15 aa, Homo sapiens
  CDR3 for beta chain variable domain of TCR clone 99463 (TRBV19, TRBJ1-1)
CASTSGQIENTEAFF

SEQ ID NO: 198927 - protein, 16 aa, Homo sapiens
  CDR3 for alpha chain variable domain of TCR clone 99464 (TRAV8-1, TRAJ33)
CAVNARGGDSNYQLIW

SEQ ID NO: 198928 - protein, 11 aa, Homo sapiens
  CDR3 for beta chain variable domain of TCR clone 99464 (TRBV11-2, TRBJ2-2)
CASSLPGELFF

SEQ ID NO: 198929 - protein, 15 aa, Homo sapiens
  CDR3 for alpha chain variable domain of TCR clone 99465 (TRAV2, TRAJ24)
CAVVRPKNSWGKLQF

SEQ ID NO: 198930 - protein, 16 aa, Homo sapiens
  CDR3 for beta chain variable domain of TCR clone 99465 (TRBV7-7, TRBJ2-3)
CASSPGTSGSTDTQYF

SEQ ID NO: 198931 - protein, 11 aa, Homo sapiens
  CDR3 for alpha chain variable domain of TCR clone 99466 (TRAV12-1, TRAJ8)
CVVTGLQKLVF

SEQ ID NO: 198932 - protein, 14 aa, Homo sapiens
  CDR3 for beta chain variable domain of TCR clone 99466 (TRBV19, TRBJ2-1)
CASGKSTQYNEQFF

SEQ ID NO: 198933 - protein, 16 aa, Homo sapiens
  CDR3 for alpha chain variable domain of TCR clone 99467 (TRAV13-1, TRAJ48)
CAASTFGNFGNEKLTF

SEQ ID NO: 198934 - protein, 14 aa, Homo sapiens
  CDR3 for beta chain variable domain of TCR clone 99467 (TRBV7-3, TRBJ1-1)
CASSLKGGNTEAFF

SEQ ID NO: 198935 - protein, 16 aa, Homo sapiens
  CDR3 for alpha chain variable domain of TCR clone 99468 (TRAV1-2, TRAJ10)
CAVRGVLTGGGNKLTF

SEQ ID NO: 198936 - protein, 14 aa, Homo sapiens
  CDR3 for beta chain variable domain of TCR clone 99468 (TRBV11-1, TRBJ2-7)
CASSLEREWGEQYF

SEQ ID NO: 198937 - protein, 14 aa, Homo sapiens
  CDR3 for alpha chain variable domain of TCR clone 99469 (TRAV8-4, TRAJ12)
CCEHLMDSSYKLIF

SEQ ID NO: 198938 - protein, 17 aa, Homo sapiens
  CDR3 for beta chain variable domain of TCR clone 99469 (TRBV3-1, TRBJ2-7)
CASSQDLTGLSSYEQYF

SEQ ID NO: 198939 - protein, 18 aa, Homo sapiens
  CDR3 for alpha chain variable domain of TCR clone 99470 (TRAV17, TRAJ45)
CATSLDLYSGGGADRLTF

SEQ ID NO: 198940 - protein, 13 aa, Homo sapiens
  CDR3 for beta chain variable domain of TCR clone 99470 (TRBV10-3, TRBJ2-7)
CASKLAVNYEQYF

SEQ ID NO: 198941 - protein, 13 aa, Homo sapiens
  CDR3 for alpha chain variable domain of TCR clone 99471 (TRAV26-2, TRAJ43)
CILRSVNNNDMRF

SEQ ID NO: 198942 - protein, 15 aa, Homo sapiens
  CDR3 for beta chain variable domain of TCR clone 99471 (TRBV7-2, TRBJ2-1)
CASTHGTGIYNEQFF

SEQ ID NO: 198943 - protein, 12 aa, Homo sapiens
  CDR3 for alpha chain variable domain of TCR clone 99472 (TRAV35, TRAJ39)
LAPNNAGNMLTF

SEQ ID NO: 198944 - protein, 16 aa, Homo sapiens
  CDR3 for beta chain variable domain of TCR clone 99472 (TRBV2, TRBJ2-3)
CASSTSVEGVADTQYF

SEQ ID NO: 198945 - protein, 11 aa, Homo sapiens
  CDR3 for alpha chain variable domain of TCR clone 99473 (TRAV4, TRAJ31)
CLVGDNARLMF

SEQ ID NO: 198946 - protein, 16 aa, Homo sapiens
  CDR3 for beta chain variable domain of TCR clone 99473 (TRBV7-2, TRBJ2-5)
CASSSKGLSGQETQYF

SEQ ID NO: 198947 - protein, 12 aa, Homo sapiens
  CDR3 for alpha chain variable domain of TCR clone 99474 (TRAV21, TRAJ31)
CFLAGNNARLMF

SEQ ID NO: 198948 - protein, 16 aa, Homo sapiens
  CDR3 for beta chain variable domain of TCR clone 99474 (TRBV27, TRBJ2-5)
CASSFGPGGTKETQYF

SEQ ID NO: 198949 - protein, 14 aa, Homo sapiens
  CDR3 for alpha chain variable domain of TCR clone 99475 (TRAV6, TRAJ6)
CALPTSGGSYIPTF

SEQ ID NO: 198950 - protein, 14 aa, Homo sapiens
  CDR3 for beta chain variable domain of TCR clone 99475 (TRBV7-9, TRBJ2-2)
CASSGLADTGELFF

SEQ ID NO: 198951 - protein, 15 aa, Homo sapiens
  CDR3 for alpha chain variable domain of TCR clone 99476 (TRAV20, TRAJ38)
CAVQGNAGNNRKLIW

SEQ ID NO: 198952 - protein, 14 aa, Homo sapiens
  CDR3 for beta chain variable domain of TCR clone 99476 (TRBV4-2, TRBJ2-3)
CASRETRAPGMQYF

SEQ ID NO: 198953 - protein, 14 aa, Homo sapiens
  CDR3 for alpha chain variable domain of TCR clone 99477 (TRAV1-2, TRAJ16)
CAVNRSSDGQKLLF

SEQ ID NO: 198954 - protein, 17 aa, Homo sapiens
  CDR3 for beta chain variable domain of TCR clone 99477 (TRBV11-2, TRBJ2-1)
CASSLYPPGVEYNEQFF

SEQ ID NO: 198955 - protein, 13 aa, Homo sapiens
  CDR3 for alpha chain variable domain of TCR clone 99478 (TRAV17, TRAJ22)
CAHHSGSARQLTF

SEQ ID NO: 198956 - protein, 16 aa, Homo sapiens
  CDR3 for beta chain variable domain of TCR clone 99478 (TRBV4-1, TRBJ1-2)
CASSRDAGQVLYGYTF

SEQ ID NO: 198957 - protein, 14 aa, Homo sapiens
  CDR3 for alpha chain variable domain of TCR clone 99479 (TRAV27, TRAJ33)
CRSGSRDSNYQLIW

SEQ ID NO: 198958 - protein, 15 aa, Homo sapiens
  CDR3 for beta chain variable domain of TCR clone 99479 (TRBV20-1, TRBJ2-5)
CSAGLAGVSQETQYF

SEQ ID NO: 198959 - protein, 14 aa, Homo sapiens
  CDR3 for alpha chain variable domain of TCR clone 99480 (TRAV12-2, TRAJ45)
CAVNIGGGADGLTF

SEQ ID NO: 198960 - protein, 15 aa, Homo sapiens
  CDR3 for beta chain variable domain of TCR clone 99480 (TRBV7-2, TRBJ2-1)
CASSSGLAGGNEQFF

SEQ ID NO: 198961 - protein, 11 aa, Homo sapiens
  CDR3 for alpha chain variable domain of TCR clone 99481 (TRAV12-2, TRAJ29)
CAVTLRSPLVF

SEQ ID NO: 198962 - protein, 12 aa, Homo sapiens
  CDR3 for beta chain variable domain of TCR clone 99481 (TRBV28, TRBJ2-3)
CASSLYRDTQYF

SEQ ID NO: 198963 - protein, 14 aa, Homo sapiens
  CDR3 for alpha chain variable domain of TCR clone 99482 (TRAV16, TRAJ32)
CALKSGGATNKLIF

SEQ ID NO: 198964 - protein, 13 aa, Homo sapiens
  CDR3 for beta chain variable domain of TCR clone 99482 (TRBV15, TRBJ1-6)
CATSGGRNSPLHF

SEQ ID NO: 198965 - protein, 15 aa, Homo sapiens
  CDR3 for alpha chain variable domain of TCR clone 99483 (TRAV12-3, TRAJ6)
CAMSATSGGSYIPTF

SEQ ID NO: 198966 - protein, 17 aa, Homo sapiens
  CDR3 for beta chain variable domain of TCR clone 99483 (TRBV20-1, TRBJ2-2)
CSASGSGQGGLTGELFF

SEQ ID NO: 198967 - protein, 12 aa, Homo sapiens
  CDR3 for alpha chain variable domain of TCR clone 99484 (TRAV13-1, TRAJ9)
CASHTGGFKTIF

SEQ ID NO: 198968 - protein, 13 aa, Homo sapiens
  CDR3 for beta chain variable domain of TCR clone 99484 (TRBV7-2, TRBJ2-2)
CASSLAVTGELFF

SEQ ID NO: 198969 - protein, 16 aa, Homo sapiens
  CDR3 for alpha chain variable domain of TCR clone 99485 (TRAV14/DV4, TRAJ53)
CAMREGGGGSKYKLTF

SEQ ID NO: 198970 - protein, 17 aa, Homo sapiens
  CDR3 for beta chain variable domain of TCR clone 99485 (TRBV13, TRBJ2-3)
CASSLSRVAGGRNTQYF

SEQ ID NO: 198971 - protein, 15 aa, Homo sapiens
  CDR3 for alpha chain variable domain of TCR clone 99486 (TRAV4, TRAJ39)
CLVGPNNNAGNMLTF

SEQ ID NO: 198972 - protein, 16 aa, Homo sapiens
  CDR3 for beta chain variable domain of TCR clone 99486 (TRBV13, TRBJ2-2)
CASSPRTGEHTGELSF

SEQ ID NO: 198973 - protein, 10 aa, Homo sapiens
  CDR3 for alpha chain variable domain of TCR clone 99487 (TRAV16, TRAJ22)
SAMYLRQLTF

SEQ ID NO: 198974 - protein, 17 aa, Homo sapiens
  CDR3 for beta chain variable domain of TCR clone 99487 (TRBV7-8, TRBJ2-6)
CASSAGTGGAGANVLTF

SEQ ID NO: 198975 - protein, 13 aa, Homo sapiens
  CDR3 for alpha chain variable domain of TCR clone 99488 (TRAV3, TRAJ15)
CAVRDQPGTALIF

SEQ ID NO: 198976 - protein, 15 aa, Homo sapiens
  CDR3 for beta chain variable domain of TCR clone 99488 (TRBV11-1, TRBJ2-7)
CASSLNYGASYEQYF

SEQ ID NO: 198977 - protein, 15 aa, Homo sapiens
  CDR3 for alpha chain variable domain of TCR clone 99489 (TRAV1-1, TRAJ20)
CAVRDNVANDYKLSF

SEQ ID NO: 198978 - protein, 13 aa, Homo sapiens
  CDR3 for beta chain variable domain of TCR clone 99489 (TRBV4-1, TRBJ2-2)
CASSQENAGELFF

SEQ ID NO: 198979 - protein, 14 aa, Homo sapiens
  CDR3 for alpha chain variable domain of TCR clone 99490 (TRAV13-2, TRAJ26)
CAENLGNYGQNFFF

SEQ ID NO: 198980 - protein, 14 aa, Homo sapiens
  CDR3 for beta chain variable domain of TCR clone 99490 (TRBV19, TRBJ1-3)
CASNRGNSGNTIYF

SEQ ID NO: 198981 - protein, 12 aa, Homo sapiens
  CDR3 for alpha chain variable domain of TCR clone 99491 (TRAV13-1, TRAJ21)
CAANEGFNKFYF

SEQ ID NO: 198982 - protein, 18 aa, Homo sapiens
  CDR3 for beta chain variable domain of TCR clone 99491 (TRBV20-1, TRBJ2-6)
CSAETTPTHGSGANVLTF

SEQ ID NO: 198983 - protein, 14 aa, Homo sapiens
  CDR3 for alpha chain variable domain of TCR clone 99492 (TRAV12-3, TRAJ10)
SQLPLTGGGNKLTF

SEQ ID NO: 198984 - protein, 14 aa, Homo sapiens
  CDR3 for beta chain variable domain of TCR clone 99492 (TRBV6-1, TRBJ1-3)
CASVQGGGGNTIYF

SEQ ID NO: 198985 - protein, 12 aa, Homo sapiens
  CDR3 for alpha chain variable domain of TCR clone 99493 (TRAV35, TRAJ30)
CAGQLADDKIIF

SEQ ID NO: 198986 - protein, 14 aa, Homo sapiens
  CDR3 for beta chain variable domain of TCR clone 99493 (TRBV19, TRBJ2-1)
CASKDPSSYNEQFF

SEQ ID NO: 198987 - protein, 11 aa, Homo sapiens
  CDR3 for alpha chain variable domain of TCR clone 99494 (TRAV21, TRAJ48)
CAVDGNEKLTF

SEQ ID NO: 198988 - protein, 16 aa, Homo sapiens
  CDR3 for beta chain variable domain of TCR clone 99494 (TRBV28, TRBJ1-4)
CASSPPYRGRSEKLFF

SEQ ID NO: 198989 - protein, 13 aa, Homo sapiens
  CDR3 for alpha chain variable domain of TCR clone 99495 (TRAV12-3, TRAJ13)
CAMSSGGYQQVTF

SEQ ID NO: 198990 - protein, 13 aa, Homo sapiens
  CDR3 for beta chain variable domain of TCR clone 99495 (TRBV20-1, TRBJ1-1)
CSAPPGGHTEAFF

SEQ ID NO: 198991 - protein, 11 aa, Homo sapiens
  CDR3 for alpha chain variable domain of TCR clone 99496 (TRAV12-2, TRAJ39)
CAVNNMPTFGG

SEQ ID NO: 198992 - protein, 16 aa, Homo sapiens
  CDR3 for beta chain variable domain of TCR clone 99496 (TRBV9, TRBJ2-7)
CASSAGPDRSPYEQYF

SEQ ID NO: 198993 - protein, 14 aa, Homo sapiens
  CDR3 for alpha chain variable domain of TCR clone 99497 (TRAV9-2, TRAJ39)
CALYIYNAGNMLTF

SEQ ID NO: 198994 - protein, 13 aa, Homo sapiens
  CDR3 for beta chain variable domain of TCR clone 99497 (TRBV11-2, TRBJ2-5)
CASSRGPSETQYF

SEQ ID NO: 198995 - protein, 14 aa, Homo sapiens
  CDR3 for alpha chain variable domain of TCR clone 99498 (TRAV26-1, TRAJ34)
CIVRVAYNTDKLNF

SEQ ID NO: 198996 - protein, 15 aa, Homo sapiens
  CDR3 for beta chain variable domain of TCR clone 99498 (TRBV20-1, TRBJ2-7)
CSARVPAAYFYEQYF

SEQ ID NO: 198997 - protein, 14 aa, Homo sapiens
  CDR3 for alpha chain variable domain of TCR clone 99499 (TRAV3, TRAJ8)
CAVSLNTGFQKLVF

SEQ ID NO: 198998 - protein, 14 aa, Homo sapiens
  CDR3 for beta chain variable domain of TCR clone 99499 (TRBV6-6, TRBJ1-5)
CASVYSGFNQPQHF

SEQ ID NO: 198999 - protein, 14 aa, Homo sapiens
  CDR3 for alpha chain variable domain of TCR clone 99500 (TRAV21, TRAJ37)
CAVKGSSNTGKLIF

SEQ ID NO: 199000 - protein, 17 aa, Homo sapiens
  CDR3 for beta chain variable domain of TCR clone 99500 (TRBV19, TRBJ1-1)
CASSIAGRGLMNTEAFF

SEQ ID NO: 199001 - protein, 15 aa, Homo sapiens
  CDR3 for alpha chain variable domain of TCR clone 99501 (TRAV23/DV6, TRAJ18)
CAARYRGSTLGRLYF

SEQ ID NO: 199002 - protein, 15 aa, Homo sapiens
  CDR3 for beta chain variable domain of TCR clone 99501 (TRBV6-3, TRBJ2-7)
CASSSPGTVFYEQYF

SEQ ID NO: 199003 - protein, 15 aa, Homo sapiens
  CDR3 for alpha chain variable domain of TCR clone 99502 (TRAV26-1, TRAJ29)
CIVRVQGSGNTPLVF

SEQ ID NO: 199004 - protein, 14 aa, Homo sapiens
  CDR3 for beta chain variable domain of TCR clone 99502 (TRBV25-1, TRBJ1-1)
CASTHLGGNTEAFF

SEQ ID NO: 199005 - protein, 14 aa, Homo sapiens
  CDR3 for alpha chain variable domain of TCR clone 99503 (TRAV8-6, TRAJ52)
CAVIGGTSYGKLTF

SEQ ID NO: 199006 - protein, 13 aa, Homo sapiens
  CDR3 for beta chain variable domain of TCR clone 99503 (TRBV7-9, TRBJ1-2)
CASSLKQNYGYTF

SEQ ID NO: 199007 - protein, 14 aa, Homo sapiens
  CDR3 for alpha chain variable domain of TCR clone 99504 (TRAV17, TRAJ4)
CATAPLGGYNKLIF

SEQ ID NO: 199008 - protein, 15 aa, Homo sapiens
  CDR3 for beta chain variable domain of TCR clone 99504 (TRBV7-2, TRBJ2-1)
CASSLVGSSYNEQFF

SEQ ID NO: 199009 - protein, 15 aa, Homo sapiens
  CDR3 for alpha chain variable domain of TCR clone 99505 (TRAV34, TRAJ38)
CGADFTPGNNRKLIW

SEQ ID NO: 199010 - protein, 16 aa, Homo sapiens
  CDR3 for beta chain variable domain of TCR clone 99505 (TRBV12-5, TRBJ2-5)
CASGPRTSGNQETQYY

SEQ ID NO: 199011 - protein, 14 aa, Homo sapiens
  CDR3 for alpha chain variable domain of TCR clone 99506 (TRAV17, TRAJ53)
CATDAGGSNYKLTF

SEQ ID NO: 199012 - protein, 16 aa, Homo sapiens
  CDR3 for beta chain variable domain of TCR clone 99506 (TRBV4-1, TRBJ1-1)
CASIQDAGMGNTEAFF

SEQ ID NO: 199013 - protein, 15 aa, Homo sapiens
  CDR3 for alpha chain variable domain of TCR clone 99507 (TRAV8-3, TRAJ23)
CAVGDRYNQGGKLIF

SEQ ID NO: 199014 - protein, 15 aa, Homo sapiens
  CDR3 for beta chain variable domain of TCR clone 99507 (TRBV11-3, TRBJ2-3)
CASLKDGREGDTQYF

SEQ ID NO: 199015 - protein, 13 aa, Homo sapiens
  CDR3 for alpha chain variable domain of TCR clone 99508 (TRAV23/DV6, TRAJ47)
CAASMTRGKKLVF

SEQ ID NO: 199016 - protein, 13 aa, Homo sapiens
  CDR3 for beta chain variable domain of TCR clone 99508 (TRBV9, TRBJ2-2)
CASSTFSSGELFF

SEQ ID NO: 199017 - protein, 11 aa, Homo sapiens
  CDR3 for alpha chain variable domain of TCR clone 99509 (TRAV2, TRAJ4)
CAVGWYNKLIL

SEQ ID NO: 199018 - protein, 15 aa, Homo sapiens
  CDR3 for beta chain variable domain of TCR clone 99509 (TRBV7-2, TRBJ2-2)
CASSFQRGETGELFF

SEQ ID NO: 199019 - protein, 11 aa, Homo sapiens
  CDR3 for alpha chain variable domain of TCR clone 99510 (TRAV1-1, TRAJ30)
FAQNRDDKIIF

SEQ ID NO: 199020 - protein, 14 aa, Homo sapiens
  CDR3 for beta chain variable domain of TCR clone 99510 (TRBV7-8, TRBJ2-7)
CASSPGLADYEQYF

SEQ ID NO: 199021 - protein, 14 aa, Homo sapiens
  CDR3 for alpha chain variable domain of TCR clone 99511 (TRAV13-1, TRAJ10)
CAAKEPGRGNKLTF

SEQ ID NO: 199022 - protein, 14 aa, Homo sapiens
  CDR3 for beta chain variable domain of TCR clone 99511 (TRBV6-6, TRBJ2-7)
CASSDSGAGYEQYF

SEQ ID NO: 199023 - protein, 19 aa, Homo sapiens
  CDR3 for alpha chain variable domain of TCR clone 99512 (TRAV26-1, TRAJ52)
CIVRAHRNAGGTSYGKLTF

SEQ ID NO: 199024 - protein, 15 aa, Homo sapiens
  CDR3 for beta chain variable domain of TCR clone 99512 (TRBV29-1, TRBJ2-1)
GSGRDRKSSYNEQFF

SEQ ID NO: 199025 - protein, 13 aa, Homo sapiens
  CDR3 for alpha chain variable domain of TCR clone 99513 (TRAV12-1, TRAJ40)
CVVPTSGTYKYIF

SEQ ID NO: 199026 - protein, 18 aa, Homo sapiens
  CDR3 for beta chain variable domain of TCR clone 99513 (TRBV7-6, TRBJ2-1)
YASSPRTSGMSSYNEQFF

SEQ ID NO: 199027 - protein, 13 aa, Homo sapiens
  CDR3 for alpha chain variable domain of TCR clone 99514 (TRAV35, TRAJ32)
CAGVGGATNKLIF

SEQ ID NO: 199028 - protein, 15 aa, Homo sapiens
  CDR3 for beta chain variable domain of TCR clone 99514 (TRBV9, TRBJ2-1)
CASSLAGSSYNEQFF

SEQ ID NO: 199029 - protein, 16 aa, Homo sapiens
  CDR3 for alpha chain variable domain of TCR clone 99515 (TRAV3, TRAJ23)
CAVKIGIYNQGGKLIF

SEQ ID NO: 199030 - protein, 17 aa, Homo sapiens
  CDR3 for beta chain variable domain of TCR clone 99515 (TRBV10-3, TRBJ2-6)
CAISESTAPSGAYVLTF

SEQ ID NO: 199031 - protein, 22 aa, Homo sapiens
  CDR3 for alpha chain variable domain of TCR clone 99516 (TRAV1-1, TRAJ34)
LLQELQMKDSASYLQNTDKLIF

SEQ ID NO: 199032 - protein, 14 aa, Homo sapiens
  CDR3 for beta chain variable domain of TCR clone 99516 (TRBV12-5, TRBJ2-5)
CASGSRTHQETQYF

SEQ ID NO: 199033 - protein, 14 aa, Homo sapiens
  CDR3 for alpha chain variable domain of TCR clone 99517 (TRAV35, TRAJ22)
CAGLRPGSARQLTF

SEQ ID NO: 199034 - protein, 15 aa, Homo sapiens
  CDR3 for beta chain variable domain of TCR clone 99517 (TRBV10-2, TRBJ2-6)
CASSEQGTGANVLTF

SEQ ID NO: 199035 - protein, 14 aa, Homo sapiens
  CDR3 for alpha chain variable domain of TCR clone 99518 (TRAV26-1, TRAJ38)
CIADNAGNNRKLIW

SEQ ID NO: 199036 - protein, 16 aa, Homo sapiens
  CDR3 for beta chain variable domain of TCR clone 99518 (TRBV2, TRBJ2-5)
CASSETQGVGEETQYF

SEQ ID NO: 199037 - protein, 12 aa, Homo sapiens
  CDR3 for alpha chain variable domain of TCR clone 99519 (TRAV36/DV7, TRAJ40)
CAVGTGTYKYIF

SEQ ID NO: 199038 - protein, 13 aa, Homo sapiens
  CDR3 for beta chain variable domain of TCR clone 99519 (TRBV7-9, TRBJ1-2)
CASSLKQNYGYTF

SEQ ID NO: 199039 - protein, 11 aa, Homo sapiens
  CDR3 for alpha chain variable domain of TCR clone 99520 (TRAV13-2, TRAJ23)
CAESPRGKLIF

SEQ ID NO: 199040 - protein, 13 aa, Homo sapiens
  CDR3 for beta chain variable domain of TCR clone 99520 (TRBV14, TRBJ1-1)
CASSQEAGTEAFF

SEQ ID NO: 199041 - protein, 15 aa, Homo sapiens
  CDR3 for alpha chain variable domain of TCR clone 99521 (TRAV17, TRAJ57)
CATGPSQGGSEKLFF

SEQ ID NO: 199042 - protein, 18 aa, Homo sapiens
  CDR3 for beta chain variable domain of TCR clone 99521 (TRBV7-9, TRBJ2-7)
CASSLTTSGSRTWYEQYF

SEQ ID NO: 199043 - protein, 13 aa, Homo sapiens
  CDR3 for alpha chain variable domain of TCR clone 99522 (TRAV12-2, TRAJ6)
CAVNVSRKLHTYI

SEQ ID NO: 199044 - protein, 13 aa, Homo sapiens
  CDR3 for beta chain variable domain of TCR clone 99522 (TRBV19, TRBJ2-2)
CASSIWSTGELFF

SEQ ID NO: 199045 - protein, 15 aa, Homo sapiens
  CDR3 for alpha chain variable domain of TCR clone 99523 (TRAV38-2/DV8, TRAJ45)
CAYWDSGGGADGLTF

SEQ ID NO: 199046 - protein, 15 aa, Homo sapiens
  CDR3 for beta chain variable domain of TCR clone 99523 (TRBV27, TRBJ2-7)
CASSTAGTGSYEQYF

SEQ ID NO: 199047 - protein, 14 aa, Homo sapiens
  CDR3 for alpha chain variable domain of TCR clone 99524 (TRAV12-2, TRAJ53)
CAVKGGGSYYKLTF

SEQ ID NO: 199048 - protein, 14 aa, Homo sapiens
  CDR3 for beta chain variable domain of TCR clone 99524 (TRBV7-7, TRBJ2-2)
CATRQDSDTGELFF

SEQ ID NO: 199049 - protein, 16 aa, Homo sapiens
  CDR3 for alpha chain variable domain of TCR clone 99525 (TRAV1-1, TRAJ36)
CAVRDTLLPGANNLFF

SEQ ID NO: 199050 - protein, 14 aa, Homo sapiens
  CDR3 for beta chain variable domain of TCR clone 99525 (TRBV27, TRBJ2-2)
CASSLGAATGELFF

SEQ ID NO: 199051 - protein, 15 aa, Homo sapiens
  CDR3 for alpha chain variable domain of TCR clone 99526 (TRAV8-3, TRAJ45)
CASSYSVGVADGLTF

SEQ ID NO: 199052 - protein, 13 aa, Homo sapiens
  CDR3 for beta chain variable domain of TCR clone 99526 (TRBV10-3, TRBJ2-7)
CASKLAVNYEQYF

SEQ ID NO: 199053 - protein, 17 aa, Homo sapiens
  CDR3 for alpha chain variable domain of TCR clone 99527 (TRAV3, TRAJ42)
CAVRDRDYGGSQGNLIF

SEQ ID NO: 199054 - protein, 14 aa, Homo sapiens
  CDR3 for beta chain variable domain of TCR clone 99527 (TRBV11-2, TRBJ1-2)
CASSLGTANYGYTF

SEQ ID NO: 199055 - protein, 12 aa, Homo sapiens
  CDR3 for alpha chain variable domain of TCR clone 99528 (TRAV23/DV6, TRAJ30)
CAASKGDDKSIF

SEQ ID NO: 199056 - protein, 15 aa, Homo sapiens
  CDR3 for beta chain variable domain of TCR clone 99528 (TRBV12-4, TRBJ2-1)
CASRPTRTGYNEQFF

SEQ ID NO: 199057 - protein, 15 aa, Homo sapiens
  CDR3 for alpha chain variable domain of TCR clone 99529 (TRAV8-2, TRAJ24)
CVLSDRTDSWGKLQF

SEQ ID NO: 199058 - protein, 11 aa, Homo sapiens
  CDR3 for beta chain variable domain of TCR clone 99529 (TRBV20-1, TRBJ1-2)
CSVQGAGGYTF

SEQ ID NO: 199059 - protein, 12 aa, Homo sapiens
  CDR3 for alpha chain variable domain of TCR clone 99530 (TRAV13-1, TRAJ21)
CAAKEGFNKFYF

SEQ ID NO: 199060 - protein, 13 aa, Homo sapiens
  CDR3 for beta chain variable domain of TCR clone 99530 (TRBV7-9, TRBJ2-7)
CASSFAGAYEQYF

SEQ ID NO: 199061 - protein, 13 aa, Homo sapiens
  CDR3 for alpha chain variable domain of TCR clone 99531 (TRAV2, TRAJ40)
CAVVTSGTYNYIF

SEQ ID NO: 199062 - protein, 14 aa, Homo sapiens
  CDR3 for beta chain variable domain of TCR clone 99531 (TRBV19, TRBJ2-3)
CASSAPRGTDTQYF

SEQ ID NO: 199063 - protein, 14 aa, Homo sapiens
  CDR3 for alpha chain variable domain of TCR clone 99532 (TRAV26-1, TRAJ38)
CIADNAGNNRKLIW

SEQ ID NO: 199064 - protein, 14 aa, Homo sapiens
  CDR3 for beta chain variable domain of TCR clone 99532 (TRBV20-1, TRBJ2-5)
CSAHRQGLWETQYF

SEQ ID NO: 199065 - protein, 14 aa, Homo sapiens
  CDR3 for alpha chain variable domain of TCR clone 99533 (TRAV1-2, TRAJ16)
CAVNRFPDGQKLLF

SEQ ID NO: 199066 - protein, 12 aa, Homo sapiens
  CDR3 for beta chain variable domain of TCR clone 99533 (TRBV12-4, TRBJ1-3)
CASSFSGNTIYF

SEQ ID NO: 199067 - protein, 15 aa, Homo sapiens
  CDR3 for alpha chain variable domain of TCR clone 99534 (TRAV8-3, TRAJ21)
CAVGSLPPRGYKFYF

SEQ ID NO: 199068 - protein, 15 aa, Homo sapiens
  CDR3 for beta chain variable domain of TCR clone 99534 (TRBV7-8, TRBJ1-5)
CASSLERRGLEPQHF

SEQ ID NO: 199069 - protein, 23 aa, Homo sapiens
  CDR3 for alpha chain variable domain of TCR clone 99535 (TRAV12-2, TRAJ22)
CAVSFRVHPGPPIVSGSARQLTF

SEQ ID NO: 199070 - protein, 16 aa, Homo sapiens
  CDR3 for beta chain variable domain of TCR clone 99535 (TRBV12-5, TRBJ2-5)
CASGPRTSGNQETQYF

SEQ ID NO: 199071 - protein, 14 aa, Homo sapiens
  CDR3 for alpha chain variable domain of TCR clone 99536 (TRAV26-1, TRAJ45)
CIEETGGGADGLTF

SEQ ID NO: 199072 - protein, 13 aa, Homo sapiens
  CDR3 for beta chain variable domain of TCR clone 99536 (TRBV7-6, TRBJ1-2)
CASSLVADYGYTF

SEQ ID NO: 199073 - protein, 13 aa, Homo sapiens
  CDR3 for alpha chain variable domain of TCR clone 99537 (TRAV3, TRAJ20)
CAVRSLNDYKLSF

SEQ ID NO: 199074 - protein, 13 aa, Homo sapiens
  CDR3 for beta chain variable domain of TCR clone 99537 (TRBV6-1, TRBJ2-1)
CAGMDPTNNGQFF

SEQ ID NO: 199075 - protein, 16 aa, Homo sapiens
  CDR3 for alpha chain variable domain of TCR clone 99538 (TRAV30, TRAJ24)
CGTEIVDADSWGKFRF

SEQ ID NO: 199076 - protein, 15 aa, Homo sapiens
  CDR3 for beta chain variable domain of TCR clone 99538 (TRBV9, TRBJ2-1)
CASSLAGSSYNEQFF

SEQ ID NO: 199077 - protein, 17 aa, Homo sapiens
  CDR3 for alpha chain variable domain of TCR clone 99539 (TRAV4, TRAJ18)
CLVGERSVGSTLGRLYF

SEQ ID NO: 199078 - protein, 18 aa, Homo sapiens
  CDR3 for beta chain variable domain of TCR clone 99539 (TRBV11-2, TRBJ2-3)
CTSSLGGASRGAPNTQYF

SEQ ID NO: 199079 - protein, 13 aa, Homo sapiens
  CDR3 for alpha chain variable domain of TCR clone 99540 (TRAV8-3, TRAJ31)
CAVGARNNARPMF

SEQ ID NO: 199080 - protein, 14 aa, Homo sapiens
  CDR3 for beta chain variable domain of TCR clone 99540 (TRBV12-5, TRBJ2-5)
CASGSRTHQETQYF

SEQ ID NO: 199081 - protein, 13 aa, Homo sapiens
  CDR3 for alpha chain variable domain of TCR clone 99541 (TRAV16, TRAJ34)
CALTGYNTDKLIF

SEQ ID NO: 199082 - protein, 13 aa, Homo sapiens
  CDR3 for beta chain variable domain of TCR clone 99541 (TRBV6-1, TRBJ2-1)
CASREDGGHEQFV

SEQ ID NO: 199083 - protein, 13 aa, Homo sapiens
  CDR3 for alpha chain variable domain of TCR clone 99542 (TRAV8-6, TRAJ49)
CAVITNTGNQFYF

SEQ ID NO: 199084 - protein, 15 aa, Homo sapiens
  CDR3 for beta chain variable domain of TCR clone 99542 (TRBV7-9, TRBJ1-5)
CASSQGHQPNQPQHF

SEQ ID NO: 199085 - protein, 15 aa, Homo sapiens
  CDR3 for alpha chain variable domain of TCR clone 99543 (TRAV8-3, TRAJ6)
CAVGPLGGGSYIPTF

SEQ ID NO: 199086 - protein, 14 aa, Homo sapiens
  CDR3 for beta chain variable domain of TCR clone 99543 (TRBV20-1, TRBJ2-7)
CSAKRGRSSYEQYF

SEQ ID NO: 199087 - protein, 11 aa, Homo sapiens
  CDR3 for alpha chain variable domain of TCR clone 99544 (TRAV4, TRAJ23)
CLVAPGGKLIF

SEQ ID NO: 199088 - protein, 18 aa, Homo sapiens
  CDR3 for beta chain variable domain of TCR clone 99544 (TRBV4-1, TRBJ2-3)
CASSHQLAGGRSTDTQYF

SEQ ID NO: 199089 - protein, 12 aa, Homo sapiens
  CDR3 for alpha chain variable domain of TCR clone 99545 (TRAV12-1, TRAJ34)
CVVTFNTGKLIF

SEQ ID NO: 199090 - protein, 14 aa, Homo sapiens
  CDR3 for beta chain variable domain of TCR clone 99545 (TRBV19, TRBJ1-1)
CASLRTGLNTEAFF

SEQ ID NO: 199091 - protein, 16 aa, Homo sapiens
  CDR3 for alpha chain variable domain of TCR clone 99546 (TRAV23/DV6, )
CADIQNTDPAVYQLRD

SEQ ID NO: 199092 - protein, 13 aa, Homo sapiens
  CDR3 for beta chain variable domain of TCR clone 99546 (TRBV28, TRBJ2-7)
CASRSSGVYEQYF

SEQ ID NO: 199093 - protein, 14 aa, Homo sapiens
  CDR3 for alpha chain variable domain of TCR clone 99547 (TRAV27, TRAJ44)
CAGEGAGTASKLTF

SEQ ID NO: 199094 - protein, 15 aa, Homo sapiens
  CDR3 for beta chain variable domain of TCR clone 99547 (TRBV9, TRBJ1-6)
CASSVAGTGDSPLHF

SEQ ID NO: 199095 - protein, 16 aa, Homo sapiens
  CDR3 for alpha chain variable domain of TCR clone 99548 (TRAV30, TRAJ24)
CGTEIVDADSWGKFQF

SEQ ID NO: 199096 - protein, 15 aa, Homo sapiens
  CDR3 for beta chain variable domain of TCR clone 99548 (TRBV20-1, TRBJ2-7)
CSARDRVSGMDDQYF

SEQ ID NO: 199097 - protein, 15 aa, Homo sapiens
  CDR3 for alpha chain variable domain of TCR clone 99549 (TRAV12-3, TRAJ47)
CAMSALVEYGNKLVF

SEQ ID NO: 199098 - protein, 13 aa, Homo sapiens
  CDR3 for beta chain variable domain of TCR clone 99549 (TRBV7-3, TRBJ1-1)
CASSQDWGAEAFF

SEQ ID NO: 199099 - protein, 11 aa, Homo sapiens
  CDR3 for alpha chain variable domain of TCR clone 99550 (TRAV12-2, TRAJ31)
CAVSNNARLMF

SEQ ID NO: 199100 - protein, 15 aa, Homo sapiens
  CDR3 for beta chain variable domain of TCR clone 99550 (TRBV5-1, TRBJ2-1)
CASSPPRAPYNEQFF

SEQ ID NO: 199101 - protein, 14 aa, Homo sapiens
  CDR3 for alpha chain variable domain of TCR clone 99551 (TRAV2, TRAJ22)
CAVGRGGFARQLTF

SEQ ID NO: 199102 - protein, 12 aa, Homo sapiens
  CDR3 for beta chain variable domain of TCR clone 99551 (TRBV19, TRBJ2-1)
CASSMQDTEQFF

SEQ ID NO: 199103 - protein, 16 aa, Homo sapiens
  CDR3 for alpha chain variable domain of TCR clone 99552 (TRAV12-2, TRAJ28)
CAVITDSGTGSYQLTF

SEQ ID NO: 199104 - protein, 12 aa, Homo sapiens
  CDR3 for beta chain variable domain of TCR clone 99552 (TRBV9, TRBJ2-2)
CASSLVTGELFF

SEQ ID NO: 199105 - protein, 14 aa, Homo sapiens
  CDR3 for alpha chain variable domain of TCR clone 99553 (TRAV13-1, TRAJ9)
CAESALTGGFKTIF

SEQ ID NO: 199106 - protein, 13 aa, Homo sapiens
  CDR3 for beta chain variable domain of TCR clone 99553 (TRBV20-1, TRBJ1-1)
CSAGTVGNTEAFF

SEQ ID NO: 199107 - protein, 14 aa, Homo sapiens
  CDR3 for alpha chain variable domain of TCR clone 99554 (TRAV8-4, TRAJ54)
CAVSEVLGAQKLVF

SEQ ID NO: 199108 - protein, 13 aa, Homo sapiens
  CDR3 for beta chain variable domain of TCR clone 99554 (TRBV27, TRBJ2-7)
CASSSVSSYEQYF

SEQ ID NO: 199109 - protein, 14 aa, Homo sapiens
  CDR3 for alpha chain variable domain of TCR clone 99555 (TRAV21, TRAJ15)
CAVSLNQAGTALIF

SEQ ID NO: 199110 - protein, 11 aa, Homo sapiens
  CDR3 for beta chain variable domain of TCR clone 99555 (TRBV20-1, TRBJ2-7)
CSARTSYEQYY

SEQ ID NO: 199111 - protein, 10 aa, Homo sapiens
  CDR3 for alpha chain variable domain of TCR clone 99556 (TRAV21, TRAJ43)
CAVRIGDMRF

SEQ ID NO: 199112 - protein, 13 aa, Homo sapiens
  CDR3 for beta chain variable domain of TCR clone 99556 (TRBV20-1, TRBJ2-7)
CSAPGRADYEQYF

SEQ ID NO: 199113 - protein, 16 aa, Homo sapiens
  CDR3 for alpha chain variable domain of TCR clone 99557 (TRAV12-3, TRAJ53)
CAMSVGSGGSNYKLTF

SEQ ID NO: 199114 - protein, 19 aa, Homo sapiens
  CDR3 for beta chain variable domain of TCR clone 99557 (TRBV25-1, TRBJ2-2)
CAILVYRVDRGRKTGELFF

SEQ ID NO: 199115 - protein, 14 aa, Homo sapiens
  CDR3 for alpha chain variable domain of TCR clone 99558 (TRAV12-3, TRAJ57)
CAMNAWGGSEKLVF

SEQ ID NO: 199116 - protein, 14 aa, Homo sapiens
  CDR3 for beta chain variable domain of TCR clone 99558 (TRBV7-8, TRBJ2-7)
CASSPRDRVYEQYF

SEQ ID NO: 199117 - protein, 12 aa, Homo sapiens
  CDR3 for alpha chain variable domain of TCR clone 99559 (TRAV4, TRAJ21)
CLVGDNFNKFYF

SEQ ID NO: 199118 - protein, 16 aa, Homo sapiens
  CDR3 for beta chain variable domain of TCR clone 99559 (TRBV5-8, TRBJ2-2)
CASTLASGTNTGELFF

SEQ ID NO: 199119 - protein, 13 aa, Homo sapiens
  CDR3 for alpha chain variable domain of TCR clone 99560 (TRAV13-1, TRAJ21)
CAASIYNFNNFYF

SEQ ID NO: 199120 - protein, 15 aa, Homo sapiens
  CDR3 for beta chain variable domain of TCR clone 99560 (TRBV7-8, TRBJ1-5)
CASSLAGQPNQPQHF

SEQ ID NO: 199121 - protein, 14 aa, Homo sapiens
  CDR3 for alpha chain variable domain of TCR clone 99561 (TRAV8-6, TRAJ29)
CAVSRASGKTPLVF

SEQ ID NO: 199122 - protein, 13 aa, Homo sapiens
  CDR3 for beta chain variable domain of TCR clone 99561 (TRBV19, TRBJ1-5)
CASSEGSNQPQHF

SEQ ID NO: 199123 - protein, 17 aa, Homo sapiens
  CDR3 for alpha chain variable domain of TCR clone 99562 (TRAV3, TRAJ6)
CAVRDGPRAGGSYIPPF

SEQ ID NO: 199124 - protein, 15 aa, Homo sapiens
  CDR3 for beta chain variable domain of TCR clone 99562 (TRBV28, TRBJ2-1)
CASSIIAGGRSEQFF

SEQ ID NO: 199125 - protein, 13 aa, Homo sapiens
  CDR3 for alpha chain variable domain of TCR clone 99563 (TRAV2, TRAJ29)
CAAQNSGNTPLGF

SEQ ID NO: 199126 - protein, 14 aa, Homo sapiens
  CDR3 for beta chain variable domain of TCR clone 99563 (TRBV7-9, TRBJ2-4)
CASSLAMGGNIQYF

SEQ ID NO: 199127 - protein, 14 aa, Homo sapiens
  CDR3 for alpha chain variable domain of TCR clone 99564 (TRAV23/DV6, TRAJ40)
CAASLTSGTYKYIF

SEQ ID NO: 199128 - protein, 15 aa, Homo sapiens
  CDR3 for beta chain variable domain of TCR clone 99564 (TRBV19, TRBJ1-2)
CASSVGQVLNYGYTF

SEQ ID NO: 199129 - protein, 11 aa, Homo sapiens
  CDR3 for alpha chain variable domain of TCR clone 99565 (TRAV26-1, TRAJ27)
CIDPNAGKSPF

SEQ ID NO: 199130 - protein, 18 aa, Homo sapiens
  CDR3 for beta chain variable domain of TCR clone 99565 (TRBV7-9, TRBJ2-6)
CASSFPGAGISGANVLTF

SEQ ID NO: 199131 - protein, 15 aa, Homo sapiens
  CDR3 for alpha chain variable domain of TCR clone 99566 (TRAV35, TRAJ58)
CAGRRQETSGSRVTF

SEQ ID NO: 199132 - protein, 11 aa, Homo sapiens
  CDR3 for beta chain variable domain of TCR clone 99566 (TRBV11-2, TRBJ1-1)
CASSINTEAFF

SEQ ID NO: 199133 - protein, 15 aa, Homo sapiens
  CDR3 for alpha chain variable domain of TCR clone 99567 (TRAV3, TRAJ3)
CAVRDGHSSASKLIF

SEQ ID NO: 199134 - protein, 14 aa, Homo sapiens
  CDR3 for beta chain variable domain of TCR clone 99567 (TRBV28, TRBJ1-4)
CASSFGTFDEKLFF

SEQ ID NO: 199135 - protein, 14 aa, Homo sapiens
  CDR3 for alpha chain variable domain of TCR clone 99568 (TRAV8-4, TRAJ48)
CAVSETFGNEKLTF

SEQ ID NO: 199136 - protein, 14 aa, Homo sapiens
  CDR3 for beta chain variable domain of TCR clone 99568 (TRBV7-3, TRBJ2-1)
CASSLAGGTNEQFF

SEQ ID NO: 199137 - protein, 15 aa, Homo sapiens
  CDR3 for alpha chain variable domain of TCR clone 99569 (TRAV26-1, TRAJ47)
CIVRVGWGYGNKLVF

SEQ ID NO: 199138 - protein, 16 aa, Homo sapiens
  CDR3 for beta chain variable domain of TCR clone 99569 (TRBV12-5, TRBJ2-5)
CASGPRTSGNQETQYF

SEQ ID NO: 199139 - protein, 15 aa, Homo sapiens
  CDR3 for alpha chain variable domain of TCR clone 99570 (TRAV3, TRAJ17)
CAVSPKEAAGNKLTF

SEQ ID NO: 199140 - protein, 16 aa, Homo sapiens
  CDR3 for beta chain variable domain of TCR clone 99570 (TRBV7-8, TRBJ2-4)
CASSAERTLAKNIQYF

SEQ ID NO: 199141 - protein, 12 aa, Homo sapiens
  CDR3 for alpha chain variable domain of TCR clone 99571 (TRAV8-6, TRAJ31)
CAVSPNNARLMF

SEQ ID NO: 199142 - protein, 15 aa, Homo sapiens
  CDR3 for beta chain variable domain of TCR clone 99571 (TRBV5-1, TRBJ2-1)
CASSPPRAPYNEQFF

SEQ ID NO: 199143 - protein, 14 aa, Homo sapiens
  CDR3 for alpha chain variable domain of TCR clone 99572 (TRAV26-1, TRAJ38)
CIADNAGNNRKLIW

SEQ ID NO: 199144 - protein, 15 aa, Homo sapiens
  CDR3 for beta chain variable domain of TCR clone 99572 (TRBV7-2, TRBJ2-3)
CASSSTGLETDTQYF

SEQ ID NO: 199145 - protein, 13 aa, Homo sapiens
  CDR3 for alpha chain variable domain of TCR clone 99573 (TRAV17, TRAJ5)
CAPMDTGRRALTF

SEQ ID NO: 199146 - protein, 13 aa, Homo sapiens
  CDR3 for beta chain variable domain of TCR clone 99573 (TRBV2, TRBJ1-4)
CASSERAGEKLFF

SEQ ID NO: 199147 - protein, 16 aa, Homo sapiens
  CDR3 for alpha chain variable domain of TCR clone 99574 (TRAV3, TRAJ3)
CAVRDRAKSSASKIIF

SEQ ID NO: 199148 - protein, 13 aa, Homo sapiens
  CDR3 for beta chain variable domain of TCR clone 99574 (TRBV10-3, TRBJ2-7)
CASKLAANYEQYF

SEQ ID NO: 199149 - protein, 13 aa, Homo sapiens
  CDR3 for alpha chain variable domain of TCR clone 99575 (TRAV21, TRAJ20)
CAVGLRVDYKLSF

SEQ ID NO: 199150 - protein, 15 aa, Homo sapiens
  CDR3 for beta chain variable domain of TCR clone 99575 (TRBV29-1, TRBJ2-1)
CSVPTGLALYNEQLF

SEQ ID NO: 199151 - protein, 15 aa, Homo sapiens
  CDR3 for alpha chain variable domain of TCR clone 99576 (TRAV3, TRAJ29)
CAVRDINSGNTPLVL

SEQ ID NO: 199152 - protein, 16 aa, Homo sapiens
  CDR3 for beta chain variable domain of TCR clone 99576 (TRBV4-1, TRBJ2-5)
CASSQTFYGDQETQYF

SEQ ID NO: 199153 - protein, 14 aa, Homo sapiens
  CDR3 for alpha chain variable domain of TCR clone 99577 (TRAV12-1, TRAJ38)
CVVHNAGNNRRLIW

SEQ ID NO: 199154 - protein, 13 aa, Homo sapiens
  CDR3 for beta chain variable domain of TCR clone 99577 (TRBV19, TRBJ2-1)
CATSRGVYNEQFF

SEQ ID NO: 199155 - protein, 14 aa, Homo sapiens
  CDR3 for alpha chain variable domain of TCR clone 99578 (TRAV12-2, TRAJ17)
CAVLFKAAGNKLTF

SEQ ID NO: 199156 - protein, 13 aa, Homo sapiens
  CDR3 for beta chain variable domain of TCR clone 99578 (TRBV28, TRBJ1-2)
CAGRDRGNYGYTF

SEQ ID NO: 199157 - protein, 17 aa, Homo sapiens
  CDR3 for alpha chain variable domain of TCR clone 99579 (TRAV13-1, TRAJ31)
CAPRDRLMFRDGTQLVV

SEQ ID NO: 199158 - protein, 12 aa, Homo sapiens
  CDR3 for beta chain variable domain of TCR clone 99579 (TRBV7-9, TRBJ2-7)
CASSLEGYEQYF

SEQ ID NO: 199159 - protein, 12 aa, Homo sapiens
  CDR3 for alpha chain variable domain of TCR clone 99580 (TRAV12-3, TRAJ17)
CAMTLTGNKLAF

SEQ ID NO: 199160 - protein, 15 aa, Homo sapiens
  CDR3 for beta chain variable domain of TCR clone 99580 (TRBV20-1, TRBJ2-7)
CSARDRVSGMGEQYF

SEQ ID NO: 199161 - protein, 12 aa, Homo sapiens
  CDR3 for alpha chain variable domain of TCR clone 99581 (TRAV12-1, TRAJ23)
CVVNIPGGTLIF

SEQ ID NO: 199162 - protein, 15 aa, Homo sapiens
  CDR3 for beta chain variable domain of TCR clone 99581 (TRBV7-2, TRBJ2-7)
CASSLVSSGSYEQYF

SEQ ID NO: 199163 - protein, 12 aa, Homo sapiens
  CDR3 for alpha chain variable domain of TCR clone 99582 (TRAV1-1, TRAJ8)
CAGGSGFQKLVF

SEQ ID NO: 199164 - protein, 15 aa, Homo sapiens
  CDR3 for beta chain variable domain of TCR clone 99582 (TRBV7-9, TRBJ1-4)
CASSRTGGFNEKLFF

SEQ ID NO: 199165 - protein, 15 aa, Homo sapiens
  CDR3 for alpha chain variable domain of TCR clone 99583 (TRAV12-2, TRAJ32)
CAVNHYGGTTNKLIF

SEQ ID NO: 199166 - protein, 14 aa, Homo sapiens
  CDR3 for beta chain variable domain of TCR clone 99583 (TRBV27, TRBJ2-1)
CASSFGREANEQFF

SEQ ID NO: 199167 - protein, 10 aa, Homo sapiens
  CDR3 for alpha chain variable domain of TCR clone 99584 (TRAV8-2, TRAJ29)
CTGGNTPLVF

SEQ ID NO: 199168 - protein, 17 aa, Homo sapiens
  CDR3 for beta chain variable domain of TCR clone 99584 (TRBV2, TRBJ2-7)
CASSQVLTGWDSYEQYF

SEQ ID NO: 199169 - protein, 17 aa, Homo sapiens
  CDR3 for alpha chain variable domain of TCR clone 99585 (TRAV3, TRAJ6)
CAVRDGPRAGGSYIPKF

SEQ ID NO: 199170 - protein, 17 aa, Homo sapiens
  CDR3 for beta chain variable domain of TCR clone 99585 (TRBV27, TRBJ2-6)
CASSLTGFASGANVLTF

SEQ ID NO: 199171 - protein, 14 aa, Homo sapiens
  CDR3 for alpha chain variable domain of TCR clone 99586 (TRAV1-2, TRAJ16)
CTVNRFSDGQKLLF

SEQ ID NO: 199172 - protein, 14 aa, Homo sapiens
  CDR3 for beta chain variable domain of TCR clone 99586 (TRBV23-1, TRBJ2-5)
CASSFLRSQETQYF

SEQ ID NO: 199173 - protein, 12 aa, Homo sapiens
  CDR3 for alpha chain variable domain of TCR clone 99587 (TRAV27, TRAJ13)
CAGAGGYQKVTF

SEQ ID NO: 199174 - protein, 15 aa, Homo sapiens
  CDR3 for beta chain variable domain of TCR clone 99587 (TRBV20-1, TRBJ2-6)
CSARDRGPGDNVLTF

SEQ ID NO: 199175 - protein, 13 aa, Homo sapiens
  CDR3 for alpha chain variable domain of TCR clone 99588 (TRAV23/DV6, TRAJ12)
CAPRGDSSYKLIF

SEQ ID NO: 199176 - protein, 12 aa, Homo sapiens
  CDR3 for beta chain variable domain of TCR clone 99588 (TRBV7-8, TRBJ2-7)
CASSLGDREQYF

SEQ ID NO: 199177 - protein, 12 aa, Homo sapiens
  CDR3 for alpha chain variable domain of TCR clone 99589 (TRAV17, TRAJ47)
CAPTGRGNKLVF

SEQ ID NO: 199178 - protein, 13 aa, Homo sapiens
  CDR3 for beta chain variable domain of TCR clone 99589 (TRBV7-2, TRBJ2-4)
CASSLAEGGIQYF

SEQ ID NO: 199179 - protein, 11 aa, Homo sapiens
  CDR3 for alpha chain variable domain of TCR clone 99590 (TRAV8-3, TRAJ18)
CAVGGRQRLNP

SEQ ID NO: 199180 - protein, 15 aa, Homo sapiens
  CDR3 for beta chain variable domain of TCR clone 99590 (TRBV19, TRBJ2-4)
CASRGPRRGENIQYF

SEQ ID NO: 199181 - protein, 15 aa, Homo sapiens
  CDR3 for alpha chain variable domain of TCR clone 99591 (TRAV12-1, TRAJ44)
CVVFVNTGTASKLTF

SEQ ID NO: 199182 - protein, 16 aa, Homo sapiens
  CDR3 for beta chain variable domain of TCR clone 99591 (TRBV7-3, TRBJ2-3)
CASSPTGYQSTDTQYF

SEQ ID NO: 199183 - protein, 14 aa, Homo sapiens
  CDR3 for alpha chain variable domain of TCR clone 99592 (TRAV12-2, TRAJ40)
CAGKIPSGTYKSIF

SEQ ID NO: 199184 - protein, 14 aa, Homo sapiens
  CDR3 for beta chain variable domain of TCR clone 99592 (TRBV20-1, TRBJ1-1)
CSAQTRIGGTEAFF

SEQ ID NO: 199185 - protein, 11 aa, Homo sapiens
  CDR3 for alpha chain variable domain of TCR clone 99593 (TRAV1-2, TRAJ20)
CAVSNDYKLSF

SEQ ID NO: 199186 - protein, 14 aa, Homo sapiens
  CDR3 for beta chain variable domain of TCR clone 99593 (TRBV20-1, TRBJ2-3)
CSARVRGSTDTQYF

SEQ ID NO: 199187 - protein, 12 aa, Homo sapiens
  CDR3 for alpha chain variable domain of TCR clone 99594 (TRAV3, TRAJ20)
CAVRDPDYKLSF

SEQ ID NO: 199188 - protein, 14 aa, Homo sapiens
  CDR3 for beta chain variable domain of TCR clone 99594 (TRBV4-2, TRBJ2-1)
CASGLDRAYNEQFL

SEQ ID NO: 199189 - protein, 14 aa, Homo sapiens
  CDR3 for alpha chain variable domain of TCR clone 99595 (TRAV12-1, TRAJ17)
CVVNYKAAGNKLTF

SEQ ID NO: 199190 - protein, 15 aa, Homo sapiens
  CDR3 for beta chain variable domain of TCR clone 99595 (TRBV19, TRBJ2-1)
CASTPVGGGYNEQFF

SEQ ID NO: 199191 - protein, 14 aa, Homo sapiens
  CDR3 for alpha chain variable domain of TCR clone 99596 (TRAV16, TRAJ15)
CALSVPQAGTALIF

SEQ ID NO: 199192 - protein, 12 aa, Homo sapiens
  CDR3 for beta chain variable domain of TCR clone 99596 (TRBV18, TRBJ2-5)
CASSPSKETQYF

SEQ ID NO: 199193 - protein, 12 aa, Homo sapiens
  CDR3 for alpha chain variable domain of TCR clone 99597 (TRAV4, TRAJ21)
CLVGDNFNKFYF

SEQ ID NO: 199194 - protein, 14 aa, Homo sapiens
  CDR3 for beta chain variable domain of TCR clone 99597 (TRBV19, TRBJ2-1)
CASPTFVLSGEQFF

SEQ ID NO: 199195 - protein, 15 aa, Homo sapiens
  CDR3 for alpha chain variable domain of TCR clone 99598 (TRAV8-1, TRAJ37)
CAVKKGSGNTGKLIF

SEQ ID NO: 199196 - protein, 17 aa, Homo sapiens
  CDR3 for beta chain variable domain of TCR clone 99598 (TRBV12-4, TRBJ1-1)
CASSLLGFRTMNTEAFF

SEQ ID NO: 199197 - protein, 11 aa, Homo sapiens
  CDR3 for alpha chain variable domain of TCR clone 99599 (TRAV3, TRAJ21)
CAVGNFNKFYF

SEQ ID NO: 199198 - protein, 14 aa, Homo sapiens
  CDR3 for beta chain variable domain of TCR clone 99599 (TRBV19, TRBJ2-1)
CASPTFVLSGEQFL

SEQ ID NO: 199199 - protein, 18 aa, Homo sapiens
  CDR3 for alpha chain variable domain of TCR clone 99600 (TRAV26-2, TRAJ45)
CILRVDKYSGGGADGLTF

SEQ ID NO: 199200 - protein, 17 aa, Homo sapiens
  CDR3 for beta chain variable domain of TCR clone 99600 (TRBV25-1, TRBJ2-1)
CSSSAYGQGRGVYEQFF

SEQ ID NO: 199201 - protein, 13 aa, Homo sapiens
  CDR3 for alpha chain variable domain of TCR clone 99601 (TRAV12-2, TRAJ39)
CAVNNNAGNMLTF

SEQ ID NO: 199202 - protein, 18 aa, Homo sapiens
  CDR3 for beta chain variable domain of TCR clone 99601 (TRBV12-4, TRBJ2-2)
CASSLVAGTRGRTGELFF

SEQ ID NO: 199203 - protein, 14 aa, Homo sapiens
  CDR3 for alpha chain variable domain of TCR clone 99602 (TRAV12-2, TRAJ13)
CAVKKTGGYQKVTF

SEQ ID NO: 199204 - protein, 12 aa, Homo sapiens
  CDR3 for beta chain variable domain of TCR clone 99602 (TRBV7-9, TRBJ1-6)
CASSLMTSPLHF

SEQ ID NO: 199205 - protein, 18 aa, Homo sapiens
  CDR3 for alpha chain variable domain of TCR clone 99603 (TRAV12-3, TRAJ52)
CAMSVGGAGGTSYGKLTF

SEQ ID NO: 199206 - protein, 16 aa, Homo sapiens
  CDR3 for beta chain variable domain of TCR clone 99603 (TRBV20-1, TRBJ2-7)
CSASTSGRLSSYEQYF

SEQ ID NO: 199207 - protein, 17 aa, Homo sapiens
  CDR3 for alpha chain variable domain of TCR clone 99604 (TRAV26-1, TRAJ10)
CIVSFRGLTGGGNKLIF

SEQ ID NO: 199208 - protein, 13 aa, Homo sapiens
  CDR3 for beta chain variable domain of TCR clone 99604 (TRBV20-1, TRBJ2-3)
CSASRQAADTQYF

SEQ ID NO: 199209 - protein, 13 aa, Homo sapiens
  CDR3 for alpha chain variable domain of TCR clone 99605 (TRAV12-3, TRAJ33)
CAMSVNSNYQLIW

SEQ ID NO: 199210 - protein, 13 aa, Homo sapiens
  CDR3 for beta chain variable domain of TCR clone 99605 (TRBV7-2, TRBJ2-2)
CVSSLAVTGELFL

SEQ ID NO: 199211 - protein, 17 aa, Homo sapiens
  CDR3 for alpha chain variable domain of TCR clone 99606 (TRAV3, TRAJ42)
CAVRDRDYGGSQGNLIF

SEQ ID NO: 199212 - protein, 14 aa, Homo sapiens
  CDR3 for beta chain variable domain of TCR clone 99606 (TRBV5-1, TRBJ2-7)
CASSRGESLYEQYF

SEQ ID NO: 199213 - protein, 13 aa, Homo sapiens
  CDR3 for alpha chain variable domain of TCR clone 99607 (TRAV2, TRAJ40)
CAVVTSGTYKYIF

SEQ ID NO: 199214 - protein, 15 aa, Homo sapiens
  CDR3 for beta chain variable domain of TCR clone 99607 (TRBV7-2, TRBJ2-1)
CASSLVAGRYNEQFF

SEQ ID NO: 199215 - protein, 13 aa, Homo sapiens
  CDR3 for alpha chain variable domain of TCR clone 99608 (TRAV13-1, TRAJ21)
CAASIYNFNKFYF

SEQ ID NO: 199216 - protein, 14 aa, Homo sapiens
  CDR3 for beta chain variable domain of TCR clone 99608 (TRBV7-9, TRBJ2-1)
CASSPRDSLYEQFF

SEQ ID NO: 199217 - protein, 15 aa, Homo sapiens
  CDR3 for alpha chain variable domain of TCR clone 99609 (TRAV2, TRAJ9)
CAVAALNTGGFKTIF

SEQ ID NO: 199218 - protein, 14 aa, Homo sapiens
  CDR3 for beta chain variable domain of TCR clone 99609 (TRBV7-8, TRBJ2-5)
CASSATGGQEAQYF

SEQ ID NO: 199219 - protein, 12 aa, Homo sapiens
  CDR3 for alpha chain variable domain of TCR clone 99610 (TRAV12-3, TRAJ17)
CAMTLTGNNLTF

SEQ ID NO: 199220 - protein, 15 aa, Homo sapiens
  CDR3 for beta chain variable domain of TCR clone 99610 (TRBV7-9, TRBJ1-6)
CASSSPGRGNSPLHF

SEQ ID NO: 199221 - protein, 15 aa, Homo sapiens
  CDR3 for alpha chain variable domain of TCR clone 99611 (TRAV8-2, TRAJ40)
CVVLGTTSGTYKYIF

SEQ ID NO: 199222 - protein, 16 aa, Homo sapiens
  CDR3 for beta chain variable domain of TCR clone 99611 (TRBV7-3, TRBJ2-1)
CASSLEGYRYYNEQFF

SEQ ID NO: 199223 - protein, 13 aa, Homo sapiens
  CDR3 for alpha chain variable domain of TCR clone 99612 (TRAV2, TRAJ20)
CAVEDPAEYKLSF

SEQ ID NO: 199224 - protein, 16 aa, Homo sapiens
  CDR3 for beta chain variable domain of TCR clone 99612 (TRBV25-1, TRBJ2-7)
CASSELTGGGIYEQYF

SEQ ID NO: 199225 - protein, 13 aa, Homo sapiens
  CDR3 for alpha chain variable domain of TCR clone 99613 (TRAV2, TRAJ15)
CAVASQAGTALIF

SEQ ID NO: 199226 - protein, 16 aa, Homo sapiens
  CDR3 for beta chain variable domain of TCR clone 99613 (TRBV5-1, TRBJ1-1)
CASSSGRNSLNTEAFF

SEQ ID NO: 199227 - protein, 14 aa, Homo sapiens
  CDR3 for alpha chain variable domain of TCR clone 99614 (TRAV26-1, TRAJ45)
CIEVTGGGADGLTF

SEQ ID NO: 199228 - protein, 13 aa, Homo sapiens
  CDR3 for beta chain variable domain of TCR clone 99614 (TRBV7-6, TRBJ1-2)
CASSLVAVYGYTF

SEQ ID NO: 199229 - protein, 15 aa, Homo sapiens
  CDR3 for alpha chain variable domain of TCR clone 99615 (TRAV3, TRAJ22)
CAVRARGGSARQLTF

SEQ ID NO: 199230 - protein, 15 aa, Homo sapiens
  CDR3 for beta chain variable domain of TCR clone 99615 (TRBV27, TRBJ2-1)
CASSNGGGSSNEQFF

SEQ ID NO: 199231 - protein, 11 aa, Homo sapiens
  CDR3 for alpha chain variable domain of TCR clone 99616 (TRAV21, TRAJ11)
CAVNGYSTLTF

SEQ ID NO: 199232 - protein, 11 aa, Homo sapiens
  CDR3 for beta chain variable domain of TCR clone 99616 (TRBV19, TRBJ1-1)
CGSSIGSEAFF

SEQ ID NO: 199233 - protein, 14 aa, Homo sapiens
  CDR3 for alpha chain variable domain of TCR clone 99617 (TRAV12-2, TRAJ17)
CAVNIKAAGNKLTF

SEQ ID NO: 199234 - protein, 16 aa, Homo sapiens
  CDR3 for beta chain variable domain of TCR clone 99617 (TRBV20-1, TRBJ2-6)
CSASSQGCDGANVLTF

SEQ ID NO: 199235 - protein, 14 aa, Homo sapiens
  CDR3 for alpha chain variable domain of TCR clone 99618 (TRAV12-2, TRAJ36)
CAVNPPPGANNLFF

SEQ ID NO: 199236 - protein, 13 aa, Homo sapiens
  CDR3 for beta chain variable domain of TCR clone 99618 (TRBV20-1, TRBJ1-6)
CSAPTGLGSPLHF

SEQ ID NO: 199237 - protein, 13 aa, Homo sapiens
  CDR3 for alpha chain variable domain of TCR clone 99619 (TRAV8-3, TRAJ28)
CAVGAVGSYQLTF

SEQ ID NO: 199238 - protein, 14 aa, Homo sapiens
  CDR3 for beta chain variable domain of TCR clone 99619 (TRBV12-4, TRBJ2-7)
CASSPAGLKYEQYF

SEQ ID NO: 199239 - protein, 21 aa, Homo sapiens
  CDR3 for alpha chain variable domain of TCR clone 99620 (TRAV12-3, TRAJ9)
CAMRNTEASKLSLEQEQDYLL

SEQ ID NO: 199240 - protein, 14 aa, Homo sapiens
  CDR3 for beta chain variable domain of TCR clone 99620 (TRBV11-2, TRBJ2-7)
CASSSTGEGYEQYF

SEQ ID NO: 199241 - protein, 14 aa, Homo sapiens
  CDR3 for alpha chain variable domain of TCR clone 99621 (TRAV12-2, TRAJ17)
CAVLFKAAGNKLTF

SEQ ID NO: 199242 - protein, 17 aa, Homo sapiens
  CDR3 for beta chain variable domain of TCR clone 99621 (TRBV20-1, TRBJ2-2)
CSASGSGPGGLTGELFF

SEQ ID NO: 199243 - protein, 17 aa, Homo sapiens
  CDR3 for alpha chain variable domain of TCR clone 99622 (TRAV3, TRAJ38)
CAVRDCLNAGNNRKLIW

SEQ ID NO: 199244 - protein, 15 aa, Homo sapiens
  CDR3 for beta chain variable domain of TCR clone 99622 (TRBV10-2, TRBJ2-6)
CASSEQGTGANVLTF

SEQ ID NO: 199245 - protein, 13 aa, Homo sapiens
  CDR3 for alpha chain variable domain of TCR clone 99623 (TRAV8-3, TRAJ47)
CAVSMEYGNKLVF

SEQ ID NO: 199246 - protein, 15 aa, Homo sapiens
  CDR3 for beta chain variable domain of TCR clone 99623 (TRBV7-2, TRBJ2-1)
CASSLASGRVNEQFF

SEQ ID NO: 199247 - protein, 12 aa, Homo sapiens
  CDR3 for alpha chain variable domain of TCR clone 99624 (TRAV13-1, TRAJ15)
CAASQAVTALIF

SEQ ID NO: 199248 - protein, 14 aa, Homo sapiens
  CDR3 for beta chain variable domain of TCR clone 99624 (TRBV19, TRBJ2-2)
CASSTLHRSGELFF

SEQ ID NO: 199249 - protein, 16 aa, Homo sapiens
  CDR3 for alpha chain variable domain of TCR clone 99625 (TRAV10, TRAJ40)
CVVSRGVSSGTYKYIF

SEQ ID NO: 199250 - protein, 16 aa, Homo sapiens
  CDR3 for beta chain variable domain of TCR clone 99625 (TRBV2, TRBJ2-1)
CASSVGGSLSYNEQFF

SEQ ID NO: 199251 - protein, 17 aa, Homo sapiens
  CDR3 for alpha chain variable domain of TCR clone 99626 (TRAV26-1, TRAJ53)
CIVRVDGSGGSNYKLTF

SEQ ID NO: 199252 - protein, 15 aa, Homo sapiens
  CDR3 for beta chain variable domain of TCR clone 99626 (TRBV20-1, TRBJ2-7)
CSARVPAAYFYEQYF

SEQ ID NO: 199253 - protein, 14 aa, Homo sapiens
  CDR3 for alpha chain variable domain of TCR clone 99627 (TRAV12-2, TRAJ17)
CAVNIKAAGNKLTF

SEQ ID NO: 199254 - protein, 16 aa, Homo sapiens
  CDR3 for beta chain variable domain of TCR clone 99627 (TRBV20-1, TRBJ2-6)
CSASSQGYDGANVLTF

SEQ ID NO: 199255 - protein, 14 aa, Homo sapiens
  CDR3 for alpha chain variable domain of TCR clone 99628 (TRAV26-2, TRAJ56)
CILRATGANSKLTF

SEQ ID NO: 199256 - protein, 14 aa, Homo sapiens
  CDR3 for beta chain variable domain of TCR clone 99628 (TRBV4-1, TRBJ2-2)
CASSQAVNTGELFF

SEQ ID NO: 199257 - protein, 15 aa, Homo sapiens
  CDR3 for alpha chain variable domain of TCR clone 99629 (TRAV3, TRAJ22)
CAVRDRGGSARQLTF

SEQ ID NO: 199258 - protein, 15 aa, Homo sapiens
  CDR3 for beta chain variable domain of TCR clone 99629 (TRBV5-1, TRBJ2-1)
CASTGSGRTYNEQFF

SEQ ID NO: 199259 - protein, 20 aa, Homo sapiens
  CDR3 for alpha chain variable domain of TCR clone 99630 (TRAV26-1, TRAJ42)
CCVLLHRQTYYGGSQGNPIF

SEQ ID NO: 199260 - protein, 16 aa, Homo sapiens
  CDR3 for beta chain variable domain of TCR clone 99630 (TRBV4-1, TRBJ1-1)
CASSSMSERPNTEAFF

SEQ ID NO: 199261 - protein, 16 aa, Homo sapiens
  CDR3 for alpha chain variable domain of TCR clone 99631 (TRAV30, TRAJ26)
CGTESVGDNYGQNFVF

SEQ ID NO: 199262 - protein, 15 aa, Homo sapiens
  CDR3 for beta chain variable domain of TCR clone 99631 (TRBV2, TRBJ2-1)
CASSELAGSYNEQFF

SEQ ID NO: 199263 - protein, 16 aa, Homo sapiens
  CDR3 for alpha chain variable domain of TCR clone 99632 (TRAV2, TRAJ4)
CAVEDRFSGGYNKLIF

SEQ ID NO: 199264 - protein, 14 aa, Homo sapiens
  CDR3 for beta chain variable domain of TCR clone 99632 (TRBV20-1, TRBJ2-4)
CSASGRVGENIQYF

SEQ ID NO: 199265 - protein, 13 aa, Homo sapiens
  CDR3 for alpha chain variable domain of TCR clone 99633 (TRAV13-1, TRAJ39)
CAASIWAGDMLPF

SEQ ID NO: 199266 - protein, 15 aa, Homo sapiens
  CDR3 for beta chain variable domain of TCR clone 99633 (TRBV7-9, TRBJ1-1)
CASSLLEQGGTEAFF

SEQ ID NO: 199267 - protein, 12 aa, Homo sapiens
  CDR3 for alpha chain variable domain of TCR clone 99634 (TRAV16, TRAJ27)
CALNHQCRQINL

SEQ ID NO: 199268 - protein, 14 aa, Homo sapiens
  CDR3 for beta chain variable domain of TCR clone 99634 (TRBV11-2, TRBJ1-5)
CASSLDRGRQHQHF

SEQ ID NO: 199269 - protein, 17 aa, Homo sapiens
  CDR3 for alpha chain variable domain of TCR clone 99635 (TRAV14/DV4, TRAJ4)
CAMREASGRGGYNKLIF

SEQ ID NO: 199270 - protein, 14 aa, Homo sapiens
  CDR3 for beta chain variable domain of TCR clone 99635 (TRBV19, TRBJ2-7)
CASSMGQGAIGQYF

SEQ ID NO: 199271 - protein, 14 aa, Homo sapiens
  CDR3 for alpha chain variable domain of TCR clone 99636 (TRAV35, TRAJ44)
CAGRPPRTASKLTF

SEQ ID NO: 199272 - protein, 14 aa, Homo sapiens
  CDR3 for beta chain variable domain of TCR clone 99636 (TRBV7-2, TRBJ1-3)
CASSRGGTGNTIYF

SEQ ID NO: 199273 - protein, 16 aa, Homo sapiens
  CDR3 for alpha chain variable domain of TCR clone 99637 (TRAV21, TRAJ37)
CAVRPRGSSNTGELIF

SEQ ID NO: 199274 - protein, 13 aa, Homo sapiens
  CDR3 for beta chain variable domain of TCR clone 99637 (TRBV7-9, TRBJ2-5)
CASLSPGQETQYF

SEQ ID NO: 199275 - protein, 11 aa, Homo sapiens
  CDR3 for alpha chain variable domain of TCR clone 99638 (TRAV3, TRAJ21)
CAVGNFNKFYF

SEQ ID NO: 199276 - protein, 14 aa, Homo sapiens
  CDR3 for beta chain variable domain of TCR clone 99638 (TRBV23-1, TRBJ2-5)
CASSFLRSQETQYF

SEQ ID NO: 199277 - protein, 15 aa, Homo sapiens
  CDR3 for alpha chain variable domain of TCR clone 99639 (TRAV35, TRAJ38)
CAGFSNAGNNRKLIL

SEQ ID NO: 199278 - protein, 18 aa, Homo sapiens
  CDR3 for beta chain variable domain of TCR clone 99639 (TRBV3-1, TRBJ1-2)
CASSQDVIGWNGDYGYTF

SEQ ID NO: 199279 - protein, 14 aa, Homo sapiens
  CDR3 for alpha chain variable domain of TCR clone 99640 (TRAV13-2, TRAJ9)
CAENSFTGGFKTIF

SEQ ID NO: 199280 - protein, 13 aa, Homo sapiens
  CDR3 for beta chain variable domain of TCR clone 99640 (TRBV19, TRBJ2-7)
CAISIDRTYEQYF

SEQ ID NO: 199281 - protein, 15 aa, Homo sapiens
  CDR3 for alpha chain variable domain of TCR clone 99641 (TRAV21, TRAJ24)
CAARSSTYSWGKLQF

SEQ ID NO: 199282 - protein, 11 aa, Homo sapiens
  CDR3 for beta chain variable domain of TCR clone 99641 (TRBV11-2, TRBJ2-2)
CASSLPGELFF

SEQ ID NO: 199283 - protein, 11 aa, Homo sapiens
  CDR3 for alpha chain variable domain of TCR clone 99642 (TRAV13-2, TRAJ36)
CAETGANNIFF

SEQ ID NO: 199284 - protein, 13 aa, Homo sapiens
  CDR3 for beta chain variable domain of TCR clone 99642 (TRBV7-9, TRBJ2-4)
CATEGLAGNIQYF

SEQ ID NO: 199285 - protein, 13 aa, Homo sapiens
  CDR3 for alpha chain variable domain of TCR clone 99643 (TRAV12-2, TRAJ20)
CAVYPSNDYKLSF

SEQ ID NO: 199286 - protein, 15 aa, Homo sapiens
  CDR3 for beta chain variable domain of TCR clone 99643 (TRBV27, TRBJ2-5)
CVSSLYPRGGETQYF

SEQ ID NO: 199287 - protein, 14 aa, Homo sapiens
  CDR3 for alpha chain variable domain of TCR clone 99644 (TRAV8-4, TRAJ54)
CAVSEVLGAQKLAF

SEQ ID NO: 199288 - protein, 13 aa, Homo sapiens
  CDR3 for beta chain variable domain of TCR clone 99644 (TRBV27, TRBJ2-7)
CASSFVSSYEQYF

SEQ ID NO: 199289 - protein, 12 aa, Homo sapiens
  CDR3 for alpha chain variable domain of TCR clone 99645 (TRAV17, TRAJ12)
CATLRSSYKLIF

SEQ ID NO: 199290 - protein, 13 aa, Homo sapiens
  CDR3 for beta chain variable domain of TCR clone 99645 (TRBV24-1, TRBJ2-2)
CATSDWSTGELFF

SEQ ID NO: 199291 - protein, 16 aa, Homo sapiens
  CDR3 for alpha chain variable domain of TCR clone 99646 (TRAV13-1, TRAJ37)
CAASSLGSSNTGKLIF

SEQ ID NO: 199292 - protein, 13 aa, Homo sapiens
  CDR3 for beta chain variable domain of TCR clone 99646 (TRBV7-3, TRBJ1-1)
CASSQDWGAEAFF

SEQ ID NO: 199293 - protein, 12 aa, Homo sapiens
  CDR3 for alpha chain variable domain of TCR clone 99647 (TRAV13-1, TRAJ21)
CAAKEGFNKFYF

SEQ ID NO: 199294 - protein, 15 aa, Homo sapiens
  CDR3 for beta chain variable domain of TCR clone 99647 (TRBV7-9, TRBJ1-6)
CASSSPGRGNSALHF

SEQ ID NO: 199295 - protein, 11 aa, Homo sapiens
  CDR3 for alpha chain variable domain of TCR clone 99648 (TRAV1-2, TRAJ20)
CAVSNDYKLSF

SEQ ID NO: 199296 - protein, 13 aa, Homo sapiens
  CDR3 for beta chain variable domain of TCR clone 99648 (TRBV7-9, TRBJ1-2)
CACSLKQNYGYTF

SEQ ID NO: 199297 - protein, 17 aa, Homo sapiens
  CDR3 for alpha chain variable domain of TCR clone 99649 (TRAV3, TRAJ38)
CAVRDCLNAGKNRKLIW

SEQ ID NO: 199298 - protein, 14 aa, Homo sapiens
  CDR3 for beta chain variable domain of TCR clone 99649 (TRBV5-5, TRBJ1-5)
CASSGQGVDQPQHF

SEQ ID NO: 199299 - protein, 14 aa, Homo sapiens
  CDR3 for alpha chain variable domain of TCR clone 99650 (TRAV17, TRAJ12)
CATDEKDSSYQLIF

SEQ ID NO: 199300 - protein, 16 aa, Homo sapiens
  CDR3 for beta chain variable domain of TCR clone 99650 (TRBV11-2, TRBJ2-1)
CASSPRLAGVYNEQFF

SEQ ID NO: 199301 - protein, 13 aa, Homo sapiens
  CDR3 for alpha chain variable domain of TCR clone 99651 (TRAV12-3, TRAJ33)
CAMSVNSNYQLIW

SEQ ID NO: 199302 - protein, 13 aa, Homo sapiens
  CDR3 for beta chain variable domain of TCR clone 99651 (TRBV4-1, TRBJ2-2)
RASSQENTGELFF

SEQ ID NO: 199303 - protein, 16 aa, Homo sapiens
  CDR3 for alpha chain variable domain of TCR clone 99652 (TRAV1-2, TRAJ10)
CAVRGVLTGGGNKLTF

SEQ ID NO: 199304 - protein, 13 aa, Homo sapiens
  CDR3 for beta chain variable domain of TCR clone 99652 (TRBV6-1, TRBJ1-1)
CASSRQGNTEAFF

SEQ ID NO: 199305 - protein, 15 aa, Homo sapiens
  CDR3 for alpha chain variable domain of TCR clone 99653 (TRAV12-1, TRAJ40)
CVVNMHFPGTYKYIF

SEQ ID NO: 199306 - protein, 15 aa, Homo sapiens
  CDR3 for beta chain variable domain of TCR clone 99653 (TRBV20-1, TRBJ2-7)
CSARDRVSGMDEQYF

SEQ ID NO: 199307 - protein, 14 aa, Homo sapiens
  CDR3 for alpha chain variable domain of TCR clone 99654 (TRAV1-2, TRAJ16)
CAVNRFSDGQKLLF

SEQ ID NO: 199308 - protein, 12 aa, Homo sapiens
  CDR3 for beta chain variable domain of TCR clone 99654 (TRBV11-2, TRBJ2-5)
CASSPPAETQYF

SEQ ID NO: 199309 - protein, 15 aa, Homo sapiens
  CDR3 for alpha chain variable domain of TCR clone 99655 (TRAV27, TRAJ38)
CAARRNAGNNRKLMW

SEQ ID NO: 199310 - protein, 13 aa, Homo sapiens
  CDR3 for beta chain variable domain of TCR clone 99655 (TRBV12-5, TRBJ2-3)
CASGDRQSDTQYL

SEQ ID NO: 199311 - protein, 11 aa, Homo sapiens
  CDR3 for alpha chain variable domain of TCR clone 99656 (TRAV1-1, TRAJ23)
CAVRQGGKLIF

SEQ ID NO: 199312 - protein, 13 aa, Homo sapiens
  CDR3 for beta chain variable domain of TCR clone 99656 (TRBV4-1, TRBJ2-2)
CASSQENTGELFF

SEQ ID NO: 199313 - protein, 14 aa, Homo sapiens
  CDR3 for alpha chain variable domain of TCR clone 99657 (TRAV35, TRAJ50)
CAGHRKTSYDKVIF

SEQ ID NO: 199314 - protein, 13 aa, Homo sapiens
  CDR3 for beta chain variable domain of TCR clone 99657 (TRBV7-7, TRBJ2-3)
CASSLSRADKQYF

SEQ ID NO: 199315 - protein, 13 aa, Homo sapiens
  CDR3 for alpha chain variable domain of TCR clone 99658 (TRAV13-1, TRAJ6)
CAASKGGSYIPTF

SEQ ID NO: 199316 - protein, 13 aa, Homo sapiens
  CDR3 for beta chain variable domain of TCR clone 99658 (TRBV7-9, TRBJ2-5)
CASIPSGRETQYF

SEQ ID NO: 199317 - protein, 17 aa, Homo sapiens
  CDR3 for alpha chain variable domain of TCR clone 99659 (TRAV13-2, TRAJ5)
CAESVVIVGHGQESTYF

SEQ ID NO: 199318 - protein, 17 aa, Homo sapiens
  CDR3 for beta chain variable domain of TCR clone 99659 (TRBV4-1, TRBJ2-3)
RQQPPTSGGRSTDTQYF

SEQ ID NO: 199319 - protein, 12 aa, Homo sapiens
  CDR3 for alpha chain variable domain of TCR clone 99660 (TRAV27, TRAJ35)
CAGADFGNVLHC

SEQ ID NO: 199320 - protein, 16 aa, Homo sapiens
  CDR3 for beta chain variable domain of TCR clone 99660 (TRBV6-1, TRBJ2-1)
CASILRQGSSYNQQFF

SEQ ID NO: 199321 - protein, 13 aa, Homo sapiens
  CDR3 for alpha chain variable domain of TCR clone 99661 (TRAV13-1, TRAJ17)
CAASRAAGNKLTF

SEQ ID NO: 199322 - protein, 15 aa, Homo sapiens
  CDR3 for beta chain variable domain of TCR clone 99661 (TRBV2, TRBJ2-1)
CASSEEREGDNEQFF

SEQ ID NO: 199323 - protein, 12 aa, Homo sapiens
  CDR3 for alpha chain variable domain of TCR clone 99662 (TRAV13-1, TRAJ20)
CAASRGDYKLSF

SEQ ID NO: 199324 - protein, 15 aa, Homo sapiens
  CDR3 for beta chain variable domain of TCR clone 99662 (TRBV19, TRBJ2-1)
CASSSPGVPLDEQFF

SEQ ID NO: 199325 - protein, 13 aa, Homo sapiens
  CDR3 for alpha chain variable domain of TCR clone 99663 (TRAV21, TRAJ27)
CAARPGHAGKSTF

SEQ ID NO: 199326 - protein, 13 aa, Homo sapiens
  CDR3 for beta chain variable domain of TCR clone 99663 (TRBV13, TRBJ2-1)
CASILGGRGEQFF

SEQ ID NO: 199327 - protein, 15 aa, Homo sapiens
  CDR3 for alpha chain variable domain of TCR clone 99664 (TRAV38-1, TRAJ37)
CAFIHGSGNTGKLIF

SEQ ID NO: 199328 - protein, 12 aa, Homo sapiens
  CDR3 for beta chain variable domain of TCR clone 99664 (TRBV7-9, TRBJ2-7)
CASSFGSYEQYV

SEQ ID NO: 199329 - protein, 13 aa, Homo sapiens
  CDR3 for alpha chain variable domain of TCR clone 99665 (TRAV13-2, TRAJ53)
CAENMGSNYKLTF

SEQ ID NO: 199330 - protein, 13 aa, Homo sapiens
  CDR3 for beta chain variable domain of TCR clone 99665 (TRBV11-2, TRBJ2-7)
CASSPLGSYEQYF

SEQ ID NO: 199331 - protein, 10 aa, Homo sapiens
  CDR3 for alpha chain variable domain of TCR clone 99666 (TRAV1-2, TRAJ31)
CAFFRCQTHV

SEQ ID NO: 199332 - protein, 13 aa, Homo sapiens
  CDR3 for beta chain variable domain of TCR clone 99666 (TRBV7-9, TRBJ1-2)
CTSSLKQNYGYTF

SEQ ID NO: 199333 - protein, 14 aa, Homo sapiens
  CDR3 for alpha chain variable domain of TCR clone 99667 (TRAV9-2, TRAJ48)
CALSGNFGNEKLTF

SEQ ID NO: 199334 - protein, 15 aa, Homo sapiens
  CDR3 for beta chain variable domain of TCR clone 99667 (TRBV6-1, TRBJ2-4)
CASSEAVWTINIQYF

SEQ ID NO: 199335 - protein, 12 aa, Homo sapiens
  CDR3 for alpha chain variable domain of TCR clone 99668 (TRAV12-3, TRAJ17)
CAMTLTGNKLTF

SEQ ID NO: 199336 - protein, 13 aa, Homo sapiens
  CDR3 for beta chain variable domain of TCR clone 99668 (TRBV7-6, TRBJ2-1)
CQQLGGGADEQFF

SEQ ID NO: 199337 - protein, 13 aa, Homo sapiens
  CDR3 for alpha chain variable domain of TCR clone 99669 (TRAV21, TRAJ20)
CAVGLRVDYKLSF

SEQ ID NO: 199338 - protein, 13 aa, Homo sapiens
  CDR3 for beta chain variable domain of TCR clone 99669 (TRBV12-4, TRBJ1-2)
CASSLDSNYGYTF

SEQ ID NO: 199339 - protein, 11 aa, Homo sapiens
  CDR3 for alpha chain variable domain of TCR clone 99670 (TRAV17, TRAJ9)
GGFTGGFKTIF

SEQ ID NO: 199340 - protein, 14 aa, Homo sapiens
  CDR3 for beta chain variable domain of TCR clone 99670 (TRBV7-9, TRBJ2-2)
CASSLVQDTGELFF

SEQ ID NO: 199341 - protein, 16 aa, Homo sapiens
  CDR3 for alpha chain variable domain of TCR clone 99671 (TRAV3, TRAJ37)
CAVSGKGSGNTGKLIF

SEQ ID NO: 199342 - protein, 15 aa, Homo sapiens
  CDR3 for beta chain variable domain of TCR clone 99671 (TRBV7-3, TRBJ2-2)
CASSETGQGTGELFF

SEQ ID NO: 199343 - protein, 11 aa, Homo sapiens
  CDR3 for alpha chain variable domain of TCR clone 99672 (TRAV12-3, TRAJ43)
CAMSVSNDMRF

SEQ ID NO: 199344 - protein, 11 aa, Homo sapiens
  CDR3 for beta chain variable domain of TCR clone 99672 (TRBV11-2, TRBJ1-1)
CASSINTEAFF

SEQ ID NO: 199345 - protein, 19 aa, Homo sapiens
  CDR3 for alpha chain variable domain of TCR clone 99673 (TRAV21, TRAJ20)
SLVTQPPTSMLPNDYKLSF

SEQ ID NO: 199346 - protein, 14 aa, Homo sapiens
  CDR3 for beta chain variable domain of TCR clone 99673 (TRBV7-2, TRBJ1-3)
CASSRLRSGNTIYF

SEQ ID NO: 199347 - protein, 13 aa, Homo sapiens
  CDR3 for alpha chain variable domain of TCR clone 99674 (TRAV1-1, TRAJ31)
CASSLNNNARLMF

SEQ ID NO: 199348 - protein, 14 aa, Homo sapiens
  CDR3 for beta chain variable domain of TCR clone 99674 (TRBV4-1, TRBJ2-5)
CASSRSGSGETQYF

SEQ ID NO: 199349 - protein, 14 aa, Homo sapiens
  CDR3 for alpha chain variable domain of TCR clone 99675 (TRAV8-4, TRAJ13)
CAVTLSGGCQKVTF

SEQ ID NO: 199350 - protein, 14 aa, Homo sapiens
  CDR3 for beta chain variable domain of TCR clone 99675 (TRBV7-2, TRBJ1-2)
CASSQTGPTYGYTF

SEQ ID NO: 199351 - protein, 14 aa, Homo sapiens
  CDR3 for alpha chain variable domain of TCR clone 99676 (TRAV2, TRAJ9)
CAVEDRCGGFKTIF

SEQ ID NO: 199352 - protein, 13 aa, Homo sapiens
  CDR3 for beta chain variable domain of TCR clone 99676 (TRBV19, TRBJ1-2)
CASSVPGQDGYTF

SEQ ID NO: 199353 - protein, 21 aa, Homo sapiens
  CDR3 for alpha chain variable domain of TCR clone 99677 (TRAV3, )
CAVRPTPDIQNPDPSVYQLRD

SEQ ID NO: 199354 - protein, 15 aa, Homo sapiens
  CDR3 for beta chain variable domain of TCR clone 99677 (TRBV11-3, TRBJ2-5)
CASSDTSGGIETQYF

SEQ ID NO: 199355 - protein, 10 aa, Homo sapiens
  CDR3 for alpha chain variable domain of TCR clone 99678 (TRAV23/DV6, TRAJ45)
TGGGADGLTF

SEQ ID NO: 199356 - protein, 17 aa, Homo sapiens
  CDR3 for beta chain variable domain of TCR clone 99678 (TRBV28, TRBJ2-3)
CASSPTPAGGRVDTQYF

SEQ ID NO: 199357 - protein, 13 aa, Homo sapiens
  CDR3 for alpha chain variable domain of TCR clone 99679 (TRAV8-2, TRAJ13)
CVVSDLRYQKVTF

SEQ ID NO: 199358 - protein, 14 aa, Homo sapiens
  CDR3 for beta chain variable domain of TCR clone 99679 (TRBV25-1, TRBJ1-1)
CASTHLGGNTEAFL

SEQ ID NO: 199359 - protein, 16 aa, Homo sapiens
  CDR3 for alpha chain variable domain of TCR clone 99680 (TRAV4, TRAJ22)
CLVGDLYSGSARQLTF

SEQ ID NO: 199360 - protein, 17 aa, Homo sapiens
  CDR3 for beta chain variable domain of TCR clone 99680 (TRBV7-9, TRBJ2-1)
CASSLYPPGVEYNEQFF

SEQ ID NO: 199361 - protein, 16 aa, Homo sapiens
  CDR3 for alpha chain variable domain of TCR clone 99681 (TRAV16, TRAJ42)
CARKMNYGGSQGNLIF

SEQ ID NO: 199362 - protein, 13 aa, Homo sapiens
  CDR3 for beta chain variable domain of TCR clone 99681 (TRBV20-1, TRBJ2-7)
CSASPPSSDEQYF

SEQ ID NO: 199363 - protein, 15 aa, Homo sapiens
  CDR3 for alpha chain variable domain of TCR clone 99682 (TRAV8-3, TRAJ27)
WAVGPSKTNAGKSTF

SEQ ID NO: 199364 - protein, 15 aa, Homo sapiens
  CDR3 for beta chain variable domain of TCR clone 99682 (TRBV7-2, TRBJ2-1)
CASSSGLAGGNEQFF

SEQ ID NO: 199365 - protein, 12 aa, Homo sapiens
  CDR3 for alpha chain variable domain of TCR clone 99683 (TRAV8-2, TRAJ30)
CVVSDSDDKIIF

SEQ ID NO: 199366 - protein, 16 aa, Homo sapiens
  CDR3 for beta chain variable domain of TCR clone 99683 (TRBV10-3, TRBJ2-6)
CAISTSGDLGANVLTF

SEQ ID NO: 199367 - protein, 18 aa, Homo sapiens
  CDR3 for alpha chain variable domain of TCR clone 99684 (TRAV26-2, TRAJ45)
CILRLWGYSGGGADGLTF

SEQ ID NO: 199368 - protein, 15 aa, Homo sapiens
  CDR3 for beta chain variable domain of TCR clone 99684 (TRBV28, TRBJ2-5)
CASSAPRQVQETQYF

SEQ ID NO: 199369 - protein, 10 aa, Homo sapiens
  CDR3 for alpha chain variable domain of TCR clone 99685 (TRAV21, TRAJ9)
CAVEAVALEA

SEQ ID NO: 199370 - protein, 13 aa, Homo sapiens
  CDR3 for beta chain variable domain of TCR clone 99685 (TRBV12-4, TRBJ1-2)
CASSSGLTVISTF

SEQ ID NO: 199371 - protein, 14 aa, Homo sapiens
  CDR3 for alpha chain variable domain of TCR clone 99686 (TRAV13-1, TRAJ40)
CAARSTSGAYKYIF

SEQ ID NO: 199372 - protein, 15 aa, Homo sapiens
  CDR3 for beta chain variable domain of TCR clone 99686 (TRBV18, TRBJ1-5)
CASSETGGNNQPQHF

SEQ ID NO: 199373 - protein, 15 aa, Homo sapiens
  CDR3 for alpha chain variable domain of TCR clone 99687 (TRAV26-1, TRAJ40)
CIVRVTTSGTYKYIF

SEQ ID NO: 199374 - protein, 14 aa, Homo sapiens
  CDR3 for beta chain variable domain of TCR clone 99687 (TRBV7-2, TRBJ2-7)
CASRSQGAAYEQYF

SEQ ID NO: 199375 - protein, 13 aa, Homo sapiens
  CDR3 for alpha chain variable domain of TCR clone 99688 (TRAV3, TRAJ27)
CAVRPLGAGKSTF

SEQ ID NO: 199376 - protein, 13 aa, Homo sapiens
  CDR3 for beta chain variable domain of TCR clone 99688 (TRBV7-9, TRBJ2-3)
CASSPGSTDTQNF

SEQ ID NO: 199377 - protein, 14 aa, Homo sapiens
  CDR3 for alpha chain variable domain of TCR clone 99689 (TRAV38-1, TRAJ45)
CAYYSGGGADGLTF

SEQ ID NO: 199378 - protein, 20 aa, Homo sapiens
  CDR3 for beta chain variable domain of TCR clone 99689 (TRBV28, TRBJ2-1)
CASTPIGRSPGLAGGNEQFI

SEQ ID NO: 199379 - protein, 15 aa, Homo sapiens
  CDR3 for alpha chain variable domain of TCR clone 99690 (TRAV17, TRAJ4)
CATGTWSGGYNKLIF

SEQ ID NO: 199380 - protein, 13 aa, Homo sapiens
  CDR3 for beta chain variable domain of TCR clone 99690 (TRBV6-6, TRBJ2-7)
CASSPKHLAEQNF

SEQ ID NO: 199381 - protein, 13 aa, Homo sapiens
  CDR3 for alpha chain variable domain of TCR clone 99691 (TRAV26-2, TRAJ54)
CIPRVGGAQKLVF

SEQ ID NO: 199382 - protein, 16 aa, Homo sapiens
  CDR3 for beta chain variable domain of TCR clone 99691 (TRBV4-1, TRBJ1-1)
CASSSMSERPNAEAFF

SEQ ID NO: 199383 - protein, 15 aa, Homo sapiens
  CDR3 for alpha chain variable domain of TCR clone 99692 (TRAV25, TRAJ52)
CAGRPGGTSYGKLTF

SEQ ID NO: 199384 - protein, 17 aa, Homo sapiens
  CDR3 for beta chain variable domain of TCR clone 99692 (TRBV7-8, TRBJ2-6)
CASSGGTGGAGANDLTF

SEQ ID NO: 199385 - protein, 16 aa, Homo sapiens
  CDR3 for alpha chain variable domain of TCR clone 99693 (TRAV1-1, TRAJ29)
CAVRSTRNSGDTPLVF

SEQ ID NO: 199386 - protein, 16 aa, Homo sapiens
  CDR3 for beta chain variable domain of TCR clone 99693 (TRBV27, TRBJ1-1)
CASSSRGRTGYTEAFF

SEQ ID NO: 199387 - protein, 12 aa, Homo sapiens
  CDR3 for alpha chain variable domain of TCR clone 99694 (TRAV21, TRAJ11)
CAATSGYSTLTF

SEQ ID NO: 199388 - protein, 14 aa, Homo sapiens
  CDR3 for beta chain variable domain of TCR clone 99694 (TRBV20-1, TRBJ2-7)
WSAPELAGVGEQYF

SEQ ID NO: 199389 - protein, 14 aa, Homo sapiens
  CDR3 for alpha chain variable domain of TCR clone 99695 (TRAV38-1, TRAJ40)
CALRPTSGTYKYIF

SEQ ID NO: 199390 - protein, 12 aa, Homo sapiens
  CDR3 for beta chain variable domain of TCR clone 99695 (TRBV7-9, TRBJ2-7)
CASSLEGYEQYF

SEQ ID NO: 199391 - protein, 13 aa, Homo sapiens
  CDR3 for alpha chain variable domain of TCR clone 99696 (TRAV13-1, TRAJ21)
CAASIYNFNKFYF

SEQ ID NO: 199392 - protein, 13 aa, Homo sapiens
  CDR3 for beta chain variable domain of TCR clone 99696 (TRBV11-3, TRBJ1-1)
CASSSNRDTEAFF

SEQ ID NO: 199393 - protein, 14 aa, Homo sapiens
  CDR3 for alpha chain variable domain of TCR clone 99697 (TRAV1-2, TRAJ6)
CAVSLSGGSYIPTF

SEQ ID NO: 199394 - protein, 15 aa, Homo sapiens
  CDR3 for beta chain variable domain of TCR clone 99697 (TRBV28, TRBJ2-7)
CASIPGGRGFYEQYF

SEQ ID NO: 199395 - protein, 14 aa, Homo sapiens
  CDR3 for alpha chain variable domain of TCR clone 99698 (TRAV21, TRAJ52)
CGRAGGTSYGKLTF

SEQ ID NO: 199396 - protein, 16 aa, Homo sapiens
  CDR3 for beta chain variable domain of TCR clone 99698 (TRBV12-5, TRBJ2-5)
CASGPRTSGNQETQYF

SEQ ID NO: 199397 - protein, 14 aa, Homo sapiens
  CDR3 for alpha chain variable domain of TCR clone 99699 (TRAV12-2, TRAJ13)
CAVKKTGGYQKVTF

SEQ ID NO: 199398 - protein, 15 aa, Homo sapiens
  CDR3 for beta chain variable domain of TCR clone 99699 (TRBV9, TRBJ1-6)
CASSVAGTGDSPLHC

SEQ ID NO: 199399 - protein, 14 aa, Homo sapiens
  CDR3 for alpha chain variable domain of TCR clone 99700 (TRAV14/DV4, TRAJ15)
CAMRRDQAGTALIF

SEQ ID NO: 199400 - protein, 16 aa, Homo sapiens
  CDR3 for beta chain variable domain of TCR clone 99700 (TRBV15, TRBJ2-3)
CATSRGLGIVTDTQYF

SEQ ID NO: 199401 - protein, 16 aa, Homo sapiens
  CDR3 for alpha chain variable domain of TCR clone 99701 (TRAV21, TRAJ37)
CAVRTAGSSDTGKLLF

SEQ ID NO: 199402 - protein, 13 aa, Homo sapiens
  CDR3 for beta chain variable domain of TCR clone 99701 (TRBV7-9, TRBJ2-5)
CASLPSGRETQYF

SEQ ID NO: 199403 - protein, 16 aa, Homo sapiens
  CDR3 for alpha chain variable domain of TCR clone 99702 (TRAV1-2, TRAJ10)
CAVRGVLTGGGNKLTF

SEQ ID NO: 199404 - protein, 12 aa, Homo sapiens
  CDR3 for beta chain variable domain of TCR clone 99702 (TRBV12-4, TRBJ2-7)
CDSSLGGYEQYF

SEQ ID NO: 199405 - protein, 15 aa, Homo sapiens
  CDR3 for alpha chain variable domain of TCR clone 99703 (TRAV23/DV6, TRAJ33)
CAASNSGGGNYQLIW

SEQ ID NO: 199406 - protein, 15 aa, Homo sapiens
  CDR3 for beta chain variable domain of TCR clone 99703 (TRBV27, TRBJ2-1)
CASSNGGGSSNEQFF

SEQ ID NO: 199407 - protein, 15 aa, Homo sapiens
  CDR3 for alpha chain variable domain of TCR clone 99704 (TRAV12-1, TRAJ44)
CVVDTPQGTASKLTF

SEQ ID NO: 199408 - protein, 13 aa, Homo sapiens
  CDR3 for beta chain variable domain of TCR clone 99704 (TRBV27, TRBJ2-1)
CASSSGAYNEQFF

SEQ ID NO: 199409 - protein, 13 aa, Homo sapiens
  CDR3 for alpha chain variable domain of TCR clone 99705 (TRAV21, TRAJ57)
CAVTQGGSEKLGF

SEQ ID NO: 199410 - protein, 11 aa, Homo sapiens
  CDR3 for beta chain variable domain of TCR clone 99705 (TRBV11-2, TRBJ2-2)
CASSLPGELFF

SEQ ID NO: 199411 - protein, 13 aa, Homo sapiens
  CDR3 for alpha chain variable domain of TCR clone 99706 (TRAV1-2, TRAJ27)
CAVFNTNAGKSTL

SEQ ID NO: 199412 - protein, 17 aa, Homo sapiens
  CDR3 for beta chain variable domain of TCR clone 99706 (TRBV11-2, TRBJ2-4)
CASSLGEGEGGKNIQYF

SEQ ID NO: 199413 - protein, 14 aa, Homo sapiens
  CDR3 for alpha chain variable domain of TCR clone 99707 (TRAV20, TRAJ56)
CAVQFGGANSKLTF

SEQ ID NO: 199414 - protein, 14 aa, Homo sapiens
  CDR3 for beta chain variable domain of TCR clone 99707 (TRBV19, TRBJ2-1)
CASSDNQGANEQFF

SEQ ID NO: 199415 - protein, 16 aa, Homo sapiens
  CDR3 for alpha chain variable domain of TCR clone 99708 (TRAV30, TRAJ24)
CGTEIVDADCWGKFQF

SEQ ID NO: 199416 - protein, 14 aa, Homo sapiens
  CDR3 for beta chain variable domain of TCR clone 99708 (TRBV7-2, TRBJ2-7)
CASSPKTSFYEQYF

SEQ ID NO: 199417 - protein, 13 aa, Homo sapiens
  CDR3 for alpha chain variable domain of TCR clone 99709 (TRAV1-2, TRAJ9)
CAALNTGGFKTIF

SEQ ID NO: 199418 - protein, 13 aa, Homo sapiens
  CDR3 for beta chain variable domain of TCR clone 99709 (TRBV15, TRBJ1-6)
CATSGGLNSPLHV

SEQ ID NO: 199419 - protein, 14 aa, Homo sapiens
  CDR3 for alpha chain variable domain of TCR clone 99710 (TRAV12-2, TRAJ40)
CAVKIPSGTYKYIF

SEQ ID NO: 199420 - protein, 12 aa, Homo sapiens
  CDR3 for beta chain variable domain of TCR clone 99710 (TRBV11-2, TRBJ2-2)
RASSLGGGELFF

SEQ ID NO: 199421 - protein, 11 aa, Homo sapiens
  CDR3 for alpha chain variable domain of TCR clone 99711 (TRAV1-2, TRAJ40)
CAVPGTYKYIF

SEQ ID NO: 199422 - protein, 20 aa, Homo sapiens
  CDR3 for beta chain variable domain of TCR clone 99711 (TRBV28, TRBJ2-1)
CASTPIGRSPGLAGGNEQFF

SEQ ID NO: 199423 - protein, 14 aa, Homo sapiens
  CDR3 for alpha chain variable domain of TCR clone 99712 (TRAV4, TRAJ17)
CLVGDMAAGNKLTF

SEQ ID NO: 199424 - protein, 14 aa, Homo sapiens
  CDR3 for beta chain variable domain of TCR clone 99712 (TRBV4-1, TRBJ2-7)
CASSPVAGGEEQYF

SEQ ID NO: 199425 - protein, 18 aa, Homo sapiens
  CDR3 for alpha chain variable domain of TCR clone 99713 (TRAV26-2, TRAJ45)
CILRVDKYLGGGADGLTF

SEQ ID NO: 199426 - protein, 16 aa, Homo sapiens
  CDR3 for beta chain variable domain of TCR clone 99713 (TRBV2, TRBJ1-4)
CASNLLQGATNEKLFF

SEQ ID NO: 199427 - protein, 13 aa, Homo sapiens
  CDR3 for alpha chain variable domain of TCR clone 99714 (TRAV1-2, TRAJ9)
CAALNTGGFKTIF

SEQ ID NO: 199428 - protein, 13 aa, Homo sapiens
  CDR3 for beta chain variable domain of TCR clone 99714 (TRBV19, TRBJ1-2)
CASSVPGQDGFTF

SEQ ID NO: 199429 - protein, 15 aa, Homo sapiens
  CDR3 for alpha chain variable domain of TCR clone 99715 (TRAV3, TRAJ22)
CAVGDRGGSARQLTF

SEQ ID NO: 199430 - protein, 14 aa, Homo sapiens
  CDR3 for beta chain variable domain of TCR clone 99715 (TRBV20-1, TRBJ2-5)
CSALVPGYQETQYF

SEQ ID NO: 199431 - protein, 19 aa, Homo sapiens
  CDR3 for alpha chain variable domain of TCR clone 99716 (TRAV27, TRAJ44)
TAAQPGDTGGAGTASKLTF

SEQ ID NO: 199432 - protein, 13 aa, Homo sapiens
  CDR3 for beta chain variable domain of TCR clone 99716 (TRBV12-4, TRBJ2-7)
CASRMTGSYEQYF

SEQ ID NO: 199433 - protein, 12 aa, Homo sapiens
  CDR3 for alpha chain variable domain of TCR clone 99717 (TRAV21, TRAJ11)
CAATSGYSTLAF

SEQ ID NO: 199434 - protein, 15 aa, Homo sapiens
  CDR3 for beta chain variable domain of TCR clone 99717 (TRBV6-1, TRBJ2-3)
CASSERGGITDTQYF

SEQ ID NO: 199435 - protein, 15 aa, Homo sapiens
  CDR3 for alpha chain variable domain of TCR clone 99718 (TRAV27, TRAJ38)
CAARRNAGNNRKLIW

SEQ ID NO: 199436 - protein, 15 aa, Homo sapiens
  CDR3 for beta chain variable domain of TCR clone 99718 (TRBV5-1, TRBJ2-1)
CASSPLRAPYNEQFF

SEQ ID NO: 199437 - protein, 15 aa, Homo sapiens
  CDR3 for alpha chain variable domain of TCR clone 99719 (TRAV34, TRAJ38)
CGADFTPGNNRKLIW

SEQ ID NO: 199438 - protein, 15 aa, Homo sapiens
  CDR3 for beta chain variable domain of TCR clone 99719 (TRBV18, TRBJ2-1)
CASLPDRGRDNEQFF

SEQ ID NO: 199439 - protein, 17 aa, Homo sapiens
  CDR3 for alpha chain variable domain of TCR clone 99720 (TRAV3, TRAJ42)
CAVRDRDYGGSQGNLIF

SEQ ID NO: 199440 - protein, 12 aa, Homo sapiens
  CDR3 for beta chain variable domain of TCR clone 99720 (TRBV7-6, TRBJ2-7)
CASSLADSEQYF

SEQ ID NO: 199441 - protein, 13 aa, Homo sapiens
  CDR3 for alpha chain variable domain of TCR clone 99721 (TRAV16, TRAJ31)
CALSAHNNARLMF

SEQ ID NO: 199442 - protein, 17 aa, Homo sapiens
  CDR3 for beta chain variable domain of TCR clone 99721 (TRBV12-4, TRBJ2-1)
CASSPGLAGGRINEKFF

SEQ ID NO: 199443 - protein, 14 aa, Homo sapiens
  CDR3 for alpha chain variable domain of TCR clone 99722 (TRAV12-2, TRAJ44)
CAVNPAGTASKLTF

SEQ ID NO: 199444 - protein, 15 aa, Homo sapiens
  CDR3 for beta chain variable domain of TCR clone 99722 (TRBV20-1, TRBJ1-6)
CSAPLGVDHPSTLGM

SEQ ID NO: 199445 - protein, 14 aa, Homo sapiens
  CDR3 for alpha chain variable domain of TCR clone 99723 (TRAV17, TRAJ11)
CATDTSRGYSTLTF

SEQ ID NO: 199446 - protein, 13 aa, Homo sapiens
  CDR3 for beta chain variable domain of TCR clone 99723 (TRBV19, TRBJ2-5)
CASRGSRRETQYF

SEQ ID NO: 199447 - protein, 17 aa, Homo sapiens
  CDR3 for alpha chain variable domain of TCR clone 99724 (TRAV3, TRAJ42)
CAGRDRDYGGSQGNLIF

SEQ ID NO: 199448 - protein, 14 aa, Homo sapiens
  CDR3 for beta chain variable domain of TCR clone 99724 (TRBV7-2, TRBJ2-5)
CASSPRGSSETQYF

SEQ ID NO: 199449 - protein, 14 aa, Homo sapiens
  CDR3 for alpha chain variable domain of TCR clone 99725 (TRAV3, TRAJ34)
CAVRDINNTDKLIF

SEQ ID NO: 199450 - protein, 14 aa, Homo sapiens
  CDR3 for beta chain variable domain of TCR clone 99725 (TRBV7-2, TRBJ2-7)
CASSPKTSFYEQYF

SEQ ID NO: 199451 - protein, 13 aa, Homo sapiens
  CDR3 for alpha chain variable domain of TCR clone 99726 (TRAV3, TRAJ3)
CAVRALGASKIIF

SEQ ID NO: 199452 - protein, 18 aa, Homo sapiens
  CDR3 for beta chain variable domain of TCR clone 99726 (TRBV12-4, TRBJ2-5)
CASSPAGGRDPVLRARHA

SEQ ID NO: 199453 - protein, 14 aa, Homo sapiens
  CDR3 for alpha chain variable domain of TCR clone 99727 (TRAV1-2, TRAJ8)
CAVREDTGFQKLVF

SEQ ID NO: 199454 - protein, 15 aa, Homo sapiens
  CDR3 for beta chain variable domain of TCR clone 99727 (TRBV7-6, TRBJ2-5)
CASSFPGGPQETQYF

SEQ ID NO: 199455 - protein, 16 aa, Homo sapiens
  CDR3 for alpha chain variable domain of TCR clone 99728 (TRAV3, TRAJ37)
CAGRGKGSGNTGKLIF

SEQ ID NO: 199456 - protein, 17 aa, Homo sapiens
  CDR3 for beta chain variable domain of TCR clone 99728 (TRBV11-2, TRBJ2-1)
CASSLYPPGVEYNEQFF

SEQ ID NO: 199457 - protein, 13 aa, Homo sapiens
  CDR3 for alpha chain variable domain of TCR clone 99729 (TRAV2, TRAJ21)
CAVEGSNFNKFYF

SEQ ID NO: 199458 - protein, 13 aa, Homo sapiens
  CDR3 for beta chain variable domain of TCR clone 99729 (TRBV7-9, TRBJ2-3)
CASSPGSTDTQYF

SEQ ID NO: 199459 - protein, 15 aa, Homo sapiens
  CDR3 for alpha chain variable domain of TCR clone 99730 (TRAV3, TRAJ5)
CAVRDRKTGRRALTF

SEQ ID NO: 199460 - protein, 15 aa, Homo sapiens
  CDR3 for beta chain variable domain of TCR clone 99730 (TRBV7-8, TRBJ2-1)
CASSLADSLYNEEFF

SEQ ID NO: 199461 - protein, 14 aa, Homo sapiens
  CDR3 for alpha chain variable domain of TCR clone 99731 (TRAV17, TRAJ54)
CATDANRGAQKLVF

SEQ ID NO: 199462 - protein, 12 aa, Homo sapiens
  CDR3 for beta chain variable domain of TCR clone 99731 (TRBV7-9, TRBJ2-7)
CASSIKREEQYF

SEQ ID NO: 199463 - protein, 15 aa, Homo sapiens
  CDR3 for alpha chain variable domain of TCR clone 99732 (TRAV20, TRAJ58)
CAVQDLETSGSRLTF

SEQ ID NO: 199464 - protein, 13 aa, Homo sapiens
  CDR3 for beta chain variable domain of TCR clone 99732 (TRBV20-1, TRBJ1-1)
CSARGGGNTEAFS

SEQ ID NO: 199465 - protein, 13 aa, Homo sapiens
  CDR3 for alpha chain variable domain of TCR clone 99733 (TRAV13-1, TRAJ11)
CAAVLAGYSPLTF

SEQ ID NO: 199466 - protein, 17 aa, Homo sapiens
  CDR3 for beta chain variable domain of TCR clone 99733 (TRBV25-1, TRBJ2-7)
CASSDARVVFSSYEQYF

SEQ ID NO: 199467 - protein, 16 aa, Homo sapiens
  CDR3 for alpha chain variable domain of TCR clone 99734 (TRAV30, TRAJ24)
CGTEIVDADSWWKFQF

SEQ ID NO: 199468 - protein, 13 aa, Homo sapiens
  CDR3 for beta chain variable domain of TCR clone 99734 (TRBV18, TRBJ1-2)
CASSASATEGYTF

SEQ ID NO: 199469 - protein, 14 aa, Homo sapiens
  CDR3 for alpha chain variable domain of TCR clone 99735 (TRAV38-2/DV8, TRAJ33)
CAYRILDSNYQLIW

SEQ ID NO: 199470 - protein, 13 aa, Homo sapiens
  CDR3 for beta chain variable domain of TCR clone 99735 (TRBV19, TRBJ1-2)
CASSVPGQDGYTF

SEQ ID NO: 199471 - protein, 11 aa, Homo sapiens
  CDR3 for alpha chain variable domain of TCR clone 99736 (TRAV21, TRAJ11)
CAVNGYSTLTF

SEQ ID NO: 199472 - protein, 13 aa, Homo sapiens
  CDR3 for beta chain variable domain of TCR clone 99736 (TRBV4-1, TRBJ2-1)
CASSQAGGDEQFF

SEQ ID NO: 199473 - protein, 17 aa, Homo sapiens
  CDR3 for alpha chain variable domain of TCR clone 99737 (TRAV3, TRAJ6)
CAVRDGPRAGGSYIPTS

SEQ ID NO: 199474 - protein, 14 aa, Homo sapiens
  CDR3 for beta chain variable domain of TCR clone 99737 (TRBV7-2, TRBJ2-5)
CASSTGGELKTQYF

SEQ ID NO: 199475 - protein, 13 aa, Homo sapiens
  CDR3 for alpha chain variable domain of TCR clone 99738 (TRAV12-1, TRAJ22)
CVVPSGSASQLTF

SEQ ID NO: 199476 - protein, 15 aa, Homo sapiens
  CDR3 for beta chain variable domain of TCR clone 99738 (TRBV11-3, TRBJ2-7)
CASSPGPASSYEQYF

SEQ ID NO: 199477 - protein, 13 aa, Homo sapiens
  CDR3 for alpha chain variable domain of TCR clone 99739 (TRAV13-2, TRAJ15)
CAERPQAGTALIF

SEQ ID NO: 199478 - protein, 14 aa, Homo sapiens
  CDR3 for beta chain variable domain of TCR clone 99739 (TRBV12-4, TRBJ1-1)
CASSLGTGGTEAFF

SEQ ID NO: 199479 - protein, 14 aa, Homo sapiens
  CDR3 for alpha chain variable domain of TCR clone 99740 (TRAV26-1, TRAJ45)
CIEVTGGGAEGLTF

SEQ ID NO: 199480 - protein, 12 aa, Homo sapiens
  CDR3 for beta chain variable domain of TCR clone 99740 (TRBV12-4, TRBJ2-7)
CASSLGGYEQYF

SEQ ID NO: 199481 - protein, 13 aa, Homo sapiens
  CDR3 for alpha chain variable domain of TCR clone 99741 (TRAV29/DV5, TRAJ49)
CSASTNTGNQFYF

SEQ ID NO: 199482 - protein, 13 aa, Homo sapiens
  CDR3 for beta chain variable domain of TCR clone 99741 (TRBV7-2, TRBJ1-4)
CASSLAGLEKLFF

SEQ ID NO: 199483 - protein, 11 aa, Homo sapiens
  CDR3 for alpha chain variable domain of TCR clone 99742 (TRAV1-1, TRAJ30)
CAQNRDDKIIF

SEQ ID NO: 199484 - protein, 14 aa, Homo sapiens
  CDR3 for beta chain variable domain of TCR clone 99742 (TRBV7-8, TRBJ2-7)
CASSPGLVDYEQYF

SEQ ID NO: 199485 - protein, 15 aa, Homo sapiens
  CDR3 for alpha chain variable domain of TCR clone 99743 (TRAV26-1, TRAJ44)
CIVRANTGTASKLTF

SEQ ID NO: 199486 - protein, 16 aa, Homo sapiens
  CDR3 for beta chain variable domain of TCR clone 99743 (TRBV7-7, TRBJ2-1)
CASSLSSGTSYNEQFF

SEQ ID NO: 199487 - protein, 16 aa, Homo sapiens
  CDR3 for alpha chain variable domain of TCR clone 99744 (TRAV12-3, TRAJ53)
CAMSPGSGGSNYKLTF

SEQ ID NO: 199488 - protein, 16 aa, Homo sapiens
  CDR3 for beta chain variable domain of TCR clone 99744 (TRBV24-1, TRBJ2-1)
CATSAVGQSSYNEQFF

SEQ ID NO: 199489 - protein, 16 aa, Homo sapiens
  CDR3 for alpha chain variable domain of TCR clone 99745 (TRAV16, TRAJ4)
CALSRMFSGGYNKLIS

SEQ ID NO: 199490 - protein, 16 aa, Homo sapiens
  CDR3 for beta chain variable domain of TCR clone 99745 (TRBV24-1, TRBJ2-3)
CATSDPGTGATDTQYF

SEQ ID NO: 199491 - protein, 18 aa, Homo sapiens
  CDR3 for alpha chain variable domain of TCR clone 99746 (TRAV8-4, TRAJ52)
CAVTRANAGGTSYGKLTF

SEQ ID NO: 199492 - protein, 20 aa, Homo sapiens
  CDR3 for beta chain variable domain of TCR clone 99746 (TRBV19, TRBJ2-1)
CASSIPRTVTSTRLNNEQFF

SEQ ID NO: 199493 - protein, 14 aa, Homo sapiens
  CDR3 for alpha chain variable domain of TCR clone 99747 (TRAV12-3, TRAJ30)
CAMSLLNRDDKIIF

SEQ ID NO: 199494 - protein, 11 aa, Homo sapiens
  CDR3 for beta chain variable domain of TCR clone 99747 (TRBV11-2, TRBJ2-2)
CSSLGGGELFF

SEQ ID NO: 199495 - protein, 12 aa, Homo sapiens
  CDR3 for alpha chain variable domain of TCR clone 99748 (TRAV13-1, TRAJ15)
CAASQAGTALIF

SEQ ID NO: 199496 - protein, 14 aa, Homo sapiens
  CDR3 for beta chain variable domain of TCR clone 99748 (TRBV19, TRBJ2-2)
CASSTRHRSGELFF

SEQ ID NO: 199497 - protein, 15 aa, Homo sapiens
  CDR3 for alpha chain variable domain of TCR clone 99749 (TRAV21, TRAJ53)
CATLNSGGSNYKLTF

SEQ ID NO: 199498 - protein, 19 aa, Homo sapiens
  CDR3 for beta chain variable domain of TCR clone 99749 (TRBV25-1, TRBJ2-2)
CAILVYQVDRGRKTGELFF

SEQ ID NO: 199499 - protein, 13 aa, Homo sapiens
  CDR3 for alpha chain variable domain of TCR clone 99750 (TRAV2, TRAJ29)
CAAGNSGNTPLIF

SEQ ID NO: 199500 - protein, 16 aa, Homo sapiens
  CDR3 for beta chain variable domain of TCR clone 99750 (TRBV7-9, TRBJ1-2)
CASSPGGGAINYGYTF

SEQ ID NO: 199501 - protein, 16 aa, Homo sapiens
  CDR3 for alpha chain variable domain of TCR clone 99751 (TRAV30, TRAJ24)
CGTGIVDADSWGKFKF

SEQ ID NO: 199502 - protein, 14 aa, Homo sapiens
  CDR3 for beta chain variable domain of TCR clone 99751 (TRBV12-5, TRBJ2-5)
CASGSRTHQETQYF

SEQ ID NO: 199503 - protein, 13 aa, Homo sapiens
  CDR3 for alpha chain variable domain of TCR clone 99752 (TRAV1-2, TRAJ9)
CAALNTGGFKTIF

SEQ ID NO: 199504 - protein, 15 aa, Homo sapiens
  CDR3 for beta chain variable domain of TCR clone 99752 (TRBV5-1, TRBJ2-7)
CASSLYPDGGYEQYF

SEQ ID NO: 199505 - protein, 14 aa, Homo sapiens
  CDR3 for alpha chain variable domain of TCR clone 99753 (TRAV12-2, TRAJ13)
CAVKKTWGYQKVTF

SEQ ID NO: 199506 - protein, 13 aa, Homo sapiens
  CDR3 for beta chain variable domain of TCR clone 99753 (TRBV7-9, TRBJ1-2)
CASSLKQNYGYTF

SEQ ID NO: 199507 - protein, 14 aa, Homo sapiens
  CDR3 for alpha chain variable domain of TCR clone 99754 (TRAV17, TRAJ16)
CATADFSDGQKLLL

SEQ ID NO: 199508 - protein, 15 aa, Homo sapiens
  CDR3 for beta chain variable domain of TCR clone 99754 (TRBV18, TRBJ2-1)
CASSPPSASYNEQFF

SEQ ID NO: 199509 - protein, 12 aa, Homo sapiens
  CDR3 for alpha chain variable domain of TCR clone 99755 (TRAV8-3, TRAJ26)
CAGDNYSQNFVF

SEQ ID NO: 199510 - protein, 15 aa, Homo sapiens
  CDR3 for beta chain variable domain of TCR clone 99755 (TRBV5-1, TRBJ2-3)
CASSVTSGSTDTQYF

SEQ ID NO: 199511 - protein, 16 aa, Homo sapiens
  CDR3 for alpha chain variable domain of TCR clone 99756 (TRAV26-1, TRAJ37)
CIVRGDGSGNTGKLIF

SEQ ID NO: 199512 - protein, 17 aa, Homo sapiens
  CDR3 for beta chain variable domain of TCR clone 99756 (TRBV4-1, TRBJ2-7)
CASSRDPLGVRGREQYF

SEQ ID NO: 199513 - protein, 11 aa, Homo sapiens
  CDR3 for alpha chain variable domain of TCR clone 99757 (TRAV25, TRAJ43)
CAGPRNNDMRF

SEQ ID NO: 199514 - protein, 15 aa, Homo sapiens
  CDR3 for beta chain variable domain of TCR clone 99757 (TRBV12-4, TRBJ2-6)
CASSLGTPGANVLTF

SEQ ID NO: 199515 - protein, 14 aa, Homo sapiens
  CDR3 for alpha chain variable domain of TCR clone 99758 (TRAV12-3, TRAJ42)
CAMNYGGSQGNLIF

SEQ ID NO: 199516 - protein, 15 aa, Homo sapiens
  CDR3 for beta chain variable domain of TCR clone 99758 (TRBV5-7, TRBJ1-5)
CSSSYGKLWDQPQHF

SEQ ID NO: 199517 - protein, 11 aa, Homo sapiens
  CDR3 for alpha chain variable domain of TCR clone 99759 (TRAV17, TRAJ12)
CYVRSSYKLIF

SEQ ID NO: 199518 - protein, 16 aa, Homo sapiens
  CDR3 for beta chain variable domain of TCR clone 99759 (TRBV28, TRBJ2-7)
CASSLFFETGGPEQYF

SEQ ID NO: 199519 - protein, 16 aa, Homo sapiens
  CDR3 for alpha chain variable domain of TCR clone 99760 (TRAV30, TRAJ24)
CGTEIMDADSWGKFQF

SEQ ID NO: 199520 - protein, 12 aa, Homo sapiens
  CDR3 for beta chain variable domain of TCR clone 99760 (TRBV7-8, TRBJ2-7)
CASSLGDREQYF

SEQ ID NO: 199521 - protein, 16 aa, Homo sapiens
  CDR3 for alpha chain variable domain of TCR clone 99761 (TRAV30, TRAJ24)
CGTEIVDADSWGKFQF

SEQ ID NO: 199522 - protein, 14 aa, Homo sapiens
  CDR3 for beta chain variable domain of TCR clone 99761 (TRBV7-8, TRBJ2-3)
CASSLEAGTDKQCF

SEQ ID NO: 199523 - protein, 21 aa, Homo sapiens
  CDR3 for alpha chain variable domain of TCR clone 99762 (TRAV41, TRAJ45)
TASHPRDSAGASGGGADGLTF

SEQ ID NO: 199524 - protein, 14 aa, Homo sapiens
  CDR3 for beta chain variable domain of TCR clone 99762 (TRBV18, TRBJ2-7)
CASSPRGGAYEQYF

SEQ ID NO: 199525 - protein, 12 aa, Homo sapiens
  CDR3 for alpha chain variable domain of TCR clone 99763 (TRAV17, TRAJ57)
CATDGGSEKLVF

SEQ ID NO: 199526 - protein, 13 aa, Homo sapiens
  CDR3 for beta chain variable domain of TCR clone 99763 (TRBV7-9, TRBJ2-7)
CASIFAGAYEQYF

SEQ ID NO: 199527 - protein, 15 aa, Homo sapiens
  CDR3 for alpha chain variable domain of TCR clone 99764 (TRAV23/DV6, TRAJ13)
CAAWPGGGGYQKVTF

SEQ ID NO: 199528 - protein, 15 aa, Homo sapiens
  CDR3 for beta chain variable domain of TCR clone 99764 (TRBV5-1, TRBJ2-1)
CASSPPRAPYNEQFF

SEQ ID NO: 199529 - protein, 16 aa, Homo sapiens
  CDR3 for alpha chain variable domain of TCR clone 99765 (TRAV8-4, TRAJ45)
CAVSAGGGGGADGLTF

SEQ ID NO: 199530 - protein, 14 aa, Homo sapiens
  CDR3 for beta chain variable domain of TCR clone 99765 (TRBV6-1, TRBJ1-3)
CASVQGGGGNTIYF

SEQ ID NO: 199531 - protein, 14 aa, Homo sapiens
  CDR3 for alpha chain variable domain of TCR clone 99766 (TRAV26-1, TRAJ34)
CIVRESYNTDKLIL

SEQ ID NO: 199532 - protein, 13 aa, Homo sapiens
  CDR3 for beta chain variable domain of TCR clone 99766 (TRBV19, TRBJ2-1)
CATSRGVYNEQFF

SEQ ID NO: 199533 - protein, 15 aa, Homo sapiens
  CDR3 for alpha chain variable domain of TCR clone 99767 (TRAV3, TRAJ22)
CAVRDRVGSARQLTF

SEQ ID NO: 199534 - protein, 13 aa, Homo sapiens
  CDR3 for beta chain variable domain of TCR clone 99767 (TRBV7-3, TRBJ2-1)
CASSPVAYNEQFF

SEQ ID NO: 199535 - protein, 15 aa, Homo sapiens
  CDR3 for alpha chain variable domain of TCR clone 99768 (TRAV38-1, TRAJ37)
CAFIFGSGNTGKLIF

SEQ ID NO: 199536 - protein, 16 aa, Homo sapiens
  CDR3 for beta chain variable domain of TCR clone 99768 (TRBV20-1, TRBJ1-2)
CSASMGQGVANYGYTF

SEQ ID NO: 199537 - protein, 14 aa, Homo sapiens
  CDR3 for alpha chain variable domain of TCR clone 99769 (TRAV26-1, TRAJ21)
CIVRVLGNFNKFYF

SEQ ID NO: 199538 - protein, 15 aa, Homo sapiens
  CDR3 for beta chain variable domain of TCR clone 99769 (TRBV7-2, TRBJ2-1)
CASSSGLAGGNEQFF

SEQ ID NO: 199539 - protein, 14 aa, Homo sapiens
  CDR3 for alpha chain variable domain of TCR clone 99770 (TRAV21, TRAJ42)
CAVLGGGSQGNLIF

SEQ ID NO: 199540 - protein, 15 aa, Homo sapiens
  CDR3 for beta chain variable domain of TCR clone 99770 (TRBV20-1, TRBJ2-2)
CSAIPGHSNTGELFF

SEQ ID NO: 199541 - protein, 14 aa, Homo sapiens
  CDR3 for alpha chain variable domain of TCR clone 99771 (TRAV12-1, TRAJ13)
CVVIDSGGYQEVTF

SEQ ID NO: 199542 - protein, 15 aa, Homo sapiens
  CDR3 for beta chain variable domain of TCR clone 99771 (TRBV9, TRBJ1-6)
CASSVAGTGDSPLHF

SEQ ID NO: 199543 - protein, 17 aa, Homo sapiens
  CDR3 for alpha chain variable domain of TCR clone 99772 (TRAV8-6, TRAJ8)
CAVKEGIENTGFQKLVF

SEQ ID NO: 199544 - protein, 12 aa, Homo sapiens
  CDR3 for beta chain variable domain of TCR clone 99772 (TRBV19, TRBJ1-6)
CASKDWPGGLFF

SEQ ID NO: 199545 - protein, 14 aa, Homo sapiens
  CDR3 for alpha chain variable domain of TCR clone 99773 (TRAV20, TRAJ20)
CAVRRGYNDYKLSF

SEQ ID NO: 199546 - protein, 13 aa, Homo sapiens
  CDR3 for beta chain variable domain of TCR clone 99773 (TRBV19, TRBJ2-5)
RASSETAPETQYF

SEQ ID NO: 199547 - protein, 13 aa, Homo sapiens
  CDR3 for alpha chain variable domain of TCR clone 99774 (TRAV23/DV6, TRAJ20)
CAAGGFNDYKLSF

SEQ ID NO: 199548 - protein, 14 aa, Homo sapiens
  CDR3 for beta chain variable domain of TCR clone 99774 (TRBV3-1, TRBJ2-7)
CASSQSGAHYEQYF

SEQ ID NO: 199549 - protein, 13 aa, Homo sapiens
  CDR3 for alpha chain variable domain of TCR clone 99775 (TRAV35, TRAJ42)
CAGFPGSQGNLIF

SEQ ID NO: 199550 - protein, 13 aa, Homo sapiens
  CDR3 for beta chain variable domain of TCR clone 99775 (TRBV29-1, TRBJ2-1)
CSVEGGRVNEQVF

SEQ ID NO: 199551 - protein, 15 aa, Homo sapiens
  CDR3 for alpha chain variable domain of TCR clone 99776 (TRAV3, TRAJ47)
CAVRDIGEYGNKLVF

SEQ ID NO: 199552 - protein, 14 aa, Homo sapiens
  CDR3 for beta chain variable domain of TCR clone 99776 (TRBV13, TRBJ2-5)
CASSLERVGETPYF

SEQ ID NO: 199553 - protein, 12 aa, Homo sapiens
  CDR3 for alpha chain variable domain of TCR clone 99777 (TRAV1-2, TRAJ29)
CAVLSGNTPLVF

SEQ ID NO: 199554 - protein, 14 aa, Homo sapiens
  CDR3 for beta chain variable domain of TCR clone 99777 (TRBV18, TRBJ2-5)
CASSPGVSQETQYF

SEQ ID NO: 199555 - protein, 13 aa, Homo sapiens
  CDR3 for alpha chain variable domain of TCR clone 99778 (TRAV3, TRAJ20)
CAVRSLNDYKLSF

SEQ ID NO: 199556 - protein, 13 aa, Homo sapiens
  CDR3 for beta chain variable domain of TCR clone 99778 (TRBV7-3, TRBJ1-1)
CASSQDWGAEVFF

SEQ ID NO: 199557 - protein, 14 aa, Homo sapiens
  CDR3 for alpha chain variable domain of TCR clone 99779 (TRAV38-1, TRAJ40)
CALRPTSGTYKYIF

SEQ ID NO: 199558 - protein, 15 aa, Homo sapiens
  CDR3 for beta chain variable domain of TCR clone 99779 (TRBV19, TRBJ2-1)
CASSIGLAGWDEQFF

SEQ ID NO: 199559 - protein, 13 aa, Homo sapiens
  CDR3 for alpha chain variable domain of TCR clone 99780 (TRAV13-1, TRAJ43)
CAASLSNNNDMRF

SEQ ID NO: 199560 - protein, 17 aa, Homo sapiens
  CDR3 for beta chain variable domain of TCR clone 99780 (TRBV13, TRBJ2-3)
CASSLSRVAGGGNTQYF

SEQ ID NO: 199561 - protein, 14 aa, Homo sapiens
  CDR3 for alpha chain variable domain of TCR clone 99781 (TRAV12-1, TRAJ12)
CVVTRMDSSYKLIF

SEQ ID NO: 199562 - protein, 14 aa, Homo sapiens
  CDR3 for beta chain variable domain of TCR clone 99781 (TRBV19, TRBJ2-1)
CASPTFVLSGEQFF

SEQ ID NO: 199563 - protein, 17 aa, Homo sapiens
  CDR3 for alpha chain variable domain of TCR clone 99782 (TRAV3, TRAJ6)
CAVRDGPRTGGSYIPTF

SEQ ID NO: 199564 - protein, 16 aa, Homo sapiens
  CDR3 for beta chain variable domain of TCR clone 99782 (TRBV7-8, TRBJ2-3)
CASSTEGQRETDTQYF

SEQ ID NO: 199565 - protein, 13 aa, Homo sapiens
  CDR3 for alpha chain variable domain of TCR clone 99783 (TRAV8-3, TRAJ28)
CAVGAVGSYQLTF

SEQ ID NO: 199566 - protein, 14 aa, Homo sapiens
  CDR3 for beta chain variable domain of TCR clone 99783 (TRBV11-2, TRBJ2-7)
CASSSTGEGYEQYF

SEQ ID NO: 199567 - protein, 15 aa, Homo sapiens
  CDR3 for alpha chain variable domain of TCR clone 99784 (TRAV3, TRAJ13)
CAVRDIAGGYQTVTF

SEQ ID NO: 199568 - protein, 13 aa, Homo sapiens
  CDR3 for beta chain variable domain of TCR clone 99784 (TRBV2, TRBJ2-2)
CASSKKNTGELFF

SEQ ID NO: 199569 - protein, 14 aa, Homo sapiens
  CDR3 for alpha chain variable domain of TCR clone 99785 (TRAV9-2, TRAJ39)
CALYIYNAGNMLTF

SEQ ID NO: 199570 - protein, 16 aa, Homo sapiens
  CDR3 for beta chain variable domain of TCR clone 99785 (TRBV29-1, TRBJ2-6)
CSVEDITYSGANDLTF

SEQ ID NO: 199571 - protein, 14 aa, Homo sapiens
  CDR3 for alpha chain variable domain of TCR clone 99786 (TRAV1-2, TRAJ16)
CAVNRFSDGQKLLF

SEQ ID NO: 199572 - protein, 11 aa, Homo sapiens
  CDR3 for beta chain variable domain of TCR clone 99786 (TRBV7-8, TRBJ2-7)
CARSLSLEQYF

SEQ ID NO: 199573 - protein, 14 aa, Homo sapiens
  CDR3 for alpha chain variable domain of TCR clone 99787 (TRAV1-2, TRAJ16)
CAVNRSSDGQKLLF

SEQ ID NO: 199574 - protein, 16 aa, Homo sapiens
  CDR3 for beta chain variable domain of TCR clone 99787 (TRBV7-3, TRBJ2-2)
CASSLKRGTLSGELFF

SEQ ID NO: 199575 - protein, 14 aa, Homo sapiens
  CDR3 for alpha chain variable domain of TCR clone 99788 (TRAV12-3, TRAJ10)
SHQPLTGGGNKLTF

SEQ ID NO: 199576 - protein, 13 aa, Homo sapiens
  CDR3 for beta chain variable domain of TCR clone 99788 (TRBV2, TRBJ1-6)
CADSGSYNSPLHF

SEQ ID NO: 199577 - protein, 12 aa, Homo sapiens
  CDR3 for alpha chain variable domain of TCR clone 99789 (TRAV27, TRAJ9)
CAGESGGFKTIF

SEQ ID NO: 199578 - protein, 14 aa, Homo sapiens
  CDR3 for beta chain variable domain of TCR clone 99789 (TRBV6-1, TRBJ2-1)
CASAQDGFYNEQFF

SEQ ID NO: 199579 - protein, 14 aa, Homo sapiens
  CDR3 for alpha chain variable domain of TCR clone 99790 (TRAV13-1, TRAJ44)
CAAKATGPASKLTF

SEQ ID NO: 199580 - protein, 16 aa, Homo sapiens
  CDR3 for beta chain variable domain of TCR clone 99790 (TRBV7-9, TRBJ2-6)
CASSLKGPLRANVLTF

SEQ ID NO: 199581 - protein, 13 aa, Homo sapiens
  CDR3 for alpha chain variable domain of TCR clone 99791 (TRAV13-2, TRAJ11)
CAENYSRYSTLTF

SEQ ID NO: 199582 - protein, 13 aa, Homo sapiens
  CDR3 for beta chain variable domain of TCR clone 99791 (TRBV12-4, TRBJ1-4)
CASAKGHNEKLFF

SEQ ID NO: 199583 - protein, 16 aa, Homo sapiens
  CDR3 for alpha chain variable domain of TCR clone 99792 (TRAV3, TRAJ37)
CAVRGKGSGNTGKLIF

SEQ ID NO: 199584 - protein, 13 aa, Homo sapiens
  CDR3 for beta chain variable domain of TCR clone 99792 (TRBV14, TRBJ2-7)
WASSQDRRYEQYF

SEQ ID NO: 199585 - protein, 15 aa, Homo sapiens
  CDR3 for alpha chain variable domain of TCR clone 99793 (TRAV12-2, TRAJ8)
CAVREENTGFQKLGF

SEQ ID NO: 199586 - protein, 15 aa, Homo sapiens
  CDR3 for beta chain variable domain of TCR clone 99793 (TRBV28, TRBJ2-4)
CAAGSGTLLMGIQYF

SEQ ID NO: 199587 - protein, 11 aa, Homo sapiens
  CDR3 for alpha chain variable domain of TCR clone 99794 (TRAV3, TRAJ17)
PRGAAGNKLTF

SEQ ID NO: 199588 - protein, 15 aa, Homo sapiens
  CDR3 for beta chain variable domain of TCR clone 99794 (TRBV27, TRBJ2-1)
CASSNGGGSSNEQFF

SEQ ID NO: 199589 - protein, 11 aa, Homo sapiens
  CDR3 for alpha chain variable domain of TCR clone 99795 (TRAV21, TRAJ34)
CAHYNTDKLIF

SEQ ID NO: 199590 - protein, 16 aa, Homo sapiens
  CDR3 for beta chain variable domain of TCR clone 99795 (TRBV4-2, TRBJ2-3)
CASSQELAGDTDTQYF

SEQ ID NO: 199591 - protein, 15 aa, Homo sapiens
  CDR3 for alpha chain variable domain of TCR clone 99796 (TRAV13-2, TRAJ45)
CAEHHSGGGADGLTF

SEQ ID NO: 199592 - protein, 13 aa, Homo sapiens
  CDR3 for beta chain variable domain of TCR clone 99796 (TRBV19, TRBJ2-7)
CASEGTTTYEQYF

SEQ ID NO: 199593 - protein, 15 aa, Homo sapiens
  CDR3 for alpha chain variable domain of TCR clone 99797 (TRAV26-1, TRAJ22)
CIVRVSFWFCKATDL

SEQ ID NO: 199594 - protein, 13 aa, Homo sapiens
  CDR3 for beta chain variable domain of TCR clone 99797 (TRBV7-9, TRBJ1-2)
CASSLKQNYVYTF

SEQ ID NO: 199595 - protein, 13 aa, Homo sapiens
  CDR3 for alpha chain variable domain of TCR clone 99798 (TRAV29/DV5, TRAJ49)
CAACTNTGNQFYF

SEQ ID NO: 199596 - protein, 13 aa, Homo sapiens
  CDR3 for beta chain variable domain of TCR clone 99798 (TRBV7-2, TRBJ1-4)
CASSLAGLEKLFF

SEQ ID NO: 199597 - protein, 14 aa, Homo sapiens
  CDR3 for alpha chain variable domain of TCR clone 99799 (TRAV1-2, TRAJ16)
CAVNRFSDGPKLLF

SEQ ID NO: 199598 - protein, 14 aa, Homo sapiens
  CDR3 for beta chain variable domain of TCR clone 99799 (TRBV7-2, TRBJ1-1)
CASSFLTGTTEAFF

SEQ ID NO: 199599 - protein, 12 aa, Homo sapiens
  CDR3 for alpha chain variable domain of TCR clone 99800 (TRAV12-3, TRAJ17)
CAMTLTGNKLTF

SEQ ID NO: 199600 - protein, 14 aa, Homo sapiens
  CDR3 for beta chain variable domain of TCR clone 99800 (TRBV4-2, TRBJ2-5)
CASSQDRGRETQYF

SEQ ID NO: 199601 - protein, 14 aa, Homo sapiens
  CDR3 for alpha chain variable domain of TCR clone 99801 (TRAV12-3, TRAJ54)
CAMSALQGAQKLVF

SEQ ID NO: 199602 - protein, 13 aa, Homo sapiens
  CDR3 for beta chain variable domain of TCR clone 99801 (TRBV19, TRBJ2-2)
CASSPLGIGELFF

SEQ ID NO: 199603 - protein, 18 aa, Homo sapiens
  CDR3 for alpha chain variable domain of TCR clone 99802 (TRAV13-1, TRAJ52)
CAASKRSAGGTSYGKLTF

SEQ ID NO: 199604 - protein, 17 aa, Homo sapiens
  CDR3 for beta chain variable domain of TCR clone 99802 (TRBV20-1, TRBJ2-2)
CSASGSGQGGLTGELFF

SEQ ID NO: 199605 - protein, 16 aa, Homo sapiens
  CDR3 for alpha chain variable domain of TCR clone 99803 (TRAV12-1, TRAJ13)
CVVNLEVSGGYQKVTF

SEQ ID NO: 199606 - protein, 16 aa, Homo sapiens
  CDR3 for beta chain variable domain of TCR clone 99803 (TRBV24-1, TRBJ2-6)
CATSGRRASGANVLTF

SEQ ID NO: 199607 - protein, 14 aa, Homo sapiens
  CDR3 for alpha chain variable domain of TCR clone 99804 (TRAV12-2, TRAJ13)
CAVQKTGGYQKVTF

SEQ ID NO: 199608 - protein, 13 aa, Homo sapiens
  CDR3 for beta chain variable domain of TCR clone 99804 (TRBV20-1, TRBJ1-1)
CSARGGGNTEAFF

SEQ ID NO: 199609 - protein, 12 aa, Homo sapiens
  CDR3 for alpha chain variable domain of TCR clone 99805 (TRAV24, TRAJ47)
CAFGEYGNKLVF

SEQ ID NO: 199610 - protein, 18 aa, Homo sapiens
  CDR3 for beta chain variable domain of TCR clone 99805 (TRBV5-1, TRBJ1-6)
CASSPGQTRIPYNSPLHF

SEQ ID NO: 199611 - protein, 22 aa, Homo sapiens
  CDR3 for alpha chain variable domain of TCR clone 99806 (TRAV4, )
CLVGPHNYDIQNPDPAVYQLRN

SEQ ID NO: 199612 - protein, 17 aa, Homo sapiens
  CDR3 for beta chain variable domain of TCR clone 99806 (TRBV24-1, TRBJ2-1)
CATSDVSTSGTYNEQFF

SEQ ID NO: 199613 - protein, 15 aa, Homo sapiens
  CDR3 for alpha chain variable domain of TCR clone 99807 (TRAV4, TRAJ39)
CLVGPNNNAGNMLTF

SEQ ID NO: 199614 - protein, 13 aa, Homo sapiens
  CDR3 for beta chain variable domain of TCR clone 99807 (TRBV11-2, TRBJ2-5)
CAISSTGEETQYF

SEQ ID NO: 199615 - protein, 15 aa, Homo sapiens
  CDR3 for alpha chain variable domain of TCR clone 99808 (TRAV16, TRAJ4)
CALEDPSGGYNKLIF

SEQ ID NO: 199616 - protein, 13 aa, Homo sapiens
  CDR3 for beta chain variable domain of TCR clone 99808 (TRBV7-3, TRBJ2-7)
CASSQAGGYEQYS

SEQ ID NO: 199617 - protein, 14 aa, Homo sapiens
  CDR3 for alpha chain variable domain of TCR clone 99809 (TRAV17, TRAJ22)
CATRYCWFCKATDL

SEQ ID NO: 199618 - protein, 14 aa, Homo sapiens
  CDR3 for beta chain variable domain of TCR clone 99809 (TRBV11-2, TRBJ2-3)
CASSRLARTDTQYF

SEQ ID NO: 199619 - protein, 15 aa, Homo sapiens
  CDR3 for alpha chain variable domain of TCR clone 99810 (TRAV2, TRAJ32)
CAVANYGGATNKLIF

SEQ ID NO: 199620 - protein, 15 aa, Homo sapiens
  CDR3 for beta chain variable domain of TCR clone 99810 (TRBV7-7, TRBJ2-5)
CASSQLERAEEAQYF

SEQ ID NO: 199621 - protein, 13 aa, Homo sapiens
  CDR3 for alpha chain variable domain of TCR clone 99811 (TRAV20, TRAJ48)
CAVQGVGNEKLTF

SEQ ID NO: 199622 - protein, 19 aa, Homo sapiens
  CDR3 for beta chain variable domain of TCR clone 99811 (TRBV2, TRBJ2-2)
CASRQPGLAGGGNTGELFF

SEQ ID NO: 199623 - protein, 12 aa, Homo sapiens
  CDR3 for alpha chain variable domain of TCR clone 99812 (TRAV12-1, TRAJ34)
CVVAGATDKLIF

SEQ ID NO: 199624 - protein, 20 aa, Homo sapiens
  CDR3 for beta chain variable domain of TCR clone 99812 (TRBV7-8, TRBJ2-2)
CASSHLFPGPTIHITGELFF

SEQ ID NO: 199625 - protein, 13 aa, Homo sapiens
  CDR3 for alpha chain variable domain of TCR clone 99813 (TRAV3, TRAJ27)
CAVRPLGAGKSTF

SEQ ID NO: 199626 - protein, 13 aa, Homo sapiens
  CDR3 for beta chain variable domain of TCR clone 99813 (TRBV7-9, TRBJ2-3)
CASSPGSTDRQYF

SEQ ID NO: 199627 - protein, 12 aa, Homo sapiens
  CDR3 for alpha chain variable domain of TCR clone 99814 (TRAV3, TRAJ27)
CAVRDRAGKSTF

SEQ ID NO: 199628 - protein, 13 aa, Homo sapiens
  CDR3 for beta chain variable domain of TCR clone 99814 (TRBV6-5, TRBJ2-5)
CASSPQGGETQYF

SEQ ID NO: 199629 - protein, 15 aa, Homo sapiens
  CDR3 for alpha chain variable domain of TCR clone 99815 (TRAV17, TRAJ54)
CATEKLGQGAQKLVF

SEQ ID NO: 199630 - protein, 16 aa, Homo sapiens
  CDR3 for beta chain variable domain of TCR clone 99815 (TRBV9, TRBJ1-2)
CASSVEEKVSPYGDTF

SEQ ID NO: 199631 - protein, 12 aa, Homo sapiens
  CDR3 for alpha chain variable domain of TCR clone 99816 (TRAV30, TRAJ43)
CGTEERGNNMRF

SEQ ID NO: 199632 - protein, 13 aa, Homo sapiens
  CDR3 for beta chain variable domain of TCR clone 99816 (TRBV27, TRBJ2-7)
CASSFSQGYEQYF

SEQ ID NO: 199633 - protein, 16 aa, Homo sapiens
  CDR3 for alpha chain variable domain of TCR clone 99817 (TRAV13-2, TRAJ53)
CAENANSGGSNYKLTF

SEQ ID NO: 199634 - protein, 15 aa, Homo sapiens
  CDR3 for beta chain variable domain of TCR clone 99817 (TRBV6-3, TRBJ2-7)
CASSPPGTVFYEQYF

SEQ ID NO: 199635 - protein, 12 aa, Homo sapiens
  CDR3 for alpha chain variable domain of TCR clone 99818 (TRAV30, TRAJ39)
CGRGNAGNMPTF

SEQ ID NO: 199636 - protein, 16 aa, Homo sapiens
  CDR3 for beta chain variable domain of TCR clone 99818 (TRBV4-2, TRBJ2-2)
CASSQDPSGREGELFF

SEQ ID NO: 199637 - protein, 13 aa, Homo sapiens
  CDR3 for alpha chain variable domain of TCR clone 99819 (TRAV13-1, TRAJ21)
CAASIYNFNKFYF

SEQ ID NO: 199638 - protein, 15 aa, Homo sapiens
  CDR3 for beta chain variable domain of TCR clone 99819 (TRBV19, TRBJ1-6)
CASSTQGAVGSPLHF

SEQ ID NO: 199639 - protein, 12 aa, Homo sapiens
  CDR3 for alpha chain variable domain of TCR clone 99820 (TRAV2, TRAJ9)
CAVGAGGFKTIF

SEQ ID NO: 199640 - protein, 13 aa, Homo sapiens
  CDR3 for beta chain variable domain of TCR clone 99820 (TRBV11-2, TRBJ1-6)
CASSLAGTSPLHF

SEQ ID NO: 199641 - protein, 14 aa, Homo sapiens
  CDR3 for alpha chain variable domain of TCR clone 99821 (TRAV1-2, TRAJ16)
CAVNRFSDGQKLLL

SEQ ID NO: 199642 - protein, 15 aa, Homo sapiens
  CDR3 for beta chain variable domain of TCR clone 99821 (TRBV7-9, TRBJ1-4)
CASSARTGGNEKLFF

SEQ ID NO: 199643 - protein, 15 aa, Homo sapiens
  CDR3 for alpha chain variable domain of TCR clone 99822 (TRAV17, TRAJ56)
CATEPFTGANSKLTF

SEQ ID NO: 199644 - protein, 15 aa, Homo sapiens
  CDR3 for beta chain variable domain of TCR clone 99822 (TRBV28, TRBJ1-5)
CASSRTGGYVQLQHF

SEQ ID NO: 199645 - protein, 16 aa, Homo sapiens
  CDR3 for alpha chain variable domain of TCR clone 99823 (TRAV12-3, TRAJ53)
CAMSPGCGGSNYKLTF

SEQ ID NO: 199646 - protein, 12 aa, Homo sapiens
  CDR3 for beta chain variable domain of TCR clone 99823 (TRBV7-8, TRBJ2-7)
CASSLGDREQYF

SEQ ID NO: 199647 - protein, 18 aa, Homo sapiens
  CDR3 for alpha chain variable domain of TCR clone 99824 (TRAV21, TRAJ52)
CAVRPSPAGGTSSGKLTF

SEQ ID NO: 199648 - protein, 15 aa, Homo sapiens
  CDR3 for beta chain variable domain of TCR clone 99824 (TRBV7-9, TRBJ2-7)
CASSSSGLAVYEQYF

SEQ ID NO: 199649 - protein, 12 aa, Homo sapiens
  CDR3 for alpha chain variable domain of TCR clone 99825 (TRAV13-2, TRAJ23)
CAERHRGGKLIF

SEQ ID NO: 199650 - protein, 16 aa, Homo sapiens
  CDR3 for beta chain variable domain of TCR clone 99825 (TRBV7-2, TRBJ1-3)
CASSRLEASSGNTIYF

SEQ ID NO: 199651 - protein, 16 aa, Homo sapiens
  CDR3 for alpha chain variable domain of TCR clone 99826 (TRAV14/DV4, TRAJ54)
CAMREGRIQGAQKLVF

SEQ ID NO: 199652 - protein, 17 aa, Homo sapiens
  CDR3 for beta chain variable domain of TCR clone 99826 (TRBV13, TRBJ2-3)
CASSLSRVAGGRNTQYF

SEQ ID NO: 199653 - protein, 14 aa, Homo sapiens
  CDR3 for alpha chain variable domain of TCR clone 99827 (TRAV17, TRAJ6)
CATDASGGSYIPTF

SEQ ID NO: 199654 - protein, 19 aa, Homo sapiens
  CDR3 for beta chain variable domain of TCR clone 99827 (TRBV4-3, TRBJ2-7)
CASSQECIGWQVTPYEQYF

SEQ ID NO: 199655 - protein, 19 aa, Homo sapiens
  CDR3 for alpha chain variable domain of TCR clone 99828 (TRAV38-1, TRAJ53)
CAFMKYGLESGGSNYKLTF

SEQ ID NO: 199656 - protein, 13 aa, Homo sapiens
  CDR3 for beta chain variable domain of TCR clone 99828 (TRBV19, TRBJ2-7)
CASSPRQSYEQYF

SEQ ID NO: 199657 - protein, 13 aa, Homo sapiens
  CDR3 for alpha chain variable domain of TCR clone 99829 (TRAV3, TRAJ21)
CAVREPDFNKFYF

SEQ ID NO: 199658 - protein, 16 aa, Homo sapiens
  CDR3 for beta chain variable domain of TCR clone 99829 (TRBV28, TRBJ1-4)
CASSPPYRGRSEKLFF

SEQ ID NO: 199659 - protein, 11 aa, Homo sapiens
  CDR3 for alpha chain variable domain of TCR clone 99830 (TRAV23/DV6, TRAJ58)
CAARLLRGETS

SEQ ID NO: 199660 - protein, 20 aa, Homo sapiens
  CDR3 for beta chain variable domain of TCR clone 99830 (TRBV7-8, TRBJ2-2)
CASSHLFPGPTIHITGELFF

SEQ ID NO: 199661 - protein, 15 aa, Homo sapiens
  CDR3 for alpha chain variable domain of TCR clone 99831 (TRAV4, TRAJ39)
CLVGPNNNAGNMLTF

SEQ ID NO: 199662 - protein, 15 aa, Homo sapiens
  CDR3 for beta chain variable domain of TCR clone 99831 (TRBV4-1, TRBJ1-4)
CASSDTGGTNEKLFF

SEQ ID NO: 199663 - protein, 13 aa, Homo sapiens
  CDR3 for alpha chain variable domain of TCR clone 99832 (TRAV27, TRAJ41)
CAGEGNSGYALNF

SEQ ID NO: 199664 - protein, 14 aa, Homo sapiens
  CDR3 for beta chain variable domain of TCR clone 99832 (TRBV7-2, TRBJ1-1)
CASGFLTGTTEAFF

SEQ ID NO: 199665 - protein, 14 aa, Homo sapiens
  CDR3 for alpha chain variable domain of TCR clone 99833 (TRAV12-1, TRAJ9)
CVVTGYTGGFKTIF

SEQ ID NO: 199666 - protein, 14 aa, Homo sapiens
  CDR3 for beta chain variable domain of TCR clone 99833 (TRBV7-9, TRBJ2-1)
CASSPRDSLYEQSF

SEQ ID NO: 199667 - protein, 14 aa, Homo sapiens
  CDR3 for alpha chain variable domain of TCR clone 99834 (TRAV1-2, TRAJ16)
CAVNRFSDGQKLLF

SEQ ID NO: 199668 - protein, 13 aa, Homo sapiens
  CDR3 for beta chain variable domain of TCR clone 99834 (TRBV29-1, TRBJ1-1)
CSVGDSRNTEAFC

SEQ ID NO: 199669 - protein, 10 aa, Homo sapiens
  CDR3 for alpha chain variable domain of TCR clone 99835 (TRAV23/DV6, TRAJ43)
CAAAVAALEQ

SEQ ID NO: 199670 - protein, 16 aa, Homo sapiens
  CDR3 for beta chain variable domain of TCR clone 99835 (TRBV18, TRBJ1-2)
CASSPPERVITYGYTF

SEQ ID NO: 199671 - protein, 12 aa, Homo sapiens
  CDR3 for alpha chain variable domain of TCR clone 99836 (TRAV12-3, TRAJ17)
CAMTLTGNKLTF

SEQ ID NO: 199672 - protein, 16 aa, Homo sapiens
  CDR3 for beta chain variable domain of TCR clone 99836 (TRBV4-2, TRBJ2-7)
CASSQEGLANSYEQYF

SEQ ID NO: 199673 - protein, 11 aa, Homo sapiens
  CDR3 for alpha chain variable domain of TCR clone 99837 (TRAV12-2, TRAJ39)
CAVNNMLTFGG

SEQ ID NO: 199674 - protein, 13 aa, Homo sapiens
  CDR3 for beta chain variable domain of TCR clone 99837 (TRBV4-1, TRBJ2-1)
CASSQAGGDEQFF

SEQ ID NO: 199675 - protein, 15 aa, Homo sapiens
  CDR3 for alpha chain variable domain of TCR clone 99838 (TRAV30, TRAJ57)
CGTAIPQGGSEKLVF

SEQ ID NO: 199676 - protein, 17 aa, Homo sapiens
  CDR3 for beta chain variable domain of TCR clone 99838 (TRBV13, TRBJ2-3)
CASSLSRVAGGRNTQYF

SEQ ID NO: 199677 - protein, 15 aa, Homo sapiens
  CDR3 for alpha chain variable domain of TCR clone 99839 (TRAV8-3, TRAJ44)
CAVGAGASTASKLTF

SEQ ID NO: 199678 - protein, 12 aa, Homo sapiens
  CDR3 for beta chain variable domain of TCR clone 99839 (TRBV7-8, TRBJ2-4)
CASSLGGNMQYF

SEQ ID NO: 199679 - protein, 12 aa, Homo sapiens
  CDR3 for alpha chain variable domain of TCR clone 99840 (TRAV21, TRAJ49)
CAVNDGGNQFSF

SEQ ID NO: 199680 - protein, 14 aa, Homo sapiens
  CDR3 for beta chain variable domain of TCR clone 99840 (TRBV18, TRBJ2-7)
CASSPRGGSYEQYF

SEQ ID NO: 199681 - protein, 14 aa, Homo sapiens
  CDR3 for alpha chain variable domain of TCR clone 99841 (TRAV13-2, TRAJ44)
CAEWRGGTASKLTV

SEQ ID NO: 199682 - protein, 13 aa, Homo sapiens
  CDR3 for beta chain variable domain of TCR clone 99841 (TRBV29-1, TRBJ2-1)
CSVDGGASDEQFF

SEQ ID NO: 199683 - protein, 15 aa, Homo sapiens
  CDR3 for alpha chain variable domain of TCR clone 99842 (TRAV38-1, TRAJ37)
CPFIHGSGNTGKLIF

SEQ ID NO: 199684 - protein, 14 aa, Homo sapiens
  CDR3 for beta chain variable domain of TCR clone 99842 (TRBV19, TRBJ2-1)
CASPTFVLSGEQFF

SEQ ID NO: 199685 - protein, 13 aa, Homo sapiens
  CDR3 for alpha chain variable domain of TCR clone 99843 (TRAV12-2, TRAJ10)
CAVPTGGGNKLTF

SEQ ID NO: 199686 - protein, 11 aa, Homo sapiens
  CDR3 for beta chain variable domain of TCR clone 99843 (TRBV6-1, TRBJ2-1)
CASISSNKQFF

SEQ ID NO: 199687 - protein, 12 aa, Homo sapiens
  CDR3 for alpha chain variable domain of TCR clone 99844 (TRAV21, TRAJ31)
CAVWGNNARLMF

SEQ ID NO: 199688 - protein, 16 aa, Homo sapiens
  CDR3 for beta chain variable domain of TCR clone 99844 (TRBV27, TRBJ2-5)
CASGYGPGGQKETQYF

SEQ ID NO: 199689 - protein, 11 aa, Homo sapiens
  CDR3 for alpha chain variable domain of TCR clone 99845 (TRAV12-1, TRAJ30)
CVVNGQDKIIF

SEQ ID NO: 199690 - protein, 12 aa, Homo sapiens
  CDR3 for beta chain variable domain of TCR clone 99845 (TRBV27, TRBJ2-2)
CARKLFTGELFF

SEQ ID NO: 199691 - protein, 16 aa, Homo sapiens
  CDR3 for alpha chain variable domain of TCR clone 99846 (TRAV3, TRAJ37)
CAVRVRGSGNTGKLIF

SEQ ID NO: 199692 - protein, 11 aa, Homo sapiens
  CDR3 for beta chain variable domain of TCR clone 99846 (TRBV11-2, TRBJ2-2)
CASSLPGDLFF

SEQ ID NO: 199693 - protein, 20 aa, Homo sapiens
  CDR3 for alpha chain variable domain of TCR clone 99847 (TRAV12-3, TRAJ41)
SLFIRDSQPSDSATPEALNF

SEQ ID NO: 199694 - protein, 15 aa, Homo sapiens
  CDR3 for beta chain variable domain of TCR clone 99847 (TRBV2, TRBJ2-7)
CASSEGLARSYEQYF

SEQ ID NO: 199695 - protein, 13 aa, Homo sapiens
  CDR3 for alpha chain variable domain of TCR clone 99848 (TRAV13-1, TRAJ39)
CSQYSNAGNMLTF

SEQ ID NO: 199696 - protein, 13 aa, Homo sapiens
  CDR3 for beta chain variable domain of TCR clone 99848 (TRBV20-1, TRBJ1-1)
CSARGGGNTEAFF

SEQ ID NO: 199697 - protein, 11 aa, Homo sapiens
  CDR3 for alpha chain variable domain of TCR clone 99849 (TRAV12-3, TRAJ27)
CAMANAGKSTF

SEQ ID NO: 199698 - protein, 13 aa, Homo sapiens
  CDR3 for beta chain variable domain of TCR clone 99849 (TRBV10-3, TRBJ2-7)
CASKLAVNYEQYF

SEQ ID NO: 199699 - protein, 18 aa, Homo sapiens
  CDR3 for alpha chain variable domain of TCR clone 99850 (TRAV21, TRAJ52)
CAVLPSPAGGTSYGKLTF

SEQ ID NO: 199700 - protein, 17 aa, Homo sapiens
  CDR3 for beta chain variable domain of TCR clone 99850 (TRBV13, TRBJ2-3)
CASSLSRVAGGRNTQYF

SEQ ID NO: 199701 - protein, 13 aa, Homo sapiens
  CDR3 for alpha chain variable domain of TCR clone 99851 (TRAV8-3, TRAJ4)
WVFYSGGYNKLLF

SEQ ID NO: 199702 - protein, 14 aa, Homo sapiens
  CDR3 for beta chain variable domain of TCR clone 99851 (TRBV7-9, TRBJ2-3)
CASSLEDGTDTQYF

SEQ ID NO: 199703 - protein, 15 aa, Homo sapiens
  CDR3 for alpha chain variable domain of TCR clone 99852 (TRAV23/DV6, TRAJ37)
CAAGEGSSSTGKLIF

SEQ ID NO: 199704 - protein, 17 aa, Homo sapiens
  CDR3 for beta chain variable domain of TCR clone 99852 (TRBV20-1, TRBJ2-7)
CSATRAGGVAGVEEQYF

SEQ ID NO: 199705 - protein, 15 aa, Homo sapiens
  CDR3 for alpha chain variable domain of TCR clone 99853 (TRAV2, TRAJ15)
CAVEDRGQAGTALIF

SEQ ID NO: 199706 - protein, 13 aa, Homo sapiens
  CDR3 for beta chain variable domain of TCR clone 99853 (TRBV10-2, TRBJ2-7)
CASGASGGYELYF

SEQ ID NO: 199707 - protein, 15 aa, Homo sapiens
  CDR3 for alpha chain variable domain of TCR clone 99854 (TRAV8-2, TRAJ40)
CVALGTTSGTYNYIF

SEQ ID NO: 199708 - protein, 16 aa, Homo sapiens
  CDR3 for beta chain variable domain of TCR clone 99854 (TRBV7-3, TRBJ2-1)
CASSLEGYRSYNEQFF

SEQ ID NO: 199709 - protein, 15 aa, Homo sapiens
  CDR3 for alpha chain variable domain of TCR clone 99855 (TRAV8-4, TRAJ3)
CAVTGENLVQQCFQD

SEQ ID NO: 199710 - protein, 14 aa, Homo sapiens
  CDR3 for beta chain variable domain of TCR clone 99855 (TRBV19, TRBJ2-1)
CASPTFVLSGEQFF

SEQ ID NO: 199711 - protein, 19 aa, Homo sapiens
  CDR3 for alpha chain variable domain of TCR clone 99856 (TRAV26-1, TRAJ42)
CVLLRRQTYYGGSQGNPIF

SEQ ID NO: 199712 - protein, 16 aa, Homo sapiens
  CDR3 for beta chain variable domain of TCR clone 99856 (TRBV7-3, TRBJ2-2)
CASSLKRGTLSGELFF

SEQ ID NO: 199713 - protein, 14 aa, Homo sapiens
  CDR3 for alpha chain variable domain of TCR clone 99857 (TRAV12-1, TRAJ38)
CVVNNAGNNRKLIW

SEQ ID NO: 199714 - protein, 16 aa, Homo sapiens
  CDR3 for beta chain variable domain of TCR clone 99857 (TRBV7-3, TRBJ2-2)
CASSLKRGTLSGELFF

SEQ ID NO: 199715 - protein, 14 aa, Homo sapiens
  CDR3 for alpha chain variable domain of TCR clone 99858 (TRAV12-1, TRAJ17)
CVVNYKAAGNKLTF

SEQ ID NO: 199716 - protein, 17 aa, Homo sapiens
  CDR3 for beta chain variable domain of TCR clone 99858 (TRBV20-1, TRBJ2-1)
CSASSWGLAGSYNEQFF

SEQ ID NO: 199717 - protein, 15 aa, Homo sapiens
  CDR3 for alpha chain variable domain of TCR clone 99859 (TRAV8-4, TRAJ12)
CAVSYRVDSSYKLIF

SEQ ID NO: 199718 - protein, 15 aa, Homo sapiens
  CDR3 for beta chain variable domain of TCR clone 99859 (TRBV11-3, TRBJ2-1)
CASSLAGQTYNEQFF

SEQ ID NO: 199719 - protein, 11 aa, Homo sapiens
  CDR3 for alpha chain variable domain of TCR clone 99860 (TRAV12-3, TRAJ49)
CAANTGNQFYF

SEQ ID NO: 199720 - protein, 16 aa, Homo sapiens
  CDR3 for beta chain variable domain of TCR clone 99860 (TRBV12-5, TRBJ2-5)
CASGPRTSGNQETQYF

SEQ ID NO: 199721 - protein, 11 aa, Homo sapiens
  CDR3 for alpha chain variable domain of TCR clone 99861 (TRAV1-1, TRAJ23)
CAVRQGGKLIF

SEQ ID NO: 199722 - protein, 14 aa, Homo sapiens
  CDR3 for beta chain variable domain of TCR clone 99861 (TRBV19, TRBJ2-1)
CASPTFVLGGEQFF

SEQ ID NO: 199723 - protein, 15 aa, Homo sapiens
  CDR3 for alpha chain variable domain of TCR clone 99862 (TRAV8-3, TRAJ45)
CASSYSGGGADGLTF

SEQ ID NO: 199724 - protein, 17 aa, Homo sapiens
  CDR3 for beta chain variable domain of TCR clone 99862 (TRBV7-8, TRBJ1-2)
CASSLRPLQGRLYGYTF

SEQ ID NO: 199725 - protein, 11 aa, Homo sapiens
  CDR3 for alpha chain variable domain of TCR clone 99863 (TRAV13-2, TRAJ23)
CAESPRGRLIF

SEQ ID NO: 199726 - protein, 15 aa, Homo sapiens
  CDR3 for beta chain variable domain of TCR clone 99863 (TRBV28, TRBJ2-1)
CASSGLAEVDNEQFF

SEQ ID NO: 199727 - protein, 11 aa, Homo sapiens
  CDR3 for alpha chain variable domain of TCR clone 99864 (TRAV3, TRAJ21)
CAVGNFNKFYF

SEQ ID NO: 199728 - protein, 13 aa, Homo sapiens
  CDR3 for beta chain variable domain of TCR clone 99864 (TRBV20-1, TRBJ2-2)
CSSSAAGTGELFF

SEQ ID NO: 199729 - protein, 13 aa, Homo sapiens
  CDR3 for alpha chain variable domain of TCR clone 99865 (TRAV35, TRAJ42)
CAGFPGSQGNLIF

SEQ ID NO: 199730 - protein, 15 aa, Homo sapiens
  CDR3 for beta chain variable domain of TCR clone 99865 (TRBV7-2, TRBJ2-1)
CASSSGLAGGNEQFF

SEQ ID NO: 199731 - protein, 14 aa, Homo sapiens
  CDR3 for alpha chain variable domain of TCR clone 99866 (TRAV17, TRAJ22)
CATSPSGSARQLTF

SEQ ID NO: 199732 - protein, 15 aa, Homo sapiens
  CDR3 for beta chain variable domain of TCR clone 99866 (TRBV2, TRBJ2-1)
CASSELAGSYNEQFF

SEQ ID NO: 199733 - protein, 15 aa, Homo sapiens
  CDR3 for alpha chain variable domain of TCR clone 99867 (TRAV3, TRAJ5)
CAVRDLDTGRRALTF

SEQ ID NO: 199734 - protein, 13 aa, Homo sapiens
  CDR3 for beta chain variable domain of TCR clone 99867 (TRBV2, TRBJ2-7)
CASSVGGSGEQYF

SEQ ID NO: 199735 - protein, 11 aa, Homo sapiens
  CDR3 for alpha chain variable domain of TCR clone 99868 (TRAV1-2, TRAJ20)
CAVSNDYKLSF

SEQ ID NO: 199736 - protein, 16 aa, Homo sapiens
  CDR3 for beta chain variable domain of TCR clone 99868 (TRBV7-3, TRBJ2-2)
CASSLKRGTLSGELFF

SEQ ID NO: 199737 - protein, 13 aa, Homo sapiens
  CDR3 for alpha chain variable domain of TCR clone 99869 (TRAV23/DV6, TRAJ15)
CAALQAGRNCSDL

SEQ ID NO: 199738 - protein, 14 aa, Homo sapiens
  CDR3 for beta chain variable domain of TCR clone 99869 (TRBV7-9, TRBJ1-2)
CASSRQGANYGYTF

SEQ ID NO: 199739 - protein, 14 aa, Homo sapiens
  CDR3 for alpha chain variable domain of TCR clone 99870 (TRAV3, TRAJ28)
CAVRRGAGSYQLTF

SEQ ID NO: 199740 - protein, 16 aa, Homo sapiens
  CDR3 for beta chain variable domain of TCR clone 99870 (TRBV4-1, TRBJ2-7)
CASSKEWTSGPLEQYF

SEQ ID NO: 199741 - protein, 13 aa, Homo sapiens
  CDR3 for alpha chain variable domain of TCR clone 99871 (TRAV12-3, TRAJ7)
CAMTPYGNNRLAF

SEQ ID NO: 199742 - protein, 16 aa, Homo sapiens
  CDR3 for beta chain variable domain of TCR clone 99871 (TRBV20-1, TRBJ1-4)
CSARPYGGELNEKMFF

SEQ ID NO: 199743 - protein, 14 aa, Homo sapiens
  CDR3 for alpha chain variable domain of TCR clone 99872 (TRAV17, TRAJ6)
CATDASGGSYIPTF

SEQ ID NO: 199744 - protein, 19 aa, Homo sapiens
  CDR3 for beta chain variable domain of TCR clone 99872 (TRBV4-3, TRBJ2-7)
CASSQEFIGWQVTPYELYF

SEQ ID NO: 199745 - protein, 14 aa, Homo sapiens
  CDR3 for alpha chain variable domain of TCR clone 99873 (TRAV13-2, TRAJ17)
CAENYKAAGNKLTF

SEQ ID NO: 199746 - protein, 11 aa, Homo sapiens
  CDR3 for beta chain variable domain of TCR clone 99873 (TRBV6-3, TRBJ2-3)
CATGQADTQYF

SEQ ID NO: 199747 - protein, 15 aa, Homo sapiens
  CDR3 for alpha chain variable domain of TCR clone 99874 (TRAV4, TRAJ10)
CLVGDGEGGGNKLTF

SEQ ID NO: 199748 - protein, 15 aa, Homo sapiens
  CDR3 for beta chain variable domain of TCR clone 99874 (TRBV7-2, TRBJ2-7)
CASSLTGQGTYEQYF

SEQ ID NO: 199749 - protein, 14 aa, Homo sapiens
  CDR3 for alpha chain variable domain of TCR clone 99875 (TRAV8-3, TRAJ9)
CAVVCNTGGFKTTF

SEQ ID NO: 199750 - protein, 14 aa, Homo sapiens
  CDR3 for beta chain variable domain of TCR clone 99875 (TRBV7-3, TRBJ2-2)
CASSSGGYTGELFF

SEQ ID NO: 199751 - protein, 12 aa, Homo sapiens
  CDR3 for alpha chain variable domain of TCR clone 99876 (TRAV26-1, TRAJ26)
CIVFIYGQNFVF

SEQ ID NO: 199752 - protein, 15 aa, Homo sapiens
  CDR3 for beta chain variable domain of TCR clone 99876 (TRBV12-4, TRBJ2-5)
CASSPPTGLQETQYF

SEQ ID NO: 199753 - protein, 17 aa, Homo sapiens
  CDR3 for alpha chain variable domain of TCR clone 99877 (TRAV13-1, TRAJ52)
CAAGRNAGGTSYGTLTF

SEQ ID NO: 199754 - protein, 15 aa, Homo sapiens
  CDR3 for beta chain variable domain of TCR clone 99877 (TRBV6-3, TRBJ2-7)
CASSSPGTVFYEQYF

SEQ ID NO: 199755 - protein, 18 aa, Homo sapiens
  CDR3 for alpha chain variable domain of TCR clone 99878 (TRAV21, TRAJ52)
CAVRPSPAGGTSYGELTF

SEQ ID NO: 199756 - protein, 19 aa, Homo sapiens
  CDR3 for beta chain variable domain of TCR clone 99878 (TRBV7-2, TRBJ2-3)
CASSFLSRNWGGGTDTQYF

SEQ ID NO: 199757 - protein, 15 aa, Homo sapiens
  CDR3 for alpha chain variable domain of TCR clone 99879 (TRAV1-2, TRAJ28)
CAVRYSGAGSYQLTF

SEQ ID NO: 199758 - protein, 13 aa, Homo sapiens
  CDR3 for beta chain variable domain of TCR clone 99879 (TRBV20-1, TRBJ2-7)
CSATHTSGYEQYF

SEQ ID NO: 199759 - protein, 14 aa, Homo sapiens
  CDR3 for alpha chain variable domain of TCR clone 99880 (TRAV27, TRAJ23)
CAGAFGNQGGKLIF

SEQ ID NO: 199760 - protein, 15 aa, Homo sapiens
  CDR3 for beta chain variable domain of TCR clone 99880 (TRBV7-3, TRBJ2-7)
CASSLTGQGRYEQYF

SEQ ID NO: 199761 - protein, 12 aa, Homo sapiens
  CDR3 for alpha chain variable domain of TCR clone 99881 (TRAV12-2, TRAJ10)
WGVTGGGNKLTF

SEQ ID NO: 199762 - protein, 15 aa, Homo sapiens
  CDR3 for beta chain variable domain of TCR clone 99881 (TRBV5-1, TRBJ2-3)
CASSVTSGSTDTQYF

SEQ ID NO: 199763 - protein, 16 aa, Homo sapiens
  CDR3 for alpha chain variable domain of TCR clone 99882 (TRAV30, TRAJ24)
CDTEIVDADSWGKFQF

SEQ ID NO: 199764 - protein, 14 aa, Homo sapiens
  CDR3 for beta chain variable domain of TCR clone 99882 (TRBV25-1, TRBJ1-1)
CASTHLGGNTEAFF

SEQ ID NO: 199765 - protein, 16 aa, Homo sapiens
  CDR3 for alpha chain variable domain of TCR clone 99883 (TRAV3, TRAJ18)
CAVRRPRGSTLGRLYF

SEQ ID NO: 199766 - protein, 15 aa, Homo sapiens
  CDR3 for beta chain variable domain of TCR clone 99883 (TRBV7-3, TRBJ2-2)
CQQLKAGDLVRGAFF

SEQ ID NO: 199767 - protein, 12 aa, Homo sapiens
  CDR3 for alpha chain variable domain of TCR clone 99884 (TRAV16, TRAJ56)
CAPTGANSKLTF

SEQ ID NO: 199768 - protein, 17 aa, Homo sapiens
  CDR3 for beta chain variable domain of TCR clone 99884 (TRBV27, TRBJ2-6)
CASSLTGFASGANVLIF

SEQ ID NO: 199769 - protein, 16 aa, Homo sapiens
  CDR3 for alpha chain variable domain of TCR clone 99885 (TRAV4, TRAJ22)
CLVGDLYSGSVRQLTF

SEQ ID NO: 199770 - protein, 16 aa, Homo sapiens
  CDR3 for beta chain variable domain of TCR clone 99885 (TRBV7-9, TRBJ2-1)
CASSDVAGCSYNEQFF

SEQ ID NO: 199771 - protein, 12 aa, Homo sapiens
  CDR3 for alpha chain variable domain of TCR clone 99886 (TRAV8-3, TRAJ26)
CAGDNYGQNFVF

SEQ ID NO: 199772 - protein, 15 aa, Homo sapiens
  CDR3 for beta chain variable domain of TCR clone 99886 (TRBV2, TRBJ2-1)
CASSELAGSYNEQFF

SEQ ID NO: 199773 - protein, 13 aa, Homo sapiens
  CDR3 for alpha chain variable domain of TCR clone 99887 (TRAV27, TRAJ45)
CRISGGGADGLTF

SEQ ID NO: 199774 - protein, 17 aa, Homo sapiens
  CDR3 for beta chain variable domain of TCR clone 99887 (TRBV11-2, TRBJ2-1)
CASSLYPPGVEYNEQFF

SEQ ID NO: 199775 - protein, 15 aa, Homo sapiens
  CDR3 for alpha chain variable domain of TCR clone 99888 (TRAV21, TRAJ24)
CAARSSTDSWGKLQF

SEQ ID NO: 199776 - protein, 13 aa, Homo sapiens
  CDR3 for beta chain variable domain of TCR clone 99888 (TRBV11-2, TRBJ2-5)
CASSSTGEETQYC

SEQ ID NO: 199777 - protein, 15 aa, Homo sapiens
  CDR3 for alpha chain variable domain of TCR clone 99889 (TRAV3, TRAJ5)
CAVRDRKTGRRVLTF

SEQ ID NO: 199778 - protein, 15 aa, Homo sapiens
  CDR3 for beta chain variable domain of TCR clone 99889 (TRBV7-8, TRBJ2-1)
CASSLADSLYNEQFF

SEQ ID NO: 199779 - protein, 18 aa, Homo sapiens
  CDR3 for alpha chain variable domain of TCR clone 99890 (TRAV1-1, TRAJ12)
CLLLLRCERGDSSYKLIF

SEQ ID NO: 199780 - protein, 15 aa, Homo sapiens
  CDR3 for beta chain variable domain of TCR clone 99890 (TRBV18, TRBJ2-5)
CASADRGPRQETQYF

SEQ ID NO: 199781 - protein, 14 aa, Homo sapiens
  CDR3 for alpha chain variable domain of TCR clone 99891 (TRAV13-1, TRAJ44)
CAAKATGTASKPTF

SEQ ID NO: 199782 - protein, 16 aa, Homo sapiens
  CDR3 for beta chain variable domain of TCR clone 99891 (TRBV7-9, TRBJ2-6)
CASSLKGPLRANVLTF

SEQ ID NO: 199783 - protein, 16 aa, Homo sapiens
  CDR3 for alpha chain variable domain of TCR clone 99892 (TRAV30, TRAJ24)
CGTEIVGADSWGKFQF

SEQ ID NO: 199784 - protein, 14 aa, Homo sapiens
  CDR3 for beta chain variable domain of TCR clone 99892 (TRBV12-5, TRBJ2-5)
CASGSRTQQETQYF

SEQ ID NO: 199785 - protein, 13 aa, Homo sapiens
  CDR3 for alpha chain variable domain of TCR clone 99893 (TRAV26-2, TRAJ43)
CILRAVNNNDMRF

SEQ ID NO: 199786 - protein, 17 aa, Homo sapiens
  CDR3 for beta chain variable domain of TCR clone 99893 (TRBV11-2, TRBJ2-1)
CASSLYPPGVEYNEQFF

SEQ ID NO: 199787 - protein, 17 aa, Homo sapiens
  CDR3 for alpha chain variable domain of TCR clone 99894 (TRAV17, TRAJ28)
CVTDPRRGGAGSYQLTF

SEQ ID NO: 199788 - protein, 16 aa, Homo sapiens
  CDR3 for beta chain variable domain of TCR clone 99894 (TRBV25-1, TRBJ1-1)
CASSGDRDRGRIEAFF

SEQ ID NO: 199789 - protein, 14 aa, Homo sapiens
  CDR3 for alpha chain variable domain of TCR clone 99895 (TRAV12-3, TRAJ57)
CARALEGGSEKLVF

SEQ ID NO: 199790 - protein, 13 aa, Homo sapiens
  CDR3 for beta chain variable domain of TCR clone 99895 (TRBV7-3, TRBJ1-1)
CASSQDWGAEAFF

SEQ ID NO: 199791 - protein, 12 aa, Homo sapiens
  CDR3 for alpha chain variable domain of TCR clone 99896 (TRAV16, TRAJ12)
CAHGDSSYKLIF

SEQ ID NO: 199792 - protein, 12 aa, Homo sapiens
  CDR3 for beta chain variable domain of TCR clone 99896 (TRBV28, TRBJ2-1)
YASSRLVGEQFF

SEQ ID NO: 199793 - protein, 14 aa, Homo sapiens
  CDR3 for alpha chain variable domain of TCR clone 99897 (TRAV1-2, TRAJ16)
CAVNRFSDGQKPLF

SEQ ID NO: 199794 - protein, 13 aa, Homo sapiens
  CDR3 for beta chain variable domain of TCR clone 99897 (TRBV7-9, TRBJ1-2)
CASSLKQNYGYTF

SEQ ID NO: 199795 - protein, 13 aa, Homo sapiens
  CDR3 for alpha chain variable domain of TCR clone 99898 (TRAV8-6, TRAJ21)
CAVSPSSLDKFYF

SEQ ID NO: 199796 - protein, 18 aa, Homo sapiens
  CDR3 for beta chain variable domain of TCR clone 99898 (TRBV11-2, TRBJ2-3)
CASSLGGASRGAPNTQYF

SEQ ID NO: 199797 - protein, 14 aa, Homo sapiens
  CDR3 for alpha chain variable domain of TCR clone 99899 (TRAV17, TRAJ16)
CATADFSDGQKLLF

SEQ ID NO: 199798 - protein, 11 aa, Homo sapiens
  CDR3 for beta chain variable domain of TCR clone 99899 (TRBV12-4, TRBJ2-3)
CASTATDTQYF

SEQ ID NO: 199799 - protein, 13 aa, Homo sapiens
  CDR3 for alpha chain variable domain of TCR clone 99900 (TRAV8-4, TRAJ48)
CAVSLFGNEKLTF

SEQ ID NO: 199800 - protein, 15 aa, Homo sapiens
  CDR3 for beta chain variable domain of TCR clone 99900 (TRBV20-1, TRBJ2-7)
CSARKGLAESYEQCF

SEQ ID NO: 199801 - protein, 16 aa, Homo sapiens
  CDR3 for alpha chain variable domain of TCR clone 99901 (TRAV3, TRAJ42)
CAVRDIEGGSQGNLIL

SEQ ID NO: 199802 - protein, 15 aa, Homo sapiens
  CDR3 for beta chain variable domain of TCR clone 99901 (TRBV9, TRBJ2-2)
CASSDFAGASGELFF

SEQ ID NO: 199803 - protein, 14 aa, Homo sapiens
  CDR3 for alpha chain variable domain of TCR clone 99902 (TRAV1-2, TRAJ16)
CAVNRFSDGQKLPF

SEQ ID NO: 199804 - protein, 12 aa, Homo sapiens
  CDR3 for beta chain variable domain of TCR clone 99902 (TRBV24-1, TRBJ1-1)
CATLYPDTEAFF

SEQ ID NO: 199805 - protein, 14 aa, Homo sapiens
  CDR3 for alpha chain variable domain of TCR clone 99903 (TRAV12-2, TRAJ13)
CAVKKTGGYREVTF

SEQ ID NO: 199806 - protein, 17 aa, Homo sapiens
  CDR3 for beta chain variable domain of TCR clone 99903 (TRBV20-1, TRBJ2-2)
CSASGSGQGGLTGELFF

SEQ ID NO: 199807 - protein, 12 aa, Homo sapiens
  CDR3 for alpha chain variable domain of TCR clone 99904 (TRAV1-1, TRAJ39)
CAVPVVGNMLTF

SEQ ID NO: 199808 - protein, 15 aa, Homo sapiens
  CDR3 for beta chain variable domain of TCR clone 99904 (TRBV19, TRBJ1-6)
CASSTQGAAGSPLHF

SEQ ID NO: 199809 - protein, 18 aa, Homo sapiens
  CDR3 for alpha chain variable domain of TCR clone 99905 (TRAV3, TRAJ17)
CAVRARGGGRSCRQQANF

SEQ ID NO: 199810 - protein, 14 aa, Homo sapiens
  CDR3 for beta chain variable domain of TCR clone 99905 (TRBV4-1, TRBJ2-2)
CASSQAVNTGELFF

SEQ ID NO: 199811 - protein, 14 aa, Homo sapiens
  CDR3 for alpha chain variable domain of TCR clone 99906 (TRAV12-2, TRAJ40)
CAVKIPSGTYKHIF

SEQ ID NO: 199812 - protein, 15 aa, Homo sapiens
  CDR3 for beta chain variable domain of TCR clone 99906 (TRBV11-3, TRBJ2-3)
CASLKDGREGDTQYF

SEQ ID NO: 199813 - protein, 12 aa, Homo sapiens
  CDR3 for alpha chain variable domain of TCR clone 99907 (TRAV12-3, TRAJ20)
CAMVRGDYKLRF

SEQ ID NO: 199814 - protein, 12 aa, Homo sapiens
  CDR3 for beta chain variable domain of TCR clone 99907 (TRBV6-1, TRBJ2-7)
CASSDYSYEQYF

SEQ ID NO: 199815 - protein, 13 aa, Homo sapiens
  CDR3 for alpha chain variable domain of TCR clone 99908 (TRAV12-2, TRAJ47)
CAVLMEYGNKLVF

SEQ ID NO: 199816 - protein, 14 aa, Homo sapiens
  CDR3 for beta chain variable domain of TCR clone 99908 (TRBV4-1, TRBJ1-5)
CASREGPTNQPQHF

SEQ ID NO: 199817 - protein, 13 aa, Homo sapiens
  CDR3 for alpha chain variable domain of TCR clone 99909 (TRAV22, TRAJ29)
CAVGGSGNTPLVF

SEQ ID NO: 199818 - protein, 15 aa, Homo sapiens
  CDR3 for beta chain variable domain of TCR clone 99909 (TRBV19, TRBJ2-7)
CASSFNSGGVWEQYF

SEQ ID NO: 199819 - protein, 12 aa, Homo sapiens
  CDR3 for alpha chain variable domain of TCR clone 99910 (TRAV16, TRAJ10)
CSRTGGGNKLTF

SEQ ID NO: 199820 - protein, 11 aa, Homo sapiens
  CDR3 for beta chain variable domain of TCR clone 99910 (TRBV7-2, TRBJ2-7)
CASSSGLWQYF

SEQ ID NO: 199821 - protein, 14 aa, Homo sapiens
  CDR3 for alpha chain variable domain of TCR clone 99911 (TRAV12-3, TRAJ10)
SHLPLTGGGNKLTF

SEQ ID NO: 199822 - protein, 17 aa, Homo sapiens
  CDR3 for beta chain variable domain of TCR clone 99911 (TRBV20-1, TRBJ1-6)
CSARGGYTFSYNSPLHF

SEQ ID NO: 199823 - protein, 17 aa, Homo sapiens
  CDR3 for alpha chain variable domain of TCR clone 99912 (TRAV3, TRAJ42)
CAVRDRDYGVSQGNLIF

SEQ ID NO: 199824 - protein, 20 aa, Homo sapiens
  CDR3 for beta chain variable domain of TCR clone 99912 (TRBV28, TRBJ2-1)
CASTPIGRSPGLAGGNEQFF

SEQ ID NO: 199825 - protein, 16 aa, Homo sapiens
  CDR3 for alpha chain variable domain of TCR clone 99913 (TRAV27, TRAJ45)
CPPRGRRGGGADGLTF

SEQ ID NO: 199826 - protein, 12 aa, Homo sapiens
  CDR3 for beta chain variable domain of TCR clone 99913 (TRBV5-5, TRBJ2-5)
CASSYFGETQYF

SEQ ID NO: 199827 - protein, 18 aa, Homo sapiens
  CDR3 for alpha chain variable domain of TCR clone 99914 (TRAV26-2, TRAJ45)
CILRLWGYSGGGADGLTF

SEQ ID NO: 199828 - protein, 17 aa, Homo sapiens
  CDR3 for beta chain variable domain of TCR clone 99914 (TRBV28, TRBJ2-3)
CASSPPPAGGRVDTQYF

SEQ ID NO: 199829 - protein, 11 aa, Homo sapiens
  CDR3 for alpha chain variable domain of TCR clone 99915 (TRAV12-2, TRAJ31)
CAILNNARLMF

SEQ ID NO: 199830 - protein, 16 aa, Homo sapiens
  CDR3 for beta chain variable domain of TCR clone 99915 (TRBV13, TRBJ2-2)
CASSPRTGEHTGELFF

SEQ ID NO: 199831 - protein, 15 aa, Homo sapiens
  CDR3 for alpha chain variable domain of TCR clone 99916 (TRAV17, TRAJ16)
CATALRFSDGQKLLF

SEQ ID NO: 199832 - protein, 14 aa, Homo sapiens
  CDR3 for beta chain variable domain of TCR clone 99916 (TRBV7-7, TRBJ2-7)
CASSPGGPTYEQYF

SEQ ID NO: 199833 - protein, 14 aa, Homo sapiens
  CDR3 for alpha chain variable domain of TCR clone 99917 (TRAV34, TRAJ44)
CGADGTGTASKLTF

SEQ ID NO: 199834 - protein, 17 aa, Homo sapiens
  CDR3 for beta chain variable domain of TCR clone 99917 (TRBV7-3, TRBJ2-3)
RASSLMKRMRGADTQYF

SEQ ID NO: 199835 - protein, 13 aa, Homo sapiens
  CDR3 for alpha chain variable domain of TCR clone 99918 (TRAV23/DV6, TRAJ21)
CAASREQLQKILL

SEQ ID NO: 199836 - protein, 16 aa, Homo sapiens
  CDR3 for beta chain variable domain of TCR clone 99918 (TRBV20-1, TRBJ2-3)
CSAVRDRGPIADTQYF

SEQ ID NO: 199837 - protein, 12 aa, Homo sapiens
  CDR3 for alpha chain variable domain of TCR clone 99919 (TRAV1-2, TRAJ33)
CAALDSNYQLIW

SEQ ID NO: 199838 - protein, 13 aa, Homo sapiens
  CDR3 for beta chain variable domain of TCR clone 99919 (TRBV19, TRBJ2-7)
CASREAGGSEQYF

SEQ ID NO: 199839 - protein, 15 aa, Homo sapiens
  CDR3 for alpha chain variable domain of TCR clone 99920 (TRAV25, TRAJ53)
CAATGGGGSNYKLTF

SEQ ID NO: 199840 - protein, 16 aa, Homo sapiens
  CDR3 for beta chain variable domain of TCR clone 99920 (TRBV10-3, TRBJ2-1)
CAISGVGDGGGGEQFF

SEQ ID NO: 199841 - protein, 16 aa, Homo sapiens
  CDR3 for alpha chain variable domain of TCR clone 99921 (TRAV27, TRAJ13)
CAGAKSDSGGYQKVTF

SEQ ID NO: 199842 - protein, 15 aa, Homo sapiens
  CDR3 for beta chain variable domain of TCR clone 99921 (TRBV29-1, TRBJ2-1)
CSVGRHALFHNEQFF

SEQ ID NO: 199843 - protein, 10 aa, Homo sapiens
  CDR3 for alpha chain variable domain of TCR clone 99922 (TRAV35, TRAJ30)
LPGGDDKIIF

SEQ ID NO: 199844 - protein, 14 aa, Homo sapiens
  CDR3 for beta chain variable domain of TCR clone 99922 (TRBV7-6, TRBJ2-1)
CASSLGGGADEQFF

SEQ ID NO: 199845 - protein, 16 aa, Homo sapiens
  CDR3 for alpha chain variable domain of TCR clone 99923 (TRAV3, TRAJ18)
CAVRDGRGSTLGRLYF

SEQ ID NO: 199846 - protein, 15 aa, Homo sapiens
  CDR3 for beta chain variable domain of TCR clone 99923 (TRBV7-9, TRBJ1-6)
CAISSPGRGNSPLHF

SEQ ID NO: 199847 - protein, 13 aa, Homo sapiens
  CDR3 for alpha chain variable domain of TCR clone 99924 (TRAV12-1, TRAJ17)
CVVSKAAGNKLTL

SEQ ID NO: 199848 - protein, 17 aa, Homo sapiens
  CDR3 for beta chain variable domain of TCR clone 99924 (TRBV4-1, TRBJ2-5)
CASSQDPSGGPQETQYF

SEQ ID NO: 199849 - protein, 11 aa, Homo sapiens
  CDR3 for alpha chain variable domain of TCR clone 99925 (TRAV12-3, TRAJ43)
CAMSVSNDMRF

SEQ ID NO: 199850 - protein, 17 aa, Homo sapiens
  CDR3 for beta chain variable domain of TCR clone 99925 (TRBV28, TRBJ2-5)
CASSRQGGLAGAETQYF

SEQ ID NO: 199851 - protein, 14 aa, Homo sapiens
  CDR3 for alpha chain variable domain of TCR clone 99926 (TRAV17, TRAJ54)
CATDANQGAQKLVF

SEQ ID NO: 199852 - protein, 12 aa, Homo sapiens
  CDR3 for beta chain variable domain of TCR clone 99926 (TRBV7-9, TRBJ2-7)
CASSVKREEQYF

SEQ ID NO: 199853 - protein, 14 aa, Homo sapiens
  CDR3 for alpha chain variable domain of TCR clone 99927 (TRAV23/DV6, TRAJ8)
CAASKSTGFQKLVF

SEQ ID NO: 199854 - protein, 16 aa, Homo sapiens
  CDR3 for beta chain variable domain of TCR clone 99927 (TRBV4-1, TRBJ2-6)
CASSQVGDPEANVLTF

SEQ ID NO: 199855 - protein, 13 aa, Homo sapiens
  CDR3 for alpha chain variable domain of TCR clone 99928 (TRAV36/DV7, TRAJ49)
CAVEANTGNQFYF

SEQ ID NO: 199856 - protein, 13 aa, Homo sapiens
  CDR3 for beta chain variable domain of TCR clone 99928 (TRBV10-3, TRBJ2-7)
CASKLAANYEQYF

SEQ ID NO: 199857 - protein, 15 aa, Homo sapiens
  CDR3 for alpha chain variable domain of TCR clone 99929 (TRAV20, TRAJ50)
CAVRQMKTSYDKGIF

SEQ ID NO: 199858 - protein, 17 aa, Homo sapiens
  CDR3 for beta chain variable domain of TCR clone 99929 (TRBV28, TRBJ2-7)
CASSPLHRASGVYEQYF

SEQ ID NO: 199859 - protein, 16 aa, Homo sapiens
  CDR3 for alpha chain variable domain of TCR clone 99930 (TRAV8-2, TRAJ50)
CVVSDHMETSYDKVIF

SEQ ID NO: 199860 - protein, 15 aa, Homo sapiens
  CDR3 for beta chain variable domain of TCR clone 99930 (TRBV7-2, TRBJ2-1)
CASSFQADEYNEQFF

SEQ ID NO: 199861 - protein, 17 aa, Homo sapiens
  CDR3 for alpha chain variable domain of TCR clone 99931 (TRAV27, TRAJ26)
CAGARAPLDNYGQHFVF

SEQ ID NO: 199862 - protein, 15 aa, Homo sapiens
  CDR3 for beta chain variable domain of TCR clone 99931 (TRBV11-2, TRBJ2-5)
CASSPRSGGLETQYF

SEQ ID NO: 199863 - protein, 12 aa, Homo sapiens
  CDR3 for alpha chain variable domain of TCR clone 99932 (TRAV8-3, TRAJ26)
CAGDNYGQNFVF

SEQ ID NO: 199864 - protein, 15 aa, Homo sapiens
  CDR3 for beta chain variable domain of TCR clone 99932 (TRBV9, TRBJ2-1)
CTSSLAGSSYNEQFF

SEQ ID NO: 199865 - protein, 16 aa, Homo sapiens
  CDR3 for alpha chain variable domain of TCR clone 99933 (TRAV3, TRAJ21)
CAVRDRSASTNFTLDL

SEQ ID NO: 199866 - protein, 16 aa, Homo sapiens
  CDR3 for beta chain variable domain of TCR clone 99933 (TRBV7-2, TRBJ2-5)
CASSLESAGGREAQYF

SEQ ID NO: 199867 - protein, 14 aa, Homo sapiens
  CDR3 for alpha chain variable domain of TCR clone 99934 (TRAV16, TRAJ15)
FALSFNQAGTALIF

SEQ ID NO: 199868 - protein, 16 aa, Homo sapiens
  CDR3 for beta chain variable domain of TCR clone 99934 (TRBV9, TRBJ2-7)
CASSAGPDRSPYEQYF

SEQ ID NO: 199869 - protein, 14 aa, Homo sapiens
  CDR3 for alpha chain variable domain of TCR clone 99935 (TRAV12-2, TRAJ13)
CAVKKTGGYQKVTF

SEQ ID NO: 199870 - protein, 12 aa, Homo sapiens
  CDR3 for beta chain variable domain of TCR clone 99935 (TRBV12-4, TRBJ1-2)
CASGFIWLHLRF

SEQ ID NO: 199871 - protein, 14 aa, Homo sapiens
  CDR3 for alpha chain variable domain of TCR clone 99936 (TRAV23/DV6, TRAJ22)
CAASVSGSARQLTF

SEQ ID NO: 199872 - protein, 13 aa, Homo sapiens
  CDR3 for beta chain variable domain of TCR clone 99936 (TRBV12-4, TRBJ2-7)
CASSPTETYEQYF

SEQ ID NO: 199873 - protein, 14 aa, Homo sapiens
  CDR3 for alpha chain variable domain of TCR clone 99937 (TRAV8-3, TRAJ4)
CAVGASGGYNQLIF

SEQ ID NO: 199874 - protein, 16 aa, Homo sapiens
  CDR3 for beta chain variable domain of TCR clone 99937 (TRBV4-3, TRBJ2-2)
CASSHLQGSGTGELFF

SEQ ID NO: 199875 - protein, 10 aa, Homo sapiens
  CDR3 for alpha chain variable domain of TCR clone 99938 (TRAV23/DV6, TRAJ57)
CSASSTLSQG

SEQ ID NO: 199876 - protein, 14 aa, Homo sapiens
  CDR3 for beta chain variable domain of TCR clone 99938 (TRBV20-1, TRBJ2-7)
CSAKRGRSSYEQYF

SEQ ID NO: 199877 - protein, 11 aa, Homo sapiens
  CDR3 for alpha chain variable domain of TCR clone 99939 (TRAV21, TRAJ49)
CAVITGNQFYF

SEQ ID NO: 199878 - protein, 14 aa, Homo sapiens
  CDR3 for beta chain variable domain of TCR clone 99939 (TRBV19, TRBJ2-1)
CASPTFVLSGEQFF

SEQ ID NO: 199879 - protein, 14 aa, Homo sapiens
  CDR3 for alpha chain variable domain of TCR clone 99940 (TRAV1-2, TRAJ24)
CAVLTTDSWGKFQF

SEQ ID NO: 199880 - protein, 14 aa, Homo sapiens
  CDR3 for beta chain variable domain of TCR clone 99940 (TRBV7-2, TRBJ1-1)
CASSFLTGTTEAFF

SEQ ID NO: 199881 - protein, 15 aa, Homo sapiens
  CDR3 for alpha chain variable domain of TCR clone 99941 (TRAV17, TRAJ52)
CATDAGGTSYGKLTF

SEQ ID NO: 199882 - protein, 14 aa, Homo sapiens
  CDR3 for beta chain variable domain of TCR clone 99941 (TRBV28, TRBJ1-5)
CASSLGVLVKPQHF

SEQ ID NO: 199883 - protein, 13 aa, Homo sapiens
  CDR3 for alpha chain variable domain of TCR clone 99942 (TRAV12-2, TRAJ50)
CAVIVTSYDKVIF

SEQ ID NO: 199884 - protein, 15 aa, Homo sapiens
  CDR3 for beta chain variable domain of TCR clone 99942 (TRBV11-2, TRBJ2-1)
CASSKNRGLIYEQFF

SEQ ID NO: 199885 - protein, 10 aa, Homo sapiens
  CDR3 for alpha chain variable domain of TCR clone 99943 (TRAV21, TRAJ31)
CAVDNARLMF

SEQ ID NO: 199886 - protein, 14 aa, Homo sapiens
  CDR3 for beta chain variable domain of TCR clone 99943 (TRBV7-2, TRBJ2-7)
CASSPKTSFYEQYF

SEQ ID NO: 199887 - protein, 14 aa, Homo sapiens
  CDR3 for alpha chain variable domain of TCR clone 99944 (TRAV12-2, TRAJ40)
CAVKIPSGTYKYIF

SEQ ID NO: 199888 - protein, 17 aa, Homo sapiens
  CDR3 for beta chain variable domain of TCR clone 99944 (TRBV24-1, TRBJ2-1)
CATSDVSTSGTYNEQFF

SEQ ID NO: 199889 - protein, 15 aa, Homo sapiens
  CDR3 for alpha chain variable domain of TCR clone 99945 (TRAV27, TRAJ38)
CAARRNAGNNRKLIW

SEQ ID NO: 199890 - protein, 12 aa, Homo sapiens
  CDR3 for beta chain variable domain of TCR clone 99945 (TRBV11-2, TRBJ2-5)
CASSLGQETQYF

SEQ ID NO: 199891 - protein, 10 aa, Homo sapiens
  CDR3 for alpha chain variable domain of TCR clone 99946 (TRAV8-4, TRAJ39)
CAVAGNMLTF

SEQ ID NO: 199892 - protein, 16 aa, Homo sapiens
  CDR3 for beta chain variable domain of TCR clone 99946 (TRBV4-3, TRBJ2-2)
CASSHLQGSGTGELFF

SEQ ID NO: 199893 - protein, 16 aa, Homo sapiens
  CDR3 for alpha chain variable domain of TCR clone 99947 (TRAV12-2, TRAJ18)
CAVTTDRGSTLGRLYF

SEQ ID NO: 199894 - protein, 13 aa, Homo sapiens
  CDR3 for beta chain variable domain of TCR clone 99947 (TRBV19, TRBJ2-3)
CATWDNITDTQYF

SEQ ID NO: 199895 - protein, 17 aa, Homo sapiens
  CDR3 for alpha chain variable domain of TCR clone 99948 (TRAV3, TRAJ6)
CAVRDGPRAGGSYIPTF

SEQ ID NO: 199896 - protein, 13 aa, Homo sapiens
  CDR3 for beta chain variable domain of TCR clone 99948 (TRBV5-1, TRBJ1-1)
CASSKLGNTEAFF

SEQ ID NO: 199897 - protein, 14 aa, Homo sapiens
  CDR3 for alpha chain variable domain of TCR clone 99949 (TRAV34, TRAJ22)
CGADTSGSARQLTF

SEQ ID NO: 199898 - protein, 15 aa, Homo sapiens
  CDR3 for beta chain variable domain of TCR clone 99949 (TRBV5-1, TRBJ2-1)
CASSPPRVPYNEQFF

SEQ ID NO: 199899 - protein, 11 aa, Homo sapiens
  CDR3 for alpha chain variable domain of TCR clone 99950 (TRAV1-2, TRAJ40)
CAVPGTYKYIF

SEQ ID NO: 199900 - protein, 15 aa, Homo sapiens
  CDR3 for beta chain variable domain of TCR clone 99950 (TRBV6-3, TRBJ2-7)
CASSSPGTVFYEQYF

SEQ ID NO: 199901 - protein, 12 aa, Homo sapiens
  CDR3 for alpha chain variable domain of TCR clone 99951 (TRAV2, TRAJ10)
CASTGGGNKLTF

SEQ ID NO: 199902 - protein, 14 aa, Homo sapiens
  CDR3 for beta chain variable domain of TCR clone 99951 (TRBV7-2, TRBJ2-2)
CASRGQGAAGKLFF

SEQ ID NO: 199903 - protein, 14 aa, Homo sapiens
  CDR3 for alpha chain variable domain of TCR clone 99952 (TRAV26-1, TRAJ45)
CIELTGGGADGLTF

SEQ ID NO: 199904 - protein, 14 aa, Homo sapiens
  CDR3 for beta chain variable domain of TCR clone 99952 (TRBV6-1, TRBJ1-3)
CASVQGGGGNTIYF

SEQ ID NO: 199905 - protein, 16 aa, Homo sapiens
  CDR3 for alpha chain variable domain of TCR clone 99953 (TRAV14/DV4, TRAJ54)
CAMREGRIQGAQKLGF

SEQ ID NO: 199906 - protein, 19 aa, Homo sapiens
  CDR3 for beta chain variable domain of TCR clone 99953 (TRBV7-2, TRBJ2-3)
CASSFLSRNWGGGTDTQYF

SEQ ID NO: 199907 - protein, 16 aa, Homo sapiens
  CDR3 for alpha chain variable domain of TCR clone 99954 (TRAV23/DV6, TRAJ9)
CAASIGGTTGGFKTIF

SEQ ID NO: 199908 - protein, 12 aa, Homo sapiens
  CDR3 for beta chain variable domain of TCR clone 99954 (TRBV6-3, TRBJ2-7)
CASSEPGFEQYF

SEQ ID NO: 199909 - protein, 13 aa, Homo sapiens
  CDR3 for alpha chain variable domain of TCR clone 99955 (TRAV8-3, TRAJ36)
CAVGATGANNLFF

SEQ ID NO: 199910 - protein, 13 aa, Homo sapiens
  CDR3 for beta chain variable domain of TCR clone 99955 (TRBV15, TRBJ1-6)
CATSGGLNSPLHF

SEQ ID NO: 199911 - protein, 14 aa, Homo sapiens
  CDR3 for alpha chain variable domain of TCR clone 99956 (TRAV1-2, TRAJ16)
CAVNRFSDGQKLLF

SEQ ID NO: 199912 - protein, 15 aa, Homo sapiens
  CDR3 for beta chain variable domain of TCR clone 99956 (TRBV7-3, TRBJ2-3)
CASSLGLTLGDTQYF

SEQ ID NO: 199913 - protein, 14 aa, Homo sapiens
  CDR3 for alpha chain variable domain of TCR clone 99957 (TRAV12-3, TRAJ10)
SHLPLTGGGNKLTF

SEQ ID NO: 199914 - protein, 15 aa, Homo sapiens
  CDR3 for beta chain variable domain of TCR clone 99957 (TRBV7-2, TRBJ2-7)
CASSLKGALTYEQYF

SEQ ID NO: 199915 - protein, 15 aa, Homo sapiens
  CDR3 for alpha chain variable domain of TCR clone 99958 (TRAV38-1, TRAJ57)
CAFMDSQGGSEKLVF

SEQ ID NO: 199916 - protein, 15 aa, Homo sapiens
  CDR3 for beta chain variable domain of TCR clone 99958 (TRBV20-1, TRBJ2-7)
CSARDRVSGMDEQYF

SEQ ID NO: 199917 - protein, 14 aa, Homo sapiens
  CDR3 for alpha chain variable domain of TCR clone 99959 (TRAV16, TRAJ33)
CALSAMDSNYQLIW

SEQ ID NO: 199918 - protein, 16 aa, Homo sapiens
  CDR3 for beta chain variable domain of TCR clone 99959 (TRBV12-4, TRBJ2-3)
CASSFPSNTNTDTQFF

SEQ ID NO: 199919 - protein, 13 aa, Homo sapiens
  CDR3 for alpha chain variable domain of TCR clone 99960 (TRAV17, TRAJ7)
CATDNYGNNRLAF

SEQ ID NO: 199920 - protein, 12 aa, Homo sapiens
  CDR3 for beta chain variable domain of TCR clone 99960 (TRBV7-8, TRBJ2-7)
CASSLGDREQYF

SEQ ID NO: 199921 - protein, 15 aa, Homo sapiens
  CDR3 for alpha chain variable domain of TCR clone 99961 (TRAV2, TRAJ22)
CAVPSRGGSARQLTF

SEQ ID NO: 199922 - protein, 18 aa, Homo sapiens
  CDR3 for beta chain variable domain of TCR clone 99961 (TRBV18, TRBJ1-3)
CASSPRGGAGPSGNTIYF

SEQ ID NO: 199923 - protein, 15 aa, Homo sapiens
  CDR3 for alpha chain variable domain of TCR clone 99962 (TRAV12-3, TRAJ6)
CAMSATTGGSYIPTF

SEQ ID NO: 199924 - protein, 16 aa, Homo sapiens
  CDR3 for beta chain variable domain of TCR clone 99962 (TRBV20-1, TRBJ1-2)
CSASMGQGVAKYGYTF

SEQ ID NO: 199925 - protein, 13 aa, Homo sapiens
  CDR3 for alpha chain variable domain of TCR clone 99963 (TRAV12-2, TRAJ39)
CAVNNNAGNMLTF

SEQ ID NO: 199926 - protein, 13 aa, Homo sapiens
  CDR3 for beta chain variable domain of TCR clone 99963 (TRBV2, TRBJ1-5)
FATAGPGNQPQHF

SEQ ID NO: 199927 - protein, 10 aa, Homo sapiens
  CDR3 for alpha chain variable domain of TCR clone 99964 (TRAV25, TRAJ21)
CLYNFNKFYF

SEQ ID NO: 199928 - protein, 13 aa, Homo sapiens
  CDR3 for beta chain variable domain of TCR clone 99964 (TRBV7-6, TRBJ2-3)
CASSLRSDNTQYF

SEQ ID NO: 199929 - protein, 14 aa, Homo sapiens
  CDR3 for alpha chain variable domain of TCR clone 99965 (TRAV13-1, TRAJ35)
CAASKGGFGNVLHC

SEQ ID NO: 199930 - protein, 15 aa, Homo sapiens
  CDR3 for beta chain variable domain of TCR clone 99965 (TRBV5-1, TRBJ2-5)
CASSFGGPPQETQYF

SEQ ID NO: 199931 - protein, 14 aa, Homo sapiens
  CDR3 for alpha chain variable domain of TCR clone 99966 (TRAV30, TRAJ26)
CGTEIVSYGQNFVF

SEQ ID NO: 199932 - protein, 15 aa, Homo sapiens
  CDR3 for beta chain variable domain of TCR clone 99966 (TRBV5-1, TRBJ2-7)
CASSLNGGPAREQYF

SEQ ID NO: 199933 - protein, 13 aa, Homo sapiens
  CDR3 for alpha chain variable domain of TCR clone 99967 (TRAV8-4, TRAJ36)
CAVREGGANNLFF

SEQ ID NO: 199934 - protein, 12 aa, Homo sapiens
  CDR3 for beta chain variable domain of TCR clone 99967 (TRBV28, TRBJ2-7)
CASTGNHYEQYF

SEQ ID NO: 199935 - protein, 11 aa, Homo sapiens
  CDR3 for alpha chain variable domain of TCR clone 99968 (TRAV3, TRAJ17)
PRGAAVNKLTF

SEQ ID NO: 199936 - protein, 16 aa, Homo sapiens
  CDR3 for beta chain variable domain of TCR clone 99968 (TRBV7-6, TRBJ2-1)
CASSAPGPSSYNEQFF

SEQ ID NO: 199937 - protein, 12 aa, Homo sapiens
  CDR3 for alpha chain variable domain of TCR clone 99969 (TRAV21, TRAJ31)
CAVWGNNARLMF

SEQ ID NO: 199938 - protein, 16 aa, Homo sapiens
  CDR3 for beta chain variable domain of TCR clone 99969 (TRBV27, TRBJ2-5)
CTSSYGPGGQKETQYF

SEQ ID NO: 199939 - protein, 18 aa, Homo sapiens
  CDR3 for alpha chain variable domain of TCR clone 99970 (TRAV13-1, TRAJ52)
CAAKNPNAGGTSYGELTF

SEQ ID NO: 199940 - protein, 14 aa, Homo sapiens
  CDR3 for beta chain variable domain of TCR clone 99970 (TRBV7-3, TRBJ2-1)
CASSLAGGTNEQFF

SEQ ID NO: 199941 - protein, 15 aa, Homo sapiens
  CDR3 for alpha chain variable domain of TCR clone 99971 (TRAV3, TRAJ6)
CAVRDFVGGSYIPTF

SEQ ID NO: 199942 - protein, 16 aa, Homo sapiens
  CDR3 for beta chain variable domain of TCR clone 99971 (TRBV7-6, TRBJ2-1)
CASSAPGPSSYNEQFF

SEQ ID NO: 199943 - protein, 11 aa, Homo sapiens
  CDR3 for alpha chain variable domain of TCR clone 99972 (TRAV1-2, TRAJ20)
CAVANDYKLSF

SEQ ID NO: 199944 - protein, 18 aa, Homo sapiens
  CDR3 for beta chain variable domain of TCR clone 99972 (TRBV20-1, TRBJ2-6)
CSAETTPTHGSGANDLSF

SEQ ID NO: 199945 - protein, 12 aa, Homo sapiens
  CDR3 for alpha chain variable domain of TCR clone 99973 (TRAV30, TRAJ39)
CGRGNAGNMLTF

SEQ ID NO: 199946 - protein, 15 aa, Homo sapiens
  CDR3 for beta chain variable domain of TCR clone 99973 (TRBV20-1, TRBJ2-7)
CSARDRVSGMDEQYF

SEQ ID NO: 199947 - protein, 14 aa, Homo sapiens
  CDR3 for alpha chain variable domain of TCR clone 99974 (TRAV17, TRAJ24)
CATLTTDSWGKSQF

SEQ ID NO: 199948 - protein, 16 aa, Homo sapiens
  CDR3 for beta chain variable domain of TCR clone 99974 (TRBV4-2, TRBJ2-7)
CASSQDGGSLRGEQYF

SEQ ID NO: 199949 - protein, 15 aa, Homo sapiens
  CDR3 for alpha chain variable domain of TCR clone 99975 (TRAV12-1, TRAJ41)
CVVNSRTGTGYALNF

SEQ ID NO: 199950 - protein, 11 aa, Homo sapiens
  CDR3 for beta chain variable domain of TCR clone 99975 (TRBV6-4, TRBJ2-1)
CASSDSYAQFF

SEQ ID NO: 199951 - protein, 12 aa, Homo sapiens
  CDR3 for alpha chain variable domain of TCR clone 99976 (TRAV16, TRAJ10)
CSRTGGGNKLTF

SEQ ID NO: 199952 - protein, 16 aa, Homo sapiens
  CDR3 for beta chain variable domain of TCR clone 99976 (TRBV19, TRBJ2-3)
CASSPEWDRGTDTQYF

SEQ ID NO: 199953 - protein, 18 aa, Homo sapiens
  CDR3 for alpha chain variable domain of TCR clone 99977 (TRAV21, TRAJ52)
CAVRPSPAGGTSYGKLTF

SEQ ID NO: 199954 - protein, 14 aa, Homo sapiens
  CDR3 for beta chain variable domain of TCR clone 99977 (TRBV28, TRBJ1-1)
CASSESGRGTEAFF

SEQ ID NO: 199955 - protein, 15 aa, Homo sapiens
  CDR3 for alpha chain variable domain of TCR clone 99978 (TRAV3, TRAJ5)
CAVRDLDTGRRALTF

SEQ ID NO: 199956 - protein, 13 aa, Homo sapiens
  CDR3 for beta chain variable domain of TCR clone 99978 (TRBV12-4, TRBJ2-7)
CGSSPTETYEQYF

SEQ ID NO: 199957 - protein, 15 aa, Homo sapiens
  CDR3 for alpha chain variable domain of TCR clone 99979 (TRAV21, TRAJ32)
CAVNSYGGATNKLIF

SEQ ID NO: 199958 - protein, 14 aa, Homo sapiens
  CDR3 for beta chain variable domain of TCR clone 99979 (TRBV19, TRBJ2-1)
CASPTFVLSGEQFF

SEQ ID NO: 199959 - protein, 15 aa, Homo sapiens
  CDR3 for alpha chain variable domain of TCR clone 99980 (TRAV17, TRAJ45)
TSVLRTGGGADGLTF

SEQ ID NO: 199960 - protein, 15 aa, Homo sapiens
  CDR3 for beta chain variable domain of TCR clone 99980 (TRBV5-7, TRBJ1-5)
CASSYGKLWEQPQHF

SEQ ID NO: 199961 - protein, 13 aa, Homo sapiens
  CDR3 for alpha chain variable domain of TCR clone 99981 (TRAV3, TRAJ3)
CAVADSSASKIIF

SEQ ID NO: 199962 - protein, 15 aa, Homo sapiens
  CDR3 for beta chain variable domain of TCR clone 99981 (TRBV7-9, TRBJ1-6)
CASSSPGRGNSPLHF

SEQ ID NO: 199963 - protein, 13 aa, Homo sapiens
  CDR3 for alpha chain variable domain of TCR clone 99982 (TRAV13-1, TRAJ11)
CAAVLAGDSTLTF

SEQ ID NO: 199964 - protein, 17 aa, Homo sapiens
  CDR3 for beta chain variable domain of TCR clone 99982 (TRBV25-1, TRBJ2-7)
CASSDARVVFSSYEQYF

SEQ ID NO: 199965 - protein, 16 aa, Homo sapiens
  CDR3 for alpha chain variable domain of TCR clone 99983 (TRAV3, TRAJ10)
CAVRDMRAGGGNKPTF

SEQ ID NO: 199966 - protein, 13 aa, Homo sapiens
  CDR3 for beta chain variable domain of TCR clone 99983 (TRBV7-9, TRBJ1-2)
CASSLKQNYGYTF

SEQ ID NO: 199967 - protein, 20 aa, Homo sapiens
  CDR3 for alpha chain variable domain of TCR clone 99984 (TRAV12-2, TRAJ52)
SPVIQPPARAGGTSYGKLTF

SEQ ID NO: 199968 - protein, 13 aa, Homo sapiens
  CDR3 for beta chain variable domain of TCR clone 99984 (TRBV7-3, TRBJ1-1)
CASSQDWGAEAFF

SEQ ID NO: 199969 - protein, 15 aa, Homo sapiens
  CDR3 for alpha chain variable domain of TCR clone 99985 (TRAV36/DV7, TRAJ53)
CVVEGSGGSNYKLTF

SEQ ID NO: 199970 - protein, 16 aa, Homo sapiens
  CDR3 for beta chain variable domain of TCR clone 99985 (TRBV27, TRBJ2-2)
CASSLSGFWVTGELFF

SEQ ID NO: 199971 - protein, 15 aa, Homo sapiens
  CDR3 for alpha chain variable domain of TCR clone 99986 (TRAV16, TRAJ48)
CALFISNFGNEKLTF

SEQ ID NO: 199972 - protein, 18 aa, Homo sapiens
  CDR3 for beta chain variable domain of TCR clone 99986 (TRBV7-9, TRBJ2-7)
CASSLTTSGSRTWYEQYF

SEQ ID NO: 199973 - protein, 12 aa, Homo sapiens
  CDR3 for alpha chain variable domain of TCR clone 99987 (TRAV30, TRAJ31)
CGTAKHNARPMF

SEQ ID NO: 199974 - protein, 15 aa, Homo sapiens
  CDR3 for beta chain variable domain of TCR clone 99987 (TRBV7-2, TRBJ2-1)
CASSPLAGEYNEQFF

SEQ ID NO: 199975 - protein, 15 aa, Homo sapiens
  CDR3 for alpha chain variable domain of TCR clone 99988 (TRAV21, TRAJ24)
CAARSSTDSWGKLQF

SEQ ID NO: 199976 - protein, 16 aa, Homo sapiens
  CDR3 for beta chain variable domain of TCR clone 99988 (TRBV27, TRBJ2-2)
CASSFRGLVRTGELFF

SEQ ID NO: 199977 - protein, 12 aa, Homo sapiens
  CDR3 for alpha chain variable domain of TCR clone 99989 (TRAV13-1, TRAJ20)
CAASRGDYKLSF

SEQ ID NO: 199978 - protein, 14 aa, Homo sapiens
  CDR3 for beta chain variable domain of TCR clone 99989 (TRBV4-1, TRBJ2-2)
CASSQAVNTGELFF

SEQ ID NO: 199979 - protein, 14 aa, Homo sapiens
  CDR3 for alpha chain variable domain of TCR clone 99990 (TRAV12-3, TRAJ10)
SHLPLTGGGNKLTF

SEQ ID NO: 199980 - protein, 12 aa, Homo sapiens
  CDR3 for beta chain variable domain of TCR clone 99990 (TRBV11-3, TRBJ2-2)
CASSLGGGELFF

SEQ ID NO: 199981 - protein, 14 aa, Homo sapiens
  CDR3 for alpha chain variable domain of TCR clone 99991 (TRAV1-2, TRAJ8)
CAVREDTGFQKLVF

SEQ ID NO: 199982 - protein, 15 aa, Homo sapiens
  CDR3 for beta chain variable domain of TCR clone 99991 (TRBV11-2, TRBJ2-1)
CASSLTSGGYNEQFF

SEQ ID NO: 199983 - protein, 14 aa, Homo sapiens
  CDR3 for alpha chain variable domain of TCR clone 99992 (TRAV12-3, TRAJ10)
SHLPLTGGGNKLTF

SEQ ID NO: 199984 - protein, 13 aa, Homo sapiens
  CDR3 for beta chain variable domain of TCR clone 99992 (TRBV7-7, TRBJ2-5)
CASSRSGQETQHF

SEQ ID NO: 199985 - protein, 21 aa, Homo sapiens
  CDR3 for alpha chain variable domain of TCR clone 99993 (TRAV1-1, TRAJ6)
CAVWREEATYLHLEEEPALLF

SEQ ID NO: 199986 - protein, 15 aa, Homo sapiens
  CDR3 for beta chain variable domain of TCR clone 99993 (TRBV6-6, TRBJ2-1)
CATRQGVSSYNEQFF

SEQ ID NO: 199987 - protein, 17 aa, Homo sapiens
  CDR3 for alpha chain variable domain of TCR clone 99994 (TRAV3, TRAJ6)
CAVRDGPRAGGSYIPTI

SEQ ID NO: 199988 - protein, 19 aa, Homo sapiens
  CDR3 for beta chain variable domain of TCR clone 99994 (TRBV25-1, TRBJ2-2)
CAILVYRVDRGRKTGELFF

SEQ ID NO: 199989 - protein, 11 aa, Homo sapiens
  CDR3 for alpha chain variable domain of TCR clone 99995 (TRAV13-1, TRAJ15)
CAATPGTALLF

SEQ ID NO: 199990 - protein, 17 aa, Homo sapiens
  CDR3 for beta chain variable domain of TCR clone 99995 (TRBV13, TRBJ2-3)
CASSLSRVAGGRNTQYF

SEQ ID NO: 199991 - protein, 12 aa, Homo sapiens
  CDR3 for alpha chain variable domain of TCR clone 99996 (TRAV4, TRAJ6)
CLAPGGSYIPTF

SEQ ID NO: 199992 - protein, 17 aa, Homo sapiens
  CDR3 for beta chain variable domain of TCR clone 99996 (TRBV7-8, TRBJ2-6)
CASSAGTGGAGANVLTF

SEQ ID NO: 199993 - protein, 16 aa, Homo sapiens
  CDR3 for alpha chain variable domain of TCR clone 99997 (TRAV35, TRAJ28)
CAGQKYSGAGSYQLTF

SEQ ID NO: 199994 - protein, 15 aa, Homo sapiens
  CDR3 for beta chain variable domain of TCR clone 99997 (TRBV20-1, TRBJ1-6)
CSARVQGQGVSPLHF

SEQ ID NO: 199995 - protein, 14 aa, Homo sapiens
  CDR3 for alpha chain variable domain of TCR clone 99998 (TRAV26-1, TRAJ21)
CIVRPPYNFNKFYF

SEQ ID NO: 199996 - protein, 15 aa, Homo sapiens
  CDR3 for beta chain variable domain of TCR clone 99998 (TRBV11-2, TRBJ1-2)
CASSLEGVQRNGYTF

SEQ ID NO: 199997 - protein, 14 aa, Homo sapiens
  CDR3 for alpha chain variable domain of TCR clone 99999 (TRAV1-2, TRAJ16)
CAVNRFSDGQKLLF

SEQ ID NO: 199998 - protein, 13 aa, Homo sapiens
  CDR3 for beta chain variable domain of TCR clone 99999 (TRBV4-1, TRBJ2-1)
CASSEAGGDEQFF

SEQ ID NO: 199999 - protein, 13 aa, Homo sapiens
  CDR3 for alpha chain variable domain of TCR clone 100000 (TRAV1-2, TRAJ24)
CAVTTDSWGKLQV

SEQ ID NO: 200000 - protein, 13 aa, Homo sapiens
  CDR3 for beta chain variable domain of TCR clone 100000 (TRBV20-1, TRBJ1-1)
CSARGGGNTEAFF

SEQ ID NO: 200001 - protein, 15 aa, Homo sapiens
  CDR3 for alpha chain variable domain of TCR clone 100001 (TRAV21, TRAJ37)
CAVRPTLSNTCKLIF

SEQ ID NO: 200002 - protein, 16 aa, Homo sapiens
  CDR3 for beta chain variable domain of TCR clone 100001 (TRBV24-1, TRBJ2-3)
CATSDRRQDLTDTQYF

SEQ ID NO: 200003 - protein, 14 aa, Homo sapiens
  CDR3 for alpha chain variable domain of TCR clone 100002 (TRAV9-2, TRAJ39)
CALYIYNAGNMRTF

SEQ ID NO: 200004 - protein, 14 aa, Homo sapiens
  CDR3 for beta chain variable domain of TCR clone 100002 (TRBV6-1, TRBJ1-3)
CASVQGGGGNTIYF

SEQ ID NO: 200005 - protein, 14 aa, Homo sapiens
  CDR3 for alpha chain variable domain of TCR clone 100003 (TRAV12-3, TRAJ42)
CAMNYGGSQGNLIF

SEQ ID NO: 200006 - protein, 15 aa, Homo sapiens
  CDR3 for beta chain variable domain of TCR clone 100003 (TRBV20-1, TRBJ1-6)
CSAPLGLDHPSTLGM

SEQ ID NO: 200007 - protein, 13 aa, Homo sapiens
  CDR3 for alpha chain variable domain of TCR clone 100004 (TRAV12-1, TRAJ3)
CVVNPRGASKIIF

SEQ ID NO: 200008 - protein, 13 aa, Homo sapiens
  CDR3 for beta chain variable domain of TCR clone 100004 (TRBV28, TRBJ1-5)
CASSYRGNQPQHF

SEQ ID NO: 200009 - protein, 16 aa, Homo sapiens
  CDR3 for alpha chain variable domain of TCR clone 100005 (TRAV30, TRAJ24)
CGTEIVDADSWGKFQF

SEQ ID NO: 200010 - protein, 16 aa, Homo sapiens
  CDR3 for beta chain variable domain of TCR clone 100005 (TRBV5-4, TRBJ2-3)
CASSFGAGEGTDTQYF

SEQ ID NO: 200011 - protein, 10 aa, Homo sapiens
  CDR3 for alpha chain variable domain of TCR clone 100006 (TRAV1-2, TRAJ23)
CVAWAGKLIF

SEQ ID NO: 200012 - protein, 14 aa, Homo sapiens
  CDR3 for beta chain variable domain of TCR clone 100006 (TRBV20-1, TRBJ2-7)
CSAKTGTGGYEQYF

SEQ ID NO: 200013 - protein, 13 aa, Homo sapiens
  CDR3 for alpha chain variable domain of TCR clone 100007 (TRAV35, TRAJ57)
CAGSQGGSEKLVF

SEQ ID NO: 200014 - protein, 14 aa, Homo sapiens
  CDR3 for beta chain variable domain of TCR clone 100007 (TRBV25-1, TRBJ1-1)
CASPHLGGNTEAFF

SEQ ID NO: 200015 - protein, 13 aa, Homo sapiens
  CDR3 for alpha chain variable domain of TCR clone 100008 (TRAV12-1, TRAJ6)
CVVFPGGSYIPTF

SEQ ID NO: 200016 - protein, 12 aa, Homo sapiens
  CDR3 for beta chain variable domain of TCR clone 100008 (TRBV29-1, TRBJ2-3)
CSVTGGADTQYF

SEQ ID NO: 200017 - protein, 16 aa, Homo sapiens
  CDR3 for alpha chain variable domain of TCR clone 100009 (TRAV3, TRAJ10)
CAVRDMGAGGGNKLTF

SEQ ID NO: 200018 - protein, 13 aa, Homo sapiens
  CDR3 for beta chain variable domain of TCR clone 100009 (TRBV4-2, TRBJ1-1)
CASSQAGNTEAFF

SEQ ID NO: 200019 - protein, 14 aa, Homo sapiens
  CDR3 for alpha chain variable domain of TCR clone 100010 (TRAV12-2, TRAJ17)
CAVNIKAARNKLTF

SEQ ID NO: 200020 - protein, 16 aa, Homo sapiens
  CDR3 for beta chain variable domain of TCR clone 100010 (TRBV20-1, TRBJ2-6)
CSASSQGYDGANVLTF

SEQ ID NO: 200021 - protein, 16 aa, Homo sapiens
  CDR3 for alpha chain variable domain of TCR clone 100011 (TRAV8-3, TRAJ10)
CAVGSGVTGGGNKLTF

SEQ ID NO: 200022 - protein, 13 aa, Homo sapiens
  CDR3 for beta chain variable domain of TCR clone 100011 (TRBV18, TRBJ1-1)
CASSPGPSGEAFF

SEQ ID NO: 200023 - protein, 12 aa, Homo sapiens
  CDR3 for alpha chain variable domain of TCR clone 100012 (TRAV12-2, TRAJ10)
WGVTGGGNKLTF

SEQ ID NO: 200024 - protein, 14 aa, Homo sapiens
  CDR3 for beta chain variable domain of TCR clone 100012 (TRBV5-7, TRBJ2-7)
CASSGGLSSYEQYF

SEQ ID NO: 200025 - protein, 23 aa, Homo sapiens
  CDR3 for alpha chain variable domain of TCR clone 100013 (TRAV8-3, )
CAVVTTRIPDIQNPDPAVDQLRD

SEQ ID NO: 200026 - protein, 14 aa, Homo sapiens
  CDR3 for beta chain variable domain of TCR clone 100013 (TRBV11-2, TRBJ2-7)
CASSPSTTSYEQYF

SEQ ID NO: 200027 - protein, 14 aa, Homo sapiens
  CDR3 for alpha chain variable domain of TCR clone 100014 (TRAV8-6, TRAJ13)
CAGGSSGGYQKVTF

SEQ ID NO: 200028 - protein, 13 aa, Homo sapiens
  CDR3 for beta chain variable domain of TCR clone 100014 (TRBV7-8, TRBJ2-7)
CASSLTGGREQYF

SEQ ID NO: 200029 - protein, 14 aa, Homo sapiens
  CDR3 for alpha chain variable domain of TCR clone 100015 (TRAV30, TRAJ26)
CGTAIVSYGQNFVF

SEQ ID NO: 200030 - protein, 13 aa, Homo sapiens
  CDR3 for beta chain variable domain of TCR clone 100015 (TRBV24-1, TRBJ2-2)
CATSDWSTGELFF

SEQ ID NO: 200031 - protein, 14 aa, Homo sapiens
  CDR3 for alpha chain variable domain of TCR clone 100016 (TRAV12-2, TRAJ13)
CAVKKTGGYQKVTF

SEQ ID NO: 200032 - protein, 14 aa, Homo sapiens
  CDR3 for beta chain variable domain of TCR clone 100016 (TRBV20-1, TRBJ2-4)
CSASGRVGENIQYF

SEQ ID NO: 200033 - protein, 16 aa, Homo sapiens
  CDR3 for alpha chain variable domain of TCR clone 100017 (TRAV17, TRAJ35)
CATAEGGIGFGNVLHC

SEQ ID NO: 200034 - protein, 15 aa, Homo sapiens
  CDR3 for beta chain variable domain of TCR clone 100017 (TRBV5-1, TRBJ2-1)
CASTGSGRNYNEQFF

SEQ ID NO: 200035 - protein, 15 aa, Homo sapiens
  CDR3 for alpha chain variable domain of TCR clone 100018 (TRAV3, TRAJ4)
CAVRDGTGGYNKLIF

SEQ ID NO: 200036 - protein, 14 aa, Homo sapiens
  CDR3 for beta chain variable domain of TCR clone 100018 (TRBV28, TRBJ2-7)
CASKPGPDLYEQYF

SEQ ID NO: 200037 - protein, 11 aa, Homo sapiens
  CDR3 for alpha chain variable domain of TCR clone 100019 (TRAV12-3, TRAJ49)
CAANTGSQFYF

SEQ ID NO: 200038 - protein, 15 aa, Homo sapiens
  CDR3 for beta chain variable domain of TCR clone 100019 (TRBV11-2, TRBJ2-1)
CASSLGTSGLNEQFF

SEQ ID NO: 200039 - protein, 15 aa, Homo sapiens
  CDR3 for alpha chain variable domain of TCR clone 100020 (TRAV13-2, TRAJ23)
CAERGFYNQGGKLIF

SEQ ID NO: 200040 - protein, 14 aa, Homo sapiens
  CDR3 for beta chain variable domain of TCR clone 100020 (TRBV4-1, TRBJ2-3)
CARSQDWSTDTQYF

SEQ ID NO: 200041 - protein, 17 aa, Homo sapiens
  CDR3 for alpha chain variable domain of TCR clone 100021 (TRAV26-1, TRAJ10)
CIVSFRGLTGGGDKLTF

SEQ ID NO: 200042 - protein, 13 aa, Homo sapiens
  CDR3 for beta chain variable domain of TCR clone 100021 (TRBV20-1, TRBJ2-3)
CSASRQAADTQYF

SEQ ID NO: 200043 - protein, 13 aa, Homo sapiens
  CDR3 for alpha chain variable domain of TCR clone 100022 (TRAV13-1, TRAJ21)
CAASIYNFNKFYF

SEQ ID NO: 200044 - protein, 15 aa, Homo sapiens
  CDR3 for beta chain variable domain of TCR clone 100022 (TRBV7-8, TRBJ1-5)
CASSLAGQPNQPQHF

SEQ ID NO: 200045 - protein, 14 aa, Homo sapiens
  CDR3 for alpha chain variable domain of TCR clone 100023 (TRAV8-6, TRAJ35)
CAVSEKALGMCCIA

SEQ ID NO: 200046 - protein, 12 aa, Homo sapiens
  CDR3 for beta chain variable domain of TCR clone 100023 (TRBV11-2, TRBJ2-2)
CASSLGGGELFF

SEQ ID NO: 200047 - protein, 14 aa, Homo sapiens
  CDR3 for alpha chain variable domain of TCR clone 100024 (TRAV12-3, TRAJ6)
CAMGATGGSYIPTF

SEQ ID NO: 200048 - protein, 16 aa, Homo sapiens
  CDR3 for beta chain variable domain of TCR clone 100024 (TRBV4-2, TRBJ2-1)
CASSPRAGQGANEQFF

SEQ ID NO: 200049 - protein, 14 aa, Homo sapiens
  CDR3 for alpha chain variable domain of TCR clone 100025 (TRAV8-3, TRAJ9)
CAVVYNTGGFKTIF

SEQ ID NO: 200050 - protein, 14 aa, Homo sapiens
  CDR3 for beta chain variable domain of TCR clone 100025 (TRBV7-2, TRBJ2-2)
CASRGQGAAGELFF

SEQ ID NO: 200051 - protein, 16 aa, Homo sapiens
  CDR3 for alpha chain variable domain of TCR clone 100026 (TRAV4, TRAJ22)
CLVGDLYSGSARQLTF

SEQ ID NO: 200052 - protein, 16 aa, Homo sapiens
  CDR3 for beta chain variable domain of TCR clone 100026 (TRBV7-9, TRBJ2-1)
CASSDVAVGSYNEQFF

SEQ ID NO: 200053 - protein, 15 aa, Homo sapiens
  CDR3 for alpha chain variable domain of TCR clone 100027 (TRAV26-1, TRAJ40)
CIVRVTPSGTYKYIF

SEQ ID NO: 200054 - protein, 12 aa, Homo sapiens
  CDR3 for beta chain variable domain of TCR clone 100027 (TRBV7-9, TRBJ1-4)
CASSTDREKLFF

SEQ ID NO: 200055 - protein, 13 aa, Homo sapiens
  CDR3 for alpha chain variable domain of TCR clone 100028 (TRAV1-2, TRAJ9)
CAALNTGGFKTIF

SEQ ID NO: 200056 - protein, 14 aa, Homo sapiens
  CDR3 for beta chain variable domain of TCR clone 100028 (TRBV7-6, TRBJ2-3)
CASNSGGDANTQYF

SEQ ID NO: 200057 - protein, 13 aa, Homo sapiens
  CDR3 for alpha chain variable domain of TCR clone 100029 (TRAV3, TRAJ3)
CAVADSRASKIIF

SEQ ID NO: 200058 - protein, 16 aa, Homo sapiens
  CDR3 for beta chain variable domain of TCR clone 100029 (TRBV5-1, TRBJ2-3)
CASSLGLAVYTDTQYF

SEQ ID NO: 200059 - protein, 12 aa, Homo sapiens
  CDR3 for alpha chain variable domain of TCR clone 100030 (TRAV17, TRAJ30)
CAKDARDDKIIF

SEQ ID NO: 200060 - protein, 15 aa, Homo sapiens
  CDR3 for beta chain variable domain of TCR clone 100030 (TRBV4-1, TRBJ2-1)
CASSQGGELYNEQFF

SEQ ID NO: 200061 - protein, 14 aa, Homo sapiens
  CDR3 for alpha chain variable domain of TCR clone 100031 (TRAV35, TRAJ22)
CARLRPGSARQLTF

SEQ ID NO: 200062 - protein, 13 aa, Homo sapiens
  CDR3 for beta chain variable domain of TCR clone 100031 (TRBV20-1, TRBJ1-1)
CSARGGGNTEAFF

SEQ ID NO: 200063 - protein, 14 aa, Homo sapiens
  CDR3 for alpha chain variable domain of TCR clone 100032 (TRAV13-1, TRAJ35)
CAASKGGFGNVLHC

SEQ ID NO: 200064 - protein, 13 aa, Homo sapiens
  CDR3 for beta chain variable domain of TCR clone 100032 (TRBV19, TRBJ1-3)
CASRLSLGNTIYF

SEQ ID NO: 200065 - protein, 14 aa, Homo sapiens
  CDR3 for alpha chain variable domain of TCR clone 100033 (TRAV23/DV6, TRAJ57)
CAASNQGGSEKLVF

SEQ ID NO: 200066 - protein, 13 aa, Homo sapiens
  CDR3 for beta chain variable domain of TCR clone 100033 (TRBV11-2, TRBJ2-7)
CASSSYPSDEQYF

SEQ ID NO: 200067 - protein, 13 aa, Homo sapiens
  CDR3 for alpha chain variable domain of TCR clone 100034 (TRAV12-2, TRAJ6)
CAVNVSRKLHTYI

SEQ ID NO: 200068 - protein, 15 aa, Homo sapiens
  CDR3 for beta chain variable domain of TCR clone 100034 (TRBV7-9, TRBJ1-4)
CASSRTGGFNEKLFF

SEQ ID NO: 200069 - protein, 16 aa, Homo sapiens
  CDR3 for alpha chain variable domain of TCR clone 100035 (TRAV30, TRAJ24)
CGTEIVDADSWGEFQF

SEQ ID NO: 200070 - protein, 12 aa, Homo sapiens
  CDR3 for beta chain variable domain of TCR clone 100035 (TRBV11-2, TRBJ2-1)
CASSPGNNEQFF

SEQ ID NO: 200071 - protein, 17 aa, Homo sapiens
  CDR3 for alpha chain variable domain of TCR clone 100036 (TRAV13-1, TRAJ31)
CAPRDRLMFGDGTQLVV

SEQ ID NO: 200072 - protein, 15 aa, Homo sapiens
  CDR3 for beta chain variable domain of TCR clone 100036 (TRBV7-9, TRBJ1-5)
CASSQGHQPNQPQHF

SEQ ID NO: 200073 - protein, 12 aa, Homo sapiens
  CDR3 for alpha chain variable domain of TCR clone 100037 (TRAV12-3, TRAJ20)
CAMVRGDYKLSF

SEQ ID NO: 200074 - protein, 16 aa, Homo sapiens
  CDR3 for beta chain variable domain of TCR clone 100037 (TRBV4-2, TRBJ1-1)
CASSQAGFGMNTEAFF

SEQ ID NO: 200075 - protein, 20 aa, Homo sapiens
  CDR3 for alpha chain variable domain of TCR clone 100038 (TRAV26-1, TRAJ47)
CCVLLHRQSRALPIWKQLVF

SEQ ID NO: 200076 - protein, 16 aa, Homo sapiens
  CDR3 for beta chain variable domain of TCR clone 100038 (TRBV5-1, TRBJ2-1)
CASSFGVSGSYNEQFF

SEQ ID NO: 200077 - protein, 14 aa, Homo sapiens
  CDR3 for alpha chain variable domain of TCR clone 100039 (TRAV8-2, TRAJ37)
CVVSISGNTGKLIF

SEQ ID NO: 200078 - protein, 11 aa, Homo sapiens
  CDR3 for beta chain variable domain of TCR clone 100039 (TRBV18, TRBJ2-5)
CASSPRENQYF

SEQ ID NO: 200079 - protein, 14 aa, Homo sapiens
  CDR3 for alpha chain variable domain of TCR clone 100040 (TRAV23/DV6, TRAJ4)
CAANLSGGYNKLIF

SEQ ID NO: 200080 - protein, 11 aa, Homo sapiens
  CDR3 for beta chain variable domain of TCR clone 100040 (TRBV7-9, TRBJ2-3)
CASSPTDTQYF

SEQ ID NO: 200081 - protein, 13 aa, Homo sapiens
  CDR3 for alpha chain variable domain of TCR clone 100041 (TRAV2, TRAJ21)
CAVEDLSFNKFYF

SEQ ID NO: 200082 - protein, 15 aa, Homo sapiens
  CDR3 for beta chain variable domain of TCR clone 100041 (TRBV28, TRBJ2-5)
CASSPGQGSIETQYF

SEQ ID NO: 200083 - protein, 15 aa, Homo sapiens
  CDR3 for alpha chain variable domain of TCR clone 100042 (TRAV29/DV5, TRAJ53)
CAVSSNGGSNYKLTF

SEQ ID NO: 200084 - protein, 17 aa, Homo sapiens
  CDR3 for beta chain variable domain of TCR clone 100042 (TRBV4-1, TRBJ1-6)
CASSQDRNRDYNSPLHF

SEQ ID NO: 200085 - protein, 16 aa, Homo sapiens
  CDR3 for alpha chain variable domain of TCR clone 100043 (TRAV29/DV5, TRAJ36)
CAASAGVETGANTLFF

SEQ ID NO: 200086 - protein, 16 aa, Homo sapiens
  CDR3 for beta chain variable domain of TCR clone 100043 (TRBV5-1, TRBJ2-3)
CASSLGLAVYTDTQYF

SEQ ID NO: 200087 - protein, 15 aa, Homo sapiens
  CDR3 for alpha chain variable domain of TCR clone 100044 (TRAV23/DV6, TRAJ44)
CAAALNTGTARKLTF

SEQ ID NO: 200088 - protein, 12 aa, Homo sapiens
  CDR3 for beta chain variable domain of TCR clone 100044 (TRBV20-1, TRBJ1-5)
CSARAPDQPQHF

SEQ ID NO: 200089 - protein, 12 aa, Homo sapiens
  CDR3 for alpha chain variable domain of TCR clone 100045 (TRAV3, TRAJ34)
CAVLGNTDKIIF

SEQ ID NO: 200090 - protein, 13 aa, Homo sapiens
  CDR3 for beta chain variable domain of TCR clone 100045 (TRBV19, TRBJ2-1)
CASSIGTGNEQFF

SEQ ID NO: 200091 - protein, 12 aa, Homo sapiens
  CDR3 for alpha chain variable domain of TCR clone 100046 (TRAV13-1, TRAJ15)
CAASQAGTALIF

SEQ ID NO: 200092 - protein, 14 aa, Homo sapiens
  CDR3 for beta chain variable domain of TCR clone 100046 (TRBV7-8, TRBJ2-3)
CASSLEAGTDTQYF

SEQ ID NO: 200093 - protein, 13 aa, Homo sapiens
  CDR3 for alpha chain variable domain of TCR clone 100047 (TRAV13-2, TRAJ48)
CAEMDFGKEKLTF

SEQ ID NO: 200094 - protein, 12 aa, Homo sapiens
  CDR3 for beta chain variable domain of TCR clone 100047 (TRBV5-1, TRBJ1-2)
CASSQDTYGYTF

SEQ ID NO: 200095 - protein, 11 aa, Homo sapiens
  CDR3 for alpha chain variable domain of TCR clone 100048 (TRAV21, TRAJ49)
CAVSFGNQFYF

SEQ ID NO: 200096 - protein, 15 aa, Homo sapiens
  CDR3 for beta chain variable domain of TCR clone 100048 (TRBV7-9, TRBJ2-7)
CASSPGGGLTYEQYF

SEQ ID NO: 200097 - protein, 19 aa, Homo sapiens
  CDR3 for alpha chain variable domain of TCR clone 100049 (TRAV26-1, TRAJ52)
CIVRAHRNACGTSYGKLTF

SEQ ID NO: 200098 - protein, 15 aa, Homo sapiens
  CDR3 for beta chain variable domain of TCR clone 100049 (TRBV12-4, TRBJ2-5)
CASSPPTGLQETQYF

SEQ ID NO: 200099 - protein, 13 aa, Homo sapiens
  CDR3 for alpha chain variable domain of TCR clone 100050 (TRAV21, TRAJ27)
CAARPGNAGKSTF

SEQ ID NO: 200100 - protein, 14 aa, Homo sapiens
  CDR3 for beta chain variable domain of TCR clone 100050 (TRBV11-2, TRBJ2-7)
CACSLGAGAYEQYF

SEQ ID NO: 200101 - protein, 14 aa, Homo sapiens
  CDR3 for alpha chain variable domain of TCR clone 100051 (TRAV12-2, TRAJ36)
CAVKISTEANNLFF

SEQ ID NO: 200102 - protein, 14 aa, Homo sapiens
  CDR3 for beta chain variable domain of TCR clone 100051 (TRBV25-1, TRBJ1-2)
CASSDTTGVVGYTF

SEQ ID NO: 200103 - protein, 15 aa, Homo sapiens
  CDR3 for alpha chain variable domain of TCR clone 100052 (TRAV35, TRAJ38)
CAGFSDAGNNRKLIW

SEQ ID NO: 200104 - protein, 15 aa, Homo sapiens
  CDR3 for beta chain variable domain of TCR clone 100052 (TRBV7-8, TRBJ2-1)
CASSLAGGLYNEQFF

SEQ ID NO: 200105 - protein, 16 aa, Homo sapiens
  CDR3 for alpha chain variable domain of TCR clone 100053 (TRAV30, TRAJ24)
CGTEIVDADSWGKFQF

SEQ ID NO: 200106 - protein, 16 aa, Homo sapiens
  CDR3 for beta chain variable domain of TCR clone 100053 (TRBV2, TRBJ1-3)
CASFGGAGRSGNTIYF

SEQ ID NO: 200107 - protein, 15 aa, Homo sapiens
  CDR3 for alpha chain variable domain of TCR clone 100054 (TRAV40, TRAJ45)
CPLGDLGGGADGLTF

SEQ ID NO: 200108 - protein, 13 aa, Homo sapiens
  CDR3 for beta chain variable domain of TCR clone 100054 (TRBV7-9, TRBJ1-2)
CASSLKQNYGYTF

SEQ ID NO: 200109 - protein, 10 aa, Homo sapiens
  CDR3 for alpha chain variable domain of TCR clone 100055 (TRAV13-1, )
CAASGPRRTH

SEQ ID NO: 200110 - protein, 16 aa, Homo sapiens
  CDR3 for beta chain variable domain of TCR clone 100055 (TRBV18, TRBJ2-3)
CASSPPAGGPRKYAVF

SEQ ID NO: 200111 - protein, 13 aa, Homo sapiens
  CDR3 for alpha chain variable domain of TCR clone 100056 (TRAV13-1, TRAJ21)
CAASIYNFNKFYF

SEQ ID NO: 200112 - protein, 13 aa, Homo sapiens
  CDR3 for beta chain variable domain of TCR clone 100056 (TRBV27, TRBJ1-4)
CASRLMGDEKLFF

SEQ ID NO: 200113 - protein, 12 aa, Homo sapiens
  CDR3 for alpha chain variable domain of TCR clone 100057 (TRAV17, TRAJ39)
CATGAAGNMLTF

SEQ ID NO: 200114 - protein, 16 aa, Homo sapiens
  CDR3 for beta chain variable domain of TCR clone 100057 (TRBV12-5, TRBJ2-5)
CASGPRTSGNQETQYF

SEQ ID NO: 200115 - protein, 17 aa, Homo sapiens
  CDR3 for alpha chain variable domain of TCR clone 100058 (TRAV12-3, TRAJ6)
CAMSARGGAGGSYIPTF

SEQ ID NO: 200116 - protein, 15 aa, Homo sapiens
  CDR3 for beta chain variable domain of TCR clone 100058 (TRBV9, TRBJ1-6)
CASSVAGTGDSPLHC

SEQ ID NO: 200117 - protein, 15 aa, Homo sapiens
  CDR3 for alpha chain variable domain of TCR clone 100059 (TRAV23/DV6, TRAJ18)
CEARYRGSTLGRLYF

SEQ ID NO: 200118 - protein, 12 aa, Homo sapiens
  CDR3 for beta chain variable domain of TCR clone 100059 (TRBV11-2, TRBJ2-2)
CASSLPTGELFF

SEQ ID NO: 200119 - protein, 16 aa, Homo sapiens
  CDR3 for alpha chain variable domain of TCR clone 100060 (TRAV30, TRAJ24)
CGTEIVDADSWGKFQF

SEQ ID NO: 200120 - protein, 15 aa, Homo sapiens
  CDR3 for beta chain variable domain of TCR clone 100060 (TRBV12-4, TRBJ2-2)
CASSPNDAGTGELFF

SEQ ID NO: 200121 - protein, 16 aa, Homo sapiens
  CDR3 for alpha chain variable domain of TCR clone 100061 (TRAV29/DV5, TRAJ36)
CAASAHYQRGANNLFF

SEQ ID NO: 200122 - protein, 16 aa, Homo sapiens
  CDR3 for beta chain variable domain of TCR clone 100061 (TRBV4-2, TRBJ2-3)
CASSQELAGDTDTQYF

SEQ ID NO: 200123 - protein, 14 aa, Homo sapiens
  CDR3 for alpha chain variable domain of TCR clone 100062 (TRAV12-1, TRAJ17)
CVGNYKAAGNKLTF

SEQ ID NO: 200124 - protein, 14 aa, Homo sapiens
  CDR3 for beta chain variable domain of TCR clone 100062 (TRBV7-2, TRBJ2-7)
CASRSQGAAYEQYF

SEQ ID NO: 200125 - protein, 22 aa, Homo sapiens
  CDR3 for alpha chain variable domain of TCR clone 100063 (TRAV2, TRAJ32)
CAFTMVVLQTSSSLELALCLLS

SEQ ID NO: 200126 - protein, 16 aa, Homo sapiens
  CDR3 for beta chain variable domain of TCR clone 100063 (TRBV7-9, TRBJ2-7)
CASSYPDREGGYEQYF

SEQ ID NO: 200127 - protein, 13 aa, Homo sapiens
  CDR3 for alpha chain variable domain of TCR clone 100064 (TRAV8-6, TRAJ50)
CAVIKTSYDKVIF

SEQ ID NO: 200128 - protein, 15 aa, Homo sapiens
  CDR3 for beta chain variable domain of TCR clone 100064 (TRBV7-2, TRBJ2-2)
CASRRPGQNIGELFF

SEQ ID NO: 200129 - protein, 16 aa, Homo sapiens
  CDR3 for alpha chain variable domain of TCR clone 100065 (TRAV3, TRAJ37)
CAVRGKGSGNTGKLIF

SEQ ID NO: 200130 - protein, 16 aa, Homo sapiens
  CDR3 for beta chain variable domain of TCR clone 100065 (TRBV19, TRBJ2-2)
CASRSPGTGATGELFF

SEQ ID NO: 200131 - protein, 15 aa, Homo sapiens
  CDR3 for alpha chain variable domain of TCR clone 100066 (TRAV12-3, TRAJ42)
CAMSGHGGGQGNLIF

SEQ ID NO: 200132 - protein, 13 aa, Homo sapiens
  CDR3 for beta chain variable domain of TCR clone 100066 (TRBV19, TRBJ2-5)
CASSGRAGETQYF

SEQ ID NO: 200133 - protein, 14 aa, Homo sapiens
  CDR3 for alpha chain variable domain of TCR clone 100067 (TRAV12-2, TRAJ44)
CAVNPAGTASELTF

SEQ ID NO: 200134 - protein, 15 aa, Homo sapiens
  CDR3 for beta chain variable domain of TCR clone 100067 (TRBV19, TRBJ2-7)
CASSPAGSGEALRYF

SEQ ID NO: 200135 - protein, 15 aa, Homo sapiens
  CDR3 for alpha chain variable domain of TCR clone 100068 (TRAV36/DV7, TRAJ53)
WEGENSGGSNYKLTL

SEQ ID NO: 200136 - protein, 15 aa, Homo sapiens
  CDR3 for beta chain variable domain of TCR clone 100068 (TRBV6-1, TRBJ2-5)
CASSEGWGIQETQYF

SEQ ID NO: 200137 - protein, 12 aa, Homo sapiens
  CDR3 for alpha chain variable domain of TCR clone 100069 (TRAV13-1, TRAJ21)
CAAKEGFNKFYF

SEQ ID NO: 200138 - protein, 13 aa, Homo sapiens
  CDR3 for beta chain variable domain of TCR clone 100069 (TRBV27, TRBJ1-1)
CASSLSIGAEAFF

SEQ ID NO: 200139 - protein, 13 aa, Homo sapiens
  CDR3 for alpha chain variable domain of TCR clone 100070 (TRAV35, TRAJ57)
CAGSQGGSEKLVF

SEQ ID NO: 200140 - protein, 11 aa, Homo sapiens
  CDR3 for beta chain variable domain of TCR clone 100070 (TRBV25-1, TRBJ1-1)
PTWGGNTEAFF

SEQ ID NO: 200141 - protein, 11 aa, Homo sapiens
  CDR3 for alpha chain variable domain of TCR clone 100071 (TRAV3, TRAJ21)
CAVGNFNKFYF

SEQ ID NO: 200142 - protein, 11 aa, Homo sapiens
  CDR3 for beta chain variable domain of TCR clone 100071 (TRBV29-1, TRBJ2-2)
KGSGNTGELFF

SEQ ID NO: 200143 - protein, 15 aa, Homo sapiens
  CDR3 for alpha chain variable domain of TCR clone 100072 (TRAV29/DV5, TRAJ29)
CAASERSSGTTPLVF

SEQ ID NO: 200144 - protein, 17 aa, Homo sapiens
  CDR3 for beta chain variable domain of TCR clone 100072 (TRBV4-1, TRBJ1-4)
CASSQEGPRGVEEKLFF

SEQ ID NO: 200145 - protein, 14 aa, Homo sapiens
  CDR3 for alpha chain variable domain of TCR clone 100073 (TRAV12-1, TRAJ27)
CGEHIRTNAGKSTF

SEQ ID NO: 200146 - protein, 15 aa, Homo sapiens
  CDR3 for beta chain variable domain of TCR clone 100073 (TRBV19, TRBJ1-1)
CASTSGQIQNTEAFF

SEQ ID NO: 200147 - protein, 14 aa, Homo sapiens
  CDR3 for alpha chain variable domain of TCR clone 100074 (TRAV16, TRAJ42)
CALLAGGSQGNLIF

SEQ ID NO: 200148 - protein, 12 aa, Homo sapiens
  CDR3 for beta chain variable domain of TCR clone 100074 (TRBV7-9, TRBJ1-4)
CASSTDREKLFF

SEQ ID NO: 200149 - protein, 14 aa, Homo sapiens
  CDR3 for alpha chain variable domain of TCR clone 100075 (TRAV12-3, TRAJ20)
CAMSARRGDYKLSF

SEQ ID NO: 200150 - protein, 14 aa, Homo sapiens
  CDR3 for beta chain variable domain of TCR clone 100075 (TRBV7-3, TRBJ2-3)
CASSPSARTGTQYF

SEQ ID NO: 200151 - protein, 13 aa, Homo sapiens
  CDR3 for alpha chain variable domain of TCR clone 100076 (TRAV8-2, TRAJ29)
CALPGAGNTPLVL

SEQ ID NO: 200152 - protein, 16 aa, Homo sapiens
  CDR3 for beta chain variable domain of TCR clone 100076 (TRBV5-1, TRBJ2-5)
CASSSSGLGGAETQYF

SEQ ID NO: 200153 - protein, 13 aa, Homo sapiens
  CDR3 for alpha chain variable domain of TCR clone 100077 (TRAV12-3, TRAJ47)
CAMKKEYGNKLVF

SEQ ID NO: 200154 - protein, 16 aa, Homo sapiens
  CDR3 for beta chain variable domain of TCR clone 100077 (TRBV3-1, TRBJ2-6)
CASSLTWASGANVLTF

SEQ ID NO: 200155 - protein, 17 aa, Homo sapiens
  CDR3 for alpha chain variable domain of TCR clone 100078 (TRAV13-1, TRAJ31)
CAPRDRLMFGDGTQLVV

SEQ ID NO: 200156 - protein, 15 aa, Homo sapiens
  CDR3 for beta chain variable domain of TCR clone 100078 (TRBV5-1, TRBJ2-7)
CASSLYPDGGYEQYF

SEQ ID NO: 200157 - protein, 13 aa, Homo sapiens
  CDR3 for alpha chain variable domain of TCR clone 100079 (TRAV16, TRAJ29)
CALSRRGNTPLVF

SEQ ID NO: 200158 - protein, 12 aa, Homo sapiens
  CDR3 for beta chain variable domain of TCR clone 100079 (TRBV28, TRBJ2-3)
CASSLYRDTQYF

SEQ ID NO: 200159 - protein, 16 aa, Homo sapiens
  CDR3 for alpha chain variable domain of TCR clone 100080 (TRAV8-2, TRAJ7)
CVVSEGPYYGNNRLAF

SEQ ID NO: 200160 - protein, 12 aa, Homo sapiens
  CDR3 for beta chain variable domain of TCR clone 100080 (TRBV11-2, TRBJ2-1)
CASSPGNNEQFF

SEQ ID NO: 200161 - protein, 15 aa, Homo sapiens
  CDR3 for alpha chain variable domain of TCR clone 100081 (TRAV16, TRAJ12)
CSKWPLRASSYKLIF

SEQ ID NO: 200162 - protein, 13 aa, Homo sapiens
  CDR3 for beta chain variable domain of TCR clone 100081 (TRBV4-2, TRBJ1-1)
CASSQAGNTEAFF

SEQ ID NO: 200163 - protein, 15 aa, Homo sapiens
  CDR3 for alpha chain variable domain of TCR clone 100082 (TRAV12-1, TRAJ42)
CVVTRDGGSQGNLIF

SEQ ID NO: 200164 - protein, 17 aa, Homo sapiens
  CDR3 for beta chain variable domain of TCR clone 100082 (TRBV7-8, TRBJ2-6)
CASSAGTGGAGANVLTF

SEQ ID NO: 200165 - protein, 16 aa, Homo sapiens
  CDR3 for alpha chain variable domain of TCR clone 100083 (TRAV12-2, TRAJ52)
CRLANAGGTSYGKLTF

SEQ ID NO: 200166 - protein, 20 aa, Homo sapiens
  CDR3 for beta chain variable domain of TCR clone 100083 (TRBV7-8, TRBJ2-2)
CASSHLFPGPTIHITGELFF

SEQ ID NO: 200167 - protein, 15 aa, Homo sapiens
  CDR3 for alpha chain variable domain of TCR clone 100084 (TRAV21, TRAJ53)
CATLNSGGSNYKLTF

SEQ ID NO: 200168 - protein, 11 aa, Homo sapiens
  CDR3 for beta chain variable domain of TCR clone 100084 (TRBV12-4, TRBJ2-3)
CASTATDTQYF

SEQ ID NO: 200169 - protein, 15 aa, Homo sapiens
  CDR3 for alpha chain variable domain of TCR clone 100085 (TRAV17, TRAJ37)
CATDGGSSNTCKLIF

SEQ ID NO: 200170 - protein, 15 aa, Homo sapiens
  CDR3 for beta chain variable domain of TCR clone 100085 (TRBV28, TRBJ2-5)
CASSSGRTIQETQYF

SEQ ID NO: 200171 - protein, 18 aa, Homo sapiens
  CDR3 for alpha chain variable domain of TCR clone 100086 (TRAV21, TRAJ52)
CAVRPSPAGGTSYGKLTF

SEQ ID NO: 200172 - protein, 17 aa, Homo sapiens
  CDR3 for beta chain variable domain of TCR clone 100086 (TRBV4-1, TRBJ1-4)
CASSQDGPRGVEEKLFF

SEQ ID NO: 200173 - protein, 14 aa, Homo sapiens
  CDR3 for alpha chain variable domain of TCR clone 100087 (TRAV12-3, TRAJ22)
CAMSLFGSARQLTF

SEQ ID NO: 200174 - protein, 14 aa, Homo sapiens
  CDR3 for beta chain variable domain of TCR clone 100087 (TRBV7-8, TRBJ2-3)
CASSFKSSTDTQYF

SEQ ID NO: 200175 - protein, 12 aa, Homo sapiens
  CDR3 for alpha chain variable domain of TCR clone 100088 (TRAV36/DV7, TRAJ54)
CAVVRGAQKLVF

SEQ ID NO: 200176 - protein, 14 aa, Homo sapiens
  CDR3 for beta chain variable domain of TCR clone 100088 (TRBV25-1, TRBJ1-1)
CASTHLGGNTEAFF

SEQ ID NO: 200177 - protein, 17 aa, Homo sapiens
  CDR3 for alpha chain variable domain of TCR clone 100089 (TRAV27, TRAJ26)
CAGARAPLDNYGQNFVF

SEQ ID NO: 200178 - protein, 13 aa, Homo sapiens
  CDR3 for beta chain variable domain of TCR clone 100089 (TRBV11-2, TRBJ2-1)
CASSLGLAGGRFF

SEQ ID NO: 200179 - protein, 12 aa, Homo sapiens
  CDR3 for alpha chain variable domain of TCR clone 100090 (TRAV36/DV7, TRAJ37)
CACYGNTGKLIF

SEQ ID NO: 200180 - protein, 17 aa, Homo sapiens
  CDR3 for beta chain variable domain of TCR clone 100090 (TRBV13, TRBJ2-3)
CASSLSRVAGGRNTQYF

SEQ ID NO: 200181 - protein, 16 aa, Homo sapiens
  CDR3 for alpha chain variable domain of TCR clone 100091 (TRAV30, TRAJ24)
CGTEIVDADSWGKFQF

SEQ ID NO: 200182 - protein, 16 aa, Homo sapiens
  CDR3 for beta chain variable domain of TCR clone 100091 (TRBV7-3, TRBJ2-2)
CASSLKRGTLPGELFF

SEQ ID NO: 200183 - protein, 17 aa, Homo sapiens
  CDR3 for alpha chain variable domain of TCR clone 100092 (TRAV36/DV7, TRAJ52)
CAVAQRAGGTSYGKLTF

SEQ ID NO: 200184 - protein, 17 aa, Homo sapiens
  CDR3 for beta chain variable domain of TCR clone 100092 (TRBV14, TRBJ2-1)
CASSQDRRDSIYNEQFF

SEQ ID NO: 200185 - protein, 15 aa, Homo sapiens
  CDR3 for alpha chain variable domain of TCR clone 100093 (TRAV26-1, TRAJ29)
CIVRVEGSGNTPLVF

SEQ ID NO: 200186 - protein, 15 aa, Homo sapiens
  CDR3 for beta chain variable domain of TCR clone 100093 (TRBV9, TRBJ1-6)
CASSVAGTGDSPLHF

SEQ ID NO: 200187 - protein, 13 aa, Homo sapiens
  CDR3 for alpha chain variable domain of TCR clone 100094 (TRAV2, TRAJ5)
CAVPDTGRRELTF

SEQ ID NO: 200188 - protein, 15 aa, Homo sapiens
  CDR3 for beta chain variable domain of TCR clone 100094 (TRBV7-2, TRBJ2-2)
CASSTRTGYTGELFF

SEQ ID NO: 200189 - protein, 13 aa, Homo sapiens
  CDR3 for alpha chain variable domain of TCR clone 100095 (TRAV8-6, TRAJ49)
CAVITNTGNQFYF

SEQ ID NO: 200190 - protein, 16 aa, Homo sapiens
  CDR3 for beta chain variable domain of TCR clone 100095 (TRBV4-3, TRBJ2-2)
CASSHLQGSGTGELFF

SEQ ID NO: 200191 - protein, 14 aa, Homo sapiens
  CDR3 for alpha chain variable domain of TCR clone 100096 (TRAV12-2, TRAJ40)
CAVKIPSGTYKYIF

SEQ ID NO: 200192 - protein, 15 aa, Homo sapiens
  CDR3 for beta chain variable domain of TCR clone 100096 (TRBV4-1, TRBJ1-4)
CASSDTGGTNEKLFF

SEQ ID NO: 200193 - protein, 14 aa, Homo sapiens
  CDR3 for alpha chain variable domain of TCR clone 100097 (TRAV12-2, TRAJ13)
CALKKTGGYQKVTF

SEQ ID NO: 200194 - protein, 12 aa, Homo sapiens
  CDR3 for beta chain variable domain of TCR clone 100097 (TRBV12-4, TRBJ1-2)
CASSFIWLHLRF

SEQ ID NO: 200195 - protein, 15 aa, Homo sapiens
  CDR3 for alpha chain variable domain of TCR clone 100098 (TRAV3, TRAJ20)
CAVRDIKLSDYKLSF

SEQ ID NO: 200196 - protein, 15 aa, Homo sapiens
  CDR3 for beta chain variable domain of TCR clone 100098 (TRBV7-9, TRBJ1-6)
CASSTPGRGNSPLHF

SEQ ID NO: 200197 - protein, 17 aa, Homo sapiens
  CDR3 for alpha chain variable domain of TCR clone 100099 (TRAV8-6, TRAJ58)
CAVSSWVGETRGSRLTF

SEQ ID NO: 200198 - protein, 15 aa, Homo sapiens
  CDR3 for beta chain variable domain of TCR clone 100099 (TRBV20-1, TRBJ2-7)
CSARDRVSGMDEQYF

SEQ ID NO: 200199 - protein, 14 aa, Homo sapiens
  CDR3 for alpha chain variable domain of TCR clone 100100 (TRAV1-2, TRAJ16)
CAVNRFSDGQKLPF

SEQ ID NO: 200200 - protein, 12 aa, Homo sapiens
  CDR3 for beta chain variable domain of TCR clone 100100 (TRBV11-2, TRBJ2-2)
CASSLGGGELFF

SEQ ID NO: 200201 - protein, 15 aa, Homo sapiens
  CDR3 for alpha chain variable domain of TCR clone 100101 (TRAV26-2, TRAJ28)
CILVESGAGRYQLTF

SEQ ID NO: 200202 - protein, 11 aa, Homo sapiens
  CDR3 for beta chain variable domain of TCR clone 100101 (TRBV25-1, TRBJ2-7)
CASSTSYEQYF

SEQ ID NO: 200203 - protein, 13 aa, Homo sapiens
  CDR3 for alpha chain variable domain of TCR clone 100102 (TRAV21, TRAJ27)
CAARPGNAGKSTF

SEQ ID NO: 200204 - protein, 14 aa, Homo sapiens
  CDR3 for beta chain variable domain of TCR clone 100102 (TRBV19, TRBJ2-3)
CASSAPRGTDTQYF

SEQ ID NO: 200205 - protein, 11 aa, Homo sapiens
  CDR3 for alpha chain variable domain of TCR clone 100103 (TRAV2, TRAJ20)
CVVLNDYKLSF

SEQ ID NO: 200206 - protein, 16 aa, Homo sapiens
  CDR3 for beta chain variable domain of TCR clone 100103 (TRBV11-1, TRBJ2-2)
CASSAEGLKNTGELFF

SEQ ID NO: 200207 - protein, 15 aa, Homo sapiens
  CDR3 for alpha chain variable domain of TCR clone 100104 (TRAV3, TRAJ17)
CAVSPKEAAGNKLTF

SEQ ID NO: 200208 - protein, 14 aa, Homo sapiens
  CDR3 for beta chain variable domain of TCR clone 100104 (TRBV7-9, TRBJ2-3)
CASSLFGPTDTQYF

SEQ ID NO: 200209 - protein, 13 aa, Homo sapiens
  CDR3 for alpha chain variable domain of TCR clone 100105 (TRAV12-2, TRAJ20)
CAVYPSNDYKLSL

SEQ ID NO: 200210 - protein, 15 aa, Homo sapiens
  CDR3 for beta chain variable domain of TCR clone 100105 (TRBV27, TRBJ2-5)
CASSLYPRGGETQYF

SEQ ID NO: 200211 - protein, 16 aa, Homo sapiens
  CDR3 for alpha chain variable domain of TCR clone 100106 (TRAV26-1, TRAJ53)
CIVRVAMGGSNYKLTF

SEQ ID NO: 200212 - protein, 13 aa, Homo sapiens
  CDR3 for beta chain variable domain of TCR clone 100106 (TRBV2, TRBJ1-1)
CASNLLRNTEAFF

SEQ ID NO: 200213 - protein, 14 aa, Homo sapiens
  CDR3 for alpha chain variable domain of TCR clone 100107 (TRAV8-3, TRAJ42)
CAVGAWGSQGNLIF

SEQ ID NO: 200214 - protein, 16 aa, Homo sapiens
  CDR3 for beta chain variable domain of TCR clone 100107 (TRBV5-1, TRBJ2-5)
CASSSSGLGGAETQYF

SEQ ID NO: 200215 - protein, 13 aa, Homo sapiens
  CDR3 for alpha chain variable domain of TCR clone 100108 (TRAV13-1, TRAJ20)
CAARVSNDYKLSF

SEQ ID NO: 200216 - protein, 16 aa, Homo sapiens
  CDR3 for beta chain variable domain of TCR clone 100108 (TRBV11-1, TRBJ1-1)
CATSPRDRAFNTEAFF

SEQ ID NO: 200217 - protein, 17 aa, Homo sapiens
  CDR3 for alpha chain variable domain of TCR clone 100109 (TRAV3, TRAJ38)
CAVRDCLNAGNNRKLIW

SEQ ID NO: 200218 - protein, 15 aa, Homo sapiens
  CDR3 for beta chain variable domain of TCR clone 100109 (TRBV7-2, TRBJ1-2)
CASSPRAGWNYGYTF

SEQ ID NO: 200219 - protein, 13 aa, Homo sapiens
  CDR3 for alpha chain variable domain of TCR clone 100110 (TRAV27, TRAJ45)
CRSPGGGADGLTF

SEQ ID NO: 200220 - protein, 15 aa, Homo sapiens
  CDR3 for beta chain variable domain of TCR clone 100110 (TRBV20-1, TRBJ2-7)
CSARDRVSGMDEQYF

SEQ ID NO: 200221 - protein, 14 aa, Homo sapiens
  CDR3 for alpha chain variable domain of TCR clone 100111 (TRAV8-4, TRAJ13)
CAVTLSGGYQIVTF

SEQ ID NO: 200222 - protein, 14 aa, Homo sapiens
  CDR3 for beta chain variable domain of TCR clone 100111 (TRBV7-2, TRBJ1-2)
CASSQTGSTYGYTF

SEQ ID NO: 200223 - protein, 11 aa, Homo sapiens
  CDR3 for alpha chain variable domain of TCR clone 100112 (TRAV12-1, TRAJ30)
CVANGQDRIIF

SEQ ID NO: 200224 - protein, 12 aa, Homo sapiens
  CDR3 for beta chain variable domain of TCR clone 100112 (TRBV27, TRBJ2-2)
CASKLFTGELFF

SEQ ID NO: 200225 - protein, 14 aa, Homo sapiens
  CDR3 for alpha chain variable domain of TCR clone 100113 (TRAV26-1, TRAJ44)
CVVRPTGTASKLTF

SEQ ID NO: 200226 - protein, 12 aa, Homo sapiens
  CDR3 for beta chain variable domain of TCR clone 100113 (TRBV11-3, TRBJ1-1)
CASSLRDSEAFF

SEQ ID NO: 200227 - protein, 14 aa, Homo sapiens
  CDR3 for alpha chain variable domain of TCR clone 100114 (TRAV12-1, TRAJ9)
CVVAGYTGSFKTIF

SEQ ID NO: 200228 - protein, 13 aa, Homo sapiens
  CDR3 for beta chain variable domain of TCR clone 100114 (TRBV20-1, TRBJ1-1)
CSARAGGNTEAFF

SEQ ID NO: 200229 - protein, 12 aa, Homo sapiens
  CDR3 for alpha chain variable domain of TCR clone 100115 (TRAV12-1, TRAJ40)
WVFYSGTYKYIF

SEQ ID NO: 200230 - protein, 12 aa, Homo sapiens
  CDR3 for beta chain variable domain of TCR clone 100115 (TRBV11-2, TRBJ2-2)
CASSLGGGELFF

SEQ ID NO: 200231 - protein, 13 aa, Homo sapiens
  CDR3 for alpha chain variable domain of TCR clone 100116 (TRAV8-3, TRAJ4)
WVFYSGGYNKLIF

SEQ ID NO: 200232 - protein, 16 aa, Homo sapiens
  CDR3 for beta chain variable domain of TCR clone 100116 (TRBV7-8, TRBJ2-3)
CTSSTEGQRETDTQYF

SEQ ID NO: 200233 - protein, 18 aa, Homo sapiens
  CDR3 for alpha chain variable domain of TCR clone 100117 (TRAV9-2, TRAJ52)
CALSRHNAGGTSYGKLTF

SEQ ID NO: 200234 - protein, 13 aa, Homo sapiens
  CDR3 for beta chain variable domain of TCR clone 100117 (TRBV7-9, TRBJ1-2)
CASSLKHNYGYTF

SEQ ID NO: 200235 - protein, 14 aa, Homo sapiens
  CDR3 for alpha chain variable domain of TCR clone 100118 (TRAV3, TRAJ17)
CAVRDAAAGNKLTF

SEQ ID NO: 200236 - protein, 16 aa, Homo sapiens
  CDR3 for beta chain variable domain of TCR clone 100118 (TRBV20-1, TRBJ1-2)
CSALMGQGVANYGYTF

SEQ ID NO: 200237 - protein, 14 aa, Homo sapiens
  CDR3 for alpha chain variable domain of TCR clone 100119 (TRAV13-1, TRAJ5)
CAASPDTGRRALTF

SEQ ID NO: 200238 - protein, 16 aa, Homo sapiens
  CDR3 for beta chain variable domain of TCR clone 100119 (TRBV18, TRBJ2-3)
CASSPGGLASTDTQYF

SEQ ID NO: 200239 - protein, 15 aa, Homo sapiens
  CDR3 for alpha chain variable domain of TCR clone 100120 (TRAV12-3, TRAJ6)
CAMSATTGRSYIPTF

SEQ ID NO: 200240 - protein, 19 aa, Homo sapiens
  CDR3 for beta chain variable domain of TCR clone 100120 (TRBV25-1, TRBJ2-2)
CAILVYRVDRGRKTGELFF

SEQ ID NO: 200241 - protein, 16 aa, Homo sapiens
  CDR3 for alpha chain variable domain of TCR clone 100121 (TRAV30, TRAJ24)
CGTEIVDADGWGKFQF

SEQ ID NO: 200242 - protein, 15 aa, Homo sapiens
  CDR3 for beta chain variable domain of TCR clone 100121 (TRBV9, TRBJ1-6)
CASSVAGTGDSPLHF

SEQ ID NO: 200243 - protein, 16 aa, Homo sapiens
  CDR3 for alpha chain variable domain of TCR clone 100122 (TRAV27, TRAJ13)
CAGAKSDSGGYQKVTF

SEQ ID NO: 200244 - protein, 15 aa, Homo sapiens
  CDR3 for beta chain variable domain of TCR clone 100122 (TRBV2, TRBJ2-7)
CASSEGLARSYEQYF

SEQ ID NO: 200245 - protein, 14 aa, Homo sapiens
  CDR3 for alpha chain variable domain of TCR clone 100123 (TRAV8-1, TRAJ23)
CAVGTYNKGGKLIF

SEQ ID NO: 200246 - protein, 16 aa, Homo sapiens
  CDR3 for beta chain variable domain of TCR clone 100123 (TRBV18, TRBJ1-5)
CASSPSTGNSNQPQHF

SEQ ID NO: 200247 - protein, 14 aa, Homo sapiens
  CDR3 for alpha chain variable domain of TCR clone 100124 (TRAV1-2, TRAJ16)
CAVNRFSDGQKLLF

SEQ ID NO: 200248 - protein, 17 aa, Homo sapiens
  CDR3 for beta chain variable domain of TCR clone 100124 (TRBV4-2, TRBJ1-1)
CASTQFGGGSGNTEAFF

SEQ ID NO: 200249 - protein, 14 aa, Homo sapiens
  CDR3 for alpha chain variable domain of TCR clone 100125 (TRAV17, TRAJ57)
CATDASGGSEKLFF

SEQ ID NO: 200250 - protein, 14 aa, Homo sapiens
  CDR3 for beta chain variable domain of TCR clone 100125 (TRBV4-2, TRBJ2-1)
CASGLDRAYNEQFF

SEQ ID NO: 200251 - protein, 12 aa, Homo sapiens
  CDR3 for alpha chain variable domain of TCR clone 100126 (TRAV22, TRAJ22)
CAPGGSARQLTF

SEQ ID NO: 200252 - protein, 13 aa, Homo sapiens
  CDR3 for beta chain variable domain of TCR clone 100126 (TRBV15, TRBJ1-6)
CVTSGGLNSPLHF

SEQ ID NO: 200253 - protein, 13 aa, Homo sapiens
  CDR3 for alpha chain variable domain of TCR clone 100127 (TRAV2, TRAJ15)
CAVASQAGTALIF

SEQ ID NO: 200254 - protein, 16 aa, Homo sapiens
  CDR3 for beta chain variable domain of TCR clone 100127 (TRBV7-9, TRBJ1-2)
CASSLGFSSGEDGYTF

SEQ ID NO: 200255 - protein, 12 aa, Homo sapiens
  CDR3 for alpha chain variable domain of TCR clone 100128 (TRAV17, TRAJ39)
CATGAAGNMLTF

SEQ ID NO: 200256 - protein, 14 aa, Homo sapiens
  CDR3 for beta chain variable domain of TCR clone 100128 (TRBV7-9, TRBJ1-2)
CASSRQGANYGYSF

SEQ ID NO: 200257 - protein, 14 aa, Homo sapiens
  CDR3 for alpha chain variable domain of TCR clone 100129 (TRAV8-3, TRAJ4)
CTVGAAGGYNKLIF

SEQ ID NO: 200258 - protein, 15 aa, Homo sapiens
  CDR3 for beta chain variable domain of TCR clone 100129 (TRBV6-5, TRBJ2-1)
CASSYDAGAGNEQFF

SEQ ID NO: 200259 - protein, 16 aa, Homo sapiens
  CDR3 for alpha chain variable domain of TCR clone 100130 (TRAV22, TRAJ45)
CAVERGKRGGADGLTF

SEQ ID NO: 200260 - protein, 16 aa, Homo sapiens
  CDR3 for beta chain variable domain of TCR clone 100130 (TRBV12-5, TRBJ2-5)
CASGPRTSGNQETQYF

SEQ ID NO: 200261 - protein, 15 aa, Homo sapiens
  CDR3 for alpha chain variable domain of TCR clone 100131 (TRAV8-3, TRAJ15)
CAVGAPNQAGTALIF

SEQ ID NO: 200262 - protein, 12 aa, Homo sapiens
  CDR3 for beta chain variable domain of TCR clone 100131 (TRBV12-4, TRBJ2-1)
CASSPRRNEQFF

SEQ ID NO: 200263 - protein, 13 aa, Homo sapiens
  CDR3 for alpha chain variable domain of TCR clone 100132 (TRAV16, TRAJ28)
CALTGAGSYKLTF

SEQ ID NO: 200264 - protein, 16 aa, Homo sapiens
  CDR3 for beta chain variable domain of TCR clone 100132 (TRBV28, TRBJ1-5)
CASSLTGQGWNQPQHF

SEQ ID NO: 200265 - protein, 16 aa, Homo sapiens
  CDR3 for alpha chain variable domain of TCR clone 100133 (TRAV16, TRAJ57)
CAPYLITQGGSEKLVF

SEQ ID NO: 200266 - protein, 17 aa, Homo sapiens
  CDR3 for beta chain variable domain of TCR clone 100133 (TRBV24-1, TRBJ2-4)
CATSDAEARGVRNTQYF

SEQ ID NO: 200267 - protein, 13 aa, Homo sapiens
  CDR3 for alpha chain variable domain of TCR clone 100134 (TRAV1-2, TRAJ9)
CAALNTGGFKTLF

SEQ ID NO: 200268 - protein, 14 aa, Homo sapiens
  CDR3 for beta chain variable domain of TCR clone 100134 (TRBV7-3, TRBJ2-1)
CASSLAGGTNEQFF

SEQ ID NO: 200269 - protein, 15 aa, Homo sapiens
  CDR3 for alpha chain variable domain of TCR clone 100135 (TRAV8-3, TRAJ7)
CAVGSISYGNNRLAF

SEQ ID NO: 200270 - protein, 13 aa, Homo sapiens
  CDR3 for beta chain variable domain of TCR clone 100135 (TRBV4-2, TRBJ1-1)
CASSQAGNTEAFF

SEQ ID NO: 200271 - protein, 17 aa, Homo sapiens
  CDR3 for alpha chain variable domain of TCR clone 100136 (TRAV13-1, TRAJ52)
CAAGRNAGGTSYGKLTF

SEQ ID NO: 200272 - protein, 17 aa, Homo sapiens
  CDR3 for beta chain variable domain of TCR clone 100136 (TRBV11-2, TRBJ2-1)
CASSLYPPGVEYNEQFF

SEQ ID NO: 200273 - protein, 17 aa, Homo sapiens
  CDR3 for alpha chain variable domain of TCR clone 100137 (TRAV13-1, TRAJ52)
CAASSGAGGTSYGKLTF

SEQ ID NO: 200274 - protein, 15 aa, Homo sapiens
  CDR3 for beta chain variable domain of TCR clone 100137 (TRBV28, TRBJ1-5)
CASSRDRGRDQPQHF

SEQ ID NO: 200275 - protein, 12 aa, Homo sapiens
  CDR3 for alpha chain variable domain of TCR clone 100138 (TRAV21, TRAJ13)
PGPSGGYQKVTF

SEQ ID NO: 200276 - protein, 14 aa, Homo sapiens
  CDR3 for beta chain variable domain of TCR clone 100138 (TRBV11-3, TRBJ2-7)
CASSLGVGDYEQYF

SEQ ID NO: 200277 - protein, 13 aa, Homo sapiens
  CDR3 for alpha chain variable domain of TCR clone 100139 (TRAV12-2, TRAJ9)
CAGGNTGGFKTIF

SEQ ID NO: 200278 - protein, 13 aa, Homo sapiens
  CDR3 for beta chain variable domain of TCR clone 100139 (TRBV7-2, TRBJ2-7)
CASSSPSGSEQYF

SEQ ID NO: 200279 - protein, 12 aa, Homo sapiens
  CDR3 for alpha chain variable domain of TCR clone 100140 (TRAV38-2/DV8, TRAJ48)
CALLSGNEKLTF

SEQ ID NO: 200280 - protein, 15 aa, Homo sapiens
  CDR3 for beta chain variable domain of TCR clone 100140 (TRBV7-8, TRBJ2-3)
CASSSTGLETDTQYF

SEQ ID NO: 200281 - protein, 15 aa, Homo sapiens
  CDR3 for alpha chain variable domain of TCR clone 100141 (TRAV3, TRAJ9)
CAVRARNTGGFKTIF

SEQ ID NO: 200282 - protein, 14 aa, Homo sapiens
  CDR3 for beta chain variable domain of TCR clone 100141 (TRBV12-5, TRBJ2-5)
CASGSRTHQETQYF

SEQ ID NO: 200283 - protein, 14 aa, Homo sapiens
  CDR3 for alpha chain variable domain of TCR clone 100142 (TRAV1-2, TRAJ16)
CAVNRFSDVQKLLF

SEQ ID NO: 200284 - protein, 15 aa, Homo sapiens
  CDR3 for beta chain variable domain of TCR clone 100142 (TRBV27, TRBJ1-1)
CASSPYADPYTEAFF

SEQ ID NO: 200285 - protein, 15 aa, Homo sapiens
  CDR3 for alpha chain variable domain of TCR clone 100143 (TRAV21, TRAJ53)
CATLNSRGSNYKLTF

SEQ ID NO: 200286 - protein, 15 aa, Homo sapiens
  CDR3 for beta chain variable domain of TCR clone 100143 (TRBV20-1, TRBJ2-7)
CSARDRVSGMDEQYF

SEQ ID NO: 200287 - protein, 15 aa, Homo sapiens
  CDR3 for alpha chain variable domain of TCR clone 100144 (TRAV8-2, TRAJ40)
CVVLGTTSGTYKYIF

SEQ ID NO: 200288 - protein, 11 aa, Homo sapiens
  CDR3 for beta chain variable domain of TCR clone 100144 (TRBV12-4, TRBJ2-3)
CASTATDTQYF

SEQ ID NO: 200289 - protein, 14 aa, Homo sapiens
  CDR3 for alpha chain variable domain of TCR clone 100145 (TRAV12-2, TRAJ40)
CAVTIPSGTYKYIF

SEQ ID NO: 200290 - protein, 13 aa, Homo sapiens
  CDR3 for beta chain variable domain of TCR clone 100145 (TRBV7-9, TRBJ1-2)
CASSLKQNYGYTF

SEQ ID NO: 200291 - protein, 16 aa, Homo sapiens
  CDR3 for alpha chain variable domain of TCR clone 100146 (TRAV4, TRAJ5)
CLVGPDHGHGRESTYF

SEQ ID NO: 200292 - protein, 17 aa, Homo sapiens
  CDR3 for beta chain variable domain of TCR clone 100146 (TRBV11-2, TRBJ2-1)
CASSLYPPGVEYNEQFF

SEQ ID NO: 200293 - protein, 21 aa, Homo sapiens
  CDR3 for alpha chain variable domain of TCR clone 100147 (TRAV16, TRAJ22)
HLKKPFDQEEDSAMYLRQLTF

SEQ ID NO: 200294 - protein, 15 aa, Homo sapiens
  CDR3 for beta chain variable domain of TCR clone 100147 (TRBV7-9, TRBJ1-6)
CASSSPGRGNSPLHF

SEQ ID NO: 200295 - protein, 15 aa, Homo sapiens
  CDR3 for alpha chain variable domain of TCR clone 100148 (TRAV12-3, TRAJ54)
CAMSPPFQGAQKLGF

SEQ ID NO: 200296 - protein, 15 aa, Homo sapiens
  CDR3 for beta chain variable domain of TCR clone 100148 (TRBV20-1, TRBJ2-7)
CSARDRVSGMDEQYF

SEQ ID NO: 200297 - protein, 15 aa, Homo sapiens
  CDR3 for alpha chain variable domain of TCR clone 100149 (TRAV3, TRAJ5)
CAVRDLVTGRRALTF

SEQ ID NO: 200298 - protein, 13 aa, Homo sapiens
  CDR3 for beta chain variable domain of TCR clone 100149 (TRBV12-4, TRBJ2-7)
CASSPTETYEQYF

SEQ ID NO: 200299 - protein, 18 aa, Homo sapiens
  CDR3 for alpha chain variable domain of TCR clone 100150 (TRAV13-1, TRAJ52)
CAAKNPNAGGTSYGKLTF

SEQ ID NO: 200300 - protein, 15 aa, Homo sapiens
  CDR3 for beta chain variable domain of TCR clone 100150 (TRBV6-1, TRBJ2-3)
CASSERGGIIDTQYF

SEQ ID NO: 200301 - protein, 14 aa, Homo sapiens
  CDR3 for alpha chain variable domain of TCR clone 100151 (TRAV16, TRAJ33)
CALSAMDSNYQLIW

SEQ ID NO: 200302 - protein, 13 aa, Homo sapiens
  CDR3 for beta chain variable domain of TCR clone 100151 (TRBV27, TRBJ2-7)
CASSLRHRYEQYF

SEQ ID NO: 200303 - protein, 15 aa, Homo sapiens
  CDR3 for alpha chain variable domain of TCR clone 100152 (TRAV38-1, TRAJ37)
CAFIFGSGNTGKLIF

SEQ ID NO: 200304 - protein, 16 aa, Homo sapiens
  CDR3 for beta chain variable domain of TCR clone 100152 (TRBV19, TRBJ2-1)
CASSKAGPSSYNEQFF

SEQ ID NO: 200305 - protein, 11 aa, Homo sapiens
  CDR3 for alpha chain variable domain of TCR clone 100153 (TRAV3, TRAJ21)
CAVRDIERGNF

SEQ ID NO: 200306 - protein, 16 aa, Homo sapiens
  CDR3 for beta chain variable domain of TCR clone 100153 (TRBV12-4, TRBJ1-5)
CASSRPVGGSNQPQHF

SEQ ID NO: 200307 - protein, 14 aa, Homo sapiens
  CDR3 for alpha chain variable domain of TCR clone 100154 (TRAV16, TRAJ33)
CALSAMDSNYQLIW

SEQ ID NO: 200308 - protein, 12 aa, Homo sapiens
  CDR3 for beta chain variable domain of TCR clone 100154 (TRBV5-1, TRBJ2-3)
CASSLAADTQYF

SEQ ID NO: 200309 - protein, 15 aa, Homo sapiens
  CDR3 for alpha chain variable domain of TCR clone 100155 (TRAV29/DV5, TRAJ29)
CAASERSSGNTPLVF

SEQ ID NO: 200310 - protein, 17 aa, Homo sapiens
  CDR3 for beta chain variable domain of TCR clone 100155 (TRBV4-1, TRBJ1-4)
CASSQEGPRGVEKKLFF

SEQ ID NO: 200311 - protein, 14 aa, Homo sapiens
  CDR3 for alpha chain variable domain of TCR clone 100156 (TRAV34, TRAJ44)
CGADGTGTARKLTF

SEQ ID NO: 200312 - protein, 15 aa, Homo sapiens
  CDR3 for beta chain variable domain of TCR clone 100156 (TRBV5-1, TRBJ2-1)
CASSPPRAPYNEQFF

SEQ ID NO: 200313 - protein, 12 aa, Homo sapiens
  CDR3 for alpha chain variable domain of TCR clone 100157 (TRAV13-1, TRAJ27)
CAAHTNAGKSTF

SEQ ID NO: 200314 - protein, 19 aa, Homo sapiens
  CDR3 for beta chain variable domain of TCR clone 100157 (TRBV7-2, TRBJ2-3)
CASSPGLAGGGLTTDTQYF

SEQ ID NO: 200315 - protein, 10 aa, Homo sapiens
  CDR3 for alpha chain variable domain of TCR clone 100158 (TRAV12-1, TRAJ37)
VRGNTGKLIF

SEQ ID NO: 200316 - protein, 15 aa, Homo sapiens
  CDR3 for beta chain variable domain of TCR clone 100158 (TRBV7-2, TRBJ2-3)
CASSLEQGGTDTQYF

SEQ ID NO: 200317 - protein, 16 aa, Homo sapiens
  CDR3 for alpha chain variable domain of TCR clone 100159 (TRAV3, TRAJ4)
CAVRPSPSGGYNKLIF

SEQ ID NO: 200318 - protein, 12 aa, Homo sapiens
  CDR3 for beta chain variable domain of TCR clone 100159 (TRBV7-9, TRBJ2-7)
CASSQGVYEQCF

SEQ ID NO: 200319 - protein, 14 aa, Homo sapiens
  CDR3 for alpha chain variable domain of TCR clone 100160 (TRAV12-3, TRAJ10)
SHLPLTGGGNKFTF

SEQ ID NO: 200320 - protein, 13 aa, Homo sapiens
  CDR3 for beta chain variable domain of TCR clone 100160 (TRBV27, TRBJ1-1)
CASSLSIGAEAFF

SEQ ID NO: 200321 - protein, 15 aa, Homo sapiens
  CDR3 for alpha chain variable domain of TCR clone 100161 (TRAV25, TRAJ53)
CPTSNSGGSNSKLTF

SEQ ID NO: 200322 - protein, 14 aa, Homo sapiens
  CDR3 for beta chain variable domain of TCR clone 100161 (TRBV11-2, TRBJ2-3)
CASSRLARTDTQYF

SEQ ID NO: 200323 - protein, 14 aa, Homo sapiens
  CDR3 for alpha chain variable domain of TCR clone 100162 (TRAV34, TRAJ22)
CGADTSGYARQLTF

SEQ ID NO: 200324 - protein, 16 aa, Homo sapiens
  CDR3 for beta chain variable domain of TCR clone 100162 (TRBV2, TRBJ2-3)
CQHRGAPRRWTDTQYF

SEQ ID NO: 200325 - protein, 15 aa, Homo sapiens
  CDR3 for alpha chain variable domain of TCR clone 100163 (TRAV2, TRAJ15)
CAVEDRGQAGTALIF

SEQ ID NO: 200326 - protein, 16 aa, Homo sapiens
  CDR3 for beta chain variable domain of TCR clone 100163 (TRBV20-1, TRBJ1-4)
CSAPGQGLLTNEKLFF

SEQ ID NO: 200327 - protein, 12 aa, Homo sapiens
  CDR3 for alpha chain variable domain of TCR clone 100164 (TRAV12-3, TRAJ20)
CAIVRGDYKLSF

SEQ ID NO: 200328 - protein, 12 aa, Homo sapiens
  CDR3 for beta chain variable domain of TCR clone 100164 (TRBV6-1, TRBJ2-7)
CASSDYSYEQYF

SEQ ID NO: 200329 - protein, 16 aa, Homo sapiens
  CDR3 for alpha chain variable domain of TCR clone 100165 (TRAV13-1, TRAJ48)
CAASIFGNFGNEQLTF

SEQ ID NO: 200330 - protein, 14 aa, Homo sapiens
  CDR3 for beta chain variable domain of TCR clone 100165 (TRBV7-3, TRBJ1-1)
CASSLKGGNTEAFF

SEQ ID NO: 200331 - protein, 14 aa, Homo sapiens
  CDR3 for alpha chain variable domain of TCR clone 100166 (TRAV1-2, TRAJ8)
CAVREDTGFQKLVF

SEQ ID NO: 200332 - protein, 16 aa, Homo sapiens
  CDR3 for beta chain variable domain of TCR clone 100166 (TRBV4-2, TRBJ2-7)
CASSQDGVERGYEQYF

SEQ ID NO: 200333 - protein, 11 aa, Homo sapiens
  CDR3 for alpha chain variable domain of TCR clone 100167 (TRAV2, TRAJ13)
CASGGYQKVTF

SEQ ID NO: 200334 - protein, 13 aa, Homo sapiens
  CDR3 for beta chain variable domain of TCR clone 100167 (TRBV7-7, TRBJ2-2)
CASSLTSAGELFF

SEQ ID NO: 200335 - protein, 11 aa, Homo sapiens
  CDR3 for alpha chain variable domain of TCR clone 100168 (TRAV1-2, TRAJ31)
CAVKNNARLMF

SEQ ID NO: 200336 - protein, 15 aa, Homo sapiens
  CDR3 for beta chain variable domain of TCR clone 100168 (TRBV11-3, TRBJ2-3)
CASLKDGREGDTQYF

SEQ ID NO: 200337 - protein, 14 aa, Homo sapiens
  CDR3 for alpha chain variable domain of TCR clone 100169 (TRAV4, TRAJ17)
CLVDDMAAGNELTF

SEQ ID NO: 200338 - protein, 14 aa, Homo sapiens
  CDR3 for beta chain variable domain of TCR clone 100169 (TRBV4-1, TRBJ2-7)
CASSPVAGGDEQYF

SEQ ID NO: 200339 - protein, 12 aa, Homo sapiens
  CDR3 for alpha chain variable domain of TCR clone 100170 (TRAV1-1, TRAJ30)
CAVRGRDDKIIF

SEQ ID NO: 200340 - protein, 14 aa, Homo sapiens
  CDR3 for beta chain variable domain of TCR clone 100170 (TRBV7-2, TRBJ1-1)
CASSFLTGTTEAFF

SEQ ID NO: 200341 - protein, 12 aa, Homo sapiens
  CDR3 for alpha chain variable domain of TCR clone 100171 (TRAV16, TRAJ9)
CALRAGGFKTIF

SEQ ID NO: 200342 - protein, 13 aa, Homo sapiens
  CDR3 for beta chain variable domain of TCR clone 100171 (TRBV4-3, TRBJ1-1)
CASSQVEVSMAFF

SEQ ID NO: 200343 - protein, 13 aa, Homo sapiens
  CDR3 for alpha chain variable domain of TCR clone 100172 (TRAV13-2, TRAJ40)
CAEFTSGTYKYIS

SEQ ID NO: 200344 - protein, 14 aa, Homo sapiens
  CDR3 for beta chain variable domain of TCR clone 100172 (TRBV10-2, TRBJ1-5)
CASSSTGRNQPQHS

SEQ ID NO: 200345 - protein, 14 aa, Homo sapiens
  CDR3 for alpha chain variable domain of TCR clone 100173 (TRAV27, TRAJ13)
CRSSNSGGYQKVTF

SEQ ID NO: 200346 - protein, 14 aa, Homo sapiens
  CDR3 for beta chain variable domain of TCR clone 100173 (TRBV7-6, TRBJ2-1)
CASSLGGEADEQFF

SEQ ID NO: 200347 - protein, 11 aa, Homo sapiens
  CDR3 for alpha chain variable domain of TCR clone 100174 (TRAV23/DV6, TRAJ48)
CAPRWGEKLTF

SEQ ID NO: 200348 - protein, 13 aa, Homo sapiens
  CDR3 for beta chain variable domain of TCR clone 100174 (TRBV12-4, TRBJ2-5)
YASSPGTEETQYF

SEQ ID NO: 200349 - protein, 16 aa, Homo sapiens
  CDR3 for alpha chain variable domain of TCR clone 100175 (TRAV8-3, TRAJ44)
CAVGTLMTGTASKLPF

SEQ ID NO: 200350 - protein, 13 aa, Homo sapiens
  CDR3 for beta chain variable domain of TCR clone 100175 (TRBV11-2, TRBJ2-1)
CASSLRLTHEQFF

SEQ ID NO: 200351 - protein, 10 aa, Homo sapiens
  CDR3 for alpha chain variable domain of TCR clone 100176 (TRAV8-2, TRAJ29)
CTGGNTPLVF

SEQ ID NO: 200352 - protein, 17 aa, Homo sapiens
  CDR3 for beta chain variable domain of TCR clone 100176 (TRBV2, TRBJ2-7)
CASSQALTGRDSYEQYF

SEQ ID NO: 200353 - protein, 12 aa, Homo sapiens
  CDR3 for alpha chain variable domain of TCR clone 100177 (TRAV3, TRAJ20)
CAVRDPDYKISF

SEQ ID NO: 200354 - protein, 13 aa, Homo sapiens
  CDR3 for beta chain variable domain of TCR clone 100177 (TRBV9, TRBJ2-1)
CASSVGQGGEQFF

SEQ ID NO: 200355 - protein, 14 aa, Homo sapiens
  CDR3 for alpha chain variable domain of TCR clone 100178 (TRAV23/DV6, TRAJ17)
CAASIGAAGNKLTF

SEQ ID NO: 200356 - protein, 11 aa, Homo sapiens
  CDR3 for beta chain variable domain of TCR clone 100178 (TRBV20-1, TRBJ2-5)
QCRGAGETQYF

SEQ ID NO: 200357 - protein, 14 aa, Homo sapiens
  CDR3 for alpha chain variable domain of TCR clone 100179 (TRAV1-2, TRAJ16)
CAVNRFSDGQKLLF

SEQ ID NO: 200358 - protein, 11 aa, Homo sapiens
  CDR3 for beta chain variable domain of TCR clone 100179 (TRBV29-1, TRBJ2-5)
CSEDRTGTQSF

SEQ ID NO: 200359 - protein, 11 aa, Homo sapiens
  CDR3 for alpha chain variable domain of TCR clone 100180 (TRAV8-4, TRAJ13)
TLSGGYQKVTF

SEQ ID NO: 200360 - protein, 14 aa, Homo sapiens
  CDR3 for beta chain variable domain of TCR clone 100180 (TRBV7-2, TRBJ1-2)
CASSQTGSTYGYTF

SEQ ID NO: 200361 - protein, 12 aa, Homo sapiens
  CDR3 for alpha chain variable domain of TCR clone 100181 (TRAV13-2, TRAJ23)
CAERHRGGKLIF

SEQ ID NO: 200362 - protein, 16 aa, Homo sapiens
  CDR3 for beta chain variable domain of TCR clone 100181 (TRBV7-8, TRBJ2-4)
CASSAERTLAKNIQYF

SEQ ID NO: 200363 - protein, 15 aa, Homo sapiens
  CDR3 for alpha chain variable domain of TCR clone 100182 (TRAV29/DV5, TRAJ29)
CAASERSSGNTPLVF

SEQ ID NO: 200364 - protein, 19 aa, Homo sapiens
  CDR3 for beta chain variable domain of TCR clone 100182 (TRBV4-1, TRBJ1-4)
CASSQEGPRGWRKNCFLAV

SEQ ID NO: 200365 - protein, 12 aa, Homo sapiens
  CDR3 for alpha chain variable domain of TCR clone 100183 (TRAV8-3, TRAJ45)
IVLGGGADGLTF

SEQ ID NO: 200366 - protein, 13 aa, Homo sapiens
  CDR3 for beta chain variable domain of TCR clone 100183 (TRBV10-3, TRBJ2-7)
CASKLAVNYEQYF

SEQ ID NO: 200367 - protein, 16 aa, Homo sapiens
  CDR3 for alpha chain variable domain of TCR clone 100184 (TRAV30, TRAJ44)
CGTEDKRTGTASKLTF

SEQ ID NO: 200368 - protein, 16 aa, Homo sapiens
  CDR3 for beta chain variable domain of TCR clone 100184 (TRBV19, TRBJ2-1)
CASSKAGPSSYNEQFF

SEQ ID NO: 200369 - protein, 15 aa, Homo sapiens
  CDR3 for alpha chain variable domain of TCR clone 100185 (TRAV27, TRAJ38)
CAARRNAGNNRKLIW

SEQ ID NO: 200370 - protein, 14 aa, Homo sapiens
  CDR3 for beta chain variable domain of TCR clone 100185 (TRBV19, TRBJ2-7)
CASSMGQGAIEQYF

SEQ ID NO: 200371 - protein, 12 aa, Homo sapiens
  CDR3 for alpha chain variable domain of TCR clone 100186 (TRAV26-2, TRAJ21)
CILKGNFNKFYF

SEQ ID NO: 200372 - protein, 16 aa, Homo sapiens
  CDR3 for beta chain variable domain of TCR clone 100186 (TRBV2, TRBJ2-1)
CASSVGGSLSYNEQFF

SEQ ID NO: 200373 - protein, 13 aa, Homo sapiens
  CDR3 for alpha chain variable domain of TCR clone 100187 (TRAV30, TRAJ24)
CGTVTDSWGNLQF

SEQ ID NO: 200374 - protein, 15 aa, Homo sapiens
  CDR3 for beta chain variable domain of TCR clone 100187 (TRBV25-1, TRBJ1-4)
CASSPGDSTNEKLFF

SEQ ID NO: 200375 - protein, 11 aa, Homo sapiens
  CDR3 for alpha chain variable domain of TCR clone 100188 (TRAV2, TRAJ13)
CAPGGYQKVTF

SEQ ID NO: 200376 - protein, 17 aa, Homo sapiens
  CDR3 for beta chain variable domain of TCR clone 100188 (TRBV7-8, TRBJ2-6)
CASSAGTGGAGANVLTF

SEQ ID NO: 200377 - protein, 11 aa, Homo sapiens
  CDR3 for alpha chain variable domain of TCR clone 100189 (TRAV3, TRAJ21)
CAVGNFNKFYF

SEQ ID NO: 200378 - protein, 14 aa, Homo sapiens
  CDR3 for beta chain variable domain of TCR clone 100189 (TRBV5-4, TRBJ1-1)
CASSLDSRRDEAFF

SEQ ID NO: 200379 - protein, 12 aa, Homo sapiens
  CDR3 for alpha chain variable domain of TCR clone 100190 (TRAV3, TRAJ43)
CAVRDPNNDMRF

SEQ ID NO: 200380 - protein, 15 aa, Homo sapiens
  CDR3 for beta chain variable domain of TCR clone 100190 (TRBV7-9, TRBJ1-6)
CASSSPGRGNSPLHF

SEQ ID NO: 200381 - protein, 13 aa, Homo sapiens
  CDR3 for alpha chain variable domain of TCR clone 100191 (TRAV19, TRAJ57)
CALLQGGSEKLVF

SEQ ID NO: 200382 - protein, 14 aa, Homo sapiens
  CDR3 for beta chain variable domain of TCR clone 100191 (TRBV7-2, TRBJ1-1)
CAISFLTGTTEAFF

SEQ ID NO: 200383 - protein, 15 aa, Homo sapiens
  CDR3 for alpha chain variable domain of TCR clone 100192 (TRAV20, TRAJ23)
CAVQAVRNQGGKLIF

SEQ ID NO: 200384 - protein, 16 aa, Homo sapiens
  CDR3 for beta chain variable domain of TCR clone 100192 (TRBV27, TRBJ2-7)
CASSRQGRGWAYEQYF

SEQ ID NO: 200385 - protein, 14 aa, Homo sapiens
  CDR3 for alpha chain variable domain of TCR clone 100193 (TRAV12-2, TRAJ24)
CAVTPADSWGKLQF

SEQ ID NO: 200386 - protein, 14 aa, Homo sapiens
  CDR3 for beta chain variable domain of TCR clone 100193 (TRBV12-5, TRBJ2-5)
CASGSRTHQETQYF

SEQ ID NO: 200387 - protein, 14 aa, Homo sapiens
  CDR3 for alpha chain variable domain of TCR clone 100194 (TRAV26-1, TRAJ39)
CIVRGSRAGNMLTF

SEQ ID NO: 200388 - protein, 15 aa, Homo sapiens
  CDR3 for beta chain variable domain of TCR clone 100194 (TRBV7-9, TRBJ1-5)
CACSQGHQPNQPQHF

SEQ ID NO: 200389 - protein, 13 aa, Homo sapiens
  CDR3 for alpha chain variable domain of TCR clone 100195 (TRAV2, TRAJ40)
CAVVTSGTYKYIF

SEQ ID NO: 200390 - protein, 14 aa, Homo sapiens
  CDR3 for beta chain variable domain of TCR clone 100195 (TRBV5-5, TRBJ1-5)
CASSGQGVDQPQHF

SEQ ID NO: 200391 - protein, 13 aa, Homo sapiens
  CDR3 for alpha chain variable domain of TCR clone 100196 (TRAV23/DV6, TRAJ22)
CAPCSGSARQLTF

SEQ ID NO: 200392 - protein, 13 aa, Homo sapiens
  CDR3 for beta chain variable domain of TCR clone 100196 (TRBV6-1, TRBJ1-1)
CASSRQGNTEAFF

SEQ ID NO: 200393 - protein, 15 aa, Homo sapiens
  CDR3 for alpha chain variable domain of TCR clone 100197 (TRAV3, TRAJ17)
CAVSPKEAAGNKLTF

SEQ ID NO: 200394 - protein, 12 aa, Homo sapiens
  CDR3 for beta chain variable domain of TCR clone 100197 (TRBV7-9, TRBJ1-6)
CASSLITSPLHF

SEQ ID NO: 200395 - protein, 12 aa, Homo sapiens
  CDR3 for alpha chain variable domain of TCR clone 100198 (TRAV35, TRAJ39)
LAPNNAGNMLTF

SEQ ID NO: 200396 - protein, 16 aa, Homo sapiens
  CDR3 for beta chain variable domain of TCR clone 100198 (TRBV2, TRBJ2-3)
CAISTSVEGVTDTQYF

SEQ ID NO: 200397 - protein, 15 aa, Homo sapiens
  CDR3 for alpha chain variable domain of TCR clone 100199 (TRAV3, TRAJ13)
CAVRVYYGGYQKVTF

SEQ ID NO: 200398 - protein, 15 aa, Homo sapiens
  CDR3 for beta chain variable domain of TCR clone 100199 (TRBV5-7, TRBJ1-2)
CASSLGVAANYGYTF

SEQ ID NO: 200399 - protein, 12 aa, Homo sapiens
  CDR3 for alpha chain variable domain of TCR clone 100200 (TRAV3, TRAJ20)
CAVRDPDYKLSF

SEQ ID NO: 200400 - protein, 12 aa, Homo sapiens
  CDR3 for beta chain variable domain of TCR clone 100200 (TRBV24-1, TRBJ2-3)
CATSDSTDTQYF

SEQ ID NO: 200401 - protein, 18 aa, Homo sapiens
  CDR3 for alpha chain variable domain of TCR clone 100201 (TRAV12-3, TRAJ52)
CAMSRTNAGGTSYGRLTF

SEQ ID NO: 200402 - protein, 17 aa, Homo sapiens
  CDR3 for beta chain variable domain of TCR clone 100201 (TRBV13, TRBJ2-3)
CASSLSRVAGGRNTQYF

SEQ ID NO: 200403 - protein, 13 aa, Homo sapiens
  CDR3 for alpha chain variable domain of TCR clone 100202 (TRAV8-2, TRAJ43)
CVVSDQGDNDSRF

SEQ ID NO: 200404 - protein, 12 aa, Homo sapiens
  CDR3 for beta chain variable domain of TCR clone 100202 (TRBV7-9, TRBJ2-7)
CASRTGFDEQYF

SEQ ID NO: 200405 - protein, 15 aa, Homo sapiens
  CDR3 for alpha chain variable domain of TCR clone 100203 (TRAV26-1, TRAJ29)
CIVRVEGSGNTPLVF

SEQ ID NO: 200406 - protein, 11 aa, Homo sapiens
  CDR3 for beta chain variable domain of TCR clone 100203 (TRBV4-1, TRBJ2-2)
CASEHTGELFF

SEQ ID NO: 200407 - protein, 13 aa, Homo sapiens
  CDR3 for alpha chain variable domain of TCR clone 100204 (TRAV2, TRAJ40)
CAVVPSGTYKYIF

SEQ ID NO: 200408 - protein, 14 aa, Homo sapiens
  CDR3 for beta chain variable domain of TCR clone 100204 (TRBV19, TRBJ2-1)
CASPTFVLSGEQFL

SEQ ID NO: 200409 - protein, 17 aa, Homo sapiens
  CDR3 for alpha chain variable domain of TCR clone 100205 (TRAV20, TRAJ4)
CAVQLVLFSGGYNKLIF

SEQ ID NO: 200410 - protein, 15 aa, Homo sapiens
  CDR3 for beta chain variable domain of TCR clone 100205 (TRBV7-9, TRBJ1-5)
CASSQGHQPNQPQHF

SEQ ID NO: 200411 - protein, 14 aa, Homo sapiens
  CDR3 for alpha chain variable domain of TCR clone 100206 (TRAV13-2, TRAJ43)
CAEIPTYNNTDMRF

SEQ ID NO: 200412 - protein, 15 aa, Homo sapiens
  CDR3 for beta chain variable domain of TCR clone 100206 (TRBV7-9, TRBJ2-2)
CASGPLDTFPGELFF

SEQ ID NO: 200413 - protein, 12 aa, Homo sapiens
  CDR3 for alpha chain variable domain of TCR clone 100207 (TRAV1-1, TRAJ8)
CAGGTGFQKPVF

SEQ ID NO: 200414 - protein, 13 aa, Homo sapiens
  CDR3 for beta chain variable domain of TCR clone 100207 (TRBV7-3, TRBJ1-1)
CASSQDWGAEAFF

SEQ ID NO: 200415 - protein, 15 aa, Homo sapiens
  CDR3 for alpha chain variable domain of TCR clone 100208 (TRAV8-6, TRAJ23)
CAMRLIYNQGGKLIF

SEQ ID NO: 200416 - protein, 13 aa, Homo sapiens
  CDR3 for beta chain variable domain of TCR clone 100208 (TRBV11-2, TRBJ2-2)
CASSLQNTGELFF

SEQ ID NO: 200417 - protein, 10 aa, Homo sapiens
  CDR3 for alpha chain variable domain of TCR clone 100209 (TRAV12-2, TRAJ41)
CAVTGYALHF

SEQ ID NO: 200418 - protein, 15 aa, Homo sapiens
  CDR3 for beta chain variable domain of TCR clone 100209 (TRBV4-2, TRBJ2-1)
CASSQDVGLAGEQFF

SEQ ID NO: 200419 - protein, 16 aa, Homo sapiens
  CDR3 for alpha chain variable domain of TCR clone 100210 (TRAV12-2, TRAJ18)
CAVTTDRGSTLGRLYF

SEQ ID NO: 200420 - protein, 14 aa, Homo sapiens
  CDR3 for beta chain variable domain of TCR clone 100210 (TRBV4-2, TRBJ1-5)
SASSQDSINQPQHF

SEQ ID NO: 200421 - protein, 14 aa, Homo sapiens
  CDR3 for alpha chain variable domain of TCR clone 100211 (TRAV13-1, TRAJ37)
CAASRLATQANKSL

SEQ ID NO: 200422 - protein, 16 aa, Homo sapiens
  CDR3 for beta chain variable domain of TCR clone 100211 (TRBV29-1, TRBJ2-7)
CSVEVVGTSGSYEQYF

SEQ ID NO: 200423 - protein, 11 aa, Homo sapiens
  CDR3 for alpha chain variable domain of TCR clone 100212 (TRAV2, TRAJ13)
CASGGYQKVTF

SEQ ID NO: 200424 - protein, 17 aa, Homo sapiens
  CDR3 for beta chain variable domain of TCR clone 100212 (TRBV20-1, TRBJ2-1)
CSAPPRLAGTRYNEQFF

SEQ ID NO: 200425 - protein, 13 aa, Homo sapiens
  CDR3 for alpha chain variable domain of TCR clone 100213 (TRAV12-2, TRAJ50)
CAGIVTSYDKVIF

SEQ ID NO: 200426 - protein, 14 aa, Homo sapiens
  CDR3 for beta chain variable domain of TCR clone 100213 (TRBV9, TRBJ2-1)
CASSVDPRGKEQFF

SEQ ID NO: 200427 - protein, 11 aa, Homo sapiens
  CDR3 for alpha chain variable domain of TCR clone 100214 (TRAV3, TRAJ17)
CAEAAGNRLTF

SEQ ID NO: 200428 - protein, 15 aa, Homo sapiens
  CDR3 for beta chain variable domain of TCR clone 100214 (TRBV12-4, TRBJ2-7)
CASSLGSGGPYEQYF

SEQ ID NO: 200429 - protein, 16 aa, Homo sapiens
  CDR3 for alpha chain variable domain of TCR clone 100215 (TRAV12-3, TRAJ53)
CAMSPGSGGSNYKLTF

SEQ ID NO: 200430 - protein, 15 aa, Homo sapiens
  CDR3 for beta chain variable domain of TCR clone 100215 (TRBV7-2, TRBJ1-2)
CASSLVSGGDYGYTF

SEQ ID NO: 200431 - protein, 18 aa, Homo sapiens
  CDR3 for alpha chain variable domain of TCR clone 100216 (TRAV13-1, TRAJ52)
CAAKNPNAGGTSYGKLTF

SEQ ID NO: 200432 - protein, 17 aa, Homo sapiens
  CDR3 for beta chain variable domain of TCR clone 100216 (TRBV19, TRBJ2-6)
CASSTGQVFSGANVLTF

SEQ ID NO: 200433 - protein, 13 aa, Homo sapiens
  CDR3 for alpha chain variable domain of TCR clone 100217 (TRAV17, TRAJ9)
CATGSTVGFKTIF

SEQ ID NO: 200434 - protein, 14 aa, Homo sapiens
  CDR3 for beta chain variable domain of TCR clone 100217 (TRBV7-8, TRBJ2-7)
CASTFRGGPNEQYF

SEQ ID NO: 200435 - protein, 16 aa, Homo sapiens
  CDR3 for alpha chain variable domain of TCR clone 100218 (TRAV30, TRAJ24)
CGTEIVDADSWGKFQF

SEQ ID NO: 200436 - protein, 17 aa, Homo sapiens
  CDR3 for beta chain variable domain of TCR clone 100218 (TRBV15, TRBJ1-2)
CATSGREIDVVNYGYTF

SEQ ID NO: 200437 - protein, 13 aa, Homo sapiens
  CDR3 for alpha chain variable domain of TCR clone 100219 (TRAV21, TRAJ27)
RAARPGNAGKSTF

SEQ ID NO: 200438 - protein, 14 aa, Homo sapiens
  CDR3 for beta chain variable domain of TCR clone 100219 (TRBV7-6, TRBJ2-3)
CAGSLGTVTDTQYF

SEQ ID NO: 200439 - protein, 14 aa, Homo sapiens
  CDR3 for alpha chain variable domain of TCR clone 100220 (TRAV3, TRAJ9)
CAVRLNSGGFKTIF

SEQ ID NO: 200440 - protein, 15 aa, Homo sapiens
  CDR3 for beta chain variable domain of TCR clone 100220 (TRBV7-2, TRBJ2-1)
CASSLASGRVNEQFF

SEQ ID NO: 200441 - protein, 13 aa, Homo sapiens
  CDR3 for alpha chain variable domain of TCR clone 100221 (TRAV1-1, TRAJ13)
CAVNSGGYQKVTF

SEQ ID NO: 200442 - protein, 12 aa, Homo sapiens
  CDR3 for beta chain variable domain of TCR clone 100221 (TRBV28, TRBJ2-1)
CASRVQINEQFF

SEQ ID NO: 200443 - protein, 14 aa, Homo sapiens
  CDR3 for alpha chain variable domain of TCR clone 100222 (TRAV26-1, TRAJ45)
CIEVTGGGADGLTF

SEQ ID NO: 200444 - protein, 13 aa, Homo sapiens
  CDR3 for beta chain variable domain of TCR clone 100222 (TRBV19, TRBJ1-2)
CASSVPGQDGYTF

SEQ ID NO: 200445 - protein, 19 aa, Homo sapiens
  CDR3 for alpha chain variable domain of TCR clone 100223 (TRAV1-2, TRAJ26)
CLLPLCCERPDNYCQNFVF

SEQ ID NO: 200446 - protein, 11 aa, Homo sapiens
  CDR3 for beta chain variable domain of TCR clone 100223 (TRBV29-1, TRBJ2-5)
CSEDRTGTQYF

SEQ ID NO: 200447 - protein, 15 aa, Homo sapiens
  CDR3 for alpha chain variable domain of TCR clone 100224 (TRAV12-2, TRAJ20)
CAVKGGFGAGTTVTV

SEQ ID NO: 200448 - protein, 14 aa, Homo sapiens
  CDR3 for beta chain variable domain of TCR clone 100224 (TRBV13, TRBJ2-5)
CASSLERVGETQYF

SEQ ID NO: 200449 - protein, 13 aa, Homo sapiens
  CDR3 for alpha chain variable domain of TCR clone 100225 (TRAV29/DV5, TRAJ31)
CAASRHNNARLMF

SEQ ID NO: 200450 - protein, 12 aa, Homo sapiens
  CDR3 for beta chain variable domain of TCR clone 100225 (TRBV14, TRBJ2-7)
CASSLYKDEQYF

SEQ ID NO: 200451 - protein, 14 aa, Homo sapiens
  CDR3 for alpha chain variable domain of TCR clone 100226 (TRAV3, TRAJ34)
CAVRAPGNTDKRIF

SEQ ID NO: 200452 - protein, 17 aa, Homo sapiens
  CDR3 for beta chain variable domain of TCR clone 100226 (TRBV20-1, TRBJ2-7)
CSAAPGLARGISYEQYF

SEQ ID NO: 200453 - protein, 12 aa, Homo sapiens
  CDR3 for alpha chain variable domain of TCR clone 100227 (TRAV1-1, TRAJ39)
CAVPVVGNMLTF

SEQ ID NO: 200454 - protein, 14 aa, Homo sapiens
  CDR3 for beta chain variable domain of TCR clone 100227 (TRBV7-6, TRBJ2-3)
CASSLGTVTDTQYF

SEQ ID NO: 200455 - protein, 22 aa, Homo sapiens
  CDR3 for alpha chain variable domain of TCR clone 100228 (TRAV8-3, TRAJ32)
CAEEVVLQTSSSLELALCLLSS

SEQ ID NO: 200456 - protein, 15 aa, Homo sapiens
  CDR3 for beta chain variable domain of TCR clone 100228 (TRBV7-2, TRBJ2-1)
CASSSRTSREDEQFF

SEQ ID NO: 200457 - protein, 13 aa, Homo sapiens
  CDR3 for alpha chain variable domain of TCR clone 100229 (TRAV13-1, TRAJ20)
CAARVSNDYKFSF

SEQ ID NO: 200458 - protein, 12 aa, Homo sapiens
  CDR3 for beta chain variable domain of TCR clone 100229 (TRBV20-1, TRBJ2-1)
CSARLGTDEQFF

SEQ ID NO: 200459 - protein, 14 aa, Homo sapiens
  CDR3 for alpha chain variable domain of TCR clone 100230 (TRAV9-2, TRAJ39)
CALYIYNAGNMLTF

SEQ ID NO: 200460 - protein, 19 aa, Homo sapiens
  CDR3 for beta chain variable domain of TCR clone 100230 (TRBV23-1, TRBJ2-3)
TVSLRQQPRSTGSTDTQYF

SEQ ID NO: 200461 - protein, 14 aa, Homo sapiens
  CDR3 for alpha chain variable domain of TCR clone 100231 (TRAV13-1, TRAJ5)
CAASPGSRRRALTF

SEQ ID NO: 200462 - protein, 14 aa, Homo sapiens
  CDR3 for beta chain variable domain of TCR clone 100231 (TRBV25-1, TRBJ1-1)
CASTHLGGNTEAFF

SEQ ID NO: 200463 - protein, 14 aa, Homo sapiens
  CDR3 for alpha chain variable domain of TCR clone 100232 (TRAV12-2, TRAJ13)
CAVKKTGGYQKGTF

SEQ ID NO: 200464 - protein, 13 aa, Homo sapiens
  CDR3 for beta chain variable domain of TCR clone 100232 (TRBV10-3, TRBJ2-7)
CASKLAVNYEQYF

SEQ ID NO: 200465 - protein, 14 aa, Homo sapiens
  CDR3 for alpha chain variable domain of TCR clone 100233 (TRAV1-2, TRAJ8)
CAVREHTGFQKLVF

SEQ ID NO: 200466 - protein, 16 aa, Homo sapiens
  CDR3 for beta chain variable domain of TCR clone 100233 (TRBV20-1, TRBJ1-4)
CSAPGQGLLTNEKLFF

SEQ ID NO: 200467 - protein, 15 aa, Homo sapiens
  CDR3 for alpha chain variable domain of TCR clone 100234 (TRAV21, TRAJ53)
CATLNSGGSKYKLTF

SEQ ID NO: 200468 - protein, 16 aa, Homo sapiens
  CDR3 for beta chain variable domain of TCR clone 100234 (TRBV9, TRBJ2-1)
CASSVGGGGNYNEQFF

SEQ ID NO: 200469 - protein, 17 aa, Homo sapiens
  CDR3 for alpha chain variable domain of TCR clone 100235 (TRAV38-1, TRAJ28)
CAFMKPTSGAGSYQLTF

SEQ ID NO: 200470 - protein, 15 aa, Homo sapiens
  CDR3 for beta chain variable domain of TCR clone 100235 (TRBV5-1, TRBJ2-4)
CASSLGGGGSYIQYL

SEQ ID NO: 200471 - protein, 14 aa, Homo sapiens
  CDR3 for alpha chain variable domain of TCR clone 100236 (TRAV17, TRAJ33)
CATDARRSNYQLIW

SEQ ID NO: 200472 - protein, 15 aa, Homo sapiens
  CDR3 for beta chain variable domain of TCR clone 100236 (TRBV19, TRBJ1-1)
CASTSGQIQNTEAFF

SEQ ID NO: 200473 - protein, 16 aa, Homo sapiens
  CDR3 for alpha chain variable domain of TCR clone 100237 (TRAV12-3, TRAJ53)
CAMSPGSGGSNYKLTF

SEQ ID NO: 200474 - protein, 16 aa, Homo sapiens
  CDR3 for beta chain variable domain of TCR clone 100237 (TRBV19, TRBJ1-1)
CASRFGGPVTGTEAFF

SEQ ID NO: 200475 - protein, 13 aa, Homo sapiens
  CDR3 for alpha chain variable domain of TCR clone 100238 (TRAV26-1, TRAJ48)
CIVLRVRNEKLSF

SEQ ID NO: 200476 - protein, 14 aa, Homo sapiens
  CDR3 for beta chain variable domain of TCR clone 100238 (TRBV20-1, TRBJ1-5)
CSARDISKNQPQHF

SEQ ID NO: 200477 - protein, 14 aa, Homo sapiens
  CDR3 for alpha chain variable domain of TCR clone 100239 (TRAV1-2, TRAJ16)
CAVNRFSDGQKLLF

SEQ ID NO: 200478 - protein, 16 aa, Homo sapiens
  CDR3 for beta chain variable domain of TCR clone 100239 (TRBV20-1, TRBJ2-4)
CSATSLAELAKNIQYF

SEQ ID NO: 200479 - protein, 13 aa, Homo sapiens
  CDR3 for alpha chain variable domain of TCR clone 100240 (TRAV21, TRAJ15)
CAVANQAGTALIF

SEQ ID NO: 200480 - protein, 15 aa, Homo sapiens
  CDR3 for beta chain variable domain of TCR clone 100240 (TRBV11-3, TRBJ2-1)
CASSGGTSSLDEQFF

SEQ ID NO: 200481 - protein, 15 aa, Homo sapiens
  CDR3 for alpha chain variable domain of TCR clone 100241 (TRAV8-3, TRAJ45)
CASSYSGGGADGLTF

SEQ ID NO: 200482 - protein, 17 aa, Homo sapiens
  CDR3 for beta chain variable domain of TCR clone 100241 (TRBV7-8, TRBJ1-2)
CASSLRPLRGHLYGYTF

SEQ ID NO: 200483 - protein, 16 aa, Homo sapiens
  CDR3 for alpha chain variable domain of TCR clone 100242 (TRAV3, TRAJ4)
CAVRAFFSGGYNKLIF

SEQ ID NO: 200484 - protein, 15 aa, Homo sapiens
  CDR3 for beta chain variable domain of TCR clone 100242 (TRBV5-4, TRBJ2-3)
CASSLAGRVTDTQYF

SEQ ID NO: 200485 - protein, 15 aa, Homo sapiens
  CDR3 for alpha chain variable domain of TCR clone 100243 (TRAV3, TRAJ22)
CAVRDRGGSARQLTF

SEQ ID NO: 200486 - protein, 13 aa, Homo sapiens
  CDR3 for beta chain variable domain of TCR clone 100243 (TRBV5-1, TRBJ1-1)
CASSADWDTEAFF

SEQ ID NO: 200487 - protein, 14 aa, Homo sapiens
  CDR3 for alpha chain variable domain of TCR clone 100244 (TRAV1-2, TRAJ16)
CAVNRFSDGQKLLF

SEQ ID NO: 200488 - protein, 13 aa, Homo sapiens
  CDR3 for beta chain variable domain of TCR clone 100244 (TRBV7-3, TRBJ1-1)
CASSQEWGAEAFF

SEQ ID NO: 200489 - protein, 14 aa, Homo sapiens
  CDR3 for alpha chain variable domain of TCR clone 100245 (TRAV12-2, TRAJ45)
CALPERGGADGLTF

SEQ ID NO: 200490 - protein, 14 aa, Homo sapiens
  CDR3 for beta chain variable domain of TCR clone 100245 (TRBV18, TRBJ1-5)
CDSSPGNSNQPQHF

SEQ ID NO: 200491 - protein, 11 aa, Homo sapiens
  CDR3 for alpha chain variable domain of TCR clone 100246 (TRAV1-2, TRAJ20)
CAVANDYKLSF

SEQ ID NO: 200492 - protein, 13 aa, Homo sapiens
  CDR3 for beta chain variable domain of TCR clone 100246 (TRBV11-2, TRBJ2-5)
CASSSTGEETQYF

SEQ ID NO: 200493 - protein, 13 aa, Homo sapiens
  CDR3 for alpha chain variable domain of TCR clone 100247 (TRAV12-3, TRAJ9)
CAMRNTGGFKTIF

SEQ ID NO: 200494 - protein, 20 aa, Homo sapiens
  CDR3 for beta chain variable domain of TCR clone 100247 (TRBV28, TRBJ2-1)
CASTPIGRSPGLAGGNEQFF

SEQ ID NO: 200495 - protein, 14 aa, Homo sapiens
  CDR3 for alpha chain variable domain of TCR clone 100248 (TRAV12-2, TRAJ40)
CAVKIPSGTYQYIF

SEQ ID NO: 200496 - protein, 17 aa, Homo sapiens
  CDR3 for beta chain variable domain of TCR clone 100248 (TRBV11-2, TRBJ2-1)
CASSLYPPGVEYNEQFF

SEQ ID NO: 200497 - protein, 12 aa, Homo sapiens
  CDR3 for alpha chain variable domain of TCR clone 100249 (TRAV13-1, TRAJ21)
CAAKEGFNKFYF

SEQ ID NO: 200498 - protein, 14 aa, Homo sapiens
  CDR3 for beta chain variable domain of TCR clone 100249 (TRBV7-3, TRBJ1-1)
CASSLKGGNTEAFF

SEQ ID NO: 200499 - protein, 14 aa, Homo sapiens
  CDR3 for alpha chain variable domain of TCR clone 100250 (TRAV23/DV6, TRAJ22)
CAASVSGSARQLTF

SEQ ID NO: 200500 - protein, 13 aa, Homo sapiens
  CDR3 for beta chain variable domain of TCR clone 100250 (TRBV7-2, TRBJ2-2)
CASSSVRAGELFF

SEQ ID NO: 200501 - protein, 15 aa, Homo sapiens
  CDR3 for alpha chain variable domain of TCR clone 100251 (TRAV27, TRAJ28)
ASTSHSGAGSYQLTF

SEQ ID NO: 200502 - protein, 15 aa, Homo sapiens
  CDR3 for beta chain variable domain of TCR clone 100251 (TRBV7-2, TRBJ2-3)
CASSLVVRGPDTQYS

SEQ ID NO: 200503 - protein, 13 aa, Homo sapiens
  CDR3 for alpha chain variable domain of TCR clone 100252 (TRAV8-3, TRAJ28)
CAVGAVGGYQLTF

SEQ ID NO: 200504 - protein, 15 aa, Homo sapiens
  CDR3 for beta chain variable domain of TCR clone 100252 (TRBV7-9, TRBJ1-5)
CASSQGHQPNQPQYF

SEQ ID NO: 200505 - protein, 16 aa, Homo sapiens
  CDR3 for alpha chain variable domain of TCR clone 100253 (TRAV12-3, TRAJ53)
CAMSPGSGGSNDKLTF

SEQ ID NO: 200506 - protein, 13 aa, Homo sapiens
  CDR3 for beta chain variable domain of TCR clone 100253 (TRBV19, TRBJ1-2)
CASSVPGQDGYTF

SEQ ID NO: 200507 - protein, 11 aa, Homo sapiens
  CDR3 for alpha chain variable domain of TCR clone 100254 (TRAV21, TRAJ27)
CAVRVQANQPL

SEQ ID NO: 200508 - protein, 16 aa, Homo sapiens
  CDR3 for beta chain variable domain of TCR clone 100254 (TRBV3-1, TRBJ2-7)
CASSQGATGVAYEQYF

SEQ ID NO: 200509 - protein, 15 aa, Homo sapiens
  CDR3 for alpha chain variable domain of TCR clone 100255 (TRAV38-1, TRAJ57)
CAFMDSQGGSEKMVF

SEQ ID NO: 200510 - protein, 16 aa, Homo sapiens
  CDR3 for beta chain variable domain of TCR clone 100255 (TRBV10-3, TRBJ2-1)
CAIRGGGRGDYNEQFF

SEQ ID NO: 200511 - protein, 13 aa, Homo sapiens
  CDR3 for alpha chain variable domain of TCR clone 100256 (TRAV21, TRAJ20)
CAVGVFADYKLSF

SEQ ID NO: 200512 - protein, 14 aa, Homo sapiens
  CDR3 for beta chain variable domain of TCR clone 100256 (TRBV13, TRBJ2-7)
CASSLKGASYEQYF

SEQ ID NO: 200513 - protein, 15 aa, Homo sapiens
  CDR3 for alpha chain variable domain of TCR clone 100257 (TRAV17, TRAJ35)
CATAFVIGFGNVLHC

SEQ ID NO: 200514 - protein, 16 aa, Homo sapiens
  CDR3 for beta chain variable domain of TCR clone 100257 (TRBV11-2, TRBJ2-7)
CASSPLAWGPRYEQYF

SEQ ID NO: 200515 - protein, 15 aa, Homo sapiens
  CDR3 for alpha chain variable domain of TCR clone 100258 (TRAV13-1, TRAJ44)
CAASRGGGTASKLTF

SEQ ID NO: 200516 - protein, 17 aa, Homo sapiens
  CDR3 for beta chain variable domain of TCR clone 100258 (TRBV28, TRBJ2-5)
CASSTPEGDALQETQYF

SEQ ID NO: 200517 - protein, 13 aa, Homo sapiens
  CDR3 for alpha chain variable domain of TCR clone 100259 (TRAV8-3, TRAJ21)
CAVGAYNFNKFYF

SEQ ID NO: 200518 - protein, 15 aa, Homo sapiens
  CDR3 for beta chain variable domain of TCR clone 100259 (TRBV27, TRBJ2-1)
CASSNGGGSSNEQFF

SEQ ID NO: 200519 - protein, 14 aa, Homo sapiens
  CDR3 for alpha chain variable domain of TCR clone 100260 (TRAV1-2, TRAJ16)
CAVNRFSDGQKLLF

SEQ ID NO: 200520 - protein, 15 aa, Homo sapiens
  CDR3 for beta chain variable domain of TCR clone 100260 (TRBV28, TRBJ2-5)
CASSFRQGALETQYF

SEQ ID NO: 200521 - protein, 13 aa, Homo sapiens
  CDR3 for alpha chain variable domain of TCR clone 100261 (TRAV12-1, TRAJ6)
CVVFPGGSYIPTF

SEQ ID NO: 200522 - protein, 14 aa, Homo sapiens
  CDR3 for beta chain variable domain of TCR clone 100261 (TRBV20-1, TRBJ1-3)
CSASPTGAGNTIDF

SEQ ID NO: 200523 - protein, 18 aa, Homo sapiens
  CDR3 for alpha chain variable domain of TCR clone 100262 (TRAV12-2, )
CAVEDIQNPDPAVYQLRD

SEQ ID NO: 200524 - protein, 14 aa, Homo sapiens
  CDR3 for beta chain variable domain of TCR clone 100262 (TRBV7-3, TRBJ2-1)
CASSLAGGTNEQFF

SEQ ID NO: 200525 - protein, 14 aa, Homo sapiens
  CDR3 for alpha chain variable domain of TCR clone 100263 (TRAV2, TRAJ37)
CAVDFTSNQGKLIF

SEQ ID NO: 200526 - protein, 15 aa, Homo sapiens
  CDR3 for beta chain variable domain of TCR clone 100263 (TRBV20-1, TRBJ1-1)
CSASRGVTGNTEAFF

SEQ ID NO: 200527 - protein, 12 aa, Homo sapiens
  CDR3 for alpha chain variable domain of TCR clone 100264 (TRAV12-2, TRAJ4)
GWPEGGYNKLIF

SEQ ID NO: 200528 - protein, 14 aa, Homo sapiens
  CDR3 for beta chain variable domain of TCR clone 100264 (TRBV12-5, TRBJ2-5)
CASGSRTHQETQYF

SEQ ID NO: 200529 - protein, 15 aa, Homo sapiens
  CDR3 for alpha chain variable domain of TCR clone 100265 (TRAV12-1, TRAJ9)
CVVSFGDTGGFKTIF

SEQ ID NO: 200530 - protein, 16 aa, Homo sapiens
  CDR3 for beta chain variable domain of TCR clone 100265 (TRBV12-5, TRBJ2-5)
CASGPRTSGNQETQYF

SEQ ID NO: 200531 - protein, 16 aa, Homo sapiens
  CDR3 for alpha chain variable domain of TCR clone 100266 (TRAV3, TRAJ10)
CAVRDMRAGGGNKLTF

SEQ ID NO: 200532 - protein, 17 aa, Homo sapiens
  CDR3 for beta chain variable domain of TCR clone 100266 (TRBV7-9, TRBJ1-5)
CASSASQGGYSNQPQHF

SEQ ID NO: 200533 - protein, 14 aa, Homo sapiens
  CDR3 for alpha chain variable domain of TCR clone 100267 (TRAV2, TRAJ37)
CAVDFTSSTGKLVF

SEQ ID NO: 200534 - protein, 14 aa, Homo sapiens
  CDR3 for beta chain variable domain of TCR clone 100267 (TRBV5-4, TRBJ2-2)
CASRLDGGTGELFF

SEQ ID NO: 200535 - protein, 23 aa, Homo sapiens
  CDR3 for alpha chain variable domain of TCR clone 100268 (TRAV4, TRAJ26)
IPADRKSSTLSLPRVYYGQNFVF

SEQ ID NO: 200536 - protein, 16 aa, Homo sapiens
  CDR3 for beta chain variable domain of TCR clone 100268 (TRBV7-2, TRBJ1-2)
CASSSNQDRRGHGYAF

SEQ ID NO: 200537 - protein, 19 aa, Homo sapiens
  CDR3 for alpha chain variable domain of TCR clone 100269 (TRAV2, TRAJ20)
ILQVREADAAVYRDCKLSF

SEQ ID NO: 200538 - protein, 12 aa, Homo sapiens
  CDR3 for beta chain variable domain of TCR clone 100269 (TRBV19, TRBJ2-1)
CASSRQGAEQFF

SEQ ID NO: 200539 - protein, 16 aa, Homo sapiens
  CDR3 for alpha chain variable domain of TCR clone 100270 (TRAV13-1, TRAJ37)
CAASIGGSSNTGKLIF

SEQ ID NO: 200540 - protein, 13 aa, Homo sapiens
  CDR3 for beta chain variable domain of TCR clone 100270 (TRBV12-4, TRBJ1-5)
CASSPDRAQPQHF

SEQ ID NO: 200541 - protein, 12 aa, Homo sapiens
  CDR3 for alpha chain variable domain of TCR clone 100271 (TRAV27, TRAJ9)
CAGDSGGFKTIF

SEQ ID NO: 200542 - protein, 14 aa, Homo sapiens
  CDR3 for beta chain variable domain of TCR clone 100271 (TRBV6-1, TRBJ2-1)
CASAKDGFYNEQFF

SEQ ID NO: 200543 - protein, 13 aa, Homo sapiens
  CDR3 for alpha chain variable domain of TCR clone 100272 (TRAV8-3, TRAJ48)
CAVVPFGNEKLPF

SEQ ID NO: 200544 - protein, 15 aa, Homo sapiens
  CDR3 for beta chain variable domain of TCR clone 100272 (TRBV11-2, TRBJ2-1)
CASSSPSTRYNEQFF

SEQ ID NO: 200545 - protein, 14 aa, Homo sapiens
  CDR3 for alpha chain variable domain of TCR clone 100273 (TRAV12-2, TRAJ6)
CASKWGGGSYIPTF

SEQ ID NO: 200546 - protein, 14 aa, Homo sapiens
  CDR3 for beta chain variable domain of TCR clone 100273 (TRBV18, TRBJ2-5)
CASSPGVSQETQYF

SEQ ID NO: 200547 - protein, 12 aa, Homo sapiens
  CDR3 for alpha chain variable domain of TCR clone 100274 (TRAV12-3, TRAJ17)
CAMTLTGNKLTF

SEQ ID NO: 200548 - protein, 15 aa, Homo sapiens
  CDR3 for beta chain variable domain of TCR clone 100274 (TRBV20-1, TRBJ1-1)
CSASWTGGMNTEAFF

SEQ ID NO: 200549 - protein, 11 aa, Homo sapiens
  CDR3 for alpha chain variable domain of TCR clone 100275 (TRAV21, TRAJ48)
CAVDGNEKLTF

SEQ ID NO: 200550 - protein, 14 aa, Homo sapiens
  CDR3 for beta chain variable domain of TCR clone 100275 (TRBV19, TRBJ2-1)
CASPTFVLSGEQFF

SEQ ID NO: 200551 - protein, 15 aa, Homo sapiens
  CDR3 for alpha chain variable domain of TCR clone 100276 (TRAV22, TRAJ45)
CAAKYSGGGADGLTF

SEQ ID NO: 200552 - protein, 15 aa, Homo sapiens
  CDR3 for beta chain variable domain of TCR clone 100276 (TRBV20-1, TRBJ1-1)
CSASRGVTGNTEAFF

SEQ ID NO: 200553 - protein, 13 aa, Homo sapiens
  CDR3 for alpha chain variable domain of TCR clone 100277 (TRAV8-1, TRAJ28)
CAVSGAGSYQLTF

SEQ ID NO: 200554 - protein, 16 aa, Homo sapiens
  CDR3 for beta chain variable domain of TCR clone 100277 (TRBV12-5, TRBJ2-5)
CASGPRTSGNQETQYF

SEQ ID NO: 200555 - protein, 13 aa, Homo sapiens
  CDR3 for alpha chain variable domain of TCR clone 100278 (TRAV8-1, TRAJ28)
CAVSGAGSYQLTF

SEQ ID NO: 200556 - protein, 14 aa, Homo sapiens
  CDR3 for beta chain variable domain of TCR clone 100278 (TRBV7-2, TRBJ2-2)
CASKGQGAAGELFF

SEQ ID NO: 200557 - protein, 12 aa, Homo sapiens
  CDR3 for alpha chain variable domain of TCR clone 100279 (TRAV12-3, TRAJ17)
CAMKLTGNKLTF

SEQ ID NO: 200558 - protein, 14 aa, Homo sapiens
  CDR3 for beta chain variable domain of TCR clone 100279 (TRBV19, TRBJ2-1)
CASPTFVLSGEQFF

SEQ ID NO: 200559 - protein, 13 aa, Homo sapiens
  CDR3 for alpha chain variable domain of TCR clone 100280 (TRAV22, TRAJ29)
CAVGGSGNTPLIF

SEQ ID NO: 200560 - protein, 13 aa, Homo sapiens
  CDR3 for beta chain variable domain of TCR clone 100280 (TRBV4-2, TRBJ1-1)
CASSQAGNTEAFF

SEQ ID NO: 200561 - protein, 18 aa, Homo sapiens
  CDR3 for alpha chain variable domain of TCR clone 100281 (TRAV12-3, TRAJ52)
CAMSVGGAGGTSYGKLTF

SEQ ID NO: 200562 - protein, 14 aa, Homo sapiens
  CDR3 for beta chain variable domain of TCR clone 100281 (TRBV7-9, TRBJ2-7)
CASSLSQGSYEQYF

SEQ ID NO: 200563 - protein, 14 aa, Homo sapiens
  CDR3 for alpha chain variable domain of TCR clone 100282 (TRAV4, TRAJ43)
CLVGPMYNNNDMRL

SEQ ID NO: 200564 - protein, 21 aa, Homo sapiens
  CDR3 for beta chain variable domain of TCR clone 100282 (TRBV11-1, TRBJ2-1)
CASSARERLRPEGPSYNEQFF

SEQ ID NO: 200565 - protein, 17 aa, Homo sapiens
  CDR3 for alpha chain variable domain of TCR clone 100283 (TRAV4, TRAJ18)
CLVGERSGGSTLGRLYF

SEQ ID NO: 200566 - protein, 14 aa, Homo sapiens
  CDR3 for beta chain variable domain of TCR clone 100283 (TRBV6-5, TRBJ1-2)
CASSYDGTGGGYTF

SEQ ID NO: 200567 - protein, 18 aa, Homo sapiens
  CDR3 for alpha chain variable domain of TCR clone 100284 (TRAV13-1, TRAJ52)
CAAKNPNAGGTSYGKLTF

SEQ ID NO: 200568 - protein, 13 aa, Homo sapiens
  CDR3 for beta chain variable domain of TCR clone 100284 (TRBV7-3, TRBJ2-1)
CQQLSGGTNEQFF

SEQ ID NO: 200569 - protein, 12 aa, Homo sapiens
  CDR3 for alpha chain variable domain of TCR clone 100285 (TRAV21, TRAJ49)
CAVRNTGNQFYF

SEQ ID NO: 200570 - protein, 12 aa, Homo sapiens
  CDR3 for beta chain variable domain of TCR clone 100285 (TRBV7-9, TRBJ2-7)
WATRTDAYEQYF

SEQ ID NO: 200571 - protein, 15 aa, Homo sapiens
  CDR3 for alpha chain variable domain of TCR clone 100286 (TRAV2, TRAJ24)
CAVDVLTDSWGKFQF

SEQ ID NO: 200572 - protein, 14 aa, Homo sapiens
  CDR3 for beta chain variable domain of TCR clone 100286 (TRBV19, TRBJ2-1)
CASSMGSGRRSSSS

SEQ ID NO: 200573 - protein, 16 aa, Homo sapiens
  CDR3 for alpha chain variable domain of TCR clone 100287 (TRAV30, TRAJ24)
CGTEIVDADSWWKFQL

SEQ ID NO: 200574 - protein, 14 aa, Homo sapiens
  CDR3 for beta chain variable domain of TCR clone 100287 (TRBV12-5, TRBJ2-5)
CASGSRTHQETQYF

SEQ ID NO: 200575 - protein, 23 aa, Homo sapiens
  CDR3 for alpha chain variable domain of TCR clone 100288 (TRAV12-2, TRAJ43)
SLLIRDSQPSDLATYLCAFDMRF

SEQ ID NO: 200576 - protein, 18 aa, Homo sapiens
  CDR3 for beta chain variable domain of TCR clone 100288 (TRBV20-1, TRBJ2-3)
CSASGLAGGPGTTDTQYF

SEQ ID NO: 200577 - protein, 13 aa, Homo sapiens
  CDR3 for alpha chain variable domain of TCR clone 100289 (TRAV3, TRAJ21)
CAVREPAFNKFYF

SEQ ID NO: 200578 - protein, 14 aa, Homo sapiens
  CDR3 for beta chain variable domain of TCR clone 100289 (TRBV20-1, TRBJ2-3)
CSARGGTSTDTQYF

SEQ ID NO: 200579 - protein, 15 aa, Homo sapiens
  CDR3 for alpha chain variable domain of TCR clone 100290 (TRAV13-1, TRAJ10)
CAAEVVTGGGNKLTF

SEQ ID NO: 200580 - protein, 13 aa, Homo sapiens
  CDR3 for beta chain variable domain of TCR clone 100290 (TRBV28, TRBJ2-5)
CARVSRGEETQYF

SEQ ID NO: 200581 - protein, 14 aa, Homo sapiens
  CDR3 for alpha chain variable domain of TCR clone 100291 (TRAV1-2, TRAJ16)
CAVNRFSDGQKLLF

SEQ ID NO: 200582 - protein, 16 aa, Homo sapiens
  CDR3 for beta chain variable domain of TCR clone 100291 (TRBV5-4, TRBJ2-2)
CASSLVGGPNTGELFF

SEQ ID NO: 200583 - protein, 13 aa, Homo sapiens
  CDR3 for alpha chain variable domain of TCR clone 100292 (TRAV13-1, TRAJ5)
CAASDTGRRALTF

SEQ ID NO: 200584 - protein, 14 aa, Homo sapiens
  CDR3 for beta chain variable domain of TCR clone 100292 (TRBV7-2, TRBJ2-7)
CASSPKTSFYEQYF

SEQ ID NO: 200585 - protein, 11 aa, Homo sapiens
  CDR3 for alpha chain variable domain of TCR clone 100293 (TRAV2, TRAJ33)
CVVESNYQLIW

SEQ ID NO: 200586 - protein, 15 aa, Homo sapiens
  CDR3 for beta chain variable domain of TCR clone 100293 (TRBV19, TRBJ1-1)
CASTSGQIQNTEAFF

SEQ ID NO: 200587 - protein, 17 aa, Homo sapiens
  CDR3 for alpha chain variable domain of TCR clone 100294 (TRAV23/DV6, TRAJ58)
CAARLLRGETSGSRLTF

SEQ ID NO: 200588 - protein, 22 aa, Homo sapiens
  CDR3 for beta chain variable domain of TCR clone 100294 (TRBV11-2, TRBJ1-4)
CASSLDITRRGIPRKDNEKLFF

SEQ ID NO: 200589 - protein, 12 aa, Homo sapiens
  CDR3 for alpha chain variable domain of TCR clone 100295 (TRAV8-3, TRAJ43)
CAVGAVNNDMRF

SEQ ID NO: 200590 - protein, 14 aa, Homo sapiens
  CDR3 for beta chain variable domain of TCR clone 100295 (TRBV4-2, TRBJ1-5)
CASSRDRGNQPQHF

SEQ ID NO: 200591 - protein, 12 aa, Homo sapiens
  CDR3 for alpha chain variable domain of TCR clone 100296 (TRAV3, TRAJ7)
CADLLWDQQTRF

SEQ ID NO: 200592 - protein, 13 aa, Homo sapiens
  CDR3 for beta chain variable domain of TCR clone 100296 (TRBV7-3, TRBJ2-5)
CASSFRGGETQYF

SEQ ID NO: 200593 - protein, 17 aa, Homo sapiens
  CDR3 for alpha chain variable domain of TCR clone 100297 (TRAV3, TRAJ12)
CAVRDGGRRDSSYKLIF

SEQ ID NO: 200594 - protein, 12 aa, Homo sapiens
  CDR3 for beta chain variable domain of TCR clone 100297 (TRBV11-2, TRBJ2-2)
CASSLGGGELFF

SEQ ID NO: 200595 - protein, 15 aa, Homo sapiens
  CDR3 for alpha chain variable domain of TCR clone 100298 (TRAV8-4, TRAJ47)
CAVSDPEEYGNKLVF

SEQ ID NO: 200596 - protein, 15 aa, Homo sapiens
  CDR3 for beta chain variable domain of TCR clone 100298 (TRBV11-2, TRBJ2-1)
CASSLGPDSYNEQFV

SEQ ID NO: 200597 - protein, 17 aa, Homo sapiens
  CDR3 for alpha chain variable domain of TCR clone 100299 (TRAV3, TRAJ6)
CAVRDGPRAGGSYIRTF

SEQ ID NO: 200598 - protein, 20 aa, Homo sapiens
  CDR3 for beta chain variable domain of TCR clone 100299 (TRBV28, TRBJ2-1)
CASTPIGRSPGLAGGNEQFF

SEQ ID NO: 200599 - protein, 14 aa, Homo sapiens
  CDR3 for alpha chain variable domain of TCR clone 100300 (TRAV1-2, TRAJ8)
CAVREDTGFQKLVF

SEQ ID NO: 200600 - protein, 15 aa, Homo sapiens
  CDR3 for beta chain variable domain of TCR clone 100300 (TRBV7-9, TRBJ1-6)
CASSSRGRGNSPLHF

SEQ ID NO: 200601 - protein, 13 aa, Homo sapiens
  CDR3 for alpha chain variable domain of TCR clone 100301 (TRAV21, TRAJ57)
CAVTQGGSEKLVV

SEQ ID NO: 200602 - protein, 17 aa, Homo sapiens
  CDR3 for beta chain variable domain of TCR clone 100301 (TRBV20-1, TRBJ2-2)
CSASGSGQGGLTGELFF

SEQ ID NO: 200603 - protein, 12 aa, Homo sapiens
  CDR3 for alpha chain variable domain of TCR clone 100302 (TRAV25, TRAJ48)
CAGDFGNEKLTF

SEQ ID NO: 200604 - protein, 12 aa, Homo sapiens
  CDR3 for beta chain variable domain of TCR clone 100302 (TRBV2, TRBJ2-5)
CDSKEYGETQYF

SEQ ID NO: 200605 - protein, 15 aa, Homo sapiens
  CDR3 for alpha chain variable domain of TCR clone 100303 (TRAV3, TRAJ20)
CAVRDIKLSDYKLSF

SEQ ID NO: 200606 - protein, 16 aa, Homo sapiens
  CDR3 for beta chain variable domain of TCR clone 100303 (TRBV7-3, TRBJ2-2)
CASSLKRGTLSGELFF

SEQ ID NO: 200607 - protein, 14 aa, Homo sapiens
  CDR3 for alpha chain variable domain of TCR clone 100304 (TRAV12-3, TRAJ10)
SHLPLTGVGNKLTF

SEQ ID NO: 200608 - protein, 14 aa, Homo sapiens
  CDR3 for beta chain variable domain of TCR clone 100304 (TRBV6-1, TRBJ1-3)
CASVQGGGGNTIYF

SEQ ID NO: 200609 - protein, 15 aa, Homo sapiens
  CDR3 for alpha chain variable domain of TCR clone 100305 (TRAV1-2, TRAJ28)
CAVQYSGAGSYQLTS

SEQ ID NO: 200610 - protein, 13 aa, Homo sapiens
  CDR3 for beta chain variable domain of TCR clone 100305 (TRBV4-2, TRBJ1-1)
CASSQAGNTEAFF

SEQ ID NO: 200611 - protein, 15 aa, Homo sapiens
  CDR3 for alpha chain variable domain of TCR clone 100306 (TRAV1-1, TRAJ23)
CLLLLRCAPGRKLIF

SEQ ID NO: 200612 - protein, 20 aa, Homo sapiens
  CDR3 for beta chain variable domain of TCR clone 100306 (TRBV7-8, TRBJ2-2)
CASSHLFPGPTIHITGELFF

SEQ ID NO: 200613 - protein, 20 aa, Homo sapiens
  CDR3 for alpha chain variable domain of TCR clone 100307 (TRAV26-1, TRAJ42)
CCVLLHRQTYYGGSQGNLIF

SEQ ID NO: 200614 - protein, 16 aa, Homo sapiens
  CDR3 for beta chain variable domain of TCR clone 100307 (TRBV7-3, TRBJ2-2)
SASSLKRGTLSGELFF

SEQ ID NO: 200615 - protein, 12 aa, Homo sapiens
  CDR3 for alpha chain variable domain of TCR clone 100308 (TRAV17, TRAJ57)
CATDGGSKKLVF

SEQ ID NO: 200616 - protein, 13 aa, Homo sapiens
  CDR3 for beta chain variable domain of TCR clone 100308 (TRBV7-9, TRBJ2-7)
CASSFAGAYEQYF

SEQ ID NO: 200617 - protein, 16 aa, Homo sapiens
  CDR3 for alpha chain variable domain of TCR clone 100309 (TRAV12-2, TRAJ6)
CAAPLAGSGGSYIPTF

SEQ ID NO: 200618 - protein, 17 aa, Homo sapiens
  CDR3 for beta chain variable domain of TCR clone 100309 (TRBV11-2, TRBJ2-1)
CASSFYLAKSSYNEQFF

SEQ ID NO: 200619 - protein, 16 aa, Homo sapiens
  CDR3 for alpha chain variable domain of TCR clone 100310 (TRAV3, TRAJ10)
CAVRDMNEGGGNKLTF

SEQ ID NO: 200620 - protein, 15 aa, Homo sapiens
  CDR3 for beta chain variable domain of TCR clone 100310 (TRBV20-1, TRBJ2-7)
CSARDRVSGMDEQYF

SEQ ID NO: 200621 - protein, 13 aa, Homo sapiens
  CDR3 for alpha chain variable domain of TCR clone 100311 (TRAV27, TRAJ42)
CAGARGSQGNLII

SEQ ID NO: 200622 - protein, 15 aa, Homo sapiens
  CDR3 for beta chain variable domain of TCR clone 100311 (TRBV10-3, TRBJ2-2)
CAIRTDREDTGELFF

SEQ ID NO: 200623 - protein, 16 aa, Homo sapiens
  CDR3 for alpha chain variable domain of TCR clone 100312 (TRAV30, TRAJ24)
CGTAIVDADSWGKFQF

SEQ ID NO: 200624 - protein, 13 aa, Homo sapiens
  CDR3 for beta chain variable domain of TCR clone 100312 (TRBV20-1, TRBJ1-1)
CSAPPGGHTEAFF

SEQ ID NO: 200625 - protein, 17 aa, Homo sapiens
  CDR3 for alpha chain variable domain of TCR clone 100313 (TRAV3, TRAJ6)
CAVRDGPRAGGSYIPTF

SEQ ID NO: 200626 - protein, 18 aa, Homo sapiens
  CDR3 for beta chain variable domain of TCR clone 100313 (TRBV5-5, TRBJ1-5)
CASSLRQAKGSSNQPQHF

SEQ ID NO: 200627 - protein, 14 aa, Homo sapiens
  CDR3 for alpha chain variable domain of TCR clone 100314 (TRAV12-2, TRAJ13)
CAVKKTGGYQRVTF

SEQ ID NO: 200628 - protein, 18 aa, Homo sapiens
  CDR3 for beta chain variable domain of TCR clone 100314 (TRBV11-2, TRBJ2-3)
CASSLGGASRGAPNTQYF

SEQ ID NO: 200629 - protein, 15 aa, Homo sapiens
  CDR3 for alpha chain variable domain of TCR clone 100315 (TRAV13-1, TRAJ11)
CAASNRNSGYSTLTF

SEQ ID NO: 200630 - protein, 13 aa, Homo sapiens
  CDR3 for beta chain variable domain of TCR clone 100315 (TRBV7-3, TRBJ1-1)
CASSQDWGAEAFF

SEQ ID NO: 200631 - protein, 14 aa, Homo sapiens
  CDR3 for alpha chain variable domain of TCR clone 100316 (TRAV23/DV6, TRAJ24)
CAASLSDSWGKLQF

SEQ ID NO: 200632 - protein, 16 aa, Homo sapiens
  CDR3 for beta chain variable domain of TCR clone 100316 (TRBV7-9, TRBJ2-6)
CASSLKGPLRANVLAF

SEQ ID NO: 200633 - protein, 15 aa, Homo sapiens
  CDR3 for alpha chain variable domain of TCR clone 100317 (TRAV12-2, TRAJ20)
CAVKGGFGAGTTVTV

SEQ ID NO: 200634 - protein, 13 aa, Homo sapiens
  CDR3 for beta chain variable domain of TCR clone 100317 (TRBV12-4, TRBJ2-7)
CASSPGQLYEQHF

SEQ ID NO: 200635 - protein, 13 aa, Homo sapiens
  CDR3 for alpha chain variable domain of TCR clone 100318 (TRAV1-1, TRAJ31)
CASYLNNNARLMF

SEQ ID NO: 200636 - protein, 13 aa, Homo sapiens
  CDR3 for beta chain variable domain of TCR clone 100318 (TRBV15, TRBJ1-6)
CATSGGLNSHLHF

SEQ ID NO: 200637 - protein, 14 aa, Homo sapiens
  CDR3 for alpha chain variable domain of TCR clone 100319 (TRAV29/DV5, TRAJ34)
CAASASRETDKLIF

SEQ ID NO: 200638 - protein, 16 aa, Homo sapiens
  CDR3 for beta chain variable domain of TCR clone 100319 (TRBV19, TRBJ2-1)
CASSKAGPSSYNEQFF

SEQ ID NO: 200639 - protein, 15 aa, Homo sapiens
  CDR3 for alpha chain variable domain of TCR clone 100320 (TRAV21, TRAJ40)
CAVRPQTSGIYKYIF

SEQ ID NO: 200640 - protein, 13 aa, Homo sapiens
  CDR3 for beta chain variable domain of TCR clone 100320 (TRBV7-2, TRBJ2-2)
CASSSVRAGELFF

SEQ ID NO: 200641 - protein, 14 aa, Homo sapiens
  CDR3 for alpha chain variable domain of TCR clone 100321 (TRAV35, TRAJ50)
CAGHQKTSYDKVIF

SEQ ID NO: 200642 - protein, 13 aa, Homo sapiens
  CDR3 for beta chain variable domain of TCR clone 100321 (TRBV7-7, TRBJ2-3)
CASSLSRADTQYF

SEQ ID NO: 200643 - protein, 15 aa, Homo sapiens
  CDR3 for alpha chain variable domain of TCR clone 100322 (TRAV3, TRAJ10)
CAVRDGTGGGSKLTF

SEQ ID NO: 200644 - protein, 15 aa, Homo sapiens
  CDR3 for beta chain variable domain of TCR clone 100322 (TRBV4-2, TRBJ1-4)
CASSLVQREVEKLFF

SEQ ID NO: 200645 - protein, 13 aa, Homo sapiens
  CDR3 for alpha chain variable domain of TCR clone 100323 (TRAV13-1, TRAJ39)
CAASIVMQATCSL

SEQ ID NO: 200646 - protein, 16 aa, Homo sapiens
  CDR3 for beta chain variable domain of TCR clone 100323 (TRBV20-1, TRBJ1-4)
CSAPGQGLLTNEKLFF

SEQ ID NO: 200647 - protein, 14 aa, Homo sapiens
  CDR3 for alpha chain variable domain of TCR clone 100324 (TRAV1-2, TRAJ16)
CAVNRFSDGQKLLF

SEQ ID NO: 200648 - protein, 13 aa, Homo sapiens
  CDR3 for beta chain variable domain of TCR clone 100324 (TRBV20-1, TRBJ1-1)
CSARGGGSTEAFF

SEQ ID NO: 200649 - protein, 15 aa, Homo sapiens
  CDR3 for alpha chain variable domain of TCR clone 100325 (TRAV35, TRAJ50)
CAGQLRKTSYDKVIF

SEQ ID NO: 200650 - protein, 21 aa, Homo sapiens
  CDR3 for beta chain variable domain of TCR clone 100325 (TRBV5-1, TRBJ2-5)
GAGGLGPLSLRQQLGLRDQYF

SEQ ID NO: 200651 - protein, 14 aa, Homo sapiens
  CDR3 for alpha chain variable domain of TCR clone 100326 (TRAV16, TRAJ33)
CALSAMDSNYQLIW

SEQ ID NO: 200652 - protein, 16 aa, Homo sapiens
  CDR3 for beta chain variable domain of TCR clone 100326 (TRBV12-4, TRBJ2-3)
CASSFPSNTNTDTQYV

SEQ ID NO: 200653 - protein, 14 aa, Homo sapiens
  CDR3 for alpha chain variable domain of TCR clone 100327 (TRAV1-1, TRAJ27)
CAVIYNTNAGKSTF

SEQ ID NO: 200654 - protein, 12 aa, Homo sapiens
  CDR3 for beta chain variable domain of TCR clone 100327 (TRBV19, TRBJ2-1)
CASSMQDTEQFF

SEQ ID NO: 200655 - protein, 16 aa, Homo sapiens
  CDR3 for alpha chain variable domain of TCR clone 100328 (TRAV30, TRAJ24)
CGTEIVDADSWGKFQF

SEQ ID NO: 200656 - protein, 17 aa, Homo sapiens
  CDR3 for beta chain variable domain of TCR clone 100328 (TRBV5-7, TRBJ2-4)
CASSPGTGHLAKNIQYF

SEQ ID NO: 200657 - protein, 15 aa, Homo sapiens
  CDR3 for alpha chain variable domain of TCR clone 100329 (TRAV17, TRAJ22)
CATVAPSGSARQLTF

SEQ ID NO: 200658 - protein, 16 aa, Homo sapiens
  CDR3 for beta chain variable domain of TCR clone 100329 (TRBV10-3, TRBJ2-7)
CAISADFAYRPYEQYF

SEQ ID NO: 200659 - protein, 10 aa, Homo sapiens
  CDR3 for alpha chain variable domain of TCR clone 100330 (TRAV1-2, TRAJ20)
CACNDYKLSF

SEQ ID NO: 200660 - protein, 16 aa, Homo sapiens
  CDR3 for beta chain variable domain of TCR clone 100330 (TRBV20-1, TRBJ2-1)
CSARDLKQDMNNEQFF

SEQ ID NO: 200661 - protein, 14 aa, Homo sapiens
  CDR3 for alpha chain variable domain of TCR clone 100331 (TRAV38-1, TRAJ31)
CAFMRHDNNARLMF

SEQ ID NO: 200662 - protein, 16 aa, Homo sapiens
  CDR3 for beta chain variable domain of TCR clone 100331 (TRBV23-1, TRBJ2-1)
CISAPATGPTYNEQFF

SEQ ID NO: 200663 - protein, 16 aa, Homo sapiens
  CDR3 for alpha chain variable domain of TCR clone 100332 (TRAV3, TRAJ37)
CAVRGKGSGKTGKLIF

SEQ ID NO: 200664 - protein, 15 aa, Homo sapiens
  CDR3 for beta chain variable domain of TCR clone 100332 (TRBV7-3, TRBJ2-2)
CASSETGQGTGELFF

SEQ ID NO: 200665 - protein, 14 aa, Homo sapiens
  CDR3 for alpha chain variable domain of TCR clone 100333 (TRAV1-1, TRAJ28)
CAAPSGAGSYQLTF

SEQ ID NO: 200666 - protein, 15 aa, Homo sapiens
  CDR3 for beta chain variable domain of TCR clone 100333 (TRBV7-2, TRBJ1-2)
CASSLVSGGDYDYTF

SEQ ID NO: 200667 - protein, 14 aa, Homo sapiens
  CDR3 for alpha chain variable domain of TCR clone 100334 (TRAV12-2, TRAJ13)
CAVKKTGGYQKVTF

SEQ ID NO: 200668 - protein, 17 aa, Homo sapiens
  CDR3 for beta chain variable domain of TCR clone 100334 (TRBV15, TRBJ1-2)
CATSGREIDVVNYGYTF

SEQ ID NO: 200669 - protein, 15 aa, Homo sapiens
  CDR3 for alpha chain variable domain of TCR clone 100335 (TRAV27, TRAJ38)
CAARRNAGNNRKLIW

SEQ ID NO: 200670 - protein, 11 aa, Homo sapiens
  CDR3 for beta chain variable domain of TCR clone 100335 (TRBV7-9, TRBJ2-3)
CASSPTDTQYF

SEQ ID NO: 200671 - protein, 17 aa, Homo sapiens
  CDR3 for alpha chain variable domain of TCR clone 100336 (TRAV3, TRAJ6)
CAVRDGPRAGESYIPTF

SEQ ID NO: 200672 - protein, 20 aa, Homo sapiens
  CDR3 for beta chain variable domain of TCR clone 100336 (TRBV28, TRBJ2-1)
CASTPIGRSPGLAGGNEQFF

SEQ ID NO: 200673 - protein, 14 aa, Homo sapiens
  CDR3 for alpha chain variable domain of TCR clone 100337 (TRAV17, TRAJ16)
CATADFSDGQKLLF

SEQ ID NO: 200674 - protein, 11 aa, Homo sapiens
  CDR3 for beta chain variable domain of TCR clone 100337 (TRBV2, TRBJ1-1)
CASREGTEAFF

SEQ ID NO: 200675 - protein, 15 aa, Homo sapiens
  CDR3 for alpha chain variable domain of TCR clone 100338 (TRAV21, TRAJ24)
CAARSSTDSWGKLQF

SEQ ID NO: 200676 - protein, 14 aa, Homo sapiens
  CDR3 for beta chain variable domain of TCR clone 100338 (TRBV27, TRBJ1-5)
CASSLDPRNQPQHF

SEQ ID NO: 200677 - protein, 11 aa, Homo sapiens
  CDR3 for alpha chain variable domain of TCR clone 100339 (TRAV21, TRAJ20)
CAVRDDYKLSF

SEQ ID NO: 200678 - protein, 14 aa, Homo sapiens
  CDR3 for beta chain variable domain of TCR clone 100339 (TRBV7-2, TRBJ2-7)
CASSPKTSFYEQYL

SEQ ID NO: 200679 - protein, 14 aa, Homo sapiens
  CDR3 for alpha chain variable domain of TCR clone 100340 (TRAV16, TRAJ33)
CALSAMDSNYQSIW

SEQ ID NO: 200680 - protein, 12 aa, Homo sapiens
  CDR3 for beta chain variable domain of TCR clone 100340 (TRBV5-1, TRBJ1-2)
CASSQDTYGYTF

SEQ ID NO: 200681 - protein, 13 aa, Homo sapiens
  CDR3 for alpha chain variable domain of TCR clone 100341 (TRAV8-6, TRAJ9)
CAVWDTGGFKTIF

SEQ ID NO: 200682 - protein, 14 aa, Homo sapiens
  CDR3 for beta chain variable domain of TCR clone 100341 (TRBV2, TRBJ2-1)
CANSEALIYNEQFF

SEQ ID NO: 200683 - protein, 12 aa, Homo sapiens
  CDR3 for alpha chain variable domain of TCR clone 100342 (TRAV12-3, TRAJ17)
CAMTLTGNKLTF

SEQ ID NO: 200684 - protein, 15 aa, Homo sapiens
  CDR3 for beta chain variable domain of TCR clone 100342 (TRBV7-9, TRBJ1-6)
CASSSPGCGNSPLHF

SEQ ID NO: 200685 - protein, 14 aa, Homo sapiens
  CDR3 for alpha chain variable domain of TCR clone 100343 (TRAV12-1, TRAJ3)
CVVNPGSSASKIIF

SEQ ID NO: 200686 - protein, 14 aa, Homo sapiens
  CDR3 for beta chain variable domain of TCR clone 100343 (TRBV20-1, TRBJ2-3)
CSARGGTSTGTQYF

SEQ ID NO: 200687 - protein, 12 aa, Homo sapiens
  CDR3 for alpha chain variable domain of TCR clone 100344 (TRAV23/DV6, TRAJ30)
CAASKGDDKIIF

SEQ ID NO: 200688 - protein, 12 aa, Homo sapiens
  CDR3 for beta chain variable domain of TCR clone 100344 (TRBV7-9, TRBJ1-4)
CASSTDREKLFF

SEQ ID NO: 200689 - protein, 13 aa, Homo sapiens
  CDR3 for alpha chain variable domain of TCR clone 100345 (TRAV12-2, TRAJ10)
CAVYTGGGNKLTF

SEQ ID NO: 200690 - protein, 11 aa, Homo sapiens
  CDR3 for beta chain variable domain of TCR clone 100345 (TRBV6-1, TRBJ2-1)
CASISSNEQFF

SEQ ID NO: 200691 - protein, 13 aa, Homo sapiens
  CDR3 for alpha chain variable domain of TCR clone 100346 (TRAV27, TRAJ41)
CAGEGNSGYALNF

SEQ ID NO: 200692 - protein, 13 aa, Homo sapiens
  CDR3 for beta chain variable domain of TCR clone 100346 (TRBV7-2, TRBJ2-2)
CASSSVRAGELFF

SEQ ID NO: 200693 - protein, 16 aa, Homo sapiens
  CDR3 for alpha chain variable domain of TCR clone 100347 (TRAV3, TRAJ10)
CAVRDMNAGGGNKLTF

SEQ ID NO: 200694 - protein, 13 aa, Homo sapiens
  CDR3 for beta chain variable domain of TCR clone 100347 (TRBV7-3, TRBJ1-1)
CASSQDWGAEAFF

SEQ ID NO: 200695 - protein, 14 aa, Homo sapiens
  CDR3 for alpha chain variable domain of TCR clone 100348 (TRAV12-2, TRAJ24)
CAVTPADSWGKLPF

SEQ ID NO: 200696 - protein, 12 aa, Homo sapiens
  CDR3 for beta chain variable domain of TCR clone 100348 (TRBV3-1, TRBJ2-1)
CASSQGSSGQFF

SEQ ID NO: 200697 - protein, 14 aa, Homo sapiens
  CDR3 for alpha chain variable domain of TCR clone 100349 (TRAV1-2, TRAJ16)
CAVNRFSDGQKLLF

SEQ ID NO: 200698 - protein, 13 aa, Homo sapiens
  CDR3 for beta chain variable domain of TCR clone 100349 (TRBV7-9, TRBJ1-1)
CASSLSGETEAFF

SEQ ID NO: 200699 - protein, 13 aa, Homo sapiens
  CDR3 for alpha chain variable domain of TCR clone 100350 (TRAV13-1, TRAJ11)
CAAVLAGYSTRTF

SEQ ID NO: 200700 - protein, 17 aa, Homo sapiens
  CDR3 for beta chain variable domain of TCR clone 100350 (TRBV25-1, TRBJ2-7)
CASSDARVVFSSYEQYF

SEQ ID NO: 200701 - protein, 12 aa, Homo sapiens
  CDR3 for alpha chain variable domain of TCR clone 100351 (TRAV36/DV7, TRAJ54)
CAVVRGAQKLVF

SEQ ID NO: 200702 - protein, 15 aa, Homo sapiens
  CDR3 for beta chain variable domain of TCR clone 100351 (TRBV28, TRBJ1-3)
CASSMGWASGNTIYF

SEQ ID NO: 200703 - protein, 13 aa, Homo sapiens
  CDR3 for alpha chain variable domain of TCR clone 100352 (TRAV8-4, TRAJ10)
FAAFTGGGNKLTF

SEQ ID NO: 200704 - protein, 15 aa, Homo sapiens
  CDR3 for beta chain variable domain of TCR clone 100352 (TRBV2, TRBJ2-3)
CASSDFEKATDTQYF

SEQ ID NO: 200705 - protein, 15 aa, Homo sapiens
  CDR3 for alpha chain variable domain of TCR clone 100353 (TRAV13-1, TRAJ6)
CAASPITGGSYIPTF

SEQ ID NO: 200706 - protein, 16 aa, Homo sapiens
  CDR3 for beta chain variable domain of TCR clone 100353 (TRBV13, TRBJ2-1)
CASSLGAETGTIEQFF

SEQ ID NO: 200707 - protein, 15 aa, Homo sapiens
  CDR3 for alpha chain variable domain of TCR clone 100354 (TRAV12-3, TRAJ49)
CAMAVTPNTGNQFYF

SEQ ID NO: 200708 - protein, 18 aa, Homo sapiens
  CDR3 for beta chain variable domain of TCR clone 100354 (TRBV4-1, TRBJ1-5)
CASSPDPRGQGLNQPQHF

SEQ ID NO: 200709 - protein, 14 aa, Homo sapiens
  CDR3 for alpha chain variable domain of TCR clone 100355 (TRAV21, TRAJ15)
WAVSLNQAGTALIF

SEQ ID NO: 200710 - protein, 11 aa, Homo sapiens
  CDR3 for beta chain variable domain of TCR clone 100355 (TRBV20-1, TRBJ2-7)
CSARTSYEQYF

SEQ ID NO: 200711 - protein, 14 aa, Homo sapiens
  CDR3 for alpha chain variable domain of TCR clone 100356 (TRAV12-2, TRAJ13)
CAVKKTGGYQKVTF

SEQ ID NO: 200712 - protein, 15 aa, Homo sapiens
  CDR3 for beta chain variable domain of TCR clone 100356 (TRBV6-3, TRBJ2-1)
CASSNGGGSSNEQFF

SEQ ID NO: 200713 - protein, 13 aa, Homo sapiens
  CDR3 for alpha chain variable domain of TCR clone 100357 (TRAV12-2, TRAJ10)
CAVPTGGGHKLTF

SEQ ID NO: 200714 - protein, 11 aa, Homo sapiens
  CDR3 for beta chain variable domain of TCR clone 100357 (TRBV6-1, TRBJ2-1)
CASISSNEQFF

SEQ ID NO: 200715 - protein, 15 aa, Homo sapiens
  CDR3 for alpha chain variable domain of TCR clone 100358 (TRAV21, TRAJ24)
CAARSSTDSWGKLQF

SEQ ID NO: 200716 - protein, 12 aa, Homo sapiens
  CDR3 for beta chain variable domain of TCR clone 100358 (TRBV29-1, TRBJ2-3)
CSVTGGADTQYF

SEQ ID NO: 200717 - protein, 14 aa, Homo sapiens
  CDR3 for alpha chain variable domain of TCR clone 100359 (TRAV1-2, TRAJ8)
CAVREDTGFQKLVF

SEQ ID NO: 200718 - protein, 17 aa, Homo sapiens
  CDR3 for beta chain variable domain of TCR clone 100359 (TRBV11-2, TRBJ2-7)
CASSLAGAGVTLYEQYF

SEQ ID NO: 200719 - protein, 18 aa, Homo sapiens
  CDR3 for alpha chain variable domain of TCR clone 100360 (TRAV12-3, TRAJ52)
CAMSVGGAGGTSYGKLTF

SEQ ID NO: 200720 - protein, 18 aa, Homo sapiens
  CDR3 for beta chain variable domain of TCR clone 100360 (TRBV11-2, TRBJ2-3)
CASSLGGAPRGAPNTQYF

SEQ ID NO: 200721 - protein, 14 aa, Homo sapiens
  CDR3 for alpha chain variable domain of TCR clone 100361 (TRAV29/DV5, TRAJ36)
CAARRKTGANNLFF

SEQ ID NO: 200722 - protein, 14 aa, Homo sapiens
  CDR3 for beta chain variable domain of TCR clone 100361 (TRBV11-1, TRBJ2-7)
CASSFRQGSYEQYF

SEQ ID NO: 200723 - protein, 12 aa, Homo sapiens
  CDR3 for alpha chain variable domain of TCR clone 100362 (TRAV16, TRAJ10)
CSRTGGGNKLTF

SEQ ID NO: 200724 - protein, 16 aa, Homo sapiens
  CDR3 for beta chain variable domain of TCR clone 100362 (TRBV28, TRBJ2-7)
CASSLFFETGGPEQYF

SEQ ID NO: 200725 - protein, 14 aa, Homo sapiens
  CDR3 for alpha chain variable domain of TCR clone 100363 (TRAV12-2, TRAJ5)
CAVNRSTGRRALTF

SEQ ID NO: 200726 - protein, 12 aa, Homo sapiens
  CDR3 for beta chain variable domain of TCR clone 100363 (TRBV5-5, TRBJ2-5)
CASSCFGETQYF

SEQ ID NO: 200727 - protein, 12 aa, Homo sapiens
  CDR3 for alpha chain variable domain of TCR clone 100364 (TRAV21, TRAJ31)
CAVSPARCRLMF

SEQ ID NO: 200728 - protein, 14 aa, Homo sapiens
  CDR3 for beta chain variable domain of TCR clone 100364 (TRBV28, TRBJ2-7)
CASSLLRISYEQYF

SEQ ID NO: 200729 - protein, 13 aa, Homo sapiens
  CDR3 for alpha chain variable domain of TCR clone 100365 (TRAV12-1, TRAJ40)
CVVPTSGTYKYIF

SEQ ID NO: 200730 - protein, 12 aa, Homo sapiens
  CDR3 for beta chain variable domain of TCR clone 100365 (TRBV11-2, TRBJ2-2)
CASSLGGGELFF

SEQ ID NO: 200731 - protein, 12 aa, Homo sapiens
  CDR3 for alpha chain variable domain of TCR clone 100366 (TRAV3, TRAJ20)
CAVRDGDYKLSF

SEQ ID NO: 200732 - protein, 17 aa, Homo sapiens
  CDR3 for beta chain variable domain of TCR clone 100366 (TRBV13, TRBJ2-3)
CASSLSRVAGGRNTQYF

SEQ ID NO: 200733 - protein, 13 aa, Homo sapiens
  CDR3 for alpha chain variable domain of TCR clone 100367 (TRAV12-1, TRAJ43)
CVVSHHNNNDMRF

SEQ ID NO: 200734 - protein, 14 aa, Homo sapiens
  CDR3 for beta chain variable domain of TCR clone 100367 (TRBV5-5, TRBJ2-2)
CASSLLGETGELFF

SEQ ID NO: 200735 - protein, 16 aa, Homo sapiens
  CDR3 for alpha chain variable domain of TCR clone 100368 (TRAV3, TRAJ37)
CAVRPHGSGNTGKLIF

SEQ ID NO: 200736 - protein, 12 aa, Homo sapiens
  CDR3 for beta chain variable domain of TCR clone 100368 (TRBV11-2, TRBJ2-1)
CASSPGNNEQFF

SEQ ID NO: 200737 - protein, 12 aa, Homo sapiens
  CDR3 for alpha chain variable domain of TCR clone 100369 (TRAV38-2/DV8, TRAJ47)
CVLMEYGNKLVF

SEQ ID NO: 200738 - protein, 14 aa, Homo sapiens
  CDR3 for beta chain variable domain of TCR clone 100369 (TRBV20-1, TRBJ1-5)
CSATDRGSDQPQHF

SEQ ID NO: 200739 - protein, 18 aa, Homo sapiens
  CDR3 for alpha chain variable domain of TCR clone 100370 (TRAV12-3, TRAJ52)
CAMSRINAGGTSYGKLTF

SEQ ID NO: 200740 - protein, 17 aa, Homo sapiens
  CDR3 for beta chain variable domain of TCR clone 100370 (TRBV7-3, TRBJ2-3)
CASNLMKRMRGADTQYF

SEQ ID NO: 200741 - protein, 12 aa, Homo sapiens
  CDR3 for alpha chain variable domain of TCR clone 100371 (TRAV12-2, TRAJ31)
CAVNTPDAGLMF

SEQ ID NO: 200742 - protein, 12 aa, Homo sapiens
  CDR3 for beta chain variable domain of TCR clone 100371 (TRBV7-8, TRBJ2-7)
CASSLGDREQYF

SEQ ID NO: 200743 - protein, 17 aa, Homo sapiens
  CDR3 for alpha chain variable domain of TCR clone 100372 (TRAV1-2, TRAJ27)
CAVRDKTGDTNEGKSTF

SEQ ID NO: 200744 - protein, 13 aa, Homo sapiens
  CDR3 for beta chain variable domain of TCR clone 100372 (TRBV7-3, TRBJ1-1)
CASSQDWGAEAFF

SEQ ID NO: 200745 - protein, 14 aa, Homo sapiens
  CDR3 for alpha chain variable domain of TCR clone 100373 (TRAV12-2, TRAJ40)
CAVKIPSGTYKYIF

SEQ ID NO: 200746 - protein, 13 aa, Homo sapiens
  CDR3 for beta chain variable domain of TCR clone 100373 (TRBV7-9, TRBJ2-5)
CASLSPGQETQYF

SEQ ID NO: 200747 - protein, 11 aa, Homo sapiens
  CDR3 for alpha chain variable domain of TCR clone 100374 (TRAV2, TRAJ13)
CASGDYQKVTF

SEQ ID NO: 200748 - protein, 16 aa, Homo sapiens
  CDR3 for beta chain variable domain of TCR clone 100374 (TRBV6-1, TRBJ2-5)
CASSETLDRGAETQYF

SEQ ID NO: 200749 - protein, 13 aa, Homo sapiens
  CDR3 for alpha chain variable domain of TCR clone 100375 (TRAV13-1, TRAJ9)
CAASETGGFKTIF

SEQ ID NO: 200750 - protein, 15 aa, Homo sapiens
  CDR3 for beta chain variable domain of TCR clone 100375 (TRBV4-1, TRBJ1-4)
CASSDTGGTNEKLFF

SEQ ID NO: 200751 - protein, 17 aa, Homo sapiens
  CDR3 for alpha chain variable domain of TCR clone 100376 (TRAV3, TRAJ42)
CAVRDRDYGGSQGNLIF

SEQ ID NO: 200752 - protein, 16 aa, Homo sapiens
  CDR3 for beta chain variable domain of TCR clone 100376 (TRBV20-1, TRBJ2-2)
CSASASGIPGAGELFF

SEQ ID NO: 200753 - protein, 11 aa, Homo sapiens
  CDR3 for alpha chain variable domain of TCR clone 100377 (TRAV12-1, TRAJ30)
CVVNGQDKIIF

SEQ ID NO: 200754 - protein, 12 aa, Homo sapiens
  CDR3 for beta chain variable domain of TCR clone 100377 (TRBV11-2, TRBJ2-2)
CASSLPTGELFF

SEQ ID NO: 200755 - protein, 12 aa, Homo sapiens
  CDR3 for alpha chain variable domain of TCR clone 100378 (TRAV20, TRAJ54)
CAVQAGAQKLVF

SEQ ID NO: 200756 - protein, 14 aa, Homo sapiens
  CDR3 for beta chain variable domain of TCR clone 100378 (TRBV20-1, TRBJ2-7)
CSAKTGTGGYEQYF

SEQ ID NO: 200757 - protein, 15 aa, Homo sapiens
  CDR3 for alpha chain variable domain of TCR clone 100379 (TRAV12-2, TRAJ53)
WAVNGGGGSNYKLTF

SEQ ID NO: 200758 - protein, 17 aa, Homo sapiens
  CDR3 for beta chain variable domain of TCR clone 100379 (TRBV7-3, TRBJ2-3)
CASSLMKRMRGADTQYF

SEQ ID NO: 200759 - protein, 13 aa, Homo sapiens
  CDR3 for alpha chain variable domain of TCR clone 100380 (TRAV12-2, TRAJ9)
CAVKWAGGFKTIF

SEQ ID NO: 200760 - protein, 15 aa, Homo sapiens
  CDR3 for beta chain variable domain of TCR clone 100380 (TRBV27, TRBJ2-1)
CASSNGGGSSNEQFF

SEQ ID NO: 200761 - protein, 14 aa, Homo sapiens
  CDR3 for alpha chain variable domain of TCR clone 100381 (TRAV35, TRAJ33)
CAGSSQDSNYQSIW

SEQ ID NO: 200762 - protein, 15 aa, Homo sapiens
  CDR3 for beta chain variable domain of TCR clone 100381 (TRBV20-1, TRBJ2-7)
CSAESGTSGAYEQYF

SEQ ID NO: 200763 - protein, 10 aa, Homo sapiens
  CDR3 for alpha chain variable domain of TCR clone 100382 (TRAV1-2, TRAJ31)
CAFFDARLMF

SEQ ID NO: 200764 - protein, 18 aa, Homo sapiens
  CDR3 for beta chain variable domain of TCR clone 100382 (TRBV20-1, TRBJ1-1)
CSARDLLRQGVVDTEAFF

SEQ ID NO: 200765 - protein, 15 aa, Homo sapiens
  CDR3 for alpha chain variable domain of TCR clone 100383 (TRAV12-3, TRAJ49)
CAMAVTPNTGNQFYF

SEQ ID NO: 200766 - protein, 18 aa, Homo sapiens
  CDR3 for beta chain variable domain of TCR clone 100383 (TRBV4-1, TRBJ1-5)
CASSQDPRGQGLNQPHHF

SEQ ID NO: 200767 - protein, 14 aa, Homo sapiens
  CDR3 for alpha chain variable domain of TCR clone 100384 (TRAV13-2, TRAJ43)
CAEIPTYNNNDMRF

SEQ ID NO: 200768 - protein, 15 aa, Homo sapiens
  CDR3 for beta chain variable domain of TCR clone 100384 (TRBV7-9, TRBJ2-2)
CTSGPLDTFPGELFF

SEQ ID NO: 200769 - protein, 14 aa, Homo sapiens
  CDR3 for alpha chain variable domain of TCR clone 100385 (TRAV35, TRAJ13)
CAGRSPGCYQKVTF

SEQ ID NO: 200770 - protein, 14 aa, Homo sapiens
  CDR3 for beta chain variable domain of TCR clone 100385 (TRBV19, TRBJ2-2)
CASSMVGLSGELFF

SEQ ID NO: 200771 - protein, 15 aa, Homo sapiens
  CDR3 for alpha chain variable domain of TCR clone 100386 (TRAV17, TRAJ52)
CATEAGGTSSGKLTF

SEQ ID NO: 200772 - protein, 14 aa, Homo sapiens
  CDR3 for beta chain variable domain of TCR clone 100386 (TRBV28, TRBJ1-5)
CASSLGVLVKPQHF

SEQ ID NO: 200773 - protein, 14 aa, Homo sapiens
  CDR3 for alpha chain variable domain of TCR clone 100387 (TRAV12-2, TRAJ40)
CAVKIPSGTHKYIF

SEQ ID NO: 200774 - protein, 17 aa, Homo sapiens
  CDR3 for beta chain variable domain of TCR clone 100387 (TRBV11-2, TRBJ2-1)
CASSLYPPGVEYNEQFF

SEQ ID NO: 200775 - protein, 13 aa, Homo sapiens
  CDR3 for alpha chain variable domain of TCR clone 100388 (TRAV35, TRAJ33)
CAGQLYGVYQLIW

SEQ ID NO: 200776 - protein, 14 aa, Homo sapiens
  CDR3 for beta chain variable domain of TCR clone 100388 (TRBV7-2, TRBJ1-1)
CDSSLGGAGTEAFF

SEQ ID NO: 200777 - protein, 12 aa, Homo sapiens
  CDR3 for alpha chain variable domain of TCR clone 100389 (TRAV12-3, TRAJ40)
CAMSSGTYKYIF

SEQ ID NO: 200778 - protein, 15 aa, Homo sapiens
  CDR3 for beta chain variable domain of TCR clone 100389 (TRBV7-3, TRBJ2-2)
CASSETGQVTGELFF

SEQ ID NO: 200779 - protein, 10 aa, Homo sapiens
  CDR3 for alpha chain variable domain of TCR clone 100390 (TRAV12-3, TRAJ18)
CAMSAEAQPW

SEQ ID NO: 200780 - protein, 13 aa, Homo sapiens
  CDR3 for beta chain variable domain of TCR clone 100390 (TRBV15, TRBJ1-6)
CATSGGPNSPLHF

SEQ ID NO: 200781 - protein, 19 aa, Homo sapiens
  CDR3 for alpha chain variable domain of TCR clone 100391 (TRAV26-1, TRAJ28)
CIVRVAHAYSGAGRYQLTF

SEQ ID NO: 200782 - protein, 15 aa, Homo sapiens
  CDR3 for beta chain variable domain of TCR clone 100391 (TRBV5-1, TRBJ1-3)
CASSSKTGAGNTIYF

SEQ ID NO: 200783 - protein, 11 aa, Homo sapiens
  CDR3 for alpha chain variable domain of TCR clone 100392 (TRAV2, TRAJ21)
CAVFNFNKFYF

SEQ ID NO: 200784 - protein, 14 aa, Homo sapiens
  CDR3 for beta chain variable domain of TCR clone 100392 (TRBV15, TRBJ2-3)
CATRSGSSTDTQYF

SEQ ID NO: 200785 - protein, 13 aa, Homo sapiens
  CDR3 for alpha chain variable domain of TCR clone 100393 (TRAV17, TRAJ9)
CATDYTGAFKTIF

SEQ ID NO: 200786 - protein, 14 aa, Homo sapiens
  CDR3 for beta chain variable domain of TCR clone 100393 (TRBV19, TRBJ2-5)
CASSMTGQQETQYF

SEQ ID NO: 200787 - protein, 13 aa, Homo sapiens
  CDR3 for alpha chain variable domain of TCR clone 100394 (TRAV25, TRAJ30)
CAGRVDRDDKIIF

SEQ ID NO: 200788 - protein, 17 aa, Homo sapiens
  CDR3 for beta chain variable domain of TCR clone 100394 (TRBV7-9, TRBJ2-6)
CASSFGAGHSGANVLTF

SEQ ID NO: 200789 - protein, 10 aa, Homo sapiens
  CDR3 for alpha chain variable domain of TCR clone 100395 (TRAV2, TRAJ34)
CAVVNDKLIF

SEQ ID NO: 200790 - protein, 13 aa, Homo sapiens
  CDR3 for beta chain variable domain of TCR clone 100395 (TRBV7-9, TRBJ1-2)
CASSLKQNYGYTF

SEQ ID NO: 200791 - protein, 12 aa, Homo sapiens
  CDR3 for alpha chain variable domain of TCR clone 100396 (TRAV12-3, TRAJ17)
CAMTLTGNKLTF

SEQ ID NO: 200792 - protein, 15 aa, Homo sapiens
  CDR3 for beta chain variable domain of TCR clone 100396 (TRBV20-1, TRBJ2-7)
CSARDRVAGMDERYF

SEQ ID NO: 200793 - protein, 16 aa, Homo sapiens
  CDR3 for alpha chain variable domain of TCR clone 100397 (TRAV23/DV6, TRAJ9)
CAASIGGNTGGFKTIF

SEQ ID NO: 200794 - protein, 17 aa, Homo sapiens
  CDR3 for beta chain variable domain of TCR clone 100397 (TRBV7-9, TRBJ1-1)
CASSSPPGQGQNTEAFF

SEQ ID NO: 200795 - protein, 14 aa, Homo sapiens
  CDR3 for alpha chain variable domain of TCR clone 100398 (TRAV20, TRAJ10)
CAVRVEGGGNKLTF

SEQ ID NO: 200796 - protein, 18 aa, Homo sapiens
  CDR3 for beta chain variable domain of TCR clone 100398 (TRBV24-1, TRBJ2-1)
CATSDLMFLGRGVHEQVF

SEQ ID NO: 200797 - protein, 11 aa, Homo sapiens
  CDR3 for alpha chain variable domain of TCR clone 100399 (TRAV2, TRAJ33)
CAVESNYQLIW

SEQ ID NO: 200798 - protein, 14 aa, Homo sapiens
  CDR3 for beta chain variable domain of TCR clone 100399 (TRBV6-1, TRBJ1-3)
CASVQGGGGNTIYF

SEQ ID NO: 200799 - protein, 12 aa, Homo sapiens
  CDR3 for alpha chain variable domain of TCR clone 100400 (TRAV9-2, TRAJ36)
CALKKGANNLFF

SEQ ID NO: 200800 - protein, 13 aa, Homo sapiens
  CDR3 for beta chain variable domain of TCR clone 100400 (TRBV27, TRBJ1-1)
CASSLAIGAEAFF

SEQ ID NO: 200801 - protein, 16 aa, Homo sapiens
  CDR3 for alpha chain variable domain of TCR clone 100401 (TRAV12-3, TRAJ53)
CAMSPGSGGSNYKLTF

SEQ ID NO: 200802 - protein, 15 aa, Homo sapiens
  CDR3 for beta chain variable domain of TCR clone 100401 (TRBV4-3, TRBJ2-7)
CASSQGDWGDYEQYF

SEQ ID NO: 200803 - protein, 13 aa, Homo sapiens
  CDR3 for alpha chain variable domain of TCR clone 100402 (TRAV21, TRAJ57)
CAVIEGRSEKLVF

SEQ ID NO: 200804 - protein, 14 aa, Homo sapiens
  CDR3 for beta chain variable domain of TCR clone 100402 (TRBV12-5, TRBJ2-5)
CASGSRTHQETQYF

SEQ ID NO: 200805 - protein, 13 aa, Homo sapiens
  CDR3 for alpha chain variable domain of TCR clone 100403 (TRAV8-4, TRAJ30)
CAVSVNRDDKIIF

SEQ ID NO: 200806 - protein, 13 aa, Homo sapiens
  CDR3 for beta chain variable domain of TCR clone 100403 (TRBV4-2, TRBJ1-1)
CASSQAGNTEAFF

SEQ ID NO: 200807 - protein, 12 aa, Homo sapiens
  CDR3 for alpha chain variable domain of TCR clone 100404 (TRAV12-2, TRAJ16)
CAVNLDGQKLPF

SEQ ID NO: 200808 - protein, 12 aa, Homo sapiens
  CDR3 for beta chain variable domain of TCR clone 100404 (TRBV5-7, TRBJ2-7)
CASSVQGGEQYF

SEQ ID NO: 200809 - protein, 13 aa, Homo sapiens
  CDR3 for alpha chain variable domain of TCR clone 100405 (TRAV20, TRAJ56)
CAVQAGANSKLTF

SEQ ID NO: 200810 - protein, 13 aa, Homo sapiens
  CDR3 for beta chain variable domain of TCR clone 100405 (TRBV12-5, TRBJ2-3)
CASGDRQSDTQYF

SEQ ID NO: 200811 - protein, 18 aa, Homo sapiens
  CDR3 for alpha chain variable domain of TCR clone 100406 (TRAV21, TRAJ52)
CAVRPSPAGGTSYGKLTF

SEQ ID NO: 200812 - protein, 13 aa, Homo sapiens
  CDR3 for beta chain variable domain of TCR clone 100406 (TRBV13, TRBJ2-1)
CASILGGRGEQFF

SEQ ID NO: 200813 - protein, 15 aa, Homo sapiens
  CDR3 for alpha chain variable domain of TCR clone 100407 (TRAV12-2, TRAJ53)
CAVNGGGGSNYKLTF

SEQ ID NO: 200814 - protein, 16 aa, Homo sapiens
  CDR3 for beta chain variable domain of TCR clone 100407 (TRBV2, TRBJ2-1)
CASRSPAGGKYNEQFF

SEQ ID NO: 200815 - protein, 14 aa, Homo sapiens
  CDR3 for alpha chain variable domain of TCR clone 100408 (TRAV16, TRAJ29)
CALTRNSGNTPLVF

SEQ ID NO: 200816 - protein, 12 aa, Homo sapiens
  CDR3 for beta chain variable domain of TCR clone 100408 (TRBV2, TRBJ2-1)
CAKWEGYNEQFF

SEQ ID NO: 200817 - protein, 14 aa, Homo sapiens
  CDR3 for alpha chain variable domain of TCR clone 100409 (TRAV2, TRAJ37)
CAVDFTSNTGKLIV

SEQ ID NO: 200818 - protein, 12 aa, Homo sapiens
  CDR3 for beta chain variable domain of TCR clone 100409 (TRBV29-1, TRBJ2-3)
CSVTGGADTQYF

SEQ ID NO: 200819 - protein, 16 aa, Homo sapiens
  CDR3 for alpha chain variable domain of TCR clone 100410 (TRAV1-1, TRAJ37)
CAVRDKALATQANQSL

SEQ ID NO: 200820 - protein, 14 aa, Homo sapiens
  CDR3 for beta chain variable domain of TCR clone 100410 (TRBV7-2, TRBJ2-7)
CASSPKTSFYEQYF

SEQ ID NO: 200821 - protein, 12 aa, Homo sapiens
  CDR3 for alpha chain variable domain of TCR clone 100411 (TRAV12-1, TRAJ9)
CVVHTGGFKTIF

SEQ ID NO: 200822 - protein, 14 aa, Homo sapiens
  CDR3 for beta chain variable domain of TCR clone 100411 (TRBV7-2, TRBJ2-7)
CASSTKTSFYEQYF

SEQ ID NO: 200823 - protein, 15 aa, Homo sapiens
  CDR3 for alpha chain variable domain of TCR clone 100412 (TRAV3, TRAJ5)
CAERDLDTGRRALTF

SEQ ID NO: 200824 - protein, 13 aa, Homo sapiens
  CDR3 for beta chain variable domain of TCR clone 100412 (TRBV12-4, TRBJ2-7)
CASSPTETYEQYF

SEQ ID NO: 200825 - protein, 14 aa, Homo sapiens
  CDR3 for alpha chain variable domain of TCR clone 100413 (TRAV8-3, TRAJ12)
CAVGARDSSYKLIF

SEQ ID NO: 200826 - protein, 14 aa, Homo sapiens
  CDR3 for beta chain variable domain of TCR clone 100413 (TRBV5-5, TRBJ1-5)
CASSGQGVDQPQHF

SEQ ID NO: 200827 - protein, 15 aa, Homo sapiens
  CDR3 for alpha chain variable domain of TCR clone 100414 (TRAV2, TRAJ28)
CAVPYSGAGSYQLTF

SEQ ID NO: 200828 - protein, 12 aa, Homo sapiens
  CDR3 for beta chain variable domain of TCR clone 100414 (TRBV3-1, TRBJ2-7)
CASSQDRDEQYF

SEQ ID NO: 200829 - protein, 17 aa, Homo sapiens
  CDR3 for alpha chain variable domain of TCR clone 100415 (TRAV26-1, TRAJ27)
CIVSTPWINTNAGKSTF

SEQ ID NO: 200830 - protein, 16 aa, Homo sapiens
  CDR3 for beta chain variable domain of TCR clone 100415 (TRBV7-9, TRBJ2-1)
CASSLDTGLAIDEQFF

SEQ ID NO: 200831 - protein, 11 aa, Homo sapiens
  CDR3 for alpha chain variable domain of TCR clone 100416 (TRAV1-2, TRAJ20)
CAVANDYKLSF

SEQ ID NO: 200832 - protein, 18 aa, Homo sapiens
  CDR3 for beta chain variable domain of TCR clone 100416 (TRBV20-1, TRBJ2-6)
CSAETTPTHGSGANVLTC

SEQ ID NO: 200833 - protein, 16 aa, Homo sapiens
  CDR3 for alpha chain variable domain of TCR clone 100417 (TRAV26-1, TRAJ45)
CIVEKYSGGVADGLTF

SEQ ID NO: 200834 - protein, 15 aa, Homo sapiens
  CDR3 for beta chain variable domain of TCR clone 100417 (TRBV15, TRBJ2-7)
CHQQRPIQQAYEQYF

SEQ ID NO: 200835 - protein, 16 aa, Homo sapiens
  CDR3 for alpha chain variable domain of TCR clone 100418 (TRAV30, TRAJ24)
CGTEIVDADSWGKFPF

SEQ ID NO: 200836 - protein, 16 aa, Homo sapiens
  CDR3 for beta chain variable domain of TCR clone 100418 (TRBV6-1, TRBJ2-1)
CASILRQGSSYNEQFF

SEQ ID NO: 200837 - protein, 12 aa, Homo sapiens
  CDR3 for alpha chain variable domain of TCR clone 100419 (TRAV8-4, TRAJ37)
CAKSSNTGKLIF

SEQ ID NO: 200838 - protein, 15 aa, Homo sapiens
  CDR3 for beta chain variable domain of TCR clone 100419 (TRBV7-9, TRBJ1-6)
CASSSPGRGNSPLHF

SEQ ID NO: 200839 - protein, 14 aa, Homo sapiens
  CDR3 for alpha chain variable domain of TCR clone 100420 (TRAV8-3, TRAJ9)
CAVVYNTGGFKTIF

SEQ ID NO: 200840 - protein, 14 aa, Homo sapiens
  CDR3 for beta chain variable domain of TCR clone 100420 (TRBV7-2, TRBJ1-1)
CASSFLTGTTEAFF

SEQ ID NO: 200841 - protein, 12 aa, Homo sapiens
  CDR3 for alpha chain variable domain of TCR clone 100421 (TRAV36/DV7, TRAJ40)
CAVGTGTYKYIF

SEQ ID NO: 200842 - protein, 14 aa, Homo sapiens
  CDR3 for beta chain variable domain of TCR clone 100421 (TRBV19, TRBJ2-3)
CASSIDLGGDTQYL

SEQ ID NO: 200843 - protein, 14 aa, Homo sapiens
  CDR3 for alpha chain variable domain of TCR clone 100422 (TRAV1-2, TRAJ8)
CAVREDTGFQKLVF

SEQ ID NO: 200844 - protein, 15 aa, Homo sapiens
  CDR3 for beta chain variable domain of TCR clone 100422 (TRBV19, TRBJ1-1)
CASTSGQIQNTEAFF

SEQ ID NO: 200845 - protein, 14 aa, Homo sapiens
  CDR3 for alpha chain variable domain of TCR clone 100423 (TRAV9-2, TRAJ39)
CALYIYNASNMLTF

SEQ ID NO: 200846 - protein, 14 aa, Homo sapiens
  CDR3 for beta chain variable domain of TCR clone 100423 (TRBV25-1, TRBJ1-1)
CASTHLGGNTEAFF

SEQ ID NO: 200847 - protein, 12 aa, Homo sapiens
  CDR3 for alpha chain variable domain of TCR clone 100424 (TRAV16, TRAJ56)
CAPTGANSKLTF

SEQ ID NO: 200848 - protein, 14 aa, Homo sapiens
  CDR3 for beta chain variable domain of TCR clone 100424 (TRBV19, TRBJ2-1)
CASPTFVLSGEQFF

SEQ ID NO: 200849 - protein, 16 aa, Homo sapiens
  CDR3 for alpha chain variable domain of TCR clone 100425 (TRAV26-1, TRAJ32)
CIVRTNYGGATNKIIF

SEQ ID NO: 200850 - protein, 14 aa, Homo sapiens
  CDR3 for beta chain variable domain of TCR clone 100425 (TRBV27, TRBJ1-1)
CASSLLSGLSEAFF

SEQ ID NO: 200851 - protein, 13 aa, Homo sapiens
  CDR3 for alpha chain variable domain of TCR clone 100426 (TRAV20, TRAJ54)
CAVQAGGAQKLVF

SEQ ID NO: 200852 - protein, 12 aa, Homo sapiens
  CDR3 for beta chain variable domain of TCR clone 100426 (TRBV7-8, TRBJ2-7)
CASSLGDREQYF

SEQ ID NO: 200853 - protein, 13 aa, Homo sapiens
  CDR3 for alpha chain variable domain of TCR clone 100427 (TRAV8-6, TRAJ16)
CAVSRGVGQKLLF

SEQ ID NO: 200854 - protein, 15 aa, Homo sapiens
  CDR3 for beta chain variable domain of TCR clone 100427 (TRBV12-4, TRBJ2-1)
CASSLSTGVSNEQFF

SEQ ID NO: 200855 - protein, 12 aa, Homo sapiens
  CDR3 for alpha chain variable domain of TCR clone 100428 (TRAV16, TRAJ10)
FSRTGGGNKLTF

SEQ ID NO: 200856 - protein, 13 aa, Homo sapiens
  CDR3 for beta chain variable domain of TCR clone 100428 (TRBV7-3, TRBJ2-5)
CASSFRGGETQYF

SEQ ID NO: 200857 - protein, 16 aa, Homo sapiens
  CDR3 for alpha chain variable domain of TCR clone 100429 (TRAV4, TRAJ22)
CLVGDLYSGSARQLTF

SEQ ID NO: 200858 - protein, 16 aa, Homo sapiens
  CDR3 for beta chain variable domain of TCR clone 100429 (TRBV7-9, TRBJ2-1)
CASSDIAGGSYNEQFF

SEQ ID NO: 200859 - protein, 14 aa, Homo sapiens
  CDR3 for alpha chain variable domain of TCR clone 100430 (TRAV29/DV5, TRAJ48)
CAAMALFGNEKLTF

SEQ ID NO: 200860 - protein, 15 aa, Homo sapiens
  CDR3 for beta chain variable domain of TCR clone 100430 (TRBV7-2, TRBJ2-1)
CASTHGTGIYNDQFF

SEQ ID NO: 200861 - protein, 13 aa, Homo sapiens
  CDR3 for alpha chain variable domain of TCR clone 100431 (TRAV12-1, TRAJ29)
CVVNGPGNTPLVF

SEQ ID NO: 200862 - protein, 15 aa, Homo sapiens
  CDR3 for beta chain variable domain of TCR clone 100431 (TRBV18, TRBJ2-1)
CASSPPSASYNEQFF

SEQ ID NO: 200863 - protein, 12 aa, Homo sapiens
  CDR3 for alpha chain variable domain of TCR clone 100432 (TRAV8-3, TRAJ20)
CAVGANDYKLSF

SEQ ID NO: 200864 - protein, 16 aa, Homo sapiens
  CDR3 for beta chain variable domain of TCR clone 100432 (TRBV19, TRBJ2-2)
CASRSPGTAATGELFF

SEQ ID NO: 200865 - protein, 15 aa, Homo sapiens
  CDR3 for alpha chain variable domain of TCR clone 100433 (TRAV3, TRAJ45)
CAVRTPWGGADGFTF

SEQ ID NO: 200866 - protein, 16 aa, Homo sapiens
  CDR3 for beta chain variable domain of TCR clone 100433 (TRBV6-1, TRBJ2-2)
CASSFGQGANTGELFF

SEQ ID NO: 200867 - protein, 15 aa, Homo sapiens
  CDR3 for alpha chain variable domain of TCR clone 100434 (TRAV8-3, TRAJ11)
CAVGLLNSGYSTLTF

SEQ ID NO: 200868 - protein, 16 aa, Homo sapiens
  CDR3 for beta chain variable domain of TCR clone 100434 (TRBV7-9, TRBJ1-2)
CASSLGFSSGEDGETF

SEQ ID NO: 200869 - protein, 14 aa, Homo sapiens
  CDR3 for alpha chain variable domain of TCR clone 100435 (TRAV12-3, TRAJ29)
CAMSAGIQETRLLS

SEQ ID NO: 200870 - protein, 11 aa, Homo sapiens
  CDR3 for beta chain variable domain of TCR clone 100435 (TRBV7-3, TRBJ2-1)
CASSLNNEQFF

SEQ ID NO: 200871 - protein, 11 aa, Homo sapiens
  CDR3 for alpha chain variable domain of TCR clone 100436 (TRAV1-1, TRAJ23)
CAVRQGGKLIF

SEQ ID NO: 200872 - protein, 15 aa, Homo sapiens
  CDR3 for beta chain variable domain of TCR clone 100436 (TRBV7-2, TRBJ1-2)
CASSPRAGWNYGYTF

SEQ ID NO: 200873 - protein, 17 aa, Homo sapiens
  CDR3 for alpha chain variable domain of TCR clone 100437 (TRAV13-1, TRAJ28)
CAASPPYSGAGSYQLTF

SEQ ID NO: 200874 - protein, 15 aa, Homo sapiens
  CDR3 for beta chain variable domain of TCR clone 100437 (TRBV6-3, TRBJ2-2)
CASSFLATLAGELFF

SEQ ID NO: 200875 - protein, 15 aa, Homo sapiens
  CDR3 for alpha chain variable domain of TCR clone 100438 (TRAV29/DV5, TRAJ24)
CAASGATDSWGKFQC

SEQ ID NO: 200876 - protein, 12 aa, Homo sapiens
  CDR3 for beta chain variable domain of TCR clone 100438 (TRBV11-2, TRBJ2-2)
CASSLPTGELFF

SEQ ID NO: 200877 - protein, 14 aa, Homo sapiens
  CDR3 for alpha chain variable domain of TCR clone 100439 (TRAV16, TRAJ33)
CALSAMVSNYQLIW

SEQ ID NO: 200878 - protein, 17 aa, Homo sapiens
  CDR3 for beta chain variable domain of TCR clone 100439 (TRBV25-1, TRBJ2-7)
CASSDARVVFSSYEQYF

SEQ ID NO: 200879 - protein, 12 aa, Homo sapiens
  CDR3 for alpha chain variable domain of TCR clone 100440 (TRAV10, TRAJ34)
CVVSGKHRQAHL

SEQ ID NO: 200880 - protein, 14 aa, Homo sapiens
  CDR3 for beta chain variable domain of TCR clone 100440 (TRBV19, TRBJ2-1)
CASPTSVLSGEQFF

SEQ ID NO: 200881 - protein, 10 aa, Homo sapiens
  CDR3 for alpha chain variable domain of TCR clone 100441 (TRAV17, TRAJ35)
CATAEGGIGF

SEQ ID NO: 200882 - protein, 12 aa, Homo sapiens
  CDR3 for beta chain variable domain of TCR clone 100441 (TRBV11-2, TRBJ2-2)
CASSLGGGELFF

SEQ ID NO: 200883 - protein, 14 aa, Homo sapiens
  CDR3 for alpha chain variable domain of TCR clone 100442 (TRAV1-2, TRAJ16)
CAVNRFSDGQKLLF

SEQ ID NO: 200884 - protein, 12 aa, Homo sapiens
  CDR3 for beta chain variable domain of TCR clone 100442 (TRBV6-5, TRBJ2-5)
CASREGSETQYF

SEQ ID NO: 200885 - protein, 11 aa, Homo sapiens
  CDR3 for alpha chain variable domain of TCR clone 100443 (TRAV8-4, TRAJ34)
CAVSWTDKRIF

SEQ ID NO: 200886 - protein, 14 aa, Homo sapiens
  CDR3 for beta chain variable domain of TCR clone 100443 (TRBV7-9, TRBJ2-3)
CASSLEDGTDTQYF

SEQ ID NO: 200887 - protein, 14 aa, Homo sapiens
  CDR3 for alpha chain variable domain of TCR clone 100444 (TRAV12-2, TRAJ13)
CAVKKTGGYQKVTF

SEQ ID NO: 200888 - protein, 16 aa, Homo sapiens
  CDR3 for beta chain variable domain of TCR clone 100444 (TRBV28, TRBJ2-1)
CASSSPEYPRDNEQFF

SEQ ID NO: 200889 - protein, 18 aa, Homo sapiens
  CDR3 for alpha chain variable domain of TCR clone 100445 (TRAV26-1, TRAJ23)
CIVRVGLEVWNQGGKPIF

SEQ ID NO: 200890 - protein, 14 aa, Homo sapiens
  CDR3 for beta chain variable domain of TCR clone 100445 (TRBV7-6, TRBJ2-3)
CASSLGTVTDTQYF

SEQ ID NO: 200891 - protein, 14 aa, Homo sapiens
  CDR3 for alpha chain variable domain of TCR clone 100446 (TRAV26-1, TRAJ38)
CSANNAGNNRKLIW

SEQ ID NO: 200892 - protein, 13 aa, Homo sapiens
  CDR3 for beta chain variable domain of TCR clone 100446 (TRBV20-1, TRBJ1-1)
CSARGGGNTEAFF

SEQ ID NO: 200893 - protein, 23 aa, Homo sapiens
  CDR3 for alpha chain variable domain of TCR clone 100447 (TRAV30, TRAJ29)
PAQLLRNLLLWHRAFSGNTHLVF

SEQ ID NO: 200894 - protein, 15 aa, Homo sapiens
  CDR3 for beta chain variable domain of TCR clone 100447 (TRBV5-1, TRBJ2-2)
CASSLFGQNTGELFF

SEQ ID NO: 200895 - protein, 17 aa, Homo sapiens
  CDR3 for alpha chain variable domain of TCR clone 100448 (TRAV3, TRAJ6)
CAVRDGPRAGGSYIPTF

SEQ ID NO: 200896 - protein, 13 aa, Homo sapiens
  CDR3 for beta chain variable domain of TCR clone 100448 (TRBV14, TRBJ1-1)
CASSQEAGTEAFL

SEQ ID NO: 200897 - protein, 14 aa, Homo sapiens
  CDR3 for alpha chain variable domain of TCR clone 100449 (TRAV12-2, TRAJ17)
CAVLLKAAGNKLTF

SEQ ID NO: 200898 - protein, 17 aa, Homo sapiens
  CDR3 for beta chain variable domain of TCR clone 100449 (TRBV20-1, TRBJ2-2)
CSASGSGQGGLTRELFF

SEQ ID NO: 200899 - protein, 14 aa, Homo sapiens
  CDR3 for alpha chain variable domain of TCR clone 100450 (TRAV12-2, TRAJ15)
CAPHTGQAGTALIF

SEQ ID NO: 200900 - protein, 16 aa, Homo sapiens
  CDR3 for beta chain variable domain of TCR clone 100450 (TRBV19, TRBJ1-1)
CASRFGGPVTGTEAFF

SEQ ID NO: 200901 - protein, 18 aa, Homo sapiens
  CDR3 for alpha chain variable domain of TCR clone 100451 (TRAV21, TRAJ52)
CAVRPSTAGGTSCGKLTF

SEQ ID NO: 200902 - protein, 13 aa, Homo sapiens
  CDR3 for beta chain variable domain of TCR clone 100451 (TRBV29-1, TRBJ2-2)
CSVYREDTGELFF

SEQ ID NO: 200903 - protein, 15 aa, Homo sapiens
  CDR3 for alpha chain variable domain of TCR clone 100452 (TRAV3, TRAJ47)
CAVRDIGEYGNKLVF

SEQ ID NO: 200904 - protein, 12 aa, Homo sapiens
  CDR3 for beta chain variable domain of TCR clone 100452 (TRBV6-3, TRBJ2-1)
CASSGSYNEQFF

SEQ ID NO: 200905 - protein, 13 aa, Homo sapiens
  CDR3 for alpha chain variable domain of TCR clone 100453 (TRAV21, TRAJ27)
CAARPGNGGKSTF

SEQ ID NO: 200906 - protein, 13 aa, Homo sapiens
  CDR3 for beta chain variable domain of TCR clone 100453 (TRBV13, TRBJ2-1)
CASILGGRGEQFF

SEQ ID NO: 200907 - protein, 16 aa, Homo sapiens
  CDR3 for alpha chain variable domain of TCR clone 100454 (TRAV26-1, TRAJ53)
CIVRVAMGGSNYKLTF

SEQ ID NO: 200908 - protein, 12 aa, Homo sapiens
  CDR3 for beta chain variable domain of TCR clone 100454 (TRBV7-9, TRBJ1-5)
CASSPQGQPEHF

SEQ ID NO: 200909 - protein, 18 aa, Homo sapiens
  CDR3 for alpha chain variable domain of TCR clone 100455 (TRAV13-1, TRAJ52)
CAASKRSAGGTSYGKLTF

SEQ ID NO: 200910 - protein, 14 aa, Homo sapiens
  CDR3 for beta chain variable domain of TCR clone 100455 (TRBV6-1, TRBJ1-3)
CASVQGGGGNTMYF

SEQ ID NO: 200911 - protein, 11 aa, Homo sapiens
  CDR3 for alpha chain variable domain of TCR clone 100456 (TRAV12-3, TRAJ49)
CAANTGNQFYF

SEQ ID NO: 200912 - protein, 14 aa, Homo sapiens
  CDR3 for beta chain variable domain of TCR clone 100456 (TRBV11-3, TRBJ1-6)
CASSFSGGDSPLHF

SEQ ID NO: 200913 - protein, 14 aa, Homo sapiens
  CDR3 for alpha chain variable domain of TCR clone 100457 (TRAV3, TRAJ28)
CAVRRGAGSYQLTF

SEQ ID NO: 200914 - protein, 16 aa, Homo sapiens
  CDR3 for beta chain variable domain of TCR clone 100457 (TRBV4-1, TRBJ2-7)
CASSQEWTSGPLERYF

SEQ ID NO: 200915 - protein, 16 aa, Homo sapiens
  CDR3 for alpha chain variable domain of TCR clone 100458 (TRAV1-2, TRAJ10)
CAVRGVLTGGGNELTF

SEQ ID NO: 200916 - protein, 15 aa, Homo sapiens
  CDR3 for beta chain variable domain of TCR clone 100458 (TRBV5-1, TRBJ2-3)
CASSVTSGSTDTQYF

SEQ ID NO: 200917 - protein, 14 aa, Homo sapiens
  CDR3 for alpha chain variable domain of TCR clone 100459 (TRAV23/DV6, TRAJ8)
CAASKATGFQKLVF

SEQ ID NO: 200918 - protein, 15 aa, Homo sapiens
  CDR3 for beta chain variable domain of TCR clone 100459 (TRBV11-3, TRBJ2-3)
CASLKDGREGDTQYF

SEQ ID NO: 200919 - protein, 14 aa, Homo sapiens
  CDR3 for alpha chain variable domain of TCR clone 100460 (TRAV26-1, TRAJ31)
CIALPPNNNARPMF

SEQ ID NO: 200920 - protein, 16 aa, Homo sapiens
  CDR3 for beta chain variable domain of TCR clone 100460 (TRBV10-2, TRBJ2-7)
CASSESPGSSGSEQYF

SEQ ID NO: 200921 - protein, 12 aa, Homo sapiens
  CDR3 for alpha chain variable domain of TCR clone 100461 (TRAV12-3, TRAJ32)
CAGGGATNKLIF

SEQ ID NO: 200922 - protein, 13 aa, Homo sapiens
  CDR3 for beta chain variable domain of TCR clone 100461 (TRBV7-3, TRBJ1-1)
CASSQDWGAEAFF

SEQ ID NO: 200923 - protein, 14 aa, Homo sapiens
  CDR3 for alpha chain variable domain of TCR clone 100462 (TRAV12-1, TRAJ17)
CVVNYKAAGNKLNF

SEQ ID NO: 200924 - protein, 15 aa, Homo sapiens
  CDR3 for beta chain variable domain of TCR clone 100462 (TRBV7-2, TRBJ2-1)
CASTHGTGIYNEQFF

SEQ ID NO: 200925 - protein, 13 aa, Homo sapiens
  CDR3 for alpha chain variable domain of TCR clone 100463 (TRAV20, TRAJ54)
CAVQAGGAQKLVF

SEQ ID NO: 200926 - protein, 14 aa, Homo sapiens
  CDR3 for beta chain variable domain of TCR clone 100463 (TRBV20-1, TRBJ2-7)
CSAKTGTGCYEQYF

SEQ ID NO: 200927 - protein, 13 aa, Homo sapiens
  CDR3 for alpha chain variable domain of TCR clone 100464 (TRAV2, TRAJ15)
CAVASQAGTALIF

SEQ ID NO: 200928 - protein, 13 aa, Homo sapiens
  CDR3 for beta chain variable domain of TCR clone 100464 (TRBV6-5, TRBJ1-1)
CASRPVTGSRTFF

SEQ ID NO: 200929 - protein, 14 aa, Homo sapiens
  CDR3 for alpha chain variable domain of TCR clone 100465 (TRAV29/DV5, TRAJ37)
CAASGSGNTGKLIF

SEQ ID NO: 200930 - protein, 17 aa, Homo sapiens
  CDR3 for beta chain variable domain of TCR clone 100465 (TRBV4-1, TRBJ2-7)
CASSPFLTSGGVGEQYF

SEQ ID NO: 200931 - protein, 16 aa, Homo sapiens
  CDR3 for alpha chain variable domain of TCR clone 100466 (TRAV3, TRAJ27)
CAVRDPQGTNAGKSTF

SEQ ID NO: 200932 - protein, 14 aa, Homo sapiens
  CDR3 for beta chain variable domain of TCR clone 100466 (TRBV19, TRBJ2-1)
CASPTFVLSGEQFF

SEQ ID NO: 200933 - protein, 15 aa, Homo sapiens
  CDR3 for alpha chain variable domain of TCR clone 100467 (TRAV23/DV6, TRAJ18)
CAARYRGSTLGRLYF

SEQ ID NO: 200934 - protein, 13 aa, Homo sapiens
  CDR3 for beta chain variable domain of TCR clone 100467 (TRBV7-2, TRBJ2-7)
CVSSSPSGSEQYF

SEQ ID NO: 200935 - protein, 12 aa, Homo sapiens
  CDR3 for alpha chain variable domain of TCR clone 100468 (TRAV26-1, TRAJ26)
CIVFIYGQNFVF

SEQ ID NO: 200936 - protein, 13 aa, Homo sapiens
  CDR3 for beta chain variable domain of TCR clone 100468 (TRBV6-5, TRBJ2-5)
CATAPSPQETQYF

SEQ ID NO: 200937 - protein, 14 aa, Homo sapiens
  CDR3 for alpha chain variable domain of TCR clone 100469 (TRAV3, TRAJ33)
CAVRAMDSNYQLIW

SEQ ID NO: 200938 - protein, 13 aa, Homo sapiens
  CDR3 for beta chain variable domain of TCR clone 100469 (TRBV2, TRBJ2-5)
CASSGQGEQTQYF

SEQ ID NO: 200939 - protein, 16 aa, Homo sapiens
  CDR3 for alpha chain variable domain of TCR clone 100470 (TRAV16, TRAJ4)
CALSRMFSGCYNKLIF

SEQ ID NO: 200940 - protein, 14 aa, Homo sapiens
  CDR3 for beta chain variable domain of TCR clone 100470 (TRBV4-1, TRBJ2-2)
CASSQAVNTGELFF

SEQ ID NO: 200941 - protein, 18 aa, Homo sapiens
  CDR3 for alpha chain variable domain of TCR clone 100471 (TRAV12-3, TRAJ52)
CAMSRTNTGGTSYGKLTF

SEQ ID NO: 200942 - protein, 17 aa, Homo sapiens
  CDR3 for beta chain variable domain of TCR clone 100471 (TRBV7-3, TRBJ2-3)
CASSLMKRMRGADTQYF

SEQ ID NO: 200943 - protein, 13 aa, Homo sapiens
  CDR3 for alpha chain variable domain of TCR clone 100472 (TRAV8-2, TRAJ49)
CVVTPNTGNQFYF

SEQ ID NO: 200944 - protein, 15 aa, Homo sapiens
  CDR3 for beta chain variable domain of TCR clone 100472 (TRBV7-2, TRBJ2-3)
CATTLAGGHTDTQYF

SEQ ID NO: 200945 - protein, 13 aa, Homo sapiens
  CDR3 for alpha chain variable domain of TCR clone 100473 (TRAV12-3, TRAJ7)
CAMTPYGNNRLAF

SEQ ID NO: 200946 - protein, 13 aa, Homo sapiens
  CDR3 for beta chain variable domain of TCR clone 100473 (TRBV10-3, TRBJ1-2)
CAINADLNYGYAF

SEQ ID NO: 200947 - protein, 14 aa, Homo sapiens
  CDR3 for alpha chain variable domain of TCR clone 100474 (TRAV4, TRAJ23)
CLVGSYNQGGKLIF

SEQ ID NO: 200948 - protein, 18 aa, Homo sapiens
  CDR3 for beta chain variable domain of TCR clone 100474 (TRBV6-5, TRBJ2-6)
CASRTPGQGKTGANDLTF

SEQ ID NO: 200949 - protein, 11 aa, Homo sapiens
  CDR3 for alpha chain variable domain of TCR clone 100475 (TRAV1-2, TRAJ31)
CAVNNNARLMF

SEQ ID NO: 200950 - protein, 15 aa, Homo sapiens
  CDR3 for beta chain variable domain of TCR clone 100475 (TRBV28, TRBJ2-1)
CASSIIAGGRSVQFF

SEQ ID NO: 200951 - protein, 13 aa, Homo sapiens
  CDR3 for alpha chain variable domain of TCR clone 100476 (TRAV27, TRAJ40)
CAGVLASTYKYIF

SEQ ID NO: 200952 - protein, 16 aa, Homo sapiens
  CDR3 for beta chain variable domain of TCR clone 100476 (TRBV11-3, TRBJ2-3)
CASSSISEAGTDTQYF

SEQ ID NO: 200953 - protein, 14 aa, Homo sapiens
  CDR3 for alpha chain variable domain of TCR clone 100477 (TRAV12-2, TRAJ40)
CAVKIPSGTYKYIF

SEQ ID NO: 200954 - protein, 17 aa, Homo sapiens
  CDR3 for beta chain variable domain of TCR clone 100477 (TRBV28, TRBJ2-5)
CASSTPEGDALQETQYF

SEQ ID NO: 200955 - protein, 10 aa, Homo sapiens
  CDR3 for alpha chain variable domain of TCR clone 100478 (TRAV17, TRAJ31)
CATSNNATHV

SEQ ID NO: 200956 - protein, 16 aa, Homo sapiens
  CDR3 for beta chain variable domain of TCR clone 100478 (TRBV7-8, TRBJ2-4)
CASSAERTLAKNIQYF

SEQ ID NO: 200957 - protein, 12 aa, Homo sapiens
  CDR3 for alpha chain variable domain of TCR clone 100479 (TRAV1-2, TRAJ24)
CAVGGSWGKFQF

SEQ ID NO: 200958 - protein, 15 aa, Homo sapiens
  CDR3 for beta chain variable domain of TCR clone 100479 (TRBV6-1, TRBJ2-7)
CTSSEGVGNPYEQYF

SEQ ID NO: 200959 - protein, 15 aa, Homo sapiens
  CDR3 for alpha chain variable domain of TCR clone 100480 (TRAV21, TRAJ53)
CATLNSGGSNYKLKF

SEQ ID NO: 200960 - protein, 16 aa, Homo sapiens
  CDR3 for beta chain variable domain of TCR clone 100480 (TRBV20-1, TRBJ1-4)
CSAPGQGLLTNEKLFF

SEQ ID NO: 200961 - protein, 14 aa, Homo sapiens
  CDR3 for alpha chain variable domain of TCR clone 100481 (TRAV26-1, TRAJ15)
CVVRANQAGTALIF

SEQ ID NO: 200962 - protein, 16 aa, Homo sapiens
  CDR3 for beta chain variable domain of TCR clone 100481 (TRBV20-1, TRBJ1-4)
CSAIGGPRGANEKLFF

SEQ ID NO: 200963 - protein, 14 aa, Homo sapiens
  CDR3 for alpha chain variable domain of TCR clone 100482 (TRAV13-1, TRAJ40)
CAARSTSGTYKYIF

SEQ ID NO: 200964 - protein, 15 aa, Homo sapiens
  CDR3 for beta chain variable domain of TCR clone 100482 (TRBV18, TRBJ1-5)
CASSETGGDNQPQHF

SEQ ID NO: 200965 - protein, 15 aa, Homo sapiens
  CDR3 for alpha chain variable domain of TCR clone 100483 (TRAV8-2, TRAJ40)
CVVSDRGSGTYKYIF

SEQ ID NO: 200966 - protein, 14 aa, Homo sapiens
  CDR3 for beta chain variable domain of TCR clone 100483 (TRBV7-3, TRBJ1-1)
CASSLKGGNTEAFF

SEQ ID NO: 200967 - protein, 14 aa, Homo sapiens
  CDR3 for alpha chain variable domain of TCR clone 100484 (TRAV13-1, TRAJ3)
CVASKSSSASKIIF

SEQ ID NO: 200968 - protein, 15 aa, Homo sapiens
  CDR3 for beta chain variable domain of TCR clone 100484 (TRBV5-5, TRBJ2-2)
CASSRQASGAGELFF

SEQ ID NO: 200969 - protein, 15 aa, Homo sapiens
  CDR3 for alpha chain variable domain of TCR clone 100485 (TRAV14/DV4, TRAJ33)
CAMRECRDSNYQLIW

SEQ ID NO: 200970 - protein, 16 aa, Homo sapiens
  CDR3 for beta chain variable domain of TCR clone 100485 (TRBV12-5, TRBJ2-5)
CASGPRTSGNQETQYF

SEQ ID NO: 200971 - protein, 13 aa, Homo sapiens
  CDR3 for alpha chain variable domain of TCR clone 100486 (TRAV20, TRAJ37)
CAGCSSNTGKLIF

SEQ ID NO: 200972 - protein, 13 aa, Homo sapiens
  CDR3 for beta chain variable domain of TCR clone 100486 (TRBV7-9, TRBJ2-7)
CASSAGLQYEQYF

SEQ ID NO: 200973 - protein, 13 aa, Homo sapiens
  CDR3 for alpha chain variable domain of TCR clone 100487 (TRAV1-1, TRAJ9)
CAAKNTGGFKTIF

SEQ ID NO: 200974 - protein, 14 aa, Homo sapiens
  CDR3 for beta chain variable domain of TCR clone 100487 (TRBV20-1, TRBJ2-1)
SSAQIGGSANEQFF

SEQ ID NO: 200975 - protein, 14 aa, Homo sapiens
  CDR3 for alpha chain variable domain of TCR clone 100488 (TRAV2, TRAJ9)
CAVEDRSGGFKTIF

SEQ ID NO: 200976 - protein, 14 aa, Homo sapiens
  CDR3 for beta chain variable domain of TCR clone 100488 (TRBV7-9, TRBJ2-7)
CASSQSGGQNEQYF

SEQ ID NO: 200977 - protein, 11 aa, Homo sapiens
  CDR3 for alpha chain variable domain of TCR clone 100489 (TRAV2, TRAJ33)
CAVDSNYQLIW

SEQ ID NO: 200978 - protein, 15 aa, Homo sapiens
  CDR3 for beta chain variable domain of TCR clone 100489 (TRBV10-2, TRBJ2-6)
CASSEQGTGANVLTF

SEQ ID NO: 200979 - protein, 17 aa, Homo sapiens
  CDR3 for alpha chain variable domain of TCR clone 100490 (TRAV12-3, TRAJ17)
CAMSAELEEAAGNKLTF

SEQ ID NO: 200980 - protein, 13 aa, Homo sapiens
  CDR3 for beta chain variable domain of TCR clone 100490 (TRBV7-9, TRBJ2-2)
CASSLDPTGELFF

SEQ ID NO: 200981 - protein, 13 aa, Homo sapiens
  CDR3 for alpha chain variable domain of TCR clone 100491 (TRAV13-1, TRAJ8)
CAASIWGFQKLVF

SEQ ID NO: 200982 - protein, 14 aa, Homo sapiens
  CDR3 for beta chain variable domain of TCR clone 100491 (TRBV7-2, TRBJ2-1)
CASSLVQGRNEQFF

SEQ ID NO: 200983 - protein, 12 aa, Homo sapiens
  CDR3 for alpha chain variable domain of TCR clone 100492 (TRAV26-2, TRAJ21)
CILKGNFNKFYF

SEQ ID NO: 200984 - protein, 13 aa, Homo sapiens
  CDR3 for beta chain variable domain of TCR clone 100492 (TRBV7-9, TRBJ1-2)
CASSLKQNYGYTF

SEQ ID NO: 200985 - protein, 13 aa, Homo sapiens
  CDR3 for alpha chain variable domain of TCR clone 100493 (TRAV8-6, TRAJ49)
CAVITNTGNQFYF

SEQ ID NO: 200986 - protein, 14 aa, Homo sapiens
  CDR3 for beta chain variable domain of TCR clone 100493 (TRBV5-1, TRBJ2-7)
CASSREESLYEQYF

SEQ ID NO: 200987 - protein, 13 aa, Homo sapiens
  CDR3 for alpha chain variable domain of TCR clone 100494 (TRAV13-1, TRAJ40)
CAASKGGTYKYIF

SEQ ID NO: 200988 - protein, 16 aa, Homo sapiens
  CDR3 for beta chain variable domain of TCR clone 100494 (TRBV6-1, TRBJ2-5)
CASSETLDRGAETQYF

SEQ ID NO: 200989 - protein, 13 aa, Homo sapiens
  CDR3 for alpha chain variable domain of TCR clone 100495 (TRAV17, TRAJ40)
CAGALGGTYKYIF

SEQ ID NO: 200990 - protein, 16 aa, Homo sapiens
  CDR3 for beta chain variable domain of TCR clone 100495 (TRBV11-2, TRBJ1-2)
CASSLDTGGADYGYIF

SEQ ID NO: 200991 - protein, 15 aa, Homo sapiens
  CDR3 for alpha chain variable domain of TCR clone 100496 (TRAV21, TRAJ24)
CAARSSTDSWGKLQF

SEQ ID NO: 200992 - protein, 17 aa, Homo sapiens
  CDR3 for beta chain variable domain of TCR clone 100496 (TRBV4-3, TRBJ1-2)
CASSSRLQAGGSVGYTF

SEQ ID NO: 200993 - protein, 12 aa, Homo sapiens
  CDR3 for alpha chain variable domain of TCR clone 100497 (TRAV12-3, TRAJ17)
CAMTLTGNKLTF

SEQ ID NO: 200994 - protein, 14 aa, Homo sapiens
  CDR3 for beta chain variable domain of TCR clone 100497 (TRBV7-9, TRBJ2-7)
CASSLGGSSYEQYF

SEQ ID NO: 200995 - protein, 16 aa, Homo sapiens
  CDR3 for alpha chain variable domain of TCR clone 100498 (TRAV3, TRAJ37)
CAVRGKGSGNTGKLIF

SEQ ID NO: 200996 - protein, 13 aa, Homo sapiens
  CDR3 for beta chain variable domain of TCR clone 100498 (TRBV14, TRBJ2-7)
CASSQVRRYEQYF

SEQ ID NO: 200997 - protein, 14 aa, Homo sapiens
  CDR3 for alpha chain variable domain of TCR clone 100499 (TRAV26-1, TRAJ38)
CIADNAGNNSKLIW

SEQ ID NO: 200998 - protein, 15 aa, Homo sapiens
  CDR3 for beta chain variable domain of TCR clone 100499 (TRBV20-1, TRBJ2-7)
CSARDRVSGMDEQYF

SEQ ID NO: 200999 - protein, 14 aa, Homo sapiens
  CDR3 for alpha chain variable domain of TCR clone 100500 (TRAV27, TRAJ23)
CAGAFDNQGGKLIF

SEQ ID NO: 201000 - protein, 15 aa, Homo sapiens
  CDR3 for beta chain variable domain of TCR clone 100500 (TRBV7-3, TRBJ2-7)
CASSLTGQGTYEQYF

SEQ ID NO: 201001 - protein, 17 aa, Homo sapiens
  CDR3 for alpha chain variable domain of TCR clone 100501 (TRAV17, TRAJ7)
CATLGRLAFGKGNQVVV

SEQ ID NO: 201002 - protein, 13 aa, Homo sapiens
  CDR3 for beta chain variable domain of TCR clone 100501 (TRBV12-4, TRBJ2-7)
CASSLERGREQYF

SEQ ID NO: 201003 - protein, 14 aa, Homo sapiens
  CDR3 for alpha chain variable domain of TCR clone 100502 (TRAV8-2, TRAJ4)
CVVSPSGGYNKLIF

SEQ ID NO: 201004 - protein, 14 aa, Homo sapiens
  CDR3 for beta chain variable domain of TCR clone 100502 (TRBV13, TRBJ2-5)
CASSLERVGETQYF

SEQ ID NO: 201005 - protein, 17 aa, Homo sapiens
  CDR3 for alpha chain variable domain of TCR clone 100503 (TRAV3, TRAJ42)
CAVRDRDYGGSQGNLIF

SEQ ID NO: 201006 - protein, 12 aa, Homo sapiens
  CDR3 for beta chain variable domain of TCR clone 100503 (TRBV6-3, TRBJ2-1)
CASSGSYNEQFF

SEQ ID NO: 201007 - protein, 16 aa, Homo sapiens
  CDR3 for alpha chain variable domain of TCR clone 100504 (TRAV3, TRAJ17)
CAVRDGSPAAGNKLTF

SEQ ID NO: 201008 - protein, 13 aa, Homo sapiens
  CDR3 for beta chain variable domain of TCR clone 100504 (TRBV15, TRBJ2-1)
CHKPRGRHNEQFF

SEQ ID NO: 201009 - protein, 15 aa, Homo sapiens
  CDR3 for alpha chain variable domain of TCR clone 100505 (TRAV2, TRAJ15)
CAVEDRDQAGTALIF

SEQ ID NO: 201010 - protein, 13 aa, Homo sapiens
  CDR3 for beta chain variable domain of TCR clone 100505 (TRBV10-2, TRBJ2-7)
CASGTSGGYEQYF

SEQ ID NO: 201011 - protein, 13 aa, Homo sapiens
  CDR3 for alpha chain variable domain of TCR clone 100506 (TRAV13-1, TRAJ5)
CAARVTGRRALTF

SEQ ID NO: 201012 - protein, 15 aa, Homo sapiens
  CDR3 for beta chain variable domain of TCR clone 100506 (TRBV7-9, TRBJ2-7)
CASSPGGGLTYERYF

SEQ ID NO: 201013 - protein, 14 aa, Homo sapiens
  CDR3 for alpha chain variable domain of TCR clone 100507 (TRAV12-2, TRAJ44)
CAVNPAGTASKLTF

SEQ ID NO: 201014 - protein, 13 aa, Homo sapiens
  CDR3 for beta chain variable domain of TCR clone 100507 (TRBV20-1, TRBJ1-6)
CSAPLGVGSPLDF

SEQ ID NO: 201015 - protein, 14 aa, Homo sapiens
  CDR3 for alpha chain variable domain of TCR clone 100508 (TRAV12-3, TRAJ54)
CAMRGIQGAQKLVF

SEQ ID NO: 201016 - protein, 19 aa, Homo sapiens
  CDR3 for beta chain variable domain of TCR clone 100508 (TRBV19, TRBJ2-5)
CASSIGQVTDFFLGETQYF

SEQ ID NO: 201017 - protein, 14 aa, Homo sapiens
  CDR3 for alpha chain variable domain of TCR clone 100509 (TRAV12-2, TRAJ24)
CAVTPADSWVKLQF

SEQ ID NO: 201018 - protein, 12 aa, Homo sapiens
  CDR3 for beta chain variable domain of TCR clone 100509 (TRBV3-1, TRBJ2-1)
CASSQGSSGQFF

SEQ ID NO: 201019 - protein, 14 aa, Homo sapiens
  CDR3 for alpha chain variable domain of TCR clone 100510 (TRAV13-1, TRAJ6)
CAARITGGSYIPTF

SEQ ID NO: 201020 - protein, 14 aa, Homo sapiens
  CDR3 for beta chain variable domain of TCR clone 100510 (TRBV6-3, TRBJ2-1)
CASLHSAYYNEQFF

SEQ ID NO: 201021 - protein, 13 aa, Homo sapiens
  CDR3 for alpha chain variable domain of TCR clone 100511 (TRAV12-1, TRAJ21)
CVVTLYNFNKFYF

SEQ ID NO: 201022 - protein, 12 aa, Homo sapiens
  CDR3 for beta chain variable domain of TCR clone 100511 (TRBV11-2, TRBJ2-2)
CASSLGGGELFF

SEQ ID NO: 201023 - protein, 12 aa, Homo sapiens
  CDR3 for alpha chain variable domain of TCR clone 100512 (TRAV12-3, TRAJ42)
CAPGGSQGNLIF

SEQ ID NO: 201024 - protein, 13 aa, Homo sapiens
  CDR3 for beta chain variable domain of TCR clone 100512 (TRBV5-7, TRBJ2-6)
CASTSSGANVLTV

SEQ ID NO: 201025 - protein, 12 aa, Homo sapiens
  CDR3 for alpha chain variable domain of TCR clone 100513 (TRAV12-3, TRAJ17)
CAMTLTGDKITF

SEQ ID NO: 201026 - protein, 15 aa, Homo sapiens
  CDR3 for beta chain variable domain of TCR clone 100513 (TRBV20-1, TRBJ2-7)
CSARDRVSGMDEQYF

SEQ ID NO: 201027 - protein, 17 aa, Homo sapiens
  CDR3 for alpha chain variable domain of TCR clone 100514 (TRAV29/DV5, TRAJ42)
CAASAGNYGGSQGNLIF

SEQ ID NO: 201028 - protein, 16 aa, Homo sapiens
  CDR3 for beta chain variable domain of TCR clone 100514 (TRBV5-1, TRBJ1-1)
CASSSGGNSLNTEAFF

SEQ ID NO: 201029 - protein, 22 aa, Homo sapiens
  CDR3 for alpha chain variable domain of TCR clone 100515 (TRAV8-2, TRAJ45)
HLTKPSAHMSDAAEYSADGLTF

SEQ ID NO: 201030 - protein, 13 aa, Homo sapiens
  CDR3 for beta chain variable domain of TCR clone 100515 (TRBV7-3, TRBJ2-1)
CASSPVAYKEQFF

SEQ ID NO: 201031 - protein, 16 aa, Homo sapiens
  CDR3 for alpha chain variable domain of TCR clone 100516 (TRAV3, TRAJ6)
CAVRDGMGRRKLHTYS

SEQ ID NO: 201032 - protein, 15 aa, Homo sapiens
  CDR3 for beta chain variable domain of TCR clone 100516 (TRBV5-1, TRBJ2-7)
CASSLGDFTTYEQYF

SEQ ID NO: 201033 - protein, 13 aa, Homo sapiens
  CDR3 for alpha chain variable domain of TCR clone 100517 (TRAV35, TRAJ42)
CAGFPGSQGNLIF

SEQ ID NO: 201034 - protein, 14 aa, Homo sapiens
  CDR3 for beta chain variable domain of TCR clone 100517 (TRBV19, TRBJ2-1)
CASPAFVLSGEQFF

SEQ ID NO: 201035 - protein, 14 aa, Homo sapiens
  CDR3 for alpha chain variable domain of TCR clone 100518 (TRAV13-1, TRAJ10)
CAAKEPEGGNKLTF

SEQ ID NO: 201036 - protein, 14 aa, Homo sapiens
  CDR3 for beta chain variable domain of TCR clone 100518 (TRBV6-6, TRBJ2-7)
CASSDSGAGYEQYF

SEQ ID NO: 201037 - protein, 18 aa, Homo sapiens
  CDR3 for alpha chain variable domain of TCR clone 100519 (TRAV17, TRAJ45)
CATSLDLYSGGDADGLTF

SEQ ID NO: 201038 - protein, 13 aa, Homo sapiens
  CDR3 for beta chain variable domain of TCR clone 100519 (TRBV10-3, TRBJ2-7)
CASKLAVNYEQYF

SEQ ID NO: 201039 - protein, 11 aa, Homo sapiens
  CDR3 for alpha chain variable domain of TCR clone 100520 (TRAV27, TRAJ47)
SIVEYGNNLVF

SEQ ID NO: 201040 - protein, 18 aa, Homo sapiens
  CDR3 for beta chain variable domain of TCR clone 100520 (TRBV2, TRBJ2-1)
CASRGLAGGPRTYNEQFF

SEQ ID NO: 201041 - protein, 13 aa, Homo sapiens
  CDR3 for alpha chain variable domain of TCR clone 100521 (TRAV12-1, TRAJ29)
CVVRNSGNTPLIF

SEQ ID NO: 201042 - protein, 14 aa, Homo sapiens
  CDR3 for beta chain variable domain of TCR clone 100521 (TRBV7-2, TRBJ2-7)
CASRSQGAAYEQYF

SEQ ID NO: 201043 - protein, 15 aa, Homo sapiens
  CDR3 for alpha chain variable domain of TCR clone 100522 (TRAV29/DV5, TRAJ42)
CAAKTDGGSQGNLIF

SEQ ID NO: 201044 - protein, 12 aa, Homo sapiens
  CDR3 for beta chain variable domain of TCR clone 100522 (TRBV5-1, TRBJ2-7)
CASSFRGYEQYF

SEQ ID NO: 201045 - protein, 13 aa, Homo sapiens
  CDR3 for alpha chain variable domain of TCR clone 100523 (TRAV4, )
CLVDIQNPDPAVY

SEQ ID NO: 201046 - protein, 15 aa, Homo sapiens
  CDR3 for beta chain variable domain of TCR clone 100523 (TRBV20-1, TRBJ1-5)
CSASRRGDLGQPQHF

SEQ ID NO: 201047 - protein, 14 aa, Homo sapiens
  CDR3 for alpha chain variable domain of TCR clone 100524 (TRAV27, TRAJ45)
CAGAQEGVLTDSPL

SEQ ID NO: 201048 - protein, 17 aa, Homo sapiens
  CDR3 for beta chain variable domain of TCR clone 100524 (TRBV11-2, TRBJ2-1)
CASSLYPPGVEYNEQFF

SEQ ID NO: 201049 - protein, 13 aa, Homo sapiens
  CDR3 for alpha chain variable domain of TCR clone 100525 (TRAV36/DV7, TRAJ57)
CAPLQGGSEKLVF

SEQ ID NO: 201050 - protein, 14 aa, Homo sapiens
  CDR3 for beta chain variable domain of TCR clone 100525 (TRBV3-1, TRBJ2-5)
CASSQGPDQETQYF

SEQ ID NO: 201051 - protein, 18 aa, Homo sapiens
  CDR3 for alpha chain variable domain of TCR clone 100526 (TRAV21, TRAJ52)
CAVRPSPAGGTSYGKLTF

SEQ ID NO: 201052 - protein, 11 aa, Homo sapiens
  CDR3 for beta chain variable domain of TCR clone 100526 (TRBV7-9, TRBJ2-3)
CASSGPDTQYF

SEQ ID NO: 201053 - protein, 14 aa, Homo sapiens
  CDR3 for alpha chain variable domain of TCR clone 100527 (TRAV12-2, TRAJ40)
CAVKIPSGTYKYIF

SEQ ID NO: 201054 - protein, 13 aa, Homo sapiens
  CDR3 for beta chain variable domain of TCR clone 100527 (TRBV23-1, TRBJ1-4)
CASRGKFNEKLFF

SEQ ID NO: 201055 - protein, 15 aa, Homo sapiens
  CDR3 for alpha chain variable domain of TCR clone 100528 (TRAV29/DV5, TRAJ57)
CAASLLRGGSEKLVF

SEQ ID NO: 201056 - protein, 13 aa, Homo sapiens
  CDR3 for beta chain variable domain of TCR clone 100528 (TRBV19, TRBJ1-5)
CASSIEPVQPQHF

SEQ ID NO: 201057 - protein, 13 aa, Homo sapiens
  CDR3 for alpha chain variable domain of TCR clone 100529 (TRAV29/DV5, TRAJ31)
FAASRNNNARLMF

SEQ ID NO: 201058 - protein, 12 aa, Homo sapiens
  CDR3 for beta chain variable domain of TCR clone 100529 (TRBV14, TRBJ2-5)
CASSQLKETQYF

SEQ ID NO: 201059 - protein, 13 aa, Homo sapiens
  CDR3 for alpha chain variable domain of TCR clone 100530 (TRAV1-2, TRAJ34)
CAVRDEATDKLIF

SEQ ID NO: 201060 - protein, 13 aa, Homo sapiens
  CDR3 for beta chain variable domain of TCR clone 100530 (TRBV7-9, TRBJ1-2)
CASSLKQNYGYTF

SEQ ID NO: 201061 - protein, 12 aa, Homo sapiens
  CDR3 for alpha chain variable domain of TCR clone 100531 (TRAV13-2, TRAJ41)
CAKNTGRYALNF

SEQ ID NO: 201062 - protein, 12 aa, Homo sapiens
  CDR3 for beta chain variable domain of TCR clone 100531 (TRBV7-9, TRBJ1-1)
CASSLSGGVAFF

SEQ ID NO: 201063 - protein, 16 aa, Homo sapiens
  CDR3 for alpha chain variable domain of TCR clone 100532 (TRAV20, TRAJ22)
CAVQALSSGSARQLTF

SEQ ID NO: 201064 - protein, 13 aa, Homo sapiens
  CDR3 for beta chain variable domain of TCR clone 100532 (TRBV7-2, TRBJ2-5)
CASSQTSVETQYF

SEQ ID NO: 201065 - protein, 14 aa, Homo sapiens
  CDR3 for alpha chain variable domain of TCR clone 100533 (TRAV1-2, TRAJ16)
FAVNRFSDGQKLLF

SEQ ID NO: 201066 - protein, 13 aa, Homo sapiens
  CDR3 for beta chain variable domain of TCR clone 100533 (TRBV10-3, TRBJ2-7)
CASKLAVNYEQYF

SEQ ID NO: 201067 - protein, 16 aa, Homo sapiens
  CDR3 for alpha chain variable domain of TCR clone 100534 (TRAV26-1, TRAJ36)
CIVRVPDQTGANNPFF

SEQ ID NO: 201068 - protein, 21 aa, Homo sapiens
  CDR3 for beta chain variable domain of TCR clone 100534 (TRBV6-1, TRBJ1-1)
CASSGVGNYKGISGFDTEAFF

SEQ ID NO: 201069 - protein, 13 aa, Homo sapiens
  CDR3 for alpha chain variable domain of TCR clone 100535 (TRAV2, TRAJ40)
CAVVTSGTHKYIF

SEQ ID NO: 201070 - protein, 16 aa, Homo sapiens
  CDR3 for beta chain variable domain of TCR clone 100535 (TRBV12-5, TRBJ2-5)
CASGPRTSGNQETQYF

SEQ ID NO: 201071 - protein, 15 aa, Homo sapiens
  CDR3 for alpha chain variable domain of TCR clone 100536 (TRAV21, TRAJ53)
CATLNSGGSNCKLTF

SEQ ID NO: 201072 - protein, 16 aa, Homo sapiens
  CDR3 for beta chain variable domain of TCR clone 100536 (TRBV9, TRBJ2-1)
CASSVGGGGNYNEQFF

SEQ ID NO: 201073 - protein, 16 aa, Homo sapiens
  CDR3 for alpha chain variable domain of TCR clone 100537 (TRAV30, TRAJ24)
CGTEIVDADSWGKFHF

SEQ ID NO: 201074 - protein, 12 aa, Homo sapiens
  CDR3 for beta chain variable domain of TCR clone 100537 (TRBV29-1, TRBJ2-3)
CSVTGGADTQYF

SEQ ID NO: 201075 - protein, 14 aa, Homo sapiens
  CDR3 for alpha chain variable domain of TCR clone 100538 (TRAV13-1, TRAJ6)
CAASITGGSYIPTF

SEQ ID NO: 201076 - protein, 14 aa, Homo sapiens
  CDR3 for beta chain variable domain of TCR clone 100538 (TRBV7-8, TRBJ2-3)
CASSLEAGTDTQYF

SEQ ID NO: 201077 - protein, 13 aa, Homo sapiens
  CDR3 for alpha chain variable domain of TCR clone 100539 (TRAV21, TRAJ27)
CAALNTNAGKSTF

SEQ ID NO: 201078 - protein, 14 aa, Homo sapiens
  CDR3 for beta chain variable domain of TCR clone 100539 (TRBV27, TRBJ1-1)
CARSLLSGLSEAFF

SEQ ID NO: 201079 - protein, 17 aa, Homo sapiens
  CDR3 for alpha chain variable domain of TCR clone 100540 (TRAV38-1, TRAJ45)
CAFMKHYMGGGADGLTF

SEQ ID NO: 201080 - protein, 19 aa, Homo sapiens
  CDR3 for beta chain variable domain of TCR clone 100540 (TRBV6-1, TRBJ2-5)
CASSEQGLAGWLYQETQYF

SEQ ID NO: 201081 - protein, 13 aa, Homo sapiens
  CDR3 for alpha chain variable domain of TCR clone 100541 (TRAV8-2, TRAJ43)
CVVSDKGDNDMRF

SEQ ID NO: 201082 - protein, 12 aa, Homo sapiens
  CDR3 for beta chain variable domain of TCR clone 100541 (TRBV7-9, TRBJ2-7)
CASRTGFDEQYF

SEQ ID NO: 201083 - protein, 17 aa, Homo sapiens
  CDR3 for alpha chain variable domain of TCR clone 100542 (TRAV3, TRAJ12)
CAARDGGRMDSSYKLIF

SEQ ID NO: 201084 - protein, 13 aa, Homo sapiens
  CDR3 for beta chain variable domain of TCR clone 100542 (TRBV20-1, TRBJ1-1)
CSAPLGGGTEAFF

SEQ ID NO: 201085 - protein, 12 aa, Homo sapiens
  CDR3 for alpha chain variable domain of TCR clone 100543 (TRAV2, TRAJ9)
CAVGAGGFKTIF

SEQ ID NO: 201086 - protein, 14 aa, Homo sapiens
  CDR3 for beta chain variable domain of TCR clone 100543 (TRBV7-3, TRBJ1-1)
CASSLKGGNTEAFF

SEQ ID NO: 201087 - protein, 12 aa, Homo sapiens
  CDR3 for alpha chain variable domain of TCR clone 100544 (TRAV30, TRAJ43)
CGTEERGKDMRF

SEQ ID NO: 201088 - protein, 13 aa, Homo sapiens
  CDR3 for beta chain variable domain of TCR clone 100544 (TRBV7-9, TRBJ2-3)
CASSPGSTDTQYF

SEQ ID NO: 201089 - protein, 14 aa, Homo sapiens
  CDR3 for alpha chain variable domain of TCR clone 100545 (TRAV3, TRAJ13)
CAVSYSGGYQKVTF

SEQ ID NO: 201090 - protein, 17 aa, Homo sapiens
  CDR3 for beta chain variable domain of TCR clone 100545 (TRBV20-1, TRBJ2-2)
CSASGSGQGGLTGELFF

SEQ ID NO: 201091 - protein, 16 aa, Homo sapiens
  CDR3 for alpha chain variable domain of TCR clone 100546 (TRAV16, TRAJ52)
CALSASGGTSYGKLTF

SEQ ID NO: 201092 - protein, 12 aa, Homo sapiens
  CDR3 for beta chain variable domain of TCR clone 100546 (TRBV12-4, TRBJ1-3)
CASSFSGNTIYF

SEQ ID NO: 201093 - protein, 14 aa, Homo sapiens
  CDR3 for alpha chain variable domain of TCR clone 100547 (TRAV38-1, TRAJ29)
CAFITPSGNTPLVF

SEQ ID NO: 201094 - protein, 14 aa, Homo sapiens
  CDR3 for beta chain variable domain of TCR clone 100547 (TRBV18, TRBJ2-7)
CASSPRGGAYEQYF

SEQ ID NO: 201095 - protein, 13 aa, Homo sapiens
  CDR3 for alpha chain variable domain of TCR clone 100548 (TRAV12-3, TRAJ13)
CAMTSGGYQKVTF

SEQ ID NO: 201096 - protein, 13 aa, Homo sapiens
  CDR3 for beta chain variable domain of TCR clone 100548 (TRBV7-3, TRBJ2-1)
CASSPVAYNEQSF

SEQ ID NO: 201097 - protein, 11 aa, Homo sapiens
  CDR3 for alpha chain variable domain of TCR clone 100549 (TRAV8-3, TRAJ18)
CAVGGRQRLNP

SEQ ID NO: 201098 - protein, 15 aa, Homo sapiens
  CDR3 for beta chain variable domain of TCR clone 100549 (TRBV7-8, TRBJ2-7)
CASSLGTGNPYEQYF

SEQ ID NO: 201099 - protein, 17 aa, Homo sapiens
  CDR3 for alpha chain variable domain of TCR clone 100550 (TRAV4, TRAJ18)
CLVGERSVGSTLGRLYF

SEQ ID NO: 201100 - protein, 14 aa, Homo sapiens
  CDR3 for beta chain variable domain of TCR clone 100550 (TRBV19, TRBJ2-3)
CASSAPRGTDTQYF

SEQ ID NO: 201101 - protein, 13 aa, Homo sapiens
  CDR3 for alpha chain variable domain of TCR clone 100551 (TRAV17, TRAJ22)
CAHHSGSARQLTF

SEQ ID NO: 201102 - protein, 16 aa, Homo sapiens
  CDR3 for beta chain variable domain of TCR clone 100551 (TRBV4-1, TRBJ1-2)
CASSQDAGQVLYGYTL

SEQ ID NO: 201103 - protein, 15 aa, Homo sapiens
  CDR3 for alpha chain variable domain of TCR clone 100552 (TRAV8-3, TRAJ27)
CAVGPSKTNAGKSTF

SEQ ID NO: 201104 - protein, 15 aa, Homo sapiens
  CDR3 for beta chain variable domain of TCR clone 100552 (TRBV7-2, TRBJ2-1)
CASSSGLTGGNEQFF

SEQ ID NO: 201105 - protein, 13 aa, Homo sapiens
  CDR3 for alpha chain variable domain of TCR clone 100553 (TRAV8-3, TRAJ28)
CAVGAVGSYQLTF

SEQ ID NO: 201106 - protein, 15 aa, Homo sapiens
  CDR3 for beta chain variable domain of TCR clone 100553 (TRBV7-9, TRBJ1-5)
CASSQCYQPNQPQHF

SEQ ID NO: 201107 - protein, 13 aa, Homo sapiens
  CDR3 for alpha chain variable domain of TCR clone 100554 (TRAV3, TRAJ29)
CAVRDWGNTPLGF

SEQ ID NO: 201108 - protein, 15 aa, Homo sapiens
  CDR3 for beta chain variable domain of TCR clone 100554 (TRBV12-4, TRBJ2-5)
CASIGRTGEGETQYF

SEQ ID NO: 201109 - protein, 23 aa, Homo sapiens
  CDR3 for alpha chain variable domain of TCR clone 100555 (TRAV30, TRAJ29)
PAQLLRNLLLWHRAFSGSTPLVF

SEQ ID NO: 201110 - protein, 15 aa, Homo sapiens
  CDR3 for beta chain variable domain of TCR clone 100555 (TRBV5-1, TRBJ2-2)
CASSLFGQNTGELFF

SEQ ID NO: 201111 - protein, 16 aa, Homo sapiens
  CDR3 for alpha chain variable domain of TCR clone 100556 (TRAV30, TRAJ24)
CGTEIVDADSWGKFQF

SEQ ID NO: 201112 - protein, 18 aa, Homo sapiens
  CDR3 for beta chain variable domain of TCR clone 100556 (TRBV10-2, TRBJ2-2)
CISAPAVHRQADAGELFF

SEQ ID NO: 201113 - protein, 17 aa, Homo sapiens
  CDR3 for alpha chain variable domain of TCR clone 100557 (TRAV36/DV7, TRAJ52)
CAVAQRAGGTSYGKLTF

SEQ ID NO: 201114 - protein, 14 aa, Homo sapiens
  CDR3 for beta chain variable domain of TCR clone 100557 (TRBV11-1, TRBJ2-7)
CASTFAVPSYEQYF

SEQ ID NO: 201115 - protein, 16 aa, Homo sapiens
  CDR3 for alpha chain variable domain of TCR clone 100558 (TRAV12-3, TRAJ53)
CAMSPGSGGSNYKLTF

SEQ ID NO: 201116 - protein, 13 aa, Homo sapiens
  CDR3 for beta chain variable domain of TCR clone 100558 (TRBV6-4, TRBJ1-5)
CASSADLNQPQHF

SEQ ID NO: 201117 - protein, 15 aa, Homo sapiens
  CDR3 for alpha chain variable domain of TCR clone 100559 (TRAV2, TRAJ15)
CAVDDREQAGTALIF

SEQ ID NO: 201118 - protein, 13 aa, Homo sapiens
  CDR3 for beta chain variable domain of TCR clone 100559 (TRBV10-2, TRBJ2-3)
CASSESGDHTQYF

SEQ ID NO: 201119 - protein, 15 aa, Homo sapiens
  CDR3 for alpha chain variable domain of TCR clone 100560 (TRAV38-1, TRAJ57)
CAFMDSQGGSEKLVF

SEQ ID NO: 201120 - protein, 16 aa, Homo sapiens
  CDR3 for beta chain variable domain of TCR clone 100560 (TRBV10-3, TRBJ2-1)
CDIRGGGRGITMSSSS

SEQ ID NO: 201121 - protein, 14 aa, Homo sapiens
  CDR3 for alpha chain variable domain of TCR clone 100561 (TRAV9-2, TRAJ39)
CALYIYNAGNMLTF

SEQ ID NO: 201122 - protein, 16 aa, Homo sapiens
  CDR3 for beta chain variable domain of TCR clone 100561 (TRBV7-2, TRBJ2-7)
CASSLEAGGPWYEQYF

SEQ ID NO: 201123 - protein, 13 aa, Homo sapiens
  CDR3 for alpha chain variable domain of TCR clone 100562 (TRAV23/DV6, TRAJ34)
CAAIENNTDKLIF

SEQ ID NO: 201124 - protein, 16 aa, Homo sapiens
  CDR3 for beta chain variable domain of TCR clone 100562 (TRBV7-9, TRBJ2-6)
CASSLKGPLRANVLTF

SEQ ID NO: 201125 - protein, 15 aa, Homo sapiens
  CDR3 for alpha chain variable domain of TCR clone 100563 (TRAV8-3, TRAJ32)
CAVGPYGGATTKLIF

SEQ ID NO: 201126 - protein, 14 aa, Homo sapiens
  CDR3 for beta chain variable domain of TCR clone 100563 (TRBV29-1, TRBJ2-2)
CSVLAETNTGELFF

SEQ ID NO: 201127 - protein, 13 aa, Homo sapiens
  CDR3 for alpha chain variable domain of TCR clone 100564 (TRAV12-1, TRAJ39)
CVALNNAGSMLTF

SEQ ID NO: 201128 - protein, 14 aa, Homo sapiens
  CDR3 for beta chain variable domain of TCR clone 100564 (TRBV7-9, TRBJ2-5)
CASSPAQDQETQYF

SEQ ID NO: 201129 - protein, 12 aa, Homo sapiens
  CDR3 for alpha chain variable domain of TCR clone 100565 (TRAV12-1, )
CVVNSWISRTLT

SEQ ID NO: 201130 - protein, 16 aa, Homo sapiens
  CDR3 for beta chain variable domain of TCR clone 100565 (TRBV19, TRBJ2-1)
CASSKAGPSSYNEQFF

SEQ ID NO: 201131 - protein, 13 aa, Homo sapiens
  CDR3 for alpha chain variable domain of TCR clone 100566 (TRAV13-2, TRAJ48)
CAEMDFGNEKLTF

SEQ ID NO: 201132 - protein, 11 aa, Homo sapiens
  CDR3 for beta chain variable domain of TCR clone 100566 (TRBV19, TRBJ2-5)
CASSIKETQYF

SEQ ID NO: 201133 - protein, 14 aa, Homo sapiens
  CDR3 for alpha chain variable domain of TCR clone 100567 (TRAV1-2, TRAJ8)
CAVREDTGFQKLVF

SEQ ID NO: 201134 - protein, 12 aa, Homo sapiens
  CDR3 for beta chain variable domain of TCR clone 100567 (TRBV11-2, TRBJ2-2)
CASSFPTGELFF

SEQ ID NO: 201135 - protein, 14 aa, Homo sapiens
  CDR3 for alpha chain variable domain of TCR clone 100568 (TRAV1-1, TRAJ27)
CAVIYNTNAGKSTF

SEQ ID NO: 201136 - protein, 13 aa, Homo sapiens
  CDR3 for beta chain variable domain of TCR clone 100568 (TRBV12-5, TRBJ1-2)
CASGVRAGNGYTF

SEQ ID NO: 201137 - protein, 13 aa, Homo sapiens
  CDR3 for alpha chain variable domain of TCR clone 100569 (TRAV1-1, TRAJ9)
CAAKNTGGFKTIF

SEQ ID NO: 201138 - protein, 14 aa, Homo sapiens
  CDR3 for beta chain variable domain of TCR clone 100569 (TRBV7-2, TRBJ2-7)
CASRSQGAAYEQYF

SEQ ID NO: 201139 - protein, 13 aa, Homo sapiens
  CDR3 for alpha chain variable domain of TCR clone 100570 (TRAV13-1, TRAJ5)
CAAEHTGRRALTF

SEQ ID NO: 201140 - protein, 12 aa, Homo sapiens
  CDR3 for beta chain variable domain of TCR clone 100570 (TRBV2, TRBJ2-1)
CAYGPPGNEQFF

SEQ ID NO: 201141 - protein, 11 aa, Homo sapiens
  CDR3 for alpha chain variable domain of TCR clone 100571 (TRAV26-1, TRAJ37)
CIVRVGRKLIF

SEQ ID NO: 201142 - protein, 15 aa, Homo sapiens
  CDR3 for beta chain variable domain of TCR clone 100571 (TRBV7-2, TRBJ1-2)
CASSPRAGWNYGYTF

SEQ ID NO: 201143 - protein, 12 aa, Homo sapiens
  CDR3 for alpha chain variable domain of TCR clone 100572 (TRAV26-1, TRAJ26)
CIVFIYGQNFVF

SEQ ID NO: 201144 - protein, 14 aa, Homo sapiens
  CDR3 for beta chain variable domain of TCR clone 100572 (TRBV12-5, TRBJ2-5)
CASGSRTHQETQYF

SEQ ID NO: 201145 - protein, 15 aa, Homo sapiens
  CDR3 for alpha chain variable domain of TCR clone 100573 (TRAV21, TRAJ53)
CATLNSGGSNYKLTS

SEQ ID NO: 201146 - protein, 13 aa, Homo sapiens
  CDR3 for beta chain variable domain of TCR clone 100573 (TRBV12-5, TRBJ2-1)
CASGLGRGNEQFF

SEQ ID NO: 201147 - protein, 17 aa, Homo sapiens
  CDR3 for alpha chain variable domain of TCR clone 100574 (TRAV13-1, TRAJ28)
CAASPPYSGAGSYQLTF

SEQ ID NO: 201148 - protein, 16 aa, Homo sapiens
  CDR3 for beta chain variable domain of TCR clone 100574 (TRBV5-1, TRBJ2-2)
CASSLWDTTNTGELFF

SEQ ID NO: 201149 - protein, 13 aa, Homo sapiens
  CDR3 for alpha chain variable domain of TCR clone 100575 (TRAV13-1, TRAJ23)
CAASSYQGGKLIF

SEQ ID NO: 201150 - protein, 16 aa, Homo sapiens
  CDR3 for beta chain variable domain of TCR clone 100575 (TRBV20-1, TRBJ2-1)
CSANLRLAGTYNEQFF

SEQ ID NO: 201151 - protein, 13 aa, Homo sapiens
  CDR3 for alpha chain variable domain of TCR clone 100576 (TRAV12-3, TRAJ7)
CAMTPYGNNRLAF

SEQ ID NO: 201152 - protein, 16 aa, Homo sapiens
  CDR3 for beta chain variable domain of TCR clone 100576 (TRBV20-1, TRBJ1-4)
CSARPYGGELSEKLFF

SEQ ID NO: 201153 - protein, 14 aa, Homo sapiens
  CDR3 for alpha chain variable domain of TCR clone 100577 (TRAV21, TRAJ10)
SHLPLTGGGNKLTF

SEQ ID NO: 201154 - protein, 15 aa, Homo sapiens
  CDR3 for beta chain variable domain of TCR clone 100577 (TRBV11-2, TRBJ1-3)
CASSLDGTVGNTIYF

SEQ ID NO: 201155 - protein, 18 aa, Homo sapiens
  CDR3 for alpha chain variable domain of TCR clone 100578 (TRAV26-1, TRAJ23)
CIVRVGLEVWNQGGKLIF

SEQ ID NO: 201156 - protein, 16 aa, Homo sapiens
  CDR3 for beta chain variable domain of TCR clone 100578 (TRBV12-4, TRBJ2-5)
CASSFFARGRQETQYF

SEQ ID NO: 201157 - protein, 12 aa, Homo sapiens
  CDR3 for alpha chain variable domain of TCR clone 100579 (TRAV21, TRAJ31)
CAVWGNNARLMF

SEQ ID NO: 201158 - protein, 16 aa, Homo sapiens
  CDR3 for beta chain variable domain of TCR clone 100579 (TRBV28, TRBJ2-7)
CASSPWVATGDLSQYF

SEQ ID NO: 201159 - protein, 17 aa, Homo sapiens
  CDR3 for alpha chain variable domain of TCR clone 100580 (TRAV26-1, TRAJ53)
CIVRDDDSGGSSYKLTF

SEQ ID NO: 201160 - protein, 15 aa, Homo sapiens
  CDR3 for beta chain variable domain of TCR clone 100580 (TRBV20-1, TRBJ2-7)
CSARVPAAYFYEQYF

SEQ ID NO: 201161 - protein, 13 aa, Homo sapiens
  CDR3 for alpha chain variable domain of TCR clone 100581 (TRAV16, TRAJ31)
CALSAHNNARLMF

SEQ ID NO: 201162 - protein, 17 aa, Homo sapiens
  CDR3 for beta chain variable domain of TCR clone 100581 (TRBV12-4, TRBJ2-1)
CASSPGLAAGRINEQFF

SEQ ID NO: 201163 - protein, 14 aa, Homo sapiens
  CDR3 for alpha chain variable domain of TCR clone 100582 (TRAV26-1, TRAJ22)
CIVRVSGSARQLTF

SEQ ID NO: 201164 - protein, 13 aa, Homo sapiens
  CDR3 for beta chain variable domain of TCR clone 100582 (TRBV25-1, TRBJ2-5)
CASSESGRETQYF

SEQ ID NO: 201165 - protein, 14 aa, Homo sapiens
  CDR3 for alpha chain variable domain of TCR clone 100583 (TRAV13-1, TRAJ5)
CAAHPDTGRRALTF

SEQ ID NO: 201166 - protein, 14 aa, Homo sapiens
  CDR3 for beta chain variable domain of TCR clone 100583 (TRBV7-2, TRBJ2-7)
CACSLYPGRYEQYF

SEQ ID NO: 201167 - protein, 13 aa, Homo sapiens
  CDR3 for alpha chain variable domain of TCR clone 100584 (TRAV20, TRAJ21)
CAVEGYNFNKFYF

SEQ ID NO: 201168 - protein, 18 aa, Homo sapiens
  CDR3 for beta chain variable domain of TCR clone 100584 (TRBV15, TRBJ2-3)
CATSRDGARSWDTDTQYF

SEQ ID NO: 201169 - protein, 11 aa, Homo sapiens
  CDR3 for alpha chain variable domain of TCR clone 100585 (TRAV26-1, TRAJ37)
CIVRVGRKLIF

SEQ ID NO: 201170 - protein, 16 aa, Homo sapiens
  CDR3 for beta chain variable domain of TCR clone 100585 (TRBV2, TRBJ2-1)
CASSVGGSLSYNEQFF

SEQ ID NO: 201171 - protein, 11 aa, Homo sapiens
  CDR3 for alpha chain variable domain of TCR clone 100586 (TRAV3, TRAJ21)
CAVGNCNKFYF

SEQ ID NO: 201172 - protein, 16 aa, Homo sapiens
  CDR3 for beta chain variable domain of TCR clone 100586 (TRBV19, TRBJ2-1)
CASSRAGPSSYNEQFF

SEQ ID NO: 201173 - protein, 13 aa, Homo sapiens
  CDR3 for alpha chain variable domain of TCR clone 100587 (TRAV21, TRAJ27)
CAARPGNAGKSTF

SEQ ID NO: 201174 - protein, 20 aa, Homo sapiens
  CDR3 for beta chain variable domain of TCR clone 100587 (TRBV19, TRBJ2-1)
CASSISRTVTSTRLNNEQFF

SEQ ID NO: 201175 - protein, 14 aa, Homo sapiens
  CDR3 for alpha chain variable domain of TCR clone 100588 (TRAV2, TRAJ9)
CAVEDRSGGFKTIF

SEQ ID NO: 201176 - protein, 12 aa, Homo sapiens
  CDR3 for beta chain variable domain of TCR clone 100588 (TRBV7-9, TRBJ2-7)
CASSLEGYGQYF

SEQ ID NO: 201177 - protein, 14 aa, Homo sapiens
  CDR3 for alpha chain variable domain of TCR clone 100589 (TRAV35, TRAJ33)
CAGSSQDSNYQLIW

SEQ ID NO: 201178 - protein, 14 aa, Homo sapiens
  CDR3 for beta chain variable domain of TCR clone 100589 (TRBV20-1, TRBJ2-1)
CSAQIGGSANERFF

SEQ ID NO: 201179 - protein, 14 aa, Homo sapiens
  CDR3 for alpha chain variable domain of TCR clone 100590 (TRAV12-2, TRAJ53)
CAVKGGGSDYKLTF

SEQ ID NO: 201180 - protein, 14 aa, Homo sapiens
  CDR3 for beta chain variable domain of TCR clone 100590 (TRBV7-7, TRBJ2-2)
CATRQDSDTGELFF

SEQ ID NO: 201181 - protein, 14 aa, Homo sapiens
  CDR3 for alpha chain variable domain of TCR clone 100591 (TRAV13-2, TRAJ39)
CAENHNNAGNMLTF

SEQ ID NO: 201182 - protein, 15 aa, Homo sapiens
  CDR3 for beta chain variable domain of TCR clone 100591 (TRBV5-1, TRBJ2-1)
CASSPPRAPYNEQFF

SEQ ID NO: 201183 - protein, 14 aa, Homo sapiens
  CDR3 for alpha chain variable domain of TCR clone 100592 (TRAV4, TRAJ17)
CLMGDMAAGNKLTF

SEQ ID NO: 201184 - protein, 14 aa, Homo sapiens
  CDR3 for beta chain variable domain of TCR clone 100592 (TRBV4-1, TRBJ2-7)
CASSPVAGGDEQYF

SEQ ID NO: 201185 - protein, 11 aa, Homo sapiens
  CDR3 for alpha chain variable domain of TCR clone 100593 (TRAV1-1, TRAJ23)
CAVRQGGKLIF

SEQ ID NO: 201186 - protein, 15 aa, Homo sapiens
  CDR3 for beta chain variable domain of TCR clone 100593 (TRBV11-2, TRBJ2-1)
CASSLGPDSYNEQFF

SEQ ID NO: 201187 - protein, 14 aa, Homo sapiens
  CDR3 for alpha chain variable domain of TCR clone 100594 (TRAV8-6, TRAJ49)
CAVSDPGTGNQFYF

SEQ ID NO: 201188 - protein, 16 aa, Homo sapiens
  CDR3 for beta chain variable domain of TCR clone 100594 (TRBV24-1, TRBJ2-1)
CATSGVTEANYNEQFF

SEQ ID NO: 201189 - protein, 14 aa, Homo sapiens
  CDR3 for alpha chain variable domain of TCR clone 100595 (TRAV12-2, TRAJ13)
CAVKKTGGYQKVTF

SEQ ID NO: 201190 - protein, 16 aa, Homo sapiens
  CDR3 for beta chain variable domain of TCR clone 100595 (TRBV20-1, TRBJ1-2)
CSASRGQGVANYGYTF

SEQ ID NO: 201191 - protein, 13 aa, Homo sapiens
  CDR3 for alpha chain variable domain of TCR clone 100596 (TRAV17, TRAJ9)
CATDYTAGFKTIF

SEQ ID NO: 201192 - protein, 14 aa, Homo sapiens
  CDR3 for beta chain variable domain of TCR clone 100596 (TRBV19, TRBJ2-5)
CASSMTGQQETQYF

SEQ ID NO: 201193 - protein, 12 aa, Homo sapiens
  CDR3 for alpha chain variable domain of TCR clone 100597 (TRAV21, TRAJ33)
CAKMDSNYRLIW

SEQ ID NO: 201194 - protein, 18 aa, Homo sapiens
  CDR3 for beta chain variable domain of TCR clone 100597 (TRBV15, TRBJ2-3)
CATSRDGARSWDTDTQYF

SEQ ID NO: 201195 - protein, 13 aa, Homo sapiens
  CDR3 for alpha chain variable domain of TCR clone 100598 (TRAV12-3, TRAJ6)
CAMIPGGSYIPTF

SEQ ID NO: 201196 - protein, 12 aa, Homo sapiens
  CDR3 for beta chain variable domain of TCR clone 100598 (TRBV6-1, TRBJ2-7)
CASSDYSYEQYF

SEQ ID NO: 201197 - protein, 13 aa, Homo sapiens
  CDR3 for alpha chain variable domain of TCR clone 100599 (TRAV24, TRAJ44)
CALLTGTASKLTF

SEQ ID NO: 201198 - protein, 16 aa, Homo sapiens
  CDR3 for beta chain variable domain of TCR clone 100599 (TRBV2, TRBJ2-3)
CASITSVEGVTDTQYF

SEQ ID NO: 201199 - protein, 12 aa, Homo sapiens
  CDR3 for alpha chain variable domain of TCR clone 100600 (TRAV13-1, TRAJ49)
CAASPMGDQFYF

SEQ ID NO: 201200 - protein, 17 aa, Homo sapiens
  CDR3 for beta chain variable domain of TCR clone 100600 (TRBV11-2, TRBJ2-1)
CASSLYPPGVEYNEQFF

SEQ ID NO: 201201 - protein, 12 aa, Homo sapiens
  CDR3 for alpha chain variable domain of TCR clone 100601 (TRAV23/DV6, TRAJ30)
CEASKGDDKIIF

SEQ ID NO: 201202 - protein, 18 aa, Homo sapiens
  CDR3 for beta chain variable domain of TCR clone 100601 (TRBV10-3, TRBJ2-3)
CAISESRVGPMRGDTQYF

SEQ ID NO: 201203 - protein, 18 aa, Homo sapiens
  CDR3 for alpha chain variable domain of TCR clone 100602 (TRAV17, TRAJ45)
CATSLDLYSGGGADGLTF

SEQ ID NO: 201204 - protein, 15 aa, Homo sapiens
  CDR3 for beta chain variable domain of TCR clone 100602 (TRBV20-1, TRBJ2-7)
CSARDRVSGMDEQYF

SEQ ID NO: 201205 - protein, 13 aa, Homo sapiens
  CDR3 for alpha chain variable domain of TCR clone 100603 (TRAV29/DV5, TRAJ49)
CAASASTGNQFYF

SEQ ID NO: 201206 - protein, 17 aa, Homo sapiens
  CDR3 for beta chain variable domain of TCR clone 100603 (TRBV7-3, TRBJ2-2)
CASSLSGTSGGTGELFF

SEQ ID NO: 201207 - protein, 14 aa, Homo sapiens
  CDR3 for alpha chain variable domain of TCR clone 100604 (TRAV8-3, TRAJ44)
CAVGNTGTAGKLTF

SEQ ID NO: 201208 - protein, 15 aa, Homo sapiens
  CDR3 for beta chain variable domain of TCR clone 100604 (TRBV28, TRBJ2-7)
CASSFRGQGRYEQYF

SEQ ID NO: 201209 - protein, 11 aa, Homo sapiens
  CDR3 for alpha chain variable domain of TCR clone 100605 (TRAV3, TRAJ21)
CAVGNFNKFYF

SEQ ID NO: 201210 - protein, 14 aa, Homo sapiens
  CDR3 for beta chain variable domain of TCR clone 100605 (TRBV5-1, TRBJ1-2)
CASSLEPVNYGYTF

SEQ ID NO: 201211 - protein, 13 aa, Homo sapiens
  CDR3 for alpha chain variable domain of TCR clone 100606 (TRAV25, TRAJ30)
CAGRVDRDDKIIF

SEQ ID NO: 201212 - protein, 19 aa, Homo sapiens
  CDR3 for beta chain variable domain of TCR clone 100606 (TRBV7-9, TRBJ2-2)
CASSLRAGGSGPNTGELFF

SEQ ID NO: 201213 - protein, 13 aa, Homo sapiens
  CDR3 for alpha chain variable domain of TCR clone 100607 (TRAV22, TRAJ45)
CAVERGKEEVLTD

SEQ ID NO: 201214 - protein, 13 aa, Homo sapiens
  CDR3 for beta chain variable domain of TCR clone 100607 (TRBV27, TRBJ1-1)
CASSLSIGAEAFF

SEQ ID NO: 201215 - protein, 13 aa, Homo sapiens
  CDR3 for alpha chain variable domain of TCR clone 100608 (TRAV20, TRAJ37)
CAGCSSNTAKLIF

SEQ ID NO: 201216 - protein, 11 aa, Homo sapiens
  CDR3 for beta chain variable domain of TCR clone 100608 (TRBV12-4, TRBJ2-3)
CASTATDTQYF

SEQ ID NO: 201217 - protein, 14 aa, Homo sapiens
  CDR3 for alpha chain variable domain of TCR clone 100609 (TRAV2, TRAJ22)
CAVGRGGSARQLTF

SEQ ID NO: 201218 - protein, 14 aa, Homo sapiens
  CDR3 for beta chain variable domain of TCR clone 100609 (TRBV12-5, TRBJ2-5)
CASGSRTHQETQYF

SEQ ID NO: 201219 - protein, 13 aa, Homo sapiens
  CDR3 for alpha chain variable domain of TCR clone 100610 (TRAV8-6, TRAJ9)
CAVWDTGGFKTIF

SEQ ID NO: 201220 - protein, 16 aa, Homo sapiens
  CDR3 for beta chain variable domain of TCR clone 100610 (TRBV5-1, TRBJ2-5)
CASSLSLAGAQETQYF

SEQ ID NO: 201221 - protein, 13 aa, Homo sapiens
  CDR3 for alpha chain variable domain of TCR clone 100611 (TRAV12-3, TRAJ53)
CTMRGGSNYKLTF

SEQ ID NO: 201222 - protein, 15 aa, Homo sapiens
  CDR3 for beta chain variable domain of TCR clone 100611 (TRBV2, TRBJ2-1)
CATQARLVMIGEQFF

SEQ ID NO: 201223 - protein, 12 aa, Homo sapiens
  CDR3 for alpha chain variable domain of TCR clone 100612 (TRAV1-1, TRAJ8)
CAGGTGFQKLVF

SEQ ID NO: 201224 - protein, 15 aa, Homo sapiens
  CDR3 for beta chain variable domain of TCR clone 100612 (TRBV7-9, TRBJ1-4)
CASSRTGVFNEKLFF

SEQ ID NO: 201225 - protein, 15 aa, Homo sapiens
  CDR3 for alpha chain variable domain of TCR clone 100613 (TRAV21, TRAJ13)
CAVRTTSGGYQKVTF

SEQ ID NO: 201226 - protein, 15 aa, Homo sapiens
  CDR3 for beta chain variable domain of TCR clone 100613 (TRBV28, TRBJ2-7)
CASSPGGRGFYEQYF

SEQ ID NO: 201227 - protein, 17 aa, Homo sapiens
  CDR3 for alpha chain variable domain of TCR clone 100614 (TRAV17, TRAJ16)
CATASGFQMARSCSLQG

SEQ ID NO: 201228 - protein, 12 aa, Homo sapiens
  CDR3 for beta chain variable domain of TCR clone 100614 (TRBV2, TRBJ2-7)
CASSDPDYEQYF

SEQ ID NO: 201229 - protein, 20 aa, Homo sapiens
  CDR3 for alpha chain variable domain of TCR clone 100615 (TRAV12-3, TRAJ41)
SLFIRDSQPRDSATPEALNF

SEQ ID NO: 201230 - protein, 15 aa, Homo sapiens
  CDR3 for beta chain variable domain of TCR clone 100615 (TRBV5-1, TRBJ2-7)
CASSLDLTSSYEQYF

SEQ ID NO: 201231 - protein, 13 aa, Homo sapiens
  CDR3 for alpha chain variable domain of TCR clone 100616 (TRAV12-3, TRAJ7)
CAMSASGNNRLAF

SEQ ID NO: 201232 - protein, 15 aa, Homo sapiens
  CDR3 for beta chain variable domain of TCR clone 100616 (TRBV28, TRBJ2-5)
CASSPGQGSIETQYF

SEQ ID NO: 201233 - protein, 11 aa, Homo sapiens
  CDR3 for alpha chain variable domain of TCR clone 100617 (TRAV2, TRAJ21)
CAVFNFNKFYF

SEQ ID NO: 201234 - protein, 15 aa, Homo sapiens
  CDR3 for beta chain variable domain of TCR clone 100617 (TRBV19, TRBJ2-7)
CASSFNSGGVWEQYF

SEQ ID NO: 201235 - protein, 13 aa, Homo sapiens
  CDR3 for alpha chain variable domain of TCR clone 100618 (TRAV20, TRAJ37)
CAGCSSNTGKLIF

SEQ ID NO: 201236 - protein, 12 aa, Homo sapiens
  CDR3 for beta chain variable domain of TCR clone 100618 (TRBV12-4, TRBJ2-7)
CASSLGGYEQYF

SEQ ID NO: 201237 - protein, 10 aa, Homo sapiens
  CDR3 for alpha chain variable domain of TCR clone 100619 (TRAV23/DV6, TRAJ57)
CAASSTLSQG

SEQ ID NO: 201238 - protein, 15 aa, Homo sapiens
  CDR3 for beta chain variable domain of TCR clone 100619 (TRBV5-1, TRBJ2-1)
CASSPPRAPYNEQFF

SEQ ID NO: 201239 - protein, 10 aa, Homo sapiens
  CDR3 for alpha chain variable domain of TCR clone 100620 (TRAV1-2, TRAJ20)
CALNDYKLSS

SEQ ID NO: 201240 - protein, 16 aa, Homo sapiens
  CDR3 for beta chain variable domain of TCR clone 100620 (TRBV20-1, TRBJ1-1)
CSARALTQGMNTEAFF

SEQ ID NO: 201241 - protein, 13 aa, Homo sapiens
  CDR3 for alpha chain variable domain of TCR clone 100621 (TRAV1-2, TRAJ9)
CAALNTGGFKTIF

SEQ ID NO: 201242 - protein, 13 aa, Homo sapiens
  CDR3 for beta chain variable domain of TCR clone 100621 (TRBV7-3, TRBJ1-1)
CASSLTQGTEAFF

SEQ ID NO: 201243 - protein, 13 aa, Homo sapiens
  CDR3 for alpha chain variable domain of TCR clone 100622 (TRAV35, TRAJ21)
CAGQLSNFNKFYF

SEQ ID NO: 201244 - protein, 11 aa, Homo sapiens
  CDR3 for beta chain variable domain of TCR clone 100622 (TRBV7-6, TRBJ2-5)
CASSSQENQYF

SEQ ID NO: 201245 - protein, 15 aa, Homo sapiens
  CDR3 for alpha chain variable domain of TCR clone 100623 (TRAV26-1, TRAJ22)
CIVRVSFWFCKATDL

SEQ ID NO: 201246 - protein, 13 aa, Homo sapiens
  CDR3 for beta chain variable domain of TCR clone 100623 (TRBV7-9, TRBJ1-2)
CASSVKQNYGYSF

SEQ ID NO: 201247 - protein, 14 aa, Homo sapiens
  CDR3 for alpha chain variable domain of TCR clone 100624 (TRAV12-3, TRAJ11)
CEMTTNSGYSTLTF

SEQ ID NO: 201248 - protein, 16 aa, Homo sapiens
  CDR3 for beta chain variable domain of TCR clone 100624 (TRBV20-1, TRBJ1-1)
CSARALTQGMNTEAFF

SEQ ID NO: 201249 - protein, 11 aa, Homo sapiens
  CDR3 for alpha chain variable domain of TCR clone 100625 (TRAV2, TRAJ13)
CASGGYQKVTF

SEQ ID NO: 201250 - protein, 14 aa, Homo sapiens
  CDR3 for beta chain variable domain of TCR clone 100625 (TRBV11-2, TRBJ2-7)
CASSSTGEGYEQYF

SEQ ID NO: 201251 - protein, 13 aa, Homo sapiens
  CDR3 for alpha chain variable domain of TCR clone 100626 (TRAV3, TRAJ27)
CAVRPLGAGKSTL

SEQ ID NO: 201252 - protein, 15 aa, Homo sapiens
  CDR3 for beta chain variable domain of TCR clone 100626 (TRBV20-1, TRBJ2-7)
CSARDRVSGMDEQYF

SEQ ID NO: 201253 - protein, 14 aa, Homo sapiens
  CDR3 for alpha chain variable domain of TCR clone 100627 (TRAV1-2, TRAJ16)
CAVNRFSDGQKLLF

SEQ ID NO: 201254 - protein, 15 aa, Homo sapiens
  CDR3 for beta chain variable domain of TCR clone 100627 (TRBV7-3, TRBJ2-1)
CASSYFRGTYNEQFF

SEQ ID NO: 201255 - protein, 14 aa, Homo sapiens
  CDR3 for alpha chain variable domain of TCR clone 100628 (TRAV12-2, TRAJ17)
CAVLFKAAGNKLTF

SEQ ID NO: 201256 - protein, 16 aa, Homo sapiens
  CDR3 for beta chain variable domain of TCR clone 100628 (TRBV7-3, TRBJ2-2)
CASSLRRGTLSGELFF

SEQ ID NO: 201257 - protein, 17 aa, Homo sapiens
  CDR3 for alpha chain variable domain of TCR clone 100629 (TRAV8-4, TRAJ45)
CAVSQDVFRRRCCRTHL

SEQ ID NO: 201258 - protein, 14 aa, Homo sapiens
  CDR3 for beta chain variable domain of TCR clone 100629 (TRBV27, TRBJ2-2)
CASSLGAATGELFF

SEQ ID NO: 201259 - protein, 15 aa, Homo sapiens
  CDR3 for alpha chain variable domain of TCR clone 100630 (TRAV13-1, TRAJ17)
CAASMERAAGNKLTF

SEQ ID NO: 201260 - protein, 15 aa, Homo sapiens
  CDR3 for beta chain variable domain of TCR clone 100630 (TRBV6-1, TRBJ2-3)
CASSERGGITDTQYF

SEQ ID NO: 201261 - protein, 15 aa, Homo sapiens
  CDR3 for alpha chain variable domain of TCR clone 100631 (TRAV3, TRAJ20)
CAVRDIKLSDYKLSF

SEQ ID NO: 201262 - protein, 15 aa, Homo sapiens
  CDR3 for beta chain variable domain of TCR clone 100631 (TRBV7-9, TRBJ1-6)
CASSSPGRGNSTLLF

SEQ ID NO: 201263 - protein, 18 aa, Homo sapiens
  CDR3 for alpha chain variable domain of TCR clone 100632 (TRAV12-3, TRAJ52)
CAMSVGGAGGISYGKLTF

SEQ ID NO: 201264 - protein, 15 aa, Homo sapiens
  CDR3 for beta chain variable domain of TCR clone 100632 (TRBV27, TRBJ1-6)
CASSFDRGLGSPLHF

SEQ ID NO: 201265 - protein, 17 aa, Homo sapiens
  CDR3 for alpha chain variable domain of TCR clone 100633 (TRAV12-2, TRAJ48)
CASNEKLTFGTGTRLTI

SEQ ID NO: 201266 - protein, 15 aa, Homo sapiens
  CDR3 for beta chain variable domain of TCR clone 100633 (TRBV11-3, TRBJ2-3)
CASLKDGREGDTQYF

SEQ ID NO: 201267 - protein, 20 aa, Homo sapiens
  CDR3 for alpha chain variable domain of TCR clone 100634 (TRAV26-1, TRAJ42)
CCVLLHRQTYYGGSQGNLIF

SEQ ID NO: 201268 - protein, 14 aa, Homo sapiens
  CDR3 for beta chain variable domain of TCR clone 100634 (TRBV19, TRBJ1-2)
CASSIGVGSYGYTF

SEQ ID NO: 201269 - protein, 13 aa, Homo sapiens
  CDR3 for alpha chain variable domain of TCR clone 100635 (TRAV13-1, TRAJ48)
CAEMDFGNEKLTF

SEQ ID NO: 201270 - protein, 15 aa, Homo sapiens
  CDR3 for beta chain variable domain of TCR clone 100635 (TRBV7-9, TRBJ1-6)
CASSSPGRGNSPLHF

SEQ ID NO: 201271 - protein, 11 aa, Homo sapiens
  CDR3 for alpha chain variable domain of TCR clone 100636 (TRAV1-1, TRAJ20)
CAVFNDYKLSF

SEQ ID NO: 201272 - protein, 16 aa, Homo sapiens
  CDR3 for beta chain variable domain of TCR clone 100636 (TRBV29-1, TRBJ2-2)
CSVENTSEGNTGELFF

SEQ ID NO: 201273 - protein, 15 aa, Homo sapiens
  CDR3 for alpha chain variable domain of TCR clone 100637 (TRAV17, TRAJ13)
CATDAGSGGYQKVTF

SEQ ID NO: 201274 - protein, 17 aa, Homo sapiens
  CDR3 for beta chain variable domain of TCR clone 100637 (TRBV11-2, TRBJ2-1)
CASSLYTPGVEYNEQFF

SEQ ID NO: 201275 - protein, 13 aa, Homo sapiens
  CDR3 for alpha chain variable domain of TCR clone 100638 (TRAV12-3, TRAJ9)
CAMRNTGGFKTIF

SEQ ID NO: 201276 - protein, 14 aa, Homo sapiens
  CDR3 for beta chain variable domain of TCR clone 100638 (TRBV7-9, TRBJ2-1)
CASSPRDSLYEQFF

SEQ ID NO: 201277 - protein, 13 aa, Homo sapiens
  CDR3 for alpha chain variable domain of TCR clone 100639 (TRAV2, TRAJ15)
CAVASQAGTALIF

SEQ ID NO: 201278 - protein, 15 aa, Homo sapiens
  CDR3 for beta chain variable domain of TCR clone 100639 (TRBV4-1, TRBJ2-7)
CASSQNTGRLYEQYF

SEQ ID NO: 201279 - protein, 15 aa, Homo sapiens
  CDR3 for alpha chain variable domain of TCR clone 100640 (TRAV3, TRAJ5)
CAVRDLYTGRRARTF

SEQ ID NO: 201280 - protein, 16 aa, Homo sapiens
  CDR3 for beta chain variable domain of TCR clone 100640 (TRBV20-1, TRBJ1-4)
CSAPGQGLLTNEKLFF

SEQ ID NO: 201281 - protein, 13 aa, Homo sapiens
  CDR3 for alpha chain variable domain of TCR clone 100641 (TRAV36/DV7, TRAJ49)
CAVEANAGTSSIL

SEQ ID NO: 201282 - protein, 13 aa, Homo sapiens
  CDR3 for beta chain variable domain of TCR clone 100641 (TRBV10-3, TRBJ2-7)
CASKLAVNYEQYF

SEQ ID NO: 201283 - protein, 11 aa, Homo sapiens
  CDR3 for alpha chain variable domain of TCR clone 100642 (TRAV27, TRAJ47)
SIVEYGNKLVF

SEQ ID NO: 201284 - protein, 14 aa, Homo sapiens
  CDR3 for beta chain variable domain of TCR clone 100642 (TRBV7-8, TRBJ2-3)
CASSLEAGTDTQYF

SEQ ID NO: 201285 - protein, 13 aa, Homo sapiens
  CDR3 for alpha chain variable domain of TCR clone 100643 (TRAV8-1, TRAJ34)
CAVRPYNTDKLIF

SEQ ID NO: 201286 - protein, 15 aa, Homo sapiens
  CDR3 for beta chain variable domain of TCR clone 100643 (TRBV7-9, TRBJ1-3)
CASSLRSGPGNTIYF

SEQ ID NO: 201287 - protein, 16 aa, Homo sapiens
  CDR3 for alpha chain variable domain of TCR clone 100644 (TRAV13-1, TRAJ37)
CAASSLGSSNTGTLIF

SEQ ID NO: 201288 - protein, 12 aa, Homo sapiens
  CDR3 for beta chain variable domain of TCR clone 100644 (TRBV6-1, TRBJ2-5)
CASSEGRETQYF

SEQ ID NO: 201289 - protein, 13 aa, Homo sapiens
  CDR3 for alpha chain variable domain of TCR clone 100645 (TRAV21, TRAJ20)
CAVGLRVDCKLSF

SEQ ID NO: 201290 - protein, 13 aa, Homo sapiens
  CDR3 for beta chain variable domain of TCR clone 100645 (TRBV6-1, TRBJ1-1)
CASSRQGNTEAFF

SEQ ID NO: 201291 - protein, 12 aa, Homo sapiens
  CDR3 for alpha chain variable domain of TCR clone 100646 (TRAV12-2, TRAJ31)
CAVNTPDARLMF

SEQ ID NO: 201292 - protein, 15 aa, Homo sapiens
  CDR3 for beta chain variable domain of TCR clone 100646 (TRBV4-2, TRBJ1-1)
CASSQDQGLNTEAFF

SEQ ID NO: 201293 - protein, 14 aa, Homo sapiens
  CDR3 for alpha chain variable domain of TCR clone 100647 (TRAV12-2, TRAJ40)
CAVKIPSGAYKYIF

SEQ ID NO: 201294 - protein, 14 aa, Homo sapiens
  CDR3 for beta chain variable domain of TCR clone 100647 (TRBV20-1, TRBJ1-1)
CSAQTRIGGTEDFF

SEQ ID NO: 201295 - protein, 12 aa, Homo sapiens
  CDR3 for alpha chain variable domain of TCR clone 100648 (TRAV1-2, TRAJ33)
CAALDSNYQLIC

SEQ ID NO: 201296 - protein, 16 aa, Homo sapiens
  CDR3 for beta chain variable domain of TCR clone 100648 (TRBV6-4, TRBJ1-2)
CASSEAVGDPNYGYTF

SEQ ID NO: 201297 - protein, 18 aa, Homo sapiens
  CDR3 for alpha chain variable domain of TCR clone 100649 (TRAV16, TRAJ45)
CAQASYPSSGGGADGLTF

SEQ ID NO: 201298 - protein, 11 aa, Homo sapiens
  CDR3 for beta chain variable domain of TCR clone 100649 (TRBV6-3, TRBJ2-3)
CATGQADTQYF

SEQ ID NO: 201299 - protein, 14 aa, Homo sapiens
  CDR3 for alpha chain variable domain of TCR clone 100650 (TRAV8-4, TRAJ13)
CAVTLSGGYQKVTF

SEQ ID NO: 201300 - protein, 13 aa, Homo sapiens
  CDR3 for beta chain variable domain of TCR clone 100650 (TRBV7-6, TRBJ2-7)
CASSLDHTHEQYF

SEQ ID NO: 201301 - protein, 18 aa, Homo sapiens
  CDR3 for alpha chain variable domain of TCR clone 100651 (TRAV13-1, TRAJ52)
CAADFPHAGGTSYGKLTF

SEQ ID NO: 201302 - protein, 14 aa, Homo sapiens
  CDR3 for beta chain variable domain of TCR clone 100651 (TRBV11-2, TRBJ2-3)
CASSLYAGRDTQYF

SEQ ID NO: 201303 - protein, 10 aa, Homo sapiens
  CDR3 for alpha chain variable domain of TCR clone 100652 (TRAV8-2, TRAJ29)
CTGGKTPLVF

SEQ ID NO: 201304 - protein, 17 aa, Homo sapiens
  CDR3 for beta chain variable domain of TCR clone 100652 (TRBV2, TRBJ2-7)
CASSQALTGWDSYEQYF

SEQ ID NO: 201305 - protein, 12 aa, Homo sapiens
  CDR3 for alpha chain variable domain of TCR clone 100653 (TRAV12-1, TRAJ40)
CVVYSGTYKYIF

SEQ ID NO: 201306 - protein, 15 aa, Homo sapiens
  CDR3 for beta chain variable domain of TCR clone 100653 (TRBV18, TRBJ2-5)
CASSPDPGLQETQYF

SEQ ID NO: 201307 - protein, 15 aa, Homo sapiens
  CDR3 for alpha chain variable domain of TCR clone 100654 (TRAV12-1, TRAJ40)
CVVNRDTSGTYKYIF

SEQ ID NO: 201308 - protein, 16 aa, Homo sapiens
  CDR3 for beta chain variable domain of TCR clone 100654 (TRBV6-1, TRBJ2-5)
CASSETLDRGAETQYF

SEQ ID NO: 201309 - protein, 15 aa, Homo sapiens
  CDR3 for alpha chain variable domain of TCR clone 100655 (TRAV13-1, TRAJ17)
CAASIERAAGNKLTF

SEQ ID NO: 201310 - protein, 13 aa, Homo sapiens
  CDR3 for beta chain variable domain of TCR clone 100655 (TRBV7-7, TRBJ2-3)
CASSVSRADTQYF

SEQ ID NO: 201311 - protein, 13 aa, Homo sapiens
  CDR3 for alpha chain variable domain of TCR clone 100656 (TRAV1-2, TRAJ33)
CAVSEDSNYQLIW

SEQ ID NO: 201312 - protein, 14 aa, Homo sapiens
  CDR3 for beta chain variable domain of TCR clone 100656 (TRBV20-1, TRBJ1-1)
CSAQTRIGGTEAFF

SEQ ID NO: 201313 - protein, 16 aa, Homo sapiens
  CDR3 for alpha chain variable domain of TCR clone 100657 (TRAV12-3, TRAJ53)
CAMSVRSGGSNYKLTF

SEQ ID NO: 201314 - protein, 11 aa, Homo sapiens
  CDR3 for beta chain variable domain of TCR clone 100657 (TRBV29-1, TRBJ2-5)
CSVASGETQYF

SEQ ID NO: 201315 - protein, 13 aa, Homo sapiens
  CDR3 for alpha chain variable domain of TCR clone 100658 (TRAV8-3, TRAJ28)
CAVGAVGSYQLTF

SEQ ID NO: 201316 - protein, 15 aa, Homo sapiens
  CDR3 for beta chain variable domain of TCR clone 100658 (TRBV7-2, TRBJ2-7)
CASSFTGQGAQEQYF

SEQ ID NO: 201317 - protein, 10 aa, Homo sapiens
  CDR3 for alpha chain variable domain of TCR clone 100659 (TRAV1-2, TRAJ18)
CAVRGEAQPW

SEQ ID NO: 201318 - protein, 13 aa, Homo sapiens
  CDR3 for beta chain variable domain of TCR clone 100659 (TRBV20-1, TRBJ1-1)
CSARVGGNTEALF

SEQ ID NO: 201319 - protein, 17 aa, Homo sapiens
  CDR3 for alpha chain variable domain of TCR clone 100660 (TRAV26-2, TRAJ42)
CILRDVGYGGSQGNLIF

SEQ ID NO: 201320 - protein, 20 aa, Homo sapiens
  CDR3 for beta chain variable domain of TCR clone 100660 (TRBV28, TRBJ2-1)
CASTPIGRSPGLAGGNEQFF

SEQ ID NO: 201321 - protein, 17 aa, Homo sapiens
  CDR3 for alpha chain variable domain of TCR clone 100661 (TRAV38-2/DV8, TRAJ28)
CAFLTLYSGAGSYQLAF

SEQ ID NO: 201322 - protein, 14 aa, Homo sapiens
  CDR3 for beta chain variable domain of TCR clone 100661 (TRBV7-2, TRBJ2-5)
CASSLSGGGETQYF

SEQ ID NO: 201323 - protein, 11 aa, Homo sapiens
  CDR3 for alpha chain variable domain of TCR clone 100662 (TRAV3, TRAJ21)
CAVGNFNKFYF

SEQ ID NO: 201324 - protein, 14 aa, Homo sapiens
  CDR3 for beta chain variable domain of TCR clone 100662 (TRBV29-1, TRBJ2-2)
CSGRESGNTGELFF

SEQ ID NO: 201325 - protein, 17 aa, Homo sapiens
  CDR3 for alpha chain variable domain of TCR clone 100663 (TRAV3, TRAJ38)
CAVRDCLKAGNNRKLIW

SEQ ID NO: 201326 - protein, 13 aa, Homo sapiens
  CDR3 for beta chain variable domain of TCR clone 100663 (TRBV23-1, TRBJ1-4)
CASRGKFNEKLFF

SEQ ID NO: 201327 - protein, 12 aa, Homo sapiens
  CDR3 for alpha chain variable domain of TCR clone 100664 (TRAV12-3, TRAJ20)
CATVRGDYKLSF

SEQ ID NO: 201328 - protein, 16 aa, Homo sapiens
  CDR3 for beta chain variable domain of TCR clone 100664 (TRBV5-1, TRBJ2-3)
CASSLGLAVYTDTQYF

SEQ ID NO: 201329 - protein, 15 aa, Homo sapiens
  CDR3 for alpha chain variable domain of TCR clone 100665 (TRAV1-2, TRAJ38)
CAVSGNAGNNRKLIW

SEQ ID NO: 201330 - protein, 16 aa, Homo sapiens
  CDR3 for beta chain variable domain of TCR clone 100665 (TRBV4-1, TRBJ2-7)
CASSLTAGQATYEQYF

SEQ ID NO: 201331 - protein, 16 aa, Homo sapiens
  CDR3 for alpha chain variable domain of TCR clone 100666 (TRAV26-1, TRAJ53)
FIVRVAMGGSNYKLTF

SEQ ID NO: 201332 - protein, 16 aa, Homo sapiens
  CDR3 for beta chain variable domain of TCR clone 100666 (TRBV28, TRBJ2-7)
CASSLFFETGGPEQYF

SEQ ID NO: 201333 - protein, 13 aa, Homo sapiens
  CDR3 for alpha chain variable domain of TCR clone 100667 (TRAV29/DV5, TRAJ27)
CAASDTNAGKSTF

SEQ ID NO: 201334 - protein, 15 aa, Homo sapiens
  CDR3 for beta chain variable domain of TCR clone 100667 (TRBV6-3, TRBJ2-7)
CASSSPGTVFYEQYF

SEQ ID NO: 201335 - protein, 13 aa, Homo sapiens
  CDR3 for alpha chain variable domain of TCR clone 100668 (TRAV27, TRAJ41)
CAGEGNSGNALNF

SEQ ID NO: 201336 - protein, 14 aa, Homo sapiens
  CDR3 for beta chain variable domain of TCR clone 100668 (TRBV25-1, TRBJ1-1)
CASTHLGGNTEAFF

SEQ ID NO: 201337 - protein, 21 aa, Homo sapiens
  CDR3 for alpha chain variable domain of TCR clone 100669 (TRAV26-1, TRAJ28)
CCVLLHRQSPDSGAGSYQLTF

SEQ ID NO: 201338 - protein, 17 aa, Homo sapiens
  CDR3 for beta chain variable domain of TCR clone 100669 (TRBV28, TRBJ2-7)
CASSPLPAGGKSYEQYF

SEQ ID NO: 201339 - protein, 10 aa, Homo sapiens
  CDR3 for alpha chain variable domain of TCR clone 100670 (TRAV12-3, TRAJ18)
CAMSAEAQPW

SEQ ID NO: 201340 - protein, 16 aa, Homo sapiens
  CDR3 for beta chain variable domain of TCR clone 100670 (TRBV29-1, TRBJ2-7)
CSVEDAEDGTAYEQYF

SEQ ID NO: 201341 - protein, 14 aa, Homo sapiens
  CDR3 for alpha chain variable domain of TCR clone 100671 (TRAV8-3, TRAJ30)
CAVVDMNRDDKIIF

SEQ ID NO: 201342 - protein, 17 aa, Homo sapiens
  CDR3 for beta chain variable domain of TCR clone 100671 (TRBV19, TRBJ2-2)
CASSRNPGGFGTGELFF

SEQ ID NO: 201343 - protein, 15 aa, Homo sapiens
  CDR3 for alpha chain variable domain of TCR clone 100672 (TRAV2, TRAJ24)
CAVEVLTDSLGKFQF

SEQ ID NO: 201344 - protein, 14 aa, Homo sapiens
  CDR3 for beta chain variable domain of TCR clone 100672 (TRBV19, TRBJ2-1)
CASSMGSGRRSSSS

SEQ ID NO: 201345 - protein, 13 aa, Homo sapiens
  CDR3 for alpha chain variable domain of TCR clone 100673 (TRAV17, TRAJ5)
CAPMDTSRRALTF

SEQ ID NO: 201346 - protein, 14 aa, Homo sapiens
  CDR3 for beta chain variable domain of TCR clone 100673 (TRBV7-3, TRBJ2-1)
CASSLAGGTNEQFF

SEQ ID NO: 201347 - protein, 13 aa, Homo sapiens
  CDR3 for alpha chain variable domain of TCR clone 100674 (TRAV16, TRAJ31)
CALSAHNNARLMF

SEQ ID NO: 201348 - protein, 16 aa, Homo sapiens
  CDR3 for beta chain variable domain of TCR clone 100674 (TRBV12-4, TRBJ2-1)
CASSPGLAGGINEQFF

SEQ ID NO: 201349 - protein, 16 aa, Homo sapiens
  CDR3 for alpha chain variable domain of TCR clone 100675 (TRAV30, TRAJ24)
CGTEIVDADSWGKFQF

SEQ ID NO: 201350 - protein, 15 aa, Homo sapiens
  CDR3 for beta chain variable domain of TCR clone 100675 (TRBV28, TRBJ1-5)
CASSRTGGYVQPQHF

SEQ ID NO: 201351 - protein, 22 aa, Homo sapiens
  CDR3 for alpha chain variable domain of TCR clone 100676 (TRAV12-2, TRAJ53)
SPVIQPPTSVPPILSSNYKLTF

SEQ ID NO: 201352 - protein, 13 aa, Homo sapiens
  CDR3 for beta chain variable domain of TCR clone 100676 (TRBV7-7, TRBJ2-3)
CASSLRRADTQYF

SEQ ID NO: 201353 - protein, 12 aa, Homo sapiens
  CDR3 for alpha chain variable domain of TCR clone 100677 (TRAV38-1, TRAJ20)
CAFIWNDYKLSF

SEQ ID NO: 201354 - protein, 14 aa, Homo sapiens
  CDR3 for beta chain variable domain of TCR clone 100677 (TRBV19, TRBJ2-1)
CASSMGSGAKEQFF

SEQ ID NO: 201355 - protein, 13 aa, Homo sapiens
  CDR3 for alpha chain variable domain of TCR clone 100678 (TRAV13-1, TRAJ21)
CAASIYNFNKFYF

SEQ ID NO: 201356 - protein, 13 aa, Homo sapiens
  CDR3 for beta chain variable domain of TCR clone 100678 (TRBV27, TRBJ1-4)
CASSLMGDEKRFF

SEQ ID NO: 201357 - protein, 15 aa, Homo sapiens
  CDR3 for alpha chain variable domain of TCR clone 100679 (TRAV19, TRAJ9)
CALSEARTGGFKTIF

SEQ ID NO: 201358 - protein, 15 aa, Homo sapiens
  CDR3 for beta chain variable domain of TCR clone 100679 (TRBV11-2, TRBJ1-1)
CASSFRSSLLLSLDK

SEQ ID NO: 201359 - protein, 19 aa, Homo sapiens
  CDR3 for alpha chain variable domain of TCR clone 100680 (TRAV12-2, )
CAVKPNIQNPDPAVYQLRD

SEQ ID NO: 201360 - protein, 15 aa, Homo sapiens
  CDR3 for beta chain variable domain of TCR clone 100680 (TRBV7-2, TRBJ2-1)
CASSSGLAGGNEQFF

SEQ ID NO: 201361 - protein, 14 aa, Homo sapiens
  CDR3 for alpha chain variable domain of TCR clone 100681 (TRAV9-2, TRAJ39)
CALYIYNAGNMLTF

SEQ ID NO: 201362 - protein, 14 aa, Homo sapiens
  CDR3 for beta chain variable domain of TCR clone 100681 (TRBV18, TRBJ1-4)
CASSPGPNGEKLFF

SEQ ID NO: 201363 - protein, 15 aa, Homo sapiens
  CDR3 for alpha chain variable domain of TCR clone 100682 (TRAV12-3, TRAJ11)
CAMSEENSGYGTLTF

SEQ ID NO: 201364 - protein, 13 aa, Homo sapiens
  CDR3 for beta chain variable domain of TCR clone 100682 (TRBV12-4, TRBJ2-1)
CASSFHSGSEQFF

SEQ ID NO: 201365 - protein, 15 aa, Homo sapiens
  CDR3 for alpha chain variable domain of TCR clone 100683 (TRAV35, TRAJ40)
CAGQLGTSGTYKYIF

SEQ ID NO: 201366 - protein, 14 aa, Homo sapiens
  CDR3 for beta chain variable domain of TCR clone 100683 (TRBV7-3, TRBJ2-1)
CASILAGGTNEQFF

SEQ ID NO: 201367 - protein, 13 aa, Homo sapiens
  CDR3 for alpha chain variable domain of TCR clone 100684 (TRAV21, TRAJ8)
CAAPNTGFQKLVF

SEQ ID NO: 201368 - protein, 14 aa, Homo sapiens
  CDR3 for beta chain variable domain of TCR clone 100684 (TRBV5-1, TRBJ2-7)
CASSRGESLYEQYF

SEQ ID NO: 201369 - protein, 13 aa, Homo sapiens
  CDR3 for alpha chain variable domain of TCR clone 100685 (TRAV3, TRAJ21)
CAVREPDFNKFYF

SEQ ID NO: 201370 - protein, 12 aa, Homo sapiens
  CDR3 for beta chain variable domain of TCR clone 100685 (TRBV5-7, TRBJ1-1)
CASSLGRGKAFF

SEQ ID NO: 201371 - protein, 14 aa, Homo sapiens
  CDR3 for alpha chain variable domain of TCR clone 100686 (TRAV12-1, TRAJ3)
CVVSGYSSASKIIF

SEQ ID NO: 201372 - protein, 14 aa, Homo sapiens
  CDR3 for beta chain variable domain of TCR clone 100686 (TRBV6-6, TRBJ1-3)
CASSRQGSGNTIYY

SEQ ID NO: 201373 - protein, 14 aa, Homo sapiens
  CDR3 for alpha chain variable domain of TCR clone 100687 (TRAV8-1, TRAJ5)
RAVRTDTGRRALTF

SEQ ID NO: 201374 - protein, 15 aa, Homo sapiens
  CDR3 for beta chain variable domain of TCR clone 100687 (TRBV9, TRBJ1-6)
CASSVAGTGDSPLHF

SEQ ID NO: 201375 - protein, 15 aa, Homo sapiens
  CDR3 for alpha chain variable domain of TCR clone 100688 (TRAV4, TRAJ39)
CLVGPNNNAGNILTF

SEQ ID NO: 201376 - protein, 16 aa, Homo sapiens
  CDR3 for beta chain variable domain of TCR clone 100688 (TRBV13, TRBJ2-2)
CASSPRTGEHTGELFF

SEQ ID NO: 201377 - protein, 13 aa, Homo sapiens
  CDR3 for alpha chain variable domain of TCR clone 100689 (TRAV1-1, TRAJ9)
CAAKNTGGFKTIF

SEQ ID NO: 201378 - protein, 14 aa, Homo sapiens
  CDR3 for beta chain variable domain of TCR clone 100689 (TRBV20-1, TRBJ2-1)
CSAEIGGSANEQFF

SEQ ID NO: 201379 - protein, 15 aa, Homo sapiens
  CDR3 for alpha chain variable domain of TCR clone 100690 (TRAV26-1, TRAJ44)
CIVRANTGTASKLTF

SEQ ID NO: 201380 - protein, 16 aa, Homo sapiens
  CDR3 for beta chain variable domain of TCR clone 100690 (TRBV7-7, TRBJ2-1)
CGSSLASGTSYNEQFF

SEQ ID NO: 201381 - protein, 15 aa, Homo sapiens
  CDR3 for alpha chain variable domain of TCR clone 100691 (TRAV14/DV4, TRAJ10)
CAMRELTGGGNKLTF

SEQ ID NO: 201382 - protein, 14 aa, Homo sapiens
  CDR3 for beta chain variable domain of TCR clone 100691 (TRBV19, TRBJ2-1)
CASPTFVLSGEQFF

SEQ ID NO: 201383 - protein, 12 aa, Homo sapiens
  CDR3 for alpha chain variable domain of TCR clone 100692 (TRAV13-1, TRAJ49)
CAASSTGNQVYF

SEQ ID NO: 201384 - protein, 14 aa, Homo sapiens
  CDR3 for beta chain variable domain of TCR clone 100692 (TRBV7-2, TRBJ2-5)
CASSPAGNQETQYF

SEQ ID NO: 201385 - protein, 12 aa, Homo sapiens
  CDR3 for alpha chain variable domain of TCR clone 100693 (TRAV17, TRAJ39)
CATGAAGNMLNF

SEQ ID NO: 201386 - protein, 14 aa, Homo sapiens
  CDR3 for beta chain variable domain of TCR clone 100693 (TRBV7-9, TRBJ1-2)
CASSRQGANYGYTF

SEQ ID NO: 201387 - protein, 10 aa, Homo sapiens
  CDR3 for alpha chain variable domain of TCR clone 100694 (TRAV1-2, TRAJ18)
CAVRGEAQPW

SEQ ID NO: 201388 - protein, 14 aa, Homo sapiens
  CDR3 for beta chain variable domain of TCR clone 100694 (TRBV19, TRBJ2-3)
CASSAPRGTDTQYF

SEQ ID NO: 201389 - protein, 13 aa, Homo sapiens
  CDR3 for alpha chain variable domain of TCR clone 100695 (TRAV29/DV5, TRAJ31)
CAASRNNNARLMF

SEQ ID NO: 201390 - protein, 12 aa, Homo sapiens
  CDR3 for beta chain variable domain of TCR clone 100695 (TRBV14, TRBJ2-5)
CASSHLKETHYF

SEQ ID NO: 201391 - protein, 14 aa, Homo sapiens
  CDR3 for alpha chain variable domain of TCR clone 100696 (TRAV38-1, TRAJ45)
CASHSGGGADGLTF

SEQ ID NO: 201392 - protein, 15 aa, Homo sapiens
  CDR3 for beta chain variable domain of TCR clone 100696 (TRBV10-2, TRBJ2-6)
CASSEQGTGANVPTF

SEQ ID NO: 201393 - protein, 15 aa, Homo sapiens
  CDR3 for alpha chain variable domain of TCR clone 100697 (TRAV26-1, TRAJ40)
CIVRVTTSGTYKYIF

SEQ ID NO: 201394 - protein, 12 aa, Homo sapiens
  CDR3 for beta chain variable domain of TCR clone 100697 (TRBV7-9, TRBJ1-4)
CASSTDLEKLFF

SEQ ID NO: 201395 - protein, 14 aa, Homo sapiens
  CDR3 for alpha chain variable domain of TCR clone 100698 (TRAV17, TRAJ56)
CATVPAGANSKLTF

SEQ ID NO: 201396 - protein, 16 aa, Homo sapiens
  CDR3 for beta chain variable domain of TCR clone 100698 (TRBV19, TRBJ2-2)
CASRSPGTGATGELFF

SEQ ID NO: 201397 - protein, 13 aa, Homo sapiens
  CDR3 for alpha chain variable domain of TCR clone 100699 (TRAV12-2, TRAJ52)
CAVSGTSYGKLTF

SEQ ID NO: 201398 - protein, 15 aa, Homo sapiens
  CDR3 for beta chain variable domain of TCR clone 100699 (TRBV20-1, TRBJ2-7)
CSARDRVSGMDEQYF

SEQ ID NO: 201399 - protein, 12 aa, Homo sapiens
  CDR3 for alpha chain variable domain of TCR clone 100700 (TRAV38-2/DV8, TRAJ47)
CALMEYGNKLVF

SEQ ID NO: 201400 - protein, 14 aa, Homo sapiens
  CDR3 for beta chain variable domain of TCR clone 100700 (TRBV20-1, TRBJ1-5)
CSATDRGSNQPQHF

SEQ ID NO: 201401 - protein, 18 aa, Homo sapiens
  CDR3 for alpha chain variable domain of TCR clone 100701 (TRAV21, TRAJ52)
CAVRPSPAGGTSYGKLTF

SEQ ID NO: 201402 - protein, 17 aa, Homo sapiens
  CDR3 for beta chain variable domain of TCR clone 100701 (TRBV13, TRBJ2-3)
CASSLSRVAGGRITQYF

SEQ ID NO: 201403 - protein, 14 aa, Homo sapiens
  CDR3 for alpha chain variable domain of TCR clone 100702 (TRAV12-2, TRAJ11)
CAVNMNSGYSTLTF

SEQ ID NO: 201404 - protein, 13 aa, Homo sapiens
  CDR3 for beta chain variable domain of TCR clone 100702 (TRBV24-1, TRBJ2-2)
CATSDWSTGELFF

SEQ ID NO: 201405 - protein, 12 aa, Homo sapiens
  CDR3 for alpha chain variable domain of TCR clone 100703 (TRAV12-3, TRAJ17)
CAMTLTGNKLTF

SEQ ID NO: 201406 - protein, 15 aa, Homo sapiens
  CDR3 for beta chain variable domain of TCR clone 100703 (TRBV20-1, TRBJ1-5)
CSARVGRVVSQPQHF

SEQ ID NO: 201407 - protein, 11 aa, Homo sapiens
  CDR3 for alpha chain variable domain of TCR clone 100704 (TRAV1-2, TRAJ40)
CAVPGTYKYIF

SEQ ID NO: 201408 - protein, 12 aa, Homo sapiens
  CDR3 for beta chain variable domain of TCR clone 100704 (TRBV2, TRBJ2-1)
CAYGPPGNEQFF

SEQ ID NO: 201409 - protein, 13 aa, Homo sapiens
  CDR3 for alpha chain variable domain of TCR clone 100705 (TRAV12-3, TRAJ53)
CAMRGGSNYKLTF

SEQ ID NO: 201410 - protein, 15 aa, Homo sapiens
  CDR3 for beta chain variable domain of TCR clone 100705 (TRBV2, TRBJ2-1)
CATQARLVRIGEQFF

SEQ ID NO: 201411 - protein, 13 aa, Homo sapiens
  CDR3 for alpha chain variable domain of TCR clone 100706 (TRAV38-1, TRAJ49)
CAFMKYTGNQFYF

SEQ ID NO: 201412 - protein, 13 aa, Homo sapiens
  CDR3 for beta chain variable domain of TCR clone 100706 (TRBV7-9, TRBJ2-3)
CASSPGSTDTQYF

SEQ ID NO: 201413 - protein, 10 aa, Homo sapiens
  CDR3 for alpha chain variable domain of TCR clone 100707 (TRAV26-1, TRAJ22)
CIVSLNFFWF

SEQ ID NO: 201414 - protein, 14 aa, Homo sapiens
  CDR3 for beta chain variable domain of TCR clone 100707 (TRBV7-6, TRBJ2-3)
CASSLGTVTDTQYF

SEQ ID NO: 201415 - protein, 15 aa, Homo sapiens
  CDR3 for alpha chain variable domain of TCR clone 100708 (TRAV16, TRAJ17)
CALGGNKAAGNKLTF

SEQ ID NO: 201416 - protein, 16 aa, Homo sapiens
  CDR3 for beta chain variable domain of TCR clone 100708 (TRBV7-6, TRBJ1-6)
CASSSLPAGEYSPLHF

SEQ ID NO: 201417 - protein, 15 aa, Homo sapiens
  CDR3 for alpha chain variable domain of TCR clone 100709 (TRAV8-3, TRAJ40)
CAAPSLGSGTYKYIF

SEQ ID NO: 201418 - protein, 16 aa, Homo sapiens
  CDR3 for beta chain variable domain of TCR clone 100709 (TRBV7-3, TRBJ2-3)
CASSISGYRPEDTQYF

SEQ ID NO: 201419 - protein, 13 aa, Homo sapiens
  CDR3 for alpha chain variable domain of TCR clone 100710 (TRAV3, TRAJ36)
CAVRDTGANNLFF

SEQ ID NO: 201420 - protein, 15 aa, Homo sapiens
  CDR3 for beta chain variable domain of TCR clone 100710 (TRBV24-1, TRBJ2-1)
CATSGSGGFYNEKFF

SEQ ID NO: 201421 - protein, 18 aa, Homo sapiens
  CDR3 for alpha chain variable domain of TCR clone 100711 (TRAV21, TRAJ52)
CAVRPSPAGGTSYRKLTF

SEQ ID NO: 201422 - protein, 13 aa, Homo sapiens
  CDR3 for beta chain variable domain of TCR clone 100711 (TRBV7-3, TRBJ1-1)
CASSQDWGAEAFF

SEQ ID NO: 201423 - protein, 17 aa, Homo sapiens
  CDR3 for alpha chain variable domain of TCR clone 100712 (TRAV3, TRAJ38)
CAVRDCLNAGNNRKLIW

SEQ ID NO: 201424 - protein, 14 aa, Homo sapiens
  CDR3 for beta chain variable domain of TCR clone 100712 (TRBV5-5, TRBJ1-5)
RASSGQGVDQPQHF

SEQ ID NO: 201425 - protein, 16 aa, Homo sapiens
  CDR3 for alpha chain variable domain of TCR clone 100713 (TRAV17, TRAJ53)
CATDALSGGSNYKLTF

SEQ ID NO: 201426 - protein, 19 aa, Homo sapiens
  CDR3 for beta chain variable domain of TCR clone 100713 (TRBV10-3, TRBJ2-3)
CAISEPTSGGAMSTDTQYF

SEQ ID NO: 201427 - protein, 11 aa, Homo sapiens
  CDR3 for alpha chain variable domain of TCR clone 100714 (TRAV12-1, TRAJ21)
CVVNNFNKFYF

SEQ ID NO: 201428 - protein, 14 aa, Homo sapiens
  CDR3 for beta chain variable domain of TCR clone 100714 (TRBV18, TRBJ2-7)
CASSPRGGDYEQYF

SEQ ID NO: 201429 - protein, 12 aa, Homo sapiens
  CDR3 for alpha chain variable domain of TCR clone 100715 (TRAV13-1, TRAJ49)
CAASDTGNQFYF

SEQ ID NO: 201430 - protein, 13 aa, Homo sapiens
  CDR3 for beta chain variable domain of TCR clone 100715 (TRBV19, TRBJ1-3)
CASRLSLGNTIYF

SEQ ID NO: 201431 - protein, 16 aa, Homo sapiens
  CDR3 for alpha chain variable domain of TCR clone 100716 (TRAV26-1, TRAJ37)
CIVRGDGSGNTGKLIF

SEQ ID NO: 201432 - protein, 22 aa, Homo sapiens
  CDR3 for beta chain variable domain of TCR clone 100716 (TRBV4-1, TRBJ2-7)
CASSRDPLGVRGGGAVLRAGHQ

SEQ ID NO: 201433 - protein, 14 aa, Homo sapiens
  CDR3 for alpha chain variable domain of TCR clone 100717 (TRAV17, TRAJ40)
CATALTSGTYKYIF

SEQ ID NO: 201434 - protein, 11 aa, Homo sapiens
  CDR3 for beta chain variable domain of TCR clone 100717 (TRBV12-4, TRBJ2-3)
CASTATDTQYF

SEQ ID NO: 201435 - protein, 16 aa, Homo sapiens
  CDR3 for alpha chain variable domain of TCR clone 100718 (TRAV8-3, TRAJ28)
CAVPPRRGAGSYQLTF

SEQ ID NO: 201436 - protein, 13 aa, Homo sapiens
  CDR3 for beta chain variable domain of TCR clone 100718 (TRBV7-6, TRBJ2-3)
CASSLRSDNTQYF

SEQ ID NO: 201437 - protein, 13 aa, Homo sapiens
  CDR3 for alpha chain variable domain of TCR clone 100719 (TRAV8-2, TRAJ4)
CCESFWCYNKLIF

SEQ ID NO: 201438 - protein, 15 aa, Homo sapiens
  CDR3 for beta chain variable domain of TCR clone 100719 (TRBV4-1, TRBJ1-4)
CASSDTGGTNEKLFF

SEQ ID NO: 201439 - protein, 23 aa, Homo sapiens
  CDR3 for alpha chain variable domain of TCR clone 100720 (TRAV12-2, TRAJ36)
SLLIRDSQPSDSATLERANNLFF

SEQ ID NO: 201440 - protein, 17 aa, Homo sapiens
  CDR3 for beta chain variable domain of TCR clone 100720 (TRBV7-9, TRBJ2-1)
CASSLVASCPSYNEQFF

SEQ ID NO: 201441 - protein, 14 aa, Homo sapiens
  CDR3 for alpha chain variable domain of TCR clone 100721 (TRAV12-1, TRAJ9)
CVVTGYTGGFKTIF

SEQ ID NO: 201442 - protein, 13 aa, Homo sapiens
  CDR3 for beta chain variable domain of TCR clone 100721 (TRBV20-1, TRBJ1-1)
CSARAGGNIEAFF

SEQ ID NO: 201443 - protein, 12 aa, Homo sapiens
  CDR3 for alpha chain variable domain of TCR clone 100722 (TRAV1-2, TRAJ29)
CAVPSGNTPLVF

SEQ ID NO: 201444 - protein, 16 aa, Homo sapiens
  CDR3 for beta chain variable domain of TCR clone 100722 (TRBV18, TRBJ2-1)
CASSPTGASGGNEQFF

SEQ ID NO: 201445 - protein, 11 aa, Homo sapiens
  CDR3 for alpha chain variable domain of TCR clone 100723 (TRAV4, TRAJ28)
CLVGDNRAETL

SEQ ID NO: 201446 - protein, 13 aa, Homo sapiens
  CDR3 for beta chain variable domain of TCR clone 100723 (TRBV20-1, TRBJ2-7)
CSATHTSEYEQYF

SEQ ID NO: 201447 - protein, 14 aa, Homo sapiens
  CDR3 for alpha chain variable domain of TCR clone 100724 (TRAV8-1, TRAJ5)
CAVRTDTGRRELTF

SEQ ID NO: 201448 - protein, 15 aa, Homo sapiens
  CDR3 for beta chain variable domain of TCR clone 100724 (TRBV7-3, TRBJ2-1)
CASSPTGGGEVEQFF

SEQ ID NO: 201449 - protein, 13 aa, Homo sapiens
  CDR3 for alpha chain variable domain of TCR clone 100725 (TRAV3, TRAJ21)
CAVREPDFNKFYF

SEQ ID NO: 201450 - protein, 12 aa, Homo sapiens
  CDR3 for beta chain variable domain of TCR clone 100725 (TRBV12-4, TRBJ1-2)
CASSFIWLHLRF

SEQ ID NO: 201451 - protein, 13 aa, Homo sapiens
  CDR3 for alpha chain variable domain of TCR clone 100726 (TRAV2, TRAJ27)
CAVEAPMQANQPL

SEQ ID NO: 201452 - protein, 13 aa, Homo sapiens
  CDR3 for beta chain variable domain of TCR clone 100726 (TRBV10-2, TRBJ2-3)
CTSSESGDHTQYF

SEQ ID NO: 201453 - protein, 14 aa, Homo sapiens
  CDR3 for alpha chain variable domain of TCR clone 100727 (TRAV41, TRAJ32)
CCPNYGGAANKLIF

SEQ ID NO: 201454 - protein, 15 aa, Homo sapiens
  CDR3 for beta chain variable domain of TCR clone 100727 (TRBV11-2, TRBJ2-1)
CASSKNRGLIYEQFF

SEQ ID NO: 201455 - protein, 12 aa, Homo sapiens
  CDR3 for alpha chain variable domain of TCR clone 100728 (TRAV38-2/DV8, TRAJ43)
CALWDNNNDMRF

SEQ ID NO: 201456 - protein, 14 aa, Homo sapiens
  CDR3 for beta chain variable domain of TCR clone 100728 (TRBV12-4, TRBJ2-5)
CASSSTEGKKTQYF

SEQ ID NO: 201457 - protein, 14 aa, Homo sapiens
  CDR3 for alpha chain variable domain of TCR clone 100729 (TRAV17, TRAJ39)
CATDPVRAGNMLTF

SEQ ID NO: 201458 - protein, 11 aa, Homo sapiens
  CDR3 for beta chain variable domain of TCR clone 100729 (TRBV11-2, TRBJ2-2)
CASSLPGELFF

SEQ ID NO: 201459 - protein, 12 aa, Homo sapiens
  CDR3 for alpha chain variable domain of TCR clone 100730 (TRAV8-4, TRAJ37)
CAKSSNTGKLIF

SEQ ID NO: 201460 - protein, 12 aa, Homo sapiens
  CDR3 for beta chain variable domain of TCR clone 100730 (TRBV14, TRBJ2-5)
CASSQLKETQYF

SEQ ID NO: 201461 - protein, 17 aa, Homo sapiens
  CDR3 for alpha chain variable domain of TCR clone 100731 (TRAV4, TRAJ42)
CLVGVLNYGGSQGNLIF

SEQ ID NO: 201462 - protein, 12 aa, Homo sapiens
  CDR3 for beta chain variable domain of TCR clone 100731 (TRBV20-1, TRBJ2-1)
CSAQDTYNEQFF

SEQ ID NO: 201463 - protein, 14 aa, Homo sapiens
  CDR3 for alpha chain variable domain of TCR clone 100732 (TRAV1-2, TRAJ8)
CAVREDTGFQKPVF

SEQ ID NO: 201464 - protein, 17 aa, Homo sapiens
  CDR3 for beta chain variable domain of TCR clone 100732 (TRBV28, TRBJ2-3)
CASSPTPAGGRVDTQYF

SEQ ID NO: 201465 - protein, 14 aa, Homo sapiens
  CDR3 for alpha chain variable domain of TCR clone 100733 (TRAV26-1, TRAJ22)
CIVRVYGSARQLTF

SEQ ID NO: 201466 - protein, 17 aa, Homo sapiens
  CDR3 for beta chain variable domain of TCR clone 100733 (TRBV7-3, TRBJ2-3)
CASGPGGLAGFGDTQYF

SEQ ID NO: 201467 - protein, 15 aa, Homo sapiens
  CDR3 for alpha chain variable domain of TCR clone 100734 (TRAV21, TRAJ38)
CAVRQDAGNNRKLIW

SEQ ID NO: 201468 - protein, 16 aa, Homo sapiens
  CDR3 for beta chain variable domain of TCR clone 100734 (TRBV4-2, TRBJ1-1)
CASRPLDGGGDTEAVF

SEQ ID NO: 201469 - protein, 16 aa, Homo sapiens
  CDR3 for alpha chain variable domain of TCR clone 100735 (TRAV12-3, TRAJ53)
CAMSPGSGGSNYKLTF

SEQ ID NO: 201470 - protein, 15 aa, Homo sapiens
  CDR3 for beta chain variable domain of TCR clone 100735 (TRBV2, TRBJ2-1)
CASSELAGSYNEQFF

SEQ ID NO: 201471 - protein, 14 aa, Homo sapiens
  CDR3 for alpha chain variable domain of TCR clone 100736 (TRAV13-2, TRAJ15)
CAENPKQAGTALIF

SEQ ID NO: 201472 - protein, 16 aa, Homo sapiens
  CDR3 for beta chain variable domain of TCR clone 100736 (TRBV12-4, TRBJ1-2)
CASSPTATGKTRGYTF

SEQ ID NO: 201473 - protein, 11 aa, Homo sapiens
  CDR3 for alpha chain variable domain of TCR clone 100737 (TRAV35, TRAJ30)
CAVPGDDKIIF

SEQ ID NO: 201474 - protein, 14 aa, Homo sapiens
  CDR3 for beta chain variable domain of TCR clone 100737 (TRBV7-6, TRBJ1-6)
CASSQAGGGSPLHF

SEQ ID NO: 201475 - protein, 14 aa, Homo sapiens
  CDR3 for alpha chain variable domain of TCR clone 100738 (TRAV12-2, TRAJ13)
CAVKKTGGYQKVTF

SEQ ID NO: 201476 - protein, 15 aa, Homo sapiens
  CDR3 for beta chain variable domain of TCR clone 100738 (TRBV2, TRBJ2-3)
CASSDFEKATDTQYF

SEQ ID NO: 201477 - protein, 14 aa, Homo sapiens
  CDR3 for alpha chain variable domain of TCR clone 100739 (TRAV12-3, TRAJ42)
CAMNYGGSQGNLIF

SEQ ID NO: 201478 - protein, 15 aa, Homo sapiens
  CDR3 for beta chain variable domain of TCR clone 100739 (TRBV10-3, TRBJ2-3)
CAISLTSGGTDTQYF

SEQ ID NO: 201479 - protein, 14 aa, Homo sapiens
  CDR3 for alpha chain variable domain of TCR clone 100740 (TRAV26-2, TRAJ40)
CCVGYGGATNKLIF

SEQ ID NO: 201480 - protein, 14 aa, Homo sapiens
  CDR3 for beta chain variable domain of TCR clone 100740 (TRBV4-2, TRBJ2-1)
CASGLDRAYNEQFF

SEQ ID NO: 201481 - protein, 14 aa, Homo sapiens
  CDR3 for alpha chain variable domain of TCR clone 100741 (TRAV26-1, TRAJ52)
CIVKGGTSYGKLTF

SEQ ID NO: 201482 - protein, 13 aa, Homo sapiens
  CDR3 for beta chain variable domain of TCR clone 100741 (TRBV7-9, TRBJ1-2)
CASSLKQNYGYTF

SEQ ID NO: 201483 - protein, 13 aa, Homo sapiens
  CDR3 for alpha chain variable domain of TCR clone 100742 (TRAV17, TRAJ40)
CAGALGGTYKDIF

SEQ ID NO: 201484 - protein, 16 aa, Homo sapiens
  CDR3 for beta chain variable domain of TCR clone 100742 (TRBV11-2, TRBJ1-2)
CASSLDTGGADYGYTF

SEQ ID NO: 201485 - protein, 17 aa, Homo sapiens
  CDR3 for alpha chain variable domain of TCR clone 100743 (TRAV38-1, TRAJ28)
CAFMKPTSGAGSYQLTF

SEQ ID NO: 201486 - protein, 17 aa, Homo sapiens
  CDR3 for beta chain variable domain of TCR clone 100743 (TRBV20-1, TRBJ2-1)
CSASSSGLAGSYNEQFF

SEQ ID NO: 201487 - protein, 13 aa, Homo sapiens
  CDR3 for alpha chain variable domain of TCR clone 100744 (TRAV8-1, TRAJ34)
CAVRPYNTDKLIF

SEQ ID NO: 201488 - protein, 15 aa, Homo sapiens
  CDR3 for beta chain variable domain of TCR clone 100744 (TRBV7-9, TRBJ1-3)
CASSVRSGSGNTIYF

SEQ ID NO: 201489 - protein, 14 aa, Homo sapiens
  CDR3 for alpha chain variable domain of TCR clone 100745 (TRAV26-1, TRAJ40)
CIVRLLSGTYKYIF

SEQ ID NO: 201490 - protein, 17 aa, Homo sapiens
  CDR3 for beta chain variable domain of TCR clone 100745 (TRBV13, TRBJ2-3)
CASSLSRVAGGRNTQYF

SEQ ID NO: 201491 - protein, 14 aa, Homo sapiens
  CDR3 for alpha chain variable domain of TCR clone 100746 (TRAV12-2, TRAJ40)
CAVKIPSGTYKYIF

SEQ ID NO: 201492 - protein, 13 aa, Homo sapiens
  CDR3 for beta chain variable domain of TCR clone 100746 (TRBV24-1, TRBJ2-2)
CATSETNTGELFF

SEQ ID NO: 201493 - protein, 12 aa, Homo sapiens
  CDR3 for alpha chain variable domain of TCR clone 100747 (TRAV1-1, TRAJ39)
CAVPVVGNMLTF

SEQ ID NO: 201494 - protein, 19 aa, Homo sapiens
  CDR3 for beta chain variable domain of TCR clone 100747 (TRBV25-1, TRBJ2-2)
CAILVYRVDRGRKTGELFF

SEQ ID NO: 201495 - protein, 13 aa, Homo sapiens
  CDR3 for alpha chain variable domain of TCR clone 100748 (TRAV41, TRAJ48)
SVPVNFGNEKLTF

SEQ ID NO: 201496 - protein, 14 aa, Homo sapiens
  CDR3 for beta chain variable domain of TCR clone 100748 (TRBV7-3, TRBJ1-1)
CASSLKGGNTEAFF

SEQ ID NO: 201497 - protein, 15 aa, Homo sapiens
  CDR3 for alpha chain variable domain of TCR clone 100749 (TRAV34, TRAJ38)
CGADFTPGNNRKLIW

SEQ ID NO: 201498 - protein, 16 aa, Homo sapiens
  CDR3 for beta chain variable domain of TCR clone 100749 (TRBV12-5, TRBJ2-5)
CASGTRTNGNQETQYF

SEQ ID NO: 201499 - protein, 17 aa, Homo sapiens
  CDR3 for alpha chain variable domain of TCR clone 100750 (TRAV3, TRAJ6)
RAVRDGPRAGGSYIPTF

SEQ ID NO: 201500 - protein, 13 aa, Homo sapiens
  CDR3 for beta chain variable domain of TCR clone 100750 (TRBV27, TRBJ2-1)
CASRTLGVGEQFF

SEQ ID NO: 201501 - protein, 14 aa, Homo sapiens
  CDR3 for alpha chain variable domain of TCR clone 100751 (TRAV21, TRAJ37)
CAVKGFSNTGKLIF

SEQ ID NO: 201502 - protein, 13 aa, Homo sapiens
  CDR3 for beta chain variable domain of TCR clone 100751 (TRBV7-2, TRBJ2-5)
CASSQTSVETQYF

SEQ ID NO: 201503 - protein, 12 aa, Homo sapiens
  CDR3 for alpha chain variable domain of TCR clone 100752 (TRAV26-2, TRAJ47)
CILVEYGNKLVF

SEQ ID NO: 201504 - protein, 15 aa, Homo sapiens
  CDR3 for beta chain variable domain of TCR clone 100752 (TRBV11-3, TRBJ2-3)
CASLKDGREGDTQYF

SEQ ID NO: 201505 - protein, 16 aa, Homo sapiens
  CDR3 for alpha chain variable domain of TCR clone 100753 (TRAV23/DV6, TRAJ52)
CAARPAGGTSYGKLTF

SEQ ID NO: 201506 - protein, 13 aa, Homo sapiens
  CDR3 for beta chain variable domain of TCR clone 100753 (TRBV7-9, TRBJ1-1)
CASSLSGETEAFF

SEQ ID NO: 201507 - protein, 14 aa, Homo sapiens
  CDR3 for alpha chain variable domain of TCR clone 100754 (TRAV17, TRAJ57)
CATDPQGGSEKLVF

SEQ ID NO: 201508 - protein, 18 aa, Homo sapiens
  CDR3 for beta chain variable domain of TCR clone 100754 (TRBV20-1, TRBJ2-3)
CSASGLAGGAGTTDTQYF

SEQ ID NO: 201509 - protein, 16 aa, Homo sapiens
  CDR3 for alpha chain variable domain of TCR clone 100755 (TRAV17, TRAJ35)
CATAEWGIGFGNVLHC

SEQ ID NO: 201510 - protein, 16 aa, Homo sapiens
  CDR3 for beta chain variable domain of TCR clone 100755 (TRBV6-5, TRBJ2-7)
CASSSDPTSGFYEQYF

SEQ ID NO: 201511 - protein, 13 aa, Homo sapiens
  CDR3 for alpha chain variable domain of TCR clone 100756 (TRAV8-3, TRAJ44)
WAVVPGTASKLTF

SEQ ID NO: 201512 - protein, 14 aa, Homo sapiens
  CDR3 for beta chain variable domain of TCR clone 100756 (TRBV11-2, TRBJ2-3)
CASRRLARTDTQYF

SEQ ID NO: 201513 - protein, 13 aa, Homo sapiens
  CDR3 for alpha chain variable domain of TCR clone 100757 (TRAV3, TRAJ20)
CAVRDTPRYKLSF

SEQ ID NO: 201514 - protein, 16 aa, Homo sapiens
  CDR3 for beta chain variable domain of TCR clone 100757 (TRBV20-1, TRBJ2-7)
CSARAPGLALSYEQYC

SEQ ID NO: 201515 - protein, 14 aa, Homo sapiens
  CDR3 for alpha chain variable domain of TCR clone 100758 (TRAV1-1, TRAJ27)
CAVIYNTNAGKSTF

SEQ ID NO: 201516 - protein, 17 aa, Homo sapiens
  CDR3 for beta chain variable domain of TCR clone 100758 (TRBV20-1, TRBJ2-7)
CSATRAGGVAGVEEQYF

SEQ ID NO: 201517 - protein, 11 aa, Homo sapiens
  CDR3 for alpha chain variable domain of TCR clone 100759 (TRAV35, TRAJ30)
CAGERDDKIIF

SEQ ID NO: 201518 - protein, 14 aa, Homo sapiens
  CDR3 for beta chain variable domain of TCR clone 100759 (TRBV15, TRBJ2-5)
CATSGDSGQETQYF

SEQ ID NO: 201519 - protein, 17 aa, Homo sapiens
  CDR3 for alpha chain variable domain of TCR clone 100760 (TRAV3, TRAJ6)
CAVRDGPRAGGSYIPTF

SEQ ID NO: 201520 - protein, 18 aa, Homo sapiens
  CDR3 for beta chain variable domain of TCR clone 100760 (TRBV6-6, TRBJ1-3)
CASSYSKWDSISGNTIYF

SEQ ID NO: 201521 - protein, 19 aa, Homo sapiens
  CDR3 for alpha chain variable domain of TCR clone 100761 (TRAV2, TRAJ20)
ILQVREADAAVYRDCKLSF

SEQ ID NO: 201522 - protein, 17 aa, Homo sapiens
  CDR3 for beta chain variable domain of TCR clone 100761 (TRBV11-2, TRBJ2-1)
CASSLCPPGVEYNEQFF

SEQ ID NO: 201523 - protein, 13 aa, Homo sapiens
  CDR3 for alpha chain variable domain of TCR clone 100762 (TRAV12-1, TRAJ37)
CVVNAGSTGKLIF

SEQ ID NO: 201524 - protein, 14 aa, Homo sapiens
  CDR3 for beta chain variable domain of TCR clone 100762 (TRBV7-2, TRBJ2-3)
CASRRGLAADTQYF

SEQ ID NO: 201525 - protein, 17 aa, Homo sapiens
  CDR3 for alpha chain variable domain of TCR clone 100763 (TRAV3, TRAJ42)
CAVRDRHYGGSQGNLIF

SEQ ID NO: 201526 - protein, 12 aa, Homo sapiens
  CDR3 for beta chain variable domain of TCR clone 100763 (TRBV11-2, TRBJ2-1)
CASSPGNNEQFF

SEQ ID NO: 201527 - protein, 13 aa, Homo sapiens
  CDR3 for alpha chain variable domain of TCR clone 100764 (TRAV27, TRAJ56)
CAGKPGASSKLTF

SEQ ID NO: 201528 - protein, 18 aa, Homo sapiens
  CDR3 for beta chain variable domain of TCR clone 100764 (TRBV11-2, TRBJ2-3)
CASSLGGASRGAPNTQYF

SEQ ID NO: 201529 - protein, 13 aa, Homo sapiens
  CDR3 for alpha chain variable domain of TCR clone 100765 (TRAV2, TRAJ40)
CAVVTSGTYKYIS

SEQ ID NO: 201530 - protein, 16 aa, Homo sapiens
  CDR3 for beta chain variable domain of TCR clone 100765 (TRBV29-1, TRBJ2-6)
CSVEDITYSGANVLTF

SEQ ID NO: 201531 - protein, 20 aa, Homo sapiens
  CDR3 for alpha chain variable domain of TCR clone 100766 (TRAV8-1, TRAJ5)
CAVKTEQPGRRAGEHSLLGV

SEQ ID NO: 201532 - protein, 16 aa, Homo sapiens
  CDR3 for beta chain variable domain of TCR clone 100766 (TRBV12-5, TRBJ2-5)
CASGPRTSGNQETQYF

SEQ ID NO: 201533 - protein, 17 aa, Homo sapiens
  CDR3 for alpha chain variable domain of TCR clone 100767 (TRAV38-1, TRAJ28)
CAFMKPTSGAGSYQLTF

SEQ ID NO: 201534 - protein, 15 aa, Homo sapiens
  CDR3 for beta chain variable domain of TCR clone 100767 (TRBV5-1, TRBJ2-4)
CASSLGGGGSYTQYF

SEQ ID NO: 201535 - protein, 16 aa, Homo sapiens
  CDR3 for alpha chain variable domain of TCR clone 100768 (TRAV4, TRAJ22)
CLVGDLYSGSARQLTF

SEQ ID NO: 201536 - protein, 16 aa, Homo sapiens
  CDR3 for beta chain variable domain of TCR clone 100768 (TRBV7-9, TRBJ2-3)
CASSPWREVGTDTQYF

SEQ ID NO: 201537 - protein, 13 aa, Homo sapiens
  CDR3 for alpha chain variable domain of TCR clone 100769 (TRAV27, TRAJ17)
CAGAATAGNKLTF

SEQ ID NO: 201538 - protein, 12 aa, Homo sapiens
  CDR3 for beta chain variable domain of TCR clone 100769 (TRBV6-1, TRBJ2-5)
CASSEGRETQYF

SEQ ID NO: 201539 - protein, 18 aa, Homo sapiens
  CDR3 for alpha chain variable domain of TCR clone 100770 (TRAV38-2/DV8, TRAJ42)
CAYRSAGLTGGSQGNLIF

SEQ ID NO: 201540 - protein, 12 aa, Homo sapiens
  CDR3 for beta chain variable domain of TCR clone 100770 (TRBV11-2, TRBJ2-2)
CASSLGGGELFF

SEQ ID NO: 201541 - protein, 14 aa, Homo sapiens
  CDR3 for alpha chain variable domain of TCR clone 100771 (TRAV12-2, TRAJ13)
CAAKKTGGYQKVTF

SEQ ID NO: 201542 - protein, 15 aa, Homo sapiens
  CDR3 for beta chain variable domain of TCR clone 100771 (TRBV27, TRBJ2-1)
CAISNGGGSSNEQFF

SEQ ID NO: 201543 - protein, 12 aa, Homo sapiens
  CDR3 for alpha chain variable domain of TCR clone 100772 (TRAV3, TRAJ27)
CAVRDGAGKSTF

SEQ ID NO: 201544 - protein, 13 aa, Homo sapiens
  CDR3 for beta chain variable domain of TCR clone 100772 (TRBV10-3, TRBJ1-2)
CATNADLDYGYTF

SEQ ID NO: 201545 - protein, 14 aa, Homo sapiens
  CDR3 for alpha chain variable domain of TCR clone 100773 (TRAV8-3, TRAJ39)
CAVGANNAGNMLTF

SEQ ID NO: 201546 - protein, 15 aa, Homo sapiens
  CDR3 for beta chain variable domain of TCR clone 100773 (TRBV6-3, TRBJ2-7)
CASSSPGTVFYEQYF

SEQ ID NO: 201547 - protein, 15 aa, Homo sapiens
  CDR3 for alpha chain variable domain of TCR clone 100774 (TRAV20, TRAJ6)
CAFRLQSGGSYIPTF

SEQ ID NO: 201548 - protein, 14 aa, Homo sapiens
  CDR3 for beta chain variable domain of TCR clone 100774 (TRBV12-4, TRBJ2-7)
CASSASGGWYEQYF

SEQ ID NO: 201549 - protein, 13 aa, Homo sapiens
  CDR3 for alpha chain variable domain of TCR clone 100775 (TRAV2, TRAJ15)
CTVASQAGAALIF

SEQ ID NO: 201550 - protein, 16 aa, Homo sapiens
  CDR3 for beta chain variable domain of TCR clone 100775 (TRBV5-1, TRBJ1-1)
CASSSGGNSLNTEAFF

SEQ ID NO: 201551 - protein, 17 aa, Homo sapiens
  CDR3 for alpha chain variable domain of TCR clone 100776 (TRAV3, TRAJ6)
CAVRDGPRAGGSYIPTF

SEQ ID NO: 201552 - protein, 15 aa, Homo sapiens
  CDR3 for beta chain variable domain of TCR clone 100776 (TRBV20-1, TRBJ1-1)
CNASWDRFLNTEAFF

SEQ ID NO: 201553 - protein, 11 aa, Homo sapiens
  CDR3 for alpha chain variable domain of TCR clone 100777 (TRAV1-2, TRAJ34)
CAGYNTDKLIF

SEQ ID NO: 201554 - protein, 12 aa, Homo sapiens
  CDR3 for beta chain variable domain of TCR clone 100777 (TRBV11-2, TRBJ2-2)
CASSLGGGELFF

SEQ ID NO: 201555 - protein, 13 aa, Homo sapiens
  CDR3 for alpha chain variable domain of TCR clone 100778 (TRAV13-1, TRAJ39)
CSKYSNAGNMLTF

SEQ ID NO: 201556 - protein, 12 aa, Homo sapiens
  CDR3 for beta chain variable domain of TCR clone 100778 (TRBV7-9, TRBJ2-7)
CASSLEGYEQYF

SEQ ID NO: 201557 - protein, 14 aa, Homo sapiens
  CDR3 for alpha chain variable domain of TCR clone 100779 (TRAV8-1, TRAJ15)
CAVNGQQAGTALIF

SEQ ID NO: 201558 - protein, 13 aa, Homo sapiens
  CDR3 for beta chain variable domain of TCR clone 100779 (TRBV7-9, TRBJ2-5)
CASTPVGQETQYF

SEQ ID NO: 201559 - protein, 15 aa, Homo sapiens
  CDR3 for alpha chain variable domain of TCR clone 100780 (TRAV12-3, TRAJ6)
CAMSATSGGSYIPTF

SEQ ID NO: 201560 - protein, 12 aa, Homo sapiens
  CDR3 for beta chain variable domain of TCR clone 100780 (TRBV5-1, TRBJ2-7)
CASSLGENEQYF

SEQ ID NO: 201561 - protein, 11 aa, Homo sapiens
  CDR3 for alpha chain variable domain of TCR clone 100781 (TRAV1-2, TRAJ20)
CAVANDYKLSF

SEQ ID NO: 201562 - protein, 17 aa, Homo sapiens
  CDR3 for beta chain variable domain of TCR clone 100781 (TRBV20-1, TRBJ2-1)
CSASSSGLAGSYSEQFF

SEQ ID NO: 201563 - protein, 11 aa, Homo sapiens
  CDR3 for alpha chain variable domain of TCR clone 100782 (TRAV13-1, TRAJ8)
CAARGFQKLVF

SEQ ID NO: 201564 - protein, 16 aa, Homo sapiens
  CDR3 for beta chain variable domain of TCR clone 100782 (TRBV19, TRBJ1-5)
CASSTRGTRSNQHQHF

SEQ ID NO: 201565 - protein, 13 aa, Homo sapiens
  CDR3 for alpha chain variable domain of TCR clone 100783 (TRAV8-3, TRAJ4)
WVFYSGGFNKLIF

SEQ ID NO: 201566 - protein, 14 aa, Homo sapiens
  CDR3 for beta chain variable domain of TCR clone 100783 (TRBV7-9, TRBJ2-3)
CASSLEDGTDTQYF

SEQ ID NO: 201567 - protein, 11 aa, Homo sapiens
  CDR3 for alpha chain variable domain of TCR clone 100784 (TRAV3, TRAJ21)
CAVGNFNKFYF

SEQ ID NO: 201568 - protein, 15 aa, Homo sapiens
  CDR3 for beta chain variable domain of TCR clone 100784 (TRBV5-1, TRBJ2-1)
CASSLVAKSYNEQFF

SEQ ID NO: 201569 - protein, 16 aa, Homo sapiens
  CDR3 for alpha chain variable domain of TCR clone 100785 (TRAV3, TRAJ4)
CDVRPSPSGGYNKLIF

SEQ ID NO: 201570 - protein, 12 aa, Homo sapiens
  CDR3 for beta chain variable domain of TCR clone 100785 (TRBV7-9, TRBJ2-7)
CASSQGVYEQYF

SEQ ID NO: 201571 - protein, 14 aa, Homo sapiens
  CDR3 for alpha chain variable domain of TCR clone 100786 (TRAV26-1, TRAJ29)
CIVRVEPGNKPLVF

SEQ ID NO: 201572 - protein, 14 aa, Homo sapiens
  CDR3 for beta chain variable domain of TCR clone 100786 (TRBV25-1, TRBJ1-1)
CASTHLGGNTEAFF

SEQ ID NO: 201573 - protein, 18 aa, Homo sapiens
  CDR3 for alpha chain variable domain of TCR clone 100787 (TRAV27, TRAJ36)
PSLAIQASTPAGANNLFF

SEQ ID NO: 201574 - protein, 13 aa, Homo sapiens
  CDR3 for beta chain variable domain of TCR clone 100787 (TRBV7-9, TRBJ2-3)
CASSPGSTDTQYF

SEQ ID NO: 201575 - protein, 13 aa, Homo sapiens
  CDR3 for alpha chain variable domain of TCR clone 100788 (TRAV20, TRAJ21)
CAVEGYNFNKFYF

SEQ ID NO: 201576 - protein, 16 aa, Homo sapiens
  CDR3 for beta chain variable domain of TCR clone 100788 (TRBV7-3, TRBJ2-2)
CASSLKRGTLSGELFF

SEQ ID NO: 201577 - protein, 17 aa, Homo sapiens
  CDR3 for alpha chain variable domain of TCR clone 100789 (TRAV3, TRAJ37)
CAVRDMRTPGNTGKLIF

SEQ ID NO: 201578 - protein, 14 aa, Homo sapiens
  CDR3 for beta chain variable domain of TCR clone 100789 (TRBV7-2, TRBJ2-7)
CASSPKTSSYEQYF

SEQ ID NO: 201579 - protein, 15 aa, Homo sapiens
  CDR3 for alpha chain variable domain of TCR clone 100790 (TRAV27, TRAJ38)
CAARRNAGNNRKLLW

SEQ ID NO: 201580 - protein, 13 aa, Homo sapiens
  CDR3 for beta chain variable domain of TCR clone 100790 (TRBV12-5, TRBJ2-3)
CASGERQSDTQYF

SEQ ID NO: 201581 - protein, 13 aa, Homo sapiens
  CDR3 for alpha chain variable domain of TCR clone 100791 (TRAV8-3, TRAJ36)
CAVGATGANNLFF

SEQ ID NO: 201582 - protein, 15 aa, Homo sapiens
  CDR3 for beta chain variable domain of TCR clone 100791 (TRBV2, TRBJ2-7)
CASSEGLARSYEQYF

SEQ ID NO: 201583 - protein, 15 aa, Homo sapiens
  CDR3 for alpha chain variable domain of TCR clone 100792 (TRAV27, TRAJ38)
CAARRNAGNNRKLIW

SEQ ID NO: 201584 - protein, 12 aa, Homo sapiens
  CDR3 for beta chain variable domain of TCR clone 100792 (TRBV19, TRBJ2-1)
CASSQISNEQFF

SEQ ID NO: 201585 - protein, 15 aa, Homo sapiens
  CDR3 for alpha chain variable domain of TCR clone 100793 (TRAV12-3, TRAJ10)
CASYILTGGGNKLTF

SEQ ID NO: 201586 - protein, 15 aa, Homo sapiens
  CDR3 for beta chain variable domain of TCR clone 100793 (TRBV7-2, TRBJ1-6)
RASSLGPDRGMPLHF

SEQ ID NO: 201587 - protein, 14 aa, Homo sapiens
  CDR3 for alpha chain variable domain of TCR clone 100794 (TRAV12-3, TRAJ58)
CAMSTENSGSRLTF

SEQ ID NO: 201588 - protein, 15 aa, Homo sapiens
  CDR3 for beta chain variable domain of TCR clone 100794 (TRBV4-1, TRBJ1-4)
CASSDTGGTNEKLFF

SEQ ID NO: 201589 - protein, 14 aa, Homo sapiens
  CDR3 for alpha chain variable domain of TCR clone 100795 (TRAV8-3, TRAJ39)
CAVGANNAGNMLTF

SEQ ID NO: 201590 - protein, 13 aa, Homo sapiens
  CDR3 for beta chain variable domain of TCR clone 100795 (TRBV10-3, TRBJ2-7)
CASKLAVNYEQYF

SEQ ID NO: 201591 - protein, 18 aa, Homo sapiens
  CDR3 for alpha chain variable domain of TCR clone 100796 (TRAV21, TRAJ52)
CAVRPSPAGGTSYGKLTF

SEQ ID NO: 201592 - protein, 14 aa, Homo sapiens
  CDR3 for beta chain variable domain of TCR clone 100796 (TRBV7-9, TRBJ2-3)
CASSLEDGTDTQYF

SEQ ID NO: 201593 - protein, 12 aa, Homo sapiens
  CDR3 for alpha chain variable domain of TCR clone 100797 (TRAV23/DV6, TRAJ49)
CAATYTGNQFYF

SEQ ID NO: 201594 - protein, 17 aa, Homo sapiens
  CDR3 for beta chain variable domain of TCR clone 100797 (TRBV4-1, TRBJ2-3)
CASSQALQGGGTDTQYF

SEQ ID NO: 201595 - protein, 13 aa, Homo sapiens
  CDR3 for alpha chain variable domain of TCR clone 100798 (TRAV13-1, TRAJ5)
CAARVTGRRALTF

SEQ ID NO: 201596 - protein, 15 aa, Homo sapiens
  CDR3 for beta chain variable domain of TCR clone 100798 (TRBV6-3, TRBJ2-7)
CASSSPGTVFYEQYF

SEQ ID NO: 201597 - protein, 14 aa, Homo sapiens
  CDR3 for alpha chain variable domain of TCR clone 100799 (TRAV16, TRAJ33)
CALSAMDSNYQLIW

SEQ ID NO: 201598 - protein, 16 aa, Homo sapiens
  CDR3 for beta chain variable domain of TCR clone 100799 (TRBV19, TRBJ2-2)
CASRSPGTGATGELFF

SEQ ID NO: 201599 - protein, 14 aa, Homo sapiens
  CDR3 for alpha chain variable domain of TCR clone 100800 (TRAV1-2, TRAJ6)
CAVSLSGGSYIPTL

SEQ ID NO: 201600 - protein, 15 aa, Homo sapiens
  CDR3 for beta chain variable domain of TCR clone 100800 (TRBV28, TRBJ2-7)
CASSPGGRGFYEQYF

SEQ ID NO: 201601 - protein, 14 aa, Homo sapiens
  CDR3 for alpha chain variable domain of TCR clone 100801 (TRAV12-2, TRAJ17)
CAVLFKAAGNKLTF

SEQ ID NO: 201602 - protein, 17 aa, Homo sapiens
  CDR3 for beta chain variable domain of TCR clone 100801 (TRBV20-1, TRBJ2-2)
CRASGSGQGGLTGELSF

SEQ ID NO: 201603 - protein, 11 aa, Homo sapiens
  CDR3 for alpha chain variable domain of TCR clone 100802 (TRAV12-3, TRAJ43)
CAMSVSNDMRF

SEQ ID NO: 201604 - protein, 12 aa, Homo sapiens
  CDR3 for beta chain variable domain of TCR clone 100802 (TRBV12-4, TRBJ2-7)
CASSLGGYEQYF

SEQ ID NO: 201605 - protein, 17 aa, Homo sapiens
  CDR3 for alpha chain variable domain of TCR clone 100803 (TRAV38-1, TRAJ28)
CAFMKPASGAGSYQLTF

SEQ ID NO: 201606 - protein, 15 aa, Homo sapiens
  CDR3 for beta chain variable domain of TCR clone 100803 (TRBV5-1, TRBJ2-4)
CASSLGGGGSYIQYF

SEQ ID NO: 201607 - protein, 12 aa, Homo sapiens
  CDR3 for alpha chain variable domain of TCR clone 100804 (TRAV8-3, TRAJ26)
CAGDNYGQNFVF

SEQ ID NO: 201608 - protein, 15 aa, Homo sapiens
  CDR3 for beta chain variable domain of TCR clone 100804 (TRBV20-1, TRBJ2-3)
CSAEPLAGHGDTQYF

SEQ ID NO: 201609 - protein, 15 aa, Homo sapiens
  CDR3 for alpha chain variable domain of TCR clone 100805 (TRAV35, TRAJ58)
CAGRRQETSGSRLTF

SEQ ID NO: 201610 - protein, 11 aa, Homo sapiens
  CDR3 for beta chain variable domain of TCR clone 100805 (TRBV11-2, TRBJ1-1)
CASSINTEAVF

SEQ ID NO: 201611 - protein, 15 aa, Homo sapiens
  CDR3 for alpha chain variable domain of TCR clone 100806 (TRAV21, TRAJ37)
CAVRPTLSNTGKLFF

SEQ ID NO: 201612 - protein, 16 aa, Homo sapiens
  CDR3 for beta chain variable domain of TCR clone 100806 (TRBV24-1, TRBJ2-3)
CATSDRRQDLTDTQYF

SEQ ID NO: 201613 - protein, 11 aa, Homo sapiens
  CDR3 for alpha chain variable domain of TCR clone 100807 (TRAV21, TRAJ41)
CAVRSGYALNS

SEQ ID NO: 201614 - protein, 13 aa, Homo sapiens
  CDR3 for beta chain variable domain of TCR clone 100807 (TRBV7-9, TRBJ1-2)
CASSLKQNYGYTF

SEQ ID NO: 201615 - protein, 11 aa, Homo sapiens
  CDR3 for alpha chain variable domain of TCR clone 100808 (TRAV16, TRAJ31)
CALFNNARLMF

SEQ ID NO: 201616 - protein, 15 aa, Homo sapiens
  CDR3 for beta chain variable domain of TCR clone 100808 (TRBV18, TRBJ1-1)
CAGSPRQGENTEAFF

SEQ ID NO: 201617 - protein, 17 aa, Homo sapiens
  CDR3 for alpha chain variable domain of TCR clone 100809 (TRAV3, TRAJ38)
CAVRDCLNAGNNRNLIW

SEQ ID NO: 201618 - protein, 13 aa, Homo sapiens
  CDR3 for beta chain variable domain of TCR clone 100809 (TRBV23-1, TRBJ1-4)
CASRGKFNEKLFF

SEQ ID NO: 201619 - protein, 11 aa, Homo sapiens
  CDR3 for alpha chain variable domain of TCR clone 100810 (TRAV2, TRAJ13)
CASGGYQKVTF

SEQ ID NO: 201620 - protein, 15 aa, Homo sapiens
  CDR3 for beta chain variable domain of TCR clone 100810 (TRBV7-2, TRBJ2-1)
CASSLVAGGHNEQFF

SEQ ID NO: 201621 - protein, 14 aa, Homo sapiens
  CDR3 for alpha chain variable domain of TCR clone 100811 (TRAV2, TRAJ21)
CAVDDLNNFNKFYF

SEQ ID NO: 201622 - protein, 11 aa, Homo sapiens
  CDR3 for beta chain variable domain of TCR clone 100811 (TRBV10-3, TRBJ2-1)
CAISDRGLQFF

SEQ ID NO: 201623 - protein, 14 aa, Homo sapiens
  CDR3 for alpha chain variable domain of TCR clone 100812 (TRAV13-1, TRAJ23)
CAASRLGRGGKLIF

SEQ ID NO: 201624 - protein, 12 aa, Homo sapiens
  CDR3 for beta chain variable domain of TCR clone 100812 (TRBV20-1, TRBJ1-1)
QCSTWGGTEAFF

SEQ ID NO: 201625 - protein, 14 aa, Homo sapiens
  CDR3 for alpha chain variable domain of TCR clone 100813 (TRAV26-1, TRAJ38)
CIADNAGNNRKLIW

SEQ ID NO: 201626 - protein, 17 aa, Homo sapiens
  CDR3 for beta chain variable domain of TCR clone 100813 (TRBV7-9, TRBJ2-3)
CASSPTVAGDLTDTQYV

SEQ ID NO: 201627 - protein, 13 aa, Homo sapiens
  CDR3 for alpha chain variable domain of TCR clone 100814 (TRAV13-1, TRAJ5)
CAARVTGRRAITF

SEQ ID NO: 201628 - protein, 15 aa, Homo sapiens
  CDR3 for beta chain variable domain of TCR clone 100814 (TRBV7-9, TRBJ2-7)
CASSPGGGLTYEQYF

SEQ ID NO: 201629 - protein, 14 aa, Homo sapiens
  CDR3 for alpha chain variable domain of TCR clone 100815 (TRAV1-2, TRAJ16)
CAVNRFSDGQKLLF

SEQ ID NO: 201630 - protein, 15 aa, Homo sapiens
  CDR3 for beta chain variable domain of TCR clone 100815 (TRBV4-2, TRBJ2-2)
CASRATGGTIGELFF

SEQ ID NO: 201631 - protein, 17 aa, Homo sapiens
  CDR3 for alpha chain variable domain of TCR clone 100816 (TRAV3, TRAJ6)
CAVRDGPRAGGSYIPTF

SEQ ID NO: 201632 - protein, 12 aa, Homo sapiens
  CDR3 for beta chain variable domain of TCR clone 100816 (TRBV7-3, TRBJ2-5)
CASSSPGGTQYF

SEQ ID NO: 201633 - protein, 13 aa, Homo sapiens
  CDR3 for alpha chain variable domain of TCR clone 100817 (TRAV12-2, TRAJ10)
CAVPTGGGNKLTF

SEQ ID NO: 201634 - protein, 12 aa, Homo sapiens
  CDR3 for beta chain variable domain of TCR clone 100817 (TRBV11-2, TRBJ2-2)
CASSLGGGELFF

SEQ ID NO: 201635 - protein, 13 aa, Homo sapiens
  CDR3 for alpha chain variable domain of TCR clone 100818 (TRAV12-3, TRAJ33)
CAMSVNSNYQLIW

SEQ ID NO: 201636 - protein, 16 aa, Homo sapiens
  CDR3 for beta chain variable domain of TCR clone 100818 (TRBV7-2, TRBJ1-5)
CASSPWGPEGNQPQHF

SEQ ID NO: 201637 - protein, 14 aa, Homo sapiens
  CDR3 for alpha chain variable domain of TCR clone 100819 (TRAV23/DV6, TRAJ4)
CAAPSSGGYNKLIF

SEQ ID NO: 201638 - protein, 16 aa, Homo sapiens
  CDR3 for beta chain variable domain of TCR clone 100819 (TRBV19, TRBJ1-1)
CASRFEGPVTGTEAFF

SEQ ID NO: 201639 - protein, 11 aa, Homo sapiens
  CDR3 for alpha chain variable domain of TCR clone 100820 (TRAV21, TRAJ34)
CAVTNTDKLIL

SEQ ID NO: 201640 - protein, 16 aa, Homo sapiens
  CDR3 for beta chain variable domain of TCR clone 100820 (TRBV18, TRBJ1-1)
CASSPGVGGRGGEAFF

SEQ ID NO: 201641 - protein, 12 aa, Homo sapiens
  CDR3 for alpha chain variable domain of TCR clone 100821 (TRAV23/DV6, TRAJ30)
CAASKGDDKIIF

SEQ ID NO: 201642 - protein, 15 aa, Homo sapiens
  CDR3 for beta chain variable domain of TCR clone 100821 (TRBV12-4, TRBJ2-1)
CASRPTRAGYNEQFF

SEQ ID NO: 201643 - protein, 14 aa, Homo sapiens
  CDR3 for alpha chain variable domain of TCR clone 100822 (TRAV3, TRAJ6)
CAVRDPWGSYIPTS

SEQ ID NO: 201644 - protein, 13 aa, Homo sapiens
  CDR3 for beta chain variable domain of TCR clone 100822 (TRBV7-9, TRBJ1-2)
CASSLKQNYGYTF

SEQ ID NO: 201645 - protein, 11 aa, Homo sapiens
  CDR3 for alpha chain variable domain of TCR clone 100823 (TRAV3, TRAJ21)
CAVGNFNKFYF

SEQ ID NO: 201646 - protein, 10 aa, Homo sapiens
  CDR3 for beta chain variable domain of TCR clone 100823 (TRBV19, TRBJ2-1)
RPSSYNEQFF

SEQ ID NO: 201647 - protein, 18 aa, Homo sapiens
  CDR3 for alpha chain variable domain of TCR clone 100824 (TRAV12-3, TRAJ52)
CAMSRTNAGGTSYGKLTF

SEQ ID NO: 201648 - protein, 16 aa, Homo sapiens
  CDR3 for beta chain variable domain of TCR clone 100824 (TRBV13, TRBJ2-3)
CQQPLQGSGGRNTQYF

SEQ ID NO: 201649 - protein, 15 aa, Homo sapiens
  CDR3 for alpha chain variable domain of TCR clone 100825 (TRAV8-3, TRAJ41)
CAVGSNSNSGYALNF

SEQ ID NO: 201650 - protein, 17 aa, Homo sapiens
  CDR3 for beta chain variable domain of TCR clone 100825 (TRBV25-1, TRBJ2-1)
CARSAYGQGRGVYEQFF

SEQ ID NO: 201651 - protein, 15 aa, Homo sapiens
  CDR3 for alpha chain variable domain of TCR clone 100826 (TRAV29/DV5, TRAJ29)
CAASERSSGNTPLVF

SEQ ID NO: 201652 - protein, 17 aa, Homo sapiens
  CDR3 for beta chain variable domain of TCR clone 100826 (TRBV4-1, TRBJ1-4)
CASSQEGPRGVEEKLSF

SEQ ID NO: 201653 - protein, 16 aa, Homo sapiens
  CDR3 for alpha chain variable domain of TCR clone 100827 (TRAV1-2, TRAJ10)
CAVRGVLTGGGNKLTF

SEQ ID NO: 201654 - protein, 12 aa, Homo sapiens
  CDR3 for beta chain variable domain of TCR clone 100827 (TRBV7-8, TRBJ2-7)
CPSSLGDREQYF

SEQ ID NO: 201655 - protein, 14 aa, Homo sapiens
  CDR3 for alpha chain variable domain of TCR clone 100828 (TRAV12-2, TRAJ29)
CAVKIPSGTYKYIF

SEQ ID NO: 201656 - protein, 14 aa, Homo sapiens
  CDR3 for beta chain variable domain of TCR clone 100828 (TRBV18, TRBJ2-5)
CASSPGVSQETQYF

SEQ ID NO: 201657 - protein, 10 aa, Homo sapiens
  CDR3 for alpha chain variable domain of TCR clone 100829 (TRAV2, TRAJ34)
CAVVNDKLIF

SEQ ID NO: 201658 - protein, 15 aa, Homo sapiens
  CDR3 for beta chain variable domain of TCR clone 100829 (TRBV3-1, TRBJ2-2)
CSSSQDWTRAGELFF

SEQ ID NO: 201659 - protein, 16 aa, Homo sapiens
  CDR3 for alpha chain variable domain of TCR clone 100830 (TRAV3, TRAJ10)
CAVRDMRAGGGNKLTF

SEQ ID NO: 201660 - protein, 14 aa, Homo sapiens
  CDR3 for beta chain variable domain of TCR clone 100830 (TRBV12-4, TRBJ1-1)
CASSREGLVTEAFF

SEQ ID NO: 201661 - protein, 13 aa, Homo sapiens
  CDR3 for alpha chain variable domain of TCR clone 100831 (TRAV12-1, TRAJ9)
CVVLNTGGFKPIF

SEQ ID NO: 201662 - protein, 13 aa, Homo sapiens
  CDR3 for beta chain variable domain of TCR clone 100831 (TRBV20-1, TRBJ1-1)
CSARGGGNTEAFF

SEQ ID NO: 201663 - protein, 19 aa, Homo sapiens
  CDR3 for alpha chain variable domain of TCR clone 100832 (TRAV2, TRAJ20)
ILQVREADAAVYRDCKLSF

SEQ ID NO: 201664 - protein, 13 aa, Homo sapiens
  CDR3 for beta chain variable domain of TCR clone 100832 (TRBV15, TRBJ1-6)
CANSGGLNSPLHF

SEQ ID NO: 201665 - protein, 15 aa, Homo sapiens
  CDR3 for alpha chain variable domain of TCR clone 100833 (TRAV3, TRAJ5)
CAVRDRKTGRRALTF

SEQ ID NO: 201666 - protein, 20 aa, Homo sapiens
  CDR3 for beta chain variable domain of TCR clone 100833 (TRBV28, TRBJ2-1)
CASTPIGRSPGLAGGNEQFF

SEQ ID NO: 201667 - protein, 16 aa, Homo sapiens
  CDR3 for alpha chain variable domain of TCR clone 100834 (TRAV16, TRAJ52)
CALSAAGGTSYGKLTF

SEQ ID NO: 201668 - protein, 17 aa, Homo sapiens
  CDR3 for beta chain variable domain of TCR clone 100834 (TRBV20-1, TRBJ2-2)
CSASGSGQGGLTGELFF

SEQ ID NO: 201669 - protein, 13 aa, Homo sapiens
  CDR3 for alpha chain variable domain of TCR clone 100835 (TRAV8-1, TRAJ34)
CAVRPYNTDKLIF

SEQ ID NO: 201670 - protein, 15 aa, Homo sapiens
  CDR3 for beta chain variable domain of TCR clone 100835 (TRBV7-9, TRBJ1-3)
CASSLRSGSGNTIYF

SEQ ID NO: 201671 - protein, 14 aa, Homo sapiens
  CDR3 for alpha chain variable domain of TCR clone 100836 (TRAV29/DV5, TRAJ36)
CAARRKTGANNLFF

SEQ ID NO: 201672 - protein, 15 aa, Homo sapiens
  CDR3 for beta chain variable domain of TCR clone 100836 (TRBV19, TRBJ1-5)
CASSIVWADNQPQHF

SEQ ID NO: 201673 - protein, 12 aa, Homo sapiens
  CDR3 for alpha chain variable domain of TCR clone 100837 (TRAV12-3, TRAJ40)
CAMSSGTYKYIF

SEQ ID NO: 201674 - protein, 20 aa, Homo sapiens
  CDR3 for beta chain variable domain of TCR clone 100837 (TRBV7-8, TRBJ2-2)
CASGHLFPGPTIHITGELFF

SEQ ID NO: 201675 - protein, 13 aa, Homo sapiens
  CDR3 for alpha chain variable domain of TCR clone 100838 (TRAV12-2, TRAJ48)
CAFQYSSASKITF

SEQ ID NO: 201676 - protein, 11 aa, Homo sapiens
  CDR3 for beta chain variable domain of TCR clone 100838 (TRBV20-1, TRBJ2-3)
CSGTSSTTQYF

SEQ ID NO: 201677 - protein, 10 aa, Homo sapiens
  CDR3 for alpha chain variable domain of TCR clone 100839 (TRAV13-1, TRAJ7)
LIGGNNRLAF

SEQ ID NO: 201678 - protein, 14 aa, Homo sapiens
  CDR3 for beta chain variable domain of TCR clone 100839 (TRBV16, TRBJ1-1)
CASSQAGPNTEDFF

SEQ ID NO: 201679 - protein, 13 aa, Homo sapiens
  CDR3 for alpha chain variable domain of TCR clone 100840 (TRAV20, TRAJ49)
CAVQARTDNQFYF

SEQ ID NO: 201680 - protein, 14 aa, Homo sapiens
  CDR3 for beta chain variable domain of TCR clone 100840 (TRBV5-1, TRBJ1-1)
CASSLQGASTEAFF

SEQ ID NO: 201681 - protein, 17 aa, Homo sapiens
  CDR3 for alpha chain variable domain of TCR clone 100841 (TRAV36/DV7, TRAJ52)
CAVAQRAGGTSYGKLTF

SEQ ID NO: 201682 - protein, 16 aa, Homo sapiens
  CDR3 for beta chain variable domain of TCR clone 100841 (TRBV13, TRBJ2-2)
CASSPRTGEHTGELFF

SEQ ID NO: 201683 - protein, 13 aa, Homo sapiens
  CDR3 for alpha chain variable domain of TCR clone 100842 (TRAV8-3, TRAJ48)
CAVVPFGNEKLTF

SEQ ID NO: 201684 - protein, 14 aa, Homo sapiens
  CDR3 for beta chain variable domain of TCR clone 100842 (TRBV19, TRBJ2-7)
CASSMGQGAIEQYF

SEQ ID NO: 201685 - protein, 15 aa, Homo sapiens
  CDR3 for alpha chain variable domain of TCR clone 100843 (TRAV14/DV4, TRAJ10)
CAMRELTGGGNKLTF

SEQ ID NO: 201686 - protein, 18 aa, Homo sapiens
  CDR3 for beta chain variable domain of TCR clone 100843 (TRBV7-9, TRBJ2-7)
CASSLTNSGSRTWYEQYF

SEQ ID NO: 201687 - protein, 14 aa, Homo sapiens
  CDR3 for alpha chain variable domain of TCR clone 100844 (TRAV17, TRAJ57)
CATDPQVGSEKLVF

SEQ ID NO: 201688 - protein, 18 aa, Homo sapiens
  CDR3 for beta chain variable domain of TCR clone 100844 (TRBV6-6, TRBJ1-3)
CASSYSKWDSISGNTIYF

SEQ ID NO: 201689 - protein, 15 aa, Homo sapiens
  CDR3 for alpha chain variable domain of TCR clone 100845 (TRAV3, TRAJ29)
CAVRAWNSGNTPLVF

SEQ ID NO: 201690 - protein, 12 aa, Homo sapiens
  CDR3 for beta chain variable domain of TCR clone 100845 (TRBV14, TRBJ2-5)
CASSQLKETQYF

SEQ ID NO: 201691 - protein, 13 aa, Homo sapiens
  CDR3 for alpha chain variable domain of TCR clone 100846 (TRAV26-1, TRAJ34)
FIVRPWITDKLIF

SEQ ID NO: 201692 - protein, 13 aa, Homo sapiens
  CDR3 for beta chain variable domain of TCR clone 100846 (TRBV5-1, TRBJ2-1)
CASSLGSYNEQFF

SEQ ID NO: 201693 - protein, 18 aa, Homo sapiens
  CDR3 for alpha chain variable domain of TCR clone 100847 (TRAV12-1, TRAJ52)
CVVKLINAGGTSYGKLTF

SEQ ID NO: 201694 - protein, 15 aa, Homo sapiens
  CDR3 for beta chain variable domain of TCR clone 100847 (TRBV7-3, TRBJ2-3)
CASSLGLTLGDTQYF

SEQ ID NO: 201695 - protein, 10 aa, Homo sapiens
  CDR3 for alpha chain variable domain of TCR clone 100848 (TRAV12-1, TRAJ33)
CVASNYQLIW

SEQ ID NO: 201696 - protein, 15 aa, Homo sapiens
  CDR3 for beta chain variable domain of TCR clone 100848 (TRBV5-4, TRBJ1-4)
CASSHGDGENENLFF

SEQ ID NO: 201697 - protein, 14 aa, Homo sapiens
  CDR3 for alpha chain variable domain of TCR clone 100849 (TRAV8-1, TRAJ15)
CAVNGQQAGTALIF

SEQ ID NO: 201698 - protein, 14 aa, Homo sapiens
  CDR3 for beta chain variable domain of TCR clone 100849 (TRBV25-1, TRBJ1-1)
CASTHLGGNTEAFF

SEQ ID NO: 201699 - protein, 16 aa, Homo sapiens
  CDR3 for alpha chain variable domain of TCR clone 100850 (TRAV16, TRAJ4)
CITVLPFSGGYTKLIF

SEQ ID NO: 201700 - protein, 14 aa, Homo sapiens
  CDR3 for beta chain variable domain of TCR clone 100850 (TRBV19, TRBJ2-7)
CASSMGQGAIEQYF

SEQ ID NO: 201701 - protein, 13 aa, Homo sapiens
  CDR3 for alpha chain variable domain of TCR clone 100851 (TRAV2, TRAJ15)
CAVASQAGTALIF

SEQ ID NO: 201702 - protein, 14 aa, Homo sapiens
  CDR3 for beta chain variable domain of TCR clone 100851 (TRBV11-2, TRBJ1-2)
CASSLYRGNYGYTF

SEQ ID NO: 201703 - protein, 17 aa, Homo sapiens
  CDR3 for alpha chain variable domain of TCR clone 100852 (TRAV1-2, TRAJ6)
CAVRDTTRTGGSYIPTF

SEQ ID NO: 201704 - protein, 14 aa, Homo sapiens
  CDR3 for beta chain variable domain of TCR clone 100852 (TRBV6-1, TRBJ1-3)
CASVQGGGGNTIYF

SEQ ID NO: 201705 - protein, 13 aa, Homo sapiens
  CDR3 for alpha chain variable domain of TCR clone 100853 (TRAV34, TRAJ22)
CGAGAGSARQLTF

SEQ ID NO: 201706 - protein, 16 aa, Homo sapiens
  CDR3 for beta chain variable domain of TCR clone 100853 (TRBV7-3, TRBJ2-1)
CASSRPLAGGYNEQFF

SEQ ID NO: 201707 - protein, 12 aa, Homo sapiens
  CDR3 for alpha chain variable domain of TCR clone 100854 (TRAV1-1, TRAJ29)
CAVISGNTPLVF

SEQ ID NO: 201708 - protein, 17 aa, Homo sapiens
  CDR3 for beta chain variable domain of TCR clone 100854 (TRBV20-1, TRBJ2-2)
CSASGSGRGGLTGELFF

SEQ ID NO: 201709 - protein, 10 aa, Homo sapiens
  CDR3 for alpha chain variable domain of TCR clone 100855 (TRAV21, TRAJ43)
CAVKIGDMRF

SEQ ID NO: 201710 - protein, 13 aa, Homo sapiens
  CDR3 for beta chain variable domain of TCR clone 100855 (TRBV20-1, TRBJ2-7)
CSAPGLADYEQYF

SEQ ID NO: 201711 - protein, 15 aa, Homo sapiens
  CDR3 for alpha chain variable domain of TCR clone 100856 (TRAV38-1, TRAJ37)
CAFIHGSGNTGKLIF

SEQ ID NO: 201712 - protein, 18 aa, Homo sapiens
  CDR3 for beta chain variable domain of TCR clone 100856 (TRBV7-9, TRBJ1-1)
CASSKPWDTMGMNTEAFF

SEQ ID NO: 201713 - protein, 11 aa, Homo sapiens
  CDR3 for alpha chain variable domain of TCR clone 100857 (TRAV27, TRAJ45)
CAGAQEEVLTD

SEQ ID NO: 201714 - protein, 17 aa, Homo sapiens
  CDR3 for beta chain variable domain of TCR clone 100857 (TRBV11-2, TRBJ2-1)
CASSLYPPGVEYNEQFF

SEQ ID NO: 201715 - protein, 15 aa, Homo sapiens
  CDR3 for alpha chain variable domain of TCR clone 100858 (TRAV12-2, TRAJ43)
CAFDMRFGAGTRLTG

SEQ ID NO: 201716 - protein, 15 aa, Homo sapiens
  CDR3 for beta chain variable domain of TCR clone 100858 (TRBV28, TRBJ2-1)
CASSGLAEVDNEQFF

SEQ ID NO: 201717 - protein, 12 aa, Homo sapiens
  CDR3 for alpha chain variable domain of TCR clone 100859 (TRAV13-2, TRAJ23)
CAERRRGGKLIF

SEQ ID NO: 201718 - protein, 12 aa, Homo sapiens
  CDR3 for beta chain variable domain of TCR clone 100859 (TRBV11-2, TRBJ2-2)
CASSLGGGELFF

SEQ ID NO: 201719 - protein, 13 aa, Homo sapiens
  CDR3 for alpha chain variable domain of TCR clone 100860 (TRAV8-3, TRAJ48)
CAVVPFGNEKLTF

SEQ ID NO: 201720 - protein, 14 aa, Homo sapiens
  CDR3 for beta chain variable domain of TCR clone 100860 (TRBV18, TRBJ2-7)
CANSPRGGAYEQYF

SEQ ID NO: 201721 - protein, 13 aa, Homo sapiens
  CDR3 for alpha chain variable domain of TCR clone 100861 (TRAV12-2, TRAJ34)
CAGRGYNTDKLIF

SEQ ID NO: 201722 - protein, 18 aa, Homo sapiens
  CDR3 for beta chain variable domain of TCR clone 100861 (TRBV11-2, TRBJ2-3)
CASSLGGASRGAPNTQYF

SEQ ID NO: 201723 - protein, 16 aa, Homo sapiens
  CDR3 for alpha chain variable domain of TCR clone 100862 (TRAV30, TRAJ24)
CGTEIVDADSWGKFQF

SEQ ID NO: 201724 - protein, 14 aa, Homo sapiens
  CDR3 for beta chain variable domain of TCR clone 100862 (TRBV5-1, TRBJ2-1)
CASSLSGGANEQFF

SEQ ID NO: 201725 - protein, 12 aa, Homo sapiens
  CDR3 for alpha chain variable domain of TCR clone 100863 (TRAV21, TRAJ13)
PGPSGGYQKVTF

SEQ ID NO: 201726 - protein, 13 aa, Homo sapiens
  CDR3 for beta chain variable domain of TCR clone 100863 (TRBV7-2, TRBJ2-2)
CASSSVRAGELFF

SEQ ID NO: 201727 - protein, 15 aa, Homo sapiens
  CDR3 for alpha chain variable domain of TCR clone 100864 (TRAV30, TRAJ32)
CGTEILGGATNKLIF

SEQ ID NO: 201728 - protein, 17 aa, Homo sapiens
  CDR3 for beta chain variable domain of TCR clone 100864 (TRBV3-1, TRBJ2-2)
CASSQFRDKVDTGELFF

SEQ ID NO: 201729 - protein, 12 aa, Homo sapiens
  CDR3 for alpha chain variable domain of TCR clone 100865 (TRAV17, TRAJ30)
CATDARDDKIIL

SEQ ID NO: 201730 - protein, 15 aa, Homo sapiens
  CDR3 for beta chain variable domain of TCR clone 100865 (TRBV4-1, TRBJ2-1)
CASSQGGELYNEQFF

SEQ ID NO: 201731 - protein, 11 aa, Homo sapiens
  CDR3 for alpha chain variable domain of TCR clone 100866 (TRAV1-2, TRAJ20)
CAVSNDYKLSF

SEQ ID NO: 201732 - protein, 15 aa, Homo sapiens
  CDR3 for beta chain variable domain of TCR clone 100866 (TRBV9, TRBJ2-1)
CASSLAGSSYNEQFF

SEQ ID NO: 201733 - protein, 17 aa, Homo sapiens
  CDR3 for alpha chain variable domain of TCR clone 100867 (TRAV13-1, TRAJ28)
CAASPPSSGAGSYQLTF

SEQ ID NO: 201734 - protein, 12 aa, Homo sapiens
  CDR3 for beta chain variable domain of TCR clone 100867 (TRBV11-2, TRBJ2-2)
CASSLPTGELFF

SEQ ID NO: 201735 - protein, 19 aa, Homo sapiens
  CDR3 for alpha chain variable domain of TCR clone 100868 (TRAV2, TRAJ20)
ILQVREADAAVYRDCKLSF

SEQ ID NO: 201736 - protein, 16 aa, Homo sapiens
  CDR3 for beta chain variable domain of TCR clone 100868 (TRBV5-1, TRBJ2-5)
CASSWALLRAGETQYF

SEQ ID NO: 201737 - protein, 12 aa, Homo sapiens
  CDR3 for alpha chain variable domain of TCR clone 100869 (TRAV35, TRAJ39)
LAPNNAGNMLTF

SEQ ID NO: 201738 - protein, 16 aa, Homo sapiens
  CDR3 for beta chain variable domain of TCR clone 100869 (TRBV2, TRBJ2-3)
CASSTSVEWVTDTQYF

SEQ ID NO: 201739 - protein, 13 aa, Homo sapiens
  CDR3 for alpha chain variable domain of TCR clone 100870 (TRAV3, TRAJ31)
CAVREGNNARLMF

SEQ ID NO: 201740 - protein, 10 aa, Homo sapiens
  CDR3 for beta chain variable domain of TCR clone 100870 (TRBV5-1, TRBJ2-6)
CASSRGVAGP

SEQ ID NO: 201741 - protein, 13 aa, Homo sapiens
  CDR3 for alpha chain variable domain of TCR clone 100871 (TRAV21, TRAJ9)
CAVRRSGGFKTIF

SEQ ID NO: 201742 - protein, 20 aa, Homo sapiens
  CDR3 for beta chain variable domain of TCR clone 100871 (TRBV28, TRBJ2-1)
CASTLIGRSPGLAGGNEQFF

SEQ ID NO: 201743 - protein, 14 aa, Homo sapiens
  CDR3 for alpha chain variable domain of TCR clone 100872 (TRAV1-2, TRAJ16)
CAGNRFSDGQKLLF

SEQ ID NO: 201744 - protein, 13 aa, Homo sapiens
  CDR3 for beta chain variable domain of TCR clone 100872 (TRBV7-9, TRBJ1-2)
CASSLKQNYGYTF

SEQ ID NO: 201745 - protein, 13 aa, Homo sapiens
  CDR3 for alpha chain variable domain of TCR clone 100873 (TRAV12-2, TRAJ13)
CAVTAGGYQKVTF

SEQ ID NO: 201746 - protein, 15 aa, Homo sapiens
  CDR3 for beta chain variable domain of TCR clone 100873 (TRBV11-1, TRBJ2-7)
CASSLNYGASYEQYF

SEQ ID NO: 201747 - protein, 13 aa, Homo sapiens
  CDR3 for alpha chain variable domain of TCR clone 100874 (TRAV1-2, TRAJ9)
CAALNTGGFKTIF

SEQ ID NO: 201748 - protein, 20 aa, Homo sapiens
  CDR3 for beta chain variable domain of TCR clone 100874 (TRBV28, TRBJ2-1)
WASTPIGRSPGLAGGNEQFF

SEQ ID NO: 201749 - protein, 10 aa, Homo sapiens
  CDR3 for alpha chain variable domain of TCR clone 100875 (TRAV23/DV6, TRAJ57)
CAASSTLSQG

SEQ ID NO: 201750 - protein, 13 aa, Homo sapiens
  CDR3 for beta chain variable domain of TCR clone 100875 (TRBV25-1, TRBJ1-1)
CQHPLGGNTEAFF

SEQ ID NO: 201751 - protein, 18 aa, Homo sapiens
  CDR3 for alpha chain variable domain of TCR clone 100876 (TRAV12-3, TRAJ52)
CAMSVGGAGGTSYGKLTF

SEQ ID NO: 201752 - protein, 15 aa, Homo sapiens
  CDR3 for beta chain variable domain of TCR clone 100876 (TRBV27, TRBJ1-6)
CVSSFDRGLGSPLHF

SEQ ID NO: 201753 - protein, 14 aa, Homo sapiens
  CDR3 for alpha chain variable domain of TCR clone 100877 (TRAV12-3, TRAJ9)
CAMSPNTGGFKTIF

SEQ ID NO: 201754 - protein, 16 aa, Homo sapiens
  CDR3 for beta chain variable domain of TCR clone 100877 (TRBV10-3, TRBJ2-1)
CAISGVGDGGGGEQFF

SEQ ID NO: 201755 - protein, 15 aa, Homo sapiens
  CDR3 for alpha chain variable domain of TCR clone 100878 (TRAV35, TRAJ40)
CAGQLGTSGTYKYIF

SEQ ID NO: 201756 - protein, 17 aa, Homo sapiens
  CDR3 for beta chain variable domain of TCR clone 100878 (TRBV11-2, TRBJ2-1)
CASSLYPPGVEYNEQFF

SEQ ID NO: 201757 - protein, 16 aa, Homo sapiens
  CDR3 for alpha chain variable domain of TCR clone 100879 (TRAV3, TRAJ32)
CAVRENYGGATNKRIF

SEQ ID NO: 201758 - protein, 12 aa, Homo sapiens
  CDR3 for beta chain variable domain of TCR clone 100879 (TRBV20-1, TRBJ1-2)
CSVTPEGYGYTF

SEQ ID NO: 201759 - protein, 14 aa, Homo sapiens
  CDR3 for alpha chain variable domain of TCR clone 100880 (TRAV16, TRAJ17)
CALSGRAAGNKLTF

SEQ ID NO: 201760 - protein, 17 aa, Homo sapiens
  CDR3 for beta chain variable domain of TCR clone 100880 (TRBV18, TRBJ2-6)
CASSPRQGAGGANVLTF

SEQ ID NO: 201761 - protein, 14 aa, Homo sapiens
  CDR3 for alpha chain variable domain of TCR clone 100881 (TRAV12-3, TRAJ10)
SHLPLTGGGNKLTF

SEQ ID NO: 201762 - protein, 16 aa, Homo sapiens
  CDR3 for beta chain variable domain of TCR clone 100881 (TRBV15, TRBJ2-3)
CATSRDLGIVTDTQYF

SEQ ID NO: 201763 - protein, 11 aa, Homo sapiens
  CDR3 for alpha chain variable domain of TCR clone 100882 (TRAV35, TRAJ30)
CAPGGDDKIIF

SEQ ID NO: 201764 - protein, 16 aa, Homo sapiens
  CDR3 for beta chain variable domain of TCR clone 100882 (TRBV5-7, TRBJ2-3)
CASSPWTSGGTDTQYF

SEQ ID NO: 201765 - protein, 12 aa, Homo sapiens
  CDR3 for alpha chain variable domain of TCR clone 100883 (TRAV12-3, TRAJ17)
CAMTLTGNKLTF

SEQ ID NO: 201766 - protein, 13 aa, Homo sapiens
  CDR3 for beta chain variable domain of TCR clone 100883 (TRBV5-1, TRBJ1-2)
CASSSTGVYGYTL

SEQ ID NO: 201767 - protein, 13 aa, Homo sapiens
  CDR3 for alpha chain variable domain of TCR clone 100884 (TRAV2, TRAJ15)
CAVASQAGTALIF

SEQ ID NO: 201768 - protein, 13 aa, Homo sapiens
  CDR3 for beta chain variable domain of TCR clone 100884 (TRBV25-1, TRBJ2-5)
CASSESGRETQYF

SEQ ID NO: 201769 - protein, 18 aa, Homo sapiens
  CDR3 for alpha chain variable domain of TCR clone 100885 (TRAV26-2, TRAJ54)
CILRDVEVGIQGAQKLVF

SEQ ID NO: 201770 - protein, 16 aa, Homo sapiens
  CDR3 for beta chain variable domain of TCR clone 100885 (TRBV19, TRBJ2-2)
CASRSPGTGATGELFF

SEQ ID NO: 201771 - protein, 14 aa, Homo sapiens
  CDR3 for alpha chain variable domain of TCR clone 100886 (TRAV12-3, TRAJ9)
CAMSPNTGGFKTIF

SEQ ID NO: 201772 - protein, 16 aa, Homo sapiens
  CDR3 for beta chain variable domain of TCR clone 100886 (TRBV24-1, TRBJ2-3)
CATSDPGTGATDTQYF

SEQ ID NO: 201773 - protein, 13 aa, Homo sapiens
  CDR3 for alpha chain variable domain of TCR clone 100887 (TRAV12-1, TRAJ34)
CVVTGYNTDKLIF

SEQ ID NO: 201774 - protein, 13 aa, Homo sapiens
  CDR3 for beta chain variable domain of TCR clone 100887 (TRBV28, TRBJ2-7)
CASRAGGVYEQYF

SEQ ID NO: 201775 - protein, 14 aa, Homo sapiens
  CDR3 for alpha chain variable domain of TCR clone 100888 (TRAV13-2, TRAJ10)
CAETLPGGGNRLTF

SEQ ID NO: 201776 - protein, 12 aa, Homo sapiens
  CDR3 for beta chain variable domain of TCR clone 100888 (TRBV6-1, TRBJ2-7)
CASSDYSYEQYF

SEQ ID NO: 201777 - protein, 17 aa, Homo sapiens
  CDR3 for alpha chain variable domain of TCR clone 100889 (TRAV3, TRAJ6)
CAVRDGPRAGGSYIPTF

SEQ ID NO: 201778 - protein, 13 aa, Homo sapiens
  CDR3 for beta chain variable domain of TCR clone 100889 (TRBV7-8, TRBJ2-7)
CASSLTGGREQYF

SEQ ID NO: 201779 - protein, 14 aa, Homo sapiens
  CDR3 for alpha chain variable domain of TCR clone 100890 (TRAV14/DV4, TRAJ32)
SNVLPLTPINKLIF

SEQ ID NO: 201780 - protein, 16 aa, Homo sapiens
  CDR3 for beta chain variable domain of TCR clone 100890 (TRBV7-3, TRBJ2-1)
CASSLEGYRSYNEQFF

SEQ ID NO: 201781 - protein, 12 aa, Homo sapiens
  CDR3 for alpha chain variable domain of TCR clone 100891 (TRAV21, TRAJ49)
CAVSNTGNQFYF

SEQ ID NO: 201782 - protein, 11 aa, Homo sapiens
  CDR3 for beta chain variable domain of TCR clone 100891 (TRBV11-2, TRBJ2-2)
CASSLPGELFF

SEQ ID NO: 201783 - protein, 12 aa, Homo sapiens
  CDR3 for alpha chain variable domain of TCR clone 100892 (TRAV8-3, TRAJ40)
CAVPSGTYKYIF

SEQ ID NO: 201784 - protein, 14 aa, Homo sapiens
  CDR3 for beta chain variable domain of TCR clone 100892 (TRBV12-4, TRBJ2-3)
CASSGQGSTDTQYF

SEQ ID NO: 201785 - protein, 12 aa, Homo sapiens
  CDR3 for alpha chain variable domain of TCR clone 100893 (TRAV12-1, TRAJ34)
CVVTFNTDKPIF

SEQ ID NO: 201786 - protein, 14 aa, Homo sapiens
  CDR3 for beta chain variable domain of TCR clone 100893 (TRBV19, TRBJ1-1)
CASLRTGLNTEAFF

SEQ ID NO: 201787 - protein, 11 aa, Homo sapiens
  CDR3 for alpha chain variable domain of TCR clone 100894 (TRAV3, TRAJ21)
CAVGNFNKFYF

SEQ ID NO: 201788 - protein, 13 aa, Homo sapiens
  CDR3 for beta chain variable domain of TCR clone 100894 (TRBV7-9, TRBJ1-2)
CARSLKQNYGYTF

SEQ ID NO: 201789 - protein, 18 aa, Homo sapiens
  CDR3 for alpha chain variable domain of TCR clone 100895 (TRAV21, TRAJ52)
CAVRPSPAGGTSYGKLTF

SEQ ID NO: 201790 - protein, 18 aa, Homo sapiens
  CDR3 for beta chain variable domain of TCR clone 100895 (TRBV15, TRBJ2-3)
CATSRDGARSWDTDTQYF

SEQ ID NO: 201791 - protein, 16 aa, Homo sapiens
  CDR3 for alpha chain variable domain of TCR clone 100896 (TRAV21, TRAJ52)
CAVSDAGGTSYGRLTF

SEQ ID NO: 201792 - protein, 13 aa, Homo sapiens
  CDR3 for beta chain variable domain of TCR clone 100896 (TRBV7-3, TRBJ2-5)
CASSFRGSQTQYF

SEQ ID NO: 201793 - protein, 13 aa, Homo sapiens
  CDR3 for alpha chain variable domain of TCR clone 100897 (TRAV12-1, TRAJ40)
CVVPTSGTYKYIF

SEQ ID NO: 201794 - protein, 18 aa, Homo sapiens
  CDR3 for beta chain variable domain of TCR clone 100897 (TRBV7-6, TRBJ2-1)
CASSPRTSGMSSYNEQFC

SEQ ID NO: 201795 - protein, 14 aa, Homo sapiens
  CDR3 for alpha chain variable domain of TCR clone 100898 (TRAV17, TRAJ15)
CATDALQAGTALIF

SEQ ID NO: 201796 - protein, 17 aa, Homo sapiens
  CDR3 for beta chain variable domain of TCR clone 100898 (TRBV6-6, TRBJ2-6)
CASSYSMEGAGANVLTF

SEQ ID NO: 201797 - protein, 17 aa, Homo sapiens
  CDR3 for alpha chain variable domain of TCR clone 100899 (TRAV12-2, TRAJ52)
RAVNPYAGGTSYGKLTF

SEQ ID NO: 201798 - protein, 16 aa, Homo sapiens
  CDR3 for beta chain variable domain of TCR clone 100899 (TRBV5-5, TRBJ2-2)
CASSGRREGATGELFF

SEQ ID NO: 201799 - protein, 11 aa, Homo sapiens
  CDR3 for alpha chain variable domain of TCR clone 100900 (TRAV2, TRAJ13)
CASGGYQKVTF

SEQ ID NO: 201800 - protein, 16 aa, Homo sapiens
  CDR3 for beta chain variable domain of TCR clone 100900 (TRBV7-9, TRBJ1-2)
CASSPGGGAINYGYTF

SEQ ID NO: 201801 - protein, 14 aa, Homo sapiens
  CDR3 for alpha chain variable domain of TCR clone 100901 (TRAV38-1, TRAJ40)
CALRPTSGTYKYIF

SEQ ID NO: 201802 - protein, 14 aa, Homo sapiens
  CDR3 for beta chain variable domain of TCR clone 100901 (TRBV5-4, TRBJ1-2)
CASTRQTDNYGYTF

SEQ ID NO: 201803 - protein, 15 aa, Homo sapiens
  CDR3 for alpha chain variable domain of TCR clone 100902 (TRAV41, TRAJ45)
CAASYSGGGADGLTF

SEQ ID NO: 201804 - protein, 14 aa, Homo sapiens
  CDR3 for beta chain variable domain of TCR clone 100902 (TRBV12-5, TRBJ2-5)
CASGSRTHQETQYV

SEQ ID NO: 201805 - protein, 15 aa, Homo sapiens
  CDR3 for alpha chain variable domain of TCR clone 100903 (TRAV16, TRAJ17)
CALSGNKAAGNKLTF

SEQ ID NO: 201806 - protein, 16 aa, Homo sapiens
  CDR3 for beta chain variable domain of TCR clone 100903 (TRBV7-6, TRBJ1-6)
CASSSLPAVEYSPLHF

SEQ ID NO: 201807 - protein, 17 aa, Homo sapiens
  CDR3 for alpha chain variable domain of TCR clone 100904 (TRAV3, TRAJ38)
CAVRDCLNSGNNRKLIW

SEQ ID NO: 201808 - protein, 13 aa, Homo sapiens
  CDR3 for beta chain variable domain of TCR clone 100904 (TRBV23-1, TRBJ1-4)
CASRGKFNEKLFF

SEQ ID NO: 201809 - protein, 12 aa, Homo sapiens
  CDR3 for alpha chain variable domain of TCR clone 100905 (TRAV17, TRAJ57)
CATDGGSEKLVF

SEQ ID NO: 201810 - protein, 15 aa, Homo sapiens
  CDR3 for beta chain variable domain of TCR clone 100905 (TRBV19, TRBJ2-1)
CASSSPGVPLDEQFF

SEQ ID NO: 201811 - protein, 11 aa, Homo sapiens
  CDR3 for alpha chain variable domain of TCR clone 100906 (TRAV2, TRAJ13)
CASGGYQKVTF

SEQ ID NO: 201812 - protein, 13 aa, Homo sapiens
  CDR3 for beta chain variable domain of TCR clone 100906 (TRBV7-2, TRBJ2-2)
CANSSVRAGELFF

SEQ ID NO: 201813 - protein, 12 aa, Homo sapiens
  CDR3 for alpha chain variable domain of TCR clone 100907 (TRAV1-1, TRAJ8)
CAGGTGFQKLVF

SEQ ID NO: 201814 - protein, 13 aa, Homo sapiens
  CDR3 for beta chain variable domain of TCR clone 100907 (TRBV7-9, TRBJ1-2)
CASSLNQNYGYTF

SEQ ID NO: 201815 - protein, 12 aa, Homo sapiens
  CDR3 for alpha chain variable domain of TCR clone 100908 (TRAV38-1, TRAJ20)
CAFIWNDYKLSF

SEQ ID NO: 201816 - protein, 14 aa, Homo sapiens
  CDR3 for beta chain variable domain of TCR clone 100908 (TRBV19, TRBJ2-1)
CASSMGSGATDQFF

SEQ ID NO: 201817 - protein, 15 aa, Homo sapiens
  CDR3 for alpha chain variable domain of TCR clone 100909 (TRAV3, TRAJ5)
CAVRVRKTGRRALTF

SEQ ID NO: 201818 - protein, 15 aa, Homo sapiens
  CDR3 for beta chain variable domain of TCR clone 100909 (TRBV7-8, TRBJ2-1)
CASSLADSLYNEQFF

SEQ ID NO: 201819 - protein, 16 aa, Homo sapiens
  CDR3 for alpha chain variable domain of TCR clone 100910 (TRAV21, TRAJ45)
CDVSWGSGGGADGLTF

SEQ ID NO: 201820 - protein, 14 aa, Homo sapiens
  CDR3 for beta chain variable domain of TCR clone 100910 (TRBV4-2, TRBJ1-2)
CASSPGGSNYGYTF

SEQ ID NO: 201821 - protein, 14 aa, Homo sapiens
  CDR3 for alpha chain variable domain of TCR clone 100911 (TRAV17, TRAJ57)
CATDPQGGSEKLVF

SEQ ID NO: 201822 - protein, 15 aa, Homo sapiens
  CDR3 for beta chain variable domain of TCR clone 100911 (TRBV2, TRBJ2-1)
CASSVTSEGTDEQFF

SEQ ID NO: 201823 - protein, 12 aa, Homo sapiens
  CDR3 for alpha chain variable domain of TCR clone 100912 (TRAV13-1, TRAJ48)
CAANFGNEKLTF

SEQ ID NO: 201824 - protein, 17 aa, Homo sapiens
  CDR3 for beta chain variable domain of TCR clone 100912 (TRBV13, TRBJ2-3)
CASSLSRVAGGRKTQYF

SEQ ID NO: 201825 - protein, 11 aa, Homo sapiens
  CDR3 for alpha chain variable domain of TCR clone 100913 (TRAV12-3, TRAJ17)
CAMTLTCKLTF

SEQ ID NO: 201826 - protein, 15 aa, Homo sapiens
  CDR3 for beta chain variable domain of TCR clone 100913 (TRBV20-1, TRBJ2-7)
CSARDRVSGMDEQYF

SEQ ID NO: 201827 - protein, 16 aa, Homo sapiens
  CDR3 for alpha chain variable domain of TCR clone 100914 (TRAV21, TRAJ37)
CAVRTAGSSNTGKLIF

SEQ ID NO: 201828 - protein, 13 aa, Homo sapiens
  CDR3 for beta chain variable domain of TCR clone 100914 (TRBV7-9, TRBJ2-5)
CTSLPSGRETQYF

SEQ ID NO: 201829 - protein, 14 aa, Homo sapiens
  CDR3 for alpha chain variable domain of TCR clone 100915 (TRAV1-2, TRAJ8)
CAVREDTGFQKLVF

SEQ ID NO: 201830 - protein, 15 aa, Homo sapiens
  CDR3 for beta chain variable domain of TCR clone 100915 (TRBV6-3, TRBJ2-7)
CASSSPGTVFSEQYF

SEQ ID NO: 201831 - protein, 18 aa, Homo sapiens
  CDR3 for alpha chain variable domain of TCR clone 100916 (TRAV26-1, TRAJ23)
CIVRVGLEVWNQGGKLIF

SEQ ID NO: 201832 - protein, 16 aa, Homo sapiens
  CDR3 for beta chain variable domain of TCR clone 100916 (TRBV12-4, TRBJ2-5)
CARSFFVRGRQETQYF

SEQ ID NO: 201833 - protein, 13 aa, Homo sapiens
  CDR3 for alpha chain variable domain of TCR clone 100917 (TRAV27, TRAJ8)
CAGGPTGFQKLVF

SEQ ID NO: 201834 - protein, 13 aa, Homo sapiens
  CDR3 for beta chain variable domain of TCR clone 100917 (TRBV7-9, TRBJ1-2)
CASSLKQNYGYTF

SEQ ID NO: 201835 - protein, 14 aa, Homo sapiens
  CDR3 for alpha chain variable domain of TCR clone 100918 (TRAV12-2, TRAJ13)
CAVKKTGGYPKVTF

SEQ ID NO: 201836 - protein, 12 aa, Homo sapiens
  CDR3 for beta chain variable domain of TCR clone 100918 (TRBV12-4, TRBJ1-2)
CASSFIWLHLRF

SEQ ID NO: 201837 - protein, 16 aa, Homo sapiens
  CDR3 for alpha chain variable domain of TCR clone 100919 (TRAV13-1, TRAJ48)
CAASIFGNFGNEKLTF

SEQ ID NO: 201838 - protein, 14 aa, Homo sapiens
  CDR3 for beta chain variable domain of TCR clone 100919 (TRBV24-1, TRBJ1-1)
CATSIPKGDTEAFF

SEQ ID NO: 201839 - protein, 13 aa, Homo sapiens
  CDR3 for alpha chain variable domain of TCR clone 100920 (TRAV27, TRAJ17)
CAGAATAGNKLTC

SEQ ID NO: 201840 - protein, 15 aa, Homo sapiens
  CDR3 for beta chain variable domain of TCR clone 100920 (TRBV5-1, TRBJ2-3)
CASRNQAGSTDTQYF

SEQ ID NO: 201841 - protein, 13 aa, Homo sapiens
  CDR3 for alpha chain variable domain of TCR clone 100921 (TRAV20, TRAJ40)
CAVPFSGTYKYIF

SEQ ID NO: 201842 - protein, 13 aa, Homo sapiens
  CDR3 for beta chain variable domain of TCR clone 100921 (TRBV15, TRBJ2-5)
CATRQIGEETQYF

SEQ ID NO: 201843 - protein, 14 aa, Homo sapiens
  CDR3 for alpha chain variable domain of TCR clone 100922 (TRAV8-3, TRAJ18)
CALTEAQPWGGYTL

SEQ ID NO: 201844 - protein, 15 aa, Homo sapiens
  CDR3 for beta chain variable domain of TCR clone 100922 (TRBV20-1, TRBJ1-5)
CSAFKNGQRNQPQHF

SEQ ID NO: 201845 - protein, 14 aa, Homo sapiens
  CDR3 for alpha chain variable domain of TCR clone 100923 (TRAV1-2, TRAJ8)
CAVREDTGFQKLVF

SEQ ID NO: 201846 - protein, 17 aa, Homo sapiens
  CDR3 for beta chain variable domain of TCR clone 100923 (TRBV4-3, TRBJ2-2)
CASSQDTSARSPGELFF

SEQ ID NO: 201847 - protein, 16 aa, Homo sapiens
  CDR3 for alpha chain variable domain of TCR clone 100924 (TRAV3, TRAJ28)
CAVLPRSGAGSYQLTF

SEQ ID NO: 201848 - protein, 13 aa, Homo sapiens
  CDR3 for beta chain variable domain of TCR clone 100924 (TRBV12-4, TRBJ2-5)
CASRPAVQETQYF

SEQ ID NO: 201849 - protein, 17 aa, Homo sapiens
  CDR3 for alpha chain variable domain of TCR clone 100925 (TRAV13-1, TRAJ10)
CAASIWGGTGGGNKLTF

SEQ ID NO: 201850 - protein, 13 aa, Homo sapiens
  CDR3 for beta chain variable domain of TCR clone 100925 (TRBV20-1, TRBJ1-1)
CSARGGGNTEAFF

SEQ ID NO: 201851 - protein, 11 aa, Homo sapiens
  CDR3 for alpha chain variable domain of TCR clone 100926 (TRAV2, TRAJ33)
CAVESNYQLIW

SEQ ID NO: 201852 - protein, 15 aa, Homo sapiens
  CDR3 for beta chain variable domain of TCR clone 100926 (TRBV7-3, TRBJ2-2)
CASSETGQGTGELFF

SEQ ID NO: 201853 - protein, 12 aa, Homo sapiens
  CDR3 for alpha chain variable domain of TCR clone 100927 (TRAV22, TRAJ29)
CAPPSGNTHLVF

SEQ ID NO: 201854 - protein, 14 aa, Homo sapiens
  CDR3 for beta chain variable domain of TCR clone 100927 (TRBV11-2, TRBJ2-7)
CASSLGAGAYEQYF

SEQ ID NO: 201855 - protein, 14 aa, Homo sapiens
  CDR3 for alpha chain variable domain of TCR clone 100928 (TRAV3, TRAJ37)
CAVKESGNTGKLTF

SEQ ID NO: 201856 - protein, 14 aa, Homo sapiens
  CDR3 for beta chain variable domain of TCR clone 100928 (TRBV2, TRBJ1-5)
CASSENRGGQPQHF

SEQ ID NO: 201857 - protein, 13 aa, Homo sapiens
  CDR3 for alpha chain variable domain of TCR clone 100929 (TRAV8-6, TRAJ49)
CAVITNTGNQFYF

SEQ ID NO: 201858 - protein, 13 aa, Homo sapiens
  CDR3 for beta chain variable domain of TCR clone 100929 (TRBV15, TRBJ1-6)
CATSGGLNSPLHF

SEQ ID NO: 201859 - protein, 13 aa, Homo sapiens
  CDR3 for alpha chain variable domain of TCR clone 100930 (TRAV8-3, TRAJ28)
CAVGAVGSYQLTF

SEQ ID NO: 201860 - protein, 17 aa, Homo sapiens
  CDR3 for beta chain variable domain of TCR clone 100930 (TRBV6-5, TRBJ2-3)
CASSYTTGTGRGDTQYF

SEQ ID NO: 201861 - protein, 11 aa, Homo sapiens
  CDR3 for alpha chain variable domain of TCR clone 100931 (TRAV17, TRAJ31)
CATSNNARLMF

SEQ ID NO: 201862 - protein, 16 aa, Homo sapiens
  CDR3 for beta chain variable domain of TCR clone 100931 (TRBV7-8, TRBJ2-4)
CASSAERALAKNIQYF

SEQ ID NO: 201863 - protein, 11 aa, Homo sapiens
  CDR3 for alpha chain variable domain of TCR clone 100932 (TRAV4, TRAJ31)
CLVGLNARLMF

SEQ ID NO: 201864 - protein, 16 aa, Homo sapiens
  CDR3 for beta chain variable domain of TCR clone 100932 (TRBV15, TRBJ2-6)
CATSVNGGFLANVLTV

SEQ ID NO: 201865 - protein, 14 aa, Homo sapiens
  CDR3 for alpha chain variable domain of TCR clone 100933 (TRAV12-1, TRAJ43)
CVANGRSNNNDMRF

SEQ ID NO: 201866 - protein, 10 aa, Homo sapiens
  CDR3 for beta chain variable domain of TCR clone 100933 (TRBV28, TRBJ2-5)
CQQSSWTQYF

SEQ ID NO: 201867 - protein, 15 aa, Homo sapiens
  CDR3 for alpha chain variable domain of TCR clone 100934 (TRAV23/DV6, TRAJ18)
CAASFRGSALGRLYF

SEQ ID NO: 201868 - protein, 13 aa, Homo sapiens
  CDR3 for beta chain variable domain of TCR clone 100934 (TRBV28, TRBJ2-7)
CAILDRAGGEQYF

SEQ ID NO: 201869 - protein, 15 aa, Homo sapiens
  CDR3 for alpha chain variable domain of TCR clone 100935 (TRAV4, TRAJ39)
CLVGPNNNAGNMLAF

SEQ ID NO: 201870 - protein, 14 aa, Homo sapiens
  CDR3 for beta chain variable domain of TCR clone 100935 (TRBV19, TRBJ2-1)
CASPTFVLSGEQFF

SEQ ID NO: 201871 - protein, 14 aa, Homo sapiens
  CDR3 for alpha chain variable domain of TCR clone 100936 (TRAV12-2, TRAJ8)
CAVKENTGFQKLGF

SEQ ID NO: 201872 - protein, 13 aa, Homo sapiens
  CDR3 for beta chain variable domain of TCR clone 100936 (TRBV18, TRBJ1-2)
CASSASATEGYTF

SEQ ID NO: 201873 - protein, 16 aa, Homo sapiens
  CDR3 for alpha chain variable domain of TCR clone 100937 (TRAV38-1, TRAJ56)
CAFMKRQTGANSKLTF

SEQ ID NO: 201874 - protein, 14 aa, Homo sapiens
  CDR3 for beta chain variable domain of TCR clone 100937 (TRBV25-1, TRBJ1-1)
CASTHLGGNTEAFF

SEQ ID NO: 201875 - protein, 14 aa, Homo sapiens
  CDR3 for alpha chain variable domain of TCR clone 100938 (TRAV12-2, TRAJ45)
CAVNIGGGADGLTF

SEQ ID NO: 201876 - protein, 17 aa, Homo sapiens
  CDR3 for beta chain variable domain of TCR clone 100938 (TRBV18, TRBJ2-1)
CASSKGLSGGADNEQFF

SEQ ID NO: 201877 - protein, 15 aa, Homo sapiens
  CDR3 for alpha chain variable domain of TCR clone 100939 (TRAV17, TRAJ22)
CATVAPSGSARQLAF

SEQ ID NO: 201878 - protein, 14 aa, Homo sapiens
  CDR3 for beta chain variable domain of TCR clone 100939 (TRBV20-1, TRBJ1-5)
CSARDGGSGQPQHF

SEQ ID NO: 201879 - protein, 14 aa, Homo sapiens
  CDR3 for alpha chain variable domain of TCR clone 100940 (TRAV38-1, TRAJ31)
CAFMKHDNNARLMF

SEQ ID NO: 201880 - protein, 14 aa, Homo sapiens
  CDR3 for beta chain variable domain of TCR clone 100940 (TRBV23-1, TRBJ2-1)
SATATGPTYNEQFF

SEQ ID NO: 201881 - protein, 14 aa, Homo sapiens
  CDR3 for alpha chain variable domain of TCR clone 100941 (TRAV20, TRAJ32)
CCGRYGGATNKLIF

SEQ ID NO: 201882 - protein, 13 aa, Homo sapiens
  CDR3 for beta chain variable domain of TCR clone 100941 (TRBV7-9, TRBJ2-3)
CASSPGSTDTQYF

SEQ ID NO: 201883 - protein, 16 aa, Homo sapiens
  CDR3 for alpha chain variable domain of TCR clone 100942 (TRAV3, TRAJ10)
CAVRDMRAGGGNKLTF

SEQ ID NO: 201884 - protein, 16 aa, Homo sapiens
  CDR3 for beta chain variable domain of TCR clone 100942 (TRBV28, TRBJ1-2)
CASSLYGQEANYGYTF

SEQ ID NO: 201885 - protein, 17 aa, Homo sapiens
  CDR3 for alpha chain variable domain of TCR clone 100943 (TRAV3, TRAJ6)
CAVRDGPRAGGSYIPTF

SEQ ID NO: 201886 - protein, 15 aa, Homo sapiens
  CDR3 for beta chain variable domain of TCR clone 100943 (TRBV7-9, TRBJ1-6)
CASSSPGRGDSPLHF

SEQ ID NO: 201887 - protein, 13 aa, Homo sapiens
  CDR3 for alpha chain variable domain of TCR clone 100944 (TRAV40, TRAJ43)
SAVYYRPNNDMRF

SEQ ID NO: 201888 - protein, 13 aa, Homo sapiens
  CDR3 for beta chain variable domain of TCR clone 100944 (TRBV19, TRBJ2-7)
CASSIRSSYEQYF

SEQ ID NO: 201889 - protein, 13 aa, Homo sapiens
  CDR3 for alpha chain variable domain of TCR clone 100945 (TRAV12-1, TRAJ39)
CVARSGAGNMLTF

SEQ ID NO: 201890 - protein, 14 aa, Homo sapiens
  CDR3 for beta chain variable domain of TCR clone 100945 (TRBV2, TRBJ2-3)
CASSEGQNTDTQYF

SEQ ID NO: 201891 - protein, 14 aa, Homo sapiens
  CDR3 for alpha chain variable domain of TCR clone 100946 (TRAV20, TRAJ29)
CAVQAWVGNSPLVF

SEQ ID NO: 201892 - protein, 15 aa, Homo sapiens
  CDR3 for beta chain variable domain of TCR clone 100946 (TRBV29-1, TRBJ2-7)
CSVEFFDRGSYEQYF

SEQ ID NO: 201893 - protein, 15 aa, Homo sapiens
  CDR3 for alpha chain variable domain of TCR clone 100947 (TRAV12-3, TRAJ49)
CAMAVTPDTGNQFYF

SEQ ID NO: 201894 - protein, 18 aa, Homo sapiens
  CDR3 for beta chain variable domain of TCR clone 100947 (TRBV4-1, TRBJ1-5)
CASSQDPRGQGLNQPQHF

SEQ ID NO: 201895 - protein, 11 aa, Homo sapiens
  CDR3 for alpha chain variable domain of TCR clone 100948 (TRAV23/DV6, TRAJ48)
CAPRWREKLTF

SEQ ID NO: 201896 - protein, 13 aa, Homo sapiens
  CDR3 for beta chain variable domain of TCR clone 100948 (TRBV12-4, TRBJ2-5)
CASSPGTEETQYF

SEQ ID NO: 201897 - protein, 22 aa, Homo sapiens
  CDR3 for alpha chain variable domain of TCR clone 100949 (TRAV40, )
CLLGDGIPDIQNPDPAVYQLSD

SEQ ID NO: 201898 - protein, 16 aa, Homo sapiens
  CDR3 for beta chain variable domain of TCR clone 100949 (TRBV20-1, TRBJ1-5)
CSAELPGQQTNQPQHF

SEQ ID NO: 201899 - protein, 10 aa, Homo sapiens
  CDR3 for alpha chain variable domain of TCR clone 100950 (TRAV16, TRAJ22)
SAMYLRQLTF

SEQ ID NO: 201900 - protein, 12 aa, Homo sapiens
  CDR3 for beta chain variable domain of TCR clone 100950 (TRBV11-3, TRBJ2-2)
CASSLGGGELFF

SEQ ID NO: 201901 - protein, 17 aa, Homo sapiens
  CDR3 for alpha chain variable domain of TCR clone 100951 (TRAV36/DV7, TRAJ52)
CAVAQRAGGTSYGKLTF

SEQ ID NO: 201902 - protein, 12 aa, Homo sapiens
  CDR3 for beta chain variable domain of TCR clone 100951 (TRBV29-1, TRBJ2-3)
CSVTGGADTQYF

SEQ ID NO: 201903 - protein, 16 aa, Homo sapiens
  CDR3 for alpha chain variable domain of TCR clone 100952 (TRAV8-4, TRAJ5)
CAVSPLTDTGRSALTF

SEQ ID NO: 201904 - protein, 14 aa, Homo sapiens
  CDR3 for beta chain variable domain of TCR clone 100952 (TRBV19, TRBJ1-6)
CASSTDGWNSPLHF

SEQ ID NO: 201905 - protein, 15 aa, Homo sapiens
  CDR3 for alpha chain variable domain of TCR clone 100953 (TRAV2, TRAJ9)
CAVAALNTGGFKTIF

SEQ ID NO: 201906 - protein, 18 aa, Homo sapiens
  CDR3 for beta chain variable domain of TCR clone 100953 (TRBV11-2, TRBJ2-3)
CASSLGGASRGAPNTQYF

SEQ ID NO: 201907 - protein, 16 aa, Homo sapiens
  CDR3 for alpha chain variable domain of TCR clone 100954 (TRAV3, TRAJ10)
CAVRDMRAGGGNKLTF

SEQ ID NO: 201908 - protein, 15 aa, Homo sapiens
  CDR3 for beta chain variable domain of TCR clone 100954 (TRBV6-3, TRBJ2-2)
CASSFLATLTGELFF

SEQ ID NO: 201909 - protein, 13 aa, Homo sapiens
  CDR3 for alpha chain variable domain of TCR clone 100955 (TRAV2, TRAJ40)
CAVVTSGTYKYIF

SEQ ID NO: 201910 - protein, 15 aa, Homo sapiens
  CDR3 for beta chain variable domain of TCR clone 100955 (TRBV19, TRBJ2-3)
CAAGDTNAPNDTQYF

SEQ ID NO: 201911 - protein, 14 aa, Homo sapiens
  CDR3 for alpha chain variable domain of TCR clone 100956 (TRAV12-2, TRAJ17)
CAVNIKAAGDKLTF

SEQ ID NO: 201912 - protein, 16 aa, Homo sapiens
  CDR3 for beta chain variable domain of TCR clone 100956 (TRBV20-1, TRBJ2-6)
CSASSQGYDGANVLTF

SEQ ID NO: 201913 - protein, 13 aa, Homo sapiens
  CDR3 for alpha chain variable domain of TCR clone 100957 (TRAV27, TRAJ6)
CAGGTRGSYIPTF

SEQ ID NO: 201914 - protein, 15 aa, Homo sapiens
  CDR3 for beta chain variable domain of TCR clone 100957 (TRBV11-2, TRBJ1-3)
CACSLSPLVRDTIYF

SEQ ID NO: 201915 - protein, 13 aa, Homo sapiens
  CDR3 for alpha chain variable domain of TCR clone 100958 (TRAV2, TRAJ40)
CAVVTSGTYKYIF

SEQ ID NO: 201916 - protein, 15 aa, Homo sapiens
  CDR3 for beta chain variable domain of TCR clone 100958 (TRBV18, TRBJ1-1)
CASSPRQGENTEAVF

SEQ ID NO: 201917 - protein, 13 aa, Homo sapiens
  CDR3 for alpha chain variable domain of TCR clone 100959 (TRAV17, TRAJ9)
CATASTGGFKTIF

SEQ ID NO: 201918 - protein, 12 aa, Homo sapiens
  CDR3 for beta chain variable domain of TCR clone 100959 (TRBV12-4, TRBJ2-7)
CASSLGGYEQYF

SEQ ID NO: 201919 - protein, 13 aa, Homo sapiens
  CDR3 for alpha chain variable domain of TCR clone 100960 (TRAV21, TRAJ26)
CAVIGNYGQNFVF

SEQ ID NO: 201920 - protein, 15 aa, Homo sapiens
  CDR3 for beta chain variable domain of TCR clone 100960 (TRBV7-9, TRBJ1-5)
CASSQGHQPNQPQHF

SEQ ID NO: 201921 - protein, 16 aa, Homo sapiens
  CDR3 for alpha chain variable domain of TCR clone 100961 (TRAV13-1, TRAJ48)
CAASIFGNFGNEKLTF

SEQ ID NO: 201922 - protein, 14 aa, Homo sapiens
  CDR3 for beta chain variable domain of TCR clone 100961 (TRBV24-1, TRBJ1-1)
CATSIPRGDTEALF

SEQ ID NO: 201923 - protein, 14 aa, Homo sapiens
  CDR3 for alpha chain variable domain of TCR clone 100962 (TRAV17, TRAJ57)
CATDPQSGSEKLVF

SEQ ID NO: 201924 - protein, 18 aa, Homo sapiens
  CDR3 for beta chain variable domain of TCR clone 100962 (TRBV6-6, TRBJ1-3)
CASSYSKWDSISGNTIYF

SEQ ID NO: 201925 - protein, 15 aa, Homo sapiens
  CDR3 for alpha chain variable domain of TCR clone 100963 (TRAV34, TRAJ38)
CGADFTPGNNRKLIW

SEQ ID NO: 201926 - protein, 15 aa, Homo sapiens
  CDR3 for beta chain variable domain of TCR clone 100963 (TRBV5-1, TRBJ2-1)
CASSPPRAPYNEQFF

SEQ ID NO: 201927 - protein, 11 aa, Homo sapiens
  CDR3 for alpha chain variable domain of TCR clone 100964 (TRAV20, TRAJ34)
CTRDNTDKLIF

SEQ ID NO: 201928 - protein, 15 aa, Homo sapiens
  CDR3 for beta chain variable domain of TCR clone 100964 (TRBV2, TRBJ2-1)
CASSVTSEGTDEQFL

SEQ ID NO: 201929 - protein, 14 aa, Homo sapiens
  CDR3 for alpha chain variable domain of TCR clone 100965 (TRAV9-2, TRAJ39)
CALYIYDAGNMLTF

SEQ ID NO: 201930 - protein, 11 aa, Homo sapiens
  CDR3 for beta chain variable domain of TCR clone 100965 (TRBV29-1, TRBJ2-5)
CSEDRTGTQYF

SEQ ID NO: 201931 - protein, 15 aa, Homo sapiens
  CDR3 for alpha chain variable domain of TCR clone 100966 (TRAV21, TRAJ52)
FAVRGGGTSYGKLTF

SEQ ID NO: 201932 - protein, 15 aa, Homo sapiens
  CDR3 for beta chain variable domain of TCR clone 100966 (TRBV18, TRBJ1-5)
CASSPSDRSNQPQHF

SEQ ID NO: 201933 - protein, 12 aa, Homo sapiens
  CDR3 for alpha chain variable domain of TCR clone 100967 (TRAV8-3, TRAJ40)
CAVTSGTYKYIF

SEQ ID NO: 201934 - protein, 15 aa, Homo sapiens
  CDR3 for beta chain variable domain of TCR clone 100967 (TRBV20-1, TRBJ2-7)
CSARDRVSGMDEQYF

SEQ ID NO: 201935 - protein, 10 aa, Homo sapiens
  CDR3 for alpha chain variable domain of TCR clone 100968 (TRAV12-3, TRAJ49)
CAMNDDQFYF

SEQ ID NO: 201936 - protein, 13 aa, Homo sapiens
  CDR3 for beta chain variable domain of TCR clone 100968 (TRBV12-5, TRBJ2-3)
CASGDRQSDTQYF

SEQ ID NO: 201937 - protein, 15 aa, Homo sapiens
  CDR3 for alpha chain variable domain of TCR clone 100969 (TRAV21, TRAJ53)
CATLNSGGSNYKLTF

SEQ ID NO: 201938 - protein, 16 aa, Homo sapiens
  CDR3 for beta chain variable domain of TCR clone 100969 (TRBV9, TRBJ2-1)
CASSVGGGGNYYEQFF

SEQ ID NO: 201939 - protein, 16 aa, Homo sapiens
  CDR3 for alpha chain variable domain of TCR clone 100970 (TRAV26-1, TRAJ36)
CIVRAIGRPGANNLFF

SEQ ID NO: 201940 - protein, 14 aa, Homo sapiens
  CDR3 for beta chain variable domain of TCR clone 100970 (TRBV25-1, TRBJ2-1)
CASSKTGGYNEQFF

SEQ ID NO: 201941 - protein, 14 aa, Homo sapiens
  CDR3 for alpha chain variable domain of TCR clone 100971 (TRAV1-2, TRAJ16)
CAVNRFSDGQKLLF

SEQ ID NO: 201942 - protein, 12 aa, Homo sapiens
  CDR3 for beta chain variable domain of TCR clone 100971 (TRBV12-4, TRBJ2-1)
CASSLVRVEQFF

SEQ ID NO: 201943 - protein, 12 aa, Homo sapiens
  CDR3 for alpha chain variable domain of TCR clone 100972 (TRAV16, TRAJ56)
CAPTGANSKLTF

SEQ ID NO: 201944 - protein, 17 aa, Homo sapiens
  CDR3 for beta chain variable domain of TCR clone 100972 (TRBV27, TRBJ2-6)
CASSLTGFASGANVLTV

SEQ ID NO: 201945 - protein, 18 aa, Homo sapiens
  CDR3 for alpha chain variable domain of TCR clone 100973 (TRAV21, TRAJ52)
CAVRPSPAGGTSYGKLTF

SEQ ID NO: 201946 - protein, 13 aa, Homo sapiens
  CDR3 for beta chain variable domain of TCR clone 100973 (TRBV20-1, TRBJ2-2)
CSASAAGTGELFF

SEQ ID NO: 201947 - protein, 13 aa, Homo sapiens
  CDR3 for alpha chain variable domain of TCR clone 100974 (TRAV8-3, TRAJ48)
CAVVPFGNEKLTF

SEQ ID NO: 201948 - protein, 19 aa, Homo sapiens
  CDR3 for beta chain variable domain of TCR clone 100974 (TRBV25-1, TRBJ2-2)
RAILVYRVDRGRKTGELFF

SEQ ID NO: 201949 - protein, 15 aa, Homo sapiens
  CDR3 for alpha chain variable domain of TCR clone 100975 (TRAV21, TRAJ13)
CAVRPTSGGYQKVTF

SEQ ID NO: 201950 - protein, 18 aa, Homo sapiens
  CDR3 for beta chain variable domain of TCR clone 100975 (TRBV11-3, TRBJ2-1)
CASSSYPGGRDSYNERFF

SEQ ID NO: 201951 - protein, 15 aa, Homo sapiens
  CDR3 for alpha chain variable domain of TCR clone 100976 (TRAV17, TRAJ13)
CATDAGSGGYQKVTF

SEQ ID NO: 201952 - protein, 17 aa, Homo sapiens
  CDR3 for beta chain variable domain of TCR clone 100976 (TRBV11-2, TRBJ2-1)
CASSLYPPGVEYNEPFF

SEQ ID NO: 201953 - protein, 14 aa, Homo sapiens
  CDR3 for alpha chain variable domain of TCR clone 100977 (TRAV30, TRAJ33)
CGTVAPRSNYQLIW

SEQ ID NO: 201954 - protein, 19 aa, Homo sapiens
  CDR3 for beta chain variable domain of TCR clone 100977 (TRBV25-1, TRBJ2-2)
CAILVYRVDRGRKTGELFF

SEQ ID NO: 201955 - protein, 12 aa, Homo sapiens
  CDR3 for alpha chain variable domain of TCR clone 100978 (TRAV12-3, TRAJ17)
CAMTLTGNKLTF

SEQ ID NO: 201956 - protein, 11 aa, Homo sapiens
  CDR3 for beta chain variable domain of TCR clone 100978 (TRBV2, TRBJ1-1)
CASREGTEAFF

SEQ ID NO: 201957 - protein, 13 aa, Homo sapiens
  CDR3 for alpha chain variable domain of TCR clone 100979 (TRAV2, TRAJ40)
CAVVTSGTYKYIF

SEQ ID NO: 201958 - protein, 16 aa, Homo sapiens
  CDR3 for beta chain variable domain of TCR clone 100979 (TRBV7-3, TRBJ2-1)
CASSLVSGSSNNEQFF

SEQ ID NO: 201959 - protein, 13 aa, Homo sapiens
  CDR3 for alpha chain variable domain of TCR clone 100980 (TRAV3, TRAJ15)
CAVRDQAGTALIF

SEQ ID NO: 201960 - protein, 17 aa, Homo sapiens
  CDR3 for beta chain variable domain of TCR clone 100980 (TRBV28, TRBJ2-5)
CANSTPEGDALQETQYF

SEQ ID NO: 201961 - protein, 16 aa, Homo sapiens
  CDR3 for alpha chain variable domain of TCR clone 100981 (TRAV30, TRAJ57)
CGTGWAPQGGSEKLVF

SEQ ID NO: 201962 - protein, 16 aa, Homo sapiens
  CDR3 for beta chain variable domain of TCR clone 100981 (TRBV7-9, TRBJ1-2)
CASSLGFSSGEDGYTF

SEQ ID NO: 201963 - protein, 14 aa, Homo sapiens
  CDR3 for alpha chain variable domain of TCR clone 100982 (TRAV12-2, TRAJ13)
CAVKKTGGYQKVTF

SEQ ID NO: 201964 - protein, 15 aa, Homo sapiens
  CDR3 for beta chain variable domain of TCR clone 100982 (TRBV27, TRBJ2-1)
CASSFGAGTGPEQFF

SEQ ID NO: 201965 - protein, 15 aa, Homo sapiens
  CDR3 for alpha chain variable domain of TCR clone 100983 (TRAV8-3, TRAJ23)
CAVGDRYNQGGKLIF

SEQ ID NO: 201966 - protein, 22 aa, Homo sapiens
  CDR3 for beta chain variable domain of TCR clone 100983 (TRBV29-1, TRBJ2-5)
TVSNMSPEDSSIYLCSAGTQYL

SEQ ID NO: 201967 - protein, 18 aa, Homo sapiens
  CDR3 for alpha chain variable domain of TCR clone 100984 (TRAV12-3, TRAJ52)
CAMSRTKAGGTSYGKLTF

SEQ ID NO: 201968 - protein, 17 aa, Homo sapiens
  CDR3 for beta chain variable domain of TCR clone 100984 (TRBV7-3, TRBJ2-3)
CASSLMKRMRGADTQYF

SEQ ID NO: 201969 - protein, 12 aa, Homo sapiens
  CDR3 for alpha chain variable domain of TCR clone 100985 (TRAV2, TRAJ31)
SAVEDNNARLMF

SEQ ID NO: 201970 - protein, 14 aa, Homo sapiens
  CDR3 for beta chain variable domain of TCR clone 100985 (TRBV19, TRBJ2-5)
CASSMTGQQETQYF

SEQ ID NO: 201971 - protein, 14 aa, Homo sapiens
  CDR3 for alpha chain variable domain of TCR clone 100986 (TRAV12-1, TRAJ17)
CVVNYKAAGNKLTF

SEQ ID NO: 201972 - protein, 11 aa, Homo sapiens
  CDR3 for beta chain variable domain of TCR clone 100986 (TRBV7-8, TRBJ2-7)
CASSLSLEQYF

SEQ ID NO: 201973 - protein, 14 aa, Homo sapiens
  CDR3 for alpha chain variable domain of TCR clone 100987 (TRAV27, TRAJ23)
CAGLSYNQGGKLIF

SEQ ID NO: 201974 - protein, 16 aa, Homo sapiens
  CDR3 for beta chain variable domain of TCR clone 100987 (TRBV12-5, TRBJ2-5)
CASGPRTSGNQETQYF

SEQ ID NO: 201975 - protein, 12 aa, Homo sapiens
  CDR3 for alpha chain variable domain of TCR clone 100988 (TRAV3, TRAJ20)
CAVRDPDYKLSF

SEQ ID NO: 201976 - protein, 14 aa, Homo sapiens
  CDR3 for beta chain variable domain of TCR clone 100988 (TRBV4-2, TRBJ2-1)
CASGLDRAYNEQSF

SEQ ID NO: 201977 - protein, 13 aa, Homo sapiens
  CDR3 for alpha chain variable domain of TCR clone 100989 (TRAV27, TRAJ49)
CAPRPYTGNQFYF

SEQ ID NO: 201978 - protein, 16 aa, Homo sapiens
  CDR3 for beta chain variable domain of TCR clone 100989 (TRBV4-1, TRBJ1-2)
CASSQDAGQVLYGFTF

SEQ ID NO: 201979 - protein, 16 aa, Homo sapiens
  CDR3 for alpha chain variable domain of TCR clone 100990 (TRAV12-3, TRAJ45)
CAMGWGSGGGADGLTF

SEQ ID NO: 201980 - protein, 13 aa, Homo sapiens
  CDR3 for beta chain variable domain of TCR clone 100990 (TRBV27, TRBJ1-1)
CASSLSIGAEAFF

SEQ ID NO: 201981 - protein, 14 aa, Homo sapiens
  CDR3 for alpha chain variable domain of TCR clone 100991 (TRAV17, TRAJ48)
CATEGNFGNEKLTF

SEQ ID NO: 201982 - protein, 15 aa, Homo sapiens
  CDR3 for beta chain variable domain of TCR clone 100991 (TRBV7-9, TRBJ1-6)
CASSSPGRGNSPLHF

SEQ ID NO: 201983 - protein, 17 aa, Homo sapiens
  CDR3 for alpha chain variable domain of TCR clone 100992 (TRAV13-1, TRAJ28)
CAASPPYSGAGSYQLTF

SEQ ID NO: 201984 - protein, 19 aa, Homo sapiens
  CDR3 for beta chain variable domain of TCR clone 100992 (TRBV25-1, TRBJ2-2)
CAILVYRVDRGRKTGELFL

SEQ ID NO: 201985 - protein, 12 aa, Homo sapiens
  CDR3 for alpha chain variable domain of TCR clone 100993 (TRAV1-2, TRAJ9)
CAVYTGGFKTIF

SEQ ID NO: 201986 - protein, 15 aa, Homo sapiens
  CDR3 for beta chain variable domain of TCR clone 100993 (TRBV11-2, TRBJ2-1)
CASSPAGQSLNEQFF

SEQ ID NO: 201987 - protein, 14 aa, Homo sapiens
  CDR3 for alpha chain variable domain of TCR clone 100994 (TRAV27, TRAJ22)
CAGLPSGSARQLTF

SEQ ID NO: 201988 - protein, 15 aa, Homo sapiens
  CDR3 for beta chain variable domain of TCR clone 100994 (TRBV19, TRBJ1-1)
CASTSGQIQNTEAFF

SEQ ID NO: 201989 - protein, 18 aa, Homo sapiens
  CDR3 for alpha chain variable domain of TCR clone 100995 (TRAV12-3, TRAJ52)
CSMSVGGAGGTSYGKLTF

SEQ ID NO: 201990 - protein, 14 aa, Homo sapiens
  CDR3 for beta chain variable domain of TCR clone 100995 (TRBV7-2, TRBJ2-7)
CASRSQGAAYEQYF

SEQ ID NO: 201991 - protein, 14 aa, Homo sapiens
  CDR3 for alpha chain variable domain of TCR clone 100996 (TRAV17, TRAJ39)
FATDPVRAGNMLTF

SEQ ID NO: 201992 - protein, 15 aa, Homo sapiens
  CDR3 for beta chain variable domain of TCR clone 100996 (TRBV13, TRBJ1-5)
CASSFGQGGVQPQHF

SEQ ID NO: 201993 - protein, 16 aa, Homo sapiens
  CDR3 for alpha chain variable domain of TCR clone 100997 (TRAV30, TRAJ24)
CGTEIVDADSWGKFQF

SEQ ID NO: 201994 - protein, 14 aa, Homo sapiens
  CDR3 for beta chain variable domain of TCR clone 100997 (TRBV12-5, TRBJ2-5)
YASGSRTHQGTQYF

SEQ ID NO: 201995 - protein, 13 aa, Homo sapiens
  CDR3 for alpha chain variable domain of TCR clone 100998 (TRAV8-3, TRAJ36)
CAVGATGANNLFF

SEQ ID NO: 201996 - protein, 15 aa, Homo sapiens
  CDR3 for beta chain variable domain of TCR clone 100998 (TRBV28, TRBJ1-4)
CASSRSGTGSEKLFF

SEQ ID NO: 201997 - protein, 18 aa, Homo sapiens
  CDR3 for alpha chain variable domain of TCR clone 100999 (TRAV21, TRAJ52)
CAVRPSPAGGTSYGKLTF

SEQ ID NO: 201998 - protein, 13 aa, Homo sapiens
  CDR3 for beta chain variable domain of TCR clone 100999 (TRBV5-1, TRBJ2-1)
CASSLGSYNEQFF

SEQ ID NO: 201999 - protein, 16 aa, Homo sapiens
  CDR3 for alpha chain variable domain of TCR clone 101000 (TRAV16, TRAJ52)
CALSGVGGTSYGKLTF

SEQ ID NO: 202000 - protein, 14 aa, Homo sapiens
  CDR3 for beta chain variable domain of TCR clone 101000 (TRBV19, TRBJ1-2)
CASSLQGQAYSYTF

SEQ ID NO: 202001 - protein, 16 aa, Homo sapiens
  CDR3 for alpha chain variable domain of TCR clone 101001 (TRAV12-3, TRAJ53)
CAMSPGSGGSNYKLTF

SEQ ID NO: 202002 - protein, 16 aa, Homo sapiens
  CDR3 for beta chain variable domain of TCR clone 101001 (TRBV4-2, TRBJ1-1)
CASSQAGVGMNTEAFF

SEQ ID NO: 202003 - protein, 13 aa, Homo sapiens
  CDR3 for alpha chain variable domain of TCR clone 101002 (TRAV5, TRAJ30)
CAEIANRDDKIIF

SEQ ID NO: 202004 - protein, 13 aa, Homo sapiens
  CDR3 for beta chain variable domain of TCR clone 101002 (TRBV12-4, TRBJ1-2)
CASSLRQGKGYTF

SEQ ID NO: 202005 - protein, 14 aa, Homo sapiens
  CDR3 for alpha chain variable domain of TCR clone 101003 (TRAV8-4, TRAJ8)
CAVSLNTGFQQLVF

SEQ ID NO: 202006 - protein, 13 aa, Homo sapiens
  CDR3 for beta chain variable domain of TCR clone 101003 (TRBV7-9, TRBJ2-3)
CASSPGSTDTQYF

SEQ ID NO: 202007 - protein, 16 aa, Homo sapiens
  CDR3 for alpha chain variable domain of TCR clone 101004 (TRAV38-1, TRAJ45)
CAFMKGSGGGADGLTC

SEQ ID NO: 202008 - protein, 15 aa, Homo sapiens
  CDR3 for beta chain variable domain of TCR clone 101004 (TRBV20-1, TRBJ2-7)
CSAREGRDSLYEQYF

SEQ ID NO: 202009 - protein, 13 aa, Homo sapiens
  CDR3 for alpha chain variable domain of TCR clone 101005 (TRAV39, TRAJ33)
CAANPDSNYHLIW

SEQ ID NO: 202010 - protein, 13 aa, Homo sapiens
  CDR3 for beta chain variable domain of TCR clone 101005 (TRBV18, TRBJ1-1)
CASSGGRNTEAFF

SEQ ID NO: 202011 - protein, 13 aa, Homo sapiens
  CDR3 for alpha chain variable domain of TCR clone 101006 (TRAV35, TRAJ48)
CAGHEFGNEKLTF

SEQ ID NO: 202012 - protein, 16 aa, Homo sapiens
  CDR3 for beta chain variable domain of TCR clone 101006 (TRBV12-5, TRBJ2-5)
CASGPRTSGNQETQYV

SEQ ID NO: 202013 - protein, 14 aa, Homo sapiens
  CDR3 for alpha chain variable domain of TCR clone 101007 (TRAV29/DV5, TRAJ48)
CAAMALFGNEKLPF

SEQ ID NO: 202014 - protein, 15 aa, Homo sapiens
  CDR3 for beta chain variable domain of TCR clone 101007 (TRBV7-2, TRBJ2-1)
CASTHGTGIYNEQFF

SEQ ID NO: 202015 - protein, 11 aa, Homo sapiens
  CDR3 for alpha chain variable domain of TCR clone 101008 (TRAV8-3, TRAJ15)
CAVGPGTALIF

SEQ ID NO: 202016 - protein, 15 aa, Homo sapiens
  CDR3 for beta chain variable domain of TCR clone 101008 (TRBV7-9, TRBJ2-3)
CASSLALAEAYEQYF

SEQ ID NO: 202017 - protein, 13 aa, Homo sapiens
  CDR3 for alpha chain variable domain of TCR clone 101009 (TRAV12-1, TRAJ40)
CVVPTSGTYKYIF

SEQ ID NO: 202018 - protein, 18 aa, Homo sapiens
  CDR3 for beta chain variable domain of TCR clone 101009 (TRBV7-6, TRBJ2-1)
WASSPRTSGMSSYNEQFF

SEQ ID NO: 202019 - protein, 14 aa, Homo sapiens
  CDR3 for alpha chain variable domain of TCR clone 101010 (TRAV13-1, TRAJ26)
CEASSAHYGQNFVF

SEQ ID NO: 202020 - protein, 17 aa, Homo sapiens
  CDR3 for beta chain variable domain of TCR clone 101010 (TRBV25-1, TRBJ2-5)
CASSRRGGRGGQETQYF

SEQ ID NO: 202021 - protein, 14 aa, Homo sapiens
  CDR3 for alpha chain variable domain of TCR clone 101011 (TRAV20, TRAJ42)
CAVQAGGSQGNLIF

SEQ ID NO: 202022 - protein, 14 aa, Homo sapiens
  CDR3 for beta chain variable domain of TCR clone 101011 (TRBV28, TRBJ1-2)
CASRIKGANYGYTF

SEQ ID NO: 202023 - protein, 16 aa, Homo sapiens
  CDR3 for alpha chain variable domain of TCR clone 101012 (TRAV8-3, TRAJ44)
CAVGASNTGTASKLTF

SEQ ID NO: 202024 - protein, 15 aa, Homo sapiens
  CDR3 for beta chain variable domain of TCR clone 101012 (TRBV27, TRBJ1-5)
CASTFNRGSNKPQHF

SEQ ID NO: 202025 - protein, 11 aa, Homo sapiens
  CDR3 for alpha chain variable domain of TCR clone 101013 (TRAV13-2, TRAJ20)
CADSNDYKLSF

SEQ ID NO: 202026 - protein, 15 aa, Homo sapiens
  CDR3 for beta chain variable domain of TCR clone 101013 (TRBV4-1, TRBJ1-4)
CASSGTGGTNEKLFF

SEQ ID NO: 202027 - protein, 13 aa, Homo sapiens
  CDR3 for alpha chain variable domain of TCR clone 101014 (TRAV12-2, TRAJ39)
CAVNNNAGNMLTF

SEQ ID NO: 202028 - protein, 13 aa, Homo sapiens
  CDR3 for beta chain variable domain of TCR clone 101014 (TRBV4-1, TRBJ2-2)
CASSQENTGELFF

SEQ ID NO: 202029 - protein, 13 aa, Homo sapiens
  CDR3 for alpha chain variable domain of TCR clone 101015 (TRAV12-1, TRAJ16)
CVVNGPGGQKLLF

SEQ ID NO: 202030 - protein, 13 aa, Homo sapiens
  CDR3 for beta chain variable domain of TCR clone 101015 (TRBV2, TRBJ1-1)
CARNPTGGFHAFF

SEQ ID NO: 202031 - protein, 14 aa, Homo sapiens
  CDR3 for alpha chain variable domain of TCR clone 101016 (TRAV1-2, TRAJ8)
CAVREDTGFQKLVF

SEQ ID NO: 202032 - protein, 14 aa, Homo sapiens
  CDR3 for beta chain variable domain of TCR clone 101016 (TRBV18, TRBJ1-4)
CASSPGPNGEKLFF

SEQ ID NO: 202033 - protein, 16 aa, Homo sapiens
  CDR3 for alpha chain variable domain of TCR clone 101017 (TRAV8-6, TRAJ32)
CAVSDPYGGATNKLIF

SEQ ID NO: 202034 - protein, 14 aa, Homo sapiens
  CDR3 for beta chain variable domain of TCR clone 101017 (TRBV18, TRBJ1-5)
CASSPGNSNQPQHF

SEQ ID NO: 202035 - protein, 15 aa, Homo sapiens
  CDR3 for alpha chain variable domain of TCR clone 101018 (TRAV21, TRAJ52)
CAVRGGGTSYGKLTF

SEQ ID NO: 202036 - protein, 15 aa, Homo sapiens
  CDR3 for beta chain variable domain of TCR clone 101018 (TRBV18, TRBJ1-5)
CASSPSDRSKQPQHF

SEQ ID NO: 202037 - protein, 14 aa, Homo sapiens
  CDR3 for alpha chain variable domain of TCR clone 101019 (TRAV1-2, TRAJ16)
CAVNRLSDGQKLIF

SEQ ID NO: 202038 - protein, 16 aa, Homo sapiens
  CDR3 for beta chain variable domain of TCR clone 101019 (TRBV6-1, TRBJ2-5)
CASSETLDRGAETQYF

SEQ ID NO: 202039 - protein, 14 aa, Homo sapiens
  CDR3 for alpha chain variable domain of TCR clone 101020 (TRAV12-3, TRAJ10)
SHLPLTGGGNKLNF

SEQ ID NO: 202040 - protein, 15 aa, Homo sapiens
  CDR3 for beta chain variable domain of TCR clone 101020 (TRBV7-9, TRBJ1-6)
CASSSPGRGNSPLHF

SEQ ID NO: 202041 - protein, 15 aa, Homo sapiens
  CDR3 for alpha chain variable domain of TCR clone 101021 (TRAV3, TRAJ20)
CAVRDIKLSDYMLSF

SEQ ID NO: 202042 - protein, 15 aa, Homo sapiens
  CDR3 for beta chain variable domain of TCR clone 101021 (TRBV7-9, TRBJ1-6)
CASSSPGRGNSPLHF

SEQ ID NO: 202043 - protein, 12 aa, Homo sapiens
  CDR3 for alpha chain variable domain of TCR clone 101022 (TRAV1-2, TRAJ24)
CAVGGSWGKFQF

SEQ ID NO: 202044 - protein, 15 aa, Homo sapiens
  CDR3 for beta chain variable domain of TCR clone 101022 (TRBV6-1, TRBJ2-7)
CASSEGVGNPYEQYV

SEQ ID NO: 202045 - protein, 12 aa, Homo sapiens
  CDR3 for alpha chain variable domain of TCR clone 101023 (TRAV12-3, TRAJ17)
CAMTLTGNKLTF

SEQ ID NO: 202046 - protein, 13 aa, Homo sapiens
  CDR3 for beta chain variable domain of TCR clone 101023 (TRBV7-6, TRBJ2-1)
CASSPLTYNEQFF

SEQ ID NO: 202047 - protein, 16 aa, Homo sapiens
  CDR3 for alpha chain variable domain of TCR clone 101024 (TRAV1-2, TRAJ10)
CAVRGVLTGGGNKLTF

SEQ ID NO: 202048 - protein, 12 aa, Homo sapiens
  CDR3 for beta chain variable domain of TCR clone 101024 (TRBV7-8, TRBJ2-7)
SASSLGDREQYF

SEQ ID NO: 202049 - protein, 14 aa, Homo sapiens
  CDR3 for alpha chain variable domain of TCR clone 101025 (TRAV26-1, TRAJ39)
CIVRGSRPGNMLTF

SEQ ID NO: 202050 - protein, 15 aa, Homo sapiens
  CDR3 for beta chain variable domain of TCR clone 101025 (TRBV7-9, TRBJ1-5)
CASSQGHQPNQPQHF

SEQ ID NO: 202051 - protein, 13 aa, Homo sapiens
  CDR3 for alpha chain variable domain of TCR clone 101026 (TRAV22, TRAJ26)
CAEEHNYGQNFVF

SEQ ID NO: 202052 - protein, 16 aa, Homo sapiens
  CDR3 for beta chain variable domain of TCR clone 101026 (TRBV7-2, TRBJ2-6)
CASSERRASGANVLTF

SEQ ID NO: 202053 - protein, 14 aa, Homo sapiens
  CDR3 for alpha chain variable domain of TCR clone 101027 (TRAV1-2, TRAJ16)
CAVNRFSDGQKLLF

SEQ ID NO: 202054 - protein, 12 aa, Homo sapiens
  CDR3 for beta chain variable domain of TCR clone 101027 (TRBV12-4, TRBJ1-1)
CASSLAGLEAFF

SEQ ID NO: 202055 - protein, 12 aa, Homo sapiens
  CDR3 for alpha chain variable domain of TCR clone 101028 (TRAV1-1, TRAJ39)
CAVPVVGTMLTF

SEQ ID NO: 202056 - protein, 17 aa, Homo sapiens
  CDR3 for beta chain variable domain of TCR clone 101028 (TRBV28, TRBJ2-5)
CASSTPEGDALQETQYF

SEQ ID NO: 202057 - protein, 23 aa, Homo sapiens
  CDR3 for alpha chain variable domain of TCR clone 101029 (TRAV30, TRAJ43)
CTLRPPSSVTQEPTSAALSDIRF

SEQ ID NO: 202058 - protein, 13 aa, Homo sapiens
  CDR3 for beta chain variable domain of TCR clone 101029 (TRBV12-4, TRBJ2-2)
CASSITGSGELFF

SEQ ID NO: 202059 - protein, 14 aa, Homo sapiens
  CDR3 for alpha chain variable domain of TCR clone 101030 (TRAV12-2, TRAJ40)
CAGKIPSGAYKYIF

SEQ ID NO: 202060 - protein, 14 aa, Homo sapiens
  CDR3 for beta chain variable domain of TCR clone 101030 (TRBV20-1, TRBJ1-1)
CSAQTRIGGTEAFF

SEQ ID NO: 202061 - protein, 15 aa, Homo sapiens
  CDR3 for alpha chain variable domain of TCR clone 101031 (TRAV2, TRAJ9)
CAVEDRGTGGFKTIF

SEQ ID NO: 202062 - protein, 16 aa, Homo sapiens
  CDR3 for beta chain variable domain of TCR clone 101031 (TRBV24-1, TRBJ2-3)
CATSDPGTGATDTQYI

SEQ ID NO: 202063 - protein, 12 aa, Homo sapiens
  CDR3 for alpha chain variable domain of TCR clone 101032 (TRAV13-1, TRAJ49)
CVAPNTGNQFYF

SEQ ID NO: 202064 - protein, 17 aa, Homo sapiens
  CDR3 for beta chain variable domain of TCR clone 101032 (TRBV25-1, TRBJ2-7)
CASSDARVVFSSYEQYF

SEQ ID NO: 202065 - protein, 13 aa, Homo sapiens
  CDR3 for alpha chain variable domain of TCR clone 101033 (TRAV12-1, TRAJ6)
CVVFPGGSYIPTF

SEQ ID NO: 202066 - protein, 14 aa, Homo sapiens
  CDR3 for beta chain variable domain of TCR clone 101033 (TRBV25-1, TRBJ1-1)
CASTHLGGNTEAFF

SEQ ID NO: 202067 - protein, 12 aa, Homo sapiens
  CDR3 for alpha chain variable domain of TCR clone 101034 (TRAV27, TRAJ13)
CVGAGGYQKVTF

SEQ ID NO: 202068 - protein, 15 aa, Homo sapiens
  CDR3 for beta chain variable domain of TCR clone 101034 (TRBV20-1, TRBJ2-6)
CSARDRGPGANVLTF

SEQ ID NO: 202069 - protein, 14 aa, Homo sapiens
  CDR3 for alpha chain variable domain of TCR clone 101035 (TRAV12-3, TRAJ57)
CAMSAWGGSEKLVF

SEQ ID NO: 202070 - protein, 13 aa, Homo sapiens
  CDR3 for beta chain variable domain of TCR clone 101035 (TRBV4-2, TRBJ1-1)
CASSQAGNTEAFF

SEQ ID NO: 202071 - protein, 14 aa, Homo sapiens
  CDR3 for alpha chain variable domain of TCR clone 101036 (TRAV9-2, TRAJ39)
CALYIYNAGNMLTF

SEQ ID NO: 202072 - protein, 15 aa, Homo sapiens
  CDR3 for beta chain variable domain of TCR clone 101036 (TRBV19, TRBJ2-1)
CASSIVEGGYNEQFF

SEQ ID NO: 202073 - protein, 16 aa, Homo sapiens
  CDR3 for alpha chain variable domain of TCR clone 101037 (TRAV3, TRAJ37)
CAVRGKGSGNTGKLIF

SEQ ID NO: 202074 - protein, 13 aa, Homo sapiens
  CDR3 for beta chain variable domain of TCR clone 101037 (TRBV14, TRBJ2-7)
CASSQDRRYEQHF

SEQ ID NO: 202075 - protein, 12 aa, Homo sapiens
  CDR3 for alpha chain variable domain of TCR clone 101038 (TRAV12-3, TRAJ17)
CAMTLTGNKLTF

SEQ ID NO: 202076 - protein, 14 aa, Homo sapiens
  CDR3 for beta chain variable domain of TCR clone 101038 (TRBV20-1, TRBJ2-1)
CSAQIGGSANDQFF

SEQ ID NO: 202077 - protein, 19 aa, Homo sapiens
  CDR3 for alpha chain variable domain of TCR clone 101039 (TRAV26-2, TRAJ13)
CCVLLHPERSFWGYQKVTF

SEQ ID NO: 202078 - protein, 11 aa, Homo sapiens
  CDR3 for beta chain variable domain of TCR clone 101039 (TRBV7-9, TRBJ2-5)
CASSLSATQYF

SEQ ID NO: 202079 - protein, 13 aa, Homo sapiens
  CDR3 for alpha chain variable domain of TCR clone 101040 (TRAV12-2, TRAJ39)
CAVNNNAGNMLTF

SEQ ID NO: 202080 - protein, 14 aa, Homo sapiens
  CDR3 for beta chain variable domain of TCR clone 101040 (TRBV20-1, TRBJ1-1)
CSAQTRIGGTEAFF

SEQ ID NO: 202081 - protein, 18 aa, Homo sapiens
  CDR3 for alpha chain variable domain of TCR clone 101041 (TRAV12-3, TRAJ52)
CAMSRTNAGGTSYGKLTF

SEQ ID NO: 202082 - protein, 14 aa, Homo sapiens
  CDR3 for beta chain variable domain of TCR clone 101041 (TRBV25-1, TRBJ1-1)
CASTHLGGNTEAFF

SEQ ID NO: 202083 - protein, 18 aa, Homo sapiens
  CDR3 for alpha chain variable domain of TCR clone 101042 (TRAV8-3, TRAJ4)
WVRDPTSNDPGGYNKLIF

SEQ ID NO: 202084 - protein, 13 aa, Homo sapiens
  CDR3 for beta chain variable domain of TCR clone 101042 (TRBV20-1, TRBJ1-2)
CSASGIQGSGYTF

SEQ ID NO: 202085 - protein, 15 aa, Homo sapiens
  CDR3 for alpha chain variable domain of TCR clone 101043 (TRAV3, TRAJ5)
CAVRDRKTGRRALTF

SEQ ID NO: 202086 - protein, 15 aa, Homo sapiens
  CDR3 for beta chain variable domain of TCR clone 101043 (TRBV7-8, TRBJ2-1)
SASSLADSLYNEQFF

SEQ ID NO: 202087 - protein, 11 aa, Homo sapiens
  CDR3 for alpha chain variable domain of TCR clone 101044 (TRAV38-1, TRAJ53)
CAFMKHGPESG

SEQ ID NO: 202088 - protein, 13 aa, Homo sapiens
  CDR3 for beta chain variable domain of TCR clone 101044 (TRBV19, TRBJ2-7)
CASSPRQSYEQYF

SEQ ID NO: 202089 - protein, 16 aa, Homo sapiens
  CDR3 for alpha chain variable domain of TCR clone 101045 (TRAV16, TRAJ57)
CAPYLITQGGSEKLVF

SEQ ID NO: 202090 - protein, 17 aa, Homo sapiens
  CDR3 for beta chain variable domain of TCR clone 101045 (TRBV24-1, TRBJ2-4)
CATSDAEARGVRNIQYL

SEQ ID NO: 202091 - protein, 14 aa, Homo sapiens
  CDR3 for alpha chain variable domain of TCR clone 101046 (TRAV12-2, TRAJ5)
CAVNRSTGRRALTF

SEQ ID NO: 202092 - protein, 14 aa, Homo sapiens
  CDR3 for beta chain variable domain of TCR clone 101046 (TRBV5-1, TRBJ2-3)
CASSRGQGGGTQYF

SEQ ID NO: 202093 - protein, 13 aa, Homo sapiens
  CDR3 for alpha chain variable domain of TCR clone 101047 (TRAV13-1, TRAJ52)
CASLGASYGKLTF

SEQ ID NO: 202094 - protein, 14 aa, Homo sapiens
  CDR3 for beta chain variable domain of TCR clone 101047 (TRBV7-8, TRBJ2-3)
CASSFPDGQDTQYF

SEQ ID NO: 202095 - protein, 12 aa, Homo sapiens
  CDR3 for alpha chain variable domain of TCR clone 101048 (TRAV21, TRAJ49)
CAVRNTGNQFYF

SEQ ID NO: 202096 - protein, 12 aa, Homo sapiens
  CDR3 for beta chain variable domain of TCR clone 101048 (TRBV7-9, TRBJ2-7)
CASRTDAYEQYF

SEQ ID NO: 202097 - protein, 14 aa, Homo sapiens
  CDR3 for alpha chain variable domain of TCR clone 101049 (TRAV13-2, TRAJ26)
CAENLGNYGQNFVF

SEQ ID NO: 202098 - protein, 14 aa, Homo sapiens
  CDR3 for beta chain variable domain of TCR clone 101049 (TRBV19, TRBJ1-3)
CASNRGNSGNTMYF

SEQ ID NO: 202099 - protein, 15 aa, Homo sapiens
  CDR3 for alpha chain variable domain of TCR clone 101050 (TRAV12-1, TRAJ9)
CVVSFGDTGGFKTIF

SEQ ID NO: 202100 - protein, 15 aa, Homo sapiens
  CDR3 for beta chain variable domain of TCR clone 101050 (TRBV20-1, TRBJ2-4)
CSVTTGLLAKNIQYF

SEQ ID NO: 202101 - protein, 14 aa, Homo sapiens
  CDR3 for alpha chain variable domain of TCR clone 101051 (TRAV12-3, TRAJ6)
CAMSATGGSYIPTF

SEQ ID NO: 202102 - protein, 16 aa, Homo sapiens
  CDR3 for beta chain variable domain of TCR clone 101051 (TRBV4-2, TRBJ2-1)
CASSPRAGQGDNEQFF

SEQ ID NO: 202103 - protein, 17 aa, Homo sapiens
  CDR3 for alpha chain variable domain of TCR clone 101052 (TRAV17, TRAJ7)
CATLGRLAFGKGNQVVV

SEQ ID NO: 202104 - protein, 13 aa, Homo sapiens
  CDR3 for beta chain variable domain of TCR clone 101052 (TRBV12-4, TRBJ2-7)
CASRLERVREQYF

SEQ ID NO: 202105 - protein, 13 aa, Homo sapiens
  CDR3 for alpha chain variable domain of TCR clone 101053 (TRAV13-1, TRAJ21)
CAASIYNFNKFYF

SEQ ID NO: 202106 - protein, 15 aa, Homo sapiens
  CDR3 for beta chain variable domain of TCR clone 101053 (TRBV4-2, TRBJ1-2)
CASSQRTGGRDGYTF

SEQ ID NO: 202107 - protein, 13 aa, Homo sapiens
  CDR3 for alpha chain variable domain of TCR clone 101054 (TRAV2, TRAJ40)
CAVVTSGTYKYIF

SEQ ID NO: 202108 - protein, 15 aa, Homo sapiens
  CDR3 for beta chain variable domain of TCR clone 101054 (TRBV2, TRBJ2-2)
CASSRETVGTGELFF

SEQ ID NO: 202109 - protein, 14 aa, Homo sapiens
  CDR3 for alpha chain variable domain of TCR clone 101055 (TRAV16, TRAJ31)
CSKWRRGDNARPMF

SEQ ID NO: 202110 - protein, 16 aa, Homo sapiens
  CDR3 for beta chain variable domain of TCR clone 101055 (TRBV28, TRBJ2-7)
CASSLFFETGGPEQYF

SEQ ID NO: 202111 - protein, 13 aa, Homo sapiens
  CDR3 for alpha chain variable domain of TCR clone 101056 (TRAV12-3, TRAJ13)
CAMSSGGYQKVTF

SEQ ID NO: 202112 - protein, 15 aa, Homo sapiens
  CDR3 for beta chain variable domain of TCR clone 101056 (TRBV5-1, TRBJ2-2)
CASSSQGGNTGELFF

SEQ ID NO: 202113 - protein, 13 aa, Homo sapiens
  CDR3 for alpha chain variable domain of TCR clone 101057 (TRAV12-1, TRAJ7)
CVVTMRGNNRLAF

SEQ ID NO: 202114 - protein, 15 aa, Homo sapiens
  CDR3 for beta chain variable domain of TCR clone 101057 (TRBV27, TRBJ2-3)
CASSLGLAATDTQYF

SEQ ID NO: 202115 - protein, 15 aa, Homo sapiens
  CDR3 for alpha chain variable domain of TCR clone 101058 (TRAV20, TRAJ53)
CAVQASGGSNYKLTF

SEQ ID NO: 202116 - protein, 12 aa, Homo sapiens
  CDR3 for beta chain variable domain of TCR clone 101058 (TRBV7-6, TRBJ2-5)
CASSLSQETQFF

SEQ ID NO: 202117 - protein, 14 aa, Homo sapiens
  CDR3 for alpha chain variable domain of TCR clone 101059 (TRAV12-1, TRAJ17)
CVVNYKAAGNKLTF

SEQ ID NO: 202118 - protein, 14 aa, Homo sapiens
  CDR3 for beta chain variable domain of TCR clone 101059 (TRBV7-2, TRBJ2-7)
CASSPKTSSYEQYF

SEQ ID NO: 202119 - protein, 14 aa, Homo sapiens
  CDR3 for alpha chain variable domain of TCR clone 101060 (TRAV1-1, TRAJ23)
CAVSVYNQGGKLIF

SEQ ID NO: 202120 - protein, 17 aa, Homo sapiens
  CDR3 for beta chain variable domain of TCR clone 101060 (TRBV5-1, TRBJ2-2)
CASSEKPNFANTGELFF

SEQ ID NO: 202121 - protein, 16 aa, Homo sapiens
  CDR3 for alpha chain variable domain of TCR clone 101061 (TRAV23/DV6, TRAJ9)
CAASIGGNTGGFKTIF

SEQ ID NO: 202122 - protein, 18 aa, Homo sapiens
  CDR3 for beta chain variable domain of TCR clone 101061 (TRBV7-9, TRBJ2-7)
CASSLTTSGSRTWYEKYF

SEQ ID NO: 202123 - protein, 14 aa, Homo sapiens
  CDR3 for alpha chain variable domain of TCR clone 101062 (TRAV12-2, TRAJ17)
CADLFKAAGNKLTF

SEQ ID NO: 202124 - protein, 16 aa, Homo sapiens
  CDR3 for beta chain variable domain of TCR clone 101062 (TRBV20-1, TRBJ2-2)
CSASASGIPGAGELFF

SEQ ID NO: 202125 - protein, 17 aa, Homo sapiens
  CDR3 for alpha chain variable domain of TCR clone 101063 (TRAV3, TRAJ42)
CAVRDRDYGGSQGNLIF

SEQ ID NO: 202126 - protein, 15 aa, Homo sapiens
  CDR3 for beta chain variable domain of TCR clone 101063 (TRBV12-4, TRBJ2-1)
CASSLLATGNNEQFF

SEQ ID NO: 202127 - protein, 13 aa, Homo sapiens
  CDR3 for alpha chain variable domain of TCR clone 101064 (TRAV21, TRAJ27)
CAARPGNAGKSTF

SEQ ID NO: 202128 - protein, 17 aa, Homo sapiens
  CDR3 for beta chain variable domain of TCR clone 101064 (TRBV15, TRBJ1-4)
CATSRYGTGDPNEKLFF

SEQ ID NO: 202129 - protein, 16 aa, Homo sapiens
  CDR3 for alpha chain variable domain of TCR clone 101065 (TRAV14/DV4, TRAJ53)
CAMREGGGGSNYKLTF

SEQ ID NO: 202130 - protein, 15 aa, Homo sapiens
  CDR3 for beta chain variable domain of TCR clone 101065 (TRBV3-1, TRBJ2-1)
CASSQQPSGGNEQFF

SEQ ID NO: 202131 - protein, 15 aa, Homo sapiens
  CDR3 for alpha chain variable domain of TCR clone 101066 (TRAV12-3, TRAJ27)
FAMRAYNTNAGKSTF

SEQ ID NO: 202132 - protein, 13 aa, Homo sapiens
  CDR3 for beta chain variable domain of TCR clone 101066 (TRBV11-2, TRBJ2-5)
CASSRGPSETQYF

SEQ ID NO: 202133 - protein, 16 aa, Homo sapiens
  CDR3 for alpha chain variable domain of TCR clone 101067 (TRAV30, TRAJ24)
CGSEIVDADSWGKFQF

SEQ ID NO: 202134 - protein, 15 aa, Homo sapiens
  CDR3 for beta chain variable domain of TCR clone 101067 (TRBV7-9, TRBJ1-4)
CASSARTGGNEKLFF

SEQ ID NO: 202135 - protein, 15 aa, Homo sapiens
  CDR3 for alpha chain variable domain of TCR clone 101068 (TRAV9-2, TRAJ39)
CALSDRNNAGNMFTF

SEQ ID NO: 202136 - protein, 15 aa, Homo sapiens
  CDR3 for beta chain variable domain of TCR clone 101068 (TRBV10-3, TRBJ2-2)
CAISPGRTNTGELFF

SEQ ID NO: 202137 - protein, 15 aa, Homo sapiens
  CDR3 for alpha chain variable domain of TCR clone 101069 (TRAV13-1, TRAJ17)
CAASIERAAGNKLTS

SEQ ID NO: 202138 - protein, 15 aa, Homo sapiens
  CDR3 for beta chain variable domain of TCR clone 101069 (TRBV6-1, TRBJ2-3)
CASSERGGITDTQYF

SEQ ID NO: 202139 - protein, 14 aa, Homo sapiens
  CDR3 for alpha chain variable domain of TCR clone 101070 (TRAV3, TRAJ6)
CAVRDWGVSYIPTF

SEQ ID NO: 202140 - protein, 17 aa, Homo sapiens
  CDR3 for beta chain variable domain of TCR clone 101070 (TRBV6-5, TRBJ2-1)
CASRLSGRFESYNEQFF

SEQ ID NO: 202141 - protein, 11 aa, Homo sapiens
  CDR3 for alpha chain variable domain of TCR clone 101071 (TRAV1-1, TRAJ23)
CAARQGGKLIF

SEQ ID NO: 202142 - protein, 20 aa, Homo sapiens
  CDR3 for beta chain variable domain of TCR clone 101071 (TRBV7-8, TRBJ2-2)
CASSHLFPGPTVHITGELFF

SEQ ID NO: 202143 - protein, 13 aa, Homo sapiens
  CDR3 for alpha chain variable domain of TCR clone 101072 (TRAV16, TRAJ28)
CALTGAGSYQLTF

SEQ ID NO: 202144 - protein, 16 aa, Homo sapiens
  CDR3 for beta chain variable domain of TCR clone 101072 (TRBV28, TRBJ1-5)
CASSLTGQGRNQPQHF

SEQ ID NO: 202145 - protein, 13 aa, Homo sapiens
  CDR3 for alpha chain variable domain of TCR clone 101073 (TRAV13-2, TRAJ48)
CAEMDFGNEKLTF

SEQ ID NO: 202146 - protein, 14 aa, Homo sapiens
  CDR3 for beta chain variable domain of TCR clone 101073 (TRBV7-3, TRBJ2-1)
CQQPTGGALIEQFF

SEQ ID NO: 202147 - protein, 13 aa, Homo sapiens
  CDR3 for alpha chain variable domain of TCR clone 101074 (TRAV27, TRAJ45)
CRSSGGGAAGLTF

SEQ ID NO: 202148 - protein, 15 aa, Homo sapiens
  CDR3 for beta chain variable domain of TCR clone 101074 (TRBV20-1, TRBJ2-7)
CSARDRVSGMDEQYF

SEQ ID NO: 202149 - protein, 15 aa, Homo sapiens
  CDR3 for alpha chain variable domain of TCR clone 101075 (TRAV3, TRAJ22)
CAVRDRGGSARQRTF

SEQ ID NO: 202150 - protein, 13 aa, Homo sapiens
  CDR3 for beta chain variable domain of TCR clone 101075 (TRBV2, TRBJ1-5)
CATAGPGNQPQHF

SEQ ID NO: 202151 - protein, 12 aa, Homo sapiens
  CDR3 for alpha chain variable domain of TCR clone 101076 (TRAV8-3, TRAJ20)
CAVDFNDYKPSF

SEQ ID NO: 202152 - protein, 13 aa, Homo sapiens
  CDR3 for beta chain variable domain of TCR clone 101076 (TRBV5-7, TRBJ2-3)
CASSLGRTDTQYF

SEQ ID NO: 202153 - protein, 15 aa, Homo sapiens
  CDR3 for alpha chain variable domain of TCR clone 101077 (TRAV3, TRAJ4)
CAVRDGTGGYNKLIF

SEQ ID NO: 202154 - protein, 12 aa, Homo sapiens
  CDR3 for beta chain variable domain of TCR clone 101077 (TRBV28, TRBJ2-3)
CASSLYRDTQYF

SEQ ID NO: 202155 - protein, 14 aa, Homo sapiens
  CDR3 for alpha chain variable domain of TCR clone 101078 (TRAV26-1, TRAJ45)
CIVRVVGGADGLTF

SEQ ID NO: 202156 - protein, 16 aa, Homo sapiens
  CDR3 for beta chain variable domain of TCR clone 101078 (TRBV7-9, TRBJ1-1)
CASSLTQVRSNTEDFF

SEQ ID NO: 202157 - protein, 18 aa, Homo sapiens
  CDR3 for alpha chain variable domain of TCR clone 101079 (TRAV21, TRAJ52)
CAVRPSPAGGTSYGKLTF

SEQ ID NO: 202158 - protein, 15 aa, Homo sapiens
  CDR3 for beta chain variable domain of TCR clone 101079 (TRBV15, TRBJ1-5)
CATSRDPVSNQPQHF

SEQ ID NO: 202159 - protein, 11 aa, Homo sapiens
  CDR3 for alpha chain variable domain of TCR clone 101080 (TRAV2, TRAJ13)
CASGGYQKVTF

SEQ ID NO: 202160 - protein, 16 aa, Homo sapiens
  CDR3 for beta chain variable domain of TCR clone 101080 (TRBV7-2, TRBJ1-6)
CASSLAPGNLNSPLHF

SEQ ID NO: 202161 - protein, 13 aa, Homo sapiens
  CDR3 for alpha chain variable domain of TCR clone 101081 (TRAV12-2, TRAJ52)
CAVSGTSYRKLTF

SEQ ID NO: 202162 - protein, 17 aa, Homo sapiens
  CDR3 for beta chain variable domain of TCR clone 101081 (TRBV11-2, TRBJ2-1)
CASSLYPPGVEYNEQFF

SEQ ID NO: 202163 - protein, 11 aa, Homo sapiens
  CDR3 for alpha chain variable domain of TCR clone 101082 (TRAV12-1, TRAJ8)
CVVTGFQKLVF

SEQ ID NO: 202164 - protein, 15 aa, Homo sapiens
  CDR3 for beta chain variable domain of TCR clone 101082 (TRBV27, TRBJ2-1)
CASSNGGGSSNEQFF

SEQ ID NO: 202165 - protein, 11 aa, Homo sapiens
  CDR3 for alpha chain variable domain of TCR clone 101083 (TRAV8-4, TRAJ52)
AGGTSYGKLTF

SEQ ID NO: 202166 - protein, 14 aa, Homo sapiens
  CDR3 for beta chain variable domain of TCR clone 101083 (TRBV7-2, TRBJ2-7)
CASSPKTSFYEQYF

SEQ ID NO: 202167 - protein, 16 aa, Homo sapiens
  CDR3 for alpha chain variable domain of TCR clone 101084 (TRAV12-2, TRAJ32)
CAVNLGQGGATNKLIF

SEQ ID NO: 202168 - protein, 15 aa, Homo sapiens
  CDR3 for beta chain variable domain of TCR clone 101084 (TRBV20-1, TRBJ2-7)
CSARGPLAGGSEQYF

SEQ ID NO: 202169 - protein, 12 aa, Homo sapiens
  CDR3 for alpha chain variable domain of TCR clone 101085 (TRAV13-2, TRAJ23)
CAERHRGGKLIL

SEQ ID NO: 202170 - protein, 13 aa, Homo sapiens
  CDR3 for beta chain variable domain of TCR clone 101085 (TRBV7-9, TRBJ1-2)
CASSLKQNYGYTF

SEQ ID NO: 202171 - protein, 12 aa, Homo sapiens
  CDR3 for alpha chain variable domain of TCR clone 101086 (TRAV21, TRAJ13)
PGPSGGYQEVTF

SEQ ID NO: 202172 - protein, 14 aa, Homo sapiens
  CDR3 for beta chain variable domain of TCR clone 101086 (TRBV20-1, TRBJ2-7)
CSAKDRKGAYEQYF

SEQ ID NO: 202173 - protein, 15 aa, Homo sapiens
  CDR3 for alpha chain variable domain of TCR clone 101087 (TRAV2, TRAJ9)
CAVEDRGTGGFKTIF

SEQ ID NO: 202174 - protein, 15 aa, Homo sapiens
  CDR3 for beta chain variable domain of TCR clone 101087 (TRBV27, TRBJ2-7)
CASSTAGTGSYEQYF

SEQ ID NO: 202175 - protein, 14 aa, Homo sapiens
  CDR3 for alpha chain variable domain of TCR clone 101088 (TRAV12-2, TRAJ13)
CAVKKTGGYQKITF

SEQ ID NO: 202176 - protein, 15 aa, Homo sapiens
  CDR3 for beta chain variable domain of TCR clone 101088 (TRBV27, TRBJ2-1)
CAGSNGGGSSNEQFF

SEQ ID NO: 202177 - protein, 14 aa, Homo sapiens
  CDR3 for alpha chain variable domain of TCR clone 101089 (TRAV12-2, TRAJ38)
CAPQTAGNNRKLLW

SEQ ID NO: 202178 - protein, 18 aa, Homo sapiens
  CDR3 for beta chain variable domain of TCR clone 101089 (TRBV28, TRBJ1-3)
CASKTPVGQIGSGNTIYF

SEQ ID NO: 202179 - protein, 13 aa, Homo sapiens
  CDR3 for alpha chain variable domain of TCR clone 101090 (TRAV12-2, TRAJ20)
CAVYPANDYKLSF

SEQ ID NO: 202180 - protein, 15 aa, Homo sapiens
  CDR3 for beta chain variable domain of TCR clone 101090 (TRBV27, TRBJ2-5)
CASSLYPRGGETQYF

SEQ ID NO: 202181 - protein, 17 aa, Homo sapiens
  CDR3 for alpha chain variable domain of TCR clone 101091 (TRAV3, TRAJ6)
CAVRDGPRAGGSYIPTF

SEQ ID NO: 202182 - protein, 15 aa, Homo sapiens
  CDR3 for beta chain variable domain of TCR clone 101091 (TRBV12-4, TRBJ2-7)
CASSQRTSGNYEQYF

SEQ ID NO: 202183 - protein, 14 aa, Homo sapiens
  CDR3 for alpha chain variable domain of TCR clone 101092 (TRAV2, TRAJ37)
CAVDFTSNTGKLSF

SEQ ID NO: 202184 - protein, 15 aa, Homo sapiens
  CDR3 for beta chain variable domain of TCR clone 101092 (TRBV20-1, TRBJ1-1)
CSASRGVTGNTEAFF

SEQ ID NO: 202185 - protein, 13 aa, Homo sapiens
  CDR3 for alpha chain variable domain of TCR clone 101093 (TRAV27, TRAJ17)
CAGAATAGNKLTF

SEQ ID NO: 202186 - protein, 15 aa, Homo sapiens
  CDR3 for beta chain variable domain of TCR clone 101093 (TRBV5-1, TRBJ2-3)
CASRNQAGSKDTQYF

SEQ ID NO: 202187 - protein, 12 aa, Homo sapiens
  CDR3 for alpha chain variable domain of TCR clone 101094 (TRAV12-2, TRAJ49)
CAVLNTGNQFYF

SEQ ID NO: 202188 - protein, 14 aa, Homo sapiens
  CDR3 for beta chain variable domain of TCR clone 101094 (TRBV27, TRBJ2-2)
CASRPGVNTGELFF

SEQ ID NO: 202189 - protein, 11 aa, Homo sapiens
  CDR3 for alpha chain variable domain of TCR clone 101095 (TRAV1-2, TRAJ20)
CAVANDYKLSF

SEQ ID NO: 202190 - protein, 16 aa, Homo sapiens
  CDR3 for beta chain variable domain of TCR clone 101095 (TRBV4-3, TRBJ1-6)
CASSQDPGVYNSPLRF

SEQ ID NO: 202191 - protein, 13 aa, Homo sapiens
  CDR3 for alpha chain variable domain of TCR clone 101096 (TRAV16, TRAJ27)
CALRRNNAGKSTF

SEQ ID NO: 202192 - protein, 15 aa, Homo sapiens
  CDR3 for beta chain variable domain of TCR clone 101096 (TRBV18, TRBJ2-1)
CASSPPSASYNEQFF

SEQ ID NO: 202193 - protein, 13 aa, Homo sapiens
  CDR3 for alpha chain variable domain of TCR clone 101097 (TRAV1-2, TRAJ9)
CAALNTGGFKTIF

SEQ ID NO: 202194 - protein, 15 aa, Homo sapiens
  CDR3 for beta chain variable domain of TCR clone 101097 (TRBV6-1, TRBJ2-3)
CASSERGGITDTQYF

SEQ ID NO: 202195 - protein, 14 aa, Homo sapiens
  CDR3 for alpha chain variable domain of TCR clone 101098 (TRAV8-3, TRAJ4)
CAVGAAGGYNKLIF

SEQ ID NO: 202196 - protein, 15 aa, Homo sapiens
  CDR3 for beta chain variable domain of TCR clone 101098 (TRBV27, TRBJ2-1)
CASSNGGGSSNEQFF

SEQ ID NO: 202197 - protein, 17 aa, Homo sapiens
  CDR3 for alpha chain variable domain of TCR clone 101099 (TRAV2, TRAJ36)
CAVEDRGNWGKQPLLWD

SEQ ID NO: 202198 - protein, 14 aa, Homo sapiens
  CDR3 for beta chain variable domain of TCR clone 101099 (TRBV7-9, TRBJ2-5)
CASSLDTAQETQHF

SEQ ID NO: 202199 - protein, 16 aa, Homo sapiens
  CDR3 for alpha chain variable domain of TCR clone 101100 (TRAV26-1, TRAJ38)
CIVRVELGGNNRKLIG

SEQ ID NO: 202200 - protein, 14 aa, Homo sapiens
  CDR3 for beta chain variable domain of TCR clone 101100 (TRBV5-1, TRBJ2-3)
CASSPGLAADTQYF

SEQ ID NO: 202201 - protein, 13 aa, Homo sapiens
  CDR3 for alpha chain variable domain of TCR clone 101101 (TRAV17, TRAJ22)
FAHHSGSARQLTF

SEQ ID NO: 202202 - protein, 16 aa, Homo sapiens
  CDR3 for beta chain variable domain of TCR clone 101101 (TRBV4-1, TRBJ1-2)
CASSQDAGQVLYGYTF

SEQ ID NO: 202203 - protein, 17 aa, Homo sapiens
  CDR3 for alpha chain variable domain of TCR clone 101102 (TRAV38-2/DV8, TRAJ45)
CAYRSRYSGGGADGLTF

SEQ ID NO: 202204 - protein, 15 aa, Homo sapiens
  CDR3 for beta chain variable domain of TCR clone 101102 (TRBV19, TRBJ2-1)
CASIKGRGPYNEQFV

SEQ ID NO: 202205 - protein, 14 aa, Homo sapiens
  CDR3 for alpha chain variable domain of TCR clone 101103 (TRAV35, TRAJ40)
CWAALDSGTYKYIF

SEQ ID NO: 202206 - protein, 12 aa, Homo sapiens
  CDR3 for beta chain variable domain of TCR clone 101103 (TRBV7-8, TRBJ2-7)
CASSLAGYEQYF

SEQ ID NO: 202207 - protein, 15 aa, Homo sapiens
  CDR3 for alpha chain variable domain of TCR clone 101104 (TRAV12-2, TRAJ50)
CAVNGLETSYDKVIF

SEQ ID NO: 202208 - protein, 11 aa, Homo sapiens
  CDR3 for beta chain variable domain of TCR clone 101104 (TRBV12-4, TRBJ2-2)
CASSSAGELFF

SEQ ID NO: 202209 - protein, 14 aa, Homo sapiens
  CDR3 for alpha chain variable domain of TCR clone 101105 (TRAV13-1, TRAJ44)
CAAKATGTASKLTF

SEQ ID NO: 202210 - protein, 14 aa, Homo sapiens
  CDR3 for beta chain variable domain of TCR clone 101105 (TRBV19, TRBJ2-2)
CASSILHRSGELFF

SEQ ID NO: 202211 - protein, 18 aa, Homo sapiens
  CDR3 for alpha chain variable domain of TCR clone 101106 (TRAV20, TRAJ4)
CAVQPYCMFSGGYNKLIF

SEQ ID NO: 202212 - protein, 13 aa, Homo sapiens
  CDR3 for beta chain variable domain of TCR clone 101106 (TRBV19, TRBJ2-3)
CATWDKITDTQYF

SEQ ID NO: 202213 - protein, 14 aa, Homo sapiens
  CDR3 for alpha chain variable domain of TCR clone 101107 (TRAV13-1, TRAJ20)
CAARPGSNDYKLSF

SEQ ID NO: 202214 - protein, 16 aa, Homo sapiens
  CDR3 for beta chain variable domain of TCR clone 101107 (TRBV5-1, TRBJ1-1)
CASSSGGNSLNTEAFF

SEQ ID NO: 202215 - protein, 13 aa, Homo sapiens
  CDR3 for alpha chain variable domain of TCR clone 101108 (TRAV8-6, TRAJ54)
CAVSEEGAQKLVF

SEQ ID NO: 202216 - protein, 15 aa, Homo sapiens
  CDR3 for beta chain variable domain of TCR clone 101108 (TRBV12-4, TRBJ2-5)
CASSPPTGLQETQYF

SEQ ID NO: 202217 - protein, 13 aa, Homo sapiens
  CDR3 for alpha chain variable domain of TCR clone 101109 (TRAV12-3, TRAJ13)
YAMSSGGYQKVTF

SEQ ID NO: 202218 - protein, 13 aa, Homo sapiens
  CDR3 for beta chain variable domain of TCR clone 101109 (TRBV20-1, TRBJ1-1)
CSAPPGGHTEAFF

SEQ ID NO: 202219 - protein, 15 aa, Homo sapiens
  CDR3 for alpha chain variable domain of TCR clone 101110 (TRAV3, TRAJ45)
CAVRTPWGGADRLTF

SEQ ID NO: 202220 - protein, 16 aa, Homo sapiens
  CDR3 for beta chain variable domain of TCR clone 101110 (TRBV6-1, TRBJ2-2)
CASSFGQGANTGELFF

SEQ ID NO: 202221 - protein, 14 aa, Homo sapiens
  CDR3 for alpha chain variable domain of TCR clone 101111 (TRAV1-1, TRAJ35)
CAVRSIGFGNVLHC

SEQ ID NO: 202222 - protein, 14 aa, Homo sapiens
  CDR3 for beta chain variable domain of TCR clone 101111 (TRBV5-7, TRBJ2-7)
CASSGGLSFYEQYF

SEQ ID NO: 202223 - protein, 12 aa, Homo sapiens
  CDR3 for alpha chain variable domain of TCR clone 101112 (TRAV13-1, TRAJ53)
AASGGSNYKLTF

SEQ ID NO: 202224 - protein, 15 aa, Homo sapiens
  CDR3 for beta chain variable domain of TCR clone 101112 (TRBV5-1, TRBJ2-1)
CASSPPRAPTMSSSL

SEQ ID NO: 202225 - protein, 15 aa, Homo sapiens
  CDR3 for alpha chain variable domain of TCR clone 101113 (TRAV3, TRAJ12)
FAVRDIRDSSYKLIF

SEQ ID NO: 202226 - protein, 15 aa, Homo sapiens
  CDR3 for beta chain variable domain of TCR clone 101113 (TRBV27, TRBJ2-7)
CASSLRNEQGYEQYF

SEQ ID NO: 202227 - protein, 14 aa, Homo sapiens
  CDR3 for alpha chain variable domain of TCR clone 101114 (TRAV1-2, TRAJ8)
CSVREDTGFQKLVF

SEQ ID NO: 202228 - protein, 16 aa, Homo sapiens
  CDR3 for beta chain variable domain of TCR clone 101114 (TRBV20-1, TRBJ1-4)
CSAPGQGLLTNEKLFF

SEQ ID NO: 202229 - protein, 13 aa, Homo sapiens
  CDR3 for alpha chain variable domain of TCR clone 101115 (TRAV36/DV7, TRAJ54)
CAVDIQGAQKLVF

SEQ ID NO: 202230 - protein, 14 aa, Homo sapiens
  CDR3 for beta chain variable domain of TCR clone 101115 (TRBV19, TRBJ2-7)
CASNFQDTFTGMYF

SEQ ID NO: 202231 - protein, 16 aa, Homo sapiens
  CDR3 for alpha chain variable domain of TCR clone 101116 (TRAV26-1, TRAJ52)
CIVRNAGGTSYGKLTF

SEQ ID NO: 202232 - protein, 16 aa, Homo sapiens
  CDR3 for beta chain variable domain of TCR clone 101116 (TRBV5-1, TRBJ2-1)
CASSLEGRGLYNEQFF

SEQ ID NO: 202233 - protein, 13 aa, Homo sapiens
  CDR3 for alpha chain variable domain of TCR clone 101117 (TRAV13-1, TRAJ20)
CAARVSNNYKLSF

SEQ ID NO: 202234 - protein, 12 aa, Homo sapiens
  CDR3 for beta chain variable domain of TCR clone 101117 (TRBV20-1, TRBJ2-1)
CSARLGTDEQFF

SEQ ID NO: 202235 - protein, 16 aa, Homo sapiens
  CDR3 for alpha chain variable domain of TCR clone 101118 (TRAV2, TRAJ4)
CAVEDRFSGGYNKLIF

SEQ ID NO: 202236 - protein, 13 aa, Homo sapiens
  CDR3 for beta chain variable domain of TCR clone 101118 (TRBV7-7, TRBJ2-5)
CASSGSGQETQYF

SEQ ID NO: 202237 - protein, 14 aa, Homo sapiens
  CDR3 for alpha chain variable domain of TCR clone 101119 (TRAV1-2, TRAJ16)
CAVNRFSDGQKLLF

SEQ ID NO: 202238 - protein, 17 aa, Homo sapiens
  CDR3 for beta chain variable domain of TCR clone 101119 (TRBV9, TRBJ1-6)
CASSVAGTGDSPSTLGT

SEQ ID NO: 202239 - protein, 14 aa, Homo sapiens
  CDR3 for alpha chain variable domain of TCR clone 101120 (TRAV12-3, TRAJ9)
CAMSPNTGGFKTIF

SEQ ID NO: 202240 - protein, 12 aa, Homo sapiens
  CDR3 for beta chain variable domain of TCR clone 101120 (TRBV11-2, TRBJ2-2)
WASSLGGGELFF

SEQ ID NO: 202241 - protein, 12 aa, Homo sapiens
  CDR3 for alpha chain variable domain of TCR clone 101121 (TRAV38-2/DV8, TRAJ49)
CAYRSSGNQFYF

SEQ ID NO: 202242 - protein, 13 aa, Homo sapiens
  CDR3 for beta chain variable domain of TCR clone 101121 (TRBV12-4, TRBJ2-7)
CASSPTETYEQYF

SEQ ID NO: 202243 - protein, 17 aa, Homo sapiens
  CDR3 for alpha chain variable domain of TCR clone 101122 (TRAV4, TRAJ18)
CLVGERSVGSTLGRLDF

SEQ ID NO: 202244 - protein, 16 aa, Homo sapiens
  CDR3 for beta chain variable domain of TCR clone 101122 (TRBV15, TRBJ1-4)
CATSRDSPPGREKLFF

SEQ ID NO: 202245 - protein, 10 aa, Homo sapiens
  CDR3 for alpha chain variable domain of TCR clone 101123 (TRAV1-2, TRAJ20)
CALNDYKLSF

SEQ ID NO: 202246 - protein, 16 aa, Homo sapiens
  CDR3 for beta chain variable domain of TCR clone 101123 (TRBV2, TRBJ2-1)
CASSVGGSLSYNEQFF

SEQ ID NO: 202247 - protein, 16 aa, Homo sapiens
  CDR3 for alpha chain variable domain of TCR clone 101124 (TRAV21, TRAJ37)
CAVRTAGSSNTGKLIF

SEQ ID NO: 202248 - protein, 13 aa, Homo sapiens
  CDR3 for beta chain variable domain of TCR clone 101124 (TRBV7-9, TRBJ2-5)
CASLPSGREDQYF

SEQ ID NO: 202249 - protein, 14 aa, Homo sapiens
  CDR3 for alpha chain variable domain of TCR clone 101125 (TRAV3, TRAJ17)
CAGRDAAAGNKLTF

SEQ ID NO: 202250 - protein, 13 aa, Homo sapiens
  CDR3 for beta chain variable domain of TCR clone 101125 (TRBV2, TRBJ1-1)
CASSVSGYTEAFF

SEQ ID NO: 202251 - protein, 13 aa, Homo sapiens
  CDR3 for alpha chain variable domain of TCR clone 101126 (TRAV26-1, TRAJ30)
CIVRVESNDKIIV

SEQ ID NO: 202252 - protein, 15 aa, Homo sapiens
  CDR3 for beta chain variable domain of TCR clone 101126 (TRBV6-1, TRBJ2-3)
CASSERGGITDTQYF

SEQ ID NO: 202253 - protein, 12 aa, Homo sapiens
  CDR3 for alpha chain variable domain of TCR clone 101127 (TRAV12-3, TRAJ17)
CAMTLTGNKLTF

SEQ ID NO: 202254 - protein, 14 aa, Homo sapiens
  CDR3 for beta chain variable domain of TCR clone 101127 (TRBV7-8, TRBJ2-3)
CASSFPDGQDTQYF

SEQ ID NO: 202255 - protein, 17 aa, Homo sapiens
  CDR3 for alpha chain variable domain of TCR clone 101128 (TRAV26-1, TRAJ28)
CIVRALYAGAGSYQLTF

SEQ ID NO: 202256 - protein, 12 aa, Homo sapiens
  CDR3 for beta chain variable domain of TCR clone 101128 (TRBV12-4, TRBJ2-1)
CASRQTENEQFF

SEQ ID NO: 202257 - protein, 16 aa, Homo sapiens
  CDR3 for alpha chain variable domain of TCR clone 101129 (TRAV12-1, TRAJ12)
CVVNTLLMDSSYKLIF

SEQ ID NO: 202258 - protein, 13 aa, Homo sapiens
  CDR3 for beta chain variable domain of TCR clone 101129 (TRBV11-2, TRBJ2-1)
CASSSEAYNEQFS

SEQ ID NO: 202259 - protein, 12 aa, Homo sapiens
  CDR3 for alpha chain variable domain of TCR clone 101130 (TRAV2, TRAJ33)
CAFMDSNYQLIW

SEQ ID NO: 202260 - protein, 13 aa, Homo sapiens
  CDR3 for beta chain variable domain of TCR clone 101130 (TRBV12-5, TRBJ2-3)
CASGDRQSDTQYF

SEQ ID NO: 202261 - protein, 16 aa, Homo sapiens
  CDR3 for alpha chain variable domain of TCR clone 101131 (TRAV30, TRAJ24)
CGTEMVDADSWGKFQF

SEQ ID NO: 202262 - protein, 12 aa, Homo sapiens
  CDR3 for beta chain variable domain of TCR clone 101131 (TRBV11-2, TRBJ2-2)
CASSLGGGELFF

SEQ ID NO: 202263 - protein, 11 aa, Homo sapiens
  CDR3 for alpha chain variable domain of TCR clone 101132 (TRAV4, TRAJ31)
CLVGDNAGLMF

SEQ ID NO: 202264 - protein, 14 aa, Homo sapiens
  CDR3 for beta chain variable domain of TCR clone 101132 (TRBV2, TRBJ1-5)
CASGEAAGGQPQHF

SEQ ID NO: 202265 - protein, 19 aa, Homo sapiens
  CDR3 for alpha chain variable domain of TCR clone 101133 (TRAV1-2, TRAJ26)
CLLPLCCERPDNYGQNFVF

SEQ ID NO: 202266 - protein, 14 aa, Homo sapiens
  CDR3 for beta chain variable domain of TCR clone 101133 (TRBV7-2, TRBJ1-1)
CASSFLTGTTEAFF

SEQ ID NO: 202267 - protein, 16 aa, Homo sapiens
  CDR3 for alpha chain variable domain of TCR clone 101134 (TRAV3, TRAJ37)
CAVRGKGSGNTGKLIF

SEQ ID NO: 202268 - protein, 16 aa, Homo sapiens
  CDR3 for beta chain variable domain of TCR clone 101134 (TRBV12-5, TRBJ2-5)
CASGPRTSGSKETQYF

SEQ ID NO: 202269 - protein, 16 aa, Homo sapiens
  CDR3 for alpha chain variable domain of TCR clone 101135 (TRAV13-1, TRAJ37)
CAASSLGSSNTGKLIF

SEQ ID NO: 202270 - protein, 12 aa, Homo sapiens
  CDR3 for beta chain variable domain of TCR clone 101135 (TRBV6-1, TRBJ2-5)
CASSEGRETQCF

SEQ ID NO: 202271 - protein, 15 aa, Homo sapiens
  CDR3 for alpha chain variable domain of TCR clone 101136 (TRAV3, TRAJ4)
RAQNMFSGGYNKLIF

SEQ ID NO: 202272 - protein, 16 aa, Homo sapiens
  CDR3 for beta chain variable domain of TCR clone 101136 (TRBV3-1, TRBJ1-6)
CASSQEFQGSYSPLHF

SEQ ID NO: 202273 - protein, 14 aa, Homo sapiens
  CDR3 for alpha chain variable domain of TCR clone 101137 (TRAV1-2, TRAJ16)
CAVNRFSDGQKLLF

SEQ ID NO: 202274 - protein, 16 aa, Homo sapiens
  CDR3 for beta chain variable domain of TCR clone 101137 (TRBV20-1, TRBJ1-4)
CSAPGQGLLTNEKRFF

SEQ ID NO: 202275 - protein, 13 aa, Homo sapiens
  CDR3 for alpha chain variable domain of TCR clone 101138 (TRAV27, TRAJ45)
CRSSGGGAYGLTF

SEQ ID NO: 202276 - protein, 14 aa, Homo sapiens
  CDR3 for beta chain variable domain of TCR clone 101138 (TRBV7-9, TRBJ2-1)
CASSSMVGFGEQFF

SEQ ID NO: 202277 - protein, 15 aa, Homo sapiens
  CDR3 for alpha chain variable domain of TCR clone 101139 (TRAV13-1, TRAJ45)
CAASGSGGGADGLTF

SEQ ID NO: 202278 - protein, 12 aa, Homo sapiens
  CDR3 for beta chain variable domain of TCR clone 101139 (TRBV11-2, TRBJ2-2)
CASSRGGGELFF

SEQ ID NO: 202279 - protein, 13 aa, Homo sapiens
  CDR3 for alpha chain variable domain of TCR clone 101140 (TRAV17, TRAJ5)
CAPMDTGRRALTF

SEQ ID NO: 202280 - protein, 16 aa, Homo sapiens
  CDR3 for beta chain variable domain of TCR clone 101140 (TRBV27, TRBJ2-7)
CANSSERRDIAYEQYF

SEQ ID NO: 202281 - protein, 12 aa, Homo sapiens
  CDR3 for alpha chain variable domain of TCR clone 101141 (TRAV1-1, TRAJ30)
CAVRGRDDKIIF

SEQ ID NO: 202282 - protein, 19 aa, Homo sapiens
  CDR3 for beta chain variable domain of TCR clone 101141 (TRBV25-1, TRBJ2-2)
CAILVYRVDRGRKTGELFF

SEQ ID NO: 202283 - protein, 12 aa, Homo sapiens
  CDR3 for alpha chain variable domain of TCR clone 101142 (TRAV12-3, TRAJ5)
CAMDTGRRALTF

SEQ ID NO: 202284 - protein, 13 aa, Homo sapiens
  CDR3 for beta chain variable domain of TCR clone 101142 (TRBV7-7, TRBJ2-2)
CASSLTSAEELFF

SEQ ID NO: 202285 - protein, 13 aa, Homo sapiens
  CDR3 for alpha chain variable domain of TCR clone 101143 (TRAV14/DV4, TRAJ16)
CAMREGRGQKLLF

SEQ ID NO: 202286 - protein, 15 aa, Homo sapiens
  CDR3 for beta chain variable domain of TCR clone 101143 (TRBV7-9, TRBJ2-7)
CASSLDLDRGYEQYF

SEQ ID NO: 202287 - protein, 11 aa, Homo sapiens
  CDR3 for alpha chain variable domain of TCR clone 101144 (TRAV2, TRAJ33)
CAVDSNYQLIW

SEQ ID NO: 202288 - protein, 12 aa, Homo sapiens
  CDR3 for beta chain variable domain of TCR clone 101144 (TRBV16, TRBJ2-2)
CASSQSVGELFF

SEQ ID NO: 202289 - protein, 13 aa, Homo sapiens
  CDR3 for alpha chain variable domain of TCR clone 101145 (TRAV12-2, TRAJ37)
CAGGSGNTGKLIF

SEQ ID NO: 202290 - protein, 14 aa, Homo sapiens
  CDR3 for beta chain variable domain of TCR clone 101145 (TRBV5-1, TRBJ1-5)
CASSLESGSRPQHF

SEQ ID NO: 202291 - protein, 13 aa, Homo sapiens
  CDR3 for alpha chain variable domain of TCR clone 101146 (TRAV20, TRAJ21)
CAVAGYNFNKFYF

SEQ ID NO: 202292 - protein, 14 aa, Homo sapiens
  CDR3 for beta chain variable domain of TCR clone 101146 (TRBV3-1, TRBJ2-5)
CASSQGPDQETQYF

SEQ ID NO: 202293 - protein, 17 aa, Homo sapiens
  CDR3 for alpha chain variable domain of TCR clone 101147 (TRAV3, TRAJ6)
CAVRDGPRAGGSYIPTF

SEQ ID NO: 202294 - protein, 12 aa, Homo sapiens
  CDR3 for beta chain variable domain of TCR clone 101147 (TRBV19, TRBJ2-1)
CASSMQDTEQFF

SEQ ID NO: 202295 - protein, 12 aa, Homo sapiens
  CDR3 for alpha chain variable domain of TCR clone 101148 (TRAV12-1, TRAJ40)
CVVYSGTYKYIF

SEQ ID NO: 202296 - protein, 14 aa, Homo sapiens
  CDR3 for beta chain variable domain of TCR clone 101148 (TRBV20-1, TRBJ2-3)
CSARGGSSTDTQYF

SEQ ID NO: 202297 - protein, 15 aa, Homo sapiens
  CDR3 for alpha chain variable domain of TCR clone 101149 (TRAV26-1, TRAJ44)
CNVRANTGTASKLTF

SEQ ID NO: 202298 - protein, 16 aa, Homo sapiens
  CDR3 for beta chain variable domain of TCR clone 101149 (TRBV7-7, TRBJ2-1)
CASSLASGTSYNEQFF

SEQ ID NO: 202299 - protein, 12 aa, Homo sapiens
  CDR3 for alpha chain variable domain of TCR clone 101150 (TRAV8-3, TRAJ41)
CAVALSGYALNF

SEQ ID NO: 202300 - protein, 18 aa, Homo sapiens
  CDR3 for beta chain variable domain of TCR clone 101150 (TRBV20-1, TRBJ2-6)
GSAETTPTHGSGANVLTF

SEQ ID NO: 202301 - protein, 14 aa, Homo sapiens
  CDR3 for alpha chain variable domain of TCR clone 101151 (TRAV8-3, TRAJ4)
CALGAAGGYNKLIF

SEQ ID NO: 202302 - protein, 14 aa, Homo sapiens
  CDR3 for beta chain variable domain of TCR clone 101151 (TRBV27, TRBJ1-1)
CASSLLSGLSEAFF

SEQ ID NO: 202303 - protein, 13 aa, Homo sapiens
  CDR3 for alpha chain variable domain of TCR clone 101152 (TRAV2, TRAJ15)
CAVASQAGTALIF

SEQ ID NO: 202304 - protein, 16 aa, Homo sapiens
  CDR3 for beta chain variable domain of TCR clone 101152 (TRBV29-1, TRBJ2-7)
CSVEDAEDGTAYEQYF

SEQ ID NO: 202305 - protein, 14 aa, Homo sapiens
  CDR3 for alpha chain variable domain of TCR clone 101153 (TRAV20, TRAJ56)
CAVQFGGANSKLTF

SEQ ID NO: 202306 - protein, 14 aa, Homo sapiens
  CDR3 for beta chain variable domain of TCR clone 101153 (TRBV7-8, TRBJ2-7)
CASSFFAGPNEQYF

SEQ ID NO: 202307 - protein, 17 aa, Homo sapiens
  CDR3 for alpha chain variable domain of TCR clone 101154 (TRAV3, TRAJ28)
CAVREAYSGAGSYRLTF

SEQ ID NO: 202308 - protein, 14 aa, Homo sapiens
  CDR3 for beta chain variable domain of TCR clone 101154 (TRBV19, TRBJ2-1)
CASPTFVLSGEQFF

SEQ ID NO: 202309 - protein, 15 aa, Homo sapiens
  CDR3 for alpha chain variable domain of TCR clone 101155 (TRAV29/DV5, TRAJ8)
CAASGRNKGFQKLVF

SEQ ID NO: 202310 - protein, 15 aa, Homo sapiens
  CDR3 for beta chain variable domain of TCR clone 101155 (TRBV5-1, TRBJ2-1)
CASTGSGRTYNEQFF

SEQ ID NO: 202311 - protein, 11 aa, Homo sapiens
  CDR3 for alpha chain variable domain of TCR clone 101156 (TRAV12-1, TRAJ30)
CVVNGQDKIIF

SEQ ID NO: 202312 - protein, 12 aa, Homo sapiens
  CDR3 for beta chain variable domain of TCR clone 101156 (TRBV27, TRBJ2-2)
YASKLFTGELFF

SEQ ID NO: 202313 - protein, 17 aa, Homo sapiens
  CDR3 for alpha chain variable domain of TCR clone 101157 (TRAV1-2, TRAJ8)
CAVRDPDENTGFQNLVF

SEQ ID NO: 202314 - protein, 16 aa, Homo sapiens
  CDR3 for beta chain variable domain of TCR clone 101157 (TRBV7-9, TRBJ2-2)
CASSGFGGANTGELFF

SEQ ID NO: 202315 - protein, 12 aa, Homo sapiens
  CDR3 for alpha chain variable domain of TCR clone 101158 (TRAV38-1, TRAJ20)
CAFIWNDYKLSF

SEQ ID NO: 202316 - protein, 14 aa, Homo sapiens
  CDR3 for beta chain variable domain of TCR clone 101158 (TRBV12-4, TRBJ1-2)
CASSNLRGNYGYTF

SEQ ID NO: 202317 - protein, 19 aa, Homo sapiens
  CDR3 for alpha chain variable domain of TCR clone 101159 (TRAV2, TRAJ20)
ILQVREADAAVYRDCQLSF

SEQ ID NO: 202318 - protein, 13 aa, Homo sapiens
  CDR3 for beta chain variable domain of TCR clone 101159 (TRBV15, TRBJ1-6)
CATSGGLNSPLHF

SEQ ID NO: 202319 - protein, 16 aa, Homo sapiens
  CDR3 for alpha chain variable domain of TCR clone 101160 (TRAV12-3, TRAJ53)
CAMSPGCGGSNYKLTF

SEQ ID NO: 202320 - protein, 13 aa, Homo sapiens
  CDR3 for beta chain variable domain of TCR clone 101160 (TRBV7-2, TRBJ2-2)
CASSLAVTGELFF

SEQ ID NO: 202321 - protein, 11 aa, Homo sapiens
  CDR3 for alpha chain variable domain of TCR clone 101161 (TRAV16, TRAJ29)
WAPSGNTPLVF

SEQ ID NO: 202322 - protein, 15 aa, Homo sapiens
  CDR3 for beta chain variable domain of TCR clone 101161 (TRBV5-7, TRBJ2-7)
CARSPYFEGSYEQYF

SEQ ID NO: 202323 - protein, 14 aa, Homo sapiens
  CDR3 for alpha chain variable domain of TCR clone 101162 (TRAV4, TRAJ9)
CLVGSGTGGFKTIF

SEQ ID NO: 202324 - protein, 15 aa, Homo sapiens
  CDR3 for beta chain variable domain of TCR clone 101162 (TRBV20-1, TRBJ2-7)
CSARDRVSGMDEQYF

SEQ ID NO: 202325 - protein, 12 aa, Homo sapiens
  CDR3 for alpha chain variable domain of TCR clone 101163 (TRAV30, TRAJ43)
CGTEERGNDMRF

SEQ ID NO: 202326 - protein, 13 aa, Homo sapiens
  CDR3 for beta chain variable domain of TCR clone 101163 (TRBV10-3, TRBJ2-7)
CASKLAVNYEQYF

SEQ ID NO: 202327 - protein, 16 aa, Homo sapiens
  CDR3 for alpha chain variable domain of TCR clone 101164 (TRAV26-1, TRAJ48)
IASPDLSNFGNEKLTF

SEQ ID NO: 202328 - protein, 14 aa, Homo sapiens
  CDR3 for beta chain variable domain of TCR clone 101164 (TRBV13, TRBJ2-7)
CASSLKGASYEQYF

SEQ ID NO: 202329 - protein, 12 aa, Homo sapiens
  CDR3 for alpha chain variable domain of TCR clone 101165 (TRAV16, TRAJ27)
CALNHQCRQINL

SEQ ID NO: 202330 - protein, 16 aa, Homo sapiens
  CDR3 for beta chain variable domain of TCR clone 101165 (TRBV12-4, TRBJ1-5)
CASSRPVGGSNQPQHF

SEQ ID NO: 202331 - protein, 15 aa, Homo sapiens
  CDR3 for alpha chain variable domain of TCR clone 101166 (TRAV3, TRAJ22)
CAVRDRGGSARQLTF

SEQ ID NO: 202332 - protein, 14 aa, Homo sapiens
  CDR3 for beta chain variable domain of TCR clone 101166 (TRBV19, TRBJ2-1)
CASSRLAFINEQFF

SEQ ID NO: 202333 - protein, 14 aa, Homo sapiens
  CDR3 for alpha chain variable domain of TCR clone 101167 (TRAV26-1, TRAJ34)
CIVRVAYNTDKLIF

SEQ ID NO: 202334 - protein, 14 aa, Homo sapiens
  CDR3 for beta chain variable domain of TCR clone 101167 (TRBV4-1, TRBJ2-2)
CASSQAVNTGELFF

SEQ ID NO: 202335 - protein, 14 aa, Homo sapiens
  CDR3 for alpha chain variable domain of TCR clone 101168 (TRAV26-1, TRAJ34)
CIVRVAYNTDKLIF

SEQ ID NO: 202336 - protein, 15 aa, Homo sapiens
  CDR3 for beta chain variable domain of TCR clone 101168 (TRBV20-1, TRBJ2-7)
CSARVPDEYFYEQYF

SEQ ID NO: 202337 - protein, 15 aa, Homo sapiens
  CDR3 for alpha chain variable domain of TCR clone 101169 (TRAV26-2, TRAJ57)
CILRDIRGGPEKLVF

SEQ ID NO: 202338 - protein, 15 aa, Homo sapiens
  CDR3 for beta chain variable domain of TCR clone 101169 (TRBV2, TRBJ2-1)
CASDIGLAGEGEQFF

SEQ ID NO: 202339 - protein, 15 aa, Homo sapiens
  CDR3 for alpha chain variable domain of TCR clone 101170 (TRAV8-3, TRAJ11)
CAVGLLNSVYSTLTF

SEQ ID NO: 202340 - protein, 16 aa, Homo sapiens
  CDR3 for beta chain variable domain of TCR clone 101170 (TRBV28, TRBJ2-1)
CASSLWGRTSGTLQFF

SEQ ID NO: 202341 - protein, 16 aa, Homo sapiens
  CDR3 for alpha chain variable domain of TCR clone 101171 (TRAV30, TRAJ24)
CGTEIVDADSWGKFQF

SEQ ID NO: 202342 - protein, 14 aa, Homo sapiens
  CDR3 for beta chain variable domain of TCR clone 101171 (TRBV13, TRBJ2-1)
CASSPRPWYNEQFF

SEQ ID NO: 202343 - protein, 13 aa, Homo sapiens
  CDR3 for alpha chain variable domain of TCR clone 101172 (TRAV1-2, TRAJ9)
CAALNTGGFKTIF

SEQ ID NO: 202344 - protein, 14 aa, Homo sapiens
  CDR3 for beta chain variable domain of TCR clone 101172 (TRBV19, TRBJ1-2)
CASSVRTGWLHLRF

SEQ ID NO: 202345 - protein, 15 aa, Homo sapiens
  CDR3 for alpha chain variable domain of TCR clone 101173 (TRAV21, TRAJ53)
CATLNSGGSNYKLTF

SEQ ID NO: 202346 - protein, 16 aa, Homo sapiens
  CDR3 for beta chain variable domain of TCR clone 101173 (TRBV9, TRBJ2-1)
CASSVGGGGNYNEQVF

SEQ ID NO: 202347 - protein, 12 aa, Homo sapiens
  CDR3 for alpha chain variable domain of TCR clone 101174 (TRAV3, TRAJ20)
CAVRDHDYKLSF

SEQ ID NO: 202348 - protein, 13 aa, Homo sapiens
  CDR3 for beta chain variable domain of TCR clone 101174 (TRBV9, TRBJ2-7)
CDSSVGQGGEQYF

SEQ ID NO: 202349 - protein, 15 aa, Homo sapiens
  CDR3 for alpha chain variable domain of TCR clone 101175 (TRAV35, TRAJ50)
CAGQLRKTSYDKVMF

SEQ ID NO: 202350 - protein, 12 aa, Homo sapiens
  CDR3 for beta chain variable domain of TCR clone 101175 (TRBV5-1, TRBJ2-5)
CASSLGLETQYF

SEQ ID NO: 202351 - protein, 14 aa, Homo sapiens
  CDR3 for alpha chain variable domain of TCR clone 101176 (TRAV12-2, TRAJ17)
WAVLFKAAGNKLTF

SEQ ID NO: 202352 - protein, 17 aa, Homo sapiens
  CDR3 for beta chain variable domain of TCR clone 101176 (TRBV20-1, TRBJ2-2)
CSASGSGQGGLTGELFF

SEQ ID NO: 202353 - protein, 12 aa, Homo sapiens
  CDR3 for alpha chain variable domain of TCR clone 101177 (TRAV3, TRAJ43)
CAGRDPNNDMRF

SEQ ID NO: 202354 - protein, 15 aa, Homo sapiens
  CDR3 for beta chain variable domain of TCR clone 101177 (TRBV27, TRBJ1-5)
CASSLGTGFDQPQHF

SEQ ID NO: 202355 - protein, 14 aa, Homo sapiens
  CDR3 for alpha chain variable domain of TCR clone 101178 (TRAV20, TRAJ42)
CAVQAGGSQGNLSF

SEQ ID NO: 202356 - protein, 14 aa, Homo sapiens
  CDR3 for beta chain variable domain of TCR clone 101178 (TRBV28, TRBJ1-2)
CASRIQGANYGYTF

SEQ ID NO: 202357 - protein, 13 aa, Homo sapiens
  CDR3 for alpha chain variable domain of TCR clone 101179 (TRAV16, TRAJ31)
CALSAHNNTRLMF

SEQ ID NO: 202358 - protein, 17 aa, Homo sapiens
  CDR3 for beta chain variable domain of TCR clone 101179 (TRBV12-4, TRBJ2-1)
CASSPGLAGGRINEQFF

SEQ ID NO: 202359 - protein, 16 aa, Homo sapiens
  CDR3 for alpha chain variable domain of TCR clone 101180 (TRAV4, TRAJ22)
CLVGDLYSGSARQLTF

SEQ ID NO: 202360 - protein, 13 aa, Homo sapiens
  CDR3 for beta chain variable domain of TCR clone 101180 (TRBV15, TRBJ1-1)
CATSRGIQARAFF

SEQ ID NO: 202361 - protein, 14 aa, Homo sapiens
  CDR3 for alpha chain variable domain of TCR clone 101181 (TRAV9-2, TRAJ39)
CALYIYNAGNMLTF

SEQ ID NO: 202362 - protein, 17 aa, Homo sapiens
  CDR3 for beta chain variable domain of TCR clone 101181 (TRBV20-1, TRBJ2-7)
CSARDRVSGWTSSTSGR

SEQ ID NO: 202363 - protein, 13 aa, Homo sapiens
  CDR3 for alpha chain variable domain of TCR clone 101182 (TRAV26-2, TRAJ43)
CILRAVNNNDMRF

SEQ ID NO: 202364 - protein, 14 aa, Homo sapiens
  CDR3 for beta chain variable domain of TCR clone 101182 (TRBV12-5, TRBJ2-5)
CASGSRTHQETQYF

SEQ ID NO: 202365 - protein, 13 aa, Homo sapiens
  CDR3 for alpha chain variable domain of TCR clone 101183 (TRAV35, TRAJ22)
CAGLSGSARKLTF

SEQ ID NO: 202366 - protein, 16 aa, Homo sapiens
  CDR3 for beta chain variable domain of TCR clone 101183 (TRBV7-9, TRBJ2-1)
CASSLVLTGQGNEQFF

SEQ ID NO: 202367 - protein, 15 aa, Homo sapiens
  CDR3 for alpha chain variable domain of TCR clone 101184 (TRAV13-1, TRAJ10)
CAAEVVTGGGNKLTF

SEQ ID NO: 202368 - protein, 13 aa, Homo sapiens
  CDR3 for beta chain variable domain of TCR clone 101184 (TRBV28, TRBJ2-5)
YAGVSRGEETQYF

SEQ ID NO: 202369 - protein, 15 aa, Homo sapiens
  CDR3 for alpha chain variable domain of TCR clone 101185 (TRAV26-1, TRAJ48)
CIARWSWFGKEKLTF

SEQ ID NO: 202370 - protein, 12 aa, Homo sapiens
  CDR3 for beta chain variable domain of TCR clone 101185 (TRBV19, TRBJ2-5)
CASSISEETQYF

SEQ ID NO: 202371 - protein, 16 aa, Homo sapiens
  CDR3 for alpha chain variable domain of TCR clone 101186 (TRAV30, TRAJ24)
CGTEIVDAASWGEFQF

SEQ ID NO: 202372 - protein, 14 aa, Homo sapiens
  CDR3 for beta chain variable domain of TCR clone 101186 (TRBV12-5, TRBJ2-5)
CASGSRTHQETQYF

SEQ ID NO: 202373 - protein, 18 aa, Homo sapiens
  CDR3 for alpha chain variable domain of TCR clone 101187 (TRAV26-2, TRAJ45)
CILRLWGYSGGGADGLTF

SEQ ID NO: 202374 - protein, 17 aa, Homo sapiens
  CDR3 for beta chain variable domain of TCR clone 101187 (TRBV28, TRBJ2-3)
CASSPTPAGGRVDTQHF

SEQ ID NO: 202375 - protein, 15 aa, Homo sapiens
  CDR3 for alpha chain variable domain of TCR clone 101188 (TRAV17, TRAJ4)
CATGTWSGGYNKLIF

SEQ ID NO: 202376 - protein, 15 aa, Homo sapiens
  CDR3 for beta chain variable domain of TCR clone 101188 (TRBV7-2, TRBJ1-3)
CASSWGGITGNTIYF

SEQ ID NO: 202377 - protein, 15 aa, Homo sapiens
  CDR3 for alpha chain variable domain of TCR clone 101189 (TRAV17, TRAJ4)
CATGTWSGGYNKLIF

SEQ ID NO: 202378 - protein, 12 aa, Homo sapiens
  CDR3 for beta chain variable domain of TCR clone 101189 (TRBV7-8, TRBJ2-7)
CASSLGDREQYF

SEQ ID NO: 202379 - protein, 12 aa, Homo sapiens
  CDR3 for alpha chain variable domain of TCR clone 101190 (TRAV4, TRAJ6)
CFAPGGSYIPTF

SEQ ID NO: 202380 - protein, 12 aa, Homo sapiens
  CDR3 for beta chain variable domain of TCR clone 101190 (TRBV6-5, TRBJ2-3)
CASSDTTDTQYF

SEQ ID NO: 202381 - protein, 14 aa, Homo sapiens
  CDR3 for alpha chain variable domain of TCR clone 101191 (TRAV12-3, TRAJ12)
CAMSEVDSSYNLIF

SEQ ID NO: 202382 - protein, 12 aa, Homo sapiens
  CDR3 for beta chain variable domain of TCR clone 101191 (TRBV18, TRBJ1-4)
CASSPSREKLFF

SEQ ID NO: 202383 - protein, 12 aa, Homo sapiens
  CDR3 for alpha chain variable domain of TCR clone 101192 (TRAV12-3, TRAJ17)
CAMTLTGNKLTL

SEQ ID NO: 202384 - protein, 15 aa, Homo sapiens
  CDR3 for beta chain variable domain of TCR clone 101192 (TRBV20-1, TRBJ2-7)
YSARDRVSGMDEQYF

SEQ ID NO: 202385 - protein, 10 aa, Homo sapiens
  CDR3 for alpha chain variable domain of TCR clone 101193 (TRAV23/DV6, TRAJ57)
CAASSTLSQG

SEQ ID NO: 202386 - protein, 22 aa, Homo sapiens
  CDR3 for beta chain variable domain of TCR clone 101193 (TRBV7-3, TRBJ2-5)
CASARDRVILRPRDPVLRARHA

SEQ ID NO: 202387 - protein, 14 aa, Homo sapiens
  CDR3 for alpha chain variable domain of TCR clone 101194 (TRAV17, TRAJ16)
CATADFSDGQKLLS

SEQ ID NO: 202388 - protein, 15 aa, Homo sapiens
  CDR3 for beta chain variable domain of TCR clone 101194 (TRBV6-5, TRBJ2-1)
CASSYDTGAGNEQFF

SEQ ID NO: 202389 - protein, 13 aa, Homo sapiens
  CDR3 for alpha chain variable domain of TCR clone 101195 (TRAV13-1, TRAJ10)
CAATAGGGNKLTF

SEQ ID NO: 202390 - protein, 13 aa, Homo sapiens
  CDR3 for beta chain variable domain of TCR clone 101195 (TRBV7-3, TRBJ1-1)
CASSQDWGAEAFF

SEQ ID NO: 202391 - protein, 15 aa, Homo sapiens
  CDR3 for alpha chain variable domain of TCR clone 101196 (TRAV21, TRAJ53)
CATLNSGGSNYKLTF

SEQ ID NO: 202392 - protein, 12 aa, Homo sapiens
  CDR3 for beta chain variable domain of TCR clone 101196 (TRBV29-1, TRBJ2-3)
CSVTGGADTQYF

SEQ ID NO: 202393 - protein, 15 aa, Homo sapiens
  CDR3 for alpha chain variable domain of TCR clone 101197 (TRAV17, TRAJ22)
CATVAPSGSARRLTF

SEQ ID NO: 202394 - protein, 16 aa, Homo sapiens
  CDR3 for beta chain variable domain of TCR clone 101197 (TRBV10-3, TRBJ2-7)
CAISADFADRPYEQYF

SEQ ID NO: 202395 - protein, 16 aa, Homo sapiens
  CDR3 for alpha chain variable domain of TCR clone 101198 (TRAV1-1, TRAJ45)
CAVRAYSGGGSDGLTF

SEQ ID NO: 202396 - protein, 13 aa, Homo sapiens
  CDR3 for beta chain variable domain of TCR clone 101198 (TRBV20-1, TRBJ1-2)
CSARGTADYGYTF

SEQ ID NO: 202397 - protein, 14 aa, Homo sapiens
  CDR3 for alpha chain variable domain of TCR clone 101199 (TRAV13-1, TRAJ40)
CAASMTSGTYKYIF

SEQ ID NO: 202398 - protein, 15 aa, Homo sapiens
  CDR3 for beta chain variable domain of TCR clone 101199 (TRBV7-2, TRBJ2-1)
CASSSGLAGGNEQFF

SEQ ID NO: 202399 - protein, 12 aa, Homo sapiens
  CDR3 for alpha chain variable domain of TCR clone 101200 (TRAV20, TRAJ39)
CAVGNAGNMLTF

SEQ ID NO: 202400 - protein, 14 aa, Homo sapiens
  CDR3 for beta chain variable domain of TCR clone 101200 (TRBV6-5, TRBJ1-2)
CASSYDGTGGGHTF

SEQ ID NO: 202401 - protein, 16 aa, Homo sapiens
  CDR3 for alpha chain variable domain of TCR clone 101201 (TRAV1-1, TRAJ29)
CAVRSTRNSGNTPLVF

SEQ ID NO: 202402 - protein, 16 aa, Homo sapiens
  CDR3 for beta chain variable domain of TCR clone 101201 (TRBV27, TRBJ1-1)
CASSSRGRTGYTEALF

SEQ ID NO: 202403 - protein, 13 aa, Homo sapiens
  CDR3 for alpha chain variable domain of TCR clone 101202 (TRAV12-2, TRAJ50)
CAVIVTSYDKLIF

SEQ ID NO: 202404 - protein, 14 aa, Homo sapiens
  CDR3 for beta chain variable domain of TCR clone 101202 (TRBV9, TRBJ2-1)
CASSVDPRGKEQFF

SEQ ID NO: 202405 - protein, 13 aa, Homo sapiens
  CDR3 for alpha chain variable domain of TCR clone 101203 (TRAV30, TRAJ6)
CGFIEGGSYIPTF

SEQ ID NO: 202406 - protein, 13 aa, Homo sapiens
  CDR3 for beta chain variable domain of TCR clone 101203 (TRBV5-4, TRBJ2-5)
CASSPVSQETQYS

SEQ ID NO: 202407 - protein, 14 aa, Homo sapiens
  CDR3 for alpha chain variable domain of TCR clone 101204 (TRAV4, TRAJ6)
CLVGEAGGSYIPTF

SEQ ID NO: 202408 - protein, 15 aa, Homo sapiens
  CDR3 for beta chain variable domain of TCR clone 101204 (TRBV12-4, TRBJ2-1)
CASSLSTGVSNEQFF

SEQ ID NO: 202409 - protein, 15 aa, Homo sapiens
  CDR3 for alpha chain variable domain of TCR clone 101205 (TRAV3, TRAJ9)
CAVRARNTGGFKTIF

SEQ ID NO: 202410 - protein, 12 aa, Homo sapiens
  CDR3 for beta chain variable domain of TCR clone 101205 (TRBV11-2, TRBJ2-7)
CASSLPTYEHYF

SEQ ID NO: 202411 - protein, 13 aa, Homo sapiens
  CDR3 for alpha chain variable domain of TCR clone 101206 (TRAV23/DV6, TRAJ22)
CAPYSGSARQLTF

SEQ ID NO: 202412 - protein, 17 aa, Homo sapiens
  CDR3 for beta chain variable domain of TCR clone 101206 (TRBV7-8, TRBJ2-6)
CASSAGTGGAGANVLTF

SEQ ID NO: 202413 - protein, 16 aa, Homo sapiens
  CDR3 for alpha chain variable domain of TCR clone 101207 (TRAV14/DV4, TRAJ53)
CAMREGGGGSNYKLTF

SEQ ID NO: 202414 - protein, 15 aa, Homo sapiens
  CDR3 for beta chain variable domain of TCR clone 101207 (TRBV7-2, TRBJ2-1)
CASSSGLAGGNEQFF

SEQ ID NO: 202415 - protein, 14 aa, Homo sapiens
  CDR3 for alpha chain variable domain of TCR clone 101208 (TRAV12-3, TRAJ10)
SHLPLPGGGNKLTF

SEQ ID NO: 202416 - protein, 15 aa, Homo sapiens
  CDR3 for beta chain variable domain of TCR clone 101208 (TRBV11-2, TRBJ1-3)
CASSLDGTVGNTIYF

SEQ ID NO: 202417 - protein, 15 aa, Homo sapiens
  CDR3 for alpha chain variable domain of TCR clone 101209 (TRAV12-1, TRAJ44)
CVVDTPQGTASKLTF

SEQ ID NO: 202418 - protein, 14 aa, Homo sapiens
  CDR3 for beta chain variable domain of TCR clone 101209 (TRBV7-9, TRBJ2-1)
CARSPRDSLYEQFF

SEQ ID NO: 202419 - protein, 16 aa, Homo sapiens
  CDR3 for alpha chain variable domain of TCR clone 101210 (TRAV4, TRAJ22)
CLVDDLYSGSARQLTF

SEQ ID NO: 202420 - protein, 16 aa, Homo sapiens
  CDR3 for beta chain variable domain of TCR clone 101210 (TRBV7-9, TRBJ2-1)
CASSDVAGGSYNEQFF

SEQ ID NO: 202421 - protein, 13 aa, Homo sapiens
  CDR3 for alpha chain variable domain of TCR clone 101211 (TRAV21, TRAJ20)
CAVGLRVDYKLSF

SEQ ID NO: 202422 - protein, 15 aa, Homo sapiens
  CDR3 for beta chain variable domain of TCR clone 101211 (TRBV25-1, TRBJ1-4)
CASSPGDSTNEKLFF

SEQ ID NO: 202423 - protein, 14 aa, Homo sapiens
  CDR3 for alpha chain variable domain of TCR clone 101212 (TRAV2, TRAJ29)
CAVTPPSGNTPLVF

SEQ ID NO: 202424 - protein, 13 aa, Homo sapiens
  CDR3 for beta chain variable domain of TCR clone 101212 (TRBV11-2, TRBJ2-1)
CASSVGLAGGRFF

SEQ ID NO: 202425 - protein, 14 aa, Homo sapiens
  CDR3 for alpha chain variable domain of TCR clone 101213 (TRAV8-6, TRAJ41)
CAVSPSNSGYALNF

SEQ ID NO: 202426 - protein, 13 aa, Homo sapiens
  CDR3 for beta chain variable domain of TCR clone 101213 (TRBV7-9, TRBJ1-2)
CASSLKQNYGYTF

SEQ ID NO: 202427 - protein, 14 aa, Homo sapiens
  CDR3 for alpha chain variable domain of TCR clone 101214 (TRAV12-2, TRAJ13)
CAVKKTGGYQKVTV

SEQ ID NO: 202428 - protein, 16 aa, Homo sapiens
  CDR3 for beta chain variable domain of TCR clone 101214 (TRBV12-5, TRBJ2-5)
CASGPRTSGNQETQYF

SEQ ID NO: 202429 - protein, 16 aa, Homo sapiens
  CDR3 for alpha chain variable domain of TCR clone 101215 (TRAV3, TRAJ37)
CAVRPHGSGNTGKLIF

SEQ ID NO: 202430 - protein, 16 aa, Homo sapiens
  CDR3 for beta chain variable domain of TCR clone 101215 (TRBV9, TRBJ1-2)
CASSVEEKVSPYSYTF

SEQ ID NO: 202431 - protein, 17 aa, Homo sapiens
  CDR3 for alpha chain variable domain of TCR clone 101216 (TRAV16, TRAJ58)
CITVLSNGGTSGSRLTF

SEQ ID NO: 202432 - protein, 17 aa, Homo sapiens
  CDR3 for beta chain variable domain of TCR clone 101216 (TRBV18, TRBJ2-1)
CASSKGLSGGADNEQFF

SEQ ID NO: 202433 - protein, 15 aa, Homo sapiens
  CDR3 for alpha chain variable domain of TCR clone 101217 (TRAV3, TRAJ12)
CAVRDIRDSSYKLIF

SEQ ID NO: 202434 - protein, 13 aa, Homo sapiens
  CDR3 for beta chain variable domain of TCR clone 101217 (TRBV19, TRBJ2-5)
CASSMGGAGTQYF

SEQ ID NO: 202435 - protein, 14 aa, Homo sapiens
  CDR3 for alpha chain variable domain of TCR clone 101218 (TRAV12-2, TRAJ13)
CAVKKTGGYQKVTF

SEQ ID NO: 202436 - protein, 14 aa, Homo sapiens
  CDR3 for beta chain variable domain of TCR clone 101218 (TRBV12-5, TRBJ2-5)
CASGSRTHQETKYF

SEQ ID NO: 202437 - protein, 13 aa, Homo sapiens
  CDR3 for alpha chain variable domain of TCR clone 101219 (TRAV8-4, TRAJ30)
CAVSVNRDDKIIF

SEQ ID NO: 202438 - protein, 12 aa, Homo sapiens
  CDR3 for beta chain variable domain of TCR clone 101219 (TRBV12-4, TRBJ2-7)
CASSLGGYEQYF

SEQ ID NO: 202439 - protein, 16 aa, Homo sapiens
  CDR3 for alpha chain variable domain of TCR clone 101220 (TRAV8-4, TRAJ18)
CAVTANGGSTLGRLSF

SEQ ID NO: 202440 - protein, 14 aa, Homo sapiens
  CDR3 for beta chain variable domain of TCR clone 101220 (TRBV12-4, TRBJ1-2)
CASSSAGHIYGYTF

SEQ ID NO: 202441 - protein, 14 aa, Homo sapiens
  CDR3 for alpha chain variable domain of TCR clone 101221 (TRAV13-1, TRAJ22)
CAARGFGSARQLTF

SEQ ID NO: 202442 - protein, 15 aa, Homo sapiens
  CDR3 for beta chain variable domain of TCR clone 101221 (TRBV9, TRBJ1-6)
CASSVAGTGDSPLHF

SEQ ID NO: 202443 - protein, 12 aa, Homo sapiens
  CDR3 for alpha chain variable domain of TCR clone 101222 (TRAV16, TRAJ10)
CSRTGGGNKLTF

SEQ ID NO: 202444 - protein, 15 aa, Homo sapiens
  CDR3 for beta chain variable domain of TCR clone 101222 (TRBV9, TRBJ1-6)
CASSVAGTGDSPLQF

SEQ ID NO: 202445 - protein, 12 aa, Homo sapiens
  CDR3 for alpha chain variable domain of TCR clone 101223 (TRAV1-1, TRAJ20)
CAVREDDYKLSF

SEQ ID NO: 202446 - protein, 16 aa, Homo sapiens
  CDR3 for beta chain variable domain of TCR clone 101223 (TRBV6-5, TRBJ2-1)
CASSETLAGHYNEQFF

SEQ ID NO: 202447 - protein, 13 aa, Homo sapiens
  CDR3 for alpha chain variable domain of TCR clone 101224 (TRAV8-3, TRAJ48)
CAVVPFGNEKLTF

SEQ ID NO: 202448 - protein, 14 aa, Homo sapiens
  CDR3 for beta chain variable domain of TCR clone 101224 (TRBV18, TRBJ2-7)
YASSPRGGAYEQYF

SEQ ID NO: 202449 - protein, 15 aa, Homo sapiens
  CDR3 for alpha chain variable domain of TCR clone 101225 (TRAV17, TRAJ22)
CATAPTSGSARQLTF

SEQ ID NO: 202450 - protein, 13 aa, Homo sapiens
  CDR3 for beta chain variable domain of TCR clone 101225 (TRBV6-5, TRBJ1-2)
CASSLDTYYGYTF

SEQ ID NO: 202451 - protein, 18 aa, Homo sapiens
  CDR3 for alpha chain variable domain of TCR clone 101226 (TRAV13-1, TRAJ52)
CAAKNPNAGGTSYGKLTF

SEQ ID NO: 202452 - protein, 17 aa, Homo sapiens
  CDR3 for beta chain variable domain of TCR clone 101226 (TRBV6-1, TRBJ2-3)
CASSERGGSQIRSILAQ

SEQ ID NO: 202453 - protein, 15 aa, Homo sapiens
  CDR3 for alpha chain variable domain of TCR clone 101227 (TRAV13-2, TRAJ53)
CAETVSGGSNYKLTF

SEQ ID NO: 202454 - protein, 14 aa, Homo sapiens
  CDR3 for beta chain variable domain of TCR clone 101227 (TRBV11-2, TRBJ2-7)
CASSLGAGAYEQYF

SEQ ID NO: 202455 - protein, 14 aa, Homo sapiens
  CDR3 for alpha chain variable domain of TCR clone 101228 (TRAV17, TRAJ6)
CATNPAGGSYIPTF

SEQ ID NO: 202456 - protein, 12 aa, Homo sapiens
  CDR3 for beta chain variable domain of TCR clone 101228 (TRBV12-4, TRBJ2-7)
CASSLGGYEQYF

SEQ ID NO: 202457 - protein, 16 aa, Homo sapiens
  CDR3 for alpha chain variable domain of TCR clone 101229 (TRAV1-2, TRAJ10)
CAVRGVLTGGGNKLTF

SEQ ID NO: 202458 - protein, 15 aa, Homo sapiens
  CDR3 for beta chain variable domain of TCR clone 101229 (TRBV13, TRBJ1-5)
CASSFGQGGVQPQHF

SEQ ID NO: 202459 - protein, 10 aa, Homo sapiens
  CDR3 for alpha chain variable domain of TCR clone 101230 (TRAV13-2, TRAJ49)
CADTGNQFYF

SEQ ID NO: 202460 - protein, 19 aa, Homo sapiens
  CDR3 for beta chain variable domain of TCR clone 101230 (TRBV25-1, TRBJ2-2)
CAILVYRVDRGRKTGELFF

SEQ ID NO: 202461 - protein, 15 aa, Homo sapiens
  CDR3 for alpha chain variable domain of TCR clone 101231 (TRAV27, TRAJ38)
CAARRNAGNNRKRIW

SEQ ID NO: 202462 - protein, 13 aa, Homo sapiens
  CDR3 for beta chain variable domain of TCR clone 101231 (TRBV10-3, TRBJ2-7)
CASKLAVNYEQYF

SEQ ID NO: 202463 - protein, 16 aa, Homo sapiens
  CDR3 for alpha chain variable domain of TCR clone 101232 (TRAV3, TRAJ37)
CAVRPHGSGNTGNLIF

SEQ ID NO: 202464 - protein, 14 aa, Homo sapiens
  CDR3 for beta chain variable domain of TCR clone 101232 (TRBV25-1, TRBJ1-1)
CASTHLGGNTEAFF

SEQ ID NO: 202465 - protein, 11 aa, Homo sapiens
  CDR3 for alpha chain variable domain of TCR clone 101233 (TRAV2, TRAJ33)
CAVESNYQLIW

SEQ ID NO: 202466 - protein, 17 aa, Homo sapiens
  CDR3 for beta chain variable domain of TCR clone 101233 (TRBV7-8, TRBJ2-6)
CASSAGTGGAGANVLTF

SEQ ID NO: 202467 - protein, 12 aa, Homo sapiens
  CDR3 for alpha chain variable domain of TCR clone 101234 (TRAV4, TRAJ26)
CLVGDYGQNFVF

SEQ ID NO: 202468 - protein, 16 aa, Homo sapiens
  CDR3 for beta chain variable domain of TCR clone 101234 (TRBV7-2, TRBJ1-2)
CASSSNQDRRGYGYTF

SEQ ID NO: 202469 - protein, 18 aa, Homo sapiens
  CDR3 for alpha chain variable domain of TCR clone 101235 (TRAV13-1, TRAJ52)
CAASKRSAGGTSYGKLTF

SEQ ID NO: 202470 - protein, 19 aa, Homo sapiens
  CDR3 for beta chain variable domain of TCR clone 101235 (TRBV28, TRBJ2-7)
CASSYSGTSRLGWVYEQYS

SEQ ID NO: 202471 - protein, 13 aa, Homo sapiens
  CDR3 for alpha chain variable domain of TCR clone 101236 (TRAV27, TRAJ45)
CGSSGGGADGLTF

SEQ ID NO: 202472 - protein, 13 aa, Homo sapiens
  CDR3 for beta chain variable domain of TCR clone 101236 (TRBV7-7, TRBJ2-5)
CASSRSGQETQYF

SEQ ID NO: 202473 - protein, 14 aa, Homo sapiens
  CDR3 for alpha chain variable domain of TCR clone 101237 (TRAV35, TRAJ40)
CAGSITSGTYKYIF

SEQ ID NO: 202474 - protein, 13 aa, Homo sapiens
  CDR3 for beta chain variable domain of TCR clone 101237 (TRBV20-1, TRBJ1-6)
CSAPLGVGSPLHF

SEQ ID NO: 202475 - protein, 12 aa, Homo sapiens
  CDR3 for alpha chain variable domain of TCR clone 101238 (TRAV6, TRAJ10)
CALERGGNKLTF

SEQ ID NO: 202476 - protein, 15 aa, Homo sapiens
  CDR3 for beta chain variable domain of TCR clone 101238 (TRBV12-4, TRBJ1-5)
CAGSLPGRSNQPQHF

SEQ ID NO: 202477 - protein, 14 aa, Homo sapiens
  CDR3 for alpha chain variable domain of TCR clone 101239 (TRAV26-1, TRAJ40)
CIVRVARETYKYIF

SEQ ID NO: 202478 - protein, 14 aa, Homo sapiens
  CDR3 for beta chain variable domain of TCR clone 101239 (TRBV7-3, TRBJ2-7)
CASSLKADSYEQYF

SEQ ID NO: 202479 - protein, 10 aa, Homo sapiens
  CDR3 for alpha chain variable domain of TCR clone 101240 (TRAV21, TRAJ43)
CAVRIGGMRF

SEQ ID NO: 202480 - protein, 13 aa, Homo sapiens
  CDR3 for beta chain variable domain of TCR clone 101240 (TRBV20-1, TRBJ2-7)
CSAPGLADYEQYF

SEQ ID NO: 202481 - protein, 13 aa, Homo sapiens
  CDR3 for alpha chain variable domain of TCR clone 101241 (TRAV13-1, TRAJ5)
CAARVTGRRALTF

SEQ ID NO: 202482 - protein, 17 aa, Homo sapiens
  CDR3 for beta chain variable domain of TCR clone 101241 (TRBV28, TRBJ2-5)
CASSTPEGDALQETQYF

SEQ ID NO: 202483 - protein, 15 aa, Homo sapiens
  CDR3 for alpha chain variable domain of TCR clone 101242 (TRAV3, TRAJ4)
CAQNMFSGGYNKLIF

SEQ ID NO: 202484 - protein, 16 aa, Homo sapiens
  CDR3 for beta chain variable domain of TCR clone 101242 (TRBV3-1, TRBJ1-6)
CASSQEFQGTYSPLHF

SEQ ID NO: 202485 - protein, 15 aa, Homo sapiens
  CDR3 for alpha chain variable domain of TCR clone 101243 (TRAV13-1, TRAJ49)
CAASTEGNTGNQCYF

SEQ ID NO: 202486 - protein, 12 aa, Homo sapiens
  CDR3 for beta chain variable domain of TCR clone 101243 (TRBV11-2, TRBJ2-2)
CASSLGGGELFF

SEQ ID NO: 202487 - protein, 19 aa, Homo sapiens
  CDR3 for alpha chain variable domain of TCR clone 101244 (TRAV38-1, TRAJ53)
CAFMKHGLESGGSNYKLTF

SEQ ID NO: 202488 - protein, 13 aa, Homo sapiens
  CDR3 for beta chain variable domain of TCR clone 101244 (TRBV19, TRBJ2-7)
CASCPRQSYEQYF

SEQ ID NO: 202489 - protein, 17 aa, Homo sapiens
  CDR3 for alpha chain variable domain of TCR clone 101245 (TRAV3, TRAJ13)
CAVRDMRRTGGYQKVTF

SEQ ID NO: 202490 - protein, 13 aa, Homo sapiens
  CDR3 for beta chain variable domain of TCR clone 101245 (TRBV12-4, TRBJ2-7)
CASSFVPTAEQYF

SEQ ID NO: 202491 - protein, 17 aa, Homo sapiens
  CDR3 for alpha chain variable domain of TCR clone 101246 (TRAV3, TRAJ42)
CAVRDRDYGGSQGNLIF

SEQ ID NO: 202492 - protein, 15 aa, Homo sapiens
  CDR3 for beta chain variable domain of TCR clone 101246 (TRBV6-6, TRBJ2-7)
CASSDSYGGSYEQYF

SEQ ID NO: 202493 - protein, 14 aa, Homo sapiens
  CDR3 for alpha chain variable domain of TCR clone 101247 (TRAV13-2, TRAJ43)
CAEIPTYNNNDMRF

SEQ ID NO: 202494 - protein, 15 aa, Homo sapiens
  CDR3 for beta chain variable domain of TCR clone 101247 (TRBV7-9, TRBJ2-2)
GASGPLDTFPGELFF

SEQ ID NO: 202495 - protein, 16 aa, Homo sapiens
  CDR3 for alpha chain variable domain of TCR clone 101248 (TRAV14/DV4, TRAJ54)
CAMREGRIQGAQKLVF

SEQ ID NO: 202496 - protein, 15 aa, Homo sapiens
  CDR3 for beta chain variable domain of TCR clone 101248 (TRBV3-1, TRBJ2-7)
CASSQEWTGSYEQYF

SEQ ID NO: 202497 - protein, 14 aa, Homo sapiens
  CDR3 for alpha chain variable domain of TCR clone 101249 (TRAV38-1, TRAJ57)
CAFMNTGGSEELVF

SEQ ID NO: 202498 - protein, 12 aa, Homo sapiens
  CDR3 for beta chain variable domain of TCR clone 101249 (TRBV20-1, TRBJ1-5)
CSTSQGNQPQHF

SEQ ID NO: 202499 - protein, 14 aa, Homo sapiens
  CDR3 for alpha chain variable domain of TCR clone 101250 (TRAV8-3, TRAJ4)
CAVGASGGYNKLIF

SEQ ID NO: 202500 - protein, 14 aa, Homo sapiens
  CDR3 for beta chain variable domain of TCR clone 101250 (TRBV7-2, TRBJ1-2)
CASSSQGAHYGYTF

SEQ ID NO: 202501 - protein, 12 aa, Homo sapiens
  CDR3 for alpha chain variable domain of TCR clone 101251 (TRAV3, TRAJ26)
CAVRDYGQNFVF

SEQ ID NO: 202502 - protein, 16 aa, Homo sapiens
  CDR3 for beta chain variable domain of TCR clone 101251 (TRBV11-2, TRBJ1-2)
CASSPSGREANYSYTF

SEQ ID NO: 202503 - protein, 13 aa, Homo sapiens
  CDR3 for alpha chain variable domain of TCR clone 101252 (TRAV12-2, TRAJ11)
CAVPNSGYSTLTF

SEQ ID NO: 202504 - protein, 15 aa, Homo sapiens
  CDR3 for beta chain variable domain of TCR clone 101252 (TRBV6-1, TRBJ2-6)
CASSSRPSGANVLTF

SEQ ID NO: 202505 - protein, 13 aa, Homo sapiens
  CDR3 for alpha chain variable domain of TCR clone 101253 (TRAV21, TRAJ27)
CAARPGNAGKSTF

SEQ ID NO: 202506 - protein, 14 aa, Homo sapiens
  CDR3 for beta chain variable domain of TCR clone 101253 (TRBV7-2, TRBJ2-7)
CASSLPPGQGPQYF

SEQ ID NO: 202507 - protein, 14 aa, Homo sapiens
  CDR3 for alpha chain variable domain of TCR clone 101254 (TRAV12-2, TRAJ17)
CAVLFKAAGNKPTF

SEQ ID NO: 202508 - protein, 14 aa, Homo sapiens
  CDR3 for beta chain variable domain of TCR clone 101254 (TRBV29-1, TRBJ2-1)
CSVGAVAGGNEQFF

SEQ ID NO: 202509 - protein, 14 aa, Homo sapiens
  CDR3 for alpha chain variable domain of TCR clone 101255 (TRAV12-3, TRAJ54)
CAMSALQGAQKLVF

SEQ ID NO: 202510 - protein, 15 aa, Homo sapiens
  CDR3 for beta chain variable domain of TCR clone 101255 (TRBV19, TRBJ2-4)
CASSTPGIARNIQYF

SEQ ID NO: 202511 - protein, 13 aa, Homo sapiens
  CDR3 for alpha chain variable domain of TCR clone 101256 (TRAV21, TRAJ57)
CAVTQGGSEKLVF

SEQ ID NO: 202512 - protein, 16 aa, Homo sapiens
  CDR3 for beta chain variable domain of TCR clone 101256 (TRBV5-4, TRBJ2-3)
CASQQPGAGGADTQYF

SEQ ID NO: 202513 - protein, 15 aa, Homo sapiens
  CDR3 for alpha chain variable domain of TCR clone 101257 (TRAV26-2, TRAJ13)
CILRDLSGGYQKVTF

SEQ ID NO: 202514 - protein, 14 aa, Homo sapiens
  CDR3 for beta chain variable domain of TCR clone 101257 (TRBV4-1, TRBJ2-3)
CASSQEGSTGTQYL

SEQ ID NO: 202515 - protein, 18 aa, Homo sapiens
  CDR3 for alpha chain variable domain of TCR clone 101258 (TRAV26-1, TRAJ23)
CIVRVGLEVWNQGGKLIF

SEQ ID NO: 202516 - protein, 16 aa, Homo sapiens
  CDR3 for beta chain variable domain of TCR clone 101258 (TRBV5-1, TRBJ1-1)
CASSSGGNSLNTEAFF

SEQ ID NO: 202517 - protein, 12 aa, Homo sapiens
  CDR3 for alpha chain variable domain of TCR clone 101259 (TRAV13-2, TRAJ41)
CAKNIGRYALNF

SEQ ID NO: 202518 - protein, 12 aa, Homo sapiens
  CDR3 for beta chain variable domain of TCR clone 101259 (TRBV7-9, TRBJ1-1)
CASSVSGGVAFF

SEQ ID NO: 202519 - protein, 11 aa, Homo sapiens
  CDR3 for alpha chain variable domain of TCR clone 101260 (TRAV21, TRAJ34)
CAVTNTDKLIF

SEQ ID NO: 202520 - protein, 15 aa, Homo sapiens
  CDR3 for beta chain variable domain of TCR clone 101260 (TRBV11-2, TRBJ2-3)
CASSARRGRGDTQYF

SEQ ID NO: 202521 - protein, 14 aa, Homo sapiens
  CDR3 for alpha chain variable domain of TCR clone 101261 (TRAV4, TRAJ9)
CLVGSGTGGFKTIF

SEQ ID NO: 202522 - protein, 14 aa, Homo sapiens
  CDR3 for beta chain variable domain of TCR clone 101261 (TRBV12-5, TRBJ2-5)
CASGSRTHQETQYF

SEQ ID NO: 202523 - protein, 23 aa, Homo sapiens
  CDR3 for alpha chain variable domain of TCR clone 101262 (TRAV26-1, TRAJ38)
CLADNAGNNHIQNPDPAVYQLRD

SEQ ID NO: 202524 - protein, 13 aa, Homo sapiens
  CDR3 for beta chain variable domain of TCR clone 101262 (TRBV20-1, TRBJ1-1)
CSARGGGNTEAFF

SEQ ID NO: 202525 - protein, 13 aa, Homo sapiens
  CDR3 for alpha chain variable domain of TCR clone 101263 (TRAV36/DV7, TRAJ37)
CAVFSSNTGTLIF

SEQ ID NO: 202526 - protein, 16 aa, Homo sapiens
  CDR3 for beta chain variable domain of TCR clone 101263 (TRBV3-1, TRBJ2-5)
CASSPGQFNGFGTQYF

SEQ ID NO: 202527 - protein, 15 aa, Homo sapiens
  CDR3 for alpha chain variable domain of TCR clone 101264 (TRAV26-1, TRAJ48)
CIARWSWFGNEKLTF

SEQ ID NO: 202528 - protein, 12 aa, Homo sapiens
  CDR3 for beta chain variable domain of TCR clone 101264 (TRBV19, TRBJ2-5)
CASSIAEETQYF

SEQ ID NO: 202529 - protein, 18 aa, Homo sapiens
  CDR3 for alpha chain variable domain of TCR clone 101265 (TRAV26-1, TRAJ22)
CIVRVALISSGSARQLTF

SEQ ID NO: 202530 - protein, 15 aa, Homo sapiens
  CDR3 for beta chain variable domain of TCR clone 101265 (TRBV11-2, TRBJ2-1)
CASSLGPDSYNEQFF

SEQ ID NO: 202531 - protein, 15 aa, Homo sapiens
  CDR3 for alpha chain variable domain of TCR clone 101266 (TRAV38-1, TRAJ30)
CAFMMSYGGEDKIIF

SEQ ID NO: 202532 - protein, 16 aa, Homo sapiens
  CDR3 for beta chain variable domain of TCR clone 101266 (TRBV7-9, TRBJ2-7)
CASSFGLAGPSYEQYF

SEQ ID NO: 202533 - protein, 15 aa, Homo sapiens
  CDR3 for alpha chain variable domain of TCR clone 101267 (TRAV1-2, TRAJ40)
CLLPLCCSRNLQYIF

SEQ ID NO: 202534 - protein, 16 aa, Homo sapiens
  CDR3 for beta chain variable domain of TCR clone 101267 (TRBV29-1, TRBJ2-7)
CSVEVVGTSGSYEQYF

SEQ ID NO: 202535 - protein, 17 aa, Homo sapiens
  CDR3 for alpha chain variable domain of TCR clone 101268 (TRAV12-3, TRAJ6)
CAMSARGGAGGSYIPTF

SEQ ID NO: 202536 - protein, 18 aa, Homo sapiens
  CDR3 for beta chain variable domain of TCR clone 101268 (TRBV12-4, TRBJ2-4)
CASSRTGAVDVAKNIQYF

SEQ ID NO: 202537 - protein, 14 aa, Homo sapiens
  CDR3 for alpha chain variable domain of TCR clone 101269 (TRAV17, TRAJ57)
CATDPQGGSEKMVF

SEQ ID NO: 202538 - protein, 18 aa, Homo sapiens
  CDR3 for beta chain variable domain of TCR clone 101269 (TRBV6-6, TRBJ1-3)
CASSYSKWDSISGNTIYF

SEQ ID NO: 202539 - protein, 16 aa, Homo sapiens
  CDR3 for alpha chain variable domain of TCR clone 101270 (TRAV30, TRAJ24)
CGTEIVDADIWGKFQF

SEQ ID NO: 202540 - protein, 14 aa, Homo sapiens
  CDR3 for beta chain variable domain of TCR clone 101270 (TRBV7-2, TRBJ2-7)
CASSPKTSFYEQYF

SEQ ID NO: 202541 - protein, 15 aa, Homo sapiens
  CDR3 for alpha chain variable domain of TCR clone 101271 (TRAV17, TRAJ35)
CATAFVIGFGNVLHC

SEQ ID NO: 202542 - protein, 14 aa, Homo sapiens
  CDR3 for beta chain variable domain of TCR clone 101271 (TRBV4-1, TRBJ2-2)
CASSQAVNTGELFF

SEQ ID NO: 202543 - protein, 14 aa, Homo sapiens
  CDR3 for alpha chain variable domain of TCR clone 101272 (TRAV9-2, TRAJ39)
CALYIYNADNMLTF

SEQ ID NO: 202544 - protein, 13 aa, Homo sapiens
  CDR3 for beta chain variable domain of TCR clone 101272 (TRBV10-2, TRBJ2-7)
CASGASGGYEQYF

SEQ ID NO: 202545 - protein, 14 aa, Homo sapiens
  CDR3 for alpha chain variable domain of TCR clone 101273 (TRAV2, TRAJ9)
CAVEDRRGGFKTIF

SEQ ID NO: 202546 - protein, 16 aa, Homo sapiens
  CDR3 for beta chain variable domain of TCR clone 101273 (TRBV28, TRBJ1-5)
CASSLTGQGWNQPQHF

SEQ ID NO: 202547 - protein, 14 aa, Homo sapiens
  CDR3 for alpha chain variable domain of TCR clone 101274 (TRAV2, TRAJ37)
CAVDFTRNTGKLIF

SEQ ID NO: 202548 - protein, 13 aa, Homo sapiens
  CDR3 for beta chain variable domain of TCR clone 101274 (TRBV4-2, TRBJ1-1)
CASSQAGNTEAFF

SEQ ID NO: 202549 - protein, 14 aa, Homo sapiens
  CDR3 for alpha chain variable domain of TCR clone 101275 (TRAV1-2, TRAJ16)
CAVNRFSDGQKLLF

SEQ ID NO: 202550 - protein, 16 aa, Homo sapiens
  CDR3 for beta chain variable domain of TCR clone 101275 (TRBV11-1, TRBJ2-2)
CASSAEGLKNTGELFF

SEQ ID NO: 202551 - protein, 16 aa, Homo sapiens
  CDR3 for alpha chain variable domain of TCR clone 101276 (TRAV2, TRAJ4)
CAVEDRFSGGYNKLIF

SEQ ID NO: 202552 - protein, 13 aa, Homo sapiens
  CDR3 for beta chain variable domain of TCR clone 101276 (TRBV7-7, TRBJ2-5)
CASSRGGQETQYF

SEQ ID NO: 202553 - protein, 16 aa, Homo sapiens
  CDR3 for alpha chain variable domain of TCR clone 101277 (TRAV12-1, TRAJ43)
CVVNPHRFGAGTRLPV

SEQ ID NO: 202554 - protein, 13 aa, Homo sapiens
  CDR3 for beta chain variable domain of TCR clone 101277 (TRBV20-1, TRBJ1-1)
CSARGGGNTEAFF

SEQ ID NO: 202555 - protein, 13 aa, Homo sapiens
  CDR3 for alpha chain variable domain of TCR clone 101278 (TRAV12-2, TRAJ50)
CAVIVTSYDKVIF

SEQ ID NO: 202556 - protein, 13 aa, Homo sapiens
  CDR3 for beta chain variable domain of TCR clone 101278 (TRBV12-4, TRBJ1-1)
CASSSRAGAEAFF

SEQ ID NO: 202557 - protein, 12 aa, Homo sapiens
  CDR3 for alpha chain variable domain of TCR clone 101279 (TRAV23/DV6, TRAJ30)
CAASKGADKIIF

SEQ ID NO: 202558 - protein, 13 aa, Homo sapiens
  CDR3 for beta chain variable domain of TCR clone 101279 (TRBV19, TRBJ1-2)
CASSVPGQDGYTF

SEQ ID NO: 202559 - protein, 15 aa, Homo sapiens
  CDR3 for alpha chain variable domain of TCR clone 101280 (TRAV21, TRAJ45)
CAVSYSGGGADGLTF

SEQ ID NO: 202560 - protein, 13 aa, Homo sapiens
  CDR3 for beta chain variable domain of TCR clone 101280 (TRBV20-1, TRBJ2-5)
GSAATELQETQYF

SEQ ID NO: 202561 - protein, 16 aa, Homo sapiens
  CDR3 for alpha chain variable domain of TCR clone 101281 (TRAV30, TRAJ44)
CGTEDKRTGTASKLTF

SEQ ID NO: 202562 - protein, 13 aa, Homo sapiens
  CDR3 for beta chain variable domain of TCR clone 101281 (TRBV2, TRBJ2-7)
CASSVGGSGEQYF

SEQ ID NO: 202563 - protein, 15 aa, Homo sapiens
  CDR3 for alpha chain variable domain of TCR clone 101282 (TRAV2, TRAJ9)
CAVEDRGTGGFRTIF

SEQ ID NO: 202564 - protein, 14 aa, Homo sapiens
  CDR3 for beta chain variable domain of TCR clone 101282 (TRBV4-1, TRBJ2-2)
CASSQAVNTGELFF

SEQ ID NO: 202565 - protein, 15 aa, Homo sapiens
  CDR3 for alpha chain variable domain of TCR clone 101283 (TRAV27, TRAJ38)
CAGRFNAGNNRKLIW

SEQ ID NO: 202566 - protein, 15 aa, Homo sapiens
  CDR3 for beta chain variable domain of TCR clone 101283 (TRBV7-3, TRBJ2-3)
CASSLGLTLGDTQYF

SEQ ID NO: 202567 - protein, 13 aa, Homo sapiens
  CDR3 for alpha chain variable domain of TCR clone 101284 (TRAV12-2, TRAJ15)
CAVFNQAGTALIF

SEQ ID NO: 202568 - protein, 10 aa, Homo sapiens
  CDR3 for beta chain variable domain of TCR clone 101284 (TRBV2, TRBJ2-5)
CASSAATQYF

SEQ ID NO: 202569 - protein, 12 aa, Homo sapiens
  CDR3 for alpha chain variable domain of TCR clone 101285 (TRAV12-3, TRAJ34)
CAMGYNTDKLIF

SEQ ID NO: 202570 - protein, 16 aa, Homo sapiens
  CDR3 for beta chain variable domain of TCR clone 101285 (TRBV7-2, TRBJ2-7)
CASSLVMGVGSYEQYF

SEQ ID NO: 202571 - protein, 14 aa, Homo sapiens
  CDR3 for alpha chain variable domain of TCR clone 101286 (TRAV23/DV6, TRAJ36)
CAASRRTGANNLLF

SEQ ID NO: 202572 - protein, 14 aa, Homo sapiens
  CDR3 for beta chain variable domain of TCR clone 101286 (TRBV6-1, TRBJ1-2)
CASSDTGASYGYTF

SEQ ID NO: 202573 - protein, 13 aa, Homo sapiens
  CDR3 for alpha chain variable domain of TCR clone 101287 (TRAV12-3, TRAJ39)
CAMIDNTGNMLTF

SEQ ID NO: 202574 - protein, 15 aa, Homo sapiens
  CDR3 for beta chain variable domain of TCR clone 101287 (TRBV7-2, TRBJ1-2)
CASSLVSGGDYGYTF

SEQ ID NO: 202575 - protein, 16 aa, Homo sapiens
  CDR3 for alpha chain variable domain of TCR clone 101288 (TRAV30, TRAJ24)
CGTEIVDADSWGKFQS

SEQ ID NO: 202576 - protein, 13 aa, Homo sapiens
  CDR3 for beta chain variable domain of TCR clone 101288 (TRBV7-3, TRBJ1-1)
CASSQDWGAEAFF

SEQ ID NO: 202577 - protein, 14 aa, Homo sapiens
  CDR3 for alpha chain variable domain of TCR clone 101289 (TRAV23/DV6, TRAJ11)
CAASLESGYSTLTF

SEQ ID NO: 202578 - protein, 13 aa, Homo sapiens
  CDR3 for beta chain variable domain of TCR clone 101289 (TRBV4-1, TRBJ2-5)
YASSLTRGETQYF

SEQ ID NO: 202579 - protein, 15 aa, Homo sapiens
  CDR3 for alpha chain variable domain of TCR clone 101290 (TRAV8-3, TRAJ6)
CAVGPVGGGSYIPTF

SEQ ID NO: 202580 - protein, 14 aa, Homo sapiens
  CDR3 for beta chain variable domain of TCR clone 101290 (TRBV19, TRBJ2-2)
CASSTGQGAGELFF

SEQ ID NO: 202581 - protein, 13 aa, Homo sapiens
  CDR3 for alpha chain variable domain of TCR clone 101291 (TRAV8-3, TRAJ44)
CAVVPGTASKLTF

SEQ ID NO: 202582 - protein, 15 aa, Homo sapiens
  CDR3 for beta chain variable domain of TCR clone 101291 (TRBV7-9, TRBJ1-4)
CASSRTGGFNEKLFF

SEQ ID NO: 202583 - protein, 15 aa, Homo sapiens
  CDR3 for alpha chain variable domain of TCR clone 101292 (TRAV3, TRAJ22)
FAVRDRGGSARQLTF

SEQ ID NO: 202584 - protein, 13 aa, Homo sapiens
  CDR3 for beta chain variable domain of TCR clone 101292 (TRBV2, TRBJ1-5)
CATAGPGNQPQHF

SEQ ID NO: 202585 - protein, 12 aa, Homo sapiens
  CDR3 for alpha chain variable domain of TCR clone 101293 (TRAV12-1, TRAJ6)
CVVSERSYIPTF

SEQ ID NO: 202586 - protein, 13 aa, Homo sapiens
  CDR3 for beta chain variable domain of TCR clone 101293 (TRBV10-3, TRBJ1-2)
CAISERDSYGYTF

SEQ ID NO: 202587 - protein, 13 aa, Homo sapiens
  CDR3 for alpha chain variable domain of TCR clone 101294 (TRAV12-1, TRAJ9)
CVVLNTGGFKTIF

SEQ ID NO: 202588 - protein, 13 aa, Homo sapiens
  CDR3 for beta chain variable domain of TCR clone 101294 (TRBV20-1, TRBJ1-1)
CSARGGENTEAFF

SEQ ID NO: 202589 - protein, 14 aa, Homo sapiens
  CDR3 for alpha chain variable domain of TCR clone 101295 (TRAV17, TRAJ16)
CSTADFSDGQKLLF

SEQ ID NO: 202590 - protein, 12 aa, Homo sapiens
  CDR3 for beta chain variable domain of TCR clone 101295 (TRBV24-1, TRBJ1-1)
CATLYPDTEAFF

SEQ ID NO: 202591 - protein, 12 aa, Homo sapiens
  CDR3 for alpha chain variable domain of TCR clone 101296 (TRAV27, TRAJ33)
CAGDGSNYQLIW

SEQ ID NO: 202592 - protein, 13 aa, Homo sapiens
  CDR3 for beta chain variable domain of TCR clone 101296 (TRBV10-3, TRBJ2-7)
CASKLAVNYEQYF

SEQ ID NO: 202593 - protein, 13 aa, Homo sapiens
  CDR3 for alpha chain variable domain of TCR clone 101297 (TRAV2, TRAJ15)
CAVASQAGTALIF

SEQ ID NO: 202594 - protein, 15 aa, Homo sapiens
  CDR3 for beta chain variable domain of TCR clone 101297 (TRBV29-1, TRBJ2-7)
CSVEFFDRGSYEQYF

SEQ ID NO: 202595 - protein, 12 aa, Homo sapiens
  CDR3 for alpha chain variable domain of TCR clone 101298 (TRAV20, TRAJ39)
CAVGNAGNMLTF

SEQ ID NO: 202596 - protein, 13 aa, Homo sapiens
  CDR3 for beta chain variable domain of TCR clone 101298 (TRBV19, TRBJ2-2)
CASRTLGTGELFF

SEQ ID NO: 202597 - protein, 12 aa, Homo sapiens
  CDR3 for alpha chain variable domain of TCR clone 101299 (TRAV3, TRAJ43)
CAVRDPNNDMRF

SEQ ID NO: 202598 - protein, 16 aa, Homo sapiens
  CDR3 for beta chain variable domain of TCR clone 101299 (TRBV7-3, TRBJ2-2)
CASSLKRGTLSGELFF

SEQ ID NO: 202599 - protein, 16 aa, Homo sapiens
  CDR3 for alpha chain variable domain of TCR clone 101300 (TRAV8-3, TRAJ8)
CAVPRDGNTGFQKLVF

SEQ ID NO: 202600 - protein, 14 aa, Homo sapiens
  CDR3 for beta chain variable domain of TCR clone 101300 (TRBV28, TRBJ1-1)
CASSELGRGTEAFF

SEQ ID NO: 202601 - protein, 14 aa, Homo sapiens
  CDR3 for alpha chain variable domain of TCR clone 101301 (TRAV23/DV6, TRAJ9)
CASKYWRLHNYLWS

SEQ ID NO: 202602 - protein, 14 aa, Homo sapiens
  CDR3 for beta chain variable domain of TCR clone 101301 (TRBV6-1, TRBJ2-7)
CASTRTGDYYEQYF

SEQ ID NO: 202603 - protein, 15 aa, Homo sapiens
  CDR3 for alpha chain variable domain of TCR clone 101302 (TRAV23/DV6, TRAJ44)
CAARTLTGTGSKLTF

SEQ ID NO: 202604 - protein, 17 aa, Homo sapiens
  CDR3 for beta chain variable domain of TCR clone 101302 (TRBV24-1, TRBJ2-1)
CATSDVSTSGTYNEQFF

SEQ ID NO: 202605 - protein, 13 aa, Homo sapiens
  CDR3 for alpha chain variable domain of TCR clone 101303 (TRAV35, TRAJ40)
CAGQLSGTYKYIF

SEQ ID NO: 202606 - protein, 14 aa, Homo sapiens
  CDR3 for beta chain variable domain of TCR clone 101303 (TRBV3-1, TRBJ2-5)
CASSPQLAGETQYF

SEQ ID NO: 202607 - protein, 15 aa, Homo sapiens
  CDR3 for alpha chain variable domain of TCR clone 101304 (TRAV12-1, TRAJ45)
CVVLSGGGGANGLTF

SEQ ID NO: 202608 - protein, 12 aa, Homo sapiens
  CDR3 for beta chain variable domain of TCR clone 101304 (TRBV12-5, TRBJ2-5)
CASGQGVETQYF

SEQ ID NO: 202609 - protein, 12 aa, Homo sapiens
  CDR3 for alpha chain variable domain of TCR clone 101305 (TRAV17, TRAJ57)
CATDGGSEKLVF

SEQ ID NO: 202610 - protein, 16 aa, Homo sapiens
  CDR3 for beta chain variable domain of TCR clone 101305 (TRBV7-3, TRBJ2-1)
CASSLEGYRSYNEQFF

SEQ ID NO: 202611 - protein, 18 aa, Homo sapiens
  CDR3 for alpha chain variable domain of TCR clone 101306 (TRAV21, TRAJ52)
CAVRPSPAGGTSYGKLTF

SEQ ID NO: 202612 - protein, 14 aa, Homo sapiens
  CDR3 for beta chain variable domain of TCR clone 101306 (TRBV7-8, TRBJ2-7)
CASSPGLADYEQYF

SEQ ID NO: 202613 - protein, 13 aa, Homo sapiens
  CDR3 for alpha chain variable domain of TCR clone 101307 (TRAV12-3, TRAJ7)
YAMTPYGNNRLAF

SEQ ID NO: 202614 - protein, 16 aa, Homo sapiens
  CDR3 for beta chain variable domain of TCR clone 101307 (TRBV20-1, TRBJ1-4)
CSARPYGGELNEKLFF

SEQ ID NO: 202615 - protein, 11 aa, Homo sapiens
  CDR3 for alpha chain variable domain of TCR clone 101308 (TRAV3, TRAJ13)
CAMTSYQKVTF

SEQ ID NO: 202616 - protein, 15 aa, Homo sapiens
  CDR3 for beta chain variable domain of TCR clone 101308 (TRBV7-9, TRBJ2-7)
CASSSSGLAVYEQYF

SEQ ID NO: 202617 - protein, 12 aa, Homo sapiens
  CDR3 for alpha chain variable domain of TCR clone 101309 (TRAV13-2, TRAJ8)
CAPWLGFQKLVF

SEQ ID NO: 202618 - protein, 20 aa, Homo sapiens
  CDR3 for beta chain variable domain of TCR clone 101309 (TRBV6-4, TRBJ2-7)
CASSDSSVSGQVPTSYEQYF

SEQ ID NO: 202619 - protein, 14 aa, Homo sapiens
  CDR3 for alpha chain variable domain of TCR clone 101310 (TRAV17, TRAJ57)
CATEAQGGSEKLVF

SEQ ID NO: 202620 - protein, 14 aa, Homo sapiens
  CDR3 for beta chain variable domain of TCR clone 101310 (TRBV12-5, TRBJ2-5)
CASGSRTHQETQYF

SEQ ID NO: 202621 - protein, 13 aa, Homo sapiens
  CDR3 for alpha chain variable domain of TCR clone 101311 (TRAV29/DV5, TRAJ47)
CAASAEYGNKLVC

SEQ ID NO: 202622 - protein, 15 aa, Homo sapiens
  CDR3 for beta chain variable domain of TCR clone 101311 (TRBV7-9, TRBJ1-4)
CASSARTGGNEKLFF

SEQ ID NO: 202623 - protein, 14 aa, Homo sapiens
  CDR3 for alpha chain variable domain of TCR clone 101312 (TRAV38-1, TRAJ31)
CAFMKHDNNARLLF

SEQ ID NO: 202624 - protein, 16 aa, Homo sapiens
  CDR3 for beta chain variable domain of TCR clone 101312 (TRBV23-1, TRBJ2-1)
CISAPATGPTYNEQFF

SEQ ID NO: 202625 - protein, 12 aa, Homo sapiens
  CDR3 for alpha chain variable domain of TCR clone 101313 (TRAV12-3, TRAJ17)
CAMTLTGNKLTF

SEQ ID NO: 202626 - protein, 12 aa, Homo sapiens
  CDR3 for beta chain variable domain of TCR clone 101313 (TRBV5-1, TRBJ2-7)
CASSFRGYEQYF

SEQ ID NO: 202627 - protein, 13 aa, Homo sapiens
  CDR3 for alpha chain variable domain of TCR clone 101314 (TRAV13-1, TRAJ39)
CAASIWAGNMLTF

SEQ ID NO: 202628 - protein, 14 aa, Homo sapiens
  CDR3 for beta chain variable domain of TCR clone 101314 (TRBV27, TRBJ2-2)
CASRPGVNTGELFF

SEQ ID NO: 202629 - protein, 15 aa, Homo sapiens
  CDR3 for alpha chain variable domain of TCR clone 101315 (TRAV26-1, TRAJ28)
RIVRVAGAGSYQLTF

SEQ ID NO: 202630 - protein, 19 aa, Homo sapiens
  CDR3 for beta chain variable domain of TCR clone 101315 (TRBV7-3, TRBJ2-7)
CASSLTGVAGGWPSYEQYF

SEQ ID NO: 202631 - protein, 14 aa, Homo sapiens
  CDR3 for alpha chain variable domain of TCR clone 101316 (TRAV12-2, TRAJ45)
CAVYSGGGADGLTF

SEQ ID NO: 202632 - protein, 17 aa, Homo sapiens
  CDR3 for beta chain variable domain of TCR clone 101316 (TRBV3-1, TRBJ2-2)
CASSQFRDKVDNGELFF

SEQ ID NO: 202633 - protein, 14 aa, Homo sapiens
  CDR3 for alpha chain variable domain of TCR clone 101317 (TRAV1-2, TRAJ8)
CAVREDTGFQKLVF

SEQ ID NO: 202634 - protein, 13 aa, Homo sapiens
  CDR3 for beta chain variable domain of TCR clone 101317 (TRBV7-8, TRBJ2-1)
CASTRDAVDEQFF

SEQ ID NO: 202635 - protein, 14 aa, Homo sapiens
  CDR3 for alpha chain variable domain of TCR clone 101318 (TRAV1-2, TRAJ16)
CAVNRFSDGQKLLF

SEQ ID NO: 202636 - protein, 16 aa, Homo sapiens
  CDR3 for beta chain variable domain of TCR clone 101318 (TRBV7-9, TRBJ2-1)
CASSLDPGLAIDEQFF

SEQ ID NO: 202637 - protein, 16 aa, Homo sapiens
  CDR3 for alpha chain variable domain of TCR clone 101319 (TRAV3, TRAJ10)
CAVRDMRAGGGNKLTF

SEQ ID NO: 202638 - protein, 16 aa, Homo sapiens
  CDR3 for beta chain variable domain of TCR clone 101319 (TRBV12-4, TRBJ2-5)
CASSFFVRGRQETQYF

SEQ ID NO: 202639 - protein, 14 aa, Homo sapiens
  CDR3 for alpha chain variable domain of TCR clone 101320 (TRAV12-2, TRAJ13)
CAVKKTGGYHKVTF

SEQ ID NO: 202640 - protein, 15 aa, Homo sapiens
  CDR3 for beta chain variable domain of TCR clone 101320 (TRBV9, TRBJ1-6)
CASSVAGTGDSPLHF

SEQ ID NO: 202641 - protein, 16 aa, Homo sapiens
  CDR3 for alpha chain variable domain of TCR clone 101321 (TRAV3, TRAJ37)
CAVSGKGSGNTGKLIF

SEQ ID NO: 202642 - protein, 13 aa, Homo sapiens
  CDR3 for beta chain variable domain of TCR clone 101321 (TRBV19, TRBJ1-2)
CASSVPGQDGYTF

SEQ ID NO: 202643 - protein, 13 aa, Homo sapiens
  CDR3 for alpha chain variable domain of TCR clone 101322 (TRAV23/DV6, TRAJ12)
CAPRVDSSYKLIF

SEQ ID NO: 202644 - protein, 12 aa, Homo sapiens
  CDR3 for beta chain variable domain of TCR clone 101322 (TRBV7-6, TRBJ2-5)
CASSLSKETQYF

SEQ ID NO: 202645 - protein, 14 aa, Homo sapiens
  CDR3 for alpha chain variable domain of TCR clone 101323 (TRAV12-1, TRAJ17)
CVVNYKAAGNKLTF

SEQ ID NO: 202646 - protein, 14 aa, Homo sapiens
  CDR3 for beta chain variable domain of TCR clone 101323 (TRBV7-6, TRBJ2-3)
CASSVAGGTDTQYF

SEQ ID NO: 202647 - protein, 14 aa, Homo sapiens
  CDR3 for alpha chain variable domain of TCR clone 101324 (TRAV1-2, TRAJ16)
CAVNRFSDGQKLLF

SEQ ID NO: 202648 - protein, 15 aa, Homo sapiens
  CDR3 for beta chain variable domain of TCR clone 101324 (TRBV9, TRBJ1-6)
CANSVAGTGDSPLHF

SEQ ID NO: 202649 - protein, 12 aa, Homo sapiens
  CDR3 for alpha chain variable domain of TCR clone 101325 (TRAV8-3, TRAJ40)
CAVASGTYKYIF

SEQ ID NO: 202650 - protein, 14 aa, Homo sapiens
  CDR3 for beta chain variable domain of TCR clone 101325 (TRBV12-4, TRBJ2-3)
CASSGQGSTDTQYF

SEQ ID NO: 202651 - protein, 14 aa, Homo sapiens
  CDR3 for alpha chain variable domain of TCR clone 101326 (TRAV12-1, TRAJ17)
CVVNYKAAGNKLTF

SEQ ID NO: 202652 - protein, 14 aa, Homo sapiens
  CDR3 for beta chain variable domain of TCR clone 101326 (TRBV7-2, TRBJ2-7)
CASSGLAGRGEQYF

SEQ ID NO: 202653 - protein, 13 aa, Homo sapiens
  CDR3 for alpha chain variable domain of TCR clone 101327 (TRAV12-2, TRAJ52)
CAVSGTSYGKLTF

SEQ ID NO: 202654 - protein, 16 aa, Homo sapiens
  CDR3 for beta chain variable domain of TCR clone 101327 (TRBV11-2, TRBJ1-2)
CASSLDRGGNNYGYTF

SEQ ID NO: 202655 - protein, 16 aa, Homo sapiens
  CDR3 for alpha chain variable domain of TCR clone 101328 (TRAV4, TRAJ8)
CLVGDSGNTGFQKLLF

SEQ ID NO: 202656 - protein, 15 aa, Homo sapiens
  CDR3 for beta chain variable domain of TCR clone 101328 (TRBV15, TRBJ1-2)
CATSRVRASGSGYTF

SEQ ID NO: 202657 - protein, 15 aa, Homo sapiens
  CDR3 for alpha chain variable domain of TCR clone 101329 (TRAV20, TRAJ53)
CAVQASGGSNYKLTF

SEQ ID NO: 202658 - protein, 14 aa, Homo sapiens
  CDR3 for beta chain variable domain of TCR clone 101329 (TRBV7-2, TRBJ1-2)
CASSQTGSAYGYTF

SEQ ID NO: 202659 - protein, 13 aa, Homo sapiens
  CDR3 for alpha chain variable domain of TCR clone 101330 (TRAV12-3, TRAJ9)
CAMRNTGGFKTIF

SEQ ID NO: 202660 - protein, 15 aa, Homo sapiens
  CDR3 for beta chain variable domain of TCR clone 101330 (TRBV2, TRBJ2-1)
CATLPSGLPYNEQFF

SEQ ID NO: 202661 - protein, 16 aa, Homo sapiens
  CDR3 for alpha chain variable domain of TCR clone 101331 (TRAV3, TRAJ37)
CAVREGTYGNTGKLIF

SEQ ID NO: 202662 - protein, 13 aa, Homo sapiens
  CDR3 for beta chain variable domain of TCR clone 101331 (TRBV27, TRBJ2-7)
CASSFVSSYEQYF

SEQ ID NO: 202663 - protein, 12 aa, Homo sapiens
  CDR3 for alpha chain variable domain of TCR clone 101332 (TRAV21, TRAJ27)
CVANTNAGKSTF

SEQ ID NO: 202664 - protein, 15 aa, Homo sapiens
  CDR3 for beta chain variable domain of TCR clone 101332 (TRBV29-1, TRBJ1-4)
CSVVGIGDINEKLFF

SEQ ID NO: 202665 - protein, 14 aa, Homo sapiens
  CDR3 for alpha chain variable domain of TCR clone 101333 (TRAV13-1, TRAJ24)
CAASRTDSWGKLQF

SEQ ID NO: 202666 - protein, 15 aa, Homo sapiens
  CDR3 for beta chain variable domain of TCR clone 101333 (TRBV7-9, TRBJ1-5)
CASSQGHQPKQPQHF

SEQ ID NO: 202667 - protein, 14 aa, Homo sapiens
  CDR3 for alpha chain variable domain of TCR clone 101334 (TRAV2, TRAJ22)
CAVEVKRAARQLTF

SEQ ID NO: 202668 - protein, 14 aa, Homo sapiens
  CDR3 for beta chain variable domain of TCR clone 101334 (TRBV19, TRBJ2-2)
CASTPGYPGGELFF

SEQ ID NO: 202669 - protein, 18 aa, Homo sapiens
  CDR3 for alpha chain variable domain of TCR clone 101335 (TRAV20, TRAJ4)
CAVQPYYMFSVGYNKLIF

SEQ ID NO: 202670 - protein, 13 aa, Homo sapiens
  CDR3 for beta chain variable domain of TCR clone 101335 (TRBV19, TRBJ2-3)
CATWDKITDTQYF

SEQ ID NO: 202671 - protein, 13 aa, Homo sapiens
  CDR3 for alpha chain variable domain of TCR clone 101336 (TRAV13-1, TRAJ37)
CAARSGNTGKLTF

SEQ ID NO: 202672 - protein, 14 aa, Homo sapiens
  CDR3 for beta chain variable domain of TCR clone 101336 (TRBV12-4, TRBJ2-3)
CASSLGQGTDTQYF

SEQ ID NO: 202673 - protein, 12 aa, Homo sapiens
  CDR3 for alpha chain variable domain of TCR clone 101337 (TRAV13-1, TRAJ15)
CAASQAGNALIF

SEQ ID NO: 202674 - protein, 14 aa, Homo sapiens
  CDR3 for beta chain variable domain of TCR clone 101337 (TRBV19, TRBJ2-2)
CASSTLHRSGELFF

SEQ ID NO: 202675 - protein, 14 aa, Homo sapiens
  CDR3 for alpha chain variable domain of TCR clone 101338 (TRAV1-2, TRAJ8)
CAVREDTGFPKLVF

SEQ ID NO: 202676 - protein, 15 aa, Homo sapiens
  CDR3 for beta chain variable domain of TCR clone 101338 (TRBV9, TRBJ1-6)
CASSVAGTGDSPLHF

SEQ ID NO: 202677 - protein, 13 aa, Homo sapiens
  CDR3 for alpha chain variable domain of TCR clone 101339 (TRAV17, TRAJ5)
CAPMDTGRRALTF

SEQ ID NO: 202678 - protein, 20 aa, Homo sapiens
  CDR3 for beta chain variable domain of TCR clone 101339 (TRBV15, TRBJ2-1)
WGTQPCTCVPPAEVDTARFF

SEQ ID NO: 202679 - protein, 12 aa, Homo sapiens
  CDR3 for alpha chain variable domain of TCR clone 101340 (TRAV1-1, TRAJ8)
CAGGTGFQKLVF

SEQ ID NO: 202680 - protein, 15 aa, Homo sapiens
  CDR3 for beta chain variable domain of TCR clone 101340 (TRBV19, TRBJ2-4)
CASRGPRRGENIQYF

SEQ ID NO: 202681 - protein, 12 aa, Homo sapiens
  CDR3 for alpha chain variable domain of TCR clone 101341 (TRAV38-1, TRAJ57)
CAFMKLPPTLVF

SEQ ID NO: 202682 - protein, 16 aa, Homo sapiens
  CDR3 for beta chain variable domain of TCR clone 101341 (TRBV19, TRBJ2-1)
CAWSVAGPSSYNEQFF

SEQ ID NO: 202683 - protein, 15 aa, Homo sapiens
  CDR3 for alpha chain variable domain of TCR clone 101342 (TRAV8-1, TRAJ23)
CAVNSHYNQGGKLIF

SEQ ID NO: 202684 - protein, 15 aa, Homo sapiens
  CDR3 for beta chain variable domain of TCR clone 101342 (TRBV11-2, TRBJ1-6)
CASTLRGTGNSPLLF

SEQ ID NO: 202685 - protein, 12 aa, Homo sapiens
  CDR3 for alpha chain variable domain of TCR clone 101343 (TRAV12-3, TRAJ17)
CAVTLTGNKLTF

SEQ ID NO: 202686 - protein, 20 aa, Homo sapiens
  CDR3 for beta chain variable domain of TCR clone 101343 (TRBV19, TRBJ2-1)
CASSISRTVTSTRLNNEQFF

SEQ ID NO: 202687 - protein, 12 aa, Homo sapiens
  CDR3 for alpha chain variable domain of TCR clone 101344 (TRAV12-3, TRAJ17)
CAMTLTGNKLTF

SEQ ID NO: 202688 - protein, 15 aa, Homo sapiens
  CDR3 for beta chain variable domain of TCR clone 101344 (TRBV11-2, TRBJ2-1)
CASSPAGQSLNEQFF

SEQ ID NO: 202689 - protein, 18 aa, Homo sapiens
  CDR3 for alpha chain variable domain of TCR clone 101345 (TRAV17, TRAJ45)
CATSLDLYSGGGADGLTF

SEQ ID NO: 202690 - protein, 12 aa, Homo sapiens
  CDR3 for beta chain variable domain of TCR clone 101345 (TRBV11-2, TRBJ2-1)
CASSPGNNEQFF

SEQ ID NO: 202691 - protein, 13 aa, Homo sapiens
  CDR3 for alpha chain variable domain of TCR clone 101346 (TRAV20, TRAJ40)
CAVPFSGTYKYIF

SEQ ID NO: 202692 - protein, 13 aa, Homo sapiens
  CDR3 for beta chain variable domain of TCR clone 101346 (TRBV15, TRBJ2-5)
CATSQIGEEAQYF

SEQ ID NO: 202693 - protein, 17 aa, Homo sapiens
  CDR3 for alpha chain variable domain of TCR clone 101347 (TRAV13-1, TRAJ52)
CAASSGAGGTSYGKLTF

SEQ ID NO: 202694 - protein, 15 aa, Homo sapiens
  CDR3 for beta chain variable domain of TCR clone 101347 (TRBV2, TRBJ2-1)
CTSSELAGSYNEQFF

SEQ ID NO: 202695 - protein, 13 aa, Homo sapiens
  CDR3 for alpha chain variable domain of TCR clone 101348 (TRAV17, TRAJ34)
CATDLYNTDTLIF

SEQ ID NO: 202696 - protein, 12 aa, Homo sapiens
  CDR3 for beta chain variable domain of TCR clone 101348 (TRBV11-2, TRBJ2-2)
CASSLGGGELFF

SEQ ID NO: 202697 - protein, 16 aa, Homo sapiens
  CDR3 for alpha chain variable domain of TCR clone 101349 (TRAV30, TRAJ24)
CGTEIVDADSWGKFQF

SEQ ID NO: 202698 - protein, 14 aa, Homo sapiens
  CDR3 for beta chain variable domain of TCR clone 101349 (TRBV7-3, TRBJ2-2)
CASSPDPSGRELFF

SEQ ID NO: 202699 - protein, 16 aa, Homo sapiens
  CDR3 for alpha chain variable domain of TCR clone 101350 (TRAV4, TRAJ22)
CLVGDLYTGSARQLTF

SEQ ID NO: 202700 - protein, 16 aa, Homo sapiens
  CDR3 for beta chain variable domain of TCR clone 101350 (TRBV7-9, TRBJ2-1)
CASSDVAGGSYNEQFF

SEQ ID NO: 202701 - protein, 14 aa, Homo sapiens
  CDR3 for alpha chain variable domain of TCR clone 101351 (TRAV1-2, TRAJ8)
CAVGEDTGFQKLVF

SEQ ID NO: 202702 - protein, 15 aa, Homo sapiens
  CDR3 for beta chain variable domain of TCR clone 101351 (TRBV7-3, TRBJ2-2)
CASSETGQGTGELFF

SEQ ID NO: 202703 - protein, 18 aa, Homo sapiens
  CDR3 for alpha chain variable domain of TCR clone 101352 (TRAV1-2, TRAJ18)
CAVRDMGDRGSTLGRLYF

SEQ ID NO: 202704 - protein, 13 aa, Homo sapiens
  CDR3 for beta chain variable domain of TCR clone 101352 (TRBV10-3, TRBJ2-7)
CASKLAVNYEQYF

SEQ ID NO: 202705 - protein, 18 aa, Homo sapiens
  CDR3 for alpha chain variable domain of TCR clone 101353 (TRAV21, TRAJ52)
CAVRPSPAGVTSYGKLTF

SEQ ID NO: 202706 - protein, 13 aa, Homo sapiens
  CDR3 for beta chain variable domain of TCR clone 101353 (TRBV7-3, TRBJ1-1)
CASSQDWGAEAFF

SEQ ID NO: 202707 - protein, 18 aa, Homo sapiens
  CDR3 for alpha chain variable domain of TCR clone 101354 (TRAV26-1, TRAJ5)
CIVRVVPPRDTGRRALTF

SEQ ID NO: 202708 - protein, 14 aa, Homo sapiens
  CDR3 for beta chain variable domain of TCR clone 101354 (TRBV7-2, TRBJ2-7)
CASSPKTSFYEQYF

SEQ ID NO: 202709 - protein, 10 aa, Homo sapiens
  CDR3 for alpha chain variable domain of TCR clone 101355 (TRAV13-2, TRAJ49)
CADTGNQFYF

SEQ ID NO: 202710 - protein, 15 aa, Homo sapiens
  CDR3 for beta chain variable domain of TCR clone 101355 (TRBV15, TRBJ1-2)
CATSRVRASGSGYTF

SEQ ID NO: 202711 - protein, 13 aa, Homo sapiens
  CDR3 for alpha chain variable domain of TCR clone 101356 (TRAV2, TRAJ40)
CAVVTSGTYKYIF

SEQ ID NO: 202712 - protein, 14 aa, Homo sapiens
  CDR3 for beta chain variable domain of TCR clone 101356 (TRBV11-2, TRBJ2-7)
CASSLGAGAYEQYF

SEQ ID NO: 202713 - protein, 14 aa, Homo sapiens
  CDR3 for alpha chain variable domain of TCR clone 101357 (TRAV17, TRAJ45)
CATASGGGADGLTF

SEQ ID NO: 202714 - protein, 15 aa, Homo sapiens
  CDR3 for beta chain variable domain of TCR clone 101357 (TRBV11-2, TRBJ2-1)
CASSRNRRLMYEQFF

SEQ ID NO: 202715 - protein, 14 aa, Homo sapiens
  CDR3 for alpha chain variable domain of TCR clone 101358 (TRAV20, TRAJ29)
CAVQAWVGNTPLVF

SEQ ID NO: 202716 - protein, 14 aa, Homo sapiens
  CDR3 for beta chain variable domain of TCR clone 101358 (TRBV19, TRBJ2-1)
CASPTFVLSGEQFF

SEQ ID NO: 202717 - protein, 12 aa, Homo sapiens
  CDR3 for alpha chain variable domain of TCR clone 101359 (TRAV16, TRAJ10)
CSRTGGVNKLTF

SEQ ID NO: 202718 - protein, 11 aa, Homo sapiens
  CDR3 for beta chain variable domain of TCR clone 101359 (TRBV29-1, TRBJ2-5)
CSEDRTGTQYF

SEQ ID NO: 202719 - protein, 15 aa, Homo sapiens
  CDR3 for alpha chain variable domain of TCR clone 101360 (TRAV27, TRAJ38)
CAGRFNAGHNRKLIW

SEQ ID NO: 202720 - protein, 13 aa, Homo sapiens
  CDR3 for beta chain variable domain of TCR clone 101360 (TRBV12-5, TRBJ2-3)
CASQNRGTDTQYF

SEQ ID NO: 202721 - protein, 16 aa, Homo sapiens
  CDR3 for alpha chain variable domain of TCR clone 101361 (TRAV3, TRAJ37)
CTVRPHGSGNTGKLIF

SEQ ID NO: 202722 - protein, 14 aa, Homo sapiens
  CDR3 for beta chain variable domain of TCR clone 101361 (TRBV20-1, TRBJ2-1)
CSARGGSSYNEQFF

SEQ ID NO: 202723 - protein, 13 aa, Homo sapiens
  CDR3 for alpha chain variable domain of TCR clone 101362 (TRAV27, TRAJ3)
ASLRGSSASKIIF

SEQ ID NO: 202724 - protein, 15 aa, Homo sapiens
  CDR3 for beta chain variable domain of TCR clone 101362 (TRBV28, TRBJ1-3)
CASSMGWSSGNTIYF

SEQ ID NO: 202725 - protein, 16 aa, Homo sapiens
  CDR3 for alpha chain variable domain of TCR clone 101363 (TRAV8-3, TRAJ44)
CAVGPFILGTASKLTF

SEQ ID NO: 202726 - protein, 19 aa, Homo sapiens
  CDR3 for beta chain variable domain of TCR clone 101363 (TRBV11-2, TRBJ2-2)
LRTRPCISVPAAYPGSCFF

SEQ ID NO: 202727 - protein, 13 aa, Homo sapiens
  CDR3 for alpha chain variable domain of TCR clone 101364 (TRAV27, TRAJ42)
CAGARGSQGNLIF

SEQ ID NO: 202728 - protein, 15 aa, Homo sapiens
  CDR3 for beta chain variable domain of TCR clone 101364 (TRBV11-2, TRBJ2-7)
CASSLRSPGPYEQYF

SEQ ID NO: 202729 - protein, 18 aa, Homo sapiens
  CDR3 for alpha chain variable domain of TCR clone 101365 (TRAV13-1, TRAJ52)
CAASKRSAGGTSYGKLTF

SEQ ID NO: 202730 - protein, 14 aa, Homo sapiens
  CDR3 for beta chain variable domain of TCR clone 101365 (TRBV19, TRBJ2-5)
CASSMTGQQETQYF

SEQ ID NO: 202731 - protein, 17 aa, Homo sapiens
  CDR3 for alpha chain variable domain of TCR clone 101366 (TRAV4, TRAJ42)
CLVGVLNYGGSQGNLIF

SEQ ID NO: 202732 - protein, 12 aa, Homo sapiens
  CDR3 for beta chain variable domain of TCR clone 101366 (TRBV20-1, TRBJ2-1)
CSAQCTYNEQFF

SEQ ID NO: 202733 - protein, 16 aa, Homo sapiens
  CDR3 for alpha chain variable domain of TCR clone 101367 (TRAV38-1, TRAJ56)
CAFMKRQTGANSKLTF

SEQ ID NO: 202734 - protein, 22 aa, Homo sapiens
  CDR3 for beta chain variable domain of TCR clone 101367 (TRBV7-3, TRBJ2-5)
CASARDRVILRPRDPVLRARHA

SEQ ID NO: 202735 - protein, 16 aa, Homo sapiens
  CDR3 for alpha chain variable domain of TCR clone 101368 (TRAV4, TRAJ22)
CLVGDLYSGSARQLTF

SEQ ID NO: 202736 - protein, 16 aa, Homo sapiens
  CDR3 for beta chain variable domain of TCR clone 101368 (TRBV7-9, TRBJ2-1)
CASSDVAGGSYSEQFF

SEQ ID NO: 202737 - protein, 12 aa, Homo sapiens
  CDR3 for alpha chain variable domain of TCR clone 101369 (TRAV3, TRAJ27)
CAVRDKAGKSTF

SEQ ID NO: 202738 - protein, 14 aa, Homo sapiens
  CDR3 for beta chain variable domain of TCR clone 101369 (TRBV20-1, TRBJ1-1)
CSARDRRTNTEAFF

SEQ ID NO: 202739 - protein, 13 aa, Homo sapiens
  CDR3 for alpha chain variable domain of TCR clone 101370 (TRAV2, TRAJ21)
CAVEDLNFNKFYF

SEQ ID NO: 202740 - protein, 15 aa, Homo sapiens
  CDR3 for beta chain variable domain of TCR clone 101370 (TRBV19, TRBJ2-1)
CASSYSGSPYNEQFF

SEQ ID NO: 202741 - protein, 13 aa, Homo sapiens
  CDR3 for alpha chain variable domain of TCR clone 101371 (TRAV27, TRAJ6)
CAGGTRGSYIPTF

SEQ ID NO: 202742 - protein, 16 aa, Homo sapiens
  CDR3 for beta chain variable domain of TCR clone 101371 (TRBV12-4, TRBJ1-5)
CASSRPVGGSNQPQHF

SEQ ID NO: 202743 - protein, 12 aa, Homo sapiens
  CDR3 for alpha chain variable domain of TCR clone 101372 (TRAV1-2, TRAJ29)
CAVPSGNTPLVF

SEQ ID NO: 202744 - protein, 14 aa, Homo sapiens
  CDR3 for beta chain variable domain of TCR clone 101372 (TRBV5-4, TRBJ1-1)
CASSLDSRRDEAFF

SEQ ID NO: 202745 - protein, 16 aa, Homo sapiens
  CDR3 for alpha chain variable domain of TCR clone 101373 (TRAV13-1, TRAJ45)
CAARGSRKGGADGLTF

SEQ ID NO: 202746 - protein, 13 aa, Homo sapiens
  CDR3 for beta chain variable domain of TCR clone 101373 (TRBV7-9, TRBJ1-2)
CASSLKQNYGYTF

SEQ ID NO: 202747 - protein, 10 aa, Homo sapiens
  CDR3 for alpha chain variable domain of TCR clone 101374 (TRAV36/DV7, TRAJ49)
CALTGNQFYF

SEQ ID NO: 202748 - protein, 16 aa, Homo sapiens
  CDR3 for beta chain variable domain of TCR clone 101374 (TRBV7-3, TRBJ2-2)
CASSLKRGTLSGELFF

SEQ ID NO: 202749 - protein, 19 aa, Homo sapiens
  CDR3 for alpha chain variable domain of TCR clone 101375 (TRAV17, TRAJ52)
CFLLLCYGGWCTSYGKLTF

SEQ ID NO: 202750 - protein, 14 aa, Homo sapiens
  CDR3 for beta chain variable domain of TCR clone 101375 (TRBV28, TRBJ1-5)
CASSLGVLVKPQHF

SEQ ID NO: 202751 - protein, 14 aa, Homo sapiens
  CDR3 for alpha chain variable domain of TCR clone 101376 (TRAV13-1, TRAJ44)
CAAKATGTASKLTF

SEQ ID NO: 202752 - protein, 13 aa, Homo sapiens
  CDR3 for beta chain variable domain of TCR clone 101376 (TRBV19, TRBJ1-2)
CASSQGQVYGYTF

SEQ ID NO: 202753 - protein, 15 aa, Homo sapiens
  CDR3 for alpha chain variable domain of TCR clone 101377 (TRAV21, TRAJ52)
CAVRGGGTSYGKLTF

SEQ ID NO: 202754 - protein, 15 aa, Homo sapiens
  CDR3 for beta chain variable domain of TCR clone 101377 (TRBV18, TRBJ1-5)
CASSPSDWSNQPQHF

SEQ ID NO: 202755 - protein, 16 aa, Homo sapiens
  CDR3 for alpha chain variable domain of TCR clone 101378 (TRAV3, TRAJ37)
CAVRGKGSGNTGKLIF

SEQ ID NO: 202756 - protein, 16 aa, Homo sapiens
  CDR3 for beta chain variable domain of TCR clone 101378 (TRBV7-3, TRBJ2-3)
CASSLSGYRPEDTQYF

SEQ ID NO: 202757 - protein, 14 aa, Homo sapiens
  CDR3 for alpha chain variable domain of TCR clone 101379 (TRAV35, TRAJ50)
CAGHRKTSYNKVIF

SEQ ID NO: 202758 - protein, 13 aa, Homo sapiens
  CDR3 for beta chain variable domain of TCR clone 101379 (TRBV7-7, TRBJ2-3)
CASSLSRADTQYF

SEQ ID NO: 202759 - protein, 16 aa, Homo sapiens
  CDR3 for alpha chain variable domain of TCR clone 101380 (TRAV12-3, TRAJ53)
CAMSPGSGGSNYKLTF

SEQ ID NO: 202760 - protein, 13 aa, Homo sapiens
  CDR3 for beta chain variable domain of TCR clone 101380 (TRBV6-1, TRBJ1-1)
CASSRQGNTEAFF

SEQ ID NO: 202761 - protein, 13 aa, Homo sapiens
  CDR3 for alpha chain variable domain of TCR clone 101381 (TRAV17, TRAJ54)
CATVTQGAQKLVF

SEQ ID NO: 202762 - protein, 15 aa, Homo sapiens
  CDR3 for beta chain variable domain of TCR clone 101381 (TRBV13, TRBJ2-1)
CASSLLSGLNNEQFF

SEQ ID NO: 202763 - protein, 12 aa, Homo sapiens
  CDR3 for alpha chain variable domain of TCR clone 101382 (TRAV13-1, TRAJ48)
CAANFGNEKLTF

SEQ ID NO: 202764 - protein, 15 aa, Homo sapiens
  CDR3 for beta chain variable domain of TCR clone 101382 (TRBV7-9, TRBJ2-7)
CASSLALAEAYEQYF

SEQ ID NO: 202765 - protein, 14 aa, Homo sapiens
  CDR3 for alpha chain variable domain of TCR clone 101383 (TRAV1-2, TRAJ8)
CAVREDTGFQKLVF

SEQ ID NO: 202766 - protein, 16 aa, Homo sapiens
  CDR3 for beta chain variable domain of TCR clone 101383 (TRBV7-2, TRBJ2-3)
CASSLARASGISTQYF

SEQ ID NO: 202767 - protein, 23 aa, Homo sapiens
  CDR3 for alpha chain variable domain of TCR clone 101384 (TRAV26-1, TRAJ38)
CIADNAGNNHIQNPDPAVCQLRD

SEQ ID NO: 202768 - protein, 14 aa, Homo sapiens
  CDR3 for beta chain variable domain of TCR clone 101384 (TRBV7-3, TRBJ1-1)
CASSLKGGNTEAFF

SEQ ID NO: 202769 - protein, 12 aa, Homo sapiens
  CDR3 for alpha chain variable domain of TCR clone 101385 (TRAV26-2, TRAJ48)
CILIKGNEKLTF

SEQ ID NO: 202770 - protein, 14 aa, Homo sapiens
  CDR3 for beta chain variable domain of TCR clone 101385 (TRBV28, TRBJ2-7)
CASSTLRGRFEQYF

SEQ ID NO: 202771 - protein, 15 aa, Homo sapiens
  CDR3 for alpha chain variable domain of TCR clone 101386 (TRAV3, TRAJ20)
CAVRDIKLSDSKLSF

SEQ ID NO: 202772 - protein, 16 aa, Homo sapiens
  CDR3 for beta chain variable domain of TCR clone 101386 (TRBV20-1, TRBJ1-4)
CSAPGQGLLTNEKLFF

SEQ ID NO: 202773 - protein, 13 aa, Homo sapiens
  CDR3 for alpha chain variable domain of TCR clone 101387 (TRAV8-3, TRAJ48)
CAVVPFGYEKLTF

SEQ ID NO: 202774 - protein, 15 aa, Homo sapiens
  CDR3 for beta chain variable domain of TCR clone 101387 (TRBV11-2, TRBJ2-1)
CASSSPSTRYNEQFF

SEQ ID NO: 202775 - protein, 15 aa, Homo sapiens
  CDR3 for alpha chain variable domain of TCR clone 101388 (TRAV8-2, TRAJ40)
CVVLGITSGTYKYIF

SEQ ID NO: 202776 - protein, 16 aa, Homo sapiens
  CDR3 for beta chain variable domain of TCR clone 101388 (TRBV7-3, TRBJ2-1)
CASSLEGYRSYNEQFF

SEQ ID NO: 202777 - protein, 13 aa, Homo sapiens
  CDR3 for alpha chain variable domain of TCR clone 101389 (TRAV23/DV6, TRAJ15)
CAALPAGRNCSDI

SEQ ID NO: 202778 - protein, 14 aa, Homo sapiens
  CDR3 for beta chain variable domain of TCR clone 101389 (TRBV7-9, TRBJ1-2)
CASSRQGANYGYTF

SEQ ID NO: 202779 - protein, 13 aa, Homo sapiens
  CDR3 for alpha chain variable domain of TCR clone 101390 (TRAV13-1, TRAJ5)
CAASDTGRRALTF

SEQ ID NO: 202780 - protein, 12 aa, Homo sapiens
  CDR3 for beta chain variable domain of TCR clone 101390 (TRBV28, TRBJ2-3)
CASSFYRDTQYF

SEQ ID NO: 202781 - protein, 13 aa, Homo sapiens
  CDR3 for alpha chain variable domain of TCR clone 101391 (TRAV26-1, TRAJ34)
CIVRPWITDKLIF

SEQ ID NO: 202782 - protein, 18 aa, Homo sapiens
  CDR3 for beta chain variable domain of TCR clone 101391 (TRBV11-2, TRBJ2-3)
CASSLGGASRGAPNTQYF

SEQ ID NO: 202783 - protein, 15 aa, Homo sapiens
  CDR3 for alpha chain variable domain of TCR clone 101392 (TRAV12-3, TRAJ6)
CAMSAASGGSYIPTF

SEQ ID NO: 202784 - protein, 11 aa, Homo sapiens
  CDR3 for beta chain variable domain of TCR clone 101392 (TRBV12-4, TRBJ2-3)
CASTATDTQYF

SEQ ID NO: 202785 - protein, 18 aa, Homo sapiens
  CDR3 for alpha chain variable domain of TCR clone 101393 (TRAV16, TRAJ10)
CAPAGRRKQTHLWDRHSA

SEQ ID NO: 202786 - protein, 15 aa, Homo sapiens
  CDR3 for beta chain variable domain of TCR clone 101393 (TRBV6-3, TRBJ2-7)
CASSSPGTVFYEQYF

SEQ ID NO: 202787 - protein, 11 aa, Homo sapiens
  CDR3 for alpha chain variable domain of TCR clone 101394 (TRAV2, TRAJ33)
CAVESDYQLIW

SEQ ID NO: 202788 - protein, 18 aa, Homo sapiens
  CDR3 for beta chain variable domain of TCR clone 101394 (TRBV11-2, TRBJ2-3)
CASSLGGASRGAPNTQYF

SEQ ID NO: 202789 - protein, 14 aa, Homo sapiens
  CDR3 for alpha chain variable domain of TCR clone 101395 (TRAV12-3, TRAJ33)
CAMSVPGSNYQLIW

SEQ ID NO: 202790 - protein, 12 aa, Homo sapiens
  CDR3 for beta chain variable domain of TCR clone 101395 (TRBV14, TRBJ2-7)
CASSSLKGEQYF

SEQ ID NO: 202791 - protein, 12 aa, Homo sapiens
  CDR3 for alpha chain variable domain of TCR clone 101396 (TRAV3, TRAJ39)
CAVTEWSNMLTF

SEQ ID NO: 202792 - protein, 14 aa, Homo sapiens
  CDR3 for beta chain variable domain of TCR clone 101396 (TRBV7-8, TRBJ2-3)
CASSFPDGQDTQYF

SEQ ID NO: 202793 - protein, 12 aa, Homo sapiens
  CDR3 for alpha chain variable domain of TCR clone 101397 (TRAV16, TRAJ49)
CALNEGGNQFYC

SEQ ID NO: 202794 - protein, 14 aa, Homo sapiens
  CDR3 for beta chain variable domain of TCR clone 101397 (TRBV7-9, TRBJ2-1)
CASRPTGLRNEQFF

SEQ ID NO: 202795 - protein, 11 aa, Homo sapiens
  CDR3 for alpha chain variable domain of TCR clone 101398 (TRAV23/DV6, TRAJ43)
CAASSGNDMRF

SEQ ID NO: 202796 - protein, 14 aa, Homo sapiens
  CDR3 for beta chain variable domain of TCR clone 101398 (TRBV4-1, TRBJ1-2)
CASSQDPLPYGDTF

SEQ ID NO: 202797 - protein, 12 aa, Homo sapiens
  CDR3 for alpha chain variable domain of TCR clone 101399 (TRAV10, TRAJ43)
CVVVRVGNEMRF

SEQ ID NO: 202798 - protein, 15 aa, Homo sapiens
  CDR3 for beta chain variable domain of TCR clone 101399 (TRBV2, TRBJ2-7)
CASSEGLARSYEQYF

SEQ ID NO: 202799 - protein, 13 aa, Homo sapiens
  CDR3 for alpha chain variable domain of TCR clone 101400 (TRAV3, TRAJ4)
CAVRDGGYDKLIF

SEQ ID NO: 202800 - protein, 14 aa, Homo sapiens
  CDR3 for beta chain variable domain of TCR clone 101400 (TRBV12-4, TRBJ1-2)
CASSSSAAGSSYTF

SEQ ID NO: 202801 - protein, 12 aa, Homo sapiens
  CDR3 for alpha chain variable domain of TCR clone 101401 (TRAV12-3, TRAJ17)
CAMTLTGNKLTF

SEQ ID NO: 202802 - protein, 15 aa, Homo sapiens
  CDR3 for beta chain variable domain of TCR clone 101401 (TRBV20-1, TRBJ2-7)
CSARDQVSGMDEQCF

SEQ ID NO: 202803 - protein, 14 aa, Homo sapiens
  CDR3 for alpha chain variable domain of TCR clone 101402 (TRAV3, TRAJ22)
CCERPGGSARQLTF

SEQ ID NO: 202804 - protein, 13 aa, Homo sapiens
  CDR3 for beta chain variable domain of TCR clone 101402 (TRBV4-1, TRBJ2-1)
CASSQAGGDEQFF

SEQ ID NO: 202805 - protein, 14 aa, Homo sapiens
  CDR3 for alpha chain variable domain of TCR clone 101403 (TRAV12-2, TRAJ13)
CAVKKTGGYQKVTF

SEQ ID NO: 202806 - protein, 15 aa, Homo sapiens
  CDR3 for beta chain variable domain of TCR clone 101403 (TRBV5-1, TRBJ2-1)
GASSPPRAPYNEQFF

SEQ ID NO: 202807 - protein, 14 aa, Homo sapiens
  CDR3 for alpha chain variable domain of TCR clone 101404 (TRAV1-2, TRAJ16)
GAVNRFSDGQKLLF

SEQ ID NO: 202808 - protein, 13 aa, Homo sapiens
  CDR3 for beta chain variable domain of TCR clone 101404 (TRBV7-9, TRBJ1-2)
CASSLKQNYGYTF

SEQ ID NO: 202809 - protein, 12 aa, Homo sapiens
  CDR3 for alpha chain variable domain of TCR clone 101405 (TRAV13-1, TRAJ15)
CAASQAGTALIF

SEQ ID NO: 202810 - protein, 18 aa, Homo sapiens
  CDR3 for beta chain variable domain of TCR clone 101405 (TRBV7-9, TRBJ2-3)
CASSLPINGQISADTQYF

SEQ ID NO: 202811 - protein, 13 aa, Homo sapiens
  CDR3 for alpha chain variable domain of TCR clone 101406 (TRAV1-2, TRAJ36)
CAVDQTGANNLFF

SEQ ID NO: 202812 - protein, 14 aa, Homo sapiens
  CDR3 for beta chain variable domain of TCR clone 101406 (TRBV20-1, TRBJ2-5)
CSAREMTKQDTQYF

SEQ ID NO: 202813 - protein, 14 aa, Homo sapiens
  CDR3 for alpha chain variable domain of TCR clone 101407 (TRAV8-4, TRAJ17)
CAVSSPAAGNKLTF

SEQ ID NO: 202814 - protein, 14 aa, Homo sapiens
  CDR3 for beta chain variable domain of TCR clone 101407 (TRBV12-4, TRBJ1-2)
CASSPPGPGGGYTF

SEQ ID NO: 202815 - protein, 13 aa, Homo sapiens
  CDR3 for alpha chain variable domain of TCR clone 101408 (TRAV26-1, TRAJ34)
CIVRVGNTDKLIF

SEQ ID NO: 202816 - protein, 14 aa, Homo sapiens
  CDR3 for beta chain variable domain of TCR clone 101408 (TRBV7-2, TRBJ2-5)
CASSPRGSSETQYF

SEQ ID NO: 202817 - protein, 17 aa, Homo sapiens
  CDR3 for alpha chain variable domain of TCR clone 101409 (TRAV12-2, TRAJ39)
CAVNNMLTFGGGTRLMF

SEQ ID NO: 202818 - protein, 16 aa, Homo sapiens
  CDR3 for beta chain variable domain of TCR clone 101409 (TRBV5-3, TRBJ2-2)
CARSFGTGTNTGELFF

SEQ ID NO: 202819 - protein, 13 aa, Homo sapiens
  CDR3 for alpha chain variable domain of TCR clone 101410 (TRAV27, TRAJ45)
CRSSGGGADGLTF

SEQ ID NO: 202820 - protein, 15 aa, Homo sapiens
  CDR3 for beta chain variable domain of TCR clone 101410 (TRBV27, TRBJ1-5)
CASSSSGTGNQPQHF

SEQ ID NO: 202821 - protein, 11 aa, Homo sapiens
  CDR3 for alpha chain variable domain of TCR clone 101411 (TRAV23/DV6, TRAJ49)
CAVAPVTSSIL

SEQ ID NO: 202822 - protein, 13 aa, Homo sapiens
  CDR3 for beta chain variable domain of TCR clone 101411 (TRBV28, TRBJ2-2)
CASIRESTGELFF

SEQ ID NO: 202823 - protein, 12 aa, Homo sapiens
  CDR3 for alpha chain variable domain of TCR clone 101412 (TRAV21, TRAJ42)
CAVGGSQGNPIF

SEQ ID NO: 202824 - protein, 14 aa, Homo sapiens
  CDR3 for beta chain variable domain of TCR clone 101412 (TRBV12-4, TRBJ1-1)
CASSLGTGGTEAFF

SEQ ID NO: 202825 - protein, 17 aa, Homo sapiens
  CDR3 for alpha chain variable domain of TCR clone 101413 (TRAV3, TRAJ6)
CAVRDGPRAGGSYIPTF

SEQ ID NO: 202826 - protein, 17 aa, Homo sapiens
  CDR3 for beta chain variable domain of TCR clone 101413 (TRBV7-6, TRBJ2-5)
CASSSPQAGDPSETQYF

SEQ ID NO: 202827 - protein, 12 aa, Homo sapiens
  CDR3 for alpha chain variable domain of TCR clone 101414 (TRAV21, TRAJ33)
CAKMDSNYQLIW

SEQ ID NO: 202828 - protein, 13 aa, Homo sapiens
  CDR3 for beta chain variable domain of TCR clone 101414 (TRBV12-4, TRBJ1-5)
CASSPDRAQPQHF

SEQ ID NO: 202829 - protein, 14 aa, Homo sapiens
  CDR3 for alpha chain variable domain of TCR clone 101415 (TRAV23/DV6, TRAJ45)
CAASWGGGADGLTF

SEQ ID NO: 202830 - protein, 13 aa, Homo sapiens
  CDR3 for beta chain variable domain of TCR clone 101415 (TRBV4-2, TRBJ1-1)
CASSQAGNTEAFF

SEQ ID NO: 202831 - protein, 14 aa, Homo sapiens
  CDR3 for alpha chain variable domain of TCR clone 101416 (TRAV13-1, TRAJ44)
CAAQATGTASKLTF

SEQ ID NO: 202832 - protein, 14 aa, Homo sapiens
  CDR3 for beta chain variable domain of TCR clone 101416 (TRBV19, TRBJ2-2)
CASSTLHRSGELFF

SEQ ID NO: 202833 - protein, 11 aa, Homo sapiens
  CDR3 for alpha chain variable domain of TCR clone 101417 (TRAV2, TRAJ13)
CASGGYQKVTF

SEQ ID NO: 202834 - protein, 16 aa, Homo sapiens
  CDR3 for beta chain variable domain of TCR clone 101417 (TRBV19, TRBJ1-5)
CASSTRGTRSNQPQHF

SEQ ID NO: 202835 - protein, 15 aa, Homo sapiens
  CDR3 for alpha chain variable domain of TCR clone 101418 (TRAV16, TRAJ16)
FALQGGGSDGQKLLS

SEQ ID NO: 202836 - protein, 14 aa, Homo sapiens
  CDR3 for beta chain variable domain of TCR clone 101418 (TRBV6-1, TRBJ2-7)
CASSERVNPYEQYF

SEQ ID NO: 202837 - protein, 11 aa, Homo sapiens
  CDR3 for alpha chain variable domain of TCR clone 101419 (TRAV1-1, TRAJ20)
CAVFNDYKLSF

SEQ ID NO: 202838 - protein, 16 aa, Homo sapiens
  CDR3 for beta chain variable domain of TCR clone 101419 (TRBV29-1, TRBJ2-2)
CSVEKTREGNTGELFF

SEQ ID NO: 202839 - protein, 12 aa, Homo sapiens
  CDR3 for alpha chain variable domain of TCR clone 101420 (TRAV21, TRAJ20)
CAVRGNDYKFSF

SEQ ID NO: 202840 - protein, 14 aa, Homo sapiens
  CDR3 for beta chain variable domain of TCR clone 101420 (TRBV7-8, TRBJ2-7)
CASSQTQGADEQYF

SEQ ID NO: 202841 - protein, 16 aa, Homo sapiens
  CDR3 for alpha chain variable domain of TCR clone 101421 (TRAV21, TRAJ37)
CAVRTAGSSNTAKLIF

SEQ ID NO: 202842 - protein, 13 aa, Homo sapiens
  CDR3 for beta chain variable domain of TCR clone 101421 (TRBV7-9, TRBJ2-5)
CASLPSGRETQYF

SEQ ID NO: 202843 - protein, 17 aa, Homo sapiens
  CDR3 for alpha chain variable domain of TCR clone 101422 (TRAV17, TRAJ28)
CATDPRRGGAGSYQLTF

SEQ ID NO: 202844 - protein, 14 aa, Homo sapiens
  CDR3 for beta chain variable domain of TCR clone 101422 (TRBV7-2, TRBJ2-7)
CASRSQGAAYEQYF

SEQ ID NO: 202845 - protein, 15 aa, Homo sapiens
  CDR3 for alpha chain variable domain of TCR clone 101423 (TRAV27, TRAJ38)
CAARRNADNNRKLSW

SEQ ID NO: 202846 - protein, 13 aa, Homo sapiens
  CDR3 for beta chain variable domain of TCR clone 101423 (TRBV12-5, TRBJ2-3)
CASGDRQSDTQYF

SEQ ID NO: 202847 - protein, 14 aa, Homo sapiens
  CDR3 for alpha chain variable domain of TCR clone 101424 (TRAV8-1, TRAJ5)
CAVRTDTGRIALTF

SEQ ID NO: 202848 - protein, 14 aa, Homo sapiens
  CDR3 for beta chain variable domain of TCR clone 101424 (TRBV7-8, TRBJ2-3)
CASSFPDGQDTQYF

SEQ ID NO: 202849 - protein, 14 aa, Homo sapiens
  CDR3 for alpha chain variable domain of TCR clone 101425 (TRAV12-2, TRAJ53)
CRERGGGSHYKLTF

SEQ ID NO: 202850 - protein, 17 aa, Homo sapiens
  CDR3 for beta chain variable domain of TCR clone 101425 (TRBV7-3, TRBJ2-3)
CASSLMKRMRGADTQYF

SEQ ID NO: 202851 - protein, 12 aa, Homo sapiens
  CDR3 for alpha chain variable domain of TCR clone 101426 (TRAV17, TRAJ57)
CATDGGSEKLVF

SEQ ID NO: 202852 - protein, 13 aa, Homo sapiens
  CDR3 for beta chain variable domain of TCR clone 101426 (TRBV7-9, TRBJ2-7)
CASSFAGAYGQYF

SEQ ID NO: 202853 - protein, 13 aa, Homo sapiens
  CDR3 for alpha chain variable domain of TCR clone 101427 (TRAV27, TRAJ3)
ASLRGSSASKIIF

SEQ ID NO: 202854 - protein, 15 aa, Homo sapiens
  CDR3 for beta chain variable domain of TCR clone 101427 (TRBV28, TRBJ1-3)
CASSMCWASGNTIYF

SEQ ID NO: 202855 - protein, 20 aa, Homo sapiens
  CDR3 for alpha chain variable domain of TCR clone 101428 (TRAV1-1, TRAJ4)
CLLLLRCEGFLSGGYNKLIF

SEQ ID NO: 202856 - protein, 16 aa, Homo sapiens
  CDR3 for beta chain variable domain of TCR clone 101428 (TRBV28, TRDJ4)
CASSPPYRGRSEKLFF

SEQ ID NO: 202857 - protein, 14 aa, Homo sapiens
  CDR3 for alpha chain variable domain of TCR clone 101429 (TRAV1-2, TRAJ27)
CAVRSGTNARKSTF

SEQ ID NO: 202858 - protein, 15 aa, Homo sapiens
  CDR3 for beta chain variable domain of TCR clone 101429 (TRBV18, TRBJ2-7)
CASSPLQGRTYEQYF

SEQ ID NO: 202859 - protein, 22 aa, Homo sapiens
  CDR3 for alpha chain variable domain of TCR clone 101430 (TRAV4, )
CLVGPHNYDIQNPDTAVYQLRD

SEQ ID NO: 202860 - protein, 17 aa, Homo sapiens
  CDR3 for beta chain variable domain of TCR clone 101430 (TRBV24-1, TRBJ2-1)
CATSDVSTSGTYNEQFF

SEQ ID NO: 202861 - protein, 14 aa, Homo sapiens
  CDR3 for alpha chain variable domain of TCR clone 101431 (TRAV8-3, TRAJ40)
CAVALTSGTYNYIF

SEQ ID NO: 202862 - protein, 14 aa, Homo sapiens
  CDR3 for beta chain variable domain of TCR clone 101431 (TRBV11-3, TRBJ1-1)
CASSPGAWNTEAFF

SEQ ID NO: 202863 - protein, 13 aa, Homo sapiens
  CDR3 for alpha chain variable domain of TCR clone 101432 (TRAV13-1, TRAJ6)
CAASKGGSYILTF

SEQ ID NO: 202864 - protein, 14 aa, Homo sapiens
  CDR3 for beta chain variable domain of TCR clone 101432 (TRBV7-2, TRBJ2-1)
CASSLGVGYNEQFF

SEQ ID NO: 202865 - protein, 12 aa, Homo sapiens
  CDR3 for alpha chain variable domain of TCR clone 101433 (TRAV21, TRAJ33)
CAVQDSNYQLIW

SEQ ID NO: 202866 - protein, 14 aa, Homo sapiens
  CDR3 for beta chain variable domain of TCR clone 101433 (TRBV28, TRBJ2-1)
CASSPGKGGNEQFF

SEQ ID NO: 202867 - protein, 16 aa, Homo sapiens
  CDR3 for alpha chain variable domain of TCR clone 101434 (TRAV3, TRAJ10)
CAVRDMNAGGGNKLTF

SEQ ID NO: 202868 - protein, 16 aa, Homo sapiens
  CDR3 for beta chain variable domain of TCR clone 101434 (TRBV5-4, TRBJ2-3)
CASQQPGAGGADTQYF

SEQ ID NO: 202869 - protein, 13 aa, Homo sapiens
  CDR3 for alpha chain variable domain of TCR clone 101435 (TRAV38-2/DV8, TRAJ34)
CAYRTWNTDKLIF

SEQ ID NO: 202870 - protein, 18 aa, Homo sapiens
  CDR3 for beta chain variable domain of TCR clone 101435 (TRBV6-6, TRBJ1-3)
CASSYSRWDSISGDTIYF

SEQ ID NO: 202871 - protein, 15 aa, Homo sapiens
  CDR3 for alpha chain variable domain of TCR clone 101436 (TRAV27, TRAJ42)
CAGGNYGGSQGNLIF

SEQ ID NO: 202872 - protein, 13 aa, Homo sapiens
  CDR3 for beta chain variable domain of TCR clone 101436 (TRBV27, TRBJ1-1)
CASSLSIGAEAFF

SEQ ID NO: 202873 - protein, 17 aa, Homo sapiens
  CDR3 for alpha chain variable domain of TCR clone 101437 (TRAV3, TRAJ6)
CAVRDGPRAGGSYIPTF

SEQ ID NO: 202874 - protein, 15 aa, Homo sapiens
  CDR3 for beta chain variable domain of TCR clone 101437 (TRBV10-3, TRBJ2-1)
CAISDVQDRAYEQFF

SEQ ID NO: 202875 - protein, 14 aa, Homo sapiens
  CDR3 for alpha chain variable domain of TCR clone 101438 (TRAV23/DV6, TRAJ58)
CAGMRETSGSRWTF

SEQ ID NO: 202876 - protein, 13 aa, Homo sapiens
  CDR3 for beta chain variable domain of TCR clone 101438 (TRBV28, TRBJ2-7)
CASRSSGVYEQYF

SEQ ID NO: 202877 - protein, 14 aa, Homo sapiens
  CDR3 for alpha chain variable domain of TCR clone 101439 (TRAV12-2, TRAJ13)
CAVKKTGGYQKVTF

SEQ ID NO: 202878 - protein, 14 aa, Homo sapiens
  CDR3 for beta chain variable domain of TCR clone 101439 (TRBV20-1, TRBJ1-3)
CSASPTGAGNTIYF

SEQ ID NO: 202879 - protein, 12 aa, Homo sapiens
  CDR3 for alpha chain variable domain of TCR clone 101440 (TRAV3, TRAJ27)
CAVRDGADKSTF

SEQ ID NO: 202880 - protein, 13 aa, Homo sapiens
  CDR3 for beta chain variable domain of TCR clone 101440 (TRBV10-3, TRBJ1-2)
CAINADLNYGYTF

SEQ ID NO: 202881 - protein, 18 aa, Homo sapiens
  CDR3 for alpha chain variable domain of TCR clone 101441 (TRAV13-1, TRAJ52)
CAAKNPNAGGTSYGKLTF

SEQ ID NO: 202882 - protein, 18 aa, Homo sapiens
  CDR3 for beta chain variable domain of TCR clone 101441 (TRBV27, TRBJ2-1)
CASGNRAVGVGSKNEQFF

SEQ ID NO: 202883 - protein, 15 aa, Homo sapiens
  CDR3 for alpha chain variable domain of TCR clone 101442 (TRAV17, TRAJ57)
CATGPSQGGSEKLVF

SEQ ID NO: 202884 - protein, 15 aa, Homo sapiens
  CDR3 for beta chain variable domain of TCR clone 101442 (TRBV5-1, TRBJ2-3)
CASSVTSGSTDTQYF

SEQ ID NO: 202885 - protein, 16 aa, Homo sapiens
  CDR3 for alpha chain variable domain of TCR clone 101443 (TRAV27, TRAJ48)
TAAQPGDTGLYLPLTF

SEQ ID NO: 202886 - protein, 14 aa, Homo sapiens
  CDR3 for beta chain variable domain of TCR clone 101443 (TRBV19, TRBJ2-1)
CASPTFVLSGEQFF

SEQ ID NO: 202887 - protein, 14 aa, Homo sapiens
  CDR3 for alpha chain variable domain of TCR clone 101444 (TRAV26-1, TRAJ38)
CIADNAGNNRKLIW

SEQ ID NO: 202888 - protein, 13 aa, Homo sapiens
  CDR3 for beta chain variable domain of TCR clone 101444 (TRBV20-1, TRBJ1-1)
CSARGGGNTVAFF

SEQ ID NO: 202889 - protein, 15 aa, Homo sapiens
  CDR3 for alpha chain variable domain of TCR clone 101445 (TRAV27, TRAJ38)
CAARRNAGNNRKLIL

SEQ ID NO: 202890 - protein, 14 aa, Homo sapiens
  CDR3 for beta chain variable domain of TCR clone 101445 (TRBV7-8, TRBJ2-3)
CASSLEAGTDTQYF

SEQ ID NO: 202891 - protein, 14 aa, Homo sapiens
  CDR3 for alpha chain variable domain of TCR clone 101446 (TRAV17, TRAJ40)
CATALTSGTYKYIF

SEQ ID NO: 202892 - protein, 13 aa, Homo sapiens
  CDR3 for beta chain variable domain of TCR clone 101446 (TRBV27, TRBJ2-1)
CASSAGSYNEQFF

SEQ ID NO: 202893 - protein, 14 aa, Homo sapiens
  CDR3 for alpha chain variable domain of TCR clone 101447 (TRAV21, TRAJ58)
CAVRRGRSGSRLTC

SEQ ID NO: 202894 - protein, 13 aa, Homo sapiens
  CDR3 for beta chain variable domain of TCR clone 101447 (TRBV7-2, TRBJ1-6)
CASSLKFDSPLHF

SEQ ID NO: 202895 - protein, 15 aa, Homo sapiens
  CDR3 for alpha chain variable domain of TCR clone 101448 (TRAV21, TRAJ53)
CATLNSGGSNYKLTF

SEQ ID NO: 202896 - protein, 14 aa, Homo sapiens
  CDR3 for beta chain variable domain of TCR clone 101448 (TRBV15, TRBJ1-2)
CATSRASVNYGYSF

SEQ ID NO: 202897 - protein, 11 aa, Homo sapiens
  CDR3 for alpha chain variable domain of TCR clone 101449 (TRAV21, TRAJ11)
CAVNGYCTLTF

SEQ ID NO: 202898 - protein, 11 aa, Homo sapiens
  CDR3 for beta chain variable domain of TCR clone 101449 (TRBV19, TRBJ1-1)
CASSIGSEAFF

SEQ ID NO: 202899 - protein, 14 aa, Homo sapiens
  CDR3 for alpha chain variable domain of TCR clone 101450 (TRAV1-2, TRAJ8)
CAVREDTGFQKLGF

SEQ ID NO: 202900 - protein, 20 aa, Homo sapiens
  CDR3 for beta chain variable domain of TCR clone 101450 (TRBV28, TRBJ2-1)
CASTPIGRSPGLAGGNEQFF

SEQ ID NO: 202901 - protein, 17 aa, Homo sapiens
  CDR3 for alpha chain variable domain of TCR clone 101451 (TRAV12-3, TRAJ6)
CAMSARGGAGGSYIPTF

SEQ ID NO: 202902 - protein, 12 aa, Homo sapiens
  CDR3 for beta chain variable domain of TCR clone 101451 (TRBV12-4, TRBJ2-3)
CASSMLPDTQYF

SEQ ID NO: 202903 - protein, 14 aa, Homo sapiens
  CDR3 for alpha chain variable domain of TCR clone 101452 (TRAV8-3, TRAJ10)
CAVGNARGGNKLTF

SEQ ID NO: 202904 - protein, 16 aa, Homo sapiens
  CDR3 for beta chain variable domain of TCR clone 101452 (TRBV11-2, TRBJ1-2)
CASSLDTGGADYGYTF

SEQ ID NO: 202905 - protein, 14 aa, Homo sapiens
  CDR3 for alpha chain variable domain of TCR clone 101453 (TRAV26-2, TRAJ32)
CILFRGGAANKLIF

SEQ ID NO: 202906 - protein, 15 aa, Homo sapiens
  CDR3 for beta chain variable domain of TCR clone 101453 (TRBV2, TRBJ2-2)
CASSGFGAGTGELFF

SEQ ID NO: 202907 - protein, 13 aa, Homo sapiens
  CDR3 for alpha chain variable domain of TCR clone 101454 (TRAV8-4, TRAJ27)
CAVSPRNAGKSTF

SEQ ID NO: 202908 - protein, 16 aa, Homo sapiens
  CDR3 for beta chain variable domain of TCR clone 101454 (TRBV7-2, TRBJ1-2)
CASSSNQDRRGHGYTF

SEQ ID NO: 202909 - protein, 14 aa, Homo sapiens
  CDR3 for alpha chain variable domain of TCR clone 101455 (TRAV29/DV5, TRAJ32)
CAAAYGGATNKLIF

SEQ ID NO: 202910 - protein, 17 aa, Homo sapiens
  CDR3 for beta chain variable domain of TCR clone 101455 (TRBV7-3, TRBJ2-3)
CASSLMKRMRGADTQYF

SEQ ID NO: 202911 - protein, 16 aa, Homo sapiens
  CDR3 for alpha chain variable domain of TCR clone 101456 (TRAV26-1, TRAJ53)
CIVRVAMGGSNYKLTF

SEQ ID NO: 202912 - protein, 15 aa, Homo sapiens
  CDR3 for beta chain variable domain of TCR clone 101456 (TRBV4-1, TRBJ1-4)
CASSDTGGTNEKLFF

SEQ ID NO: 202913 - protein, 13 aa, Homo sapiens
  CDR3 for alpha chain variable domain of TCR clone 101457 (TRAV12-1, TRAJ16)
CVVNGPDGQKLLF

SEQ ID NO: 202914 - protein, 13 aa, Homo sapiens
  CDR3 for beta chain variable domain of TCR clone 101457 (TRBV2, TRBJ1-1)
CARNPTGGFHAFF

SEQ ID NO: 202915 - protein, 14 aa, Homo sapiens
  CDR3 for alpha chain variable domain of TCR clone 101458 (TRAV1-2, TRAJ16)
CPVNRFSDGQKLLF

SEQ ID NO: 202916 - protein, 15 aa, Homo sapiens
  CDR3 for beta chain variable domain of TCR clone 101458 (TRBV9, TRBJ1-6)
CASSVAGTGDSPLHF

SEQ ID NO: 202917 - protein, 14 aa, Homo sapiens
  CDR3 for alpha chain variable domain of TCR clone 101459 (TRAV26-1, TRAJ48)
FIVRTNFGNEKLTF

SEQ ID NO: 202918 - protein, 12 aa, Homo sapiens
  CDR3 for beta chain variable domain of TCR clone 101459 (TRBV20-1, TRBJ2-7)
CSASSGANEQYF

SEQ ID NO: 202919 - protein, 13 aa, Homo sapiens
  CDR3 for alpha chain variable domain of TCR clone 101460 (TRAV27, TRAJ43)
CAGAGNNNNDIRF

SEQ ID NO: 202920 - protein, 14 aa, Homo sapiens
  CDR3 for beta chain variable domain of TCR clone 101460 (TRBV7-2, TRBJ2-7)
CASRSQGAAYEQYF

SEQ ID NO: 202921 - protein, 15 aa, Homo sapiens
  CDR3 for alpha chain variable domain of TCR clone 101461 (TRAV21, TRAJ53)
CATLNSGGSSYKLTF

SEQ ID NO: 202922 - protein, 16 aa, Homo sapiens
  CDR3 for beta chain variable domain of TCR clone 101461 (TRBV12-4, TRBJ1-5)
CASSRPVGGYNQPQHF

SEQ ID NO: 202923 - protein, 15 aa, Homo sapiens
  CDR3 for alpha chain variable domain of TCR clone 101462 (TRAV8-3, TRAJ41)
CAVGSNSNSGYALNF

SEQ ID NO: 202924 - protein, 17 aa, Homo sapiens
  CDR3 for beta chain variable domain of TCR clone 101462 (TRBV25-1, TRBJ2-1)
CASSAYVQGRGVYEQFF

SEQ ID NO: 202925 - protein, 13 aa, Homo sapiens
  CDR3 for alpha chain variable domain of TCR clone 101463 (TRAV27, TRAJ58)
CAGVETSGSRLTF

SEQ ID NO: 202926 - protein, 13 aa, Homo sapiens
  CDR3 for beta chain variable domain of TCR clone 101463 (TRBV7-2, TRBJ2-1)
CASNRDRWNEQFF

SEQ ID NO: 202927 - protein, 13 aa, Homo sapiens
  CDR3 for alpha chain variable domain of TCR clone 101464 (TRAV1-2, TRAJ9)
CAALNTGGFKTIF

SEQ ID NO: 202928 - protein, 13 aa, Homo sapiens
  CDR3 for beta chain variable domain of TCR clone 101464 (TRBV19, TRBJ1-2)
CASSVPGHNGYTF

SEQ ID NO: 202929 - protein, 12 aa, Homo sapiens
  CDR3 for alpha chain variable domain of TCR clone 101465 (TRAV12-2, TRAJ33)
CAVGDSNYQLIW

SEQ ID NO: 202930 - protein, 13 aa, Homo sapiens
  CDR3 for beta chain variable domain of TCR clone 101465 (TRBV6-1, TRBJ1-2)
CASSAWEGYGYTF

SEQ ID NO: 202931 - protein, 14 aa, Homo sapiens
  CDR3 for alpha chain variable domain of TCR clone 101466 (TRAV12-2, TRAJ13)
CAVKKTGGYQKVTF

SEQ ID NO: 202932 - protein, 15 aa, Homo sapiens
  CDR3 for beta chain variable domain of TCR clone 101466 (TRBV27, TRBJ2-1)
CASSNGGGSSNEPFF

SEQ ID NO: 202933 - protein, 11 aa, Homo sapiens
  CDR3 for alpha chain variable domain of TCR clone 101467 (TRAV25, TRAJ47)
CAGLYGNKLVF

SEQ ID NO: 202934 - protein, 14 aa, Homo sapiens
  CDR3 for beta chain variable domain of TCR clone 101467 (TRBV19, TRBJ2-1)
CASKEGVKVNEQFF

SEQ ID NO: 202935 - protein, 14 aa, Homo sapiens
  CDR3 for alpha chain variable domain of TCR clone 101468 (TRAV29/DV5, TRAJ36)
CAARRKTGANNLFF

SEQ ID NO: 202936 - protein, 14 aa, Homo sapiens
  CDR3 for beta chain variable domain of TCR clone 101468 (TRBV7-2, TRBJ2-5)
CASSPRGSSETQYF

SEQ ID NO: 202937 - protein, 18 aa, Homo sapiens
  CDR3 for alpha chain variable domain of TCR clone 101469 (TRAV9-2, TRAJ52)
CALSRHNAGGTSYGKLSF

SEQ ID NO: 202938 - protein, 13 aa, Homo sapiens
  CDR3 for beta chain variable domain of TCR clone 101469 (TRBV7-9, TRBJ1-2)
CASSLKQNYGYTF

SEQ ID NO: 202939 - protein, 14 aa, Homo sapiens
  CDR3 for alpha chain variable domain of TCR clone 101470 (TRAV16, TRAJ33)
CALSAMDSNYRLIW

SEQ ID NO: 202940 - protein, 12 aa, Homo sapiens
  CDR3 for beta chain variable domain of TCR clone 101470 (TRBV5-1, TRBJ1-2)
CASSQDTYGYTF

SEQ ID NO: 202941 - protein, 12 aa, Homo sapiens
  CDR3 for alpha chain variable domain of TCR clone 101471 (TRAV2, TRAJ33)
CAVPDSNYQLIW

SEQ ID NO: 202942 - protein, 20 aa, Homo sapiens
  CDR3 for beta chain variable domain of TCR clone 101471 (TRBV19, TRBJ2-1)
CASSIPRTVTSTRLNNEQFF

SEQ ID NO: 202943 - protein, 13 aa, Homo sapiens
  CDR3 for alpha chain variable domain of TCR clone 101472 (TRAV3, TRAJ27)
CAVTNTNAGKSTF

SEQ ID NO: 202944 - protein, 13 aa, Homo sapiens
  CDR3 for beta chain variable domain of TCR clone 101472 (TRBV14, TRBJ1-1)
CASSREFGTEAFF

SEQ ID NO: 202945 - protein, 13 aa, Homo sapiens
  CDR3 for alpha chain variable domain of TCR clone 101473 (TRAV12-2, TRAJ18)
CAVRGSTLERLYF

SEQ ID NO: 202946 - protein, 20 aa, Homo sapiens
  CDR3 for beta chain variable domain of TCR clone 101473 (TRBV7-8, TRBJ2-2)
CASSHLFPGPTIHITGELFF

SEQ ID NO: 202947 - protein, 13 aa, Homo sapiens
  CDR3 for alpha chain variable domain of TCR clone 101474 (TRAV27, TRAJ42)
CAGARGSQGHLIF

SEQ ID NO: 202948 - protein, 15 aa, Homo sapiens
  CDR3 for beta chain variable domain of TCR clone 101474 (TRBV10-3, TRBJ2-2)
CAIRTDREDTGELFF

SEQ ID NO: 202949 - protein, 14 aa, Homo sapiens
  CDR3 for alpha chain variable domain of TCR clone 101475 (TRAV26-1, TRAJ44)
CIVKSTGTASKLTF

SEQ ID NO: 202950 - protein, 15 aa, Homo sapiens
  CDR3 for beta chain variable domain of TCR clone 101475 (TRBV19, TRBJ2-4)
CASSDGGGAKNIRYF

SEQ ID NO: 202951 - protein, 15 aa, Homo sapiens
  CDR3 for alpha chain variable domain of TCR clone 101476 (TRAV20, TRAJ53)
CAVQASVGSNYKLTF

SEQ ID NO: 202952 - protein, 12 aa, Homo sapiens
  CDR3 for beta chain variable domain of TCR clone 101476 (TRBV7-8, TRBJ2-7)
CASSLGDREQYF

SEQ ID NO: 202953 - protein, 14 aa, Homo sapiens
  CDR3 for alpha chain variable domain of TCR clone 101477 (TRAV10, TRAJ34)
CVVSRGGDTDKLIL

SEQ ID NO: 202954 - protein, 17 aa, Homo sapiens
  CDR3 for beta chain variable domain of TCR clone 101477 (TRBV6-3, TRBJ2-3)
CASRRPLGGGSTDTQYF

SEQ ID NO: 202955 - protein, 13 aa, Homo sapiens
  CDR3 for alpha chain variable domain of TCR clone 101478 (TRAV8-2, TRAJ49)
CVVTPNTGNQFYF

SEQ ID NO: 202956 - protein, 15 aa, Homo sapiens
  CDR3 for beta chain variable domain of TCR clone 101478 (TRBV11-2, TRBJ2-1)
CASSLTNGGYNEQFF

SEQ ID NO: 202957 - protein, 17 aa, Homo sapiens
  CDR3 for alpha chain variable domain of TCR clone 101479 (TRAV3, TRAJ6)
CAVRDGPRAGGSYIPTF

SEQ ID NO: 202958 - protein, 13 aa, Homo sapiens
  CDR3 for beta chain variable domain of TCR clone 101479 (TRBV12-4, TRBJ1-1)
CASSFGEDTEAFF

SEQ ID NO: 202959 - protein, 16 aa, Homo sapiens
  CDR3 for alpha chain variable domain of TCR clone 101480 (TRAV30, TRAJ24)
CGTEIVDTDSWGKFQF

SEQ ID NO: 202960 - protein, 15 aa, Homo sapiens
  CDR3 for beta chain variable domain of TCR clone 101480 (TRBV27, TRBJ2-1)
CASSNGGGSSNEQFF

SEQ ID NO: 202961 - protein, 16 aa, Homo sapiens
  CDR3 for alpha chain variable domain of TCR clone 101481 (TRAV8-6, TRAJ37)
CAVSGLGSSNTGKLIF

SEQ ID NO: 202962 - protein, 15 aa, Homo sapiens
  CDR3 for beta chain variable domain of TCR clone 101481 (TRBV20-1, TRBJ1-5)
CSARPGPSMNQPQHF

SEQ ID NO: 202963 - protein, 11 aa, Homo sapiens
  CDR3 for alpha chain variable domain of TCR clone 101482 (TRAV2, TRAJ13)
CASGGYQKVTF

SEQ ID NO: 202964 - protein, 11 aa, Homo sapiens
  CDR3 for beta chain variable domain of TCR clone 101482 (TRBV5-6, TRBJ2-5)
CASSLERTQYV

SEQ ID NO: 202965 - protein, 14 aa, Homo sapiens
  CDR3 for alpha chain variable domain of TCR clone 101483 (TRAV1-1, TRAJ27)
CAVIYNTNAGKSTF

SEQ ID NO: 202966 - protein, 12 aa, Homo sapiens
  CDR3 for beta chain variable domain of TCR clone 101483 (TRBV6-3, TRBJ2-7)
CASSLTPYEQYF

SEQ ID NO: 202967 - protein, 11 aa, Homo sapiens
  CDR3 for alpha chain variable domain of TCR clone 101484 (TRAV4, TRAJ23)
CPVAPGGKLIF

SEQ ID NO: 202968 - protein, 13 aa, Homo sapiens
  CDR3 for beta chain variable domain of TCR clone 101484 (TRBV7-9, TRBJ1-2)
CASSLKQNYGYTF

SEQ ID NO: 202969 - protein, 17 aa, Homo sapiens
  CDR3 for alpha chain variable domain of TCR clone 101485 (TRAV36/DV7, TRAJ52)
CAVAQRAGGTSYGKLTF

SEQ ID NO: 202970 - protein, 14 aa, Homo sapiens
  CDR3 for beta chain variable domain of TCR clone 101485 (TRBV7-2, TRBJ2-7)
CASRSQGAAYEQYF

SEQ ID NO: 202971 - protein, 22 aa, Homo sapiens
  CDR3 for alpha chain variable domain of TCR clone 101486 (TRAV16, TRAJ32)
CALNRVVLQTSPSLELALCLLS

SEQ ID NO: 202972 - protein, 13 aa, Homo sapiens
  CDR3 for beta chain variable domain of TCR clone 101486 (TRBV15, TRBJ1-6)
CATSGGLNSPLHF

SEQ ID NO: 202973 - protein, 14 aa, Homo sapiens
  CDR3 for alpha chain variable domain of TCR clone 101487 (TRAV29/DV5, TRAJ36)
CAARRKTGANNLFF

SEQ ID NO: 202974 - protein, 14 aa, Homo sapiens
  CDR3 for beta chain variable domain of TCR clone 101487 (TRBV5-1, TRBJ1-1)
CASSLTRRSTEAFF

SEQ ID NO: 202975 - protein, 12 aa, Homo sapiens
  CDR3 for alpha chain variable domain of TCR clone 101488 (TRAV13-1, TRAJ49)
CAASIAGNQFYF

SEQ ID NO: 202976 - protein, 13 aa, Homo sapiens
  CDR3 for beta chain variable domain of TCR clone 101488 (TRBV2, TRBJ2-7)
CASSVGGSGEQYF

SEQ ID NO: 202977 - protein, 13 aa, Homo sapiens
  CDR3 for alpha chain variable domain of TCR clone 101489 (TRAV12-3, TRAJ21)
CAPGPHNFNKFYF

SEQ ID NO: 202978 - protein, 13 aa, Homo sapiens
  CDR3 for beta chain variable domain of TCR clone 101489 (TRBV4-2, TRBJ1-1)
CASSQAGNTEAFF

SEQ ID NO: 202979 - protein, 15 aa, Homo sapiens
  CDR3 for alpha chain variable domain of TCR clone 101490 (TRAV35, TRAJ40)
CAGQLRTSGTYKYIF

SEQ ID NO: 202980 - protein, 14 aa, Homo sapiens
  CDR3 for beta chain variable domain of TCR clone 101490 (TRBV7-3, TRBJ2-1)
CASSLAGGTNEQFF

SEQ ID NO: 202981 - protein, 12 aa, Homo sapiens
  CDR3 for alpha chain variable domain of TCR clone 101491 (TRAV8-3, TRAJ26)
GAGDNYGQNFVF

SEQ ID NO: 202982 - protein, 15 aa, Homo sapiens
  CDR3 for beta chain variable domain of TCR clone 101491 (TRBV9, TRBJ2-1)
CASSLAGSSYNEQFF

SEQ ID NO: 202983 - protein, 15 aa, Homo sapiens
  CDR3 for alpha chain variable domain of TCR clone 101492 (TRAV36/DV7, TRAJ54)
CAVEKPVQGAQQLVF

SEQ ID NO: 202984 - protein, 14 aa, Homo sapiens
  CDR3 for beta chain variable domain of TCR clone 101492 (TRBV4-3, TRBJ2-2)
CASSQGHVTGELFF

SEQ ID NO: 202985 - protein, 19 aa, Homo sapiens
  CDR3 for alpha chain variable domain of TCR clone 101493 (TRAV4, TRAJ13)
CLVGVQGSSGGYQKVTLEL

SEQ ID NO: 202986 - protein, 18 aa, Homo sapiens
  CDR3 for beta chain variable domain of TCR clone 101493 (TRBV15, TRBJ2-3)
CATSRDGARSWDTDTQYF

SEQ ID NO: 202987 - protein, 16 aa, Homo sapiens
  CDR3 for alpha chain variable domain of TCR clone 101494 (TRAV3, TRAJ10)
CSVRDMRAGGGNKLTF

SEQ ID NO: 202988 - protein, 15 aa, Homo sapiens
  CDR3 for beta chain variable domain of TCR clone 101494 (TRBV20-1, TRBJ2-7)
CSARDRVSGMDEQYF

SEQ ID NO: 202989 - protein, 18 aa, Homo sapiens
  CDR3 for alpha chain variable domain of TCR clone 101495 (TRAV26-1, TRAJ22)
CIVRVALISSGSPRQLTF

SEQ ID NO: 202990 - protein, 13 aa, Homo sapiens
  CDR3 for beta chain variable domain of TCR clone 101495 (TRBV13, TRBJ2-5)
CASSPEVGETQYF

SEQ ID NO: 202991 - protein, 15 aa, Homo sapiens
  CDR3 for alpha chain variable domain of TCR clone 101496 (TRAV12-1, TRAJ36)
WVVNEHQTGANNLFF

SEQ ID NO: 202992 - protein, 12 aa, Homo sapiens
  CDR3 for beta chain variable domain of TCR clone 101496 (TRBV29-1, TRBJ2-3)
CSVTGGADTQYF

SEQ ID NO: 202993 - protein, 14 aa, Homo sapiens
  CDR3 for alpha chain variable domain of TCR clone 101497 (TRAV12-2, TRAJ17)
CAVNIKAAGNKLTF

SEQ ID NO: 202994 - protein, 12 aa, Homo sapiens
  CDR3 for beta chain variable domain of TCR clone 101497 (TRBV6-3, TRBJ2-1)
CASSGSYNEQFF

SEQ ID NO: 202995 - protein, 16 aa, Homo sapiens
  CDR3 for alpha chain variable domain of TCR clone 101498 (TRAV13-1, TRAJ48)
CAASIFGNFGNEKLTF

SEQ ID NO: 202996 - protein, 13 aa, Homo sapiens
  CDR3 for beta chain variable domain of TCR clone 101498 (TRBV10-3, TRBJ2-7)
CASKLAVNYEQYF

SEQ ID NO: 202997 - protein, 15 aa, Homo sapiens
  CDR3 for alpha chain variable domain of TCR clone 101499 (TRAV12-1, TRAJ5)
CVVNMLETGRRALTF

SEQ ID NO: 202998 - protein, 13 aa, Homo sapiens
  CDR3 for beta chain variable domain of TCR clone 101499 (TRBV14, TRBJ1-5)
CASSQDRRGAQHF

SEQ ID NO: 202999 - protein, 11 aa, Homo sapiens
  CDR3 for alpha chain variable domain of TCR clone 101500 (TRAV2, TRAJ31)
CAAGPPARLMF

SEQ ID NO: 203000 - protein, 14 aa, Homo sapiens
  CDR3 for beta chain variable domain of TCR clone 101500 (TRBV25-1, TRBJ1-1)
CASTHLGGNTEAFF

SEQ ID NO: 203001 - protein, 11 aa, Homo sapiens
  CDR3 for alpha chain variable domain of TCR clone 101501 (TRAV2, TRAJ33)
CAVESNYQLTW

SEQ ID NO: 203002 - protein, 17 aa, Homo sapiens
  CDR3 for beta chain variable domain of TCR clone 101501 (TRBV19, TRBJ2-7)
CASSISFYDSYPYEQYF

SEQ ID NO: 203003 - protein, 13 aa, Homo sapiens
  CDR3 for alpha chain variable domain of TCR clone 101502 (TRAV2, TRAJ40)
CAVVTSGTYKYIF

SEQ ID NO: 203004 - protein, 15 aa, Homo sapiens
  CDR3 for beta chain variable domain of TCR clone 101502 (TRBV11-3, TRBJ2-3)
CASLQDGREGDTQYF

SEQ ID NO: 203005 - protein, 15 aa, Homo sapiens
  CDR3 for alpha chain variable domain of TCR clone 101503 (TRAV34, TRAJ38)
CGADFTPSNNRKLIW

SEQ ID NO: 203006 - protein, 16 aa, Homo sapiens
  CDR3 for beta chain variable domain of TCR clone 101503 (TRBV12-5, TRBJ2-5)
CASGPRTSGNQETQYF

SEQ ID NO: 203007 - protein, 14 aa, Homo sapiens
  CDR3 for alpha chain variable domain of TCR clone 101504 (TRAV12-2, TRAJ45)
CAVYSGGGADGLTF

SEQ ID NO: 203008 - protein, 20 aa, Homo sapiens
  CDR3 for beta chain variable domain of TCR clone 101504 (TRBV7-8, TRBJ2-2)
CASSHLFPGPTIHITGELFF

SEQ ID NO: 203009 - protein, 13 aa, Homo sapiens
  CDR3 for alpha chain variable domain of TCR clone 101505 (TRAV12-2, TRAJ20)
CAVYPSNDYKLSF

SEQ ID NO: 203010 - protein, 15 aa, Homo sapiens
  CDR3 for beta chain variable domain of TCR clone 101505 (TRBV27, TRBJ2-5)
CASSLNPRGGETQYF

SEQ ID NO: 203011 - protein, 12 aa, Homo sapiens
  CDR3 for alpha chain variable domain of TCR clone 101506 (TRAV8-3, TRAJ26)
CAGDNYGQNFVF

SEQ ID NO: 203012 - protein, 14 aa, Homo sapiens
  CDR3 for beta chain variable domain of TCR clone 101506 (TRBV5-4, TRBJ1-1)
CASSLDSRRDEAFF

SEQ ID NO: 203013 - protein, 14 aa, Homo sapiens
  CDR3 for alpha chain variable domain of TCR clone 101507 (TRAV12-2, TRAJ44)
CAVNPAGTASKLTF

SEQ ID NO: 203014 - protein, 13 aa, Homo sapiens
  CDR3 for beta chain variable domain of TCR clone 101507 (TRBV12-5, TRBJ2-3)
CASGDRQSDTQYF

SEQ ID NO: 203015 - protein, 13 aa, Homo sapiens
  CDR3 for alpha chain variable domain of TCR clone 101508 (TRAV8-6, TRAJ49)
CAVITNTGNQFYC

SEQ ID NO: 203016 - protein, 14 aa, Homo sapiens
  CDR3 for beta chain variable domain of TCR clone 101508 (TRBV5-1, TRBJ2-7)
CASSRGESLYEQYF

SEQ ID NO: 203017 - protein, 16 aa, Homo sapiens
  CDR3 for alpha chain variable domain of TCR clone 101509 (TRAV20, TRAJ52)
CAVLPDGGTSYGKLTF

SEQ ID NO: 203018 - protein, 12 aa, Homo sapiens
  CDR3 for beta chain variable domain of TCR clone 101509 (TRBV19, TRBJ2-1)
CASSQISSEQFF

SEQ ID NO: 203019 - protein, 15 aa, Homo sapiens
  CDR3 for alpha chain variable domain of TCR clone 101510 (TRAV17, TRAJ4)
CATGTWSGGYNKLIF

SEQ ID NO: 203020 - protein, 14 aa, Homo sapiens
  CDR3 for beta chain variable domain of TCR clone 101510 (TRBV7-2, TRBJ2-7)
CASRSQGAAYEQYF

SEQ ID NO: 203021 - protein, 15 aa, Homo sapiens
  CDR3 for alpha chain variable domain of TCR clone 101511 (TRAV12-1, TRAJ44)
YVADLPTGTASKLTF

SEQ ID NO: 203022 - protein, 13 aa, Homo sapiens
  CDR3 for beta chain variable domain of TCR clone 101511 (TRBV6-5, TRBJ2-5)
CASSPQGGETQYF

SEQ ID NO: 203023 - protein, 10 aa, Homo sapiens
  CDR3 for alpha chain variable domain of TCR clone 101512 (TRAV1-2, TRAJ31)
CVSEDARLMF

SEQ ID NO: 203024 - protein, 14 aa, Homo sapiens
  CDR3 for beta chain variable domain of TCR clone 101512 (TRBV19, TRBJ2-1)
CASPTLVLSGEQFF

SEQ ID NO: 203025 - protein, 15 aa, Homo sapiens
  CDR3 for alpha chain variable domain of TCR clone 101513 (TRAV23/DV6, TRAJ44)
CAARNLTGTASKLTF

SEQ ID NO: 203026 - protein, 17 aa, Homo sapiens
  CDR3 for beta chain variable domain of TCR clone 101513 (TRBV24-1, TRBJ2-1)
CATSDVSTSGTYNEQFF

SEQ ID NO: 203027 - protein, 11 aa, Homo sapiens
  CDR3 for alpha chain variable domain of TCR clone 101514 (TRAV1-1, TRAJ23)
CAVRQGGKLIF

SEQ ID NO: 203028 - protein, 15 aa, Homo sapiens
  CDR3 for beta chain variable domain of TCR clone 101514 (TRBV11-2, TRBJ2-1)
CASSSPSTRYNEQFF

SEQ ID NO: 203029 - protein, 14 aa, Homo sapiens
  CDR3 for alpha chain variable domain of TCR clone 101515 (TRAV1-2, TRAJ33)
CAVRAPDSNYQLIW

SEQ ID NO: 203030 - protein, 12 aa, Homo sapiens
  CDR3 for beta chain variable domain of TCR clone 101515 (TRBV7-3, TRBJ2-1)
CASSFINNEQFF

SEQ ID NO: 203031 - protein, 14 aa, Homo sapiens
  CDR3 for alpha chain variable domain of TCR clone 101516 (TRAV26-1, TRAJ45)
CIEVTGGGADGLTF

SEQ ID NO: 203032 - protein, 14 aa, Homo sapiens
  CDR3 for beta chain variable domain of TCR clone 101516 (TRBV10-2, TRBJ1-5)
CASSSTGRNQPQHF

SEQ ID NO: 203033 - protein, 13 aa, Homo sapiens
  CDR3 for alpha chain variable domain of TCR clone 101517 (TRAV13-1, TRAJ21)
CAASIYNFNKFYF

SEQ ID NO: 203034 - protein, 13 aa, Homo sapiens
  CDR3 for beta chain variable domain of TCR clone 101517 (TRBV7-2, TRBJ2-2)
CASSLAVTGELFF

SEQ ID NO: 203035 - protein, 14 aa, Homo sapiens
  CDR3 for alpha chain variable domain of TCR clone 101518 (TRAV12-1, TRAJ22)
CVVTTSGSARQLTF

SEQ ID NO: 203036 - protein, 13 aa, Homo sapiens
  CDR3 for beta chain variable domain of TCR clone 101518 (TRBV10-3, TRBJ2-7)
CASKLAVNYEQYF

SEQ ID NO: 203037 - protein, 13 aa, Homo sapiens
  CDR3 for alpha chain variable domain of TCR clone 101519 (TRAV21, TRAJ27)
CAARPGNAGKSTF

SEQ ID NO: 203038 - protein, 14 aa, Homo sapiens
  CDR3 for beta chain variable domain of TCR clone 101519 (TRBV11-2, TRBJ2-7)
CASSLGAGTYEQYF

SEQ ID NO: 203039 - protein, 13 aa, Homo sapiens
  CDR3 for alpha chain variable domain of TCR clone 101520 (TRAV13-2, TRAJ13)
CAERPGGYQKVTF

SEQ ID NO: 203040 - protein, 15 aa, Homo sapiens
  CDR3 for beta chain variable domain of TCR clone 101520 (TRBV11-3, TRBJ2-7)
CTSSPGPASSYEQYF

SEQ ID NO: 203041 - protein, 17 aa, Homo sapiens
  CDR3 for alpha chain variable domain of TCR clone 101521 (TRAV16, TRAJ37)
CAFWPKNGSSNTGKLIF

SEQ ID NO: 203042 - protein, 15 aa, Homo sapiens
  CDR3 for beta chain variable domain of TCR clone 101521 (TRBV19, TRBJ2-1)
CASSYSGSPYNEQFF

SEQ ID NO: 203043 - protein, 15 aa, Homo sapiens
  CDR3 for alpha chain variable domain of TCR clone 101522 (TRAV16, TRAJ10)
CALEGLTGGGNKLTF

SEQ ID NO: 203044 - protein, 14 aa, Homo sapiens
  CDR3 for beta chain variable domain of TCR clone 101522 (TRBV2, TRBJ2-7)
CASSLTSGGYEQYF

SEQ ID NO: 203045 - protein, 14 aa, Homo sapiens
  CDR3 for alpha chain variable domain of TCR clone 101523 (TRAV23/DV6, TRAJ24)
CAASLRDSWGKLQF

SEQ ID NO: 203046 - protein, 15 aa, Homo sapiens
  CDR3 for beta chain variable domain of TCR clone 101523 (TRBV9, TRBJ1-6)
CASSVAGTGDSPLHF

SEQ ID NO: 203047 - protein, 14 aa, Homo sapiens
  CDR3 for alpha chain variable domain of TCR clone 101524 (TRAV12-3, TRAJ30)
CAMSLLKRDDKIIF

SEQ ID NO: 203048 - protein, 12 aa, Homo sapiens
  CDR3 for beta chain variable domain of TCR clone 101524 (TRBV11-2, TRBJ2-2)
CASSLGGGELFF

SEQ ID NO: 203049 - protein, 13 aa, Homo sapiens
  CDR3 for alpha chain variable domain of TCR clone 101525 (TRAV1-2, TRAJ11)
CAVRDSGYSTLTF

SEQ ID NO: 203050 - protein, 15 aa, Homo sapiens
  CDR3 for beta chain variable domain of TCR clone 101525 (TRBV20-1, TRBJ2-7)
CSARDRVSGMDEQYF

SEQ ID NO: 203051 - protein, 15 aa, Homo sapiens
  CDR3 for alpha chain variable domain of TCR clone 101526 (TRAV25, TRAJ52)
CAGRPGGTSYGKLTF

SEQ ID NO: 203052 - protein, 16 aa, Homo sapiens
  CDR3 for beta chain variable domain of TCR clone 101526 (TRBV4-1, TRBJ1-1)
CASSYRQGTGDTEAFF

SEQ ID NO: 203053 - protein, 14 aa, Homo sapiens
  CDR3 for alpha chain variable domain of TCR clone 101527 (TRAV13-2, TRAJ10)
CAETFTGGGNKHTF

SEQ ID NO: 203054 - protein, 16 aa, Homo sapiens
  CDR3 for beta chain variable domain of TCR clone 101527 (TRBV18, TRBJ2-7)
CASSPRSQGISYEQYF

SEQ ID NO: 203055 - protein, 14 aa, Homo sapiens
  CDR3 for alpha chain variable domain of TCR clone 101528 (TRAV8-3, TRAJ4)
CAVGAAGGYNKLIF

SEQ ID NO: 203056 - protein, 15 aa, Homo sapiens
  CDR3 for beta chain variable domain of TCR clone 101528 (TRBV18, TRBJ2-1)
CASSPPSASYNEQFF

SEQ ID NO: 203057 - protein, 15 aa, Homo sapiens
  CDR3 for alpha chain variable domain of TCR clone 101529 (TRAV2, TRAJ24)
CAVVRLKNSWGKLQF

SEQ ID NO: 203058 - protein, 16 aa, Homo sapiens
  CDR3 for beta chain variable domain of TCR clone 101529 (TRBV7-3, TRBJ2-2)
CASSLKRGTLSGELFF

SEQ ID NO: 203059 - protein, 14 aa, Homo sapiens
  CDR3 for alpha chain variable domain of TCR clone 101530 (TRAV9-2, TRAJ39)
CALYIYNAGNMLTF

SEQ ID NO: 203060 - protein, 12 aa, Homo sapiens
  CDR3 for beta chain variable domain of TCR clone 101530 (TRBV11-2, TRBJ2-5)
CASSLDTQTQYF

SEQ ID NO: 203061 - protein, 14 aa, Homo sapiens
  CDR3 for alpha chain variable domain of TCR clone 101531 (TRAV12-1, TRAJ12)
CVVTRMDSSYKLIF

SEQ ID NO: 203062 - protein, 15 aa, Homo sapiens
  CDR3 for beta chain variable domain of TCR clone 101531 (TRBV7-8, TRBJ2-1)
CASSLADSLYNEQFF

SEQ ID NO: 203063 - protein, 14 aa, Homo sapiens
  CDR3 for alpha chain variable domain of TCR clone 101532 (TRAV13-1, TRAJ35)
CAASKGGFGNVLHC

SEQ ID NO: 203064 - protein, 14 aa, Homo sapiens
  CDR3 for beta chain variable domain of TCR clone 101532 (TRBV19, TRBJ2-1)
CASPTFVLSGEQLF

SEQ ID NO: 203065 - protein, 16 aa, Homo sapiens
  CDR3 for alpha chain variable domain of TCR clone 101533 (TRAV8-3, TRAJ10)
CAVGPTLTGGGNKLTF

SEQ ID NO: 203066 - protein, 15 aa, Homo sapiens
  CDR3 for beta chain variable domain of TCR clone 101533 (TRBV7-2, TRBJ2-2)
CASRRPGQNTGELFF

SEQ ID NO: 203067 - protein, 17 aa, Homo sapiens
  CDR3 for alpha chain variable domain of TCR clone 101534 (TRAV3, TRAJ6)
CAVRDGPRAGGSYIPTF

SEQ ID NO: 203068 - protein, 13 aa, Homo sapiens
  CDR3 for beta chain variable domain of TCR clone 101534 (TRBV19, TRBJ2-7)
CASSIDRTYEQYF

SEQ ID NO: 203069 - protein, 15 aa, Homo sapiens
  CDR3 for alpha chain variable domain of TCR clone 101535 (TRAV26-1, TRAJ22)
CIVRVSLWFCKATDL

SEQ ID NO: 203070 - protein, 12 aa, Homo sapiens
  CDR3 for beta chain variable domain of TCR clone 101535 (TRBV11-2, TRBJ2-2)
RASSLGGGELFF

SEQ ID NO: 203071 - protein, 13 aa, Homo sapiens
  CDR3 for alpha chain variable domain of TCR clone 101536 (TRAV17, TRAJ9)
CATDYTGGFKTIF

SEQ ID NO: 203072 - protein, 13 aa, Homo sapiens
  CDR3 for beta chain variable domain of TCR clone 101536 (TRBV25-1, TRBJ2-5)
CASSESGRETQYF

SEQ ID NO: 203073 - protein, 13 aa, Homo sapiens
  CDR3 for alpha chain variable domain of TCR clone 101537 (TRAV1-2, TRAJ9)
CAALNTGGFKTIF

SEQ ID NO: 203074 - protein, 13 aa, Homo sapiens
  CDR3 for beta chain variable domain of TCR clone 101537 (TRBV19, TRBJ1-5)
CASSMRGYQPQHF

SEQ ID NO: 203075 - protein, 14 aa, Homo sapiens
  CDR3 for alpha chain variable domain of TCR clone 101538 (TRAV1-2, TRAJ8)
CAVREDTGFQKLEF

SEQ ID NO: 203076 - protein, 12 aa, Homo sapiens
  CDR3 for beta chain variable domain of TCR clone 101538 (TRBV2, TRBJ2-1)
CAYGPPGNEQFF

SEQ ID NO: 203077 - protein, 14 aa, Homo sapiens
  CDR3 for alpha chain variable domain of TCR clone 101539 (TRAV17, TRAJ57)
CATDPQGGSEKLVF

SEQ ID NO: 203078 - protein, 15 aa, Homo sapiens
  CDR3 for beta chain variable domain of TCR clone 101539 (TRBV13, TRBJ1-5)
CASSFGQGGVQPQHF

SEQ ID NO: 203079 - protein, 15 aa, Homo sapiens
  CDR3 for alpha chain variable domain of TCR clone 101540 (TRAV21, TRAJ24)
CAARSSTDSWGKLQF

SEQ ID NO: 203080 - protein, 16 aa, Homo sapiens
  CDR3 for beta chain variable domain of TCR clone 101540 (TRBV5-1, TRBJ2-1)
CASSGAGASDYNEQFF

SEQ ID NO: 203081 - protein, 15 aa, Homo sapiens
  CDR3 for alpha chain variable domain of TCR clone 101541 (TRAV34, TRAJ38)
CGADFTPGNNRKLIW

SEQ ID NO: 203082 - protein, 15 aa, Homo sapiens
  CDR3 for beta chain variable domain of TCR clone 101541 (TRBV20-1, TRBJ1-1)
CSASRGVTGNTEAFF

SEQ ID NO: 203083 - protein, 15 aa, Homo sapiens
  CDR3 for alpha chain variable domain of TCR clone 101542 (TRAV10, TRAJ38)
CVVRINAGNNRKLIW

SEQ ID NO: 203084 - protein, 13 aa, Homo sapiens
  CDR3 for beta chain variable domain of TCR clone 101542 (TRBV12-4, TRBJ1-2)
CASSLRQGKGYTF

SEQ ID NO: 203085 - protein, 11 aa, Homo sapiens
  CDR3 for alpha chain variable domain of TCR clone 101543 (TRAV26-1, TRAJ27)
CIDPNAGKSTF

SEQ ID NO: 203086 - protein, 18 aa, Homo sapiens
  CDR3 for beta chain variable domain of TCR clone 101543 (TRBV7-9, TRBJ2-6)
CARSFPGAGISGANVLTF

SEQ ID NO: 203087 - protein, 15 aa, Homo sapiens
  CDR3 for alpha chain variable domain of TCR clone 101544 (TRAV8-2, TRAJ40)
CDVLGTTSGTYKYIF

SEQ ID NO: 203088 - protein, 16 aa, Homo sapiens
  CDR3 for beta chain variable domain of TCR clone 101544 (TRBV7-3, TRBJ2-1)
CASSLEGYRSYNEQFF

SEQ ID NO: 203089 - protein, 14 aa, Homo sapiens
  CDR3 for alpha chain variable domain of TCR clone 101545 (TRAV14/DV4, TRAJ7)
CAMREAYGNNRLAF

SEQ ID NO: 203090 - protein, 15 aa, Homo sapiens
  CDR3 for beta chain variable domain of TCR clone 101545 (TRBV19, TRBJ2-1)
CASSINREPSHEQLF

SEQ ID NO: 203091 - protein, 16 aa, Homo sapiens
  CDR3 for alpha chain variable domain of TCR clone 101546 (TRAV1-2, TRAJ40)
CAVRGSRTSGTYKYIF

SEQ ID NO: 203092 - protein, 16 aa, Homo sapiens
  CDR3 for beta chain variable domain of TCR clone 101546 (TRBV7-3, TRBJ2-1)
CASSLEGYRSYNEQFF

SEQ ID NO: 203093 - protein, 13 aa, Homo sapiens
  CDR3 for alpha chain variable domain of TCR clone 101547 (TRAV3, TRAJ21)
CAVREPDFNKFYF

SEQ ID NO: 203094 - protein, 11 aa, Homo sapiens
  CDR3 for beta chain variable domain of TCR clone 101547 (TRBV4-1, TRBJ2-2)
CASEHTGELFF

SEQ ID NO: 203095 - protein, 13 aa, Homo sapiens
  CDR3 for alpha chain variable domain of TCR clone 101548 (TRAV12-2, TRAJ20)
CAVYPSNDYKLSF

SEQ ID NO: 203096 - protein, 15 aa, Homo sapiens
  CDR3 for beta chain variable domain of TCR clone 101548 (TRBV7-9, TRBJ1-5)
CASSQGHQPNQPQHF

SEQ ID NO: 203097 - protein, 17 aa, Homo sapiens
  CDR3 for alpha chain variable domain of TCR clone 101549 (TRAV13-1, TRAJ31)
CAPRDRLMFGDGTQLVV

SEQ ID NO: 203098 - protein, 14 aa, Homo sapiens
  CDR3 for beta chain variable domain of TCR clone 101549 (TRBV6-1, TRBJ1-3)
CASVQGGGGNTIYF

SEQ ID NO: 203099 - protein, 13 aa, Homo sapiens
  CDR3 for alpha chain variable domain of TCR clone 101550 (TRAV12-3, TRAJ33)
CAMSVNSNYQLIW

SEQ ID NO: 203100 - protein, 14 aa, Homo sapiens
  CDR3 for beta chain variable domain of TCR clone 101550 (TRBV12-4, TRBJ1-1)
CASSLGTGGTEAFF

SEQ ID NO: 203101 - protein, 14 aa, Homo sapiens
  CDR3 for alpha chain variable domain of TCR clone 101551 (TRAV1-2, TRAJ8)
CAVREDTGFQKLVF

SEQ ID NO: 203102 - protein, 15 aa, Homo sapiens
  CDR3 for beta chain variable domain of TCR clone 101551 (TRBV6-1, TRBJ2-7)
CASSSPGTVFYEQYF

SEQ ID NO: 203103 - protein, 14 aa, Homo sapiens
  CDR3 for alpha chain variable domain of TCR clone 101552 (TRAV35, TRAJ13)
CAGSPSGGYQKVTF

SEQ ID NO: 203104 - protein, 11 aa, Homo sapiens
  CDR3 for beta chain variable domain of TCR clone 101552 (TRBV27, TRBJ2-7)
CASSLGYEQYF

SEQ ID NO: 203105 - protein, 14 aa, Homo sapiens
  CDR3 for alpha chain variable domain of TCR clone 101553 (TRAV29/DV5, TRAJ36)
CAARRKTRANNLFF

SEQ ID NO: 203106 - protein, 14 aa, Homo sapiens
  CDR3 for beta chain variable domain of TCR clone 101553 (TRBV12-5, TRBJ2-5)
CASGSRTHQETQYF

SEQ ID NO: 203107 - protein, 16 aa, Homo sapiens
  CDR3 for alpha chain variable domain of TCR clone 101554 (TRAV12-2, TRAJ10)
CAVNRVLTGGGNKLTF

SEQ ID NO: 203108 - protein, 15 aa, Homo sapiens
  CDR3 for beta chain variable domain of TCR clone 101554 (TRBV20-1, TRBJ2-7)
CSARDRVSGMDEQYF

SEQ ID NO: 203109 - protein, 16 aa, Homo sapiens
  CDR3 for alpha chain variable domain of TCR clone 101555 (TRAV4, TRAJ39)
CLVVALREGMQATCSP

SEQ ID NO: 203110 - protein, 16 aa, Homo sapiens
  CDR3 for beta chain variable domain of TCR clone 101555 (TRBV7-6, TRBJ2-7)
CASSGGTGALSYEQYF

SEQ ID NO: 203111 - protein, 14 aa, Homo sapiens
  CDR3 for alpha chain variable domain of TCR clone 101556 (TRAV12-2, TRAJ13)
CAVKKTGGYQKVTF

SEQ ID NO: 203112 - protein, 16 aa, Homo sapiens
  CDR3 for beta chain variable domain of TCR clone 101556 (TRBV4-1, TRBJ2-3)
CASSHSTSGAEDTQYF

SEQ ID NO: 203113 - protein, 12 aa, Homo sapiens
  CDR3 for alpha chain variable domain of TCR clone 101557 (TRAV12-3, TRAJ17)
CAMTLTGNKLTF

SEQ ID NO: 203114 - protein, 13 aa, Homo sapiens
  CDR3 for beta chain variable domain of TCR clone 101557 (TRBV28, TRBJ2-7)
CAGAQQGLDEQYF

SEQ ID NO: 203115 - protein, 18 aa, Homo sapiens
  CDR3 for alpha chain variable domain of TCR clone 101558 (TRAV9-2, TRAJ52)
CALSRHNAGGTSYGKLTF

SEQ ID NO: 203116 - protein, 13 aa, Homo sapiens
  CDR3 for beta chain variable domain of TCR clone 101558 (TRBV7-9, TRBJ1-2)
CASSFKQNYGYTF

SEQ ID NO: 203117 - protein, 14 aa, Homo sapiens
  CDR3 for alpha chain variable domain of TCR clone 101559 (TRAV1-1, TRAJ27)
CAVIYNTNAGKSTF

SEQ ID NO: 203118 - protein, 14 aa, Homo sapiens
  CDR3 for beta chain variable domain of TCR clone 101559 (TRBV7-9, TRBJ2-1)
CASSPRDSLYEQFF

SEQ ID NO: 203119 - protein, 10 aa, Homo sapiens
  CDR3 for alpha chain variable domain of TCR clone 101560 (TRAV26-1, TRAJ40)
CIAGTYKYIF

SEQ ID NO: 203120 - protein, 15 aa, Homo sapiens
  CDR3 for beta chain variable domain of TCR clone 101560 (TRBV19, TRBJ2-1)
CASSSPGVPLDDQFF

SEQ ID NO: 203121 - protein, 12 aa, Homo sapiens
  CDR3 for alpha chain variable domain of TCR clone 101561 (TRAV12-3, TRAJ17)
CAMTLTDNKLTF

SEQ ID NO: 203122 - protein, 14 aa, Homo sapiens
  CDR3 for beta chain variable domain of TCR clone 101561 (TRBV4-1, TRBJ2-7)
CASSQDREHVEQYF

SEQ ID NO: 203123 - protein, 15 aa, Homo sapiens
  CDR3 for alpha chain variable domain of TCR clone 101562 (TRAV12-3, TRAJ49)
CAMAVTPNTGNQFYF

SEQ ID NO: 203124 - protein, 12 aa, Homo sapiens
  CDR3 for beta chain variable domain of TCR clone 101562 (TRBV5-1, TRBJ2-7)
CASSLDSYEQYF

SEQ ID NO: 203125 - protein, 17 aa, Homo sapiens
  CDR3 for alpha chain variable domain of TCR clone 101563 (TRAV3, TRAJ6)
CAARDGSRAGGSYIPTF

SEQ ID NO: 203126 - protein, 14 aa, Homo sapiens
  CDR3 for beta chain variable domain of TCR clone 101563 (TRBV7-2, TRBJ2-7)
CASSPKTSFYEQYF

SEQ ID NO: 203127 - protein, 13 aa, Homo sapiens
  CDR3 for alpha chain variable domain of TCR clone 101564 (TRAV13-1, TRAJ5)
CAASDTGRRALTF

SEQ ID NO: 203128 - protein, 11 aa, Homo sapiens
  CDR3 for beta chain variable domain of TCR clone 101564 (TRBV6-3, TRBJ2-3)
CATGQADTQYF

SEQ ID NO: 203129 - protein, 15 aa, Homo sapiens
  CDR3 for alpha chain variable domain of TCR clone 101565 (TRAV12-3, TRAJ11)
CAMSEENSGYSTLTF

SEQ ID NO: 203130 - protein, 15 aa, Homo sapiens
  CDR3 for beta chain variable domain of TCR clone 101565 (TRBV6-3, TRBJ2-7)
CASSSPGTVFYEQYF

SEQ ID NO: 203131 - protein, 16 aa, Homo sapiens
  CDR3 for alpha chain variable domain of TCR clone 101566 (TRAV3, TRAJ10)
CAVRDMMAGGGNKLTF

SEQ ID NO: 203132 - protein, 15 aa, Homo sapiens
  CDR3 for beta chain variable domain of TCR clone 101566 (TRBV6-3, TRBJ2-7)
CASSSPGTVFYEQYF

SEQ ID NO: 203133 - protein, 16 aa, Homo sapiens
  CDR3 for alpha chain variable domain of TCR clone 101567 (TRAV1-2, TRAJ10)
CAVRGVLTGGGSKLTF

SEQ ID NO: 203134 - protein, 14 aa, Homo sapiens
  CDR3 for beta chain variable domain of TCR clone 101567 (TRBV4-1, TRBJ2-2)
CASSQAVNTGELFF

SEQ ID NO: 203135 - protein, 17 aa, Homo sapiens
  CDR3 for alpha chain variable domain of TCR clone 101568 (TRAV3, TRAJ6)
CAVRDGPRAGGSYIPTF

SEQ ID NO: 203136 - protein, 14 aa, Homo sapiens
  CDR3 for beta chain variable domain of TCR clone 101568 (TRBV11-2, TRBJ2-7)
CASSSTGEGYEQYF

SEQ ID NO: 203137 - protein, 11 aa, Homo sapiens
  CDR3 for alpha chain variable domain of TCR clone 101569 (TRAV21, TRAJ23)
CAPQRRGKRIF

SEQ ID NO: 203138 - protein, 14 aa, Homo sapiens
  CDR3 for beta chain variable domain of TCR clone 101569 (TRBV12-4, TRBJ1-1)
CASTWTGHDTEAFF

SEQ ID NO: 203139 - protein, 14 aa, Homo sapiens
  CDR3 for alpha chain variable domain of TCR clone 101570 (TRAV16, TRAJ32)
CALKSGGATNRLIF

SEQ ID NO: 203140 - protein, 13 aa, Homo sapiens
  CDR3 for beta chain variable domain of TCR clone 101570 (TRBV15, TRBJ1-6)
CATSGGVNSPLHF

SEQ ID NO: 203141 - protein, 13 aa, Homo sapiens
  CDR3 for alpha chain variable domain of TCR clone 101571 (TRAV26-1, TRAJ48)
CIVRVVGDEKLTF

SEQ ID NO: 203142 - protein, 12 aa, Homo sapiens
  CDR3 for beta chain variable domain of TCR clone 101571 (TRBV11-2, TRBJ2-2)
CASSLGGGELFF

SEQ ID NO: 203143 - protein, 15 aa, Homo sapiens
  CDR3 for alpha chain variable domain of TCR clone 101572 (TRAV2, TRAJ15)
CAVEDREQAGTAMIF

SEQ ID NO: 203144 - protein, 13 aa, Homo sapiens
  CDR3 for beta chain variable domain of TCR clone 101572 (TRBV10-2, TRBJ2-7)
CASGTSGGYEQYF

SEQ ID NO: 203145 - protein, 14 aa, Homo sapiens
  CDR3 for alpha chain variable domain of TCR clone 101573 (TRAV1-2, TRAJ16)
CAVNRFSDGQKLLF

SEQ ID NO: 203146 - protein, 16 aa, Homo sapiens
  CDR3 for beta chain variable domain of TCR clone 101573 (TRBV6-1, TRBJ2-5)
CASSETMDRGAETQYF

SEQ ID NO: 203147 - protein, 13 aa, Homo sapiens
  CDR3 for alpha chain variable domain of TCR clone 101574 (TRAV29/DV5, TRAJ47)
CAASAEYGNKLVF

SEQ ID NO: 203148 - protein, 12 aa, Homo sapiens
  CDR3 for beta chain variable domain of TCR clone 101574 (TRBV12-4, TRBJ1-2)
CASIGTGHGYTF

SEQ ID NO: 203149 - protein, 12 aa, Homo sapiens
  CDR3 for alpha chain variable domain of TCR clone 101575 (TRAV13-1, TRAJ49)
CAASPLGNQFYF

SEQ ID NO: 203150 - protein, 18 aa, Homo sapiens
  CDR3 for beta chain variable domain of TCR clone 101575 (TRBV15, TRBJ2-7)
CATSRDRGIRAVLRAGHQ

SEQ ID NO: 203151 - protein, 13 aa, Homo sapiens
  CDR3 for alpha chain variable domain of TCR clone 101576 (TRAV12-1, TRAJ34)
CGVTGYNTDKLIF

SEQ ID NO: 203152 - protein, 13 aa, Homo sapiens
  CDR3 for beta chain variable domain of TCR clone 101576 (TRBV28, TRBJ2-7)
CASKAGGVYEQYF

SEQ ID NO: 203153 - protein, 14 aa, Homo sapiens
  CDR3 for alpha chain variable domain of TCR clone 101577 (TRAV1-2, TRAJ8)
CAVREDTGFQKLVC

SEQ ID NO: 203154 - protein, 13 aa, Homo sapiens
  CDR3 for beta chain variable domain of TCR clone 101577 (TRBV19, TRBJ1-2)
CASSVPGQDGYTF

SEQ ID NO: 203155 - protein, 14 aa, Homo sapiens
  CDR3 for alpha chain variable domain of TCR clone 101578 (TRAV12-1, TRAJ23)
CVVIVDNQGGKLIF

SEQ ID NO: 203156 - protein, 15 aa, Homo sapiens
  CDR3 for beta chain variable domain of TCR clone 101578 (TRBV20-1, TRBJ1-5)
CSAKPPGQGPQPQHF

SEQ ID NO: 203157 - protein, 14 aa, Homo sapiens
  CDR3 for alpha chain variable domain of TCR clone 101579 (TRAV1-2, TRAJ16)
CAVNRFSDGQKLLF

SEQ ID NO: 203158 - protein, 15 aa, Homo sapiens
  CDR3 for beta chain variable domain of TCR clone 101579 (TRBV12-4, TRBJ1-2)
CASSLAHRDGQAYTF

SEQ ID NO: 203159 - protein, 12 aa, Homo sapiens
  CDR3 for alpha chain variable domain of TCR clone 101580 (TRAV1-1, TRAJ39)
CAVPVVGNMLTF

SEQ ID NO: 203160 - protein, 15 aa, Homo sapiens
  CDR3 for beta chain variable domain of TCR clone 101580 (TRBV19, TRBJ1-6)
CASSTQGAVGSPHHF

SEQ ID NO: 203161 - protein, 16 aa, Homo sapiens
  CDR3 for alpha chain variable domain of TCR clone 101581 (TRAV16, TRAJ52)
CALGGVGGTSYGKLTF

SEQ ID NO: 203162 - protein, 14 aa, Homo sapiens
  CDR3 for beta chain variable domain of TCR clone 101581 (TRBV19, TRBJ1-2)
CASSLQGQAYGYTF

SEQ ID NO: 203163 - protein, 13 aa, Homo sapiens
  CDR3 for alpha chain variable domain of TCR clone 101582 (TRAV26-1, )
CIVSHRVEGFWNQ

SEQ ID NO: 203164 - protein, 12 aa, Homo sapiens
  CDR3 for beta chain variable domain of TCR clone 101582 (TRBV7-6, TRBJ2-5)
CASSLSQETQYF

SEQ ID NO: 203165 - protein, 16 aa, Homo sapiens
  CDR3 for alpha chain variable domain of TCR clone 101583 (TRAV12-2, TRAJ40)
CAVIRGGTSGTYKYIF

SEQ ID NO: 203166 - protein, 14 aa, Homo sapiens
  CDR3 for beta chain variable domain of TCR clone 101583 (TRBV4-1, TRBJ2-2)
CASSQAVNTGELFF

SEQ ID NO: 203167 - protein, 14 aa, Homo sapiens
  CDR3 for alpha chain variable domain of TCR clone 101584 (TRAV12-2, TRAJ40)
CAVKIPSGTYKYIF

SEQ ID NO: 203168 - protein, 16 aa, Homo sapiens
  CDR3 for beta chain variable domain of TCR clone 101584 (TRBV6-1, TRBJ2-5)
CASSETLDRGAETQYF

SEQ ID NO: 203169 - protein, 17 aa, Homo sapiens
  CDR3 for alpha chain variable domain of TCR clone 101585 (TRAV26-1, TRAJ53)
CIVRVDGSGGSNYKLTF

SEQ ID NO: 203170 - protein, 15 aa, Homo sapiens
  CDR3 for beta chain variable domain of TCR clone 101585 (TRBV11-3, TRBJ2-2)
CASSSDRVNAGELFF

SEQ ID NO: 203171 - protein, 11 aa, Homo sapiens
  CDR3 for alpha chain variable domain of TCR clone 101586 (TRAV13-2, TRAJ20)
CADSNDYKLSF

SEQ ID NO: 203172 - protein, 15 aa, Homo sapiens
  CDR3 for beta chain variable domain of TCR clone 101586 (TRBV7-2, TRBJ1-2)
CASSPRAGWNYGYTF

SEQ ID NO: 203173 - protein, 16 aa, Homo sapiens
  CDR3 for alpha chain variable domain of TCR clone 101587 (TRAV3, TRAJ37)
CAVRGKGSGNTGKLIF

SEQ ID NO: 203174 - protein, 12 aa, Homo sapiens
  CDR3 for beta chain variable domain of TCR clone 101587 (TRBV11-3, TRBJ2-2)
CASSLGGGELFF

SEQ ID NO: 203175 - protein, 14 aa, Homo sapiens
  CDR3 for alpha chain variable domain of TCR clone 101588 (TRAV17, TRAJ57)
CAKDTQGGSEKLVF

SEQ ID NO: 203176 - protein, 18 aa, Homo sapiens
  CDR3 for beta chain variable domain of TCR clone 101588 (TRBV6-6, TRBJ1-3)
CASSYSKWDSISGNTIYF

SEQ ID NO: 203177 - protein, 16 aa, Homo sapiens
  CDR3 for alpha chain variable domain of TCR clone 101589 (TRAV30, TRAJ24)
CGTEIVDADSWGKFQF

SEQ ID NO: 203178 - protein, 14 aa, Homo sapiens
  CDR3 for beta chain variable domain of TCR clone 101589 (TRBV7-2, TRBJ1-2)
CTSSQTGSTYGYTF

SEQ ID NO: 203179 - protein, 14 aa, Homo sapiens
  CDR3 for alpha chain variable domain of TCR clone 101590 (TRAV26-1, TRAJ34)
CIVRVAYNTAKLIF

SEQ ID NO: 203180 - protein, 16 aa, Homo sapiens
  CDR3 for beta chain variable domain of TCR clone 101590 (TRBV7-3, TRBJ2-2)
CASSLKRGTLSGELFF

SEQ ID NO: 203181 - protein, 10 aa, Homo sapiens
  CDR3 for alpha chain variable domain of TCR clone 101591 (TRAV8-4, TRAJ43)
CAVSADDMRF

SEQ ID NO: 203182 - protein, 15 aa, Homo sapiens
  CDR3 for beta chain variable domain of TCR clone 101591 (TRBV5-1, TRBJ2-3)
CASSVTSGSTDTQHF

SEQ ID NO: 203183 - protein, 11 aa, Homo sapiens
  CDR3 for alpha chain variable domain of TCR clone 101592 (TRAV13-1, TRAJ39)
CASHAGNMLTF

SEQ ID NO: 203184 - protein, 14 aa, Homo sapiens
  CDR3 for beta chain variable domain of TCR clone 101592 (TRBV11-2, TRBJ1-5)
CASSLDKGRQPQHF

SEQ ID NO: 203185 - protein, 16 aa, Homo sapiens
  CDR3 for alpha chain variable domain of TCR clone 101593 (TRAV3, TRAJ18)
CAVRDGRGSTLGRLYF

SEQ ID NO: 203186 - protein, 17 aa, Homo sapiens
  CDR3 for beta chain variable domain of TCR clone 101593 (TRBV7-9, TRBJ1-6)
CASSSRDVEIHPSTLGT

SEQ ID NO: 203187 - protein, 15 aa, Homo sapiens
  CDR3 for alpha chain variable domain of TCR clone 101594 (TRAV26-1, TRAJ29)
CIVRVEGSGNTPLVF

SEQ ID NO: 203188 - protein, 14 aa, Homo sapiens
  CDR3 for beta chain variable domain of TCR clone 101594 (TRBV25-1, TRBJ1-1)
CASTHLGGNTEASF

SEQ ID NO: 203189 - protein, 14 aa, Homo sapiens
  CDR3 for alpha chain variable domain of TCR clone 101595 (TRAV12-2, TRAJ53)
CAVKGGGSNYKLTF

SEQ ID NO: 203190 - protein, 14 aa, Homo sapiens
  CDR3 for beta chain variable domain of TCR clone 101595 (TRBV19, TRBJ2-1)
CASPTFVVSGEQFF

SEQ ID NO: 203191 - protein, 15 aa, Homo sapiens
  CDR3 for alpha chain variable domain of TCR clone 101596 (TRAV8-3, TRAJ37)
CAVGGLSSNTGKLIF

SEQ ID NO: 203192 - protein, 14 aa, Homo sapiens
  CDR3 for beta chain variable domain of TCR clone 101596 (TRBV12-5, TRBJ2-5)
CASGSRTHQETQYF

SEQ ID NO: 203193 - protein, 13 aa, Homo sapiens
  CDR3 for alpha chain variable domain of TCR clone 101597 (TRAV21, TRAJ47)
CAVSGLYGNKLVF

SEQ ID NO: 203194 - protein, 16 aa, Homo sapiens
  CDR3 for beta chain variable domain of TCR clone 101597 (TRBV7-3, TRBJ2-2)
CASSLKRGTLSGELFF

SEQ ID NO: 203195 - protein, 13 aa, Homo sapiens
  CDR3 for alpha chain variable domain of TCR clone 101598 (TRAV12-3, TRAJ7)
CAMSASGNNRLDF

SEQ ID NO: 203196 - protein, 14 aa, Homo sapiens
  CDR3 for beta chain variable domain of TCR clone 101598 (TRBV13, TRBJ2-5)
CASSLGPRGETQYF

SEQ ID NO: 203197 - protein, 18 aa, Homo sapiens
  CDR3 for alpha chain variable domain of TCR clone 101599 (TRAV21, TRAJ52)
CAVRPSPAGGTSYGKLTF

SEQ ID NO: 203198 - protein, 16 aa, Homo sapiens
  CDR3 for beta chain variable domain of TCR clone 101599 (TRBV7-3, TRBJ2-3)
CASSLSGYRPEDTQYF

SEQ ID NO: 203199 - protein, 14 aa, Homo sapiens
  CDR3 for alpha chain variable domain of TCR clone 101600 (TRAV8-4, TRAJ13)
CAVTLSGGYQKVTF

SEQ ID NO: 203200 - protein, 15 aa, Homo sapiens
  CDR3 for beta chain variable domain of TCR clone 101600 (TRBV5-1, TRBJ2-1)
CASSPPRAPYNEQFF

SEQ ID NO: 203201 - protein, 11 aa, Homo sapiens
  CDR3 for alpha chain variable domain of TCR clone 101601 (TRAV1-1, TRAJ23)
CAVRQGGRLIF

SEQ ID NO: 203202 - protein, 20 aa, Homo sapiens
  CDR3 for beta chain variable domain of TCR clone 101601 (TRBV7-8, TRBJ2-2)
CASSHLFPGPTVHITGELFF

SEQ ID NO: 203203 - protein, 14 aa, Homo sapiens
  CDR3 for alpha chain variable domain of TCR clone 101602 (TRAV21, TRAJ23)
CAIMIYNQGGKLIL

SEQ ID NO: 203204 - protein, 18 aa, Homo sapiens
  CDR3 for beta chain variable domain of TCR clone 101602 (TRBV20-1, TRBJ2-6)
CSAETTPTHGSGANVLTF

SEQ ID NO: 203205 - protein, 12 aa, Homo sapiens
  CDR3 for alpha chain variable domain of TCR clone 101603 (TRAV36/DV7, TRAJ54)
RAVVRGAQKLVF

SEQ ID NO: 203206 - protein, 14 aa, Homo sapiens
  CDR3 for beta chain variable domain of TCR clone 101603 (TRBV7-3, TRBJ1-1)
CASSLKGGSTEAFF

SEQ ID NO: 203207 - protein, 14 aa, Homo sapiens
  CDR3 for alpha chain variable domain of TCR clone 101604 (TRAV23/DV6, TRAJ6)
CAASRAGGSYIPTF

SEQ ID NO: 203208 - protein, 17 aa, Homo sapiens
  CDR3 for beta chain variable domain of TCR clone 101604 (TRBV20-1, TRBJ2-1)
CSASASGLAGSYNEQFF

SEQ ID NO: 203209 - protein, 14 aa, Homo sapiens
  CDR3 for alpha chain variable domain of TCR clone 101605 (TRAV12-3, TRAJ9)
CAMSPNTGGFKTIF

SEQ ID NO: 203210 - protein, 16 aa, Homo sapiens
  CDR3 for beta chain variable domain of TCR clone 101605 (TRBV7-9, TRBJ2-1)
CASSDVAGGSYNEQFF

SEQ ID NO: 203211 - protein, 16 aa, Homo sapiens
  CDR3 for alpha chain variable domain of TCR clone 101606 (TRAV30, TRAJ24)
CGTEIVDADSWGKFQF

SEQ ID NO: 203212 - protein, 16 aa, Homo sapiens
  CDR3 for beta chain variable domain of TCR clone 101606 (TRBV2, TRBJ2-1)
CASSANPRDWQAEQFF

SEQ ID NO: 203213 - protein, 14 aa, Homo sapiens
  CDR3 for alpha chain variable domain of TCR clone 101607 (TRAV13-1, TRAJ3)
CAAEGYSSASKIIF

SEQ ID NO: 203214 - protein, 14 aa, Homo sapiens
  CDR3 for beta chain variable domain of TCR clone 101607 (TRBV7-6, TRBJ2-3)
CASSLGTVTDTQYF

SEQ ID NO: 203215 - protein, 15 aa, Homo sapiens
  CDR3 for alpha chain variable domain of TCR clone 101608 (TRAV26-1, TRAJ40)
CIVRVTTSGTYKYIF

SEQ ID NO: 203216 - protein, 13 aa, Homo sapiens
  CDR3 for beta chain variable domain of TCR clone 101608 (TRBV2, TRBJ1-1)
CASSVSGYTEAFF

SEQ ID NO: 203217 - protein, 14 aa, Homo sapiens
  CDR3 for alpha chain variable domain of TCR clone 101609 (TRAV12-2, TRAJ13)
CAVKKTWGYQKVTF

SEQ ID NO: 203218 - protein, 14 aa, Homo sapiens
  CDR3 for beta chain variable domain of TCR clone 101609 (TRBV7-6, TRBJ2-3)
CASSLGTVTDTQYF

SEQ ID NO: 203219 - protein, 14 aa, Homo sapiens
  CDR3 for alpha chain variable domain of TCR clone 101610 (TRAV1-2, TRAJ8)
CAVREDTGFQKLVF

SEQ ID NO: 203220 - protein, 16 aa, Homo sapiens
  CDR3 for beta chain variable domain of TCR clone 101610 (TRBV13, TRBJ2-3)
CQQPLQGSGGRNTQYF

SEQ ID NO: 203221 - protein, 16 aa, Homo sapiens
  CDR3 for alpha chain variable domain of TCR clone 101611 (TRAV12-2, TRAJ37)
CAGKEKGSSNTGKLIF

SEQ ID NO: 203222 - protein, 12 aa, Homo sapiens
  CDR3 for beta chain variable domain of TCR clone 101611 (TRBV10-1, TRBJ1-5)
CASSDSNQPQHF

SEQ ID NO: 203223 - protein, 15 aa, Homo sapiens
  CDR3 for alpha chain variable domain of TCR clone 101612 (TRAV13-1, TRAJ17)
CAASIERAAGNKLTC

SEQ ID NO: 203224 - protein, 12 aa, Homo sapiens
  CDR3 for beta chain variable domain of TCR clone 101612 (TRBV5-7, TRBJ1-1)
CASSLGRGKAFF

SEQ ID NO: 203225 - protein, 18 aa, Homo sapiens
  CDR3 for alpha chain variable domain of TCR clone 101613 (TRAV13-1, TRAJ52)
CAASKKSAGGTSYGKLTF

SEQ ID NO: 203226 - protein, 13 aa, Homo sapiens
  CDR3 for beta chain variable domain of TCR clone 101613 (TRBV12-4, TRBJ1-2)
CASSLRQGKGYAF

SEQ ID NO: 203227 - protein, 13 aa, Homo sapiens
  CDR3 for alpha chain variable domain of TCR clone 101614 (TRAV26-1, TRAJ48)
CIVRVVGDEKLTF

SEQ ID NO: 203228 - protein, 16 aa, Homo sapiens
  CDR3 for beta chain variable domain of TCR clone 101614 (TRBV6-5, TRBJ2-1)
CASSETLAGHYNEQFF

SEQ ID NO: 203229 - protein, 12 aa, Homo sapiens
  CDR3 for alpha chain variable domain of TCR clone 101615 (TRAV12-3, TRAJ3)
CAIDSSASKIIF

SEQ ID NO: 203230 - protein, 17 aa, Homo sapiens
  CDR3 for beta chain variable domain of TCR clone 101615 (TRBV7-9, TRBJ2-3)
CASSFEEAGAYPDTQYF

SEQ ID NO: 203231 - protein, 13 aa, Homo sapiens
  CDR3 for alpha chain variable domain of TCR clone 101616 (TRAV20, TRAJ35)
CAVQASFGNVLHC

SEQ ID NO: 203232 - protein, 15 aa, Homo sapiens
  CDR3 for beta chain variable domain of TCR clone 101616 (TRBV11-3, TRBJ2-3)
CASLKDGREGDTQYF

SEQ ID NO: 203233 - protein, 12 aa, Homo sapiens
  CDR3 for alpha chain variable domain of TCR clone 101617 (TRAV8-3, TRAJ41)
CAVGAMGYALNF

SEQ ID NO: 203234 - protein, 16 aa, Homo sapiens
  CDR3 for beta chain variable domain of TCR clone 101617 (TRBV7-6, TRBJ2-3)
CASSDSRGEGTDTQYF

SEQ ID NO: 203235 - protein, 13 aa, Homo sapiens
  CDR3 for alpha chain variable domain of TCR clone 101618 (TRAV29/DV5, TRAJ31)
CAASRNNNARLMF

SEQ ID NO: 203236 - protein, 15 aa, Homo sapiens
  CDR3 for beta chain variable domain of TCR clone 101618 (TRBV5-1, TRBJ2-7)
CASSLNGGPAREQYF

SEQ ID NO: 203237 - protein, 14 aa, Homo sapiens
  CDR3 for alpha chain variable domain of TCR clone 101619 (TRAV12-2, TRAJ13)
CAVKKTGGYQKVTF

SEQ ID NO: 203238 - protein, 15 aa, Homo sapiens
  CDR3 for beta chain variable domain of TCR clone 101619 (TRBV9, TRBJ1-6)
CASSVAGTGDSPLYF

SEQ ID NO: 203239 - protein, 12 aa, Homo sapiens
  CDR3 for alpha chain variable domain of TCR clone 101620 (TRAV13-2, TRAJ8)
CAPWLGFQKLVF

SEQ ID NO: 203240 - protein, 15 aa, Homo sapiens
  CDR3 for beta chain variable domain of TCR clone 101620 (TRBV28, TRBJ1-3)
CASSMGWASGNTIYF

SEQ ID NO: 203241 - protein, 13 aa, Homo sapiens
  CDR3 for alpha chain variable domain of TCR clone 101621 (TRAV8-3, TRAJ28)
FAVGAVGSYQLTF

SEQ ID NO: 203242 - protein, 17 aa, Homo sapiens
  CDR3 for beta chain variable domain of TCR clone 101621 (TRBV11-2, TRBJ2-1)
CASSLYPPGVEYNEQFF

SEQ ID NO: 203243 - protein, 11 aa, Homo sapiens
  CDR3 for alpha chain variable domain of TCR clone 101622 (TRAV21, TRAJ11)
CAVNGYSTLTF

SEQ ID NO: 203244 - protein, 13 aa, Homo sapiens
  CDR3 for beta chain variable domain of TCR clone 101622 (TRBV10-3, TRBJ2-7)
CASKLAVNYEQYF

SEQ ID NO: 203245 - protein, 15 aa, Homo sapiens
  CDR3 for alpha chain variable domain of TCR clone 101623 (TRAV12-1, TRAJ44)
CVVFVNTGTASKLTF

SEQ ID NO: 203246 - protein, 16 aa, Homo sapiens
  CDR3 for beta chain variable domain of TCR clone 101623 (TRBV20-1, TRBJ2-5)
CRPGGTSGGYMETQYF

SEQ ID NO: 203247 - protein, 12 aa, Homo sapiens
  CDR3 for alpha chain variable domain of TCR clone 101624 (TRAV12-3, TRAJ17)
CAMTLTGNKLTF

SEQ ID NO: 203248 - protein, 15 aa, Homo sapiens
  CDR3 for beta chain variable domain of TCR clone 101624 (TRBV20-1, TRBJ2-7)
CSARDRVSGVYEQYF

SEQ ID NO: 203249 - protein, 14 aa, Homo sapiens
  CDR3 for alpha chain variable domain of TCR clone 101625 (TRAV12-3, TRAJ10)
SHLPLTGGGNKLSF

SEQ ID NO: 203250 - protein, 12 aa, Homo sapiens
  CDR3 for beta chain variable domain of TCR clone 101625 (TRBV7-3, TRBJ2-5)
CASSSPGGTQYF

SEQ ID NO: 203251 - protein, 14 aa, Homo sapiens
  CDR3 for alpha chain variable domain of TCR clone 101626 (TRAV13-1, TRAJ8)
CSASEDTGFQKLVF

SEQ ID NO: 203252 - protein, 13 aa, Homo sapiens
  CDR3 for beta chain variable domain of TCR clone 101626 (TRBV19, TRBJ1-5)
CASSTRRDQPQHF

SEQ ID NO: 203253 - protein, 11 aa, Homo sapiens
  CDR3 for alpha chain variable domain of TCR clone 101627 (TRAV12-3, TRAJ41)
CAMNAREALNF

SEQ ID NO: 203254 - protein, 16 aa, Homo sapiens
  CDR3 for beta chain variable domain of TCR clone 101627 (TRBV7-8, TRBJ2-3)
CASGTEGQRETDTQYF

SEQ ID NO: 203255 - protein, 16 aa, Homo sapiens
  CDR3 for alpha chain variable domain of TCR clone 101628 (TRAV14/DV4, TRAJ17)
CAMREAGRAAGNKLTF

SEQ ID NO: 203256 - protein, 12 aa, Homo sapiens
  CDR3 for beta chain variable domain of TCR clone 101628 (TRBV7-8, TRBJ2-7)
CASSLGDREQYF

SEQ ID NO: 203257 - protein, 17 aa, Homo sapiens
  CDR3 for alpha chain variable domain of TCR clone 101629 (TRAV20, TRAJ4)
CAVQLVLFSGGYNKLIF

SEQ ID NO: 203258 - protein, 17 aa, Homo sapiens
  CDR3 for beta chain variable domain of TCR clone 101629 (TRBV13, TRBJ2-3)
CASSLSRVAGGRNTQYF

SEQ ID NO: 203259 - protein, 12 aa, Homo sapiens
  CDR3 for alpha chain variable domain of TCR clone 101630 (TRAV29/DV5, TRAJ34)
CAASGNTDKLIF

SEQ ID NO: 203260 - protein, 17 aa, Homo sapiens
  CDR3 for beta chain variable domain of TCR clone 101630 (TRBV7-3, TRBJ2-2)
CASSLSGASGGTGELFF

SEQ ID NO: 203261 - protein, 16 aa, Homo sapiens
  CDR3 for alpha chain variable domain of TCR clone 101631 (TRAV14/DV4, TRAJ53)
CAMREGGGGSNYKLKF

SEQ ID NO: 203262 - protein, 19 aa, Homo sapiens
  CDR3 for beta chain variable domain of TCR clone 101631 (TRBV28, TRBJ2-4)
CASSFQPGGPAHSKNIQYF

SEQ ID NO: 203263 - protein, 12 aa, Homo sapiens
  CDR3 for alpha chain variable domain of TCR clone 101632 (TRAV29/DV5, TRAJ43)
CAAPYNNNDMRF

SEQ ID NO: 203264 - protein, 17 aa, Homo sapiens
  CDR3 for beta chain variable domain of TCR clone 101632 (TRBV19, TRBJ2-6)
CASSTGQVFSGANVLTL

SEQ ID NO: 203265 - protein, 10 aa, Homo sapiens
  CDR3 for alpha chain variable domain of TCR clone 101633 (TRAV8-4, TRAJ43)
CAGSADDMRF

SEQ ID NO: 203266 - protein, 13 aa, Homo sapiens
  CDR3 for beta chain variable domain of TCR clone 101633 (TRBV12-4, TRBJ2-5)
CASSPGTEETQYF

SEQ ID NO: 203267 - protein, 15 aa, Homo sapiens
  CDR3 for alpha chain variable domain of TCR clone 101634 (TRAV12-1, TRAJ45)
CLVLSGGGGADGLTF

SEQ ID NO: 203268 - protein, 14 aa, Homo sapiens
  CDR3 for beta chain variable domain of TCR clone 101634 (TRBV11-2, TRBJ2-5)
CASSRTGGIETQYF

SEQ ID NO: 203269 - protein, 13 aa, Homo sapiens
  CDR3 for alpha chain variable domain of TCR clone 101635 (TRAV1-1, TRAJ9)
CAAKNTGGFKTIF

SEQ ID NO: 203270 - protein, 14 aa, Homo sapiens
  CDR3 for beta chain variable domain of TCR clone 101635 (TRBV20-1, TRBJ2-1)
CSAQIGGSANEQFC

SEQ ID NO: 203271 - protein, 17 aa, Homo sapiens
  CDR3 for alpha chain variable domain of TCR clone 101636 (TRAV26-2, TRAJ42)
CILRDVGYGGSQGNLIF

SEQ ID NO: 203272 - protein, 15 aa, Homo sapiens
  CDR3 for beta chain variable domain of TCR clone 101636 (TRBV12-4, TRBJ2-7)
CQQFDWRDRTYEQYF

SEQ ID NO: 203273 - protein, 13 aa, Homo sapiens
  CDR3 for alpha chain variable domain of TCR clone 101637 (TRAV2, TRAJ40)
CTVVTSGTYKYIF

SEQ ID NO: 203274 - protein, 14 aa, Homo sapiens
  CDR3 for beta chain variable domain of TCR clone 101637 (TRBV19, TRBJ2-1)
CASPTFVLGGEQFF

SEQ ID NO: 203275 - protein, 22 aa, Homo sapiens
  CDR3 for alpha chain variable domain of TCR clone 101638 (TRAV8-2, TRAJ45)
HLTKPSAHMSDAAEYSADGLTF

SEQ ID NO: 203276 - protein, 13 aa, Homo sapiens
  CDR3 for beta chain variable domain of TCR clone 101638 (TRBV7-3, TRBJ2-1)
CASSPVAYNEQSF

SEQ ID NO: 203277 - protein, 16 aa, Homo sapiens
  CDR3 for alpha chain variable domain of TCR clone 101639 (TRAV8-1, TRAJ42)
CAVTSRYGGSQGNHIF

SEQ ID NO: 203278 - protein, 12 aa, Homo sapiens
  CDR3 for beta chain variable domain of TCR clone 101639 (TRBV6-3, TRBJ2-7)
CASSLGRRGLYF

SEQ ID NO: 203279 - protein, 13 aa, Homo sapiens
  CDR3 for alpha chain variable domain of TCR clone 101640 (TRAV8-3, TRAJ44)
CAVVPGTASKLTF

SEQ ID NO: 203280 - protein, 13 aa, Homo sapiens
  CDR3 for beta chain variable domain of TCR clone 101640 (TRBV7-2, TRBJ2-2)
CASSLAVTGELFF

SEQ ID NO: 203281 - protein, 16 aa, Homo sapiens
  CDR3 for alpha chain variable domain of TCR clone 101641 (TRAV3, TRAJ10)
CAVRDMRAGGGNKLTF

SEQ ID NO: 203282 - protein, 17 aa, Homo sapiens
  CDR3 for beta chain variable domain of TCR clone 101641 (TRBV13, TRBJ2-3)
CASSLTRVAGGRNTQYF

SEQ ID NO: 203283 - protein, 14 aa, Homo sapiens
  CDR3 for alpha chain variable domain of TCR clone 101642 (TRAV20, TRAJ42)
CAVQAGGIQGNLIF

SEQ ID NO: 203284 - protein, 14 aa, Homo sapiens
  CDR3 for beta chain variable domain of TCR clone 101642 (TRBV28, TRBJ1-2)
CASRIQGANYGYTF

SEQ ID NO: 203285 - protein, 12 aa, Homo sapiens
  CDR3 for alpha chain variable domain of TCR clone 101643 (TRAV2, TRAJ33)
CALMDSNYQLIW

SEQ ID NO: 203286 - protein, 16 aa, Homo sapiens
  CDR3 for beta chain variable domain of TCR clone 101643 (TRBV2, TRBJ2-7)
CASSEPWTGPSYEQYF

SEQ ID NO: 203287 - protein, 15 aa, Homo sapiens
  CDR3 for alpha chain variable domain of TCR clone 101644 (TRAV17, TRAJ4)
CATGTWSGGYNKLIF

SEQ ID NO: 203288 - protein, 17 aa, Homo sapiens
  CDR3 for beta chain variable domain of TCR clone 101644 (TRBV13, TRBJ2-3)
CASSLSRVAGGRNTQYF

SEQ ID NO: 203289 - protein, 14 aa, Homo sapiens
  CDR3 for alpha chain variable domain of TCR clone 101645 (TRAV25, TRAJ6)
CAGRESGGSYIPTF

SEQ ID NO: 203290 - protein, 14 aa, Homo sapiens
  CDR3 for beta chain variable domain of TCR clone 101645 (TRBV12-4, TRBJ1-1)
CASASSEFYTEAFF

SEQ ID NO: 203291 - protein, 12 aa, Homo sapiens
  CDR3 for alpha chain variable domain of TCR clone 101646 (TRAV13-2, TRAJ23)
CAERHRGGKLIF

SEQ ID NO: 203292 - protein, 13 aa, Homo sapiens
  CDR3 for beta chain variable domain of TCR clone 101646 (TRBV3-1, TRBJ1-1)
CASSPGVITEAFF

SEQ ID NO: 203293 - protein, 13 aa, Homo sapiens
  CDR3 for alpha chain variable domain of TCR clone 101647 (TRAV21, TRAJ49)
CAVRQSTGNQFYF

SEQ ID NO: 203294 - protein, 15 aa, Homo sapiens
  CDR3 for beta chain variable domain of TCR clone 101647 (TRBV10-3, TRBJ2-3)
CAISLTSGGTDTQYF

SEQ ID NO: 203295 - protein, 14 aa, Homo sapiens
  CDR3 for alpha chain variable domain of TCR clone 101648 (TRAV16, TRAJ26)
CALSSANYGQNFVF

SEQ ID NO: 203296 - protein, 14 aa, Homo sapiens
  CDR3 for beta chain variable domain of TCR clone 101648 (TRBV6-1, TRBJ1-3)
CASVQGGGGNTIYF

SEQ ID NO: 203297 - protein, 12 aa, Homo sapiens
  CDR3 for alpha chain variable domain of TCR clone 101649 (TRAV27, TRAJ22)
CAGDGAGVEIWF

SEQ ID NO: 203298 - protein, 17 aa, Homo sapiens
  CDR3 for beta chain variable domain of TCR clone 101649 (TRBV5-7, TRBJ1-1)
CASSLRFRGLMNTEAFF

SEQ ID NO: 203299 - protein, 11 aa, Homo sapiens
  CDR3 for alpha chain variable domain of TCR clone 101650 (TRAV17, TRAJ31)
CATSNNPRLMF

SEQ ID NO: 203300 - protein, 16 aa, Homo sapiens
  CDR3 for beta chain variable domain of TCR clone 101650 (TRBV7-8, TRBJ2-4)
CASSAERTLAKNIQYF

SEQ ID NO: 203301 - protein, 16 aa, Homo sapiens
  CDR3 for alpha chain variable domain of TCR clone 101651 (TRAV30, TRAJ24)
RGTEIVDADSWGKFQF

SEQ ID NO: 203302 - protein, 13 aa, Homo sapiens
  CDR3 for beta chain variable domain of TCR clone 101651 (TRBV27, TRBJ1-4)
CASSLMGDEKLFF

SEQ ID NO: 203303 - protein, 16 aa, Homo sapiens
  CDR3 for alpha chain variable domain of TCR clone 101652 (TRAV3, TRAJ10)
CAVRDMRAGGGNKLTF

SEQ ID NO: 203304 - protein, 11 aa, Homo sapiens
  CDR3 for beta chain variable domain of TCR clone 101652 (TRBV7-6, TRBJ2-5)
CASSSQETQYF

SEQ ID NO: 203305 - protein, 17 aa, Homo sapiens
  CDR3 for alpha chain variable domain of TCR clone 101653 (TRAV13-1, TRAJ52)
CAASSGAGGTSYGKLTF

SEQ ID NO: 203306 - protein, 14 aa, Homo sapiens
  CDR3 for beta chain variable domain of TCR clone 101653 (TRBV7-9, TRBJ2-1)
CASSPRDSLYEQFF

SEQ ID NO: 203307 - protein, 14 aa, Homo sapiens
  CDR3 for alpha chain variable domain of TCR clone 101654 (TRAV12-1, TRAJ22)
CVAFSSGSARQLTF

SEQ ID NO: 203308 - protein, 14 aa, Homo sapiens
  CDR3 for beta chain variable domain of TCR clone 101654 (TRBV16, TRBJ1-1)
CASSQAGPNTEAFF

SEQ ID NO: 203309 - protein, 14 aa, Homo sapiens
  CDR3 for alpha chain variable domain of TCR clone 101655 (TRAV3, TRAJ6)
CAVRDSRRKLPTYI

SEQ ID NO: 203310 - protein, 15 aa, Homo sapiens
  CDR3 for beta chain variable domain of TCR clone 101655 (TRBV18, TRBJ2-7)
CASSPLQGRTYEQYF

SEQ ID NO: 203311 - protein, 12 aa, Homo sapiens
  CDR3 for alpha chain variable domain of TCR clone 101656 (TRAV12-3, TRAJ17)
CAMTPTGNKLTF

SEQ ID NO: 203312 - protein, 15 aa, Homo sapiens
  CDR3 for beta chain variable domain of TCR clone 101656 (TRBV20-1, TRBJ2-7)
CSARDRVSGMDERYF

SEQ ID NO: 203313 - protein, 14 aa, Homo sapiens
  CDR3 for alpha chain variable domain of TCR clone 101657 (TRAV13-1, TRAJ45)
CAAIGGGGADGLNF

SEQ ID NO: 203314 - protein, 16 aa, Homo sapiens
  CDR3 for beta chain variable domain of TCR clone 101657 (TRBV7-2, TRBJ1-1)
CASSLGAGWTNTEAFF

SEQ ID NO: 203315 - protein, 16 aa, Homo sapiens
  CDR3 for alpha chain variable domain of TCR clone 101658 (TRAV30, TRAJ24)
CGTEIVDADSWGKFQF

SEQ ID NO: 203316 - protein, 15 aa, Homo sapiens
  CDR3 for beta chain variable domain of TCR clone 101658 (TRBV25-1, TRBJ1-4)
CASSKRIATNEKLFF

SEQ ID NO: 203317 - protein, 13 aa, Homo sapiens
  CDR3 for alpha chain variable domain of TCR clone 101659 (TRAV13-1, TRAJ10)
CAATAGGGNKLTS

SEQ ID NO: 203318 - protein, 14 aa, Homo sapiens
  CDR3 for beta chain variable domain of TCR clone 101659 (TRBV12-4, TRBJ2-7)
CASSPAGLKYEQYF

SEQ ID NO: 203319 - protein, 14 aa, Homo sapiens
  CDR3 for alpha chain variable domain of TCR clone 101660 (TRAV8-4, TRAJ9)
CAVRINTGGFKTIF

SEQ ID NO: 203320 - protein, 15 aa, Homo sapiens
  CDR3 for beta chain variable domain of TCR clone 101660 (TRBV10-2, TRBJ2-6)
CTSSEQGTGANVLTF

SEQ ID NO: 203321 - protein, 13 aa, Homo sapiens
  CDR3 for alpha chain variable domain of TCR clone 101661 (TRAV22, TRAJ29)
CAVGGSGNTPLVF

SEQ ID NO: 203322 - protein, 15 aa, Homo sapiens
  CDR3 for beta chain variable domain of TCR clone 101661 (TRBV28, TRBJ2-3)
CAPTFRDWSTDTQYF

SEQ ID NO: 203323 - protein, 14 aa, Homo sapiens
  CDR3 for alpha chain variable domain of TCR clone 101662 (TRAV20, TRAJ42)
CCAADGGSQGNLIF

SEQ ID NO: 203324 - protein, 13 aa, Homo sapiens
  CDR3 for beta chain variable domain of TCR clone 101662 (TRBV4-1, TRBJ2-1)
CASSQEVQYEQFF

SEQ ID NO: 203325 - protein, 12 aa, Homo sapiens
  CDR3 for alpha chain variable domain of TCR clone 101663 (TRAV35, TRAJ49)
CAGWNTGNQFYF

SEQ ID NO: 203326 - protein, 15 aa, Homo sapiens
  CDR3 for beta chain variable domain of TCR clone 101663 (TRBV7-2, TRBJ2-2)
CASRRPGQNTGELFF

SEQ ID NO: 203327 - protein, 23 aa, Homo sapiens
  CDR3 for alpha chain variable domain of TCR clone 101664 (TRAV26-1, TRAJ38)
CIADNAGNNHIQNPDPAVYQLRD

SEQ ID NO: 203328 - protein, 13 aa, Homo sapiens
  CDR3 for beta chain variable domain of TCR clone 101664 (TRBV4-1, TRBJ2-2)
CASSQENTGELFF

SEQ ID NO: 203329 - protein, 14 aa, Homo sapiens
  CDR3 for alpha chain variable domain of TCR clone 101665 (TRAV20, TRAJ10)
CAVRVEGGGNKLTF

SEQ ID NO: 203330 - protein, 16 aa, Homo sapiens
  CDR3 for beta chain variable domain of TCR clone 101665 (TRBV12-5, TRBJ2-5)
CASGPRTSGNQETQYF

SEQ ID NO: 203331 - protein, 14 aa, Homo sapiens
  CDR3 for alpha chain variable domain of TCR clone 101666 (TRAV23/DV6, TRAJ11)
CAASIESGYSTLTF

SEQ ID NO: 203332 - protein, 13 aa, Homo sapiens
  CDR3 for beta chain variable domain of TCR clone 101666 (TRBV4-1, TRBJ2-5)
CASSLTRGETQYF

SEQ ID NO: 203333 - protein, 13 aa, Homo sapiens
  CDR3 for alpha chain variable domain of TCR clone 101667 (TRAV12-3, TRAJ9)
CAMRYTGGFKTIF

SEQ ID NO: 203334 - protein, 14 aa, Homo sapiens
  CDR3 for beta chain variable domain of TCR clone 101667 (TRBV11-2, TRBJ2-7)
CASSSTGEGYEQYF

SEQ ID NO: 203335 - protein, 12 aa, Homo sapiens
  CDR3 for alpha chain variable domain of TCR clone 101668 (TRAV12-3, TRAJ17)
CAMTLTGNKLTF

SEQ ID NO: 203336 - protein, 15 aa, Homo sapiens
  CDR3 for beta chain variable domain of TCR clone 101668 (TRBV20-1, TRBJ2-7)
CSARYRVSVMDEQYF

SEQ ID NO: 203337 - protein, 15 aa, Homo sapiens
  CDR3 for alpha chain variable domain of TCR clone 101669 (TRAV8-4, TRAJ48)
CAVSAADFGNEKLTF

SEQ ID NO: 203338 - protein, 12 aa, Homo sapiens
  CDR3 for beta chain variable domain of TCR clone 101669 (TRBV3-1, TRBJ2-5)
CASSQRGETQYF

SEQ ID NO: 203339 - protein, 13 aa, Homo sapiens
  CDR3 for alpha chain variable domain of TCR clone 101670 (TRAV21, TRAJ27)
CAARPGNAGKSTF

SEQ ID NO: 203340 - protein, 16 aa, Homo sapiens
  CDR3 for beta chain variable domain of TCR clone 101670 (TRBV29-1, TRBJ2-6)
CSVEDITYSGANVLTF

SEQ ID NO: 203341 - protein, 23 aa, Homo sapiens
  CDR3 for alpha chain variable domain of TCR clone 101671 (TRAV12-2, TRAJ22)
CAVSFRVHPGPPIVSGSARQLTF

SEQ ID NO: 203342 - protein, 13 aa, Homo sapiens
  CDR3 for beta chain variable domain of TCR clone 101671 (TRBV12-4, TRBJ1-2)
CASSLDSNYGYTS

SEQ ID NO: 203343 - protein, 15 aa, Homo sapiens
  CDR3 for alpha chain variable domain of TCR clone 101672 (TRAV17, TRAJ22)
CATVAPSGSARQLTF

SEQ ID NO: 203344 - protein, 16 aa, Homo sapiens
  CDR3 for beta chain variable domain of TCR clone 101672 (TRBV10-3, TRBJ2-7)
CAISADIADRPYEQYF

SEQ ID NO: 203345 - protein, 16 aa, Homo sapiens
  CDR3 for alpha chain variable domain of TCR clone 101673 (TRAV4, TRAJ13)
CCVLLPPPGGYQKVTF

SEQ ID NO: 203346 - protein, 13 aa, Homo sapiens
  CDR3 for beta chain variable domain of TCR clone 101673 (TRBV12-5, TRBJ2-3)
CASGDRQSDTQYF

SEQ ID NO: 203347 - protein, 15 aa, Homo sapiens
  CDR3 for alpha chain variable domain of TCR clone 101674 (TRAV27, TRAJ38)
CAARRNAGNNRKLIW

SEQ ID NO: 203348 - protein, 15 aa, Homo sapiens
  CDR3 for beta chain variable domain of TCR clone 101674 (TRBV7-3, TRBJ2-1)
CASSSLAGVHNEQFF

SEQ ID NO: 203349 - protein, 13 aa, Homo sapiens
  CDR3 for alpha chain variable domain of TCR clone 101675 (TRAV2, TRAJ23)
CAVMGNQGGKLIF

SEQ ID NO: 203350 - protein, 13 aa, Homo sapiens
  CDR3 for beta chain variable domain of TCR clone 101675 (TRBV4-2, TRBJ1-1)
CASSQAGNTEAFF

SEQ ID NO: 203351 - protein, 13 aa, Homo sapiens
  CDR3 for alpha chain variable domain of TCR clone 101676 (TRAV3, TRAJ15)
CAVRDQAGTALIF

SEQ ID NO: 203352 - protein, 14 aa, Homo sapiens
  CDR3 for beta chain variable domain of TCR clone 101676 (TRBV7-6, TRBJ2-3)
CASSVAGGTDTQYF

SEQ ID NO: 203353 - protein, 13 aa, Homo sapiens
  CDR3 for alpha chain variable domain of TCR clone 101677 (TRAV2, TRAJ15)
CAVEAQAGTALIF

SEQ ID NO: 203354 - protein, 12 aa, Homo sapiens
  CDR3 for beta chain variable domain of TCR clone 101677 (TRBV7-8, TRBJ2-7)
CASSLGDREQYF

SEQ ID NO: 203355 - protein, 13 aa, Homo sapiens
  CDR3 for alpha chain variable domain of TCR clone 101678 (TRAV21, TRAJ20)
CAVGLRVDYKLSF

SEQ ID NO: 203356 - protein, 13 aa, Homo sapiens
  CDR3 for beta chain variable domain of TCR clone 101678 (TRBV5-1, TRBJ2-1)
CASRPFGYNEQFF

SEQ ID NO: 203357 - protein, 12 aa, Homo sapiens
  CDR3 for alpha chain variable domain of TCR clone 101679 (TRAV12-3, TRAJ17)
CAMTLTGNNLTL

SEQ ID NO: 203358 - protein, 15 aa, Homo sapiens
  CDR3 for beta chain variable domain of TCR clone 101679 (TRBV20-1, TRBJ2-7)
CSARDRVSGMDEQYF

SEQ ID NO: 203359 - protein, 15 aa, Homo sapiens
  CDR3 for alpha chain variable domain of TCR clone 101680 (TRAV25, TRAJ52)
CAGTSGSTSYGKLTL

SEQ ID NO: 203360 - protein, 16 aa, Homo sapiens
  CDR3 for beta chain variable domain of TCR clone 101680 (TRBV15, TRBJ1-2)
CATSRGPRTGGGGYTF

SEQ ID NO: 203361 - protein, 10 aa, Homo sapiens
  CDR3 for alpha chain variable domain of TCR clone 101681 (TRAV21, TRAJ43)
CAVRIGDMRF

SEQ ID NO: 203362 - protein, 13 aa, Homo sapiens
  CDR3 for beta chain variable domain of TCR clone 101681 (TRBV20-1, TRBJ2-7)
CSAPGLADYKQYF

SEQ ID NO: 203363 - protein, 14 aa, Homo sapiens
  CDR3 for alpha chain variable domain of TCR clone 101682 (TRAV17, TRAJ31)
CATAPLSGNARLMF

SEQ ID NO: 203364 - protein, 15 aa, Homo sapiens
  CDR3 for beta chain variable domain of TCR clone 101682 (TRBV15, TRBJ2-2)
CATSGTGGRVGELFF

SEQ ID NO: 203365 - protein, 15 aa, Homo sapiens
  CDR3 for alpha chain variable domain of TCR clone 101683 (TRAV29/DV5, TRAJ53)
CAASASGGSNYKLTF

SEQ ID NO: 203366 - protein, 16 aa, Homo sapiens
  CDR3 for beta chain variable domain of TCR clone 101683 (TRBV7-3, TRBJ2-2)
CASSLKRGTLSGELFF

SEQ ID NO: 203367 - protein, 14 aa, Homo sapiens
  CDR3 for alpha chain variable domain of TCR clone 101684 (TRAV8-2, TRAJ4)
CVVSPSGGNNKLIF

SEQ ID NO: 203368 - protein, 15 aa, Homo sapiens
  CDR3 for beta chain variable domain of TCR clone 101684 (TRBV4-1, TRBJ1-4)
CASSDTGGTNEKLFF

SEQ ID NO: 203369 - protein, 10 aa, Homo sapiens
  CDR3 for alpha chain variable domain of TCR clone 101685 (TRAV36/DV7, TRAJ48)
CAVGNEKLTF

SEQ ID NO: 203370 - protein, 14 aa, Homo sapiens
  CDR3 for beta chain variable domain of TCR clone 101685 (TRBV25-1, TRBJ1-1)
CASTHLGGNTEAFF

SEQ ID NO: 203371 - protein, 10 aa, Homo sapiens
  CDR3 for alpha chain variable domain of TCR clone 101686 (TRAV12-2, TRAJ52)
RSTSYGKLTF

SEQ ID NO: 203372 - protein, 13 aa, Homo sapiens
  CDR3 for beta chain variable domain of TCR clone 101686 (TRBV10-3, TRBJ2-7)
CASKLAVNYEQYF

SEQ ID NO: 203373 - protein, 15 aa, Homo sapiens
  CDR3 for alpha chain variable domain of TCR clone 101687 (TRAV3, TRAJ22)
CAVRDRGGSARQLTF

SEQ ID NO: 203374 - protein, 11 aa, Homo sapiens
  CDR3 for beta chain variable domain of TCR clone 101687 (TRBV6-3, TRBJ2-3)
CATGQADTQYF

SEQ ID NO: 203375 - protein, 13 aa, Homo sapiens
  CDR3 for alpha chain variable domain of TCR clone 101688 (TRAV27, TRAJ37)
CAGGPSNTGKLIF

SEQ ID NO: 203376 - protein, 13 aa, Homo sapiens
  CDR3 for beta chain variable domain of TCR clone 101688 (TRBV28, TRBJ1-1)
CASSKQGWTEAFF

SEQ ID NO: 203377 - protein, 15 aa, Homo sapiens
  CDR3 for alpha chain variable domain of TCR clone 101689 (TRAV26-1, TRAJ23)
CIVRVLNNQRGKLIF

SEQ ID NO: 203378 - protein, 15 aa, Homo sapiens
  CDR3 for beta chain variable domain of TCR clone 101689 (TRBV7-3, TRBJ2-1)
CASSFGQSNYNEQFF

SEQ ID NO: 203379 - protein, 14 aa, Homo sapiens
  CDR3 for alpha chain variable domain of TCR clone 101690 (TRAV13-2, TRAJ29)
CEEGTFETNTPLVF

SEQ ID NO: 203380 - protein, 13 aa, Homo sapiens
  CDR3 for beta chain variable domain of TCR clone 101690 (TRBV2, TRBJ1-1)
CASNLLRNTEAFF

SEQ ID NO: 203381 - protein, 12 aa, Homo sapiens
  CDR3 for alpha chain variable domain of TCR clone 101691 (TRAV16, TRAJ10)
CSRTGGGNKLTF

SEQ ID NO: 203382 - protein, 11 aa, Homo sapiens
  CDR3 for beta chain variable domain of TCR clone 101691 (TRBV11-2, TRBJ2-2)
CASSLPGELFF

SEQ ID NO: 203383 - protein, 14 aa, Homo sapiens
  CDR3 for alpha chain variable domain of TCR clone 101692 (TRAV1-1, TRAJ27)
CAVIYNTNGGKSTF

SEQ ID NO: 203384 - protein, 15 aa, Homo sapiens
  CDR3 for beta chain variable domain of TCR clone 101692 (TRBV7-2, TRBJ2-1)
CASSSGLAGGNEQFF

SEQ ID NO: 203385 - protein, 14 aa, Homo sapiens
  CDR3 for alpha chain variable domain of TCR clone 101693 (TRAV38-1, TRAJ40)
CALRPTSGTYKYIF

SEQ ID NO: 203386 - protein, 13 aa, Homo sapiens
  CDR3 for beta chain variable domain of TCR clone 101693 (TRBV25-1, TRBJ1-1)
CQHPPGGDTEAFF

SEQ ID NO: 203387 - protein, 13 aa, Homo sapiens
  CDR3 for alpha chain variable domain of TCR clone 101694 (TRAV13-1, TRAJ12)
CAASPDSSYKLIF

SEQ ID NO: 203388 - protein, 15 aa, Homo sapiens
  CDR3 for beta chain variable domain of TCR clone 101694 (TRBV7-9, TRBJ2-7)
CASSLALAEAYEQYF

SEQ ID NO: 203389 - protein, 16 aa, Homo sapiens
  CDR3 for alpha chain variable domain of TCR clone 101695 (TRAV30, TRAJ24)
CGTEIVDADSWGKFQF

SEQ ID NO: 203390 - protein, 14 aa, Homo sapiens
  CDR3 for beta chain variable domain of TCR clone 101695 (TRBV19, TRBJ2-2)
CASSGQGIAGELFF

SEQ ID NO: 203391 - protein, 13 aa, Homo sapiens
  CDR3 for alpha chain variable domain of TCR clone 101696 (TRAV12-3, TRAJ13)
CAMTSGGYHKVTF

SEQ ID NO: 203392 - protein, 13 aa, Homo sapiens
  CDR3 for beta chain variable domain of TCR clone 101696 (TRBV20-1, TRBJ2-2)
CSALSGGAGELFF

SEQ ID NO: 203393 - protein, 14 aa, Homo sapiens
  CDR3 for alpha chain variable domain of TCR clone 101697 (TRAV8-3, TRAJ39)
CAVGANNAGNMLTF

SEQ ID NO: 203394 - protein, 12 aa, Homo sapiens
  CDR3 for beta chain variable domain of TCR clone 101697 (TRBV28, TRBJ2-3)
CASSLYRDTQYF

SEQ ID NO: 203395 - protein, 23 aa, Homo sapiens
  CDR3 for alpha chain variable domain of TCR clone 101698 (TRAV26-1, TRAJ38)
CIADNAGNNHIQNPDPAVYQLRD

SEQ ID NO: 203396 - protein, 16 aa, Homo sapiens
  CDR3 for beta chain variable domain of TCR clone 101698 (TRBV9, TRBJ2-3)
CASSGTSGKDTDTQYF

SEQ ID NO: 203397 - protein, 15 aa, Homo sapiens
  CDR3 for alpha chain variable domain of TCR clone 101699 (TRAV16, TRAJ13)
CALSDEFWGLPESYL

SEQ ID NO: 203398 - protein, 12 aa, Homo sapiens
  CDR3 for beta chain variable domain of TCR clone 101699 (TRBV28, TRBJ2-3)
CASSLYRDTQYF

SEQ ID NO: 203399 - protein, 14 aa, Homo sapiens
  CDR3 for alpha chain variable domain of TCR clone 101700 (TRAV2, TRAJ9)
CAVDPNTGGFKTII

SEQ ID NO: 203400 - protein, 13 aa, Homo sapiens
  CDR3 for beta chain variable domain of TCR clone 101700 (TRBV20-1, TRBJ2-1)
CSASTGTSNEQFF

SEQ ID NO: 203401 - protein, 17 aa, Homo sapiens
  CDR3 for alpha chain variable domain of TCR clone 101701 (TRAV3, TRAJ38)
CAVRDCLNAGNNRKLIW

SEQ ID NO: 203402 - protein, 14 aa, Homo sapiens
  CDR3 for beta chain variable domain of TCR clone 101701 (TRBV28, TRBJ1-2)
CASRIQGANYGYTF

SEQ ID NO: 203403 - protein, 15 aa, Homo sapiens
  CDR3 for alpha chain variable domain of TCR clone 101702 (TRAV12-3, TRAJ11)
CAMSEENSGYSTLTF

SEQ ID NO: 203404 - protein, 16 aa, Homo sapiens
  CDR3 for beta chain variable domain of TCR clone 101702 (TRBV5-1, TRBJ2-7)
CASSSEGLAGLYEQYF

SEQ ID NO: 203405 - protein, 15 aa, Homo sapiens
  CDR3 for alpha chain variable domain of TCR clone 101703 (TRAV1-1, TRAJ4)
CAVRAFSCGYNKLIF

SEQ ID NO: 203406 - protein, 16 aa, Homo sapiens
  CDR3 for beta chain variable domain of TCR clone 101703 (TRBV7-2, TRBJ2-6)
CAILSGVSSGANVLTF

SEQ ID NO: 203407 - protein, 13 aa, Homo sapiens
  CDR3 for alpha chain variable domain of TCR clone 101704 (TRAV27, TRAJ57)
CRSAQGGSVKLVF

SEQ ID NO: 203408 - protein, 11 aa, Homo sapiens
  CDR3 for beta chain variable domain of TCR clone 101704 (TRBV11-2, TRBJ1-1)
CASSINTEAFF

SEQ ID NO: 203409 - protein, 14 aa, Homo sapiens
  CDR3 for alpha chain variable domain of TCR clone 101705 (TRAV17, TRAJ45)
CATASGGGTDGLTF

SEQ ID NO: 203410 - protein, 15 aa, Homo sapiens
  CDR3 for beta chain variable domain of TCR clone 101705 (TRBV11-2, TRBJ2-1)
CASSRNRGLMYEQFF

SEQ ID NO: 203411 - protein, 23 aa, Homo sapiens
  CDR3 for alpha chain variable domain of TCR clone 101706 (TRAV12-2, TRAJ36)
SLLIRDSQPSDSATLERANNLFF

SEQ ID NO: 203412 - protein, 16 aa, Homo sapiens
  CDR3 for beta chain variable domain of TCR clone 101706 (TRBV7-3, TRBJ2-2)
CDSSLKQGTLSGELFF

SEQ ID NO: 203413 - protein, 11 aa, Homo sapiens
  CDR3 for alpha chain variable domain of TCR clone 101707 (TRAV26-1, TRAJ37)
CIVRVGRKLIF

SEQ ID NO: 203414 - protein, 15 aa, Homo sapiens
  CDR3 for beta chain variable domain of TCR clone 101707 (TRBV6-3, TRBJ2-7)
CASSSPGTVFYEQYF

SEQ ID NO: 203415 - protein, 13 aa, Homo sapiens
  CDR3 for alpha chain variable domain of TCR clone 101708 (TRAV13-2, TRAJ48)
CAEMDFGNEELTF

SEQ ID NO: 203416 - protein, 16 aa, Homo sapiens
  CDR3 for beta chain variable domain of TCR clone 101708 (TRBV27, TRBJ2-2)
CASSFRGLVRTGELFF

SEQ ID NO: 203417 - protein, 14 aa, Homo sapiens
  CDR3 for alpha chain variable domain of TCR clone 101709 (TRAV38-1, TRAJ32)
CAFIYGGATNKLIF

SEQ ID NO: 203418 - protein, 12 aa, Homo sapiens
  CDR3 for beta chain variable domain of TCR clone 101709 (TRBV28, TRBJ2-7)
CASSLNRYEQYF

SEQ ID NO: 203419 - protein, 15 aa, Homo sapiens
  CDR3 for alpha chain variable domain of TCR clone 101710 (TRAV25, TRAJ53)
CPTSNSGGSNYKLTF

SEQ ID NO: 203420 - protein, 11 aa, Homo sapiens
  CDR3 for beta chain variable domain of TCR clone 101710 (TRBV11-2, TRBJ1-1)
CASSINTEAFF

SEQ ID NO: 203421 - protein, 13 aa, Homo sapiens
  CDR3 for alpha chain variable domain of TCR clone 101711 (TRAV21, TRAJ20)
CAVGLRVDYKLSF

SEQ ID NO: 203422 - protein, 18 aa, Homo sapiens
  CDR3 for beta chain variable domain of TCR clone 101711 (TRBV7-2, TRBJ2-3)
CASSLETSRGRKADTQYF

SEQ ID NO: 203423 - protein, 15 aa, Homo sapiens
  CDR3 for alpha chain variable domain of TCR clone 101712 (TRAV4, TRAJ39)
CLVGPNNNAGNMLTF

SEQ ID NO: 203424 - protein, 15 aa, Homo sapiens
  CDR3 for beta chain variable domain of TCR clone 101712 (TRBV19, TRBJ2-1)
CASIKGRGPYNEQFF

SEQ ID NO: 203425 - protein, 15 aa, Homo sapiens
  CDR3 for alpha chain variable domain of TCR clone 101713 (TRAV36/DV7, TRAJ42)
CAVEWYGGSQGNLIF

SEQ ID NO: 203426 - protein, 12 aa, Homo sapiens
  CDR3 for beta chain variable domain of TCR clone 101713 (TRBV7-9, TRBJ2-7)
CASSIKREEQYF

SEQ ID NO: 203427 - protein, 16 aa, Homo sapiens
  CDR3 for alpha chain variable domain of TCR clone 101714 (TRAV16, TRAJ52)
CALSAAGGTSYGKLTF

SEQ ID NO: 203428 - protein, 16 aa, Homo sapiens
  CDR3 for beta chain variable domain of TCR clone 101714 (TRBV12-4, TRBJ1-5)
CASIRPVGGSNQLQHF

SEQ ID NO: 203429 - protein, 10 aa, Homo sapiens
  CDR3 for alpha chain variable domain of TCR clone 101715 (TRAV8-4, TRAJ43)
CAVSLGDMRF

SEQ ID NO: 203430 - protein, 17 aa, Homo sapiens
  CDR3 for beta chain variable domain of TCR clone 101715 (TRBV19, TRBJ1-1)
CASSIAGRGLMNTEAFF

SEQ ID NO: 203431 - protein, 14 aa, Homo sapiens
  CDR3 for alpha chain variable domain of TCR clone 101716 (TRAV12-3, TRAJ10)
SHLPLTGGGNKLTF

SEQ ID NO: 203432 - protein, 16 aa, Homo sapiens
  CDR3 for beta chain variable domain of TCR clone 101716 (TRBV12-4, TRBJ2-5)
CASSWRPSGELETQYF

SEQ ID NO: 203433 - protein, 16 aa, Homo sapiens
  CDR3 for alpha chain variable domain of TCR clone 101717 (TRAV3, TRAJ21)
CAVRDIERGNFNKFYF

SEQ ID NO: 203434 - protein, 13 aa, Homo sapiens
  CDR3 for beta chain variable domain of TCR clone 101717 (TRBV27, TRBJ2-7)
CASSLTTGCEQYF

SEQ ID NO: 203435 - protein, 13 aa, Homo sapiens
  CDR3 for alpha chain variable domain of TCR clone 101718 (TRAV21, TRAJ20)
CAVGLRVDYKLSF

SEQ ID NO: 203436 - protein, 14 aa, Homo sapiens
  CDR3 for beta chain variable domain of TCR clone 101718 (TRBV7-3, TRBJ1-1)
CASSLKGGNTEAFF

SEQ ID NO: 203437 - protein, 15 aa, Homo sapiens
  CDR3 for alpha chain variable domain of TCR clone 101719 (TRAV3, TRAJ13)
CAVRVYSGGYQKVTF

SEQ ID NO: 203438 - protein, 15 aa, Homo sapiens
  CDR3 for beta chain variable domain of TCR clone 101719 (TRBV6-6, TRBJ2-7)
CASSYSYGGSYEQYF

SEQ ID NO: 203439 - protein, 14 aa, Homo sapiens
  CDR3 for alpha chain variable domain of TCR clone 101720 (TRAV35, TRAJ33)
CWPRGRDSNYQLIW

SEQ ID NO: 203440 - protein, 11 aa, Homo sapiens
  CDR3 for beta chain variable domain of TCR clone 101720 (TRBV10-3, TRBJ2-7)
CAISEGHEQYF

SEQ ID NO: 203441 - protein, 16 aa, Homo sapiens
  CDR3 for alpha chain variable domain of TCR clone 101721 (TRAV30, TRAJ24)
CGTEIVDADSWGKFQF

SEQ ID NO: 203442 - protein, 14 aa, Homo sapiens
  CDR3 for beta chain variable domain of TCR clone 101721 (TRBV18, TRBJ2-3)
CASSGLADTDTQYF

SEQ ID NO: 203443 - protein, 16 aa, Homo sapiens
  CDR3 for alpha chain variable domain of TCR clone 101722 (TRAV12-3, TRAJ10)
CAMKKGITGGGNKLTF

SEQ ID NO: 203444 - protein, 12 aa, Homo sapiens
  CDR3 for beta chain variable domain of TCR clone 101722 (TRBV20-1, TRBJ2-7)
CSVITPTKEQYF

SEQ ID NO: 203445 - protein, 14 aa, Homo sapiens
  CDR3 for alpha chain variable domain of TCR clone 101723 (TRAV38-1, TRAJ45)
CVYYSGGGADGLTF

SEQ ID NO: 203446 - protein, 20 aa, Homo sapiens
  CDR3 for beta chain variable domain of TCR clone 101723 (TRBV28, TRBJ2-1)
CASTPIGRSPGLAGGNEQFF

SEQ ID NO: 203447 - protein, 11 aa, Homo sapiens
  CDR3 for alpha chain variable domain of TCR clone 101724 (TRAV13-1, TRAJ40)
CAVSVTYKYIF

SEQ ID NO: 203448 - protein, 13 aa, Homo sapiens
  CDR3 for beta chain variable domain of TCR clone 101724 (TRBV19, TRBJ1-5)
CASSIGGNQPQHF

SEQ ID NO: 203449 - protein, 13 aa, Homo sapiens
  CDR3 for alpha chain variable domain of TCR clone 101725 (TRAV3, TRAJ21)
CAVREPDFNKFYF

SEQ ID NO: 203450 - protein, 14 aa, Homo sapiens
  CDR3 for beta chain variable domain of TCR clone 101725 (TRBV7-9, TRBJ1-2)
CASSSNGGGDGYTF

SEQ ID NO: 203451 - protein, 13 aa, Homo sapiens
  CDR3 for alpha chain variable domain of TCR clone 101726 (TRAV21, TRAJ57)
CAETQGGSEKLVF

SEQ ID NO: 203452 - protein, 16 aa, Homo sapiens
  CDR3 for beta chain variable domain of TCR clone 101726 (TRBV29-1, TRBJ2-7)
CSVEDAEDGTAYEQYF

SEQ ID NO: 203453 - protein, 13 aa, Homo sapiens
  CDR3 for alpha chain variable domain of TCR clone 101727 (TRAV21, TRAJ27)
CAARPGHAGKSTF

SEQ ID NO: 203454 - protein, 20 aa, Homo sapiens
  CDR3 for beta chain variable domain of TCR clone 101727 (TRBV7-8, TRBJ2-2)
CASSHLFPGPTIHITGELFF

SEQ ID NO: 203455 - protein, 11 aa, Homo sapiens
  CDR3 for alpha chain variable domain of TCR clone 101728 (TRAV12-3, TRAJ49)
CAANTGNQFYF

SEQ ID NO: 203456 - protein, 17 aa, Homo sapiens
  CDR3 for beta chain variable domain of TCR clone 101728 (TRBV7-3, TRBJ2-3)
RASSLMKRMRGADTQYF

SEQ ID NO: 203457 - protein, 14 aa, Homo sapiens
  CDR3 for alpha chain variable domain of TCR clone 101729 (TRAV3, TRAJ5)
CCERPRHGRRALTF

SEQ ID NO: 203458 - protein, 13 aa, Homo sapiens
  CDR3 for beta chain variable domain of TCR clone 101729 (TRBV12-4, TRBJ2-7)
CASSPTETYKQYF

SEQ ID NO: 203459 - protein, 14 aa, Homo sapiens
  CDR3 for alpha chain variable domain of TCR clone 101730 (TRAV12-3, TRAJ10)
SHLPLTGGGNKLTF

SEQ ID NO: 203460 - protein, 15 aa, Homo sapiens
  CDR3 for beta chain variable domain of TCR clone 101730 (TRBV7-2, TRBJ1-1)
CASSFAGDRDTEAFF

SEQ ID NO: 203461 - protein, 16 aa, Homo sapiens
  CDR3 for alpha chain variable domain of TCR clone 101731 (TRAV26-1, TRAJ53)
CIVRVAMGGSNYKLTF

SEQ ID NO: 203462 - protein, 12 aa, Homo sapiens
  CDR3 for beta chain variable domain of TCR clone 101731 (TRBV7-9, TRBJ1-5)
FASSPQGQPQHF

SEQ ID NO: 203463 - protein, 12 aa, Homo sapiens
  CDR3 for alpha chain variable domain of TCR clone 101732 (TRAV12-3, TRAJ20)
CAMVRGDYKLSC

SEQ ID NO: 203464 - protein, 14 aa, Homo sapiens
  CDR3 for beta chain variable domain of TCR clone 101732 (TRBV5-5, TRBJ1-5)
CASSGQGVDQPQHF

SEQ ID NO: 203465 - protein, 14 aa, Homo sapiens
  CDR3 for alpha chain variable domain of TCR clone 101733 (TRAV12-2, TRAJ5)
CAVNRSTGRRALTF

SEQ ID NO: 203466 - protein, 12 aa, Homo sapiens
  CDR3 for beta chain variable domain of TCR clone 101733 (TRBV19, TRBJ1-5)
CASSIAQQPQHV

SEQ ID NO: 203467 - protein, 15 aa, Homo sapiens
  CDR3 for alpha chain variable domain of TCR clone 101734 (TRAV12-2, TRAJ43)
CAFDMRFGAGTRLTV

SEQ ID NO: 203468 - protein, 18 aa, Homo sapiens
  CDR3 for beta chain variable domain of TCR clone 101734 (TRBV20-1, TRBJ2-3)
CSASGPAGGPGTTDTQYF

SEQ ID NO: 203469 - protein, 14 aa, Homo sapiens
  CDR3 for alpha chain variable domain of TCR clone 101735 (TRAV17, TRAJ12)
CAILPMASSYKLIF

SEQ ID NO: 203470 - protein, 15 aa, Homo sapiens
  CDR3 for beta chain variable domain of TCR clone 101735 (TRBV5-1, TRBJ1-1)
CASSLGEGENTEAFF

SEQ ID NO: 203471 - protein, 13 aa, Homo sapiens
  CDR3 for alpha chain variable domain of TCR clone 101736 (TRAV12-2, TRAJ9)
CAVKWAGGFKTIF

SEQ ID NO: 203472 - protein, 15 aa, Homo sapiens
  CDR3 for beta chain variable domain of TCR clone 101736 (TRBV5-1, TRBJ1-4)
CASSLTADSDENLFF

SEQ ID NO: 203473 - protein, 15 aa, Homo sapiens
  CDR3 for alpha chain variable domain of TCR clone 101737 (TRAV35, TRAJ50)
CAGQIRKTSYDKVIF

SEQ ID NO: 203474 - protein, 12 aa, Homo sapiens
  CDR3 for beta chain variable domain of TCR clone 101737 (TRBV5-1, TRBJ2-5)
CASSLGLETQYF

SEQ ID NO: 203475 - protein, 16 aa, Homo sapiens
  CDR3 for alpha chain variable domain of TCR clone 101738 (TRAV38-1, TRAJ56)
CAFMKRQTGANSKLTF

SEQ ID NO: 203476 - protein, 12 aa, Homo sapiens
  CDR3 for beta chain variable domain of TCR clone 101738 (TRBV27, TRBJ2-7)
CASSGGFYEQYF

SEQ ID NO: 203477 - protein, 13 aa, Homo sapiens
  CDR3 for alpha chain variable domain of TCR clone 101739 (TRAV17, TRAJ9)
CATDSTGGFKTIF

SEQ ID NO: 203478 - protein, 14 aa, Homo sapiens
  CDR3 for beta chain variable domain of TCR clone 101739 (TRBV19, TRBJ2-5)
CASSMTGQQETQYF

SEQ ID NO: 203479 - protein, 10 aa, Homo sapiens
  CDR3 for alpha chain variable domain of TCR clone 101740 (TRAV12-2, TRAJ22)
CAVNETQLTF

SEQ ID NO: 203480 - protein, 14 aa, Homo sapiens
  CDR3 for beta chain variable domain of TCR clone 101740 (TRBV7-7, TRBJ2-2)
CATRQDSDTGELFF

SEQ ID NO: 203481 - protein, 14 aa, Homo sapiens
  CDR3 for alpha chain variable domain of TCR clone 101741 (TRAV1-1, TRAJ27)
CAVIYNTNAGKSTF

SEQ ID NO: 203482 - protein, 12 aa, Homo sapiens
  CDR3 for beta chain variable domain of TCR clone 101741 (TRBV7-9, TRBJ2-7)
CASSLEGYEQYF

SEQ ID NO: 203483 - protein, 16 aa, Homo sapiens
  CDR3 for alpha chain variable domain of TCR clone 101742 (TRAV17, TRAJ36)
CATVSLNWGKQPLLWD

SEQ ID NO: 203484 - protein, 15 aa, Homo sapiens
  CDR3 for beta chain variable domain of TCR clone 101742 (TRBV15, TRBJ1-1)
CATSLQGGRNTETFF

SEQ ID NO: 203485 - protein, 20 aa, Homo sapiens
  CDR3 for alpha chain variable domain of TCR clone 101743 (TRAV12-1, TRAJ42)
SSVIQPHTSVKGGSQGNLIF

SEQ ID NO: 203486 - protein, 18 aa, Homo sapiens
  CDR3 for beta chain variable domain of TCR clone 101743 (TRBV11-2, TRBJ2-3)
CASSLGGASRGAPNTQYF

SEQ ID NO: 203487 - protein, 12 aa, Homo sapiens
  CDR3 for alpha chain variable domain of TCR clone 101744 (TRAV21, TRAJ37)
CAVRGNTGKLIF

SEQ ID NO: 203488 - protein, 13 aa, Homo sapiens
  CDR3 for beta chain variable domain of TCR clone 101744 (TRBV19, TRBJ2-1)
CQRGDGARNEQFF

SEQ ID NO: 203489 - protein, 16 aa, Homo sapiens
  CDR3 for alpha chain variable domain of TCR clone 101745 (TRAV27, TRAJ53)
CAAPEGSGGSNYKLTF

SEQ ID NO: 203490 - protein, 14 aa, Homo sapiens
  CDR3 for beta chain variable domain of TCR clone 101745 (TRBV7-2, TRBJ2-7)
CASSPKTSFYEQYF

SEQ ID NO: 203491 - protein, 12 aa, Homo sapiens
  CDR3 for alpha chain variable domain of TCR clone 101746 (TRAV12-3, TRAJ17)
CAMTLTGNKLTF

SEQ ID NO: 203492 - protein, 15 aa, Homo sapiens
  CDR3 for beta chain variable domain of TCR clone 101746 (TRBV7-2, TRBJ2-7)
CASSLALGSAYEQYF

SEQ ID NO: 203493 - protein, 13 aa, Homo sapiens
  CDR3 for alpha chain variable domain of TCR clone 101747 (TRAV12-3, TRAJ30)
CAMSAKWDDKIIF

SEQ ID NO: 203494 - protein, 15 aa, Homo sapiens
  CDR3 for beta chain variable domain of TCR clone 101747 (TRBV11-2, TRBJ1-3)
CASSLDGTVGNTIYF

SEQ ID NO: 203495 - protein, 13 aa, Homo sapiens
  CDR3 for alpha chain variable domain of TCR clone 101748 (TRAV1-2, TRAJ9)
CAVLNTGGFKTIF

SEQ ID NO: 203496 - protein, 14 aa, Homo sapiens
  CDR3 for beta chain variable domain of TCR clone 101748 (TRBV19, TRBJ2-1)
CASPTFVLSGAQFF

SEQ ID NO: 203497 - protein, 14 aa, Homo sapiens
  CDR3 for alpha chain variable domain of TCR clone 101749 (TRAV26-1, TRAJ31)
CIVRTGNNNARLMF

SEQ ID NO: 203498 - protein, 12 aa, Homo sapiens
  CDR3 for beta chain variable domain of TCR clone 101749 (TRBV5-7, TRBJ1-1)
CASSLGRGKAFF

SEQ ID NO: 203499 - protein, 15 aa, Homo sapiens
  CDR3 for alpha chain variable domain of TCR clone 101750 (TRAV38-2/DV8, TRAJ45)
CAYWDSGGGADGRTF

SEQ ID NO: 203500 - protein, 16 aa, Homo sapiens
  CDR3 for beta chain variable domain of TCR clone 101750 (TRBV19, TRBJ1-1)
CASSPTRFWPGTEAFF

SEQ ID NO: 203501 - protein, 13 aa, Homo sapiens
  CDR3 for alpha chain variable domain of TCR clone 101751 (TRAV23/DV6, TRAJ34)
CAAIENNTDKLNF

SEQ ID NO: 203502 - protein, 13 aa, Homo sapiens
  CDR3 for beta chain variable domain of TCR clone 101751 (TRBV29-1, TRBJ2-7)
CSVGPSGGYEQYF

SEQ ID NO: 203503 - protein, 19 aa, Homo sapiens
  CDR3 for alpha chain variable domain of TCR clone 101752 (TRAV17, TRAJ17)
CVTDGRPGVIKAAGNKLTF

SEQ ID NO: 203504 - protein, 17 aa, Homo sapiens
  CDR3 for beta chain variable domain of TCR clone 101752 (TRBV12-4, TRBJ1-1)
CASSLSGFRTMNTEAFF

SEQ ID NO: 203505 - protein, 16 aa, Homo sapiens
  CDR3 for alpha chain variable domain of TCR clone 101753 (TRAV26-1, TRAJ53)
CIVRVAMGGSNYKLTF

SEQ ID NO: 203506 - protein, 13 aa, Homo sapiens
  CDR3 for beta chain variable domain of TCR clone 101753 (TRBV11-2, TRBJ2-1)
CASSLRLTHEQFF

SEQ ID NO: 203507 - protein, 14 aa, Homo sapiens
  CDR3 for alpha chain variable domain of TCR clone 101754 (TRAV26-1, TRAJ5)
CIVRVLFNRRALTF

SEQ ID NO: 203508 - protein, 17 aa, Homo sapiens
  CDR3 for beta chain variable domain of TCR clone 101754 (TRBV29-1, TRBJ2-3)
CSVEVLAGETSTDTQYF

SEQ ID NO: 203509 - protein, 12 aa, Homo sapiens
  CDR3 for alpha chain variable domain of TCR clone 101755 (TRAV12-1, TRAJ40)
CVVYSGTYKYIF

SEQ ID NO: 203510 - protein, 14 aa, Homo sapiens
  CDR3 for beta chain variable domain of TCR clone 101755 (TRBV12-4, TRBJ2-5)
CASSLWQKQETQYF

SEQ ID NO: 203511 - protein, 12 aa, Homo sapiens
  CDR3 for alpha chain variable domain of TCR clone 101756 (TRAV2, TRAJ31)
CAVEDNNARLMF

SEQ ID NO: 203512 - protein, 14 aa, Homo sapiens
  CDR3 for beta chain variable domain of TCR clone 101756 (TRBV11-2, TRBJ1-2)
CASSLGTANYGYTF

SEQ ID NO: 203513 - protein, 17 aa, Homo sapiens
  CDR3 for alpha chain variable domain of TCR clone 101757 (TRAV3, TRAJ12)
CAVRDGGRMDSSYKLIF

SEQ ID NO: 203514 - protein, 17 aa, Homo sapiens
  CDR3 for beta chain variable domain of TCR clone 101757 (TRBV20-1, TRBJ2-1)
RSASSSGLAGSYNEQFF

SEQ ID NO: 203515 - protein, 13 aa, Homo sapiens
  CDR3 for alpha chain variable domain of TCR clone 101758 (TRAV2, TRAJ40)
CAVVTSGTYKYIF

SEQ ID NO: 203516 - protein, 17 aa, Homo sapiens
  CDR3 for beta chain variable domain of TCR clone 101758 (TRBV18, TRBJ2-2)
CASSQRSSGQGPGELFF

SEQ ID NO: 203517 - protein, 10 aa, Homo sapiens
  CDR3 for alpha chain variable domain of TCR clone 101759 (TRAV2, TRAJ34)
CAVVNDKLIF

SEQ ID NO: 203518 - protein, 18 aa, Homo sapiens
  CDR3 for beta chain variable domain of TCR clone 101759 (TRBV11-2, TRBJ2-7)
CASSPRGVAGFLIYEQYF

SEQ ID NO: 203519 - protein, 16 aa, Homo sapiens
  CDR3 for alpha chain variable domain of TCR clone 101760 (TRAV3, TRAJ37)
CAVRPHGSGNTGKLIC

SEQ ID NO: 203520 - protein, 16 aa, Homo sapiens
  CDR3 for beta chain variable domain of TCR clone 101760 (TRBV9, TRBJ1-2)
CASSVEEKVSPYGYTF

SEQ ID NO: 203521 - protein, 12 aa, Homo sapiens
  CDR3 for alpha chain variable domain of TCR clone 101761 (TRAV8-6, TRAJ8)
CAVTPGFQKLVF

SEQ ID NO: 203522 - protein, 16 aa, Homo sapiens
  CDR3 for beta chain variable domain of TCR clone 101761 (TRBV7-3, TRBJ2-2)
CDSSLKRGTLSGELFF

SEQ ID NO: 203523 - protein, 13 aa, Homo sapiens
  CDR3 for alpha chain variable domain of TCR clone 101762 (TRAV8-3, TRAJ48)
CAVVPFGNEKLTF

SEQ ID NO: 203524 - protein, 15 aa, Homo sapiens
  CDR3 for beta chain variable domain of TCR clone 101762 (TRBV11-2, TRBJ2-1)
CASRSPSTRYNEQFF

SEQ ID NO: 203525 - protein, 12 aa, Homo sapiens
  CDR3 for alpha chain variable domain of TCR clone 101763 (TRAV35, TRAJ53)
CAGLGSNYKVTF

SEQ ID NO: 203526 - protein, 15 aa, Homo sapiens
  CDR3 for beta chain variable domain of TCR clone 101763 (TRBV13, TRBJ2-5)
CASSLRPGRGETQYF

SEQ ID NO: 203527 - protein, 15 aa, Homo sapiens
  CDR3 for alpha chain variable domain of TCR clone 101764 (TRAV12-2, TRAJ53)
CAVNGGGGSNYKLTF

SEQ ID NO: 203528 - protein, 14 aa, Homo sapiens
  CDR3 for beta chain variable domain of TCR clone 101764 (TRBV7-9, TRBJ2-4)
CASSLAMGGNIQYF

SEQ ID NO: 203529 - protein, 14 aa, Homo sapiens
  CDR3 for alpha chain variable domain of TCR clone 101765 (TRAV12-2, TRAJ17)
CAVLFKAAGNKLTF

SEQ ID NO: 203530 - protein, 13 aa, Homo sapiens
  CDR3 for beta chain variable domain of TCR clone 101765 (TRBV12-4, TRBJ1-2)
CASSLDSNYGYTF

SEQ ID NO: 203531 - protein, 12 aa, Homo sapiens
  CDR3 for alpha chain variable domain of TCR clone 101766 (TRAV12-1, TRAJ40)
CVVYSGTYKYIF

SEQ ID NO: 203532 - protein, 15 aa, Homo sapiens
  CDR3 for beta chain variable domain of TCR clone 101766 (TRBV7-2, TRBJ2-1)
CASTHGTGIYNEQFF

SEQ ID NO: 203533 - protein, 11 aa, Homo sapiens
  CDR3 for alpha chain variable domain of TCR clone 101767 (TRAV3, TRAJ13)
CAVTSYQKVTF

SEQ ID NO: 203534 - protein, 15 aa, Homo sapiens
  CDR3 for beta chain variable domain of TCR clone 101767 (TRBV7-9, TRBJ2-7)
CASSISGLAVYEQYF

SEQ ID NO: 203535 - protein, 16 aa, Homo sapiens
  CDR3 for alpha chain variable domain of TCR clone 101768 (TRAV14/DV4, TRAJ53)
CAMREGGGGSNYKLTF

SEQ ID NO: 203536 - protein, 17 aa, Homo sapiens
  CDR3 for beta chain variable domain of TCR clone 101768 (TRBV7-8, TRBJ2-6)
CASSAGTGGAGANVLTF

SEQ ID NO: 203537 - protein, 16 aa, Homo sapiens
  CDR3 for alpha chain variable domain of TCR clone 101769 (TRAV4, TRAJ37)
CLVGWFGSSNTGNLIF

SEQ ID NO: 203538 - protein, 15 aa, Homo sapiens
  CDR3 for beta chain variable domain of TCR clone 101769 (TRBV12-4, TRBJ2-3)
CASSLAERPTDTQYF

SEQ ID NO: 203539 - protein, 11 aa, Homo sapiens
  CDR3 for alpha chain variable domain of TCR clone 101770 (TRAV21, TRAJ34)
CSVTNTDKLIF

SEQ ID NO: 203540 - protein, 16 aa, Homo sapiens
  CDR3 for beta chain variable domain of TCR clone 101770 (TRBV18, TRBJ1-1)
CASSPGVGGRGGEAFF

SEQ ID NO: 203541 - protein, 13 aa, Homo sapiens
  CDR3 for alpha chain variable domain of TCR clone 101771 (TRAV12-2, TRAJ20)
CAVYPSNDYKLSF

SEQ ID NO: 203542 - protein, 12 aa, Homo sapiens
  CDR3 for beta chain variable domain of TCR clone 101771 (TRBV7-9, TRBJ2-7)
CASSLEGYEQYF

SEQ ID NO: 203543 - protein, 13 aa, Homo sapiens
  CDR3 for alpha chain variable domain of TCR clone 101772 (TRAV2, TRAJ29)
CAVEPSGNTPLVF

SEQ ID NO: 203544 - protein, 13 aa, Homo sapiens
  CDR3 for beta chain variable domain of TCR clone 101772 (TRBV6-3, TRBJ2-1)
CASSYDNYNEQFF

SEQ ID NO: 203545 - protein, 14 aa, Homo sapiens
  CDR3 for alpha chain variable domain of TCR clone 101773 (TRAV12-1, TRAJ41)
CVVLNSNSGYALNF

SEQ ID NO: 203546 - protein, 13 aa, Homo sapiens
  CDR3 for beta chain variable domain of TCR clone 101773 (TRBV28, TRBJ2-7)
CASNNSGNYEQYF

SEQ ID NO: 203547 - protein, 16 aa, Homo sapiens
  CDR3 for alpha chain variable domain of TCR clone 101774 (TRAV3, TRAJ21)
CAVRDIERGNFNNFYF

SEQ ID NO: 203548 - protein, 16 aa, Homo sapiens
  CDR3 for beta chain variable domain of TCR clone 101774 (TRBV12-4, TRBJ1-5)
CASSRPVGGSNQPQHF

SEQ ID NO: 203549 - protein, 16 aa, Homo sapiens
  CDR3 for alpha chain variable domain of TCR clone 101775 (TRAV12-3, TRAJ53)
CAMSPGSGGSNYKLTF

SEQ ID NO: 203550 - protein, 16 aa, Homo sapiens
  CDR3 for beta chain variable domain of TCR clone 101775 (TRBV28, TRBJ2-5)
CQQHARGDALQETQYF

SEQ ID NO: 203551 - protein, 11 aa, Homo sapiens
  CDR3 for alpha chain variable domain of TCR clone 101776 (TRAV1-1, TRAJ9)
CAVAGGFKTIF

SEQ ID NO: 203552 - protein, 17 aa, Homo sapiens
  CDR3 for beta chain variable domain of TCR clone 101776 (TRBV13, TRBJ2-3)
CASSLSRVAGGRNTQYF

SEQ ID NO: 203553 - protein, 11 aa, Homo sapiens
  CDR3 for alpha chain variable domain of TCR clone 101777 (TRAV2, TRAJ13)
CASGGYQKVTF

SEQ ID NO: 203554 - protein, 16 aa, Homo sapiens
  CDR3 for beta chain variable domain of TCR clone 101777 (TRBV7-2, TRBJ2-5)
CASSLAVSGRGETQYF

SEQ ID NO: 203555 - protein, 16 aa, Homo sapiens
  CDR3 for alpha chain variable domain of TCR clone 101778 (TRAV30, TRAJ24)
CGIEIVDADSWGKFQF

SEQ ID NO: 203556 - protein, 12 aa, Homo sapiens
  CDR3 for beta chain variable domain of TCR clone 101778 (TRBV11-2, TRBJ2-1)
CASSPGNNEQFF

SEQ ID NO: 203557 - protein, 14 aa, Homo sapiens
  CDR3 for alpha chain variable domain of TCR clone 101779 (TRAV26-1, TRAJ21)
CIVRVVYNFNKFYF

SEQ ID NO: 203558 - protein, 15 aa, Homo sapiens
  CDR3 for beta chain variable domain of TCR clone 101779 (TRBV20-1, TRBJ2-7)
CSARDRVSGMDEQYF

SEQ ID NO: 203559 - protein, 14 aa, Homo sapiens
  CDR3 for alpha chain variable domain of TCR clone 101780 (TRAV12-3, TRAJ28)
CAMWSGAGSYQLTF

SEQ ID NO: 203560 - protein, 14 aa, Homo sapiens
  CDR3 for beta chain variable domain of TCR clone 101780 (TRBV19, TRBJ1-5)
CASSLSGGSQHQHF

SEQ ID NO: 203561 - protein, 14 aa, Homo sapiens
  CDR3 for alpha chain variable domain of TCR clone 101781 (TRAV8-6, TRAJ29)
CAASRASGNTPLVF

SEQ ID NO: 203562 - protein, 13 aa, Homo sapiens
  CDR3 for beta chain variable domain of TCR clone 101781 (TRBV19, TRBJ1-5)
CASSEGSNQPQHF

SEQ ID NO: 203563 - protein, 15 aa, Homo sapiens
  CDR3 for alpha chain variable domain of TCR clone 101782 (TRAV2, TRAJ28)
CAVPYSGAGSYQLTY

SEQ ID NO: 203564 - protein, 15 aa, Homo sapiens
  CDR3 for beta chain variable domain of TCR clone 101782 (TRBV11-3, TRBJ1-1)
CASSLGGPGDTEAFF

SEQ ID NO: 203565 - protein, 15 aa, Homo sapiens
  CDR3 for alpha chain variable domain of TCR clone 101783 (TRAV17, TRAJ10)
CATVLLTGGGNKLTF

SEQ ID NO: 203566 - protein, 11 aa, Homo sapiens
  CDR3 for beta chain variable domain of TCR clone 101783 (TRBV11-2, TRBJ1-1)
CASSINTEAFF

SEQ ID NO: 203567 - protein, 15 aa, Homo sapiens
  CDR3 for alpha chain variable domain of TCR clone 101784 (TRAV26-1, TRAJ56)
CIVRVATGANSKLTF

SEQ ID NO: 203568 - protein, 14 aa, Homo sapiens
  CDR3 for beta chain variable domain of TCR clone 101784 (TRBV7-2, TRBJ2-7)
CASSPKTSFYEQYF

SEQ ID NO: 203569 - protein, 14 aa, Homo sapiens
  CDR3 for alpha chain variable domain of TCR clone 101785 (TRAV25, TRAJ22)
CAVRSSGSARQLTF

SEQ ID NO: 203570 - protein, 16 aa, Homo sapiens
  CDR3 for beta chain variable domain of TCR clone 101785 (TRBV4-2, TRBJ1-1)
CASSTSPGRAAPEAFF

SEQ ID NO: 203571 - protein, 10 aa, Homo sapiens
  CDR3 for alpha chain variable domain of TCR clone 101786 (TRAV12-1, TRAJ33)
CVASNYQLIW

SEQ ID NO: 203572 - protein, 15 aa, Homo sapiens
  CDR3 for beta chain variable domain of TCR clone 101786 (TRBV5-4, TRBJ1-4)
CASSHGDGEKEKLFF

SEQ ID NO: 203573 - protein, 16 aa, Homo sapiens
  CDR3 for alpha chain variable domain of TCR clone 101787 (TRAV30, TRAJ24)
CGTEMVDADSGGKFQF

SEQ ID NO: 203574 - protein, 14 aa, Homo sapiens
  CDR3 for beta chain variable domain of TCR clone 101787 (TRBV12-5, TRBJ2-5)
CASGSRTHQETQYF

SEQ ID NO: 203575 - protein, 11 aa, Homo sapiens
  CDR3 for alpha chain variable domain of TCR clone 101788 (TRAV29/DV5, TRAJ30)
CAVREVDKIIF

SEQ ID NO: 203576 - protein, 13 aa, Homo sapiens
  CDR3 for beta chain variable domain of TCR clone 101788 (TRBV12-4, TRBJ1-2)
CASSLRQGKGYTF

SEQ ID NO: 203577 - protein, 18 aa, Homo sapiens
  CDR3 for alpha chain variable domain of TCR clone 101789 (TRAV13-1, TRAJ52)
CAASNRSAGGTSYGKLTF

SEQ ID NO: 203578 - protein, 13 aa, Homo sapiens
  CDR3 for beta chain variable domain of TCR clone 101789 (TRBV12-4, TRBJ1-2)
CASSLRQGKGYTF

SEQ ID NO: 203579 - protein, 14 aa, Homo sapiens
  CDR3 for alpha chain variable domain of TCR clone 101790 (TRAV13-2, TRAJ43)
CAEIPTYNNNDMRF

SEQ ID NO: 203580 - protein, 13 aa, Homo sapiens
  CDR3 for beta chain variable domain of TCR clone 101790 (TRBV12-4, TRBJ1-5)
CASSPDRAQPQHF

SEQ ID NO: 203581 - protein, 16 aa, Homo sapiens
  CDR3 for alpha chain variable domain of TCR clone 101791 (TRAV30, TRAJ24)
CGTEIVGADSWGRFQF

SEQ ID NO: 203582 - protein, 14 aa, Homo sapiens
  CDR3 for beta chain variable domain of TCR clone 101791 (TRBV12-5, TRBJ2-5)
CASGSRTHQETQYF

SEQ ID NO: 203583 - protein, 14 aa, Homo sapiens
  CDR3 for alpha chain variable domain of TCR clone 101792 (TRAV3, TRAJ21)
CALGRGSTNFTLDL

SEQ ID NO: 203584 - protein, 11 aa, Homo sapiens
  CDR3 for beta chain variable domain of TCR clone 101792 (TRBV29-1, TRBJ2-5)
CSEDRTGTQYF

SEQ ID NO: 203585 - protein, 15 aa, Homo sapiens
  CDR3 for alpha chain variable domain of TCR clone 101793 (TRAV17, TRAJ16)
CATALRFSDGQKLLF

SEQ ID NO: 203586 - protein, 15 aa, Homo sapiens
  CDR3 for beta chain variable domain of TCR clone 101793 (TRBV5-4, TRBJ2-1)
CASSSGLAGVNEQFF

SEQ ID NO: 203587 - protein, 16 aa, Homo sapiens
  CDR3 for alpha chain variable domain of TCR clone 101794 (TRAV16, TRAJ4)
CALSRMFSGGYNKLIF

SEQ ID NO: 203588 - protein, 18 aa, Homo sapiens
  CDR3 for beta chain variable domain of TCR clone 101794 (TRBV7-9, TRBJ2-1)
CASSLAVSGTSGRNEQFF

SEQ ID NO: 203589 - protein, 14 aa, Homo sapiens
  CDR3 for alpha chain variable domain of TCR clone 101795 (TRAV23/DV6, TRAJ17)
CAASIGAAGNKLTF

SEQ ID NO: 203590 - protein, 12 aa, Homo sapiens
  CDR3 for beta chain variable domain of TCR clone 101795 (TRBV20-1, TRBJ2-5)
CRAGGAGETQYF

SEQ ID NO: 203591 - protein, 15 aa, Homo sapiens
  CDR3 for alpha chain variable domain of TCR clone 101796 (TRAV13-1, TRAJ10)
CAATILTGGGNKLTF

SEQ ID NO: 203592 - protein, 15 aa, Homo sapiens
  CDR3 for beta chain variable domain of TCR clone 101796 (TRBV2, TRBJ2-7)
CASTLLGSGGTEQYF

SEQ ID NO: 203593 - protein, 15 aa, Homo sapiens
  CDR3 for alpha chain variable domain of TCR clone 101797 (TRAV21, TRAJ53)
CATLNSGGSNYKLTF

SEQ ID NO: 203594 - protein, 17 aa, Homo sapiens
  CDR3 for beta chain variable domain of TCR clone 101797 (TRBV20-1, TRBJ2-2)
CSASGSRQGGLTGELFF

SEQ ID NO: 203595 - protein, 17 aa, Homo sapiens
  CDR3 for alpha chain variable domain of TCR clone 101798 (TRAV3, TRAJ6)
CAVRDGHRAGGSYIPTF

SEQ ID NO: 203596 - protein, 14 aa, Homo sapiens
  CDR3 for beta chain variable domain of TCR clone 101798 (TRBV7-3, TRBJ2-1)
CASSTSGGWDEQFF

SEQ ID NO: 203597 - protein, 13 aa, Homo sapiens
  CDR3 for alpha chain variable domain of TCR clone 101799 (TRAV16, TRAJ11)
CALSGPSYSTLTF

SEQ ID NO: 203598 - protein, 13 aa, Homo sapiens
  CDR3 for beta chain variable domain of TCR clone 101799 (TRBV19, TRBJ1-2)
CASSVPGQDGYTF

SEQ ID NO: 203599 - protein, 12 aa, Homo sapiens
  CDR3 for alpha chain variable domain of TCR clone 101800 (TRAV12-3, TRAJ40)
CAMSSGTYKYIF

SEQ ID NO: 203600 - protein, 13 aa, Homo sapiens
  CDR3 for beta chain variable domain of TCR clone 101800 (TRBV4-1, TRBJ2-7)
CASSWTGGYEQYF

SEQ ID NO: 203601 - protein, 15 aa, Homo sapiens
  CDR3 for alpha chain variable domain of TCR clone 101801 (TRAV12-3, TRAJ27)
CAMRAYNTNAGRSTF

SEQ ID NO: 203602 - protein, 13 aa, Homo sapiens
  CDR3 for beta chain variable domain of TCR clone 101801 (TRBV11-2, TRBJ2-5)
CASSRGPSETQYF

SEQ ID NO: 203603 - protein, 11 aa, Homo sapiens
  CDR3 for alpha chain variable domain of TCR clone 101802 (TRAV3, TRAJ27)
CAMANAGKSTF

SEQ ID NO: 203604 - protein, 14 aa, Homo sapiens
  CDR3 for beta chain variable domain of TCR clone 101802 (TRBV12-5, TRBJ2-5)
CASGSRTHQETQYF

SEQ ID NO: 203605 - protein, 13 aa, Homo sapiens
  CDR3 for alpha chain variable domain of TCR clone 101803 (TRAV21, TRAJ20)
CAVGLRVDYKLSF

SEQ ID NO: 203606 - protein, 13 aa, Homo sapiens
  CDR3 for beta chain variable domain of TCR clone 101803 (TRBV10-2, TRBJ2-7)
CASGASGGYEQYF

SEQ ID NO: 203607 - protein, 13 aa, Homo sapiens
  CDR3 for alpha chain variable domain of TCR clone 101804 (TRAV36/DV7, TRAJ49)
CAVEANTGNQFYF

SEQ ID NO: 203608 - protein, 13 aa, Homo sapiens
  CDR3 for beta chain variable domain of TCR clone 101804 (TRBV28, TRBJ2-5)
CASSFAGGETQYF

SEQ ID NO: 203609 - protein, 15 aa, Homo sapiens
  CDR3 for alpha chain variable domain of TCR clone 101805 (TRAV26-1, TRAJ44)
CIVRANTGTASKLTF

SEQ ID NO: 203610 - protein, 16 aa, Homo sapiens
  CDR3 for beta chain variable domain of TCR clone 101805 (TRBV7-7, TRBJ2-1)
GASSLASGTSYNEQFF

SEQ ID NO: 203611 - protein, 13 aa, Homo sapiens
  CDR3 for alpha chain variable domain of TCR clone 101806 (TRAV20, TRAJ48)
CAVQGVGNEKLTF

SEQ ID NO: 203612 - protein, 19 aa, Homo sapiens
  CDR3 for beta chain variable domain of TCR clone 101806 (TRBV2, TRBJ2-2)
CASSQTGLAGGGNTGELFF

SEQ ID NO: 203613 - protein, 15 aa, Homo sapiens
  CDR3 for alpha chain variable domain of TCR clone 101807 (TRAV3, TRAJ9)
CAVRARNTGGFKTIF

SEQ ID NO: 203614 - protein, 12 aa, Homo sapiens
  CDR3 for beta chain variable domain of TCR clone 101807 (TRBV11-2, TRBJ2-7)
CASSLPTYEQCF

SEQ ID NO: 203615 - protein, 14 aa, Homo sapiens
  CDR3 for alpha chain variable domain of TCR clone 101808 (TRAV21, TRAJ35)
CAVMPIGFGNVLHC

SEQ ID NO: 203616 - protein, 12 aa, Homo sapiens
  CDR3 for beta chain variable domain of TCR clone 101808 (TRBV14, TRBJ1-1)
CASSQLKGLAFF

SEQ ID NO: 203617 - protein, 15 aa, Homo sapiens
  CDR3 for alpha chain variable domain of TCR clone 101809 (TRAV3, TRAJ36)
CAVRDLDTGRRALTF

SEQ ID NO: 203618 - protein, 13 aa, Homo sapiens
  CDR3 for beta chain variable domain of TCR clone 101809 (TRBV12-4, TRBJ2-7)
CASSPTETYEQYF

SEQ ID NO: 203619 - protein, 11 aa, Homo sapiens
  CDR3 for alpha chain variable domain of TCR clone 101810 (TRAV1-2, TRAJ8)
CAVSSFQKLVF

SEQ ID NO: 203620 - protein, 14 aa, Homo sapiens
  CDR3 for beta chain variable domain of TCR clone 101810 (TRBV5-1, TRBJ2-1)
CASSQRDIYNEQFF

SEQ ID NO: 203621 - protein, 13 aa, Homo sapiens
  CDR3 for alpha chain variable domain of TCR clone 101811 (TRAV3, TRAJ4)
CAVRDGGYNKLIF

SEQ ID NO: 203622 - protein, 12 aa, Homo sapiens
  CDR3 for beta chain variable domain of TCR clone 101811 (TRBV11-2, TRBJ2-2)
RASSLGGGELFF

SEQ ID NO: 203623 - protein, 11 aa, Homo sapiens
  CDR3 for alpha chain variable domain of TCR clone 101812 (TRAV1-1, TRAJ23)
CAVRQGGKLIF

SEQ ID NO: 203624 - protein, 13 aa, Homo sapiens
  CDR3 for beta chain variable domain of TCR clone 101812 (TRBV7-3, TRBJ1-1)
CASSQDWGAESFF

SEQ ID NO: 203625 - protein, 14 aa, Homo sapiens
  CDR3 for alpha chain variable domain of TCR clone 101813 (TRAV8-4, TRAJ4)
CAVSPSGGYNKLIF

SEQ ID NO: 203626 - protein, 14 aa, Homo sapiens
  CDR3 for beta chain variable domain of TCR clone 101813 (TRBV5-1, TRBJ1-1)
CASSLVSINTEAFF

SEQ ID NO: 203627 - protein, 13 aa, Homo sapiens
  CDR3 for alpha chain variable domain of TCR clone 101814 (TRAV20, TRAJ48)
CAVQGVGNEKLTF

SEQ ID NO: 203628 - protein, 14 aa, Homo sapiens
  CDR3 for beta chain variable domain of TCR clone 101814 (TRBV27, TRBJ2-7)
CDSSFRDGPYEQYF

SEQ ID NO: 203629 - protein, 15 aa, Homo sapiens
  CDR3 for alpha chain variable domain of TCR clone 101815 (TRAV17, TRAJ45)
TSVLRTGGGADGLTF

SEQ ID NO: 203630 - protein, 15 aa, Homo sapiens
  CDR3 for beta chain variable domain of TCR clone 101815 (TRBV5-6, TRBJ1-5)
CASSYGKLWDQPQHF

SEQ ID NO: 203631 - protein, 18 aa, Homo sapiens
  CDR3 for alpha chain variable domain of TCR clone 101816 (TRAV21, TRAJ52)
CAVRPSPAGGTSDGKLTF

SEQ ID NO: 203632 - protein, 16 aa, Homo sapiens
  CDR3 for beta chain variable domain of TCR clone 101816 (TRBV13, TRBJ2-3)
CQQPLQGSGGRNTQYF

SEQ ID NO: 203633 - protein, 15 aa, Homo sapiens
  CDR3 for alpha chain variable domain of TCR clone 101817 (TRAV23/DV6, TRAJ18)
CAARYRGSTLGRLYF

SEQ ID NO: 203634 - protein, 15 aa, Homo sapiens
  CDR3 for beta chain variable domain of TCR clone 101817 (TRBV7-9, TRBJ2-1)
CASSLGLAGGTEQFF

SEQ ID NO: 203635 - protein, 14 aa, Homo sapiens
  CDR3 for alpha chain variable domain of TCR clone 101818 (TRAV35, TRAJ41)
CAGQASVRRNALNF

SEQ ID NO: 203636 - protein, 14 aa, Homo sapiens
  CDR3 for beta chain variable domain of TCR clone 101818 (TRBV20-1, TRBJ1-2)
CSASEQGAVYGYTV

SEQ ID NO: 203637 - protein, 16 aa, Homo sapiens
  CDR3 for alpha chain variable domain of TCR clone 101819 (TRAV16, TRAJ52)
CALSAAGGTSYGKLTF

SEQ ID NO: 203638 - protein, 14 aa, Homo sapiens
  CDR3 for beta chain variable domain of TCR clone 101819 (TRBV19, TRBJ2-5)
CASSMTGQQETQYF

SEQ ID NO: 203639 - protein, 16 aa, Homo sapiens
  CDR3 for alpha chain variable domain of TCR clone 101820 (TRAV30, TRAJ24)
CGTEIVDADSWGKFQF

SEQ ID NO: 203640 - protein, 15 aa, Homo sapiens
  CDR3 for beta chain variable domain of TCR clone 101820 (TRBV24-1, TRBJ2-4)
CATSDPRDRANIQYF

SEQ ID NO: 203641 - protein, 14 aa, Homo sapiens
  CDR3 for alpha chain variable domain of TCR clone 101821 (TRAV26-1, TRAJ38)
CIADNAGNNRKLIW

SEQ ID NO: 203642 - protein, 17 aa, Homo sapiens
  CDR3 for beta chain variable domain of TCR clone 101821 (TRBV15, TRBJ1-1)
CATSRVGGADGDTEDFF

SEQ ID NO: 203643 - protein, 13 aa, Homo sapiens
  CDR3 for alpha chain variable domain of TCR clone 101822 (TRAV12-3, TRAJ7)
CAMSASGNNRLAF

SEQ ID NO: 203644 - protein, 15 aa, Homo sapiens
  CDR3 for beta chain variable domain of TCR clone 101822 (TRBV11-3, TRBJ2-3)
CASLKDGREGDTQYF

SEQ ID NO: 203645 - protein, 16 aa, Homo sapiens
  CDR3 for alpha chain variable domain of TCR clone 101823 (TRAV16, TRAJ57)
CAPYLITQGGSEQLVF

SEQ ID NO: 203646 - protein, 17 aa, Homo sapiens
  CDR3 for beta chain variable domain of TCR clone 101823 (TRBV24-1, TRBJ2-4)
CATSDAEARGVRNIQYF

SEQ ID NO: 203647 - protein, 14 aa, Homo sapiens
  CDR3 for alpha chain variable domain of TCR clone 101824 (TRAV17, TRAJ16)
CATADFSDGQKLLF

SEQ ID NO: 203648 - protein, 15 aa, Homo sapiens
  CDR3 for beta chain variable domain of TCR clone 101824 (TRBV18, TRBJ2-1)
CASSPPSASYNEQFV

SEQ ID NO: 203649 - protein, 14 aa, Homo sapiens
  CDR3 for alpha chain variable domain of TCR clone 101825 (TRAV2, TRAJ37)
CAVDFTSNTGKLIF

SEQ ID NO: 203650 - protein, 14 aa, Homo sapiens
  CDR3 for beta chain variable domain of TCR clone 101825 (TRBV18, TRBJ2-7)
CASSPRGGAYEQYF

SEQ ID NO: 203651 - protein, 13 aa, Homo sapiens
  CDR3 for alpha chain variable domain of TCR clone 101826 (TRAV35, TRAJ22)
CAGLSCSARQLTF

SEQ ID NO: 203652 - protein, 16 aa, Homo sapiens
  CDR3 for beta chain variable domain of TCR clone 101826 (TRBV7-9, TRBJ2-1)
CASSLVLTGQGNEQFF

SEQ ID NO: 203653 - protein, 14 aa, Homo sapiens
  CDR3 for alpha chain variable domain of TCR clone 101827 (TRAV35, TRAJ40)
CAGSTTSGTYKYIF

SEQ ID NO: 203654 - protein, 13 aa, Homo sapiens
  CDR3 for beta chain variable domain of TCR clone 101827 (TRBV20-1, TRBJ1-6)
CSAPLGVGSPLDF

SEQ ID NO: 203655 - protein, 14 aa, Homo sapiens
  CDR3 for alpha chain variable domain of TCR clone 101828 (TRAV26-1, TRAJ39)
CIVRGSRAGNMPTF

SEQ ID NO: 203656 - protein, 14 aa, Homo sapiens
  CDR3 for beta chain variable domain of TCR clone 101828 (TRBV6-1, TRBJ1-3)
CASVQGGGGNTIYF

SEQ ID NO: 203657 - protein, 16 aa, Homo sapiens
  CDR3 for alpha chain variable domain of TCR clone 101829 (TRAV16, TRAJ4)
CALSRMFSGGYNKLIF

SEQ ID NO: 203658 - protein, 16 aa, Homo sapiens
  CDR3 for beta chain variable domain of TCR clone 101829 (TRBV24-1, TRBJ2-3)
CATSDPGTGATDTQYC

SEQ ID NO: 203659 - protein, 14 aa, Homo sapiens
  CDR3 for alpha chain variable domain of TCR clone 101830 (TRAV3, TRAJ36)
CAVRDGTGANNLFF

SEQ ID NO: 203660 - protein, 15 aa, Homo sapiens
  CDR3 for beta chain variable domain of TCR clone 101830 (TRBV11-3, TRBJ2-7)
CASSPGPASSYEQYF

SEQ ID NO: 203661 - protein, 12 aa, Homo sapiens
  CDR3 for alpha chain variable domain of TCR clone 101831 (TRAV12-3, TRAJ17)
CAITLTGNKLTF

SEQ ID NO: 203662 - protein, 13 aa, Homo sapiens
  CDR3 for beta chain variable domain of TCR clone 101831 (TRBV7-2, TRBJ2-2)
CASSLAVTGELFF

SEQ ID NO: 203663 - protein, 15 aa, Homo sapiens
  CDR3 for alpha chain variable domain of TCR clone 101832 (TRAV4, TRAJ10)
CLVGDGSGGGNKLTF

SEQ ID NO: 203664 - protein, 15 aa, Homo sapiens
  CDR3 for beta chain variable domain of TCR clone 101832 (TRBV2, TRBJ1-2)
CASSESRTVNYGYTF

SEQ ID NO: 203665 - protein, 14 aa, Homo sapiens
  CDR3 for alpha chain variable domain of TCR clone 101833 (TRAV17, TRAJ43)
CATDHPYNNNDMRF

SEQ ID NO: 203666 - protein, 16 aa, Homo sapiens
  CDR3 for beta chain variable domain of TCR clone 101833 (TRBV4-1, TRBJ2-1)
CASSPYAGGHDNEQFF

SEQ ID NO: 203667 - protein, 16 aa, Homo sapiens
  CDR3 for alpha chain variable domain of TCR clone 101834 (TRAV17, TRAJ35)
CATAEGGMGFGNVLHC

SEQ ID NO: 203668 - protein, 19 aa, Homo sapiens
  CDR3 for beta chain variable domain of TCR clone 101834 (TRBV19, TRBJ2-5)
CASSIGQVTDFFLGETQYF

SEQ ID NO: 203669 - protein, 15 aa, Homo sapiens
  CDR3 for alpha chain variable domain of TCR clone 101835 (TRAV22, TRAJ24)
CAVPLSTDSWGQLQF

SEQ ID NO: 203670 - protein, 16 aa, Homo sapiens
  CDR3 for beta chain variable domain of TCR clone 101835 (TRBV28, TRBJ2-7)
CASSFPDRRLTYEQYF

SEQ ID NO: 203671 - protein, 14 aa, Homo sapiens
  CDR3 for alpha chain variable domain of TCR clone 101836 (TRAV1-2, TRAJ33)
CAVIAPDSNYQLIW

SEQ ID NO: 203672 - protein, 14 aa, Homo sapiens
  CDR3 for beta chain variable domain of TCR clone 101836 (TRBV11-3, TRBJ1-6)
CASSFSGGDSPLHF

SEQ ID NO: 203673 - protein, 18 aa, Homo sapiens
  CDR3 for alpha chain variable domain of TCR clone 101837 (TRAV12-3, TRAJ52)
CAMSVGGAGGTSYGKLTF

SEQ ID NO: 203674 - protein, 14 aa, Homo sapiens
  CDR3 for beta chain variable domain of TCR clone 101837 (TRBV7-2, TRBJ2-7)
CASGSQGAAYEQYF

SEQ ID NO: 203675 - protein, 12 aa, Homo sapiens
  CDR3 for alpha chain variable domain of TCR clone 101838 (TRAV27, TRAJ21)
CAGGRQLQQILL

SEQ ID NO: 203676 - protein, 14 aa, Homo sapiens
  CDR3 for beta chain variable domain of TCR clone 101838 (TRBV7-9, TRBJ1-4)
CASSLEGQSEKLFF

SEQ ID NO: 203677 - protein, 12 aa, Homo sapiens
  CDR3 for alpha chain variable domain of TCR clone 101839 (TRAV3, TRAJ43)
CAVRDPNNDLRF

SEQ ID NO: 203678 - protein, 17 aa, Homo sapiens
  CDR3 for beta chain variable domain of TCR clone 101839 (TRBV7-8, TRBJ2-6)
CASSAGTGGAGANVLTF

SEQ ID NO: 203679 - protein, 19 aa, Homo sapiens
  CDR3 for alpha chain variable domain of TCR clone 101840 (TRAV3, TRAJ37)
CAVRDIVGGYPSNTGKLLF

SEQ ID NO: 203680 - protein, 14 aa, Homo sapiens
  CDR3 for beta chain variable domain of TCR clone 101840 (TRBV7-8, TRBJ2-3)
CASSLEAGTDTQYF

SEQ ID NO: 203681 - protein, 13 aa, Homo sapiens
  CDR3 for alpha chain variable domain of TCR clone 101841 (TRAV8-4, TRAJ10)
SAAFTGGGNKLTF

SEQ ID NO: 203682 - protein, 15 aa, Homo sapiens
  CDR3 for beta chain variable domain of TCR clone 101841 (TRBV2, TRBJ2-3)
CASSDFEKATDTQYF

SEQ ID NO: 203683 - protein, 19 aa, Homo sapiens
  CDR3 for alpha chain variable domain of TCR clone 101842 (TRAV3, TRAJ6)
CAGRDRNPSRSGGSYIPTF

SEQ ID NO: 203684 - protein, 15 aa, Homo sapiens
  CDR3 for beta chain variable domain of TCR clone 101842 (TRBV18, TRBJ2-7)
CASSPTFMDSYEQYF

SEQ ID NO: 203685 - protein, 16 aa, Homo sapiens
  CDR3 for alpha chain variable domain of TCR clone 101843 (TRAV30, TRAJ24)
CGTEIVGAYSWGKFQF

SEQ ID NO: 203686 - protein, 15 aa, Homo sapiens
  CDR3 for beta chain variable domain of TCR clone 101843 (TRBV7-9, TRBJ1-4)
CASSARTGGNEKLFF

SEQ ID NO: 203687 - protein, 14 aa, Homo sapiens
  CDR3 for alpha chain variable domain of TCR clone 101844 (TRAV4, TRAJ23)
CLVGSYNQGGKLIF

SEQ ID NO: 203688 - protein, 18 aa, Homo sapiens
  CDR3 for beta chain variable domain of TCR clone 101844 (TRBV6-5, TRBJ2-6)
CVSRTPGQGKTGANVLTF

SEQ ID NO: 203689 - protein, 17 aa, Homo sapiens
  CDR3 for alpha chain variable domain of TCR clone 101845 (TRAV12-3, TRAJ26)
CAMGGGRWDNYGQNFVF

SEQ ID NO: 203690 - protein, 12 aa, Homo sapiens
  CDR3 for beta chain variable domain of TCR clone 101845 (TRBV19, TRBJ1-1)
CASSTTGIEAFF

SEQ ID NO: 203691 - protein, 18 aa, Homo sapiens
  CDR3 for alpha chain variable domain of TCR clone 101846 (TRAV29/DV5, TRAJ52)
CAAGFRGAGGTSYGKLTF

SEQ ID NO: 203692 - protein, 16 aa, Homo sapiens
  CDR3 for beta chain variable domain of TCR clone 101846 (TRBV20-1, TRBJ1-4)
CSAPGQGLLTNEKLFF

SEQ ID NO: 203693 - protein, 15 aa, Homo sapiens
  CDR3 for alpha chain variable domain of TCR clone 101847 (TRAV35, TRAJ52)
FAGPRGGTSYGKLTF

SEQ ID NO: 203694 - protein, 14 aa, Homo sapiens
  CDR3 for beta chain variable domain of TCR clone 101847 (TRBV20-1, TRBJ2-7)
CSAWTALSSYEQYF

SEQ ID NO: 203695 - protein, 13 aa, Homo sapiens
  CDR3 for alpha chain variable domain of TCR clone 101848 (TRAV29/DV5, TRAJ34)
CAASVRNTDKLIF

SEQ ID NO: 203696 - protein, 16 aa, Homo sapiens
  CDR3 for beta chain variable domain of TCR clone 101848 (TRBV20-1, TRBJ1-4)
CSAPGQGLLTNEKLFF

SEQ ID NO: 203697 - protein, 16 aa, Homo sapiens
  CDR3 for alpha chain variable domain of TCR clone 101849 (TRAV3, TRAJ37)
CAVRGKGSGNTGKLIL

SEQ ID NO: 203698 - protein, 14 aa, Homo sapiens
  CDR3 for beta chain variable domain of TCR clone 101849 (TRBV20-1, TRBJ2-3)
CSARGGTSTDTQYF

SEQ ID NO: 203699 - protein, 17 aa, Homo sapiens
  CDR3 for alpha chain variable domain of TCR clone 101850 (TRAV26-1, TRAJ22)
CTVRVPSHSGSARQLTF

SEQ ID NO: 203700 - protein, 16 aa, Homo sapiens
  CDR3 for beta chain variable domain of TCR clone 101850 (TRBV28, TRBJ2-1)
CASRRSGRVVGNEQFF

SEQ ID NO: 203701 - protein, 12 aa, Homo sapiens
  CDR3 for alpha chain variable domain of TCR clone 101851 (TRAV13-1, TRAJ27)
CAAHTNAGKSTF

SEQ ID NO: 203702 - protein, 14 aa, Homo sapiens
  CDR3 for beta chain variable domain of TCR clone 101851 (TRBV4-2, TRBJ2-1)
CASGLDRAYNEQFF

SEQ ID NO: 203703 - protein, 12 aa, Homo sapiens
  CDR3 for alpha chain variable domain of TCR clone 101852 (TRAV16, TRAJ10)
CSRTGGGNKLTF

SEQ ID NO: 203704 - protein, 13 aa, Homo sapiens
  CDR3 for beta chain variable domain of TCR clone 101852 (TRBV25-1, TRBJ2-7)
CASSEDGDYEQYF

SEQ ID NO: 203705 - protein, 14 aa, Homo sapiens
  CDR3 for alpha chain variable domain of TCR clone 101853 (TRAV36/DV7, TRAJ44)
CCGANTGTASKLTF

SEQ ID NO: 203706 - protein, 16 aa, Homo sapiens
  CDR3 for beta chain variable domain of TCR clone 101853 (TRBV7-9, TRBJ1-2)
CASSLGFSSGEDGDTF

SEQ ID NO: 203707 - protein, 15 aa, Homo sapiens
  CDR3 for alpha chain variable domain of TCR clone 101854 (TRAV40, TRAJ45)
CLLGDMGGGADGLTF

SEQ ID NO: 203708 - protein, 13 aa, Homo sapiens
  CDR3 for beta chain variable domain of TCR clone 101854 (TRBV7-9, TRBJ1-2)
CASSLKQNYGYTF

SEQ ID NO: 203709 - protein, 17 aa, Homo sapiens
  CDR3 for alpha chain variable domain of TCR clone 101855 (TRAV3, TRAJ42)
CAVRDRDYGGSQGNLIL

SEQ ID NO: 203710 - protein, 14 aa, Homo sapiens
  CDR3 for beta chain variable domain of TCR clone 101855 (TRBV7-2, TRBJ2-5)
CASSPRGSSETQYF

SEQ ID NO: 203711 - protein, 10 aa, Homo sapiens
  CDR3 for alpha chain variable domain of TCR clone 101856 (TRAV8-2, TRAJ29)
CTGGNTPLVF

SEQ ID NO: 203712 - protein, 17 aa, Homo sapiens
  CDR3 for beta chain variable domain of TCR clone 101856 (TRBV2, TRBJ2-7)
CASSQALTGWYSYEQYF

SEQ ID NO: 203713 - protein, 13 aa, Homo sapiens
  CDR3 for alpha chain variable domain of TCR clone 101857 (TRAV12-3, TRAJ31)
CAMSANNNARLLF

SEQ ID NO: 203714 - protein, 16 aa, Homo sapiens
  CDR3 for beta chain variable domain of TCR clone 101857 (TRBV7-9, TRBJ1-2)
CASSLGFSSGEDGYTF

SEQ ID NO: 203715 - protein, 13 aa, Homo sapiens
  CDR3 for alpha chain variable domain of TCR clone 101858 (TRAV21, TRAJ20)
CAVGLRVDYKLSF

SEQ ID NO: 203716 - protein, 13 aa, Homo sapiens
  CDR3 for beta chain variable domain of TCR clone 101858 (TRBV24-1, TRBJ2-2)
CATSDWSTGELFF

SEQ ID NO: 203717 - protein, 13 aa, Homo sapiens
  CDR3 for alpha chain variable domain of TCR clone 101859 (TRAV25, TRAJ17)
CAGLRAAGNKLTF

SEQ ID NO: 203718 - protein, 16 aa, Homo sapiens
  CDR3 for beta chain variable domain of TCR clone 101859 (TRBV7-3, TRBJ2-1)
CASSLEGYRSYNEQFF

SEQ ID NO: 203719 - protein, 16 aa, Homo sapiens
  CDR3 for alpha chain variable domain of TCR clone 101860 (TRAV4, TRAJ22)
CLVGDLYSGSARQLTF

SEQ ID NO: 203720 - protein, 14 aa, Homo sapiens
  CDR3 for beta chain variable domain of TCR clone 101860 (TRBV4-3, TRBJ2-7)
CASSQDVAGGEQYF

SEQ ID NO: 203721 - protein, 13 aa, Homo sapiens
  CDR3 for alpha chain variable domain of TCR clone 101861 (TRAV21, TRAJ57)
CAVTQGGSEKLVF

SEQ ID NO: 203722 - protein, 15 aa, Homo sapiens
  CDR3 for beta chain variable domain of TCR clone 101861 (TRBV11-2, TRBJ1-2)
CASSLEGVQRNGYTF

SEQ ID NO: 203723 - protein, 12 aa, Homo sapiens
  CDR3 for alpha chain variable domain of TCR clone 101862 (TRAV12-3, TRAJ17)
CAMKLTGNKLTF

SEQ ID NO: 203724 - protein, 15 aa, Homo sapiens
  CDR3 for beta chain variable domain of TCR clone 101862 (TRBV27, TRBJ1-5)
CASSLGTGFDQPQHF

SEQ ID NO: 203725 - protein, 14 aa, Homo sapiens
  CDR3 for alpha chain variable domain of TCR clone 101863 (TRAV35, TRAJ22)
CAGHLSGSARQLTF

SEQ ID NO: 203726 - protein, 15 aa, Homo sapiens
  CDR3 for beta chain variable domain of TCR clone 101863 (TRBV7-3, TRBJ1-6)
CASSVGRGAGSPLHF

SEQ ID NO: 203727 - protein, 16 aa, Homo sapiens
  CDR3 for alpha chain variable domain of TCR clone 101864 (TRAV8-3, TRAJ13)
CAVGAYPSGGSQKVTF

SEQ ID NO: 203728 - protein, 13 aa, Homo sapiens
  CDR3 for beta chain variable domain of TCR clone 101864 (TRBV7-9, TRBJ1-2)
CASSLKQNYGYTF

SEQ ID NO: 203729 - protein, 13 aa, Homo sapiens
  CDR3 for alpha chain variable domain of TCR clone 101865 (TRAV13-2, TRAJ15)
CTESNQAGTALIF

SEQ ID NO: 203730 - protein, 14 aa, Homo sapiens
  CDR3 for beta chain variable domain of TCR clone 101865 (TRBV25-1, TRBJ1-1)
CASTHLGGNTEAFF

SEQ ID NO: 203731 - protein, 15 aa, Homo sapiens
  CDR3 for alpha chain variable domain of TCR clone 101866 (TRAV10, TRAJ34)
PTSVWGAVNTDKLIF

SEQ ID NO: 203732 - protein, 14 aa, Homo sapiens
  CDR3 for beta chain variable domain of TCR clone 101866 (TRBV19, TRBJ2-1)
CASPTFVLSGEQFF

SEQ ID NO: 203733 - protein, 14 aa, Homo sapiens
  CDR3 for alpha chain variable domain of TCR clone 101867 (TRAV12-1, TRAJ12)
CVVTRMDSSYKLIF

SEQ ID NO: 203734 - protein, 13 aa, Homo sapiens
  CDR3 for beta chain variable domain of TCR clone 101867 (TRBV20-1, TRBJ1-1)
CSARGGGNTQAFF

SEQ ID NO: 203735 - protein, 16 aa, Homo sapiens
  CDR3 for alpha chain variable domain of TCR clone 101868 (TRAV38-1, TRAJ37)
CAFKGDGSSTTGKLIF

SEQ ID NO: 203736 - protein, 13 aa, Homo sapiens
  CDR3 for beta chain variable domain of TCR clone 101868 (TRBV12-4, TRBJ2-5)
CASSLFRRETQYF

SEQ ID NO: 203737 - protein, 14 aa, Homo sapiens
  CDR3 for alpha chain variable domain of TCR clone 101869 (TRAV1-2, TRAJ8)
CAVREDTGFQKLVF

SEQ ID NO: 203738 - protein, 15 aa, Homo sapiens
  CDR3 for beta chain variable domain of TCR clone 101869 (TRBV18, TRBJ1-1)
CASSPSSWVNTEAFF

SEQ ID NO: 203739 - protein, 16 aa, Homo sapiens
  CDR3 for alpha chain variable domain of TCR clone 101870 (TRAV30, TRAJ24)
CGTEIVDADSWGKFQF

SEQ ID NO: 203740 - protein, 14 aa, Homo sapiens
  CDR3 for beta chain variable domain of TCR clone 101870 (TRBV12-5, TRBJ2-5)
CASGSRTHQEQQYF

SEQ ID NO: 203741 - protein, 12 aa, Homo sapiens
  CDR3 for alpha chain variable domain of TCR clone 101871 (TRAV17, TRAJ20)
CATYYNDYKLSF

SEQ ID NO: 203742 - protein, 11 aa, Homo sapiens
  CDR3 for beta chain variable domain of TCR clone 101871 (TRBV4-1, TRBJ2-2)
CASEHTGELFF

SEQ ID NO: 203743 - protein, 17 aa, Homo sapiens
  CDR3 for alpha chain variable domain of TCR clone 101872 (TRAV27, TRAJ52)
CAGAGWAGGTSYGKLTF

SEQ ID NO: 203744 - protein, 16 aa, Homo sapiens
  CDR3 for beta chain variable domain of TCR clone 101872 (TRBV19, TRBJ2-1)
CASSKAGPSAYNEQFF

SEQ ID NO: 203745 - protein, 13 aa, Homo sapiens
  CDR3 for alpha chain variable domain of TCR clone 101873 (TRAV39, TRAJ58)
CAGEETSGTRLTF

SEQ ID NO: 203746 - protein, 13 aa, Homo sapiens
  CDR3 for beta chain variable domain of TCR clone 101873 (TRBV15, TRBJ2-7)
CATSTTGHYEQYF

SEQ ID NO: 203747 - protein, 18 aa, Homo sapiens
  CDR3 for alpha chain variable domain of TCR clone 101874 (TRAV21, TRAJ52)
CAVRPSPAGGTSYGKLTF

SEQ ID NO: 203748 - protein, 13 aa, Homo sapiens
  CDR3 for beta chain variable domain of TCR clone 101874 (TRBV5-1, TRBJ1-3)
CASSPRERSTIYF

SEQ ID NO: 203749 - protein, 14 aa, Homo sapiens
  CDR3 for alpha chain variable domain of TCR clone 101875 (TRAV17, TRAJ57)
CATDPQGGSEKLVF

SEQ ID NO: 203750 - protein, 15 aa, Homo sapiens
  CDR3 for beta chain variable domain of TCR clone 101875 (TRBV6-1, TRBJ2-2)
CASRRLSQDTGELFF

SEQ ID NO: 203751 - protein, 14 aa, Homo sapiens
  CDR3 for alpha chain variable domain of TCR clone 101876 (TRAV12-1, TRAJ9)
CLVTGYTGGFKTIF

SEQ ID NO: 203752 - protein, 13 aa, Homo sapiens
  CDR3 for beta chain variable domain of TCR clone 101876 (TRBV20-1, TRBJ1-1)
CSARAGGNTEAFF

SEQ ID NO: 203753 - protein, 17 aa, Homo sapiens
  CDR3 for alpha chain variable domain of TCR clone 101877 (TRAV3, TRAJ6)
CAVRDGPRAGGSYIPTF

SEQ ID NO: 203754 - protein, 15 aa, Homo sapiens
  CDR3 for beta chain variable domain of TCR clone 101877 (TRBV7-9, TRBJ2-2)
CASGPLDTFPGELFF

SEQ ID NO: 203755 - protein, 15 aa, Homo sapiens
  CDR3 for alpha chain variable domain of TCR clone 101878 (TRAV8-4, TRAJ37)
CAVSRGSGNPGKLIF

SEQ ID NO: 203756 - protein, 15 aa, Homo sapiens
  CDR3 for beta chain variable domain of TCR clone 101878 (TRBV5-1, TRBJ2-7)
CASSLDLTSSYEQYF

SEQ ID NO: 203757 - protein, 13 aa, Homo sapiens
  CDR3 for alpha chain variable domain of TCR clone 101879 (TRAV36/DV7, TRAJ37)
CAVFSSKTGKLIF

SEQ ID NO: 203758 - protein, 12 aa, Homo sapiens
  CDR3 for beta chain variable domain of TCR clone 101879 (TRBV11-2, TRBJ2-2)
CASSLGGGELFF

SEQ ID NO: 203759 - protein, 11 aa, Homo sapiens
  CDR3 for alpha chain variable domain of TCR clone 101880 (TRAV2, TRAJ13)
CASGGYQKVTF

SEQ ID NO: 203760 - protein, 14 aa, Homo sapiens
  CDR3 for beta chain variable domain of TCR clone 101880 (TRBV19, TRBJ2-1)
CASPTFALSGEQFF

SEQ ID NO: 203761 - protein, 15 aa, Homo sapiens
  CDR3 for alpha chain variable domain of TCR clone 101881 (TRAV27, TRAJ38)
CAARRNAGNNRKLIS

SEQ ID NO: 203762 - protein, 13 aa, Homo sapiens
  CDR3 for beta chain variable domain of TCR clone 101881 (TRBV12-5, TRBJ2-3)
CASGDRQSDTQYF

SEQ ID NO: 203763 - protein, 16 aa, Homo sapiens
  CDR3 for alpha chain variable domain of TCR clone 101882 (TRAV8-6, TRAJ22)
CAVSPISSGSARQLTF

SEQ ID NO: 203764 - protein, 14 aa, Homo sapiens
  CDR3 for beta chain variable domain of TCR clone 101882 (TRBV2, TRBJ2-1)
CASNARAAYNEQFF

SEQ ID NO: 203765 - protein, 12 aa, Homo sapiens
  CDR3 for alpha chain variable domain of TCR clone 101883 (TRAV3, TRAJ20)
CAVRDPDYKLSF

SEQ ID NO: 203766 - protein, 16 aa, Homo sapiens
  CDR3 for beta chain variable domain of TCR clone 101883 (TRBV19, TRBJ2-3)
CASSPGAASRTDTQYF

SEQ ID NO: 203767 - protein, 15 aa, Homo sapiens
  CDR3 for alpha chain variable domain of TCR clone 101884 (TRAV4, TRAJ10)
CLVGDGTGGGNKLTF

SEQ ID NO: 203768 - protein, 15 aa, Homo sapiens
  CDR3 for beta chain variable domain of TCR clone 101884 (TRBV27, TRBJ2-3)
CASSSLAGVIDTQYF

SEQ ID NO: 203769 - protein, 15 aa, Homo sapiens
  CDR3 for alpha chain variable domain of TCR clone 101885 (TRAV25, TRAJ52)
CAGRPGGTSYGKLTF

SEQ ID NO: 203770 - protein, 14 aa, Homo sapiens
  CDR3 for beta chain variable domain of TCR clone 101885 (TRBV4-2, TRBJ2-1)
CASGLDRAYNEQFF

SEQ ID NO: 203771 - protein, 13 aa, Homo sapiens
  CDR3 for alpha chain variable domain of TCR clone 101886 (TRAV27, TRAJ27)
CAGGITNAGKSTL

SEQ ID NO: 203772 - protein, 13 aa, Homo sapiens
  CDR3 for beta chain variable domain of TCR clone 101886 (TRBV20-1, TRBJ1-2)
CSASLGVGYGYTF

SEQ ID NO: 203773 - protein, 13 aa, Homo sapiens
  CDR3 for alpha chain variable domain of TCR clone 101887 (TRAV39, TRAJ48)
CAAVKFGNEKLTF

SEQ ID NO: 203774 - protein, 12 aa, Homo sapiens
  CDR3 for beta chain variable domain of TCR clone 101887 (TRBV5-5, TRBJ2-5)
CASSYFGETQYF

SEQ ID NO: 203775 - protein, 18 aa, Homo sapiens
  CDR3 for alpha chain variable domain of TCR clone 101888 (TRAV12-3, TRAJ52)
CAMSVGGAGGTSDGKLTF

SEQ ID NO: 203776 - protein, 16 aa, Homo sapiens
  CDR3 for beta chain variable domain of TCR clone 101888 (TRBV7-9, TRBJ1-2)
CASSISLDRGGYGYTF

SEQ ID NO: 203777 - protein, 14 aa, Homo sapiens
  CDR3 for alpha chain variable domain of TCR clone 101889 (TRAV26-1, TRAJ38)
CIADNAGNNRKLIW

SEQ ID NO: 203778 - protein, 15 aa, Homo sapiens
  CDR3 for beta chain variable domain of TCR clone 101889 (TRBV20-1, TRBJ1-1)
CSARGGGNTKLSLDK

SEQ ID NO: 203779 - protein, 15 aa, Homo sapiens
  CDR3 for alpha chain variable domain of TCR clone 101890 (TRAV12-1, TRAJ44)
CVADLPTGTVSKLTF

SEQ ID NO: 203780 - protein, 18 aa, Homo sapiens
  CDR3 for beta chain variable domain of TCR clone 101890 (TRBV28, TRBJ2-5)
CASSFPNFGTGGGETQYF

SEQ ID NO: 203781 - protein, 12 aa, Homo sapiens
  CDR3 for alpha chain variable domain of TCR clone 101891 (TRAV13-1, TRAJ48)
CAANFGNEKLTF

SEQ ID NO: 203782 - protein, 14 aa, Homo sapiens
  CDR3 for beta chain variable domain of TCR clone 101891 (TRBV7-2, TRBJ1-6)
CASSLQGANSPLHF

SEQ ID NO: 203783 - protein, 12 aa, Homo sapiens
  CDR3 for alpha chain variable domain of TCR clone 101892 (TRAV8-3, TRAJ20)
CAVGGGDYKLSF

SEQ ID NO: 203784 - protein, 14 aa, Homo sapiens
  CDR3 for beta chain variable domain of TCR clone 101892 (TRBV5-1, TRBJ2-7)
CASSRGESLYEQYL

SEQ ID NO: 203785 - protein, 14 aa, Homo sapiens
  CDR3 for alpha chain variable domain of TCR clone 101893 (TRAV12-2, TRAJ45)
CAVNIGGGADGLTF

SEQ ID NO: 203786 - protein, 12 aa, Homo sapiens
  CDR3 for beta chain variable domain of TCR clone 101893 (TRBV12-4, TRBJ2-1)
CASSPGRNEQFF

SEQ ID NO: 203787 - protein, 15 aa, Homo sapiens
  CDR3 for alpha chain variable domain of TCR clone 101894 (TRAV21, TRAJ53)
CATLNSGGSNYKLTF

SEQ ID NO: 203788 - protein, 16 aa, Homo sapiens
  CDR3 for beta chain variable domain of TCR clone 101894 (TRBV11-2, TRBJ1-2)
CASSPSGREANYGYTF

SEQ ID NO: 203789 - protein, 19 aa, Homo sapiens
  CDR3 for alpha chain variable domain of TCR clone 101895 (TRAV29/DV5, TRAJ49)
CSVPLCSKLTVDTGNQFYF

SEQ ID NO: 203790 - protein, 15 aa, Homo sapiens
  CDR3 for beta chain variable domain of TCR clone 101895 (TRBV11-3, TRBJ2-3)
CASLKDGREGDTQYF

SEQ ID NO: 203791 - protein, 17 aa, Homo sapiens
  CDR3 for alpha chain variable domain of TCR clone 101896 (TRAV3, TRAJ6)
CAVRDGPRAGGSYIPTF

SEQ ID NO: 203792 - protein, 14 aa, Homo sapiens
  CDR3 for beta chain variable domain of TCR clone 101896 (TRBV7-2, TRBJ2-7)
CASSPKTSFYAQYF

SEQ ID NO: 203793 - protein, 14 aa, Homo sapiens
  CDR3 for alpha chain variable domain of TCR clone 101897 (TRAV8-4, TRAJ15)
CSVTIREAGTALIF

SEQ ID NO: 203794 - protein, 13 aa, Homo sapiens
  CDR3 for beta chain variable domain of TCR clone 101897 (TRBV10-3, TRBJ2-7)
CAISEKGGYEQYF

SEQ ID NO: 203795 - protein, 14 aa, Homo sapiens
  CDR3 for alpha chain variable domain of TCR clone 101898 (TRAV8-3, TRAJ23)
CAVIIYNQGGKLIF

SEQ ID NO: 203796 - protein, 15 aa, Homo sapiens
  CDR3 for beta chain variable domain of TCR clone 101898 (TRBV18, TRBJ2-1)
CASSPPRASYNEQFF

SEQ ID NO: 203797 - protein, 16 aa, Homo sapiens
  CDR3 for alpha chain variable domain of TCR clone 101899 (TRAV12-3, TRAJ53)
CAMSPGSGGSNYKLTF

SEQ ID NO: 203798 - protein, 13 aa, Homo sapiens
  CDR3 for beta chain variable domain of TCR clone 101899 (TRBV7-9, TRBJ1-2)
CASSLEQNYGYTF

SEQ ID NO: 203799 - protein, 13 aa, Homo sapiens
  CDR3 for alpha chain variable domain of TCR clone 101900 (TRAV13-1, TRAJ6)
CAASKGGSYIPAF

SEQ ID NO: 203800 - protein, 14 aa, Homo sapiens
  CDR3 for beta chain variable domain of TCR clone 101900 (TRBV7-2, TRBJ2-1)
CASSLGVGYNEQFF

SEQ ID NO: 203801 - protein, 16 aa, Homo sapiens
  CDR3 for alpha chain variable domain of TCR clone 101901 (TRAV3, TRAJ18)
CAVRDGRGSTLGRLYF

SEQ ID NO: 203802 - protein, 14 aa, Homo sapiens
  CDR3 for beta chain variable domain of TCR clone 101901 (TRBV7-2, TRBJ2-7)
CASSPKTSFYEQYF

SEQ ID NO: 203803 - protein, 12 aa, Homo sapiens
  CDR3 for alpha chain variable domain of TCR clone 101902 (TRAV1-1, TRAJ43)
CAPRVSSNGMRF

SEQ ID NO: 203804 - protein, 15 aa, Homo sapiens
  CDR3 for beta chain variable domain of TCR clone 101902 (TRBV5-1, TRBJ2-7)
CASSLGDFTTCEQYF

SEQ ID NO: 203805 - protein, 11 aa, Homo sapiens
  CDR3 for alpha chain variable domain of TCR clone 101903 (TRAV2, TRAJ21)
CAVFNFNKFYF

SEQ ID NO: 203806 - protein, 14 aa, Homo sapiens
  CDR3 for beta chain variable domain of TCR clone 101903 (TRBV15, TRBJ2-3)
CATRSETSTDTQYF

SEQ ID NO: 203807 - protein, 14 aa, Homo sapiens
  CDR3 for alpha chain variable domain of TCR clone 101904 (TRAV22, TRAJ6)
CAGVGPGGSYIPTF

SEQ ID NO: 203808 - protein, 15 aa, Homo sapiens
  CDR3 for beta chain variable domain of TCR clone 101904 (TRBV7-8, TRBJ2-5)
CASSDAAGSQETQYF

SEQ ID NO: 203809 - protein, 13 aa, Homo sapiens
  CDR3 for alpha chain variable domain of TCR clone 101905 (TRAV21, TRAJ27)
FAARPGNAGKSTF

SEQ ID NO: 203810 - protein, 14 aa, Homo sapiens
  CDR3 for beta chain variable domain of TCR clone 101905 (TRBV11-2, TRBJ2-7)
CASSLGAGAYEQYF

SEQ ID NO: 203811 - protein, 15 aa, Homo sapiens
  CDR3 for alpha chain variable domain of TCR clone 101906 (TRAV20, TRAJ43)
CAVQAGISSNNDMRF

SEQ ID NO: 203812 - protein, 14 aa, Homo sapiens
  CDR3 for beta chain variable domain of TCR clone 101906 (TRBV27, TRBJ2-1)
CASRHLGGGKEQFF

SEQ ID NO: 203813 - protein, 16 aa, Homo sapiens
  CDR3 for alpha chain variable domain of TCR clone 101907 (TRAV38-1, TRAJ37)
CAFKGDGSINTGKLIF

SEQ ID NO: 203814 - protein, 13 aa, Homo sapiens
  CDR3 for beta chain variable domain of TCR clone 101907 (TRBV12-4, TRBJ2-5)
CASSLFRRETQYF

SEQ ID NO: 203815 - protein, 13 aa, Homo sapiens
  CDR3 for alpha chain variable domain of TCR clone 101908 (TRAV2, TRAJ40)
CAVVTSGTYKYIF

SEQ ID NO: 203816 - protein, 15 aa, Homo sapiens
  CDR3 for beta chain variable domain of TCR clone 101908 (TRBV5-1, TRBJ2-1)
CASSLVANSYNEQFF

SEQ ID NO: 203817 - protein, 13 aa, Homo sapiens
  CDR3 for alpha chain variable domain of TCR clone 101909 (TRAV12-1, TRAJ7)
CVVNMRGNNRLAV

SEQ ID NO: 203818 - protein, 15 aa, Homo sapiens
  CDR3 for beta chain variable domain of TCR clone 101909 (TRBV27, TRBJ2-3)
CASSLGLAATDTQYF

SEQ ID NO: 203819 - protein, 10 aa, Homo sapiens
  CDR3 for alpha chain variable domain of TCR clone 101910 (TRAV26-1, TRAJ40)
CIAGTYKYIF

SEQ ID NO: 203820 - protein, 15 aa, Homo sapiens
  CDR3 for beta chain variable domain of TCR clone 101910 (TRBV19, TRBJ2-1)
CASSSPGLPLDEQFF

SEQ ID NO: 203821 - protein, 14 aa, Homo sapiens
  CDR3 for alpha chain variable domain of TCR clone 101911 (TRAV12-2, TRAJ13)
CAVKKTGGYQKVTF

SEQ ID NO: 203822 - protein, 16 aa, Homo sapiens
  CDR3 for beta chain variable domain of TCR clone 101911 (TRBV2, TRBJ1-4)
CASNLLQGATNEKLFF

SEQ ID NO: 203823 - protein, 14 aa, Homo sapiens
  CDR3 for alpha chain variable domain of TCR clone 101912 (TRAV1-2, TRAJ8)
CAVREDTGFQKLVF

SEQ ID NO: 203824 - protein, 13 aa, Homo sapiens
  CDR3 for beta chain variable domain of TCR clone 101912 (TRBV3-1, TRBJ1-1)
CASSQLQGAEAFF

SEQ ID NO: 203825 - protein, 15 aa, Homo sapiens
  CDR3 for alpha chain variable domain of TCR clone 101913 (TRAV35, TRAJ58)
CAGRRHETSGSRLTF

SEQ ID NO: 203826 - protein, 11 aa, Homo sapiens
  CDR3 for beta chain variable domain of TCR clone 101913 (TRBV11-2, TRBJ1-1)
CASSINTEAFF

SEQ ID NO: 203827 - protein, 19 aa, Homo sapiens
  CDR3 for alpha chain variable domain of TCR clone 101914 (TRAV1-2, TRAJ26)
CLLPLCCERPDNYGQNFVF

SEQ ID NO: 203828 - protein, 13 aa, Homo sapiens
  CDR3 for beta chain variable domain of TCR clone 101914 (TRBV7-9, TRBJ2-3)
CASSPGSTDTQYF

SEQ ID NO: 203829 - protein, 13 aa, Homo sapiens
  CDR3 for alpha chain variable domain of TCR clone 101915 (TRAV13-1, TRAJ6)
CAASNGGSYIPTF

SEQ ID NO: 203830 - protein, 14 aa, Homo sapiens
  CDR3 for beta chain variable domain of TCR clone 101915 (TRBV7-2, TRBJ2-1)
CASSLGVGYNEQFF

SEQ ID NO: 203831 - protein, 12 aa, Homo sapiens
  CDR3 for alpha chain variable domain of TCR clone 101916 (TRAV17, TRAJ57)
CATDGGSEKLFF

SEQ ID NO: 203832 - protein, 12 aa, Homo sapiens
  CDR3 for beta chain variable domain of TCR clone 101916 (TRBV29-1, TRBJ2-2)
CSVDKYTGELFF

SEQ ID NO: 203833 - protein, 16 aa, Homo sapiens
  CDR3 for alpha chain variable domain of TCR clone 101917 (TRAV21, TRAJ37)
CPVRTAGSSNTGKLIF

SEQ ID NO: 203834 - protein, 13 aa, Homo sapiens
  CDR3 for beta chain variable domain of TCR clone 101917 (TRBV7-9, TRBJ2-5)
CASLPSGRETQYF

SEQ ID NO: 203835 - protein, 12 aa, Homo sapiens
  CDR3 for alpha chain variable domain of TCR clone 101918 (TRAV13-1, TRAJ20)
CAASRGDYKLSF

SEQ ID NO: 203836 - protein, 16 aa, Homo sapiens
  CDR3 for beta chain variable domain of TCR clone 101918 (TRBV4-1, TRBJ2-5)
CASSSGLAGVLGTQYF

SEQ ID NO: 203837 - protein, 14 aa, Homo sapiens
  CDR3 for alpha chain variable domain of TCR clone 101919 (TRAV16, TRAJ26)
CALSSANYGQDFVF

SEQ ID NO: 203838 - protein, 16 aa, Homo sapiens
  CDR3 for beta chain variable domain of TCR clone 101919 (TRBV20-1, TRBJ1-4)
CSAPGQGLLTNEKLFF

SEQ ID NO: 203839 - protein, 12 aa, Homo sapiens
  CDR3 for alpha chain variable domain of TCR clone 101920 (TRAV13-1, TRAJ27)
CAAHTNAGKSTF

SEQ ID NO: 203840 - protein, 14 aa, Homo sapiens
  CDR3 for beta chain variable domain of TCR clone 101920 (TRBV19, TRBJ2-2)
CASSGKGIAGELFF

SEQ ID NO: 203841 - protein, 12 aa, Homo sapiens
  CDR3 for alpha chain variable domain of TCR clone 101921 (TRAV29/DV5, TRAJ49)
CAATDTGNQFCF

SEQ ID NO: 203842 - protein, 12 aa, Homo sapiens
  CDR3 for beta chain variable domain of TCR clone 101921 (TRBV12-4, TRBJ2-7)
CASSLGGYEQYF

SEQ ID NO: 203843 - protein, 10 aa, Homo sapiens
  CDR3 for alpha chain variable domain of TCR clone 101922 (TRAV16, TRAJ26)
CAPEELWSEF

SEQ ID NO: 203844 - protein, 15 aa, Homo sapiens
  CDR3 for beta chain variable domain of TCR clone 101922 (TRBV7-2, TRBJ2-3)
CASSLTGTSTDTQYL

SEQ ID NO: 203845 - protein, 16 aa, Homo sapiens
  CDR3 for alpha chain variable domain of TCR clone 101923 (TRAV23/DV6, TRAJ57)
CAASSTLSQVGSEKLF

SEQ ID NO: 203846 - protein, 14 aa, Homo sapiens
  CDR3 for beta chain variable domain of TCR clone 101923 (TRBV25-1, TRBJ1-1)
CASTHLGGNTEAFF

SEQ ID NO: 203847 - protein, 16 aa, Homo sapiens
  CDR3 for alpha chain variable domain of TCR clone 101924 (TRAV3, TRAJ37)
CAVRPHGSGTTGKLIF

SEQ ID NO: 203848 - protein, 17 aa, Homo sapiens
  CDR3 for beta chain variable domain of TCR clone 101924 (TRBV20-1, TRBJ2-1)
CSASSSGLAGSYNEQFF

SEQ ID NO: 203849 - protein, 11 aa, Homo sapiens
  CDR3 for alpha chain variable domain of TCR clone 101925 (TRAV12-1, TRAJ31)
CVGRVQCQTHV

SEQ ID NO: 203850 - protein, 13 aa, Homo sapiens
  CDR3 for beta chain variable domain of TCR clone 101925 (TRBV19, TRBJ1-2)
CASSQGQVYGYTF

SEQ ID NO: 203851 - protein, 11 aa, Homo sapiens
  CDR3 for alpha chain variable domain of TCR clone 101926 (TRAV12-1, TRAJ8)
CVVTGFQKLVF

SEQ ID NO: 203852 - protein, 13 aa, Homo sapiens
  CDR3 for beta chain variable domain of TCR clone 101926 (TRBV19, TRBJ2-1)
CQWEINSINEQFF

SEQ ID NO: 203853 - protein, 13 aa, Homo sapiens
  CDR3 for alpha chain variable domain of TCR clone 101927 (TRAV35, TRAJ44)
CAGLSGTASKLTF

SEQ ID NO: 203854 - protein, 17 aa, Homo sapiens
  CDR3 for beta chain variable domain of TCR clone 101927 (TRBV7-8, TRBJ1-2)
CASSLRPLQGHLYGYIF

SEQ ID NO: 203855 - protein, 23 aa, Homo sapiens
  CDR3 for alpha chain variable domain of TCR clone 101928 (TRAV26-1, )
CIADNGGNNHIQNPDPAVYQLRD

SEQ ID NO: 203856 - protein, 13 aa, Homo sapiens
  CDR3 for beta chain variable domain of TCR clone 101928 (TRBV5-4, TRBJ1-1)
CASSVDLGTEAFF

SEQ ID NO: 203857 - protein, 14 aa, Homo sapiens
  CDR3 for alpha chain variable domain of TCR clone 101929 (TRAV12-1, TRAJ12)
CVVTRMDSSYKLIF

SEQ ID NO: 203858 - protein, 13 aa, Homo sapiens
  CDR3 for beta chain variable domain of TCR clone 101929 (TRBV20-1, TRBJ1-1)
CSARGGVNTEAFF

SEQ ID NO: 203859 - protein, 11 aa, Homo sapiens
  CDR3 for alpha chain variable domain of TCR clone 101930 (TRAV1-1, TRAJ23)
CAVRQGGKLIF

SEQ ID NO: 203860 - protein, 15 aa, Homo sapiens
  CDR3 for beta chain variable domain of TCR clone 101930 (TRBV19, TRBJ1-2)
CASSVGQVLNYGYTF

SEQ ID NO: 203861 - protein, 13 aa, Homo sapiens
  CDR3 for alpha chain variable domain of TCR clone 101931 (TRAV12-2, TRAJ52)
CAVSGTSYGKLTL

SEQ ID NO: 203862 - protein, 19 aa, Homo sapiens
  CDR3 for beta chain variable domain of TCR clone 101931 (TRBV12-4, TRBJ2-7)
CASSPRSLRTSGRGHEQYF

SEQ ID NO: 203863 - protein, 13 aa, Homo sapiens
  CDR3 for alpha chain variable domain of TCR clone 101932 (TRAV2, TRAJ40)
CAVVTSGTYKYVF

SEQ ID NO: 203864 - protein, 15 aa, Homo sapiens
  CDR3 for beta chain variable domain of TCR clone 101932 (TRBV24-1, TRBJ1-4)
CATSDPQGADEKLFF

SEQ ID NO: 203865 - protein, 12 aa, Homo sapiens
  CDR3 for alpha chain variable domain of TCR clone 101933 (TRAV27, TRAJ9)
CAGESGGFKTIF

SEQ ID NO: 203866 - protein, 15 aa, Homo sapiens
  CDR3 for beta chain variable domain of TCR clone 101933 (TRBV27, TRBJ2-1)
CASSNGGGSSNEQFF

SEQ ID NO: 203867 - protein, 14 aa, Homo sapiens
  CDR3 for alpha chain variable domain of TCR clone 101934 (TRAV16, TRAJ32)
CALKSGGATNKLIF

SEQ ID NO: 203868 - protein, 17 aa, Homo sapiens
  CDR3 for beta chain variable domain of TCR clone 101934 (TRBV10-3, TRBJ2-1)
CAISDPSRGSSYNEQFF

SEQ ID NO: 203869 - protein, 14 aa, Homo sapiens
  CDR3 for alpha chain variable domain of TCR clone 101935 (TRAV1-2, TRAJ16)
CAVNRFSDGQKLLF

SEQ ID NO: 203870 - protein, 14 aa, Homo sapiens
  CDR3 for beta chain variable domain of TCR clone 101935 (TRBV7-2, TRBJ2-7)
CVSSPKTSFYEQYF

SEQ ID NO: 203871 - protein, 17 aa, Homo sapiens
  CDR3 for alpha chain variable domain of TCR clone 101936 (TRAV13-1, TRAJ28)
CAASPPYSGAGSYQLTF

SEQ ID NO: 203872 - protein, 15 aa, Homo sapiens
  CDR3 for beta chain variable domain of TCR clone 101936 (TRBV7-9, TRBJ1-6)
CASSSPGRGNSPLHF

SEQ ID NO: 203873 - protein, 13 aa, Homo sapiens
  CDR3 for alpha chain variable domain of TCR clone 101937 (TRAV2, TRAJ20)
CAVEGPSEYKLRF

SEQ ID NO: 203874 - protein, 16 aa, Homo sapiens
  CDR3 for beta chain variable domain of TCR clone 101937 (TRBV25-1, TRBJ2-7)
CASSELTGGGIYEQYF

SEQ ID NO: 203875 - protein, 14 aa, Homo sapiens
  CDR3 for alpha chain variable domain of TCR clone 101938 (TRAV1-2, TRAJ6)
CAVSLSGGSNIPTF

SEQ ID NO: 203876 - protein, 15 aa, Homo sapiens
  CDR3 for beta chain variable domain of TCR clone 101938 (TRBV28, TRBJ2-7)
CASSPGGRGFYEQYF

SEQ ID NO: 203877 - protein, 15 aa, Homo sapiens
  CDR3 for alpha chain variable domain of TCR clone 101939 (TRAV13-1, TRAJ36)
CAASIRQTGANNLFF

SEQ ID NO: 203878 - protein, 13 aa, Homo sapiens
  CDR3 for beta chain variable domain of TCR clone 101939 (TRBV10-3, TRBJ2-7)
CASKLAVNYEQYF

SEQ ID NO: 203879 - protein, 12 aa, Homo sapiens
  CDR3 for alpha chain variable domain of TCR clone 101940 (TRAV35, TRAJ39)
LAPNNAGNMLTF

SEQ ID NO: 203880 - protein, 13 aa, Homo sapiens
  CDR3 for beta chain variable domain of TCR clone 101940 (TRBV19, TRBJ1-3)
CASRLALGNTIYF

SEQ ID NO: 203881 - protein, 13 aa, Homo sapiens
  CDR3 for alpha chain variable domain of TCR clone 101941 (TRAV20, TRAJ26)
CAVPTSYGQNFVF

SEQ ID NO: 203882 - protein, 16 aa, Homo sapiens
  CDR3 for beta chain variable domain of TCR clone 101941 (TRBV28, TRBJ2-7)
CASSSPQGRDVYEQYL

SEQ ID NO: 203883 - protein, 14 aa, Homo sapiens
  CDR3 for alpha chain variable domain of TCR clone 101942 (TRAV26-1, TRAJ45)
CIEVTGEGADGLTF

SEQ ID NO: 203884 - protein, 13 aa, Homo sapiens
  CDR3 for beta chain variable domain of TCR clone 101942 (TRBV7-6, TRBJ1-2)
CASSLVADYGYTF

SEQ ID NO: 203885 - protein, 13 aa, Homo sapiens
  CDR3 for alpha chain variable domain of TCR clone 101943 (TRAV17, TRAJ9)
CATDYTGGFKTFF

SEQ ID NO: 203886 - protein, 14 aa, Homo sapiens
  CDR3 for beta chain variable domain of TCR clone 101943 (TRBV19, TRBJ2-5)
CASSMTGQQETQYF

SEQ ID NO: 203887 - protein, 12 aa, Homo sapiens
  CDR3 for alpha chain variable domain of TCR clone 101944 (TRAV12-3, TRAJ17)
CAMTLTGNKLTF

SEQ ID NO: 203888 - protein, 18 aa, Homo sapiens
  CDR3 for beta chain variable domain of TCR clone 101944 (TRBV7-9, TRBJ2-1)
CASSLAVSGTSGRNEQFF

SEQ ID NO: 203889 - protein, 15 aa, Homo sapiens
  CDR3 for alpha chain variable domain of TCR clone 101945 (TRAV10, TRAJ34)
CVVSGKHRQAHLWDL

SEQ ID NO: 203890 - protein, 14 aa, Homo sapiens
  CDR3 for beta chain variable domain of TCR clone 101945 (TRBV19, TRBJ2-1)
CASPTFVLSGEQFF

SEQ ID NO: 203891 - protein, 14 aa, Homo sapiens
  CDR3 for alpha chain variable domain of TCR clone 101946 (TRAV12-3, TRAJ30)
CAMSLLNRDDKIIF

SEQ ID NO: 203892 - protein, 12 aa, Homo sapiens
  CDR3 for beta chain variable domain of TCR clone 101946 (TRBV11-2, TRBJ2-2)
CASSLGGGEPFF

SEQ ID NO: 203893 - protein, 16 aa, Homo sapiens
  CDR3 for alpha chain variable domain of TCR clone 101947 (TRAV4, TRAJ9)
CLVGDPNRPGGFKAIF

SEQ ID NO: 203894 - protein, 16 aa, Homo sapiens
  CDR3 for beta chain variable domain of TCR clone 101947 (TRBV18, TRBJ2-7)
CASSPRSQGISYEQYF

SEQ ID NO: 203895 - protein, 14 aa, Homo sapiens
  CDR3 for alpha chain variable domain of TCR clone 101948 (TRAV12-2, TRAJ13)
CAVKKTGGYQKVTF

SEQ ID NO: 203896 - protein, 14 aa, Homo sapiens
  CDR3 for beta chain variable domain of TCR clone 101948 (TRBV4-1, TRBJ2-5)
CASSRSGSGETQYF

SEQ ID NO: 203897 - protein, 14 aa, Homo sapiens
  CDR3 for alpha chain variable domain of TCR clone 101949 (TRAV8-3, TRAJ9)
CAVVYNTGGFKTIF

SEQ ID NO: 203898 - protein, 14 aa, Homo sapiens
  CDR3 for beta chain variable domain of TCR clone 101949 (TRBV7-3, TRBJ2-2)
CASSSGGYTGELYF

SEQ ID NO: 203899 - protein, 13 aa, Homo sapiens
  CDR3 for alpha chain variable domain of TCR clone 101950 (TRAV12-2, TRAJ42)
CAAKRGSQGNLIF

SEQ ID NO: 203900 - protein, 13 aa, Homo sapiens
  CDR3 for beta chain variable domain of TCR clone 101950 (TRBV7-9, TRBJ2-3)
CASSPGSTDTQYF

SEQ ID NO: 203901 - protein, 15 aa, Homo sapiens
  CDR3 for alpha chain variable domain of TCR clone 101951 (TRAV12-1, TRAJ44)
CVVDEYTGTARKLTF

SEQ ID NO: 203902 - protein, 14 aa, Homo sapiens
  CDR3 for beta chain variable domain of TCR clone 101951 (TRBV5-1, TRBJ1-2)
CASSLEPVNYGYTF

SEQ ID NO: 203903 - protein, 14 aa, Homo sapiens
  CDR3 for alpha chain variable domain of TCR clone 101952 (TRAV1-2, TRAJ16)
CAVSRFSDGQKLLF

SEQ ID NO: 203904 - protein, 15 aa, Homo sapiens
  CDR3 for beta chain variable domain of TCR clone 101952 (TRBV20-1, TRBJ1-5)
CSAFKNGQRNQPQHF

SEQ ID NO: 203905 - protein, 19 aa, Homo sapiens
  CDR3 for alpha chain variable domain of TCR clone 101953 (TRAV25, TRAJ43)
TATQTTDVGTYFCAVFMRF

SEQ ID NO: 203906 - protein, 13 aa, Homo sapiens
  CDR3 for beta chain variable domain of TCR clone 101953 (TRBV7-9, TRBJ1-2)
CASSLKQNYGDTF

SEQ ID NO: 203907 - protein, 15 aa, Homo sapiens
  CDR3 for alpha chain variable domain of TCR clone 101954 (TRAV16, TRAJ17)
CALSGNKAAGNKLTF

SEQ ID NO: 203908 - protein, 16 aa, Homo sapiens
  CDR3 for beta chain variable domain of TCR clone 101954 (TRBV7-6, TRBJ1-6)
RASSSLPAGEYSPLHF

SEQ ID NO: 203909 - protein, 12 aa, Homo sapiens
  CDR3 for alpha chain variable domain of TCR clone 101955 (TRAV21, TRAJ27)
CAANTNAGKSTF

SEQ ID NO: 203910 - protein, 16 aa, Homo sapiens
  CDR3 for beta chain variable domain of TCR clone 101955 (TRBV7-8, TRBJ2-1)
CASSFRLAGGHNEQFF

SEQ ID NO: 203911 - protein, 14 aa, Homo sapiens
  CDR3 for alpha chain variable domain of TCR clone 101956 (TRAV12-2, TRAJ40)
CAVKIPSGTYKYIF

SEQ ID NO: 203912 - protein, 14 aa, Homo sapiens
  CDR3 for beta chain variable domain of TCR clone 101956 (TRBV11-2, TRBJ2-5)
CASSGHSLQETQYF

SEQ ID NO: 203913 - protein, 14 aa, Homo sapiens
  CDR3 for alpha chain variable domain of TCR clone 101957 (TRAV26-2, TRAJ11)
CIPRLNSGYSTLTF

SEQ ID NO: 203914 - protein, 17 aa, Homo sapiens
  CDR3 for beta chain variable domain of TCR clone 101957 (TRBV13, TRBJ2-3)
CASSLSRVAGGRNTQYF

SEQ ID NO: 203915 - protein, 13 aa, Homo sapiens
  CDR3 for alpha chain variable domain of TCR clone 101958 (TRAV8-3, TRAJ36)
CAVGANGANNLFF

SEQ ID NO: 203916 - protein, 15 aa, Homo sapiens
  CDR3 for beta chain variable domain of TCR clone 101958 (TRBV7-2, TRBJ1-2)
CASSPRAGWNYGYTF

SEQ ID NO: 203917 - protein, 12 aa, Homo sapiens
  CDR3 for alpha chain variable domain of TCR clone 101959 (TRAV23/DV6, TRAJ17)
CARGSCRQQANF

SEQ ID NO: 203918 - protein, 14 aa, Homo sapiens
  CDR3 for beta chain variable domain of TCR clone 101959 (TRBV7-2, TRBJ1-2)
CASSQTGSTYGYSF

SEQ ID NO: 203919 - protein, 14 aa, Homo sapiens
  CDR3 for alpha chain variable domain of TCR clone 101960 (TRAV36/DV7, TRAJ48)
CAQRRDFGNEKLTF

SEQ ID NO: 203920 - protein, 15 aa, Homo sapiens
  CDR3 for beta chain variable domain of TCR clone 101960 (TRBV7-2, TRBJ2-2)
CASSTRTGYTGELFF

SEQ ID NO: 203921 - protein, 18 aa, Homo sapiens
  CDR3 for alpha chain variable domain of TCR clone 101961 (TRAV12-1, TRAJ52)
CVVKLINAGGTSYGKLTF

SEQ ID NO: 203922 - protein, 12 aa, Homo sapiens
  CDR3 for beta chain variable domain of TCR clone 101961 (TRBV7-9, TRBJ1-5)
CASSPQGQPQHF

SEQ ID NO: 203923 - protein, 11 aa, Homo sapiens
  CDR3 for alpha chain variable domain of TCR clone 101962 (TRAV1-2, TRAJ40)
CAVPGPYKYIF

SEQ ID NO: 203924 - protein, 16 aa, Homo sapiens
  CDR3 for beta chain variable domain of TCR clone 101962 (TRBV29-1, TRBJ2-7)
CSVEVVGTSGSYEQYF

SEQ ID NO: 203925 - protein, 14 aa, Homo sapiens
  CDR3 for alpha chain variable domain of TCR clone 101963 (TRAV8-3, TRAJ4)
CAVGAAGGYNKLIF

SEQ ID NO: 203926 - protein, 15 aa, Homo sapiens
  CDR3 for beta chain variable domain of TCR clone 101963 (TRBV6-5, TRBJ2-1)
CASSYDAGAGNVQFF

SEQ ID NO: 203927 - protein, 17 aa, Homo sapiens
  CDR3 for alpha chain variable domain of TCR clone 101964 (TRAV26-1, TRAJ53)
CIVRVDDSGGSNYKLTI

SEQ ID NO: 203928 - protein, 15 aa, Homo sapiens
  CDR3 for beta chain variable domain of TCR clone 101964 (TRBV20-1, TRBJ2-7)
CSARVPAAYFYEQYF

SEQ ID NO: 203929 - protein, 13 aa, Homo sapiens
  CDR3 for alpha chain variable domain of TCR clone 101965 (TRAV27, TRAJ41)
CAGEGNSGYALNS

SEQ ID NO: 203930 - protein, 14 aa, Homo sapiens
  CDR3 for beta chain variable domain of TCR clone 101965 (TRBV25-1, TRBJ1-1)
CASTHLGGNTEAFF

SEQ ID NO: 203931 - protein, 13 aa, Homo sapiens
  CDR3 for alpha chain variable domain of TCR clone 101966 (TRAV13-1, TRAJ5)
CAASDTGRRALTF

SEQ ID NO: 203932 - protein, 14 aa, Homo sapiens
  CDR3 for beta chain variable domain of TCR clone 101966 (TRBV20-1, TRBJ2-7)
CSAKTGTGGYEQYF

SEQ ID NO: 203933 - protein, 18 aa, Homo sapiens
  CDR3 for alpha chain variable domain of TCR clone 101967 (TRAV29/DV5, TRAJ52)
CAAGFRGAGGTSYGKLTF

SEQ ID NO: 203934 - protein, 16 aa, Homo sapiens
  CDR3 for beta chain variable domain of TCR clone 101967 (TRBV7-3, TRBJ2-2)
CASSLKRGTLFGELFF

SEQ ID NO: 203935 - protein, 15 aa, Homo sapiens
  CDR3 for alpha chain variable domain of TCR clone 101968 (TRAV12-3, TRAJ6)
CAMSAASGGSYIPTF

SEQ ID NO: 203936 - protein, 16 aa, Homo sapiens
  CDR3 for beta chain variable domain of TCR clone 101968 (TRBV10-3, TRBJ2-1)
CAISGVGDGGGGEQFF

SEQ ID NO: 203937 - protein, 13 aa, Homo sapiens
  CDR3 for alpha chain variable domain of TCR clone 101969 (TRAV2, TRAJ15)
CAVASQAGTVLIF

SEQ ID NO: 203938 - protein, 16 aa, Homo sapiens
  CDR3 for beta chain variable domain of TCR clone 101969 (TRBV20-1, TRBJ1-4)
CSAPGQGLLTNEKLFF

SEQ ID NO: 203939 - protein, 13 aa, Homo sapiens
  CDR3 for alpha chain variable domain of TCR clone 101970 (TRAV13-1, TRAJ6)
CAASKGVSYIPTF

SEQ ID NO: 203940 - protein, 14 aa, Homo sapiens
  CDR3 for beta chain variable domain of TCR clone 101970 (TRBV7-2, TRBJ2-1)
CASSLGVGYNEQFF

SEQ ID NO: 203941 - protein, 17 aa, Homo sapiens
  CDR3 for alpha chain variable domain of TCR clone 101971 (TRAV3, TRAJ6)
CAVRDGPRAGGSYIPTF

SEQ ID NO: 203942 - protein, 17 aa, Homo sapiens
  CDR3 for beta chain variable domain of TCR clone 101971 (TRBV7-2, TRBJ1-4)
CASSFKAGPTTNEKLFF

SEQ ID NO: 203943 - protein, 12 aa, Homo sapiens
  CDR3 for alpha chain variable domain of TCR clone 101972 (TRAV12-3, TRAJ17)
CAITLTGNKLTF

SEQ ID NO: 203944 - protein, 15 aa, Homo sapiens
  CDR3 for beta chain variable domain of TCR clone 101972 (TRBV20-1, TRBJ2-7)
CSARDRVSGMGEQYF

SEQ ID NO: 203945 - protein, 18 aa, Homo sapiens
  CDR3 for alpha chain variable domain of TCR clone 101973 (TRAV35, TRAJ52)
CAGLLRYPGGTSYGKLTF

SEQ ID NO: 203946 - protein, 13 aa, Homo sapiens
  CDR3 for beta chain variable domain of TCR clone 101973 (TRBV7-9, TRBJ1-2)
CASSLKQNYGYTF

SEQ ID NO: 203947 - protein, 16 aa, Homo sapiens
  CDR3 for alpha chain variable domain of TCR clone 101974 (TRAV30, TRAJ24)
CGTEIVDADSWWKFQF

SEQ ID NO: 203948 - protein, 16 aa, Homo sapiens
  CDR3 for beta chain variable domain of TCR clone 101974 (TRBV6-1, TRBJ2-1)
CASILRQGSSYNEQFF

SEQ ID NO: 203949 - protein, 14 aa, Homo sapiens
  CDR3 for alpha chain variable domain of TCR clone 101975 (TRAV17, TRAJ8)
CATDLNTGFQKLVF

SEQ ID NO: 203950 - protein, 14 aa, Homo sapiens
  CDR3 for beta chain variable domain of TCR clone 101975 (TRBV27, TRBJ2-1)
CASRHLGGGKEQFF

SEQ ID NO: 203951 - protein, 12 aa, Homo sapiens
  CDR3 for alpha chain variable domain of TCR clone 101976 (TRAV8-6, TRAJ43)
CAVSNNNNDMRF

SEQ ID NO: 203952 - protein, 16 aa, Homo sapiens
  CDR3 for beta chain variable domain of TCR clone 101976 (TRBV12-5, TRBJ2-5)
CASGPRTSGNQETQYF

SEQ ID NO: 203953 - protein, 11 aa, Homo sapiens
  CDR3 for alpha chain variable domain of TCR clone 101977 (TRAV2, TRAJ13)
CASGGYQKVTF

SEQ ID NO: 203954 - protein, 14 aa, Homo sapiens
  CDR3 for beta chain variable domain of TCR clone 101977 (TRBV19, TRBJ2-1)
CASPTFVVSGEQFF

SEQ ID NO: 203955 - protein, 13 aa, Homo sapiens
  CDR3 for alpha chain variable domain of TCR clone 101978 (TRAV13-1, TRAJ21)
CAASIYNFNKFYF

SEQ ID NO: 203956 - protein, 12 aa, Homo sapiens
  CDR3 for beta chain variable domain of TCR clone 101978 (TRBV7-3, TRBJ2-1)
CASSFINNEQFF

SEQ ID NO: 203957 - protein, 12 aa, Homo sapiens
  CDR3 for alpha chain variable domain of TCR clone 101979 (TRAV12-1, )
CVVNSRISRTLT

SEQ ID NO: 203958 - protein, 11 aa, Homo sapiens
  CDR3 for beta chain variable domain of TCR clone 101979 (TRBV6-3, TRBJ2-3)
CATGQADTQYF

SEQ ID NO: 203959 - protein, 16 aa, Homo sapiens
  CDR3 for alpha chain variable domain of TCR clone 101980 (TRAV16, TRAJ4)
CITVLPFSGGYNKLIF

SEQ ID NO: 203960 - protein, 15 aa, Homo sapiens
  CDR3 for beta chain variable domain of TCR clone 101980 (TRBV11-1, TRBJ2-7)
CASSLNYGASYEQYF

SEQ ID NO: 203961 - protein, 13 aa, Homo sapiens
  CDR3 for alpha chain variable domain of TCR clone 101981 (TRAV8-3, TRAJ44)
CAEVPGTASKLTF

SEQ ID NO: 203962 - protein, 14 aa, Homo sapiens
  CDR3 for beta chain variable domain of TCR clone 101981 (TRBV11-2, TRBJ2-3)
CASSRLARTDTQYF

SEQ ID NO: 203963 - protein, 13 aa, Homo sapiens
  CDR3 for alpha chain variable domain of TCR clone 101982 (TRAV13-2, TRAJ48)
CAEMDFGNEKLTF

SEQ ID NO: 203964 - protein, 12 aa, Homo sapiens
  CDR3 for beta chain variable domain of TCR clone 101982 (TRBV28, TRBJ1-2)
CASLTLAEGYTF

SEQ ID NO: 203965 - protein, 12 aa, Homo sapiens
  CDR3 for alpha chain variable domain of TCR clone 101983 (TRAV3, TRAJ43)
CAVRDPNNDMRF

SEQ ID NO: 203966 - protein, 15 aa, Homo sapiens
  CDR3 for beta chain variable domain of TCR clone 101983 (TRBV7-2, TRBJ1-2)
CASSPRAGWNYGYTF

SEQ ID NO: 203967 - protein, 14 aa, Homo sapiens
  CDR3 for alpha chain variable domain of TCR clone 101984 (TRAV1-2, TRAJ16)
CAVNRFSDGQKLPF

SEQ ID NO: 203968 - protein, 14 aa, Homo sapiens
  CDR3 for beta chain variable domain of TCR clone 101984 (TRBV11-2, TRBJ1-4)
CASSLGGLGEKLFF

SEQ ID NO: 203969 - protein, 13 aa, Homo sapiens
  CDR3 for alpha chain variable domain of TCR clone 101985 (TRAV17, TRAJ9)
CATAITGGFKTIF

SEQ ID NO: 203970 - protein, 16 aa, Homo sapiens
  CDR3 for beta chain variable domain of TCR clone 101985 (TRBV15, TRBJ2-1)
CATSRNRAGGYNEQFF

SEQ ID NO: 203971 - protein, 14 aa, Homo sapiens
  CDR3 for alpha chain variable domain of TCR clone 101986 (TRAV8-2, TRAJ6)
CVVISAGGSYIPTF

SEQ ID NO: 203972 - protein, 16 aa, Homo sapiens
  CDR3 for beta chain variable domain of TCR clone 101986 (TRBV7-6, TRBJ2-6)
CASSLPGLSGANGLTF

SEQ ID NO: 203973 - protein, 12 aa, Homo sapiens
  CDR3 for alpha chain variable domain of TCR clone 101987 (TRAV13-1, TRAJ42)
VNYGGSQGNLIF

SEQ ID NO: 203974 - protein, 15 aa, Homo sapiens
  CDR3 for beta chain variable domain of TCR clone 101987 (TRBV20-1, TRBJ2-1)
CSASSAGSSYNEQFL

SEQ ID NO: 203975 - protein, 13 aa, Homo sapiens
  CDR3 for alpha chain variable domain of TCR clone 101988 (TRAV12-2, TRAJ20)
CAVYPSNDYKLSF

SEQ ID NO: 203976 - protein, 15 aa, Homo sapiens
  CDR3 for beta chain variable domain of TCR clone 101988 (TRBV27, TRBJ2-5)
CASSLYPRAGETQYF

SEQ ID NO: 203977 - protein, 15 aa, Homo sapiens
  CDR3 for alpha chain variable domain of TCR clone 101989 (TRAV26-1, TRAJ29)
CIVRVQGSGSTPLVF

SEQ ID NO: 203978 - protein, 15 aa, Homo sapiens
  CDR3 for beta chain variable domain of TCR clone 101989 (TRBV7-9, TRBJ1-5)
CASSQGHQPNQPQHF

SEQ ID NO: 203979 - protein, 16 aa, Homo sapiens
  CDR3 for alpha chain variable domain of TCR clone 101990 (TRAV3, TRAJ10)
CAVRDMRAGGGNKLTF

SEQ ID NO: 203980 - protein, 14 aa, Homo sapiens
  CDR3 for beta chain variable domain of TCR clone 101990 (TRBV7-6, TRBJ1-6)
CASSQAGGGSPLHF

SEQ ID NO: 203981 - protein, 15 aa, Homo sapiens
  CDR3 for alpha chain variable domain of TCR clone 101991 (TRAV8-3, TRAJ45)
CASSYSGGGADGLTF

SEQ ID NO: 203982 - protein, 15 aa, Homo sapiens
  CDR3 for beta chain variable domain of TCR clone 101991 (TRBV10-3, TRBJ2-7)
CTSASKLAVNYEQYF

SEQ ID NO: 203983 - protein, 14 aa, Homo sapiens
  CDR3 for alpha chain variable domain of TCR clone 101992 (TRAV12-3, TRAJ9)
CAMSPNTGGFKTIF

SEQ ID NO: 203984 - protein, 15 aa, Homo sapiens
  CDR3 for beta chain variable domain of TCR clone 101992 (TRBV12-4, TRBJ2-5)
CASSPPTGLQETQYF

SEQ ID NO: 203985 - protein, 17 aa, Homo sapiens
  CDR3 for alpha chain variable domain of TCR clone 101993 (TRAV12-2, TRAJ22)
CAVNRIPFSGSARQLTF

SEQ ID NO: 203986 - protein, 13 aa, Homo sapiens
  CDR3 for beta chain variable domain of TCR clone 101993 (TRBV11-3, TRBJ1-1)
CASSANRDTEAFF

SEQ ID NO: 203987 - protein, 15 aa, Homo sapiens
  CDR3 for alpha chain variable domain of TCR clone 101994 (TRAV12-1, TRAJ44)
CVVFVNTGTASTLTF

SEQ ID NO: 203988 - protein, 17 aa, Homo sapiens
  CDR3 for beta chain variable domain of TCR clone 101994 (TRBV7-8, TRBJ2-6)
YASSAGTGGAGANVLTF

SEQ ID NO: 203989 - protein, 13 aa, Homo sapiens
  CDR3 for alpha chain variable domain of TCR clone 101995 (TRAV12-2, TRAJ42)
YAVKRGSQGNLIF

SEQ ID NO: 203990 - protein, 12 aa, Homo sapiens
  CDR3 for beta chain variable domain of TCR clone 101995 (TRBV5-7, TRBJ1-2)
CASSLVQNGYTF

SEQ ID NO: 203991 - protein, 14 aa, Homo sapiens
  CDR3 for alpha chain variable domain of TCR clone 101996 (TRAV1-2, TRAJ13)
CAVKHSGGYQKVTF

SEQ ID NO: 203992 - protein, 22 aa, Homo sapiens
  CDR3 for beta chain variable domain of TCR clone 101996 (TRBV7-3, TRBJ2-1)
GGTQPCISVPAAPRDSLYEQFF

SEQ ID NO: 203993 - protein, 12 aa, Homo sapiens
  CDR3 for alpha chain variable domain of TCR clone 101997 (TRAV27, TRAJ35)
CAGADFGNVLHC

SEQ ID NO: 203994 - protein, 14 aa, Homo sapiens
  CDR3 for beta chain variable domain of TCR clone 101997 (TRBV12-4, TRBJ2-5)
CASSFGASGGTQYF

SEQ ID NO: 203995 - protein, 15 aa, Homo sapiens
  CDR3 for alpha chain variable domain of TCR clone 101998 (TRAV8-3, TRAJ15)
CAVGAANQAGPALIF

SEQ ID NO: 203996 - protein, 14 aa, Homo sapiens
  CDR3 for beta chain variable domain of TCR clone 101998 (TRBV20-1, TRBJ2-1)
CSPNDEASYNEQFF

SEQ ID NO: 203997 - protein, 15 aa, Homo sapiens
  CDR3 for alpha chain variable domain of TCR clone 101999 (TRAV27, TRAJ38)
CAARRNAGNNRKLIW

SEQ ID NO: 203998 - protein, 14 aa, Homo sapiens
  CDR3 for beta chain variable domain of TCR clone 101999 (TRBV6-5, TRBJ1-2)
CASTRGGGSDGYTF

SEQ ID NO: 203999 - protein, 12 aa, Homo sapiens
  CDR3 for alpha chain variable domain of TCR clone 102000 (TRAV12-3, TRAJ42)
CAPGGSQGNLIF

SEQ ID NO: 204000 - protein, 13 aa, Homo sapiens
  CDR3 for beta chain variable domain of TCR clone 102000 (TRBV5-7, TRBJ2-6)
CASTSSGANVLTC

SEQ ID NO: 204001 - protein, 16 aa, Homo sapiens
  CDR3 for alpha chain variable domain of TCR clone 102001 (TRAV8-3, TRAJ42)
CAVGEENGGSQGNLIF

SEQ ID NO: 204002 - protein, 14 aa, Homo sapiens
  CDR3 for beta chain variable domain of TCR clone 102001 (TRBV7-2, TRBJ2-1)
CASSRGGARNEQFF

SEQ ID NO: 204003 - protein, 13 aa, Homo sapiens
  CDR3 for alpha chain variable domain of TCR clone 102002 (TRAV12-3, TRAJ33)
CAMSLNSNYQLIW

SEQ ID NO: 204004 - protein, 13 aa, Homo sapiens
  CDR3 for beta chain variable domain of TCR clone 102002 (TRBV7-2, TRBJ2-2)
CVSSLAVTGELFF

SEQ ID NO: 204005 - protein, 12 aa, Homo sapiens
  CDR3 for alpha chain variable domain of TCR clone 102003 (TRAV13-2, TRAJ23)
CAERHRGGKLIF

SEQ ID NO: 204006 - protein, 14 aa, Homo sapiens
  CDR3 for beta chain variable domain of TCR clone 102003 (TRBV7-8, TRBJ2-3)
CASSFKSSTDTQYF

SEQ ID NO: 204007 - protein, 16 aa, Homo sapiens
  CDR3 for alpha chain variable domain of TCR clone 102004 (TRAV16, TRAJ54)
CALSPPLIQGAQKLVL

SEQ ID NO: 204008 - protein, 18 aa, Homo sapiens
  CDR3 for beta chain variable domain of TCR clone 102004 (TRBV7-3, TRBJ2-1)
CASSLTLASGRAMVSSSS

SEQ ID NO: 204009 - protein, 14 aa, Homo sapiens
  CDR3 for alpha chain variable domain of TCR clone 102005 (TRAV9-2, TRAJ39)
CALYIYNAGNMLTF

SEQ ID NO: 204010 - protein, 17 aa, Homo sapiens
  CDR3 for beta chain variable domain of TCR clone 102005 (TRBV11-3, TRBJ2-6)
CASKWGQGLSGANVLTF

SEQ ID NO: 204011 - protein, 11 aa, Homo sapiens
  CDR3 for alpha chain variable domain of TCR clone 102006 (TRAV12-2, TRAJ21)
CAVEGSNKFYF

SEQ ID NO: 204012 - protein, 14 aa, Homo sapiens
  CDR3 for beta chain variable domain of TCR clone 102006 (TRBV7-2, TRBJ2-7)
CASSPKTSFYEQYF

SEQ ID NO: 204013 - protein, 14 aa, Homo sapiens
  CDR3 for alpha chain variable domain of TCR clone 102007 (TRAV26-1, TRAJ44)
CIVKSTGTASKLTL

SEQ ID NO: 204014 - protein, 15 aa, Homo sapiens
  CDR3 for beta chain variable domain of TCR clone 102007 (TRBV19, TRBJ2-4)
CASSDGGGAKNIQYF

SEQ ID NO: 204015 - protein, 15 aa, Homo sapiens
  CDR3 for alpha chain variable domain of TCR clone 102008 (TRAV12-2, TRAJ53)
CAANGGGGSNYKLTF

SEQ ID NO: 204016 - protein, 13 aa, Homo sapiens
  CDR3 for beta chain variable domain of TCR clone 102008 (TRBV3-1, TRBJ1-1)
CASSPGVITEAFF

SEQ ID NO: 204017 - protein, 11 aa, Homo sapiens
  CDR3 for alpha chain variable domain of TCR clone 102009 (TRAV3, TRAJ21)
CSVGNFNKFYF

SEQ ID NO: 204018 - protein, 16 aa, Homo sapiens
  CDR3 for beta chain variable domain of TCR clone 102009 (TRBV7-6, TRBJ2-1)
CASSAPGPSSYNEQFF

SEQ ID NO: 204019 - protein, 13 aa, Homo sapiens
  CDR3 for alpha chain variable domain of TCR clone 102010 (TRAV8-4, TRAJ10)
CAAFTGGGNKLTF

SEQ ID NO: 204020 - protein, 12 aa, Homo sapiens
  CDR3 for beta chain variable domain of TCR clone 102010 (TRBV11-2, TRBJ2-1)
CASSPGNNEQFF

SEQ ID NO: 204021 - protein, 18 aa, Homo sapiens
  CDR3 for alpha chain variable domain of TCR clone 102011 (TRAV13-1, TRAJ52)
CAAKNPNAGGTSYGKLTF

SEQ ID NO: 204022 - protein, 13 aa, Homo sapiens
  CDR3 for beta chain variable domain of TCR clone 102011 (TRBV6-5, TRBJ2-1)
CASRGRVGNEQFF

SEQ ID NO: 204023 - protein, 11 aa, Homo sapiens
  CDR3 for alpha chain variable domain of TCR clone 102012 (TRAV2, TRAJ13)
CASGGYQKVTF

SEQ ID NO: 204024 - protein, 15 aa, Homo sapiens
  CDR3 for beta chain variable domain of TCR clone 102012 (TRBV18, TRBJ2-1)
CASSPPSASYNEQFF

SEQ ID NO: 204025 - protein, 10 aa, Homo sapiens
  CDR3 for alpha chain variable domain of TCR clone 102013 (TRAV12-2, TRAJ43)
CAGDDMRLEQ

SEQ ID NO: 204026 - protein, 16 aa, Homo sapiens
  CDR3 for beta chain variable domain of TCR clone 102013 (TRBV2, TRBJ2-4)
CASSEAPGGEQNIQYF

SEQ ID NO: 204027 - protein, 17 aa, Homo sapiens
  CDR3 for alpha chain variable domain of TCR clone 102014 (TRAV20, TRAJ52)
CAVQANAGGTSYGKLTF

SEQ ID NO: 204028 - protein, 15 aa, Homo sapiens
  CDR3 for beta chain variable domain of TCR clone 102014 (TRBV6-5, TRBJ2-1)
CASSYDAGAGNEQFF

SEQ ID NO: 204029 - protein, 13 aa, Homo sapiens
  CDR3 for alpha chain variable domain of TCR clone 102015 (TRAV2, TRAJ29)
CAAGNSGNTPLVF

SEQ ID NO: 204030 - protein, 12 aa, Homo sapiens
  CDR3 for beta chain variable domain of TCR clone 102015 (TRBV11-2, TRBJ2-2)
CASSLPTGELFF

SEQ ID NO: 204031 - protein, 12 aa, Homo sapiens
  CDR3 for alpha chain variable domain of TCR clone 102016 (TRAV5, TRAJ27)
CAEITNAGKSTF

SEQ ID NO: 204032 - protein, 15 aa, Homo sapiens
  CDR3 for beta chain variable domain of TCR clone 102016 (TRBV11-2, TRBJ1-2)
CASSLEGVQRNSYTF

SEQ ID NO: 204033 - protein, 16 aa, Homo sapiens
  CDR3 for alpha chain variable domain of TCR clone 102017 (TRAV1-2, TRAJ10)
CAVRGVLTGGGNKLTF

SEQ ID NO: 204034 - protein, 12 aa, Homo sapiens
  CDR3 for beta chain variable domain of TCR clone 102017 (TRBV7-8, TRBJ2-7)
CASCLGDREQYF

SEQ ID NO: 204035 - protein, 14 aa, Homo sapiens
  CDR3 for alpha chain variable domain of TCR clone 102018 (TRAV13-2, TRAJ4)
FAEKGPKGYNKLIF

SEQ ID NO: 204036 - protein, 13 aa, Homo sapiens
  CDR3 for beta chain variable domain of TCR clone 102018 (TRBV18, TRBJ2-5)
CASSPPGKETQYF

SEQ ID NO: 204037 - protein, 10 aa, Homo sapiens
  CDR3 for alpha chain variable domain of TCR clone 102019 (TRAV8-4, TRAJ43)
CAVSAGDMRF

SEQ ID NO: 204038 - protein, 13 aa, Homo sapiens
  CDR3 for beta chain variable domain of TCR clone 102019 (TRBV12-4, TRBJ2-5)
CASSPGTEETQYF

SEQ ID NO: 204039 - protein, 16 aa, Homo sapiens
  CDR3 for alpha chain variable domain of TCR clone 102020 (TRAV4, TRAJ5)
CLVGPDHGHGQESIYF

SEQ ID NO: 204040 - protein, 15 aa, Homo sapiens
  CDR3 for beta chain variable domain of TCR clone 102020 (TRBV27, TRBJ2-5)
CASSLIPSGGETQYF

SEQ ID NO: 204041 - protein, 15 aa, Homo sapiens
  CDR3 for alpha chain variable domain of TCR clone 102021 (TRAV3, TRAJ5)
CAVRDRKTGRRALTF

SEQ ID NO: 204042 - protein, 15 aa, Homo sapiens
  CDR3 for beta chain variable domain of TCR clone 102021 (TRBV7-8, TRBJ2-1)
CANSLADSLYNEQFF

SEQ ID NO: 204043 - protein, 18 aa, Homo sapiens
  CDR3 for alpha chain variable domain of TCR clone 102022 (TRAV13-1, TRAJ52)
CAAKNPNAGGTSYGKLTF

SEQ ID NO: 204044 - protein, 15 aa, Homo sapiens
  CDR3 for beta chain variable domain of TCR clone 102022 (TRBV6-1, TRBJ2-3)
CASSERGGITDTQYV

SEQ ID NO: 204045 - protein, 14 aa, Homo sapiens
  CDR3 for alpha chain variable domain of TCR clone 102023 (TRAV12-1, TRAJ30)
CVVNIGKRDDKIIF

SEQ ID NO: 204046 - protein, 14 aa, Homo sapiens
  CDR3 for beta chain variable domain of TCR clone 102023 (TRBV7-9, TRBJ2-5)
CASSPRPSGETQYF

SEQ ID NO: 204047 - protein, 12 aa, Homo sapiens
  CDR3 for alpha chain variable domain of TCR clone 102024 (TRAV13-1, TRAJ20)
CAASRGDYKLSF

SEQ ID NO: 204048 - protein, 18 aa, Homo sapiens
  CDR3 for beta chain variable domain of TCR clone 102024 (TRBV11-2, TRBJ2-3)
CASSLGGASRGAPNTQYF

SEQ ID NO: 204049 - protein, 14 aa, Homo sapiens
  CDR3 for alpha chain variable domain of TCR clone 102025 (TRAV13-1, TRAJ40)
CAASMTSGTYKYIF

SEQ ID NO: 204050 - protein, 12 aa, Homo sapiens
  CDR3 for beta chain variable domain of TCR clone 102025 (TRBV12-4, TRBJ2-7)
CASSLGGYEQYF

SEQ ID NO: 204051 - protein, 15 aa, Homo sapiens
  CDR3 for alpha chain variable domain of TCR clone 102026 (TRAV8-3, TRAJ32)
CAVGPSGGATNKLIF

SEQ ID NO: 204052 - protein, 14 aa, Homo sapiens
  CDR3 for beta chain variable domain of TCR clone 102026 (TRBV29-1, TRBJ2-2)
CSVLAETNTGELFF

SEQ ID NO: 204053 - protein, 14 aa, Homo sapiens
  CDR3 for alpha chain variable domain of TCR clone 102027 (TRAV9-2, TRAJ39)
CALYIYNAGNMLTF

SEQ ID NO: 204054 - protein, 12 aa, Homo sapiens
  CDR3 for beta chain variable domain of TCR clone 102027 (TRBV5-4, TRBJ2-7)
CASSWAGQGENF

SEQ ID NO: 204055 - protein, 16 aa, Homo sapiens
  CDR3 for alpha chain variable domain of TCR clone 102028 (TRAV8-3, TRAJ44)
CAVGTLMTGTASKLTF

SEQ ID NO: 204056 - protein, 12 aa, Homo sapiens
  CDR3 for beta chain variable domain of TCR clone 102028 (TRBV7-8, TRBJ2-7)
CASSLGDREQYF

SEQ ID NO: 204057 - protein, 13 aa, Homo sapiens
  CDR3 for alpha chain variable domain of TCR clone 102029 (TRAV8-4, TRAJ48)
CAVSLFGNEKLTF

SEQ ID NO: 204058 - protein, 15 aa, Homo sapiens
  CDR3 for beta chain variable domain of TCR clone 102029 (TRBV20-1, TRBJ2-7)
CSARKGLAEYYEQYF

SEQ ID NO: 204059 - protein, 12 aa, Homo sapiens
  CDR3 for alpha chain variable domain of TCR clone 102030 (TRAV12-2, TRAJ9)
CAVNTGGFKTIF

SEQ ID NO: 204060 - protein, 17 aa, Homo sapiens
  CDR3 for beta chain variable domain of TCR clone 102030 (TRBV13, TRBJ2-3)
CASSLSRVAGGRNTQYF

SEQ ID NO: 204061 - protein, 12 aa, Homo sapiens
  CDR3 for alpha chain variable domain of TCR clone 102031 (TRAV26-1, TRAJ26)
CIVFIYGQNFVF

SEQ ID NO: 204062 - protein, 13 aa, Homo sapiens
  CDR3 for beta chain variable domain of TCR clone 102031 (TRBV27, TRBJ1-1)
CASSLSIGAEASF

SEQ ID NO: 204063 - protein, 14 aa, Homo sapiens
  CDR3 for alpha chain variable domain of TCR clone 102032 (TRAV13-2, TRAJ6)
CAERGSGGSYIPTF

SEQ ID NO: 204064 - protein, 15 aa, Homo sapiens
  CDR3 for beta chain variable domain of TCR clone 102032 (TRBV3-1, TRBJ2-1)
CASSQQPSGGNEQFF

SEQ ID NO: 204065 - protein, 12 aa, Homo sapiens
  CDR3 for alpha chain variable domain of TCR clone 102033 (TRAV12-3, TRAJ42)
CAPGGSQGNLIF

SEQ ID NO: 204066 - protein, 15 aa, Homo sapiens
  CDR3 for beta chain variable domain of TCR clone 102033 (TRBV7-2, TRBJ1-1)
CASSPQGGQGKSAFF

SEQ ID NO: 204067 - protein, 13 aa, Homo sapiens
  CDR3 for alpha chain variable domain of TCR clone 102034 (TRAV35, TRAJ42)
CAGFPGSQGNLIF

SEQ ID NO: 204068 - protein, 14 aa, Homo sapiens
  CDR3 for beta chain variable domain of TCR clone 102034 (TRBV7-8, TRBJ1-2)
CASSPDSLSYGYTF

SEQ ID NO: 204069 - protein, 14 aa, Homo sapiens
  CDR3 for alpha chain variable domain of TCR clone 102035 (TRAV16, TRAJ33)
CALSAMDSNYQLIW

SEQ ID NO: 204070 - protein, 12 aa, Homo sapiens
  CDR3 for beta chain variable domain of TCR clone 102035 (TRBV5-1, TRBJ1-2)
CASSQDTYGYTC

SEQ ID NO: 204071 - protein, 11 aa, Homo sapiens
  CDR3 for alpha chain variable domain of TCR clone 102036 (TRAV35, TRAJ30)
CAGERDDKIIF

SEQ ID NO: 204072 - protein, 20 aa, Homo sapiens
  CDR3 for beta chain variable domain of TCR clone 102036 (TRBV7-8, TRBJ2-2)
CASSHLFPGPTIHITGELFF

SEQ ID NO: 204073 - protein, 16 aa, Homo sapiens
  CDR3 for alpha chain variable domain of TCR clone 102037 (TRAV17, TRAJ22)
CATVPISSGSARQLTF

SEQ ID NO: 204074 - protein, 13 aa, Homo sapiens
  CDR3 for beta chain variable domain of TCR clone 102037 (TRBV11-2, TRBJ2-1)
CASSLGLAGGRFF

SEQ ID NO: 204075 - protein, 14 aa, Homo sapiens
  CDR3 for alpha chain variable domain of TCR clone 102038 (TRAV12-1, TRAJ30)
CVVNIGGRDDKIIF

SEQ ID NO: 204076 - protein, 14 aa, Homo sapiens
  CDR3 for beta chain variable domain of TCR clone 102038 (TRBV25-1, TRBJ1-1)
CASTHLGGNTEAFF

SEQ ID NO: 204077 - protein, 14 aa, Homo sapiens
  CDR3 for alpha chain variable domain of TCR clone 102039 (TRAV3, TRAJ22)
WAVRDYGSARQLTF

SEQ ID NO: 204078 - protein, 13 aa, Homo sapiens
  CDR3 for beta chain variable domain of TCR clone 102039 (TRBV11-2, TRBJ2-5)
CASGHGAKETQYF

SEQ ID NO: 204079 - protein, 21 aa, Homo sapiens
  CDR3 for alpha chain variable domain of TCR clone 102040 (TRAV30, TRAJ43)
GLPAQLLRNLLPIIELNDMRF

SEQ ID NO: 204080 - protein, 14 aa, Homo sapiens
  CDR3 for beta chain variable domain of TCR clone 102040 (TRBV27, TRBJ2-1)
CASRHLGWGKEQFF

SEQ ID NO: 204081 - protein, 12 aa, Homo sapiens
  CDR3 for alpha chain variable domain of TCR clone 102041 (TRAV12-3, TRAJ17)
CAMTLTGNKLTF

SEQ ID NO: 204082 - protein, 14 aa, Homo sapiens
  CDR3 for beta chain variable domain of TCR clone 102041 (TRBV4-1, TRBJ2-5)
CASSRSGSGETQYF

SEQ ID NO: 204083 - protein, 17 aa, Homo sapiens
  CDR3 for alpha chain variable domain of TCR clone 102042 (TRAV13-1, TRAJ31)
CAPRDRLMFGDGTQLVV

SEQ ID NO: 204084 - protein, 12 aa, Homo sapiens
  CDR3 for beta chain variable domain of TCR clone 102042 (TRBV7-9, TRBJ2-7)
CASSLEGCEQYF

SEQ ID NO: 204085 - protein, 12 aa, Homo sapiens
  CDR3 for alpha chain variable domain of TCR clone 102043 (TRAV21, TRAJ27)
CAANTNAGKSTF

SEQ ID NO: 204086 - protein, 13 aa, Homo sapiens
  CDR3 for beta chain variable domain of TCR clone 102043 (TRBV7-9, TRBJ1-2)
CASSLKQNYGYTF

SEQ ID NO: 204087 - protein, 16 aa, Homo sapiens
  CDR3 for alpha chain variable domain of TCR clone 102044 (TRAV30, TRAJ24)
CGTEIVDADSWGKFQF

SEQ ID NO: 204088 - protein, 14 aa, Homo sapiens
  CDR3 for beta chain variable domain of TCR clone 102044 (TRBV7-9, TRBJ2-1)
CASSDNSGYNEQFF

SEQ ID NO: 204089 - protein, 14 aa, Homo sapiens
  CDR3 for alpha chain variable domain of TCR clone 102045 (TRAV12-1, TRAJ42)
CVVIYGGSQGNLII

SEQ ID NO: 204090 - protein, 13 aa, Homo sapiens
  CDR3 for beta chain variable domain of TCR clone 102045 (TRBV18, TRBJ2-5)
CASSPPGKETQYF

SEQ ID NO: 204091 - protein, 15 aa, Homo sapiens
  CDR3 for alpha chain variable domain of TCR clone 102046 (TRAV12-2, TRAJ43)
CAFDMRFGAGTRLTV

SEQ ID NO: 204092 - protein, 16 aa, Homo sapiens
  CDR3 for beta chain variable domain of TCR clone 102046 (TRBV7-3, TRBJ2-2)
CASSLKRGTLSGELFF

SEQ ID NO: 204093 - protein, 14 aa, Homo sapiens
  CDR3 for alpha chain variable domain of TCR clone 102047 (TRAV13-2, TRAJ9)
CAENSFTGGFKTIF

SEQ ID NO: 204094 - protein, 13 aa, Homo sapiens
  CDR3 for beta chain variable domain of TCR clone 102047 (TRBV19, TRBJ2-7)
CASSIERTYEQYF

SEQ ID NO: 204095 - protein, 16 aa, Homo sapiens
  CDR3 for alpha chain variable domain of TCR clone 102048 (TRAV8-3, TRAJ28)
CAVPPQRGAGSYQLTS

SEQ ID NO: 204096 - protein, 13 aa, Homo sapiens
  CDR3 for beta chain variable domain of TCR clone 102048 (TRBV7-6, TRBJ2-3)
CASSLRSDNTQYF

SEQ ID NO: 204097 - protein, 14 aa, Homo sapiens
  CDR3 for alpha chain variable domain of TCR clone 102049 (TRAV1-2, TRAJ16)
CAVNRFSDGQKLLF

SEQ ID NO: 204098 - protein, 13 aa, Homo sapiens
  CDR3 for beta chain variable domain of TCR clone 102049 (TRBV7-3, TRBJ2-2)
CASSLNVLGELFF

SEQ ID NO: 204099 - protein, 16 aa, Homo sapiens
  CDR3 for alpha chain variable domain of TCR clone 102050 (TRAV23/DV6, )
CADIQNPDPAVYQLID

SEQ ID NO: 204100 - protein, 13 aa, Homo sapiens
  CDR3 for beta chain variable domain of TCR clone 102050 (TRBV28, TRBJ2-7)
CASRSSGVYEQYF

SEQ ID NO: 204101 - protein, 13 aa, Homo sapiens
  CDR3 for alpha chain variable domain of TCR clone 102051 (TRAV2, TRAJ40)
CAVVTSGTYKYIL

SEQ ID NO: 204102 - protein, 14 aa, Homo sapiens
  CDR3 for beta chain variable domain of TCR clone 102051 (TRBV7-2, TRBJ2-7)
CASSPKTSFYEQYF

SEQ ID NO: 204103 - protein, 13 aa, Homo sapiens
  CDR3 for alpha chain variable domain of TCR clone 102052 (TRAV12-1, TRAJ31)
CVVNMNNNARLMF

SEQ ID NO: 204104 - protein, 15 aa, Homo sapiens
  CDR3 for beta chain variable domain of TCR clone 102052 (TRBV4-1, TRBJ1-2)
CASSRGQGAAYGYTF

SEQ ID NO: 204105 - protein, 14 aa, Homo sapiens
  CDR3 for alpha chain variable domain of TCR clone 102053 (TRAV38-2/DV8, TRAJ23)
CAYRSQNQGGKLIF

SEQ ID NO: 204106 - protein, 19 aa, Homo sapiens
  CDR3 for beta chain variable domain of TCR clone 102053 (TRBV7-9, TRBJ2-1)
CASSLWGSTRKSSYNEQFF

SEQ ID NO: 204107 - protein, 14 aa, Homo sapiens
  CDR3 for alpha chain variable domain of TCR clone 102054 (TRAV1-2, TRAJ15)
CAVRDRQAGTALIF

SEQ ID NO: 204108 - protein, 16 aa, Homo sapiens
  CDR3 for beta chain variable domain of TCR clone 102054 (TRBV6-1, TRBJ2-5)
CASSETLDRGAETQYF

SEQ ID NO: 204109 - protein, 14 aa, Homo sapiens
  CDR3 for alpha chain variable domain of TCR clone 102055 (TRAV8-6, TRAJ37)
CAVRLSGNTGKLIF

SEQ ID NO: 204110 - protein, 18 aa, Homo sapiens
  CDR3 for beta chain variable domain of TCR clone 102055 (TRBV7-9, TRBJ2-7)
CASSLTTSGSRTWYEQYF

SEQ ID NO: 204111 - protein, 13 aa, Homo sapiens
  CDR3 for alpha chain variable domain of TCR clone 102056 (TRAV8-3, TRAJ4)
WVFYAGGYNKLIF

SEQ ID NO: 204112 - protein, 14 aa, Homo sapiens
  CDR3 for beta chain variable domain of TCR clone 102056 (TRBV7-9, TRBJ2-3)
CASSLEDGTDTQYF

SEQ ID NO: 204113 - protein, 18 aa, Homo sapiens
  CDR3 for alpha chain variable domain of TCR clone 102057 (TRAV13-1, TRAJ52)
CAASKRSAGGTSYGKLTF

SEQ ID NO: 204114 - protein, 13 aa, Homo sapiens
  CDR3 for beta chain variable domain of TCR clone 102057 (TRBV10-3, TRBJ2-7)
CSSKLAVNYEQYF

SEQ ID NO: 204115 - protein, 16 aa, Homo sapiens
  CDR3 for alpha chain variable domain of TCR clone 102058 (TRAV30, TRAJ24)
CGTEIVDADSWGKFQF

SEQ ID NO: 204116 - protein, 15 aa, Homo sapiens
  CDR3 for beta chain variable domain of TCR clone 102058 (TRBV7-9, TRBJ1-4)
CASSARTGGNGKLFF

SEQ ID NO: 204117 - protein, 11 aa, Homo sapiens
  CDR3 for alpha chain variable domain of TCR clone 102059 (TRAV3, TRAJ21)
CAVGNFNKFYF

SEQ ID NO: 204118 - protein, 15 aa, Homo sapiens
  CDR3 for beta chain variable domain of TCR clone 102059 (TRBV6-4, TRBJ2-1)
CASSDSTGGYNEQFF

SEQ ID NO: 204119 - protein, 14 aa, Homo sapiens
  CDR3 for alpha chain variable domain of TCR clone 102060 (TRAV20, TRAJ22)
CAVQVSGSARQLTF

SEQ ID NO: 204120 - protein, 16 aa, Homo sapiens
  CDR3 for beta chain variable domain of TCR clone 102060 (TRBV20-1, TRBJ1-4)
CSAPGQGLLTNEKLFF

SEQ ID NO: 204121 - protein, 12 aa, Homo sapiens
  CDR3 for alpha chain variable domain of TCR clone 102061 (TRAV25, TRAJ33)
CAGPDSNYQLIW

SEQ ID NO: 204122 - protein, 20 aa, Homo sapiens
  CDR3 for beta chain variable domain of TCR clone 102061 (TRBV4-1, TRBJ2-2)
CVSSQASPPGLASNTGELFF

SEQ ID NO: 204123 - protein, 14 aa, Homo sapiens
  CDR3 for alpha chain variable domain of TCR clone 102062 (TRAV26-1, TRAJ39)
CIVRGSRAGNMLTF

SEQ ID NO: 204124 - protein, 16 aa, Homo sapiens
  CDR3 for beta chain variable domain of TCR clone 102062 (TRBV4-2, TRBJ2-3)
CASSQELAGDTDTQYF

SEQ ID NO: 204125 - protein, 15 aa, Homo sapiens
  CDR3 for alpha chain variable domain of TCR clone 102063 (TRAV20, TRAJ4)
CAVQVFSGGYNKLIF

SEQ ID NO: 204126 - protein, 15 aa, Homo sapiens
  CDR3 for beta chain variable domain of TCR clone 102063 (TRBV28, TRBJ2-2)
CASRLAGARTGELFF

SEQ ID NO: 204127 - protein, 13 aa, Homo sapiens
  CDR3 for alpha chain variable domain of TCR clone 102064 (TRAV1-2, TRAJ9)
CAALNTGGFKTIF

SEQ ID NO: 204128 - protein, 17 aa, Homo sapiens
  CDR3 for beta chain variable domain of TCR clone 102064 (TRBV11-3, TRBJ1-5)
CASSPLTGLRGNQPQHF

SEQ ID NO: 204129 - protein, 16 aa, Homo sapiens
  CDR3 for alpha chain variable domain of TCR clone 102065 (TRAV14/DV4, TRAJ54)
CAMREGRIQGAQKLVF

SEQ ID NO: 204130 - protein, 18 aa, Homo sapiens
  CDR3 for beta chain variable domain of TCR clone 102065 (TRBV18, TRBJ1-3)
CASSPRGGAGPAGNTIYF

SEQ ID NO: 204131 - protein, 16 aa, Homo sapiens
  CDR3 for alpha chain variable domain of TCR clone 102066 (TRAV1-2, TRAJ10)
CAVRGVLTGGGNKLTF

SEQ ID NO: 204132 - protein, 15 aa, Homo sapiens
  CDR3 for beta chain variable domain of TCR clone 102066 (TRBV5-1, TRBJ2-7)
CASSLNGGPAREQYF

SEQ ID NO: 204133 - protein, 13 aa, Homo sapiens
  CDR3 for alpha chain variable domain of TCR clone 102067 (TRAV3, TRAJ36)
CAVRDSGANNLFF

SEQ ID NO: 204134 - protein, 15 aa, Homo sapiens
  CDR3 for beta chain variable domain of TCR clone 102067 (TRBV6-5, TRBJ2-1)
CASSPREGAYNEQFF

SEQ ID NO: 204135 - protein, 15 aa, Homo sapiens
  CDR3 for alpha chain variable domain of TCR clone 102068 (TRAV13-1, TRAJ52)
CAATSPRTSYGKLTF

SEQ ID NO: 204136 - protein, 16 aa, Homo sapiens
  CDR3 for beta chain variable domain of TCR clone 102068 (TRBV7-3, TRBJ2-2)
CASSLKRETLSGELFF

SEQ ID NO: 204137 - protein, 13 aa, Homo sapiens
  CDR3 for alpha chain variable domain of TCR clone 102069 (TRAV17, TRAJ5)
CALRGTGRRALTF

SEQ ID NO: 204138 - protein, 13 aa, Homo sapiens
  CDR3 for beta chain variable domain of TCR clone 102069 (TRBV7-2, TRBJ2-2)
CASSSVRAGELFF

SEQ ID NO: 204139 - protein, 12 aa, Homo sapiens
  CDR3 for alpha chain variable domain of TCR clone 102070 (TRAV23/DV6, TRAJ17)
CARGSCRQPANF

SEQ ID NO: 204140 - protein, 14 aa, Homo sapiens
  CDR3 for beta chain variable domain of TCR clone 102070 (TRBV7-2, TRBJ1-2)
CASSQTGSTYGYTF

SEQ ID NO: 204141 - protein, 14 aa, Homo sapiens
  CDR3 for alpha chain variable domain of TCR clone 102071 (TRAV13-1, TRAJ44)
CASKATGTASKLTF

SEQ ID NO: 204142 - protein, 13 aa, Homo sapiens
  CDR3 for beta chain variable domain of TCR clone 102071 (TRBV5-5, TRBJ1-2)
CASSFWRGEDYTF

SEQ ID NO: 204143 - protein, 13 aa, Homo sapiens
  CDR3 for alpha chain variable domain of TCR clone 102072 (TRAV1-1, TRAJ9)
CAAKNTGGFKTIF

SEQ ID NO: 204144 - protein, 14 aa, Homo sapiens
  CDR3 for beta chain variable domain of TCR clone 102072 (TRBV10-2, TRBJ2-1)
CASSEGTSEDEQFF

SEQ ID NO: 204145 - protein, 14 aa, Homo sapiens
  CDR3 for alpha chain variable domain of TCR clone 102073 (TRAV1-2, TRAJ8)
CAVREDTGFQKLVF

SEQ ID NO: 204146 - protein, 16 aa, Homo sapiens
  CDR3 for beta chain variable domain of TCR clone 102073 (TRBV4-2, TRBJ1-2)
CASSQERRIHYIGYTF

SEQ ID NO: 204147 - protein, 14 aa, Homo sapiens
  CDR3 for alpha chain variable domain of TCR clone 102074 (TRAV13-2, TRAJ9)
CAENSFTVGFKTIF

SEQ ID NO: 204148 - protein, 13 aa, Homo sapiens
  CDR3 for beta chain variable domain of TCR clone 102074 (TRBV19, TRBJ2-7)
CASSIDRTYEQYF

SEQ ID NO: 204149 - protein, 14 aa, Homo sapiens
  CDR3 for alpha chain variable domain of TCR clone 102075 (TRAV4, TRAJ26)
CLVGPHNYGQNFVF

SEQ ID NO: 204150 - protein, 14 aa, Homo sapiens
  CDR3 for beta chain variable domain of TCR clone 102075 (TRBV19, TRBJ2-1)
CASPTFVLSGEQFF

SEQ ID NO: 204151 - protein, 15 aa, Homo sapiens
  CDR3 for alpha chain variable domain of TCR clone 102076 (TRAV21, TRAJ13)
CAVRPTSGGYQKVTF

SEQ ID NO: 204152 - protein, 15 aa, Homo sapiens
  CDR3 for beta chain variable domain of TCR clone 102076 (TRBV28, TRBJ2-7)
CASSPGGRGFYEQFF

SEQ ID NO: 204153 - protein, 13 aa, Homo sapiens
  CDR3 for alpha chain variable domain of TCR clone 102077 (TRAV13-1, TRAJ39)
CSKYSNAGNMLTF

SEQ ID NO: 204154 - protein, 15 aa, Homo sapiens
  CDR3 for beta chain variable domain of TCR clone 102077 (TRBV9, TRBJ2-1)
CASSLAGSSYNEQFL

SEQ ID NO: 204155 - protein, 14 aa, Homo sapiens
  CDR3 for alpha chain variable domain of TCR clone 102078 (TRAV12-2, TRAJ13)
CAVKKTGGYQIVTF

SEQ ID NO: 204156 - protein, 15 aa, Homo sapiens
  CDR3 for beta chain variable domain of TCR clone 102078 (TRBV27, TRBJ2-1)
CASSNGGGSSNEQFF

SEQ ID NO: 204157 - protein, 12 aa, Homo sapiens
  CDR3 for alpha chain variable domain of TCR clone 102079 (TRAV12-3, TRAJ17)
CAMTLTGSKLTF

SEQ ID NO: 204158 - protein, 14 aa, Homo sapiens
  CDR3 for beta chain variable domain of TCR clone 102079 (TRBV11-2, TRBJ2-3)
CASSRLARTDTQYF

SEQ ID NO: 204159 - protein, 14 aa, Homo sapiens
  CDR3 for alpha chain variable domain of TCR clone 102080 (TRAV12-1, TRAJ17)
CVVNYKAAGNKLTF

SEQ ID NO: 204160 - protein, 19 aa, Homo sapiens
  CDR3 for beta chain variable domain of TCR clone 102080 (TRBV11-3, TRBJ2-3)
CASGFGTSGGPRGGGTQYF

SEQ ID NO: 204161 - protein, 12 aa, Homo sapiens
  CDR3 for alpha chain variable domain of TCR clone 102081 (TRAV12-3, TRAJ17)
CAMTLTGNKLTF

SEQ ID NO: 204162 - protein, 16 aa, Homo sapiens
  CDR3 for beta chain variable domain of TCR clone 102081 (TRBV4-3, TRBJ1-4)
CASSQVVDRLREKLFF

SEQ ID NO: 204163 - protein, 15 aa, Homo sapiens
  CDR3 for alpha chain variable domain of TCR clone 102082 (TRAV26-1, TRAJ44)
CIVRIGAGTASKLTF

SEQ ID NO: 204164 - protein, 15 aa, Homo sapiens
  CDR3 for beta chain variable domain of TCR clone 102082 (TRBV7-6, TRBJ2-1)
CASSSLAGEGNEQFF

SEQ ID NO: 204165 - protein, 14 aa, Homo sapiens
  CDR3 for alpha chain variable domain of TCR clone 102083 (TRAV12-2, TRAJ13)
CAVKKTGGYQKVTF

SEQ ID NO: 204166 - protein, 15 aa, Homo sapiens
  CDR3 for beta chain variable domain of TCR clone 102083 (TRBV27, TRBJ2-1)
CASSNGEGPPMSISS

SEQ ID NO: 204167 - protein, 15 aa, Homo sapiens
  CDR3 for alpha chain variable domain of TCR clone 102084 (TRAV26-1, TRAJ17)
CIVSSFKAAGNKLTF

SEQ ID NO: 204168 - protein, 14 aa, Homo sapiens
  CDR3 for beta chain variable domain of TCR clone 102084 (TRBV6-1, TRBJ2-2)
CDSTWQGNTGELFF

SEQ ID NO: 204169 - protein, 13 aa, Homo sapiens
  CDR3 for alpha chain variable domain of TCR clone 102085 (TRAV21, TRAJ27)
CAARPGNAGKYTF

SEQ ID NO: 204170 - protein, 14 aa, Homo sapiens
  CDR3 for beta chain variable domain of TCR clone 102085 (TRBV7-6, TRBJ2-3)
CASSLGTVTDTQYF

SEQ ID NO: 204171 - protein, 13 aa, Homo sapiens
  CDR3 for alpha chain variable domain of TCR clone 102086 (TRAV27, TRAJ53)
CAGQGGSNYKLTF

SEQ ID NO: 204172 - protein, 13 aa, Homo sapiens
  CDR3 for beta chain variable domain of TCR clone 102086 (TRBV29-1, TRBJ1-1)
CSVESGFGTEAFL

SEQ ID NO: 204173 - protein, 16 aa, Homo sapiens
  CDR3 for alpha chain variable domain of TCR clone 102087 (TRAV8-3, TRAJ28)
CAVPPQRGAGRYQLTF

SEQ ID NO: 204174 - protein, 13 aa, Homo sapiens
  CDR3 for beta chain variable domain of TCR clone 102087 (TRBV7-6, TRBJ2-3)
CASSLRSDNTQYF

SEQ ID NO: 204175 - protein, 16 aa, Homo sapiens
  CDR3 for alpha chain variable domain of TCR clone 102088 (TRAV12-3, TRAJ53)
CAMSPGSGGSNYKLTF

SEQ ID NO: 204176 - protein, 13 aa, Homo sapiens
  CDR3 for beta chain variable domain of TCR clone 102088 (TRBV27, TRBJ2-1)
CASRTLGVGEQFF

SEQ ID NO: 204177 - protein, 10 aa, Homo sapiens
  CDR3 for alpha chain variable domain of TCR clone 102089 (TRAV23/DV6, TRAJ4)
CAARDFLSRD

SEQ ID NO: 204178 - protein, 13 aa, Homo sapiens
  CDR3 for beta chain variable domain of TCR clone 102089 (TRBV7-2, TRBJ1-1)
CASSRNTNTEAFF

SEQ ID NO: 204179 - protein, 12 aa, Homo sapiens
  CDR3 for alpha chain variable domain of TCR clone 102090 (TRAV25, TRAJ20)
CAGRSNDYKLSF

SEQ ID NO: 204180 - protein, 15 aa, Homo sapiens
  CDR3 for beta chain variable domain of TCR clone 102090 (TRBV7-6, TRBJ2-7)
CASSGRRDAFGEQYF

SEQ ID NO: 204181 - protein, 12 aa, Homo sapiens
  CDR3 for alpha chain variable domain of TCR clone 102091 (TRAV35, TRAJ30)
CAGQLADDKIIF

SEQ ID NO: 204182 - protein, 17 aa, Homo sapiens
  CDR3 for beta chain variable domain of TCR clone 102091 (TRBV4-2, TRBJ2-5)
CASSPGRLRNFQETQYF

SEQ ID NO: 204183 - protein, 18 aa, Homo sapiens
  CDR3 for alpha chain variable domain of TCR clone 102092 (TRAV29/DV5, TRAJ52)
CAAGFRGAGGTSYGKLTF

SEQ ID NO: 204184 - protein, 16 aa, Homo sapiens
  CDR3 for beta chain variable domain of TCR clone 102092 (TRBV7-3, TRBJ2-2)
CASSFKRGTLSGELFF

SEQ ID NO: 204185 - protein, 12 aa, Homo sapiens
  CDR3 for alpha chain variable domain of TCR clone 102093 (TRAV21, TRAJ33)
CAKMDSNDQLIW

SEQ ID NO: 204186 - protein, 15 aa, Homo sapiens
  CDR3 for beta chain variable domain of TCR clone 102093 (TRBV9, TRBJ1-6)
CASSVAGTGDSPLHF

SEQ ID NO: 204187 - protein, 11 aa, Homo sapiens
  CDR3 for alpha chain variable domain of TCR clone 102094 (TRAV2, TRAJ23)
CAVETRGKLIF

SEQ ID NO: 204188 - protein, 14 aa, Homo sapiens
  CDR3 for beta chain variable domain of TCR clone 102094 (TRBV2, TRBJ2-3)
CASSERQNTDTQYF

SEQ ID NO: 204189 - protein, 14 aa, Homo sapiens
  CDR3 for alpha chain variable domain of TCR clone 102095 (TRAV1-2, TRAJ8)
CAVRGDTGFQKLVF

SEQ ID NO: 204190 - protein, 14 aa, Homo sapiens
  CDR3 for beta chain variable domain of TCR clone 102095 (TRBV7-9, TRBJ1-1)
CASSLGGANTEAFF

SEQ ID NO: 204191 - protein, 14 aa, Homo sapiens
  CDR3 for alpha chain variable domain of TCR clone 102096 (TRAV17, TRAJ57)
CATYPQGGSEKLVF

SEQ ID NO: 204192 - protein, 18 aa, Homo sapiens
  CDR3 for beta chain variable domain of TCR clone 102096 (TRBV6-6, TRBJ1-3)
CASSYSKWDSISGNTIYF

SEQ ID NO: 204193 - protein, 15 aa, Homo sapiens
  CDR3 for alpha chain variable domain of TCR clone 102097 (TRAV12-1, TRAJ53)
CAVNGGGGSNYKLTF

SEQ ID NO: 204194 - protein, 12 aa, Homo sapiens
  CDR3 for beta chain variable domain of TCR clone 102097 (TRBV11-2, TRBJ2-1)
CASSPGNNEQFF

SEQ ID NO: 204195 - protein, 16 aa, Homo sapiens
  CDR3 for alpha chain variable domain of TCR clone 102098 (TRAV3, TRAJ37)
CAVRGKGSGNTGKLIF

SEQ ID NO: 204196 - protein, 13 aa, Homo sapiens
  CDR3 for beta chain variable domain of TCR clone 102098 (TRBV19, TRBJ1-2)
CASSQGQVYGYTF

SEQ ID NO: 204197 - protein, 15 aa, Homo sapiens
  CDR3 for alpha chain variable domain of TCR clone 102099 (TRAV3, TRAJ21)
CAVREPDFNKFTLDL

SEQ ID NO: 204198 - protein, 13 aa, Homo sapiens
  CDR3 for beta chain variable domain of TCR clone 102099 (TRBV9, TRBJ2-1)
CASSPSGGNEQFF

SEQ ID NO: 204199 - protein, 14 aa, Homo sapiens
  CDR3 for alpha chain variable domain of TCR clone 102100 (TRAV2, TRAJ9)
CAVDPNTGGFKTIF

SEQ ID NO: 204200 - protein, 13 aa, Homo sapiens
  CDR3 for beta chain variable domain of TCR clone 102100 (TRBV20-1, TRBJ2-1)
WSASTGTSNEQFF

SEQ ID NO: 204201 - protein, 18 aa, Homo sapiens
  CDR3 for alpha chain variable domain of TCR clone 102101 (TRAV21, TRAJ52)
CAVRPSPAGGTSYGKLTF

SEQ ID NO: 204202 - protein, 12 aa, Homo sapiens
  CDR3 for beta chain variable domain of TCR clone 102101 (TRBV19, TRBJ2-1)
CASSMQDTEQFF

SEQ ID NO: 204203 - protein, 15 aa, Homo sapiens
  CDR3 for alpha chain variable domain of TCR clone 102102 (TRAV26-2, TRAJ50)
CILRDEETSYDKVIF

SEQ ID NO: 204204 - protein, 15 aa, Homo sapiens
  CDR3 for beta chain variable domain of TCR clone 102102 (TRBV19, TRBJ1-2)
CASSVGQVLNYGYTF

SEQ ID NO: 204205 - protein, 14 aa, Homo sapiens
  CDR3 for alpha chain variable domain of TCR clone 102103 (TRAV12-2, TRAJ13)
CAVKKTGGYQKVTF

SEQ ID NO: 204206 - protein, 14 aa, Homo sapiens
  CDR3 for beta chain variable domain of TCR clone 102103 (TRBV19, TRBJ2-1)
CAGPTFVLSSEQFF

SEQ ID NO: 204207 - protein, 17 aa, Homo sapiens
  CDR3 for alpha chain variable domain of TCR clone 102104 (TRAV13-1, )
CAASIQNPDPAVYQLRD

SEQ ID NO: 204208 - protein, 14 aa, Homo sapiens
  CDR3 for beta chain variable domain of TCR clone 102104 (TRBV19, TRBJ2-7)
CASSIGPNSYEQYF

SEQ ID NO: 204209 - protein, 15 aa, Homo sapiens
  CDR3 for alpha chain variable domain of TCR clone 102105 (TRAV16, TRAJ4)
CALEDPSGGYNKLIF

SEQ ID NO: 204210 - protein, 16 aa, Homo sapiens
  CDR3 for beta chain variable domain of TCR clone 102105 (TRBV7-8, TRBJ2-5)
CASSLAEEGWQETQYF

SEQ ID NO: 204211 - protein, 13 aa, Homo sapiens
  CDR3 for alpha chain variable domain of TCR clone 102106 (TRAV3, TRAJ21)
CAVREPDFNKFYF

SEQ ID NO: 204212 - protein, 14 aa, Homo sapiens
  CDR3 for beta chain variable domain of TCR clone 102106 (TRBV20-1, TRBJ2-7)
CSAPELAGVGEQYF

SEQ ID NO: 204213 - protein, 13 aa, Homo sapiens
  CDR3 for alpha chain variable domain of TCR clone 102107 (TRAV8-6, TRAJ16)
CAVSSPDGQKLLF

SEQ ID NO: 204214 - protein, 13 aa, Homo sapiens
  CDR3 for beta chain variable domain of TCR clone 102107 (TRBV4-2, TRBJ1-1)
CASSQAGNTEAFF

SEQ ID NO: 204215 - protein, 12 aa, Homo sapiens
  CDR3 for alpha chain variable domain of TCR clone 102108 (TRAV12-3, TRAJ17)
CAMTLTGNKLTF

SEQ ID NO: 204216 - protein, 15 aa, Homo sapiens
  CDR3 for beta chain variable domain of TCR clone 102108 (TRBV5-8, TRBJ2-2)
CASSLDRGATGELFF

SEQ ID NO: 204217 - protein, 14 aa, Homo sapiens
  CDR3 for alpha chain variable domain of TCR clone 102109 (TRAV1-2, TRAJ16)
CAINRFSDGQKLLF

SEQ ID NO: 204218 - protein, 11 aa, Homo sapiens
  CDR3 for beta chain variable domain of TCR clone 102109 (TRBV11-2, TRBJ2-2)
CASSLPGELFF

SEQ ID NO: 204219 - protein, 13 aa, Homo sapiens
  CDR3 for alpha chain variable domain of TCR clone 102110 (TRAV12-3, TRAJ40)
CAMSDSGTYKYIF

SEQ ID NO: 204220 - protein, 11 aa, Homo sapiens
  CDR3 for beta chain variable domain of TCR clone 102110 (TRBV12-4, TRBJ2-3)
CASTATDTQYF

SEQ ID NO: 204221 - protein, 16 aa, Homo sapiens
  CDR3 for alpha chain variable domain of TCR clone 102111 (TRAV3, TRAJ18)
CAVRDGRGSTLGRLHF

SEQ ID NO: 204222 - protein, 15 aa, Homo sapiens
  CDR3 for beta chain variable domain of TCR clone 102111 (TRBV7-9, TRBJ1-6)
CASSSPGRGNSPLHF

SEQ ID NO: 204223 - protein, 11 aa, Homo sapiens
  CDR3 for alpha chain variable domain of TCR clone 102112 (TRAV1-2, TRAJ20)
CAVANDYKLGF

SEQ ID NO: 204224 - protein, 14 aa, Homo sapiens
  CDR3 for beta chain variable domain of TCR clone 102112 (TRBV7-9, TRBJ1-1)
CASTPLQSYTEAFF

SEQ ID NO: 204225 - protein, 12 aa, Homo sapiens
  CDR3 for alpha chain variable domain of TCR clone 102113 (TRAV1-1, TRAJ23)
CAVTNQGGKLIF

SEQ ID NO: 204226 - protein, 17 aa, Homo sapiens
  CDR3 for beta chain variable domain of TCR clone 102113 (TRBV4-1, TRBJ2-5)
CASSQDLTGGPIETQYF

SEQ ID NO: 204227 - protein, 16 aa, Homo sapiens
  CDR3 for alpha chain variable domain of TCR clone 102114 (TRAV12-3, TRAJ20)
CAMDKLSFGAGTTVTV

SEQ ID NO: 204228 - protein, 13 aa, Homo sapiens
  CDR3 for beta chain variable domain of TCR clone 102114 (TRBV19, TRBJ1-5)
CASSMRGYQPQHF

SEQ ID NO: 204229 - protein, 12 aa, Homo sapiens
  CDR3 for alpha chain variable domain of TCR clone 102115 (TRAV13-1, TRAJ21)
CAAREGFNKFYF

SEQ ID NO: 204230 - protein, 20 aa, Homo sapiens
  CDR3 for beta chain variable domain of TCR clone 102115 (TRBV28, TRBJ2-1)
CASTPIGRSPGLAGGNEQFF

SEQ ID NO: 204231 - protein, 15 aa, Homo sapiens
  CDR3 for alpha chain variable domain of TCR clone 102116 (TRAV1-2, TRAJ15)
CAVDVMGSAGTALIF

SEQ ID NO: 204232 - protein, 12 aa, Homo sapiens
  CDR3 for beta chain variable domain of TCR clone 102116 (TRBV7-8, TRBJ2-7)
CASSLGDREQYF

SEQ ID NO: 204233 - protein, 13 aa, Homo sapiens
  CDR3 for alpha chain variable domain of TCR clone 102117 (TRAV2, TRAJ21)
CAVEDLNFNKFYF

SEQ ID NO: 204234 - protein, 15 aa, Homo sapiens
  CDR3 for beta chain variable domain of TCR clone 102117 (TRBV28, TRBJ2-5)
CASSPGQGSIDTQYF

SEQ ID NO: 204235 - protein, 14 aa, Homo sapiens
  CDR3 for alpha chain variable domain of TCR clone 102118 (TRAV1-2, TRAJ8)
CAVREDTGFQKLVS

SEQ ID NO: 204236 - protein, 15 aa, Homo sapiens
  CDR3 for beta chain variable domain of TCR clone 102118 (TRBV10-2, TRBJ2-6)
CASSEQGTGANVLTF

SEQ ID NO: 204237 - protein, 14 aa, Homo sapiens
  CDR3 for alpha chain variable domain of TCR clone 102119 (TRAV12-2, TRAJ40)
CAVKIPSGTYKYIF

SEQ ID NO: 204238 - protein, 13 aa, Homo sapiens
  CDR3 for beta chain variable domain of TCR clone 102119 (TRBV7-9, TRBJ1-2)
CTSSLKQNYGYTF

SEQ ID NO: 204239 - protein, 14 aa, Homo sapiens
  CDR3 for alpha chain variable domain of TCR clone 102120 (TRAV17, TRAJ54)
CATDANQGAQKLVF

SEQ ID NO: 204240 - protein, 12 aa, Homo sapiens
  CDR3 for beta chain variable domain of TCR clone 102120 (TRBV6-3, TRBJ2-1)
CASSGPYNEQFF

SEQ ID NO: 204241 - protein, 13 aa, Homo sapiens
  CDR3 for alpha chain variable domain of TCR clone 102121 (TRAV3, TRAJ20)
CREAFCNDYKLSF

SEQ ID NO: 204242 - protein, 15 aa, Homo sapiens
  CDR3 for beta chain variable domain of TCR clone 102121 (TRBV6-5, TRBJ2-1)
CASSYDAGAGNEQFF

SEQ ID NO: 204243 - protein, 16 aa, Homo sapiens
  CDR3 for alpha chain variable domain of TCR clone 102122 (TRAV12-1, TRAJ28)
CVVIAYSGAGSYQLTF

SEQ ID NO: 204244 - protein, 15 aa, Homo sapiens
  CDR3 for beta chain variable domain of TCR clone 102122 (TRBV14, TRBJ1-1)
CASSQEGMGFTQAFF

SEQ ID NO: 204245 - protein, 15 aa, Homo sapiens
  CDR3 for alpha chain variable domain of TCR clone 102123 (TRAV8-4, TRAJ10)
CAVSDQMGGGNKLTF

SEQ ID NO: 204246 - protein, 16 aa, Homo sapiens
  CDR3 for beta chain variable domain of TCR clone 102123 (TRBV20-1, TRBJ2-1)
CSARCVTPPPYNEQFF

SEQ ID NO: 204247 - protein, 16 aa, Homo sapiens
  CDR3 for alpha chain variable domain of TCR clone 102124 (TRAV26-1, TRAJ37)
CIVRGDGSSNTGKLIF

SEQ ID NO: 204248 - protein, 17 aa, Homo sapiens
  CDR3 for beta chain variable domain of TCR clone 102124 (TRBV4-1, TRBJ2-7)
CASSRDPLGVRGGEQYF

SEQ ID NO: 204249 - protein, 14 aa, Homo sapiens
  CDR3 for alpha chain variable domain of TCR clone 102125 (TRAV1-2, TRAJ8)
CAVREDTGFQKLVF

SEQ ID NO: 204250 - protein, 14 aa, Homo sapiens
  CDR3 for beta chain variable domain of TCR clone 102125 (TRBV2, TRBJ2-1)
CASSDRAYYNEQFF

SEQ ID NO: 204251 - protein, 15 aa, Homo sapiens
  CDR3 for alpha chain variable domain of TCR clone 102126 (TRAV26-1, TRAJ29)
CIVRVKGSGDTPLVF

SEQ ID NO: 204252 - protein, 15 aa, Homo sapiens
  CDR3 for beta chain variable domain of TCR clone 102126 (TRBV7-9, TRBJ1-5)
CASSQGHQPNQPQHF

SEQ ID NO: 204253 - protein, 14 aa, Homo sapiens
  CDR3 for alpha chain variable domain of TCR clone 102127 (TRAV13-1, TRAJ40)
CAASMTSGTYKYNF

SEQ ID NO: 204254 - protein, 13 aa, Homo sapiens
  CDR3 for beta chain variable domain of TCR clone 102127 (TRBV4-1, TRBJ2-5)
CASSQEVQETQYF

SEQ ID NO: 204255 - protein, 14 aa, Homo sapiens
  CDR3 for alpha chain variable domain of TCR clone 102128 (TRAV8-4, TRAJ17)
CAVSEGAAGNKLTF

SEQ ID NO: 204256 - protein, 13 aa, Homo sapiens
  CDR3 for beta chain variable domain of TCR clone 102128 (TRBV19, TRBJ2-1)
RASSMYRVNEQFF

SEQ ID NO: 204257 - protein, 17 aa, Homo sapiens
  CDR3 for alpha chain variable domain of TCR clone 102129 (TRAV27, TRAJ18)
CAGLHSGRGSTLGRLYF

SEQ ID NO: 204258 - protein, 14 aa, Homo sapiens
  CDR3 for beta chain variable domain of TCR clone 102129 (TRBV20-1, TRBJ1-5)
CSARGRGSNQPQHF

SEQ ID NO: 204259 - protein, 14 aa, Homo sapiens
  CDR3 for alpha chain variable domain of TCR clone 102130 (TRAV12-3, TRAJ10)
SHLPLTRGGNKLTF

SEQ ID NO: 204260 - protein, 12 aa, Homo sapiens
  CDR3 for beta chain variable domain of TCR clone 102130 (TRBV7-9, TRBJ2-7)
CATRTDAYEQYF

SEQ ID NO: 204261 - protein, 12 aa, Homo sapiens
  CDR3 for alpha chain variable domain of TCR clone 102131 (TRAV12-2, TRAJ9)
CAVDNGGFKTIF

SEQ ID NO: 204262 - protein, 14 aa, Homo sapiens
  CDR3 for beta chain variable domain of TCR clone 102131 (TRBV6-1, TRBJ1-5)
CASSETGMEQPQHF

SEQ ID NO: 204263 - protein, 15 aa, Homo sapiens
  CDR3 for alpha chain variable domain of TCR clone 102132 (TRAV12-1, TRAJ44)
CVVDTPQGTASKLTF

SEQ ID NO: 204264 - protein, 13 aa, Homo sapiens
  CDR3 for beta chain variable domain of TCR clone 102132 (TRBV25-1, TRBJ2-1)
CASSSGSYNEQFF

SEQ ID NO: 204265 - protein, 17 aa, Homo sapiens
  CDR3 for alpha chain variable domain of TCR clone 102133 (TRAV38-2/DV8, TRAJ23)
CALSRKLIFGQGTELAV

SEQ ID NO: 204266 - protein, 17 aa, Homo sapiens
  CDR3 for beta chain variable domain of TCR clone 102133 (TRBV5-4, TRBJ2-1)
CASSSAGGRGPYNEQFF

SEQ ID NO: 204267 - protein, 14 aa, Homo sapiens
  CDR3 for alpha chain variable domain of TCR clone 102134 (TRAV38-1, TRAJ29)
CAFITPSGNTPLVF

SEQ ID NO: 204268 - protein, 14 aa, Homo sapiens
  CDR3 for beta chain variable domain of TCR clone 102134 (TRBV18, TRBJ2-7)
CASSLRGGAYEQYF

SEQ ID NO: 204269 - protein, 16 aa, Homo sapiens
  CDR3 for alpha chain variable domain of TCR clone 102135 (TRAV22, TRAJ45)
CAVVRGKRGGADGLTF

SEQ ID NO: 204270 - protein, 11 aa, Homo sapiens
  CDR3 for beta chain variable domain of TCR clone 102135 (TRBV29-1, TRBJ2-5)
CSEDRTGTQYF

SEQ ID NO: 204271 - protein, 12 aa, Homo sapiens
  CDR3 for alpha chain variable domain of TCR clone 102136 (TRAV12-3, TRAJ17)
CAMTLTGNKLTF

SEQ ID NO: 204272 - protein, 13 aa, Homo sapiens
  CDR3 for beta chain variable domain of TCR clone 102136 (TRBV7-9, TRBJ2-2)
CASSLDPTGELFF

SEQ ID NO: 204273 - protein, 16 aa, Homo sapiens
  CDR3 for alpha chain variable domain of TCR clone 102137 (TRAV13-1, TRAJ18)
CAASRMRGSTLGRLHF

SEQ ID NO: 204274 - protein, 16 aa, Homo sapiens
  CDR3 for beta chain variable domain of TCR clone 102137 (TRBV27, TRBJ1-1)
CASSSRGRTGYTEAFF

SEQ ID NO: 204275 - protein, 14 aa, Homo sapiens
  CDR3 for alpha chain variable domain of TCR clone 102138 (TRAV30, TRAJ33)
CGTVAPRSNYQLIW

SEQ ID NO: 204276 - protein, 12 aa, Homo sapiens
  CDR3 for beta chain variable domain of TCR clone 102138 (TRBV24-1, TRBJ1-1)
CATLYPDTEAFF

SEQ ID NO: 204277 - protein, 14 aa, Homo sapiens
  CDR3 for alpha chain variable domain of TCR clone 102139 (TRAV12-1, TRAJ17)
CVVNYKAAGNKRTF

SEQ ID NO: 204278 - protein, 16 aa, Homo sapiens
  CDR3 for beta chain variable domain of TCR clone 102139 (TRBV12-4, TRBJ1-5)
CASSRPVGGSNQPQHF

SEQ ID NO: 204279 - protein, 11 aa, Homo sapiens
  CDR3 for alpha chain variable domain of TCR clone 102140 (TRAV21, TRAJ48)
CAVDGNEKLTF

SEQ ID NO: 204280 - protein, 16 aa, Homo sapiens
  CDR3 for beta chain variable domain of TCR clone 102140 (TRBV12-4, TRBJ1-5)
CASSSGPRGSNQPQHC

SEQ ID NO: 204281 - protein, 13 aa, Homo sapiens
  CDR3 for alpha chain variable domain of TCR clone 102141 (TRAV35, TRAJ36)
CAGPRIGANNLFF

SEQ ID NO: 204282 - protein, 15 aa, Homo sapiens
  CDR3 for beta chain variable domain of TCR clone 102141 (TRBV28, TRBJ2-5)
CASSAPWSYQETQYF

SEQ ID NO: 204283 - protein, 23 aa, Homo sapiens
  CDR3 for alpha chain variable domain of TCR clone 102142 (TRAV12-1, TRAJ20)
CSSETPSSVIQPPTSAENYKLSS

SEQ ID NO: 204284 - protein, 13 aa, Homo sapiens
  CDR3 for beta chain variable domain of TCR clone 102142 (TRBV10-3, TRBJ2-7)
CASKLAVNYEQYF

SEQ ID NO: 204285 - protein, 11 aa, Homo sapiens
  CDR3 for alpha chain variable domain of TCR clone 102143 (TRAV14/DV4, )
CAMREISRTLT

SEQ ID NO: 204286 - protein, 14 aa, Homo sapiens
  CDR3 for beta chain variable domain of TCR clone 102143 (TRBV2, TRBJ2-1)
CASSDRTYYNEQFF

SEQ ID NO: 204287 - protein, 14 aa, Homo sapiens
  CDR3 for alpha chain variable domain of TCR clone 102144 (TRAV12-3, TRAJ10)
SHLPLTGGGNKLTF

SEQ ID NO: 204288 - protein, 15 aa, Homo sapiens
  CDR3 for beta chain variable domain of TCR clone 102144 (TRBV27, TRBJ1-5)
CASSLGTGFDQPQNF

SEQ ID NO: 204289 - protein, 12 aa, Homo sapiens
  CDR3 for alpha chain variable domain of TCR clone 102145 (TRAV12-2, TRAJ10)
WGVTGGGNKLTF

SEQ ID NO: 204290 - protein, 16 aa, Homo sapiens
  CDR3 for beta chain variable domain of TCR clone 102145 (TRBV7-9, TRBJ2-1)
CASSDVAGGSYNEQFF

SEQ ID NO: 204291 - protein, 12 aa, Homo sapiens
  CDR3 for alpha chain variable domain of TCR clone 102146 (TRAV38-1, TRAJ20)
CAFIWNNYKLSF

SEQ ID NO: 204292 - protein, 14 aa, Homo sapiens
  CDR3 for beta chain variable domain of TCR clone 102146 (TRBV19, TRBJ2-1)
CASSMGSGATEQFF

SEQ ID NO: 204293 - protein, 14 aa, Homo sapiens
  CDR3 for alpha chain variable domain of TCR clone 102147 (TRAV8-4, TRAJ4)
CAVSPSGGYNKLIF

SEQ ID NO: 204294 - protein, 15 aa, Homo sapiens
  CDR3 for beta chain variable domain of TCR clone 102147 (TRBV7-8, TRBJ2-3)
CASSLSADSGGAQCF

SEQ ID NO: 204295 - protein, 13 aa, Homo sapiens
  CDR3 for alpha chain variable domain of TCR clone 102148 (TRAV2, TRAJ15)
CAVASQAGTALIF

SEQ ID NO: 204296 - protein, 16 aa, Homo sapiens
  CDR3 for beta chain variable domain of TCR clone 102148 (TRBV5-1, TRBJ1-1)
YASSSGGNSLNTEAFF

SEQ ID NO: 204297 - protein, 16 aa, Homo sapiens
  CDR3 for alpha chain variable domain of TCR clone 102149 (TRAV30, TRAJ24)
CGTEIVDADSWGKFQF

SEQ ID NO: 204298 - protein, 15 aa, Homo sapiens
  CDR3 for beta chain variable domain of TCR clone 102149 (TRBV28, TRBJ2-1)
CASRTGAGVIARQFF

SEQ ID NO: 204299 - protein, 10 aa, Homo sapiens
  CDR3 for alpha chain variable domain of TCR clone 102150 (TRAV13-1, TRAJ27)
CAPLARQINL

SEQ ID NO: 204300 - protein, 13 aa, Homo sapiens
  CDR3 for beta chain variable domain of TCR clone 102150 (TRBV28, TRBJ1-1)
CASSKQGWTEAVF

SEQ ID NO: 204301 - protein, 15 aa, Homo sapiens
  CDR3 for alpha chain variable domain of TCR clone 102151 (TRAV3, TRAJ29)
CAVSEDFRGNTPLVF

SEQ ID NO: 204302 - protein, 12 aa, Homo sapiens
  CDR3 for beta chain variable domain of TCR clone 102151 (TRBV14, TRBJ2-7)
CASSSLKGEQYF

SEQ ID NO: 204303 - protein, 18 aa, Homo sapiens
  CDR3 for alpha chain variable domain of TCR clone 102152 (TRAV12-3, TRAJ52)
CAMSVGGAGGTSYGKLTF

SEQ ID NO: 204304 - protein, 15 aa, Homo sapiens
  CDR3 for beta chain variable domain of TCR clone 102152 (TRBV27, TRBJ1-6)
CASSFDRGLGSTLHL

SEQ ID NO: 204305 - protein, 14 aa, Homo sapiens
  CDR3 for alpha chain variable domain of TCR clone 102153 (TRAV16, TRAJ44)
CALSTTGTASKLTF

SEQ ID NO: 204306 - protein, 15 aa, Homo sapiens
  CDR3 for beta chain variable domain of TCR clone 102153 (TRBV20-1, TRBJ2-7)
CSARVPAAYFYEQYF

SEQ ID NO: 204307 - protein, 12 aa, Homo sapiens
  CDR3 for alpha chain variable domain of TCR clone 102154 (TRAV16, TRAJ10)
CSRTGGGNKLTF

SEQ ID NO: 204308 - protein, 13 aa, Homo sapiens
  CDR3 for beta chain variable domain of TCR clone 102154 (TRBV7-3, TRBJ1-1)
CASSQDWGAEAFS

SEQ ID NO: 204309 - protein, 13 aa, Homo sapiens
  CDR3 for alpha chain variable domain of TCR clone 102155 (TRAV3, TRAJ29)
CALRDIIDTPLVF

SEQ ID NO: 204310 - protein, 14 aa, Homo sapiens
  CDR3 for beta chain variable domain of TCR clone 102155 (TRBV27, TRBJ2-1)
CASSATGGYNEQFF

SEQ ID NO: 204311 - protein, 16 aa, Homo sapiens
  CDR3 for alpha chain variable domain of TCR clone 102156 (TRAV3, TRAJ37)
CAVRGEGSGNTGKLIF

SEQ ID NO: 204312 - protein, 15 aa, Homo sapiens
  CDR3 for beta chain variable domain of TCR clone 102156 (TRBV7-9, TRBJ2-2)
CASGPLDTFPGELFF

SEQ ID NO: 204313 - protein, 13 aa, Homo sapiens
  CDR3 for alpha chain variable domain of TCR clone 102157 (TRAV2, TRAJ40)
CAVVTSGTFKYIF

SEQ ID NO: 204314 - protein, 15 aa, Homo sapiens
  CDR3 for beta chain variable domain of TCR clone 102157 (TRBV11-3, TRBJ2-3)
CASLKDGREGDTQYF

SEQ ID NO: 204315 - protein, 16 aa, Homo sapiens
  CDR3 for alpha chain variable domain of TCR clone 102158 (TRAV8-3, TRAJ8)
SAVPRDGNTGFQKLVF

SEQ ID NO: 204316 - protein, 14 aa, Homo sapiens
  CDR3 for beta chain variable domain of TCR clone 102158 (TRBV4-1, TRBJ2-2)
CASSQAVNTGELFF

SEQ ID NO: 204317 - protein, 15 aa, Homo sapiens
  CDR3 for alpha chain variable domain of TCR clone 102159 (TRAV34, TRAJ38)
CGADFTPGNNRKLIW

SEQ ID NO: 204318 - protein, 14 aa, Homo sapiens
  CDR3 for beta chain variable domain of TCR clone 102159 (TRBV18, TRBJ2-5)
CASSPGVSQETQYF

SEQ ID NO: 204319 - protein, 15 aa, Homo sapiens
  CDR3 for alpha chain variable domain of TCR clone 102160 (TRAV20, TRAJ50)
CAVRQMKTSYDKVIF

SEQ ID NO: 204320 - protein, 16 aa, Homo sapiens
  CDR3 for beta chain variable domain of TCR clone 102160 (TRBV12-5, TRBJ2-5)
CASGPRTSGNQETQYF

SEQ ID NO: 204321 - protein, 15 aa, Homo sapiens
  CDR3 for alpha chain variable domain of TCR clone 102161 (TRAV21, TRAJ37)
CAVRPTLSNTGKLIF

SEQ ID NO: 204322 - protein, 16 aa, Homo sapiens
  CDR3 for beta chain variable domain of TCR clone 102161 (TRBV24-1, TRBJ2-3)
CATSDRRQDLKDTQYF

SEQ ID NO: 204323 - protein, 11 aa, Homo sapiens
  CDR3 for alpha chain variable domain of TCR clone 102162 (TRAV2, TRAJ23)
CAVKPEESLSS

SEQ ID NO: 204324 - protein, 14 aa, Homo sapiens
  CDR3 for beta chain variable domain of TCR clone 102162 (TRBV2, TRBJ2-3)
CASSEGQNTDTQYF

SEQ ID NO: 204325 - protein, 16 aa, Homo sapiens
  CDR3 for alpha chain variable domain of TCR clone 102163 (TRAV1-2, TRAJ16)
CAVNRFQMARSCSLQG

SEQ ID NO: 204326 - protein, 16 aa, Homo sapiens
  CDR3 for beta chain variable domain of TCR clone 102163 (TRBV4-3, TRBJ2-1)
CASSPALDRGVNEQFF

SEQ ID NO: 204327 - protein, 15 aa, Homo sapiens
  CDR3 for alpha chain variable domain of TCR clone 102164 (TRAV16, TRAJ17)
CALSGNKAAGNKLTF

SEQ ID NO: 204328 - protein, 16 aa, Homo sapiens
  CDR3 for beta chain variable domain of TCR clone 102164 (TRBV7-6, TRBJ1-6)
CASSSLPAGEYSPLYF

SEQ ID NO: 204329 - protein, 14 aa, Homo sapiens
  CDR3 for alpha chain variable domain of TCR clone 102165 (TRAV12-3, TRAJ6)
CAMSATGGSYIPTL

SEQ ID NO: 204330 - protein, 16 aa, Homo sapiens
  CDR3 for beta chain variable domain of TCR clone 102165 (TRBV4-2, TRBJ2-1)
CASSPRAGQGANEQFF

SEQ ID NO: 204331 - protein, 14 aa, Homo sapiens
  CDR3 for alpha chain variable domain of TCR clone 102166 (TRAV17, TRAJ57)
CATDPQGGSEKLVF

SEQ ID NO: 204332 - protein, 17 aa, Homo sapiens
  CDR3 for beta chain variable domain of TCR clone 102166 (TRBV5-1, TRBJ2-2)
CASSLAGLGGGTGELFF

SEQ ID NO: 204333 - protein, 11 aa, Homo sapiens
  CDR3 for alpha chain variable domain of TCR clone 102167 (TRAV35, TRAJ30)
CAGERDDKVIF

SEQ ID NO: 204334 - protein, 14 aa, Homo sapiens
  CDR3 for beta chain variable domain of TCR clone 102167 (TRBV15, TRBJ2-5)
CATSGDRGQETQYF

SEQ ID NO: 204335 - protein, 14 aa, Homo sapiens
  CDR3 for alpha chain variable domain of TCR clone 102168 (TRAV1-2, TRAJ8)
CAVREDTGFQKLVF

SEQ ID NO: 204336 - protein, 16 aa, Homo sapiens
  CDR3 for beta chain variable domain of TCR clone 102168 (TRBV19, TRBJ2-1)
CASSKAGPSSYNVQFF

SEQ ID NO: 204337 - protein, 12 aa, Homo sapiens
  CDR3 for alpha chain variable domain of TCR clone 102169 (TRAV16, TRAJ22)
CALEVSATQLTF

SEQ ID NO: 204338 - protein, 14 aa, Homo sapiens
  CDR3 for beta chain variable domain of TCR clone 102169 (TRBV11-2, TRBJ2-3)
CASSSIASTDTQYF

SEQ ID NO: 204339 - protein, 14 aa, Homo sapiens
  CDR3 for alpha chain variable domain of TCR clone 102170 (TRAV1-2, TRAJ16)
CAVNRFSDGQKLLF

SEQ ID NO: 204340 - protein, 18 aa, Homo sapiens
  CDR3 for beta chain variable domain of TCR clone 102170 (TRBV20-1, TRBJ2-6)
CSAETTPTHGSGANVLSF

SEQ ID NO: 204341 - protein, 14 aa, Homo sapiens
  CDR3 for alpha chain variable domain of TCR clone 102171 (TRAV12-3, TRAJ10)
SHLPLTGGGNKFTF

SEQ ID NO: 204342 - protein, 14 aa, Homo sapiens
  CDR3 for beta chain variable domain of TCR clone 102171 (TRBV6-1, TRBJ1-3)
CASVQGGGGNTIYF

SEQ ID NO: 204343 - protein, 14 aa, Homo sapiens
  CDR3 for alpha chain variable domain of TCR clone 102172 (TRAV17, TRAJ35)
CATDRPGFGSVLHC

SEQ ID NO: 204344 - protein, 19 aa, Homo sapiens
  CDR3 for beta chain variable domain of TCR clone 102172 (TRBV11-3, TRBJ2-2)
RASSTRPGAKTTNTGELFF

SEQ ID NO: 204345 - protein, 14 aa, Homo sapiens
  CDR3 for alpha chain variable domain of TCR clone 102173 (TRAV8-2, TRAJ11)
CVVSEQSGYSTLTF

SEQ ID NO: 204346 - protein, 16 aa, Homo sapiens
  CDR3 for beta chain variable domain of TCR clone 102173 (TRBV28, TRBJ2-1)
CASSSPEYPRDNEQFF

SEQ ID NO: 204347 - protein, 15 aa, Homo sapiens
  CDR3 for alpha chain variable domain of TCR clone 102174 (TRAV3, TRAJ5)
CAVRDLDTGRRALTF

SEQ ID NO: 204348 - protein, 15 aa, Homo sapiens
  CDR3 for beta chain variable domain of TCR clone 102174 (TRBV6-3, TRBJ2-7)
CASSSPGTVFYEKYF

SEQ ID NO: 204349 - protein, 14 aa, Homo sapiens
  CDR3 for alpha chain variable domain of TCR clone 102175 (TRAV23/DV6, TRAJ17)
CAASIGAAGNKLTF

SEQ ID NO: 204350 - protein, 15 aa, Homo sapiens
  CDR3 for beta chain variable domain of TCR clone 102175 (TRBV7-9, TRBJ1-6)
CASSSPGRGNSPLHF

SEQ ID NO: 204351 - protein, 18 aa, Homo sapiens
  CDR3 for alpha chain variable domain of TCR clone 102176 (TRAV26-1, TRAJ22)
CIVRVALISSGSARQLTF

SEQ ID NO: 204352 - protein, 15 aa, Homo sapiens
  CDR3 for beta chain variable domain of TCR clone 102176 (TRBV7-6, TRBJ1-5)
CASSQSSGINQPQHF

SEQ ID NO: 204353 - protein, 14 aa, Homo sapiens
  CDR3 for alpha chain variable domain of TCR clone 102177 (TRAV17, TRAJ37)
CATDGSSNTGKLIF

SEQ ID NO: 204354 - protein, 11 aa, Homo sapiens
  CDR3 for beta chain variable domain of TCR clone 102177 (TRBV29-1, TRBJ2-5)
CSEDRTGTQYF

SEQ ID NO: 204355 - protein, 14 aa, Homo sapiens
  CDR3 for alpha chain variable domain of TCR clone 102178 (TRAV1-2, TRAJ16)
RAVRSASDGQKLLF

SEQ ID NO: 204356 - protein, 13 aa, Homo sapiens
  CDR3 for beta chain variable domain of TCR clone 102178 (TRBV6-3, TRBJ1-4)
CASSPGPGEKLFF

SEQ ID NO: 204357 - protein, 15 aa, Homo sapiens
  CDR3 for alpha chain variable domain of TCR clone 102179 (TRAV12-3, TRAJ27)
GAMRAYNTNAGKSTF

SEQ ID NO: 204358 - protein, 13 aa, Homo sapiens
  CDR3 for beta chain variable domain of TCR clone 102179 (TRBV11-2, TRBJ2-5)
CASSRGPSETQYF

SEQ ID NO: 204359 - protein, 14 aa, Homo sapiens
  CDR3 for alpha chain variable domain of TCR clone 102180 (TRAV35, TRAJ33)
CAGSSQDSNYKLIW

SEQ ID NO: 204360 - protein, 15 aa, Homo sapiens
  CDR3 for beta chain variable domain of TCR clone 102180 (TRBV29-1, TRBJ2-7)
CSVEFFDRGSYEQYF

SEQ ID NO: 204361 - protein, 18 aa, Homo sapiens
  CDR3 for alpha chain variable domain of TCR clone 102181 (TRAV9-2, TRAJ52)
CALSRHNAGDTSYGKLTF

SEQ ID NO: 204362 - protein, 13 aa, Homo sapiens
  CDR3 for beta chain variable domain of TCR clone 102181 (TRBV7-9, TRBJ1-2)
CASSLKQNYGYTF

SEQ ID NO: 204363 - protein, 13 aa, Homo sapiens
  CDR3 for alpha chain variable domain of TCR clone 102182 (TRAV8-4, TRAJ10)
CAAFTGGGHKLTF

SEQ ID NO: 204364 - protein, 15 aa, Homo sapiens
  CDR3 for beta chain variable domain of TCR clone 102182 (TRBV2, TRBJ2-3)
CASSDFEKATDTQYF

SEQ ID NO: 204365 - protein, 16 aa, Homo sapiens
  CDR3 for alpha chain variable domain of TCR clone 102183 (TRAV4, TRAJ18)
CCVLLIGGSTLGRLYF

SEQ ID NO: 204366 - protein, 18 aa, Homo sapiens
  CDR3 for beta chain variable domain of TCR clone 102183 (TRBV11-2, TRBJ2-3)
CASSLGGASRGAPNTQYF

SEQ ID NO: 204367 - protein, 14 aa, Homo sapiens
  CDR3 for alpha chain variable domain of TCR clone 102184 (TRAV25, TRAJ52)
CRRPGGTSYGKLTF

SEQ ID NO: 204368 - protein, 17 aa, Homo sapiens
  CDR3 for beta chain variable domain of TCR clone 102184 (TRBV7-8, TRBJ2-6)
CASSAGTGGAGANVLTF

SEQ ID NO: 204369 - protein, 13 aa, Homo sapiens
  CDR3 for alpha chain variable domain of TCR clone 102185 (TRAV20, TRAJ49)
CAVQARTVNQFYF

SEQ ID NO: 204370 - protein, 14 aa, Homo sapiens
  CDR3 for beta chain variable domain of TCR clone 102185 (TRBV5-1, TRBJ1-1)
CASSLQGASTEAFF

SEQ ID NO: 204371 - protein, 17 aa, Homo sapiens
  CDR3 for alpha chain variable domain of TCR clone 102186 (TRAV3, TRAJ6)
CAVRDGPRAGGSYIPTF

SEQ ID NO: 204372 - protein, 13 aa, Homo sapiens
  CDR3 for beta chain variable domain of TCR clone 102186 (TRBV27, TRBJ2-1)
CAGRTLGVGEQFF

SEQ ID NO: 204373 - protein, 14 aa, Homo sapiens
  CDR3 for alpha chain variable domain of TCR clone 102187 (TRAV13-2, TRAJ17)
CAGNSKAAGNKLTF

SEQ ID NO: 204374 - protein, 11 aa, Homo sapiens
  CDR3 for beta chain variable domain of TCR clone 102187 (TRBV6-3, TRBJ2-3)
CATGQADTQYF

SEQ ID NO: 204375 - protein, 15 aa, Homo sapiens
  CDR3 for alpha chain variable domain of TCR clone 102188 (TRAV12-2, TRAJ8)
CAVREENTGFQKLVL

SEQ ID NO: 204376 - protein, 15 aa, Homo sapiens
  CDR3 for beta chain variable domain of TCR clone 102188 (TRBV28, TRBJ2-4)
CAAGSGTLLMGIQYF

SEQ ID NO: 204377 - protein, 12 aa, Homo sapiens
  CDR3 for alpha chain variable domain of TCR clone 102189 (TRAV21, TRAJ33)
CAKMDSNYQLIW

SEQ ID NO: 204378 - protein, 14 aa, Homo sapiens
  CDR3 for beta chain variable domain of TCR clone 102189 (TRBV11-1, TRBJ2-7)
CASSWTGTAYEQYF

SEQ ID NO: 204379 - protein, 12 aa, Homo sapiens
  CDR3 for alpha chain variable domain of TCR clone 102190 (TRAV8-3, TRAJ40)
CAVTSGTYKYIF

SEQ ID NO: 204380 - protein, 14 aa, Homo sapiens
  CDR3 for beta chain variable domain of TCR clone 102190 (TRBV12-4, TRBJ2-3)
CASSGQGSTDTQCF

SEQ ID NO: 204381 - protein, 18 aa, Homo sapiens
  CDR3 for alpha chain variable domain of TCR clone 102191 (TRAV26-2, TRAJ54)
CILRDVEVGIQGAQNLVF

SEQ ID NO: 204382 - protein, 17 aa, Homo sapiens
  CDR3 for beta chain variable domain of TCR clone 102191 (TRBV20-1, TRBJ1-5)
CSASLSPGQGGNQPQHF

SEQ ID NO: 204383 - protein, 14 aa, Homo sapiens
  CDR3 for alpha chain variable domain of TCR clone 102192 (TRAV1-2, TRAJ16)
CAVNRFSDGQKLLF

SEQ ID NO: 204384 - protein, 14 aa, Homo sapiens
  CDR3 for beta chain variable domain of TCR clone 102192 (TRBV7-9, TRBJ2-3)
CASSLEDCTDTQYF

SEQ ID NO: 204385 - protein, 15 aa, Homo sapiens
  CDR3 for alpha chain variable domain of TCR clone 102193 (TRAV8-1, TRAJ42)
CAVRSYGGSQGNLIF

SEQ ID NO: 204386 - protein, 17 aa, Homo sapiens
  CDR3 for beta chain variable domain of TCR clone 102193 (TRBV7-8, TRBJ2-6)
CASSAGTGGAGANVLTF

SEQ ID NO: 204387 - protein, 13 aa, Homo sapiens
  CDR3 for alpha chain variable domain of TCR clone 102194 (TRAV35, TRAJ45)
CAGREGGADGLTF

SEQ ID NO: 204388 - protein, 16 aa, Homo sapiens
  CDR3 for beta chain variable domain of TCR clone 102194 (TRBV20-1, TRBJ2-2)
CSASASGIPGAGELFF

SEQ ID NO: 204389 - protein, 17 aa, Homo sapiens
  CDR3 for alpha chain variable domain of TCR clone 102195 (TRAV26-1, TRAJ47)
CIVPSLLYMEHGNKLVF

SEQ ID NO: 204390 - protein, 14 aa, Homo sapiens
  CDR3 for beta chain variable domain of TCR clone 102195 (TRBV7-3, TRBJ1-5)
RASSFSGCNQPQHF

SEQ ID NO: 204391 - protein, 17 aa, Homo sapiens
  CDR3 for alpha chain variable domain of TCR clone 102196 (TRAV13-1, TRAJ28)
CAASPPYSGAGSYQLTF

SEQ ID NO: 204392 - protein, 14 aa, Homo sapiens
  CDR3 for beta chain variable domain of TCR clone 102196 (TRBV7-3, TRBJ2-1)
CASSLAGGTNEQFF

SEQ ID NO: 204393 - protein, 11 aa, Homo sapiens
  CDR3 for alpha chain variable domain of TCR clone 102197 (TRAV12-1, TRAJ34)
CVVNKGRERIF

SEQ ID NO: 204394 - protein, 12 aa, Homo sapiens
  CDR3 for beta chain variable domain of TCR clone 102197 (TRBV2, TRBJ2-1)
CAYGPPGNEQFF

SEQ ID NO: 204395 - protein, 14 aa, Homo sapiens
  CDR3 for alpha chain variable domain of TCR clone 102198 (TRAV2, TRAJ37)
CAVDFTSNTGKLIF

SEQ ID NO: 204396 - protein, 14 aa, Homo sapiens
  CDR3 for beta chain variable domain of TCR clone 102198 (TRBV15, TRBJ2-5)
CATSIGGLGETQYF

SEQ ID NO: 204397 - protein, 13 aa, Homo sapiens
  CDR3 for alpha chain variable domain of TCR clone 102199 (TRAV30, TRAJ24)
CGTVTDSWGKLQF

SEQ ID NO: 204398 - protein, 13 aa, Homo sapiens
  CDR3 for beta chain variable domain of TCR clone 102199 (TRBV10-2, TRBJ1-1)
CASNDQMNTEAFF

SEQ ID NO: 204399 - protein, 12 aa, Homo sapiens
  CDR3 for alpha chain variable domain of TCR clone 102200 (TRAV3, TRAJ7)
CADLLWEQQTRF

SEQ ID NO: 204400 - protein, 13 aa, Homo sapiens
  CDR3 for beta chain variable domain of TCR clone 102200 (TRBV4-1, TRBJ2-3)
CASSLDFTDTQYF

SEQ ID NO: 204401 - protein, 14 aa, Homo sapiens
  CDR3 for alpha chain variable domain of TCR clone 102201 (TRAV1-2, TRAJ8)
CAVREDTGFQKLVF

SEQ ID NO: 204402 - protein, 16 aa, Homo sapiens
  CDR3 for beta chain variable domain of TCR clone 102201 (TRBV5-1, TRBJ2-5)
CASSRSGLAGGETQYF

SEQ ID NO: 204403 - protein, 14 aa, Homo sapiens
  CDR3 for alpha chain variable domain of TCR clone 102202 (TRAV27, TRAJ23)
CAGLSYNQGGKLIS

SEQ ID NO: 204404 - protein, 15 aa, Homo sapiens
  CDR3 for beta chain variable domain of TCR clone 102202 (TRBV19, TRBJ2-2)
CASSLNRGVTGELFF

SEQ ID NO: 204405 - protein, 14 aa, Homo sapiens
  CDR3 for alpha chain variable domain of TCR clone 102203 (TRAV1-2, TRAJ16)
CAVNRFSAGQKLLF

SEQ ID NO: 204406 - protein, 11 aa, Homo sapiens
  CDR3 for beta chain variable domain of TCR clone 102203 (TRBV29-1, TRBJ2-5)
CSEDRTGTQYF

SEQ ID NO: 204407 - protein, 11 aa, Homo sapiens
  CDR3 for alpha chain variable domain of TCR clone 102204 (TRAV21, TRAJ4)
HVSGGYNKLIF

SEQ ID NO: 204408 - protein, 13 aa, Homo sapiens
  CDR3 for beta chain variable domain of TCR clone 102204 (TRBV7-3, TRBJ2-5)
CASSLPAGETQYF

SEQ ID NO: 204409 - protein, 13 aa, Homo sapiens
  CDR3 for alpha chain variable domain of TCR clone 102205 (TRAV21, TRAJ20)
CAVGLRVDYKLSF

SEQ ID NO: 204410 - protein, 20 aa, Homo sapiens
  CDR3 for beta chain variable domain of TCR clone 102205 (TRBV15, TRBJ2-1)
WGTQPCTCVPPAEVDTARFF

SEQ ID NO: 204411 - protein, 12 aa, Homo sapiens
  CDR3 for alpha chain variable domain of TCR clone 102206 (TRAV12-3, TRAJ40)
CAMSSGTYKYIF

SEQ ID NO: 204412 - protein, 13 aa, Homo sapiens
  CDR3 for beta chain variable domain of TCR clone 102206 (TRBV20-1, TRBJ2-7)
CSATHTSGYEQYF

SEQ ID NO: 204413 - protein, 14 aa, Homo sapiens
  CDR3 for alpha chain variable domain of TCR clone 102207 (TRAV9-2, TRAJ24)
CALNPRGSWGKLQF

SEQ ID NO: 204414 - protein, 14 aa, Homo sapiens
  CDR3 for beta chain variable domain of TCR clone 102207 (TRBV13, TRBJ2-7)
CASSLKGASYEQYF

SEQ ID NO: 204415 - protein, 12 aa, Homo sapiens
  CDR3 for alpha chain variable domain of TCR clone 102208 (TRAV8-3, TRAJ20)
CAVGANDYKLSF

SEQ ID NO: 204416 - protein, 16 aa, Homo sapiens
  CDR3 for beta chain variable domain of TCR clone 102208 (TRBV19, TRBJ2-3)
CASSPGAASRTDTQYF

SEQ ID NO: 204417 - protein, 12 aa, Homo sapiens
  CDR3 for alpha chain variable domain of TCR clone 102209 (TRAV30, TRAJ20)
CGTESNDYKFSF

SEQ ID NO: 204418 - protein, 15 aa, Homo sapiens
  CDR3 for beta chain variable domain of TCR clone 102209 (TRBV9, TRBJ2-7)
CASSAVPIPGYEQYF

SEQ ID NO: 204419 - protein, 16 aa, Homo sapiens
  CDR3 for alpha chain variable domain of TCR clone 102210 (TRAV2, TRAJ4)
CAVEDRFSGGYNELIF

SEQ ID NO: 204420 - protein, 13 aa, Homo sapiens
  CDR3 for beta chain variable domain of TCR clone 102210 (TRBV7-7, TRBJ2-5)
CASSRSGQETQYF

SEQ ID NO: 204421 - protein, 15 aa, Homo sapiens
  CDR3 for alpha chain variable domain of TCR clone 102211 (TRAV40, TRAJ53)
CLLANSGGSNYKLTF

SEQ ID NO: 204422 - protein, 14 aa, Homo sapiens
  CDR3 for beta chain variable domain of TCR clone 102211 (TRBV7-9, TRBJ2-1)
CASSPRDSLYEQFF

SEQ ID NO: 204423 - protein, 13 aa, Homo sapiens
  CDR3 for alpha chain variable domain of TCR clone 102212 (TRAV21, TRAJ45)
CAVMGGGADGLTF

SEQ ID NO: 204424 - protein, 14 aa, Homo sapiens
  CDR3 for beta chain variable domain of TCR clone 102212 (TRBV19, TRBJ2-1)
CASPTFVLSGEQFF

SEQ ID NO: 204425 - protein, 13 aa, Homo sapiens
  CDR3 for alpha chain variable domain of TCR clone 102213 (TRAV17, TRAJ5)
CAPMDTGRRALTF

SEQ ID NO: 204426 - protein, 15 aa, Homo sapiens
  CDR3 for beta chain variable domain of TCR clone 102213 (TRBV9, TRBJ1-6)
CASSVAGTGDSPLHF

SEQ ID NO: 204427 - protein, 13 aa, Homo sapiens
  CDR3 for alpha chain variable domain of TCR clone 102214 (TRAV20, TRAJ37)
CAGCSSNTGKLIF

SEQ ID NO: 204428 - protein, 21 aa, Homo sapiens
  CDR3 for beta chain variable domain of TCR clone 102214 (TRBV4-2, TRBJ2-3)
PCSQKTRPCVSVPAAPDTQYF

SEQ ID NO: 204429 - protein, 13 aa, Homo sapiens
  CDR3 for alpha chain variable domain of TCR clone 102215 (TRAV20, TRAJ35)
CAVQEGFGNVLHF

SEQ ID NO: 204430 - protein, 14 aa, Homo sapiens
  CDR3 for beta chain variable domain of TCR clone 102215 (TRBV5-1, TRBJ1-1)
CASSSATGGTEAFF

SEQ ID NO: 204431 - protein, 15 aa, Homo sapiens
  CDR3 for alpha chain variable domain of TCR clone 102216 (TRAV36/DV7, TRAJ53)
CAVEGSGGSNYKLTF

SEQ ID NO: 204432 - protein, 16 aa, Homo sapiens
  CDR3 for beta chain variable domain of TCR clone 102216 (TRBV27, TRBJ2-2)
CASSLSGFWVTGELFV

SEQ ID NO: 204433 - protein, 12 aa, Homo sapiens
  CDR3 for alpha chain variable domain of TCR clone 102217 (TRAV13-2, TRAJ23)
CAERHRGGKLIF

SEQ ID NO: 204434 - protein, 15 aa, Homo sapiens
  CDR3 for beta chain variable domain of TCR clone 102217 (TRBV7-6, TRBJ2-5)
CASSKPTGPQETQYF

SEQ ID NO: 204435 - protein, 14 aa, Homo sapiens
  CDR3 for alpha chain variable domain of TCR clone 102218 (TRAV12-2, TRAJ13)
CAVKKTGGYQKVTL

SEQ ID NO: 204436 - protein, 13 aa, Homo sapiens
  CDR3 for beta chain variable domain of TCR clone 102218 (TRBV7-9, TRBJ1-2)
CASSLKQNYGYTF

SEQ ID NO: 204437 - protein, 15 aa, Homo sapiens
  CDR3 for alpha chain variable domain of TCR clone 102219 (TRAV13-1, TRAJ32)
CAASIYVGATNKLIF

SEQ ID NO: 204438 - protein, 17 aa, Homo sapiens
  CDR3 for beta chain variable domain of TCR clone 102219 (TRBV7-3, TRBJ2-5)
CASSLGSGRSGSETQYF

SEQ ID NO: 204439 - protein, 11 aa, Homo sapiens
  CDR3 for alpha chain variable domain of TCR clone 102220 (TRAV1-2, TRAJ20)
CAVANDYKLSF

SEQ ID NO: 204440 - protein, 17 aa, Homo sapiens
  CDR3 for beta chain variable domain of TCR clone 102220 (TRBV28, TRBJ2-5)
CASSTPEGDALQETQYF

SEQ ID NO: 204441 - protein, 13 aa, Homo sapiens
  CDR3 for alpha chain variable domain of TCR clone 102221 (TRAV8-6, TRAJ9)
CAVSDTGGFKTIF

SEQ ID NO: 204442 - protein, 13 aa, Homo sapiens
  CDR3 for beta chain variable domain of TCR clone 102221 (TRBV10-3, TRBJ2-7)
CASKLAVNYEQYF

SEQ ID NO: 204443 - protein, 13 aa, Homo sapiens
  CDR3 for alpha chain variable domain of TCR clone 102222 (TRAV17, TRAJ5)
CAPMDTGRRALTF

SEQ ID NO: 204444 - protein, 14 aa, Homo sapiens
  CDR3 for beta chain variable domain of TCR clone 102222 (TRBV29-1, TRBJ2-7)
CSVDQRQASYEQYL

SEQ ID NO: 204445 - protein, 13 aa, Homo sapiens
  CDR3 for alpha chain variable domain of TCR clone 102223 (TRAV12-2, TRAJ10)
RAVPTGGGNKLTF

SEQ ID NO: 204446 - protein, 14 aa, Homo sapiens
  CDR3 for beta chain variable domain of TCR clone 102223 (TRBV25-1, TRBJ1-1)
CASTHLGGNTEAFF

SEQ ID NO: 204447 - protein, 13 aa, Homo sapiens
  CDR3 for alpha chain variable domain of TCR clone 102224 (TRAV38-1, TRAJ52)
CAFRGTSYGKLTF

SEQ ID NO: 204448 - protein, 15 aa, Homo sapiens
  CDR3 for beta chain variable domain of TCR clone 102224 (TRBV7-8, TRBJ2-5)
CASSDAAGSQETQFF

SEQ ID NO: 204449 - protein, 16 aa, Homo sapiens
  CDR3 for alpha chain variable domain of TCR clone 102225 (TRAV3, TRAJ3)
CAVRARAKSSASKIIF

SEQ ID NO: 204450 - protein, 13 aa, Homo sapiens
  CDR3 for beta chain variable domain of TCR clone 102225 (TRBV10-3, TRBJ2-7)
CASKLAVNYEQYF

SEQ ID NO: 204451 - protein, 13 aa, Homo sapiens
  CDR3 for alpha chain variable domain of TCR clone 102226 (TRAV3, TRAJ16)
CSVRDRNGQKLLF

SEQ ID NO: 204452 - protein, 15 aa, Homo sapiens
  CDR3 for beta chain variable domain of TCR clone 102226 (TRBV5-1, TRBJ2-1)
CASSPPRAPYNEQFF

SEQ ID NO: 204453 - protein, 17 aa, Homo sapiens
  CDR3 for alpha chain variable domain of TCR clone 102227 (TRAV3, TRAJ12)
CAVRDGGRMDSSDKLIF

SEQ ID NO: 204454 - protein, 13 aa, Homo sapiens
  CDR3 for beta chain variable domain of TCR clone 102227 (TRBV20-1, TRBJ1-1)
CSAPLGGGTEAFF

SEQ ID NO: 204455 - protein, 14 aa, Homo sapiens
  CDR3 for alpha chain variable domain of TCR clone 102228 (TRAV1-2, TRAJ8)
CAVREDTGFQRLVF

SEQ ID NO: 204456 - protein, 17 aa, Homo sapiens
  CDR3 for beta chain variable domain of TCR clone 102228 (TRBV28, TRBJ2-5)
CASSRQGGLAGAGTQYF

SEQ ID NO: 204457 - protein, 11 aa, Homo sapiens
  CDR3 for alpha chain variable domain of TCR clone 102229 (TRAV2, TRAJ13)
CASGGYQKVTF

SEQ ID NO: 204458 - protein, 13 aa, Homo sapiens
  CDR3 for beta chain variable domain of TCR clone 102229 (TRBV11-2, TRBJ2-7)
CASSGTRPYEQYF

SEQ ID NO: 204459 - protein, 13 aa, Homo sapiens
  CDR3 for alpha chain variable domain of TCR clone 102230 (TRAV12-3, TRAJ21)
CAPGPHNFNKFYF

SEQ ID NO: 204460 - protein, 13 aa, Homo sapiens
  CDR3 for beta chain variable domain of TCR clone 102230 (TRBV4-2, TRBJ1-1)
CASSQAGNNEAFF

SEQ ID NO: 204461 - protein, 16 aa, Homo sapiens
  CDR3 for alpha chain variable domain of TCR clone 102231 (TRAV3, TRAJ10)
CAVRDMRAGGGNKLTF

SEQ ID NO: 204462 - protein, 15 aa, Homo sapiens
  CDR3 for beta chain variable domain of TCR clone 102231 (TRBV9, TRBJ2-1)
CASSLAGSSYNEQFF

SEQ ID NO: 204463 - protein, 18 aa, Homo sapiens
  CDR3 for alpha chain variable domain of TCR clone 102232 (TRAV9-2, TRAJ52)
CALSRHNAGGTSYGKLTF

SEQ ID NO: 204464 - protein, 13 aa, Homo sapiens
  CDR3 for beta chain variable domain of TCR clone 102232 (TRBV7-9, TRBJ1-2)
CASSLKQNYGYTC

SEQ ID NO: 204465 - protein, 16 aa, Homo sapiens
  CDR3 for alpha chain variable domain of TCR clone 102233 (TRAV12-3, TRAJ53)
CAMSPGSGGSNYKLTF

SEQ ID NO: 204466 - protein, 15 aa, Homo sapiens
  CDR3 for beta chain variable domain of TCR clone 102233 (TRBV11-2, TRBJ2-1)
CASSLGPDSYNEQFF

SEQ ID NO: 204467 - protein, 13 aa, Homo sapiens
  CDR3 for alpha chain variable domain of TCR clone 102234 (TRAV3, TRAJ8)
CAVRFTGFQKLVF

SEQ ID NO: 204468 - protein, 15 aa, Homo sapiens
  CDR3 for beta chain variable domain of TCR clone 102234 (TRBV20-1, TRBJ2-7)
CSARDRVSGMDEQYL

SEQ ID NO: 204469 - protein, 12 aa, Homo sapiens
  CDR3 for alpha chain variable domain of TCR clone 102235 (TRAV12-3, TRAJ17)
CAMTLTGNKLTF

SEQ ID NO: 204470 - protein, 12 aa, Homo sapiens
  CDR3 for beta chain variable domain of TCR clone 102235 (TRBV12-4, TRBJ1-5)
CASSLGRQPQHF

SEQ ID NO: 204471 - protein, 14 aa, Homo sapiens
  CDR3 for alpha chain variable domain of TCR clone 102236 (TRAV12-2, TRAJ32)
CAHPESGATNKLIF

SEQ ID NO: 204472 - protein, 13 aa, Homo sapiens
  CDR3 for beta chain variable domain of TCR clone 102236 (TRBV5-1, TRBJ1-2)
CASSIDRPEGYTF

SEQ ID NO: 204473 - protein, 14 aa, Homo sapiens
  CDR3 for alpha chain variable domain of TCR clone 102237 (TRAV1-2, TRAJ16)
CAVNRFSDGQKLLF

SEQ ID NO: 204474 - protein, 16 aa, Homo sapiens
  CDR3 for beta chain variable domain of TCR clone 102237 (TRBV28, TRBJ2-5)
CQQFWGEWGGQETQYF

SEQ ID NO: 204475 - protein, 14 aa, Homo sapiens
  CDR3 for alpha chain variable domain of TCR clone 102238 (TRAV35, TRAJ34)
CAGRGTPTSSSLGL

SEQ ID NO: 204476 - protein, 12 aa, Homo sapiens
  CDR3 for beta chain variable domain of TCR clone 102238 (TRBV12-5, TRBJ2-5)
CASGQGVETQYF

SEQ ID NO: 204477 - protein, 22 aa, Homo sapiens
  CDR3 for alpha chain variable domain of TCR clone 102239 (TRAV3, TRAJ38)
CAVRDYLNAGNNHIQNPDPAVY

SEQ ID NO: 204478 - protein, 19 aa, Homo sapiens
  CDR3 for beta chain variable domain of TCR clone 102239 (TRBV7-2, TRBJ2-3)
CASSFLSRNWGGGTDTQYF

SEQ ID NO: 204479 - protein, 12 aa, Homo sapiens
  CDR3 for alpha chain variable domain of TCR clone 102240 (TRAV3, TRAJ43)
CAVRDPNNDMRF

SEQ ID NO: 204480 - protein, 13 aa, Homo sapiens
  CDR3 for beta chain variable domain of TCR clone 102240 (TRBV7-3, TRBJ1-2)
CASSLKRGYGYTF

SEQ ID NO: 204481 - protein, 15 aa, Homo sapiens
  CDR3 for alpha chain variable domain of TCR clone 102241 (TRAV3, TRAJ22)
CAVRDRGGSASQLTF

SEQ ID NO: 204482 - protein, 14 aa, Homo sapiens
  CDR3 for beta chain variable domain of TCR clone 102241 (TRBV19, TRBJ1-5)
CASSLGLIGQPQHF

SEQ ID NO: 204483 - protein, 12 aa, Homo sapiens
  CDR3 for alpha chain variable domain of TCR clone 102242 (TRAV17, TRAJ30)
CVPERRDDKIIF

SEQ ID NO: 204484 - protein, 11 aa, Homo sapiens
  CDR3 for beta chain variable domain of TCR clone 102242 (TRBV20-1, TRBJ1-2)
CSVQGAGGYAF

SEQ ID NO: 204485 - protein, 12 aa, Homo sapiens
  CDR3 for alpha chain variable domain of TCR clone 102243 (TRAV13-2, TRAJ8)
FAPWLGFQKLVF

SEQ ID NO: 204486 - protein, 18 aa, Homo sapiens
  CDR3 for beta chain variable domain of TCR clone 102243 (TRBV11-2, TRBJ2-3)
CASSLGGASRGAPNTQYF

SEQ ID NO: 204487 - protein, 13 aa, Homo sapiens
  CDR3 for alpha chain variable domain of TCR clone 102244 (TRAV12-3, TRAJ7)
CAMTTYGNNRLAF

SEQ ID NO: 204488 - protein, 16 aa, Homo sapiens
  CDR3 for beta chain variable domain of TCR clone 102244 (TRBV20-1, TRBJ1-4)
CSARPYGGELNEKLFF

SEQ ID NO: 204489 - protein, 14 aa, Homo sapiens
  CDR3 for alpha chain variable domain of TCR clone 102245 (TRAV12-2, TRAJ13)
CAVKKTGGYQKVTF

SEQ ID NO: 204490 - protein, 17 aa, Homo sapiens
  CDR3 for beta chain variable domain of TCR clone 102245 (TRBV7-3, TRBJ2-3)
CASSPGGLAGFGDTQYF

SEQ ID NO: 204491 - protein, 13 aa, Homo sapiens
  CDR3 for alpha chain variable domain of TCR clone 102246 (TRAV21, TRAJ20)
CAVGLRVDYKLSF

SEQ ID NO: 204492 - protein, 17 aa, Homo sapiens
  CDR3 for beta chain variable domain of TCR clone 102246 (TRBV4-2, TRBJ2-5)
CASSPGRWRNFQETQYF

SEQ ID NO: 204493 - protein, 17 aa, Homo sapiens
  CDR3 for alpha chain variable domain of TCR clone 102247 (TRAV4, TRAJ13)
CLVGVQGSSGGYQKVTF

SEQ ID NO: 204494 - protein, 18 aa, Homo sapiens
  CDR3 for beta chain variable domain of TCR clone 102247 (TRBV15, TRBJ2-3)
CATSRDGARSWETDTQYF

SEQ ID NO: 204495 - protein, 12 aa, Homo sapiens
  CDR3 for alpha chain variable domain of TCR clone 102248 (TRAV12-3, TRAJ17)
CAMTLTGNKLTF

SEQ ID NO: 204496 - protein, 14 aa, Homo sapiens
  CDR3 for beta chain variable domain of TCR clone 102248 (TRBV12-4, TRBJ1-1)
CASSLRSSGTEAFF

SEQ ID NO: 204497 - protein, 17 aa, Homo sapiens
  CDR3 for alpha chain variable domain of TCR clone 102249 (TRAV3, TRAJ6)
CAVRDGPRAGGSCIPAF

SEQ ID NO: 204498 - protein, 14 aa, Homo sapiens
  CDR3 for beta chain variable domain of TCR clone 102249 (TRBV7-2, TRBJ2-7)
CASSPKTSFYEQYF

SEQ ID NO: 204499 - protein, 12 aa, Homo sapiens
  CDR3 for alpha chain variable domain of TCR clone 102250 (TRAV29/DV5, TRAJ49)
CAATDTGNQFYF

SEQ ID NO: 204500 - protein, 19 aa, Homo sapiens
  CDR3 for beta chain variable domain of TCR clone 102250 (TRBV25-1, TRBJ2-2)
CAILVYRVDGGRKTGELFF

SEQ ID NO: 204501 - protein, 13 aa, Homo sapiens
  CDR3 for alpha chain variable domain of TCR clone 102251 (TRAV8-3, TRAJ28)
CAVGAVGSYQLTF

SEQ ID NO: 204502 - protein, 15 aa, Homo sapiens
  CDR3 for beta chain variable domain of TCR clone 102251 (TRBV7-9, TRBJ2-2)
CASGPLDTFPGELFF

SEQ ID NO: 204503 - protein, 12 aa, Homo sapiens
  CDR3 for alpha chain variable domain of TCR clone 102252 (TRAV2, TRAJ37)
CAVTMNTGKLIF

SEQ ID NO: 204504 - protein, 15 aa, Homo sapiens
  CDR3 for beta chain variable domain of TCR clone 102252 (TRBV5-1, TRBJ2-5)
CASSCGGPPQETQYF

SEQ ID NO: 204505 - protein, 15 aa, Homo sapiens
  CDR3 for alpha chain variable domain of TCR clone 102253 (TRAV12-2, TRAJ43)
CAFDMRFGAGTRLTV

SEQ ID NO: 204506 - protein, 14 aa, Homo sapiens
  CDR3 for beta chain variable domain of TCR clone 102253 (TRBV11-2, TRBJ1-2)
CASSLGTANYGYTF

SEQ ID NO: 204507 - protein, 14 aa, Homo sapiens
  CDR3 for alpha chain variable domain of TCR clone 102254 (TRAV12-3, TRAJ22)
CAMSLFGSARQLTF

SEQ ID NO: 204508 - protein, 17 aa, Homo sapiens
  CDR3 for beta chain variable domain of TCR clone 102254 (TRBV25-1, TRBJ2-7)
CASSDARVVFSSYEQYF

SEQ ID NO: 204509 - protein, 16 aa, Homo sapiens
  CDR3 for alpha chain variable domain of TCR clone 102255 (TRAV4, TRAJ22)
CLVGDFYSGSARQLTF

SEQ ID NO: 204510 - protein, 16 aa, Homo sapiens
  CDR3 for beta chain variable domain of TCR clone 102255 (TRBV7-9, TRBJ2-1)
CASSDVAGGSYNEQFF

SEQ ID NO: 204511 - protein, 12 aa, Homo sapiens
  CDR3 for alpha chain variable domain of TCR clone 102256 (TRAV13-1, TRAJ53)
AASGGSTYKLTF

SEQ ID NO: 204512 - protein, 15 aa, Homo sapiens
  CDR3 for beta chain variable domain of TCR clone 102256 (TRBV5-1, TRBJ2-1)
CASSPPRAPYNEQFF

SEQ ID NO: 204513 - protein, 15 aa, Homo sapiens
  CDR3 for alpha chain variable domain of TCR clone 102257 (TRAV8-4, TRAJ3)
CAVTGENLVQQCFQD

SEQ ID NO: 204514 - protein, 14 aa, Homo sapiens
  CDR3 for beta chain variable domain of TCR clone 102257 (TRBV7-9, TRBJ2-1)
CASSPRDSLYEQFF

SEQ ID NO: 204515 - protein, 13 aa, Homo sapiens
  CDR3 for alpha chain variable domain of TCR clone 102258 (TRAV12-1, TRAJ21)
CVVTLYNFNNFYF

SEQ ID NO: 204516 - protein, 20 aa, Homo sapiens
  CDR3 for beta chain variable domain of TCR clone 102258 (TRBV7-8, TRBJ2-1)
CASSLAHRLAGVRSYNEQFF

SEQ ID NO: 204517 - protein, 14 aa, Homo sapiens
  CDR3 for alpha chain variable domain of TCR clone 102259 (TRAV1-2, TRAJ16)
CAVNRFSDGQKLLF

SEQ ID NO: 204518 - protein, 13 aa, Homo sapiens
  CDR3 for beta chain variable domain of TCR clone 102259 (TRBV7-6, TRBJ1-2)
CASSLVADYGDTF

SEQ ID NO: 204519 - protein, 14 aa, Homo sapiens
  CDR3 for alpha chain variable domain of TCR clone 102260 (TRAV1-2, TRAJ16)
CAVNRFSDGQKLLF

SEQ ID NO: 204520 - protein, 14 aa, Homo sapiens
  CDR3 for beta chain variable domain of TCR clone 102260 (TRBV7-2, TRBJ2-5)
CASSLSGGGETQYF

SEQ ID NO: 204521 - protein, 12 aa, Homo sapiens
  CDR3 for alpha chain variable domain of TCR clone 102261 (TRAV4, TRAJ26)
CLVGDYGQNFVF

SEQ ID NO: 204522 - protein, 15 aa, Homo sapiens
  CDR3 for beta chain variable domain of TCR clone 102261 (TRBV27, TRBJ2-1)
CASSNGGGSSNEQFL

SEQ ID NO: 204523 - protein, 10 aa, Homo sapiens
  CDR3 for alpha chain variable domain of TCR clone 102262 (TRAV23/DV6, TRAJ57)
CAASSTLSQG

SEQ ID NO: 204524 - protein, 17 aa, Homo sapiens
  CDR3 for beta chain variable domain of TCR clone 102262 (TRBV4-3, TRBJ2-1)
CASSQFSSGRASGEQFF

SEQ ID NO: 204525 - protein, 14 aa, Homo sapiens
  CDR3 for alpha chain variable domain of TCR clone 102263 (TRAV13-1, TRAJ39)
CAARYNNAGNMLTF

SEQ ID NO: 204526 - protein, 13 aa, Homo sapiens
  CDR3 for beta chain variable domain of TCR clone 102263 (TRBV24-1, TRBJ1-4)
CATNNGRSEKLFF

SEQ ID NO: 204527 - protein, 14 aa, Homo sapiens
  CDR3 for alpha chain variable domain of TCR clone 102264 (TRAV8-3, TRAJ10)
CAVGNAGGGNKLTF

SEQ ID NO: 204528 - protein, 16 aa, Homo sapiens
  CDR3 for beta chain variable domain of TCR clone 102264 (TRBV11-2, TRBJ1-2)
CASSLDTGGADYGDTF

SEQ ID NO: 204529 - protein, 14 aa, Homo sapiens
  CDR3 for alpha chain variable domain of TCR clone 102265 (TRAV21, TRAJ35)
CTVMPIGFGNVLHC

SEQ ID NO: 204530 - protein, 12 aa, Homo sapiens
  CDR3 for beta chain variable domain of TCR clone 102265 (TRBV7-9, TRBJ2-7)
CASSIKREEQYF

SEQ ID NO: 204531 - protein, 15 aa, Homo sapiens
  CDR3 for alpha chain variable domain of TCR clone 102266 (TRAV21, TRAJ45)
RPQGGSGGGADGLTF

SEQ ID NO: 204532 - protein, 12 aa, Homo sapiens
  CDR3 for beta chain variable domain of TCR clone 102266 (TRBV29-1, TRBJ1-3)
CSTRDSGNTIYF

SEQ ID NO: 204533 - protein, 14 aa, Homo sapiens
  CDR3 for alpha chain variable domain of TCR clone 102267 (TRAV21, TRAJ32)
CCGDYGGATTKLIF

SEQ ID NO: 204534 - protein, 13 aa, Homo sapiens
  CDR3 for beta chain variable domain of TCR clone 102267 (TRBV2, TRBJ1-6)
CASGRGGISPLHF

SEQ ID NO: 204535 - protein, 14 aa, Homo sapiens
  CDR3 for alpha chain variable domain of TCR clone 102268 (TRAV9-2, TRAJ39)
CALYIYNAGNMLTF

SEQ ID NO: 204536 - protein, 14 aa, Homo sapiens
  CDR3 for beta chain variable domain of TCR clone 102268 (TRBV19, TRBJ2-2)
CASSTGQGAGELFF

SEQ ID NO: 204537 - protein, 15 aa, Homo sapiens
  CDR3 for alpha chain variable domain of TCR clone 102269 (TRAV21, TRAJ40)
CAVRPQTSVTYKYIF

SEQ ID NO: 204538 - protein, 13 aa, Homo sapiens
  CDR3 for beta chain variable domain of TCR clone 102269 (TRBV7-2, TRBJ2-2)
CASSSVRAGELFF

SEQ ID NO: 204539 - protein, 14 aa, Homo sapiens
  CDR3 for alpha chain variable domain of TCR clone 102270 (TRAV16, TRAJ42)
CALLAGGSQGNLIF

SEQ ID NO: 204540 - protein, 10 aa, Homo sapiens
  CDR3 for beta chain variable domain of TCR clone 102270 (TRBV2, TRBJ2-4)
CASRGSIQYF

SEQ ID NO: 204541 - protein, 11 aa, Homo sapiens
  CDR3 for alpha chain variable domain of TCR clone 102271 (TRAV8-4, TRAJ20)
CAVTNVLTTTS

SEQ ID NO: 204542 - protein, 15 aa, Homo sapiens
  CDR3 for beta chain variable domain of TCR clone 102271 (TRBV7-9, TRBJ1-5)
CASSQGHQPNQPQHF

SEQ ID NO: 204543 - protein, 13 aa, Homo sapiens
  CDR3 for alpha chain variable domain of TCR clone 102272 (TRAV21, TRAJ20)
CAVGLRVDYKLSF

SEQ ID NO: 204544 - protein, 15 aa, Homo sapiens
  CDR3 for beta chain variable domain of TCR clone 102272 (TRBV20-1, TRBJ1-1)
CSASRGVTGNTEAFF

SEQ ID NO: 204545 - protein, 12 aa, Homo sapiens
  CDR3 for alpha chain variable domain of TCR clone 102273 (TRAV36/DV7, TRAJ54)
CAVVRGAQKLVF

SEQ ID NO: 204546 - protein, 14 aa, Homo sapiens
  CDR3 for beta chain variable domain of TCR clone 102273 (TRBV16, TRBJ1-1)
CASSQAGPNTEAFF

SEQ ID NO: 204547 - protein, 12 aa, Homo sapiens
  CDR3 for alpha chain variable domain of TCR clone 102274 (TRAV13-1, TRAJ49)
CAASPMGNQFYF

SEQ ID NO: 204548 - protein, 14 aa, Homo sapiens
  CDR3 for beta chain variable domain of TCR clone 102274 (TRBV19, TRBJ2-1)
CASPTFVLSGEQFF

SEQ ID NO: 204549 - protein, 13 aa, Homo sapiens
  CDR3 for alpha chain variable domain of TCR clone 102275 (TRAV8-2, TRAJ47)
CVVSEREGNKLGF

SEQ ID NO: 204550 - protein, 16 aa, Homo sapiens
  CDR3 for beta chain variable domain of TCR clone 102275 (TRBV5-1, TRBJ1-1)
CASSKTGTEVGTEAFF

SEQ ID NO: 204551 - protein, 15 aa, Homo sapiens
  CDR3 for alpha chain variable domain of TCR clone 102276 (TRAV8-1, TRAJ34)
CAVNSRTYNTDKLIF

SEQ ID NO: 204552 - protein, 15 aa, Homo sapiens
  CDR3 for beta chain variable domain of TCR clone 102276 (TRBV6-3, TRBJ2-7)
CASSSPGTVFYEQYF

SEQ ID NO: 204553 - protein, 12 aa, Homo sapiens
  CDR3 for alpha chain variable domain of TCR clone 102277 (TRAV13-1, TRAJ21)
CAAEEGFNKFYF

SEQ ID NO: 204554 - protein, 13 aa, Homo sapiens
  CDR3 for beta chain variable domain of TCR clone 102277 (TRBV7-9, TRBJ1-2)
CASSLKQNYGYTF

SEQ ID NO: 204555 - protein, 10 aa, Homo sapiens
  CDR3 for alpha chain variable domain of TCR clone 102278 (TRAV12-3, TRAJ49)
CAMNDDQFYF

SEQ ID NO: 204556 - protein, 13 aa, Homo sapiens
  CDR3 for beta chain variable domain of TCR clone 102278 (TRBV12-4, TRBJ1-1)
CPSSPGTGFEAFF

SEQ ID NO: 204557 - protein, 15 aa, Homo sapiens
  CDR3 for alpha chain variable domain of TCR clone 102279 (TRAV4, TRAJ39)
CLVGPNNNAGNMLTF

SEQ ID NO: 204558 - protein, 13 aa, Homo sapiens
  CDR3 for beta chain variable domain of TCR clone 102279 (TRBV11-2, TRBJ2-5)
CASRSTGEETQYF

SEQ ID NO: 204559 - protein, 14 aa, Homo sapiens
  CDR3 for alpha chain variable domain of TCR clone 102280 (TRAV17, TRAJ57)
CAKDPQGGSEKLVF

SEQ ID NO: 204560 - protein, 18 aa, Homo sapiens
  CDR3 for beta chain variable domain of TCR clone 102280 (TRBV6-6, TRBJ1-3)
CASSYSKWDSISGNTMYF

SEQ ID NO: 204561 - protein, 10 aa, Homo sapiens
  CDR3 for alpha chain variable domain of TCR clone 102281 (TRAV38-2/DV8, TRAJ40)
CASGTYKYNF

SEQ ID NO: 204562 - protein, 14 aa, Homo sapiens
  CDR3 for beta chain variable domain of TCR clone 102281 (TRBV7-9, TRBJ2-1)
CASSPRDSLYEQFF

SEQ ID NO: 204563 - protein, 14 aa, Homo sapiens
  CDR3 for alpha chain variable domain of TCR clone 102282 (TRAV8-3, TRAJ4)
CAVGAAGGYNKLIF

SEQ ID NO: 204564 - protein, 15 aa, Homo sapiens
  CDR3 for beta chain variable domain of TCR clone 102282 (TRBV7-2, TRBJ2-1)
CASRKTGSSYNEQFF

SEQ ID NO: 204565 - protein, 13 aa, Homo sapiens
  CDR3 for alpha chain variable domain of TCR clone 102283 (TRAV35, TRAJ20)
CAGPLSNDYKLSF

SEQ ID NO: 204566 - protein, 16 aa, Homo sapiens
  CDR3 for beta chain variable domain of TCR clone 102283 (TRBV29-1, TRBJ2-7)
CSVEVVGTSGSYEHYF

SEQ ID NO: 204567 - protein, 13 aa, Homo sapiens
  CDR3 for alpha chain variable domain of TCR clone 102284 (TRAV27, TRAJ53)
CAGQVGSNYKLTF

SEQ ID NO: 204568 - protein, 13 aa, Homo sapiens
  CDR3 for beta chain variable domain of TCR clone 102284 (TRBV29-1, TRBJ1-1)
CSVESGFGTEAFF

SEQ ID NO: 204569 - protein, 14 aa, Homo sapiens
  CDR3 for alpha chain variable domain of TCR clone 102285 (TRAV12-1, TRAJ43)
CVVNGRSNNNDMRF

SEQ ID NO: 204570 - protein, 14 aa, Homo sapiens
  CDR3 for beta chain variable domain of TCR clone 102285 (TRBV7-2, TRBJ2-7)
CASSPKTSFYEQYF

SEQ ID NO: 204571 - protein, 14 aa, Homo sapiens
  CDR3 for alpha chain variable domain of TCR clone 102286 (TRAV8-3, TRAJ47)
CAVGAQGYGNKLVF

SEQ ID NO: 204572 - protein, 14 aa, Homo sapiens
  CDR3 for beta chain variable domain of TCR clone 102286 (TRBV19, TRBJ2-1)
CASPTFVLSGEQFF

SEQ ID NO: 204573 - protein, 21 aa, Homo sapiens
  CDR3 for alpha chain variable domain of TCR clone 102287 (TRAV1-1, TRAJ6)
CLLLLRCERLERTGGSYIPTF

SEQ ID NO: 204574 - protein, 13 aa, Homo sapiens
  CDR3 for beta chain variable domain of TCR clone 102287 (TRBV10-2, TRBJ2-7)
CASGASGGYEQYS

SEQ ID NO: 204575 - protein, 16 aa, Homo sapiens
  CDR3 for alpha chain variable domain of TCR clone 102288 (TRAV3, TRAJ37)
CAVRPLGSGNTGKLIF

SEQ ID NO: 204576 - protein, 13 aa, Homo sapiens
  CDR3 for beta chain variable domain of TCR clone 102288 (TRBV2, TRBJ1-5)
CASGTGGYQPQHF

SEQ ID NO: 204577 - protein, 13 aa, Homo sapiens
  CDR3 for alpha chain variable domain of TCR clone 102289 (TRAV39, TRAJ33)
CAANPDSTYQLIW

SEQ ID NO: 204578 - protein, 13 aa, Homo sapiens
  CDR3 for beta chain variable domain of TCR clone 102289 (TRBV18, TRBJ1-1)
CASSGGRNTEAFF

SEQ ID NO: 204579 - protein, 13 aa, Homo sapiens
  CDR3 for alpha chain variable domain of TCR clone 102290 (TRAV13-1, TRAJ21)
CAASIYNFNKFYF

SEQ ID NO: 204580 - protein, 14 aa, Homo sapiens
  CDR3 for beta chain variable domain of TCR clone 102290 (TRBV7-8, TRBJ2-3)
CASSLEAGTDTQYF

SEQ ID NO: 204581 - protein, 13 aa, Homo sapiens
  CDR3 for alpha chain variable domain of TCR clone 102291 (TRAV35, TRAJ42)
CAGFPGSQGNLIF

SEQ ID NO: 204582 - protein, 14 aa, Homo sapiens
  CDR3 for beta chain variable domain of TCR clone 102291 (TRBV19, TRBJ2-1)
CASPTFVLSVEQFF

SEQ ID NO: 204583 - protein, 14 aa, Homo sapiens
  CDR3 for alpha chain variable domain of TCR clone 102292 (TRAV4, TRAJ41)
CLVGDGDSGYALHF

SEQ ID NO: 204584 - protein, 15 aa, Homo sapiens
  CDR3 for beta chain variable domain of TCR clone 102292 (TRBV27, TRBJ2-7)
CASSLVGGGAHEQYF

SEQ ID NO: 204585 - protein, 15 aa, Homo sapiens
  CDR3 for alpha chain variable domain of TCR clone 102293 (TRAV12-2, TRAJ53)
CAVNGSGGSNYKLTF

SEQ ID NO: 204586 - protein, 14 aa, Homo sapiens
  CDR3 for beta chain variable domain of TCR clone 102293 (TRBV4-3, TRBJ1-5)
CASSQGGQGWPQHF

SEQ ID NO: 204587 - protein, 12 aa, Homo sapiens
  CDR3 for alpha chain variable domain of TCR clone 102294 (TRAV17, TRAJ20)
CATDSNDYKLSF

SEQ ID NO: 204588 - protein, 15 aa, Homo sapiens
  CDR3 for beta chain variable domain of TCR clone 102294 (TRBV7-9, TRBJ1-6)
CASSSPGRGNSPLHF

SEQ ID NO: 204589 - protein, 15 aa, Homo sapiens
  CDR3 for alpha chain variable domain of TCR clone 102295 (TRAV3, TRAJ12)
CAVRDIRDGSYKLIF

SEQ ID NO: 204590 - protein, 15 aa, Homo sapiens
  CDR3 for beta chain variable domain of TCR clone 102295 (TRBV27, TRBJ2-7)
CASSLRNEQGYEQYF

SEQ ID NO: 204591 - protein, 13 aa, Homo sapiens
  CDR3 for alpha chain variable domain of TCR clone 102296 (TRAV12-3, TRAJ7)
CAMTPYGNNRLAF

SEQ ID NO: 204592 - protein, 13 aa, Homo sapiens
  CDR3 for beta chain variable domain of TCR clone 102296 (TRBV10-3, TRBJ1-2)
CAINADLNYGDTF

SEQ ID NO: 204593 - protein, 12 aa, Homo sapiens
  CDR3 for alpha chain variable domain of TCR clone 102297 (TRAV12-3, TRAJ17)
CAMMLTGNKLTF

SEQ ID NO: 204594 - protein, 13 aa, Homo sapiens
  CDR3 for beta chain variable domain of TCR clone 102297 (TRBV27, TRBJ2-1)
CASRTLGVGEQFF

SEQ ID NO: 204595 - protein, 17 aa, Homo sapiens
  CDR3 for alpha chain variable domain of TCR clone 102298 (TRAV21, TRAJ24)
CAGIRLRSTDSWGKLPF

SEQ ID NO: 204596 - protein, 15 aa, Homo sapiens
  CDR3 for beta chain variable domain of TCR clone 102298 (TRBV7-2, TRBJ2-3)
CASSPRGLSTDTQYF

SEQ ID NO: 204597 - protein, 16 aa, Homo sapiens
  CDR3 for alpha chain variable domain of TCR clone 102299 (TRAV12-3, TRAJ53)
CAMSPGSGGSNYKLTF

SEQ ID NO: 204598 - protein, 11 aa, Homo sapiens
  CDR3 for beta chain variable domain of TCR clone 102299 (TRBV29-1, TRBJ2-5)
CSEYRTGTHYF

SEQ ID NO: 204599 - protein, 16 aa, Homo sapiens
  CDR3 for alpha chain variable domain of TCR clone 102300 (TRAV20, TRAJ26)
CAVQHRRDNYGQNFVF

SEQ ID NO: 204600 - protein, 15 aa, Homo sapiens
  CDR3 for beta chain variable domain of TCR clone 102300 (TRBV6-3, TRBJ2-7)
CASSSPGTVFYEQYF

SEQ ID NO: 204601 - protein, 14 aa, Homo sapiens
  CDR3 for alpha chain variable domain of TCR clone 102301 (TRAV17, TRAJ34)
CATVPTYNTDKLIF

SEQ ID NO: 204602 - protein, 13 aa, Homo sapiens
  CDR3 for beta chain variable domain of TCR clone 102301 (TRBV4-2, TRBJ1-1)
CASSQAGNTEAFF

SEQ ID NO: 204603 - protein, 12 aa, Homo sapiens
  CDR3 for alpha chain variable domain of TCR clone 102302 (TRAV12-1, TRAJ20)
CVVNPDDYKLSF

SEQ ID NO: 204604 - protein, 12 aa, Homo sapiens
  CDR3 for beta chain variable domain of TCR clone 102302 (TRBV11-2, TRBJ2-2)
CASSLVGGELFF

SEQ ID NO: 204605 - protein, 14 aa, Homo sapiens
  CDR3 for alpha chain variable domain of TCR clone 102303 (TRAV1-2, TRAJ16)
CAVNRFSDGQELLF

SEQ ID NO: 204606 - protein, 15 aa, Homo sapiens
  CDR3 for beta chain variable domain of TCR clone 102303 (TRBV4-2, TRBJ1-1)
CASSQQGAGDTEAFF

SEQ ID NO: 204607 - protein, 14 aa, Homo sapiens
  CDR3 for alpha chain variable domain of TCR clone 102304 (TRAV9-2, TRAJ39)
CALYIYNAGNMLTF

SEQ ID NO: 204608 - protein, 15 aa, Homo sapiens
  CDR3 for beta chain variable domain of TCR clone 102304 (TRBV2, TRBJ2-3)
CASSDFEKATDTQYF

SEQ ID NO: 204609 - protein, 13 aa, Homo sapiens
  CDR3 for alpha chain variable domain of TCR clone 102305 (TRAV8-6, TRAJ37)
CAVSAGNTGKLIF

SEQ ID NO: 204610 - protein, 16 aa, Homo sapiens
  CDR3 for beta chain variable domain of TCR clone 102305 (TRBV3-1, TRBJ1-2)
CASSQGQGVQRDGYTF

SEQ ID NO: 204611 - protein, 10 aa, Homo sapiens
  CDR3 for alpha chain variable domain of TCR clone 102306 (TRAV21, TRAJ43)
CAVRIGDMRF

SEQ ID NO: 204612 - protein, 13 aa, Homo sapiens
  CDR3 for beta chain variable domain of TCR clone 102306 (TRBV2, TRBJ2-3)
CASIIPASDTQYF

SEQ ID NO: 204613 - protein, 14 aa, Homo sapiens
  CDR3 for alpha chain variable domain of TCR clone 102307 (TRAV9-2, TRAJ39)
CALYIYNAGNMLTF

SEQ ID NO: 204614 - protein, 19 aa, Homo sapiens
  CDR3 for beta chain variable domain of TCR clone 102307 (TRBV2, TRBJ2-7)
CASSDDETSGRANDYEQYF

SEQ ID NO: 204615 - protein, 17 aa, Homo sapiens
  CDR3 for alpha chain variable domain of TCR clone 102308 (TRAV3, TRAJ42)
CAVRDRDYGGSQGNLIF

SEQ ID NO: 204616 - protein, 12 aa, Homo sapiens
  CDR3 for beta chain variable domain of TCR clone 102308 (TRBV12-4, TRBJ1-3)
CASSFSGNTIYF

SEQ ID NO: 204617 - protein, 14 aa, Homo sapiens
  CDR3 for alpha chain variable domain of TCR clone 102309 (TRAV8-6, TRAJ30)
CAVRPVNRDDKIIF

SEQ ID NO: 204618 - protein, 17 aa, Homo sapiens
  CDR3 for beta chain variable domain of TCR clone 102309 (TRBV7-8, TRBJ2-6)
CASSAGTGGAGANDLTF

SEQ ID NO: 204619 - protein, 11 aa, Homo sapiens
  CDR3 for alpha chain variable domain of TCR clone 102310 (TRAV1-1, TRAJ23)
CAVRQGGKLIF

SEQ ID NO: 204620 - protein, 14 aa, Homo sapiens
  CDR3 for beta chain variable domain of TCR clone 102310 (TRBV19, TRBJ2-1)
CASLTFVLSGEQFF

SEQ ID NO: 204621 - protein, 14 aa, Homo sapiens
  CDR3 for alpha chain variable domain of TCR clone 102311 (TRAV1-2, TRAJ10)
CAVRVTGGGNKLTF

SEQ ID NO: 204622 - protein, 12 aa, Homo sapiens
  CDR3 for beta chain variable domain of TCR clone 102311 (TRBV11-2, TRBJ2-2)
CASSLGGGELFF

SEQ ID NO: 204623 - protein, 13 aa, Homo sapiens
  CDR3 for alpha chain variable domain of TCR clone 102312 (TRAV3, TRAJ34)
CAVRDIGSDKLIF

SEQ ID NO: 204624 - protein, 12 aa, Homo sapiens
  CDR3 for beta chain variable domain of TCR clone 102312 (TRBV2, TRBJ2-1)
CAYGPPGNEQFF

SEQ ID NO: 204625 - protein, 13 aa, Homo sapiens
  CDR3 for alpha chain variable domain of TCR clone 102313 (TRAV8-2, TRAJ26)
CVVTLLLGSEFCF

SEQ ID NO: 204626 - protein, 15 aa, Homo sapiens
  CDR3 for beta chain variable domain of TCR clone 102313 (TRBV11-2, TRBJ2-2)
CASSSDRVNAGELFF

SEQ ID NO: 204627 - protein, 14 aa, Homo sapiens
  CDR3 for alpha chain variable domain of TCR clone 102314 (TRAV26-1, TRAJ38)
CIADNAGNNRKLTW

SEQ ID NO: 204628 - protein, 13 aa, Homo sapiens
  CDR3 for beta chain variable domain of TCR clone 102314 (TRBV2, TRBJ1-5)
CATAGPGNQPQHF

SEQ ID NO: 204629 - protein, 11 aa, Homo sapiens
  CDR3 for alpha chain variable domain of TCR clone 102315 (TRAV4, TRAJ31)
CLVGDNARLMF

SEQ ID NO: 204630 - protein, 15 aa, Homo sapiens
  CDR3 for beta chain variable domain of TCR clone 102315 (TRBV10-3, TRBJ2-3)
CAISLTSGGTDTQYF

SEQ ID NO: 204631 - protein, 17 aa, Homo sapiens
  CDR3 for alpha chain variable domain of TCR clone 102316 (TRAV13-1, TRAJ52)
CAASSGAGGTSYGKLTF

SEQ ID NO: 204632 - protein, 16 aa, Homo sapiens
  CDR3 for beta chain variable domain of TCR clone 102316 (TRBV19, TRBJ1-1)
CASSPTRFWPGTEAFF

SEQ ID NO: 204633 - protein, 13 aa, Homo sapiens
  CDR3 for alpha chain variable domain of TCR clone 102317 (TRAV12-3, TRAJ46)
CAVKKSSGDKLTF

SEQ ID NO: 204634 - protein, 13 aa, Homo sapiens
  CDR3 for beta chain variable domain of TCR clone 102317 (TRBV6-1, TRBJ2-1)
SASSHDRNNEQFF

SEQ ID NO: 204635 - protein, 18 aa, Homo sapiens
  CDR3 for alpha chain variable domain of TCR clone 102318 (TRAV21, TRAJ52)
CAVRPSPAGGTSYGKLTF

SEQ ID NO: 204636 - protein, 14 aa, Homo sapiens
  CDR3 for beta chain variable domain of TCR clone 102318 (TRBV7-7, TRBJ2-2)
CATRQDSDTGELFF

SEQ ID NO: 204637 - protein, 12 aa, Homo sapiens
  CDR3 for alpha chain variable domain of TCR clone 102319 (TRAV2, TRAJ10)
CASTGGGNKLTF

SEQ ID NO: 204638 - protein, 18 aa, Homo sapiens
  CDR3 for beta chain variable domain of TCR clone 102319 (TRBV4-1, TRBJ1-4)
CASSPRTGGAWTNEKLFF

SEQ ID NO: 204639 - protein, 13 aa, Homo sapiens
  CDR3 for alpha chain variable domain of TCR clone 102320 (TRAV38-2/DV8, TRAJ49)
CAYRRRTGNPFYF

SEQ ID NO: 204640 - protein, 15 aa, Homo sapiens
  CDR3 for beta chain variable domain of TCR clone 102320 (TRBV24-1, TRBJ1-1)
CATSDSKTVNTEAFF

SEQ ID NO: 204641 - protein, 17 aa, Homo sapiens
  CDR3 for alpha chain variable domain of TCR clone 102321 (TRAV35, TRAJ28)
CAGLQVYSGAGSYKLTF

SEQ ID NO: 204642 - protein, 15 aa, Homo sapiens
  CDR3 for beta chain variable domain of TCR clone 102321 (TRBV2, TRBJ1-2)
CASSEIGGANYGYTF

SEQ ID NO: 204643 - protein, 14 aa, Homo sapiens
  CDR3 for alpha chain variable domain of TCR clone 102322 (TRAV16, TRAJ33)
RALSAMDSNYQLIW

SEQ ID NO: 204644 - protein, 12 aa, Homo sapiens
  CDR3 for beta chain variable domain of TCR clone 102322 (TRBV5-1, TRBJ1-2)
CASSQDTYGYTF

SEQ ID NO: 204645 - protein, 17 aa, Homo sapiens
  CDR3 for alpha chain variable domain of TCR clone 102323 (TRAV3, TRAJ6)
CAVRDGPRAGGSYTPTF

SEQ ID NO: 204646 - protein, 13 aa, Homo sapiens
  CDR3 for beta chain variable domain of TCR clone 102323 (TRBV20-1, TRBJ1-6)
CSAPLGVGSPLHF

SEQ ID NO: 204647 - protein, 16 aa, Homo sapiens
  CDR3 for alpha chain variable domain of TCR clone 102324 (TRAV3, TRAJ22)
CAVRDMGSGSARQLTF

SEQ ID NO: 204648 - protein, 16 aa, Homo sapiens
  CDR3 for beta chain variable domain of TCR clone 102324 (TRBV28, TRBJ2-6)
CASSNRRGSGANVLTF

SEQ ID NO: 204649 - protein, 22 aa, Homo sapiens
  CDR3 for alpha chain variable domain of TCR clone 102325 (TRAV8-2, TRAJ45)
HLTKPSAHTSDAAEYSADGLTF

SEQ ID NO: 204650 - protein, 13 aa, Homo sapiens
  CDR3 for beta chain variable domain of TCR clone 102325 (TRBV7-3, TRBJ2-1)
CASSPVAYNEQFF

SEQ ID NO: 204651 - protein, 14 aa, Homo sapiens
  CDR3 for alpha chain variable domain of TCR clone 102326 (TRAV13-1, TRAJ31)
CAASSRPNNARLIF

SEQ ID NO: 204652 - protein, 15 aa, Homo sapiens
  CDR3 for beta chain variable domain of TCR clone 102326 (TRBV4-2, TRBJ2-4)
CASSPLGAAKNIQYF

SEQ ID NO: 204653 - protein, 15 aa, Homo sapiens
  CDR3 for alpha chain variable domain of TCR clone 102327 (TRAV26-1, TRAJ29)
CTVRVEGSGNTPLVF

SEQ ID NO: 204654 - protein, 14 aa, Homo sapiens
  CDR3 for beta chain variable domain of TCR clone 102327 (TRBV25-1, TRBJ1-1)
CASTHLGGNTEAFF

SEQ ID NO: 204655 - protein, 13 aa, Homo sapiens
  CDR3 for alpha chain variable domain of TCR clone 102328 (TRAV16, TRAJ42)
CSTGRRSQGNLIF

SEQ ID NO: 204656 - protein, 15 aa, Homo sapiens
  CDR3 for beta chain variable domain of TCR clone 102328 (TRBV2, TRBJ2-7)
CASSEGLARSYEQYF

SEQ ID NO: 204657 - protein, 12 aa, Homo sapiens
  CDR3 for alpha chain variable domain of TCR clone 102329 (TRAV13-1, TRAJ21)
CAAFFNFNKFYF

SEQ ID NO: 204658 - protein, 15 aa, Homo sapiens
  CDR3 for beta chain variable domain of TCR clone 102329 (TRBV12-4, TRBJ1-6)
CASSLGGQGTSPLHF

SEQ ID NO: 204659 - protein, 14 aa, Homo sapiens
  CDR3 for alpha chain variable domain of TCR clone 102330 (TRAV25, TRAJ42)
CAGNYGGSQGNLIF

SEQ ID NO: 204660 - protein, 15 aa, Homo sapiens
  CDR3 for beta chain variable domain of TCR clone 102330 (TRBV6-1, TRBJ2-6)
CASTGSRAGANVLTF

SEQ ID NO: 204661 - protein, 11 aa, Homo sapiens
  CDR3 for alpha chain variable domain of TCR clone 102331 (TRAV12-2, TRAJ3)
CAVKRASKIIF

SEQ ID NO: 204662 - protein, 14 aa, Homo sapiens
  CDR3 for beta chain variable domain of TCR clone 102331 (TRBV28, TRBJ2-2)
CASTRRSGDGELFF

SEQ ID NO: 204663 - protein, 14 aa, Homo sapiens
  CDR3 for alpha chain variable domain of TCR clone 102332 (TRAV38-1, TRAJ45)
CASHSGGGADGLTF

SEQ ID NO: 204664 - protein, 12 aa, Homo sapiens
  CDR3 for beta chain variable domain of TCR clone 102332 (TRBV12-4, TRBJ2-1)
CASSLVRVEQFF

SEQ ID NO: 204665 - protein, 12 aa, Homo sapiens
  CDR3 for alpha chain variable domain of TCR clone 102333 (TRAV36/DV7, TRAJ54)
CPVVRGAQKLVF

SEQ ID NO: 204666 - protein, 14 aa, Homo sapiens
  CDR3 for beta chain variable domain of TCR clone 102333 (TRBV7-3, TRBJ1-1)
CASSLKGGNTEAFF

SEQ ID NO: 204667 - protein, 14 aa, Homo sapiens
  CDR3 for alpha chain variable domain of TCR clone 102334 (TRAV16, TRAJ33)
CALSAMDSNYQLIW

SEQ ID NO: 204668 - protein, 16 aa, Homo sapiens
  CDR3 for beta chain variable domain of TCR clone 102334 (TRBV12-4, TRBJ1-5)
CASSRPVGGSNQPQHF

SEQ ID NO: 204669 - protein, 11 aa, Homo sapiens
  CDR3 for alpha chain variable domain of TCR clone 102335 (TRAV21, TRAJ27)
CAVRMQANQPL

SEQ ID NO: 204670 - protein, 13 aa, Homo sapiens
  CDR3 for beta chain variable domain of TCR clone 102335 (TRBV10-3, TRBJ2-7)
CASKLAVNYEQYF

SEQ ID NO: 204671 - protein, 16 aa, Homo sapiens
  CDR3 for alpha chain variable domain of TCR clone 102336 (TRAV3, TRAJ37)
CAVRPHGSGNTGKLIF

SEQ ID NO: 204672 - protein, 16 aa, Homo sapiens
  CDR3 for beta chain variable domain of TCR clone 102336 (TRBV9, TRBJ1-2)
CASSVEGKVSPYGYTF

SEQ ID NO: 204673 - protein, 11 aa, Homo sapiens
  CDR3 for alpha chain variable domain of TCR clone 102337 (TRAV12-2, TRAJ29)
CAVTLRSPLVF

SEQ ID NO: 204674 - protein, 16 aa, Homo sapiens
  CDR3 for beta chain variable domain of TCR clone 102337 (TRBV19, TRBJ1-5)
CASSIDRGGPRQHQHF

SEQ ID NO: 204675 - protein, 15 aa, Homo sapiens
  CDR3 for alpha chain variable domain of TCR clone 102338 (TRAV14/DV4, TRAJ9)
CAMREGNTGGFKTIF

SEQ ID NO: 204676 - protein, 16 aa, Homo sapiens
  CDR3 for beta chain variable domain of TCR clone 102338 (TRBV13, TRBJ2-5)
CASSRGAGIRQESQYF

SEQ ID NO: 204677 - protein, 15 aa, Homo sapiens
  CDR3 for alpha chain variable domain of TCR clone 102339 (TRAV8-2, TRAJ16)
CVVSDGFSNGQKLLF

SEQ ID NO: 204678 - protein, 15 aa, Homo sapiens
  CDR3 for beta chain variable domain of TCR clone 102339 (TRBV5-1, TRBJ2-4)
CASSLGGGGSYIQYF

SEQ ID NO: 204679 - protein, 12 aa, Homo sapiens
  CDR3 for alpha chain variable domain of TCR clone 102340 (TRAV4, TRAJ9)
CLVPTGGFKTIF

SEQ ID NO: 204680 - protein, 13 aa, Homo sapiens
  CDR3 for beta chain variable domain of TCR clone 102340 (TRBV7-3, TRBJ1-1)
CASSQDWGAEAFF

SEQ ID NO: 204681 - protein, 13 aa, Homo sapiens
  CDR3 for alpha chain variable domain of TCR clone 102341 (TRAV29/DV5, TRAJ31)
CSASRNNNARLMF

SEQ ID NO: 204682 - protein, 12 aa, Homo sapiens
  CDR3 for beta chain variable domain of TCR clone 102341 (TRBV11-2, TRBJ2-2)
CASSLGGGELFF

SEQ ID NO: 204683 - protein, 14 aa, Homo sapiens
  CDR3 for alpha chain variable domain of TCR clone 102342 (TRAV3, TRAJ34)
CAVRAPGNTDKLIF

SEQ ID NO: 204684 - protein, 17 aa, Homo sapiens
  CDR3 for beta chain variable domain of TCR clone 102342 (TRBV20-1, TRBJ2-7)
CSAAPGLARGIAYEQYF

SEQ ID NO: 204685 - protein, 13 aa, Homo sapiens
  CDR3 for alpha chain variable domain of TCR clone 102343 (TRAV27, TRAJ45)
CRSSGGGADGLTF

SEQ ID NO: 204686 - protein, 14 aa, Homo sapiens
  CDR3 for beta chain variable domain of TCR clone 102343 (TRBV6-1, TRBJ1-3)
CASVQGGGGNTIYF

SEQ ID NO: 204687 - protein, 14 aa, Homo sapiens
  CDR3 for alpha chain variable domain of TCR clone 102344 (TRAV9-2, TRAJ39)
CALYIYNAGNMLTF

SEQ ID NO: 204688 - protein, 16 aa, Homo sapiens
  CDR3 for beta chain variable domain of TCR clone 102344 (TRBV24-1, TRBJ2-3)
CATSDPGTGVTDTQYF

SEQ ID NO: 204689 - protein, 14 aa, Homo sapiens
  CDR3 for alpha chain variable domain of TCR clone 102345 (TRAV1-2, TRAJ16)
CAVNQFSDGQKLLF

SEQ ID NO: 204690 - protein, 14 aa, Homo sapiens
  CDR3 for beta chain variable domain of TCR clone 102345 (TRBV5-4, TRBJ1-1)
CASSLDSRRDEAFF

SEQ ID NO: 204691 - protein, 15 aa, Homo sapiens
  CDR3 for alpha chain variable domain of TCR clone 102346 (TRAV1-2, TRAJ16)
VLDGLEEKDGQKLLF

SEQ ID NO: 204692 - protein, 13 aa, Homo sapiens
  CDR3 for beta chain variable domain of TCR clone 102346 (TRBV20-1, TRBJ1-1)
CSARGGGNTEAFF

SEQ ID NO: 204693 - protein, 13 aa, Homo sapiens
  CDR3 for alpha chain variable domain of TCR clone 102347 (TRAV14/DV4, TRAJ4)
CAMKAGCYNKLIF

SEQ ID NO: 204694 - protein, 15 aa, Homo sapiens
  CDR3 for beta chain variable domain of TCR clone 102347 (TRBV11-3, TRBJ1-1)
CASSLGGPGDTEAFF

SEQ ID NO: 204695 - protein, 12 aa, Homo sapiens
  CDR3 for alpha chain variable domain of TCR clone 102348 (TRAV13-1, TRAJ49)
CAASPMGNQFYF

SEQ ID NO: 204696 - protein, 17 aa, Homo sapiens
  CDR3 for beta chain variable domain of TCR clone 102348 (TRBV11-3, TRBJ2-1)
CASSLYPPGVEYNEQFF

SEQ ID NO: 204697 - protein, 14 aa, Homo sapiens
  CDR3 for alpha chain variable domain of TCR clone 102349 (TRAV16, TRAJ29)
CALTRNSGNTRLVF

SEQ ID NO: 204698 - protein, 12 aa, Homo sapiens
  CDR3 for beta chain variable domain of TCR clone 102349 (TRBV2, TRBJ2-1)
CAKREGYNEQFF

SEQ ID NO: 204699 - protein, 16 aa, Homo sapiens
  CDR3 for alpha chain variable domain of TCR clone 102350 (TRAV30, TRAJ24)
CGTEIVDADSWGKFQF

SEQ ID NO: 204700 - protein, 17 aa, Homo sapiens
  CDR3 for beta chain variable domain of TCR clone 102350 (TRBV15, TRBJ1-5)
CATSRAPPGTRNQPQHF

SEQ ID NO: 204701 - protein, 16 aa, Homo sapiens
  CDR3 for alpha chain variable domain of TCR clone 102351 (TRAV38-1, TRAJ45)
CAFMKGSGGGADGRTF

SEQ ID NO: 204702 - protein, 15 aa, Homo sapiens
  CDR3 for beta chain variable domain of TCR clone 102351 (TRBV20-1, TRBJ2-7)
CSAREGRDSLYEQYF

SEQ ID NO: 204703 - protein, 13 aa, Homo sapiens
  CDR3 for alpha chain variable domain of TCR clone 102352 (TRAV36/DV7, TRAJ54)
CAVCTQGAQKLGF

SEQ ID NO: 204704 - protein, 13 aa, Homo sapiens
  CDR3 for beta chain variable domain of TCR clone 102352 (TRBV7-6, TRBJ2-7)
CASSLDHTHEQYF

SEQ ID NO: 204705 - protein, 16 aa, Homo sapiens
  CDR3 for alpha chain variable domain of TCR clone 102353 (TRAV30, TRAJ24)
CGTEIVDADSWGKFQF

SEQ ID NO: 204706 - protein, 15 aa, Homo sapiens
  CDR3 for beta chain variable domain of TCR clone 102353 (TRBV15, TRBJ1-5)
CATSRDPVSNHPQHF

SEQ ID NO: 204707 - protein, 15 aa, Homo sapiens
  CDR3 for alpha chain variable domain of TCR clone 102354 (TRAV20, TRAJ50)
CAVRQMKTSYDKVIF

SEQ ID NO: 204708 - protein, 17 aa, Homo sapiens
  CDR3 for beta chain variable domain of TCR clone 102354 (TRBV28, TRBJ2-7)
CASSPLQRASGVYEQYF

SEQ ID NO: 204709 - protein, 16 aa, Homo sapiens
  CDR3 for alpha chain variable domain of TCR clone 102355 (TRAV20, TRAJ28)
CAVRDPSGAGSYQLTF

SEQ ID NO: 204710 - protein, 12 aa, Homo sapiens
  CDR3 for beta chain variable domain of TCR clone 102355 (TRBV7-8, TRBJ2-7)
CASSLGDREQYF

SEQ ID NO: 204711 - protein, 13 aa, Homo sapiens
  CDR3 for alpha chain variable domain of TCR clone 102356 (TRAV12-1, TRAJ37)
CVVNAGNTGKLIF

SEQ ID NO: 204712 - protein, 14 aa, Homo sapiens
  CDR3 for beta chain variable domain of TCR clone 102356 (TRBV7-2, TRBJ2-3)
CASRRGLAADMQYF

SEQ ID NO: 204713 - protein, 13 aa, Homo sapiens
  CDR3 for alpha chain variable domain of TCR clone 102357 (TRAV8-4, TRAJ10)
CAAFTGGGNKLTF

SEQ ID NO: 204714 - protein, 15 aa, Homo sapiens
  CDR3 for beta chain variable domain of TCR clone 102357 (TRBV2, TRBJ2-3)
CASSDFEKATETQYF

SEQ ID NO: 204715 - protein, 12 aa, Homo sapiens
  CDR3 for alpha chain variable domain of TCR clone 102358 (TRAV12-3, TRAJ17)
CAMTLTGNKLTF

SEQ ID NO: 204716 - protein, 16 aa, Homo sapiens
  CDR3 for beta chain variable domain of TCR clone 102358 (TRBV3-1, TRBJ2-5)
CASSQDWASGQETQYF

SEQ ID NO: 204717 - protein, 16 aa, Homo sapiens
  CDR3 for alpha chain variable domain of TCR clone 102359 (TRAV12-3, TRAJ53)
CAMSPGSGGSNYKLTF

SEQ ID NO: 204718 - protein, 12 aa, Homo sapiens
  CDR3 for beta chain variable domain of TCR clone 102359 (TRBV4-3, TRBJ2-1)
CASSLSGYEQFF

SEQ ID NO: 204719 - protein, 13 aa, Homo sapiens
  CDR3 for alpha chain variable domain of TCR clone 102360 (TRAV21, TRAJ57)
CAVTQGGSEKLVF

SEQ ID NO: 204720 - protein, 16 aa, Homo sapiens
  CDR3 for beta chain variable domain of TCR clone 102360 (TRBV7-3, TRBJ2-1)
CASSLEGYRSYNEQFF

SEQ ID NO: 204721 - protein, 16 aa, Homo sapiens
  CDR3 for alpha chain variable domain of TCR clone 102361 (TRAV3, TRAJ37)
CAVRGKGSGNTGKLIF

SEQ ID NO: 204722 - protein, 12 aa, Homo sapiens
  CDR3 for beta chain variable domain of TCR clone 102361 (TRBV28, TRBJ2-3)
CASSLYRDTQYF

SEQ ID NO: 204723 - protein, 12 aa, Homo sapiens
  CDR3 for alpha chain variable domain of TCR clone 102362 (TRAV12-3, TRAJ20)
CAMVRGDYKLSL

SEQ ID NO: 204724 - protein, 11 aa, Homo sapiens
  CDR3 for beta chain variable domain of TCR clone 102362 (TRBV29-1, TRBJ2-5)
CSEDRTGTQYF

SEQ ID NO: 204725 - protein, 16 aa, Homo sapiens
  CDR3 for alpha chain variable domain of TCR clone 102363 (TRAV3, TRAJ10)
CAVRDMRAGGGNKLTF

SEQ ID NO: 204726 - protein, 15 aa, Homo sapiens
  CDR3 for beta chain variable domain of TCR clone 102363 (TRBV11-1, TRBJ2-7)
CASSLNYGASYEQYF

SEQ ID NO: 204727 - protein, 14 aa, Homo sapiens
  CDR3 for alpha chain variable domain of TCR clone 102364 (TRAV12-3, TRAJ54)
CAMRGIQGAQKLVF

SEQ ID NO: 204728 - protein, 12 aa, Homo sapiens
  CDR3 for beta chain variable domain of TCR clone 102364 (TRBV7-9, TRBJ2-7)
CASSIKREEQYF

SEQ ID NO: 204729 - protein, 14 aa, Homo sapiens
  CDR3 for alpha chain variable domain of TCR clone 102365 (TRAV12-2, TRAJ13)
CAVKKTGGYQKVTF

SEQ ID NO: 204730 - protein, 12 aa, Homo sapiens
  CDR3 for beta chain variable domain of TCR clone 102365 (TRBV7-6, TRBJ2-5)
CASSLSQETQYF

SEQ ID NO: 204731 - protein, 17 aa, Homo sapiens
  CDR3 for alpha chain variable domain of TCR clone 102366 (TRAV3, TRAJ6)
CAVRDGPRAGGSYIPTF

SEQ ID NO: 204732 - protein, 14 aa, Homo sapiens
  CDR3 for beta chain variable domain of TCR clone 102366 (TRBV5-1, TRBJ1-1)
CASSLVSINTEAFF

SEQ ID NO: 204733 - protein, 14 aa, Homo sapiens
  CDR3 for alpha chain variable domain of TCR clone 102367 (TRAV20, TRAJ20)
CAVRRGYNDYKLSF

SEQ ID NO: 204734 - protein, 13 aa, Homo sapiens
  CDR3 for beta chain variable domain of TCR clone 102367 (TRBV19, TRBJ2-5)
CASSETAPEAQYF

SEQ ID NO: 204735 - protein, 18 aa, Homo sapiens
  CDR3 for alpha chain variable domain of TCR clone 102368 (TRAV26-2, TRAJ54)
CILRDVEVGIQGAQKLVF

SEQ ID NO: 204736 - protein, 16 aa, Homo sapiens
  CDR3 for beta chain variable domain of TCR clone 102368 (TRBV6-1, TRBJ2-5)
CASSETLERGAETQYF

SEQ ID NO: 204737 - protein, 12 aa, Homo sapiens
  CDR3 for alpha chain variable domain of TCR clone 102369 (TRAV12-1, TRAJ40)
CVVYSGTYKYIF

SEQ ID NO: 204738 - protein, 14 aa, Homo sapiens
  CDR3 for beta chain variable domain of TCR clone 102369 (TRBV7-9, TRBJ2-5)
CSSSLDTAQETQYF

SEQ ID NO: 204739 - protein, 14 aa, Homo sapiens
  CDR3 for alpha chain variable domain of TCR clone 102370 (TRAV12-3, TRAJ10)
SHLPLTGGGNKLTF

SEQ ID NO: 204740 - protein, 13 aa, Homo sapiens
  CDR3 for beta chain variable domain of TCR clone 102370 (TRBV12-4, TRBJ2-7)
CASSFVRGYEQYF

SEQ ID NO: 204741 - protein, 14 aa, Homo sapiens
  CDR3 for alpha chain variable domain of TCR clone 102371 (TRAV12-3, TRAJ15)
CAMIPPQAGTALVF

SEQ ID NO: 204742 - protein, 12 aa, Homo sapiens
  CDR3 for beta chain variable domain of TCR clone 102371 (TRBV11-2, TRBJ2-2)
CASSLGGGELFF

SEQ ID NO: 204743 - protein, 13 aa, Homo sapiens
  CDR3 for alpha chain variable domain of TCR clone 102372 (TRAV21, TRAJ27)
CAARPGNDGKSTF

SEQ ID NO: 204744 - protein, 14 aa, Homo sapiens
  CDR3 for beta chain variable domain of TCR clone 102372 (TRBV7-6, TRBJ2-3)
CASSLGTVTDTQYF

SEQ ID NO: 204745 - protein, 13 aa, Homo sapiens
  CDR3 for alpha chain variable domain of TCR clone 102373 (TRAV2, TRAJ29)
CAAGNSGNTPLVF

SEQ ID NO: 204746 - protein, 15 aa, Homo sapiens
  CDR3 for beta chain variable domain of TCR clone 102373 (TRBV5-1, TRBJ2-3)
CASSVTSGSTDTQYF

SEQ ID NO: 204747 - protein, 12 aa, Homo sapiens
  CDR3 for alpha chain variable domain of TCR clone 102374 (TRAV13-2, TRAJ23)
CAERHRGGKLIF

SEQ ID NO: 204748 - protein, 15 aa, Homo sapiens
  CDR3 for beta chain variable domain of TCR clone 102374 (TRBV19, TRBJ1-2)
CASSVGQVLNYGYTL

SEQ ID NO: 204749 - protein, 12 aa, Homo sapiens
  CDR3 for alpha chain variable domain of TCR clone 102375 (TRAV21, TRAJ23)
CAVMLQGGRLIF

SEQ ID NO: 204750 - protein, 14 aa, Homo sapiens
  CDR3 for beta chain variable domain of TCR clone 102375 (TRBV7-9, TRBJ1-4)
CAITEGEANEKLFF

SEQ ID NO: 204751 - protein, 16 aa, Homo sapiens
  CDR3 for alpha chain variable domain of TCR clone 102376 (TRAV12-3, TRAJ53)
GAMSPGSGGSNYKLTF

SEQ ID NO: 204752 - protein, 11 aa, Homo sapiens
  CDR3 for beta chain variable domain of TCR clone 102376 (TRBV29-1, TRBJ2-5)
CSEDRTGTQYF

SEQ ID NO: 204753 - protein, 13 aa, Homo sapiens
  CDR3 for alpha chain variable domain of TCR clone 102377 (TRAV21, TRAJ27)
CAARPGNAGKSPF

SEQ ID NO: 204754 - protein, 16 aa, Homo sapiens
  CDR3 for beta chain variable domain of TCR clone 102377 (TRBV20-1, TRBJ1-2)
CSASMGQGVANYGYTF

SEQ ID NO: 204755 - protein, 13 aa, Homo sapiens
  CDR3 for alpha chain variable domain of TCR clone 102378 (TRAV17, TRAJ5)
CPPMDTGRRALTF

SEQ ID NO: 204756 - protein, 13 aa, Homo sapiens
  CDR3 for beta chain variable domain of TCR clone 102378 (TRBV7-9, TRBJ1-2)
CASSLKQNYGYTF

SEQ ID NO: 204757 - protein, 14 aa, Homo sapiens
  CDR3 for alpha chain variable domain of TCR clone 102379 (TRAV17, TRAJ35)
CATDRPGFGNVLHC

SEQ ID NO: 204758 - protein, 14 aa, Homo sapiens
  CDR3 for beta chain variable domain of TCR clone 102379 (TRBV7-8, TRBJ2-3)
CVSSLKAGTDTQYF

SEQ ID NO: 204759 - protein, 16 aa, Homo sapiens
  CDR3 for alpha chain variable domain of TCR clone 102380 (TRAV22, TRAJ45)
CAVERGKRGGADGLTF

SEQ ID NO: 204760 - protein, 16 aa, Homo sapiens
  CDR3 for beta chain variable domain of TCR clone 102380 (TRBV7-3, TRBJ2-2)
CASSLKRGTLSGELFF

SEQ ID NO: 204761 - protein, 16 aa, Homo sapiens
  CDR3 for alpha chain variable domain of TCR clone 102381 (TRAV26-2, TRAJ45)
CTTASPIGGGADGLTF

SEQ ID NO: 204762 - protein, 20 aa, Homo sapiens
  CDR3 for beta chain variable domain of TCR clone 102381 (TRBV28, TRBJ2-1)
YASTPIGRSPGLAGGNEQFF

SEQ ID NO: 204763 - protein, 13 aa, Homo sapiens
  CDR3 for alpha chain variable domain of TCR clone 102382 (TRAV23/DV6, TRAJ22)
CSPYSGSARQLTF

SEQ ID NO: 204764 - protein, 15 aa, Homo sapiens
  CDR3 for beta chain variable domain of TCR clone 102382 (TRBV11-2, TRBJ1-6)
CASSLDPWAVSPLHF

SEQ ID NO: 204765 - protein, 15 aa, Homo sapiens
  CDR3 for alpha chain variable domain of TCR clone 102383 (TRAV27, TRAJ38)
CAARRNAGNNRKLIW

SEQ ID NO: 204766 - protein, 15 aa, Homo sapiens
  CDR3 for beta chain variable domain of TCR clone 102383 (TRBV5-1, TRBJ2-1)
CASGPPRAPYNEQFF

SEQ ID NO: 204767 - protein, 16 aa, Homo sapiens
  CDR3 for alpha chain variable domain of TCR clone 102384 (TRAV12-2, TRAJ28)
CAVNEYSGAGSYQLTF

SEQ ID NO: 204768 - protein, 15 aa, Homo sapiens
  CDR3 for beta chain variable domain of TCR clone 102384 (TRBV5-5, TRBJ2-2)
CASSRQASGAGELFF

SEQ ID NO: 204769 - protein, 11 aa, Homo sapiens
  CDR3 for alpha chain variable domain of TCR clone 102385 (TRAV16, TRAJ31)
CALFNNARLMF

SEQ ID NO: 204770 - protein, 15 aa, Homo sapiens
  CDR3 for beta chain variable domain of TCR clone 102385 (TRBV18, TRBJ1-1)
CASSPRQGESTEAFF

SEQ ID NO: 204771 - protein, 12 aa, Homo sapiens
  CDR3 for alpha chain variable domain of TCR clone 102386 (TRAV1-1, TRAJ39)
CAVPVVGNMLTF

SEQ ID NO: 204772 - protein, 15 aa, Homo sapiens
  CDR3 for beta chain variable domain of TCR clone 102386 (TRBV19, TRBJ1-6)
CASSTQGAVGSPLDF

SEQ ID NO: 204773 - protein, 13 aa, Homo sapiens
  CDR3 for alpha chain variable domain of TCR clone 102387 (TRAV2, TRAJ40)
CAVVTSGTYKYIF

SEQ ID NO: 204774 - protein, 15 aa, Homo sapiens
  CDR3 for beta chain variable domain of TCR clone 102387 (TRBV11-3, TRBJ2-3)
WASLKDGREGDTQYF

SEQ ID NO: 204775 - protein, 11 aa, Homo sapiens
  CDR3 for alpha chain variable domain of TCR clone 102388 (TRAV13-1, TRAJ47)
CAAAPRNKLVF

SEQ ID NO: 204776 - protein, 20 aa, Homo sapiens
  CDR3 for beta chain variable domain of TCR clone 102388 (TRBV28, TRBJ2-1)
CASTPIGRSPGLAGGNEQFF

SEQ ID NO: 204777 - protein, 11 aa, Homo sapiens
  CDR3 for alpha chain variable domain of TCR clone 102389 (TRAV13-1, TRAJ15)
CAATLGTALIF

SEQ ID NO: 204778 - protein, 13 aa, Homo sapiens
  CDR3 for beta chain variable domain of TCR clone 102389 (TRBV7-2, TRBJ2-1)
CASSLGVYNEQFF

SEQ ID NO: 204779 - protein, 14 aa, Homo sapiens
  CDR3 for alpha chain variable domain of TCR clone 102390 (TRAV2, TRAJ20)
CAVEDGTNDYKLSF

SEQ ID NO: 204780 - protein, 13 aa, Homo sapiens
  CDR3 for beta chain variable domain of TCR clone 102390 (TRBV20-1, TRBJ1-1)
CSARGGGNTEAFF

SEQ ID NO: 204781 - protein, 14 aa, Homo sapiens
  CDR3 for alpha chain variable domain of TCR clone 102391 (TRAV26-1, TRAJ38)
CIADNAGNKRKLIW

SEQ ID NO: 204782 - protein, 16 aa, Homo sapiens
  CDR3 for beta chain variable domain of TCR clone 102391 (TRBV19, TRBJ2-1)
CASSKAGPSSYNEQFF

SEQ ID NO: 204783 - protein, 15 aa, Homo sapiens
  CDR3 for alpha chain variable domain of TCR clone 102392 (TRAV17, TRAJ56)
CATDANTGANSKLKF

SEQ ID NO: 204784 - protein, 12 aa, Homo sapiens
  CDR3 for beta chain variable domain of TCR clone 102392 (TRBV7-8, TRBJ2-7)
CASSLGDREQYF

SEQ ID NO: 204785 - protein, 13 aa, Homo sapiens
  CDR3 for alpha chain variable domain of TCR clone 102393 (TRAV2, TRAJ21)
CAVEDLNFNKFYF

SEQ ID NO: 204786 - protein, 17 aa, Homo sapiens
  CDR3 for beta chain variable domain of TCR clone 102393 (TRBV7-8, TRBJ2-6)
CASSAGTGGAGANVLTF

SEQ ID NO: 204787 - protein, 17 aa, Homo sapiens
  CDR3 for alpha chain variable domain of TCR clone 102394 (TRAV16, TRAJ58)
CITVLSNGETSGSRLTF

SEQ ID NO: 204788 - protein, 17 aa, Homo sapiens
  CDR3 for beta chain variable domain of TCR clone 102394 (TRBV18, TRBJ2-1)
CAGSKGLSGGADNEQFF

SEQ ID NO: 204789 - protein, 15 aa, Homo sapiens
  CDR3 for alpha chain variable domain of TCR clone 102395 (TRAV26-1, TRAJ29)
CIVRVEGSGNTPLVF

SEQ ID NO: 204790 - protein, 13 aa, Homo sapiens
  CDR3 for beta chain variable domain of TCR clone 102395 (TRBV25-1, TRBJ2-5)
CASSPGGVETQYF

SEQ ID NO: 204791 - protein, 16 aa, Homo sapiens
  CDR3 for alpha chain variable domain of TCR clone 102396 (TRAV17, TRAJ35)
CATAEGGIGFVNVLHC

SEQ ID NO: 204792 - protein, 16 aa, Homo sapiens
  CDR3 for beta chain variable domain of TCR clone 102396 (TRBV6-5, TRBJ2-7)
CASSSDPTSGFYEQYF

SEQ ID NO: 204793 - protein, 13 aa, Homo sapiens
  CDR3 for alpha chain variable domain of TCR clone 102397 (TRAV35, TRAJ43)
CAGYPYNNNDMRC

SEQ ID NO: 204794 - protein, 15 aa, Homo sapiens
  CDR3 for beta chain variable domain of TCR clone 102397 (TRBV25-1, TRBJ1-4)
CASSKRIATNEKLFF

SEQ ID NO: 204795 - protein, 13 aa, Homo sapiens
  CDR3 for alpha chain variable domain of TCR clone 102398 (TRAV8-1, TRAJ32)
CAADGGATNKLIL

SEQ ID NO: 204796 - protein, 18 aa, Homo sapiens
  CDR3 for beta chain variable domain of TCR clone 102398 (TRBV18, TRBJ2-3)
CASSYTSGAAGGTDTQYF

SEQ ID NO: 204797 - protein, 13 aa, Homo sapiens
  CDR3 for alpha chain variable domain of TCR clone 102399 (TRAV8-3, TRAJ4)
WVFYSGGYNKLIF

SEQ ID NO: 204798 - protein, 17 aa, Homo sapiens
  CDR3 for beta chain variable domain of TCR clone 102399 (TRBV7-8, TRBJ2-6)
CASSAGTGGAGANVLTF

SEQ ID NO: 204799 - protein, 14 aa, Homo sapiens
  CDR3 for alpha chain variable domain of TCR clone 102400 (TRAV13-1, TRAJ44)
CAAKATGTASKLTF

SEQ ID NO: 204800 - protein, 15 aa, Homo sapiens
  CDR3 for beta chain variable domain of TCR clone 102400 (TRBV7-9, TRBJ1-4)
CASSARTGGNEKLFF

SEQ ID NO: 204801 - protein, 13 aa, Homo sapiens
  CDR3 for alpha chain variable domain of TCR clone 102401 (TRAV8-3, TRAJ36)
CAVGATGANILFF

SEQ ID NO: 204802 - protein, 15 aa, Homo sapiens
  CDR3 for beta chain variable domain of TCR clone 102401 (TRBV7-2, TRBJ1-2)
CASSPRAGWNYGYTF

SEQ ID NO: 204803 - protein, 15 aa, Homo sapiens
  CDR3 for alpha chain variable domain of TCR clone 102402 (TRAV17, TRAJ40)
FATVSSTSGTYKYIF

SEQ ID NO: 204804 - protein, 15 aa, Homo sapiens
  CDR3 for beta chain variable domain of TCR clone 102402 (TRBV5-1, TRBJ2-1)
CASSQAGYWWNEQFF

SEQ ID NO: 204805 - protein, 12 aa, Homo sapiens
  CDR3 for alpha chain variable domain of TCR clone 102403 (TRAV10, TRAJ6)
CVVSEGSYIPTF

SEQ ID NO: 204806 - protein, 14 aa, Homo sapiens
  CDR3 for beta chain variable domain of TCR clone 102403 (TRBV7-2, TRBJ2-7)
CASSPKTSFYEQYF

SEQ ID NO: 204807 - protein, 14 aa, Homo sapiens
  CDR3 for alpha chain variable domain of TCR clone 102404 (TRAV20, TRAJ29)
CAVQAWVGNTPLVF

SEQ ID NO: 204808 - protein, 18 aa, Homo sapiens
  CDR3 for beta chain variable domain of TCR clone 102404 (TRBV20-1, TRBJ2-3)
CSASGLAGGPGTTDTQYF

SEQ ID NO: 204809 - protein, 12 aa, Homo sapiens
  CDR3 for alpha chain variable domain of TCR clone 102405 (TRAV12-1, TRAJ34)
CVVAGATDKLIF

SEQ ID NO: 204810 - protein, 13 aa, Homo sapiens
  CDR3 for beta chain variable domain of TCR clone 102405 (TRBV4-2, TRBJ1-1)
CASSQAGNTEAFF

SEQ ID NO: 204811 - protein, 16 aa, Homo sapiens
  CDR3 for alpha chain variable domain of TCR clone 102406 (TRAV30, TRAJ24)
CGTEIVDADSWGKFQF

SEQ ID NO: 204812 - protein, 14 aa, Homo sapiens
  CDR3 for beta chain variable domain of TCR clone 102406 (TRBV7-2, TRBJ2-7)
CASSRKTSFYEQYF

SEQ ID NO: 204813 - protein, 10 aa, Homo sapiens
  CDR3 for alpha chain variable domain of TCR clone 102407 (TRAV36/DV7, TRAJ13)
CAAGYQKVTF

SEQ ID NO: 204814 - protein, 15 aa, Homo sapiens
  CDR3 for beta chain variable domain of TCR clone 102407 (TRBV11-2, TRBJ2-1)
CASSLGTSGLNEQFF

SEQ ID NO: 204815 - protein, 13 aa, Homo sapiens
  CDR3 for alpha chain variable domain of TCR clone 102408 (TRAV2, TRAJ40)
CAVVTSGTYKYIF

SEQ ID NO: 204816 - protein, 16 aa, Homo sapiens
  CDR3 for beta chain variable domain of TCR clone 102408 (TRBV7-2, TRBJ2-5)
CASSSKWLSGQETQYF

SEQ ID NO: 204817 - protein, 14 aa, Homo sapiens
  CDR3 for alpha chain variable domain of TCR clone 102409 (TRAV26-1, TRAJ21)
CIVRPPYNFNKFYF

SEQ ID NO: 204818 - protein, 16 aa, Homo sapiens
  CDR3 for beta chain variable domain of TCR clone 102409 (TRBV12-4, TRBJ2-7)
CASSLIGGTGTYEQYF

SEQ ID NO: 204819 - protein, 13 aa, Homo sapiens
  CDR3 for alpha chain variable domain of TCR clone 102410 (TRAV8-6, TRAJ54)
CAVSEEGAQKLVF

SEQ ID NO: 204820 - protein, 16 aa, Homo sapiens
  CDR3 for beta chain variable domain of TCR clone 102410 (TRBV7-3, TRBJ2-1)
CASSKPLAGGYNEQFF

SEQ ID NO: 204821 - protein, 15 aa, Homo sapiens
  CDR3 for alpha chain variable domain of TCR clone 102411 (TRAV3, TRAJ3)
CAVRDRDSSASKIIF

SEQ ID NO: 204822 - protein, 18 aa, Homo sapiens
  CDR3 for beta chain variable domain of TCR clone 102411 (TRBV25-1, TRBJ1-2)
CASSWLQNGQGLIFGYTF

SEQ ID NO: 204823 - protein, 14 aa, Homo sapiens
  CDR3 for alpha chain variable domain of TCR clone 102412 (TRAV16, TRAJ42)
CAILAGGSQGNLIF

SEQ ID NO: 204824 - protein, 13 aa, Homo sapiens
  CDR3 for beta chain variable domain of TCR clone 102412 (TRBV7-9, TRBJ1-2)
CASSLKQNYGYTF

SEQ ID NO: 204825 - protein, 12 aa, Homo sapiens
  CDR3 for alpha chain variable domain of TCR clone 102413 (TRAV13-1, TRAJ49)
CAAPNTGNQFYF

SEQ ID NO: 204826 - protein, 17 aa, Homo sapiens
  CDR3 for beta chain variable domain of TCR clone 102413 (TRBV25-1, TRBJ2-7)
CDSSDARVVFSSYEQYF

SEQ ID NO: 204827 - protein, 15 aa, Homo sapiens
  CDR3 for alpha chain variable domain of TCR clone 102414 (TRAV12-2, TRAJ43)
CAFDMRFGAGTRLTG

SEQ ID NO: 204828 - protein, 13 aa, Homo sapiens
  CDR3 for beta chain variable domain of TCR clone 102414 (TRBV6-1, TRBJ1-6)
CASSSSWDSPLHF

SEQ ID NO: 204829 - protein, 12 aa, Homo sapiens
  CDR3 for alpha chain variable domain of TCR clone 102415 (TRAV12-3, TRAJ17)
CAMTLTGNKLTF

SEQ ID NO: 204830 - protein, 13 aa, Homo sapiens
  CDR3 for beta chain variable domain of TCR clone 102415 (TRBV2, TRBJ2-7)
CASSGGIAYEQYF

SEQ ID NO: 204831 - protein, 14 aa, Homo sapiens
  CDR3 for alpha chain variable domain of TCR clone 102416 (TRAV26-1, TRAJ21)
CIVSPPYNFNKFYF

SEQ ID NO: 204832 - protein, 14 aa, Homo sapiens
  CDR3 for beta chain variable domain of TCR clone 102416 (TRBV11-3, TRBJ2-1)
CASSATTSGSIQFF

SEQ ID NO: 204833 - protein, 12 aa, Homo sapiens
  CDR3 for alpha chain variable domain of TCR clone 102417 (TRAV21, TRAJ3)
CCFYSSASKIIF

SEQ ID NO: 204834 - protein, 16 aa, Homo sapiens
  CDR3 for beta chain variable domain of TCR clone 102417 (TRBV19, TRBJ2-1)
CASSNAGPSSYNEQFF

SEQ ID NO: 204835 - protein, 14 aa, Homo sapiens
  CDR3 for alpha chain variable domain of TCR clone 102418 (TRAV17, TRAJ37)
CATDGSSTTGKLIF

SEQ ID NO: 204836 - protein, 13 aa, Homo sapiens
  CDR3 for beta chain variable domain of TCR clone 102418 (TRBV11-2, TRBJ2-1)
CASSLDLVNEQFF

SEQ ID NO: 204837 - protein, 12 aa, Homo sapiens
  CDR3 for alpha chain variable domain of TCR clone 102419 (TRAV13-2, TRAJ23)
CAERHRGGKLIF

SEQ ID NO: 204838 - protein, 15 aa, Homo sapiens
  CDR3 for beta chain variable domain of TCR clone 102419 (TRBV7-2, TRBJ2-7)
CASSLALGSAYEQYF

SEQ ID NO: 204839 - protein, 14 aa, Homo sapiens
  CDR3 for alpha chain variable domain of TCR clone 102420 (TRAV12-2, TRAJ17)
CAALFKAAGNKLTF

SEQ ID NO: 204840 - protein, 16 aa, Homo sapiens
  CDR3 for beta chain variable domain of TCR clone 102420 (TRBV20-1, TRBJ2-2)
CSASTSGIPGAGELFF

SEQ ID NO: 204841 - protein, 11 aa, Homo sapiens
  CDR3 for alpha chain variable domain of TCR clone 102421 (TRAV1-2, TRAJ34)
CAGYNADKLIF

SEQ ID NO: 204842 - protein, 16 aa, Homo sapiens
  CDR3 for beta chain variable domain of TCR clone 102421 (TRBV10-3, TRBJ2-1)
CAISGVGDGGGGEQFF

SEQ ID NO: 204843 - protein, 11 aa, Homo sapiens
  CDR3 for alpha chain variable domain of TCR clone 102422 (TRAV4, TRAJ23)
CLVAPGGKHIF

SEQ ID NO: 204844 - protein, 15 aa, Homo sapiens
  CDR3 for beta chain variable domain of TCR clone 102422 (TRBV7-2, TRBJ2-1)
CASSFQADEYNEQFF

SEQ ID NO: 204845 - protein, 11 aa, Homo sapiens
  CDR3 for alpha chain variable domain of TCR clone 102423 (TRAV12-3, TRAJ43)
CAMSVSNDMRF

SEQ ID NO: 204846 - protein, 15 aa, Homo sapiens
  CDR3 for beta chain variable domain of TCR clone 102423 (TRBV6-5, TRBJ2-1)
CASSYDAGAGNEQFF

SEQ ID NO: 204847 - protein, 10 aa, Homo sapiens
  CDR3 for alpha chain variable domain of TCR clone 102424 (TRAV30, TRAJ48)
CGIGNEKLIF

SEQ ID NO: 204848 - protein, 14 aa, Homo sapiens
  CDR3 for beta chain variable domain of TCR clone 102424 (TRBV7-6, TRBJ2-3)
CASSVAGGTDTQYF

SEQ ID NO: 204849 - protein, 13 aa, Homo sapiens
  CDR3 for alpha chain variable domain of TCR clone 102425 (TRAV27, TRAJ49)
CAPRPYTGNQFYF

SEQ ID NO: 204850 - protein, 13 aa, Homo sapiens
  CDR3 for beta chain variable domain of TCR clone 102425 (TRBV20-1, TRBJ1-1)
CSARGGGNTEAFF

SEQ ID NO: 204851 - protein, 18 aa, Homo sapiens
  CDR3 for alpha chain variable domain of TCR clone 102426 (TRAV12-3, TRAJ52)
CAMSRTNAGGTSYGKLTF

SEQ ID NO: 204852 - protein, 16 aa, Homo sapiens
  CDR3 for beta chain variable domain of TCR clone 102426 (TRBV2, TRBJ2-1)
CASSVGGSLSYNEQFF

SEQ ID NO: 204853 - protein, 12 aa, Homo sapiens
  CDR3 for alpha chain variable domain of TCR clone 102427 (TRAV35, TRAJ39)
LAPNNAGNMLTF

SEQ ID NO: 204854 - protein, 17 aa, Homo sapiens
  CDR3 for beta chain variable domain of TCR clone 102427 (TRBV11-2, TRBJ2-1)
CASSLYPPGVEYNEQFF

SEQ ID NO: 204855 - protein, 12 aa, Homo sapiens
  CDR3 for alpha chain variable domain of TCR clone 102428 (TRAV27, )
CAARRNAATTIS

SEQ ID NO: 204856 - protein, 13 aa, Homo sapiens
  CDR3 for beta chain variable domain of TCR clone 102428 (TRBV12-5, TRBJ2-3)
CASGDRQSDTQYF

SEQ ID NO: 204857 - protein, 13 aa, Homo sapiens
  CDR3 for alpha chain variable domain of TCR clone 102429 (TRAV26-2, TRAJ43)
CTLRAVNNNDMRF

SEQ ID NO: 204858 - protein, 11 aa, Homo sapiens
  CDR3 for beta chain variable domain of TCR clone 102429 (TRBV29-1, TRBJ2-5)
CSEDRTGTQYF

SEQ ID NO: 204859 - protein, 16 aa, Homo sapiens
  CDR3 for alpha chain variable domain of TCR clone 102430 (TRAV12-3, TRAJ53)
CAVSPGSGGSNYKLTF

SEQ ID NO: 204860 - protein, 12 aa, Homo sapiens
  CDR3 for beta chain variable domain of TCR clone 102430 (TRBV7-8, TRBJ2-7)
CASSLGDREQYF

SEQ ID NO: 204861 - protein, 11 aa, Homo sapiens
  CDR3 for alpha chain variable domain of TCR clone 102431 (TRAV13-1, TRAJ15)
CAATPGTALIF

SEQ ID NO: 204862 - protein, 18 aa, Homo sapiens
  CDR3 for beta chain variable domain of TCR clone 102431 (TRBV18, TRBJ2-3)
CASSYTSGAAGGTDTQYF

SEQ ID NO: 204863 - protein, 13 aa, Homo sapiens
  CDR3 for alpha chain variable domain of TCR clone 102432 (TRAV2, TRAJ15)
CAVASQAGTALIF

SEQ ID NO: 204864 - protein, 12 aa, Homo sapiens
  CDR3 for beta chain variable domain of TCR clone 102432 (TRBV19, TRBJ2-1)
CASSRQGAEQFF

SEQ ID NO: 204865 - protein, 15 aa, Homo sapiens
  CDR3 for alpha chain variable domain of TCR clone 102433 (TRAV2, TRAJ15)
CAVEDRGQAGTALIF

SEQ ID NO: 204866 - protein, 13 aa, Homo sapiens
  CDR3 for beta chain variable domain of TCR clone 102433 (TRBV10-2, TRBJ2-7)
CASRASGGYEQYF

SEQ ID NO: 204867 - protein, 14 aa, Homo sapiens
  CDR3 for alpha chain variable domain of TCR clone 102434 (TRAV1-2, TRAJ16)
CAVNRFSDGQKLLF

SEQ ID NO: 204868 - protein, 12 aa, Homo sapiens
  CDR3 for beta chain variable domain of TCR clone 102434 (TRBV11-2, TRBJ2-1)
CASSLGNNEQFF

SEQ ID NO: 204869 - protein, 14 aa, Homo sapiens
  CDR3 for alpha chain variable domain of TCR clone 102435 (TRAV12-3, TRAJ9)
CTMSPNTGGFKTIF

SEQ ID NO: 204870 - protein, 12 aa, Homo sapiens
  CDR3 for beta chain variable domain of TCR clone 102435 (TRBV19, TRBJ1-5)
CASSIAQQPQHF

SEQ ID NO: 204871 - protein, 15 aa, Homo sapiens
  CDR3 for alpha chain variable domain of TCR clone 102436 (TRAV26-1, TRAJ17)
FIVRVVKAAGNKLTF

SEQ ID NO: 204872 - protein, 16 aa, Homo sapiens
  CDR3 for beta chain variable domain of TCR clone 102436 (TRBV7-9, TRBJ2-1)
CASSLVSGPSYNEQFF

SEQ ID NO: 204873 - protein, 12 aa, Homo sapiens
  CDR3 for alpha chain variable domain of TCR clone 102437 (TRAV29/DV5, TRAJ49)
CAATDTGNQFYF

SEQ ID NO: 204874 - protein, 12 aa, Homo sapiens
  CDR3 for beta chain variable domain of TCR clone 102437 (TRBV12-4, TRBJ2-7)
CASRLGGYEQYF

SEQ ID NO: 204875 - protein, 14 aa, Homo sapiens
  CDR3 for alpha chain variable domain of TCR clone 102438 (TRAV12-1, TRAJ9)
CVVNRGTGGFKTIF

SEQ ID NO: 204876 - protein, 15 aa, Homo sapiens
  CDR3 for beta chain variable domain of TCR clone 102438 (TRBV20-1, TRBJ2-7)
CSARDRVSGMDEQYF

SEQ ID NO: 204877 - protein, 15 aa, Homo sapiens
  CDR3 for alpha chain variable domain of TCR clone 102439 (TRAV3, TRAJ5)
CAVRDRKTGRRALTF

SEQ ID NO: 204878 - protein, 12 aa, Homo sapiens
  CDR3 for beta chain variable domain of TCR clone 102439 (TRBV28, TRBJ2-6)
CAIQAGANVLTF

SEQ ID NO: 204879 - protein, 12 aa, Homo sapiens
  CDR3 for alpha chain variable domain of TCR clone 102440 (TRAV17, TRAJ20)
CATDANDYKLSF

SEQ ID NO: 204880 - protein, 17 aa, Homo sapiens
  CDR3 for beta chain variable domain of TCR clone 102440 (TRBV5-1, TRBJ2-2)
CASSMAGPAGGTGELFF

SEQ ID NO: 204881 - protein, 13 aa, Homo sapiens
  CDR3 for alpha chain variable domain of TCR clone 102441 (TRAV12-3, TRAJ7)
CAMSASGNNRLAF

SEQ ID NO: 204882 - protein, 14 aa, Homo sapiens
  CDR3 for beta chain variable domain of TCR clone 102441 (TRBV13, TRBJ2-5)
CASSLGPGGETQYF

SEQ ID NO: 204883 - protein, 16 aa, Homo sapiens
  CDR3 for alpha chain variable domain of TCR clone 102442 (TRAV3, TRAJ37)
CAVRPHGSGNTGKLIF

SEQ ID NO: 204884 - protein, 11 aa, Homo sapiens
  CDR3 for beta chain variable domain of TCR clone 102442 (TRBV6-1, TRBJ2-1)
CASISSNEQFF

SEQ ID NO: 204885 - protein, 17 aa, Homo sapiens
  CDR3 for alpha chain variable domain of TCR clone 102443 (TRAV3, TRAJ6)
CAVRDGPRAGGSYIPTF

SEQ ID NO: 204886 - protein, 15 aa, Homo sapiens
  CDR3 for beta chain variable domain of TCR clone 102443 (TRBV12-4, TRBJ2-3)
CASSLAERPTDTQYF

SEQ ID NO: 204887 - protein, 12 aa, Homo sapiens
  CDR3 for alpha chain variable domain of TCR clone 102444 (TRAV12-3, TRAJ40)
CAMGSGNYKYIF

SEQ ID NO: 204888 - protein, 15 aa, Homo sapiens
  CDR3 for beta chain variable domain of TCR clone 102444 (TRBV7-3, TRBJ2-2)
CASSETGQGTGELFF

SEQ ID NO: 204889 - protein, 13 aa, Homo sapiens
  CDR3 for alpha chain variable domain of TCR clone 102445 (TRAV4, TRAJ42)
CLVGGGSQGHLIF

SEQ ID NO: 204890 - protein, 16 aa, Homo sapiens
  CDR3 for beta chain variable domain of TCR clone 102445 (TRBV5-1, TRBJ2-3)
CASSLQGRVGADTQYF

SEQ ID NO: 204891 - protein, 15 aa, Homo sapiens
  CDR3 for alpha chain variable domain of TCR clone 102446 (TRAV4, TRAJ39)
CLVGPNNNAGNMLTY

SEQ ID NO: 204892 - protein, 13 aa, Homo sapiens
  CDR3 for beta chain variable domain of TCR clone 102446 (TRBV11-2, TRBJ2-5)
CASSSTGEETQYF

SEQ ID NO: 204893 - protein, 13 aa, Homo sapiens
  CDR3 for alpha chain variable domain of TCR clone 102447 (TRAV20, TRAJ54)
CAVQAGGAQKLVF

SEQ ID NO: 204894 - protein, 14 aa, Homo sapiens
  CDR3 for beta chain variable domain of TCR clone 102447 (TRBV3-1, TRBJ1-2)
CASSPEDPFYGYTF

SEQ ID NO: 204895 - protein, 14 aa, Homo sapiens
  CDR3 for alpha chain variable domain of TCR clone 102448 (TRAV12-1, TRAJ13)
CVVIDSGGYQKVTF

SEQ ID NO: 204896 - protein, 11 aa, Homo sapiens
  CDR3 for beta chain variable domain of TCR clone 102448 (TRBV19, TRBJ1-1)
CASSTTGQAFF

SEQ ID NO: 204897 - protein, 16 aa, Homo sapiens
  CDR3 for alpha chain variable domain of TCR clone 102449 (TRAV30, TRAJ24)
CGTEIVDADSWGKCQF

SEQ ID NO: 204898 - protein, 15 aa, Homo sapiens
  CDR3 for beta chain variable domain of TCR clone 102449 (TRBV20-1, TRBJ2-7)
CSARDRVSGMDEQYF

SEQ ID NO: 204899 - protein, 16 aa, Homo sapiens
  CDR3 for alpha chain variable domain of TCR clone 102450 (TRAV8-3, TRAJ13)
CAVVLMNSGGYQKVTF

SEQ ID NO: 204900 - protein, 14 aa, Homo sapiens
  CDR3 for beta chain variable domain of TCR clone 102450 (TRBV5-4, TRBJ2-5)
CQQLGGGAKETQYF

SEQ ID NO: 204901 - protein, 13 aa, Homo sapiens
  CDR3 for alpha chain variable domain of TCR clone 102451 (TRAV17, TRAJ9)
CATDYTGGFKTIF

SEQ ID NO: 204902 - protein, 15 aa, Homo sapiens
  CDR3 for beta chain variable domain of TCR clone 102451 (TRBV7-9, TRBJ2-7)
CASSPTGLRTYEQYF

SEQ ID NO: 204903 - protein, 16 aa, Homo sapiens
  CDR3 for alpha chain variable domain of TCR clone 102452 (TRAV16, TRAJ57)
CAPYLITQGGSEKLVL

SEQ ID NO: 204904 - protein, 17 aa, Homo sapiens
  CDR3 for beta chain variable domain of TCR clone 102452 (TRBV24-1, TRBJ2-4)
CATSDAEARGVRNIQYF

SEQ ID NO: 204905 - protein, 12 aa, Homo sapiens
  CDR3 for alpha chain variable domain of TCR clone 102453 (TRAV21, TRAJ11)
CAATLGYSTLTF

SEQ ID NO: 204906 - protein, 14 aa, Homo sapiens
  CDR3 for beta chain variable domain of TCR clone 102453 (TRBV20-1, TRBJ2-7)
CSAPELAGVGEQYF

SEQ ID NO: 204907 - protein, 14 aa, Homo sapiens
  CDR3 for alpha chain variable domain of TCR clone 102454 (TRAV26-1, TRAJ38)
CIADNAGNNRKLIW

SEQ ID NO: 204908 - protein, 13 aa, Homo sapiens
  CDR3 for beta chain variable domain of TCR clone 102454 (TRBV7-7, TRBJ2-3)
CASSLSRADTQYF

SEQ ID NO: 204909 - protein, 14 aa, Homo sapiens
  CDR3 for alpha chain variable domain of TCR clone 102455 (TRAV12-2, TRAJ40)
CTVKIPSGTYKYIF

SEQ ID NO: 204910 - protein, 20 aa, Homo sapiens
  CDR3 for beta chain variable domain of TCR clone 102455 (TRBV28, TRBJ2-1)
CASTPIGRSPGLAGGNEQFF

SEQ ID NO: 204911 - protein, 14 aa, Homo sapiens
  CDR3 for alpha chain variable domain of TCR clone 102456 (TRAV2, TRAJ9)
CAVEDRSGGFKTIF

SEQ ID NO: 204912 - protein, 12 aa, Homo sapiens
  CDR3 for beta chain variable domain of TCR clone 102456 (TRBV12-4, TRBJ2-4)
CASSASGNIQYF

SEQ ID NO: 204913 - protein, 14 aa, Homo sapiens
  CDR3 for alpha chain variable domain of TCR clone 102457 (TRAV13-1, TRAJ20)
CAARPGSNDYQLSF

SEQ ID NO: 204914 - protein, 13 aa, Homo sapiens
  CDR3 for beta chain variable domain of TCR clone 102457 (TRBV20-1, TRBJ1-1)
CSAPPGGHTEAFF

SEQ ID NO: 204915 - protein, 14 aa, Homo sapiens
  CDR3 for alpha chain variable domain of TCR clone 102458 (TRAV13-1, TRAJ44)
CAAKATSTASKLTF

SEQ ID NO: 204916 - protein, 12 aa, Homo sapiens
  CDR3 for beta chain variable domain of TCR clone 102458 (TRBV7-8, TRBJ2-7)
CASSLGDREQYF

SEQ ID NO: 204917 - protein, 16 aa, Homo sapiens
  CDR3 for alpha chain variable domain of TCR clone 102459 (TRAV12-2, TRAJ45)
CAVNMYSGGGADGLTF

SEQ ID NO: 204918 - protein, 15 aa, Homo sapiens
  CDR3 for beta chain variable domain of TCR clone 102459 (TRBV6-3, TRBJ2-7)
CASSSPGTVFYEQYF

SEQ ID NO: 204919 - protein, 11 aa, Homo sapiens
  CDR3 for alpha chain variable domain of TCR clone 102460 (TRAV1-1, TRAJ23)
CAVRQGGKLIF

SEQ ID NO: 204920 - protein, 16 aa, Homo sapiens
  CDR3 for beta chain variable domain of TCR clone 102460 (TRBV19, TRBJ2-3)
CASSPGAASRTDTQYF

SEQ ID NO: 204921 - protein, 14 aa, Homo sapiens
  CDR3 for alpha chain variable domain of TCR clone 102461 (TRAV35, TRAJ13)
CAGSPSGGYQKVTF

SEQ ID NO: 204922 - protein, 13 aa, Homo sapiens
  CDR3 for beta chain variable domain of TCR clone 102461 (TRBV29-1, TRBJ1-1)
CSVGDSRNTDAFF

SEQ ID NO: 204923 - protein, 10 aa, Homo sapiens
  CDR3 for alpha chain variable domain of TCR clone 102462 (TRAV12-2, TRAJ41)
CAVTGYALNF

SEQ ID NO: 204924 - protein, 15 aa, Homo sapiens
  CDR3 for beta chain variable domain of TCR clone 102462 (TRBV4-2, TRBJ2-1)
CASSQDVGLASEQFF

SEQ ID NO: 204925 - protein, 13 aa, Homo sapiens
  CDR3 for alpha chain variable domain of TCR clone 102463 (TRAV17, TRAJ5)
CAPMETGRRALTF

SEQ ID NO: 204926 - protein, 11 aa, Homo sapiens
  CDR3 for beta chain variable domain of TCR clone 102463 (TRBV19, TRBJ1-1)
CASSIGSEAFF

SEQ ID NO: 204927 - protein, 14 aa, Homo sapiens
  CDR3 for alpha chain variable domain of TCR clone 102464 (TRAV38-1, TRAJ40)
CALRPTSGTYKYIF

SEQ ID NO: 204928 - protein, 16 aa, Homo sapiens
  CDR3 for beta chain variable domain of TCR clone 102464 (TRBV2, TRBJ2-5)
CASSARGLGGRETQYF

SEQ ID NO: 204929 - protein, 14 aa, Homo sapiens
  CDR3 for alpha chain variable domain of TCR clone 102465 (TRAV8-3, TRAJ31)
CAVGRGLNNARLMF

SEQ ID NO: 204930 - protein, 15 aa, Homo sapiens
  CDR3 for beta chain variable domain of TCR clone 102465 (TRBV7-2, TRBJ2-2)
CASSLAGGLTGELFF

SEQ ID NO: 204931 - protein, 15 aa, Homo sapiens
  CDR3 for alpha chain variable domain of TCR clone 102466 (TRAV2, TRAJ15)
CAVEDRGQAGTALIF

SEQ ID NO: 204932 - protein, 17 aa, Homo sapiens
  CDR3 for beta chain variable domain of TCR clone 102466 (TRBV5-1, TRBJ2-5)
CASSPVALGQNQETQYF

SEQ ID NO: 204933 - protein, 15 aa, Homo sapiens
  CDR3 for alpha chain variable domain of TCR clone 102467 (TRAV21, TRAJ24)
CAARSSTDSRGKLQF

SEQ ID NO: 204934 - protein, 11 aa, Homo sapiens
  CDR3 for beta chain variable domain of TCR clone 102467 (TRBV12-4, TRBJ2-3)
CASSFTDTQYF

SEQ ID NO: 204935 - protein, 14 aa, Homo sapiens
  CDR3 for alpha chain variable domain of TCR clone 102468 (TRAV26-1, TRAJ38)
CIADNAGNNRKLIW

SEQ ID NO: 204936 - protein, 15 aa, Homo sapiens
  CDR3 for beta chain variable domain of TCR clone 102468 (TRBV9, TRBJ2-1)
CASSIAGSSYNEQFF

SEQ ID NO: 204937 - protein, 15 aa, Homo sapiens
  CDR3 for alpha chain variable domain of TCR clone 102469 (TRAV8-6, TRAJ10)
CAVSSKGGGGNKPTF

SEQ ID NO: 204938 - protein, 17 aa, Homo sapiens
  CDR3 for beta chain variable domain of TCR clone 102469 (TRBV20-1, TRBJ2-1)
CSASSSGLAGSYNEQFF

SEQ ID NO: 204939 - protein, 15 aa, Homo sapiens
  CDR3 for alpha chain variable domain of TCR clone 102470 (TRAV3, TRAJ20)
CAVSDIKLSDYKLTF

SEQ ID NO: 204940 - protein, 15 aa, Homo sapiens
  CDR3 for beta chain variable domain of TCR clone 102470 (TRBV7-9, TRBJ1-6)
CASSSPGRGNSPLHF

SEQ ID NO: 204941 - protein, 12 aa, Homo sapiens
  CDR3 for alpha chain variable domain of TCR clone 102471 (TRAV13-1, TRAJ21)
CAAFFNFNKFYF

SEQ ID NO: 204942 - protein, 16 aa, Homo sapiens
  CDR3 for beta chain variable domain of TCR clone 102471 (TRBV12-5, TRBJ2-5)
CASGPRTSGNQETQYF

SEQ ID NO: 204943 - protein, 15 aa, Homo sapiens
  CDR3 for alpha chain variable domain of TCR clone 102472 (TRAV3, TRAJ4)
CAVRDGTGGYNKLIF

SEQ ID NO: 204944 - protein, 15 aa, Homo sapiens
  CDR3 for beta chain variable domain of TCR clone 102472 (TRBV6-5, TRBJ2-1)
CASSYDAGAGNEQFF

SEQ ID NO: 204945 - protein, 14 aa, Homo sapiens
  CDR3 for alpha chain variable domain of TCR clone 102473 (TRAV12-1, TRAJ45)
CVVNIGGGADGLTF

SEQ ID NO: 204946 - protein, 16 aa, Homo sapiens
  CDR3 for beta chain variable domain of TCR clone 102473 (TRBV12-5, TRBJ2-5)
CASGPRTSGNQETQYF

SEQ ID NO: 204947 - protein, 17 aa, Homo sapiens
  CDR3 for alpha chain variable domain of TCR clone 102474 (TRAV3, TRAJ6)
CAVRYGPRAGGSYIPTF

SEQ ID NO: 204948 - protein, 14 aa, Homo sapiens
  CDR3 for beta chain variable domain of TCR clone 102474 (TRBV7-2, TRBJ2-7)
CASSPRTSFYEQYF

SEQ ID NO: 204949 - protein, 14 aa, Homo sapiens
  CDR3 for alpha chain variable domain of TCR clone 102475 (TRAV12-3, TRAJ10)
SHLPLTGGGNKLTF

SEQ ID NO: 204950 - protein, 14 aa, Homo sapiens
  CDR3 for beta chain variable domain of TCR clone 102475 (TRBV2, TRBJ2-1)
CASSDRAYYNEQFF

SEQ ID NO: 204951 - protein, 13 aa, Homo sapiens
  CDR3 for alpha chain variable domain of TCR clone 102476 (TRAV2, TRAJ15)
CAVASQAGTALIF

SEQ ID NO: 204952 - protein, 16 aa, Homo sapiens
  CDR3 for beta chain variable domain of TCR clone 102476 (TRBV6-1, TRBJ1-3)
CASVQGGVETPYILER

SEQ ID NO: 204953 - protein, 16 aa, Homo sapiens
  CDR3 for alpha chain variable domain of TCR clone 102477 (TRAV12-3, TRAJ49)
CAMNDDQFYTGTSLTV

SEQ ID NO: 204954 - protein, 13 aa, Homo sapiens
  CDR3 for beta chain variable domain of TCR clone 102477 (TRBV12-4, TRBJ1-1)
CASSPGTGFEAFF

SEQ ID NO: 204955 - protein, 14 aa, Homo sapiens
  CDR3 for alpha chain variable domain of TCR clone 102478 (TRAV1-2, TRAJ16)
CAVNRFSDGQKLLF

SEQ ID NO: 204956 - protein, 14 aa, Homo sapiens
  CDR3 for beta chain variable domain of TCR clone 102478 (TRBV11-2, TRBJ1-2)
CASSLYRGNYGYTF

SEQ ID NO: 204957 - protein, 13 aa, Homo sapiens
  CDR3 for alpha chain variable domain of TCR clone 102479 (TRAV17, TRAJ5)
CAPMDTGRRALTF

SEQ ID NO: 204958 - protein, 15 aa, Homo sapiens
  CDR3 for beta chain variable domain of TCR clone 102479 (TRBV6-6, TRBJ2-5)
CARSPGGGLEETQYF

SEQ ID NO: 204959 - protein, 13 aa, Homo sapiens
  CDR3 for alpha chain variable domain of TCR clone 102480 (TRAV38-2/DV8, TRAJ34)
CAYRNDNTDKLIF

SEQ ID NO: 204960 - protein, 15 aa, Homo sapiens
  CDR3 for beta chain variable domain of TCR clone 102480 (TRBV20-1, TRBJ2-5)
CSAEGTGGLQETQYF

SEQ ID NO: 204961 - protein, 14 aa, Homo sapiens
  CDR3 for alpha chain variable domain of TCR clone 102481 (TRAV38-1, TRAJ45)
CASHSGGGADGLTF

SEQ ID NO: 204962 - protein, 13 aa, Homo sapiens
  CDR3 for beta chain variable domain of TCR clone 102481 (TRBV10-3, TRBJ1-2)
CAMSERDSYGYTF

SEQ ID NO: 204963 - protein, 12 aa, Homo sapiens
  CDR3 for alpha chain variable domain of TCR clone 102482 (TRAV12-3, TRAJ17)
CATTLTGDKLTF

SEQ ID NO: 204964 - protein, 15 aa, Homo sapiens
  CDR3 for beta chain variable domain of TCR clone 102482 (TRBV20-1, TRBJ2-7)
CSARDRVSGMDEQYF

SEQ ID NO: 204965 - protein, 14 aa, Homo sapiens
  CDR3 for alpha chain variable domain of TCR clone 102483 (TRAV12-1, TRAJ30)
CVPTGTNRDNKIIF

SEQ ID NO: 204966 - protein, 11 aa, Homo sapiens
  CDR3 for beta chain variable domain of TCR clone 102483 (TRBV4-1, TRBJ2-2)
CASEHTGELFF

SEQ ID NO: 204967 - protein, 11 aa, Homo sapiens
  CDR3 for alpha chain variable domain of TCR clone 102484 (TRAV16, TRAJ31)
CALFNNARLMF

SEQ ID NO: 204968 - protein, 14 aa, Homo sapiens
  CDR3 for beta chain variable domain of TCR clone 102484 (TRBV7-6, TRBJ2-3)
CASSLGTVTDTQYF

SEQ ID NO: 204969 - protein, 18 aa, Homo sapiens
  CDR3 for alpha chain variable domain of TCR clone 102485 (TRAV1-2, TRAJ18)
CAVRDMGDRGSTLGRLYF

SEQ ID NO: 204970 - protein, 16 aa, Homo sapiens
  CDR3 for beta chain variable domain of TCR clone 102485 (TRBV29-1, TRBJ1-2)
CSVEANRDIANYGYTC

SEQ ID NO: 204971 - protein, 13 aa, Homo sapiens
  CDR3 for alpha chain variable domain of TCR clone 102486 (TRAV13-2, TRAJ13)
CAERPGGYQKVTF

SEQ ID NO: 204972 - protein, 17 aa, Homo sapiens
  CDR3 for beta chain variable domain of TCR clone 102486 (TRBV7-3, TRBJ2-3)
CASSLMKRMRGADTQYF

SEQ ID NO: 204973 - protein, 14 aa, Homo sapiens
  CDR3 for alpha chain variable domain of TCR clone 102487 (TRAV1-2, TRAJ16)
CAVNRLSDGQKLLF

SEQ ID NO: 204974 - protein, 15 aa, Homo sapiens
  CDR3 for beta chain variable domain of TCR clone 102487 (TRBV5-1, TRBJ2-1)
CASSPPRAPYNEQFF

SEQ ID NO: 204975 - protein, 17 aa, Homo sapiens
  CDR3 for alpha chain variable domain of TCR clone 102488 (TRAV26-1, TRAJ28)
CIVRALYSGAGSYQLNF

SEQ ID NO: 204976 - protein, 12 aa, Homo sapiens
  CDR3 for beta chain variable domain of TCR clone 102488 (TRBV12-4, TRBJ2-1)
CASRQTENEQFF

SEQ ID NO: 204977 - protein, 16 aa, Homo sapiens
  CDR3 for alpha chain variable domain of TCR clone 102489 (TRAV23/DV6, TRAJ57)
CSKLYPSQGGSEKLVF

SEQ ID NO: 204978 - protein, 14 aa, Homo sapiens
  CDR3 for beta chain variable domain of TCR clone 102489 (TRBV25-1, TRBJ1-1)
CASTHLGGNTEAFF

SEQ ID NO: 204979 - protein, 18 aa, Homo sapiens
  CDR3 for alpha chain variable domain of TCR clone 102490 (TRAV3, TRAJ17)
CAVRARRWGRSCRQQANF

SEQ ID NO: 204980 - protein, 14 aa, Homo sapiens
  CDR3 for beta chain variable domain of TCR clone 102490 (TRBV4-1, TRBJ2-2)
CASSQAVNTGELFF

SEQ ID NO: 204981 - protein, 13 aa, Homo sapiens
  CDR3 for alpha chain variable domain of TCR clone 102491 (TRAV21, TRAJ37)
FAVSSGNTGKLIF

SEQ ID NO: 204982 - protein, 17 aa, Homo sapiens
  CDR3 for beta chain variable domain of TCR clone 102491 (TRBV5-1, TRBJ2-5)
CASSLLGLAANQETQYF

SEQ ID NO: 204983 - protein, 14 aa, Homo sapiens
  CDR3 for alpha chain variable domain of TCR clone 102492 (TRAV9-2, TRAJ39)
CALYIYNAGNMLTF

SEQ ID NO: 204984 - protein, 16 aa, Homo sapiens
  CDR3 for beta chain variable domain of TCR clone 102492 (TRBV7-7, TRBJ2-1)
CASSLASGTSYNEQFF

SEQ ID NO: 204985 - protein, 13 aa, Homo sapiens
  CDR3 for alpha chain variable domain of TCR clone 102493 (TRAV8-3, TRAJ36)
CAVGATGANNLFF

SEQ ID NO: 204986 - protein, 15 aa, Homo sapiens
  CDR3 for beta chain variable domain of TCR clone 102493 (TRBV7-2, TRBJ1-2)
CASSPTAGWNYGYTF

SEQ ID NO: 204987 - protein, 17 aa, Homo sapiens
  CDR3 for alpha chain variable domain of TCR clone 102494 (TRAV26-1, TRAJ58)
CIVRVGAEETSGSRLTF

SEQ ID NO: 204988 - protein, 14 aa, Homo sapiens
  CDR3 for beta chain variable domain of TCR clone 102494 (TRBV12-4, TRBJ1-6)
CASNLQGKGSPLHF

SEQ ID NO: 204989 - protein, 14 aa, Homo sapiens
  CDR3 for alpha chain variable domain of TCR clone 102495 (TRAV12-1, TRAJ43)
CVVNGRSNNNDMRF

SEQ ID NO: 204990 - protein, 14 aa, Homo sapiens
  CDR3 for beta chain variable domain of TCR clone 102495 (TRBV7-2, TRBJ2-7)
CASRSQGAAYEQYF

SEQ ID NO: 204991 - protein, 11 aa, Homo sapiens
  CDR3 for alpha chain variable domain of TCR clone 102496 (TRAV6, TRAJ39)
CAPDAGNMLTF

SEQ ID NO: 204992 - protein, 16 aa, Homo sapiens
  CDR3 for beta chain variable domain of TCR clone 102496 (TRBV2, TRBJ2-1)
CASRSPAGGKYNEQFF

SEQ ID NO: 204993 - protein, 14 aa, Homo sapiens
  CDR3 for alpha chain variable domain of TCR clone 102497 (TRAV13-1, TRAJ3)
CAASKSSSASKIIF

SEQ ID NO: 204994 - protein, 13 aa, Homo sapiens
  CDR3 for beta chain variable domain of TCR clone 102497 (TRBV4-2, TRBJ1-1)
CASSQAGNTEAFF

SEQ ID NO: 204995 - protein, 11 aa, Homo sapiens
  CDR3 for alpha chain variable domain of TCR clone 102498 (TRAV35, TRAJ34)
CWARNTDKLIF

SEQ ID NO: 204996 - protein, 14 aa, Homo sapiens
  CDR3 for beta chain variable domain of TCR clone 102498 (TRBV5-1, TRBJ2-7)
CASSRGESLNEQYF

SEQ ID NO: 204997 - protein, 11 aa, Homo sapiens
  CDR3 for alpha chain variable domain of TCR clone 102499 (TRAV35, TRAJ34)
CWARNTDKLIF

SEQ ID NO: 204998 - protein, 15 aa, Homo sapiens
  CDR3 for beta chain variable domain of TCR clone 102499 (TRBV10-3, TRBJ2-3)
CAISLTSGGTDTQYF

SEQ ID NO: 204999 - protein, 15 aa, Homo sapiens
  CDR3 for alpha chain variable domain of TCR clone 102500 (TRAV23/DV6, TRAJ15)
CAALPAGRNCSDLRE

SEQ ID NO: 205000 - protein, 14 aa, Homo sapiens
  CDR3 for beta chain variable domain of TCR clone 102500 (TRBV7-9, TRBJ1-2)
CASSRQGANYGYTF

SEQ ID NO: 205001 - protein, 14 aa, Homo sapiens
  CDR3 for alpha chain variable domain of TCR clone 102501 (TRAV8-3, TRAJ4)
CAVGASGGYNKLIF

SEQ ID NO: 205002 - protein, 16 aa, Homo sapiens
  CDR3 for beta chain variable domain of TCR clone 102501 (TRBV4-3, TRBJ2-2)
CASSHLQGSGTGELVF

SEQ ID NO: 205003 - protein, 18 aa, Homo sapiens
  CDR3 for alpha chain variable domain of TCR clone 102502 (TRAV2, TRAJ32)
CCLLLCFHYGGATNKLIF

SEQ ID NO: 205004 - protein, 16 aa, Homo sapiens
  CDR3 for beta chain variable domain of TCR clone 102502 (TRBV7-9, TRBJ2-7)
CASSCPDREGGYEQYF

SEQ ID NO: 205005 - protein, 16 aa, Homo sapiens
  CDR3 for alpha chain variable domain of TCR clone 102503 (TRAV20, TRAJ22)
CAVQASSSGSARQLTF

SEQ ID NO: 205006 - protein, 15 aa, Homo sapiens
  CDR3 for beta chain variable domain of TCR clone 102503 (TRBV2, TRBJ2-5)
CASTRDGGPQETQYF

SEQ ID NO: 205007 - protein, 13 aa, Homo sapiens
  CDR3 for alpha chain variable domain of TCR clone 102504 (TRAV1-1, TRAJ13)
CAVNSGGYQKVTF

SEQ ID NO: 205008 - protein, 16 aa, Homo sapiens
  CDR3 for beta chain variable domain of TCR clone 102504 (TRBV12-5, TRBJ2-5)
CASGPRTSGNQETQYF

SEQ ID NO: 205009 - protein, 14 aa, Homo sapiens
  CDR3 for alpha chain variable domain of TCR clone 102505 (TRAV4, TRAJ32)
CLVNYGGATNKPIF

SEQ ID NO: 205010 - protein, 14 aa, Homo sapiens
  CDR3 for beta chain variable domain of TCR clone 102505 (TRBV15, TRBJ2-5)
CATSGGTRTETQYF

SEQ ID NO: 205011 - protein, 15 aa, Homo sapiens
  CDR3 for alpha chain variable domain of TCR clone 102506 (TRAV13-1, TRAJ5)
CAVYIRDTGSRALTF

SEQ ID NO: 205012 - protein, 16 aa, Homo sapiens
  CDR3 for beta chain variable domain of TCR clone 102506 (TRBV12-4, TRBJ2-1)
CASTEQGMDRSNEQFF

SEQ ID NO: 205013 - protein, 19 aa, Homo sapiens
  CDR3 for alpha chain variable domain of TCR clone 102507 (TRAV26-1, TRAJ52)
CIVRAHRNAGGTSYGKLTF

SEQ ID NO: 205014 - protein, 13 aa, Homo sapiens
  CDR3 for beta chain variable domain of TCR clone 102507 (TRBV20-1, TRBJ1-6)
CSAPLGGGSPLHF

SEQ ID NO: 205015 - protein, 13 aa, Homo sapiens
  CDR3 for alpha chain variable domain of TCR clone 102508 (TRAV23/DV6, TRAJ16)
CAASISDGQKLLF

SEQ ID NO: 205016 - protein, 15 aa, Homo sapiens
  CDR3 for beta chain variable domain of TCR clone 102508 (TRBV2, TRBJ2-2)
CASSRETVGTGELFF

SEQ ID NO: 205017 - protein, 12 aa, Homo sapiens
  CDR3 for alpha chain variable domain of TCR clone 102509 (TRAV17, TRAJ57)
CATDGGSEKLVF

SEQ ID NO: 205018 - protein, 14 aa, Homo sapiens
  CDR3 for beta chain variable domain of TCR clone 102509 (TRBV6-3, TRBJ2-2)
CQQFLATLTGELFF

SEQ ID NO: 205019 - protein, 15 aa, Homo sapiens
  CDR3 for alpha chain variable domain of TCR clone 102510 (TRAV2, TRAJ24)
CAVEVLTDSWGKFQF

SEQ ID NO: 205020 - protein, 12 aa, Homo sapiens
  CDR3 for beta chain variable domain of TCR clone 102510 (TRBV19, TRBJ2-1)
CASSMGSGRRSS

SEQ ID NO: 205021 - protein, 14 aa, Homo sapiens
  CDR3 for alpha chain variable domain of TCR clone 102511 (TRAV8-2, TRAJ4)
CVVSPSGCYNKLIF

SEQ ID NO: 205022 - protein, 14 aa, Homo sapiens
  CDR3 for beta chain variable domain of TCR clone 102511 (TRBV19, TRBJ2-5)
CASSSSGIQETQYF

SEQ ID NO: 205023 - protein, 12 aa, Homo sapiens
  CDR3 for alpha chain variable domain of TCR clone 102512 (TRAV16, TRAJ22)
CALEVSARQLTF

SEQ ID NO: 205024 - protein, 14 aa, Homo sapiens
  CDR3 for beta chain variable domain of TCR clone 102512 (TRBV11-2, TRBJ2-3)
CASSSIASTDTQHF

SEQ ID NO: 205025 - protein, 16 aa, Homo sapiens
  CDR3 for alpha chain variable domain of TCR clone 102513 (TRAV14/DV4, TRAJ21)
CAMREGPENNFNKFYF

SEQ ID NO: 205026 - protein, 13 aa, Homo sapiens
  CDR3 for beta chain variable domain of TCR clone 102513 (TRBV7-8, TRBJ2-7)
CASSLTGGREQYF

SEQ ID NO: 205027 - protein, 14 aa, Homo sapiens
  CDR3 for alpha chain variable domain of TCR clone 102514 (TRAV3, TRAJ17)
CAVRDAAAGNKLTF

SEQ ID NO: 205028 - protein, 15 aa, Homo sapiens
  CDR3 for beta chain variable domain of TCR clone 102514 (TRBV3-1, TRBJ2-7)
CASSQVRQGACEQYF

SEQ ID NO: 205029 - protein, 15 aa, Homo sapiens
  CDR3 for alpha chain variable domain of TCR clone 102515 (TRAV3, TRAJ22)
CAVRDRGGSARQLTF

SEQ ID NO: 205030 - protein, 16 aa, Homo sapiens
  CDR3 for beta chain variable domain of TCR clone 102515 (TRBV9, TRBJ2-2)
CASSAMGKGNTGELFS

SEQ ID NO: 205031 - protein, 14 aa, Homo sapiens
  CDR3 for alpha chain variable domain of TCR clone 102516 (TRAV1-2, TRAJ16)
CAVNRFSDGQKLLF

SEQ ID NO: 205032 - protein, 14 aa, Homo sapiens
  CDR3 for beta chain variable domain of TCR clone 102516 (TRBV7-2, TRBJ2-7)
CASRSQGAAYERYF

SEQ ID NO: 205033 - protein, 17 aa, Homo sapiens
  CDR3 for alpha chain variable domain of TCR clone 102517 (TRAV13-2, TRAJ5)
CAESVVIVGHGQEGTYF

SEQ ID NO: 205034 - protein, 18 aa, Homo sapiens
  CDR3 for beta chain variable domain of TCR clone 102517 (TRBV4-1, TRBJ2-3)
CASSHQLAGGRSTDTQYF

SEQ ID NO: 205035 - protein, 14 aa, Homo sapiens
  CDR3 for alpha chain variable domain of TCR clone 102518 (TRAV2, TRAJ22)
CAVGRGGSARQMTF

SEQ ID NO: 205036 - protein, 12 aa, Homo sapiens
  CDR3 for beta chain variable domain of TCR clone 102518 (TRBV19, TRBJ2-1)
CASSMQDTEQFF

SEQ ID NO: 205037 - protein, 13 aa, Homo sapiens
  CDR3 for alpha chain variable domain of TCR clone 102519 (TRAV35, TRAJ44)
CAGLSGTASKLTF

SEQ ID NO: 205038 - protein, 14 aa, Homo sapiens
  CDR3 for beta chain variable domain of TCR clone 102519 (TRBV4-2, TRBJ2-1)
CASGLDRAYNEQFF

SEQ ID NO: 205039 - protein, 13 aa, Homo sapiens
  CDR3 for alpha chain variable domain of TCR clone 102520 (TRAV23/DV6, TRAJ22)
CAPYSGSARQLTF

SEQ ID NO: 205040 - protein, 16 aa, Homo sapiens
  CDR3 for beta chain variable domain of TCR clone 102520 (TRBV5-1, TRBJ2-7)
CASSFTTGTALVEQYF

SEQ ID NO: 205041 - protein, 14 aa, Homo sapiens
  CDR3 for alpha chain variable domain of TCR clone 102521 (TRAV1-2, TRAJ8)
CAVREGTGFQKLVF

SEQ ID NO: 205042 - protein, 18 aa, Homo sapiens
  CDR3 for beta chain variable domain of TCR clone 102521 (TRBV10-3, TRBJ2-7)
CAISESGRPSGGRVEQYF

SEQ ID NO: 205043 - protein, 12 aa, Homo sapiens
  CDR3 for alpha chain variable domain of TCR clone 102522 (TRAV13-2, TRAJ8)
CAPWLGFQQLVF

SEQ ID NO: 205044 - protein, 13 aa, Homo sapiens
  CDR3 for beta chain variable domain of TCR clone 102522 (TRBV12-4, TRBJ1-5)
CASSPDRAQPQHF

SEQ ID NO: 205045 - protein, 11 aa, Homo sapiens
  CDR3 for alpha chain variable domain of TCR clone 102523 (TRAV12-1, TRAJ30)
CVVNGQDKIIF

SEQ ID NO: 205046 - protein, 15 aa, Homo sapiens
  CDR3 for beta chain variable domain of TCR clone 102523 (TRBV9, TRBJ1-6)
CASSVAGTGDSPLHF

SEQ ID NO: 205047 - protein, 12 aa, Homo sapiens
  CDR3 for alpha chain variable domain of TCR clone 102524 (TRAV16, TRAJ9)
CALSSGGFKTIF

SEQ ID NO: 205048 - protein, 14 aa, Homo sapiens
  CDR3 for beta chain variable domain of TCR clone 102524 (TRBV7-9, TRBJ2-1)
CASSLAGPHNEQFF

SEQ ID NO: 205049 - protein, 13 aa, Homo sapiens
  CDR3 for alpha chain variable domain of TCR clone 102525 (TRAV8-6, TRAJ49)
CAVIMNTGNQFYF

SEQ ID NO: 205050 - protein, 12 aa, Homo sapiens
  CDR3 for beta chain variable domain of TCR clone 102525 (TRBV11-2, TRBJ2-2)
CASSLGGGELFF

SEQ ID NO: 205051 - protein, 15 aa, Homo sapiens
  CDR3 for alpha chain variable domain of TCR clone 102526 (TRAV12-3, TRAJ49)
CAMTAPGNTGNQFYF

SEQ ID NO: 205052 - protein, 15 aa, Homo sapiens
  CDR3 for beta chain variable domain of TCR clone 102526 (TRBV11-2, TRBJ1-6)
CASSLDPWAVSPLHF

SEQ ID NO: 205053 - protein, 14 aa, Homo sapiens
  CDR3 for alpha chain variable domain of TCR clone 102527 (TRAV1-2, TRAJ16)
CAVRGFSDGQKLLF

SEQ ID NO: 205054 - protein, 16 aa, Homo sapiens
  CDR3 for beta chain variable domain of TCR clone 102527 (TRBV4-1, TRBJ2-5)
CASSSGLAGVLGTQYF

SEQ ID NO: 205055 - protein, 13 aa, Homo sapiens
  CDR3 for alpha chain variable domain of TCR clone 102528 (TRAV1-2, TRAJ9)
CAVLNTGGFKTIF

SEQ ID NO: 205056 - protein, 14 aa, Homo sapiens
  CDR3 for beta chain variable domain of TCR clone 102528 (TRBV20-1, TRBJ2-3)
GSARGGTSTDTQYF

SEQ ID NO: 205057 - protein, 12 aa, Homo sapiens
  CDR3 for alpha chain variable domain of TCR clone 102529 (TRAV27, TRAJ13)
CAGAGGYPKVTF

SEQ ID NO: 205058 - protein, 15 aa, Homo sapiens
  CDR3 for beta chain variable domain of TCR clone 102529 (TRBV20-1, TRBJ2-6)
CSARDRGPGANVLTF

SEQ ID NO: 205059 - protein, 13 aa, Homo sapiens
  CDR3 for alpha chain variable domain of TCR clone 102530 (TRAV27, TRAJ41)
CAGEGNSGFALNF

SEQ ID NO: 205060 - protein, 14 aa, Homo sapiens
  CDR3 for beta chain variable domain of TCR clone 102530 (TRBV7-2, TRBJ1-1)
CASSFLTGTTEAFF

SEQ ID NO: 205061 - protein, 15 aa, Homo sapiens
  CDR3 for alpha chain variable domain of TCR clone 102531 (TRAV23/DV6, TRAJ18)
CAARYRGSTLGRLYF

SEQ ID NO: 205062 - protein, 16 aa, Homo sapiens
  CDR3 for beta chain variable domain of TCR clone 102531 (TRBV5-1, TRBJ2-2)
CASSLWDTTNTGELFF

SEQ ID NO: 205063 - protein, 13 aa, Homo sapiens
  CDR3 for alpha chain variable domain of TCR clone 102532 (TRAV8-3, TRAJ48)
CAVVPFGNEKLTS

SEQ ID NO: 205064 - protein, 12 aa, Homo sapiens
  CDR3 for beta chain variable domain of TCR clone 102532 (TRBV11-2, TRBJ2-2)
CASSLGGGELFF

SEQ ID NO: 205065 - protein, 17 aa, Homo sapiens
  CDR3 for alpha chain variable domain of TCR clone 102533 (TRAV3, TRAJ38)
CAVRDCLNAGNNRKLIW

SEQ ID NO: 205066 - protein, 10 aa, Homo sapiens
  CDR3 for beta chain variable domain of TCR clone 102533 (TRBV20-1, TRBJ2-5)
CSARFETQYF

SEQ ID NO: 205067 - protein, 12 aa, Homo sapiens
  CDR3 for alpha chain variable domain of TCR clone 102534 (TRAV13-1, TRAJ11)
CAGPSGYNTLTF

SEQ ID NO: 205068 - protein, 13 aa, Homo sapiens
  CDR3 for beta chain variable domain of TCR clone 102534 (TRBV12-4, TRBJ1-5)
CASSPDRAQPQHF

SEQ ID NO: 205069 - protein, 11 aa, Homo sapiens
  CDR3 for alpha chain variable domain of TCR clone 102535 (TRAV2, TRAJ33)
CAVESNYQLIW

SEQ ID NO: 205070 - protein, 17 aa, Homo sapiens
  CDR3 for beta chain variable domain of TCR clone 102535 (TRBV28, TRBJ2-5)
CASSTPEGDALQETQYF

SEQ ID NO: 205071 - protein, 12 aa, Homo sapiens
  CDR3 for alpha chain variable domain of TCR clone 102536 (TRAV27, TRAJ35)
CAGADFGNVLHC

SEQ ID NO: 205072 - protein, 13 aa, Homo sapiens
  CDR3 for beta chain variable domain of TCR clone 102536 (TRBV12-5, TRBJ2-3)
CASGDRQSDTQYF

SEQ ID NO: 205073 - protein, 18 aa, Homo sapiens
  CDR3 for alpha chain variable domain of TCR clone 102537 (TRAV26-1, TRAJ23)
CIVRVGLEVWKQGGKLIF

SEQ ID NO: 205074 - protein, 16 aa, Homo sapiens
  CDR3 for beta chain variable domain of TCR clone 102537 (TRBV12-4, TRBJ2-5)
CASSFFVGGRQETQYF

SEQ ID NO: 205075 - protein, 12 aa, Homo sapiens
  CDR3 for alpha chain variable domain of TCR clone 102538 (TRAV26-1, TRAJ26)
CIVYNYGQTFVF

SEQ ID NO: 205076 - protein, 15 aa, Homo sapiens
  CDR3 for beta chain variable domain of TCR clone 102538 (TRBV7-2, TRBJ2-3)
CASSLRGGSTDTQYF

SEQ ID NO: 205077 - protein, 23 aa, Homo sapiens
  CDR3 for alpha chain variable domain of TCR clone 102539 (TRAV12-2, TRAJ43)
SLLIRDSQPSDSATDLCAFDMRF

SEQ ID NO: 205078 - protein, 18 aa, Homo sapiens
  CDR3 for beta chain variable domain of TCR clone 102539 (TRBV20-1, TRBJ2-3)
CSASGLAGGPGTTDTQYF

SEQ ID NO: 205079 - protein, 15 aa, Homo sapiens
  CDR3 for alpha chain variable domain of TCR clone 102540 (TRAV21, TRAJ53)
CATLNSGGSNYKLTF

SEQ ID NO: 205080 - protein, 16 aa, Homo sapiens
  CDR3 for beta chain variable domain of TCR clone 102540 (TRBV12-4, TRBJ2-3)
CASSWRLAETTDTQYF

SEQ ID NO: 205081 - protein, 13 aa, Homo sapiens
  CDR3 for alpha chain variable domain of TCR clone 102541 (TRAV12-1, TRAJ13)
CGEQTGGYQKVTF

SEQ ID NO: 205082 - protein, 17 aa, Homo sapiens
  CDR3 for beta chain variable domain of TCR clone 102541 (TRBV13, TRBJ2-3)
CASSLSRVAGGRNTQYF

SEQ ID NO: 205083 - protein, 14 aa, Homo sapiens
  CDR3 for alpha chain variable domain of TCR clone 102542 (TRAV12-2, TRAJ13)
CAVKKTGGYQKVTF

SEQ ID NO: 205084 - protein, 12 aa, Homo sapiens
  CDR3 for beta chain variable domain of TCR clone 102542 (TRBV24-1, TRBJ2-7)
CATSDPGYEQYF

SEQ ID NO: 205085 - protein, 12 aa, Homo sapiens
  CDR3 for alpha chain variable domain of TCR clone 102543 (TRAV3, TRAJ20)
CAVRDPDYKLSF

SEQ ID NO: 205086 - protein, 13 aa, Homo sapiens
  CDR3 for beta chain variable domain of TCR clone 102543 (TRBV19, TRBJ1-2)
CASSRGQVYGYTF

SEQ ID NO: 205087 - protein, 14 aa, Homo sapiens
  CDR3 for alpha chain variable domain of TCR clone 102544 (TRAV2, TRAJ9)
CAVEDRSGGFKTIF

SEQ ID NO: 205088 - protein, 13 aa, Homo sapiens
  CDR3 for beta chain variable domain of TCR clone 102544 (TRBV27, TRBJ2-3)
CACRETSTDTQYF

SEQ ID NO: 205089 - protein, 13 aa, Homo sapiens
  CDR3 for alpha chain variable domain of TCR clone 102545 (TRAV27, TRAJ42)
CAGARGSQGNLIF

SEQ ID NO: 205090 - protein, 15 aa, Homo sapiens
  CDR3 for beta chain variable domain of TCR clone 102545 (TRBV10-3, TRBJ2-2)
CAIRTDREDTGELFV

SEQ ID NO: 205091 - protein, 15 aa, Homo sapiens
  CDR3 for alpha chain variable domain of TCR clone 102546 (TRAV26-1, TRAJ56)
CIVRVDNGANSKLTF

SEQ ID NO: 205092 - protein, 15 aa, Homo sapiens
  CDR3 for beta chain variable domain of TCR clone 102546 (TRBV20-1, TRBJ2-7)
CSARDPTELGHEQYF

SEQ ID NO: 205093 - protein, 15 aa, Homo sapiens
  CDR3 for alpha chain variable domain of TCR clone 102547 (TRAV8-3, TRAJ23)
CAAGDRYNQGGKLIF

SEQ ID NO: 205094 - protein, 17 aa, Homo sapiens
  CDR3 for beta chain variable domain of TCR clone 102547 (TRBV4-1, TRBJ1-4)
CASSQEGPRGVEEKLFF

SEQ ID NO: 205095 - protein, 14 aa, Homo sapiens
  CDR3 for alpha chain variable domain of TCR clone 102548 (TRAV23/DV6, TRAJ22)
CAASVSGSARQLTF

SEQ ID NO: 205096 - protein, 14 aa, Homo sapiens
  CDR3 for beta chain variable domain of TCR clone 102548 (TRBV7-2, TRBJ2-7)
CASSPKTSFYEQYF

SEQ ID NO: 205097 - protein, 13 aa, Homo sapiens
  CDR3 for alpha chain variable domain of TCR clone 102549 (TRAV2, TRAJ40)
CAVVTSGTYKYIF

SEQ ID NO: 205098 - protein, 13 aa, Homo sapiens
  CDR3 for beta chain variable domain of TCR clone 102549 (TRBV7-9, TRBJ2-5)
CASLPSGRGTQYF

SEQ ID NO: 205099 - protein, 15 aa, Homo sapiens
  CDR3 for alpha chain variable domain of TCR clone 102550 (TRAV20, TRAJ24)
CAVQAAPDSWGKLQF

SEQ ID NO: 205100 - protein, 14 aa, Homo sapiens
  CDR3 for beta chain variable domain of TCR clone 102550 (TRBV20-1, TRBJ1-1)
CSARDRGQGSEAFF

SEQ ID NO: 205101 - protein, 13 aa, Homo sapiens
  CDR3 for alpha chain variable domain of TCR clone 102551 (TRAV30, TRAJ6)
CGFIEGGSYIPTF

SEQ ID NO: 205102 - protein, 16 aa, Homo sapiens
  CDR3 for beta chain variable domain of TCR clone 102551 (TRBV7-6, TRBJ2-3)
CASSARTSGGTDTQYF

SEQ ID NO: 205103 - protein, 16 aa, Homo sapiens
  CDR3 for alpha chain variable domain of TCR clone 102552 (TRAV30, TRAJ24)
CGPEIVDADSWGKFQF

SEQ ID NO: 205104 - protein, 16 aa, Homo sapiens
  CDR3 for beta chain variable domain of TCR clone 102552 (TRBV7-3, TRBJ2-2)
CASSLKRGTLSGELFF

SEQ ID NO: 205105 - protein, 12 aa, Homo sapiens
  CDR3 for alpha chain variable domain of TCR clone 102553 (TRAV21, TRAJ11)
CAATAGYSTLTF

SEQ ID NO: 205106 - protein, 14 aa, Homo sapiens
  CDR3 for beta chain variable domain of TCR clone 102553 (TRBV20-1, TRBJ2-7)
CSAPELAGVGEQYF

SEQ ID NO: 205107 - protein, 14 aa, Homo sapiens
  CDR3 for alpha chain variable domain of TCR clone 102554 (TRAV21, TRAJ35)
GAVMPIGFGNVLHC

SEQ ID NO: 205108 - protein, 12 aa, Homo sapiens
  CDR3 for beta chain variable domain of TCR clone 102554 (TRBV7-9, TRBJ2-7)
CASSIKREEQYF

SEQ ID NO: 205109 - protein, 11 aa, Homo sapiens
  CDR3 for alpha chain variable domain of TCR clone 102555 (TRAV36/DV7, TRAJ33)
CAVDMDSNYQL

SEQ ID NO: 205110 - protein, 16 aa, Homo sapiens
  CDR3 for beta chain variable domain of TCR clone 102555 (TRBV15, TRBJ2-3)
CATRLSGGRAPDTQYF

SEQ ID NO: 205111 - protein, 15 aa, Homo sapiens
  CDR3 for alpha chain variable domain of TCR clone 102556 (TRAV27, TRAJ38)
CAARRNAGNNRKPIW

SEQ ID NO: 205112 - protein, 15 aa, Homo sapiens
  CDR3 for beta chain variable domain of TCR clone 102556 (TRBV11-2, TRBJ2-2)
CASSSDRVNAGELFF

SEQ ID NO: 205113 - protein, 15 aa, Homo sapiens
  CDR3 for alpha chain variable domain of TCR clone 102557 (TRAV12-2, TRAJ42)
CAVNSHGGSQGNLIF

SEQ ID NO: 205114 - protein, 13 aa, Homo sapiens
  CDR3 for beta chain variable domain of TCR clone 102557 (TRBV27, TRBJ1-1)
CASSVAANTEAFF

SEQ ID NO: 205115 - protein, 14 aa, Homo sapiens
  CDR3 for alpha chain variable domain of TCR clone 102558 (TRAV12-2, TRAJ53)
CAVKGGGSNYKLTF

SEQ ID NO: 205116 - protein, 13 aa, Homo sapiens
  CDR3 for beta chain variable domain of TCR clone 102558 (TRBV10-3, TRBJ2-7)
CASRLAVNYEQYF

SEQ ID NO: 205117 - protein, 11 aa, Homo sapiens
  CDR3 for alpha chain variable domain of TCR clone 102559 (TRAV3, TRAJ21)
CAVGNFNKFYF

SEQ ID NO: 205118 - protein, 14 aa, Homo sapiens
  CDR3 for beta chain variable domain of TCR clone 102559 (TRBV5-5, TRBJ1-5)
CASSGQGVDQPQHF

SEQ ID NO: 205119 - protein, 14 aa, Homo sapiens
  CDR3 for alpha chain variable domain of TCR clone 102560 (TRAV3, TRAJ16)
CCERLKSDGQKLLF

SEQ ID NO: 205120 - protein, 15 aa, Homo sapiens
  CDR3 for beta chain variable domain of TCR clone 102560 (TRBV28, TRBJ2-7)
CASSPGCRGFYEQYF

SEQ ID NO: 205121 - protein, 11 aa, Homo sapiens
  CDR3 for alpha chain variable domain of TCR clone 102561 (TRAV9-2, TRAJ11)
CVPAGYSTLTF

SEQ ID NO: 205122 - protein, 14 aa, Homo sapiens
  CDR3 for beta chain variable domain of TCR clone 102561 (TRBV2, TRBJ2-7)
CASSLTAGGYEQYF

SEQ ID NO: 205123 - protein, 14 aa, Homo sapiens
  CDR3 for alpha chain variable domain of TCR clone 102562 (TRAV12-3, TRAJ15)
CAMIPPQAGTALIF

SEQ ID NO: 205124 - protein, 12 aa, Homo sapiens
  CDR3 for beta chain variable domain of TCR clone 102562 (TRBV11-2, TRBJ2-2)
CASSLGGGEQFF

SEQ ID NO: 205125 - protein, 11 aa, Homo sapiens
  CDR3 for alpha chain variable domain of TCR clone 102563 (TRAV12-3, TRAJ43)
CAMSVSNDMRF

SEQ ID NO: 205126 - protein, 17 aa, Homo sapiens
  CDR3 for beta chain variable domain of TCR clone 102563 (TRBV20-1, TRBJ2-1)
CSASSSRLAGSYNEQFF

SEQ ID NO: 205127 - protein, 17 aa, Homo sapiens
  CDR3 for alpha chain variable domain of TCR clone 102564 (TRAV23/DV6, TRAJ57)
CAASSTLSQGGSEKLVF

SEQ ID NO: 205128 - protein, 14 aa, Homo sapiens
  CDR3 for beta chain variable domain of TCR clone 102564 (TRBV25-1, TRBJ1-1)
CASTHLGGNSEAFF

SEQ ID NO: 205129 - protein, 17 aa, Homo sapiens
  CDR3 for alpha chain variable domain of TCR clone 102565 (TRAV3, TRAJ4)
CAVRDIVFSGGYNKLIF

SEQ ID NO: 205130 - protein, 13 aa, Homo sapiens
  CDR3 for beta chain variable domain of TCR clone 102565 (TRBV28, TRBJ2-1)
CASSLIGRDEQFF

SEQ ID NO: 205131 - protein, 15 aa, Homo sapiens
  CDR3 for alpha chain variable domain of TCR clone 102566 (TRAV27, TRAJ38)
CAARRNAGNNRKLSW

SEQ ID NO: 205132 - protein, 15 aa, Homo sapiens
  CDR3 for beta chain variable domain of TCR clone 102566 (TRBV5-1, TRBJ2-1)
CASSPPRAPYNEQFF

SEQ ID NO: 205133 - protein, 17 aa, Homo sapiens
  CDR3 for alpha chain variable domain of TCR clone 102567 (TRAV3, TRAJ6)
CAVRDGPRAGGSYIPTF

SEQ ID NO: 205134 - protein, 15 aa, Homo sapiens
  CDR3 for beta chain variable domain of TCR clone 102567 (TRBV5-7, TRBJ2-7)
CASSPYFEGSYEQYF

SEQ ID NO: 205135 - protein, 18 aa, Homo sapiens
  CDR3 for alpha chain variable domain of TCR clone 102568 (TRAV8-3, TRAJ4)
WVREPTSNDPGGYNKLIF

SEQ ID NO: 205136 - protein, 13 aa, Homo sapiens
  CDR3 for beta chain variable domain of TCR clone 102568 (TRBV20-1, TRBJ1-2)
CSATGIQGSGYTF

SEQ ID NO: 205137 - protein, 11 aa, Homo sapiens
  CDR3 for alpha chain variable domain of TCR clone 102569 (TRAV2, TRAJ13)
CASGGYQKVTF

SEQ ID NO: 205138 - protein, 17 aa, Homo sapiens
  CDR3 for beta chain variable domain of TCR clone 102569 (TRBV28, TRBJ1-1)
CASSLSGTGYENTEAFF

SEQ ID NO: 205139 - protein, 15 aa, Homo sapiens
  CDR3 for alpha chain variable domain of TCR clone 102570 (TRAV21, TRAJ40)
CAVRPQTSGTYKYIF

SEQ ID NO: 205140 - protein, 16 aa, Homo sapiens
  CDR3 for beta chain variable domain of TCR clone 102570 (TRBV5-1, TRBJ1-1)
CASSSGGNSLNTEAFF

SEQ ID NO: 205141 - protein, 13 aa, Homo sapiens
  CDR3 for alpha chain variable domain of TCR clone 102571 (TRAV1-2, TRAJ9)
CAALNTGGFKTIF

SEQ ID NO: 205142 - protein, 13 aa, Homo sapiens
  CDR3 for beta chain variable domain of TCR clone 102571 (TRBV19, TRBJ1-2)
CASSVPGQDGYAV

SEQ ID NO: 205143 - protein, 14 aa, Homo sapiens
  CDR3 for alpha chain variable domain of TCR clone 102572 (TRAV23/DV6, TRAJ27)
CAASRDTNAGKSTF

SEQ ID NO: 205144 - protein, 13 aa, Homo sapiens
  CDR3 for beta chain variable domain of TCR clone 102572 (TRBV7-9, TRBJ1-2)
CASSLKQNYGYTF

SEQ ID NO: 205145 - protein, 15 aa, Homo sapiens
  CDR3 for alpha chain variable domain of TCR clone 102573 (TRAV13-1, TRAJ40)
CAENRSRQGTYKYIF

SEQ ID NO: 205146 - protein, 15 aa, Homo sapiens
  CDR3 for beta chain variable domain of TCR clone 102573 (TRBV19, TRBJ2-1)
CASSMGWNSNNEQFF

SEQ ID NO: 205147 - protein, 13 aa, Homo sapiens
  CDR3 for alpha chain variable domain of TCR clone 102574 (TRAV1-2, TRAJ9)
CAALNTGGFKTIF

SEQ ID NO: 205148 - protein, 15 aa, Homo sapiens
  CDR3 for beta chain variable domain of TCR clone 102574 (TRBV19, TRBJ1-2)
CASSVPGQDGYTLVR

SEQ ID NO: 205149 - protein, 11 aa, Homo sapiens
  CDR3 for alpha chain variable domain of TCR clone 102575 (TRAV2, TRAJ13)
CASVGYQKVTF

SEQ ID NO: 205150 - protein, 17 aa, Homo sapiens
  CDR3 for beta chain variable domain of TCR clone 102575 (TRBV20-1, TRBJ2-2)
CSASGSGQGGLTGELFF

SEQ ID NO: 205151 - protein, 13 aa, Homo sapiens
  CDR3 for alpha chain variable domain of TCR clone 102576 (TRAV21, TRAJ20)
CAVGLRVDYKLSF

SEQ ID NO: 205152 - protein, 14 aa, Homo sapiens
  CDR3 for beta chain variable domain of TCR clone 102576 (TRBV28, TRBJ2-3)
CASSLTDLLDTQYF

SEQ ID NO: 205153 - protein, 14 aa, Homo sapiens
  CDR3 for alpha chain variable domain of TCR clone 102577 (TRAV3, TRAJ7)
CAVREEEKEQQTRF

SEQ ID NO: 205154 - protein, 12 aa, Homo sapiens
  CDR3 for beta chain variable domain of TCR clone 102577 (TRBV7-8, TRBJ2-7)
CASSLGDREQYF

SEQ ID NO: 205155 - protein, 15 aa, Homo sapiens
  CDR3 for alpha chain variable domain of TCR clone 102578 (TRAV21, TRAJ37)
CAVRPTLSNTGKPIF

SEQ ID NO: 205156 - protein, 16 aa, Homo sapiens
  CDR3 for beta chain variable domain of TCR clone 102578 (TRBV24-1, TRBJ2-3)
CATSDRRQDLTDTQYF

SEQ ID NO: 205157 - protein, 12 aa, Homo sapiens
  CDR3 for alpha chain variable domain of TCR clone 102579 (TRAV35, TRAJ43)
CAGAYNNNDMRF

SEQ ID NO: 205158 - protein, 14 aa, Homo sapiens
  CDR3 for beta chain variable domain of TCR clone 102579 (TRBV2, TRBJ2-2)
CARSWQGATGELFF

SEQ ID NO: 205159 - protein, 12 aa, Homo sapiens
  CDR3 for alpha chain variable domain of TCR clone 102580 (TRAV12-2, TRAJ10)
WGVTGGGNKLTF

SEQ ID NO: 205160 - protein, 13 aa, Homo sapiens
  CDR3 for beta chain variable domain of TCR clone 102580 (TRBV19, TRBJ1-5)
CASSIGGEQPQHF

SEQ ID NO: 205161 - protein, 16 aa, Homo sapiens
  CDR3 for alpha chain variable domain of TCR clone 102581 (TRAV16, TRAJ4)
CALSRMFSGGYNKLIF

SEQ ID NO: 205162 - protein, 16 aa, Homo sapiens
  CDR3 for beta chain variable domain of TCR clone 102581 (TRBV7-3, TRBJ2-2)
CASSLKRGTLSGELFF

SEQ ID NO: 205163 - protein, 12 aa, Homo sapiens
  CDR3 for alpha chain variable domain of TCR clone 102582 (TRAV3, TRAJ43)
CAVRDPNNDMRF

SEQ ID NO: 205164 - protein, 15 aa, Homo sapiens
  CDR3 for beta chain variable domain of TCR clone 102582 (TRBV27, TRBJ1-5)
CASSLGTGFDQPPHF

SEQ ID NO: 205165 - protein, 22 aa, Homo sapiens
  CDR3 for alpha chain variable domain of TCR clone 102583 (TRAV21, TRAJ39)
AASQPGDSATPKGAKAGNMLTF

SEQ ID NO: 205166 - protein, 16 aa, Homo sapiens
  CDR3 for beta chain variable domain of TCR clone 102583 (TRBV11-2, TRBJ2-1)
CASSVTADFSYNEQFF

SEQ ID NO: 205167 - protein, 11 aa, Homo sapiens
  CDR3 for alpha chain variable domain of TCR clone 102584 (TRAV13-1, TRAJ20)
CAASNNYKLSF

SEQ ID NO: 205168 - protein, 15 aa, Homo sapiens
  CDR3 for beta chain variable domain of TCR clone 102584 (TRBV6-3, TRBJ2-7)
CASSSPGTVFYEQYF

SEQ ID NO: 205169 - protein, 13 aa, Homo sapiens
  CDR3 for alpha chain variable domain of TCR clone 102585 (TRAV17, TRAJ5)
CAPMDTGRRALTF

SEQ ID NO: 205170 - protein, 15 aa, Homo sapiens
  CDR3 for beta chain variable domain of TCR clone 102585 (TRBV6-6, TRBJ2-5)
CASSPGGCLEETQYF

SEQ ID NO: 205171 - protein, 11 aa, Homo sapiens
  CDR3 for alpha chain variable domain of TCR clone 102586 (TRAV17, TRAJ9)
CATTGGFKTIF

SEQ ID NO: 205172 - protein, 14 aa, Homo sapiens
  CDR3 for beta chain variable domain of TCR clone 102586 (TRBV7-9, TRBJ2-2)
CASSGLADTGELFL

SEQ ID NO: 205173 - protein, 14 aa, Homo sapiens
  CDR3 for alpha chain variable domain of TCR clone 102587 (TRAV1-2, TRAJ8)
CAVREDTGFQQLVF

SEQ ID NO: 205174 - protein, 15 aa, Homo sapiens
  CDR3 for beta chain variable domain of TCR clone 102587 (TRBV15, TRBJ1-1)
CATSLQGGRNTEAFF

SEQ ID NO: 205175 - protein, 14 aa, Homo sapiens
  CDR3 for alpha chain variable domain of TCR clone 102588 (TRAV38-1, TRAJ45)
CASHSGGGADGLTF

SEQ ID NO: 205176 - protein, 13 aa, Homo sapiens
  CDR3 for beta chain variable domain of TCR clone 102588 (TRBV12-4, TRBJ1-2)
CASSLRQGKGYTF

SEQ ID NO: 205177 - protein, 10 aa, Homo sapiens
  CDR3 for alpha chain variable domain of TCR clone 102589 (TRAV21, TRAJ31)
CAVDNARLIF

SEQ ID NO: 205178 - protein, 13 aa, Homo sapiens
  CDR3 for beta chain variable domain of TCR clone 102589 (TRBV4-1, TRBJ1-1)
CASSRKMNTEAFF

SEQ ID NO: 205179 - protein, 14 aa, Homo sapiens
  CDR3 for alpha chain variable domain of TCR clone 102590 (TRAV1-2, TRAJ6)
CAVSLSGGSYITTF

SEQ ID NO: 205180 - protein, 15 aa, Homo sapiens
  CDR3 for beta chain variable domain of TCR clone 102590 (TRBV28, TRBJ2-7)
CASSPGGRGFYEQYF

SEQ ID NO: 205181 - protein, 16 aa, Homo sapiens
  CDR3 for alpha chain variable domain of TCR clone 102591 (TRAV27, TRAJ53)
CAAPEGSGGSNYKLTF

SEQ ID NO: 205182 - protein, 15 aa, Homo sapiens
  CDR3 for beta chain variable domain of TCR clone 102591 (TRBV20-1, TRBJ1-1)
CSASRGVTGKTEAFF

SEQ ID NO: 205183 - protein, 14 aa, Homo sapiens
  CDR3 for alpha chain variable domain of TCR clone 102592 (TRAV26-1, TRAJ38)
CIADNAGNNRKLIG

SEQ ID NO: 205184 - protein, 15 aa, Homo sapiens
  CDR3 for beta chain variable domain of TCR clone 102592 (TRBV20-1, TRBJ1-1)
CSASRGVTGNTEAFF

SEQ ID NO: 205185 - protein, 13 aa, Homo sapiens
  CDR3 for alpha chain variable domain of TCR clone 102593 (TRAV1-1, TRAJ13)
CAVNSGGYQKVTF

SEQ ID NO: 205186 - protein, 17 aa, Homo sapiens
  CDR3 for beta chain variable domain of TCR clone 102593 (TRBV28, TRBJ2-5)
CASSRQGGLAGAETQYF

SEQ ID NO: 205187 - protein, 14 aa, Homo sapiens
  CDR3 for alpha chain variable domain of TCR clone 102594 (TRAV12-2, TRAJ44)
CAVNPAGTASKLTF

SEQ ID NO: 205188 - protein, 14 aa, Homo sapiens
  CDR3 for beta chain variable domain of TCR clone 102594 (TRBV7-9, TRBJ2-7)
CASSRPGGPYEQYF

SEQ ID NO: 205189 - protein, 17 aa, Homo sapiens
  CDR3 for alpha chain variable domain of TCR clone 102595 (TRAV3, TRAJ6)
CAVRDGPRAGGSYIPTF

SEQ ID NO: 205190 - protein, 11 aa, Homo sapiens
  CDR3 for beta chain variable domain of TCR clone 102595 (TRBV12-4, TRBJ2-3)
CASSSVRGRYF

SEQ ID NO: 205191 - protein, 15 aa, Homo sapiens
  CDR3 for alpha chain variable domain of TCR clone 102596 (TRAV2, TRAJ15)
CAVEDRAQAGTALIF

SEQ ID NO: 205192 - protein, 15 aa, Homo sapiens
  CDR3 for beta chain variable domain of TCR clone 102596 (TRBV3-1, TRBJ1-2)
CASSHPGTPGYGYTF

SEQ ID NO: 205193 - protein, 17 aa, Homo sapiens
  CDR3 for alpha chain variable domain of TCR clone 102597 (TRAV26-1, TRAJ53)
CIIRVDDSGGSNYKLTF

SEQ ID NO: 205194 - protein, 12 aa, Homo sapiens
  CDR3 for beta chain variable domain of TCR clone 102597 (TRBV12-4, TRBJ2-7)
CASSLGGYEQYF

SEQ ID NO: 205195 - protein, 19 aa, Homo sapiens
  CDR3 for alpha chain variable domain of TCR clone 102598 (TRAV1-2, TRAJ26)
CLLPLCCERPDNYGQNFVF

SEQ ID NO: 205196 - protein, 15 aa, Homo sapiens
  CDR3 for beta chain variable domain of TCR clone 102598 (TRBV27, TRBJ2-7)
CASSTAGAGSYEQYF

SEQ ID NO: 205197 - protein, 16 aa, Homo sapiens
  CDR3 for alpha chain variable domain of TCR clone 102599 (TRAV4, TRAJ22)
CLVGDLYSGSARLLTF

SEQ ID NO: 205198 - protein, 16 aa, Homo sapiens
  CDR3 for beta chain variable domain of TCR clone 102599 (TRBV7-9, TRBJ2-1)
CASSDVAGGSYNEQFF

SEQ ID NO: 205199 - protein, 12 aa, Homo sapiens
  CDR3 for alpha chain variable domain of TCR clone 102600 (TRAV30, TRAJ43)
CGTEERGNDIRF

SEQ ID NO: 205200 - protein, 13 aa, Homo sapiens
  CDR3 for beta chain variable domain of TCR clone 102600 (TRBV7-9, TRBJ2-3)
CASSPGSTDTQYF

SEQ ID NO: 205201 - protein, 15 aa, Homo sapiens
  CDR3 for alpha chain variable domain of TCR clone 102601 (TRAV8-6, TRAJ6)
CAVRDASGGSYIPTF

SEQ ID NO: 205202 - protein, 12 aa, Homo sapiens
  CDR3 for beta chain variable domain of TCR clone 102601 (TRBV11-2, TRBJ2-1)
CASSPGNNEQFF

SEQ ID NO: 205203 - protein, 14 aa, Homo sapiens
  CDR3 for alpha chain variable domain of TCR clone 102602 (TRAV17, TRAJ53)
CATDAGGSNYKLTF

SEQ ID NO: 205204 - protein, 16 aa, Homo sapiens
  CDR3 for beta chain variable domain of TCR clone 102602 (TRBV4-1, TRBJ1-1)
YASSQDAGMGNTEAFF

SEQ ID NO: 205205 - protein, 12 aa, Homo sapiens
  CDR3 for alpha chain variable domain of TCR clone 102603 (TRAV17, TRAJ57)
CATGPPRADLKS

SEQ ID NO: 205206 - protein, 16 aa, Homo sapiens
  CDR3 for beta chain variable domain of TCR clone 102603 (TRBV12-4, TRBJ1-5)
CASSRPAGGSNQPQHF

SEQ ID NO: 205207 - protein, 15 aa, Homo sapiens
  CDR3 for alpha chain variable domain of TCR clone 102604 (TRAV25, TRAJ53)
CPTSNSGGSNYKLTF

SEQ ID NO: 205208 - protein, 14 aa, Homo sapiens
  CDR3 for beta chain variable domain of TCR clone 102604 (TRBV11-2, TRBJ2-3)
CASSRLAHTDTQYF

SEQ ID NO: 205209 - protein, 13 aa, Homo sapiens
  CDR3 for alpha chain variable domain of TCR clone 102605 (TRAV23/DV6, TRAJ5)
CAARAAGRRALTF

SEQ ID NO: 205210 - protein, 12 aa, Homo sapiens
  CDR3 for beta chain variable domain of TCR clone 102605 (TRBV12-4, TRBJ2-7)
CASSLGGYEQYF

SEQ ID NO: 205211 - protein, 15 aa, Homo sapiens
  CDR3 for alpha chain variable domain of TCR clone 102606 (TRAV3, TRAJ13)
CAVSFFLGGYQKVTF

SEQ ID NO: 205212 - protein, 14 aa, Homo sapiens
  CDR3 for beta chain variable domain of TCR clone 102606 (TRBV19, TRBJ2-1)
CASPTFVLSGEQFF

SEQ ID NO: 205213 - protein, 16 aa, Homo sapiens
  CDR3 for alpha chain variable domain of TCR clone 102607 (TRAV3, TRAJ6)
CAVRDGPRAGGSYTYI

SEQ ID NO: 205214 - protein, 14 aa, Homo sapiens
  CDR3 for beta chain variable domain of TCR clone 102607 (TRBV7-2, TRBJ2-7)
CASSPKTSFYEQYF

SEQ ID NO: 205215 - protein, 11 aa, Homo sapiens
  CDR3 for alpha chain variable domain of TCR clone 102608 (TRAV2, TRAJ21)
CAVFNFNKFYF

SEQ ID NO: 205216 - protein, 14 aa, Homo sapiens
  CDR3 for beta chain variable domain of TCR clone 102608 (TRBV15, TRBJ2-3)
CATRSGTGTDTQYF

SEQ ID NO: 205217 - protein, 14 aa, Homo sapiens
  CDR3 for alpha chain variable domain of TCR clone 102609 (TRAV1-1, TRAJ27)
CAVIYNTNAGKSTF

SEQ ID NO: 205218 - protein, 17 aa, Homo sapiens
  CDR3 for beta chain variable domain of TCR clone 102609 (TRBV7-8, TRBJ2-6)
CASSAGTGGAGANVLTF

SEQ ID NO: 205219 - protein, 16 aa, Homo sapiens
  CDR3 for alpha chain variable domain of TCR clone 102610 (TRAV30, TRAJ24)
CGTEIVDTDSWGKFQF

SEQ ID NO: 205220 - protein, 18 aa, Homo sapiens
  CDR3 for beta chain variable domain of TCR clone 102610 (TRBV7-9, TRBJ2-7)
CASSLTTSGSRTWYEQYF

SEQ ID NO: 205221 - protein, 16 aa, Homo sapiens
  CDR3 for alpha chain variable domain of TCR clone 102611 (TRAV30, TRAJ24)
CGTEIVDADSWGKFQF

SEQ ID NO: 205222 - protein, 18 aa, Homo sapiens
  CDR3 for beta chain variable domain of TCR clone 102611 (TRBV7-9, TRBJ2-7)
CASSITTSGSRTWYEQYF

SEQ ID NO: 205223 - protein, 22 aa, Homo sapiens
  CDR3 for alpha chain variable domain of TCR clone 102612 (TRAV12-2, TRAJ32)
CSSETPSPVIQPPKSATNKLIF

SEQ ID NO: 205224 - protein, 14 aa, Homo sapiens
  CDR3 for beta chain variable domain of TCR clone 102612 (TRBV7-3, TRBJ2-1)
CASSLRGSYNEQFF

SEQ ID NO: 205225 - protein, 14 aa, Homo sapiens
  CDR3 for alpha chain variable domain of TCR clone 102613 (TRAV12-2, TRAJ13)
CAVKKTGGYQKVTF

SEQ ID NO: 205226 - protein, 12 aa, Homo sapiens
  CDR3 for beta chain variable domain of TCR clone 102613 (TRBV2, TRBJ2-1)
GRGLPSYNEQFF

SEQ ID NO: 205227 - protein, 14 aa, Homo sapiens
  CDR3 for alpha chain variable domain of TCR clone 102614 (TRAV9-2, TRAJ39)
CALYIYNAGNMLTF

SEQ ID NO: 205228 - protein, 16 aa, Homo sapiens
  CDR3 for beta chain variable domain of TCR clone 102614 (TRBV2, TRBJ2-7)
CASSEPWTGPSYEQYF

SEQ ID NO: 205229 - protein, 18 aa, Homo sapiens
  CDR3 for alpha chain variable domain of TCR clone 102615 (TRAV26-1, TRAJ23)
CIVRVGLEVWNQGGKRIF

SEQ ID NO: 205230 - protein, 13 aa, Homo sapiens
  CDR3 for beta chain variable domain of TCR clone 102615 (TRBV7-2, TRBJ2-7)
CASILSGRSGLAG

SEQ ID NO: 205231 - protein, 17 aa, Homo sapiens
  CDR3 for alpha chain variable domain of TCR clone 102616 (TRAV14/DV4, TRAJ45)
CAMRELYSGGGADGLTF

SEQ ID NO: 205232 - protein, 17 aa, Homo sapiens
  CDR3 for beta chain variable domain of TCR clone 102616 (TRBV7-8, TRBJ2-6)
CASSAGTGGAGANVLTF

SEQ ID NO: 205233 - protein, 15 aa, Homo sapiens
  CDR3 for alpha chain variable domain of TCR clone 102617 (TRAV12-1, TRAJ44)
CVVFVNTGTASKLTF

SEQ ID NO: 205234 - protein, 17 aa, Homo sapiens
  CDR3 for beta chain variable domain of TCR clone 102617 (TRBV7-8, TRBJ2-6)
CAGSAGTGGAGANVLTF

SEQ ID NO: 205235 - protein, 14 aa, Homo sapiens
  CDR3 for alpha chain variable domain of TCR clone 102618 (TRAV35, TRAJ22)
CAWLRPGSARQLTF

SEQ ID NO: 205236 - protein, 15 aa, Homo sapiens
  CDR3 for beta chain variable domain of TCR clone 102618 (TRBV12-3, TRBJ2-5)
CASSPPTGLQETQYF

SEQ ID NO: 205237 - protein, 16 aa, Homo sapiens
  CDR3 for alpha chain variable domain of TCR clone 102619 (TRAV12-3, TRAJ53)
CAMSPGSGGSNYKLTF

SEQ ID NO: 205238 - protein, 15 aa, Homo sapiens
  CDR3 for beta chain variable domain of TCR clone 102619 (TRBV10-3, TRBJ2-3)
CAISLTSGGTDTQYF

SEQ ID NO: 205239 - protein, 14 aa, Homo sapiens
  CDR3 for alpha chain variable domain of TCR clone 102620 (TRAV35, TRAJ33)
CAGSSQDSDYQLIW

SEQ ID NO: 205240 - protein, 15 aa, Homo sapiens
  CDR3 for beta chain variable domain of TCR clone 102620 (TRBV5-1, TRBJ1-4)
FAPAAWKDGNEKLFF

SEQ ID NO: 205241 - protein, 15 aa, Homo sapiens
  CDR3 for alpha chain variable domain of TCR clone 102621 (TRAV17, TRAJ22)
CATVAPSGSARQLTF

SEQ ID NO: 205242 - protein, 15 aa, Homo sapiens
  CDR3 for beta chain variable domain of TCR clone 102621 (TRBV6-3, TRBJ2-7)
CASSSPGTVFYEQYF

SEQ ID NO: 205243 - protein, 14 aa, Homo sapiens
  CDR3 for alpha chain variable domain of TCR clone 102622 (TRAV13-1, TRAJ9)
CAASALTGVFKTIF

SEQ ID NO: 205244 - protein, 13 aa, Homo sapiens
  CDR3 for beta chain variable domain of TCR clone 102622 (TRBV20-1, TRBJ1-1)
CSAGTVGNTEAFF

SEQ ID NO: 205245 - protein, 12 aa, Homo sapiens
  CDR3 for alpha chain variable domain of TCR clone 102623 (TRAV4, TRAJ26)
CFVGDYGQNFVF

SEQ ID NO: 205246 - protein, 16 aa, Homo sapiens
  CDR3 for beta chain variable domain of TCR clone 102623 (TRBV7-2, TRBJ1-2)
CASSSNQDRRGHGYTF

SEQ ID NO: 205247 - protein, 15 aa, Homo sapiens
  CDR3 for alpha chain variable domain of TCR clone 102624 (TRAV17, TRAJ57)
CATGPSQGGSEKLVF

SEQ ID NO: 205248 - protein, 13 aa, Homo sapiens
  CDR3 for beta chain variable domain of TCR clone 102624 (TRBV12-4, TRBJ1-2)
CASSSGPNYGYTF

SEQ ID NO: 205249 - protein, 15 aa, Homo sapiens
  CDR3 for alpha chain variable domain of TCR clone 102625 (TRAV4, TRAJ26)
CLAGDMNNYGQNFVF

SEQ ID NO: 205250 - protein, 16 aa, Homo sapiens
  CDR3 for beta chain variable domain of TCR clone 102625 (TRBV28, TRBJ1-4)
CASSSRTGAANEKLFF

SEQ ID NO: 205251 - protein, 14 aa, Homo sapiens
  CDR3 for alpha chain variable domain of TCR clone 102626 (TRAV13-1, TRAJ3)
CAAEGYSSASKLIF

SEQ ID NO: 205252 - protein, 14 aa, Homo sapiens
  CDR3 for beta chain variable domain of TCR clone 102626 (TRBV19, TRBJ2-5)
CASSSSGIQETQYF

SEQ ID NO: 205253 - protein, 14 aa, Homo sapiens
  CDR3 for alpha chain variable domain of TCR clone 102627 (TRAV20, TRAJ42)
CAVQAGGSQGNLIF

SEQ ID NO: 205254 - protein, 14 aa, Homo sapiens
  CDR3 for beta chain variable domain of TCR clone 102627 (TRBV28, TRBJ1-2)
CASRIEGANYGYTF

SEQ ID NO: 205255 - protein, 10 aa, Homo sapiens
  CDR3 for alpha chain variable domain of TCR clone 102628 (TRAV1-2, TRAJ23)
CAGQGGKLVF

SEQ ID NO: 205256 - protein, 16 aa, Homo sapiens
  CDR3 for beta chain variable domain of TCR clone 102628 (TRBV11-2, TRBJ1-1)
CASSLRQGGEHSKAFF

SEQ ID NO: 205257 - protein, 13 aa, Homo sapiens
  CDR3 for alpha chain variable domain of TCR clone 102629 (TRAV27, TRAJ6)
CAGGTRGSYIPTF

SEQ ID NO: 205258 - protein, 14 aa, Homo sapiens
  CDR3 for beta chain variable domain of TCR clone 102629 (TRBV6-1, TRBJ1-3)
CASVQGGGGNTMYF

SEQ ID NO: 205259 - protein, 14 aa, Homo sapiens
  CDR3 for alpha chain variable domain of TCR clone 102630 (TRAV29/DV5, TRAJ36)
CAARRTTGANNLFF

SEQ ID NO: 205260 - protein, 15 aa, Homo sapiens
  CDR3 for beta chain variable domain of TCR clone 102630 (TRBV19, TRBJ1-6)
CASSTQGAVGSPLHF

SEQ ID NO: 205261 - protein, 13 aa, Homo sapiens
  CDR3 for alpha chain variable domain of TCR clone 102631 (TRAV12-3, TRAJ40)
CAMSDSGTYKYIF

SEQ ID NO: 205262 - protein, 14 aa, Homo sapiens
  CDR3 for beta chain variable domain of TCR clone 102631 (TRBV12-5, TRBJ2-5)
CASGSRTHQETQYF

SEQ ID NO: 205263 - protein, 14 aa, Homo sapiens
  CDR3 for alpha chain variable domain of TCR clone 102632 (TRAV25, TRAJ12)
CAGCDMDSSYKLIF

SEQ ID NO: 205264 - protein, 15 aa, Homo sapiens
  CDR3 for beta chain variable domain of TCR clone 102632 (TRBV19, TRBJ1-5)
CASSILTGENQPQHF

SEQ ID NO: 205265 - protein, 13 aa, Homo sapiens
  CDR3 for alpha chain variable domain of TCR clone 102633 (TRAV23/DV6, TRAJ12)
CAPRVDSSYKLIF

SEQ ID NO: 205266 - protein, 12 aa, Homo sapiens
  CDR3 for beta chain variable domain of TCR clone 102633 (TRBV7-8, TRBJ2-7)
CASSLGDGEQYF

SEQ ID NO: 205267 - protein, 15 aa, Homo sapiens
  CDR3 for alpha chain variable domain of TCR clone 102634 (TRAV13-1, TRAJ17)
CAASIERAAGNKLTF

SEQ ID NO: 205268 - protein, 12 aa, Homo sapiens
  CDR3 for beta chain variable domain of TCR clone 102634 (TRBV5-7, TRBJ1-1)
FASSLGRGKAFF

SEQ ID NO: 205269 - protein, 13 aa, Homo sapiens
  CDR3 for alpha chain variable domain of TCR clone 102635 (TRAV16, TRAJ5)
CALTNTGRKALTF

SEQ ID NO: 205270 - protein, 15 aa, Homo sapiens
  CDR3 for beta chain variable domain of TCR clone 102635 (TRBV11-2, TRBJ2-4)
CASSRPGTGINIQYF

SEQ ID NO: 205271 - protein, 12 aa, Homo sapiens
  CDR3 for alpha chain variable domain of TCR clone 102636 (TRAV21, TRAJ33)
CAKMDSNCQLIW

SEQ ID NO: 205272 - protein, 14 aa, Homo sapiens
  CDR3 for beta chain variable domain of TCR clone 102636 (TRBV2, TRBJ2-7)
CASSLTAGGYEQYF

SEQ ID NO: 205273 - protein, 12 aa, Homo sapiens
  CDR3 for alpha chain variable domain of TCR clone 102637 (TRAV21, TRAJ31)
CAVWGNNARLMF

SEQ ID NO: 205274 - protein, 14 aa, Homo sapiens
  CDR3 for beta chain variable domain of TCR clone 102637 (TRBV6-1, TRBJ1-3)
CASVQGGGGNTMYF

SEQ ID NO: 205275 - protein, 12 aa, Homo sapiens
  CDR3 for alpha chain variable domain of TCR clone 102638 (TRAV8-3, TRAJ15)
CAVGAPLSALIF

SEQ ID NO: 205276 - protein, 15 aa, Homo sapiens
  CDR3 for beta chain variable domain of TCR clone 102638 (TRBV19, TRBJ1-2)
CASSVGQVLNYGYTF

SEQ ID NO: 205277 - protein, 14 aa, Homo sapiens
  CDR3 for alpha chain variable domain of TCR clone 102639 (TRAV1-2, TRAJ16)
CAVNRFSDGQKLLF

SEQ ID NO: 205278 - protein, 16 aa, Homo sapiens
  CDR3 for beta chain variable domain of TCR clone 102639 (TRBV11-2, TRBJ1-2)
CASSWDTGGADYGYTF

SEQ ID NO: 205279 - protein, 16 aa, Homo sapiens
  CDR3 for alpha chain variable domain of TCR clone 102640 (TRAV12-3, TRAJ53)
CAMSPGSGGSNYKLTF

SEQ ID NO: 205280 - protein, 15 aa, Homo sapiens
  CDR3 for beta chain variable domain of TCR clone 102640 (TRBV12-4, TRBJ1-2)
CASSPITGGGYGYTF

SEQ ID NO: 205281 - protein, 12 aa, Homo sapiens
  CDR3 for alpha chain variable domain of TCR clone 102641 (TRAV36/DV7, TRAJ54)
CAVVRGAQKLVF

SEQ ID NO: 205282 - protein, 14 aa, Homo sapiens
  CDR3 for beta chain variable domain of TCR clone 102641 (TRBV7-3, TRBJ1-1)
CASSLNGGNTEAFF

SEQ ID NO: 205283 - protein, 16 aa, Homo sapiens
  CDR3 for alpha chain variable domain of TCR clone 102642 (TRAV3, TRAJ6)
CAVRDGRGRRKLHTYI

SEQ ID NO: 205284 - protein, 15 aa, Homo sapiens
  CDR3 for beta chain variable domain of TCR clone 102642 (TRBV5-1, TRBJ2-7)
CASSLGDFTTYEQYF

SEQ ID NO: 205285 - protein, 19 aa, Homo sapiens
  CDR3 for alpha chain variable domain of TCR clone 102643 (TRAV2, TRAJ20)
ILQVREADAAVYRDCKLSF

SEQ ID NO: 205286 - protein, 14 aa, Homo sapiens
  CDR3 for beta chain variable domain of TCR clone 102643 (TRBV19, TRBJ2-1)
CASPTFVLSGEQFF

SEQ ID NO: 205287 - protein, 12 aa, Homo sapiens
  CDR3 for alpha chain variable domain of TCR clone 102644 (TRAV17, TRAJ4)
CATRGGYNKLIF

SEQ ID NO: 205288 - protein, 15 aa, Homo sapiens
  CDR3 for beta chain variable domain of TCR clone 102644 (TRBV27, TRBJ2-1)
CASSNGGGSSNEQFF

SEQ ID NO: 205289 - protein, 15 aa, Homo sapiens
  CDR3 for alpha chain variable domain of TCR clone 102645 (TRAV25, TRAJ53)
CAATGGGGSNYKLTF

SEQ ID NO: 205290 - protein, 14 aa, Homo sapiens
  CDR3 for beta chain variable domain of TCR clone 102645 (TRBV7-2, TRBJ1-1)
CASSFLTGTTEAFL

SEQ ID NO: 205291 - protein, 14 aa, Homo sapiens
  CDR3 for alpha chain variable domain of TCR clone 102646 (TRAV12-2, TRAJ44)
CAVNPAGTASKLTF

SEQ ID NO: 205292 - protein, 13 aa, Homo sapiens
  CDR3 for beta chain variable domain of TCR clone 102646 (TRBV7-9, TRBJ1-1)
CASSLSGETEAFF

SEQ ID NO: 205293 - protein, 12 aa, Homo sapiens
  CDR3 for alpha chain variable domain of TCR clone 102647 (TRAV29/DV5, TRAJ43)
CAAPYNNNDMRF

SEQ ID NO: 205294 - protein, 15 aa, Homo sapiens
  CDR3 for beta chain variable domain of TCR clone 102647 (TRBV18, TRBJ1-6)
CASSRIQGRNSTLHF

SEQ ID NO: 205295 - protein, 11 aa, Homo sapiens
  CDR3 for alpha chain variable domain of TCR clone 102648 (TRAV2, TRAJ13)
CASGGYQKVTF

SEQ ID NO: 205296 - protein, 15 aa, Homo sapiens
  CDR3 for beta chain variable domain of TCR clone 102648 (TRBV15, TRBJ1-5)
CATSRDPVSNQPQHF

SEQ ID NO: 205297 - protein, 14 aa, Homo sapiens
  CDR3 for alpha chain variable domain of TCR clone 102649 (TRAV17, TRAJ54)
CATDANQVAQKLVF

SEQ ID NO: 205298 - protein, 12 aa, Homo sapiens
  CDR3 for beta chain variable domain of TCR clone 102649 (TRBV6-3, TRBJ2-1)
CASSGSYNEQFF

SEQ ID NO: 205299 - protein, 12 aa, Homo sapiens
  CDR3 for alpha chain variable domain of TCR clone 102650 (TRAV17, TRAJ12)
CAGGDSSYKLTF

SEQ ID NO: 205300 - protein, 12 aa, Homo sapiens
  CDR3 for beta chain variable domain of TCR clone 102650 (TRBV29-1, TRBJ1-1)
CSESDGNTEAFF

SEQ ID NO: 205301 - protein, 19 aa, Homo sapiens
  CDR3 for alpha chain variable domain of TCR clone 102651 (TRAV26-1, TRAJ52)
CIVRAHRNAGGPSYGKLTF

SEQ ID NO: 205302 - protein, 15 aa, Homo sapiens
  CDR3 for beta chain variable domain of TCR clone 102651 (TRBV29-1, TRBJ2-1)
CSGRDRKSSYNEQFF

SEQ ID NO: 205303 - protein, 13 aa, Homo sapiens
  CDR3 for alpha chain variable domain of TCR clone 102652 (TRAV13-1, TRAJ21)
CAASIYNFNKFYF

SEQ ID NO: 205304 - protein, 12 aa, Homo sapiens
  CDR3 for beta chain variable domain of TCR clone 102652 (TRBV11-2, TRBJ2-1)
CASIPGNNEQFF

SEQ ID NO: 205305 - protein, 12 aa, Homo sapiens
  CDR3 for alpha chain variable domain of TCR clone 102653 (TRAV17, TRAJ53)
CAGGGRNYKLTF

SEQ ID NO: 205306 - protein, 16 aa, Homo sapiens
  CDR3 for beta chain variable domain of TCR clone 102653 (TRBV11-2, TRBJ2-3)
CASSFQGRGALDTQYF

SEQ ID NO: 205307 - protein, 15 aa, Homo sapiens
  CDR3 for alpha chain variable domain of TCR clone 102654 (TRAV21, TRAJ32)
CAAAPYGGATNKLIF

SEQ ID NO: 205308 - protein, 17 aa, Homo sapiens
  CDR3 for beta chain variable domain of TCR clone 102654 (TRBV18, TRBJ2-3)
CASSPFGDGRFTDTQYF

SEQ ID NO: 205309 - protein, 13 aa, Homo sapiens
  CDR3 for alpha chain variable domain of TCR clone 102655 (TRAV21, TRAJ27)
CAARTGNAGKSTF

SEQ ID NO: 205310 - protein, 20 aa, Homo sapiens
  CDR3 for beta chain variable domain of TCR clone 102655 (TRBV7-8, TRBJ2-2)
CASSHLFPGPTIHITGELFF

SEQ ID NO: 205311 - protein, 13 aa, Homo sapiens
  CDR3 for alpha chain variable domain of TCR clone 102656 (TRAV35, TRAJ42)
CAGFPGSQGNLIC

SEQ ID NO: 205312 - protein, 13 aa, Homo sapiens
  CDR3 for beta chain variable domain of TCR clone 102656 (TRBV29-1, TRBJ2-1)
CSVEGGRVNEQFF

SEQ ID NO: 205313 - protein, 13 aa, Homo sapiens
  CDR3 for alpha chain variable domain of TCR clone 102657 (TRAV1-2, TRAJ12)
CAVSMDSSYKLIF

SEQ ID NO: 205314 - protein, 15 aa, Homo sapiens
  CDR3 for beta chain variable domain of TCR clone 102657 (TRBV27, TRBJ2-5)
CASNLIPSGGETQYF

SEQ ID NO: 205315 - protein, 14 aa, Homo sapiens
  CDR3 for alpha chain variable domain of TCR clone 102658 (TRAV35, TRAJ33)
CAGSSQDSNYQLIW

SEQ ID NO: 205316 - protein, 17 aa, Homo sapiens
  CDR3 for beta chain variable domain of TCR clone 102658 (TRBV20-1, TRBJ2-7)
CSASGTSGRVGESEQYF

SEQ ID NO: 205317 - protein, 16 aa, Homo sapiens
  CDR3 for alpha chain variable domain of TCR clone 102659 (TRAV26-1, TRAJ53)
CIVRVAMGGSNYKLTF

SEQ ID NO: 205318 - protein, 15 aa, Homo sapiens
  CDR3 for beta chain variable domain of TCR clone 102659 (TRBV7-9, TRBJ1-6)
CASSSPGRGNSPLHF

SEQ ID NO: 205319 - protein, 13 aa, Homo sapiens
  CDR3 for alpha chain variable domain of TCR clone 102660 (TRAV27, TRAJ29)
CAGAHSGNTPLVF

SEQ ID NO: 205320 - protein, 13 aa, Homo sapiens
  CDR3 for beta chain variable domain of TCR clone 102660 (TRBV19, TRBJ2-5)
CASSIGQVTDFFL

SEQ ID NO: 205321 - protein, 16 aa, Homo sapiens
  CDR3 for alpha chain variable domain of TCR clone 102661 (TRAV21, TRAJ37)
CAVSPRGSSNTGKLIF

SEQ ID NO: 205322 - protein, 13 aa, Homo sapiens
  CDR3 for beta chain variable domain of TCR clone 102661 (TRBV20-1, TRBJ2-2)
CSALSGGAGELFF

SEQ ID NO: 205323 - protein, 15 aa, Homo sapiens
  CDR3 for alpha chain variable domain of TCR clone 102662 (TRAV2, TRAJ15)
CAVEDRGQAGTALIF

SEQ ID NO: 205324 - protein, 15 aa, Homo sapiens
  CDR3 for beta chain variable domain of TCR clone 102662 (TRBV27, TRBJ2-1)
CASSNGGGSSNEQFF

SEQ ID NO: 205325 - protein, 11 aa, Homo sapiens
  CDR3 for alpha chain variable domain of TCR clone 102663 (TRAV8-3, TRAJ18)
CAVGGRQRLNP

SEQ ID NO: 205326 - protein, 14 aa, Homo sapiens
  CDR3 for beta chain variable domain of TCR clone 102663 (TRBV19, TRBJ2-1)
CASPTFVLSGEQFF

SEQ ID NO: 205327 - protein, 15 aa, Homo sapiens
  CDR3 for alpha chain variable domain of TCR clone 102664 (TRAV21, TRAJ24)
CAARSSTDSWGKLQF

SEQ ID NO: 205328 - protein, 14 aa, Homo sapiens
  CDR3 for beta chain variable domain of TCR clone 102664 (TRBV18, TRBJ2-5)
CASSPGVSQETQYF

SEQ ID NO: 205329 - protein, 13 aa, Homo sapiens
  CDR3 for alpha chain variable domain of TCR clone 102665 (TRAV20, TRAJ49)
CAVQARTGNQFYF

SEQ ID NO: 205330 - protein, 14 aa, Homo sapiens
  CDR3 for beta chain variable domain of TCR clone 102665 (TRBV11-2, TRBJ1-2)
CASSLGTANYGYTF

SEQ ID NO: 205331 - protein, 18 aa, Homo sapiens
  CDR3 for alpha chain variable domain of TCR clone 102666 (TRAV26-2, TRAJ32)
CILRAPLNYGGATNKPIF

SEQ ID NO: 205332 - protein, 13 aa, Homo sapiens
  CDR3 for beta chain variable domain of TCR clone 102666 (TRBV7-3, TRBJ2-1)
CASSLWPYNEQFF

SEQ ID NO: 205333 - protein, 13 aa, Homo sapiens
  CDR3 for alpha chain variable domain of TCR clone 102667 (TRAV41, TRAJ54)
FAVRIQGAQKLVF

SEQ ID NO: 205334 - protein, 14 aa, Homo sapiens
  CDR3 for beta chain variable domain of TCR clone 102667 (TRBV2, TRBJ2-1)
CASRTGSSYNEQFF

SEQ ID NO: 205335 - protein, 14 aa, Homo sapiens
  CDR3 for alpha chain variable domain of TCR clone 102668 (TRAV13-1, TRAJ5)
CAASPGSRRRALPF

SEQ ID NO: 205336 - protein, 17 aa, Homo sapiens
  CDR3 for beta chain variable domain of TCR clone 102668 (TRBV20-1, TRBJ2-1)
CSASSSGLAGSYNEQFF

SEQ ID NO: 205337 - protein, 14 aa, Homo sapiens
  CDR3 for alpha chain variable domain of TCR clone 102669 (TRAV23/DV6, TRAJ24)
CAASLSDSWGKLQF

SEQ ID NO: 205338 - protein, 16 aa, Homo sapiens
  CDR3 for beta chain variable domain of TCR clone 102669 (TRBV7-9, TRBJ2-6)
CASSLKGPLGANVLTF

SEQ ID NO: 205339 - protein, 16 aa, Homo sapiens
  CDR3 for alpha chain variable domain of TCR clone 102670 (TRAV3, TRAJ18)
CAVRDGRGSTLGRLYF

SEQ ID NO: 205340 - protein, 11 aa, Homo sapiens
  CDR3 for beta chain variable domain of TCR clone 102670 (TRBV6-1, TRBJ2-1)
CASISSNEQFF

SEQ ID NO: 205341 - protein, 20 aa, Homo sapiens
  CDR3 for alpha chain variable domain of TCR clone 102671 (TRAV12-1, TRAJ42)
SSVIQPPTSVKGGSQGNLIF

SEQ ID NO: 205342 - protein, 18 aa, Homo sapiens
  CDR3 for beta chain variable domain of TCR clone 102671 (TRBV11-2, TRBJ2-3)
CASSLGGASRGAHNTQYF

SEQ ID NO: 205343 - protein, 12 aa, Homo sapiens
  CDR3 for alpha chain variable domain of TCR clone 102672 (TRAV9-2, TRAJ20)
CALHSNDYKPSF

SEQ ID NO: 205344 - protein, 13 aa, Homo sapiens
  CDR3 for beta chain variable domain of TCR clone 102672 (TRBV6-3, TRBJ2-7)
CASSTDLAGEQYF

SEQ ID NO: 205345 - protein, 11 aa, Homo sapiens
  CDR3 for alpha chain variable domain of TCR clone 102673 (TRAV2, TRAJ13)
CASGGYQKVTS

SEQ ID NO: 205346 - protein, 17 aa, Homo sapiens
  CDR3 for beta chain variable domain of TCR clone 102673 (TRBV7-3, TRBJ2-3)
CASSLMKRMRGADTQYF

SEQ ID NO: 205347 - protein, 16 aa, Homo sapiens
  CDR3 for alpha chain variable domain of TCR clone 102674 (TRAV1-2, TRAJ16)
CAVNRFSDGQSCSLQG

SEQ ID NO: 205348 - protein, 15 aa, Homo sapiens
  CDR3 for beta chain variable domain of TCR clone 102674 (TRBV9, TRBJ1-6)
CASSVAGTGDSPLHF

SEQ ID NO: 205349 - protein, 14 aa, Homo sapiens
  CDR3 for alpha chain variable domain of TCR clone 102675 (TRAV8-3, TRAJ39)
CAVGANNAGNMLTF

SEQ ID NO: 205350 - protein, 14 aa, Homo sapiens
  CDR3 for beta chain variable domain of TCR clone 102675 (TRBV19, TRBJ2-5)
CASSMTGQQETQYF

SEQ ID NO: 205351 - protein, 12 aa, Homo sapiens
  CDR3 for alpha chain variable domain of TCR clone 102676 (TRAV13-1, TRAJ21)
CAAKEGCNKFYF

SEQ ID NO: 205352 - protein, 13 aa, Homo sapiens
  CDR3 for beta chain variable domain of TCR clone 102676 (TRBV19, TRBJ1-2)
CASSVPGQDGYTF

SEQ ID NO: 205353 - protein, 15 aa, Homo sapiens
  CDR3 for alpha chain variable domain of TCR clone 102677 (TRAV12-2, TRAJ53)
CAVNGGGGSNYKLTV

SEQ ID NO: 205354 - protein, 17 aa, Homo sapiens
  CDR3 for beta chain variable domain of TCR clone 102677 (TRBV7-3, TRBJ2-3)
CASSLMKRMRGADTQYF

SEQ ID NO: 205355 - protein, 14 aa, Homo sapiens
  CDR3 for alpha chain variable domain of TCR clone 102678 (TRAV2, TRAJ9)
CAVEDRSGGFKTIF

SEQ ID NO: 205356 - protein, 15 aa, Homo sapiens
  CDR3 for beta chain variable domain of TCR clone 102678 (TRBV7-2, TRBJ2-3)
CASSLAGAFIDTQYF

SEQ ID NO: 205357 - protein, 17 aa, Homo sapiens
  CDR3 for alpha chain variable domain of TCR clone 102679 (TRAV12-1, TRAJ42)
CVVMHMNYGGSQGNLIF

SEQ ID NO: 205358 - protein, 13 aa, Homo sapiens
  CDR3 for beta chain variable domain of TCR clone 102679 (TRBV7-2, TRBJ1-1)
CASSLARPAEAFF

SEQ ID NO: 205359 - protein, 12 aa, Homo sapiens
  CDR3 for alpha chain variable domain of TCR clone 102680 (TRAV8-6, TRAJ43)
CAVSHNNNDMRF

SEQ ID NO: 205360 - protein, 14 aa, Homo sapiens
  CDR3 for beta chain variable domain of TCR clone 102680 (TRBV10-3, TRBJ1-1)
CAISDGSGVSEAFF

SEQ ID NO: 205361 - protein, 11 aa, Homo sapiens
  CDR3 for alpha chain variable domain of TCR clone 102681 (TRAV27, TRAJ47)
SIVEYGNKLVF

SEQ ID NO: 205362 - protein, 18 aa, Homo sapiens
  CDR3 for beta chain variable domain of TCR clone 102681 (TRBV2, TRBJ2-1)
CASRGLAGGPRTYNEQFL

SEQ ID NO: 205363 - protein, 15 aa, Homo sapiens
  CDR3 for alpha chain variable domain of TCR clone 102682 (TRAV25, TRAJ53)
CPTSNSGGSHYKLTF

SEQ ID NO: 205364 - protein, 14 aa, Homo sapiens
  CDR3 for beta chain variable domain of TCR clone 102682 (TRBV11-2, TRBJ2-3)
CASSRLARTDTQYF

SEQ ID NO: 205365 - protein, 14 aa, Homo sapiens
  CDR3 for alpha chain variable domain of TCR clone 102683 (TRAV2, TRAJ13)
CAVFNSGGYQKVTF

SEQ ID NO: 205366 - protein, 18 aa, Homo sapiens
  CDR3 for beta chain variable domain of TCR clone 102683 (TRBV20-1, TRBJ2-6)
CSARTLAGGPSGANVLTF

SEQ ID NO: 205367 - protein, 14 aa, Homo sapiens
  CDR3 for alpha chain variable domain of TCR clone 102684 (TRAV19, TRAJ15)
CALRIEQAGTALIF

SEQ ID NO: 205368 - protein, 19 aa, Homo sapiens
  CDR3 for beta chain variable domain of TCR clone 102684 (TRBV28, TRBJ2-4)
CASSFQPGGPAHSKNSQYF

SEQ ID NO: 205369 - protein, 14 aa, Homo sapiens
  CDR3 for alpha chain variable domain of TCR clone 102685 (TRAV12-2, TRAJ45)
CAVYSGGGADGLTF

SEQ ID NO: 205370 - protein, 15 aa, Homo sapiens
  CDR3 for beta chain variable domain of TCR clone 102685 (TRBV27, TRBJ2-1)
CASSNGGGSSNEQFF

SEQ ID NO: 205371 - protein, 12 aa, Homo sapiens
  CDR3 for alpha chain variable domain of TCR clone 102686 (TRAV8-3, TRAJ41)
CAVALSGYALNF

SEQ ID NO: 205372 - protein, 16 aa, Homo sapiens
  CDR3 for beta chain variable domain of TCR clone 102686 (TRBV27, TRBJ2-7)
WASSSERRDSAYEQYF

SEQ ID NO: 205373 - protein, 15 aa, Homo sapiens
  CDR3 for alpha chain variable domain of TCR clone 102687 (TRAV8-3, TRAJ11)
CAVGLLNSGYSTLTL

SEQ ID NO: 205374 - protein, 15 aa, Homo sapiens
  CDR3 for beta chain variable domain of TCR clone 102687 (TRBV13, TRBJ2-1)
CASSLLSGLNNEQFF

SEQ ID NO: 205375 - protein, 14 aa, Homo sapiens
  CDR3 for alpha chain variable domain of TCR clone 102688 (TRAV12-2, TRAJ17)
CAVLFKAAGNKLTF

SEQ ID NO: 205376 - protein, 17 aa, Homo sapiens
  CDR3 for beta chain variable domain of TCR clone 102688 (TRBV20-1, TRBJ2-2)
CSASGSAQGGLTGELFF

SEQ ID NO: 205377 - protein, 21 aa, Homo sapiens
  CDR3 for alpha chain variable domain of TCR clone 102689 (TRAV1-1, TRAJ6)
CLSLLRCERLERTGGSYIPTF

SEQ ID NO: 205378 - protein, 13 aa, Homo sapiens
  CDR3 for beta chain variable domain of TCR clone 102689 (TRBV10-2, TRBJ2-7)
CASGASGGYEQYF

SEQ ID NO: 205379 - protein, 14 aa, Homo sapiens
  CDR3 for alpha chain variable domain of TCR clone 102690 (TRAV26-1, TRAJ5)
CIVRVRFNRRALTF

SEQ ID NO: 205380 - protein, 17 aa, Homo sapiens
  CDR3 for beta chain variable domain of TCR clone 102690 (TRBV29-1, TRBJ2-3)
CSAEVLAGETSTDTQYF

SEQ ID NO: 205381 - protein, 12 aa, Homo sapiens
  CDR3 for alpha chain variable domain of TCR clone 102691 (TRAV12-3, TRAJ17)
CAMTLTGNKLTF

SEQ ID NO: 205382 - protein, 15 aa, Homo sapiens
  CDR3 for beta chain variable domain of TCR clone 102691 (TRBV13, TRBJ2-1)
CASSLLSGLNNEQFF

SEQ ID NO: 205383 - protein, 14 aa, Homo sapiens
  CDR3 for alpha chain variable domain of TCR clone 102692 (TRAV12-2, TRAJ9)
CAVNAPEGGFRTIF

SEQ ID NO: 205384 - protein, 16 aa, Homo sapiens
  CDR3 for beta chain variable domain of TCR clone 102692 (TRBV19, TRBJ1-6)
CASSVAPVAGNSPLHF

SEQ ID NO: 205385 - protein, 16 aa, Homo sapiens
  CDR3 for alpha chain variable domain of TCR clone 102693 (TRAV1-1, TRAJ37)
CAVRDKALATQANKSL

SEQ ID NO: 205386 - protein, 13 aa, Homo sapiens
  CDR3 for beta chain variable domain of TCR clone 102693 (TRBV7-3, TRBJ1-1)
CASSQDWGAEAFF

SEQ ID NO: 205387 - protein, 14 aa, Homo sapiens
  CDR3 for alpha chain variable domain of TCR clone 102694 (TRAV12-1, TRAJ30)
CVPTGTNRDYKIIF

SEQ ID NO: 205388 - protein, 11 aa, Homo sapiens
  CDR3 for beta chain variable domain of TCR clone 102694 (TRBV4-1, TRBJ2-2)
CASEHTGELFF

SEQ ID NO: 205389 - protein, 14 aa, Homo sapiens
  CDR3 for alpha chain variable domain of TCR clone 102695 (TRAV8-4, TRAJ9)
CAVRINTGGFKTIF

SEQ ID NO: 205390 - protein, 14 aa, Homo sapiens
  CDR3 for beta chain variable domain of TCR clone 102695 (TRBV12-4, TRBJ1-1)
CASSLGTGGTEAFF

SEQ ID NO: 205391 - protein, 15 aa, Homo sapiens
  CDR3 for alpha chain variable domain of TCR clone 102696 (TRAV4, TRAJ39)
CLVGPNNNAGKVLTF

SEQ ID NO: 205392 - protein, 15 aa, Homo sapiens
  CDR3 for beta chain variable domain of TCR clone 102696 (TRBV19, TRBJ1-1)
CASTSGQIQNTEAFF

SEQ ID NO: 205393 - protein, 16 aa, Homo sapiens
  CDR3 for alpha chain variable domain of TCR clone 102697 (TRAV3, TRAJ21)
CAVRDIERGNFNKFYF

SEQ ID NO: 205394 - protein, 11 aa, Homo sapiens
  CDR3 for beta chain variable domain of TCR clone 102697 (TRBV19, TRBJ1-1)
CASSIGSEAFF

SEQ ID NO: 205395 - protein, 14 aa, Homo sapiens
  CDR3 for alpha chain variable domain of TCR clone 102698 (TRAV23/DV6, TRAJ37)
CAASPSSNTGKLIF

SEQ ID NO: 205396 - protein, 17 aa, Homo sapiens
  CDR3 for beta chain variable domain of TCR clone 102698 (TRBV13, TRBJ2-3)
CASSLSRVAGRRNTQYF

SEQ ID NO: 205397 - protein, 16 aa, Homo sapiens
  CDR3 for alpha chain variable domain of TCR clone 102699 (TRAV12-1, TRAJ43)
CVVNPHRFGAGTRLTA

SEQ ID NO: 205398 - protein, 13 aa, Homo sapiens
  CDR3 for beta chain variable domain of TCR clone 102699 (TRBV20-1, TRBJ1-1)
CSARGGGNTEAFF

SEQ ID NO: 205399 - protein, 11 aa, Homo sapiens
  CDR3 for alpha chain variable domain of TCR clone 102700 (TRAV12-1, TRAJ21)
CVVNNFDKFYF

SEQ ID NO: 205400 - protein, 17 aa, Homo sapiens
  CDR3 for beta chain variable domain of TCR clone 102700 (TRBV7-8, TRBJ2-1)
CASSPPTGTLAYNEQFF

SEQ ID NO: 205401 - protein, 16 aa, Homo sapiens
  CDR3 for alpha chain variable domain of TCR clone 102701 (TRAV30, TRAJ24)
CGTEIVDADSWGKFQF

SEQ ID NO: 205402 - protein, 16 aa, Homo sapiens
  CDR3 for beta chain variable domain of TCR clone 102701 (TRBV2, TRBJ1-3)
CASSGGAGRSGNTIDF

SEQ ID NO: 205403 - protein, 11 aa, Homo sapiens
  CDR3 for alpha chain variable domain of TCR clone 102702 (TRAV17, TRAJ36)
CAPTGANNLFF

SEQ ID NO: 205404 - protein, 12 aa, Homo sapiens
  CDR3 for beta chain variable domain of TCR clone 102702 (TRBV29-1, TRBJ2-3)
CSVTGGAYTQYF

SEQ ID NO: 205405 - protein, 13 aa, Homo sapiens
  CDR3 for alpha chain variable domain of TCR clone 102703 (TRAV13-2, TRAJ8)
CAFMNTGFQKLVF

SEQ ID NO: 205406 - protein, 15 aa, Homo sapiens
  CDR3 for beta chain variable domain of TCR clone 102703 (TRBV7-9, TRBJ1-4)
CASSARTGGNEKLFF

SEQ ID NO: 205407 - protein, 14 aa, Homo sapiens
  CDR3 for alpha chain variable domain of TCR clone 102704 (TRAV2, TRAJ37)
CAVDFTSNTGRLIF

SEQ ID NO: 205408 - protein, 13 aa, Homo sapiens
  CDR3 for beta chain variable domain of TCR clone 102704 (TRBV24-1, TRBJ2-2)
CATSDWSTGELFF

SEQ ID NO: 205409 - protein, 13 aa, Homo sapiens
  CDR3 for alpha chain variable domain of TCR clone 102705 (TRAV12-3, TRAJ13)
CAMTSGGYQKVTF

SEQ ID NO: 205410 - protein, 13 aa, Homo sapiens
  CDR3 for beta chain variable domain of TCR clone 102705 (TRBV7-9, TRBJ1-2)
CASRLKQNYGYTF

SEQ ID NO: 205411 - protein, 15 aa, Homo sapiens
  CDR3 for alpha chain variable domain of TCR clone 102706 (TRAV38-1, TRAJ53)
CAFKNSGGSNYKLTF

SEQ ID NO: 205412 - protein, 13 aa, Homo sapiens
  CDR3 for beta chain variable domain of TCR clone 102706 (TRBV7-3, TRBJ1-1)
CASSQDWGAEAFF

SEQ ID NO: 205413 - protein, 11 aa, Homo sapiens
  CDR3 for alpha chain variable domain of TCR clone 102707 (TRAV17, TRAJ49)
CATNTGNQFYF

SEQ ID NO: 205414 - protein, 12 aa, Homo sapiens
  CDR3 for beta chain variable domain of TCR clone 102707 (TRBV2, TRBJ2-7)
CASSDGSGIPYF

SEQ ID NO: 205415 - protein, 13 aa, Homo sapiens
  CDR3 for alpha chain variable domain of TCR clone 102708 (TRAV27, TRAJ54)
CAGAGHGAQKLVF

SEQ ID NO: 205416 - protein, 15 aa, Homo sapiens
  CDR3 for beta chain variable domain of TCR clone 102708 (TRBV18, TRBJ2-6)
CASSPSYAGANVLTF

SEQ ID NO: 205417 - protein, 18 aa, Homo sapiens
  CDR3 for alpha chain variable domain of TCR clone 102709 (TRAV21, TRAJ52)
CAVRPSPAGGTSFGKLTF

SEQ ID NO: 205418 - protein, 14 aa, Homo sapiens
  CDR3 for beta chain variable domain of TCR clone 102709 (TRBV4-1, TRBJ2-2)
CASSQAVNTGELFF

SEQ ID NO: 205419 - protein, 13 aa, Homo sapiens
  CDR3 for alpha chain variable domain of TCR clone 102710 (TRAV3, TRAJ21)
CAVREPDSNKFYF

SEQ ID NO: 205420 - protein, 13 aa, Homo sapiens
  CDR3 for beta chain variable domain of TCR clone 102710 (TRBV7-2, TRBJ2-5)
CASSQTSVETQYF

SEQ ID NO: 205421 - protein, 14 aa, Homo sapiens
  CDR3 for alpha chain variable domain of TCR clone 102711 (TRAV13-1, TRAJ44)
CAAKATGTPSKLTF

SEQ ID NO: 205422 - protein, 17 aa, Homo sapiens
  CDR3 for beta chain variable domain of TCR clone 102711 (TRBV7-3, TRBJ2-3)
CASSLMKRMRGADTQYF

SEQ ID NO: 205423 - protein, 14 aa, Homo sapiens
  CDR3 for alpha chain variable domain of TCR clone 102712 (TRAV1-2, TRAJ17)
CALRRGAAGNKLTF

SEQ ID NO: 205424 - protein, 15 aa, Homo sapiens
  CDR3 for beta chain variable domain of TCR clone 102712 (TRBV20-1, TRBJ1-1)
CSASRGVTGNTEAFF

SEQ ID NO: 205425 - protein, 15 aa, Homo sapiens
  CDR3 for alpha chain variable domain of TCR clone 102713 (TRAV3, TRAJ12)
CAVRDIRDSSCKLIF

SEQ ID NO: 205426 - protein, 15 aa, Homo sapiens
  CDR3 for beta chain variable domain of TCR clone 102713 (TRBV27, TRBJ2-7)
CASSLRNEQGYEQYF

SEQ ID NO: 205427 - protein, 17 aa, Homo sapiens
  CDR3 for alpha chain variable domain of TCR clone 102714 (TRAV27, TRAJ18)
CAGLHRGRGSTLGRLYF

SEQ ID NO: 205428 - protein, 12 aa, Homo sapiens
  CDR3 for beta chain variable domain of TCR clone 102714 (TRBV7-3, TRBJ2-1)
CASSFINNEQFF

SEQ ID NO: 205429 - protein, 13 aa, Homo sapiens
  CDR3 for alpha chain variable domain of TCR clone 102715 (TRAV12-2, TRAJ50)
CAVIVTSYAKVIF

SEQ ID NO: 205430 - protein, 14 aa, Homo sapiens
  CDR3 for beta chain variable domain of TCR clone 102715 (TRBV9, TRBJ2-1)
CASSVDPRGKEQFF

SEQ ID NO: 205431 - protein, 17 aa, Homo sapiens
  CDR3 for alpha chain variable domain of TCR clone 102716 (TRAV13-1, TRAJ53)
CAASWKSSGGSNYKLTF

SEQ ID NO: 205432 - protein, 19 aa, Homo sapiens
  CDR3 for beta chain variable domain of TCR clone 102716 (TRBV7-9, TRBJ2-1)
CASSHNRGSLLRSYNEQFF

SEQ ID NO: 205433 - protein, 15 aa, Homo sapiens
  CDR3 for alpha chain variable domain of TCR clone 102717 (TRAV8-3, TRAJ27)
CAVGPTKTNAGKSTF

SEQ ID NO: 205434 - protein, 15 aa, Homo sapiens
  CDR3 for beta chain variable domain of TCR clone 102717 (TRBV7-2, TRBJ2-1)
CASSSGLAGGNEQFF

SEQ ID NO: 205435 - protein, 14 aa, Homo sapiens
  CDR3 for alpha chain variable domain of TCR clone 102718 (TRAV12-3, TRAJ10)
SHLPLTGGGNKLTF

SEQ ID NO: 205436 - protein, 17 aa, Homo sapiens
  CDR3 for beta chain variable domain of TCR clone 102718 (TRBV4-1, TRBJ2-1)
CASSHRDSGSSYNEQFF

SEQ ID NO: 205437 - protein, 16 aa, Homo sapiens
  CDR3 for alpha chain variable domain of TCR clone 102719 (TRAV3, TRAJ27)
CAVRDPQGTNAGKSTF

SEQ ID NO: 205438 - protein, 13 aa, Homo sapiens
  CDR3 for beta chain variable domain of TCR clone 102719 (TRBV7-9, TRBJ1-2)
CASSLKQNYGYTF

SEQ ID NO: 205439 - protein, 15 aa, Homo sapiens
  CDR3 for alpha chain variable domain of TCR clone 102720 (TRAV8-3, TRAJ27)
CAVGPSKTNAGKSTF

SEQ ID NO: 205440 - protein, 14 aa, Homo sapiens
  CDR3 for beta chain variable domain of TCR clone 102720 (TRBV28, TRBJ2-7)
CAIVGQGNLYEQYF

SEQ ID NO: 205441 - protein, 17 aa, Homo sapiens
  CDR3 for alpha chain variable domain of TCR clone 102721 (TRAV21, TRAJ24)
CAGIRLRPTDSWGKLQF

SEQ ID NO: 205442 - protein, 15 aa, Homo sapiens
  CDR3 for beta chain variable domain of TCR clone 102721 (TRBV7-2, TRBJ2-3)
CASSPRGLSTDTQYF

SEQ ID NO: 205443 - protein, 14 aa, Homo sapiens
  CDR3 for alpha chain variable domain of TCR clone 102722 (TRAV16, TRAJ54)
CALSLVQGAQKLVF

SEQ ID NO: 205444 - protein, 17 aa, Homo sapiens
  CDR3 for beta chain variable domain of TCR clone 102722 (TRBV11-2, TRBJ2-4)
CASSSVGPGGHRNIQYF

SEQ ID NO: 205445 - protein, 12 aa, Homo sapiens
  CDR3 for alpha chain variable domain of TCR clone 102723 (TRAV13-2, TRAJ8)
CAPWLGFQKLVF

SEQ ID NO: 205446 - protein, 15 aa, Homo sapiens
  CDR3 for beta chain variable domain of TCR clone 102723 (TRBV7-9, TRBJ1-6)
CASSSPGRGNSPLHF

SEQ ID NO: 205447 - protein, 14 aa, Homo sapiens
  CDR3 for alpha chain variable domain of TCR clone 102724 (TRAV12-2, TRAJ33)
CAVKRARSNYQLIW

SEQ ID NO: 205448 - protein, 15 aa, Homo sapiens
  CDR3 for beta chain variable domain of TCR clone 102724 (TRBV20-1, TRBJ2-7)
CSARERVSGMDEQYF

SEQ ID NO: 205449 - protein, 13 aa, Homo sapiens
  CDR3 for alpha chain variable domain of TCR clone 102725 (TRAV21, TRAJ15)
CAVANQAGTALIF

SEQ ID NO: 205450 - protein, 15 aa, Homo sapiens
  CDR3 for beta chain variable domain of TCR clone 102725 (TRBV27, TRBJ2-7)
CASSLGSSVSHEQYF

SEQ ID NO: 205451 - protein, 12 aa, Homo sapiens
  CDR3 for alpha chain variable domain of TCR clone 102726 (TRAV12-3, TRAJ20)
CAMGRGDYKLSF

SEQ ID NO: 205452 - protein, 14 aa, Homo sapiens
  CDR3 for beta chain variable domain of TCR clone 102726 (TRBV5-5, TRBJ1-5)
CASSGQGVDQPQHF

SEQ ID NO: 205453 - protein, 14 aa, Homo sapiens
  CDR3 for alpha chain variable domain of TCR clone 102727 (TRAV9-2, TRAJ39)
CALYIYNAGNMLTF

SEQ ID NO: 205454 - protein, 13 aa, Homo sapiens
  CDR3 for beta chain variable domain of TCR clone 102727 (TRBV19, TRBJ1-2)
CASSQGQVYGYTF

SEQ ID NO: 205455 - protein, 12 aa, Homo sapiens
  CDR3 for alpha chain variable domain of TCR clone 102728 (TRAV35, TRAJ39)
LAPNNAGNMLSF

SEQ ID NO: 205456 - protein, 16 aa, Homo sapiens
  CDR3 for beta chain variable domain of TCR clone 102728 (TRBV2, TRBJ2-3)
CASSTSVEGVTDTQYF

SEQ ID NO: 205457 - protein, 19 aa, Homo sapiens
  CDR3 for alpha chain variable domain of TCR clone 102729 (TRAV17, TRAJ57)
CFLLLCYGPSQGGSEKLVF

SEQ ID NO: 205458 - protein, 16 aa, Homo sapiens
  CDR3 for beta chain variable domain of TCR clone 102729 (TRBV11-2, TRBJ2-7)
CASSPLAGGPRYEQYF

SEQ ID NO: 205459 - protein, 15 aa, Homo sapiens
  CDR3 for alpha chain variable domain of TCR clone 102730 (TRAV8-3, TRAJ15)
CAVGAPNQAGTALIF

SEQ ID NO: 205460 - protein, 14 aa, Homo sapiens
  CDR3 for beta chain variable domain of TCR clone 102730 (TRBV20-1, TRBJ2-1)
CSPNDEASYDEQFF

SEQ ID NO: 205461 - protein, 16 aa, Homo sapiens
  CDR3 for alpha chain variable domain of TCR clone 102731 (TRAV12-2, TRAJ28)
CAVIRGSGAGSYQLTF

SEQ ID NO: 205462 - protein, 14 aa, Homo sapiens
  CDR3 for beta chain variable domain of TCR clone 102731 (TRBV4-1, TRBJ2-7)
CASSPVAGGDEQYF

SEQ ID NO: 205463 - protein, 14 aa, Homo sapiens
  CDR3 for alpha chain variable domain of TCR clone 102732 (TRAV8-6, TRAJ48)
CAVRTNFGNEKLTF

SEQ ID NO: 205464 - protein, 13 aa, Homo sapiens
  CDR3 for beta chain variable domain of TCR clone 102732 (TRBV5-5, TRBJ1-2)
CASSFWRGEDYTF

SEQ ID NO: 205465 - protein, 11 aa, Homo sapiens
  CDR3 for alpha chain variable domain of TCR clone 102733 (TRAV39, TRAJ49)
CAVDISTQFYF

SEQ ID NO: 205466 - protein, 11 aa, Homo sapiens
  CDR3 for beta chain variable domain of TCR clone 102733 (TRBV7-8, TRBJ2-7)
CASSLSLEHYF

SEQ ID NO: 205467 - protein, 14 aa, Homo sapiens
  CDR3 for alpha chain variable domain of TCR clone 102734 (TRAV9-2, TRAJ39)
CALYIYNAGNMLTF

SEQ ID NO: 205468 - protein, 12 aa, Homo sapiens
  CDR3 for beta chain variable domain of TCR clone 102734 (TRBV18, TRBJ2-1)
CASSSDEDEQFF

SEQ ID NO: 205469 - protein, 15 aa, Homo sapiens
  CDR3 for alpha chain variable domain of TCR clone 102735 (TRAV34, TRAJ38)
CGAAFTPGNNRKLIW

SEQ ID NO: 205470 - protein, 16 aa, Homo sapiens
  CDR3 for beta chain variable domain of TCR clone 102735 (TRBV12-5, TRBJ2-5)
CASGPRTSGNQETQYF

SEQ ID NO: 205471 - protein, 14 aa, Homo sapiens
  CDR3 for alpha chain variable domain of TCR clone 102736 (TRAV23/DV6, TRAJ40)
CAASLTSVTYKYIF

SEQ ID NO: 205472 - protein, 14 aa, Homo sapiens
  CDR3 for beta chain variable domain of TCR clone 102736 (TRBV5-1, TRBJ2-3)
CASSRGQGGGTQYF

SEQ ID NO: 205473 - protein, 11 aa, Homo sapiens
  CDR3 for alpha chain variable domain of TCR clone 102737 (TRAV12-2, TRAJ23)
CARGRGGKRIF

SEQ ID NO: 205474 - protein, 14 aa, Homo sapiens
  CDR3 for beta chain variable domain of TCR clone 102737 (TRBV28, TRBJ2-5)
CASSLGDRAETQYF

SEQ ID NO: 205475 - protein, 13 aa, Homo sapiens
  CDR3 for alpha chain variable domain of TCR clone 102738 (TRAV17, TRAJ31)
CATDENNNARLMF

SEQ ID NO: 205476 - protein, 14 aa, Homo sapiens
  CDR3 for beta chain variable domain of TCR clone 102738 (TRBV11-2, TRBJ2-1)
CASSPSRQGGGQFL

SEQ ID NO: 205477 - protein, 16 aa, Homo sapiens
  CDR3 for alpha chain variable domain of TCR clone 102739 (TRAV8-2, TRAJ7)
CVVSEGPYYGNNRLAF

SEQ ID NO: 205478 - protein, 13 aa, Homo sapiens
  CDR3 for beta chain variable domain of TCR clone 102739 (TRBV19, TRBJ2-1)
CASSMYGVNEQFF

SEQ ID NO: 205479 - protein, 17 aa, Homo sapiens
  CDR3 for alpha chain variable domain of TCR clone 102740 (TRAV13-1, TRAJ52)
CAAGRNAGGTSYGKLTF

SEQ ID NO: 205480 - protein, 13 aa, Homo sapiens
  CDR3 for beta chain variable domain of TCR clone 102740 (TRBV7-2, TRBJ1-1)
RASNLKGAKVAFF

SEQ ID NO: 205481 - protein, 17 aa, Homo sapiens
  CDR3 for alpha chain variable domain of TCR clone 102741 (TRAV3, TRAJ6)
CAVRDGPRAGGSYIPTF

SEQ ID NO: 205482 - protein, 19 aa, Homo sapiens
  CDR3 for beta chain variable domain of TCR clone 102741 (TRBV28, TRBJ2-1)
CASSFSIRGSGRTRYEQFF

SEQ ID NO: 205483 - protein, 14 aa, Homo sapiens
  CDR3 for alpha chain variable domain of TCR clone 102742 (TRAV16, TRAJ37)
CALDISGNTGKLIF

SEQ ID NO: 205484 - protein, 17 aa, Homo sapiens
  CDR3 for beta chain variable domain of TCR clone 102742 (TRBV11-2, TRBJ2-1)
CASSLYPPGVEYNEQFF

SEQ ID NO: 205485 - protein, 14 aa, Homo sapiens
  CDR3 for alpha chain variable domain of TCR clone 102743 (TRAV20, TRAJ10)
CAVRVEGGGNKLTV

SEQ ID NO: 205486 - protein, 18 aa, Homo sapiens
  CDR3 for beta chain variable domain of TCR clone 102743 (TRBV24-1, TRBJ2-1)
CATSDLMFLGRGVHEQFF

SEQ ID NO: 205487 - protein, 14 aa, Homo sapiens
  CDR3 for alpha chain variable domain of TCR clone 102744 (TRAV23/DV6, TRAJ4)
SAANLSGGYNKLIF

SEQ ID NO: 205488 - protein, 17 aa, Homo sapiens
  CDR3 for beta chain variable domain of TCR clone 102744 (TRBV4-1, TRBJ1-3)
CASSPQRGIRFGNTIYF

SEQ ID NO: 205489 - protein, 14 aa, Homo sapiens
  CDR3 for alpha chain variable domain of TCR clone 102745 (TRAV13-2, TRAJ43)
CAEIPTYNNNDMRF

SEQ ID NO: 205490 - protein, 15 aa, Homo sapiens
  CDR3 for beta chain variable domain of TCR clone 102745 (TRBV7-9, TRBJ1-4)
CASSARTGGNEKLFF

SEQ ID NO: 205491 - protein, 14 aa, Homo sapiens
  CDR3 for alpha chain variable domain of TCR clone 102746 (TRAV13-1, TRAJ10)
CAAKEPGGGNKLTL

SEQ ID NO: 205492 - protein, 14 aa, Homo sapiens
  CDR3 for beta chain variable domain of TCR clone 102746 (TRBV20-1, TRBJ1-1)
CSAQTRIGGTEAFF

SEQ ID NO: 205493 - protein, 12 aa, Homo sapiens
  CDR3 for alpha chain variable domain of TCR clone 102747 (TRAV29/DV5, TRAJ15)
CASNQAGTALIF

SEQ ID NO: 205494 - protein, 14 aa, Homo sapiens
  CDR3 for beta chain variable domain of TCR clone 102747 (TRBV7-2, TRBJ2-7)
CASRSQGAAYEQYF

SEQ ID NO: 205495 - protein, 15 aa, Homo sapiens
  CDR3 for alpha chain variable domain of TCR clone 102748 (TRAV29/DV5, TRAJ42)
CAAKTDGGSQGNLIF

SEQ ID NO: 205496 - protein, 15 aa, Homo sapiens
  CDR3 for beta chain variable domain of TCR clone 102748 (TRBV5-1, TRBJ2-5)
CASSLGLAEQETQYF

SEQ ID NO: 205497 - protein, 18 aa, Homo sapiens
  CDR3 for alpha chain variable domain of TCR clone 102749 (TRAV12-3, TRAJ52)
CAMSRTNAGGTSYGKLTF

SEQ ID NO: 205498 - protein, 14 aa, Homo sapiens
  CDR3 for beta chain variable domain of TCR clone 102749 (TRBV6-1, TRBJ1-3)
CASVQGGGGNTMYF

SEQ ID NO: 205499 - protein, 12 aa, Homo sapiens
  CDR3 for alpha chain variable domain of TCR clone 102750 (TRAV17, TRAJ4)
WATDGGYNKLIF

SEQ ID NO: 205500 - protein, 13 aa, Homo sapiens
  CDR3 for beta chain variable domain of TCR clone 102750 (TRBV29-1, TRBJ2-2)
CSTTGVNTGELFF

SEQ ID NO: 205501 - protein, 18 aa, Homo sapiens
  CDR3 for alpha chain variable domain of TCR clone 102751 (TRAV8-6, TRAJ52)
CAVSRANAGGTSYGKLTF

SEQ ID NO: 205502 - protein, 15 aa, Homo sapiens
  CDR3 for beta chain variable domain of TCR clone 102751 (TRBV28, TRBJ2-1)
CASRVGLDEYNEQFF

SEQ ID NO: 205503 - protein, 14 aa, Homo sapiens
  CDR3 for alpha chain variable domain of TCR clone 102752 (TRAV1-2, TRAJ16)
CAVNRFSDGQKLLF

SEQ ID NO: 205504 - protein, 14 aa, Homo sapiens
  CDR3 for beta chain variable domain of TCR clone 102752 (TRBV19, TRBJ2-1)
CASPTFVLSGEQFS

SEQ ID NO: 205505 - protein, 14 aa, Homo sapiens
  CDR3 for alpha chain variable domain of TCR clone 102753 (TRAV8-2, TRAJ4)
CVVSSSGGYNKLIF

SEQ ID NO: 205506 - protein, 15 aa, Homo sapiens
  CDR3 for beta chain variable domain of TCR clone 102753 (TRBV4-1, TRBJ1-4)
CASSDTGGTNEKLFF

SEQ ID NO: 205507 - protein, 15 aa, Homo sapiens
  CDR3 for alpha chain variable domain of TCR clone 102754 (TRAV25, TRAJ53)
CPTSNSGGSNYKLTF

SEQ ID NO: 205508 - protein, 12 aa, Homo sapiens
  CDR3 for beta chain variable domain of TCR clone 102754 (TRBV11-3, TRBJ2-2)
CASSLGGGELFF

SEQ ID NO: 205509 - protein, 15 aa, Homo sapiens
  CDR3 for alpha chain variable domain of TCR clone 102755 (TRAV23/DV6, TRAJ18)
CAARYRGSTLGRLYF

SEQ ID NO: 205510 - protein, 14 aa, Homo sapiens
  CDR3 for beta chain variable domain of TCR clone 102755 (TRBV15, TRBJ2-3)
CATRSGTSTDTQYF

SEQ ID NO: 205511 - protein, 18 aa, Homo sapiens
  CDR3 for alpha chain variable domain of TCR clone 102756 (TRAV13-1, TRAJ52)
CAASKRSAGGTSYGKLTF

SEQ ID NO: 205512 - protein, 15 aa, Homo sapiens
  CDR3 for beta chain variable domain of TCR clone 102756 (TRBV11-2, TRBJ1-6)
CASSLDPWAVSPLHF

SEQ ID NO: 205513 - protein, 15 aa, Homo sapiens
  CDR3 for alpha chain variable domain of TCR clone 102757 (TRAV2, TRAJ28)
CAVPYSGAWSYQLTF

SEQ ID NO: 205514 - protein, 17 aa, Homo sapiens
  CDR3 for beta chain variable domain of TCR clone 102757 (TRBV20-1, TRBJ2-4)
CSARDWASGGRENIQYF

SEQ ID NO: 205515 - protein, 13 aa, Homo sapiens
  CDR3 for alpha chain variable domain of TCR clone 102758 (TRAV29/DV5, TRAJ44)
CAASTGTASKLTF

SEQ ID NO: 205516 - protein, 11 aa, Homo sapiens
  CDR3 for beta chain variable domain of TCR clone 102758 (TRBV11-2, TRBJ2-2)
CASSLPGELFF

SEQ ID NO: 205517 - protein, 13 aa, Homo sapiens
  CDR3 for alpha chain variable domain of TCR clone 102759 (TRAV2, TRAJ40)
CAVVTSGTYKYIF

SEQ ID NO: 205518 - protein, 17 aa, Homo sapiens
  CDR3 for beta chain variable domain of TCR clone 102759 (TRBV7-3, TRBJ2-3)
CASSLMKRVRGADTQYF

SEQ ID NO: 205519 - protein, 14 aa, Homo sapiens
  CDR3 for alpha chain variable domain of TCR clone 102760 (TRAV16, TRAJ26)
CALSSANYGQNFVF

SEQ ID NO: 205520 - protein, 16 aa, Homo sapiens
  CDR3 for beta chain variable domain of TCR clone 102760 (TRBV20-1, TRBJ1-4)
CSAPGQGLLTNENLFF

SEQ ID NO: 205521 - protein, 17 aa, Homo sapiens
  CDR3 for alpha chain variable domain of TCR clone 102761 (TRAV27, TRAJ26)
CAGARAPLDNYGQKFVF

SEQ ID NO: 205522 - protein, 15 aa, Homo sapiens
  CDR3 for beta chain variable domain of TCR clone 102761 (TRBV11-2, TRBJ2-5)
CASSPRSGGLETQYF

SEQ ID NO: 205523 - protein, 12 aa, Homo sapiens
  CDR3 for alpha chain variable domain of TCR clone 102762 (TRAV20, TRAJ54)
CAVQEGAQKLVF

SEQ ID NO: 205524 - protein, 17 aa, Homo sapiens
  CDR3 for beta chain variable domain of TCR clone 102762 (TRBV13, TRBJ2-3)
CASSLSRGAGGRNTQYF

SEQ ID NO: 205525 - protein, 17 aa, Homo sapiens
  CDR3 for alpha chain variable domain of TCR clone 102763 (TRAV12-3, TRAJ6)
CAMSARGGVGGSYIPTF

SEQ ID NO: 205526 - protein, 12 aa, Homo sapiens
  CDR3 for beta chain variable domain of TCR clone 102763 (TRBV12-4, TRBJ2-3)
CASSTLPDTQYF

SEQ ID NO: 205527 - protein, 15 aa, Homo sapiens
  CDR3 for alpha chain variable domain of TCR clone 102764 (TRAV23/DV6, TRAJ13)
CAAWPGGGGFQKVTF

SEQ ID NO: 205528 - protein, 17 aa, Homo sapiens
  CDR3 for beta chain variable domain of TCR clone 102764 (TRBV19, TRBJ2-7)
CASSISFYDSYPYEQYF

SEQ ID NO: 205529 - protein, 10 aa, Homo sapiens
  CDR3 for alpha chain variable domain of TCR clone 102765 (TRAV8-1, TRAJ21)
CAVNGTKFYF

SEQ ID NO: 205530 - protein, 16 aa, Homo sapiens
  CDR3 for beta chain variable domain of TCR clone 102765 (TRBV7-2, TRBJ1-5)
CASSPWGLEGNQPQHF

SEQ ID NO: 205531 - protein, 15 aa, Homo sapiens
  CDR3 for alpha chain variable domain of TCR clone 102766 (TRAV3, TRAJ16)
CAVRDGFSDGQKLLF

SEQ ID NO: 205532 - protein, 15 aa, Homo sapiens
  CDR3 for beta chain variable domain of TCR clone 102766 (TRBV4-1, TRBJ2-7)
CASSQNTGRLYEQYF

SEQ ID NO: 205533 - protein, 19 aa, Homo sapiens
  CDR3 for alpha chain variable domain of TCR clone 102767 (TRAV4, TRAJ41)
PRVSLSDTAVYYWGYALNF

SEQ ID NO: 205534 - protein, 14 aa, Homo sapiens
  CDR3 for beta chain variable domain of TCR clone 102767 (TRBV11-1, TRBJ2-7)
CASSFRQGSYEQYF

SEQ ID NO: 205535 - protein, 13 aa, Homo sapiens
  CDR3 for alpha chain variable domain of TCR clone 102768 (TRAV17, TRAJ9)
CATFLTGGFKPIF

SEQ ID NO: 205536 - protein, 16 aa, Homo sapiens
  CDR3 for beta chain variable domain of TCR clone 102768 (TRBV5-7, TRBJ1-4)
CASSPSGGLKTEKLFF

SEQ ID NO: 205537 - protein, 15 aa, Homo sapiens
  CDR3 for alpha chain variable domain of TCR clone 102769 (TRAV12-2, TRAJ52)
CAAPGGGTSYGKLTF

SEQ ID NO: 205538 - protein, 13 aa, Homo sapiens
  CDR3 for beta chain variable domain of TCR clone 102769 (TRBV7-3, TRBJ1-2)
CAGSLKRGYGYTF

SEQ ID NO: 205539 - protein, 12 aa, Homo sapiens
  CDR3 for alpha chain variable domain of TCR clone 102770 (TRAV12-3, TRAJ17)
CAMTLTGNKLTF

SEQ ID NO: 205540 - protein, 11 aa, Homo sapiens
  CDR3 for beta chain variable domain of TCR clone 102770 (TRBV29-1, TRBJ2-5)
CSEDRTGTQYL

SEQ ID NO: 205541 - protein, 14 aa, Homo sapiens
  CDR3 for alpha chain variable domain of TCR clone 102771 (TRAV12-1, TRAJ9)
CVVTGYTGGFKTIF

SEQ ID NO: 205542 - protein, 20 aa, Homo sapiens
  CDR3 for beta chain variable domain of TCR clone 102771 (TRBV23-1, TRBJ1-1)
CISAPAVPPPGLDMNTEAFF

SEQ ID NO: 205543 - protein, 17 aa, Homo sapiens
  CDR3 for alpha chain variable domain of TCR clone 102772 (TRAV3, TRAJ6)
CAVRDGPRAGGSYIPTF

SEQ ID NO: 205544 - protein, 14 aa, Homo sapiens
  CDR3 for beta chain variable domain of TCR clone 102772 (TRBV7-2, TRBJ2-7)
RASRPKTSFYEQYF

SEQ ID NO: 205545 - protein, 12 aa, Homo sapiens
  CDR3 for alpha chain variable domain of TCR clone 102773 (TRAV12-1, TRAJ40)
CVVYSGTYKYIF

SEQ ID NO: 205546 - protein, 16 aa, Homo sapiens
  CDR3 for beta chain variable domain of TCR clone 102773 (TRBV19, TRBJ2-2)
CASRSPGTGATGELFF

SEQ ID NO: 205547 - protein, 15 aa, Homo sapiens
  CDR3 for alpha chain variable domain of TCR clone 102774 (TRAV23/DV6, TRAJ4)
CASSPLRGGYNKLIF

SEQ ID NO: 205548 - protein, 15 aa, Homo sapiens
  CDR3 for beta chain variable domain of TCR clone 102774 (TRBV7-9, TRBJ1-6)
CASSSPGRGNSPLHF

SEQ ID NO: 205549 - protein, 14 aa, Homo sapiens
  CDR3 for alpha chain variable domain of TCR clone 102775 (TRAV12-2, TRAJ17)
CAVLFKAAGNKLTF

SEQ ID NO: 205550 - protein, 14 aa, Homo sapiens
  CDR3 for beta chain variable domain of TCR clone 102775 (TRBV19, TRBJ2-1)
CASPTFVVSGEQFF

SEQ ID NO: 205551 - protein, 15 aa, Homo sapiens
  CDR3 for alpha chain variable domain of TCR clone 102776 (TRAV26-1, TRAJ29)
CIVRVEGSGNTPLVF

SEQ ID NO: 205552 - protein, 14 aa, Homo sapiens
  CDR3 for beta chain variable domain of TCR clone 102776 (TRBV18, TRBJ2-5)
CSSSPGVSQETQYF

SEQ ID NO: 205553 - protein, 13 aa, Homo sapiens
  CDR3 for alpha chain variable domain of TCR clone 102777 (TRAV13-1, TRAJ21)
CAASIYNFNKFYF

SEQ ID NO: 205554 - protein, 16 aa, Homo sapiens
  CDR3 for beta chain variable domain of TCR clone 102777 (TRBV29-1, TRBJ2-2)
CSVEKTSEGNTGELFF

SEQ ID NO: 205555 - protein, 14 aa, Homo sapiens
  CDR3 for alpha chain variable domain of TCR clone 102778 (TRAV17, TRAJ22)
CATSPSGSARQLTF

SEQ ID NO: 205556 - protein, 13 aa, Homo sapiens
  CDR3 for beta chain variable domain of TCR clone 102778 (TRBV7-9, TRBJ1-2)
CASSLKQNYGYTF

SEQ ID NO: 205557 - protein, 14 aa, Homo sapiens
  CDR3 for alpha chain variable domain of TCR clone 102779 (TRAV16, TRAJ39)
CALSKNNAGNMLTF

SEQ ID NO: 205558 - protein, 14 aa, Homo sapiens
  CDR3 for beta chain variable domain of TCR clone 102779 (TRBV12-4, TRBJ2-3)
CASSLSGATDTQYF

SEQ ID NO: 205559 - protein, 11 aa, Homo sapiens
  CDR3 for alpha chain variable domain of TCR clone 102780 (TRAV3, TRAJ49)
CAPITGNQFFF

SEQ ID NO: 205560 - protein, 16 aa, Homo sapiens
  CDR3 for beta chain variable domain of TCR clone 102780 (TRBV5-1, TRBJ2-3)
CASSVFPMSSTDTQYF

SEQ ID NO: 205561 - protein, 14 aa, Homo sapiens
  CDR3 for alpha chain variable domain of TCR clone 102781 (TRAV8-3, TRAJ36)
CAVGPITGANNLFL

SEQ ID NO: 205562 - protein, 15 aa, Homo sapiens
  CDR3 for beta chain variable domain of TCR clone 102781 (TRBV4-1, TRBJ2-1)
CASSQDPGNYNEQFF

SEQ ID NO: 205563 - protein, 14 aa, Homo sapiens
  CDR3 for alpha chain variable domain of TCR clone 102782 (TRAV13-1, TRAJ44)
CAAKSTGTASKLTF

SEQ ID NO: 205564 - protein, 14 aa, Homo sapiens
  CDR3 for beta chain variable domain of TCR clone 102782 (TRBV18, TRBJ2-7)
CASSPRGGAYEQYF

SEQ ID NO: 205565 - protein, 14 aa, Homo sapiens
  CDR3 for alpha chain variable domain of TCR clone 102783 (TRAV1-2, TRAJ8)
CAVREDTGFQKLVF

SEQ ID NO: 205566 - protein, 16 aa, Homo sapiens
  CDR3 for beta chain variable domain of TCR clone 102783 (TRBV3-1, TRBJ2-5)
CASSPGQFNGFGTQYF

SEQ ID NO: 205567 - protein, 13 aa, Homo sapiens
  CDR3 for alpha chain variable domain of TCR clone 102784 (TRAV1-2, TRAJ9)
CAALNTGGFKTIF

SEQ ID NO: 205568 - protein, 13 aa, Homo sapiens
  CDR3 for beta chain variable domain of TCR clone 102784 (TRBV20-1, TRBJ2-3)
CSAPGVGTDTQYF

SEQ ID NO: 205569 - protein, 14 aa, Homo sapiens
  CDR3 for alpha chain variable domain of TCR clone 102785 (TRAV35, TRAJ13)
CAGSPSAGYQKVTF

SEQ ID NO: 205570 - protein, 13 aa, Homo sapiens
  CDR3 for beta chain variable domain of TCR clone 102785 (TRBV29-1, TRBJ1-1)
CSVGDSRNTEAFF

SEQ ID NO: 205571 - protein, 14 aa, Homo sapiens
  CDR3 for alpha chain variable domain of TCR clone 102786 (TRAV23/DV6, TRAJ40)
CAASLTSGTYKYIF

SEQ ID NO: 205572 - protein, 12 aa, Homo sapiens
  CDR3 for beta chain variable domain of TCR clone 102786 (TRBV12-4, TRBJ2-3)
CASSSTTDTQYF

SEQ ID NO: 205573 - protein, 12 aa, Homo sapiens
  CDR3 for alpha chain variable domain of TCR clone 102787 (TRAV21, TRAJ49)
CAVTNTGNQFYF

SEQ ID NO: 205574 - protein, 17 aa, Homo sapiens
  CDR3 for beta chain variable domain of TCR clone 102787 (TRBV13, TRBJ2-3)
CASSLARVAGGRNTQYF

SEQ ID NO: 205575 - protein, 13 aa, Homo sapiens
  CDR3 for alpha chain variable domain of TCR clone 102788 (TRAV20, TRAJ21)
CAVEGYNFNKFYF

SEQ ID NO: 205576 - protein, 14 aa, Homo sapiens
  CDR3 for beta chain variable domain of TCR clone 102788 (TRBV20-1, TRBJ2-5)
CSARDGRAGETQYF

SEQ ID NO: 205577 - protein, 15 aa, Homo sapiens
  CDR3 for alpha chain variable domain of TCR clone 102789 (TRAV8-4, TRAJ12)
CAVSDRVDSSYKLIF

SEQ ID NO: 205578 - protein, 16 aa, Homo sapiens
  CDR3 for beta chain variable domain of TCR clone 102789 (TRBV2, TRBJ2-5)
CASSETQGVGEETQYF

SEQ ID NO: 205579 - protein, 16 aa, Homo sapiens
  CDR3 for alpha chain variable domain of TCR clone 102790 (TRAV3, TRAJ37)
CAVREGTYGNTGKLIF

SEQ ID NO: 205580 - protein, 12 aa, Homo sapiens
  CDR3 for beta chain variable domain of TCR clone 102790 (TRBV7-8, TRBJ2-7)
CASSLGDREQYF

SEQ ID NO: 205581 - protein, 14 aa, Homo sapiens
  CDR3 for alpha chain variable domain of TCR clone 102791 (TRAV38-2/DV8, TRAJ54)
AAMYQIQGAQKPVF

SEQ ID NO: 205582 - protein, 17 aa, Homo sapiens
  CDR3 for beta chain variable domain of TCR clone 102791 (TRBV6-1, TRBJ2-3)
CASSEALRLISTDTQYF

SEQ ID NO: 205583 - protein, 13 aa, Homo sapiens
  CDR3 for alpha chain variable domain of TCR clone 102792 (TRAV17, TRAJ5)
CAPMDTGRRALTF

SEQ ID NO: 205584 - protein, 15 aa, Homo sapiens
  CDR3 for beta chain variable domain of TCR clone 102792 (TRBV12-4, TRBJ2-5)
CASSPPTGLQETQYF

SEQ ID NO: 205585 - protein, 12 aa, Homo sapiens
  CDR3 for alpha chain variable domain of TCR clone 102793 (TRAV23/DV6, TRAJ30)
CAASKGDDKIIF

SEQ ID NO: 205586 - protein, 17 aa, Homo sapiens
  CDR3 for beta chain variable domain of TCR clone 102793 (TRBV13, TRBJ2-3)
SASSLSRVAGGRNTQYF

SEQ ID NO: 205587 - protein, 14 aa, Homo sapiens
  CDR3 for alpha chain variable domain of TCR clone 102794 (TRAV13-1, TRAJ35)
CAASKGGFGNVLHC

SEQ ID NO: 205588 - protein, 14 aa, Homo sapiens
  CDR3 for beta chain variable domain of TCR clone 102794 (TRBV19, TRBJ2-7)
CASTVQGRPYEQYF

SEQ ID NO: 205589 - protein, 13 aa, Homo sapiens
  CDR3 for alpha chain variable domain of TCR clone 102795 (TRAV27, TRAJ53)
CAGQGGSNYKLTF

SEQ ID NO: 205590 - protein, 14 aa, Homo sapiens
  CDR3 for beta chain variable domain of TCR clone 102795 (TRBV4-1, TRBJ2-2)
CASSQAVNTGELFF

SEQ ID NO: 205591 - protein, 12 aa, Homo sapiens
  CDR3 for alpha chain variable domain of TCR clone 102796 (TRAV17, TRAJ30)
CVPERRDDKIIF

SEQ ID NO: 205592 - protein, 14 aa, Homo sapiens
  CDR3 for beta chain variable domain of TCR clone 102796 (TRBV7-7, TRBJ2-2)
CASSRDRCTGELFF

SEQ ID NO: 205593 - protein, 13 aa, Homo sapiens
  CDR3 for alpha chain variable domain of TCR clone 102797 (TRAV12-1, TRAJ26)
CVVRRNYGQNFVF

SEQ ID NO: 205594 - protein, 14 aa, Homo sapiens
  CDR3 for beta chain variable domain of TCR clone 102797 (TRBV4-2, TRBJ2-1)
CARGLDRAYNEQFF

SEQ ID NO: 205595 - protein, 12 aa, Homo sapiens
  CDR3 for alpha chain variable domain of TCR clone 102798 (TRAV36/DV7, TRAJ54)
CAVVRGAQKLGF

SEQ ID NO: 205596 - protein, 13 aa, Homo sapiens
  CDR3 for beta chain variable domain of TCR clone 102798 (TRBV20-1, TRBJ1-1)
CSARGGGNTEAFF

SEQ ID NO: 205597 - protein, 14 aa, Homo sapiens
  CDR3 for alpha chain variable domain of TCR clone 102799 (TRAV3, TRAJ34)
CSVRAPGNTDKLIF

SEQ ID NO: 205598 - protein, 17 aa, Homo sapiens
  CDR3 for beta chain variable domain of TCR clone 102799 (TRBV20-1, TRBJ2-7)
CSAAPGLARGISYEQYF

SEQ ID NO: 205599 - protein, 13 aa, Homo sapiens
  CDR3 for alpha chain variable domain of TCR clone 102800 (TRAV27, TRAJ8)
CAGGPTGFQKLVF

SEQ ID NO: 205600 - protein, 13 aa, Homo sapiens
  CDR3 for beta chain variable domain of TCR clone 102800 (TRBV27, TRBJ2-7)
CASSLTTGYEQYF

SEQ ID NO: 205601 - protein, 13 aa, Homo sapiens
  CDR3 for alpha chain variable domain of TCR clone 102801 (TRAV38-1, TRAJ42)
CARWGGSQGNLIF

SEQ ID NO: 205602 - protein, 14 aa, Homo sapiens
  CDR3 for beta chain variable domain of TCR clone 102801 (TRBV6-1, TRBJ1-3)
CASVQGGGGNTIYV

SEQ ID NO: 205603 - protein, 17 aa, Homo sapiens
  CDR3 for alpha chain variable domain of TCR clone 102802 (TRAV26-1, TRAJ28)
CIVRALYSGAGSYQLAF

SEQ ID NO: 205604 - protein, 12 aa, Homo sapiens
  CDR3 for beta chain variable domain of TCR clone 102802 (TRBV12-4, TRBJ2-1)
CASRQTENEQFF

SEQ ID NO: 205605 - protein, 12 aa, Homo sapiens
  CDR3 for alpha chain variable domain of TCR clone 102803 (TRAV8-3, TRAJ41)
CAVALSGYALNF

SEQ ID NO: 205606 - protein, 16 aa, Homo sapiens
  CDR3 for beta chain variable domain of TCR clone 102803 (TRBV27, TRBJ2-7)
CASSSERRDSAYEQYL

SEQ ID NO: 205607 - protein, 11 aa, Homo sapiens
  CDR3 for alpha chain variable domain of TCR clone 102804 (TRAV2, TRAJ13)
CASGGYQKVTF

SEQ ID NO: 205608 - protein, 12 aa, Homo sapiens
  CDR3 for beta chain variable domain of TCR clone 102804 (TRBV11-2, TRBJ2-2)
CASSLGGGELLF

SEQ ID NO: 205609 - protein, 13 aa, Homo sapiens
  CDR3 for alpha chain variable domain of TCR clone 102805 (TRAV8-3, TRAJ4)
WVFYSGGYNKLIF

SEQ ID NO: 205610 - protein, 16 aa, Homo sapiens
  CDR3 for beta chain variable domain of TCR clone 102805 (TRBV7-8, TRBJ2-3)
CASSTEGQRETGTQYF

SEQ ID NO: 205611 - protein, 15 aa, Homo sapiens
  CDR3 for alpha chain variable domain of TCR clone 102806 (TRAV35, TRAJ58)
CAGRRQETSGSRLTF

SEQ ID NO: 205612 - protein, 16 aa, Homo sapiens
  CDR3 for beta chain variable domain of TCR clone 102806 (TRBV2, TRBJ2-1)
CASSVGGSLAYNEQFF

SEQ ID NO: 205613 - protein, 13 aa, Homo sapiens
  CDR3 for alpha chain variable domain of TCR clone 102807 (TRAV23/DV6, TRAJ15)
CAALPAGRNCSDL

SEQ ID NO: 205614 - protein, 14 aa, Homo sapiens
  CDR3 for beta chain variable domain of TCR clone 102807 (TRBV19, TRBJ2-1)
CASPTFVLSGEQFF

SEQ ID NO: 205615 - protein, 12 aa, Homo sapiens
  CDR3 for alpha chain variable domain of TCR clone 102808 (TRAV8-3, TRAJ36)
CAVGPITGQTTS

SEQ ID NO: 205616 - protein, 15 aa, Homo sapiens
  CDR3 for beta chain variable domain of TCR clone 102808 (TRBV4-1, TRBJ2-1)
CASSQDPGNYNEQFF

SEQ ID NO: 205617 - protein, 13 aa, Homo sapiens
  CDR3 for alpha chain variable domain of TCR clone 102809 (TRAV3, TRAJ21)
CAVREPDFNKFYF

SEQ ID NO: 205618 - protein, 16 aa, Homo sapiens
  CDR3 for beta chain variable domain of TCR clone 102809 (TRBV18, TRBJ1-3)
CASSLGILNGENTIYF

SEQ ID NO: 205619 - protein, 12 aa, Homo sapiens
  CDR3 for alpha chain variable domain of TCR clone 102810 (TRAV3, TRAJ20)
CAVRDPDYKLSF

SEQ ID NO: 205620 - protein, 16 aa, Homo sapiens
  CDR3 for beta chain variable domain of TCR clone 102810 (TRBV6-1, TRBJ2-5)
CASSETLDRGAETQYF

SEQ ID NO: 205621 - protein, 17 aa, Homo sapiens
  CDR3 for alpha chain variable domain of TCR clone 102811 (TRAV13-2, TRAJ28)
CAEEPAGSGAGSYQLTF

SEQ ID NO: 205622 - protein, 15 aa, Homo sapiens
  CDR3 for beta chain variable domain of TCR clone 102811 (TRBV5-5, TRBJ1-1)
CASSLVGKDDTEAFF

SEQ ID NO: 205623 - protein, 15 aa, Homo sapiens
  CDR3 for alpha chain variable domain of TCR clone 102812 (TRAV12-1, TRAJ5)
CVVNMLETGRRALTF

SEQ ID NO: 205624 - protein, 16 aa, Homo sapiens
  CDR3 for beta chain variable domain of TCR clone 102812 (TRBV7-3, TRBJ2-2)
CASSLKRGTLSGELFF

SEQ ID NO: 205625 - protein, 11 aa, Homo sapiens
  CDR3 for alpha chain variable domain of TCR clone 102813 (TRAV12-2, TRAJ43)
CASPIGNDIRF

SEQ ID NO: 205626 - protein, 13 aa, Homo sapiens
  CDR3 for beta chain variable domain of TCR clone 102813 (TRBV7-3, TRBJ1-2)
CASSLKRGYGYTF

SEQ ID NO: 205627 - protein, 21 aa, Homo sapiens
  CDR3 for alpha chain variable domain of TCR clone 102814 (TRAV29/DV5, TRAJ52)
CSVLLCSKREAGGTGYGKLTF

SEQ ID NO: 205628 - protein, 13 aa, Homo sapiens
  CDR3 for beta chain variable domain of TCR clone 102814 (TRBV27, TRBJ1-4)
CASSLMGDEKLFF

SEQ ID NO: 205629 - protein, 12 aa, Homo sapiens
  CDR3 for alpha chain variable domain of TCR clone 102815 (TRAV13-1, TRAJ21)
CAAKEGFNKFYF

SEQ ID NO: 205630 - protein, 13 aa, Homo sapiens
  CDR3 for beta chain variable domain of TCR clone 102815 (TRBV5-5, TRBJ1-2)
CASSFWRGEDYTF

SEQ ID NO: 205631 - protein, 14 aa, Homo sapiens
  CDR3 for alpha chain variable domain of TCR clone 102816 (TRAV12-2, TRAJ6)
CASKWGGGSYIPTF

SEQ ID NO: 205632 - protein, 13 aa, Homo sapiens
  CDR3 for beta chain variable domain of TCR clone 102816 (TRBV2, TRBJ1-1)
CASSEGGNNEAFF

SEQ ID NO: 205633 - protein, 14 aa, Homo sapiens
  CDR3 for alpha chain variable domain of TCR clone 102817 (TRAV12-2, TRAJ17)
CAVNIKAAGNKLTF

SEQ ID NO: 205634 - protein, 14 aa, Homo sapiens
  CDR3 for beta chain variable domain of TCR clone 102817 (TRBV5-1, TRBJ2-3)
CASSLFGPTDTQYF

SEQ ID NO: 205635 - protein, 13 aa, Homo sapiens
  CDR3 for alpha chain variable domain of TCR clone 102818 (TRAV12-3, TRAJ33)
CAMSVNSNYQLIW

SEQ ID NO: 205636 - protein, 15 aa, Homo sapiens
  CDR3 for beta chain variable domain of TCR clone 102818 (TRBV15, TRBJ1-4)
CATSRDMGSYEKLFF

SEQ ID NO: 205637 - protein, 15 aa, Homo sapiens
  CDR3 for alpha chain variable domain of TCR clone 102819 (TRAV8-6, TRAJ6)
CAVSGESGGSYIPTF

SEQ ID NO: 205638 - protein, 14 aa, Homo sapiens
  CDR3 for beta chain variable domain of TCR clone 102819 (TRBV7-9, TRBJ2-1)
CASSSMVWFGEQFF

SEQ ID NO: 205639 - protein, 14 aa, Homo sapiens
  CDR3 for alpha chain variable domain of TCR clone 102820 (TRAV1-2, TRAJ27)
CAPAEYTNAGKSTF

SEQ ID NO: 205640 - protein, 15 aa, Homo sapiens
  CDR3 for beta chain variable domain of TCR clone 102820 (TRBV28, TRBJ2-1)
CASSIIAGGRSEQFF

SEQ ID NO: 205641 - protein, 15 aa, Homo sapiens
  CDR3 for alpha chain variable domain of TCR clone 102821 (TRAV1-2, TRAJ10)
CAVRGFTGGGNKLTF

SEQ ID NO: 205642 - protein, 16 aa, Homo sapiens
  CDR3 for beta chain variable domain of TCR clone 102821 (TRBV4-1, TRBJ2-1)
CASSQKAGQGSDEQFF

SEQ ID NO: 205643 - protein, 20 aa, Homo sapiens
  CDR3 for alpha chain variable domain of TCR clone 102822 (TRAV12-3, TRAJ41)
SLFIRDSQPSDSATPEALNF

SEQ ID NO: 205644 - protein, 15 aa, Homo sapiens
  CDR3 for beta chain variable domain of TCR clone 102822 (TRBV5-1, TRBJ2-7)
CASSLDLTGSYEQYF

SEQ ID NO: 205645 - protein, 16 aa, Homo sapiens
  CDR3 for alpha chain variable domain of TCR clone 102823 (TRAV30, TRAJ24)
CGTEIVDADSWGKFQF

SEQ ID NO: 205646 - protein, 14 aa, Homo sapiens
  CDR3 for beta chain variable domain of TCR clone 102823 (TRBV11-2, TRBJ2-7)
CASSVGAGAYEQYF

SEQ ID NO: 205647 - protein, 16 aa, Homo sapiens
  CDR3 for alpha chain variable domain of TCR clone 102824 (TRAV14/DV4, TRAJ20)
CAMREGRSRDDYKLSF

SEQ ID NO: 205648 - protein, 13 aa, Homo sapiens
  CDR3 for beta chain variable domain of TCR clone 102824 (TRBV7-3, TRBJ2-1)
CASSLDSYNEQFF

SEQ ID NO: 205649 - protein, 15 aa, Homo sapiens
  CDR3 for alpha chain variable domain of TCR clone 102825 (TRAV8-3, TRAJ45)
CASSYSGGGADGLTF

SEQ ID NO: 205650 - protein, 17 aa, Homo sapiens
  CDR3 for beta chain variable domain of TCR clone 102825 (TRBV28, TRBJ2-5)
CASSTPEGDALQETQYF

SEQ ID NO: 205651 - protein, 15 aa, Homo sapiens
  CDR3 for alpha chain variable domain of TCR clone 102826 (TRAV3, TRAJ22)
CAARDRGGSARQLTF

SEQ ID NO: 205652 - protein, 20 aa, Homo sapiens
  CDR3 for beta chain variable domain of TCR clone 102826 (TRBV11-2, TRBJ1-6)
CASSLVFATGGSVHPSTLGT

SEQ ID NO: 205653 - protein, 14 aa, Homo sapiens
  CDR3 for alpha chain variable domain of TCR clone 102827 (TRAV13-1, TRAJ35)
CAASKGGFGNVLHC

SEQ ID NO: 205654 - protein, 13 aa, Homo sapiens
  CDR3 for beta chain variable domain of TCR clone 102827 (TRBV20-1, TRBJ1-6)
CSAPLGVGSPLHF

SEQ ID NO: 205655 - protein, 14 aa, Homo sapiens
  CDR3 for alpha chain variable domain of TCR clone 102828 (TRAV13-1, TRAJ24)
CAAGPADSWGKFQF

SEQ ID NO: 205656 - protein, 14 aa, Homo sapiens
  CDR3 for beta chain variable domain of TCR clone 102828 (TRBV2, TRBJ1-1)
CASRSGTMNTEAFF

SEQ ID NO: 205657 - protein, 15 aa, Homo sapiens
  CDR3 for alpha chain variable domain of TCR clone 102829 (TRAV12-3, TRAJ53)
CMSPGSGGSNYKLTF

SEQ ID NO: 205658 - protein, 11 aa, Homo sapiens
  CDR3 for beta chain variable domain of TCR clone 102829 (TRBV29-1, TRBJ2-5)
CSEDRTGTQYF

SEQ ID NO: 205659 - protein, 16 aa, Homo sapiens
  CDR3 for alpha chain variable domain of TCR clone 102830 (TRAV16, TRAJ52)
CALSAAGGTSYGKLTF

SEQ ID NO: 205660 - protein, 12 aa, Homo sapiens
  CDR3 for beta chain variable domain of TCR clone 102830 (TRBV11-2, TRBJ2-2)
CASSLPTGELFF

SEQ ID NO: 205661 - protein, 14 aa, Homo sapiens
  CDR3 for alpha chain variable domain of TCR clone 102831 (TRAV13-1, TRAJ35)
CAASKGGFGNVLHC

SEQ ID NO: 205662 - protein, 12 aa, Homo sapiens
  CDR3 for beta chain variable domain of TCR clone 102831 (TRBV7-9, TRBJ1-1)
CASSLVRGEAFF

SEQ ID NO: 205663 - protein, 12 aa, Homo sapiens
  CDR3 for alpha chain variable domain of TCR clone 102832 (TRAV12-2, TRAJ9)
CAVTGGGFKTIF

SEQ ID NO: 205664 - protein, 13 aa, Homo sapiens
  CDR3 for beta chain variable domain of TCR clone 102832 (TRBV19, TRBJ1-2)
CASSVPGQDGYTF

SEQ ID NO: 205665 - protein, 13 aa, Homo sapiens
  CDR3 for alpha chain variable domain of TCR clone 102833 (TRAV38-1, TRAJ49)
CAFMKRVGNQFYF

SEQ ID NO: 205666 - protein, 17 aa, Homo sapiens
  CDR3 for beta chain variable domain of TCR clone 102833 (TRBV19, TRBJ2-6)
CASSTGQVFSGANVLTF

SEQ ID NO: 205667 - protein, 12 aa, Homo sapiens
  CDR3 for alpha chain variable domain of TCR clone 102834 (TRAV13-2, TRAJ23)
CAERHRGGKLIL

SEQ ID NO: 205668 - protein, 14 aa, Homo sapiens
  CDR3 for beta chain variable domain of TCR clone 102834 (TRBV6-1, TRBJ1-3)
CASVQGGGGNTIYF

SEQ ID NO: 205669 - protein, 14 aa, Homo sapiens
  CDR3 for alpha chain variable domain of TCR clone 102835 (TRAV29/DV5, TRAJ36)
CAARRKTGANNLFF

SEQ ID NO: 205670 - protein, 14 aa, Homo sapiens
  CDR3 for beta chain variable domain of TCR clone 102835 (TRBV12-5, TRBJ2-5)
CASGTRTHQETQYF

SEQ ID NO: 205671 - protein, 15 aa, Homo sapiens
  CDR3 for alpha chain variable domain of TCR clone 102836 (TRAV27, TRAJ38)
CAARRNAGNNRKPIW

SEQ ID NO: 205672 - protein, 15 aa, Homo sapiens
  CDR3 for beta chain variable domain of TCR clone 102836 (TRBV5-1, TRBJ2-1)
CASSPPRAPYNEQFF

SEQ ID NO: 205673 - protein, 12 aa, Homo sapiens
  CDR3 for alpha chain variable domain of TCR clone 102837 (TRAV12-3, TRAJ20)
CAMVRGDYKLSF

SEQ ID NO: 205674 - protein, 15 aa, Homo sapiens
  CDR3 for beta chain variable domain of TCR clone 102837 (TRBV11-3, TRBJ2-3)
CASLKDGREGDTQYF

SEQ ID NO: 205675 - protein, 12 aa, Homo sapiens
  CDR3 for alpha chain variable domain of TCR clone 102838 (TRAV21, TRAJ33)
CAKMDSNYQLIW

SEQ ID NO: 205676 - protein, 14 aa, Homo sapiens
  CDR3 for beta chain variable domain of TCR clone 102838 (TRBV2, TRBJ2-7)
CASSLTSGGYEEYF

SEQ ID NO: 205677 - protein, 14 aa, Homo sapiens
  CDR3 for alpha chain variable domain of TCR clone 102839 (TRAV1-2, TRAJ16)
CAVNRFSDGQELLF

SEQ ID NO: 205678 - protein, 17 aa, Homo sapiens
  CDR3 for beta chain variable domain of TCR clone 102839 (TRBV28, TRBJ2-5)
CASSRQGGLSGAETQYF

SEQ ID NO: 205679 - protein, 16 aa, Homo sapiens
  CDR3 for alpha chain variable domain of TCR clone 102840 (TRAV13-1, TRAJ48)
CAARIFGNFGNEKLTF

SEQ ID NO: 205680 - protein, 12 aa, Homo sapiens
  CDR3 for beta chain variable domain of TCR clone 102840 (TRBV14, TRBJ2-4)
CASSNLKSIQYF

SEQ ID NO: 205681 - protein, 14 aa, Homo sapiens
  CDR3 for alpha chain variable domain of TCR clone 102841 (TRAV12-2, TRAJ13)
CAVKKTGGYQKVTF

SEQ ID NO: 205682 - protein, 14 aa, Homo sapiens
  CDR3 for beta chain variable domain of TCR clone 102841 (TRBV7-6, TRBJ2-3)
CASSLGAVTDTQYF

SEQ ID NO: 205683 - protein, 15 aa, Homo sapiens
  CDR3 for alpha chain variable domain of TCR clone 102842 (TRAV8-3, TRAJ40)
CAAPSLGSGTYKYIF

SEQ ID NO: 205684 - protein, 13 aa, Homo sapiens
  CDR3 for beta chain variable domain of TCR clone 102842 (TRBV19, TRBJ2-7)
CASSPRQSYEQYF

SEQ ID NO: 205685 - protein, 13 aa, Homo sapiens
  CDR3 for alpha chain variable domain of TCR clone 102843 (TRAV26-1, TRAJ31)
CIVRVDGNARLIF

SEQ ID NO: 205686 - protein, 17 aa, Homo sapiens
  CDR3 for beta chain variable domain of TCR clone 102843 (TRBV11-2, TRBJ2-1)
CASSLYPPGVEYNEQFF

SEQ ID NO: 205687 - protein, 14 aa, Homo sapiens
  CDR3 for alpha chain variable domain of TCR clone 102844 (TRAV1-1, TRAJ27)
CAVIYNTNAGKSTF

SEQ ID NO: 205688 - protein, 14 aa, Homo sapiens
  CDR3 for beta chain variable domain of TCR clone 102844 (TRBV5-7, TRBJ1-2)
CASSLVSANYGYTF

SEQ ID NO: 205689 - protein, 17 aa, Homo sapiens
  CDR3 for alpha chain variable domain of TCR clone 102845 (TRAV3, TRAJ6)
CAVRDGPRAGGSYIPTF

SEQ ID NO: 205690 - protein, 18 aa, Homo sapiens
  CDR3 for beta chain variable domain of TCR clone 102845 (TRBV6-5, TRBJ2-1)
CASSYSSRRAGVYNEQFF

SEQ ID NO: 205691 - protein, 14 aa, Homo sapiens
  CDR3 for alpha chain variable domain of TCR clone 102846 (TRAV13-1, TRAJ44)
CAAKATGTASKLTF

SEQ ID NO: 205692 - protein, 16 aa, Homo sapiens
  CDR3 for beta chain variable domain of TCR clone 102846 (TRBV2, TRBJ1-4)
CASNLLQGATNEKLFF

SEQ ID NO: 205693 - protein, 11 aa, Homo sapiens
  CDR3 for alpha chain variable domain of TCR clone 102847 (TRAV12-2, TRAJ31)
CAILNNARLMV

SEQ ID NO: 205694 - protein, 16 aa, Homo sapiens
  CDR3 for beta chain variable domain of TCR clone 102847 (TRBV13, TRBJ2-2)
CASSPRTGEHTGELFF

SEQ ID NO: 205695 - protein, 13 aa, Homo sapiens
  CDR3 for alpha chain variable domain of TCR clone 102848 (TRAV23/DV6, TRAJ34)
CAAIGNNTDKLIF

SEQ ID NO: 205696 - protein, 13 aa, Homo sapiens
  CDR3 for beta chain variable domain of TCR clone 102848 (TRBV29-1, TRBJ2-7)
CSVGPSGGYEQYF

SEQ ID NO: 205697 - protein, 14 aa, Homo sapiens
  CDR3 for alpha chain variable domain of TCR clone 102849 (TRAV17, TRAJ57)
CATDPQGGSKKLVF

SEQ ID NO: 205698 - protein, 18 aa, Homo sapiens
  CDR3 for beta chain variable domain of TCR clone 102849 (TRBV6-6, TRBJ1-3)
CASSYSKWDSISGNTIYF

SEQ ID NO: 205699 - protein, 16 aa, Homo sapiens
  CDR3 for alpha chain variable domain of TCR clone 102850 (TRAV1-2, TRAJ10)
CAVRGVLTGGGNKLTF

SEQ ID NO: 205700 - protein, 15 aa, Homo sapiens
  CDR3 for beta chain variable domain of TCR clone 102850 (TRBV27, TRBJ2-3)
CASSSLAGVIDTQYF

SEQ ID NO: 205701 - protein, 14 aa, Homo sapiens
  CDR3 for alpha chain variable domain of TCR clone 102851 (TRAV1-2, TRAJ16)
CAVNRFSDGQKPLF

SEQ ID NO: 205702 - protein, 13 aa, Homo sapiens
  CDR3 for beta chain variable domain of TCR clone 102851 (TRBV7-3, TRBJ1-2)
CASSLKRGYGYTF

SEQ ID NO: 205703 - protein, 14 aa, Homo sapiens
  CDR3 for alpha chain variable domain of TCR clone 102852 (TRAV13-2, TRAJ10)
CAETLPGGGNKLAF

SEQ ID NO: 205704 - protein, 15 aa, Homo sapiens
  CDR3 for beta chain variable domain of TCR clone 102852 (TRBV3-1, TRBJ2-1)
CASSQDYTPRGEQFF

SEQ ID NO: 205705 - protein, 14 aa, Homo sapiens
  CDR3 for alpha chain variable domain of TCR clone 102853 (TRAV12-1, TRAJ17)
CVVNYKAAGNKLTF

SEQ ID NO: 205706 - protein, 13 aa, Homo sapiens
  CDR3 for beta chain variable domain of TCR clone 102853 (TRBV18, TRBJ2-1)
CASGLASNNEQFF

SEQ ID NO: 205707 - protein, 18 aa, Homo sapiens
  CDR3 for alpha chain variable domain of TCR clone 102854 (TRAV17, TRAJ45)
CATSLDLYSGGGSDGLTF

SEQ ID NO: 205708 - protein, 13 aa, Homo sapiens
  CDR3 for beta chain variable domain of TCR clone 102854 (TRBV10-3, TRBJ2-7)
CASKLAVNYEQYF

SEQ ID NO: 205709 - protein, 14 aa, Homo sapiens
  CDR3 for alpha chain variable domain of TCR clone 102855 (TRAV1-2, TRAJ16)
CAVNRFSDGQKLLF

SEQ ID NO: 205710 - protein, 13 aa, Homo sapiens
  CDR3 for beta chain variable domain of TCR clone 102855 (TRBV11-2, TRBJ2-5)
CASSSTGEETQYL

SEQ ID NO: 205711 - protein, 14 aa, Homo sapiens
  CDR3 for alpha chain variable domain of TCR clone 102856 (TRAV20, TRAJ22)
CAVALGGSARQLTF

SEQ ID NO: 205712 - protein, 11 aa, Homo sapiens
  CDR3 for beta chain variable domain of TCR clone 102856 (TRBV6-1, TRBJ2-1)
CASISSNEQFF

SEQ ID NO: 205713 - protein, 15 aa, Homo sapiens
  CDR3 for alpha chain variable domain of TCR clone 102857 (TRAV3, TRAJ3)
CAVRNGHSSASKIIF

SEQ ID NO: 205714 - protein, 14 aa, Homo sapiens
  CDR3 for beta chain variable domain of TCR clone 102857 (TRBV28, TRBJ1-4)
CASSFGTFDEKLFF

SEQ ID NO: 205715 - protein, 15 aa, Homo sapiens
  CDR3 for alpha chain variable domain of TCR clone 102858 (TRAV8-3, TRAJ27)
CAVGPSKTNAGKSTF

SEQ ID NO: 205716 - protein, 16 aa, Homo sapiens
  CDR3 for beta chain variable domain of TCR clone 102858 (TRBV6-6, TRBJ2-1)
CASSWGGQGPYNEQFF

SEQ ID NO: 205717 - protein, 15 aa, Homo sapiens
  CDR3 for alpha chain variable domain of TCR clone 102859 (TRAV1-2, TRAJ30)
CAVRPHGNRDDKIIF

SEQ ID NO: 205718 - protein, 17 aa, Homo sapiens
  CDR3 for beta chain variable domain of TCR clone 102859 (TRBV13, TRBJ2-3)
CASSLSRVAGGRNTQYF

SEQ ID NO: 205719 - protein, 12 aa, Homo sapiens
  CDR3 for alpha chain variable domain of TCR clone 102860 (TRAV21, TRAJ31)
CAVSPARGRLMF

SEQ ID NO: 205720 - protein, 14 aa, Homo sapiens
  CDR3 for beta chain variable domain of TCR clone 102860 (TRBV28, TRBJ2-7)
CASSLLRISYEQDF

SEQ ID NO: 205721 - protein, 12 aa, Homo sapiens
  CDR3 for alpha chain variable domain of TCR clone 102861 (TRAV1-1, TRAJ39)
FAVPVVGNMLTF

SEQ ID NO: 205722 - protein, 15 aa, Homo sapiens
  CDR3 for beta chain variable domain of TCR clone 102861 (TRBV27, TRBJ2-1)
CASSNGGGSSNEQFF

SEQ ID NO: 205723 - protein, 12 aa, Homo sapiens
  CDR3 for alpha chain variable domain of TCR clone 102862 (TRAV12-2, TRAJ10)
WGVTGGGNNLTF

SEQ ID NO: 205724 - protein, 16 aa, Homo sapiens
  CDR3 for beta chain variable domain of TCR clone 102862 (TRBV6-4, TRBJ1-2)
CASSEAVGDPNYGYTF

SEQ ID NO: 205725 - protein, 14 aa, Homo sapiens
  CDR3 for alpha chain variable domain of TCR clone 102863 (TRAV1-2, TRAJ16)
CAVRGFSDGQKLLF

SEQ ID NO: 205726 - protein, 16 aa, Homo sapiens
  CDR3 for beta chain variable domain of TCR clone 102863 (TRBV20-1, TRBJ2-1)
CSASDHLAGGRGEQFF

SEQ ID NO: 205727 - protein, 11 aa, Homo sapiens
  CDR3 for alpha chain variable domain of TCR clone 102864 (TRAV4, TRAJ28)
CLVGDTRAETL

SEQ ID NO: 205728 - protein, 13 aa, Homo sapiens
  CDR3 for beta chain variable domain of TCR clone 102864 (TRBV20-1, TRBJ2-7)
CSATHTSGYEQYF

SEQ ID NO: 205729 - protein, 13 aa, Homo sapiens
  CDR3 for alpha chain variable domain of TCR clone 102865 (TRAV1-2, TRAJ9)
CAALNTGGFKTIF

SEQ ID NO: 205730 - protein, 15 aa, Homo sapiens
  CDR3 for beta chain variable domain of TCR clone 102865 (TRBV24-1, TRBJ2-1)
CATSGSGGFYNEQLF

SEQ ID NO: 205731 - protein, 12 aa, Homo sapiens
  CDR3 for alpha chain variable domain of TCR clone 102866 (TRAV12-3, TRAJ17)
CAMTLTGNKLTF

SEQ ID NO: 205732 - protein, 15 aa, Homo sapiens
  CDR3 for beta chain variable domain of TCR clone 102866 (TRBV20-1, TRBJ2-7)
RSVRDRVSGMDEQYF

SEQ ID NO: 205733 - protein, 14 aa, Homo sapiens
  CDR3 for alpha chain variable domain of TCR clone 102867 (TRAV26-2, TRAJ27)
CILRDISDAGKSTF

SEQ ID NO: 205734 - protein, 13 aa, Homo sapiens
  CDR3 for beta chain variable domain of TCR clone 102867 (TRBV7-3, TRBJ1-1)
CASSQDWGAEAFF

SEQ ID NO: 205735 - protein, 14 aa, Homo sapiens
  CDR3 for alpha chain variable domain of TCR clone 102868 (TRAV38-1, TRAJ45)
CAYYSGGGADGLTF

SEQ ID NO: 205736 - protein, 12 aa, Homo sapiens
  CDR3 for beta chain variable domain of TCR clone 102868 (TRBV5-1, TRBJ2-7)
CASSDSTYEQYF

SEQ ID NO: 205737 - protein, 16 aa, Homo sapiens
  CDR3 for alpha chain variable domain of TCR clone 102869 (TRAV3, TRAJ37)
CAVRPHGSGNTGKLIF

SEQ ID NO: 205738 - protein, 13 aa, Homo sapiens
  CDR3 for beta chain variable domain of TCR clone 102869 (TRBV7-7, TRBJ2-5)
CASSRSGQETQYF

SEQ ID NO: 205739 - protein, 14 aa, Homo sapiens
  CDR3 for alpha chain variable domain of TCR clone 102870 (TRAV1-2, TRAJ16)
CAVNRFSDGQKLLF

SEQ ID NO: 205740 - protein, 13 aa, Homo sapiens
  CDR3 for beta chain variable domain of TCR clone 102870 (TRBV12-4, TRBJ2-7)
CASSFVPTAEQYF

SEQ ID NO: 205741 - protein, 14 aa, Homo sapiens
  CDR3 for alpha chain variable domain of TCR clone 102871 (TRAV35, TRAJ22)
CAGLRPGSARQLTF

SEQ ID NO: 205742 - protein, 15 aa, Homo sapiens
  CDR3 for beta chain variable domain of TCR clone 102871 (TRBV12-4, TRBJ2-5)
CASSPPTGLQETQNF

SEQ ID NO: 205743 - protein, 13 aa, Homo sapiens
  CDR3 for alpha chain variable domain of TCR clone 102872 (TRAV1-2, TRAJ9)
CAALNTGGFKTIF

SEQ ID NO: 205744 - protein, 14 aa, Homo sapiens
  CDR3 for beta chain variable domain of TCR clone 102872 (TRBV7-8, TRBJ2-3)
CASSFPDGQDTQYF

SEQ ID NO: 205745 - protein, 22 aa, Homo sapiens
  CDR3 for alpha chain variable domain of TCR clone 102873 (TRAV26-1, TRAJ42)
CIVRPIMEEANEISSLEKALNS

SEQ ID NO: 205746 - protein, 16 aa, Homo sapiens
  CDR3 for beta chain variable domain of TCR clone 102873 (TRBV7-3, TRBJ2-2)
CASSLKRGTLSGELFF

SEQ ID NO: 205747 - protein, 16 aa, Homo sapiens
  CDR3 for alpha chain variable domain of TCR clone 102874 (TRAV12-2, TRAJ6)
CAAPLAGSGGSYIPTF

SEQ ID NO: 205748 - protein, 13 aa, Homo sapiens
  CDR3 for beta chain variable domain of TCR clone 102874 (TRBV6-9, TRBJ2-5)
RASKGDGRRTQYF

SEQ ID NO: 205749 - protein, 16 aa, Homo sapiens
  CDR3 for alpha chain variable domain of TCR clone 102875 (TRAV23/DV6, TRAJ57)
CSKLYPFSGGSEKLVF

SEQ ID NO: 205750 - protein, 14 aa, Homo sapiens
  CDR3 for beta chain variable domain of TCR clone 102875 (TRBV25-1, TRBJ1-1)
CASTHLGGNTEAFF

SEQ ID NO: 205751 - protein, 16 aa, Homo sapiens
  CDR3 for alpha chain variable domain of TCR clone 102876 (TRAV30, TRAJ24)
CGTEIVDADSWGKFEF

SEQ ID NO: 205752 - protein, 14 aa, Homo sapiens
  CDR3 for beta chain variable domain of TCR clone 102876 (TRBV7-9, TRBJ2-4)
CASSLAMGGNIQYF

SEQ ID NO: 205753 - protein, 13 aa, Homo sapiens
  CDR3 for alpha chain variable domain of TCR clone 102877 (TRAV1-2, TRAJ9)
CAALNTGGFKTIF

SEQ ID NO: 205754 - protein, 13 aa, Homo sapiens
  CDR3 for beta chain variable domain of TCR clone 102877 (TRBV19, TRBJ1-2)
CASSVPGQDRHTF

SEQ ID NO: 205755 - protein, 16 aa, Homo sapiens
  CDR3 for alpha chain variable domain of TCR clone 102878 (TRAV17, TRAJ9)
CATGEWGGTGGFKTIF

SEQ ID NO: 205756 - protein, 12 aa, Homo sapiens
  CDR3 for beta chain variable domain of TCR clone 102878 (TRBV11-2, TRBJ2-2)
CASSLGGGELFF

SEQ ID NO: 205757 - protein, 16 aa, Homo sapiens
  CDR3 for alpha chain variable domain of TCR clone 102879 (TRAV23/DV6, TRAJ52)
CAVRPSGGTSYGKLTF

SEQ ID NO: 205758 - protein, 13 aa, Homo sapiens
  CDR3 for beta chain variable domain of TCR clone 102879 (TRBV7-9, TRBJ1-1)
CASSLSGETEAFF

SEQ ID NO: 205759 - protein, 16 aa, Homo sapiens
  CDR3 for alpha chain variable domain of TCR clone 102880 (TRAV30, TRAJ24)
CGTEIVDADSWGKFQF

SEQ ID NO: 205760 - protein, 12 aa, Homo sapiens
  CDR3 for beta chain variable domain of TCR clone 102880 (TRBV19, TRBJ2-1)
CASSRQGAEQFF

SEQ ID NO: 205761 - protein, 14 aa, Homo sapiens
  CDR3 for alpha chain variable domain of TCR clone 102881 (TRAV2, TRAJ37)
CAVEDQGNTGKLIF

SEQ ID NO: 205762 - protein, 15 aa, Homo sapiens
  CDR3 for beta chain variable domain of TCR clone 102881 (TRBV9, TRBJ1-6)
CASSVAETGDSPLHF

SEQ ID NO: 205763 - protein, 14 aa, Homo sapiens
  CDR3 for alpha chain variable domain of TCR clone 102882 (TRAV1-2, TRAJ8)
CAVREDTGFQKLVF

SEQ ID NO: 205764 - protein, 13 aa, Homo sapiens
  CDR3 for beta chain variable domain of TCR clone 102882 (TRBV28, TRBJ1-2)
CAGRDRGNYGYTF

SEQ ID NO: 205765 - protein, 11 aa, Homo sapiens
  CDR3 for alpha chain variable domain of TCR clone 102883 (TRAV2, TRAJ13)
CASGGYQKVTF

SEQ ID NO: 205766 - protein, 16 aa, Homo sapiens
  CDR3 for beta chain variable domain of TCR clone 102883 (TRBV19, TRBJ1-1)
CASSPTRFWPGTEAFF

SEQ ID NO: 205767 - protein, 14 aa, Homo sapiens
  CDR3 for alpha chain variable domain of TCR clone 102884 (TRAV8-2, TRAJ13)
CVVTASGGYQKVTF

SEQ ID NO: 205768 - protein, 15 aa, Homo sapiens
  CDR3 for beta chain variable domain of TCR clone 102884 (TRBV7-2, TRBJ1-2)
CASSLVSGGDYGYTF

SEQ ID NO: 205769 - protein, 17 aa, Homo sapiens
  CDR3 for alpha chain variable domain of TCR clone 102885 (TRAV12-2, TRAJ22)
CAVNRIPFSGSARQLTF

SEQ ID NO: 205770 - protein, 15 aa, Homo sapiens
  CDR3 for beta chain variable domain of TCR clone 102885 (TRBV7-9, TRBJ2-2)
CASRRTGGRTGELFF

SEQ ID NO: 205771 - protein, 15 aa, Homo sapiens
  CDR3 for alpha chain variable domain of TCR clone 102886 (TRAV16, TRAJ45)
CAPPYSGGGADGLTF

SEQ ID NO: 205772 - protein, 12 aa, Homo sapiens
  CDR3 for beta chain variable domain of TCR clone 102886 (TRBV11-2, TRBJ2-2)
CASSLGGGELFF

SEQ ID NO: 205773 - protein, 14 aa, Homo sapiens
  CDR3 for alpha chain variable domain of TCR clone 102887 (TRAV2, TRAJ9)
CAVEDRSGGFKTIF

SEQ ID NO: 205774 - protein, 14 aa, Homo sapiens
  CDR3 for beta chain variable domain of TCR clone 102887 (TRBV7-9, TRBJ2-5)
CASSLVGGEETQYF

SEQ ID NO: 205775 - protein, 14 aa, Homo sapiens
  CDR3 for alpha chain variable domain of TCR clone 102888 (TRAV23/DV6, TRAJ53)
CAARSGGSNYKLTF

SEQ ID NO: 205776 - protein, 14 aa, Homo sapiens
  CDR3 for beta chain variable domain of TCR clone 102888 (TRBV7-2, TRBJ2-7)
CASSPKTSFYEQYF

SEQ ID NO: 205777 - protein, 12 aa, Homo sapiens
  CDR3 for alpha chain variable domain of TCR clone 102889 (TRAV25, TRAJ47)
CAGQGYGNKLVF

SEQ ID NO: 205778 - protein, 15 aa, Homo sapiens
  CDR3 for beta chain variable domain of TCR clone 102889 (TRBV6-6, TRBJ1-5)
CASSSIQGTNQPQHF

SEQ ID NO: 205779 - protein, 14 aa, Homo sapiens
  CDR3 for alpha chain variable domain of TCR clone 102890 (TRAV12-1, TRAJ23)
CVVMVYNQGGKLIF

SEQ ID NO: 205780 - protein, 15 aa, Homo sapiens
  CDR3 for beta chain variable domain of TCR clone 102890 (TRBV20-1, TRBJ1-5)
CSAKPPGQGPQPQHF

SEQ ID NO: 205781 - protein, 13 aa, Homo sapiens
  CDR3 for alpha chain variable domain of TCR clone 102891 (TRAV23/DV6, TRAJ27)
CAASKPMQANQPL

SEQ ID NO: 205782 - protein, 14 aa, Homo sapiens
  CDR3 for beta chain variable domain of TCR clone 102891 (TRBV5-4, TRBJ1-1)
CASSLDSRRDEASF

SEQ ID NO: 205783 - protein, 16 aa, Homo sapiens
  CDR3 for alpha chain variable domain of TCR clone 102892 (TRAV3, TRAJ23)
CAVKIGIYNQGGKLIF

SEQ ID NO: 205784 - protein, 16 aa, Homo sapiens
  CDR3 for beta chain variable domain of TCR clone 102892 (TRBV11-2, TRBJ1-2)
CASSLDTGGADYGYTF

SEQ ID NO: 205785 - protein, 10 aa, Homo sapiens
  CDR3 for alpha chain variable domain of TCR clone 102893 (TRAV12-3, TRAJ49)
CAMNDDQFYF

SEQ ID NO: 205786 - protein, 12 aa, Homo sapiens
  CDR3 for beta chain variable domain of TCR clone 102893 (TRBV7-6, TRBJ2-3)
CASSTGTDTQYF

SEQ ID NO: 205787 - protein, 13 aa, Homo sapiens
  CDR3 for alpha chain variable domain of TCR clone 102894 (TRAV2, TRAJ40)
CAVVTSGTYKYIF

SEQ ID NO: 205788 - protein, 15 aa, Homo sapiens
  CDR3 for beta chain variable domain of TCR clone 102894 (TRBV7-2, TRBJ1-2)
CASSLAPDRGLGYTF

SEQ ID NO: 205789 - protein, 16 aa, Homo sapiens
  CDR3 for alpha chain variable domain of TCR clone 102895 (TRAV12-1, TRAJ45)
CMVIRYSGGGADGLTF

SEQ ID NO: 205790 - protein, 12 aa, Homo sapiens
  CDR3 for beta chain variable domain of TCR clone 102895 (TRBV6-5, TRBJ2-2)
CASRQITGELFF

SEQ ID NO: 205791 - protein, 15 aa, Homo sapiens
  CDR3 for alpha chain variable domain of TCR clone 102896 (TRAV8-3, TRAJ40)
CAAPSLGSGTYKYIF

SEQ ID NO: 205792 - protein, 16 aa, Homo sapiens
  CDR3 for beta chain variable domain of TCR clone 102896 (TRBV7-3, TRBJ2-3)
CGSSLSGYRPEDTQYF

SEQ ID NO: 205793 - protein, 18 aa, Homo sapiens
  CDR3 for alpha chain variable domain of TCR clone 102897 (TRAV13-1, TRAJ52)
CAAKNPNAGGTSYGKLTF

SEQ ID NO: 205794 - protein, 15 aa, Homo sapiens
  CDR3 for beta chain variable domain of TCR clone 102897 (TRBV28, TRBJ2-3)
CASSPDRQGANAQYF

SEQ ID NO: 205795 - protein, 14 aa, Homo sapiens
  CDR3 for alpha chain variable domain of TCR clone 102898 (TRAV17, TRAJ5)
CATVAPTGRRALTF

SEQ ID NO: 205796 - protein, 14 aa, Homo sapiens
  CDR3 for beta chain variable domain of TCR clone 102898 (TRBV28, TRBJ2-7)
CASSPYGMAYEQYF

SEQ ID NO: 205797 - protein, 14 aa, Homo sapiens
  CDR3 for alpha chain variable domain of TCR clone 102899 (TRAV12-3, TRAJ10)
SHLPLTGGGNKLTF

SEQ ID NO: 205798 - protein, 17 aa, Homo sapiens
  CDR3 for beta chain variable domain of TCR clone 102899 (TRBV7-6, TRBJ2-1)
CASSLEIAGGSYNEQFF

SEQ ID NO: 205799 - protein, 12 aa, Homo sapiens
  CDR3 for alpha chain variable domain of TCR clone 102900 (TRAV10, TRAJ43)
CVVVRVGNDMRF

SEQ ID NO: 205800 - protein, 12 aa, Homo sapiens
  CDR3 for beta chain variable domain of TCR clone 102900 (TRBV11-2, TRBJ2-2)
CASSLPTGELFF

SEQ ID NO: 205801 - protein, 15 aa, Homo sapiens
  CDR3 for alpha chain variable domain of TCR clone 102901 (TRAV13-1, TRAJ15)
CAASIERQAGTALIF

SEQ ID NO: 205802 - protein, 15 aa, Homo sapiens
  CDR3 for beta chain variable domain of TCR clone 102901 (TRBV4-1, TRBJ1-4)
CASSDTGGTNEKLFF

SEQ ID NO: 205803 - protein, 11 aa, Homo sapiens
  CDR3 for alpha chain variable domain of TCR clone 102902 (TRAV35, TRAJ34)
CWARNTDKLIF

SEQ ID NO: 205804 - protein, 14 aa, Homo sapiens
  CDR3 for beta chain variable domain of TCR clone 102902 (TRBV6-1, TRBJ1-3)
CASVQGGGGNTIYF

SEQ ID NO: 205805 - protein, 12 aa, Homo sapiens
  CDR3 for alpha chain variable domain of TCR clone 102903 (TRAV2, TRAJ31)
CAVEDNNARLMF

SEQ ID NO: 205806 - protein, 13 aa, Homo sapiens
  CDR3 for beta chain variable domain of TCR clone 102903 (TRBV12-4, TRBJ2-7)
CASSPTETYEQYF

SEQ ID NO: 205807 - protein, 13 aa, Homo sapiens
  CDR3 for alpha chain variable domain of TCR clone 102904 (TRAV27, TRAJ41)
CAGEGNSGYALNF

SEQ ID NO: 205808 - protein, 15 aa, Homo sapiens
  CDR3 for beta chain variable domain of TCR clone 102904 (TRBV7-9, TRBJ1-4)
CASSRTGGFNEKLFF

SEQ ID NO: 205809 - protein, 15 aa, Homo sapiens
  CDR3 for alpha chain variable domain of TCR clone 102905 (TRAV21, TRAJ40)
CAVRPQTSGTYKYIF

SEQ ID NO: 205810 - protein, 15 aa, Homo sapiens
  CDR3 for beta chain variable domain of TCR clone 102905 (TRBV28, TRBJ1-3)
CASWGGHLSGNTIYF

SEQ ID NO: 205811 - protein, 13 aa, Homo sapiens
  CDR3 for alpha chain variable domain of TCR clone 102906 (TRAV36/DV7, TRAJ38)
CVANAGNNRKLIW

SEQ ID NO: 205812 - protein, 15 aa, Homo sapiens
  CDR3 for beta chain variable domain of TCR clone 102906 (TRBV7-2, TRBJ1-5)
CASSLDRGQDQPQHF

SEQ ID NO: 205813 - protein, 13 aa, Homo sapiens
  CDR3 for alpha chain variable domain of TCR clone 102907 (TRAV3, TRAJ27)
CAVRPLGAGKSTF

SEQ ID NO: 205814 - protein, 12 aa, Homo sapiens
  CDR3 for beta chain variable domain of TCR clone 102907 (TRBV7-3, TRBJ1-2)
CASSKKGVPVTF

SEQ ID NO: 205815 - protein, 14 aa, Homo sapiens
  CDR3 for alpha chain variable domain of TCR clone 102908 (TRAV26-2, TRAJ32)
CCVGYGGATNKLIF

SEQ ID NO: 205816 - protein, 13 aa, Homo sapiens
  CDR3 for beta chain variable domain of TCR clone 102908 (TRBV12-5, TRBJ2-3)
CASGDRQSDTHYF

SEQ ID NO: 205817 - protein, 13 aa, Homo sapiens
  CDR3 for alpha chain variable domain of TCR clone 102909 (TRAV1-2, TRAJ11)
CAVRDSGYSTLTF

SEQ ID NO: 205818 - protein, 14 aa, Homo sapiens
  CDR3 for beta chain variable domain of TCR clone 102909 (TRBV19, TRBJ2-1)
CASPTFVLSGEQFF

SEQ ID NO: 205819 - protein, 11 aa, Homo sapiens
  CDR3 for alpha chain variable domain of TCR clone 102910 (TRAV3, TRAJ21)
CAVGNFNKFYF

SEQ ID NO: 205820 - protein, 16 aa, Homo sapiens
  CDR3 for beta chain variable domain of TCR clone 102910 (TRBV7-2, TRBJ1-4)
CASSLAPGRRDEKLFF

SEQ ID NO: 205821 - protein, 11 aa, Homo sapiens
  CDR3 for alpha chain variable domain of TCR clone 102911 (TRAV2, TRAJ13)
CASGGYQKVTF

SEQ ID NO: 205822 - protein, 15 aa, Homo sapiens
  CDR3 for beta chain variable domain of TCR clone 102911 (TRBV29-1, TRBJ2-1)
CSGRDRKSSYNGQFF

SEQ ID NO: 205823 - protein, 15 aa, Homo sapiens
  CDR3 for alpha chain variable domain of TCR clone 102912 (TRAV16, TRAJ17)
CALIGNKAAGNKLTF

SEQ ID NO: 205824 - protein, 16 aa, Homo sapiens
  CDR3 for beta chain variable domain of TCR clone 102912 (TRBV7-6, TRBJ1-6)
CASSSLPAGEYSPLHF

SEQ ID NO: 205825 - protein, 14 aa, Homo sapiens
  CDR3 for alpha chain variable domain of TCR clone 102913 (TRAV8-4, TRAJ29)
CAVSAVEGNTPLVF

SEQ ID NO: 205826 - protein, 13 aa, Homo sapiens
  CDR3 for beta chain variable domain of TCR clone 102913 (TRBV12-4, TRBJ2-7)
CASSFQGRYEHYF

SEQ ID NO: 205827 - protein, 14 aa, Homo sapiens
  CDR3 for alpha chain variable domain of TCR clone 102914 (TRAV12-3, TRAJ22)
CAMSLFGSARQLTF

SEQ ID NO: 205828 - protein, 14 aa, Homo sapiens
  CDR3 for beta chain variable domain of TCR clone 102914 (TRBV12-4, TRBJ1-1)
CASSLGTGGTEAFF

SEQ ID NO: 205829 - protein, 15 aa, Homo sapiens
  CDR3 for alpha chain variable domain of TCR clone 102915 (TRAV12-3, TRAJ47)
CAMTKVLEYGNKLAF

SEQ ID NO: 205830 - protein, 15 aa, Homo sapiens
  CDR3 for beta chain variable domain of TCR clone 102915 (TRBV5-4, TRBJ2-3)
CASTGGGRAIDTQYF

SEQ ID NO: 205831 - protein, 15 aa, Homo sapiens
  CDR3 for alpha chain variable domain of TCR clone 102916 (TRAV17, TRAJ48)
CATDETNFGNEKLTF

SEQ ID NO: 205832 - protein, 19 aa, Homo sapiens
  CDR3 for beta chain variable domain of TCR clone 102916 (TRBV28, TRBJ1-6)
CASSLLGVTGRTYNSPLHF

SEQ ID NO: 205833 - protein, 14 aa, Homo sapiens
  CDR3 for alpha chain variable domain of TCR clone 102917 (TRAV12-1, TRAJ38)
CGELKAGNNRKMIW

SEQ ID NO: 205834 - protein, 14 aa, Homo sapiens
  CDR3 for beta chain variable domain of TCR clone 102917 (TRBV13, TRBJ2-5)
CASSLERVGETQYF

SEQ ID NO: 205835 - protein, 14 aa, Homo sapiens
  CDR3 for alpha chain variable domain of TCR clone 102918 (TRAV12-1, TRAJ9)
CVVTGYTGGFKTIF

SEQ ID NO: 205836 - protein, 13 aa, Homo sapiens
  CDR3 for beta chain variable domain of TCR clone 102918 (TRBV7-9, TRBJ1-2)
CASSLKQNYGYTF

SEQ ID NO: 205837 - protein, 13 aa, Homo sapiens
  CDR3 for alpha chain variable domain of TCR clone 102919 (TRAV13-2, TRAJ53)
CAENMGSNYKLTF

SEQ ID NO: 205838 - protein, 14 aa, Homo sapiens
  CDR3 for beta chain variable domain of TCR clone 102919 (TRBV7-2, TRBJ1-2)
CASSQTGSTYGYTF

SEQ ID NO: 205839 - protein, 16 aa, Homo sapiens
  CDR3 for alpha chain variable domain of TCR clone 102920 (TRAV12-3, TRAJ45)
CAMGWGSGGGADGLAF

SEQ ID NO: 205840 - protein, 15 aa, Homo sapiens
  CDR3 for beta chain variable domain of TCR clone 102920 (TRBV3-1, TRBJ1-2)
CASSHPGTPGYGYTF

SEQ ID NO: 205841 - protein, 13 aa, Homo sapiens
  CDR3 for alpha chain variable domain of TCR clone 102921 (TRAV1-1, TRAJ23)
CAVVANQGGKLIF

SEQ ID NO: 205842 - protein, 12 aa, Homo sapiens
  CDR3 for beta chain variable domain of TCR clone 102921 (TRBV11-2, TRBJ2-2)
CASSLGGGELFF

SEQ ID NO: 205843 - protein, 13 aa, Homo sapiens
  CDR3 for alpha chain variable domain of TCR clone 102922 (TRAV26-2, TRAJ43)
CILIAVNNNDMRF

SEQ ID NO: 205844 - protein, 15 aa, Homo sapiens
  CDR3 for beta chain variable domain of TCR clone 102922 (TRBV7-2, TRBJ2-1)
CASTHGTGIYNEQFF

SEQ ID NO: 205845 - protein, 11 aa, Homo sapiens
  CDR3 for alpha chain variable domain of TCR clone 102923 (TRAV35, TRAJ30)
CAGPGDDKIIF

SEQ ID NO: 205846 - protein, 12 aa, Homo sapiens
  CDR3 for beta chain variable domain of TCR clone 102923 (TRBV27, TRBJ2-1)
CASGGFYNEQFF

SEQ ID NO: 205847 - protein, 13 aa, Homo sapiens
  CDR3 for alpha chain variable domain of TCR clone 102924 (TRAV39, TRAJ58)
CAGEETSGYRLTF

SEQ ID NO: 205848 - protein, 13 aa, Homo sapiens
  CDR3 for beta chain variable domain of TCR clone 102924 (TRBV15, TRBJ2-7)
CATSTTGHYEQYF

SEQ ID NO: 205849 - protein, 14 aa, Homo sapiens
  CDR3 for alpha chain variable domain of TCR clone 102925 (TRAV12-1, TRAJ26)
CVVKGSNYGQNFVF

SEQ ID NO: 205850 - protein, 14 aa, Homo sapiens
  CDR3 for beta chain variable domain of TCR clone 102925 (TRBV11-2, TRBJ2-3)
CASSRLARTDTQYF

SEQ ID NO: 205851 - protein, 14 aa, Homo sapiens
  CDR3 for alpha chain variable domain of TCR clone 102926 (TRAV21, TRAJ4)
CAAPGVGGYNKLIF

SEQ ID NO: 205852 - protein, 15 aa, Homo sapiens
  CDR3 for beta chain variable domain of TCR clone 102926 (TRBV7-2, TRBJ2-3)
CASSSTGLETDTQYF

SEQ ID NO: 205853 - protein, 15 aa, Homo sapiens
  CDR3 for alpha chain variable domain of TCR clone 102927 (TRAV2, TRAJ15)
CAVEDRGQAGTALIF

SEQ ID NO: 205854 - protein, 14 aa, Homo sapiens
  CDR3 for beta chain variable domain of TCR clone 102927 (TRBV19, TRBJ2-1)
CARGARSFQWEQFF

SEQ ID NO: 205855 - protein, 14 aa, Homo sapiens
  CDR3 for alpha chain variable domain of TCR clone 102928 (TRAV8-4, TRAJ8)
CAVSLKTGFQKLVF

SEQ ID NO: 205856 - protein, 13 aa, Homo sapiens
  CDR3 for beta chain variable domain of TCR clone 102928 (TRBV7-9, TRBJ2-3)
CASSPGSTDTQYF

SEQ ID NO: 205857 - protein, 13 aa, Homo sapiens
  CDR3 for alpha chain variable domain of TCR clone 102929 (TRAV16, TRAJ28)
CSLTGAGSYQLTF

SEQ ID NO: 205858 - protein, 16 aa, Homo sapiens
  CDR3 for beta chain variable domain of TCR clone 102929 (TRBV28, TRBJ1-5)
CASSLTGQGWNQPQHF

SEQ ID NO: 205859 - protein, 17 aa, Homo sapiens
  CDR3 for alpha chain variable domain of TCR clone 102930 (TRAV13-1, TRAJ31)
CAPRDRLMFGDGTQLVV

SEQ ID NO: 205860 - protein, 12 aa, Homo sapiens
  CDR3 for beta chain variable domain of TCR clone 102930 (TRBV7-9, TRBJ2-7)
CASRLEGYEQYF

SEQ ID NO: 205861 - protein, 14 aa, Homo sapiens
  CDR3 for alpha chain variable domain of TCR clone 102931 (TRAV26-1, TRAJ38)
CIADNAGNNRKLIG

SEQ ID NO: 205862 - protein, 13 aa, Homo sapiens
  CDR3 for beta chain variable domain of TCR clone 102931 (TRBV19, TRBJ1-2)
CASSVPGQDGYTF

SEQ ID NO: 205863 - protein, 14 aa, Homo sapiens
  CDR3 for alpha chain variable domain of TCR clone 102932 (TRAV38-1, TRAJ45)
CASHSGGGADGLTF

SEQ ID NO: 205864 - protein, 11 aa, Homo sapiens
  CDR3 for beta chain variable domain of TCR clone 102932 (TRBV29-1, TRBJ2-5)
CSEDRTGTQYF

SEQ ID NO: 205865 - protein, 17 aa, Homo sapiens
  CDR3 for alpha chain variable domain of TCR clone 102933 (TRAV3, TRAJ6)
CAVRGGPRAGGSYIPTF

SEQ ID NO: 205866 - protein, 13 aa, Homo sapiens
  CDR3 for beta chain variable domain of TCR clone 102933 (TRBV7-9, TRBJ1-2)
CASSLKQNYGYTF

SEQ ID NO: 205867 - protein, 15 aa, Homo sapiens
  CDR3 for alpha chain variable domain of TCR clone 102934 (TRAV8-3, TRAJ23)
CAVGDRYNQGGKLTF

SEQ ID NO: 205868 - protein, 22 aa, Homo sapiens
  CDR3 for beta chain variable domain of TCR clone 102934 (TRBV29-1, TRBJ2-5)
TVSNMSPEDSSIYLCSAGTQYF

SEQ ID NO: 205869 - protein, 13 aa, Homo sapiens
  CDR3 for alpha chain variable domain of TCR clone 102935 (TRAV12-1, TRAJ49)
CVVGANTGNQFYF

SEQ ID NO: 205870 - protein, 15 aa, Homo sapiens
  CDR3 for beta chain variable domain of TCR clone 102935 (TRBV11-2, TRBJ2-1)
CASSKNRGLIYEQFF

SEQ ID NO: 205871 - protein, 11 aa, Homo sapiens
  CDR3 for alpha chain variable domain of TCR clone 102936 (TRAV12-1, TRAJ43)
CVEYDNNDMRF

SEQ ID NO: 205872 - protein, 14 aa, Homo sapiens
  CDR3 for beta chain variable domain of TCR clone 102936 (TRBV11-2, TRBJ2-5)
CASRPLAGRETQYF

SEQ ID NO: 205873 - protein, 13 aa, Homo sapiens
  CDR3 for alpha chain variable domain of TCR clone 102937 (TRAV12-1, TRAJ26)
CVVRRNYGQNFVF

SEQ ID NO: 205874 - protein, 15 aa, Homo sapiens
  CDR3 for beta chain variable domain of TCR clone 102937 (TRBV28, TRBJ2-1)
CASSIIAGCRSEQFF

SEQ ID NO: 205875 - protein, 13 aa, Homo sapiens
  CDR3 for alpha chain variable domain of TCR clone 102938 (TRAV2, TRAJ40)
CAVVTSGTYKYIF

SEQ ID NO: 205876 - protein, 17 aa, Homo sapiens
  CDR3 for beta chain variable domain of TCR clone 102938 (TRBV5-4, TRBJ2-1)
CASSSAGGRGPYNEQFF

SEQ ID NO: 205877 - protein, 16 aa, Homo sapiens
  CDR3 for alpha chain variable domain of TCR clone 102939 (TRAV14/DV4, TRAJ54)
CAMREGRIQGAQKLVF

SEQ ID NO: 205878 - protein, 11 aa, Homo sapiens
  CDR3 for beta chain variable domain of TCR clone 102939 (TRBV6-3, TRBJ2-3)
CATGQADTQYF

SEQ ID NO: 205879 - protein, 13 aa, Homo sapiens
  CDR3 for alpha chain variable domain of TCR clone 102940 (TRAV26-1, TRAJ30)
CIVNMNRDDKIIF

SEQ ID NO: 205880 - protein, 16 aa, Homo sapiens
  CDR3 for beta chain variable domain of TCR clone 102940 (TRBV16, TRBJ2-7)
CASSRPACGSSYEQYF

SEQ ID NO: 205881 - protein, 14 aa, Homo sapiens
  CDR3 for alpha chain variable domain of TCR clone 102941 (TRAV13-2, TRAJ17)
CAENSKAAGNKLTF

SEQ ID NO: 205882 - protein, 16 aa, Homo sapiens
  CDR3 for beta chain variable domain of TCR clone 102941 (TRBV2, TRBJ2-1)
CASRSPAGGKYNEQFF

SEQ ID NO: 205883 - protein, 12 aa, Homo sapiens
  CDR3 for alpha chain variable domain of TCR clone 102942 (TRAV17, TRAJ57)
CATDGGSEKLVF

SEQ ID NO: 205884 - protein, 15 aa, Homo sapiens
  CDR3 for beta chain variable domain of TCR clone 102942 (TRBV11-3, TRBJ2-3)
CASLKDGREGDTQYF

SEQ ID NO: 205885 - protein, 14 aa, Homo sapiens
  CDR3 for alpha chain variable domain of TCR clone 102943 (TRAV12-2, TRAJ17)
CAALFKAAGNKLTF

SEQ ID NO: 205886 - protein, 16 aa, Homo sapiens
  CDR3 for beta chain variable domain of TCR clone 102943 (TRBV12-5, TRBJ2-5)
CASGPRTSGNQETQYF

SEQ ID NO: 205887 - protein, 16 aa, Homo sapiens
  CDR3 for alpha chain variable domain of TCR clone 102944 (TRAV26-1, TRAJ53)
CIVRVAMGGSNYKRTF

SEQ ID NO: 205888 - protein, 12 aa, Homo sapiens
  CDR3 for beta chain variable domain of TCR clone 102944 (TRBV7-9, TRBJ1-5)
CASSPQGQPQHF

SEQ ID NO: 205889 - protein, 16 aa, Homo sapiens
  CDR3 for alpha chain variable domain of TCR clone 102945 (TRAV12-1, TRAJ22)
CVVNTISSGSARKLTF

SEQ ID NO: 205890 - protein, 13 aa, Homo sapiens
  CDR3 for beta chain variable domain of TCR clone 102945 (TRBV19, TRBJ2-1)
CASNGGVFSEQFF

SEQ ID NO: 205891 - protein, 22 aa, Homo sapiens
  CDR3 for alpha chain variable domain of TCR clone 102946 (TRAV21, )
CAVRQDAGNNHIQNPDPAVYQL

SEQ ID NO: 205892 - protein, 16 aa, Homo sapiens
  CDR3 for beta chain variable domain of TCR clone 102946 (TRBV4-2, TRBJ1-1)
CASRPLDGGGDTEDFF

SEQ ID NO: 205893 - protein, 15 aa, Homo sapiens
  CDR3 for alpha chain variable domain of TCR clone 102947 (TRAV3, TRAJ24)
CAVRDKMAAGGNCSL

SEQ ID NO: 205894 - protein, 14 aa, Homo sapiens
  CDR3 for beta chain variable domain of TCR clone 102947 (TRBV7-2, TRBJ2-3)
CASSQTGSSYTQYF

SEQ ID NO: 205895 - protein, 15 aa, Homo sapiens
  CDR3 for alpha chain variable domain of TCR clone 102948 (TRAV27, TRAJ38)
CAARRNAGNNRKLLL

SEQ ID NO: 205896 - protein, 13 aa, Homo sapiens
  CDR3 for beta chain variable domain of TCR clone 102948 (TRBV12-5, TRBJ2-3)
CASGDRQSDTQYF

SEQ ID NO: 205897 - protein, 18 aa, Homo sapiens
  CDR3 for alpha chain variable domain of TCR clone 102949 (TRAV26-2, TRAJ45)
CILRVDKYSGGGADGFTF

SEQ ID NO: 205898 - protein, 11 aa, Homo sapiens
  CDR3 for beta chain variable domain of TCR clone 102949 (TRBV29-1, TRBJ2-5)
CSEDRTGTQYF

SEQ ID NO: 205899 - protein, 15 aa, Homo sapiens
  CDR3 for alpha chain variable domain of TCR clone 102950 (TRAV17, TRAJ57)
CATGPSQGGSEKLVF

SEQ ID NO: 205900 - protein, 13 aa, Homo sapiens
  CDR3 for beta chain variable domain of TCR clone 102950 (TRBV10-2, TRBJ2-7)
CASGASGGYEQYF

SEQ ID NO: 205901 - protein, 18 aa, Homo sapiens
  CDR3 for alpha chain variable domain of TCR clone 102951 (TRAV12-3, TRAJ52)
CAMSVGGAGGTSYGKLTF

SEQ ID NO: 205902 - protein, 15 aa, Homo sapiens
  CDR3 for beta chain variable domain of TCR clone 102951 (TRBV18, TRBJ2-1)
CASSPPSASYNEQFF

SEQ ID NO: 205903 - protein, 12 aa, Homo sapiens
  CDR3 for alpha chain variable domain of TCR clone 102952 (TRAV21, TRAJ33)
CAKMDSNYQLIW

SEQ ID NO: 205904 - protein, 15 aa, Homo sapiens
  CDR3 for beta chain variable domain of TCR clone 102952 (TRBV2, TRBJ2-1)
CASSEEREGDNEQFF

SEQ ID NO: 205905 - protein, 16 aa, Homo sapiens
  CDR3 for alpha chain variable domain of TCR clone 102953 (TRAV30, TRAJ24)
CGTEIVDADSWGKFSF

SEQ ID NO: 205906 - protein, 14 aa, Homo sapiens
  CDR3 for beta chain variable domain of TCR clone 102953 (TRBV12-5, TRBJ2-5)
CASGSRTHQETQYF

SEQ ID NO: 205907 - protein, 15 aa, Homo sapiens
  CDR3 for alpha chain variable domain of TCR clone 102954 (TRAV20, TRAJ53)
CAAQASGGSNYKLTF

SEQ ID NO: 205908 - protein, 14 aa, Homo sapiens
  CDR3 for beta chain variable domain of TCR clone 102954 (TRBV7-8, TRBJ2-3)
CASSFKSSTDTQYF

SEQ ID NO: 205909 - protein, 14 aa, Homo sapiens
  CDR3 for alpha chain variable domain of TCR clone 102955 (TRAV12-3, TRAJ9)
CAMSPNTGGFKTIF

SEQ ID NO: 205910 - protein, 17 aa, Homo sapiens
  CDR3 for beta chain variable domain of TCR clone 102955 (TRBV7-3, TRBJ2-3)
CASSLMKRMRGADTQYF

SEQ ID NO: 205911 - protein, 13 aa, Homo sapiens
  CDR3 for alpha chain variable domain of TCR clone 102956 (TRAV8-3, TRAJ28)
CAVGAVGNYQLTF

SEQ ID NO: 205912 - protein, 14 aa, Homo sapiens
  CDR3 for beta chain variable domain of TCR clone 102956 (TRBV7-2, TRBJ2-7)
CASRSQGAAYEQYF

SEQ ID NO: 205913 - protein, 13 aa, Homo sapiens
  CDR3 for alpha chain variable domain of TCR clone 102957 (TRAV12-1, TRAJ26)
CVVRRNYGQNFVF

SEQ ID NO: 205914 - protein, 14 aa, Homo sapiens
  CDR3 for beta chain variable domain of TCR clone 102957 (TRBV11-2, TRBJ1-2)
CASSLGTANYGYTF

SEQ ID NO: 205915 - protein, 13 aa, Homo sapiens
  CDR3 for alpha chain variable domain of TCR clone 102958 (TRAV35, TRAJ36)
CAGPRIGANNLFF

SEQ ID NO: 205916 - protein, 15 aa, Homo sapiens
  CDR3 for beta chain variable domain of TCR clone 102958 (TRBV19, TRBJ2-4)
CASRGPRRGENIQYF

SEQ ID NO: 205917 - protein, 18 aa, Homo sapiens
  CDR3 for alpha chain variable domain of TCR clone 102959 (TRAV12-3, TRAJ52)
CAMSRTNASGTSYGKLTF

SEQ ID NO: 205918 - protein, 17 aa, Homo sapiens
  CDR3 for beta chain variable domain of TCR clone 102959 (TRBV7-3, TRBJ2-3)
CASSLMKRMRGAATQYF

SEQ ID NO: 205919 - protein, 14 aa, Homo sapiens
  CDR3 for alpha chain variable domain of TCR clone 102960 (TRAV3, TRAJ33)
CAVSDMDSNYQLIW

SEQ ID NO: 205920 - protein, 19 aa, Homo sapiens
  CDR3 for beta chain variable domain of TCR clone 102960 (TRBV7-3, TRBJ1-2)
CASSFPQGNDGELWLHLRF

SEQ ID NO: 205921 - protein, 13 aa, Homo sapiens
  CDR3 for alpha chain variable domain of TCR clone 102961 (TRAV23/DV6, TRAJ21)
CAASIGNFNKFYF

SEQ ID NO: 205922 - protein, 14 aa, Homo sapiens
  CDR3 for beta chain variable domain of TCR clone 102961 (TRBV2, TRBJ2-7)
CASSLTSGGYEQYF

SEQ ID NO: 205923 - protein, 14 aa, Homo sapiens
  CDR3 for alpha chain variable domain of TCR clone 102962 (TRAV1-2, TRAJ8)
CAVREETGFQKLAF

SEQ ID NO: 205924 - protein, 15 aa, Homo sapiens
  CDR3 for beta chain variable domain of TCR clone 102962 (TRBV6-3, TRBJ2-7)
CASSSPGTVFYEQYF

SEQ ID NO: 205925 - protein, 12 aa, Homo sapiens
  CDR3 for alpha chain variable domain of TCR clone 102963 (TRAV36/DV7, TRAJ54)
CAVVRGAQKLVF

SEQ ID NO: 205926 - protein, 13 aa, Homo sapiens
  CDR3 for beta chain variable domain of TCR clone 102963 (TRBV7-3, TRBJ1-1)
CQQLKGGSTEAFF

SEQ ID NO: 205927 - protein, 14 aa, Homo sapiens
  CDR3 for alpha chain variable domain of TCR clone 102964 (TRAV2, TRAJ9)
CAVEDRSGGFKTIF

SEQ ID NO: 205928 - protein, 18 aa, Homo sapiens
  CDR3 for beta chain variable domain of TCR clone 102964 (TRBV7-9, TRBJ2-7)
CASSLTTSGSRTWYEQYF

SEQ ID NO: 205929 - protein, 15 aa, Homo sapiens
  CDR3 for alpha chain variable domain of TCR clone 102965 (TRAV13-1, TRAJ32)
CAASNGWWCYKHAHL

SEQ ID NO: 205930 - protein, 15 aa, Homo sapiens
  CDR3 for beta chain variable domain of TCR clone 102965 (TRBV20-1, TRBJ1-2)
CSAIRTGAFNYGYTF

SEQ ID NO: 205931 - protein, 14 aa, Homo sapiens
  CDR3 for alpha chain variable domain of TCR clone 102966 (TRAV12-3, TRAJ20)
CAMSAWRGDYKLSF

SEQ ID NO: 205932 - protein, 14 aa, Homo sapiens
  CDR3 for beta chain variable domain of TCR clone 102966 (TRBV7-3, TRBJ2-3)
CASSPSARTDTQYF

SEQ ID NO: 205933 - protein, 16 aa, Homo sapiens
  CDR3 for alpha chain variable domain of TCR clone 102967 (TRAV8-6, TRAJ4)
CAVTKILSVGYNKLIF

SEQ ID NO: 205934 - protein, 17 aa, Homo sapiens
  CDR3 for beta chain variable domain of TCR clone 102967 (TRBV20-1, TRBJ2-1)
CSASSSGLAGSYNEQFF

SEQ ID NO: 205935 - protein, 13 aa, Homo sapiens
  CDR3 for alpha chain variable domain of TCR clone 102968 (TRAV26-1, TRAJ23)
CIDLRTPGGKLIF

SEQ ID NO: 205936 - protein, 14 aa, Homo sapiens
  CDR3 for beta chain variable domain of TCR clone 102968 (TRBV2, TRBJ2-7)
CASSRDRSSYEQYF

SEQ ID NO: 205937 - protein, 15 aa, Homo sapiens
  CDR3 for alpha chain variable domain of TCR clone 102969 (TRAV13-1, TRAJ39)
CAASPLNNAGNMLTF

SEQ ID NO: 205938 - protein, 16 aa, Homo sapiens
  CDR3 for beta chain variable domain of TCR clone 102969 (TRBV12-5, TRBJ2-5)
CASGPRTSGNQETQYF

SEQ ID NO: 205939 - protein, 15 aa, Homo sapiens
  CDR3 for alpha chain variable domain of TCR clone 102970 (TRAV17, TRAJ23)
CATDAEDNQGGKLIF

SEQ ID NO: 205940 - protein, 12 aa, Homo sapiens
  CDR3 for beta chain variable domain of TCR clone 102970 (TRBV2, TRBJ2-1)
CAKLEGYNEQFF

SEQ ID NO: 205941 - protein, 17 aa, Homo sapiens
  CDR3 for alpha chain variable domain of TCR clone 102971 (TRAV3, TRAJ42)
CAVRDRDYGGSQGNLIF

SEQ ID NO: 205942 - protein, 15 aa, Homo sapiens
  CDR3 for beta chain variable domain of TCR clone 102971 (TRBV20-1, TRBJ2-1)
CSASSAGSSYNEQFF

SEQ ID NO: 205943 - protein, 11 aa, Homo sapiens
  CDR3 for alpha chain variable domain of TCR clone 102972 (TRAV2, TRAJ33)
CAVDSNYQLIW

SEQ ID NO: 205944 - protein, 13 aa, Homo sapiens
  CDR3 for beta chain variable domain of TCR clone 102972 (TRBV19, TRBJ1-2)
CAWSVPGQDGYTF

SEQ ID NO: 205945 - protein, 16 aa, Homo sapiens
  CDR3 for alpha chain variable domain of TCR clone 102973 (TRAV36/DV7, TRAJ28)
CAGTLYSGAGSYQLTF

SEQ ID NO: 205946 - protein, 14 aa, Homo sapiens
  CDR3 for beta chain variable domain of TCR clone 102973 (TRBV7-6, TRBJ2-3)
CASSLGTVTDTQYF

SEQ ID NO: 205947 - protein, 13 aa, Homo sapiens
  CDR3 for alpha chain variable domain of TCR clone 102974 (TRAV2, TRAJ15)
RAVASQAGTALIF

SEQ ID NO: 205948 - protein, 15 aa, Homo sapiens
  CDR3 for beta chain variable domain of TCR clone 102974 (TRBV4-1, TRBJ2-7)
CASSQQGQGFDEQYF

SEQ ID NO: 205949 - protein, 13 aa, Homo sapiens
  CDR3 for alpha chain variable domain of TCR clone 102975 (TRAV17, TRAJ22)
CAHHSGSARQLTF

SEQ ID NO: 205950 - protein, 14 aa, Homo sapiens
  CDR3 for beta chain variable domain of TCR clone 102975 (TRBV16, TRBJ1-1)
CASSQAGANTEAFF

SEQ ID NO: 205951 - protein, 10 aa, Homo sapiens
  CDR3 for alpha chain variable domain of TCR clone 102976 (TRAV13-2, TRAJ20)
CAENICRLQA

SEQ ID NO: 205952 - protein, 14 aa, Homo sapiens
  CDR3 for beta chain variable domain of TCR clone 102976 (TRBV7-3, TRBJ2-1)
CASSLAGGTNEQFF

SEQ ID NO: 205953 - protein, 15 aa, Homo sapiens
  CDR3 for alpha chain variable domain of TCR clone 102977 (TRAV8-4, TRAJ13)
CAVSDWSGGYQKVTF

SEQ ID NO: 205954 - protein, 16 aa, Homo sapiens
  CDR3 for beta chain variable domain of TCR clone 102977 (TRBV2, TRBJ1-1)
CASSPPNRGMNTEAFF

SEQ ID NO: 205955 - protein, 14 aa, Homo sapiens
  CDR3 for alpha chain variable domain of TCR clone 102978 (TRAV26-1, TRAJ33)
CIVRNMDSNYQLIW

SEQ ID NO: 205956 - protein, 14 aa, Homo sapiens
  CDR3 for beta chain variable domain of TCR clone 102978 (TRBV19, TRBJ2-1)
CASPTFVLSGEQFF

SEQ ID NO: 205957 - protein, 15 aa, Homo sapiens
  CDR3 for alpha chain variable domain of TCR clone 102979 (TRAV13-2, TRAJ16)
CAENDRFSDGQKLLF

SEQ ID NO: 205958 - protein, 13 aa, Homo sapiens
  CDR3 for beta chain variable domain of TCR clone 102979 (TRBV4-2, TRBJ1-1)
CASSQAGNTEAFF

SEQ ID NO: 205959 - protein, 12 aa, Homo sapiens
  CDR3 for alpha chain variable domain of TCR clone 102980 (TRAV3, TRAJ43)
CAVREPNNDMRF

SEQ ID NO: 205960 - protein, 15 aa, Homo sapiens
  CDR3 for beta chain variable domain of TCR clone 102980 (TRBV4-3, TRBJ2-7)
CASSQGDWGDYEQYF

SEQ ID NO: 205961 - protein, 14 aa, Homo sapiens
  CDR3 for alpha chain variable domain of TCR clone 102981 (TRAV29/DV5, TRAJ32)
CAAAYGGATNKLIF

SEQ ID NO: 205962 - protein, 12 aa, Homo sapiens
  CDR3 for beta chain variable domain of TCR clone 102981 (TRBV5-1, TRBJ1-2)
CASSQDTYGYTF

SEQ ID NO: 205963 - protein, 12 aa, Homo sapiens
  CDR3 for alpha chain variable domain of TCR clone 102982 (TRAV21, TRAJ33)
CAKMDSNYQLIW

SEQ ID NO: 205964 - protein, 13 aa, Homo sapiens
  CDR3 for beta chain variable domain of TCR clone 102982 (TRBV19, TRBJ2-2)
CASSSKNTGELFF

SEQ ID NO: 205965 - protein, 17 aa, Homo sapiens
  CDR3 for alpha chain variable domain of TCR clone 102983 (TRAV8-2, TRAJ17)
CVVSDRRFKAAGNKLTL

SEQ ID NO: 205966 - protein, 18 aa, Homo sapiens
  CDR3 for beta chain variable domain of TCR clone 102983 (TRBV7-9, TRBJ2-7)
CASSLTTSGSRTWYEQYF

SEQ ID NO: 205967 - protein, 14 aa, Homo sapiens
  CDR3 for alpha chain variable domain of TCR clone 102984 (TRAV8-3, TRAJ13)
CAVGAQEGYQKVTF

SEQ ID NO: 205968 - protein, 15 aa, Homo sapiens
  CDR3 for beta chain variable domain of TCR clone 102984 (TRBV19, TRBJ1-1)
CASTSGQIQNTEAFF

SEQ ID NO: 205969 - protein, 10 aa, Homo sapiens
  CDR3 for alpha chain variable domain of TCR clone 102985 (TRAV12-3, TRAJ49)
CAMNDDQFYF

SEQ ID NO: 205970 - protein, 13 aa, Homo sapiens
  CDR3 for beta chain variable domain of TCR clone 102985 (TRBV10-3, TRBJ2-7)
CASKLAVNYEQYF

SEQ ID NO: 205971 - protein, 12 aa, Homo sapiens
  CDR3 for alpha chain variable domain of TCR clone 102986 (TRAV1-1, TRAJ39)
CAVPVVGNMLTF

SEQ ID NO: 205972 - protein, 16 aa, Homo sapiens
  CDR3 for beta chain variable domain of TCR clone 102986 (TRBV2, TRBJ2-1)
CASSVGGPLSYNEQFF

SEQ ID NO: 205973 - protein, 13 aa, Homo sapiens
  CDR3 for alpha chain variable domain of TCR clone 102987 (TRAV12-1, TRAJ21)
CVLIGDNFNKFYF

SEQ ID NO: 205974 - protein, 14 aa, Homo sapiens
  CDR3 for beta chain variable domain of TCR clone 102987 (TRBV7-3, TRBJ2-2)
CASSLYPLTGELFF

SEQ ID NO: 205975 - protein, 12 aa, Homo sapiens
  CDR3 for alpha chain variable domain of TCR clone 102988 (TRAV26-1, TRAJ13)
CIVSRGYQKVTF

SEQ ID NO: 205976 - protein, 17 aa, Homo sapiens
  CDR3 for beta chain variable domain of TCR clone 102988 (TRBV20-1, TRBJ2-2)
CSASGSGQGGLTGELFF

SEQ ID NO: 205977 - protein, 12 aa, Homo sapiens
  CDR3 for alpha chain variable domain of TCR clone 102989 (TRAV13-1, TRAJ15)
CAASQAGTAMIF

SEQ ID NO: 205978 - protein, 14 aa, Homo sapiens
  CDR3 for beta chain variable domain of TCR clone 102989 (TRBV19, TRBJ2-2)
CASSALHRSGELFF

SEQ ID NO: 205979 - protein, 16 aa, Homo sapiens
  CDR3 for alpha chain variable domain of TCR clone 102990 (TRAV1-2, TRAJ6)
CAVRDQGTGGSYITTF

SEQ ID NO: 205980 - protein, 13 aa, Homo sapiens
  CDR3 for beta chain variable domain of TCR clone 102990 (TRBV28, TRBJ2-7)
CASTPGLAGEQYF

SEQ ID NO: 205981 - protein, 12 aa, Homo sapiens
  CDR3 for alpha chain variable domain of TCR clone 102991 (TRAV12-1, TRAJ30)
CVVNPRDDKIIF

SEQ ID NO: 205982 - protein, 13 aa, Homo sapiens
  CDR3 for beta chain variable domain of TCR clone 102991 (TRBV10-3, TRBJ2-7)
CASKLAVNYEQYF

SEQ ID NO: 205983 - protein, 15 aa, Homo sapiens
  CDR3 for alpha chain variable domain of TCR clone 102992 (TRAV8-1, TRAJ6)
CAVNANPGGSYIPTF

SEQ ID NO: 205984 - protein, 14 aa, Homo sapiens
  CDR3 for beta chain variable domain of TCR clone 102992 (TRBV2, TRBJ2-1)
CASRTGSSYNEQFF

SEQ ID NO: 205985 - protein, 13 aa, Homo sapiens
  CDR3 for alpha chain variable domain of TCR clone 102993 (TRAV27, TRAJ3)
ASLRGSSASKIIF

SEQ ID NO: 205986 - protein, 13 aa, Homo sapiens
  CDR3 for beta chain variable domain of TCR clone 102993 (TRBV20-1, TRBJ1-1)
CSAPLGGGTEAFF

SEQ ID NO: 205987 - protein, 12 aa, Homo sapiens
  CDR3 for alpha chain variable domain of TCR clone 102994 (TRAV2, TRAJ10)
CASTGGGNKLTF

SEQ ID NO: 205988 - protein, 19 aa, Homo sapiens
  CDR3 for beta chain variable domain of TCR clone 102994 (TRBV25-1, TRBJ2-2)
CAILVYRVDRGRKTGELFF

SEQ ID NO: 205989 - protein, 11 aa, Homo sapiens
  CDR3 for alpha chain variable domain of TCR clone 102995 (TRAV12-1, TRAJ34)
CVVNKGRELIF

SEQ ID NO: 205990 - protein, 12 aa, Homo sapiens
  CDR3 for beta chain variable domain of TCR clone 102995 (TRBV11-2, TRBJ2-2)
CASSLGGGGLFF

SEQ ID NO: 205991 - protein, 13 aa, Homo sapiens
  CDR3 for alpha chain variable domain of TCR clone 102996 (TRAV12-3, TRAJ7)
CAMTPYGNNRLAF

SEQ ID NO: 205992 - protein, 15 aa, Homo sapiens
  CDR3 for beta chain variable domain of TCR clone 102996 (TRBV20-1, TRBJ2-7)
CSARDRVSGMDEQYF

SEQ ID NO: 205993 - protein, 14 aa, Homo sapiens
  CDR3 for alpha chain variable domain of TCR clone 102997 (TRAV38-1, TRAJ45)
CAYYSGGGADGLTF

SEQ ID NO: 205994 - protein, 15 aa, Homo sapiens
  CDR3 for beta chain variable domain of TCR clone 102997 (TRBV2, TRBJ1-2)
CASSEIGGANYGYTF

SEQ ID NO: 205995 - protein, 16 aa, Homo sapiens
  CDR3 for alpha chain variable domain of TCR clone 102998 (TRAV22, TRAJ45)
CAVERGKRGGADGLTF

SEQ ID NO: 205996 - protein, 13 aa, Homo sapiens
  CDR3 for beta chain variable domain of TCR clone 102998 (TRBV27, TRBJ1-1)
CASSLSIGVEAFF

SEQ ID NO: 205997 - protein, 15 aa, Homo sapiens
  CDR3 for alpha chain variable domain of TCR clone 102999 (TRAV26-2, TRAJ13)
CILRDLSGGYQKVTF

SEQ ID NO: 205998 - protein, 14 aa, Homo sapiens
  CDR3 for beta chain variable domain of TCR clone 102999 (TRBV4-1, TRBJ2-3)
CASSQEGSTGTQYF

SEQ ID NO: 205999 - protein, 18 aa, Homo sapiens
  CDR3 for alpha chain variable domain of TCR clone 103000 (TRAV12-3, TRAJ52)
CAMNRTNAGGTSYGKLTF

SEQ ID NO: 206000 - protein, 17 aa, Homo sapiens
  CDR3 for beta chain variable domain of TCR clone 103000 (TRBV7-3, TRBJ2-3)
CASSLMKRMRGADTQYF

SEQ ID NO: 206001 - protein, 13 aa, Homo sapiens
  CDR3 for alpha chain variable domain of TCR clone 103001 (TRAV3, TRAJ21)
CAVREPDFNKFYF

SEQ ID NO: 206002 - protein, 12 aa, Homo sapiens
  CDR3 for beta chain variable domain of TCR clone 103001 (TRBV12-4, TRBJ2-3)
CASSTLPDTQYF

SEQ ID NO: 206003 - protein, 14 aa, Homo sapiens
  CDR3 for alpha chain variable domain of TCR clone 103002 (TRAV12-2, TRAJ29)
CAVRRNSGYTPLVF

SEQ ID NO: 206004 - protein, 13 aa, Homo sapiens
  CDR3 for beta chain variable domain of TCR clone 103002 (TRBV12-4, TRBJ2-1)
CASSHYTDNEQFF

SEQ ID NO: 206005 - protein, 13 aa, Homo sapiens
  CDR3 for alpha chain variable domain of TCR clone 103003 (TRAV12-3, TRAJ33)
CAMSVNSNYQLIW

SEQ ID NO: 206006 - protein, 13 aa, Homo sapiens
  CDR3 for beta chain variable domain of TCR clone 103003 (TRBV19, TRBJ1-2)
CASSQGQVYGYTF

SEQ ID NO: 206007 - protein, 13 aa, Homo sapiens
  CDR3 for alpha chain variable domain of TCR clone 103004 (TRAV35, TRAJ57)
CAGSQGGSEKLVF

SEQ ID NO: 206008 - protein, 14 aa, Homo sapiens
  CDR3 for beta chain variable domain of TCR clone 103004 (TRBV25-1, TRBJ1-1)
CASTHLGGNTETFF

SEQ ID NO: 206009 - protein, 14 aa, Homo sapiens
  CDR3 for alpha chain variable domain of TCR clone 103005 (TRAV17, TRAJ53)
CATDAGGSNYKLTF

SEQ ID NO: 206010 - protein, 16 aa, Homo sapiens
  CDR3 for beta chain variable domain of TCR clone 103005 (TRBV4-1, TRBJ1-1)
CASSQDAGMGNTEAVF

SEQ ID NO: 206011 - protein, 11 aa, Homo sapiens
  CDR3 for alpha chain variable domain of TCR clone 103006 (TRAV2, TRAJ33)
CAVESNYQLIW

SEQ ID NO: 206012 - protein, 15 aa, Homo sapiens
  CDR3 for beta chain variable domain of TCR clone 103006 (TRBV19, TRBJ1-1)
CASTSGQILNTEAFF

SEQ ID NO: 206013 - protein, 16 aa, Homo sapiens
  CDR3 for alpha chain variable domain of TCR clone 103007 (TRAV3, TRAJ4)
CAVRPSPSGGYNKLIL

SEQ ID NO: 206014 - protein, 12 aa, Homo sapiens
  CDR3 for beta chain variable domain of TCR clone 103007 (TRBV7-9, TRBJ2-7)
CASSQGVYEQYF

SEQ ID NO: 206015 - protein, 14 aa, Homo sapiens
  CDR3 for alpha chain variable domain of TCR clone 103008 (TRAV16, TRAJ42)
CALLAGGSQGNLIF

SEQ ID NO: 206016 - protein, 16 aa, Homo sapiens
  CDR3 for beta chain variable domain of TCR clone 103008 (TRBV12-5, TRBJ2-5)
CASGPRTSGNQETQYF

SEQ ID NO: 206017 - protein, 12 aa, Homo sapiens
  CDR3 for alpha chain variable domain of TCR clone 103009 (TRAV13-1, TRAJ21)
CAAFFNFNKFYF

SEQ ID NO: 206018 - protein, 12 aa, Homo sapiens
  CDR3 for beta chain variable domain of TCR clone 103009 (TRBV7-9, TRBJ2-7)
CASSIKREEQYF

SEQ ID NO: 206019 - protein, 15 aa, Homo sapiens
  CDR3 for alpha chain variable domain of TCR clone 103010 (TRAV12-3, TRAJ6)
CAMSATTGGSYIPTF

SEQ ID NO: 206020 - protein, 17 aa, Homo sapiens
  CDR3 for beta chain variable domain of TCR clone 103010 (TRBV5-1, TRBJ2-3)
CASSLGASTSGTDTQYF

SEQ ID NO: 206021 - protein, 12 aa, Homo sapiens
  CDR3 for alpha chain variable domain of TCR clone 103011 (TRAV8-4, TRAJ43)
CAVSVNNNDMRF

SEQ ID NO: 206022 - protein, 16 aa, Homo sapiens
  CDR3 for beta chain variable domain of TCR clone 103011 (TRBV20-1, TRBJ1-4)
CSAPGQGLLTNEKLFF

SEQ ID NO: 206023 - protein, 14 aa, Homo sapiens
  CDR3 for alpha chain variable domain of TCR clone 103012 (TRAV3, TRAJ21)
CSLGRGSTNFTLDL

SEQ ID NO: 206024 - protein, 14 aa, Homo sapiens
  CDR3 for beta chain variable domain of TCR clone 103012 (TRBV7-9, TRBJ2-4)
CASSLAMGGNIQYF

SEQ ID NO: 206025 - protein, 14 aa, Homo sapiens
  CDR3 for alpha chain variable domain of TCR clone 103013 (TRAV25, TRAJ22)
CAVRSSGSVRQLTF

SEQ ID NO: 206026 - protein, 16 aa, Homo sapiens
  CDR3 for beta chain variable domain of TCR clone 103013 (TRBV4-2, TRBJ1-1)
CASSPSPGRAAPEAFF

SEQ ID NO: 206027 - protein, 17 aa, Homo sapiens
  CDR3 for alpha chain variable domain of TCR clone 103014 (TRAV3, TRAJ6)
CAVRAGPRAGGSYITTF

SEQ ID NO: 206028 - protein, 14 aa, Homo sapiens
  CDR3 for beta chain variable domain of TCR clone 103014 (TRBV7-2, TRBJ2-7)
CASSPKTSFYEQYF

SEQ ID NO: 206029 - protein, 10 aa, Homo sapiens
  CDR3 for alpha chain variable domain of TCR clone 103015 (TRAV23/DV6, TRAJ57)
CAASSTLSQG

SEQ ID NO: 206030 - protein, 14 aa, Homo sapiens
  CDR3 for beta chain variable domain of TCR clone 103015 (TRBV7-9, TRBJ2-2)
CDSSLGHRTGELFF

SEQ ID NO: 206031 - protein, 13 aa, Homo sapiens
  CDR3 for alpha chain variable domain of TCR clone 103016 (TRAV21, TRAJ27)
CAARPGNAGKSTF

SEQ ID NO: 206032 - protein, 17 aa, Homo sapiens
  CDR3 for beta chain variable domain of TCR clone 103016 (TRBV19, TRBJ2-7)
CASSISFYDSYPYEQYF

SEQ ID NO: 206033 - protein, 14 aa, Homo sapiens
  CDR3 for alpha chain variable domain of TCR clone 103017 (TRAV24, TRAJ39)
CAFPSSQCRQHAHL

SEQ ID NO: 206034 - protein, 13 aa, Homo sapiens
  CDR3 for beta chain variable domain of TCR clone 103017 (TRBV6-5, TRBJ1-6)
CASSYERSTPLLF

SEQ ID NO: 206035 - protein, 14 aa, Homo sapiens
  CDR3 for alpha chain variable domain of TCR clone 103018 (TRAV12-1, TRAJ9)
CVVTGSTGGFKTIF

SEQ ID NO: 206036 - protein, 13 aa, Homo sapiens
  CDR3 for beta chain variable domain of TCR clone 103018 (TRBV20-1, TRBJ1-1)
CSARAGGNTEAFF

SEQ ID NO: 206037 - protein, 17 aa, Homo sapiens
  CDR3 for alpha chain variable domain of TCR clone 103019 (TRAV8-6, TRAJ58)
CAVSSWVGETSGSRLTF

SEQ ID NO: 206038 - protein, 17 aa, Homo sapiens
  CDR3 for beta chain variable domain of TCR clone 103019 (TRBV28, TRBJ2-5)
CASSTPEGDALQETQYF

SEQ ID NO: 206039 - protein, 14 aa, Homo sapiens
  CDR3 for alpha chain variable domain of TCR clone 103020 (TRAV3, TRAJ33)
CAVRDVGSNYQLIW

SEQ ID NO: 206040 - protein, 17 aa, Homo sapiens
  CDR3 for beta chain variable domain of TCR clone 103020 (TRBV19, TRBJ2-1)
CASSIWSAQPTHNEQFF

SEQ ID NO: 206041 - protein, 14 aa, Homo sapiens
  CDR3 for alpha chain variable domain of TCR clone 103021 (TRAV12-3, TRAJ12)
CAMSEVDSSYKLIF

SEQ ID NO: 206042 - protein, 12 aa, Homo sapiens
  CDR3 for beta chain variable domain of TCR clone 103021 (TRBV18, TRBJ1-4)
CASSPSREKLFL

SEQ ID NO: 206043 - protein, 14 aa, Homo sapiens
  CDR3 for alpha chain variable domain of TCR clone 103022 (TRAV13-2, TRAJ17)
CAENTKAAGNKLTF

SEQ ID NO: 206044 - protein, 11 aa, Homo sapiens
  CDR3 for beta chain variable domain of TCR clone 103022 (TRBV6-3, TRBJ2-3)
CATGQADTQYF

SEQ ID NO: 206045 - protein, 12 aa, Homo sapiens
  CDR3 for alpha chain variable domain of TCR clone 103023 (TRAV20, TRAJ56)
CAVTGANSKLTF

SEQ ID NO: 206046 - protein, 14 aa, Homo sapiens
  CDR3 for beta chain variable domain of TCR clone 103023 (TRBV20-1, TRBJ2-5)
CSALVPGYQETQFF

SEQ ID NO: 206047 - protein, 15 aa, Homo sapiens
  CDR3 for alpha chain variable domain of TCR clone 103024 (TRAV2, TRAJ15)
CAVEDRGQAGTALIF

SEQ ID NO: 206048 - protein, 13 aa, Homo sapiens
  CDR3 for beta chain variable domain of TCR clone 103024 (TRBV10-2, TRBJ2-7)
CASGDSGGYEQYF

SEQ ID NO: 206049 - protein, 16 aa, Homo sapiens
  CDR3 for alpha chain variable domain of TCR clone 103025 (TRAV12-2, TRAJ43)
CAGADMRFGAGNRLTV

SEQ ID NO: 206050 - protein, 16 aa, Homo sapiens
  CDR3 for beta chain variable domain of TCR clone 103025 (TRBV2, TRBJ2-4)
CASSEAPGGEQNIQYF

SEQ ID NO: 206051 - protein, 16 aa, Homo sapiens
  CDR3 for alpha chain variable domain of TCR clone 103026 (TRAV3, TRAJ37)
CAVRGKGSGNTGKLIL

SEQ ID NO: 206052 - protein, 15 aa, Homo sapiens
  CDR3 for beta chain variable domain of TCR clone 103026 (TRBV7-9, TRBJ2-2)
CASGPLDTFPGELFF

SEQ ID NO: 206053 - protein, 15 aa, Homo sapiens
  CDR3 for alpha chain variable domain of TCR clone 103027 (TRAV13-1, TRAJ10)
CAATILTGGGNKLTF

SEQ ID NO: 206054 - protein, 13 aa, Homo sapiens
  CDR3 for beta chain variable domain of TCR clone 103027 (TRBV19, TRBJ1-2)
CASSVPGQDGYTF

SEQ ID NO: 206055 - protein, 13 aa, Homo sapiens
  CDR3 for alpha chain variable domain of TCR clone 103028 (TRAV21, TRAJ15)
CAVANQAGTALIF

SEQ ID NO: 206056 - protein, 15 aa, Homo sapiens
  CDR3 for beta chain variable domain of TCR clone 103028 (TRBV7-3, TRBJ2-2)
CASSETGQGTGELFF

SEQ ID NO: 206057 - protein, 16 aa, Homo sapiens
  CDR3 for alpha chain variable domain of TCR clone 103029 (TRAV30, TRAJ24)
CGTEIVYADSWGKFQF

SEQ ID NO: 206058 - protein, 14 aa, Homo sapiens
  CDR3 for beta chain variable domain of TCR clone 103029 (TRBV12-5, TRBJ2-5)
CASGSRTRQETQYF

SEQ ID NO: 206059 - protein, 12 aa, Homo sapiens
  CDR3 for alpha chain variable domain of TCR clone 103030 (TRAV29/DV5, TRAJ49)
CAATDTGNQFYF

SEQ ID NO: 206060 - protein, 11 aa, Homo sapiens
  CDR3 for beta chain variable domain of TCR clone 103030 (TRBV10-3, TRBJ2-7)
CAISEGLEQYF

SEQ ID NO: 206061 - protein, 12 aa, Homo sapiens
  CDR3 for alpha chain variable domain of TCR clone 103031 (TRAV12-1, TRAJ40)
CVVYSGTYKYIF

SEQ ID NO: 206062 - protein, 15 aa, Homo sapiens
  CDR3 for beta chain variable domain of TCR clone 103031 (TRBV12-4, TRBJ2-5)
CASSPPTGLQETQYF

SEQ ID NO: 206063 - protein, 13 aa, Homo sapiens
  CDR3 for alpha chain variable domain of TCR clone 103032 (TRAV38-1, TRAJ42)
CARWGGSQGNLII

SEQ ID NO: 206064 - protein, 17 aa, Homo sapiens
  CDR3 for beta chain variable domain of TCR clone 103032 (TRBV20-1, TRBJ2-1)
CSARDPLAGVWDNEQFF

SEQ ID NO: 206065 - protein, 14 aa, Homo sapiens
  CDR3 for alpha chain variable domain of TCR clone 103033 (TRAV1-2, TRAJ16)
CAVNRFSDGQKRLF

SEQ ID NO: 206066 - protein, 14 aa, Homo sapiens
  CDR3 for beta chain variable domain of TCR clone 103033 (TRBV7-2, TRBJ2-7)
CASSPKTSFYEQYF

SEQ ID NO: 206067 - protein, 12 aa, Homo sapiens
  CDR3 for alpha chain variable domain of TCR clone 103034 (TRAV3, TRAJ39)
CAVIEWSNMLTF

SEQ ID NO: 206068 - protein, 14 aa, Homo sapiens
  CDR3 for beta chain variable domain of TCR clone 103034 (TRBV7-8, TRBJ2-3)
SASSFPDGQDTQYF

SEQ ID NO: 206069 - protein, 16 aa, Homo sapiens
  CDR3 for alpha chain variable domain of TCR clone 103035 (TRAV12-2, TRAJ45)
CAVKRNPGGGADGLTF

SEQ ID NO: 206070 - protein, 12 aa, Homo sapiens
  CDR3 for beta chain variable domain of TCR clone 103035 (TRBV6-1, TRBJ2-5)
CASSEGRETQYC

SEQ ID NO: 206071 - protein, 13 aa, Homo sapiens
  CDR3 for alpha chain variable domain of TCR clone 103036 (TRAV13-1, TRAJ5)
CAASDTGRRALTF

SEQ ID NO: 206072 - protein, 12 aa, Homo sapiens
  CDR3 for beta chain variable domain of TCR clone 103036 (TRBV5-7, TRBJ1-1)
CASSLGRGKAFF

SEQ ID NO: 206073 - protein, 13 aa, Homo sapiens
  CDR3 for alpha chain variable domain of TCR clone 103037 (TRAV2, TRAJ40)
CAVVTSGTYNYIF

SEQ ID NO: 206074 - protein, 14 aa, Homo sapiens
  CDR3 for beta chain variable domain of TCR clone 103037 (TRBV19, TRBJ2-1)
CASPTFVSSGEQFF

SEQ ID NO: 206075 - protein, 14 aa, Homo sapiens
  CDR3 for alpha chain variable domain of TCR clone 103038 (TRAV1-2, TRAJ8)
CAVREDTGFEKLVF

SEQ ID NO: 206076 - protein, 12 aa, Homo sapiens
  CDR3 for beta chain variable domain of TCR clone 103038 (TRBV11-2, TRBJ2-2)
CASSLGGGELFF

SEQ ID NO: 206077 - protein, 13 aa, Homo sapiens
  CDR3 for alpha chain variable domain of TCR clone 103039 (TRAV30, TRAJ16)
CGTFGGDGQKLLF

SEQ ID NO: 206078 - protein, 14 aa, Homo sapiens
  CDR3 for beta chain variable domain of TCR clone 103039 (TRBV4-1, TRBJ2-2)
CASSQAVNTGELFF

SEQ ID NO: 206079 - protein, 16 aa, Homo sapiens
  CDR3 for alpha chain variable domain of TCR clone 103040 (TRAV14/DV4, TRAJ53)
CAMREGGGGSNYKLTF

SEQ ID NO: 206080 - protein, 15 aa, Homo sapiens
  CDR3 for beta chain variable domain of TCR clone 103040 (TRBV20-1, TRBJ1-1)
CSASRGVTGNTEAFF

SEQ ID NO: 206081 - protein, 16 aa, Homo sapiens
  CDR3 for alpha chain variable domain of TCR clone 103041 (TRAV30, TRAJ24)
CGTEIVDADSWGKFQF

SEQ ID NO: 206082 - protein, 13 aa, Homo sapiens
  CDR3 for beta chain variable domain of TCR clone 103041 (TRBV18, TRBJ1-1)
CASSGGRNTEAFF

SEQ ID NO: 206083 - protein, 17 aa, Homo sapiens
  CDR3 for alpha chain variable domain of TCR clone 103042 (TRAV8-6, TRAJ8)
CAVKEGIENTGFQKLVF

SEQ ID NO: 206084 - protein, 12 aa, Homo sapiens
  CDR3 for beta chain variable domain of TCR clone 103042 (TRBV19, TRBJ1-4)
CASKDWAGGLFF

SEQ ID NO: 206085 - protein, 11 aa, Homo sapiens
  CDR3 for alpha chain variable domain of TCR clone 103043 (TRAV27, TRAJ45)
CAGAQGEVLTD

SEQ ID NO: 206086 - protein, 17 aa, Homo sapiens
  CDR3 for beta chain variable domain of TCR clone 103043 (TRBV11-2, TRBJ2-1)
CASSLYPPGVEYNEQFF

SEQ ID NO: 206087 - protein, 15 aa, Homo sapiens
  CDR3 for alpha chain variable domain of TCR clone 103044 (TRAV12-3, TRAJ6)
CAMSATTGGSYIPTF

SEQ ID NO: 206088 - protein, 14 aa, Homo sapiens
  CDR3 for beta chain variable domain of TCR clone 103044 (TRBV2, TRBJ1-5)
CASSGTVSNQPQHF

SEQ ID NO: 206089 - protein, 14 aa, Homo sapiens
  CDR3 for alpha chain variable domain of TCR clone 103045 (TRAV1-2, TRAJ29)
CAVRELTSATPLVF

SEQ ID NO: 206090 - protein, 14 aa, Homo sapiens
  CDR3 for beta chain variable domain of TCR clone 103045 (TRBV3-1, TRBJ2-5)
CASSKGPDQETQYF

SEQ ID NO: 206091 - protein, 18 aa, Homo sapiens
  CDR3 for alpha chain variable domain of TCR clone 103046 (TRAV21, TRAJ52)
CAVRPSPAGGTSNGKLTF

SEQ ID NO: 206092 - protein, 13 aa, Homo sapiens
  CDR3 for beta chain variable domain of TCR clone 103046 (TRBV7-3, TRBJ1-1)
CASSQDWGAEAFF

SEQ ID NO: 206093 - protein, 15 aa, Homo sapiens
  CDR3 for alpha chain variable domain of TCR clone 103047 (TRAV21, TRAJ53)
CATLNSGGSNYKLKF

SEQ ID NO: 206094 - protein, 17 aa, Homo sapiens
  CDR3 for beta chain variable domain of TCR clone 103047 (TRBV20-1, TRBJ2-2)
CSASGSGQGGLTGELFF

SEQ ID NO: 206095 - protein, 17 aa, Homo sapiens
  CDR3 for alpha chain variable domain of TCR clone 103048 (TRAV3, TRAJ6)
CAVRDGPRAGGSYIPTF

SEQ ID NO: 206096 - protein, 13 aa, Homo sapiens
  CDR3 for beta chain variable domain of TCR clone 103048 (TRBV19, TRBJ1-3)
CASRLSLGNTIYF

SEQ ID NO: 206097 - protein, 14 aa, Homo sapiens
  CDR3 for alpha chain variable domain of TCR clone 103049 (TRAV8-3, TRAJ9)
CAVVYNTGGFKTIF

SEQ ID NO: 206098 - protein, 15 aa, Homo sapiens
  CDR3 for beta chain variable domain of TCR clone 103049 (TRBV5-1, TRBJ2-1)
CASSPPRAPYNEQFF

SEQ ID NO: 206099 - protein, 12 aa, Homo sapiens
  CDR3 for alpha chain variable domain of TCR clone 103050 (TRAV17, TRAJ53)
CAFGGSNYKLTF

SEQ ID NO: 206100 - protein, 14 aa, Homo sapiens
  CDR3 for beta chain variable domain of TCR clone 103050 (TRBV12-5, TRBJ2-5)
CASGSRTHQETQYF

SEQ ID NO: 206101 - protein, 11 aa, Homo sapiens
  CDR3 for alpha chain variable domain of TCR clone 103051 (TRAV12-1, TRAJ43)
CVEYDNNDMRF

SEQ ID NO: 206102 - protein, 17 aa, Homo sapiens
  CDR3 for beta chain variable domain of TCR clone 103051 (TRBV20-1, TRBJ2-1)
CSARAPLAGVWDNEQFF

SEQ ID NO: 206103 - protein, 14 aa, Homo sapiens
  CDR3 for alpha chain variable domain of TCR clone 103052 (TRAV12-2, TRAJ53)
CAVKGGGSNYKMTF

SEQ ID NO: 206104 - protein, 14 aa, Homo sapiens
  CDR3 for beta chain variable domain of TCR clone 103052 (TRBV19, TRBJ2-1)
CASPTFVLSGEQFF

SEQ ID NO: 206105 - protein, 13 aa, Homo sapiens
  CDR3 for alpha chain variable domain of TCR clone 103053 (TRAV20, TRAJ37)
CAGCSSNTGKLIF

SEQ ID NO: 206106 - protein, 15 aa, Homo sapiens
  CDR3 for beta chain variable domain of TCR clone 103053 (TRBV20-1, TRBJ2-7)
CSARVPAAYFYEQYF

SEQ ID NO: 206107 - protein, 14 aa, Homo sapiens
  CDR3 for alpha chain variable domain of TCR clone 103054 (TRAV12-3, TRAJ56)
CAMSVTGANSKLTF

SEQ ID NO: 206108 - protein, 15 aa, Homo sapiens
  CDR3 for beta chain variable domain of TCR clone 103054 (TRBV5-1, TRBJ2-2)
CASSSQGGNTGELFF

SEQ ID NO: 206109 - protein, 12 aa, Homo sapiens
  CDR3 for alpha chain variable domain of TCR clone 103055 (TRAV8-3, TRAJ20)
CAVGANDYRLSF

SEQ ID NO: 206110 - protein, 16 aa, Homo sapiens
  CDR3 for beta chain variable domain of TCR clone 103055 (TRBV19, TRBJ2-2)
CVSRSPGTGATGELFF

SEQ ID NO: 206111 - protein, 11 aa, Homo sapiens
  CDR3 for alpha chain variable domain of TCR clone 103056 (TRAV2, TRAJ13)
CASGGYQKGTF

SEQ ID NO: 206112 - protein, 17 aa, Homo sapiens
  CDR3 for beta chain variable domain of TCR clone 103056 (TRBV28, TRBJ2-5)
CASSTPEGDALQETQYF

SEQ ID NO: 206113 - protein, 13 aa, Homo sapiens
  CDR3 for alpha chain variable domain of TCR clone 103057 (TRAV25, TRAJ58)
CAGRRTSGSRLTF

SEQ ID NO: 206114 - protein, 17 aa, Homo sapiens
  CDR3 for beta chain variable domain of TCR clone 103057 (TRBV25-1, TRBJ2-1)
CASSAYGQGRGVYEQFF

SEQ ID NO: 206115 - protein, 15 aa, Homo sapiens
  CDR3 for alpha chain variable domain of TCR clone 103058 (TRAV8-3, TRAJ45)
CASSYSGGGSDGLTF

SEQ ID NO: 206116 - protein, 15 aa, Homo sapiens
  CDR3 for beta chain variable domain of TCR clone 103058 (TRBV18, TRBJ1-1)
CASSPRQGENTEAFF

SEQ ID NO: 206117 - protein, 13 aa, Homo sapiens
  CDR3 for alpha chain variable domain of TCR clone 103059 (TRAV3, TRAJ21)
CAVGNFNKFYLDL

SEQ ID NO: 206118 - protein, 14 aa, Homo sapiens
  CDR3 for beta chain variable domain of TCR clone 103059 (TRBV29-1, TRBJ2-2)
CSGRGSGNTGELFF

SEQ ID NO: 206119 - protein, 14 aa, Homo sapiens
  CDR3 for alpha chain variable domain of TCR clone 103060 (TRAV1-2, TRAJ16)
CAVNRFSDGQKLLF

SEQ ID NO: 206120 - protein, 15 aa, Homo sapiens
  CDR3 for beta chain variable domain of TCR clone 103060 (TRBV9, TRBJ1-6)
CASSVAGTGDSRLHF

SEQ ID NO: 206121 - protein, 14 aa, Homo sapiens
  CDR3 for alpha chain variable domain of TCR clone 103061 (TRAV1-1, TRAJ27)
CAVIYNTNAGKSTF

SEQ ID NO: 206122 - protein, 13 aa, Homo sapiens
  CDR3 for beta chain variable domain of TCR clone 103061 (TRBV19, TRBJ1-2)
CASSQGQVYGYTF

SEQ ID NO: 206123 - protein, 16 aa, Homo sapiens
  CDR3 for alpha chain variable domain of TCR clone 103062 (TRAV4, TRAJ22)
CLVGDLYSGSARQLTF

SEQ ID NO: 206124 - protein, 14 aa, Homo sapiens
  CDR3 for beta chain variable domain of TCR clone 103062 (TRBV20-1, TRBJ2-7)
CSAKRGRSSYEQYF

SEQ ID NO: 206125 - protein, 10 aa, Homo sapiens
  CDR3 for alpha chain variable domain of TCR clone 103063 (TRAV8-4, TRAJ43)
CAVSADDMRF

SEQ ID NO: 206126 - protein, 15 aa, Homo sapiens
  CDR3 for beta chain variable domain of TCR clone 103063 (TRBV5-1, TRBJ2-3)
CASSFTSGSTDTQYF

SEQ ID NO: 206127 - protein, 15 aa, Homo sapiens
  CDR3 for alpha chain variable domain of TCR clone 103064 (TRAV17, TRAJ57)
CATGPSQGGSAKLVF

SEQ ID NO: 206128 - protein, 16 aa, Homo sapiens
  CDR3 for beta chain variable domain of TCR clone 103064 (TRBV12-4, TRBJ1-5)
CASSRPVGGSKQPQHF

SEQ ID NO: 206129 - protein, 16 aa, Homo sapiens
  CDR3 for alpha chain variable domain of TCR clone 103065 (TRAV20, TRAJ22)
CAVQASSSGSARQLAF

SEQ ID NO: 206130 - protein, 13 aa, Homo sapiens
  CDR3 for beta chain variable domain of TCR clone 103065 (TRBV7-2, TRBJ2-5)
CASSQTSVETQYF

SEQ ID NO: 206131 - protein, 20 aa, Homo sapiens
  CDR3 for alpha chain variable domain of TCR clone 103066 (TRAV12-1, TRAJ42)
SSVIQPPTSVKGGSQGNLIF

SEQ ID NO: 206132 - protein, 18 aa, Homo sapiens
  CDR3 for beta chain variable domain of TCR clone 103066 (TRBV11-2, TRBJ2-3)
CASSLGGASRGAPDTQYF

SEQ ID NO: 206133 - protein, 14 aa, Homo sapiens
  CDR3 for alpha chain variable domain of TCR clone 103067 (TRAV35, TRAJ46)
CAGPQKSSGDKLTF

SEQ ID NO: 206134 - protein, 12 aa, Homo sapiens
  CDR3 for beta chain variable domain of TCR clone 103067 (TRBV2, TRBJ2-7)
CASSDPDYEQYF

SEQ ID NO: 206135 - protein, 14 aa, Homo sapiens
  CDR3 for alpha chain variable domain of TCR clone 103068 (TRAV9-2, TRAJ39)
CALYIYNAGNMLTF

SEQ ID NO: 206136 - protein, 15 aa, Homo sapiens
  CDR3 for beta chain variable domain of TCR clone 103068 (TRBV5-7, TRBJ2-7)
CASSLGPGRGHEQYF

SEQ ID NO: 206137 - protein, 13 aa, Homo sapiens
  CDR3 for alpha chain variable domain of TCR clone 103069 (TRAV3, TRAJ27)
CAVRPLGAGKSTF

SEQ ID NO: 206138 - protein, 15 aa, Homo sapiens
  CDR3 for beta chain variable domain of TCR clone 103069 (TRBV10-1, TRBJ2-1)
CASSTGTELYNEQFF

SEQ ID NO: 206139 - protein, 12 aa, Homo sapiens
  CDR3 for alpha chain variable domain of TCR clone 103070 (TRAV8-3, TRAJ20)
CAVDFNDYKLSF

SEQ ID NO: 206140 - protein, 13 aa, Homo sapiens
  CDR3 for beta chain variable domain of TCR clone 103070 (TRBV12-4, TRBJ2-5)
CASRKRGKETQYF

SEQ ID NO: 206141 - protein, 14 aa, Homo sapiens
  CDR3 for alpha chain variable domain of TCR clone 103071 (TRAV26-1, TRAJ34)
CIVRESYNTDKLVF

SEQ ID NO: 206142 - protein, 13 aa, Homo sapiens
  CDR3 for beta chain variable domain of TCR clone 103071 (TRBV19, TRBJ2-1)
CATSRGVYNEQLF

SEQ ID NO: 206143 - protein, 14 aa, Homo sapiens
  CDR3 for alpha chain variable domain of TCR clone 103072 (TRAV12-3, TRAJ10)
SHLPLTGGGNELTF

SEQ ID NO: 206144 - protein, 15 aa, Homo sapiens
  CDR3 for beta chain variable domain of TCR clone 103072 (TRBV13, TRBJ2-1)
CASSLLSGLNNEQFF

SEQ ID NO: 206145 - protein, 16 aa, Homo sapiens
  CDR3 for alpha chain variable domain of TCR clone 103073 (TRAV17, TRAJ22)
CATGLISSGSARQLTF

SEQ ID NO: 206146 - protein, 13 aa, Homo sapiens
  CDR3 for beta chain variable domain of TCR clone 103073 (TRBV11-2, TRBJ2-1)
CASSLGLAGGRFF

SEQ ID NO: 206147 - protein, 16 aa, Homo sapiens
  CDR3 for alpha chain variable domain of TCR clone 103074 (TRAV3, TRAJ37)
CAVRGRGSGNTGKLLF

SEQ ID NO: 206148 - protein, 13 aa, Homo sapiens
  CDR3 for beta chain variable domain of TCR clone 103074 (TRBV14, TRBJ2-7)
CASSQDRRGEQYF

SEQ ID NO: 206149 - protein, 11 aa, Homo sapiens
  CDR3 for alpha chain variable domain of TCR clone 103075 (TRAV17, TRAJ21)
CATGNFNKFYF

SEQ ID NO: 206150 - protein, 16 aa, Homo sapiens
  CDR3 for beta chain variable domain of TCR clone 103075 (TRBV19, TRBJ2-1)
RASSKAGPSSYNEQFF

SEQ ID NO: 206151 - protein, 15 aa, Homo sapiens
  CDR3 for alpha chain variable domain of TCR clone 103076 (TRAV8-3, TRAJ11)
CAVGLLNSGYSTLTF

SEQ ID NO: 206152 - protein, 15 aa, Homo sapiens
  CDR3 for beta chain variable domain of TCR clone 103076 (TRBV10-2, TRBJ2-6)
CASSEQGTGANVLTF

SEQ ID NO: 206153 - protein, 11 aa, Homo sapiens
  CDR3 for alpha chain variable domain of TCR clone 103077 (TRAV2, TRAJ37)
CAVDNIGKLIF

SEQ ID NO: 206154 - protein, 16 aa, Homo sapiens
  CDR3 for beta chain variable domain of TCR clone 103077 (TRBV9, TRBJ2-1)
CASSVGGGGNYNEQFF

SEQ ID NO: 206155 - protein, 14 aa, Homo sapiens
  CDR3 for alpha chain variable domain of TCR clone 103078 (TRAV8-2, TRAJ37)
CVVSLTGNTGKLIF

SEQ ID NO: 206156 - protein, 14 aa, Homo sapiens
  CDR3 for beta chain variable domain of TCR clone 103078 (TRBV7-2, TRBJ1-1)
CASSFLTGTTEAFF

SEQ ID NO: 206157 - protein, 15 aa, Homo sapiens
  CDR3 for alpha chain variable domain of TCR clone 103079 (TRAV8-3, TRAJ27)
CAVGPSKTNAGKSTF

SEQ ID NO: 206158 - protein, 15 aa, Homo sapiens
  CDR3 for beta chain variable domain of TCR clone 103079 (TRBV7-2, TRBJ2-1)
CASSSGLAGGTEQFF

SEQ ID NO: 206159 - protein, 11 aa, Homo sapiens
  CDR3 for alpha chain variable domain of TCR clone 103080 (TRAV35, TRAJ30)
CAGERDDKIIF

SEQ ID NO: 206160 - protein, 14 aa, Homo sapiens
  CDR3 for beta chain variable domain of TCR clone 103080 (TRBV25-1, TRBJ1-1)
CASTHLGGNTEAFF

SEQ ID NO: 206161 - protein, 15 aa, Homo sapiens
  CDR3 for alpha chain variable domain of TCR clone 103081 (TRAV21, TRAJ53)
CATLNSGGSNYKLTF

SEQ ID NO: 206162 - protein, 15 aa, Homo sapiens
  CDR3 for beta chain variable domain of TCR clone 103081 (TRBV7-9, TRBJ2-2)
CASGPLDTFPGELFF

SEQ ID NO: 206163 - protein, 14 aa, Homo sapiens
  CDR3 for alpha chain variable domain of TCR clone 103082 (TRAV26-1, TRAJ39)
CIVRGSRAGNMLTF

SEQ ID NO: 206164 - protein, 14 aa, Homo sapiens
  CDR3 for beta chain variable domain of TCR clone 103082 (TRBV25-1, TRBJ1-1)
CASIHLGGNTEAFF

SEQ ID NO: 206165 - protein, 15 aa, Homo sapiens
  CDR3 for alpha chain variable domain of TCR clone 103083 (TRAV3, TRAJ4)
CAQNMFSGGYNKLIF

SEQ ID NO: 206166 - protein, 16 aa, Homo sapiens
  CDR3 for beta chain variable domain of TCR clone 103083 (TRBV3-1, TRBJ1-6)
CASSQEFQGSYSTLHF

SEQ ID NO: 206167 - protein, 12 aa, Homo sapiens
  CDR3 for alpha chain variable domain of TCR clone 103084 (TRAV36/DV7, TRAJ54)
CAVVRGAQKLVF

SEQ ID NO: 206168 - protein, 15 aa, Homo sapiens
  CDR3 for beta chain variable domain of TCR clone 103084 (TRBV9, TRBJ2-1)
CASSLAGSSYNEQFF

SEQ ID NO: 206169 - protein, 12 aa, Homo sapiens
  CDR3 for alpha chain variable domain of TCR clone 103085 (TRAV13-1, TRAJ49)
CAASPMGNQFYF

SEQ ID NO: 206170 - protein, 14 aa, Homo sapiens
  CDR3 for beta chain variable domain of TCR clone 103085 (TRBV7-6, TRBJ2-3)
CASSLGTVTDTQYF

SEQ ID NO: 206171 - protein, 14 aa, Homo sapiens
  CDR3 for alpha chain variable domain of TCR clone 103086 (TRAV12-2, TRAJ17)
CAVLFKAAGNKLTF

SEQ ID NO: 206172 - protein, 18 aa, Homo sapiens
  CDR3 for beta chain variable domain of TCR clone 103086 (TRBV7-7, TRBJ2-1)
CASSLALTSGRSYNEQFF

SEQ ID NO: 206173 - protein, 17 aa, Homo sapiens
  CDR3 for alpha chain variable domain of TCR clone 103087 (TRAV4, TRAJ13)
CFVGVQGSSGGYQKVTF

SEQ ID NO: 206174 - protein, 18 aa, Homo sapiens
  CDR3 for beta chain variable domain of TCR clone 103087 (TRBV15, TRBJ2-3)
CATSRDGARSWDTDTQYF

SEQ ID NO: 206175 - protein, 14 aa, Homo sapiens
  CDR3 for alpha chain variable domain of TCR clone 103088 (TRAV23/DV6, TRAJ57)
CAASNQGGAEKLVF

SEQ ID NO: 206176 - protein, 13 aa, Homo sapiens
  CDR3 for beta chain variable domain of TCR clone 103088 (TRBV11-2, TRBJ2-7)
CASSSYPSYEQYF

SEQ ID NO: 206177 - protein, 13 aa, Homo sapiens
  CDR3 for alpha chain variable domain of TCR clone 103089 (TRAV13-2, TRAJ48)
CAEMDFGNEELTF

SEQ ID NO: 206178 - protein, 16 aa, Homo sapiens
  CDR3 for beta chain variable domain of TCR clone 103089 (TRBV7-9, TRBJ2-1)
CASSDVAGGSYNEQFF

SEQ ID NO: 206179 - protein, 14 aa, Homo sapiens
  CDR3 for alpha chain variable domain of TCR clone 103090 (TRAV13-1, TRAJ50)
CAARSKTSYDKGIF

SEQ ID NO: 206180 - protein, 17 aa, Homo sapiens
  CDR3 for beta chain variable domain of TCR clone 103090 (TRBV13, TRBJ2-3)
CASSLSRVAGGRNTQYF

SEQ ID NO: 206181 - protein, 11 aa, Homo sapiens
  CDR3 for alpha chain variable domain of TCR clone 103091 (TRAV21, TRAJ41)
CAVRSGYALNF

SEQ ID NO: 206182 - protein, 13 aa, Homo sapiens
  CDR3 for beta chain variable domain of TCR clone 103091 (TRBV7-9, TRBJ1-2)
CASSLKQNYCYTV

SEQ ID NO: 206183 - protein, 11 aa, Homo sapiens
  CDR3 for alpha chain variable domain of TCR clone 103092 (TRAV12-1, TRAJ43)
RVEYDNNDMRF

SEQ ID NO: 206184 - protein, 17 aa, Homo sapiens
  CDR3 for beta chain variable domain of TCR clone 103092 (TRBV4-1, TRBJ1-4)
CASSQEGPRGVEEKLFF

SEQ ID NO: 206185 - protein, 14 aa, Homo sapiens
  CDR3 for alpha chain variable domain of TCR clone 103093 (TRAV8-3, TRAJ7)
CAAIELYGNNGLAF

SEQ ID NO: 206186 - protein, 16 aa, Homo sapiens
  CDR3 for beta chain variable domain of TCR clone 103093 (TRBV13, TRBJ2-2)
CASSPRTGEHTGELFF

SEQ ID NO: 206187 - protein, 13 aa, Homo sapiens
  CDR3 for alpha chain variable domain of TCR clone 103094 (TRAV1-1, TRAJ39)
CTVRDGAGNMLTF

SEQ ID NO: 206188 - protein, 16 aa, Homo sapiens
  CDR3 for beta chain variable domain of TCR clone 103094 (TRBV5-7, TRBJ1-5)
CASSLQQDREYQPQHF

SEQ ID NO: 206189 - protein, 13 aa, Homo sapiens
  CDR3 for alpha chain variable domain of TCR clone 103095 (TRAV17, TRAJ9)
CATAITGGFKTIF

SEQ ID NO: 206190 - protein, 13 aa, Homo sapiens
  CDR3 for beta chain variable domain of TCR clone 103095 (TRBV7-9, TRBJ2-5)
CASLPSGRETQYF

SEQ ID NO: 206191 - protein, 13 aa, Homo sapiens
  CDR3 for alpha chain variable domain of TCR clone 103096 (TRAV21, TRAJ20)
CAVGLRVDYKLSF

SEQ ID NO: 206192 - protein, 15 aa, Homo sapiens
  CDR3 for beta chain variable domain of TCR clone 103096 (TRBV11-3, TRBJ2-3)
CASLKDGREGDTQYF

SEQ ID NO: 206193 - protein, 15 aa, Homo sapiens
  CDR3 for alpha chain variable domain of TCR clone 103097 (TRAV3, TRAJ13)
CAVRVYSGGYQKATF

SEQ ID NO: 206194 - protein, 15 aa, Homo sapiens
  CDR3 for beta chain variable domain of TCR clone 103097 (TRBV7-2, TRBJ2-1)
CASSSGLAGGNEQFF

SEQ ID NO: 206195 - protein, 13 aa, Homo sapiens
  CDR3 for alpha chain variable domain of TCR clone 103098 (TRAV21, TRAJ20)
CAVGLRVDYKLSF

SEQ ID NO: 206196 - protein, 14 aa, Homo sapiens
  CDR3 for beta chain variable domain of TCR clone 103098 (TRBV6-5, TRBJ1-1)
CASSFGQGLTEAFF

SEQ ID NO: 206197 - protein, 14 aa, Homo sapiens
  CDR3 for alpha chain variable domain of TCR clone 103099 (TRAV9-2, TRAJ36)
CALPWRPGANNLFF

SEQ ID NO: 206198 - protein, 14 aa, Homo sapiens
  CDR3 for beta chain variable domain of TCR clone 103099 (TRBV2, TRBJ1-2)
CASSELQVNYGYTF

SEQ ID NO: 206199 - protein, 14 aa, Homo sapiens
  CDR3 for alpha chain variable domain of TCR clone 103100 (TRAV1-2, TRAJ8)
CAVREDTGFQKLVF

SEQ ID NO: 206200 - protein, 11 aa, Homo sapiens
  CDR3 for beta chain variable domain of TCR clone 103100 (TRBV11-3, TRBJ2-7)
CASSRTYEQYC

SEQ ID NO: 206201 - protein, 12 aa, Homo sapiens
  CDR3 for alpha chain variable domain of TCR clone 103101 (TRAV12-3, TRAJ17)
CAMTLTGNKLTF

SEQ ID NO: 206202 - protein, 17 aa, Homo sapiens
  CDR3 for beta chain variable domain of TCR clone 103101 (TRBV7-9, TRBJ2-6)
CASSFGAGYSGANVLTF

SEQ ID NO: 206203 - protein, 16 aa, Homo sapiens
  CDR3 for alpha chain variable domain of TCR clone 103102 (TRAV3, TRAJ37)
CAVRPHGPGNTGKLIF

SEQ ID NO: 206204 - protein, 17 aa, Homo sapiens
  CDR3 for beta chain variable domain of TCR clone 103102 (TRBV20-1, TRBJ2-1)
CSASSSGLAGSYNEQFF

SEQ ID NO: 206205 - protein, 16 aa, Homo sapiens
  CDR3 for alpha chain variable domain of TCR clone 103103 (TRAV26-1, TRAJ38)
CIVRVELGGTNRKLIW

SEQ ID NO: 206206 - protein, 14 aa, Homo sapiens
  CDR3 for beta chain variable domain of TCR clone 103103 (TRBV5-1, TRBJ2-3)
CASSPGLAADTQYF

SEQ ID NO: 206207 - protein, 14 aa, Homo sapiens
  CDR3 for alpha chain variable domain of TCR clone 103104 (TRAV12-1, TRAJ12)
CVVTRMDSSYKLIF

SEQ ID NO: 206208 - protein, 15 aa, Homo sapiens
  CDR3 for beta chain variable domain of TCR clone 103104 (TRBV6-1, TRBJ2-3)
CASSERGGITDTQYF

SEQ ID NO: 206209 - protein, 13 aa, Homo sapiens
  CDR3 for alpha chain variable domain of TCR clone 103105 (TRAV21, TRAJ27)
CAARPGNAGKSTF

SEQ ID NO: 206210 - protein, 19 aa, Homo sapiens
  CDR3 for beta chain variable domain of TCR clone 103105 (TRBV6-3, TRBJ2-1)
CASSYSWTSGRATYNEQFF

SEQ ID NO: 206211 - protein, 16 aa, Homo sapiens
  CDR3 for alpha chain variable domain of TCR clone 103106 (TRAV3, TRAJ10)
CAVRDIRAGGGNKLTF

SEQ ID NO: 206212 - protein, 15 aa, Homo sapiens
  CDR3 for beta chain variable domain of TCR clone 103106 (TRBV9, TRBJ1-6)
CASSVAGTGDSPLHF

SEQ ID NO: 206213 - protein, 14 aa, Homo sapiens
  CDR3 for alpha chain variable domain of TCR clone 103107 (TRAV16, TRAJ39)
CALSKNNAGNMLTF

SEQ ID NO: 206214 - protein, 16 aa, Homo sapiens
  CDR3 for beta chain variable domain of TCR clone 103107 (TRBV6-6, TRBJ2-1)
CASSYSCSGSYNEQFF

SEQ ID NO: 206215 - protein, 11 aa, Homo sapiens
  CDR3 for alpha chain variable domain of TCR clone 103108 (TRAV35, TRAJ57)
GPQGGSEKLVF

SEQ ID NO: 206216 - protein, 16 aa, Homo sapiens
  CDR3 for beta chain variable domain of TCR clone 103108 (TRBV7-3, TRBJ2-2)
CASSLKRGTLSGELFF

SEQ ID NO: 206217 - protein, 16 aa, Homo sapiens
  CDR3 for alpha chain variable domain of TCR clone 103109 (TRAV3, TRAJ37)
CAVRPHGPGNTGKLIF

SEQ ID NO: 206218 - protein, 13 aa, Homo sapiens
  CDR3 for beta chain variable domain of TCR clone 103109 (TRBV11-2, TRBJ2-2)
CASSWGGTGELFF

SEQ ID NO: 206219 - protein, 15 aa, Homo sapiens
  CDR3 for alpha chain variable domain of TCR clone 103110 (TRAV26-1, TRAJ44)
CIVRANTGTASKLTF

SEQ ID NO: 206220 - protein, 15 aa, Homo sapiens
  CDR3 for beta chain variable domain of TCR clone 103110 (TRBV19, TRBJ1-2)
CASSVGQVLNYGYTF

SEQ ID NO: 206221 - protein, 12 aa, Homo sapiens
  CDR3 for alpha chain variable domain of TCR clone 103111 (TRAV29/DV5, TRAJ26)
CAAIPSGQNFVF

SEQ ID NO: 206222 - protein, 15 aa, Homo sapiens
  CDR3 for beta chain variable domain of TCR clone 103111 (TRBV19, TRBJ1-5)
CASSDSGPRNQHQHF

SEQ ID NO: 206223 - protein, 15 aa, Homo sapiens
  CDR3 for alpha chain variable domain of TCR clone 103112 (TRAV26-1, TRAJ27)
CIVRVLTPIQANQPL

SEQ ID NO: 206224 - protein, 13 aa, Homo sapiens
  CDR3 for beta chain variable domain of TCR clone 103112 (TRBV20-1, TRBJ2-7)
CSATHTSGYEQYF

SEQ ID NO: 206225 - protein, 16 aa, Homo sapiens
  CDR3 for alpha chain variable domain of TCR clone 103113 (TRAV21, TRAJ37)
CAVRTAGSSNPGKLIF

SEQ ID NO: 206226 - protein, 13 aa, Homo sapiens
  CDR3 for beta chain variable domain of TCR clone 103113 (TRBV7-9, TRBJ2-5)
CASLPSGRETQYC

SEQ ID NO: 206227 - protein, 12 aa, Homo sapiens
  CDR3 for alpha chain variable domain of TCR clone 103114 (TRAV13-1, TRAJ20)
SVQQVNDYKLSF

SEQ ID NO: 206228 - protein, 14 aa, Homo sapiens
  CDR3 for beta chain variable domain of TCR clone 103114 (TRBV7-6, TRBJ2-3)
CASGLTGGTDTQYF

SEQ ID NO: 206229 - protein, 14 aa, Homo sapiens
  CDR3 for alpha chain variable domain of TCR clone 103115 (TRAV1-1, TRAJ28)
CAAPSGAGSYQLTF

SEQ ID NO: 206230 - protein, 16 aa, Homo sapiens
  CDR3 for beta chain variable domain of TCR clone 103115 (TRBV18, TRBJ1-5)
CASSPSTGNSNQPQHF

SEQ ID NO: 206231 - protein, 15 aa, Homo sapiens
  CDR3 for alpha chain variable domain of TCR clone 103116 (TRAV16, TRAJ48)
CALFISNFGNEKLTF

SEQ ID NO: 206232 - protein, 14 aa, Homo sapiens
  CDR3 for beta chain variable domain of TCR clone 103116 (TRBV19, TRBJ2-1)
CASPTFVLSGEQFF

SEQ ID NO: 206233 - protein, 12 aa, Homo sapiens
  CDR3 for alpha chain variable domain of TCR clone 103117 (TRAV1-1, TRAJ9)
CAVDTGGFKTIF

SEQ ID NO: 206234 - protein, 13 aa, Homo sapiens
  CDR3 for beta chain variable domain of TCR clone 103117 (TRBV7-3, TRBJ1-1)
CASSQDWGAEAFF

SEQ ID NO: 206235 - protein, 12 aa, Homo sapiens
  CDR3 for alpha chain variable domain of TCR clone 103118 (TRAV12-3, TRAJ3)
CALYSSASKIIF

SEQ ID NO: 206236 - protein, 14 aa, Homo sapiens
  CDR3 for beta chain variable domain of TCR clone 103118 (TRBV4-1, TRBJ2-2)
CASSQAVNTGELFF

SEQ ID NO: 206237 - protein, 12 aa, Homo sapiens
  CDR3 for alpha chain variable domain of TCR clone 103119 (TRAV8-4, TRAJ43)
CAVSVNNNDMRF

SEQ ID NO: 206238 - protein, 13 aa, Homo sapiens
  CDR3 for beta chain variable domain of TCR clone 103119 (TRBV7-9, TRBJ1-2)
CASSLKQNYCYTF

SEQ ID NO: 206239 - protein, 15 aa, Homo sapiens
  CDR3 for alpha chain variable domain of TCR clone 103120 (TRAV25, TRAJ52)
CAGRPGGTSYGKLTF

SEQ ID NO: 206240 - protein, 17 aa, Homo sapiens
  CDR3 for beta chain variable domain of TCR clone 103120 (TRBV7-8, TRBJ2-6)
CASSAGTGRAGANVLTF

SEQ ID NO: 206241 - protein, 13 aa, Homo sapiens
  CDR3 for alpha chain variable domain of TCR clone 103121 (TRAV1-1, TRAJ9)
CAAKNTGGFITIF

SEQ ID NO: 206242 - protein, 14 aa, Homo sapiens
  CDR3 for beta chain variable domain of TCR clone 103121 (TRBV20-1, TRBJ2-1)
CSAQIGGSANEQFF

SEQ ID NO: 206243 - protein, 14 aa, Homo sapiens
  CDR3 for alpha chain variable domain of TCR clone 103122 (TRAV4, TRAJ17)
CLVGDMAAGNKLTF

SEQ ID NO: 206244 - protein, 14 aa, Homo sapiens
  CDR3 for beta chain variable domain of TCR clone 103122 (TRBV4-1, TRBJ2-7)
CASSPVAGGDELYF

SEQ ID NO: 206245 - protein, 13 aa, Homo sapiens
  CDR3 for alpha chain variable domain of TCR clone 103123 (TRAV12-2, TRAJ43)
CAMIRPNNNDMRF

SEQ ID NO: 206246 - protein, 12 aa, Homo sapiens
  CDR3 for beta chain variable domain of TCR clone 103123 (TRBV11-2, TRBJ2-5)
CASSLGQETQYF

SEQ ID NO: 206247 - protein, 14 aa, Homo sapiens
  CDR3 for alpha chain variable domain of TCR clone 103124 (TRAV12-2, TRAJ36)
CAVNPPTGANNLFF

SEQ ID NO: 206248 - protein, 13 aa, Homo sapiens
  CDR3 for beta chain variable domain of TCR clone 103124 (TRBV20-1, TRBJ1-6)
CSAPTGLGSALHF

SEQ ID NO: 206249 - protein, 14 aa, Homo sapiens
  CDR3 for alpha chain variable domain of TCR clone 103125 (TRAV1-2, TRAJ8)
CAVREGTGFQKLVF

SEQ ID NO: 206250 - protein, 16 aa, Homo sapiens
  CDR3 for beta chain variable domain of TCR clone 103125 (TRBV19, TRBJ2-3)
CASGTGPNDGTDTQYF

SEQ ID NO: 206251 - protein, 12 aa, Homo sapiens
  CDR3 for alpha chain variable domain of TCR clone 103126 (TRAV12-1, TRAJ40)
CVVSSGTYKYIF

SEQ ID NO: 206252 - protein, 12 aa, Homo sapiens
  CDR3 for beta chain variable domain of TCR clone 103126 (TRBV12-5, TRBJ2-5)
CASGQGVETQYF

SEQ ID NO: 206253 - protein, 15 aa, Homo sapiens
  CDR3 for alpha chain variable domain of TCR clone 103127 (TRAV8-1, TRAJ6)
CAVNANPGGSYIPTF

SEQ ID NO: 206254 - protein, 14 aa, Homo sapiens
  CDR3 for beta chain variable domain of TCR clone 103127 (TRBV7-2, TRBJ1-2)
CASSQTGSTYGYTF

SEQ ID NO: 206255 - protein, 11 aa, Homo sapiens
  CDR3 for alpha chain variable domain of TCR clone 103128 (TRAV1-1, TRAJ23)
CAVRQGGKLIF

SEQ ID NO: 206256 - protein, 14 aa, Homo sapiens
  CDR3 for beta chain variable domain of TCR clone 103128 (TRBV6-3, TRBJ2-7)
CASSYSGDHYEQYF

SEQ ID NO: 206257 - protein, 14 aa, Homo sapiens
  CDR3 for alpha chain variable domain of TCR clone 103129 (TRAV12-2, TRAJ11)
CAVEGGSGYSTLTF

SEQ ID NO: 206258 - protein, 13 aa, Homo sapiens
  CDR3 for beta chain variable domain of TCR clone 103129 (TRBV12-4, TRBJ1-2)
CASSSGPNYGYTF

SEQ ID NO: 206259 - protein, 14 aa, Homo sapiens
  CDR3 for alpha chain variable domain of TCR clone 103130 (TRAV8-2, TRAJ4)
CVVSPSGGYNKLIF

SEQ ID NO: 206260 - protein, 15 aa, Homo sapiens
  CDR3 for beta chain variable domain of TCR clone 103130 (TRBV4-1, TRBJ1-4)
CASSDTVGTNEKLFF

SEQ ID NO: 206261 - protein, 10 aa, Homo sapiens
  CDR3 for alpha chain variable domain of TCR clone 103131 (TRAV1-2, TRAJ20)
CALNDYKRSF

SEQ ID NO: 206262 - protein, 14 aa, Homo sapiens
  CDR3 for beta chain variable domain of TCR clone 103131 (TRBV19, TRBJ2-1)
CASPTFVLSGEQFF

SEQ ID NO: 206263 - protein, 14 aa, Homo sapiens
  CDR3 for alpha chain variable domain of TCR clone 103132 (TRAV12-2, TRAJ13)
CAVKKAGGYQKVTF

SEQ ID NO: 206264 - protein, 12 aa, Homo sapiens
  CDR3 for beta chain variable domain of TCR clone 103132 (TRBV29-1, TRBJ1-1)
CSESDGNTEAFF

SEQ ID NO: 206265 - protein, 12 aa, Homo sapiens
  CDR3 for alpha chain variable domain of TCR clone 103133 (TRAV16, TRAJ10)
CSRTGGGNKLTF

SEQ ID NO: 206266 - protein, 15 aa, Homo sapiens
  CDR3 for beta chain variable domain of TCR clone 103133 (TRBV6-3, TRBJ2-7)
CASSSPGTVFYEQYC

SEQ ID NO: 206267 - protein, 15 aa, Homo sapiens
  CDR3 for alpha chain variable domain of TCR clone 103134 (TRAV17, TRAJ57)
CATGPSQGGSEKLVF

SEQ ID NO: 206268 - protein, 14 aa, Homo sapiens
  CDR3 for beta chain variable domain of TCR clone 103134 (TRBV12-5, TRBJ2-5)
CASGARTHQETQYF

SEQ ID NO: 206269 - protein, 13 aa, Homo sapiens
  CDR3 for alpha chain variable domain of TCR clone 103135 (TRAV12-1, TRAJ10)
CVVSTGGGNKLTF

SEQ ID NO: 206270 - protein, 16 aa, Homo sapiens
  CDR3 for beta chain variable domain of TCR clone 103135 (TRBV12-4, TRBJ1-5)
CASSRPVGGSNQTQHF

SEQ ID NO: 206271 - protein, 16 aa, Homo sapiens
  CDR3 for alpha chain variable domain of TCR clone 103136 (TRAV12-1, TRAJ4)
CLVNPGISGGYNKLTF

SEQ ID NO: 206272 - protein, 14 aa, Homo sapiens
  CDR3 for beta chain variable domain of TCR clone 103136 (TRBV5-7, TRBJ2-3)
CASRTSGGTDTQYF

SEQ ID NO: 206273 - protein, 16 aa, Homo sapiens
  CDR3 for alpha chain variable domain of TCR clone 103137 (TRAV20, TRAJ22)
CAVQASSSGSARQLTF

SEQ ID NO: 206274 - protein, 13 aa, Homo sapiens
  CDR3 for beta chain variable domain of TCR clone 103137 (TRBV7-2, TRBJ2-5)
CASSQTSGETQYF

SEQ ID NO: 206275 - protein, 12 aa, Homo sapiens
  CDR3 for alpha chain variable domain of TCR clone 103138 (TRAV2, TRAJ26)
CAGSPGRLWSEF

SEQ ID NO: 206276 - protein, 17 aa, Homo sapiens
  CDR3 for beta chain variable domain of TCR clone 103138 (TRBV11-2, TRBJ2-1)
CASSLHPPGVEYNEQFF

SEQ ID NO: 206277 - protein, 14 aa, Homo sapiens
  CDR3 for alpha chain variable domain of TCR clone 103139 (TRAV26-1, TRAJ38)
CIVVGAGNNRKLSW

SEQ ID NO: 206278 - protein, 12 aa, Homo sapiens
  CDR3 for beta chain variable domain of TCR clone 103139 (TRBV5-1, TRBJ2-5)
CASSWDQETQYF

SEQ ID NO: 206279 - protein, 16 aa, Homo sapiens
  CDR3 for alpha chain variable domain of TCR clone 103140 (TRAV16, TRAJ4)
CITVLPFSGGYNKLIF

SEQ ID NO: 206280 - protein, 14 aa, Homo sapiens
  CDR3 for beta chain variable domain of TCR clone 103140 (TRBV4-1, TRBJ2-2)
CASSQAVNTGELFF

SEQ ID NO: 206281 - protein, 16 aa, Homo sapiens
  CDR3 for alpha chain variable domain of TCR clone 103141 (TRAV20, TRAJ22)
CAVQASLSGSARQLTF

SEQ ID NO: 206282 - protein, 13 aa, Homo sapiens
  CDR3 for beta chain variable domain of TCR clone 103141 (TRBV7-2, TRBJ2-5)
CASSQTSVETQYF

SEQ ID NO: 206283 - protein, 15 aa, Homo sapiens
  CDR3 for alpha chain variable domain of TCR clone 103142 (TRAV30, TRAJ32)
CGTEILGGATNKLIF

SEQ ID NO: 206284 - protein, 17 aa, Homo sapiens
  CDR3 for beta chain variable domain of TCR clone 103142 (TRBV5-4, TRBJ2-1)
CASSYAGGRGPYNEQFF

SEQ ID NO: 206285 - protein, 12 aa, Homo sapiens
  CDR3 for alpha chain variable domain of TCR clone 103143 (TRAV13-1, TRAJ21)
CAAKEGFNKFYF

SEQ ID NO: 206286 - protein, 14 aa, Homo sapiens
  CDR3 for beta chain variable domain of TCR clone 103143 (TRBV4-2, TRBJ2-1)
CASGLDRAYNEQFF

SEQ ID NO: 206287 - protein, 12 aa, Homo sapiens
  CDR3 for alpha chain variable domain of TCR clone 103144 (TRAV13-1, TRAJ21)
CAAKEGFNNFYF

SEQ ID NO: 206288 - protein, 14 aa, Homo sapiens
  CDR3 for beta chain variable domain of TCR clone 103144 (TRBV5-1, TRBJ2-7)
CASSRGESLYEQYF

SEQ ID NO: 206289 - protein, 15 aa, Homo sapiens
  CDR3 for alpha chain variable domain of TCR clone 103145 (TRAV3, TRAJ26)
CAVRDGDNYGQNFVF

SEQ ID NO: 206290 - protein, 14 aa, Homo sapiens
  CDR3 for beta chain variable domain of TCR clone 103145 (TRBV7-8, TRBJ2-3)
CASSFPDGQDTQYF

SEQ ID NO: 206291 - protein, 17 aa, Homo sapiens
  CDR3 for alpha chain variable domain of TCR clone 103146 (TRAV20, TRAJ42)
CVVQAWGYGGSQGNLIF

SEQ ID NO: 206292 - protein, 16 aa, Homo sapiens
  CDR3 for beta chain variable domain of TCR clone 103146 (TRBV29-1, TRBJ2-5)
CSVEGLAGDYQETQYF

SEQ ID NO: 206293 - protein, 11 aa, Homo sapiens
  CDR3 for alpha chain variable domain of TCR clone 103147 (TRAV2, TRAJ13)
CASGGYQKVTF

SEQ ID NO: 206294 - protein, 15 aa, Homo sapiens
  CDR3 for beta chain variable domain of TCR clone 103147 (TRBV28, TRBJ2-3)
CAPTFRDWSTDTQYF

SEQ ID NO: 206295 - protein, 18 aa, Homo sapiens
  CDR3 for alpha chain variable domain of TCR clone 103148 (TRAV21, TRAJ52)
CAVRPSPAGGTSYGKLTF

SEQ ID NO: 206296 - protein, 12 aa, Homo sapiens
  CDR3 for beta chain variable domain of TCR clone 103148 (TRBV12-4, TRBJ2-1)
CASTYVLNEQFF

SEQ ID NO: 206297 - protein, 13 aa, Homo sapiens
  CDR3 for alpha chain variable domain of TCR clone 103149 (TRAV13-1, TRAJ37)
CAAVSGNPGKLIF

SEQ ID NO: 206298 - protein, 17 aa, Homo sapiens
  CDR3 for beta chain variable domain of TCR clone 103149 (TRBV10-2, TRBJ1-6)
CASSENRGSSYNSPLHF

SEQ ID NO: 206299 - protein, 15 aa, Homo sapiens
  CDR3 for alpha chain variable domain of TCR clone 103150 (TRAV26-2, TRAJ39)
CSLRGNNNAGNILTF

SEQ ID NO: 206300 - protein, 15 aa, Homo sapiens
  CDR3 for beta chain variable domain of TCR clone 103150 (TRBV5-4, TRBJ1-1)
CASSSLGWANTEAFF

SEQ ID NO: 206301 - protein, 14 aa, Homo sapiens
  CDR3 for alpha chain variable domain of TCR clone 103151 (TRAV1-2, TRAJ16)
CAVNRFSDGQKLLF

SEQ ID NO: 206302 - protein, 14 aa, Homo sapiens
  CDR3 for beta chain variable domain of TCR clone 103151 (TRBV25-1, TRBJ1-1)
CASTHLGGNTEAFS

SEQ ID NO: 206303 - protein, 14 aa, Homo sapiens
  CDR3 for alpha chain variable domain of TCR clone 103152 (TRAV1-2, TRAJ16)
CAVNRFSDGQKLLL

SEQ ID NO: 206304 - protein, 14 aa, Homo sapiens
  CDR3 for beta chain variable domain of TCR clone 103152 (TRBV4-1, TRBJ2-2)
CASSQAVNTGELFF

SEQ ID NO: 206305 - protein, 14 aa, Homo sapiens
  CDR3 for alpha chain variable domain of TCR clone 103153 (TRAV26-1, TRAJ48)
CIVRANFGNEKLTF

SEQ ID NO: 206306 - protein, 12 aa, Homo sapiens
  CDR3 for beta chain variable domain of TCR clone 103153 (TRBV20-1, TRBJ2-7)
CSASSGANEQYF

SEQ ID NO: 206307 - protein, 15 aa, Homo sapiens
  CDR3 for alpha chain variable domain of TCR clone 103154 (TRAV38-1, TRAJ37)
CAFIFGSGNTGKLIF

SEQ ID NO: 206308 - protein, 16 aa, Homo sapiens
  CDR3 for beta chain variable domain of TCR clone 103154 (TRBV7-8, TRBJ2-4)
CASSAERTLAKNIQYF

SEQ ID NO: 206309 - protein, 14 aa, Homo sapiens
  CDR3 for alpha chain variable domain of TCR clone 103155 (TRAV1-2, TRAJ16)
CAVNRFSDGQKLLF

SEQ ID NO: 206310 - protein, 16 aa, Homo sapiens
  CDR3 for beta chain variable domain of TCR clone 103155 (TRBV10-3, TRBJ2-1)
CAIRGGGRGDYNEQFF

SEQ ID NO: 206311 - protein, 14 aa, Homo sapiens
  CDR3 for alpha chain variable domain of TCR clone 103156 (TRAV12-2, TRAJ40)
CAVKIPSGTYKYIF

SEQ ID NO: 206312 - protein, 14 aa, Homo sapiens
  CDR3 for beta chain variable domain of TCR clone 103156 (TRBV19, TRBJ2-1)
CASPTLVLSGEQFF

SEQ ID NO: 206313 - protein, 13 aa, Homo sapiens
  CDR3 for alpha chain variable domain of TCR clone 103157 (TRAV27, TRAJ17)
CAGAATAGTKLTF

SEQ ID NO: 206314 - protein, 15 aa, Homo sapiens
  CDR3 for beta chain variable domain of TCR clone 103157 (TRBV5-1, TRBJ2-3)
CASRNQAGSTDTQYF

SEQ ID NO: 206315 - protein, 12 aa, Homo sapiens
  CDR3 for alpha chain variable domain of TCR clone 103158 (TRAV3, TRAJ26)
CAVRDYGQNFVF

SEQ ID NO: 206316 - protein, 16 aa, Homo sapiens
  CDR3 for beta chain variable domain of TCR clone 103158 (TRBV11-2, TRBJ1-2)
CASSPSGRKANYGYTF

SEQ ID NO: 206317 - protein, 11 aa, Homo sapiens
  CDR3 for alpha chain variable domain of TCR clone 103159 (TRAV12-2, TRAJ49)
CAVNTGNQFYF

SEQ ID NO: 206318 - protein, 12 aa, Homo sapiens
  CDR3 for beta chain variable domain of TCR clone 103159 (TRBV2, TRBJ2-3)
CASRGRFDTQYF

SEQ ID NO: 206319 - protein, 13 aa, Homo sapiens
  CDR3 for alpha chain variable domain of TCR clone 103160 (TRAV12-2, TRAJ52)
CAAHGTSYGKLTF

SEQ ID NO: 206320 - protein, 15 aa, Homo sapiens
  CDR3 for beta chain variable domain of TCR clone 103160 (TRBV10-3, TRBJ2-7)
CAISTFSGVNGEQYF

SEQ ID NO: 206321 - protein, 11 aa, Homo sapiens
  CDR3 for alpha chain variable domain of TCR clone 103161 (TRAV1-1, TRAJ23)
CAVRQGGKLIF

SEQ ID NO: 206322 - protein, 15 aa, Homo sapiens
  CDR3 for beta chain variable domain of TCR clone 103161 (TRBV7-2, TRBJ1-1)
CASRSATGWNTEAFF

SEQ ID NO: 206323 - protein, 13 aa, Homo sapiens
  CDR3 for alpha chain variable domain of TCR clone 103162 (TRAV36/DV7, TRAJ49)
CAVEANTGNQFYF

SEQ ID NO: 206324 - protein, 13 aa, Homo sapiens
  CDR3 for beta chain variable domain of TCR clone 103162 (TRBV10-3, TRBJ2-7)
CASKPAVNYEQYF

SEQ ID NO: 206325 - protein, 16 aa, Homo sapiens
  CDR3 for alpha chain variable domain of TCR clone 103163 (TRAV16, TRAJ42)
CALSGLLGGSQGNLTF

SEQ ID NO: 206326 - protein, 15 aa, Homo sapiens
  CDR3 for beta chain variable domain of TCR clone 103163 (TRBV5-1, TRBJ2-1)
CASSPGGLAGNEQFF

SEQ ID NO: 206327 - protein, 14 aa, Homo sapiens
  CDR3 for alpha chain variable domain of TCR clone 103164 (TRAV12-3, TRAJ3)
CNERGNSSASKIIF

SEQ ID NO: 206328 - protein, 17 aa, Homo sapiens
  CDR3 for beta chain variable domain of TCR clone 103164 (TRBV13, TRBJ2-3)
CASSLSRVAGGRNTQYF

SEQ ID NO: 206329 - protein, 13 aa, Homo sapiens
  CDR3 for alpha chain variable domain of TCR clone 103165 (TRAV26-1, TRAJ29)
CIVRRSGNTPLVF

SEQ ID NO: 206330 - protein, 16 aa, Homo sapiens
  CDR3 for beta chain variable domain of TCR clone 103165 (TRBV11-2, TRBJ2-7)
CASSLAPTGVSYEQYF

SEQ ID NO: 206331 - protein, 15 aa, Homo sapiens
  CDR3 for alpha chain variable domain of TCR clone 103166 (TRAV17, TRAJ57)
CATGPSQGGSEKLVF

SEQ ID NO: 206332 - protein, 14 aa, Homo sapiens
  CDR3 for beta chain variable domain of TCR clone 103166 (TRBV7-9, TRBJ2-2)
CASSLVQDTGELFF

SEQ ID NO: 206333 - protein, 12 aa, Homo sapiens
  CDR3 for alpha chain variable domain of TCR clone 103167 (TRAV14/DV4, TRAJ9)
CAMSPGGFKTIF

SEQ ID NO: 206334 - protein, 16 aa, Homo sapiens
  CDR3 for beta chain variable domain of TCR clone 103167 (TRBV28, TRBJ2-5)
CASSFSPAGGWETQYF

SEQ ID NO: 206335 - protein, 13 aa, Homo sapiens
  CDR3 for alpha chain variable domain of TCR clone 103168 (TRAV27, TRAJ34)
CAGGLDNTDKLIF

SEQ ID NO: 206336 - protein, 21 aa, Homo sapiens
  CDR3 for beta chain variable domain of TCR clone 103168 (TRBV6-1, TRBJ1-1)
CASSGVGNYKGISGFDTEAFF

SEQ ID NO: 206337 - protein, 11 aa, Homo sapiens
  CDR3 for alpha chain variable domain of TCR clone 103169 (TRAV23/DV6, TRAJ58)
CAARLLRGETS

SEQ ID NO: 206338 - protein, 16 aa, Homo sapiens
  CDR3 for beta chain variable domain of TCR clone 103169 (TRBV7-3, TRBJ2-1)
CASSFTGRRSYNEQFF

SEQ ID NO: 206339 - protein, 17 aa, Homo sapiens
  CDR3 for alpha chain variable domain of TCR clone 103170 (TRAV3, TRAJ6)
CAVRDGPRAGGSYIPTF

SEQ ID NO: 206340 - protein, 16 aa, Homo sapiens
  CDR3 for beta chain variable domain of TCR clone 103170 (TRBV13, TRBJ2-2)
CAISPRTGEHTGELFF

SEQ ID NO: 206341 - protein, 16 aa, Homo sapiens
  CDR3 for alpha chain variable domain of TCR clone 103171 (TRAV20, TRAJ52)
CAVLPDGGTSYGKLPF

SEQ ID NO: 206342 - protein, 12 aa, Homo sapiens
  CDR3 for beta chain variable domain of TCR clone 103171 (TRBV19, TRBJ2-1)
CASSQISNEQFF

SEQ ID NO: 206343 - protein, 16 aa, Homo sapiens
  CDR3 for alpha chain variable domain of TCR clone 103172 (TRAV4, TRAJ22)
CLVGDLYSGSARQLTF

SEQ ID NO: 206344 - protein, 16 aa, Homo sapiens
  CDR3 for beta chain variable domain of TCR clone 103172 (TRBV7-9, TRBJ2-3)
CASSPWREVGTDTRYF

SEQ ID NO: 206345 - protein, 16 aa, Homo sapiens
  CDR3 for alpha chain variable domain of TCR clone 103173 (TRAV16, TRAJ52)
CALSAAGGTSYGKLTF

SEQ ID NO: 206346 - protein, 14 aa, Homo sapiens
  CDR3 for beta chain variable domain of TCR clone 103173 (TRBV7-2, TRBJ1-3)
CASSLGTAGNTIYF

SEQ ID NO: 206347 - protein, 12 aa, Homo sapiens
  CDR3 for alpha chain variable domain of TCR clone 103174 (TRAV10, TRAJ6)
CVVSEGSHIPTF

SEQ ID NO: 206348 - protein, 15 aa, Homo sapiens
  CDR3 for beta chain variable domain of TCR clone 103174 (TRBV4-3, TRBJ2-7)
CASSQGGRGIYEQYF

SEQ ID NO: 206349 - protein, 16 aa, Homo sapiens
  CDR3 for alpha chain variable domain of TCR clone 103175 (TRAV3, TRAJ37)
CAVRPHGSGNTGKLIF

SEQ ID NO: 206350 - protein, 14 aa, Homo sapiens
  CDR3 for beta chain variable domain of TCR clone 103175 (TRBV25-1, TRBJ1-1)
CASTHLGGNTEASF

SEQ ID NO: 206351 - protein, 13 aa, Homo sapiens
  CDR3 for alpha chain variable domain of TCR clone 103176 (TRAV3, TRAJ3)
CAVADSSASKIIF

SEQ ID NO: 206352 - protein, 16 aa, Homo sapiens
  CDR3 for beta chain variable domain of TCR clone 103176 (TRBV5-1, TRBJ2-3)
CASSLGRAVYTDTQYF

SEQ ID NO: 206353 - protein, 10 aa, Homo sapiens
  CDR3 for alpha chain variable domain of TCR clone 103177 (TRAV8-4, TRAJ43)
CDVSADDMRF

SEQ ID NO: 206354 - protein, 15 aa, Homo sapiens
  CDR3 for beta chain variable domain of TCR clone 103177 (TRBV5-1, TRBJ2-3)
CASSVTSGSTDTQYF

SEQ ID NO: 206355 - protein, 14 aa, Homo sapiens
  CDR3 for alpha chain variable domain of TCR clone 103178 (TRAV3, TRAJ9)
CAVRLNTGGFKTIF

SEQ ID NO: 206356 - protein, 15 aa, Homo sapiens
  CDR3 for beta chain variable domain of TCR clone 103178 (TRBV7-2, TRBJ2-1)
CASSLASGRVNERFF

SEQ ID NO: 206357 - protein, 14 aa, Homo sapiens
  CDR3 for alpha chain variable domain of TCR clone 103179 (TRAV12-2, TRAJ44)
CAANPAGTASKLTF

SEQ ID NO: 206358 - protein, 16 aa, Homo sapiens
  CDR3 for beta chain variable domain of TCR clone 103179 (TRBV2, TRBJ2-1)
CASSVGGSLSYNEQFF

SEQ ID NO: 206359 - protein, 12 aa, Homo sapiens
  CDR3 for alpha chain variable domain of TCR clone 103180 (TRAV8-3, TRAJ48)
CCGAFGNEKLTF

SEQ ID NO: 206360 - protein, 15 aa, Homo sapiens
  CDR3 for beta chain variable domain of TCR clone 103180 (TRBV11-2, TRBJ2-1)
CASSSPSTRYNEQFF

SEQ ID NO: 206361 - protein, 14 aa, Homo sapiens
  CDR3 for alpha chain variable domain of TCR clone 103181 (TRAV12-2, TRAJ13)
CAVKKTGGYQKVTF

SEQ ID NO: 206362 - protein, 12 aa, Homo sapiens
  CDR3 for beta chain variable domain of TCR clone 103181 (TRBV6-3, TRBJ2-7)
CASSLTPHEQYF

SEQ ID NO: 206363 - protein, 13 aa, Homo sapiens
  CDR3 for alpha chain variable domain of TCR clone 103182 (TRAV3, TRAJ20)
CAVRSLNDYKLSF

SEQ ID NO: 206364 - protein, 13 aa, Homo sapiens
  CDR3 for beta chain variable domain of TCR clone 103182 (TRBV7-3, TRBJ1-1)
CASSQDWGAEALF

SEQ ID NO: 206365 - protein, 14 aa, Homo sapiens
  CDR3 for alpha chain variable domain of TCR clone 103183 (TRAV3, TRAJ21)
CAVRDEYNFNKFYF

SEQ ID NO: 206366 - protein, 17 aa, Homo sapiens
  CDR3 for beta chain variable domain of TCR clone 103183 (TRBV20-1, TRBJ1-6)
CSARGGYTFSYNSPLHF

SEQ ID NO: 206367 - protein, 14 aa, Homo sapiens
  CDR3 for alpha chain variable domain of TCR clone 103184 (TRAV13-1, TRAJ20)
CAARPGSNDYKLSF

SEQ ID NO: 206368 - protein, 15 aa, Homo sapiens
  CDR3 for beta chain variable domain of TCR clone 103184 (TRBV4-1, TRBJ2-7)
CASSQRGQGFDEQYF

SEQ ID NO: 206369 - protein, 13 aa, Homo sapiens
  CDR3 for alpha chain variable domain of TCR clone 103185 (TRAV23/DV6, TRAJ34)
CAAIENNTEKLIF

SEQ ID NO: 206370 - protein, 13 aa, Homo sapiens
  CDR3 for beta chain variable domain of TCR clone 103185 (TRBV29-1, TRBJ2-7)
CSVGPSGGYEQYF

SEQ ID NO: 206371 - protein, 16 aa, Homo sapiens
  CDR3 for alpha chain variable domain of TCR clone 103186 (TRAV3, TRAJ10)
CAVRDMNAGGGNKLTC

SEQ ID NO: 206372 - protein, 16 aa, Homo sapiens
  CDR3 for beta chain variable domain of TCR clone 103186 (TRBV6-3, TRBJ1-2)
CASSYSRRASNYGYTF

SEQ ID NO: 206373 - protein, 18 aa, Homo sapiens
  CDR3 for alpha chain variable domain of TCR clone 103187 (TRAV21, TRAJ53)
CAVKGGENSGGSNYKLTF

SEQ ID NO: 206374 - protein, 13 aa, Homo sapiens
  CDR3 for beta chain variable domain of TCR clone 103187 (TRBV7-9, TRBJ1-2)
YASSLKQNYGYTF

SEQ ID NO: 206375 - protein, 17 aa, Homo sapiens
  CDR3 for alpha chain variable domain of TCR clone 103188 (TRAV26-1, TRAJ53)
CIVRVDDSGGSNYKLTF

SEQ ID NO: 206376 - protein, 12 aa, Homo sapiens
  CDR3 for beta chain variable domain of TCR clone 103188 (TRBV29-1, TRBJ2-3)
CSVTGGADTQYF

SEQ ID NO: 206377 - protein, 18 aa, Homo sapiens
  CDR3 for alpha chain variable domain of TCR clone 103189 (TRAV8-3, TRAJ13)
CAVGAYPSGGYQKVTLEL

SEQ ID NO: 206378 - protein, 15 aa, Homo sapiens
  CDR3 for beta chain variable domain of TCR clone 103189 (TRBV19, TRBJ1-5)
CASSIVWADNQPQHF

SEQ ID NO: 206379 - protein, 16 aa, Homo sapiens
  CDR3 for alpha chain variable domain of TCR clone 103190 (TRAV13-1, TRAJ48)
CAASIFGNFGHEKLTF

SEQ ID NO: 206380 - protein, 14 aa, Homo sapiens
  CDR3 for beta chain variable domain of TCR clone 103190 (TRBV24-1, TRBJ1-1)
CATSIPRGDTEAFF

SEQ ID NO: 206381 - protein, 16 aa, Homo sapiens
  CDR3 for alpha chain variable domain of TCR clone 103191 (TRAV26-1, TRAJ53)
CIVRVAMGGSNYKLTF

SEQ ID NO: 206382 - protein, 12 aa, Homo sapiens
  CDR3 for beta chain variable domain of TCR clone 103191 (TRBV7-9, TRBJ1-5)
CASSPQGQPQQF

SEQ ID NO: 206383 - protein, 12 aa, Homo sapiens
  CDR3 for alpha chain variable domain of TCR clone 103192 (TRAV2, TRAJ33)
CAVWGSNYQLIW

SEQ ID NO: 206384 - protein, 16 aa, Homo sapiens
  CDR3 for beta chain variable domain of TCR clone 103192 (TRBV20-1, TRBJ1-4)
CSAPGQGLLTNENLFF

SEQ ID NO: 206385 - protein, 14 aa, Homo sapiens
  CDR3 for alpha chain variable domain of TCR clone 103193 (TRAV12-3, TRAJ10)
SHLPQTGGGNKLTF

SEQ ID NO: 206386 - protein, 14 aa, Homo sapiens
  CDR3 for beta chain variable domain of TCR clone 103193 (TRBV6-1, TRBJ1-3)
CASVQGGGGNTIYF

SEQ ID NO: 206387 - protein, 15 aa, Homo sapiens
  CDR3 for alpha chain variable domain of TCR clone 103194 (TRAV26-1, TRAJ29)
CIVRVVGSGNTPLVF

SEQ ID NO: 206388 - protein, 14 aa, Homo sapiens
  CDR3 for beta chain variable domain of TCR clone 103194 (TRBV19, TRBJ2-1)
CASPTFVLSGEQFF

SEQ ID NO: 206389 - protein, 18 aa, Homo sapiens
  CDR3 for alpha chain variable domain of TCR clone 103195 (TRAV8-3, TRAJ4)
WVRDPTSNDPGGYNKLIF

SEQ ID NO: 206390 - protein, 15 aa, Homo sapiens
  CDR3 for beta chain variable domain of TCR clone 103195 (TRBV4-1, TRBJ1-2)
CASSQGQGAAYGYTF

SEQ ID NO: 206391 - protein, 13 aa, Homo sapiens
  CDR3 for alpha chain variable domain of TCR clone 103196 (TRAV12-2, TRAJ6)
CAVNVSRKLHTYI

SEQ ID NO: 206392 - protein, 15 aa, Homo sapiens
  CDR3 for beta chain variable domain of TCR clone 103196 (TRBV20-1, TRBJ2-1)
CSAEGGLLAGDEQFF

SEQ ID NO: 206393 - protein, 18 aa, Homo sapiens
  CDR3 for alpha chain variable domain of TCR clone 103197 (TRAV29/DV5, TRAJ52)
CAAGFRGAGGTSYGKLTF

SEQ ID NO: 206394 - protein, 16 aa, Homo sapiens
  CDR3 for beta chain variable domain of TCR clone 103197 (TRBV7-3, TRBJ2-2)
CASSLKRGTLSGELVF

SEQ ID NO: 206395 - protein, 11 aa, Homo sapiens
  CDR3 for alpha chain variable domain of TCR clone 103198 (TRAV2, TRAJ13)
CASGGYQKVTF

SEQ ID NO: 206396 - protein, 12 aa, Homo sapiens
  CDR3 for beta chain variable domain of TCR clone 103198 (TRBV5-4, TRBJ2-5)
CASSSTRETQYF

SEQ ID NO: 206397 - protein, 14 aa, Homo sapiens
  CDR3 for alpha chain variable domain of TCR clone 103199 (TRAV1-2, TRAJ8)
CAVREDTGFQKLVF

SEQ ID NO: 206398 - protein, 17 aa, Homo sapiens
  CDR3 for beta chain variable domain of TCR clone 103199 (TRBV11-2, TRBJ2-1)
CASSFYPPGVEYNEQFF

SEQ ID NO: 206399 - protein, 13 aa, Homo sapiens
  CDR3 for alpha chain variable domain of TCR clone 103200 (TRAV20, TRAJ54)
CAVQAGGAQKLVF

SEQ ID NO: 206400 - protein, 14 aa, Homo sapiens
  CDR3 for beta chain variable domain of TCR clone 103200 (TRBV20-1, TRBJ2-7)
CSAKTGTGGYEQYV

SEQ ID NO: 206401 - protein, 13 aa, Homo sapiens
  CDR3 for alpha chain variable domain of TCR clone 103201 (TRAV20, TRAJ37)
CAGCSSNNGKLIF

SEQ ID NO: 206402 - protein, 11 aa, Homo sapiens
  CDR3 for beta chain variable domain of TCR clone 103201 (TRBV12-4, TRBJ2-3)
CASTATDTQYF

SEQ ID NO: 206403 - protein, 12 aa, Homo sapiens
  CDR3 for alpha chain variable domain of TCR clone 103202 (TRAV16, TRAJ10)
CSRTGGGNKLTF

SEQ ID NO: 206404 - protein, 19 aa, Homo sapiens
  CDR3 for beta chain variable domain of TCR clone 103202 (TRBV25-1, TRBJ2-2)
CAILVYRVDRGRRTGELFF

SEQ ID NO: 206405 - protein, 15 aa, Homo sapiens
  CDR3 for alpha chain variable domain of TCR clone 103203 (TRAV26-2, TRAJ13)
CILRDLSWGYQKVTF

SEQ ID NO: 206406 - protein, 14 aa, Homo sapiens
  CDR3 for beta chain variable domain of TCR clone 103203 (TRBV4-1, TRBJ2-3)
CASSQEGSTDTQYF

SEQ ID NO: 206407 - protein, 13 aa, Homo sapiens
  CDR3 for alpha chain variable domain of TCR clone 103204 (TRAV12-3, TRAJ9)
CAMRNTGGFKTIF

SEQ ID NO: 206408 - protein, 13 aa, Homo sapiens
  CDR3 for beta chain variable domain of TCR clone 103204 (TRBV10-3, TRBJ2-7)
CASKLAVNYEQYF

SEQ ID NO: 206409 - protein, 14 aa, Homo sapiens
  CDR3 for alpha chain variable domain of TCR clone 103205 (TRAV1-2, TRAJ8)
CAVREDTGFQKLVF

SEQ ID NO: 206410 - protein, 15 aa, Homo sapiens
  CDR3 for beta chain variable domain of TCR clone 103205 (TRBV7-3, TRBJ2-2)
CASSETGQGTGKLFF

SEQ ID NO: 206411 - protein, 14 aa, Homo sapiens
  CDR3 for alpha chain variable domain of TCR clone 103206 (TRAV12-2, TRAJ45)
CAVNIGGGADGLTF

SEQ ID NO: 206412 - protein, 15 aa, Homo sapiens
  CDR3 for beta chain variable domain of TCR clone 103206 (TRBV6-3, TRBJ2-7)
CASSSPGTVFYEQYF

SEQ ID NO: 206413 - protein, 15 aa, Homo sapiens
  CDR3 for alpha chain variable domain of TCR clone 103207 (TRAV4, TRAJ39)
CLVGPNNNAGNMLTF

SEQ ID NO: 206414 - protein, 14 aa, Homo sapiens
  CDR3 for beta chain variable domain of TCR clone 103207 (TRBV2, TRBJ2-1)
CASRAYGIYNEQFF

SEQ ID NO: 206415 - protein, 15 aa, Homo sapiens
  CDR3 for alpha chain variable domain of TCR clone 103208 (TRAV38-1, TRAJ37)
CAFIHGSGNTGKLIF

SEQ ID NO: 206416 - protein, 14 aa, Homo sapiens
  CDR3 for beta chain variable domain of TCR clone 103208 (TRBV23-1, TRBJ2-5)
CASSFLRSQETQYF

SEQ ID NO: 206417 - protein, 14 aa, Homo sapiens
  CDR3 for alpha chain variable domain of TCR clone 103209 (TRAV8-3, TRAJ44)
CAVGNTGTASKLTF

SEQ ID NO: 206418 - protein, 14 aa, Homo sapiens
  CDR3 for beta chain variable domain of TCR clone 103209 (TRBV7-2, TRBJ2-7)
CASSPKTSFYEQYF

SEQ ID NO: 206419 - protein, 14 aa, Homo sapiens
  CDR3 for alpha chain variable domain of TCR clone 103210 (TRAV16, TRAJ37)
YALDISGNTGKLIF

SEQ ID NO: 206420 - protein, 11 aa, Homo sapiens
  CDR3 for beta chain variable domain of TCR clone 103210 (TRBV6-1, TRBJ2-1)
CASISSNEQFF

SEQ ID NO: 206421 - protein, 15 aa, Homo sapiens
  CDR3 for alpha chain variable domain of TCR clone 103211 (TRAV27, TRAJ38)
CAARRNAGNNRKLIW

SEQ ID NO: 206422 - protein, 13 aa, Homo sapiens
  CDR3 for beta chain variable domain of TCR clone 103211 (TRBV12-5, TRBJ2-3)
GASGDRQSDTQYF

SEQ ID NO: 206423 - protein, 16 aa, Homo sapiens
  CDR3 for alpha chain variable domain of TCR clone 103212 (TRAV20, TRAJ22)
CAVQPSSSGSARQLTF

SEQ ID NO: 206424 - protein, 13 aa, Homo sapiens
  CDR3 for beta chain variable domain of TCR clone 103212 (TRBV7-2, TRBJ2-5)
CASSQTSVETQYF

SEQ ID NO: 206425 - protein, 15 aa, Homo sapiens
  CDR3 for alpha chain variable domain of TCR clone 103213 (TRAV38-1, TRAJ37)
CAFIHGSGNTGKLIF

SEQ ID NO: 206426 - protein, 12 aa, Homo sapiens
  CDR3 for beta chain variable domain of TCR clone 103213 (TRBV7-9, TRBJ2-7)
CASSFGSYEQDF

SEQ ID NO: 206427 - protein, 12 aa, Homo sapiens
  CDR3 for alpha chain variable domain of TCR clone 103214 (TRAV12-3, TRAJ17)
CAMTPTGNKLTF

SEQ ID NO: 206428 - protein, 14 aa, Homo sapiens
  CDR3 for beta chain variable domain of TCR clone 103214 (TRBV20-1, TRBJ2-1)
CSAQIGGSANEQFF

SEQ ID NO: 206429 - protein, 12 aa, Homo sapiens
  CDR3 for alpha chain variable domain of TCR clone 103215 (TRAV12-1, TRAJ40)
CVVYSGTYKYIL

SEQ ID NO: 206430 - protein, 14 aa, Homo sapiens
  CDR3 for beta chain variable domain of TCR clone 103215 (TRBV7-9, TRBJ2-5)
CASSLDTAQETQYF

SEQ ID NO: 206431 - protein, 18 aa, Homo sapiens
  CDR3 for alpha chain variable domain of TCR clone 103216 (TRAV21, TRAJ52)
CAVRPSPAGGTSYGKLTI

SEQ ID NO: 206432 - protein, 13 aa, Homo sapiens
  CDR3 for beta chain variable domain of TCR clone 103216 (TRBV7-3, TRBJ1-1)
CASSQDWGAEAFF

SEQ ID NO: 206433 - protein, 13 aa, Homo sapiens
  CDR3 for alpha chain variable domain of TCR clone 103217 (TRAV8-6, TRAJ13)
CAVREGGYQKVTF

SEQ ID NO: 206434 - protein, 15 aa, Homo sapiens
  CDR3 for beta chain variable domain of TCR clone 103217 (TRBV7-9, TRBJ2-2)
CASRPEGTSTGELFF

SEQ ID NO: 206435 - protein, 15 aa, Homo sapiens
  CDR3 for alpha chain variable domain of TCR clone 103218 (TRAV8-4, TRAJ30)
CAVRDEYGRDDKIIF

SEQ ID NO: 206436 - protein, 16 aa, Homo sapiens
  CDR3 for beta chain variable domain of TCR clone 103218 (TRBV5-1, TRBJ2-5)
CASSLANHRGRETQYF

SEQ ID NO: 206437 - protein, 13 aa, Homo sapiens
  CDR3 for alpha chain variable domain of TCR clone 103219 (TRAV1-2, TRAJ12)
CAAWMDSSYKLIF

SEQ ID NO: 206438 - protein, 16 aa, Homo sapiens
  CDR3 for beta chain variable domain of TCR clone 103219 (TRBV12-5, TRBJ2-5)
CASGPRTSGNRETQYF

SEQ ID NO: 206439 - protein, 17 aa, Homo sapiens
  CDR3 for alpha chain variable domain of TCR clone 103220 (TRAV3, TRAJ6)
CAVRDGPGQEEATYLNL

SEQ ID NO: 206440 - protein, 14 aa, Homo sapiens
  CDR3 for beta chain variable domain of TCR clone 103220 (TRBV7-2, TRBJ2-7)
CASSPKTSFYEQYF

SEQ ID NO: 206441 - protein, 14 aa, Homo sapiens
  CDR3 for alpha chain variable domain of TCR clone 103221 (TRAV35, TRAJ46)
CAGPQKSSGDKLTF

SEQ ID NO: 206442 - protein, 12 aa, Homo sapiens
  CDR3 for beta chain variable domain of TCR clone 103221 (TRBV5-1, TRBJ2-7)
CASSLDSYEQYF

SEQ ID NO: 206443 - protein, 12 aa, Homo sapiens
  CDR3 for alpha chain variable domain of TCR clone 103222 (TRAV1-1, TRAJ9)
CAVDTGGFKTIF

SEQ ID NO: 206444 - protein, 14 aa, Homo sapiens
  CDR3 for beta chain variable domain of TCR clone 103222 (TRBV7-8, TRBJ2-5)
CASSATGGRETQYF

SEQ ID NO: 206445 - protein, 13 aa, Homo sapiens
  CDR3 for alpha chain variable domain of TCR clone 103223 (TRAV20, TRAJ49)
CAVQARTGNQFYF

SEQ ID NO: 206446 - protein, 17 aa, Homo sapiens
  CDR3 for beta chain variable domain of TCR clone 103223 (TRBV24-1, TRBJ2-1)
CATSDVSTSGTYNEQFF

SEQ ID NO: 206447 - protein, 13 aa, Homo sapiens
  CDR3 for alpha chain variable domain of TCR clone 103224 (TRAV16, TRAJ48)
CSPLNFGNEKLTF

SEQ ID NO: 206448 - protein, 11 aa, Homo sapiens
  CDR3 for beta chain variable domain of TCR clone 103224 (TRBV7-9, TRBJ2-3)
CASSATDTQYF

SEQ ID NO: 206449 - protein, 13 aa, Homo sapiens
  CDR3 for alpha chain variable domain of TCR clone 103225 (TRAV27, TRAJ29)
CAGAHSENTPLVF

SEQ ID NO: 206450 - protein, 14 aa, Homo sapiens
  CDR3 for beta chain variable domain of TCR clone 103225 (TRBV7-9, TRBJ2-7)
CASSIGQGAGEQYF

SEQ ID NO: 206451 - protein, 16 aa, Homo sapiens
  CDR3 for alpha chain variable domain of TCR clone 103226 (TRAV3, TRAJ10)
CAVRDMRAGGGNKLTF

SEQ ID NO: 206452 - protein, 15 aa, Homo sapiens
  CDR3 for beta chain variable domain of TCR clone 103226 (TRBV13, TRBJ1-5)
CASSFGQGGVQPQHF

SEQ ID NO: 206453 - protein, 13 aa, Homo sapiens
  CDR3 for alpha chain variable domain of TCR clone 103227 (TRAV17, TRAJ6)
CATGFGGSYIPTF

SEQ ID NO: 206454 - protein, 14 aa, Homo sapiens
  CDR3 for beta chain variable domain of TCR clone 103227 (TRBV5-1, TRBJ2-5)
CASSFGGSQETQYF

SEQ ID NO: 206455 - protein, 12 aa, Homo sapiens
  CDR3 for alpha chain variable domain of TCR clone 103228 (TRAV13-2, TRAJ23)
CAERHRGGKLIF

SEQ ID NO: 206456 - protein, 15 aa, Homo sapiens
  CDR3 for beta chain variable domain of TCR clone 103228 (TRBV7-9, TRBJ1-6)
CASSSPGRGNSPLLF

SEQ ID NO: 206457 - protein, 13 aa, Homo sapiens
  CDR3 for alpha chain variable domain of TCR clone 103229 (TRAV12-2, TRAJ20)
CAVYPSNDYKLSF

SEQ ID NO: 206458 - protein, 15 aa, Homo sapiens
  CDR3 for beta chain variable domain of TCR clone 103229 (TRBV18, TRBJ1-2)
CASSPGNGIGYGYTF

SEQ ID NO: 206459 - protein, 15 aa, Homo sapiens
  CDR3 for alpha chain variable domain of TCR clone 103230 (TRAV21, TRAJ10)
CAVPLLTGGGHKLTF

SEQ ID NO: 206460 - protein, 14 aa, Homo sapiens
  CDR3 for beta chain variable domain of TCR clone 103230 (TRBV12-4, TRBJ1-1)
CASSLGTGGTEAFF

SEQ ID NO: 206461 - protein, 14 aa, Homo sapiens
  CDR3 for alpha chain variable domain of TCR clone 103231 (TRAV1-2, TRAJ16)
CAVNRFSDGQKLLF

SEQ ID NO: 206462 - protein, 15 aa, Homo sapiens
  CDR3 for beta chain variable domain of TCR clone 103231 (TRBV2, TRBJ2-2)
CASSRQGPNTGELFF

SEQ ID NO: 206463 - protein, 12 aa, Homo sapiens
  CDR3 for alpha chain variable domain of TCR clone 103232 (TRAV8-3, TRAJ26)
CAGDNYGQHFVF

SEQ ID NO: 206464 - protein, 15 aa, Homo sapiens
  CDR3 for beta chain variable domain of TCR clone 103232 (TRBV9, TRBJ2-1)
CASSLAGSSYNEQFF

SEQ ID NO: 206465 - protein, 13 aa, Homo sapiens
  CDR3 for alpha chain variable domain of TCR clone 103233 (TRAV12-3, TRAJ13)
CAMGTGGYQKVTF

SEQ ID NO: 206466 - protein, 15 aa, Homo sapiens
  CDR3 for beta chain variable domain of TCR clone 103233 (TRBV3-1, TRBJ2-2)
CASSQDWTRAGELFF

SEQ ID NO: 206467 - protein, 15 aa, Homo sapiens
  CDR3 for alpha chain variable domain of TCR clone 103234 (TRAV26-2, TRAJ13)
CILRDLSVGYQKVTF

SEQ ID NO: 206468 - protein, 11 aa, Homo sapiens
  CDR3 for beta chain variable domain of TCR clone 103234 (TRBV7-9, TRBJ2-5)
CASSLSATQYF

SEQ ID NO: 206469 - protein, 14 aa, Homo sapiens
  CDR3 for alpha chain variable domain of TCR clone 103235 (TRAV26-1, TRAJ34)
CIVRVAYNTDKLIF

SEQ ID NO: 206470 - protein, 15 aa, Homo sapiens
  CDR3 for beta chain variable domain of TCR clone 103235 (TRBV20-1, TRBJ2-7)
CSARLPAAYFYEQYF

SEQ ID NO: 206471 - protein, 13 aa, Homo sapiens
  CDR3 for alpha chain variable domain of TCR clone 103236 (TRAV1-2, TRAJ9)
CAALNTGGFKTIF

SEQ ID NO: 206472 - protein, 14 aa, Homo sapiens
  CDR3 for beta chain variable domain of TCR clone 103236 (TRBV20-1, TRBJ2-7)
CSAKRGRSSYEQYF

SEQ ID NO: 206473 - protein, 16 aa, Homo sapiens
  CDR3 for alpha chain variable domain of TCR clone 103237 (TRAV3, TRAJ10)
CAVRDMRAGGGNKLTF

SEQ ID NO: 206474 - protein, 14 aa, Homo sapiens
  CDR3 for beta chain variable domain of TCR clone 103237 (TRBV19, TRBJ2-1)
CASSMGSGATEQFF

SEQ ID NO: 206475 - protein, 12 aa, Homo sapiens
  CDR3 for alpha chain variable domain of TCR clone 103238 (TRAV13-1, TRAJ45)
CAATRGADGLTF

SEQ ID NO: 206476 - protein, 12 aa, Homo sapiens
  CDR3 for beta chain variable domain of TCR clone 103238 (TRBV11-2, TRBJ2-2)
CASSLGGGELFF

SEQ ID NO: 206477 - protein, 14 aa, Homo sapiens
  CDR3 for alpha chain variable domain of TCR clone 103239 (TRAV25, TRAJ6)
CAGRESGGSYIPTF

SEQ ID NO: 206478 - protein, 12 aa, Homo sapiens
  CDR3 for beta chain variable domain of TCR clone 103239 (TRBV11-2, TRBJ2-2)
CASSLGGGELFF

SEQ ID NO: 206479 - protein, 16 aa, Homo sapiens
  CDR3 for alpha chain variable domain of TCR clone 103240 (TRAV29/DV5, TRAJ36)
CAASAGVETGANNLFF

SEQ ID NO: 206480 - protein, 15 aa, Homo sapiens
  CDR3 for beta chain variable domain of TCR clone 103240 (TRBV27, TRBJ1-5)
CASSLGQGSVQPQHF

SEQ ID NO: 206481 - protein, 15 aa, Homo sapiens
  CDR3 for alpha chain variable domain of TCR clone 103241 (TRAV35, TRAJ58)
CAGRRQENSGSRLTF

SEQ ID NO: 206482 - protein, 11 aa, Homo sapiens
  CDR3 for beta chain variable domain of TCR clone 103241 (TRBV11-2, TRBJ1-1)
CASSINTEAFF

SEQ ID NO: 206483 - protein, 12 aa, Homo sapiens
  CDR3 for alpha chain variable domain of TCR clone 103242 (TRAV1-1, TRAJ9)
CAVDTGGFKTIF

SEQ ID NO: 206484 - protein, 16 aa, Homo sapiens
  CDR3 for beta chain variable domain of TCR clone 103242 (TRBV28, TRBJ2-1)
CASSSPEYPRDNEQFF

SEQ ID NO: 206485 - protein, 23 aa, Homo sapiens
  CDR3 for alpha chain variable domain of TCR clone 103243 (TRAV26-1, TRAJ38)
CIADNAGNNHIQNPDPAVYQLRD

SEQ ID NO: 206486 - protein, 14 aa, Homo sapiens
  CDR3 for beta chain variable domain of TCR clone 103243 (TRBV12-4, TRBJ1-1)
CASSLGTGGTEAFF

SEQ ID NO: 206487 - protein, 17 aa, Homo sapiens
  CDR3 for alpha chain variable domain of TCR clone 103244 (TRAV26-1, TRAJ46)
IASSESEKKSSGDKLTF

SEQ ID NO: 206488 - protein, 15 aa, Homo sapiens
  CDR3 for beta chain variable domain of TCR clone 103244 (TRBV7-3, TRBJ1-1)
CASSLSYYMNTEAFF

SEQ ID NO: 206489 - protein, 18 aa, Homo sapiens
  CDR3 for alpha chain variable domain of TCR clone 103245 (TRAV26-1, TRAJ23)
CIVRVGLEVWNQGGKLIF

SEQ ID NO: 206490 - protein, 14 aa, Homo sapiens
  CDR3 for beta chain variable domain of TCR clone 103245 (TRBV13, TRBJ2-5)
CASSLERVGETQYF

SEQ ID NO: 206491 - protein, 13 aa, Homo sapiens
  CDR3 for alpha chain variable domain of TCR clone 103246 (TRAV12-2, TRAJ39)
CAVNNNAGNMLTF

SEQ ID NO: 206492 - protein, 13 aa, Homo sapiens
  CDR3 for beta chain variable domain of TCR clone 103246 (TRBV2, TRBJ1-5)
CATAGPGNQPQHF

SEQ ID NO: 206493 - protein, 13 aa, Homo sapiens
  CDR3 for alpha chain variable domain of TCR clone 103247 (TRAV26-1, TRAJ31)
CIVRVDGNARLMV

SEQ ID NO: 206494 - protein, 17 aa, Homo sapiens
  CDR3 for beta chain variable domain of TCR clone 103247 (TRBV11-2, TRBJ2-1)
CASSLYPPGVEYNEQFF

SEQ ID NO: 206495 - protein, 15 aa, Homo sapiens
  CDR3 for alpha chain variable domain of TCR clone 103248 (TRAV8-3, TRAJ45)
CALSYSGGGADGLTF

SEQ ID NO: 206496 - protein, 13 aa, Homo sapiens
  CDR3 for beta chain variable domain of TCR clone 103248 (TRBV10-3, TRBJ2-7)
CAPKLAVNYEQYF

SEQ ID NO: 206497 - protein, 16 aa, Homo sapiens
  CDR3 for alpha chain variable domain of TCR clone 103249 (TRAV8-3, TRAJ28)
CAVPPQRGAGGYQLTF

SEQ ID NO: 206498 - protein, 13 aa, Homo sapiens
  CDR3 for beta chain variable domain of TCR clone 103249 (TRBV7-6, TRBJ2-3)
CASSLRSDNTQYF

SEQ ID NO: 206499 - protein, 13 aa, Homo sapiens
  CDR3 for alpha chain variable domain of TCR clone 103250 (TRAV38-1, TRAJ42)
RARWGGSQGNLIF

SEQ ID NO: 206500 - protein, 10 aa, Homo sapiens
  CDR3 for beta chain variable domain of TCR clone 103250 (TRBV2, TRBJ2-5)
CASSAATQYF

SEQ ID NO: 206501 - protein, 16 aa, Homo sapiens
  CDR3 for alpha chain variable domain of TCR clone 103251 (TRAV30, TRAJ26)
CGTESVGDNYGQNFVF

SEQ ID NO: 206502 - protein, 14 aa, Homo sapiens
  CDR3 for beta chain variable domain of TCR clone 103251 (TRBV19, TRBJ2-1)
CASPTFVSSGEQFF

SEQ ID NO: 206503 - protein, 12 aa, Homo sapiens
  CDR3 for alpha chain variable domain of TCR clone 103252 (TRAV12-3, TRAJ17)
CAMTLTGNKLTF

SEQ ID NO: 206504 - protein, 15 aa, Homo sapiens
  CDR3 for beta chain variable domain of TCR clone 103252 (TRBV7-2, TRBJ1-2)
CASSLAPDRGLGYTF

SEQ ID NO: 206505 - protein, 15 aa, Homo sapiens
  CDR3 for alpha chain variable domain of TCR clone 103253 (TRAV4, TRAJ10)
CLVGDEAGGGNKLTF

SEQ ID NO: 206506 - protein, 15 aa, Homo sapiens
  CDR3 for beta chain variable domain of TCR clone 103253 (TRBV7-2, TRBJ2-7)
CASSLTGQGTYEQYF

SEQ ID NO: 206507 - protein, 11 aa, Homo sapiens
  CDR3 for alpha chain variable domain of TCR clone 103254 (TRAV2, TRAJ13)
CASGGYQKVTF

SEQ ID NO: 206508 - protein, 15 aa, Homo sapiens
  CDR3 for beta chain variable domain of TCR clone 103254 (TRBV11-3, TRBJ2-1)
CASSLGDSSHNEQFF

SEQ ID NO: 206509 - protein, 15 aa, Homo sapiens
  CDR3 for alpha chain variable domain of TCR clone 103255 (TRAV3, TRAJ24)
CAVRDKMTAGGNCIL

SEQ ID NO: 206510 - protein, 14 aa, Homo sapiens
  CDR3 for beta chain variable domain of TCR clone 103255 (TRBV7-2, TRBJ2-3)
CASSQTGSSYTQYF

SEQ ID NO: 206511 - protein, 16 aa, Homo sapiens
  CDR3 for alpha chain variable domain of TCR clone 103256 (TRAV17, TRAJ22)
CATGPISSGSARQLTF

SEQ ID NO: 206512 - protein, 13 aa, Homo sapiens
  CDR3 for beta chain variable domain of TCR clone 103256 (TRBV11-2, TRBJ2-1)
CASSLGLGGGRFF

SEQ ID NO: 206513 - protein, 18 aa, Homo sapiens
  CDR3 for alpha chain variable domain of TCR clone 103257 (TRAV21, TRAJ52)
CAVRPSPAGGTSYRKLTF

SEQ ID NO: 206514 - protein, 16 aa, Homo sapiens
  CDR3 for beta chain variable domain of TCR clone 103257 (TRBV19, TRBJ2-2)
CASRSPGTGATGELFF

SEQ ID NO: 206515 - protein, 14 aa, Homo sapiens
  CDR3 for alpha chain variable domain of TCR clone 103258 (TRAV12-2, TRAJ40)
CAVKIPSGTYKYIF

SEQ ID NO: 206516 - protein, 17 aa, Homo sapiens
  CDR3 for beta chain variable domain of TCR clone 103258 (TRBV5-1, TRBJ2-5)
CASSPVALGQNQETQYF

SEQ ID NO: 206517 - protein, 15 aa, Homo sapiens
  CDR3 for alpha chain variable domain of TCR clone 103259 (TRAV13-2, TRAJ42)
CAENNYGGSQGNLIF

SEQ ID NO: 206518 - protein, 15 aa, Homo sapiens
  CDR3 for beta chain variable domain of TCR clone 103259 (TRBV7-2, TRBJ2-1)
CASSSGLAGGNEQFF

SEQ ID NO: 206519 - protein, 14 aa, Homo sapiens
  CDR3 for alpha chain variable domain of TCR clone 103260 (TRAV2, TRAJ16)
CAVERGADGQKLLF

SEQ ID NO: 206520 - protein, 12 aa, Homo sapiens
  CDR3 for beta chain variable domain of TCR clone 103260 (TRBV6-5, TRBJ2-7)
CASYIYGYEQYF

SEQ ID NO: 206521 - protein, 15 aa, Homo sapiens
  CDR3 for alpha chain variable domain of TCR clone 103261 (TRAV1-2, TRAJ28)
CAVQYSGAGSYQLTF

SEQ ID NO: 206522 - protein, 16 aa, Homo sapiens
  CDR3 for beta chain variable domain of TCR clone 103261 (TRBV2, TRBJ2-1)
CASSVGGSLSYNEQFF

SEQ ID NO: 206523 - protein, 14 aa, Homo sapiens
  CDR3 for alpha chain variable domain of TCR clone 103262 (TRAV21, TRAJ28)
CAVGSGAGSYQLTF

SEQ ID NO: 206524 - protein, 15 aa, Homo sapiens
  CDR3 for beta chain variable domain of TCR clone 103262 (TRBV5-1, TRBJ2-3)
CASSSTSGSTDTQYF

SEQ ID NO: 206525 - protein, 14 aa, Homo sapiens
  CDR3 for alpha chain variable domain of TCR clone 103263 (TRAV12-2, TRAJ17)
CAVLFKAAGNKLTF

SEQ ID NO: 206526 - protein, 12 aa, Homo sapiens
  CDR3 for beta chain variable domain of TCR clone 103263 (TRBV12-4, TRBJ1-2)
CASSLIWLHLRF

SEQ ID NO: 206527 - protein, 13 aa, Homo sapiens
  CDR3 for alpha chain variable domain of TCR clone 103264 (TRAV36/DV7, TRAJ40)
CAVEASGTYKYIF

SEQ ID NO: 206528 - protein, 14 aa, Homo sapiens
  CDR3 for beta chain variable domain of TCR clone 103264 (TRBV7-2, TRBJ2-3)
CASSRTSGADTQYF

SEQ ID NO: 206529 - protein, 13 aa, Homo sapiens
  CDR3 for alpha chain variable domain of TCR clone 103265 (TRAV36/DV7, TRAJ49)
CAVEANTGNQFYF

SEQ ID NO: 206530 - protein, 14 aa, Homo sapiens
  CDR3 for beta chain variable domain of TCR clone 103265 (TRBV20-1, TRBJ2-5)
CSASSGGAAETQYF

SEQ ID NO: 206531 - protein, 16 aa, Homo sapiens
  CDR3 for alpha chain variable domain of TCR clone 103266 (TRAV8-3, TRAJ42)
CAVGEGDGGSQGNLIF

SEQ ID NO: 206532 - protein, 14 aa, Homo sapiens
  CDR3 for beta chain variable domain of TCR clone 103266 (TRBV7-2, TRBJ2-1)
CASSRGGARNEQFF

SEQ ID NO: 206533 - protein, 15 aa, Homo sapiens
  CDR3 for alpha chain variable domain of TCR clone 103267 (TRAV2, TRAJ9)
CAMEDRGTGGFKTIF

SEQ ID NO: 206534 - protein, 16 aa, Homo sapiens
  CDR3 for beta chain variable domain of TCR clone 103267 (TRBV24-1, TRBJ2-3)
CATSDPGTGATDTQYF

SEQ ID NO: 206535 - protein, 14 aa, Homo sapiens
  CDR3 for alpha chain variable domain of TCR clone 103268 (TRAV38-1, TRAJ40)
CALRTTSGTYKYIF

SEQ ID NO: 206536 - protein, 14 aa, Homo sapiens
  CDR3 for beta chain variable domain of TCR clone 103268 (TRBV25-1, TRBJ1-1)
CASAHLGGNTEAFF

SEQ ID NO: 206537 - protein, 16 aa, Homo sapiens
  CDR3 for alpha chain variable domain of TCR clone 103269 (TRAV1-2, TRAJ10)
CAVRGVLTGGGNKLTF

SEQ ID NO: 206538 - protein, 13 aa, Homo sapiens
  CDR3 for beta chain variable domain of TCR clone 103269 (TRBV7-6, TRBJ1-2)
CASSLVADYGYTF

SEQ ID NO: 206539 - protein, 15 aa, Homo sapiens
  CDR3 for alpha chain variable domain of TCR clone 103270 (TRAV26-1, TRAJ48)
CIVRVGDFGNEKLTF

SEQ ID NO: 206540 - protein, 20 aa, Homo sapiens
  CDR3 for beta chain variable domain of TCR clone 103270 (TRBV7-8, TRBJ2-1)
CASSLAHRLAGVRSYNEQFF

SEQ ID NO: 206541 - protein, 21 aa, Homo sapiens
  CDR3 for alpha chain variable domain of TCR clone 103271 (TRAV12-3, TRAJ18)
CAMSAEAQPWGGYTLEEELSL

SEQ ID NO: 206542 - protein, 13 aa, Homo sapiens
  CDR3 for beta chain variable domain of TCR clone 103271 (TRBV15, TRBJ1-6)
CATSGGLNSPLHF

SEQ ID NO: 206543 - protein, 14 aa, Homo sapiens
  CDR3 for alpha chain variable domain of TCR clone 103272 (TRAV26-1, TRAJ49)
CIVRLTNTGNQFYF

SEQ ID NO: 206544 - protein, 13 aa, Homo sapiens
  CDR3 for beta chain variable domain of TCR clone 103272 (TRBV10-1, TRBJ1-1)
CASQGRTNTEAFF

SEQ ID NO: 206545 - protein, 15 aa, Homo sapiens
  CDR3 for alpha chain variable domain of TCR clone 103273 (TRAV8-4, TRAJ37)
CAVTYGSSNTGKLIF

SEQ ID NO: 206546 - protein, 15 aa, Homo sapiens
  CDR3 for beta chain variable domain of TCR clone 103273 (TRBV6-6, TRBJ2-7)
CASSYSYGGSYEQYF

SEQ ID NO: 206547 - protein, 19 aa, Homo sapiens
  CDR3 for alpha chain variable domain of TCR clone 103274 (TRAV1-2, TRAJ26)
CLLPLCCEKPDNYGQNFVF

SEQ ID NO: 206548 - protein, 14 aa, Homo sapiens
  CDR3 for beta chain variable domain of TCR clone 103274 (TRBV25-1, TRBJ1-1)
CASTHLGGNTEAFF

SEQ ID NO: 206549 - protein, 10 aa, Homo sapiens
  CDR3 for alpha chain variable domain of TCR clone 103275 (TRAV21, TRAJ31)
CAVDNARLMF

SEQ ID NO: 206550 - protein, 13 aa, Homo sapiens
  CDR3 for beta chain variable domain of TCR clone 103275 (TRBV4-1, TRBJ1-1)
CSSSRKMNTEAFF

SEQ ID NO: 206551 - protein, 13 aa, Homo sapiens
  CDR3 for alpha chain variable domain of TCR clone 103276 (TRAV27, TRAJ27)
CAARPGNAGKSTF

SEQ ID NO: 206552 - protein, 14 aa, Homo sapiens
  CDR3 for beta chain variable domain of TCR clone 103276 (TRBV7-6, TRBJ2-3)
CASSLGTVTDTQYF

SEQ ID NO: 206553 - protein, 14 aa, Homo sapiens
  CDR3 for alpha chain variable domain of TCR clone 103277 (TRAV27, TRAJ37)
CAGERSSNTGKRIF

SEQ ID NO: 206554 - protein, 15 aa, Homo sapiens
  CDR3 for beta chain variable domain of TCR clone 103277 (TRBV11-3, TRBJ1-6)
CASSLDWGANSPLHF

SEQ ID NO: 206555 - protein, 13 aa, Homo sapiens
  CDR3 for alpha chain variable domain of TCR clone 103278 (TRAV2, TRAJ15)
CAVASQAGTALIF

SEQ ID NO: 206556 - protein, 17 aa, Homo sapiens
  CDR3 for beta chain variable domain of TCR clone 103278 (TRBV7-9, TRBJ1-5)
CASSASQGGYSNQPQHF

SEQ ID NO: 206557 - protein, 11 aa, Homo sapiens
  CDR3 for alpha chain variable domain of TCR clone 103279 (TRAV12-1, TRAJ30)
CVVNGQDKIIF

SEQ ID NO: 206558 - protein, 16 aa, Homo sapiens
  CDR3 for beta chain variable domain of TCR clone 103279 (TRBV27, TRBJ2-5)
CASSYGPGGQKETQYF

SEQ ID NO: 206559 - protein, 14 aa, Homo sapiens
  CDR3 for alpha chain variable domain of TCR clone 103280 (TRAV12-1, TRAJ24)
CVVRSTDSWGKFQF

SEQ ID NO: 206560 - protein, 15 aa, Homo sapiens
  CDR3 for beta chain variable domain of TCR clone 103280 (TRBV11-2, TRBJ1-6)
CASTLRGTGNSPLHF

SEQ ID NO: 206561 - protein, 14 aa, Homo sapiens
  CDR3 for alpha chain variable domain of TCR clone 103281 (TRAV13-2, TRAJ32)
CAESLGGAANKLIF

SEQ ID NO: 206562 - protein, 15 aa, Homo sapiens
  CDR3 for beta chain variable domain of TCR clone 103281 (TRBV20-1, TRBJ1-2)
CSARDSRGRNYGYTF

SEQ ID NO: 206563 - protein, 15 aa, Homo sapiens
  CDR3 for alpha chain variable domain of TCR clone 103282 (TRAV12-2, TRAJ56)
CAVNPFPGANSKLTF

SEQ ID NO: 206564 - protein, 13 aa, Homo sapiens
  CDR3 for beta chain variable domain of TCR clone 103282 (TRBV20-1, TRBJ1-2)
CSARDRVYGGYTF

SEQ ID NO: 206565 - protein, 18 aa, Homo sapiens
  CDR3 for alpha chain variable domain of TCR clone 103283 (TRAV26-1, TRAJ30)
CCVLLHRQSTNIDDKIIF

SEQ ID NO: 206566 - protein, 18 aa, Homo sapiens
  CDR3 for beta chain variable domain of TCR clone 103283 (TRBV4-1, TRBJ1-5)
CASSQDPRGQGLNQPQHF

SEQ ID NO: 206567 - protein, 15 aa, Homo sapiens
  CDR3 for alpha chain variable domain of TCR clone 103284 (TRAV12-2, TRAJ43)
CAFDMRFGAGTRLTV

SEQ ID NO: 206568 - protein, 16 aa, Homo sapiens
  CDR3 for beta chain variable domain of TCR clone 103284 (TRBV29-1, TRBJ2-7)
CSVEDAEDGTAYEQYF

SEQ ID NO: 206569 - protein, 14 aa, Homo sapiens
  CDR3 for alpha chain variable domain of TCR clone 103285 (TRAV8-3, TRAJ39)
CAVGANNAGNMLTF

SEQ ID NO: 206570 - protein, 12 aa, Homo sapiens
  CDR3 for beta chain variable domain of TCR clone 103285 (TRBV28, TRBJ1-3)
CASVSSGNTMYF

SEQ ID NO: 206571 - protein, 17 aa, Homo sapiens
  CDR3 for alpha chain variable domain of TCR clone 103286 (TRAV8-4, TRAJ11)
CAVRDRGENSGYSTLTF

SEQ ID NO: 206572 - protein, 14 aa, Homo sapiens
  CDR3 for beta chain variable domain of TCR clone 103286 (TRBV20-1, TRBJ2-1)
CSPNDEASYNEQFF

SEQ ID NO: 206573 - protein, 15 aa, Homo sapiens
  CDR3 for alpha chain variable domain of TCR clone 103287 (TRAV21, TRAJ38)
CAVRQDAGNNSKLIW

SEQ ID NO: 206574 - protein, 16 aa, Homo sapiens
  CDR3 for beta chain variable domain of TCR clone 103287 (TRBV4-2, TRBJ1-1)
CASRPLDGGGDTEAFF

SEQ ID NO: 206575 - protein, 12 aa, Homo sapiens
  CDR3 for alpha chain variable domain of TCR clone 103288 (TRAV21, TRAJ33)
CAKMDSNYQLIW

SEQ ID NO: 206576 - protein, 13 aa, Homo sapiens
  CDR3 for beta chain variable domain of TCR clone 103288 (TRBV3-1, TRBJ2-2)
CASLARGSGELSF

SEQ ID NO: 206577 - protein, 18 aa, Homo sapiens
  CDR3 for alpha chain variable domain of TCR clone 103289 (TRAV8-3, TRAJ4)
WVRDPTSNDPGGYNKLIF

SEQ ID NO: 206578 - protein, 13 aa, Homo sapiens
  CDR3 for beta chain variable domain of TCR clone 103289 (TRBV20-1, TRBJ1-2)
CSATGTQGSGYTF

SEQ ID NO: 206579 - protein, 12 aa, Homo sapiens
  CDR3 for alpha chain variable domain of TCR clone 103290 (TRAV21, TRAJ23)
CAVMLQGGKLIF

SEQ ID NO: 206580 - protein, 14 aa, Homo sapiens
  CDR3 for beta chain variable domain of TCR clone 103290 (TRBV7-9, TRBJ1-4)
CAITEGEANEKLFV

SEQ ID NO: 206581 - protein, 15 aa, Homo sapiens
  CDR3 for alpha chain variable domain of TCR clone 103291 (TRAV13-1, TRAJ17)
CAASIERAAGNKLTF

SEQ ID NO: 206582 - protein, 14 aa, Homo sapiens
  CDR3 for beta chain variable domain of TCR clone 103291 (TRBV20-1, TRBJ2-7)
CSAKRGRSSYEQYF

SEQ ID NO: 206583 - protein, 13 aa, Homo sapiens
  CDR3 for alpha chain variable domain of TCR clone 103292 (TRAV1-1, TRAJ9)
CAAKNTGGFKTIF

SEQ ID NO: 206584 - protein, 14 aa, Homo sapiens
  CDR3 for beta chain variable domain of TCR clone 103292 (TRBV7-9, TRBJ2-5)
CASSLVGGEETQYF

SEQ ID NO: 206585 - protein, 15 aa, Homo sapiens
  CDR3 for alpha chain variable domain of TCR clone 103293 (TRAV27, TRAJ38)
CAARRNAGNNRKLSW

SEQ ID NO: 206586 - protein, 13 aa, Homo sapiens
  CDR3 for beta chain variable domain of TCR clone 103293 (TRBV7-3, TRBJ2-1)
CASSLDSYNEQFF

SEQ ID NO: 206587 - protein, 12 aa, Homo sapiens
  CDR3 for alpha chain variable domain of TCR clone 103294 (TRAV8-4, TRAJ37)
FAKSSNTGKLIF

SEQ ID NO: 206588 - protein, 15 aa, Homo sapiens
  CDR3 for beta chain variable domain of TCR clone 103294 (TRBV7-9, TRBJ2-7)
CASSSSGLAVYEQYF

SEQ ID NO: 206589 - protein, 13 aa, Homo sapiens
  CDR3 for alpha chain variable domain of TCR clone 103295 (TRAV13-1, TRAJ5)
CAASDTGRRALTF

SEQ ID NO: 206590 - protein, 13 aa, Homo sapiens
  CDR3 for beta chain variable domain of TCR clone 103295 (TRBV7-3, TRBJ1-1)
CASSQDWGAEAFF

SEQ ID NO: 206591 - protein, 17 aa, Homo sapiens
  CDR3 for alpha chain variable domain of TCR clone 103296 (TRAV3, TRAJ6)
CAVRDGPRAGGSYIPTF

SEQ ID NO: 206592 - protein, 16 aa, Homo sapiens
  CDR3 for beta chain variable domain of TCR clone 103296 (TRBV19, TRBJ1-1)
CASSPTRFWPGTEAFF

SEQ ID NO: 206593 - protein, 14 aa, Homo sapiens
  CDR3 for alpha chain variable domain of TCR clone 103297 (TRAV35, TRAJ40)
CAGSTTSGTYKYIF

SEQ ID NO: 206594 - protein, 11 aa, Homo sapiens
  CDR3 for beta chain variable domain of TCR clone 103297 (TRBV13, TRBJ2-3)
CASGNADTQYF

SEQ ID NO: 206595 - protein, 16 aa, Homo sapiens
  CDR3 for alpha chain variable domain of TCR clone 103298 (TRAV30, TRAJ24)
CGTEIVDADSWGKFKF

SEQ ID NO: 206596 - protein, 15 aa, Homo sapiens
  CDR3 for beta chain variable domain of TCR clone 103298 (TRBV5-1, TRBJ1-1)
CASSLAPRGNTEAFF

SEQ ID NO: 206597 - protein, 16 aa, Homo sapiens
  CDR3 for alpha chain variable domain of TCR clone 103299 (TRAV12-2, TRAJ10)
CAVNRVLTGGGNKLTL

SEQ ID NO: 206598 - protein, 14 aa, Homo sapiens
  CDR3 for beta chain variable domain of TCR clone 103299 (TRBV9, TRBJ2-1)
CASSVALAVNEQFF

SEQ ID NO: 206599 - protein, 14 aa, Homo sapiens
  CDR3 for alpha chain variable domain of TCR clone 103300 (TRAV38-1, TRAJ45)
CAYYSGGGAHGLTF

SEQ ID NO: 206600 - protein, 20 aa, Homo sapiens
  CDR3 for beta chain variable domain of TCR clone 103300 (TRBV28, TRBJ2-1)
CASTPIGRSPGLAGGNEQFF

SEQ ID NO: 206601 - protein, 14 aa, Homo sapiens
  CDR3 for alpha chain variable domain of TCR clone 103301 (TRAV1-2, TRAJ16)
CAVNRFSDGQKLLF

SEQ ID NO: 206602 - protein, 14 aa, Homo sapiens
  CDR3 for beta chain variable domain of TCR clone 103301 (TRBV12-4, TRBJ1-2)
CASSPLGTVGGYTF

SEQ ID NO: 206603 - protein, 15 aa, Homo sapiens
  CDR3 for alpha chain variable domain of TCR clone 103302 (TRAV38-1, TRAJ57)
CAFMDSQGGSEKLVF

SEQ ID NO: 206604 - protein, 16 aa, Homo sapiens
  CDR3 for beta chain variable domain of TCR clone 103302 (TRBV12-5, TRBJ2-5)
CASGPRTSGNQETQYF

SEQ ID NO: 206605 - protein, 17 aa, Homo sapiens
  CDR3 for alpha chain variable domain of TCR clone 103303 (TRAV1-1, TRAJ11)
CAGYSTLTFGKGTMLLV

SEQ ID NO: 206606 - protein, 20 aa, Homo sapiens
  CDR3 for beta chain variable domain of TCR clone 103303 (TRBV7-8, TRBJ2-2)
CASSHLFPGPTIHITGELFF

SEQ ID NO: 206607 - protein, 14 aa, Homo sapiens
  CDR3 for alpha chain variable domain of TCR clone 103304 (TRAV30, TRAJ26)
CGTEIVSYGQNFVF

SEQ ID NO: 206608 - protein, 14 aa, Homo sapiens
  CDR3 for beta chain variable domain of TCR clone 103304 (TRBV25-1, TRBJ1-1)
CASTHLGGNTEAFF

SEQ ID NO: 206609 - protein, 16 aa, Homo sapiens
  CDR3 for alpha chain variable domain of TCR clone 103305 (TRAV38-2/DV8, TRAJ47)
CAYRGAIMEYGDKLVF

SEQ ID NO: 206610 - protein, 14 aa, Homo sapiens
  CDR3 for beta chain variable domain of TCR clone 103305 (TRBV19, TRBJ2-7)
CASSIFAGTYEQYF

SEQ ID NO: 206611 - protein, 16 aa, Homo sapiens
  CDR3 for alpha chain variable domain of TCR clone 103306 (TRAV21, TRAJ52)
CAVIPAGGTSYGKLTF

SEQ ID NO: 206612 - protein, 16 aa, Homo sapiens
  CDR3 for beta chain variable domain of TCR clone 103306 (TRBV25-1, TRBJ1-4)
CASSERGQAAMEKLFF

SEQ ID NO: 206613 - protein, 12 aa, Homo sapiens
  CDR3 for alpha chain variable domain of TCR clone 103307 (TRAV36/DV7, TRAJ54)
CAVVRGAQKLVF

SEQ ID NO: 206614 - protein, 15 aa, Homo sapiens
  CDR3 for beta chain variable domain of TCR clone 103307 (TRBV5-1, TRBJ2-7)
CASSLNGGPAREQYF

SEQ ID NO: 206615 - protein, 13 aa, Homo sapiens
  CDR3 for alpha chain variable domain of TCR clone 103308 (TRAV20, TRAJ20)
CAVRAGSGYKLSF

SEQ ID NO: 206616 - protein, 13 aa, Homo sapiens
  CDR3 for beta chain variable domain of TCR clone 103308 (TRBV3-1, TRBJ2-3)
CASSQGGGDTQYF

SEQ ID NO: 206617 - protein, 18 aa, Homo sapiens
  CDR3 for alpha chain variable domain of TCR clone 103309 (TRAV12-3, TRAJ52)
CAMSVGGAGGTSYGELTF

SEQ ID NO: 206618 - protein, 17 aa, Homo sapiens
  CDR3 for beta chain variable domain of TCR clone 103309 (TRBV11-2, TRBJ2-1)
CASSLYPPGVEYNEQFF

SEQ ID NO: 206619 - protein, 16 aa, Homo sapiens
  CDR3 for alpha chain variable domain of TCR clone 103310 (TRAV21, TRAJ37)
CAVGPRGSSNTSKLIF

SEQ ID NO: 206620 - protein, 16 aa, Homo sapiens
  CDR3 for beta chain variable domain of TCR clone 103310 (TRBV2, TRBJ2-1)
CASSVGGSLSYNEQFF

SEQ ID NO: 206621 - protein, 10 aa, Homo sapiens
  CDR3 for alpha chain variable domain of TCR clone 103311 (TRAV23/DV6, TRAJ43)
CAAAVAALEQ

SEQ ID NO: 206622 - protein, 13 aa, Homo sapiens
  CDR3 for beta chain variable domain of TCR clone 103311 (TRBV7-7, TRBJ2-3)
CASSLSRADTQYF

SEQ ID NO: 206623 - protein, 13 aa, Homo sapiens
  CDR3 for alpha chain variable domain of TCR clone 103312 (TRAV35, TRAJ57)
CAGSQGGSEKLVF

SEQ ID NO: 206624 - protein, 13 aa, Homo sapiens
  CDR3 for beta chain variable domain of TCR clone 103312 (TRBV25-1, TRBJ1-1)
CQHPPGGNTEAFF

SEQ ID NO: 206625 - protein, 16 aa, Homo sapiens
  CDR3 for alpha chain variable domain of TCR clone 103313 (TRAV3, TRAJ37)
CAVRPHGSGNTGKLIS

SEQ ID NO: 206626 - protein, 13 aa, Homo sapiens
  CDR3 for beta chain variable domain of TCR clone 103313 (TRBV2, TRBJ1-5)
CASGTGGYQPQHF

SEQ ID NO: 206627 - protein, 14 aa, Homo sapiens
  CDR3 for alpha chain variable domain of TCR clone 103314 (TRAV20, TRAJ26)
CAVQAVNYGQNFVF

SEQ ID NO: 206628 - protein, 13 aa, Homo sapiens
  CDR3 for beta chain variable domain of TCR clone 103314 (TRBV7-3, TRBJ1-1)
CASSQDWGAEAFF

SEQ ID NO: 206629 - protein, 10 aa, Homo sapiens
  CDR3 for alpha chain variable domain of TCR clone 103315 (TRAV26-2, TRAJ49)
CILLGNQFYF

SEQ ID NO: 206630 - protein, 14 aa, Homo sapiens
  CDR3 for beta chain variable domain of TCR clone 103315 (TRBV19, TRBJ2-1)
CASPTFVLSGEQFF

SEQ ID NO: 206631 - protein, 15 aa, Homo sapiens
  CDR3 for alpha chain variable domain of TCR clone 103316 (TRAV8-6, TRAJ10)
CAVSDQAGGGNKLTV

SEQ ID NO: 206632 - protein, 15 aa, Homo sapiens
  CDR3 for beta chain variable domain of TCR clone 103316 (TRBV3-1, TRBJ2-5)
CASSANLGGPETQYF

SEQ ID NO: 206633 - protein, 13 aa, Homo sapiens
  CDR3 for alpha chain variable domain of TCR clone 103317 (TRAV21, TRAJ27)
CAARPGNAGKSTF

SEQ ID NO: 206634 - protein, 13 aa, Homo sapiens
  CDR3 for beta chain variable domain of TCR clone 103317 (TRBV7-3, TRBJ1-1)
CASSLTQGTEAFF

SEQ ID NO: 206635 - protein, 12 aa, Homo sapiens
  CDR3 for alpha chain variable domain of TCR clone 103318 (TRAV12-1, TRAJ40)
CVVYSGTYKYIF

SEQ ID NO: 206636 - protein, 16 aa, Homo sapiens
  CDR3 for beta chain variable domain of TCR clone 103318 (TRBV2, TRBJ1-5)
CASSEGGFYSNQPQHF

SEQ ID NO: 206637 - protein, 14 aa, Homo sapiens
  CDR3 for alpha chain variable domain of TCR clone 103319 (TRAV3, TRAJ22)
CAVRDYGSARQLTF

SEQ ID NO: 206638 - protein, 13 aa, Homo sapiens
  CDR3 for beta chain variable domain of TCR clone 103319 (TRBV11-2, TRBJ2-5)
CASGPGAKETQYF

SEQ ID NO: 206639 - protein, 15 aa, Homo sapiens
  CDR3 for alpha chain variable domain of TCR clone 103320 (TRAV12-2, TRAJ43)
CAFDMRFGAGTRLTV

SEQ ID NO: 206640 - protein, 18 aa, Homo sapiens
  CDR3 for beta chain variable domain of TCR clone 103320 (TRBV20-1, TRBJ2-3)
CSASELAGGPGTTDTQYF

SEQ ID NO: 206641 - protein, 15 aa, Homo sapiens
  CDR3 for alpha chain variable domain of TCR clone 103321 (TRAV40, TRAJ56)
CLLHPDTGANSKLTF

SEQ ID NO: 206642 - protein, 12 aa, Homo sapiens
  CDR3 for beta chain variable domain of TCR clone 103321 (TRBV5-1, TRBJ1-2)
CASSQDTYGYTF

SEQ ID NO: 206643 - protein, 14 aa, Homo sapiens
  CDR3 for alpha chain variable domain of TCR clone 103322 (TRAV26-1, TRAJ38)
CIADNAGSNRKLIW

SEQ ID NO: 206644 - protein, 12 aa, Homo sapiens
  CDR3 for beta chain variable domain of TCR clone 103322 (TRBV29-1, TRBJ2-3)
CSVTGGADTQYF

SEQ ID NO: 206645 - protein, 15 aa, Homo sapiens
  CDR3 for alpha chain variable domain of TCR clone 103323 (TRAV12-3, TRAJ52)
CNGGAGGTSYGKLTF

SEQ ID NO: 206646 - protein, 17 aa, Homo sapiens
  CDR3 for beta chain variable domain of TCR clone 103323 (TRBV7-8, TRBJ2-6)
CASSAGTGGAGANVLTF

SEQ ID NO: 206647 - protein, 15 aa, Homo sapiens
  CDR3 for alpha chain variable domain of TCR clone 103324 (TRAV38-1, TRAJ28)
CAFIRSGAGSYQLTF

SEQ ID NO: 206648 - protein, 14 aa, Homo sapiens
  CDR3 for beta chain variable domain of TCR clone 103324 (TRBV7-9, TRBJ2-7)
CASSLEAVGDEQYF

SEQ ID NO: 206649 - protein, 14 aa, Homo sapiens
  CDR3 for alpha chain variable domain of TCR clone 103325 (TRAV12-2, TRAJ45)
CAVNIGGGADGLTF

SEQ ID NO: 206650 - protein, 13 aa, Homo sapiens
  CDR3 for beta chain variable domain of TCR clone 103325 (TRBV10-3, TRBJ1-2)
CAISERDSYGYTF

SEQ ID NO: 206651 - protein, 10 aa, Homo sapiens
  CDR3 for alpha chain variable domain of TCR clone 103326 (TRAV12-3, TRAJ49)
CAMNDDQFYF

SEQ ID NO: 206652 - protein, 15 aa, Homo sapiens
  CDR3 for beta chain variable domain of TCR clone 103326 (TRBV5-1, TRBJ2-1)
CASSPPRAPYNEQFF

SEQ ID NO: 206653 - protein, 11 aa, Homo sapiens
  CDR3 for alpha chain variable domain of TCR clone 103327 (TRAV12-3, TRAJ43)
CAMSVSNDMRF

SEQ ID NO: 206654 - protein, 15 aa, Homo sapiens
  CDR3 for beta chain variable domain of TCR clone 103327 (TRBV7-3, TRBJ2-1)
CASSLGQGPFGERFF

SEQ ID NO: 206655 - protein, 16 aa, Homo sapiens
  CDR3 for alpha chain variable domain of TCR clone 103328 (TRAV30, TRAJ24)
CGTEIVGADSWGKFKF

SEQ ID NO: 206656 - protein, 15 aa, Homo sapiens
  CDR3 for beta chain variable domain of TCR clone 103328 (TRBV7-9, TRBJ1-4)
CASSARTGGNEKLFF

SEQ ID NO: 206657 - protein, 23 aa, Homo sapiens
  CDR3 for alpha chain variable domain of TCR clone 103329 (TRAV26-1, TRAJ38)
CIADNAGNNHIQNPDPAVYQLRD

SEQ ID NO: 206658 - protein, 13 aa, Homo sapiens
  CDR3 for beta chain variable domain of TCR clone 103329 (TRBV20-1, TRBJ1-1)
CSAMGGGNTEAFF

SEQ ID NO: 206659 - protein, 16 aa, Homo sapiens
  CDR3 for alpha chain variable domain of TCR clone 103330 (TRAV12-3, TRAJ53)
CAMSPGSGGSNYKLAF

SEQ ID NO: 206660 - protein, 11 aa, Homo sapiens
  CDR3 for beta chain variable domain of TCR clone 103330 (TRBV29-1, TRBJ2-5)
CSDDRTGTQYF

SEQ ID NO: 206661 - protein, 13 aa, Homo sapiens
  CDR3 for alpha chain variable domain of TCR clone 103331 (TRAV35, TRAJ22)
CAGLSVSARQLTF

SEQ ID NO: 206662 - protein, 16 aa, Homo sapiens
  CDR3 for beta chain variable domain of TCR clone 103331 (TRBV7-9, TRBJ2-1)
CASSLVLTGQGNEQFF

SEQ ID NO: 206663 - protein, 17 aa, Homo sapiens
  CDR3 for alpha chain variable domain of TCR clone 103332 (TRAV39, TRAJ32)
CAVDIKGVGGATNKLIF

SEQ ID NO: 206664 - protein, 11 aa, Homo sapiens
  CDR3 for beta chain variable domain of TCR clone 103332 (TRBV18, TRBJ1-2)
CASSPLNGYTF

SEQ ID NO: 206665 - protein, 17 aa, Homo sapiens
  CDR3 for alpha chain variable domain of TCR clone 103333 (TRAV26-1, TRAJ53)
CIVRVDDSGGSNYKLTF

SEQ ID NO: 206666 - protein, 13 aa, Homo sapiens
  CDR3 for beta chain variable domain of TCR clone 103333 (TRBV7-3, TRBJ1-1)
CASSQDWGAEAFF

SEQ ID NO: 206667 - protein, 14 aa, Homo sapiens
  CDR3 for alpha chain variable domain of TCR clone 103334 (TRAV29/DV5, TRAJ49)
CAARLSNTGNQFYF

SEQ ID NO: 206668 - protein, 15 aa, Homo sapiens
  CDR3 for beta chain variable domain of TCR clone 103334 (TRBV20-1, TRBJ2-1)
CSARGIGGTYNEQFF

SEQ ID NO: 206669 - protein, 14 aa, Homo sapiens
  CDR3 for alpha chain variable domain of TCR clone 103335 (TRAV9-2, TRAJ39)
CALYIYSAGNMLTF

SEQ ID NO: 206670 - protein, 14 aa, Homo sapiens
  CDR3 for beta chain variable domain of TCR clone 103335 (TRBV6-1, TRBJ1-3)
CASVQGGGGNTIYF

SEQ ID NO: 206671 - protein, 14 aa, Homo sapiens
  CDR3 for alpha chain variable domain of TCR clone 103336 (TRAV8-4, TRAJ4)
CAVSPSSGYNKLIF

SEQ ID NO: 206672 - protein, 15 aa, Homo sapiens
  CDR3 for beta chain variable domain of TCR clone 103336 (TRBV7-8, TRBJ2-3)
CASSLSADSGGAQYF

SEQ ID NO: 206673 - protein, 13 aa, Homo sapiens
  CDR3 for alpha chain variable domain of TCR clone 103337 (TRAV26-2, TRAJ43)
CILRAVNNNDMRF

SEQ ID NO: 206674 - protein, 15 aa, Homo sapiens
  CDR3 for beta chain variable domain of TCR clone 103337 (TRBV7-2, TRBJ2-1)
CDSTHGTGIYNEQFF

SEQ ID NO: 206675 - protein, 13 aa, Homo sapiens
  CDR3 for alpha chain variable domain of TCR clone 103338 (TRAV17, TRAJ21)
CATDGGNFNKFYF

SEQ ID NO: 206676 - protein, 15 aa, Homo sapiens
  CDR3 for beta chain variable domain of TCR clone 103338 (TRBV28, TRBJ2-5)
CASSPPWSYQETQYF

SEQ ID NO: 206677 - protein, 15 aa, Homo sapiens
  CDR3 for alpha chain variable domain of TCR clone 103339 (TRAV1-2, TRAJ9)
CAVRDDGTGGFKTIF

SEQ ID NO: 206678 - protein, 15 aa, Homo sapiens
  CDR3 for beta chain variable domain of TCR clone 103339 (TRBV20-1, TRBJ2-7)
CSARDRVSGMDEQYF

SEQ ID NO: 206679 - protein, 12 aa, Homo sapiens
  CDR3 for alpha chain variable domain of TCR clone 103340 (TRAV20, TRAJ39)
CAVGNAGNMLTF

SEQ ID NO: 206680 - protein, 16 aa, Homo sapiens
  CDR3 for beta chain variable domain of TCR clone 103340 (TRBV10-3, TRBJ2-1)
CAISGVGDGGGGEQFF

SEQ ID NO: 206681 - protein, 13 aa, Homo sapiens
  CDR3 for alpha chain variable domain of TCR clone 103341 (TRAV13-1, TRAJ24)
CAASDGSWGKLQC

SEQ ID NO: 206682 - protein, 13 aa, Homo sapiens
  CDR3 for beta chain variable domain of TCR clone 103341 (TRBV4-3, TRBJ2-5)
CASSQGGGETQYF

SEQ ID NO: 206683 - protein, 15 aa, Homo sapiens
  CDR3 for alpha chain variable domain of TCR clone 103342 (TRAV2, TRAJ22)
CAVPSREGSARQLTF

SEQ ID NO: 206684 - protein, 11 aa, Homo sapiens
  CDR3 for beta chain variable domain of TCR clone 103342 (TRBV27, TRBJ2-3)
CASSLGDTQYF

SEQ ID NO: 206685 - protein, 13 aa, Homo sapiens
  CDR3 for alpha chain variable domain of TCR clone 103343 (TRAV27, TRAJ29)
CAGAHSRNTPLVF

SEQ ID NO: 206686 - protein, 13 aa, Homo sapiens
  CDR3 for beta chain variable domain of TCR clone 103343 (TRBV7-3, TRBJ1-1)
CASSQDWGAEAFF

SEQ ID NO: 206687 - protein, 14 aa, Homo sapiens
  CDR3 for alpha chain variable domain of TCR clone 103344 (TRAV1-2, TRAJ8)
CAVREDTGFQKLVF

SEQ ID NO: 206688 - protein, 18 aa, Homo sapiens
  CDR3 for beta chain variable domain of TCR clone 103344 (TRBV20-1, TRBJ2-3)
CSASGLAGGPGTTDTQYF

SEQ ID NO: 206689 - protein, 10 aa, Homo sapiens
  CDR3 for alpha chain variable domain of TCR clone 103345 (TRAV12-1, TRAJ37)
ARGNTGELIF

SEQ ID NO: 206690 - protein, 15 aa, Homo sapiens
  CDR3 for beta chain variable domain of TCR clone 103345 (TRBV7-2, TRBJ2-3)
CASSLDQGGTDTQYF

SEQ ID NO: 206691 - protein, 13 aa, Homo sapiens
  CDR3 for alpha chain variable domain of TCR clone 103346 (TRAV21, TRAJ27)
CAARPGNAGKSTF

SEQ ID NO: 206692 - protein, 16 aa, Homo sapiens
  CDR3 for beta chain variable domain of TCR clone 103346 (TRBV24-1, TRBJ2-3)
CATSDPGTGATDTQYF

SEQ ID NO: 206693 - protein, 14 aa, Homo sapiens
  CDR3 for alpha chain variable domain of TCR clone 103347 (TRAV12-3, TRAJ12)
CAMGEVDSSYKLIF

SEQ ID NO: 206694 - protein, 12 aa, Homo sapiens
  CDR3 for beta chain variable domain of TCR clone 103347 (TRBV18, TRBJ1-4)
CASSPSREKLFF

SEQ ID NO: 206695 - protein, 14 aa, Homo sapiens
  CDR3 for alpha chain variable domain of TCR clone 103348 (TRAV34, TRAJ44)
CGADGTGTASKLTF

SEQ ID NO: 206696 - protein, 13 aa, Homo sapiens
  CDR3 for beta chain variable domain of TCR clone 103348 (TRBV7-2, TRBJ2-7)
CASSSPSGSEQYF

SEQ ID NO: 206697 - protein, 16 aa, Homo sapiens
  CDR3 for alpha chain variable domain of TCR clone 103349 (TRAV16, TRAJ4)
CALSRMFSGSYNKLIF

SEQ ID NO: 206698 - protein, 16 aa, Homo sapiens
  CDR3 for beta chain variable domain of TCR clone 103349 (TRBV24-1, TRBJ2-3)
CATSDHGTGATDTQYF

SEQ ID NO: 206699 - protein, 18 aa, Homo sapiens
  CDR3 for alpha chain variable domain of TCR clone 103350 (TRAV12-3, TRAJ52)
CAMSRTNAGGTSYGKLTF

SEQ ID NO: 206700 - protein, 17 aa, Homo sapiens
  CDR3 for beta chain variable domain of TCR clone 103350 (TRBV7-3, TRBJ2-3)
CASSLMKRMRGADTKYF

SEQ ID NO: 206701 - protein, 14 aa, Homo sapiens
  CDR3 for alpha chain variable domain of TCR clone 103351 (TRAV13-1, TRAJ35)
CAASKGGFGNVLHC

SEQ ID NO: 206702 - protein, 12 aa, Homo sapiens
  CDR3 for beta chain variable domain of TCR clone 103351 (TRBV6-1, TRBJ2-7)
CASSDYSYEQYF

SEQ ID NO: 206703 - protein, 18 aa, Homo sapiens
  CDR3 for alpha chain variable domain of TCR clone 103352 (TRAV26-2, TRAJ54)
CILRDVEEGIQGAQKLVF

SEQ ID NO: 206704 - protein, 16 aa, Homo sapiens
  CDR3 for beta chain variable domain of TCR clone 103352 (TRBV6-1, TRBJ2-5)
CASSETLDRGAETQYF

SEQ ID NO: 206705 - protein, 14 aa, Homo sapiens
  CDR3 for alpha chain variable domain of TCR clone 103353 (TRAV17, TRAJ53)
CATDAGGGNYKLTF

SEQ ID NO: 206706 - protein, 16 aa, Homo sapiens
  CDR3 for beta chain variable domain of TCR clone 103353 (TRBV4-1, TRBJ1-1)
CASSQDAGMGNTEAFF

SEQ ID NO: 206707 - protein, 14 aa, Homo sapiens
  CDR3 for alpha chain variable domain of TCR clone 103354 (TRAV23/DV6, TRAJ8)
YAASKATGFQKLVF

SEQ ID NO: 206708 - protein, 15 aa, Homo sapiens
  CDR3 for beta chain variable domain of TCR clone 103354 (TRBV28, TRBJ2-3)
CASSPDRQGANTQYF

SEQ ID NO: 206709 - protein, 12 aa, Homo sapiens
  CDR3 for alpha chain variable domain of TCR clone 103355 (TRAV36/DV7, TRAJ37)
CACYGNTGKLIF

SEQ ID NO: 206710 - protein, 13 aa, Homo sapiens
  CDR3 for beta chain variable domain of TCR clone 103355 (TRBV19, TRBJ2-7)
CASSPRQSYEQYF

SEQ ID NO: 206711 - protein, 14 aa, Homo sapiens
  CDR3 for alpha chain variable domain of TCR clone 103356 (TRAV12-1, TRAJ24)
RVVRSTDSWGKFQF

SEQ ID NO: 206712 - protein, 13 aa, Homo sapiens
  CDR3 for beta chain variable domain of TCR clone 103356 (TRBV2, TRBJ2-3)
CASILAGGQGQYF

SEQ ID NO: 206713 - protein, 15 aa, Homo sapiens
  CDR3 for alpha chain variable domain of TCR clone 103357 (TRAV1-1, TRAJ26)
SALSPRRNYGQNFVF

SEQ ID NO: 206714 - protein, 16 aa, Homo sapiens
  CDR3 for beta chain variable domain of TCR clone 103357 (TRBV7-3, TRBJ2-3)
CASSPGGGAVTDTQYF

SEQ ID NO: 206715 - protein, 15 aa, Homo sapiens
  CDR3 for alpha chain variable domain of TCR clone 103358 (TRAV26-2, TRAJ28)
CILVESGAGSYQLTF

SEQ ID NO: 206716 - protein, 15 aa, Homo sapiens
  CDR3 for beta chain variable domain of TCR clone 103358 (TRBV5-5, TRBJ1-5)
CASSLKGGGEQPQHF

SEQ ID NO: 206717 - protein, 14 aa, Homo sapiens
  CDR3 for alpha chain variable domain of TCR clone 103359 (TRAV3, TRAJ36)
CAVRDGTGANNLFF

SEQ ID NO: 206718 - protein, 16 aa, Homo sapiens
  CDR3 for beta chain variable domain of TCR clone 103359 (TRBV7-3, TRBJ2-5)
CASIQPGGSVQETQYV

SEQ ID NO: 206719 - protein, 14 aa, Homo sapiens
  CDR3 for alpha chain variable domain of TCR clone 103360 (TRAV4, TRAJ10)
LLVGDTGGGNKLIF

SEQ ID NO: 206720 - protein, 13 aa, Homo sapiens
  CDR3 for beta chain variable domain of TCR clone 103360 (TRBV10-2, TRBJ2-5)
CASSVGPQETQYF

SEQ ID NO: 206721 - protein, 12 aa, Homo sapiens
  CDR3 for alpha chain variable domain of TCR clone 103361 (TRAV20, TRAJ56)
CAVTRANSKLTF

SEQ ID NO: 206722 - protein, 14 aa, Homo sapiens
  CDR3 for beta chain variable domain of TCR clone 103361 (TRBV20-1, TRBJ2-5)
CSALVPGYQETQYF

SEQ ID NO: 206723 - protein, 12 aa, Homo sapiens
  CDR3 for alpha chain variable domain of TCR clone 103362 (TRAV24, TRAJ37)
CASSSNTGKLIF

SEQ ID NO: 206724 - protein, 14 aa, Homo sapiens
  CDR3 for beta chain variable domain of TCR clone 103362 (TRBV11-2, TRBJ2-3)
CASSRLARTDTQYF

SEQ ID NO: 206725 - protein, 14 aa, Homo sapiens
  CDR3 for alpha chain variable domain of TCR clone 103363 (TRAV19, TRAJ45)
CAFLSGGGADGLTF

SEQ ID NO: 206726 - protein, 13 aa, Homo sapiens
  CDR3 for beta chain variable domain of TCR clone 103363 (TRBV7-9, TRBJ1-2)
CASSLKQNYGYTF

SEQ ID NO: 206727 - protein, 14 aa, Homo sapiens
  CDR3 for alpha chain variable domain of TCR clone 103364 (TRAV8-3, TRAJ28)
CAVVPGAGSYQLTF

SEQ ID NO: 206728 - protein, 15 aa, Homo sapiens
  CDR3 for beta chain variable domain of TCR clone 103364 (TRBV5-1, TRBJ2-2)
CASSSQGGNTGELFF

SEQ ID NO: 206729 - protein, 14 aa, Homo sapiens
  CDR3 for alpha chain variable domain of TCR clone 103365 (TRAV26-1, TRAJ38)
CIADNAGNNRKLIW

SEQ ID NO: 206730 - protein, 13 aa, Homo sapiens
  CDR3 for beta chain variable domain of TCR clone 103365 (TRBV7-9, TRBJ1-2)
CASSLKQNYGDTF

SEQ ID NO: 206731 - protein, 17 aa, Homo sapiens
  CDR3 for alpha chain variable domain of TCR clone 103366 (TRAV3, TRAJ6)
CPVRDGPRAGGSYIPTF

SEQ ID NO: 206732 - protein, 20 aa, Homo sapiens
  CDR3 for beta chain variable domain of TCR clone 103366 (TRBV28, TRBJ2-1)
CASTPIGRSPGLAGGNEQFF

SEQ ID NO: 206733 - protein, 14 aa, Homo sapiens
  CDR3 for alpha chain variable domain of TCR clone 103367 (TRAV8-4, TRAJ48)
CAVSETFGNEKLTF

SEQ ID NO: 206734 - protein, 11 aa, Homo sapiens
  CDR3 for beta chain variable domain of TCR clone 103367 (TRBV29-1, TRBJ2-5)
CSEDRTGTQYF

SEQ ID NO: 206735 - protein, 16 aa, Homo sapiens
  CDR3 for alpha chain variable domain of TCR clone 103368 (TRAV3, TRAJ10)
CAVRDMRAGGGNKLTF

SEQ ID NO: 206736 - protein, 15 aa, Homo sapiens
  CDR3 for beta chain variable domain of TCR clone 103368 (TRBV11-2, TRBJ2-2)
CASSSDRVNAGELFF

SEQ ID NO: 206737 - protein, 14 aa, Homo sapiens
  CDR3 for alpha chain variable domain of TCR clone 103369 (TRAV23/DV6, TRAJ3)
CAASMASSASKIIF

SEQ ID NO: 206738 - protein, 13 aa, Homo sapiens
  CDR3 for beta chain variable domain of TCR clone 103369 (TRBV27, TRBJ2-5)
CASFARGLETQYF

SEQ ID NO: 206739 - protein, 14 aa, Homo sapiens
  CDR3 for alpha chain variable domain of TCR clone 103370 (TRAV1-2, TRAJ35)
CAASKGGFGNVLHC

SEQ ID NO: 206740 - protein, 13 aa, Homo sapiens
  CDR3 for beta chain variable domain of TCR clone 103370 (TRBV7-3, TRBJ1-1)
CASSQDWGAEAFF

SEQ ID NO: 206741 - protein, 14 aa, Homo sapiens
  CDR3 for alpha chain variable domain of TCR clone 103371 (TRAV12-2, TRAJ17)
CAVLFKAAGNKLTF

SEQ ID NO: 206742 - protein, 14 aa, Homo sapiens
  CDR3 for beta chain variable domain of TCR clone 103371 (TRBV7-8, TRBJ2-5)
CASSATGGQEDQYF

SEQ ID NO: 206743 - protein, 13 aa, Homo sapiens
  CDR3 for alpha chain variable domain of TCR clone 103372 (TRAV12-2, TRAJ4)
CADRSGGYNKLIF

SEQ ID NO: 206744 - protein, 15 aa, Homo sapiens
  CDR3 for beta chain variable domain of TCR clone 103372 (TRBV10-3, TRBJ2-1)
CAISDVQDRAYEQFF

SEQ ID NO: 206745 - protein, 13 aa, Homo sapiens
  CDR3 for alpha chain variable domain of TCR clone 103373 (TRAV27, TRAJ29)
CAGAHSGNTPLVF

SEQ ID NO: 206746 - protein, 14 aa, Homo sapiens
  CDR3 for beta chain variable domain of TCR clone 103373 (TRBV7-2, TRBJ2-7)
CASRSQGAAYEQYF

SEQ ID NO: 206747 - protein, 14 aa, Homo sapiens
  CDR3 for alpha chain variable domain of TCR clone 103374 (TRAV26-1, TRAJ45)
CIEVTGGGADGLTF

SEQ ID NO: 206748 - protein, 15 aa, Homo sapiens
  CDR3 for beta chain variable domain of TCR clone 103374 (TRBV18, TRBJ1-1)
CASSPRQGENTEAFF

SEQ ID NO: 206749 - protein, 14 aa, Homo sapiens
  CDR3 for alpha chain variable domain of TCR clone 103375 (TRAV1-2, TRAJ16)
CAVNRFSDGQKLLF

SEQ ID NO: 206750 - protein, 13 aa, Homo sapiens
  CDR3 for beta chain variable domain of TCR clone 103375 (TRBV4-1, TRBJ2-1)
CASSQAGGDELFF

SEQ ID NO: 206751 - protein, 13 aa, Homo sapiens
  CDR3 for alpha chain variable domain of TCR clone 103376 (TRAV21, TRAJ27)
CAARPGNAGKSTF

SEQ ID NO: 206752 - protein, 14 aa, Homo sapiens
  CDR3 for beta chain variable domain of TCR clone 103376 (TRBV5-1, TRBJ2-2)
CASSWTGNTGELFF

SEQ ID NO: 206753 - protein, 13 aa, Homo sapiens
  CDR3 for alpha chain variable domain of TCR clone 103377 (TRAV27, TRAJ6)
CAGGTRGSYIPKF

SEQ ID NO: 206754 - protein, 15 aa, Homo sapiens
  CDR3 for beta chain variable domain of TCR clone 103377 (TRBV5-5, TRBJ2-7)
CASSLAAPLSYEQYF

SEQ ID NO: 206755 - protein, 15 aa, Homo sapiens
  CDR3 for alpha chain variable domain of TCR clone 103378 (TRAV22, TRAJ24)
CAVPLSTDSWGNLQF

SEQ ID NO: 206756 - protein, 16 aa, Homo sapiens
  CDR3 for beta chain variable domain of TCR clone 103378 (TRBV28, TRBJ2-7)
CASSFPDRRLTYEQYF

SEQ ID NO: 206757 - protein, 15 aa, Homo sapiens
  CDR3 for alpha chain variable domain of TCR clone 103379 (TRAV20, TRAJ4)
CAVEGSSGGYNKLSF

SEQ ID NO: 206758 - protein, 14 aa, Homo sapiens
  CDR3 for beta chain variable domain of TCR clone 103379 (TRBV7-8, TRBJ2-7)
CASTLGGALGEQYF

SEQ ID NO: 206759 - protein, 12 aa, Homo sapiens
  CDR3 for alpha chain variable domain of TCR clone 103380 (TRAV21, TRAJ31)
CAVSPARGILMF

SEQ ID NO: 206760 - protein, 14 aa, Homo sapiens
  CDR3 for beta chain variable domain of TCR clone 103380 (TRBV28, TRBJ2-7)
CASSLLRISYEQYF

SEQ ID NO: 206761 - protein, 13 aa, Homo sapiens
  CDR3 for alpha chain variable domain of TCR clone 103381 (TRAV23/DV6, TRAJ27)
CAASKPMQANQPS

SEQ ID NO: 206762 - protein, 14 aa, Homo sapiens
  CDR3 for beta chain variable domain of TCR clone 103381 (TRBV5-4, TRBJ1-1)
CASSLDSRRDEAFF

SEQ ID NO: 206763 - protein, 13 aa, Homo sapiens
  CDR3 for alpha chain variable domain of TCR clone 103382 (TRAV3, TRAJ11)
CAVRVSGYSTLTF

SEQ ID NO: 206764 - protein, 12 aa, Homo sapiens
  CDR3 for beta chain variable domain of TCR clone 103382 (TRBV20-1, TRBJ2-1)
CSAIGPRNEQFF

SEQ ID NO: 206765 - protein, 18 aa, Homo sapiens
  CDR3 for alpha chain variable domain of TCR clone 103383 (TRAV29/DV5, TRAJ52)
CAAGFRGAGGTSYGKLTF

SEQ ID NO: 206766 - protein, 13 aa, Homo sapiens
  CDR3 for beta chain variable domain of TCR clone 103383 (TRBV23-1, TRBJ1-4)
CASRGKFNEKLFF

SEQ ID NO: 206767 - protein, 14 aa, Homo sapiens
  CDR3 for alpha chain variable domain of TCR clone 103384 (TRAV26-1, TRAJ8)
CIVRVDTGFQKLVF

SEQ ID NO: 206768 - protein, 16 aa, Homo sapiens
  CDR3 for beta chain variable domain of TCR clone 103384 (TRBV12-4, TRBJ2-7)
CASSPEGQGSSYEQYF

SEQ ID NO: 206769 - protein, 14 aa, Homo sapiens
  CDR3 for alpha chain variable domain of TCR clone 103385 (TRAV17, TRAJ40)
CATALTSGTYKYTF

SEQ ID NO: 206770 - protein, 17 aa, Homo sapiens
  CDR3 for beta chain variable domain of TCR clone 103385 (TRBV13, TRBJ2-3)
CASSLSRVAGGRNTQYF

SEQ ID NO: 206771 - protein, 16 aa, Homo sapiens
  CDR3 for alpha chain variable domain of TCR clone 103386 (TRAV26-1, TRAJ53)
CIVRVAMGGSNYKLTF

SEQ ID NO: 206772 - protein, 15 aa, Homo sapiens
  CDR3 for beta chain variable domain of TCR clone 103386 (TRBV7-9, TRBJ1-1)
CASSPELGGGTEAFF

SEQ ID NO: 206773 - protein, 13 aa, Homo sapiens
  CDR3 for alpha chain variable domain of TCR clone 103387 (TRAV1-2, TRAJ12)
CAVSMDSSYKLIF

SEQ ID NO: 206774 - protein, 15 aa, Homo sapiens
  CDR3 for beta chain variable domain of TCR clone 103387 (TRBV7-9, TRBJ2-2)
CASGPLDTFPGELFF

SEQ ID NO: 206775 - protein, 14 aa, Homo sapiens
  CDR3 for alpha chain variable domain of TCR clone 103388 (TRAV1-2, TRAJ8)
CAVREDTGFQKLVF

SEQ ID NO: 206776 - protein, 14 aa, Homo sapiens
  CDR3 for beta chain variable domain of TCR clone 103388 (TRBV11-2, TRBJ2-5)
CASRPLAGRETQYF

SEQ ID NO: 206777 - protein, 14 aa, Homo sapiens
  CDR3 for alpha chain variable domain of TCR clone 103389 (TRAV20, TRAJ29)
CAVQAWVGNTPLVF

SEQ ID NO: 206778 - protein, 15 aa, Homo sapiens
  CDR3 for beta chain variable domain of TCR clone 103389 (TRBV29-1, TRBJ2-7)
CSVEFFDRGSYEQYL

SEQ ID NO: 206779 - protein, 16 aa, Homo sapiens
  CDR3 for alpha chain variable domain of TCR clone 103390 (TRAV12-3, TRAJ10)
CAMKKWITGGGNKLTF

SEQ ID NO: 206780 - protein, 12 aa, Homo sapiens
  CDR3 for beta chain variable domain of TCR clone 103390 (TRBV20-1, TRBJ2-7)
CSAITPTKEQYF

SEQ ID NO: 206781 - protein, 10 aa, Homo sapiens
  CDR3 for alpha chain variable domain of TCR clone 103391 (TRAV12-1, TRAJ43)
CVVHNNDMRF

SEQ ID NO: 206782 - protein, 16 aa, Homo sapiens
  CDR3 for beta chain variable domain of TCR clone 103391 (TRBV11-2, TRBJ2-7)
CASSPTTGGVSYEQYF

SEQ ID NO: 206783 - protein, 15 aa, Homo sapiens
  CDR3 for alpha chain variable domain of TCR clone 103392 (TRAV12-1, TRAJ17)
CGEHDEKAAGNKLTF

SEQ ID NO: 206784 - protein, 14 aa, Homo sapiens
  CDR3 for beta chain variable domain of TCR clone 103392 (TRBV7-3, TRBJ1-1)
CASSLKGGNTEAFF

SEQ ID NO: 206785 - protein, 13 aa, Homo sapiens
  CDR3 for alpha chain variable domain of TCR clone 103393 (TRAV17, TRAJ40)
CAGALGGTYKYIF

SEQ ID NO: 206786 - protein, 14 aa, Homo sapiens
  CDR3 for beta chain variable domain of TCR clone 103393 (TRBV11-2, TRBJ2-5)
CASSRTGGIETQYF

SEQ ID NO: 206787 - protein, 14 aa, Homo sapiens
  CDR3 for alpha chain variable domain of TCR clone 103394 (TRAV12-3, TRAJ10)
SHLPLTGGGNKLTF

SEQ ID NO: 206788 - protein, 15 aa, Homo sapiens
  CDR3 for beta chain variable domain of TCR clone 103394 (TRBV6-5, TRBJ1-3)
CASSFYGTEGNTIYF

SEQ ID NO: 206789 - protein, 17 aa, Homo sapiens
  CDR3 for alpha chain variable domain of TCR clone 103395 (TRAV12-2, TRAJ42)
CAVNIFNYGGSQGNLIF

SEQ ID NO: 206790 - protein, 13 aa, Homo sapiens
  CDR3 for beta chain variable domain of TCR clone 103395 (TRBV3-1, TRBJ1-5)
CASSQDLDQPQHF

SEQ ID NO: 206791 - protein, 12 aa, Homo sapiens
  CDR3 for alpha chain variable domain of TCR clone 103396 (TRAV23/DV6, TRAJ30)
CAASKGEDKIIF

SEQ ID NO: 206792 - protein, 15 aa, Homo sapiens
  CDR3 for beta chain variable domain of TCR clone 103396 (TRBV29-1, TRBJ2-1)
CSGRDRKSSYNEQFF

SEQ ID NO: 206793 - protein, 14 aa, Homo sapiens
  CDR3 for alpha chain variable domain of TCR clone 103397 (TRAV26-1, TRAJ21)
CIVGPPYNFNKFYF

SEQ ID NO: 206794 - protein, 14 aa, Homo sapiens
  CDR3 for beta chain variable domain of TCR clone 103397 (TRBV11-3, TRBJ2-1)
CASSATTSGSIQFF

SEQ ID NO: 206795 - protein, 13 aa, Homo sapiens
  CDR3 for alpha chain variable domain of TCR clone 103398 (TRAV20, TRAJ37)
CAGCSSNTGKLIF

SEQ ID NO: 206796 - protein, 17 aa, Homo sapiens
  CDR3 for beta chain variable domain of TCR clone 103398 (TRBV25-1, TRBJ2-5)
CASSRRGGRGGQETQYF

SEQ ID NO: 206797 - protein, 13 aa, Homo sapiens
  CDR3 for alpha chain variable domain of TCR clone 103399 (TRAV27, TRAJ57)
CRSAQGGSEKLVF

SEQ ID NO: 206798 - protein, 14 aa, Homo sapiens
  CDR3 for beta chain variable domain of TCR clone 103399 (TRBV7-3, TRBJ1-1)
CASSLKGGNTEAFF

SEQ ID NO: 206799 - protein, 13 aa, Homo sapiens
  CDR3 for alpha chain variable domain of TCR clone 103400 (TRAV21, TRAJ10)
CAVPTGGGNKLTS

SEQ ID NO: 206800 - protein, 22 aa, Homo sapiens
  CDR3 for beta chain variable domain of TCR clone 103400 (TRBV19, TRBJ2-1)
CASSVRDRVTGTSGRIYNEQFF

SEQ ID NO: 206801 - protein, 13 aa, Homo sapiens
  CDR3 for alpha chain variable domain of TCR clone 103401 (TRAV8-6, TRAJ54)
CAVEAQGAQKLVF

SEQ ID NO: 206802 - protein, 14 aa, Homo sapiens
  CDR3 for beta chain variable domain of TCR clone 103401 (TRBV7-2, TRBJ2-2)
CASSLGQNTGELFF

SEQ ID NO: 206803 - protein, 14 aa, Homo sapiens
  CDR3 for alpha chain variable domain of TCR clone 103402 (TRAV23/DV6, TRAJ37)
CAAGTSSNTGKLIF

SEQ ID NO: 206804 - protein, 13 aa, Homo sapiens
  CDR3 for beta chain variable domain of TCR clone 103402 (TRBV7-7, TRBJ1-1)
CASSLGANTEAFF

SEQ ID NO: 206805 - protein, 12 aa, Homo sapiens
  CDR3 for alpha chain variable domain of TCR clone 103403 (TRAV29/DV5, TRAJ41)
CAAISSGYAPNF

SEQ ID NO: 206806 - protein, 17 aa, Homo sapiens
  CDR3 for beta chain variable domain of TCR clone 103403 (TRBV18, TRBJ2-1)
CASSKGLSGGADNEQFF

SEQ ID NO: 206807 - protein, 17 aa, Homo sapiens
  CDR3 for alpha chain variable domain of TCR clone 103404 (TRAV3, TRAJ6)
CAARDGPRAGGSYIPTF

SEQ ID NO: 206808 - protein, 13 aa, Homo sapiens
  CDR3 for beta chain variable domain of TCR clone 103404 (TRBV19, TRBJ2-7)
CASSIDRTYEQYF

SEQ ID NO: 206809 - protein, 12 aa, Homo sapiens
  CDR3 for alpha chain variable domain of TCR clone 103405 (TRAV21, TRAJ3)
CCFYSSASKIIF

SEQ ID NO: 206810 - protein, 16 aa, Homo sapiens
  CDR3 for beta chain variable domain of TCR clone 103405 (TRBV19, TRBJ2-1)
CASSKAVPSSYNEQFF

SEQ ID NO: 206811 - protein, 13 aa, Homo sapiens
  CDR3 for alpha chain variable domain of TCR clone 103406 (TRAV20, TRAJ40)
CAVPFPGTYKYIF

SEQ ID NO: 206812 - protein, 13 aa, Homo sapiens
  CDR3 for beta chain variable domain of TCR clone 103406 (TRBV15, TRBJ2-5)
CATSQIGEEAQYF

SEQ ID NO: 206813 - protein, 13 aa, Homo sapiens
  CDR3 for alpha chain variable domain of TCR clone 103407 (TRAV12-1, TRAJ6)
CVVFPGGSYIPTF

SEQ ID NO: 206814 - protein, 15 aa, Homo sapiens
  CDR3 for beta chain variable domain of TCR clone 103407 (TRBV6-3, TRBJ2-7)
CASSSPGTVFYEQYF

SEQ ID NO: 206815 - protein, 12 aa, Homo sapiens
  CDR3 for alpha chain variable domain of TCR clone 103408 (TRAV23/DV6, TRAJ49)
CAATYTGNQFYF

SEQ ID NO: 206816 - protein, 17 aa, Homo sapiens
  CDR3 for beta chain variable domain of TCR clone 103408 (TRBV4-1, TRBJ2-3)
CASSQVLQGGGTDTQYL

SEQ ID NO: 206817 - protein, 12 aa, Homo sapiens
  CDR3 for alpha chain variable domain of TCR clone 103409 (TRAV16, TRAJ49)
CALNEVGNQFYF

SEQ ID NO: 206818 - protein, 14 aa, Homo sapiens
  CDR3 for beta chain variable domain of TCR clone 103409 (TRBV7-9, TRBJ2-1)
CASRPTGLRNEQFF

SEQ ID NO: 206819 - protein, 12 aa, Homo sapiens
  CDR3 for alpha chain variable domain of TCR clone 103410 (TRAV36/DV7, TRAJ54)
CAVVRGAQKLVF

SEQ ID NO: 206820 - protein, 15 aa, Homo sapiens
  CDR3 for beta chain variable domain of TCR clone 103410 (TRBV7-3, TRBJ2-1)
CASSYFRGTYNEQFF

SEQ ID NO: 206821 - protein, 13 aa, Homo sapiens
  CDR3 for alpha chain variable domain of TCR clone 103411 (TRAV12-3, TRAJ9)
CAMRNTGGFKTIF

SEQ ID NO: 206822 - protein, 16 aa, Homo sapiens
  CDR3 for beta chain variable domain of TCR clone 103411 (TRBV12-5, TRBJ2-5)
CASGPRTSGNQETQYF

SEQ ID NO: 206823 - protein, 14 aa, Homo sapiens
  CDR3 for alpha chain variable domain of TCR clone 103412 (TRAV1-2, TRAJ8)
CAVREDTGFQKLVF

SEQ ID NO: 206824 - protein, 17 aa, Homo sapiens
  CDR3 for beta chain variable domain of TCR clone 103412 (TRBV19, TRBJ1-5)
CASSRDRILSRFQPQHF

SEQ ID NO: 206825 - protein, 10 aa, Homo sapiens
  CDR3 for alpha chain variable domain of TCR clone 103413 (TRAV23/DV6, TRAJ57)
CAASSTLSQG

SEQ ID NO: 206826 - protein, 20 aa, Homo sapiens
  CDR3 for beta chain variable domain of TCR clone 103413 (TRBV28, TRBJ2-1)
CASTPIGRSPGLAGGNEQFF

SEQ ID NO: 206827 - protein, 15 aa, Homo sapiens
  CDR3 for alpha chain variable domain of TCR clone 103414 (TRAV3, TRAJ4)
CAVRDGTGGYIKLIF

SEQ ID NO: 206828 - protein, 16 aa, Homo sapiens
  CDR3 for beta chain variable domain of TCR clone 103414 (TRBV27, TRBJ2-2)
CASSSSGVSNTGELFF

SEQ ID NO: 206829 - protein, 13 aa, Homo sapiens
  CDR3 for alpha chain variable domain of TCR clone 103415 (TRAV17, TRAJ9)
CATDYTGGFKTIF

SEQ ID NO: 206830 - protein, 15 aa, Homo sapiens
  CDR3 for beta chain variable domain of TCR clone 103415 (TRBV7-9, TRBJ1-5)
CASSQGHQPNQPQHF

SEQ ID NO: 206831 - protein, 15 aa, Homo sapiens
  CDR3 for alpha chain variable domain of TCR clone 103416 (TRAV3, TRAJ5)
CAVRDLEPGRRALTF

SEQ ID NO: 206832 - protein, 13 aa, Homo sapiens
  CDR3 for beta chain variable domain of TCR clone 103416 (TRBV12-4, TRBJ2-7)
CASSPTETYEQYF

SEQ ID NO: 206833 - protein, 17 aa, Homo sapiens
  CDR3 for alpha chain variable domain of TCR clone 103417 (TRAV13-1, TRAJ28)
CAASPPYSGAGSYQLTF

SEQ ID NO: 206834 - protein, 17 aa, Homo sapiens
  CDR3 for beta chain variable domain of TCR clone 103417 (TRBV7-8, TRBJ2-6)
CASSAGTGGAGANVLTF

SEQ ID NO: 206835 - protein, 10 aa, Homo sapiens
  CDR3 for alpha chain variable domain of TCR clone 103418 (TRAV16, TRAJ22)
SAMYLRQLTF

SEQ ID NO: 206836 - protein, 19 aa, Homo sapiens
  CDR3 for beta chain variable domain of TCR clone 103418 (TRBV4-3, TRBJ2-7)
CISAPAAKQPSGTPYEQYF

SEQ ID NO: 206837 - protein, 16 aa, Homo sapiens
  CDR3 for alpha chain variable domain of TCR clone 103419 (TRAV3, TRAJ37)
CAVRGKGSGNTGKLIF

SEQ ID NO: 206838 - protein, 13 aa, Homo sapiens
  CDR3 for beta chain variable domain of TCR clone 103419 (TRBV18, TRBJ2-3)
CASSTGRTDTQYF

SEQ ID NO: 206839 - protein, 14 aa, Homo sapiens
  CDR3 for alpha chain variable domain of TCR clone 103420 (TRAV17, TRAJ12)
CAILPMDSSYKLIF

SEQ ID NO: 206840 - protein, 12 aa, Homo sapiens
  CDR3 for beta chain variable domain of TCR clone 103420 (TRBV12-4, TRBJ2-1)
CASSPGRNEQFF

SEQ ID NO: 206841 - protein, 17 aa, Homo sapiens
  CDR3 for alpha chain variable domain of TCR clone 103421 (TRAV1-2, TRAJ8)
CAVRDPDENTGFQKLVF

SEQ ID NO: 206842 - protein, 16 aa, Homo sapiens
  CDR3 for beta chain variable domain of TCR clone 103421 (TRBV7-9, TRBJ2-2)
CGSSGFGGANTGELFF

SEQ ID NO: 206843 - protein, 14 aa, Homo sapiens
  CDR3 for alpha chain variable domain of TCR clone 103422 (TRAV1-2, TRAJ16)
CAVNRFSDGQKLLF

SEQ ID NO: 206844 - protein, 16 aa, Homo sapiens
  CDR3 for beta chain variable domain of TCR clone 103422 (TRBV4-1, TRBJ2-1)
CASSQEAGQGSDEQFF

SEQ ID NO: 206845 - protein, 16 aa, Homo sapiens
  CDR3 for alpha chain variable domain of TCR clone 103423 (TRAV8-3, TRAJ52)
CAVQPAGGTIYGKLTF

SEQ ID NO: 206846 - protein, 15 aa, Homo sapiens
  CDR3 for beta chain variable domain of TCR clone 103423 (TRBV11-2, TRBJ2-7)
CASSLAGGVATEQYF

SEQ ID NO: 206847 - protein, 13 aa, Homo sapiens
  CDR3 for alpha chain variable domain of TCR clone 103424 (TRAV8-4, TRAJ49)
CAVSDPGGNQFYF

SEQ ID NO: 206848 - protein, 11 aa, Homo sapiens
  CDR3 for beta chain variable domain of TCR clone 103424 (TRBV29-1, TRBJ1-3)
CSVATGNTIYF

SEQ ID NO: 206849 - protein, 14 aa, Homo sapiens
  CDR3 for alpha chain variable domain of TCR clone 103425 (TRAV13-1, TRAJ6)
CAASITGGSYIPTF

SEQ ID NO: 206850 - protein, 14 aa, Homo sapiens
  CDR3 for beta chain variable domain of TCR clone 103425 (TRBV23-1, TRBJ2-5)
CASSFLRSQETQYF

SEQ ID NO: 206851 - protein, 14 aa, Homo sapiens
  CDR3 for alpha chain variable domain of TCR clone 103426 (TRAV1-1, TRAJ23)
CAAPIYNQGGELIF

SEQ ID NO: 206852 - protein, 13 aa, Homo sapiens
  CDR3 for beta chain variable domain of TCR clone 103426 (TRBV5-1, TRBJ2-5)
CASSWEGEETQYF

SEQ ID NO: 206853 - protein, 14 aa, Homo sapiens
  CDR3 for alpha chain variable domain of TCR clone 103427 (TRAV38-1, TRAJ27)
CAFIHNTNAGKSTF

SEQ ID NO: 206854 - protein, 13 aa, Homo sapiens
  CDR3 for beta chain variable domain of TCR clone 103427 (TRBV10-3, TRBJ2-7)
CASKLAVNYEQYF

SEQ ID NO: 206855 - protein, 13 aa, Homo sapiens
  CDR3 for alpha chain variable domain of TCR clone 103428 (TRAV13-1, TRAJ21)
CAASIYNYNKFYF

SEQ ID NO: 206856 - protein, 13 aa, Homo sapiens
  CDR3 for beta chain variable domain of TCR clone 103428 (TRBV27, TRBJ1-4)
CASSLMGDEKLFF

SEQ ID NO: 206857 - protein, 13 aa, Homo sapiens
  CDR3 for alpha chain variable domain of TCR clone 103429 (TRAV29/DV5, TRAJ31)
CAASRNNNARLMF

SEQ ID NO: 206858 - protein, 14 aa, Homo sapiens
  CDR3 for beta chain variable domain of TCR clone 103429 (TRBV19, TRBJ2-7)
CASTVQGRPYEQYF

SEQ ID NO: 206859 - protein, 12 aa, Homo sapiens
  CDR3 for alpha chain variable domain of TCR clone 103430 (TRAV27, TRAJ20)
CAGTFNDYKLSF

SEQ ID NO: 206860 - protein, 13 aa, Homo sapiens
  CDR3 for beta chain variable domain of TCR clone 103430 (TRBV7-8, TRBJ2-7)
CASSFAGLYEQYF

SEQ ID NO: 206861 - protein, 12 aa, Homo sapiens
  CDR3 for alpha chain variable domain of TCR clone 103431 (TRAV27, TRAJ13)
CAGVRGDQKVTF

SEQ ID NO: 206862 - protein, 16 aa, Homo sapiens
  CDR3 for beta chain variable domain of TCR clone 103431 (TRBV28, TRBJ2-1)
CASSSSYSGSLNEQFF

SEQ ID NO: 206863 - protein, 15 aa, Homo sapiens
  CDR3 for alpha chain variable domain of TCR clone 103432 (TRAV3, TRAJ32)
CAVSSYGGATNKLIF

SEQ ID NO: 206864 - protein, 13 aa, Homo sapiens
  CDR3 for beta chain variable domain of TCR clone 103432 (TRBV7-9, TRBJ1-2)
CASSLKQNYGYTF

SEQ ID NO: 206865 - protein, 14 aa, Homo sapiens
  CDR3 for alpha chain variable domain of TCR clone 103433 (TRAV20, TRAJ29)
CAVQAWVGNTPLVF

SEQ ID NO: 206866 - protein, 15 aa, Homo sapiens
  CDR3 for beta chain variable domain of TCR clone 103433 (TRBV29-1, TRBJ2-7)
CSAEFFDRGSYEQYF

SEQ ID NO: 206867 - protein, 14 aa, Homo sapiens
  CDR3 for alpha chain variable domain of TCR clone 103434 (TRAV13-1, TRAJ10)
CAAKEPGGGNKLTF

SEQ ID NO: 206868 - protein, 13 aa, Homo sapiens
  CDR3 for beta chain variable domain of TCR clone 103434 (TRBV7-9, TRBJ1-2)
CASSLKQNYGYTF

SEQ ID NO: 206869 - protein, 16 aa, Homo sapiens
  CDR3 for alpha chain variable domain of TCR clone 103435 (TRAV3, TRAJ37)
CAVRGKGSGNTGKLIF

SEQ ID NO: 206870 - protein, 14 aa, Homo sapiens
  CDR3 for beta chain variable domain of TCR clone 103435 (TRBV2, TRBJ2-7)
CASSLTSGGYEQYF

SEQ ID NO: 206871 - protein, 16 aa, Homo sapiens
  CDR3 for alpha chain variable domain of TCR clone 103436 (TRAV12-1, TRAJ48)
CVVNMRDNFGNEKLTF

SEQ ID NO: 206872 - protein, 16 aa, Homo sapiens
  CDR3 for beta chain variable domain of TCR clone 103436 (TRBV7-6, TRBJ2-1)
CASSSVVAGTYNEQFL

SEQ ID NO: 206873 - protein, 12 aa, Homo sapiens
  CDR3 for alpha chain variable domain of TCR clone 103437 (TRAV12-2, TRAJ8)
CAANTGFQKLVF

SEQ ID NO: 206874 - protein, 17 aa, Homo sapiens
  CDR3 for beta chain variable domain of TCR clone 103437 (TRBV7-2, TRBJ2-3)
CASSLEARGTSTDTQYF

SEQ ID NO: 206875 - protein, 15 aa, Homo sapiens
  CDR3 for alpha chain variable domain of TCR clone 103438 (TRAV17, TRAJ6)
CATDLPSGGSYIPTF

SEQ ID NO: 206876 - protein, 15 aa, Homo sapiens
  CDR3 for beta chain variable domain of TCR clone 103438 (TRBV2, TRBJ2-1)
CASSELAGSYNEQFF

SEQ ID NO: 206877 - protein, 10 aa, Homo sapiens
  CDR3 for alpha chain variable domain of TCR clone 103439 (TRAV23/DV6, TRAJ9)
CASKYWRLQN

SEQ ID NO: 206878 - protein, 14 aa, Homo sapiens
  CDR3 for beta chain variable domain of TCR clone 103439 (TRBV6-1, TRBJ2-7)
CARTRTGDYYEQYF

SEQ ID NO: 206879 - protein, 16 aa, Homo sapiens
  CDR3 for alpha chain variable domain of TCR clone 103440 (TRAV3, TRAJ37)
CAVRGKGSGNTGKLIF

SEQ ID NO: 206880 - protein, 15 aa, Homo sapiens
  CDR3 for beta chain variable domain of TCR clone 103440 (TRBV7-9, TRBJ1-6)
CASSSPVRGNSPLHF

SEQ ID NO: 206881 - protein, 14 aa, Homo sapiens
  CDR3 for alpha chain variable domain of TCR clone 103441 (TRAV12-3, TRAJ10)
SHLPLTGGGNKLTF

SEQ ID NO: 206882 - protein, 12 aa, Homo sapiens
  CDR3 for beta chain variable domain of TCR clone 103441 (TRBV7-6, TRBJ2-3)
CASSWAEDTQYF

SEQ ID NO: 206883 - protein, 15 aa, Homo sapiens
  CDR3 for alpha chain variable domain of TCR clone 103442 (TRAV26-1, TRAJ23)
CIVRVLNNQGGKLIF

SEQ ID NO: 206884 - protein, 16 aa, Homo sapiens
  CDR3 for beta chain variable domain of TCR clone 103442 (TRBV4-2, TRBJ2-7)
CASSQDRGTSSYEQYF

SEQ ID NO: 206885 - protein, 11 aa, Homo sapiens
  CDR3 for alpha chain variable domain of TCR clone 103443 (TRAV2, TRAJ13)
CASGGYQTVTF

SEQ ID NO: 206886 - protein, 16 aa, Homo sapiens
  CDR3 for beta chain variable domain of TCR clone 103443 (TRBV2, TRBJ2-1)
CASSVGGSLSYNEQFF

SEQ ID NO: 206887 - protein, 13 aa, Homo sapiens
  CDR3 for alpha chain variable domain of TCR clone 103444 (TRAV12-3, TRAJ33)
CAMSVNSNYQLVW

SEQ ID NO: 206888 - protein, 10 aa, Homo sapiens
  CDR3 for beta chain variable domain of TCR clone 103444 (TRBV19, TRBJ1-1)
CASRQVEAFF

SEQ ID NO: 206889 - protein, 14 aa, Homo sapiens
  CDR3 for alpha chain variable domain of TCR clone 103445 (TRAV9-2, TRAJ39)
CALYIYNSGNMLTF

SEQ ID NO: 206890 - protein, 14 aa, Homo sapiens
  CDR3 for beta chain variable domain of TCR clone 103445 (TRBV12-5, TRBJ2-5)
CASGSRTHQETQYF

SEQ ID NO: 206891 - protein, 12 aa, Homo sapiens
  CDR3 for alpha chain variable domain of TCR clone 103446 (TRAV20, TRAJ39)
CAVGNAGNMLTF

SEQ ID NO: 206892 - protein, 15 aa, Homo sapiens
  CDR3 for beta chain variable domain of TCR clone 103446 (TRBV20-1, TRBJ2-7)
CSARDRVSGMDEQYF

SEQ ID NO: 206893 - protein, 13 aa, Homo sapiens
  CDR3 for alpha chain variable domain of TCR clone 103447 (TRAV23/DV6, TRAJ6)
CAAKTGGSYIPTF

SEQ ID NO: 206894 - protein, 15 aa, Homo sapiens
  CDR3 for beta chain variable domain of TCR clone 103447 (TRBV5-1, TRBJ1-2)
CASSSYGEFDYGYAF

SEQ ID NO: 206895 - protein, 10 aa, Homo sapiens
  CDR3 for alpha chain variable domain of TCR clone 103448 (TRAV8-4, TRAJ43)
CAVSADDMRF

SEQ ID NO: 206896 - protein, 15 aa, Homo sapiens
  CDR3 for beta chain variable domain of TCR clone 103448 (TRBV11-3, TRBJ1-1)
CASSGRTGSNTEAFF

SEQ ID NO: 206897 - protein, 15 aa, Homo sapiens
  CDR3 for alpha chain variable domain of TCR clone 103449 (TRAV8-3, TRAJ41)
CAVGSNSNSGNALNF

SEQ ID NO: 206898 - protein, 17 aa, Homo sapiens
  CDR3 for beta chain variable domain of TCR clone 103449 (TRBV25-1, TRBJ2-1)
CASSAYGQGRGVYEQFF

SEQ ID NO: 206899 - protein, 12 aa, Homo sapiens
  CDR3 for alpha chain variable domain of TCR clone 103450 (TRAV25, TRAJ38)
CAGTGNNRKLIW

SEQ ID NO: 206900 - protein, 13 aa, Homo sapiens
  CDR3 for beta chain variable domain of TCR clone 103450 (TRBV19, TRBJ1-2)
CASSVPGQDGYTF

SEQ ID NO: 206901 - protein, 16 aa, Homo sapiens
  CDR3 for alpha chain variable domain of TCR clone 103451 (TRAV23/DV6, TRAJ21)
CAASSGGGTTSTNFTL

SEQ ID NO: 206902 - protein, 15 aa, Homo sapiens
  CDR3 for beta chain variable domain of TCR clone 103451 (TRBV7-2, TRBJ2-3)
CASSLAGAFIDTQYF

SEQ ID NO: 206903 - protein, 15 aa, Homo sapiens
  CDR3 for alpha chain variable domain of TCR clone 103452 (TRAV12-3, TRAJ42)
CAMSGHGGSQGNLIF

SEQ ID NO: 206904 - protein, 10 aa, Homo sapiens
  CDR3 for beta chain variable domain of TCR clone 103452 (TRBV23-1, TRBJ2-1)
KWSSYNEQFF

SEQ ID NO: 206905 - protein, 12 aa, Homo sapiens
  CDR3 for alpha chain variable domain of TCR clone 103453 (TRAV25, TRAJ48)
CAGDFGNERLTF

SEQ ID NO: 206906 - protein, 12 aa, Homo sapiens
  CDR3 for beta chain variable domain of TCR clone 103453 (TRBV2, TRBJ2-5)
CASKEYGGTQYF

SEQ ID NO: 206907 - protein, 13 aa, Homo sapiens
  CDR3 for alpha chain variable domain of TCR clone 103454 (TRAV13-1, TRAJ39)
CSKYSNAGNMLTF

SEQ ID NO: 206908 - protein, 14 aa, Homo sapiens
  CDR3 for beta chain variable domain of TCR clone 103454 (TRBV27, TRBJ1-1)
CASSLLSGLSEAFF

SEQ ID NO: 206909 - protein, 14 aa, Homo sapiens
  CDR3 for alpha chain variable domain of TCR clone 103455 (TRAV8-4, TRAJ38)
CAVSYAGNNRKRIW

SEQ ID NO: 206910 - protein, 15 aa, Homo sapiens
  CDR3 for beta chain variable domain of TCR clone 103455 (TRBV12-4, TRBJ2-1)
CASSLLATGNNEQFF

SEQ ID NO: 206911 - protein, 16 aa, Homo sapiens
  CDR3 for alpha chain variable domain of TCR clone 103456 (TRAV30, TRAJ49)
SAAQRVGPNTGNQFYF

SEQ ID NO: 206912 - protein, 14 aa, Homo sapiens
  CDR3 for beta chain variable domain of TCR clone 103456 (TRBV7-9, TRBJ1-4)
CASSRAGFGEKLFF

SEQ ID NO: 206913 - protein, 10 aa, Homo sapiens
  CDR3 for alpha chain variable domain of TCR clone 103457 (TRAV1-2, TRAJ31)
CAFFDARLMF

SEQ ID NO: 206914 - protein, 15 aa, Homo sapiens
  CDR3 for beta chain variable domain of TCR clone 103457 (TRBV11-3, TRBJ2-3)
CASLKDGREGDTQYF

SEQ ID NO: 206915 - protein, 21 aa, Homo sapiens
  CDR3 for alpha chain variable domain of TCR clone 103458 (TRAV12-2, TRAJ52)
CSSETPSPVIQPPARAGGTSY

SEQ ID NO: 206916 - protein, 16 aa, Homo sapiens
  CDR3 for beta chain variable domain of TCR clone 103458 (TRBV15, TRBJ1-2)
CATSRGPRTGGGGYTF

SEQ ID NO: 206917 - protein, 13 aa, Homo sapiens
  CDR3 for alpha chain variable domain of TCR clone 103459 (TRAV21, TRAJ47)
CAVSGLYGNKLVF

SEQ ID NO: 206918 - protein, 17 aa, Homo sapiens
  CDR3 for beta chain variable domain of TCR clone 103459 (TRBV15, TRBJ2-3)
CATSGTTSEEGTDTKYF

SEQ ID NO: 206919 - protein, 16 aa, Homo sapiens
  CDR3 for alpha chain variable domain of TCR clone 103460 (TRAV17, TRAJ52)
CATSNAGGTSYGKLTF

SEQ ID NO: 206920 - protein, 13 aa, Homo sapiens
  CDR3 for beta chain variable domain of TCR clone 103460 (TRBV7-3, TRBJ1-1)
CASSQDWGAEAFF

SEQ ID NO: 206921 - protein, 12 aa, Homo sapiens
  CDR3 for alpha chain variable domain of TCR clone 103461 (TRAV17, TRAJ12)
CATLRSSYKLIF

SEQ ID NO: 206922 - protein, 16 aa, Homo sapiens
  CDR3 for beta chain variable domain of TCR clone 103461 (TRBV28, TRBJ2-7)
CASSLFFETGGPEQSF

SEQ ID NO: 206923 - protein, 15 aa, Homo sapiens
  CDR3 for alpha chain variable domain of TCR clone 103462 (TRAV35, TRAJ52)
CAGPRGGTSYGKLTF

SEQ ID NO: 206924 - protein, 13 aa, Homo sapiens
  CDR3 for beta chain variable domain of TCR clone 103462 (TRBV19, TRBJ1-2)
CASSVPGQDGYTF

SEQ ID NO: 206925 - protein, 16 aa, Homo sapiens
  CDR3 for alpha chain variable domain of TCR clone 103463 (TRAV12-3, TRAJ53)
CAMSPGSGGSNYKLTF

SEQ ID NO: 206926 - protein, 13 aa, Homo sapiens
  CDR3 for beta chain variable domain of TCR clone 103463 (TRBV7-6, TRBJ1-2)
CASSLVADYGYTF

SEQ ID NO: 206927 - protein, 14 aa, Homo sapiens
  CDR3 for alpha chain variable domain of TCR clone 103464 (TRAV1-2, TRAJ16)
CAVNRFSDGKKLLF

SEQ ID NO: 206928 - protein, 16 aa, Homo sapiens
  CDR3 for beta chain variable domain of TCR clone 103464 (TRBV11-2, TRBJ1-2)
CASSLDTGGADYGYTF

SEQ ID NO: 206929 - protein, 16 aa, Homo sapiens
  CDR3 for alpha chain variable domain of TCR clone 103465 (TRAV3, TRAJ23)
CAVRIGIYNQGGKLIF

SEQ ID NO: 206930 - protein, 17 aa, Homo sapiens
  CDR3 for beta chain variable domain of TCR clone 103465 (TRBV10-3, TRBJ2-6)
CAISESTAPSGANVLTF

SEQ ID NO: 206931 - protein, 16 aa, Homo sapiens
  CDR3 for alpha chain variable domain of TCR clone 103466 (TRAV30, TRAJ24)
CGTEIVDADSWGKFQF

SEQ ID NO: 206932 - protein, 19 aa, Homo sapiens
  CDR3 for beta chain variable domain of TCR clone 103466 (TRBV25-1, TRBJ2-2)
YAILVYRVDRGRKTGELFF

SEQ ID NO: 206933 - protein, 16 aa, Homo sapiens
  CDR3 for alpha chain variable domain of TCR clone 103467 (TRAV30, TRAJ24)
CGTEIVDADSWGKFQF

SEQ ID NO: 206934 - protein, 15 aa, Homo sapiens
  CDR3 for beta chain variable domain of TCR clone 103467 (TRBV27, TRBJ2-1)
CASSNGGGSSNEQFF

SEQ ID NO: 206935 - protein, 12 aa, Homo sapiens
  CDR3 for alpha chain variable domain of TCR clone 103468 (TRAV36/DV7, TRAJ54)
CAVVRRAQKLVF

SEQ ID NO: 206936 - protein, 14 aa, Homo sapiens
  CDR3 for beta chain variable domain of TCR clone 103468 (TRBV7-3, TRBJ1-1)
CASSLKGGNTEAFF

SEQ ID NO: 206937 - protein, 14 aa, Homo sapiens
  CDR3 for alpha chain variable domain of TCR clone 103469 (TRAV2, TRAJ9)
CAVEDRSGGFKTIF

SEQ ID NO: 206938 - protein, 13 aa, Homo sapiens
  CDR3 for beta chain variable domain of TCR clone 103469 (TRBV7-2, TRBJ1-1)
CASSLTENTEAFF

SEQ ID NO: 206939 - protein, 17 aa, Homo sapiens
  CDR3 for alpha chain variable domain of TCR clone 103470 (TRAV8-1, TRAJ42)
CAVKWGNYGGSQGNLIF

SEQ ID NO: 206940 - protein, 13 aa, Homo sapiens
  CDR3 for beta chain variable domain of TCR clone 103470 (TRBV7-3, TRBJ1-1)
CASSQDWGAEAFF

SEQ ID NO: 206941 - protein, 13 aa, Homo sapiens
  CDR3 for alpha chain variable domain of TCR clone 103471 (TRAV16, TRAJ11)
CALTQSGYSTLTF

SEQ ID NO: 206942 - protein, 14 aa, Homo sapiens
  CDR3 for beta chain variable domain of TCR clone 103471 (TRBV19, TRBJ2-7)
CASSTTRSYYEQYF

SEQ ID NO: 206943 - protein, 15 aa, Homo sapiens
  CDR3 for alpha chain variable domain of TCR clone 103472 (TRAV12-3, TRAJ49)
CAMAVTPNTGNQFYF

SEQ ID NO: 206944 - protein, 17 aa, Homo sapiens
  CDR3 for beta chain variable domain of TCR clone 103472 (TRBV13, TRBJ2-3)
CASSLSRVAGGRNTQYF

SEQ ID NO: 206945 - protein, 13 aa, Homo sapiens
  CDR3 for alpha chain variable domain of TCR clone 103473 (TRAV12-2, TRAJ42)
CAVKRGSQGNLIF

SEQ ID NO: 206946 - protein, 13 aa, Homo sapiens
  CDR3 for beta chain variable domain of TCR clone 103473 (TRBV7-9, TRBJ1-2)
CASSLKQNYGCTF

SEQ ID NO: 206947 - protein, 15 aa, Homo sapiens
  CDR3 for alpha chain variable domain of TCR clone 103474 (TRAV2, TRAJ9)
CAVEDRGTGGFKTIF

SEQ ID NO: 206948 - protein, 16 aa, Homo sapiens
  CDR3 for beta chain variable domain of TCR clone 103474 (TRBV24-1, TRBJ2-3)
CATSDPGSGATDTQYF

SEQ ID NO: 206949 - protein, 12 aa, Homo sapiens
  CDR3 for alpha chain variable domain of TCR clone 103475 (TRAV9-2, TRAJ36)
CALKKGANNLFF

SEQ ID NO: 206950 - protein, 13 aa, Homo sapiens
  CDR3 for beta chain variable domain of TCR clone 103475 (TRBV7-9, TRBJ1-2)
CASSLKQNYGYTF

SEQ ID NO: 206951 - protein, 14 aa, Homo sapiens
  CDR3 for alpha chain variable domain of TCR clone 103476 (TRAV2, TRAJ9)
CAVEDRSGGFKTIF

SEQ ID NO: 206952 - protein, 13 aa, Homo sapiens
  CDR3 for beta chain variable domain of TCR clone 103476 (TRBV19, TRBJ2-7)
CASSLTTSYEQYF

SEQ ID NO: 206953 - protein, 15 aa, Homo sapiens
  CDR3 for alpha chain variable domain of TCR clone 103477 (TRAV17, TRAJ16)
CATALRFSDGQKLLF

SEQ ID NO: 206954 - protein, 14 aa, Homo sapiens
  CDR3 for beta chain variable domain of TCR clone 103477 (TRBV4-1, TRBJ2-2)
CASSQAVNTGELFF

SEQ ID NO: 206955 - protein, 16 aa, Homo sapiens
  CDR3 for alpha chain variable domain of TCR clone 103478 (TRAV13-1, TRAJ10)
CAASRKRREEETNSPL

SEQ ID NO: 206956 - protein, 14 aa, Homo sapiens
  CDR3 for beta chain variable domain of TCR clone 103478 (TRBV19, TRBJ2-1)
CASSIGGDYNEQFF

SEQ ID NO: 206957 - protein, 14 aa, Homo sapiens
  CDR3 for alpha chain variable domain of TCR clone 103479 (TRAV1-2, TRAJ16)
FAVNRFSDGQKLLF

SEQ ID NO: 206958 - protein, 16 aa, Homo sapiens
  CDR3 for beta chain variable domain of TCR clone 103479 (TRBV7-2, TRBJ2-7)
CASSLDLSGGAYEQYF

SEQ ID NO: 206959 - protein, 14 aa, Homo sapiens
  CDR3 for alpha chain variable domain of TCR clone 103480 (TRAV16, TRAJ15)
CALSGPQAGTALIF

SEQ ID NO: 206960 - protein, 12 aa, Homo sapiens
  CDR3 for beta chain variable domain of TCR clone 103480 (TRBV18, TRBJ2-5)
CASSPSKETQFF

SEQ ID NO: 206961 - protein, 16 aa, Homo sapiens
  CDR3 for alpha chain variable domain of TCR clone 103481 (TRAV30, TRAJ24)
CGTEIVDADSWGKFQL

SEQ ID NO: 206962 - protein, 11 aa, Homo sapiens
  CDR3 for beta chain variable domain of TCR clone 103481 (TRBV29-1, TRBJ2-5)
CSEDRTGTQYF

SEQ ID NO: 206963 - protein, 18 aa, Homo sapiens
  CDR3 for alpha chain variable domain of TCR clone 103482 (TRAV12-3, TRAJ52)
CAMSRTNAGGTSYGKLTF

SEQ ID NO: 206964 - protein, 15 aa, Homo sapiens
  CDR3 for beta chain variable domain of TCR clone 103482 (TRBV7-2, TRBJ2-1)
CARSLVAGGHNEQFF

SEQ ID NO: 206965 - protein, 12 aa, Homo sapiens
  CDR3 for alpha chain variable domain of TCR clone 103483 (TRAV25, TRAJ48)
CAGDVGNEKLTF

SEQ ID NO: 206966 - protein, 12 aa, Homo sapiens
  CDR3 for beta chain variable domain of TCR clone 103483 (TRBV2, TRBJ2-5)
CASKEYGETQYF

SEQ ID NO: 206967 - protein, 14 aa, Homo sapiens
  CDR3 for alpha chain variable domain of TCR clone 103484 (TRAV12-2, TRAJ5)
CAVNRSTGRRALTF

SEQ ID NO: 206968 - protein, 16 aa, Homo sapiens
  CDR3 for beta chain variable domain of TCR clone 103484 (TRBV7-3, TRBJ2-1)
CASSLSSGGGAKEQFF

SEQ ID NO: 206969 - protein, 13 aa, Homo sapiens
  CDR3 for alpha chain variable domain of TCR clone 103485 (TRAV1-2, TRAJ11)
CAVRDSGYSTLTF

SEQ ID NO: 206970 - protein, 14 aa, Homo sapiens
  CDR3 for beta chain variable domain of TCR clone 103485 (TRBV4-1, TRBJ2-2)
CASSQAVNTGELFF

SEQ ID NO: 206971 - protein, 14 aa, Homo sapiens
  CDR3 for alpha chain variable domain of TCR clone 103486 (TRAV4, TRAJ41)
CLVGDGDSGYALNF

SEQ ID NO: 206972 - protein, 14 aa, Homo sapiens
  CDR3 for beta chain variable domain of TCR clone 103486 (TRBV27, TRBJ2-7)
CQQFSGRGAHEQYF

SEQ ID NO: 206973 - protein, 14 aa, Homo sapiens
  CDR3 for alpha chain variable domain of TCR clone 103487 (TRAV12-1, TRAJ9)
CVVNIITGGFKTIF

SEQ ID NO: 206974 - protein, 13 aa, Homo sapiens
  CDR3 for beta chain variable domain of TCR clone 103487 (TRBV7-9, TRBJ2-3)
CASSPGSTDTQYF

SEQ ID NO: 206975 - protein, 15 aa, Homo sapiens
  CDR3 for alpha chain variable domain of TCR clone 103488 (TRAV13-1, TRAJ11)
CAASNRNSGYSTLTF

SEQ ID NO: 206976 - protein, 11 aa, Homo sapiens
  CDR3 for beta chain variable domain of TCR clone 103488 (TRBV20-1, TRBJ2-7)
CSARLSYEQYL

SEQ ID NO: 206977 - protein, 16 aa, Homo sapiens
  CDR3 for alpha chain variable domain of TCR clone 103489 (TRAV23/DV6, TRAJ35)
CAASMRLRGFGNVLHC

SEQ ID NO: 206978 - protein, 15 aa, Homo sapiens
  CDR3 for beta chain variable domain of TCR clone 103489 (TRBV11-3, TRBJ2-3)
CASLKDGREGDTQYF

SEQ ID NO: 206979 - protein, 11 aa, Homo sapiens
  CDR3 for alpha chain variable domain of TCR clone 103490 (TRAV27, TRAJ47)
SIVEYGDKLVF

SEQ ID NO: 206980 - protein, 18 aa, Homo sapiens
  CDR3 for beta chain variable domain of TCR clone 103490 (TRBV2, TRBJ2-1)
CASRGLAGGPRTYNEQFF

SEQ ID NO: 206981 - protein, 18 aa, Homo sapiens
  CDR3 for alpha chain variable domain of TCR clone 103491 (TRAV13-1, TRAJ52)
CAAKNPNAGGTSYGKLTF

SEQ ID NO: 206982 - protein, 15 aa, Homo sapiens
  CDR3 for beta chain variable domain of TCR clone 103491 (TRBV7-8, TRBJ2-1)
CASSLAGGLYNEQFF

SEQ ID NO: 206983 - protein, 15 aa, Homo sapiens
  CDR3 for alpha chain variable domain of TCR clone 103492 (TRAV23/DV6, TRAJ18)
CAARYRGSTLGRLYF

SEQ ID NO: 206984 - protein, 13 aa, Homo sapiens
  CDR3 for beta chain variable domain of TCR clone 103492 (TRBV7-7, TRBJ1-1)
CASSLGANTEAFF

SEQ ID NO: 206985 - protein, 16 aa, Homo sapiens
  CDR3 for alpha chain variable domain of TCR clone 103493 (TRAV1-1, TRAJ28)
CAVRDDSGAGSYQLTF

SEQ ID NO: 206986 - protein, 12 aa, Homo sapiens
  CDR3 for beta chain variable domain of TCR clone 103493 (TRBV11-2, TRBJ2-5)
CASSLDTQTLYF

SEQ ID NO: 206987 - protein, 11 aa, Homo sapiens
  CDR3 for alpha chain variable domain of TCR clone 103494 (TRAV17, TRAJ12)
CATTGSYKLIF

SEQ ID NO: 206988 - protein, 15 aa, Homo sapiens
  CDR3 for beta chain variable domain of TCR clone 103494 (TRBV20-1, TRBJ2-5)
CSAEGTGGLQETQYF

SEQ ID NO: 206989 - protein, 15 aa, Homo sapiens
  CDR3 for alpha chain variable domain of TCR clone 103495 (TRAV27, TRAJ38)
CAARRNAGNNRKLIW

SEQ ID NO: 206990 - protein, 14 aa, Homo sapiens
  CDR3 for beta chain variable domain of TCR clone 103495 (TRBV4-1, TRBJ2-2)
CASSQAVNTGELFF

SEQ ID NO: 206991 - protein, 12 aa, Homo sapiens
  CDR3 for alpha chain variable domain of TCR clone 103496 (TRAV21, TRAJ49)
CAVNDGGNQVYF

SEQ ID NO: 206992 - protein, 14 aa, Homo sapiens
  CDR3 for beta chain variable domain of TCR clone 103496 (TRBV18, TRBJ2-7)
CASSPRGGSYEQYF

SEQ ID NO: 206993 - protein, 13 aa, Homo sapiens
  CDR3 for alpha chain variable domain of TCR clone 103497 (TRAV16, TRAJ9)
CALRATGGFKTIL

SEQ ID NO: 206994 - protein, 16 aa, Homo sapiens
  CDR3 for beta chain variable domain of TCR clone 103497 (TRBV5-1, TRBJ1-3)
CASSRSGEDSGNTIYF

SEQ ID NO: 206995 - protein, 17 aa, Homo sapiens
  CDR3 for alpha chain variable domain of TCR clone 103498 (TRAV3, TRAJ6)
CAVRDGPRAGGSYIPTL

SEQ ID NO: 206996 - protein, 15 aa, Homo sapiens
  CDR3 for beta chain variable domain of TCR clone 103498 (TRBV7-9, TRBJ1-6)
CASSSPGRGNSPLHF

SEQ ID NO: 206997 - protein, 10 aa, Homo sapiens
  CDR3 for alpha chain variable domain of TCR clone 103499 (TRAV12-2, TRAJ52)
RSTSYGKLTF

SEQ ID NO: 206998 - protein, 11 aa, Homo sapiens
  CDR3 for beta chain variable domain of TCR clone 103499 (TRBV29-1, TRBJ2-5)
CSEDRTGTQYF

SEQ ID NO: 206999 - protein, 18 aa, Homo sapiens
  CDR3 for alpha chain variable domain of TCR clone 103500 (TRAV13-1, TRAJ52)
CAASKSSAGGTSYGKLTF

SEQ ID NO: 207000 - protein, 14 aa, Homo sapiens
  CDR3 for beta chain variable domain of TCR clone 103500 (TRBV19, TRBJ2-1)
CASPTFVLSGEQFF

SEQ ID NO: 207001 - protein, 11 aa, Homo sapiens
  CDR3 for alpha chain variable domain of TCR clone 103501 (TRAV21, TRAJ48)
CAVDGNERLTF

SEQ ID NO: 207002 - protein, 15 aa, Homo sapiens
  CDR3 for beta chain variable domain of TCR clone 103501 (TRBV2, TRBJ2-1)
CASSELAGSYNEQFF

SEQ ID NO: 207003 - protein, 16 aa, Homo sapiens
  CDR3 for alpha chain variable domain of TCR clone 103502 (TRAV26-1, TRAJ23)
CIVRVESYNQGGKLIF

SEQ ID NO: 207004 - protein, 15 aa, Homo sapiens
  CDR3 for beta chain variable domain of TCR clone 103502 (TRBV18, TRBJ2-7)
CASSPRGGKGYEQYF

SEQ ID NO: 207005 - protein, 16 aa, Homo sapiens
  CDR3 for alpha chain variable domain of TCR clone 103503 (TRAV30, TRAJ24)
CGTEIVDADSWGKFQF

SEQ ID NO: 207006 - protein, 12 aa, Homo sapiens
  CDR3 for beta chain variable domain of TCR clone 103503 (TRBV2, TRBJ2-1)
GRGLPSYNEQFF

SEQ ID NO: 207007 - protein, 16 aa, Homo sapiens
  CDR3 for alpha chain variable domain of TCR clone 103504 (TRAV13-2, TRAJ28)
CAEKSYSGAGSCQLTF

SEQ ID NO: 207008 - protein, 16 aa, Homo sapiens
  CDR3 for beta chain variable domain of TCR clone 103504 (TRBV19, TRBJ2-1)
CASSKAGPSSYNEQFF

SEQ ID NO: 207009 - protein, 15 aa, Homo sapiens
  CDR3 for alpha chain variable domain of TCR clone 103505 (TRAV8-4, TRAJ40)
CAVGSITSGTYKYIF

SEQ ID NO: 207010 - protein, 13 aa, Homo sapiens
  CDR3 for beta chain variable domain of TCR clone 103505 (TRBV2, TRBJ2-1)
CATSRGTDNEQFF

SEQ ID NO: 207011 - protein, 18 aa, Homo sapiens
  CDR3 for alpha chain variable domain of TCR clone 103506 (TRAV1-2, TRAJ8)
CLLPLCCERGHRLQKLVF

SEQ ID NO: 207012 - protein, 15 aa, Homo sapiens
  CDR3 for beta chain variable domain of TCR clone 103506 (TRBV6-3, TRBJ2-7)
CASSSPGTVFYEQYF

SEQ ID NO: 207013 - protein, 16 aa, Homo sapiens
  CDR3 for alpha chain variable domain of TCR clone 103507 (TRAV30, TRAJ24)
VGTEIVDADSWGKFQF

SEQ ID NO: 207014 - protein, 14 aa, Homo sapiens
  CDR3 for beta chain variable domain of TCR clone 103507 (TRBV12-5, TRBJ2-5)
CASGSRTHQETQYF

SEQ ID NO: 207015 - protein, 12 aa, Homo sapiens
  CDR3 for alpha chain variable domain of TCR clone 103508 (TRAV3, TRAJ34)
CAVLGNTNKLIF

SEQ ID NO: 207016 - protein, 13 aa, Homo sapiens
  CDR3 for beta chain variable domain of TCR clone 103508 (TRBV19, TRBJ2-1)
CASSIGTGNEQFF

SEQ ID NO: 207017 - protein, 14 aa, Homo sapiens
  CDR3 for alpha chain variable domain of TCR clone 103509 (TRAV26-1, TRAJ48)
CIVRSWGGNEKLTF

SEQ ID NO: 207018 - protein, 14 aa, Homo sapiens
  CDR3 for beta chain variable domain of TCR clone 103509 (TRBV7-8, TRBJ2-3)
CASSLEAGTDTQYF

SEQ ID NO: 207019 - protein, 18 aa, Homo sapiens
  CDR3 for alpha chain variable domain of TCR clone 103510 (TRAV21, TRAJ52)
CAVRPSPAGGTSYGKLTF

SEQ ID NO: 207020 - protein, 16 aa, Homo sapiens
  CDR3 for beta chain variable domain of TCR clone 103510 (TRBV2, TRBJ1-4)
CASNLLQGATNEKLFF

SEQ ID NO: 207021 - protein, 13 aa, Homo sapiens
  CDR3 for alpha chain variable domain of TCR clone 103511 (TRAV17, TRAJ15)
CATDARAGTALTF

SEQ ID NO: 207022 - protein, 15 aa, Homo sapiens
  CDR3 for beta chain variable domain of TCR clone 103511 (TRBV20-1, TRBJ2-7)
CSARDRVSGMDEQYF

SEQ ID NO: 207023 - protein, 16 aa, Homo sapiens
  CDR3 for alpha chain variable domain of TCR clone 103512 (TRAV3, TRAJ10)
CAVRDMRAGGGNKLNF

SEQ ID NO: 207024 - protein, 17 aa, Homo sapiens
  CDR3 for beta chain variable domain of TCR clone 103512 (TRBV20-1, TRBJ2-2)
CSASGSGQGGLTGELFF

SEQ ID NO: 207025 - protein, 15 aa, Homo sapiens
  CDR3 for alpha chain variable domain of TCR clone 103513 (TRAV8-3, TRAJ27)
CAVGPSKTNAGKSTF

SEQ ID NO: 207026 - protein, 20 aa, Homo sapiens
  CDR3 for beta chain variable domain of TCR clone 103513 (TRBV7-8, TRBJ2-2)
CASSHLFPGPTIHITGELFF

SEQ ID NO: 207027 - protein, 14 aa, Homo sapiens
  CDR3 for alpha chain variable domain of TCR clone 103514 (TRAV2, TRAJ9)
CAVEDRSGGFKTIF

SEQ ID NO: 207028 - protein, 12 aa, Homo sapiens
  CDR3 for beta chain variable domain of TCR clone 103514 (TRBV28, TRBJ2-3)
CASSLYRDTQYF

SEQ ID NO: 207029 - protein, 12 aa, Homo sapiens
  CDR3 for alpha chain variable domain of TCR clone 103515 (TRAV26-2, TRAJ47)
CILVEYGNKLVF

SEQ ID NO: 207030 - protein, 20 aa, Homo sapiens
  CDR3 for beta chain variable domain of TCR clone 103515 (TRBV28, TRBJ2-1)
CASTPIGRSPGLAGGNEQFF

SEQ ID NO: 207031 - protein, 15 aa, Homo sapiens
  CDR3 for alpha chain variable domain of TCR clone 103516 (TRAV23/DV6, TRAJ30)
CAASSQESRDDKNIF

SEQ ID NO: 207032 - protein, 17 aa, Homo sapiens
  CDR3 for beta chain variable domain of TCR clone 103516 (TRBV4-3, TRBJ2-1)
CASSQFSSGRASGEQFF

SEQ ID NO: 207033 - protein, 12 aa, Homo sapiens
  CDR3 for alpha chain variable domain of TCR clone 103517 (TRAV8-3, TRAJ20)
CAVGGGDYKLSF

SEQ ID NO: 207034 - protein, 14 aa, Homo sapiens
  CDR3 for beta chain variable domain of TCR clone 103517 (TRBV5-1, TRBJ2-7)
CASSRGEALYEQYF

SEQ ID NO: 207035 - protein, 12 aa, Homo sapiens
  CDR3 for alpha chain variable domain of TCR clone 103518 (TRAV12-3, TRAJ17)
CAMTLTGNKLTF

SEQ ID NO: 207036 - protein, 16 aa, Homo sapiens
  CDR3 for beta chain variable domain of TCR clone 103518 (TRBV18, TRBJ2-4)
CASSPPYSGAKNIQYF

SEQ ID NO: 207037 - protein, 16 aa, Homo sapiens
  CDR3 for alpha chain variable domain of TCR clone 103519 (TRAV12-3, TRAJ53)
CAMSPGRGGSNYKPTF

SEQ ID NO: 207038 - protein, 11 aa, Homo sapiens
  CDR3 for beta chain variable domain of TCR clone 103519 (TRBV29-1, TRBJ2-5)
CSEDRTGTQYF

SEQ ID NO: 207039 - protein, 14 aa, Homo sapiens
  CDR3 for alpha chain variable domain of TCR clone 103520 (TRAV13-1, TRAJ9)
CAASALTGGFKTIF

SEQ ID NO: 207040 - protein, 13 aa, Homo sapiens
  CDR3 for beta chain variable domain of TCR clone 103520 (TRBV20-1, TRBJ1-1)
CSAGTVGDTEAFF

SEQ ID NO: 207041 - protein, 23 aa, Homo sapiens
  CDR3 for alpha chain variable domain of TCR clone 103521 (TRAV8-3, )
CAVVTTRIPDIQNPDPAVYQLTD

SEQ ID NO: 207042 - protein, 14 aa, Homo sapiens
  CDR3 for beta chain variable domain of TCR clone 103521 (TRBV11-2, TRBJ2-7)
CASSPSTTSYEQYF

SEQ ID NO: 207043 - protein, 16 aa, Homo sapiens
  CDR3 for alpha chain variable domain of TCR clone 103522 (TRAV2, TRAJ4)
CAVEDRFSGGYHKLIF

SEQ ID NO: 207044 - protein, 13 aa, Homo sapiens
  CDR3 for beta chain variable domain of TCR clone 103522 (TRBV7-7, TRBJ2-5)
CASSRSGQETQYF

SEQ ID NO: 207045 - protein, 11 aa, Homo sapiens
  CDR3 for alpha chain variable domain of TCR clone 103523 (TRAV21, TRAJ34)
CAVTNTDKLIF

SEQ ID NO: 207046 - protein, 16 aa, Homo sapiens
  CDR3 for beta chain variable domain of TCR clone 103523 (TRBV12-5, TRBJ2-5)
CASGPRTSGNQEAQYF

SEQ ID NO: 207047 - protein, 17 aa, Homo sapiens
  CDR3 for alpha chain variable domain of TCR clone 103524 (TRAV8-6, TRAJ58)
CAVSSWVGETSGSRLTF

SEQ ID NO: 207048 - protein, 16 aa, Homo sapiens
  CDR3 for beta chain variable domain of TCR clone 103524 (TRBV4-2, TRBJ2-1)
CISVPAAYRAYNEQFF

SEQ ID NO: 207049 - protein, 15 aa, Homo sapiens
  CDR3 for alpha chain variable domain of TCR clone 103525 (TRAV12-1, TRAJ42)
CVVTRDGGSQGNIIF

SEQ ID NO: 207050 - protein, 14 aa, Homo sapiens
  CDR3 for beta chain variable domain of TCR clone 103525 (TRBV11-2, TRBJ2-3)
CASSLGGGANTQYF

SEQ ID NO: 207051 - protein, 13 aa, Homo sapiens
  CDR3 for alpha chain variable domain of TCR clone 103526 (TRAV35, TRAJ42)
CAGFPGSQGNLIF

SEQ ID NO: 207052 - protein, 14 aa, Homo sapiens
  CDR3 for beta chain variable domain of TCR clone 103526 (TRBV19, TRBJ2-1)
CASPSFVLSGEQFF

SEQ ID NO: 207053 - protein, 15 aa, Homo sapiens
  CDR3 for alpha chain variable domain of TCR clone 103527 (TRAV8-4, TRAJ13)
CAVRDWGGGYQKVTF

SEQ ID NO: 207054 - protein, 15 aa, Homo sapiens
  CDR3 for beta chain variable domain of TCR clone 103527 (TRBV25-1, TRBJ1-4)
CASSPGDSTNEKLFF

SEQ ID NO: 207055 - protein, 11 aa, Homo sapiens
  CDR3 for alpha chain variable domain of TCR clone 103528 (TRAV2, TRAJ13)
CASGGYQKVTF

SEQ ID NO: 207056 - protein, 13 aa, Homo sapiens
  CDR3 for beta chain variable domain of TCR clone 103528 (TRBV19, TRBJ1-3)
CASRLSLGNTIYF

SEQ ID NO: 207057 - protein, 13 aa, Homo sapiens
  CDR3 for alpha chain variable domain of TCR clone 103529 (TRAV29/DV5, TRAJ29)
CAASAAGNTPLVF

SEQ ID NO: 207058 - protein, 11 aa, Homo sapiens
  CDR3 for beta chain variable domain of TCR clone 103529 (TRBV7-8, TRBJ2-7)
CASSLSLEQYF

SEQ ID NO: 207059 - protein, 23 aa, Homo sapiens
  CDR3 for alpha chain variable domain of TCR clone 103530 (TRAV12-2, TRAJ43)
SLLIRDFQPSDSATYLCAFDMRF

SEQ ID NO: 207060 - protein, 18 aa, Homo sapiens
  CDR3 for beta chain variable domain of TCR clone 103530 (TRBV20-1, TRBJ2-3)
CSASGLAGGPGTTDTQYF

SEQ ID NO: 207061 - protein, 14 aa, Homo sapiens
  CDR3 for alpha chain variable domain of TCR clone 103531 (TRAV26-1, TRAJ38)
CIADNAGNNRKLIW

SEQ ID NO: 207062 - protein, 17 aa, Homo sapiens
  CDR3 for beta chain variable domain of TCR clone 103531 (TRBV7-2, TRBJ1-4)
CASSFKAGPTTNEKLFF

SEQ ID NO: 207063 - protein, 16 aa, Homo sapiens
  CDR3 for alpha chain variable domain of TCR clone 103532 (TRAV3, TRAJ10)
CAVRDMRAGGGNKLTF

SEQ ID NO: 207064 - protein, 19 aa, Homo sapiens
  CDR3 for beta chain variable domain of TCR clone 103532 (TRBV6-3, TRBJ1-2)
CASSYSKGRTGPPNYGYSF

SEQ ID NO: 207065 - protein, 16 aa, Homo sapiens
  CDR3 for alpha chain variable domain of TCR clone 103533 (TRAV29/DV5, TRAJ22)
CAASASTSGSARQLTF

SEQ ID NO: 207066 - protein, 16 aa, Homo sapiens
  CDR3 for beta chain variable domain of TCR clone 103533 (TRBV6-5, TRBJ2-5)
CASSYSWTSEGETQYF

SEQ ID NO: 207067 - protein, 14 aa, Homo sapiens
  CDR3 for alpha chain variable domain of TCR clone 103534 (TRAV8-3, TRAJ35)
CAVVPQCFGNVLHC

SEQ ID NO: 207068 - protein, 15 aa, Homo sapiens
  CDR3 for beta chain variable domain of TCR clone 103534 (TRBV6-1, TRBJ2-2)
CASSAGQGYTGELFF

SEQ ID NO: 207069 - protein, 13 aa, Homo sapiens
  CDR3 for alpha chain variable domain of TCR clone 103535 (TRAV21, TRAJ27)
CAARPGNAGKSTF

SEQ ID NO: 207070 - protein, 12 aa, Homo sapiens
  CDR3 for beta chain variable domain of TCR clone 103535 (TRBV7-9, TRBJ2-7)
CASSLEGYEQYF

SEQ ID NO: 207071 - protein, 12 aa, Homo sapiens
  CDR3 for alpha chain variable domain of TCR clone 103536 (TRAV4, TRAJ9)
CLVPTGGFKTIF

SEQ ID NO: 207072 - protein, 16 aa, Homo sapiens
  CDR3 for beta chain variable domain of TCR clone 103536 (TRBV7-3, TRBJ2-1)
CASSLVSGSSNNEQFF

SEQ ID NO: 207073 - protein, 16 aa, Homo sapiens
  CDR3 for alpha chain variable domain of TCR clone 103537 (TRAV8-4, TRAJ5)
CAVSPLTDTGRRALTF

SEQ ID NO: 207074 - protein, 14 aa, Homo sapiens
  CDR3 for beta chain variable domain of TCR clone 103537 (TRBV19, TRBJ1-6)
CASSTDGWNSPLNF

SEQ ID NO: 207075 - protein, 15 aa, Homo sapiens
  CDR3 for alpha chain variable domain of TCR clone 103538 (TRAV35, TRAJ40)
CAGQLGTSGTYKYIF

SEQ ID NO: 207076 - protein, 16 aa, Homo sapiens
  CDR3 for beta chain variable domain of TCR clone 103538 (TRBV7-3, TRBJ2-1)
CASSLEGYRSYNEQFF

SEQ ID NO: 207077 - protein, 12 aa, Homo sapiens
  CDR3 for alpha chain variable domain of TCR clone 103539 (TRAV3, TRAJ31)
CAVRDGNARLMF

SEQ ID NO: 207078 - protein, 18 aa, Homo sapiens
  CDR3 for beta chain variable domain of TCR clone 103539 (TRBV7-2, TRBJ2-3)
CARSLKREGSGITDTQYF

SEQ ID NO: 207079 - protein, 11 aa, Homo sapiens
  CDR3 for alpha chain variable domain of TCR clone 103540 (TRAV21, TRAJ48)
CAVDGNEKLTF

SEQ ID NO: 207080 - protein, 17 aa, Homo sapiens
  CDR3 for beta chain variable domain of TCR clone 103540 (TRBV28, TRBJ2-5)
CASSTPEGDALQETQYF

SEQ ID NO: 207081 - protein, 13 aa, Homo sapiens
  CDR3 for alpha chain variable domain of TCR clone 103541 (TRAV16, TRAJ58)
CALSIPSGSRLTF

SEQ ID NO: 207082 - protein, 13 aa, Homo sapiens
  CDR3 for beta chain variable domain of TCR clone 103541 (TRBV7-3, TRBJ1-1)
CASSQDWGAEAFF

SEQ ID NO: 207083 - protein, 17 aa, Homo sapiens
  CDR3 for alpha chain variable domain of TCR clone 103542 (TRAV3, TRAJ6)
CAVRDGPRAGGSYIPTF

SEQ ID NO: 207084 - protein, 16 aa, Homo sapiens
  CDR3 for beta chain variable domain of TCR clone 103542 (TRBV7-8, TRBJ2-3)
CASSTEGQRDTDTQYF

SEQ ID NO: 207085 - protein, 11 aa, Homo sapiens
  CDR3 for alpha chain variable domain of TCR clone 103543 (TRAV3, TRAJ21)
CAVGNFNKFYF

SEQ ID NO: 207086 - protein, 13 aa, Homo sapiens
  CDR3 for beta chain variable domain of TCR clone 103543 (TRBV20-1, TRBJ2-7)
CSATHTSGYEQYF

SEQ ID NO: 207087 - protein, 14 aa, Homo sapiens
  CDR3 for alpha chain variable domain of TCR clone 103544 (TRAV12-2, TRAJ13)
CAVKKTGGYQKVTF

SEQ ID NO: 207088 - protein, 14 aa, Homo sapiens
  CDR3 for beta chain variable domain of TCR clone 103544 (TRBV7-6, TRBJ2-3)
CASSVGTVTDTQYF

SEQ ID NO: 207089 - protein, 14 aa, Homo sapiens
  CDR3 for alpha chain variable domain of TCR clone 103545 (TRAV4, TRAJ26)
CLVGPHNYGQNFVF

SEQ ID NO: 207090 - protein, 15 aa, Homo sapiens
  CDR3 for beta chain variable domain of TCR clone 103545 (TRBV7-3, TRBJ2-2)
CASSETGQGTGELFF

SEQ ID NO: 207091 - protein, 14 aa, Homo sapiens
  CDR3 for alpha chain variable domain of TCR clone 103546 (TRAV29/DV5, TRAJ32)
CAAAYGGATKKLIF

SEQ ID NO: 207092 - protein, 11 aa, Homo sapiens
  CDR3 for beta chain variable domain of TCR clone 103546 (TRBV11-2, TRBJ2-2)
CASSLPGELFF

SEQ ID NO: 207093 - protein, 16 aa, Homo sapiens
  CDR3 for alpha chain variable domain of TCR clone 103547 (TRAV30, TRAJ24)
CGTEIVDADSWGRFQF

SEQ ID NO: 207094 - protein, 17 aa, Homo sapiens
  CDR3 for beta chain variable domain of TCR clone 103547 (TRBV20-1, TRBJ2-1)
CSARDRRRASSYNEQFF

SEQ ID NO: 207095 - protein, 13 aa, Homo sapiens
  CDR3 for alpha chain variable domain of TCR clone 103548 (TRAV17, TRAJ5)
CALRGTGRRALTF

SEQ ID NO: 207096 - protein, 15 aa, Homo sapiens
  CDR3 for beta chain variable domain of TCR clone 103548 (TRBV9, TRBJ1-6)
CASSVAGTGDSPLLF

SEQ ID NO: 207097 - protein, 14 aa, Homo sapiens
  CDR3 for alpha chain variable domain of TCR clone 103549 (TRAV1-2, TRAJ8)
CAVREDTGFQKLVF

SEQ ID NO: 207098 - protein, 16 aa, Homo sapiens
  CDR3 for beta chain variable domain of TCR clone 103549 (TRBV4-2, TRBJ2-4)
CASSQELRRAKNIQYF

SEQ ID NO: 207099 - protein, 14 aa, Homo sapiens
  CDR3 for alpha chain variable domain of TCR clone 103550 (TRAV12-2, TRAJ13)
CAVNKTGGYQKVTF

SEQ ID NO: 207100 - protein, 14 aa, Homo sapiens
  CDR3 for beta chain variable domain of TCR clone 103550 (TRBV18, TRBJ2-5)
CASSPGVSQETQYF

SEQ ID NO: 207101 - protein, 14 aa, Homo sapiens
  CDR3 for alpha chain variable domain of TCR clone 103551 (TRAV12-2, TRAJ17)
CAVNINAAGNKLTF

SEQ ID NO: 207102 - protein, 16 aa, Homo sapiens
  CDR3 for beta chain variable domain of TCR clone 103551 (TRBV20-1, TRBJ2-6)
CSASSQGYDGANVLTF

SEQ ID NO: 207103 - protein, 14 aa, Homo sapiens
  CDR3 for alpha chain variable domain of TCR clone 103552 (TRAV3, TRAJ9)
CAVRLNTGGFKTIF

SEQ ID NO: 207104 - protein, 15 aa, Homo sapiens
  CDR3 for beta chain variable domain of TCR clone 103552 (TRBV7-9, TRBJ1-5)
CASSQGHQPNQPQHF

SEQ ID NO: 207105 - protein, 14 aa, Homo sapiens
  CDR3 for alpha chain variable domain of TCR clone 103553 (TRAV12-3, TRAJ42)
CAMDYGGSQGNLIF

SEQ ID NO: 207106 - protein, 13 aa, Homo sapiens
  CDR3 for beta chain variable domain of TCR clone 103553 (TRBV20-1, TRBJ1-6)
CSAPLGVGSPLHF

SEQ ID NO: 207107 - protein, 11 aa, Homo sapiens
  CDR3 for alpha chain variable domain of TCR clone 103554 (TRAV12-3, TRAJ43)
CAMSVSNDMRF

SEQ ID NO: 207108 - protein, 14 aa, Homo sapiens
  CDR3 for beta chain variable domain of TCR clone 103554 (TRBV7-9, TRBJ2-1)
CASSPRDSLYEQFF

SEQ ID NO: 207109 - protein, 13 aa, Homo sapiens
  CDR3 for alpha chain variable domain of TCR clone 103555 (TRAV12-1, TRAJ13)
CVVALLGYQKVTF

SEQ ID NO: 207110 - protein, 13 aa, Homo sapiens
  CDR3 for beta chain variable domain of TCR clone 103555 (TRBV20-1, TRBJ2-5)
CSAILTGQETQYL

SEQ ID NO: 207111 - protein, 14 aa, Homo sapiens
  CDR3 for alpha chain variable domain of TCR clone 103556 (TRAV4, TRAJ32)
CLVGLGGATNKLIF

SEQ ID NO: 207112 - protein, 15 aa, Homo sapiens
  CDR3 for beta chain variable domain of TCR clone 103556 (TRBV24-1, TRBJ2-5)
CATSETTGAVGAQYF

SEQ ID NO: 207113 - protein, 17 aa, Homo sapiens
  CDR3 for alpha chain variable domain of TCR clone 103557 (TRAV13-1, TRAJ52)
CAAGRNAGGTSYGKLTF

SEQ ID NO: 207114 - protein, 15 aa, Homo sapiens
  CDR3 for beta chain variable domain of TCR clone 103557 (TRBV6-3, TRBJ2-7)
CASSSLGTVFYEQYF

SEQ ID NO: 207115 - protein, 16 aa, Homo sapiens
  CDR3 for alpha chain variable domain of TCR clone 103558 (TRAV3, TRAJ21)
CAVRDIERGNFNKFYF

SEQ ID NO: 207116 - protein, 16 aa, Homo sapiens
  CDR3 for beta chain variable domain of TCR clone 103558 (TRBV11-3, TRBJ2-1)
CQQLSEYKSSYNEQFF

SEQ ID NO: 207117 - protein, 17 aa, Homo sapiens
  CDR3 for alpha chain variable domain of TCR clone 103559 (TRAV3, )
CAVRPTPDIQNPDPAVY

SEQ ID NO: 207118 - protein, 15 aa, Homo sapiens
  CDR3 for beta chain variable domain of TCR clone 103559 (TRBV11-3, TRBJ2-5)
CASSDTSGGIETQYF

SEQ ID NO: 207119 - protein, 10 aa, Homo sapiens
  CDR3 for alpha chain variable domain of TCR clone 103560 (TRAV17, TRAJ52)
SATSYVKLTF

SEQ ID NO: 207120 - protein, 13 aa, Homo sapiens
  CDR3 for beta chain variable domain of TCR clone 103560 (TRBV29-1, TRBJ2-5)
CSVGGTSAETQYF

SEQ ID NO: 207121 - protein, 15 aa, Homo sapiens
  CDR3 for alpha chain variable domain of TCR clone 103561 (TRAV8-3, TRAJ45)
CASSYSGGGADGLTF

SEQ ID NO: 207122 - protein, 19 aa, Homo sapiens
  CDR3 for beta chain variable domain of TCR clone 103561 (TRBV25-1, TRBJ2-2)
CAILVYRVDRGRKPGELFF

SEQ ID NO: 207123 - protein, 15 aa, Homo sapiens
  CDR3 for alpha chain variable domain of TCR clone 103562 (TRAV3, TRAJ22)
CAVRDRGGSARQQTF

SEQ ID NO: 207124 - protein, 16 aa, Homo sapiens
  CDR3 for beta chain variable domain of TCR clone 103562 (TRBV5-4, TRBJ2-3)
CASQQPGAGGADTQYF

SEQ ID NO: 207125 - protein, 13 aa, Homo sapiens
  CDR3 for alpha chain variable domain of TCR clone 103563 (TRAV3, TRAJ21)
CAVREPDFNKFYF

SEQ ID NO: 207126 - protein, 16 aa, Homo sapiens
  CDR3 for beta chain variable domain of TCR clone 103563 (TRBV28, TRBJ2-7)
CASSSGTSGRGYEQYF

SEQ ID NO: 207127 - protein, 15 aa, Homo sapiens
  CDR3 for alpha chain variable domain of TCR clone 103564 (TRAV8-3, TRAJ40)
CAAPSLGSGTYKYIF

SEQ ID NO: 207128 - protein, 16 aa, Homo sapiens
  CDR3 for beta chain variable domain of TCR clone 103564 (TRBV7-3, TRBJ2-3)
CASSLSGYRPEDTQYL

SEQ ID NO: 207129 - protein, 14 aa, Homo sapiens
  CDR3 for alpha chain variable domain of TCR clone 103565 (TRAV38-1, TRAJ39)
CAFAYNNAGNMLTF

SEQ ID NO: 207130 - protein, 15 aa, Homo sapiens
  CDR3 for beta chain variable domain of TCR clone 103565 (TRBV19, TRBJ2-6)
CASSRGPSGANVLTF

SEQ ID NO: 207131 - protein, 15 aa, Homo sapiens
  CDR3 for alpha chain variable domain of TCR clone 103566 (TRAV21, TRAJ13)
CAVMPTSGGYQKVTF

SEQ ID NO: 207132 - protein, 18 aa, Homo sapiens
  CDR3 for beta chain variable domain of TCR clone 103566 (TRBV11-3, TRBJ2-1)
CASSSYPGGRDSYNEQFF

SEQ ID NO: 207133 - protein, 11 aa, Homo sapiens
  CDR3 for alpha chain variable domain of TCR clone 103567 (TRAV21, TRAJ11)
CAMNGYSTLTF

SEQ ID NO: 207134 - protein, 11 aa, Homo sapiens
  CDR3 for beta chain variable domain of TCR clone 103567 (TRBV19, TRBJ1-1)
CASSIGSEAFF

SEQ ID NO: 207135 - protein, 10 aa, Homo sapiens
  CDR3 for alpha chain variable domain of TCR clone 103568 (TRAV12-3, TRAJ18)
CAMSAEAKPW

SEQ ID NO: 207136 - protein, 13 aa, Homo sapiens
  CDR3 for beta chain variable domain of TCR clone 103568 (TRBV15, TRBJ1-6)
CATSGGLNSPLHF

SEQ ID NO: 207137 - protein, 15 aa, Homo sapiens
  CDR3 for alpha chain variable domain of TCR clone 103569 (TRAV3, TRAJ4)
CAVRDGTGGYNKLIF

SEQ ID NO: 207138 - protein, 16 aa, Homo sapiens
  CDR3 for beta chain variable domain of TCR clone 103569 (TRBV27, TRBJ2-2)
CASSSSGVSNTGELFF

SEQ ID NO: 207139 - protein, 12 aa, Homo sapiens
  CDR3 for alpha chain variable domain of TCR clone 103570 (TRAV21, TRAJ35)
CAVVGFGNVLHC

SEQ ID NO: 207140 - protein, 12 aa, Homo sapiens
  CDR3 for beta chain variable domain of TCR clone 103570 (TRBV5-1, TRBJ1-2)
CASSQDTYGYTF

SEQ ID NO: 207141 - protein, 13 aa, Homo sapiens
  CDR3 for alpha chain variable domain of TCR clone 103571 (TRAV27, TRAJ41)
CAGEGNSGYALNF

SEQ ID NO: 207142 - protein, 15 aa, Homo sapiens
  CDR3 for beta chain variable domain of TCR clone 103571 (TRBV28, TRBJ2-1)
CASSIIAGGRSEQFF

SEQ ID NO: 207143 - protein, 13 aa, Homo sapiens
  CDR3 for alpha chain variable domain of TCR clone 103572 (TRAV38-1, TRAJ42)
CARWGGSQGNLIF

SEQ ID NO: 207144 - protein, 15 aa, Homo sapiens
  CDR3 for beta chain variable domain of TCR clone 103572 (TRBV5-1, TRBJ2-3)
CASSVTSGSTDTQYF

SEQ ID NO: 207145 - protein, 14 aa, Homo sapiens
  CDR3 for alpha chain variable domain of TCR clone 103573 (TRAV8-6, TRAJ29)
CAVSRASGNTPLVF

SEQ ID NO: 207146 - protein, 13 aa, Homo sapiens
  CDR3 for beta chain variable domain of TCR clone 103573 (TRBV19, TRBJ1-5)
CASSEGSNQPQQF

SEQ ID NO: 207147 - protein, 16 aa, Homo sapiens
  CDR3 for alpha chain variable domain of TCR clone 103574 (TRAV23/DV6, TRAJ9)
CAASIGGNTGGFRTIF

SEQ ID NO: 207148 - protein, 17 aa, Homo sapiens
  CDR3 for beta chain variable domain of TCR clone 103574 (TRBV20-1, TRBJ2-2)
CSASGSGQGGLTGELFF

SEQ ID NO: 207149 - protein, 15 aa, Homo sapiens
  CDR3 for alpha chain variable domain of TCR clone 103575 (TRAV8-4, TRAJ13)
CAVSDWGGGYQKVTF

SEQ ID NO: 207150 - protein, 14 aa, Homo sapiens
  CDR3 for beta chain variable domain of TCR clone 103575 (TRBV28, TRBJ2-1)
CASSLVAPYNEQFF

SEQ ID NO: 207151 - protein, 15 aa, Homo sapiens
  CDR3 for alpha chain variable domain of TCR clone 103576 (TRAV23/DV6, TRAJ38)
CAASGGAGNKRKLIW

SEQ ID NO: 207152 - protein, 13 aa, Homo sapiens
  CDR3 for beta chain variable domain of TCR clone 103576 (TRBV7-2, TRBJ1-2)
CASSLPGLYGYTF

SEQ ID NO: 207153 - protein, 14 aa, Homo sapiens
  CDR3 for alpha chain variable domain of TCR clone 103577 (TRAV23/DV6, TRAJ23)
CAASRRGQGGKLIF

SEQ ID NO: 207154 - protein, 17 aa, Homo sapiens
  CDR3 for beta chain variable domain of TCR clone 103577 (TRBV7-2, TRBJ2-3)
CASSARSSGSPTDTQYF

SEQ ID NO: 207155 - protein, 12 aa, Homo sapiens
  CDR3 for alpha chain variable domain of TCR clone 103578 (TRAV12-3, TRAJ17)
CAMTLTGNKLTF

SEQ ID NO: 207156 - protein, 18 aa, Homo sapiens
  CDR3 for beta chain variable domain of TCR clone 103578 (TRBV28, TRBJ2-6)
CACSLAGRAVSGANVLTF

SEQ ID NO: 207157 - protein, 13 aa, Homo sapiens
  CDR3 for alpha chain variable domain of TCR clone 103579 (TRAV36/DV7, TRAJ49)
CAGDSNTGNQFYF

SEQ ID NO: 207158 - protein, 16 aa, Homo sapiens
  CDR3 for beta chain variable domain of TCR clone 103579 (TRBV4-1, TRBJ2-7)
CASSQEWTSGPLEQYF

SEQ ID NO: 207159 - protein, 13 aa, Homo sapiens
  CDR3 for alpha chain variable domain of TCR clone 103580 (TRAV36/DV7, TRAJ37)
YAVFSSNTGKLIF

SEQ ID NO: 207160 - protein, 15 aa, Homo sapiens
  CDR3 for beta chain variable domain of TCR clone 103580 (TRBV12-4, TRBJ2-5)
CQQFFVRGRQETQHF

SEQ ID NO: 207161 - protein, 13 aa, Homo sapiens
  CDR3 for alpha chain variable domain of TCR clone 103581 (TRAV2, TRAJ29)
CAAQNSGNTPRVF

SEQ ID NO: 207162 - protein, 14 aa, Homo sapiens
  CDR3 for beta chain variable domain of TCR clone 103581 (TRBV7-9, TRBJ2-4)
CASSLAMGGNIQYF

SEQ ID NO: 207163 - protein, 13 aa, Homo sapiens
  CDR3 for alpha chain variable domain of TCR clone 103582 (TRAV13-1, TRAJ12)
CSKYMGSSYKLIF

SEQ ID NO: 207164 - protein, 12 aa, Homo sapiens
  CDR3 for beta chain variable domain of TCR clone 103582 (TRBV7-8, TRBJ2-7)
CASSLGDREQYF

SEQ ID NO: 207165 - protein, 16 aa, Homo sapiens
  CDR3 for alpha chain variable domain of TCR clone 103583 (TRAV30, TRAJ24)
CGTEIVDADSWGKFQF

SEQ ID NO: 207166 - protein, 14 aa, Homo sapiens
  CDR3 for beta chain variable domain of TCR clone 103583 (TRBV7-9, TRBJ2-1)
CASSLGVADNEQFF

SEQ ID NO: 207167 - protein, 12 aa, Homo sapiens
  CDR3 for alpha chain variable domain of TCR clone 103584 (TRAV12-2, TRAJ10)
WGVTGGGDKLTF

SEQ ID NO: 207168 - protein, 15 aa, Homo sapiens
  CDR3 for beta chain variable domain of TCR clone 103584 (TRBV6-3, TRBJ2-7)
CASSSPGTVFYEQYF

SEQ ID NO: 207169 - protein, 14 aa, Homo sapiens
  CDR3 for alpha chain variable domain of TCR clone 103585 (TRAV12-2, TRAJ53)
CAVKGGGSNYKLTF

SEQ ID NO: 207170 - protein, 14 aa, Homo sapiens
  CDR3 for beta chain variable domain of TCR clone 103585 (TRBV18, TRBJ2-5)
CASSPGVSQETQYF

SEQ ID NO: 207171 - protein, 23 aa, Homo sapiens
  CDR3 for alpha chain variable domain of TCR clone 103586 (TRAV2, TRAJ32)
CAFTMVVLQTSPSLELALCLLSS

SEQ ID NO: 207172 - protein, 16 aa, Homo sapiens
  CDR3 for beta chain variable domain of TCR clone 103586 (TRBV7-9, TRBJ2-7)
CASSYPDREGGYEQYF

SEQ ID NO: 207173 - protein, 13 aa, Homo sapiens
  CDR3 for alpha chain variable domain of TCR clone 103587 (TRAV35, TRAJ42)
CAGFPGSQGNLLF

SEQ ID NO: 207174 - protein, 13 aa, Homo sapiens
  CDR3 for beta chain variable domain of TCR clone 103587 (TRBV29-1, TRBJ2-1)
CSVEGGRVNEQFF

SEQ ID NO: 207175 - protein, 14 aa, Homo sapiens
  CDR3 for alpha chain variable domain of TCR clone 103588 (TRAV1-2, TRAJ16)
CAVNRFSDGQKLLF

SEQ ID NO: 207176 - protein, 15 aa, Homo sapiens
  CDR3 for beta chain variable domain of TCR clone 103588 (TRBV18, TRBJ2-1)
CASLPDRGRDNEQFF

SEQ ID NO: 207177 - protein, 14 aa, Homo sapiens
  CDR3 for alpha chain variable domain of TCR clone 103589 (TRAV12-1, TRAJ12)
CVVTRMDSSYKLIF

SEQ ID NO: 207178 - protein, 18 aa, Homo sapiens
  CDR3 for beta chain variable domain of TCR clone 103589 (TRBV20-1, TRBJ2-6)
CSAETTPTHGSGVNVLTF

SEQ ID NO: 207179 - protein, 13 aa, Homo sapiens
  CDR3 for alpha chain variable domain of TCR clone 103590 (TRAV13-1, TRAJ33)
CAASRAGNYQLIW

SEQ ID NO: 207180 - protein, 15 aa, Homo sapiens
  CDR3 for beta chain variable domain of TCR clone 103590 (TRBV2, TRBJ2-7)
EGSAMYFCASSEQYF

SEQ ID NO: 207181 - protein, 14 aa, Homo sapiens
  CDR3 for alpha chain variable domain of TCR clone 103591 (TRAV8-1, TRAJ23)
CAGGTYNQGGKLIF

SEQ ID NO: 207182 - protein, 16 aa, Homo sapiens
  CDR3 for beta chain variable domain of TCR clone 103591 (TRBV18, TRBJ1-5)
CASSPSTGNSNQPQHF

SEQ ID NO: 207183 - protein, 13 aa, Homo sapiens
  CDR3 for alpha chain variable domain of TCR clone 103592 (TRAV29/DV5, TRAJ41)
CAASGNSGYALNF

SEQ ID NO: 207184 - protein, 15 aa, Homo sapiens
  CDR3 for beta chain variable domain of TCR clone 103592 (TRBV11-2, TRBJ1-2)
CASSLEGVQRNGYTF

SEQ ID NO: 207185 - protein, 14 aa, Homo sapiens
  CDR3 for alpha chain variable domain of TCR clone 103593 (TRAV3, TRAJ5)
CAVRDGTGRRALTF

SEQ ID NO: 207186 - protein, 11 aa, Homo sapiens
  CDR3 for beta chain variable domain of TCR clone 103593 (TRBV7-8, TRBJ2-7)
CASSLSLEQYF

SEQ ID NO: 207187 - protein, 12 aa, Homo sapiens
  CDR3 for alpha chain variable domain of TCR clone 103594 (TRAV8-3, TRAJ20)
CAVGANDYKLSF

SEQ ID NO: 207188 - protein, 12 aa, Homo sapiens
  CDR3 for beta chain variable domain of TCR clone 103594 (TRBV7-3, TRBJ2-1)
CASSFINNEQFF

SEQ ID NO: 207189 - protein, 16 aa, Homo sapiens
  CDR3 for alpha chain variable domain of TCR clone 103595 (TRAV3, TRAJ37)
CAVRGKGSGKTGKLIF

SEQ ID NO: 207190 - protein, 16 aa, Homo sapiens
  CDR3 for beta chain variable domain of TCR clone 103595 (TRBV12-4, TRBJ1-5)
CASSRPVGGSNQPQHF

SEQ ID NO: 207191 - protein, 12 aa, Homo sapiens
  CDR3 for alpha chain variable domain of TCR clone 103596 (TRAV8-3, TRAJ26)
CAGGNYGQNFVF

SEQ ID NO: 207192 - protein, 15 aa, Homo sapiens
  CDR3 for beta chain variable domain of TCR clone 103596 (TRBV12-4, TRBJ2-1)
CASSLSGGASNEQFF

SEQ ID NO: 207193 - protein, 15 aa, Homo sapiens
  CDR3 for alpha chain variable domain of TCR clone 103597 (TRAV3, TRAJ17)
CAVSPKEAAGNKLPF

SEQ ID NO: 207194 - protein, 12 aa, Homo sapiens
  CDR3 for beta chain variable domain of TCR clone 103597 (TRBV7-9, TRBJ1-6)
CASSLMTSPLHF

SEQ ID NO: 207195 - protein, 13 aa, Homo sapiens
  CDR3 for alpha chain variable domain of TCR clone 103598 (TRAV25, TRAJ26)
CAGMDNYGQNFVF

SEQ ID NO: 207196 - protein, 15 aa, Homo sapiens
  CDR3 for beta chain variable domain of TCR clone 103598 (TRBV10-3, TRBJ2-1)
CAIRNGTSGHNEQFS

SEQ ID NO: 207197 - protein, 18 aa, Homo sapiens
  CDR3 for alpha chain variable domain of TCR clone 103599 (TRAV21, TRAJ52)
CAVRPSPAGGTSYGKLTF

SEQ ID NO: 207198 - protein, 11 aa, Homo sapiens
  CDR3 for beta chain variable domain of TCR clone 103599 (TRBV12-4, TRBJ1-2)
CASRGDRGYTF

SEQ ID NO: 207199 - protein, 13 aa, Homo sapiens
  CDR3 for alpha chain variable domain of TCR clone 103600 (TRAV27, TRAJ6)
CAGGTRGSYIPTF

SEQ ID NO: 207200 - protein, 14 aa, Homo sapiens
  CDR3 for beta chain variable domain of TCR clone 103600 (TRBV6-3, TRBJ1-1)
CASSYQRRDTEDFF

SEQ ID NO: 207201 - protein, 11 aa, Homo sapiens
  CDR3 for alpha chain variable domain of TCR clone 103601 (TRAV17, TRAJ31)
CATSNNARLMF

SEQ ID NO: 207202 - protein, 16 aa, Homo sapiens
  CDR3 for beta chain variable domain of TCR clone 103601 (TRBV7-8, TRBJ2-4)
CACSAERTLAKNIQYF

SEQ ID NO: 207203 - protein, 13 aa, Homo sapiens
  CDR3 for alpha chain variable domain of TCR clone 103602 (TRAV21, TRAJ27)
CAARPGNAGKSTF

SEQ ID NO: 207204 - protein, 14 aa, Homo sapiens
  CDR3 for beta chain variable domain of TCR clone 103602 (TRBV7-3, TRBJ1-1)
CASSLKGGNTEAFF

SEQ ID NO: 207205 - protein, 16 aa, Homo sapiens
  CDR3 for alpha chain variable domain of TCR clone 103603 (TRAV3, TRAJ37)
CAVRVRGSGNTGKLIF

SEQ ID NO: 207206 - protein, 16 aa, Homo sapiens
  CDR3 for beta chain variable domain of TCR clone 103603 (TRBV15, TRBJ2-7)
CATSRDGGIPSYEQYF

SEQ ID NO: 207207 - protein, 13 aa, Homo sapiens
  CDR3 for alpha chain variable domain of TCR clone 103604 (TRAV21, TRAJ27)
CAARPGNAGKSTS

SEQ ID NO: 207208 - protein, 15 aa, Homo sapiens
  CDR3 for beta chain variable domain of TCR clone 103604 (TRBV11-3, TRBJ2-7)
CASSPGPASSYEQYF

SEQ ID NO: 207209 - protein, 15 aa, Homo sapiens
  CDR3 for alpha chain variable domain of TCR clone 103605 (TRAV3, TRAJ4)
CAVRDGTGGYNKLIF

SEQ ID NO: 207210 - protein, 16 aa, Homo sapiens
  CDR3 for beta chain variable domain of TCR clone 103605 (TRBV27, TRBJ2-2)
CASGSSGVSNTGELFF

SEQ ID NO: 207211 - protein, 13 aa, Homo sapiens
  CDR3 for alpha chain variable domain of TCR clone 103606 (TRAV21, TRAJ15)
CAVANQAGTALIF

SEQ ID NO: 207212 - protein, 13 aa, Homo sapiens
  CDR3 for beta chain variable domain of TCR clone 103606 (TRBV4-1, TRBJ2-2)
CASSQENTGELFF

SEQ ID NO: 207213 - protein, 13 aa, Homo sapiens
  CDR3 for alpha chain variable domain of TCR clone 103607 (TRAV8-4, TRAJ48)
CAVSIFGNEKLTF

SEQ ID NO: 207214 - protein, 15 aa, Homo sapiens
  CDR3 for beta chain variable domain of TCR clone 103607 (TRBV20-1, TRBJ2-7)
CSARKGLAESYEQYF

SEQ ID NO: 207215 - protein, 13 aa, Homo sapiens
  CDR3 for alpha chain variable domain of TCR clone 103608 (TRAV20, TRAJ20)
CAVQAGSGYKLSF

SEQ ID NO: 207216 - protein, 15 aa, Homo sapiens
  CDR3 for beta chain variable domain of TCR clone 103608 (TRBV18, TRBJ2-1)
CASSPPSASYNEQFF

SEQ ID NO: 207217 - protein, 15 aa, Homo sapiens
  CDR3 for alpha chain variable domain of TCR clone 103609 (TRAV3, TRAJ22)
CAVRDRGGSARQLTF

SEQ ID NO: 207218 - protein, 15 aa, Homo sapiens
  CDR3 for beta chain variable domain of TCR clone 103609 (TRBV5-1, TRBJ2-3)
CASSVTSGSTDTQYF

SEQ ID NO: 207219 - protein, 12 aa, Homo sapiens
  CDR3 for alpha chain variable domain of TCR clone 103610 (TRAV8-3, TRAJ27)
CAVGADAGKSTF

SEQ ID NO: 207220 - protein, 14 aa, Homo sapiens
  CDR3 for beta chain variable domain of TCR clone 103610 (TRBV2, TRBJ2-1)
CASRLIVGHDEQFF

SEQ ID NO: 207221 - protein, 17 aa, Homo sapiens
  CDR3 for alpha chain variable domain of TCR clone 103611 (TRAV3, TRAJ6)
CAVRDGPRAGGSYIPTF

SEQ ID NO: 207222 - protein, 13 aa, Homo sapiens
  CDR3 for beta chain variable domain of TCR clone 103611 (TRBV28, TRBJ2-7)
CAGAQQGLDEQYF

SEQ ID NO: 207223 - protein, 13 aa, Homo sapiens
  CDR3 for alpha chain variable domain of TCR clone 103612 (TRAV17, TRAJ22)
CAHHSGSARQLTF

SEQ ID NO: 207224 - protein, 15 aa, Homo sapiens
  CDR3 for beta chain variable domain of TCR clone 103612 (TRBV6-1, TRBJ2-3)
CASSERGGITDTQYF

SEQ ID NO: 207225 - protein, 18 aa, Homo sapiens
  CDR3 for alpha chain variable domain of TCR clone 103613 (TRAV29/DV5, TRAJ52)
CAAGFRGAGGTSYGKLTF

SEQ ID NO: 207226 - protein, 16 aa, Homo sapiens
  CDR3 for beta chain variable domain of TCR clone 103613 (TRBV7-9, TRBJ1-2)
CASSLGFSSGEDGYTF

SEQ ID NO: 207227 - protein, 13 aa, Homo sapiens
  CDR3 for alpha chain variable domain of TCR clone 103614 (TRAV26-1, TRAJ29)
CIVRRSGNTPLVF

SEQ ID NO: 207228 - protein, 16 aa, Homo sapiens
  CDR3 for beta chain variable domain of TCR clone 103614 (TRBV11-2, TRBJ2-7)
CASSLAPTWVNYEQYF

SEQ ID NO: 207229 - protein, 12 aa, Homo sapiens
  CDR3 for alpha chain variable domain of TCR clone 103615 (TRAV12-3, TRAJ20)
CAMVRGDYKLSF

SEQ ID NO: 207230 - protein, 17 aa, Homo sapiens
  CDR3 for beta chain variable domain of TCR clone 103615 (TRBV7-8, TRBJ2-6)
CASSAGTGGAGANVLTF

SEQ ID NO: 207231 - protein, 14 aa, Homo sapiens
  CDR3 for alpha chain variable domain of TCR clone 103616 (TRAV12-1, TRAJ17)
CVVNHKAAGNKLTF

SEQ ID NO: 207232 - protein, 14 aa, Homo sapiens
  CDR3 for beta chain variable domain of TCR clone 103616 (TRBV7-2, TRBJ2-7)
CASRSQGAAYEQYF

SEQ ID NO: 207233 - protein, 13 aa, Homo sapiens
  CDR3 for alpha chain variable domain of TCR clone 103617 (TRAV21, TRAJ27)
CAARPCNAGKSTF

SEQ ID NO: 207234 - protein, 17 aa, Homo sapiens
  CDR3 for beta chain variable domain of TCR clone 103617 (TRBV20-1, TRBJ2-2)
CSASGSGQGGLTGELFF

SEQ ID NO: 207235 - protein, 11 aa, Homo sapiens
  CDR3 for alpha chain variable domain of TCR clone 103618 (TRAV21, TRAJ27)
CAVRMQANQPL

SEQ ID NO: 207236 - protein, 17 aa, Homo sapiens
  CDR3 for beta chain variable domain of TCR clone 103618 (TRBV11-2, TRBJ2-1)
CASSLYPPGVEYNEQFF

SEQ ID NO: 207237 - protein, 12 aa, Homo sapiens
  CDR3 for alpha chain variable domain of TCR clone 103619 (TRAV29/DV5, TRAJ15)
CASNQAGTALIF

SEQ ID NO: 207238 - protein, 15 aa, Homo sapiens
  CDR3 for beta chain variable domain of TCR clone 103619 (TRBV9, TRBJ2-2)
CASSDFAGASGELFF

SEQ ID NO: 207239 - protein, 11 aa, Homo sapiens
  CDR3 for alpha chain variable domain of TCR clone 103620 (TRAV12-1, TRAJ21)
CVVNNFNKFYF

SEQ ID NO: 207240 - protein, 15 aa, Homo sapiens
  CDR3 for beta chain variable domain of TCR clone 103620 (TRBV10-2, TRBJ2-6)
CASSEQGTGANVLTF

SEQ ID NO: 207241 - protein, 12 aa, Homo sapiens
  CDR3 for alpha chain variable domain of TCR clone 103621 (TRAV16, TRAJ10)
CSRKGGGNKLTF

SEQ ID NO: 207242 - protein, 15 aa, Homo sapiens
  CDR3 for beta chain variable domain of TCR clone 103621 (TRBV6-3, TRBJ2-7)
CASSSPGTVFYEQYF

SEQ ID NO: 207243 - protein, 12 aa, Homo sapiens
  CDR3 for alpha chain variable domain of TCR clone 103622 (TRAV12-3, TRAJ17)
CAMTLTGNKLTF

SEQ ID NO: 207244 - protein, 17 aa, Homo sapiens
  CDR3 for beta chain variable domain of TCR clone 103622 (TRBV20-1, TRBJ2-7)
CSARDRVSGRTSSTSGR

SEQ ID NO: 207245 - protein, 15 aa, Homo sapiens
  CDR3 for alpha chain variable domain of TCR clone 103623 (TRAV3, TRAJ4)
CAVRDGTGGCNKLIF

SEQ ID NO: 207246 - protein, 16 aa, Homo sapiens
  CDR3 for beta chain variable domain of TCR clone 103623 (TRBV27, TRBJ2-2)
CASSSSGVSNTGELFF

SEQ ID NO: 207247 - protein, 14 aa, Homo sapiens
  CDR3 for alpha chain variable domain of TCR clone 103624 (TRAV29/DV5, TRAJ34)
CAASASRETDKLIF

SEQ ID NO: 207248 - protein, 15 aa, Homo sapiens
  CDR3 for beta chain variable domain of TCR clone 103624 (TRBV7-8, TRBJ2-7)
CASSLERAGYYEQYF

SEQ ID NO: 207249 - protein, 13 aa, Homo sapiens
  CDR3 for alpha chain variable domain of TCR clone 103625 (TRAV8-4, TRAJ44)
CAVCTGTASKLTF

SEQ ID NO: 207250 - protein, 15 aa, Homo sapiens
  CDR3 for beta chain variable domain of TCR clone 103625 (TRBV14, TRBJ2-1)
CASSQVGLHFNEQFF

SEQ ID NO: 207251 - protein, 13 aa, Homo sapiens
  CDR3 for alpha chain variable domain of TCR clone 103626 (TRAV13-2, TRAJ42)
CAENGGSQGNLIF

SEQ ID NO: 207252 - protein, 13 aa, Homo sapiens
  CDR3 for beta chain variable domain of TCR clone 103626 (TRBV10-3, TRBJ1-2)
CAINADLNYGYTF

SEQ ID NO: 207253 - protein, 14 aa, Homo sapiens
  CDR3 for alpha chain variable domain of TCR clone 103627 (TRAV12-3, TRAJ12)
CAMSEVDSSYKLVF

SEQ ID NO: 207254 - protein, 12 aa, Homo sapiens
  CDR3 for beta chain variable domain of TCR clone 103627 (TRBV18, TRBJ1-4)
CASSPSREKLFF

SEQ ID NO: 207255 - protein, 13 aa, Homo sapiens
  CDR3 for alpha chain variable domain of TCR clone 103628 (TRAV27, TRAJ45)
CRSSGGGADGLTF

SEQ ID NO: 207256 - protein, 12 aa, Homo sapiens
  CDR3 for beta chain variable domain of TCR clone 103628 (TRBV2, TRBJ2-1)
CAYGPPGNEQFF

SEQ ID NO: 207257 - protein, 15 aa, Homo sapiens
  CDR3 for alpha chain variable domain of TCR clone 103629 (TRAV12-3, TRAJ6)
CAMSATTGGSYIPTF

SEQ ID NO: 207258 - protein, 13 aa, Homo sapiens
  CDR3 for beta chain variable domain of TCR clone 103629 (TRBV19, TRBJ1-2)
CASSVPGQDGYTF

SEQ ID NO: 207259 - protein, 17 aa, Homo sapiens
  CDR3 for alpha chain variable domain of TCR clone 103630 (TRAV20, TRAJ52)
CAVQANAGGTSYGKLTF

SEQ ID NO: 207260 - protein, 12 aa, Homo sapiens
  CDR3 for beta chain variable domain of TCR clone 103630 (TRBV7-8, TRBJ2-7)
CASSLGDREQYF

SEQ ID NO: 207261 - protein, 14 aa, Homo sapiens
  CDR3 for alpha chain variable domain of TCR clone 103631 (TRAV1-2, TRAJ16)
YAVKEGSDGQKLLF

SEQ ID NO: 207262 - protein, 13 aa, Homo sapiens
  CDR3 for beta chain variable domain of TCR clone 103631 (TRBV7-2, TRBJ2-1)
CASSLSPDNEQFF

SEQ ID NO: 207263 - protein, 14 aa, Homo sapiens
  CDR3 for alpha chain variable domain of TCR clone 103632 (TRAV12-2, TRAJ17)
CAALFKAAGNKLTF

SEQ ID NO: 207264 - protein, 16 aa, Homo sapiens
  CDR3 for beta chain variable domain of TCR clone 103632 (TRBV20-1, TRBJ2-2)
GSASASGIPGAGELFF

SEQ ID NO: 207265 - protein, 17 aa, Homo sapiens
  CDR3 for alpha chain variable domain of TCR clone 103633 (TRAV3, TRAJ6)
CAVRDGPRAGGSYIPTF

SEQ ID NO: 207266 - protein, 18 aa, Homo sapiens
  CDR3 for beta chain variable domain of TCR clone 103633 (TRBV4-1, TRBJ1-5)
CASSQDPRGQGLNQPQHF

SEQ ID NO: 207267 - protein, 14 aa, Homo sapiens
  CDR3 for alpha chain variable domain of TCR clone 103634 (TRAV12-2, TRAJ17)
CAVNIKAAGNKPTF

SEQ ID NO: 207268 - protein, 13 aa, Homo sapiens
  CDR3 for beta chain variable domain of TCR clone 103634 (TRBV4-1, TRBJ2-2)
CASSQENTGELFF

SEQ ID NO: 207269 - protein, 17 aa, Homo sapiens
  CDR3 for alpha chain variable domain of TCR clone 103635 (TRAV23/DV6, TRAJ57)
CAASSTLSQGGSEKLVF

SEQ ID NO: 207270 - protein, 20 aa, Homo sapiens
  CDR3 for beta chain variable domain of TCR clone 103635 (TRBV7-8, TRBJ2-2)
CASSHLFPGPTIHITGELFF

SEQ ID NO: 207271 - protein, 17 aa, Homo sapiens
  CDR3 for alpha chain variable domain of TCR clone 103636 (TRAV26-2, TRAJ42)
CILRDVGYGGSQGNLIF

SEQ ID NO: 207272 - protein, 16 aa, Homo sapiens
  CDR3 for beta chain variable domain of TCR clone 103636 (TRBV12-4, TRBJ1-5)
CDSSRPVGGSNQPQHF

SEQ ID NO: 207273 - protein, 12 aa, Homo sapiens
  CDR3 for alpha chain variable domain of TCR clone 103637 (TRAV25, TRAJ35)
CAGIGFGNVLHC

SEQ ID NO: 207274 - protein, 12 aa, Homo sapiens
  CDR3 for beta chain variable domain of TCR clone 103637 (TRBV6-3, TRBJ2-7)
CASSRQGYEQYF

SEQ ID NO: 207275 - protein, 13 aa, Homo sapiens
  CDR3 for alpha chain variable domain of TCR clone 103638 (TRAV26-2, TRAJ43)
CILRAVNNNDMRF

SEQ ID NO: 207276 - protein, 15 aa, Homo sapiens
  CDR3 for beta chain variable domain of TCR clone 103638 (TRBV7-9, TRBJ1-5)
CASSQGHQPNQPQHF

SEQ ID NO: 207277 - protein, 16 aa, Homo sapiens
  CDR3 for alpha chain variable domain of TCR clone 103639 (TRAV30, TRAJ24)
CGTEIVDADSWGKFPF

SEQ ID NO: 207278 - protein, 15 aa, Homo sapiens
  CDR3 for beta chain variable domain of TCR clone 103639 (TRBV27, TRBJ2-1)
CASSNGGGSSNEQFF

SEQ ID NO: 207279 - protein, 14 aa, Homo sapiens
  CDR3 for alpha chain variable domain of TCR clone 103640 (TRAV12-3, TRAJ10)
SHLPLTGGGNKLTF

SEQ ID NO: 207280 - protein, 16 aa, Homo sapiens
  CDR3 for beta chain variable domain of TCR clone 103640 (TRBV7-7, TRBJ2-1)
CASSPGLAGGFNEQFF

SEQ ID NO: 207281 - protein, 14 aa, Homo sapiens
  CDR3 for alpha chain variable domain of TCR clone 103641 (TRAV12-1, TRAJ22)
CVVTTSGSARQLTF

SEQ ID NO: 207282 - protein, 11 aa, Homo sapiens
  CDR3 for beta chain variable domain of TCR clone 103641 (TRBV20-1, TRBJ2-1)
CSLSSGSEQFF

SEQ ID NO: 207283 - protein, 23 aa, Homo sapiens
  CDR3 for alpha chain variable domain of TCR clone 103642 (TRAV26-1, )
CIADNASNNHIQNPDPAVYQLRD

SEQ ID NO: 207284 - protein, 12 aa, Homo sapiens
  CDR3 for beta chain variable domain of TCR clone 103642 (TRBV11-2, TRBJ2-2)
CASSLGGGELFF

SEQ ID NO: 207285 - protein, 13 aa, Homo sapiens
  CDR3 for alpha chain variable domain of TCR clone 103643 (TRAV17, TRAJ21)
CATDGGNFNKFYF

SEQ ID NO: 207286 - protein, 11 aa, Homo sapiens
  CDR3 for beta chain variable domain of TCR clone 103643 (TRBV11-2, TRBJ2-2)
CASSLPGELFF

SEQ ID NO: 207287 - protein, 12 aa, Homo sapiens
  CDR3 for alpha chain variable domain of TCR clone 103644 (TRAV22, TRAJ29)
CAPPSGNTPLVF

SEQ ID NO: 207288 - protein, 14 aa, Homo sapiens
  CDR3 for beta chain variable domain of TCR clone 103644 (TRBV11-2, TRBJ2-7)
CAGSLGAGAYEQYF

SEQ ID NO: 207289 - protein, 15 aa, Homo sapiens
  CDR3 for alpha chain variable domain of TCR clone 103645 (TRAV21, TRAJ10)
CAVRGLTGGGNKLTF

SEQ ID NO: 207290 - protein, 15 aa, Homo sapiens
  CDR3 for beta chain variable domain of TCR clone 103645 (TRBV6-6, TRBJ1-5)
CASSSIQGTNQPQHF

SEQ ID NO: 207291 - protein, 10 aa, Homo sapiens
  CDR3 for alpha chain variable domain of TCR clone 103646 (TRAV14/DV4, TRAJ32)
PLTPTNKLIF

SEQ ID NO: 207292 - protein, 17 aa, Homo sapiens
  CDR3 for beta chain variable domain of TCR clone 103646 (TRBV20-1, TRBJ2-1)
CSASSSGLAGSYNEQFF

SEQ ID NO: 207293 - protein, 16 aa, Homo sapiens
  CDR3 for alpha chain variable domain of TCR clone 103647 (TRAV4, TRAJ9)
CLVGDPNRPVGFKTIF

SEQ ID NO: 207294 - protein, 16 aa, Homo sapiens
  CDR3 for beta chain variable domain of TCR clone 103647 (TRBV28, TRBJ1-4)
CASSPPYRGRSEKLFF

SEQ ID NO: 207295 - protein, 13 aa, Homo sapiens
  CDR3 for alpha chain variable domain of TCR clone 103648 (TRAV2, TRAJ5)
CAVPDTGRRALTF

SEQ ID NO: 207296 - protein, 15 aa, Homo sapiens
  CDR3 for beta chain variable domain of TCR clone 103648 (TRBV28, TRBJ1-5)
CASSRDRGRDQPQHF

SEQ ID NO: 207297 - protein, 14 aa, Homo sapiens
  CDR3 for alpha chain variable domain of TCR clone 103649 (TRAV12-2, TRAJ17)
CAVLFKAAGNKLTF

SEQ ID NO: 207298 - protein, 17 aa, Homo sapiens
  CDR3 for beta chain variable domain of TCR clone 103649 (TRBV28, TRBJ2-3)
CASSPTPAGGRVDTQYF

SEQ ID NO: 207299 - protein, 16 aa, Homo sapiens
  CDR3 for alpha chain variable domain of TCR clone 103650 (TRAV27, TRAJ13)
CAGAKSDSGGYQKVTF

SEQ ID NO: 207300 - protein, 12 aa, Homo sapiens
  CDR3 for beta chain variable domain of TCR clone 103650 (TRBV19, TRBJ1-5)
CASSIAQQPQHF

SEQ ID NO: 207301 - protein, 17 aa, Homo sapiens
  CDR3 for alpha chain variable domain of TCR clone 103651 (TRAV14/DV4, TRAJ3)
CNERGQWWYSSASKIIF

SEQ ID NO: 207302 - protein, 15 aa, Homo sapiens
  CDR3 for beta chain variable domain of TCR clone 103651 (TRBV3-1, TRBJ2-7)
CASSQEWTGSYEQYF

SEQ ID NO: 207303 - protein, 13 aa, Homo sapiens
  CDR3 for alpha chain variable domain of TCR clone 103652 (TRAV20, TRAJ37)
CAGCSSNTGKLIF

SEQ ID NO: 207304 - protein, 13 aa, Homo sapiens
  CDR3 for beta chain variable domain of TCR clone 103652 (TRBV20-1, TRBJ1-1)
CSARGGGNTEAFF

SEQ ID NO: 207305 - protein, 13 aa, Homo sapiens
  CDR3 for alpha chain variable domain of TCR clone 103653 (TRAV17, TRAJ5)
CALRGTGRRALTF

SEQ ID NO: 207306 - protein, 20 aa, Homo sapiens
  CDR3 for beta chain variable domain of TCR clone 103653 (TRBV11-3, TRBJ2-7)
CASSQRTSGSLRAVLRAGHQ

SEQ ID NO: 207307 - protein, 14 aa, Homo sapiens
  CDR3 for alpha chain variable domain of TCR clone 103654 (TRAV3, TRAJ40)
CAVRDMPGTYKYIF

SEQ ID NO: 207308 - protein, 16 aa, Homo sapiens
  CDR3 for beta chain variable domain of TCR clone 103654 (TRBV18, TRBJ2-7)
CASSPGRAGGAYEQYF

SEQ ID NO: 207309 - protein, 13 aa, Homo sapiens
  CDR3 for alpha chain variable domain of TCR clone 103655 (TRAV21, TRAJ34)
CAVESYNTDKLIF

SEQ ID NO: 207310 - protein, 12 aa, Homo sapiens
  CDR3 for beta chain variable domain of TCR clone 103655 (TRBV2, TRBJ1-5)
CAFGEYGQPQHF

SEQ ID NO: 207311 - protein, 12 aa, Homo sapiens
  CDR3 for alpha chain variable domain of TCR clone 103656 (TRAV3, TRAJ26)
CAVRDYGQKFVF

SEQ ID NO: 207312 - protein, 16 aa, Homo sapiens
  CDR3 for beta chain variable domain of TCR clone 103656 (TRBV11-2, TRBJ1-2)
CASSPSGREANYGYTF

SEQ ID NO: 207313 - protein, 14 aa, Homo sapiens
  CDR3 for alpha chain variable domain of TCR clone 103657 (TRAV12-3, TRAJ58)
CAMSTETSGSRLTF

SEQ ID NO: 207314 - protein, 13 aa, Homo sapiens
  CDR3 for beta chain variable domain of TCR clone 103657 (TRBV20-1, TRBJ2-7)
CSATHTSGYEQYF

SEQ ID NO: 207315 - protein, 13 aa, Homo sapiens
  CDR3 for alpha chain variable domain of TCR clone 103658 (TRAV13-2, TRAJ40)
CAEFTSGTYKYIF

SEQ ID NO: 207316 - protein, 14 aa, Homo sapiens
  CDR3 for beta chain variable domain of TCR clone 103658 (TRBV10-2, TRBJ1-5)
CASSSTGRNQPQYF

SEQ ID NO: 207317 - protein, 16 aa, Homo sapiens
  CDR3 for alpha chain variable domain of TCR clone 103659 (TRAV4, TRAJ22)
CLVGDLYSGSARQLTF

SEQ ID NO: 207318 - protein, 17 aa, Homo sapiens
  CDR3 for beta chain variable domain of TCR clone 103659 (TRBV11-2, TRBJ2-1)
WASSLYPPGVEYNEQFF

SEQ ID NO: 207319 - protein, 15 aa, Homo sapiens
  CDR3 for alpha chain variable domain of TCR clone 103660 (TRAV3, TRAJ5)
CAVRDLDTGRRALTF

SEQ ID NO: 207320 - protein, 16 aa, Homo sapiens
  CDR3 for beta chain variable domain of TCR clone 103660 (TRBV5-1, TRBJ1-1)
CASSLRPRNLNTEAFF

SEQ ID NO: 207321 - protein, 13 aa, Homo sapiens
  CDR3 for alpha chain variable domain of TCR clone 103661 (TRAV3, TRAJ21)
CAVREPDFNKFYF

SEQ ID NO: 207322 - protein, 12 aa, Homo sapiens
  CDR3 for beta chain variable domain of TCR clone 103661 (TRBV7-2, TRBJ2-2)
CASSLPPGMLFF

SEQ ID NO: 207323 - protein, 14 aa, Homo sapiens
  CDR3 for alpha chain variable domain of TCR clone 103662 (TRAV21, TRAJ28)
CAVGSEAGSYQLTF

SEQ ID NO: 207324 - protein, 14 aa, Homo sapiens
  CDR3 for beta chain variable domain of TCR clone 103662 (TRBV18, TRBJ1-4)
CASSPGPNGEKLFF

SEQ ID NO: 207325 - protein, 10 aa, Homo sapiens
  CDR3 for alpha chain variable domain of TCR clone 103663 (TRAV13-2, TRAJ20)
CARRDYKLSF

SEQ ID NO: 207326 - protein, 12 aa, Homo sapiens
  CDR3 for beta chain variable domain of TCR clone 103663 (TRBV7-9, TRBJ2-7)
CASSLEGYEQYF

SEQ ID NO: 207327 - protein, 13 aa, Homo sapiens
  CDR3 for alpha chain variable domain of TCR clone 103664 (TRAV8-3, TRAJ48)
CAVVPFGNEKLTF

SEQ ID NO: 207328 - protein, 16 aa, Homo sapiens
  CDR3 for beta chain variable domain of TCR clone 103664 (TRBV19, TRBJ2-2)
CASRSPGTGATGELFF

SEQ ID NO: 207329 - protein, 15 aa, Homo sapiens
  CDR3 for alpha chain variable domain of TCR clone 103665 (TRAV21, TRAJ53)
CATLNSGGSNYKLTF

SEQ ID NO: 207330 - protein, 14 aa, Homo sapiens
  CDR3 for beta chain variable domain of TCR clone 103665 (TRBV19, TRBJ2-5)
CASSMTGQQETQYF

SEQ ID NO: 207331 - protein, 15 aa, Homo sapiens
  CDR3 for alpha chain variable domain of TCR clone 103666 (TRAV25, TRAJ23)
CALAPNYNQGGKLIF

SEQ ID NO: 207332 - protein, 10 aa, Homo sapiens
  CDR3 for beta chain variable domain of TCR clone 103666 (TRBV7-9, TRBJ2-3)
CASSLDTQYF

SEQ ID NO: 207333 - protein, 13 aa, Homo sapiens
  CDR3 for alpha chain variable domain of TCR clone 103667 (TRAV1-1, TRAJ28)
CVTSGAGSYQLAF

SEQ ID NO: 207334 - protein, 17 aa, Homo sapiens
  CDR3 for beta chain variable domain of TCR clone 103667 (TRBV18, TRBJ2-2)
CASSQRSSGQGPGELFF

SEQ ID NO: 207335 - protein, 15 aa, Homo sapiens
  CDR3 for alpha chain variable domain of TCR clone 103668 (TRAV3, TRAJ22)
CAVRDRGGSARQLTF

SEQ ID NO: 207336 - protein, 13 aa, Homo sapiens
  CDR3 for beta chain variable domain of TCR clone 103668 (TRBV14, TRBJ1-1)
CTSSREFGTEAFF

SEQ ID NO: 207337 - protein, 16 aa, Homo sapiens
  CDR3 for alpha chain variable domain of TCR clone 103669 (TRAV2, TRAJ4)
CAVEDRFSGGYNKLIF

SEQ ID NO: 207338 - protein, 13 aa, Homo sapiens
  CDR3 for beta chain variable domain of TCR clone 103669 (TRBV7-7, TRBJ2-5)
CASSRSGQETQYL

SEQ ID NO: 207339 - protein, 12 aa, Homo sapiens
  CDR3 for alpha chain variable domain of TCR clone 103670 (TRAV20, TRAJ54)
CAVQEGAHKLVF

SEQ ID NO: 207340 - protein, 17 aa, Homo sapiens
  CDR3 for beta chain variable domain of TCR clone 103670 (TRBV13, TRBJ2-3)
CASSLSRVAGGRNTQYF

SEQ ID NO: 207341 - protein, 14 aa, Homo sapiens
  CDR3 for alpha chain variable domain of TCR clone 103671 (TRAV1-2, TRAJ16)
CAVNRFSDGQKLLF

SEQ ID NO: 207342 - protein, 15 aa, Homo sapiens
  CDR3 for beta chain variable domain of TCR clone 103671 (TRBV9, TRBJ1-6)
CASSVAGTGDSPLHF

SEQ ID NO: 207343 - protein, 14 aa, Homo sapiens
  CDR3 for alpha chain variable domain of TCR clone 103672 (TRAV29/DV5, TRAJ36)
CAARRKTGADNLFF

SEQ ID NO: 207344 - protein, 16 aa, Homo sapiens
  CDR3 for beta chain variable domain of TCR clone 103672 (TRBV6-1, TRBJ2-1)
CAGILRQGSSYNEQFF

SEQ ID NO: 207345 - protein, 14 aa, Homo sapiens
  CDR3 for alpha chain variable domain of TCR clone 103673 (TRAV35, TRAJ42)
CAGRYGGSQGNRIF

SEQ ID NO: 207346 - protein, 15 aa, Homo sapiens
  CDR3 for beta chain variable domain of TCR clone 103673 (TRBV7-9, TRBJ2-1)
CASSLGWGRANEQFF

SEQ ID NO: 207347 - protein, 16 aa, Homo sapiens
  CDR3 for alpha chain variable domain of TCR clone 103674 (TRAV1-1, TRAJ45)
CAVRAYLGGGADGLTF

SEQ ID NO: 207348 - protein, 13 aa, Homo sapiens
  CDR3 for beta chain variable domain of TCR clone 103674 (TRBV20-1, TRBJ1-2)
CSARGTADYGYTF

SEQ ID NO: 207349 - protein, 13 aa, Homo sapiens
  CDR3 for alpha chain variable domain of TCR clone 103675 (TRAV12-3, TRAJ9)
CAMRNTGGFKTIF

SEQ ID NO: 207350 - protein, 14 aa, Homo sapiens
  CDR3 for beta chain variable domain of TCR clone 103675 (TRBV11-2, TRBJ2-7)
SASSSTGEGYEQYF

SEQ ID NO: 207351 - protein, 14 aa, Homo sapiens
  CDR3 for alpha chain variable domain of TCR clone 103676 (TRAV12-1, TRAJ30)
CVVNIGGRDDKIIF

SEQ ID NO: 207352 - protein, 13 aa, Homo sapiens
  CDR3 for beta chain variable domain of TCR clone 103676 (TRBV7-3, TRBJ1-1)
CASSQDWGAEAFF

SEQ ID NO: 207353 - protein, 13 aa, Homo sapiens
  CDR3 for alpha chain variable domain of TCR clone 103677 (TRAV8-3, TRAJ43)
CAVVPCNNNDMRF

SEQ ID NO: 207354 - protein, 16 aa, Homo sapiens
  CDR3 for beta chain variable domain of TCR clone 103677 (TRBV7-2, TRBJ2-5)
CASSPFPTGGEETQYF

SEQ ID NO: 207355 - protein, 14 aa, Homo sapiens
  CDR3 for alpha chain variable domain of TCR clone 103678 (TRAV12-3, TRAJ9)
CAMSPNTGGFKTIF

SEQ ID NO: 207356 - protein, 12 aa, Homo sapiens
  CDR3 for beta chain variable domain of TCR clone 103678 (TRBV19, TRBJ1-5)
CASSIAQQPQHY

SEQ ID NO: 207357 - protein, 12 aa, Homo sapiens
  CDR3 for alpha chain variable domain of TCR clone 103679 (TRAV12-2, TRAJ8)
CAVNTGFQKLVF

SEQ ID NO: 207358 - protein, 15 aa, Homo sapiens
  CDR3 for beta chain variable domain of TCR clone 103679 (TRBV7-8, TRBJ1-5)
CASSLERRGLEAQHF

SEQ ID NO: 207359 - protein, 14 aa, Homo sapiens
  CDR3 for alpha chain variable domain of TCR clone 103680 (TRAV35, TRAJ22)
CAGLRPGSARQLTF

SEQ ID NO: 207360 - protein, 15 aa, Homo sapiens
  CDR3 for beta chain variable domain of TCR clone 103680 (TRBV7-3, TRBJ2-1)
CASSPTGGGEVEQFF

SEQ ID NO: 207361 - protein, 15 aa, Homo sapiens
  CDR3 for alpha chain variable domain of TCR clone 103681 (TRAV12-1, TRAJ40)
CVVNMHFPGTYKYIF

SEQ ID NO: 207362 - protein, 13 aa, Homo sapiens
  CDR3 for beta chain variable domain of TCR clone 103681 (TRBV7-8, TRBJ2-1)
CASSLERLGEQFF

SEQ ID NO: 207363 - protein, 10 aa, Homo sapiens
  CDR3 for alpha chain variable domain of TCR clone 103682 (TRAV12-3, TRAJ18)
CAMSAEAQPW

SEQ ID NO: 207364 - protein, 12 aa, Homo sapiens
  CDR3 for beta chain variable domain of TCR clone 103682 (TRBV7-8, TRBJ2-7)
CASSLGDREQYF

SEQ ID NO: 207365 - protein, 12 aa, Homo sapiens
  CDR3 for alpha chain variable domain of TCR clone 103683 (TRAV3, TRAJ43)
CAVRDPNNDMRS

SEQ ID NO: 207366 - protein, 15 aa, Homo sapiens
  CDR3 for beta chain variable domain of TCR clone 103683 (TRBV4-3, TRBJ2-7)
CASSQGDWGDYEQYF

SEQ ID NO: 207367 - protein, 11 aa, Homo sapiens
  CDR3 for alpha chain variable domain of TCR clone 103684 (TRAV13-1, TRAJ52)
PGGTRYGKLTF

SEQ ID NO: 207368 - protein, 16 aa, Homo sapiens
  CDR3 for beta chain variable domain of TCR clone 103684 (TRBV28, TRBJ2-7)
CASSPWVATGDLSQYF

SEQ ID NO: 207369 - protein, 13 aa, Homo sapiens
  CDR3 for alpha chain variable domain of TCR clone 103685 (TRAV1-2, TRAJ9)
CAALNTGGFKTIF

SEQ ID NO: 207370 - protein, 14 aa, Homo sapiens
  CDR3 for beta chain variable domain of TCR clone 103685 (TRBV7-9, TRBJ2-2)
CASSGLADTGELFF

SEQ ID NO: 207371 - protein, 12 aa, Homo sapiens
  CDR3 for alpha chain variable domain of TCR clone 103686 (TRAV13-1, TRAJ49)
CAASIWGNQFYF

SEQ ID NO: 207372 - protein, 14 aa, Homo sapiens
  CDR3 for beta chain variable domain of TCR clone 103686 (TRBV12-4, TRBJ1-1)
CASSLDGSNTEAFF

SEQ ID NO: 207373 - protein, 11 aa, Homo sapiens
  CDR3 for alpha chain variable domain of TCR clone 103687 (TRAV3, TRAJ13)
CAVTSYQKVTF

SEQ ID NO: 207374 - protein, 20 aa, Homo sapiens
  CDR3 for beta chain variable domain of TCR clone 103687 (TRBV28, TRBJ2-1)
CASTPIGRSPGLAGGNEQFF

SEQ ID NO: 207375 - protein, 11 aa, Homo sapiens
  CDR3 for alpha chain variable domain of TCR clone 103688 (TRAV12-3, TRAJ27)
CAMANAGKSTF

SEQ ID NO: 207376 - protein, 13 aa, Homo sapiens
  CDR3 for beta chain variable domain of TCR clone 103688 (TRBV7-9, TRBJ1-1)
CASSRRDTRRAFF

SEQ ID NO: 207377 - protein, 13 aa, Homo sapiens
  CDR3 for alpha chain variable domain of TCR clone 103689 (TRAV27, TRAJ41)
CAGEGNSGYALTF

SEQ ID NO: 207378 - protein, 14 aa, Homo sapiens
  CDR3 for beta chain variable domain of TCR clone 103689 (TRBV11-2, TRBJ2-7)
CASSLGAGAYEQYF

SEQ ID NO: 207379 - protein, 12 aa, Homo sapiens
  CDR3 for alpha chain variable domain of TCR clone 103690 (TRAV10, TRAJ31)
CVVRAHRARLMF

SEQ ID NO: 207380 - protein, 14 aa, Homo sapiens
  CDR3 for beta chain variable domain of TCR clone 103690 (TRBV5-5, TRBJ1-5)
CASSGQGVDQPQHF

SEQ ID NO: 207381 - protein, 13 aa, Homo sapiens
  CDR3 for alpha chain variable domain of TCR clone 103691 (TRAV3, TRAJ20)
CAVRDTPRYKLSF

SEQ ID NO: 207382 - protein, 15 aa, Homo sapiens
  CDR3 for beta chain variable domain of TCR clone 103691 (TRBV10-2, TRBJ2-6)
CASSEQGTGANVLTF

SEQ ID NO: 207383 - protein, 15 aa, Homo sapiens
  CDR3 for alpha chain variable domain of TCR clone 103692 (TRAV26-1, TRAJ23)
CIVRVAGYQGGKLIF

SEQ ID NO: 207384 - protein, 19 aa, Homo sapiens
  CDR3 for beta chain variable domain of TCR clone 103692 (TRBV19, TRBJ2-5)
CASSIGQVTDFFLGETQYF

SEQ ID NO: 207385 - protein, 16 aa, Homo sapiens
  CDR3 for alpha chain variable domain of TCR clone 103693 (TRAV16, TRAJ42)
CARKMNYGGSQGNLIF

SEQ ID NO: 207386 - protein, 14 aa, Homo sapiens
  CDR3 for beta chain variable domain of TCR clone 103693 (TRBV11-2, TRBJ2-3)
CASSLGGGANTQYF

SEQ ID NO: 207387 - protein, 15 aa, Homo sapiens
  CDR3 for alpha chain variable domain of TCR clone 103694 (TRAV13-1, TRAJ36)
CAASIRQTGANNRFF

SEQ ID NO: 207388 - protein, 14 aa, Homo sapiens
  CDR3 for beta chain variable domain of TCR clone 103694 (TRBV6-1, TRBJ1-3)
CASVQGGGGNTIYF

SEQ ID NO: 207389 - protein, 12 aa, Homo sapiens
  CDR3 for alpha chain variable domain of TCR clone 103695 (TRAV12-3, TRAJ17)
CAMTLTGNKLTF

SEQ ID NO: 207390 - protein, 12 aa, Homo sapiens
  CDR3 for beta chain variable domain of TCR clone 103695 (TRBV2, TRBJ2-1)
CADGPPGNEQFF

SEQ ID NO: 207391 - protein, 15 aa, Homo sapiens
  CDR3 for alpha chain variable domain of TCR clone 103696 (TRAV26-1, TRAJ29)
CIVRVEGSGNTPLVF

SEQ ID NO: 207392 - protein, 13 aa, Homo sapiens
  CDR3 for beta chain variable domain of TCR clone 103696 (TRBV7-8, TRBJ2-7)
CASSLTGGREQYF

SEQ ID NO: 207393 - protein, 12 aa, Homo sapiens
  CDR3 for alpha chain variable domain of TCR clone 103697 (TRAV1-1, TRAJ30)
CAVRGRDDKIIF

SEQ ID NO: 207394 - protein, 14 aa, Homo sapiens
  CDR3 for beta chain variable domain of TCR clone 103697 (TRBV19, TRBJ2-1)
CASPTFVLSGEQFF

SEQ ID NO: 207395 - protein, 14 aa, Homo sapiens
  CDR3 for alpha chain variable domain of TCR clone 103698 (TRAV12-3, TRAJ10)
SHLPLTGGGNKLTF

SEQ ID NO: 207396 - protein, 14 aa, Homo sapiens
  CDR3 for beta chain variable domain of TCR clone 103698 (TRBV7-2, TRBJ2-5)
CASSFTQGQETQYF

SEQ ID NO: 207397 - protein, 14 aa, Homo sapiens
  CDR3 for alpha chain variable domain of TCR clone 103699 (TRAV1-2, TRAJ10)
CAVRVTGGRNKLTF

SEQ ID NO: 207398 - protein, 12 aa, Homo sapiens
  CDR3 for beta chain variable domain of TCR clone 103699 (TRBV5-4, TRBJ1-1)
CASSFGQTEAFF

SEQ ID NO: 207399 - protein, 12 aa, Homo sapiens
  CDR3 for alpha chain variable domain of TCR clone 103700 (TRAV9-2, TRAJ36)
CALKKGANNLFF

SEQ ID NO: 207400 - protein, 15 aa, Homo sapiens
  CDR3 for beta chain variable domain of TCR clone 103700 (TRBV12-4, TRBJ2-5)
CASSPPTGLQETQYF

SEQ ID NO: 207401 - protein, 10 aa, Homo sapiens
  CDR3 for alpha chain variable domain of TCR clone 103701 (TRAV23/DV6, TRAJ57)
CAASSTLSQG

SEQ ID NO: 207402 - protein, 14 aa, Homo sapiens
  CDR3 for beta chain variable domain of TCR clone 103701 (TRBV25-1, TRBJ1-1)
CASTHLGRNTEAFF

SEQ ID NO: 207403 - protein, 20 aa, Homo sapiens
  CDR3 for alpha chain variable domain of TCR clone 103702 (TRAV26-1, TRAJ42)
CCVLLHLQTYYGGSQGNLIF

SEQ ID NO: 207404 - protein, 16 aa, Homo sapiens
  CDR3 for beta chain variable domain of TCR clone 103702 (TRBV7-3, TRBJ2-2)
CASSLKRGTLSGELFF

SEQ ID NO: 207405 - protein, 15 aa, Homo sapiens
  CDR3 for alpha chain variable domain of TCR clone 103703 (TRAV23/DV6, TRAJ13)
CAAWPGGVGYQKVTF

SEQ ID NO: 207406 - protein, 17 aa, Homo sapiens
  CDR3 for beta chain variable domain of TCR clone 103703 (TRBV19, TRBJ2-7)
CASSISFYDSYPYEQYF

SEQ ID NO: 207407 - protein, 14 aa, Homo sapiens
  CDR3 for alpha chain variable domain of TCR clone 103704 (TRAV21, TRAJ38)
CAVMGAGHNRKLIW

SEQ ID NO: 207408 - protein, 13 aa, Homo sapiens
  CDR3 for beta chain variable domain of TCR clone 103704 (TRBV7-3, TRBJ2-5)
CASSIGFFETQYF

SEQ ID NO: 207409 - protein, 13 aa, Homo sapiens
  CDR3 for alpha chain variable domain of TCR clone 103705 (TRAV27, TRAJ45)
CTSSGGGADGLTF

SEQ ID NO: 207410 - protein, 17 aa, Homo sapiens
  CDR3 for beta chain variable domain of TCR clone 103705 (TRBV11-2, TRBJ2-1)
CASSLYPPGVEYNEQFF

SEQ ID NO: 207411 - protein, 11 aa, Homo sapiens
  CDR3 for alpha chain variable domain of TCR clone 103706 (TRAV2, TRAJ33)
CAVESNYQLIW

SEQ ID NO: 207412 - protein, 14 aa, Homo sapiens
  CDR3 for beta chain variable domain of TCR clone 103706 (TRBV6-3, TRBJ1-1)
CASSYQRRDTEAFF

SEQ ID NO: 207413 - protein, 14 aa, Homo sapiens
  CDR3 for alpha chain variable domain of TCR clone 103707 (TRAV1-2, TRAJ8)
CAVREATGFQKLVF

SEQ ID NO: 207414 - protein, 13 aa, Homo sapiens
  CDR3 for beta chain variable domain of TCR clone 103707 (TRBV20-1, TRBJ1-1)
CSARGGGNTEAFF

SEQ ID NO: 207415 - protein, 18 aa, Homo sapiens
  CDR3 for alpha chain variable domain of TCR clone 103708 (TRAV21, TRAJ52)
CAVRPSPAGGTSYGKLTF

SEQ ID NO: 207416 - protein, 14 aa, Homo sapiens
  CDR3 for beta chain variable domain of TCR clone 103708 (TRBV4-1, TRBJ2-2)
CDSSQAVNTGELFF

SEQ ID NO: 207417 - protein, 14 aa, Homo sapiens
  CDR3 for alpha chain variable domain of TCR clone 103709 (TRAV10, TRAJ29)
CVVSANSGNTPLVF

SEQ ID NO: 207418 - protein, 16 aa, Homo sapiens
  CDR3 for beta chain variable domain of TCR clone 103709 (TRBV29-1, TRBJ2-7)
CSVEDAEDGTDYEQYF

SEQ ID NO: 207419 - protein, 13 aa, Homo sapiens
  CDR3 for alpha chain variable domain of TCR clone 103710 (TRAV36/DV7, TRAJ33)
CAVDMDSNHQLIW

SEQ ID NO: 207420 - protein, 16 aa, Homo sapiens
  CDR3 for beta chain variable domain of TCR clone 103710 (TRBV15, TRBJ2-3)
CATRLSGGRAPDTQYF

SEQ ID NO: 207421 - protein, 14 aa, Homo sapiens
  CDR3 for alpha chain variable domain of TCR clone 103711 (TRAV13-1, TRAJ20)
CAARPGSNDYKLSF

SEQ ID NO: 207422 - protein, 15 aa, Homo sapiens
  CDR3 for beta chain variable domain of TCR clone 103711 (TRBV18, TRBJ2-5)
CASSPRASEAETQYF

SEQ ID NO: 207423 - protein, 16 aa, Homo sapiens
  CDR3 for alpha chain variable domain of TCR clone 103712 (TRAV12-1, TRAJ28)
CVVIANSGAGSYQLTF

SEQ ID NO: 207424 - protein, 14 aa, Homo sapiens
  CDR3 for beta chain variable domain of TCR clone 103712 (TRBV5-4, TRBJ1-1)
CASSLDSRRDEAFF

SEQ ID NO: 207425 - protein, 13 aa, Homo sapiens
  CDR3 for alpha chain variable domain of TCR clone 103713 (TRAV16, TRAJ10)
CALLTGGGNKLTF

SEQ ID NO: 207426 - protein, 12 aa, Homo sapiens
  CDR3 for beta chain variable domain of TCR clone 103713 (TRBV28, TRBJ2-7)
CASTGNHYEQYL

SEQ ID NO: 207427 - protein, 15 aa, Homo sapiens
  CDR3 for alpha chain variable domain of TCR clone 103714 (TRAV8-1, TRAJ6)
CAVNAGAGGSYIPTF

SEQ ID NO: 207428 - protein, 15 aa, Homo sapiens
  CDR3 for beta chain variable domain of TCR clone 103714 (TRBV18, TRBJ2-7)
CASSPTFMDSYEQYF

SEQ ID NO: 207429 - protein, 14 aa, Homo sapiens
  CDR3 for alpha chain variable domain of TCR clone 103715 (TRAV8-4, TRAJ13)
CAVTLSGGYQKVTF

SEQ ID NO: 207430 - protein, 13 aa, Homo sapiens
  CDR3 for beta chain variable domain of TCR clone 103715 (TRBV19, TRBJ1-2)
CASSVPGQDGYTF

SEQ ID NO: 207431 - protein, 13 aa, Homo sapiens
  CDR3 for alpha chain variable domain of TCR clone 103716 (TRAV12-3, TRAJ23)
CAMRNNQGGKLIF

SEQ ID NO: 207432 - protein, 16 aa, Homo sapiens
  CDR3 for beta chain variable domain of TCR clone 103716 (TRBV19, TRBJ2-2)
CASSAAGTGGTGELFF

SEQ ID NO: 207433 - protein, 16 aa, Homo sapiens
  CDR3 for alpha chain variable domain of TCR clone 103717 (TRAV26-1, TRAJ37)
CIVRGDGSGNTSKLIF

SEQ ID NO: 207434 - protein, 17 aa, Homo sapiens
  CDR3 for beta chain variable domain of TCR clone 103717 (TRBV4-1, TRBJ2-7)
CASSRDPLGVRGGEQYF

SEQ ID NO: 207435 - protein, 15 aa, Homo sapiens
  CDR3 for alpha chain variable domain of TCR clone 103718 (TRAV8-3, TRAJ27)
CAVGTSKTNAGKSTF

SEQ ID NO: 207436 - protein, 12 aa, Homo sapiens
  CDR3 for beta chain variable domain of TCR clone 103718 (TRBV11-2, TRBJ2-2)
CASSLGGGELFF

SEQ ID NO: 207437 - protein, 15 aa, Homo sapiens
  CDR3 for alpha chain variable domain of TCR clone 103719 (TRAV26-1, TRAJ39)
FIVRDGSNAGNMLTF

SEQ ID NO: 207438 - protein, 14 aa, Homo sapiens
  CDR3 for beta chain variable domain of TCR clone 103719 (TRBV10-3, TRBJ1-2)
CAIRAGTGDYGYTF

SEQ ID NO: 207439 - protein, 13 aa, Homo sapiens
  CDR3 for alpha chain variable domain of TCR clone 103720 (TRAV22, TRAJ12)
CAVLMDSSYKLIF

SEQ ID NO: 207440 - protein, 16 aa, Homo sapiens
  CDR3 for beta chain variable domain of TCR clone 103720 (TRBV12-5, TRBJ2-5)
CASGPRTSGNQETQYF

SEQ ID NO: 207441 - protein, 12 aa, Homo sapiens
  CDR3 for alpha chain variable domain of TCR clone 103721 (TRAV8-3, TRAJ20)
CAVGANDYKLSF

SEQ ID NO: 207442 - protein, 15 aa, Homo sapiens
  CDR3 for beta chain variable domain of TCR clone 103721 (TRBV19, TRBJ2-4)
CASRGPRRGENIQYF

SEQ ID NO: 207443 - protein, 11 aa, Homo sapiens
  CDR3 for alpha chain variable domain of TCR clone 103722 (TRAV20, TRAJ23)
CACNQGGKLIF

SEQ ID NO: 207444 - protein, 16 aa, Homo sapiens
  CDR3 for beta chain variable domain of TCR clone 103722 (TRBV7-8, TRBJ2-5)
CASSFGGQPAQETQYV

SEQ ID NO: 207445 - protein, 18 aa, Homo sapiens
  CDR3 for alpha chain variable domain of TCR clone 103723 (TRAV21, TRAJ52)
CAVRPSPAGGTSYGKLTF

SEQ ID NO: 207446 - protein, 12 aa, Homo sapiens
  CDR3 for beta chain variable domain of TCR clone 103723 (TRBV5-5, TRBJ2-5)
CASSYFGETQYF

SEQ ID NO: 207447 - protein, 13 aa, Homo sapiens
  CDR3 for alpha chain variable domain of TCR clone 103724 (TRAV17, TRAJ5)
CAPMDTGRRALTF

SEQ ID NO: 207448 - protein, 12 aa, Homo sapiens
  CDR3 for beta chain variable domain of TCR clone 103724 (TRBV7-9, TRBJ2-7)
CASSIKREEQYF

SEQ ID NO: 207449 - protein, 14 aa, Homo sapiens
  CDR3 for alpha chain variable domain of TCR clone 103725 (TRAV1-2, TRAJ16)
CAVNRFSDCQKLLF

SEQ ID NO: 207450 - protein, 14 aa, Homo sapiens
  CDR3 for beta chain variable domain of TCR clone 103725 (TRBV25-1, TRBJ1-1)
CASTHLGGNTEAFF

SEQ ID NO: 207451 - protein, 11 aa, Homo sapiens
  CDR3 for alpha chain variable domain of TCR clone 103726 (TRAV35, TRAJ31)
CAESGDARLMF

SEQ ID NO: 207452 - protein, 11 aa, Homo sapiens
  CDR3 for beta chain variable domain of TCR clone 103726 (TRBV24-1, TRBJ2-3)
CATSGLDTQYF

SEQ ID NO: 207453 - protein, 13 aa, Homo sapiens
  CDR3 for alpha chain variable domain of TCR clone 103727 (TRAV8-3, TRAJ48)
CAVMPFGNEKLTF

SEQ ID NO: 207454 - protein, 15 aa, Homo sapiens
  CDR3 for beta chain variable domain of TCR clone 103727 (TRBV11-2, TRBJ2-1)
CASSSPSTRYNEQFF

SEQ ID NO: 207455 - protein, 14 aa, Homo sapiens
  CDR3 for alpha chain variable domain of TCR clone 103728 (TRAV13-1, TRAJ20)
CAARPGSNDYKLSF

SEQ ID NO: 207456 - protein, 13 aa, Homo sapiens
  CDR3 for beta chain variable domain of TCR clone 103728 (TRBV20-1, TRBJ1-1)
CSAPPGGRTEAFF

SEQ ID NO: 207457 - protein, 14 aa, Homo sapiens
  CDR3 for alpha chain variable domain of TCR clone 103729 (TRAV1-2, TRAJ8)
CAVREGTGFQKLVF

SEQ ID NO: 207458 - protein, 15 aa, Homo sapiens
  CDR3 for beta chain variable domain of TCR clone 103729 (TRBV20-1, TRBJ2-7)
CSARDRVSGMDEQYF

SEQ ID NO: 207459 - protein, 10 aa, Homo sapiens
  CDR3 for alpha chain variable domain of TCR clone 103730 (TRAV23/DV6, TRAJ9)
CAASIGGNTG

SEQ ID NO: 207460 - protein, 15 aa, Homo sapiens
  CDR3 for beta chain variable domain of TCR clone 103730 (TRBV6-3, TRBJ2-7)
CASSSPGTVLYEQYF

SEQ ID NO: 207461 - protein, 15 aa, Homo sapiens
  CDR3 for alpha chain variable domain of TCR clone 103731 (TRAV3, TRAJ13)
CAVRVYSGGYQKVTF

SEQ ID NO: 207462 - protein, 15 aa, Homo sapiens
  CDR3 for beta chain variable domain of TCR clone 103731 (TRBV10-3, TRBJ2-1)
CAIRNGTSGHNEQFF

SEQ ID NO: 207463 - protein, 14 aa, Homo sapiens
  CDR3 for alpha chain variable domain of TCR clone 103732 (TRAV35, TRAJ22)
CAGLRPGSARQLTF

SEQ ID NO: 207464 - protein, 12 aa, Homo sapiens
  CDR3 for beta chain variable domain of TCR clone 103732 (TRBV5-5, TRBJ2-5)
CASSYFGETQYF

SEQ ID NO: 207465 - protein, 14 aa, Homo sapiens
  CDR3 for alpha chain variable domain of TCR clone 103733 (TRAV38-1, TRAJ54)
CAFLRIQGAQKLVF

SEQ ID NO: 207466 - protein, 18 aa, Homo sapiens
  CDR3 for beta chain variable domain of TCR clone 103733 (TRBV11-2, TRBJ2-3)
CASSLGGASRGAPNTQYF

SEQ ID NO: 207467 - protein, 14 aa, Homo sapiens
  CDR3 for alpha chain variable domain of TCR clone 103734 (TRAV12-3, TRAJ10)
SHLPLTGGGNKLTF

SEQ ID NO: 207468 - protein, 15 aa, Homo sapiens
  CDR3 for beta chain variable domain of TCR clone 103734 (TRBV29-1, TRBJ2-7)
CSVEFCDRGSYEQYF

SEQ ID NO: 207469 - protein, 14 aa, Homo sapiens
  CDR3 for alpha chain variable domain of TCR clone 103735 (TRAV2, TRAJ9)
CAVEDRSGGFTTIF

SEQ ID NO: 207470 - protein, 18 aa, Homo sapiens
  CDR3 for beta chain variable domain of TCR clone 103735 (TRBV20-1, TRBJ2-5)
CSQTGDSGRLGGKETQYF

SEQ ID NO: 207471 - protein, 16 aa, Homo sapiens
  CDR3 for alpha chain variable domain of TCR clone 103736 (TRAV30, TRAJ24)
CGTEVVDADSWGKFQF

SEQ ID NO: 207472 - protein, 13 aa, Homo sapiens
  CDR3 for beta chain variable domain of TCR clone 103736 (TRBV19, TRBJ1-2)
CASSVPGQDGYTF

SEQ ID NO: 207473 - protein, 14 aa, Homo sapiens
  CDR3 for alpha chain variable domain of TCR clone 103737 (TRAV12-3, TRAJ9)
CAMSVETGGIKTIF

SEQ ID NO: 207474 - protein, 14 aa, Homo sapiens
  CDR3 for beta chain variable domain of TCR clone 103737 (TRBV7-2, TRBJ2-7)
CASRSQGAAYEQYF

SEQ ID NO: 207475 - protein, 13 aa, Homo sapiens
  CDR3 for alpha chain variable domain of TCR clone 103738 (TRAV3, TRAJ43)
CDVKARNNNDMRF

SEQ ID NO: 207476 - protein, 16 aa, Homo sapiens
  CDR3 for beta chain variable domain of TCR clone 103738 (TRBV7-9, TRBJ2-3)
CASSFSVAGGTDTQYF

SEQ ID NO: 207477 - protein, 16 aa, Homo sapiens
  CDR3 for alpha chain variable domain of TCR clone 103739 (TRAV3, TRAJ28)
CAVLPRSGAGSHQLTF

SEQ ID NO: 207478 - protein, 13 aa, Homo sapiens
  CDR3 for beta chain variable domain of TCR clone 103739 (TRBV12-4, TRBJ2-5)
CASRLAVQETQYF

SEQ ID NO: 207479 - protein, 15 aa, Homo sapiens
  CDR3 for alpha chain variable domain of TCR clone 103740 (TRAV3, TRAJ32)
CAVSSYGGATNKIIF

SEQ ID NO: 207480 - protein, 13 aa, Homo sapiens
  CDR3 for beta chain variable domain of TCR clone 103740 (TRBV20-1, TRBJ2-7)
CSARPSTNYEQYF

SEQ ID NO: 207481 - protein, 12 aa, Homo sapiens
  CDR3 for alpha chain variable domain of TCR clone 103741 (TRAV12-3, TRAJ17)
CAMTLTGNKLTF

SEQ ID NO: 207482 - protein, 13 aa, Homo sapiens
  CDR3 for beta chain variable domain of TCR clone 103741 (TRBV18, TRBJ2-7)
CASQSGGGYEQYF

SEQ ID NO: 207483 - protein, 17 aa, Homo sapiens
  CDR3 for alpha chain variable domain of TCR clone 103742 (TRAV26-2, TRAJ42)
CILRDVGYGGSQGNLIF

SEQ ID NO: 207484 - protein, 16 aa, Homo sapiens
  CDR3 for beta chain variable domain of TCR clone 103742 (TRBV12-4, TRBJ2-7)
CASSLIGGTGTYEQDF

SEQ ID NO: 207485 - protein, 14 aa, Homo sapiens
  CDR3 for alpha chain variable domain of TCR clone 103743 (TRAV1-2, TRAJ8)
CAVREDTGFQKLVF

SEQ ID NO: 207486 - protein, 15 aa, Homo sapiens
  CDR3 for beta chain variable domain of TCR clone 103743 (TRBV7-9, TRBJ1-6)
CASSSPGRGSSPLHF

SEQ ID NO: 207487 - protein, 11 aa, Homo sapiens
  CDR3 for alpha chain variable domain of TCR clone 103744 (TRAV12-3, TRAJ43)
CAMSVSNDMRF

SEQ ID NO: 207488 - protein, 14 aa, Homo sapiens
  CDR3 for beta chain variable domain of TCR clone 103744 (TRBV20-1, TRBJ1-1)
SAGLHLGGGTEAFF

SEQ ID NO: 207489 - protein, 19 aa, Homo sapiens
  CDR3 for alpha chain variable domain of TCR clone 103745 (TRAV38-1, TRAJ53)
CAFMKHGLESGGSNYKLTF

SEQ ID NO: 207490 - protein, 13 aa, Homo sapiens
  CDR3 for beta chain variable domain of TCR clone 103745 (TRBV19, TRBJ2-7)
CVSSPRQSYEQYF

SEQ ID NO: 207491 - protein, 16 aa, Homo sapiens
  CDR3 for alpha chain variable domain of TCR clone 103746 (TRAV12-3, TRAJ53)
CAMSPGSGGSNDKLTF

SEQ ID NO: 207492 - protein, 13 aa, Homo sapiens
  CDR3 for beta chain variable domain of TCR clone 103746 (TRBV12-5, TRBJ2-3)
CASGDRQSDTQYF

SEQ ID NO: 207493 - protein, 11 aa, Homo sapiens
  CDR3 for alpha chain variable domain of TCR clone 103747 (TRAV1-1, TRAJ23)
CAVRQGGKLIF

SEQ ID NO: 207494 - protein, 15 aa, Homo sapiens
  CDR3 for beta chain variable domain of TCR clone 103747 (TRBV19, TRBJ1-6)
CASSTQGAVGSTLHF

SEQ ID NO: 207495 - protein, 15 aa, Homo sapiens
  CDR3 for alpha chain variable domain of TCR clone 103748 (TRAV26-1, TRAJ22)
CIVRVSFWFCKATDL

SEQ ID NO: 207496 - protein, 13 aa, Homo sapiens
  CDR3 for beta chain variable domain of TCR clone 103748 (TRBV7-9, TRBJ1-2)
CASSLKQNYRYTF

SEQ ID NO: 207497 - protein, 11 aa, Homo sapiens
  CDR3 for alpha chain variable domain of TCR clone 103749 (TRAV35, TRAJ34)
CWARNTDKLIF

SEQ ID NO: 207498 - protein, 13 aa, Homo sapiens
  CDR3 for beta chain variable domain of TCR clone 103749 (TRBV12-4, TRBJ1-1)
CASSPGTGFEAFF

SEQ ID NO: 207499 - protein, 13 aa, Homo sapiens
  CDR3 for alpha chain variable domain of TCR clone 103750 (TRAV12-2, TRAJ34)
CAVRGYNTDKPIF

SEQ ID NO: 207500 - protein, 18 aa, Homo sapiens
  CDR3 for beta chain variable domain of TCR clone 103750 (TRBV11-2, TRBJ2-3)
CASSLGGASRGAPNTQYF

SEQ ID NO: 207501 - protein, 13 aa, Homo sapiens
  CDR3 for alpha chain variable domain of TCR clone 103751 (TRAV26-1, TRAJ33)
CIVRVDSNYQLIC

SEQ ID NO: 207502 - protein, 15 aa, Homo sapiens
  CDR3 for beta chain variable domain of TCR clone 103751 (TRBV7-2, TRBJ1-5)
CASSFSAGINQPQHF

SEQ ID NO: 207503 - protein, 11 aa, Homo sapiens
  CDR3 for alpha chain variable domain of TCR clone 103752 (TRAV4, TRAJ31)
CLVGDNARLMF

SEQ ID NO: 207504 - protein, 14 aa, Homo sapiens
  CDR3 for beta chain variable domain of TCR clone 103752 (TRBV2, TRBJ1-5)
CASSEAAGGRPQHF

SEQ ID NO: 207505 - protein, 12 aa, Homo sapiens
  CDR3 for alpha chain variable domain of TCR clone 103753 (TRAV12-3, TRAJ17)
RAMTLTGNKLTF

SEQ ID NO: 207506 - protein, 15 aa, Homo sapiens
  CDR3 for beta chain variable domain of TCR clone 103753 (TRBV20-1, TRBJ2-7)
CSARDRVSGMDERYF

SEQ ID NO: 207507 - protein, 11 aa, Homo sapiens
  CDR3 for alpha chain variable domain of TCR clone 103754 (TRAV1-2, TRAJ20)
CAVANDYKLSS

SEQ ID NO: 207508 - protein, 16 aa, Homo sapiens
  CDR3 for beta chain variable domain of TCR clone 103754 (TRBV4-3, TRBJ1-6)
CASSQDPGVYNSPLHF

SEQ ID NO: 207509 - protein, 15 aa, Homo sapiens
  CDR3 for alpha chain variable domain of TCR clone 103755 (TRAV1-2, TRAJ36)
CAASADQTGANNLFF

SEQ ID NO: 207510 - protein, 15 aa, Homo sapiens
  CDR3 for beta chain variable domain of TCR clone 103755 (TRBV5-1, TRBJ2-7)
CASSFSTDSVYERYF

SEQ ID NO: 207511 - protein, 12 aa, Homo sapiens
  CDR3 for alpha chain variable domain of TCR clone 103756 (TRAV10, TRAJ34)
CVVSGKHRQAHL

SEQ ID NO: 207512 - protein, 17 aa, Homo sapiens
  CDR3 for beta chain variable domain of TCR clone 103756 (TRBV20-1, TRBJ1-5)
CSASLSPGQGGNQPQHF

SEQ ID NO: 207513 - protein, 22 aa, Homo sapiens
  CDR3 for alpha chain variable domain of TCR clone 103757 (TRAV21, )
CAVRQDAGNNHIQNPDPAVYQL

SEQ ID NO: 207514 - protein, 16 aa, Homo sapiens
  CDR3 for beta chain variable domain of TCR clone 103757 (TRBV4-2, TRBJ1-1)
CASRPLDGGGDTEASF

SEQ ID NO: 207515 - protein, 14 aa, Homo sapiens
  CDR3 for alpha chain variable domain of TCR clone 103758 (TRAV3, TRAJ9)
CAVRLNTGGFKTIF

SEQ ID NO: 207516 - protein, 15 aa, Homo sapiens
  CDR3 for beta chain variable domain of TCR clone 103758 (TRBV12-4, TRBJ2-5)
CASSPPTGLQETQYF

SEQ ID NO: 207517 - protein, 14 aa, Homo sapiens
  CDR3 for alpha chain variable domain of TCR clone 103759 (TRAV12-2, TRAJ13)
CSVKKTGGYQKVTF

SEQ ID NO: 207518 - protein, 17 aa, Homo sapiens
  CDR3 for beta chain variable domain of TCR clone 103759 (TRBV13, TRBJ2-3)
CASSLSRVAGGRNTQYF

SEQ ID NO: 207519 - protein, 11 aa, Homo sapiens
  CDR3 for alpha chain variable domain of TCR clone 103760 (TRAV17, TRAJ9)
CATTGGFKTIF

SEQ ID NO: 207520 - protein, 14 aa, Homo sapiens
  CDR3 for beta chain variable domain of TCR clone 103760 (TRBV20-1, TRBJ1-1)
SAVLHLGGGTEAFF

SEQ ID NO: 207521 - protein, 14 aa, Homo sapiens
  CDR3 for alpha chain variable domain of TCR clone 103761 (TRAV17, TRAJ9)
CATVTLGGGFKTIF

SEQ ID NO: 207522 - protein, 16 aa, Homo sapiens
  CDR3 for beta chain variable domain of TCR clone 103761 (TRBV7-3, TRBJ2-2)
CASSLKRGTLSGELFF

SEQ ID NO: 207523 - protein, 13 aa, Homo sapiens
  CDR3 for alpha chain variable domain of TCR clone 103762 (TRAV17, TRAJ9)
CATAIIGGFKTIF

SEQ ID NO: 207524 - protein, 16 aa, Homo sapiens
  CDR3 for beta chain variable domain of TCR clone 103762 (TRBV15, TRBJ2-1)
CATSRNLAGGYNEQFF

SEQ ID NO: 207525 - protein, 15 aa, Homo sapiens
  CDR3 for alpha chain variable domain of TCR clone 103763 (TRAV12-3, TRAJ6)
CAMSAASGGSYIPTF

SEQ ID NO: 207526 - protein, 13 aa, Homo sapiens
  CDR3 for beta chain variable domain of TCR clone 103763 (TRBV20-1, TRBJ1-2)
CSASTERIHGYTF

SEQ ID NO: 207527 - protein, 14 aa, Homo sapiens
  CDR3 for alpha chain variable domain of TCR clone 103764 (TRAV29/DV5, TRAJ36)
CAARRKTGANNLFF

SEQ ID NO: 207528 - protein, 13 aa, Homo sapiens
  CDR3 for beta chain variable domain of TCR clone 103764 (TRBV2, TRBJ1-4)
CASSERAGEKLFF

SEQ ID NO: 207529 - protein, 11 aa, Homo sapiens
  CDR3 for alpha chain variable domain of TCR clone 103765 (TRAV12-3, TRAJ43)
CAMSVSNDMRF

SEQ ID NO: 207530 - protein, 13 aa, Homo sapiens
  CDR3 for beta chain variable domain of TCR clone 103765 (TRBV6-3, TRBJ2-7)
CASSSDRDFEQYF

SEQ ID NO: 207531 - protein, 14 aa, Homo sapiens
  CDR3 for alpha chain variable domain of TCR clone 103766 (TRAV27, TRAJ12)
CAGARMDSSYKLIF

SEQ ID NO: 207532 - protein, 18 aa, Homo sapiens
  CDR3 for beta chain variable domain of TCR clone 103766 (TRBV10-3, TRBJ2-7)
CAISESGRPSGGRGEQYF

SEQ ID NO: 207533 - protein, 14 aa, Homo sapiens
  CDR3 for alpha chain variable domain of TCR clone 103767 (TRAV12-2, TRAJ40)
CAVKIPSGTYKYIF

SEQ ID NO: 207534 - protein, 17 aa, Homo sapiens
  CDR3 for beta chain variable domain of TCR clone 103767 (TRBV13, TRBJ2-3)
CASSLSSVAGGRNTQYF

SEQ ID NO: 207535 - protein, 15 aa, Homo sapiens
  CDR3 for alpha chain variable domain of TCR clone 103768 (TRAV12-2, TRAJ23)
CAVNTLYNQGGKLIF

SEQ ID NO: 207536 - protein, 17 aa, Homo sapiens
  CDR3 for beta chain variable domain of TCR clone 103768 (TRBV7-8, TRBJ2-6)
CASSAGTGGAGANVLTF

SEQ ID NO: 207537 - protein, 14 aa, Homo sapiens
  CDR3 for alpha chain variable domain of TCR clone 103769 (TRAV16, TRAJ17)
CAPRIKAAGNKLTF

SEQ ID NO: 207538 - protein, 17 aa, Homo sapiens
  CDR3 for beta chain variable domain of TCR clone 103769 (TRBV7-2, TRBJ2-3)
CASSSYSGTRGADTQYF

SEQ ID NO: 207539 - protein, 14 aa, Homo sapiens
  CDR3 for alpha chain variable domain of TCR clone 103770 (TRAV12-1, TRAJ13)
CVVIDSGGYQKVTF

SEQ ID NO: 207540 - protein, 14 aa, Homo sapiens
  CDR3 for beta chain variable domain of TCR clone 103770 (TRBV7-8, TRBJ2-3)
CASSLEAGTDTQYF

SEQ ID NO: 207541 - protein, 13 aa, Homo sapiens
  CDR3 for alpha chain variable domain of TCR clone 103771 (TRAV23/DV6, TRAJ12)
CAPRVGSSYKLIF

SEQ ID NO: 207542 - protein, 12 aa, Homo sapiens
  CDR3 for beta chain variable domain of TCR clone 103771 (TRBV7-8, TRBJ2-7)
CASSLGDREQYF

SEQ ID NO: 207543 - protein, 16 aa, Homo sapiens
  CDR3 for alpha chain variable domain of TCR clone 103772 (TRAV3, TRAJ23)
CAVKIGIYNQGGKLIF

SEQ ID NO: 207544 - protein, 10 aa, Homo sapiens
  CDR3 for beta chain variable domain of TCR clone 103772 (TRBV28, TRBJ1-2)
CASSSDRAVF

SEQ ID NO: 207545 - protein, 17 aa, Homo sapiens
  CDR3 for alpha chain variable domain of TCR clone 103773 (TRAV12-3, TRAJ52)
CNEPTNAGGTSYGKLTF

SEQ ID NO: 207546 - protein, 17 aa, Homo sapiens
  CDR3 for beta chain variable domain of TCR clone 103773 (TRBV7-3, TRBJ2-3)
CASSLMKRMRGADTQYF

SEQ ID NO: 207547 - protein, 15 aa, Homo sapiens
  CDR3 for alpha chain variable domain of TCR clone 103774 (TRAV3, TRAJ22)
CAVRDRGGSARQLTF

SEQ ID NO: 207548 - protein, 15 aa, Homo sapiens
  CDR3 for beta chain variable domain of TCR clone 103774 (TRBV10-3, TRBJ2-3)
CAISLTSGGTDTQYF

SEQ ID NO: 207549 - protein, 17 aa, Homo sapiens
  CDR3 for alpha chain variable domain of TCR clone 103775 (TRAV16, TRAJ58)
CITVLSDGETSGSRLTF

SEQ ID NO: 207550 - protein, 17 aa, Homo sapiens
  CDR3 for beta chain variable domain of TCR clone 103775 (TRBV18, TRBJ2-1)
CASSKGLSGGADNEQFF

SEQ ID NO: 207551 - protein, 13 aa, Homo sapiens
  CDR3 for alpha chain variable domain of TCR clone 103776 (TRAV20, TRAJ48)
CAVRGVGNEKLTF

SEQ ID NO: 207552 - protein, 14 aa, Homo sapiens
  CDR3 for beta chain variable domain of TCR clone 103776 (TRBV27, TRBJ2-7)
CASSFRDGPYEQYF

SEQ ID NO: 207553 - protein, 14 aa, Homo sapiens
  CDR3 for alpha chain variable domain of TCR clone 103777 (TRAV10, TRAJ32)
CGEPRGGATNTLIF

SEQ ID NO: 207554 - protein, 14 aa, Homo sapiens
  CDR3 for beta chain variable domain of TCR clone 103777 (TRBV5-4, TRBJ2-2)
CASRLDGGTGELFF

SEQ ID NO: 207555 - protein, 14 aa, Homo sapiens
  CDR3 for alpha chain variable domain of TCR clone 103778 (TRAV12-2, TRAJ24)
CAVTPADSWGKLQF

SEQ ID NO: 207556 - protein, 13 aa, Homo sapiens
  CDR3 for beta chain variable domain of TCR clone 103778 (TRBV7-6, TRBJ2-3)
CASSLRSDNTQYF

SEQ ID NO: 207557 - protein, 14 aa, Homo sapiens
  CDR3 for alpha chain variable domain of TCR clone 103779 (TRAV4, TRAJ9)
CLVGSGPGGFKTIF

SEQ ID NO: 207558 - protein, 15 aa, Homo sapiens
  CDR3 for beta chain variable domain of TCR clone 103779 (TRBV7-2, TRBJ2-1)
CASSLASGRVNEQFF

SEQ ID NO: 207559 - protein, 14 aa, Homo sapiens
  CDR3 for alpha chain variable domain of TCR clone 103780 (TRAV4, TRAJ43)
CLVVPMYNNNDMRF

SEQ ID NO: 207560 - protein, 21 aa, Homo sapiens
  CDR3 for beta chain variable domain of TCR clone 103780 (TRBV11-1, TRBJ2-1)
CASSARERLRPEGPSYNEQFF

SEQ ID NO: 207561 - protein, 14 aa, Homo sapiens
  CDR3 for alpha chain variable domain of TCR clone 103781 (TRAV29/DV5, TRAJ36)
CAARRKTGANNLFF

SEQ ID NO: 207562 - protein, 14 aa, Homo sapiens
  CDR3 for beta chain variable domain of TCR clone 103781 (TRBV12-5, TRBJ2-5)
CASGSWTHQETQYF

SEQ ID NO: 207563 - protein, 19 aa, Homo sapiens
  CDR3 for alpha chain variable domain of TCR clone 103782 (TRAV8-3, TRAJ8)
MSTSVLWDPMNTGFQKLVF

SEQ ID NO: 207564 - protein, 13 aa, Homo sapiens
  CDR3 for beta chain variable domain of TCR clone 103782 (TRBV10-2, TRBJ2-3)
CASSESGDHTQYF

SEQ ID NO: 207565 - protein, 18 aa, Homo sapiens
  CDR3 for alpha chain variable domain of TCR clone 103783 (TRAV21, TRAJ52)
CAVRPSPAGGTSYGKLTF

SEQ ID NO: 207566 - protein, 16 aa, Homo sapiens
  CDR3 for beta chain variable domain of TCR clone 103783 (TRBV6-1, TRBJ1-3)
CASVQGGGGNTIYLER

SEQ ID NO: 207567 - protein, 14 aa, Homo sapiens
  CDR3 for alpha chain variable domain of TCR clone 103784 (TRAV17, TRAJ53)
CATDAGGSNHKLTF

SEQ ID NO: 207568 - protein, 16 aa, Homo sapiens
  CDR3 for beta chain variable domain of TCR clone 103784 (TRBV4-1, TRBJ1-1)
CASSQDAGMGNTEAFF

SEQ ID NO: 207569 - protein, 14 aa, Homo sapiens
  CDR3 for alpha chain variable domain of TCR clone 103785 (TRAV17, TRAJ54)
CATDANQGAQKLVF

SEQ ID NO: 207570 - protein, 16 aa, Homo sapiens
  CDR3 for beta chain variable domain of TCR clone 103785 (TRBV19, TRBJ2-2)
CASRSPGTGATGELFF

SEQ ID NO: 207571 - protein, 15 aa, Homo sapiens
  CDR3 for alpha chain variable domain of TCR clone 103786 (TRAV23/DV6, TRAJ13)
CAAWPGGGGYQKVTF

SEQ ID NO: 207572 - protein, 15 aa, Homo sapiens
  CDR3 for beta chain variable domain of TCR clone 103786 (TRBV7-2, TRBJ2-1)
CASSFQADEYNEQFF

SEQ ID NO: 207573 - protein, 15 aa, Homo sapiens
  CDR3 for alpha chain variable domain of TCR clone 103787 (TRAV3, TRAJ5)
CAVRDRKTGRRALTF

SEQ ID NO: 207574 - protein, 15 aa, Homo sapiens
  CDR3 for beta chain variable domain of TCR clone 103787 (TRBV7-8, TRBJ2-1)
CASSLADSLYNEPFF

SEQ ID NO: 207575 - protein, 21 aa, Homo sapiens
  CDR3 for alpha chain variable domain of TCR clone 103788 (TRAV25, TRAJ53)
TATQTTDVGTGSGGSKYKLTF

SEQ ID NO: 207576 - protein, 16 aa, Homo sapiens
  CDR3 for beta chain variable domain of TCR clone 103788 (TRBV4-2, TRBJ2-3)
CASSLSSGGHTDTQYF

SEQ ID NO: 207577 - protein, 18 aa, Homo sapiens
  CDR3 for alpha chain variable domain of TCR clone 103789 (TRAV12-2, )
CAVEDIQNPDPAVYQLRD

SEQ ID NO: 207578 - protein, 16 aa, Homo sapiens
  CDR3 for beta chain variable domain of TCR clone 103789 (TRBV6-1, TRBJ1-2)
CASSGAWQGRSHGYTV

SEQ ID NO: 207579 - protein, 13 aa, Homo sapiens
  CDR3 for alpha chain variable domain of TCR clone 103790 (TRAV13-1, TRAJ13)
CAASKGGYQKVTF

SEQ ID NO: 207580 - protein, 16 aa, Homo sapiens
  CDR3 for beta chain variable domain of TCR clone 103790 (TRBV18, TRBJ1-2)
CASSPPERVAIYGYTF

SEQ ID NO: 207581 - protein, 18 aa, Homo sapiens
  CDR3 for alpha chain variable domain of TCR clone 103791 (TRAV21, TRAJ53)
CAVKGGENSGGSNYKLTF

SEQ ID NO: 207582 - protein, 18 aa, Homo sapiens
  CDR3 for beta chain variable domain of TCR clone 103791 (TRBV11-2, TRBJ2-3)
CASSLGGASRGAPNTQYF

SEQ ID NO: 207583 - protein, 14 aa, Homo sapiens
  CDR3 for alpha chain variable domain of TCR clone 103792 (TRAV12-3, TRAJ10)
SHLPPTGGGNKLTF

SEQ ID NO: 207584 - protein, 15 aa, Homo sapiens
  CDR3 for beta chain variable domain of TCR clone 103792 (TRBV29-1, TRBJ2-7)
CSVEFFDRGSYEQYF

SEQ ID NO: 207585 - protein, 13 aa, Homo sapiens
  CDR3 for alpha chain variable domain of TCR clone 103793 (TRAV16, TRAJ28)
CALTGAGSYQLTF

SEQ ID NO: 207586 - protein, 17 aa, Homo sapiens
  CDR3 for beta chain variable domain of TCR clone 103793 (TRBV13, TRBJ2-3)
CASSLSRVAGGRNTQYF

SEQ ID NO: 207587 - protein, 14 aa, Homo sapiens
  CDR3 for alpha chain variable domain of TCR clone 103794 (TRAV12-2, TRAJ17)
CAVLFKAAGTKLTF

SEQ ID NO: 207588 - protein, 16 aa, Homo sapiens
  CDR3 for beta chain variable domain of TCR clone 103794 (TRBV20-1, TRBJ1-4)
CSAPRQGLLTNEKLFF

SEQ ID NO: 207589 - protein, 15 aa, Homo sapiens
  CDR3 for alpha chain variable domain of TCR clone 103795 (TRAV17, TRAJ52)
CATEAGGTSYGKLTF

SEQ ID NO: 207590 - protein, 15 aa, Homo sapiens
  CDR3 for beta chain variable domain of TCR clone 103795 (TRBV13, TRBJ1-2)
CASSLGRQPGYGYTF

SEQ ID NO: 207591 - protein, 16 aa, Homo sapiens
  CDR3 for alpha chain variable domain of TCR clone 103796 (TRAV20, TRAJ53)
CAVRRGSGGSNYKLTF

SEQ ID NO: 207592 - protein, 12 aa, Homo sapiens
  CDR3 for beta chain variable domain of TCR clone 103796 (TRBV29-1, TRBJ2-3)
CSAVLGADTQYF

SEQ ID NO: 207593 - protein, 15 aa, Homo sapiens
  CDR3 for alpha chain variable domain of TCR clone 103797 (TRAV38-2/DV8, TRAJ48)
CAYGGRDFGNEKLTF

SEQ ID NO: 207594 - protein, 13 aa, Homo sapiens
  CDR3 for beta chain variable domain of TCR clone 103797 (TRBV10-3, TRBJ2-7)
CASKLAVNYEQYF

SEQ ID NO: 207595 - protein, 12 aa, Homo sapiens
  CDR3 for alpha chain variable domain of TCR clone 103798 (TRAV8-3, TRAJ26)
CAGDNYGQNFVF

SEQ ID NO: 207596 - protein, 14 aa, Homo sapiens
  CDR3 for beta chain variable domain of TCR clone 103798 (TRBV7-2, TRBJ2-7)
CASRPQGAAYEQYF

SEQ ID NO: 207597 - protein, 10 aa, Homo sapiens
  CDR3 for alpha chain variable domain of TCR clone 103799 (TRAV13-1, TRAJ27)
CAPLARQINL

SEQ ID NO: 207598 - protein, 13 aa, Homo sapiens
  CDR3 for beta chain variable domain of TCR clone 103799 (TRBV7-3, TRBJ1-1)
CASSQDWGAEAFS

SEQ ID NO: 207599 - protein, 13 aa, Homo sapiens
  CDR3 for alpha chain variable domain of TCR clone 103800 (TRAV13-1, TRAJ5)
CAASATGRRALTF

SEQ ID NO: 207600 - protein, 12 aa, Homo sapiens
  CDR3 for beta chain variable domain of TCR clone 103800 (TRBV28, TRBJ2-3)
CASSLYRDTQYF

SEQ ID NO: 207601 - protein, 15 aa, Homo sapiens
  CDR3 for alpha chain variable domain of TCR clone 103801 (TRAV2, TRAJ9)
CAVEDRGTGGFKTIF

SEQ ID NO: 207602 - protein, 13 aa, Homo sapiens
  CDR3 for beta chain variable domain of TCR clone 103801 (TRBV7-9, TRBJ2-3)
CASSPGSTDTQYF

SEQ ID NO: 207603 - protein, 11 aa, Homo sapiens
  CDR3 for alpha chain variable domain of TCR clone 103802 (TRAV17, TRAJ9)
CGFTGGFKTIF

SEQ ID NO: 207604 - protein, 13 aa, Homo sapiens
  CDR3 for beta chain variable domain of TCR clone 103802 (TRBV7-9, TRBJ2-2)
CQQLSSRHGELFF

SEQ ID NO: 207605 - protein, 14 aa, Homo sapiens
  CDR3 for alpha chain variable domain of TCR clone 103803 (TRAV12-1, TRAJ26)
CVVKGSNYGQNFVS

SEQ ID NO: 207606 - protein, 17 aa, Homo sapiens
  CDR3 for beta chain variable domain of TCR clone 103803 (TRBV11-2, TRBJ2-6)
CASSQRDIFSGANVLTF

SEQ ID NO: 207607 - protein, 17 aa, Homo sapiens
  CDR3 for alpha chain variable domain of TCR clone 103804 (TRAV4, TRAJ18)
CLVGERSVGSTLGRLYF

SEQ ID NO: 207608 - protein, 15 aa, Homo sapiens
  CDR3 for beta chain variable domain of TCR clone 103804 (TRBV28, TRBJ1-3)
CASSMGWASGNTIYF

SEQ ID NO: 207609 - protein, 18 aa, Homo sapiens
  CDR3 for alpha chain variable domain of TCR clone 103805 (TRAV21, TRAJ52)
CAVRPSPAGGTSYGKLTF

SEQ ID NO: 207610 - protein, 12 aa, Homo sapiens
  CDR3 for beta chain variable domain of TCR clone 103805 (TRBV3-1, TRBJ2-2)
CASSLFPGELFF

SEQ ID NO: 207611 - protein, 13 aa, Homo sapiens
  CDR3 for alpha chain variable domain of TCR clone 103806 (TRAV13-2, TRAJ5)
CAVMDTGRRSLTF

SEQ ID NO: 207612 - protein, 12 aa, Homo sapiens
  CDR3 for beta chain variable domain of TCR clone 103806 (TRBV28, TRBJ2-7)
CASSFSSYEQYF

SEQ ID NO: 207613 - protein, 14 aa, Homo sapiens
  CDR3 for alpha chain variable domain of TCR clone 103807 (TRAV2, TRAJ9)
CAVEDRSGGFKTIF

SEQ ID NO: 207614 - protein, 12 aa, Homo sapiens
  CDR3 for beta chain variable domain of TCR clone 103807 (TRBV11-2, TRBJ2-1)
RASSPGNNEQFF

SEQ ID NO: 207615 - protein, 15 aa, Homo sapiens
  CDR3 for alpha chain variable domain of TCR clone 103808 (TRAV12-3, TRAJ6)
CAMSATTGGSYIPTF

SEQ ID NO: 207616 - protein, 17 aa, Homo sapiens
  CDR3 for beta chain variable domain of TCR clone 103808 (TRBV13, TRBJ2-3)
CANSLSRVAGGRNTQYF

SEQ ID NO: 207617 - protein, 15 aa, Homo sapiens
  CDR3 for alpha chain variable domain of TCR clone 103809 (TRAV34, TRAJ38)
CGADFTPGNNRKLIW

SEQ ID NO: 207618 - protein, 12 aa, Homo sapiens
  CDR3 for beta chain variable domain of TCR clone 103809 (TRBV7-9, TRBJ2-7)
CASSIKREEQYF

SEQ ID NO: 207619 - protein, 15 aa, Homo sapiens
  CDR3 for alpha chain variable domain of TCR clone 103810 (TRAV21, TRAJ24)
CAARSSTYSWGKLQF

SEQ ID NO: 207620 - protein, 15 aa, Homo sapiens
  CDR3 for beta chain variable domain of TCR clone 103810 (TRBV4-1, TRBJ2-7)
CASSQNTGRLYEQYF

SEQ ID NO: 207621 - protein, 17 aa, Homo sapiens
  CDR3 for alpha chain variable domain of TCR clone 103811 (TRAV3, TRAJ6)
CAVRGGPRAGGSYIPTF

SEQ ID NO: 207622 - protein, 13 aa, Homo sapiens
  CDR3 for beta chain variable domain of TCR clone 103811 (TRBV20-1, TRBJ1-1)
CSAPLGGGTEAFF

SEQ ID NO: 207623 - protein, 15 aa, Homo sapiens
  CDR3 for alpha chain variable domain of TCR clone 103812 (TRAV4, TRAJ12)
CLVGDLMDSSYKLIF

SEQ ID NO: 207624 - protein, 14 aa, Homo sapiens
  CDR3 for beta chain variable domain of TCR clone 103812 (TRBV7-2, TRBJ1-1)
CASSHRQGRTESFF

SEQ ID NO: 207625 - protein, 13 aa, Homo sapiens
  CDR3 for alpha chain variable domain of TCR clone 103813 (TRAV21, TRAJ27)
CAARPGNAGKSTF

SEQ ID NO: 207626 - protein, 16 aa, Homo sapiens
  CDR3 for beta chain variable domain of TCR clone 103813 (TRBV20-1, TRBJ1-2)
CSAPMGQGVANYGYTF

SEQ ID NO: 207627 - protein, 16 aa, Homo sapiens
  CDR3 for alpha chain variable domain of TCR clone 103814 (TRAV38-2/DV8, TRAJ45)
CAYTTTSGGGADGLTF

SEQ ID NO: 207628 - protein, 14 aa, Homo sapiens
  CDR3 for beta chain variable domain of TCR clone 103814 (TRBV7-9, TRBJ2-2)
CASSLGHRTGGLFF

SEQ ID NO: 207629 - protein, 14 aa, Homo sapiens
  CDR3 for alpha chain variable domain of TCR clone 103815 (TRAV34, TRAJ44)
CGADGTGTASKLTF

SEQ ID NO: 207630 - protein, 15 aa, Homo sapiens
  CDR3 for beta chain variable domain of TCR clone 103815 (TRBV19, TRBJ1-2)
CASSVGQVLNYGYTF

SEQ ID NO: 207631 - protein, 16 aa, Homo sapiens
  CDR3 for alpha chain variable domain of TCR clone 103816 (TRAV29/DV5, TRAJ57)
CAASAVVQGGSEKLVF

SEQ ID NO: 207632 - protein, 13 aa, Homo sapiens
  CDR3 for beta chain variable domain of TCR clone 103816 (TRBV12-5, TRBJ2-3)
CASGDRQSDTQYF

SEQ ID NO: 207633 - protein, 11 aa, Homo sapiens
  CDR3 for alpha chain variable domain of TCR clone 103817 (TRAV21, TRAJ34)
CAHYNTDKLIF

SEQ ID NO: 207634 - protein, 11 aa, Homo sapiens
  CDR3 for beta chain variable domain of TCR clone 103817 (TRBV29-1, TRBJ2-5)
RSEDRTGTQYF

SEQ ID NO: 207635 - protein, 16 aa, Homo sapiens
  CDR3 for alpha chain variable domain of TCR clone 103818 (TRAV12-2, TRAJ32)
CAVNLGQGGATNKLIF

SEQ ID NO: 207636 - protein, 14 aa, Homo sapiens
  CDR3 for beta chain variable domain of TCR clone 103818 (TRBV7-6, TRBJ2-3)
CASSLGTVTDTQYF

SEQ ID NO: 207637 - protein, 14 aa, Homo sapiens
  CDR3 for alpha chain variable domain of TCR clone 103819 (TRAV14/DV4, TRAJ15)
CAMRRDQAGTALIF

SEQ ID NO: 207638 - protein, 14 aa, Homo sapiens
  CDR3 for beta chain variable domain of TCR clone 103819 (TRBV5-5, TRBJ2-7)
CASSLGQGTYEQYF

SEQ ID NO: 207639 - protein, 16 aa, Homo sapiens
  CDR3 for alpha chain variable domain of TCR clone 103820 (TRAV8-3, TRAJ10)
CAVGPGVTGGGNKLTF

SEQ ID NO: 207640 - protein, 13 aa, Homo sapiens
  CDR3 for beta chain variable domain of TCR clone 103820 (TRBV18, TRBJ1-1)
CARSPGPSGEAFF

SEQ ID NO: 207641 - protein, 14 aa, Homo sapiens
  CDR3 for alpha chain variable domain of TCR clone 103821 (TRAV1-1, TRAJ27)
CAVIYNTNAGKSTF

SEQ ID NO: 207642 - protein, 14 aa, Homo sapiens
  CDR3 for beta chain variable domain of TCR clone 103821 (TRBV25-1, TRBJ1-1)
CASTHLGGSTEAFF

SEQ ID NO: 207643 - protein, 12 aa, Homo sapiens
  CDR3 for alpha chain variable domain of TCR clone 103822 (TRAV4, TRAJ26)
RLVGDYGQNFVF

SEQ ID NO: 207644 - protein, 16 aa, Homo sapiens
  CDR3 for beta chain variable domain of TCR clone 103822 (TRBV7-2, TRBJ1-2)
CASSSNQDRRGHGYTF

SEQ ID NO: 207645 - protein, 16 aa, Homo sapiens
  CDR3 for alpha chain variable domain of TCR clone 103823 (TRAV27, TRAJ53)
CAAPEWSGGSNYKLTF

SEQ ID NO: 207646 - protein, 14 aa, Homo sapiens
  CDR3 for beta chain variable domain of TCR clone 103823 (TRBV4-3, TRBJ1-5)
CASSQGGQGWPQHF

SEQ ID NO: 207647 - protein, 14 aa, Homo sapiens
  CDR3 for alpha chain variable domain of TCR clone 103824 (TRAV12-2, TRAJ13)
CAVKKTGGYQKVTF

SEQ ID NO: 207648 - protein, 14 aa, Homo sapiens
  CDR3 for beta chain variable domain of TCR clone 103824 (TRBV7-2, TRBJ2-5)
CASSPRGSSETQYF

SEQ ID NO: 207649 - protein, 15 aa, Homo sapiens
  CDR3 for alpha chain variable domain of TCR clone 103825 (TRAV21, TRAJ38)
CAVRQDAGNNRKLIW

SEQ ID NO: 207650 - protein, 16 aa, Homo sapiens
  CDR3 for beta chain variable domain of TCR clone 103825 (TRBV4-2, TRBJ1-1)
CASRSLDGGGDTEAFF

SEQ ID NO: 207651 - protein, 12 aa, Homo sapiens
  CDR3 for alpha chain variable domain of TCR clone 103826 (TRAV13-1, TRAJ43)
CAAGRFNNDMRF

SEQ ID NO: 207652 - protein, 14 aa, Homo sapiens
  CDR3 for beta chain variable domain of TCR clone 103826 (TRBV6-3, TRBJ2-5)
CASRRDGGEETLYF

SEQ ID NO: 207653 - protein, 20 aa, Homo sapiens
  CDR3 for alpha chain variable domain of TCR clone 103827 (TRAV12-3, TRAJ41)
SLFIRDSQPSDSATPEALNF

SEQ ID NO: 207654 - protein, 15 aa, Homo sapiens
  CDR3 for beta chain variable domain of TCR clone 103827 (TRBV5-1, TRBJ2-7)
CASSLDLTSSYEQHF

SEQ ID NO: 207655 - protein, 14 aa, Homo sapiens
  CDR3 for alpha chain variable domain of TCR clone 103828 (TRAV2, TRAJ37)
CAVDFTSNTGKLIF

SEQ ID NO: 207656 - protein, 18 aa, Homo sapiens
  CDR3 for beta chain variable domain of TCR clone 103828 (TRBV12-4, TRBJ2-2)
CASSLVAGTRGRTGELFF

SEQ ID NO: 207657 - protein, 14 aa, Homo sapiens
  CDR3 for alpha chain variable domain of TCR clone 103829 (TRAV14/DV4, TRAJ11)
CAMSSNSGYSTLTF

SEQ ID NO: 207658 - protein, 18 aa, Homo sapiens
  CDR3 for beta chain variable domain of TCR clone 103829 (TRBV11-2, TRBJ2-3)
CASSLGGASRGAPNTQYF

SEQ ID NO: 207659 - protein, 12 aa, Homo sapiens
  CDR3 for alpha chain variable domain of TCR clone 103830 (TRAV17, TRAJ57)
CATDGGSEKLVF

SEQ ID NO: 207660 - protein, 13 aa, Homo sapiens
  CDR3 for beta chain variable domain of TCR clone 103830 (TRBV7-9, TRBJ2-7)
CACSFAGAYEQYF

SEQ ID NO: 207661 - protein, 15 aa, Homo sapiens
  CDR3 for alpha chain variable domain of TCR clone 103831 (TRAV25, TRAJ52)
CAGTSGGTSYGKLTF

SEQ ID NO: 207662 - protein, 15 aa, Homo sapiens
  CDR3 for beta chain variable domain of TCR clone 103831 (TRBV20-1, TRBJ2-7)
CSARDRVSGMDEQYF

SEQ ID NO: 207663 - protein, 12 aa, Homo sapiens
  CDR3 for alpha chain variable domain of TCR clone 103832 (TRAV3, TRAJ20)
CAVRDGDYKLSF

SEQ ID NO: 207664 - protein, 17 aa, Homo sapiens
  CDR3 for beta chain variable domain of TCR clone 103832 (TRBV7-9, TRBJ2-3)
CASSLEEAGAYPDTQYF

SEQ ID NO: 207665 - protein, 14 aa, Homo sapiens
  CDR3 for alpha chain variable domain of TCR clone 103833 (TRAV35, TRAJ53)
CAGNSGGSNYKLTF

SEQ ID NO: 207666 - protein, 13 aa, Homo sapiens
  CDR3 for beta chain variable domain of TCR clone 103833 (TRBV11-3, TRBJ1-1)
CASTGSLNTEAFF

SEQ ID NO: 207667 - protein, 14 aa, Homo sapiens
  CDR3 for alpha chain variable domain of TCR clone 103834 (TRAV26-2, TRAJ27)
CILRDISDAGKSTF

SEQ ID NO: 207668 - protein, 14 aa, Homo sapiens
  CDR3 for beta chain variable domain of TCR clone 103834 (TRBV7-9, TRBJ2-3)
CASSLEDGTDTQYF

SEQ ID NO: 207669 - protein, 14 aa, Homo sapiens
  CDR3 for alpha chain variable domain of TCR clone 103835 (TRAV27, TRAJ23)
CAGAFDNQGGKLIF

SEQ ID NO: 207670 - protein, 15 aa, Homo sapiens
  CDR3 for beta chain variable domain of TCR clone 103835 (TRBV7-3, TRBJ2-7)
CARSLTGQGKYEQYF

SEQ ID NO: 207671 - protein, 16 aa, Homo sapiens
  CDR3 for alpha chain variable domain of TCR clone 103836 (TRAV21, TRAJ58)
CAVRGDRETSGSRLTF

SEQ ID NO: 207672 - protein, 12 aa, Homo sapiens
  CDR3 for beta chain variable domain of TCR clone 103836 (TRBV19, TRBJ2-3)
CASAGGVDTQYF

SEQ ID NO: 207673 - protein, 14 aa, Homo sapiens
  CDR3 for alpha chain variable domain of TCR clone 103837 (TRAV17, TRAJ40)
CATALTSGTYKYIF

SEQ ID NO: 207674 - protein, 13 aa, Homo sapiens
  CDR3 for beta chain variable domain of TCR clone 103837 (TRBV6-1, TRBJ1-1)
CASSRQGSTEAFF

SEQ ID NO: 207675 - protein, 15 aa, Homo sapiens
  CDR3 for alpha chain variable domain of TCR clone 103838 (TRAV3, TRAJ22)
CAVRDRGGSARQLTF

SEQ ID NO: 207676 - protein, 15 aa, Homo sapiens
  CDR3 for beta chain variable domain of TCR clone 103838 (TRBV2, TRBJ2-7)
CASSEGLARSYEQYF

SEQ ID NO: 207677 - protein, 16 aa, Homo sapiens
  CDR3 for alpha chain variable domain of TCR clone 103839 (TRAV8-3, TRAJ13)
FAVGAYPSGGYQKVTF

SEQ ID NO: 207678 - protein, 14 aa, Homo sapiens
  CDR3 for beta chain variable domain of TCR clone 103839 (TRBV18, TRBJ2-5)
CASSPRASSETQYF

SEQ ID NO: 207679 - protein, 15 aa, Homo sapiens
  CDR3 for alpha chain variable domain of TCR clone 103840 (TRAV35, TRAJ34)
CAGTSIVRNTDKLIF

SEQ ID NO: 207680 - protein, 15 aa, Homo sapiens
  CDR3 for beta chain variable domain of TCR clone 103840 (TRBV28, TRBJ2-5)
CASSPGQGSIETQYF

SEQ ID NO: 207681 - protein, 17 aa, Homo sapiens
  CDR3 for alpha chain variable domain of TCR clone 103841 (TRAV20, TRAJ31)
CAGCTRLMFGDGTQLVV

SEQ ID NO: 207682 - protein, 13 aa, Homo sapiens
  CDR3 for beta chain variable domain of TCR clone 103841 (TRBV2, TRBJ1-4)
CASSERAGEKLFF

SEQ ID NO: 207683 - protein, 12 aa, Homo sapiens
  CDR3 for alpha chain variable domain of TCR clone 103842 (TRAV12-2, TRAJ42)
CAVGGSQGNPIF

SEQ ID NO: 207684 - protein, 15 aa, Homo sapiens
  CDR3 for beta chain variable domain of TCR clone 103842 (TRBV9, TRBJ1-6)
CASSVAGTGDSPLHF

SEQ ID NO: 207685 - protein, 15 aa, Homo sapiens
  CDR3 for alpha chain variable domain of TCR clone 103843 (TRAV3, TRAJ3)
CAVRDRDSSVSKIIF

SEQ ID NO: 207686 - protein, 18 aa, Homo sapiens
  CDR3 for beta chain variable domain of TCR clone 103843 (TRBV25-1, TRBJ1-2)
CASSGLQNGQGLIFGYTF

SEQ ID NO: 207687 - protein, 15 aa, Homo sapiens
  CDR3 for alpha chain variable domain of TCR clone 103844 (TRAV3, TRAJ9)
CAVRDSNTGGFKTIF

SEQ ID NO: 207688 - protein, 15 aa, Homo sapiens
  CDR3 for beta chain variable domain of TCR clone 103844 (TRBV28, TRBJ2-1)
CASSIIAGGRSEQFF

SEQ ID NO: 207689 - protein, 15 aa, Homo sapiens
  CDR3 for alpha chain variable domain of TCR clone 103845 (TRAV2, TRAJ9)
CAVEDRGIGGFKTIF

SEQ ID NO: 207690 - protein, 16 aa, Homo sapiens
  CDR3 for beta chain variable domain of TCR clone 103845 (TRBV24-1, TRBJ2-3)
CATSDPGTGATDTQYF

SEQ ID NO: 207691 - protein, 15 aa, Homo sapiens
  CDR3 for alpha chain variable domain of TCR clone 103846 (TRAV16, TRAJ16)
CALQGGGSDGQKLLF

SEQ ID NO: 207692 - protein, 15 aa, Homo sapiens
  CDR3 for beta chain variable domain of TCR clone 103846 (TRBV9, TRBJ1-6)
CASSVAGTGDSPLHF

SEQ ID NO: 207693 - protein, 12 aa, Homo sapiens
  CDR3 for alpha chain variable domain of TCR clone 103847 (TRAV12-3, TRAJ17)
CAMTLTDNKLTF

SEQ ID NO: 207694 - protein, 15 aa, Homo sapiens
  CDR3 for beta chain variable domain of TCR clone 103847 (TRBV19, TRBJ2-1)
CASSILGEGRNEQFF

SEQ ID NO: 207695 - protein, 14 aa, Homo sapiens
  CDR3 for alpha chain variable domain of TCR clone 103848 (TRAV23/DV6, TRAJ13)
CAAMYSGGYPKVTF

SEQ ID NO: 207696 - protein, 16 aa, Homo sapiens
  CDR3 for beta chain variable domain of TCR clone 103848 (TRBV9, TRBJ2-1)
CASSALGGIGNNEQFF

SEQ ID NO: 207697 - protein, 13 aa, Homo sapiens
  CDR3 for alpha chain variable domain of TCR clone 103849 (TRAV27, TRAJ6)
CAGGTRGSYIPTF

SEQ ID NO: 207698 - protein, 13 aa, Homo sapiens
  CDR3 for beta chain variable domain of TCR clone 103849 (TRBV4-1, TRBJ2-2)
CACSQENTGELFF

SEQ ID NO: 207699 - protein, 14 aa, Homo sapiens
  CDR3 for alpha chain variable domain of TCR clone 103850 (TRAV12-3, TRAJ10)
SHLPQTGGGNKLTF

SEQ ID NO: 207700 - protein, 15 aa, Homo sapiens
  CDR3 for beta chain variable domain of TCR clone 103850 (TRBV19, TRBJ1-1)
CASTSGQIQNTEAFF

SEQ ID NO: 207701 - protein, 14 aa, Homo sapiens
  CDR3 for alpha chain variable domain of TCR clone 103851 (TRAV8-4, TRAJ37)
CAVSEPSNTGKLIF

SEQ ID NO: 207702 - protein, 14 aa, Homo sapiens
  CDR3 for beta chain variable domain of TCR clone 103851 (TRBV28, TRBJ2-1)
CSIHRTGARTEQFF

SEQ ID NO: 207703 - protein, 12 aa, Homo sapiens
  CDR3 for alpha chain variable domain of TCR clone 103852 (TRAV4, TRAJ26)
CLVGDYGQNFVF

SEQ ID NO: 207704 - protein, 17 aa, Homo sapiens
  CDR3 for beta chain variable domain of TCR clone 103852 (TRBV27, TRBJ1-6)
CASSLDQLSSYNSPLHF

SEQ ID NO: 207705 - protein, 13 aa, Homo sapiens
  CDR3 for alpha chain variable domain of TCR clone 103853 (TRAV27, TRAJ29)
CAGAHSGNTPLVF

SEQ ID NO: 207706 - protein, 14 aa, Homo sapiens
  CDR3 for beta chain variable domain of TCR clone 103853 (TRBV7-9, TRBJ2-7)
CASSIGKGAGEQYF

SEQ ID NO: 207707 - protein, 10 aa, Homo sapiens
  CDR3 for alpha chain variable domain of TCR clone 103854 (TRAV25, TRAJ20)
CAVNDYKLSF

SEQ ID NO: 207708 - protein, 15 aa, Homo sapiens
  CDR3 for beta chain variable domain of TCR clone 103854 (TRBV10-3, TRBJ2-3)
CAISLTSGGTDTQYF

SEQ ID NO: 207709 - protein, 15 aa, Homo sapiens
  CDR3 for alpha chain variable domain of TCR clone 103855 (TRAV1-2, TRAJ30)
CAVRPHGNRDDKITF

SEQ ID NO: 207710 - protein, 13 aa, Homo sapiens
  CDR3 for beta chain variable domain of TCR clone 103855 (TRBV4-1, TRBJ2-7)
CASSQGQAYEQYF

SEQ ID NO: 207711 - protein, 14 aa, Homo sapiens
  CDR3 for alpha chain variable domain of TCR clone 103856 (TRAV12-3, TRAJ10)
SHLPLTGGGNKLTF

SEQ ID NO: 207712 - protein, 13 aa, Homo sapiens
  CDR3 for beta chain variable domain of TCR clone 103856 (TRBV24-1, TRBJ2-2)
CATSDWSTGELFF

SEQ ID NO: 207713 - protein, 12 aa, Homo sapiens
  CDR3 for alpha chain variable domain of TCR clone 103857 (TRAV12-3, TRAJ17)
CAMTLTGNRLTF

SEQ ID NO: 207714 - protein, 15 aa, Homo sapiens
  CDR3 for beta chain variable domain of TCR clone 103857 (TRBV6-3, TRBJ2-7)
CASSSPGTVFYEQYF

SEQ ID NO: 207715 - protein, 17 aa, Homo sapiens
  CDR3 for alpha chain variable domain of TCR clone 103858 (TRAV3, TRAJ6)
CAVRDGPRAGGSYIPTF

SEQ ID NO: 207716 - protein, 14 aa, Homo sapiens
  CDR3 for beta chain variable domain of TCR clone 103858 (TRBV27, TRBJ2-5)
CASSSLKGWETQYF

SEQ ID NO: 207717 - protein, 17 aa, Homo sapiens
  CDR3 for alpha chain variable domain of TCR clone 103859 (TRAV23/DV6, TRAJ57)
CAASSTLSQGGSEKLVF

SEQ ID NO: 207718 - protein, 14 aa, Homo sapiens
  CDR3 for beta chain variable domain of TCR clone 103859 (TRBV7-8, TRBJ2-1)
RASSSQGTYNEQFF

SEQ ID NO: 207719 - protein, 18 aa, Homo sapiens
  CDR3 for alpha chain variable domain of TCR clone 103860 (TRAV38-1, TRAJ40)
CDVFLCFTPTSGTYKYIF

SEQ ID NO: 207720 - protein, 14 aa, Homo sapiens
  CDR3 for beta chain variable domain of TCR clone 103860 (TRBV25-1, TRBJ1-1)
CASTHLGGNTEAFF

SEQ ID NO: 207721 - protein, 14 aa, Homo sapiens
  CDR3 for alpha chain variable domain of TCR clone 103861 (TRAV1-2, TRAJ16)
CAVNRFSDGQKLLF

SEQ ID NO: 207722 - protein, 11 aa, Homo sapiens
  CDR3 for beta chain variable domain of TCR clone 103861 (TRBV29-1, TRBJ2-5)
CSEDRTGTQCF

SEQ ID NO: 207723 - protein, 14 aa, Homo sapiens
  CDR3 for alpha chain variable domain of TCR clone 103862 (TRAV17, TRAJ15)
CATGPNQAGTALTF

SEQ ID NO: 207724 - protein, 15 aa, Homo sapiens
  CDR3 for beta chain variable domain of TCR clone 103862 (TRBV11-2, TRBJ2-2)
CASSSDRVNAGELFF

SEQ ID NO: 207725 - protein, 15 aa, Homo sapiens
  CDR3 for alpha chain variable domain of TCR clone 103863 (TRAV2, TRAJ24)
CAVVRLKNSWGKLQF

SEQ ID NO: 207726 - protein, 15 aa, Homo sapiens
  CDR3 for beta chain variable domain of TCR clone 103863 (TRBV6-6, TRBJ2-7)
CASSYSYGGSYEQYF

SEQ ID NO: 207727 - protein, 16 aa, Homo sapiens
  CDR3 for alpha chain variable domain of TCR clone 103864 (TRAV26-1, TRAJ23)
CIVRVHPYNQGGKLIF

SEQ ID NO: 207728 - protein, 15 aa, Homo sapiens
  CDR3 for beta chain variable domain of TCR clone 103864 (TRBV5-7, TRBJ2-7)
CASSPYFEGSYEQYV

SEQ ID NO: 207729 - protein, 14 aa, Homo sapiens
  CDR3 for alpha chain variable domain of TCR clone 103865 (TRAV8-6, TRAJ29)
CAVSDQAGNTPLVF

SEQ ID NO: 207730 - protein, 16 aa, Homo sapiens
  CDR3 for beta chain variable domain of TCR clone 103865 (TRBV6-5, TRBJ2-7)
CASSYFRVGISDEQYF

SEQ ID NO: 207731 - protein, 15 aa, Homo sapiens
  CDR3 for alpha chain variable domain of TCR clone 103866 (TRAV23/DV6, TRAJ18)
CAARYRGSTLGRLYF

SEQ ID NO: 207732 - protein, 13 aa, Homo sapiens
  CDR3 for beta chain variable domain of TCR clone 103866 (TRBV7-2, TRBJ2-7)
CASSSPSGSEQYV

SEQ ID NO: 207733 - protein, 12 aa, Homo sapiens
  CDR3 for alpha chain variable domain of TCR clone 103867 (TRAV12-2, TRAJ8)
CAVATGFRKLVF

SEQ ID NO: 207734 - protein, 12 aa, Homo sapiens
  CDR3 for beta chain variable domain of TCR clone 103867 (TRBV12-5, TRBJ2-5)
CASGQGVETQYF

SEQ ID NO: 207735 - protein, 11 aa, Homo sapiens
  CDR3 for alpha chain variable domain of TCR clone 103868 (TRAV2, TRAJ13)
CASGGYQKVTF

SEQ ID NO: 207736 - protein, 15 aa, Homo sapiens
  CDR3 for beta chain variable domain of TCR clone 103868 (TRBV19, TRBJ2-3)
CAAGDTNAPNDTQYF

SEQ ID NO: 207737 - protein, 14 aa, Homo sapiens
  CDR3 for alpha chain variable domain of TCR clone 103869 (TRAV2, TRAJ37)
CAVEGSSNTGKLIF

SEQ ID NO: 207738 - protein, 12 aa, Homo sapiens
  CDR3 for beta chain variable domain of TCR clone 103869 (TRBV12-4, TRBJ2-7)
CASSLGGYEQYF

SEQ ID NO: 207739 - protein, 15 aa, Homo sapiens
  CDR3 for alpha chain variable domain of TCR clone 103870 (TRAV21, TRAJ38)
CAVRQDAGNNRKLIW

SEQ ID NO: 207740 - protein, 16 aa, Homo sapiens
  CDR3 for beta chain variable domain of TCR clone 103870 (TRBV4-2, TRBJ1-1)
CASRPLDGGGDTEAFC

SEQ ID NO: 207741 - protein, 10 aa, Homo sapiens
  CDR3 for alpha chain variable domain of TCR clone 103871 (TRAV12-3, TRAJ49)
CAMNDDQFYS

SEQ ID NO: 207742 - protein, 15 aa, Homo sapiens
  CDR3 for beta chain variable domain of TCR clone 103871 (TRBV20-1, TRBJ2-7)
CSARDRVSGMDEQYS

SEQ ID NO: 207743 - protein, 14 aa, Homo sapiens
  CDR3 for alpha chain variable domain of TCR clone 103872 (TRAV17, TRAJ22)
CTTSPSGPARQLTF

SEQ ID NO: 207744 - protein, 15 aa, Homo sapiens
  CDR3 for beta chain variable domain of TCR clone 103872 (TRBV4-1, TRBJ2-5)
CASSQWDLYQETQYF

SEQ ID NO: 207745 - protein, 13 aa, Homo sapiens
  CDR3 for alpha chain variable domain of TCR clone 103873 (TRAV6, TRAJ9)
CALDRTGGFKTIF

SEQ ID NO: 207746 - protein, 13 aa, Homo sapiens
  CDR3 for beta chain variable domain of TCR clone 103873 (TRBV6-5, TRBJ2-3)
CASSYGTGDTQYF

SEQ ID NO: 207747 - protein, 12 aa, Homo sapiens
  CDR3 for alpha chain variable domain of TCR clone 103874 (TRAV26-1, TRAJ43)
CIVRPRVDDMRF

SEQ ID NO: 207748 - protein, 16 aa, Homo sapiens
  CDR3 for beta chain variable domain of TCR clone 103874 (TRBV3-1, TRBJ2-1)
CASSQGGRRSFDEQFF

SEQ ID NO: 207749 - protein, 13 aa, Homo sapiens
  CDR3 for alpha chain variable domain of TCR clone 103875 (TRAV35, TRAJ21)
RAGQLSNFNKFYF

SEQ ID NO: 207750 - protein, 16 aa, Homo sapiens
  CDR3 for beta chain variable domain of TCR clone 103875 (TRBV4-3, TRBJ2-2)
CASSHLQGSGTGELFF

SEQ ID NO: 207751 - protein, 14 aa, Homo sapiens
  CDR3 for alpha chain variable domain of TCR clone 103876 (TRAV12-3, TRAJ42)
CAMNYGGSQGNLIF

SEQ ID NO: 207752 - protein, 12 aa, Homo sapiens
  CDR3 for beta chain variable domain of TCR clone 103876 (TRBV12-4, TRBJ2-7)
CASSLGGYEQYF

SEQ ID NO: 207753 - protein, 16 aa, Homo sapiens
  CDR3 for alpha chain variable domain of TCR clone 103877 (TRAV3, TRAJ10)
CAVRDMRAGGGNKLTF

SEQ ID NO: 207754 - protein, 13 aa, Homo sapiens
  CDR3 for beta chain variable domain of TCR clone 103877 (TRBV20-1, TRBJ1-6)
CSAPLGVGSPLHF

SEQ ID NO: 207755 - protein, 14 aa, Homo sapiens
  CDR3 for alpha chain variable domain of TCR clone 103878 (TRAV22, TRAJ21)
CACRGGYNFNKFYL

SEQ ID NO: 207756 - protein, 14 aa, Homo sapiens
  CDR3 for beta chain variable domain of TCR clone 103878 (TRBV7-2, TRBJ2-7)
CASSPKTSFYEQYF

SEQ ID NO: 207757 - protein, 15 aa, Homo sapiens
  CDR3 for alpha chain variable domain of TCR clone 103879 (TRAV3, TRAJ22)
CAVRDRGGSARPLTF

SEQ ID NO: 207758 - protein, 18 aa, Homo sapiens
  CDR3 for beta chain variable domain of TCR clone 103879 (TRBV28, TRBJ2-1)
CASSSTSGRANSYNEQFF

SEQ ID NO: 207759 - protein, 14 aa, Homo sapiens
  CDR3 for alpha chain variable domain of TCR clone 103880 (TRAV12-3, TRAJ6)
CAMSATGGSYIPTS

SEQ ID NO: 207760 - protein, 16 aa, Homo sapiens
  CDR3 for beta chain variable domain of TCR clone 103880 (TRBV4-2, TRBJ2-1)
CASSPRAGQGANEQFF

SEQ ID NO: 207761 - protein, 13 aa, Homo sapiens
  CDR3 for alpha chain variable domain of TCR clone 103881 (TRAV3, TRAJ21)
CAVREPDFNTFYF

SEQ ID NO: 207762 - protein, 14 aa, Homo sapiens
  CDR3 for beta chain variable domain of TCR clone 103881 (TRBV6-1, TRBJ1-3)
CASVQGGGGNTIYF

SEQ ID NO: 207763 - protein, 14 aa, Homo sapiens
  CDR3 for alpha chain variable domain of TCR clone 103882 (TRAV13-1, TRAJ44)
CAAKATGTASRLTF

SEQ ID NO: 207764 - protein, 15 aa, Homo sapiens
  CDR3 for beta chain variable domain of TCR clone 103882 (TRBV4-3, TRBJ1-1)
CASSQELGRGTEAFF

SEQ ID NO: 207765 - protein, 15 aa, Homo sapiens
  CDR3 for alpha chain variable domain of TCR clone 103883 (TRAV8-3, TRAJ23)
CAVGDRYNQGGTLIF

SEQ ID NO: 207766 - protein, 17 aa, Homo sapiens
  CDR3 for beta chain variable domain of TCR clone 103883 (TRBV4-1, TRBJ1-4)
CASSQEGPRGVEEKLFF

SEQ ID NO: 207767 - protein, 12 aa, Homo sapiens
  CDR3 for alpha chain variable domain of TCR clone 103884 (TRAV21, TRAJ37)
CAVRGNTGKLIL

SEQ ID NO: 207768 - protein, 14 aa, Homo sapiens
  CDR3 for beta chain variable domain of TCR clone 103884 (TRBV19, TRBJ2-1)
CASEVTGARNEQFF

SEQ ID NO: 207769 - protein, 14 aa, Homo sapiens
  CDR3 for alpha chain variable domain of TCR clone 103885 (TRAV1-2, TRAJ24)
CAVLTTDSWGKFQF

SEQ ID NO: 207770 - protein, 21 aa, Homo sapiens
  CDR3 for beta chain variable domain of TCR clone 103885 (TRBV6-5, TRBJ1-3)
CASSYWEKIAQGMSSGNTMYF

SEQ ID NO: 207771 - protein, 17 aa, Homo sapiens
  CDR3 for alpha chain variable domain of TCR clone 103886 (TRAV3, TRAJ38)
CAVRYCLNAGNNRKLIW

SEQ ID NO: 207772 - protein, 15 aa, Homo sapiens
  CDR3 for beta chain variable domain of TCR clone 103886 (TRBV27, TRBJ2-1)
CASSNGGGSSNEQFF

SEQ ID NO: 207773 - protein, 23 aa, Homo sapiens
  CDR3 for alpha chain variable domain of TCR clone 103887 (TRAV26-1, )
CIADSAGNNHIQNPDPAVYQLRD

SEQ ID NO: 207774 - protein, 12 aa, Homo sapiens
  CDR3 for beta chain variable domain of TCR clone 103887 (TRBV7-9, TRBJ2-7)
CASSIKREEQYF

SEQ ID NO: 207775 - protein, 12 aa, Homo sapiens
  CDR3 for alpha chain variable domain of TCR clone 103888 (TRAV10, TRAJ43)
CVVGRVGNDMRF

SEQ ID NO: 207776 - protein, 15 aa, Homo sapiens
  CDR3 for beta chain variable domain of TCR clone 103888 (TRBV2, TRBJ2-7)
CASSEGLARSYEQYF

SEQ ID NO: 207777 - protein, 14 aa, Homo sapiens
  CDR3 for alpha chain variable domain of TCR clone 103889 (TRAV16, TRAJ21)
CACGWATTSTNFTF

SEQ ID NO: 207778 - protein, 15 aa, Homo sapiens
  CDR3 for beta chain variable domain of TCR clone 103889 (TRBV19, TRBJ2-1)
CASSIQATSYNEQFF

SEQ ID NO: 207779 - protein, 13 aa, Homo sapiens
  CDR3 for alpha chain variable domain of TCR clone 103890 (TRAV21, TRAJ27)
CAARPGNAGKSTF

SEQ ID NO: 207780 - protein, 16 aa, Homo sapiens
  CDR3 for beta chain variable domain of TCR clone 103890 (TRBV2, TRBJ2-3)
CASSTSVEGVTDTQYF

SEQ ID NO: 207781 - protein, 18 aa, Homo sapiens
  CDR3 for alpha chain variable domain of TCR clone 103891 (TRAV12-3, TRAJ52)
CAMSVGGAGGTSYGKLTF

SEQ ID NO: 207782 - protein, 15 aa, Homo sapiens
  CDR3 for beta chain variable domain of TCR clone 103891 (TRBV11-2, TRBJ2-1)
CVSSKNRGLIYEQFF

SEQ ID NO: 207783 - protein, 14 aa, Homo sapiens
  CDR3 for alpha chain variable domain of TCR clone 103892 (TRAV17, TRAJ26)
CATDASNYGQNFVF

SEQ ID NO: 207784 - protein, 15 aa, Homo sapiens
  CDR3 for beta chain variable domain of TCR clone 103892 (TRBV20-1, TRBJ1-1)
CSASRGVTGNTEAFF

SEQ ID NO: 207785 - protein, 16 aa, Homo sapiens
  CDR3 for alpha chain variable domain of TCR clone 103893 (TRAV30, TRAJ24)
CGTEIVDADRWGKFQF

SEQ ID NO: 207786 - protein, 14 aa, Homo sapiens
  CDR3 for beta chain variable domain of TCR clone 103893 (TRBV13, TRBJ2-1)
CASSPRPRYNEQFF

SEQ ID NO: 207787 - protein, 12 aa, Homo sapiens
  CDR3 for alpha chain variable domain of TCR clone 103894 (TRAV17, TRAJ57)
CATDGGTEKLVF

SEQ ID NO: 207788 - protein, 12 aa, Homo sapiens
  CDR3 for beta chain variable domain of TCR clone 103894 (TRBV29-1, TRBJ2-2)
CSVDKYTGELFF

SEQ ID NO: 207789 - protein, 11 aa, Homo sapiens
  CDR3 for alpha chain variable domain of TCR clone 103895 (TRAV4, TRAJ23)
CLVAPGGKRIF

SEQ ID NO: 207790 - protein, 15 aa, Homo sapiens
  CDR3 for beta chain variable domain of TCR clone 103895 (TRBV7-2, TRBJ2-1)
CASSFQADEYNEQFF

SEQ ID NO: 207791 - protein, 14 aa, Homo sapiens
  CDR3 for alpha chain variable domain of TCR clone 103896 (TRAV17, TRAJ57)
CATDPQGGSEKLVF

SEQ ID NO: 207792 - protein, 14 aa, Homo sapiens
  CDR3 for beta chain variable domain of TCR clone 103896 (TRBV2, TRBJ2-1)
CASSVGRSGNEQFF

SEQ ID NO: 207793 - protein, 13 aa, Homo sapiens
  CDR3 for alpha chain variable domain of TCR clone 103897 (TRAV23/DV6, TRAJ34)
CAAIENNTYKLIF

SEQ ID NO: 207794 - protein, 13 aa, Homo sapiens
  CDR3 for beta chain variable domain of TCR clone 103897 (TRBV29-1, TRBJ2-7)
CSVGPSGGYEQYF

SEQ ID NO: 207795 - protein, 14 aa, Homo sapiens
  CDR3 for alpha chain variable domain of TCR clone 103898 (TRAV26-1, TRAJ11)
CIVPLYSGYSTLTF

SEQ ID NO: 207796 - protein, 15 aa, Homo sapiens
  CDR3 for beta chain variable domain of TCR clone 103898 (TRBV5-1, TRBJ2-7)
CASSLMTSGSNEQYF

SEQ ID NO: 207797 - protein, 17 aa, Homo sapiens
  CDR3 for alpha chain variable domain of TCR clone 103899 (TRAV13-1, TRAJ28)
CAASPPYSGAGSYQLTF

SEQ ID NO: 207798 - protein, 14 aa, Homo sapiens
  CDR3 for beta chain variable domain of TCR clone 103899 (TRBV7-8, TRBJ2-3)
CASSLEAGTDTQYF

SEQ ID NO: 207799 - protein, 16 aa, Homo sapiens
  CDR3 for alpha chain variable domain of TCR clone 103900 (TRAV30, TRAJ24)
CGTEIVDAASWGKFQF

SEQ ID NO: 207800 - protein, 15 aa, Homo sapiens
  CDR3 for beta chain variable domain of TCR clone 103900 (TRBV20-1, TRBJ2-7)
CSARDRVSGMDEQYF

SEQ ID NO: 207801 - protein, 14 aa, Homo sapiens
  CDR3 for alpha chain variable domain of TCR clone 103901 (TRAV1-1, TRAJ27)
CAVIYNTNAGKSTF

SEQ ID NO: 207802 - protein, 17 aa, Homo sapiens
  CDR3 for beta chain variable domain of TCR clone 103901 (TRBV20-1, TRBJ1-5)
CSARVGGERQGNQPQHF

SEQ ID NO: 207803 - protein, 14 aa, Homo sapiens
  CDR3 for alpha chain variable domain of TCR clone 103902 (TRAV1-2, TRAJ16)
CAANRFSDGQKLLF

SEQ ID NO: 207804 - protein, 14 aa, Homo sapiens
  CDR3 for beta chain variable domain of TCR clone 103902 (TRBV20-1, TRBJ2-3)
CSARGGTSTDTQYF

SEQ ID NO: 207805 - protein, 11 aa, Homo sapiens
  CDR3 for alpha chain variable domain of TCR clone 103903 (TRAV2, TRAJ33)
CAVESNYQLIW

SEQ ID NO: 207806 - protein, 14 aa, Homo sapiens
  CDR3 for beta chain variable domain of TCR clone 103903 (TRBV20-1, TRBJ1-1)
CSAQTRIGGTEAFF

SEQ ID NO: 207807 - protein, 15 aa, Homo sapiens
  CDR3 for alpha chain variable domain of TCR clone 103904 (TRAV21, TRAJ52)
CAVRGGGTSYGKLTF

SEQ ID NO: 207808 - protein, 12 aa, Homo sapiens
  CDR3 for beta chain variable domain of TCR clone 103904 (TRBV11-3, TRBJ1-1)
CASSHRQGEAFF

SEQ ID NO: 207809 - protein, 14 aa, Homo sapiens
  CDR3 for alpha chain variable domain of TCR clone 103905 (TRAV17, TRAJ31)
CATDAEDNNARLMF

SEQ ID NO: 207810 - protein, 13 aa, Homo sapiens
  CDR3 for beta chain variable domain of TCR clone 103905 (TRBV20-1, TRBJ2-3)
CSARLAGTDTQYF

SEQ ID NO: 207811 - protein, 16 aa, Homo sapiens
  CDR3 for alpha chain variable domain of TCR clone 103906 (TRAV30, TRAJ24)
CGTEIVDADSWGKFQF

SEQ ID NO: 207812 - protein, 15 aa, Homo sapiens
  CDR3 for beta chain variable domain of TCR clone 103906 (TRBV7-9, TRBJ2-2)
CASGPLDTFPGELFF

SEQ ID NO: 207813 - protein, 13 aa, Homo sapiens
  CDR3 for alpha chain variable domain of TCR clone 103907 (TRAV26-1, TRAJ34)
CLVRPWITDKLIF

SEQ ID NO: 207814 - protein, 14 aa, Homo sapiens
  CDR3 for beta chain variable domain of TCR clone 103907 (TRBV7-2, TRBJ2-7)
CASRSQGAAYEQYF

SEQ ID NO: 207815 - protein, 13 aa, Homo sapiens
  CDR3 for alpha chain variable domain of TCR clone 103908 (TRAV3, TRAJ27)
CAVRPLGAGKSTF

SEQ ID NO: 207816 - protein, 14 aa, Homo sapiens
  CDR3 for beta chain variable domain of TCR clone 103908 (TRBV7-3, TRBJ2-1)
CASSLAGGTNEQFF

SEQ ID NO: 207817 - protein, 14 aa, Homo sapiens
  CDR3 for alpha chain variable domain of TCR clone 103909 (TRAV8-1, TRAJ4)
CAVPFSCGYNKLIF

SEQ ID NO: 207818 - protein, 16 aa, Homo sapiens
  CDR3 for beta chain variable domain of TCR clone 103909 (TRBV6-1, TRBJ1-2)
CASSGAWQGRSHGYTF

SEQ ID NO: 207819 - protein, 12 aa, Homo sapiens
  CDR3 for alpha chain variable domain of TCR clone 103910 (TRAV23/DV6, TRAJ24)
CAANDSWGKLQF

SEQ ID NO: 207820 - protein, 16 aa, Homo sapiens
  CDR3 for beta chain variable domain of TCR clone 103910 (TRBV12-4, TRBJ2-5)
CVSSLSTSGGKETQYF

SEQ ID NO: 207821 - protein, 16 aa, Homo sapiens
  CDR3 for alpha chain variable domain of TCR clone 103911 (TRAV30, TRAJ24)
CGTAIVDADSWGKFQF

SEQ ID NO: 207822 - protein, 16 aa, Homo sapiens
  CDR3 for beta chain variable domain of TCR clone 103911 (TRBV6-3, TRBJ1-1)
CASTDLGTVPNTEAFF

SEQ ID NO: 207823 - protein, 13 aa, Homo sapiens
  CDR3 for alpha chain variable domain of TCR clone 103912 (TRAV35, TRAJ36)
CAGPRIGAINLFF

SEQ ID NO: 207824 - protein, 15 aa, Homo sapiens
  CDR3 for beta chain variable domain of TCR clone 103912 (TRBV28, TRBJ2-5)
CASSPPWSYQETQYF

SEQ ID NO: 207825 - protein, 21 aa, Homo sapiens
  CDR3 for alpha chain variable domain of TCR clone 103913 (TRAV1-1, TRAJ6)
CLLLLRCERLESTGGSYIPTF

SEQ ID NO: 207826 - protein, 13 aa, Homo sapiens
  CDR3 for beta chain variable domain of TCR clone 103913 (TRBV10-2, TRBJ2-7)
CASGASGGYEQYF

SEQ ID NO: 207827 - protein, 14 aa, Homo sapiens
  CDR3 for alpha chain variable domain of TCR clone 103914 (TRAV29/DV5, TRAJ36)
CAARRKTGANNLFF

SEQ ID NO: 207828 - protein, 15 aa, Homo sapiens
  CDR3 for beta chain variable domain of TCR clone 103914 (TRBV5-1, TRBJ1-4)
FAPAAWKDGNEKLFF

SEQ ID NO: 207829 - protein, 15 aa, Homo sapiens
  CDR3 for alpha chain variable domain of TCR clone 103915 (TRAV12-1, TRAJ42)
CVVKTGGGSQGNLIF

SEQ ID NO: 207830 - protein, 14 aa, Homo sapiens
  CDR3 for beta chain variable domain of TCR clone 103915 (TRBV7-9, TRBJ2-3)
CASSLEDGTDTQYF

SEQ ID NO: 207831 - protein, 12 aa, Homo sapiens
  CDR3 for alpha chain variable domain of TCR clone 103916 (TRAV2, TRAJ31)
CAVEDNNARLMF

SEQ ID NO: 207832 - protein, 14 aa, Homo sapiens
  CDR3 for beta chain variable domain of TCR clone 103916 (TRBV7-2, TRBJ2-7)
CASSGLAGRGEQYF

SEQ ID NO: 207833 - protein, 11 aa, Homo sapiens
  CDR3 for alpha chain variable domain of TCR clone 103917 (TRAV29/DV5, TRAJ31)
CAASYRARLMF

SEQ ID NO: 207834 - protein, 19 aa, Homo sapiens
  CDR3 for beta chain variable domain of TCR clone 103917 (TRBV19, TRBJ2-5)
CASSIGQVTDFFLGETQYF

SEQ ID NO: 207835 - protein, 20 aa, Homo sapiens
  CDR3 for alpha chain variable domain of TCR clone 103918 (TRAV1-1, TRAJ4)
CLLLLRCEGFLSGGYNKLIF

SEQ ID NO: 207836 - protein, 16 aa, Homo sapiens
  CDR3 for beta chain variable domain of TCR clone 103918 (TRBV28, TRBJ1-4)
CASSPPYRGRSEKLFV

SEQ ID NO: 207837 - protein, 14 aa, Homo sapiens
  CDR3 for alpha chain variable domain of TCR clone 103919 (TRAV12-3, TRAJ22)
RAMSLFGSARQLTF

SEQ ID NO: 207838 - protein, 14 aa, Homo sapiens
  CDR3 for beta chain variable domain of TCR clone 103919 (TRBV20-1, TRBJ2-7)
CSAPELAGVGEQYF

SEQ ID NO: 207839 - protein, 17 aa, Homo sapiens
  CDR3 for alpha chain variable domain of TCR clone 103920 (TRAV23/DV6, TRAJ58)
CAARLLRGETSGSRLTF

SEQ ID NO: 207840 - protein, 13 aa, Homo sapiens
  CDR3 for beta chain variable domain of TCR clone 103920 (TRBV6-4, TRBJ1-5)
CASGADLNQPQHF

SEQ ID NO: 207841 - protein, 16 aa, Homo sapiens
  CDR3 for alpha chain variable domain of TCR clone 103921 (TRAV12-3, TRAJ53)
CAMSPGSGGSNYKLTF

SEQ ID NO: 207842 - protein, 15 aa, Homo sapiens
  CDR3 for beta chain variable domain of TCR clone 103921 (TRBV28, TRBJ1-4)
CASSRSGTGNEKLFF

SEQ ID NO: 207843 - protein, 15 aa, Homo sapiens
  CDR3 for alpha chain variable domain of TCR clone 103922 (TRAV3, TRAJ4)
CAVRDGTGGYNKLIF

SEQ ID NO: 207844 - protein, 13 aa, Homo sapiens
  CDR3 for beta chain variable domain of TCR clone 103922 (TRBV28, TRBJ2-5)
CAGVSRGEETQYF

SEQ ID NO: 207845 - protein, 13 aa, Homo sapiens
  CDR3 for alpha chain variable domain of TCR clone 103923 (TRAV3, TRAJ27)
CAVRPLGAGKSTF

SEQ ID NO: 207846 - protein, 14 aa, Homo sapiens
  CDR3 for beta chain variable domain of TCR clone 103923 (TRBV25-1, TRBJ1-1)
CASTHLGGNTEASF

SEQ ID NO: 207847 - protein, 14 aa, Homo sapiens
  CDR3 for alpha chain variable domain of TCR clone 103924 (TRAV23/DV6, TRAJ27)
CAASRDTNAGKSTF

SEQ ID NO: 207848 - protein, 13 aa, Homo sapiens
  CDR3 for beta chain variable domain of TCR clone 103924 (TRBV20-1, TRBJ1-5)
CSASGRGDQPQHF

SEQ ID NO: 207849 - protein, 14 aa, Homo sapiens
  CDR3 for alpha chain variable domain of TCR clone 103925 (TRAV12-3, TRAJ11)
CAMTTNSGYSTLTF

SEQ ID NO: 207850 - protein, 18 aa, Homo sapiens
  CDR3 for beta chain variable domain of TCR clone 103925 (TRBV4-1, TRBJ2-7)
CASSQDTGAGSGLNEQYF

SEQ ID NO: 207851 - protein, 11 aa, Homo sapiens
  CDR3 for alpha chain variable domain of TCR clone 103926 (TRAV16, TRAJ31)
CALFNNARLMF

SEQ ID NO: 207852 - protein, 15 aa, Homo sapiens
  CDR3 for beta chain variable domain of TCR clone 103926 (TRBV11-2, TRBJ2-1)
CASSLGTSGLNEQFF

SEQ ID NO: 207853 - protein, 17 aa, Homo sapiens
  CDR3 for alpha chain variable domain of TCR clone 103927 (TRAV3, TRAJ6)
CAVRDGPRAGGSYIPTF

SEQ ID NO: 207854 - protein, 20 aa, Homo sapiens
  CDR3 for beta chain variable domain of TCR clone 103927 (TRBV28, TRBJ2-1)
CATTPIGRSPGLAGGNEQFF

SEQ ID NO: 207855 - protein, 23 aa, Homo sapiens
  CDR3 for alpha chain variable domain of TCR clone 103928 (TRAV26-1, TRAJ38)
CIADNAGNNHIQNPDPAVYQLRD

SEQ ID NO: 207856 - protein, 17 aa, Homo sapiens
  CDR3 for beta chain variable domain of TCR clone 103928 (TRBV11-2, TRBJ2-6)
CASSQRDIVSGANVLTF

SEQ ID NO: 207857 - protein, 14 aa, Homo sapiens
  CDR3 for alpha chain variable domain of TCR clone 103929 (TRAV2, TRAJ21)
CAVEDLNNFNKFYF

SEQ ID NO: 207858 - protein, 11 aa, Homo sapiens
  CDR3 for beta chain variable domain of TCR clone 103929 (TRBV10-3, TRBJ2-1)
CAISDRGMQFF

SEQ ID NO: 207859 - protein, 16 aa, Homo sapiens
  CDR3 for alpha chain variable domain of TCR clone 103930 (TRAV3, TRAJ37)
CAVRGKGSGNTGKLIF

SEQ ID NO: 207860 - protein, 13 aa, Homo sapiens
  CDR3 for beta chain variable domain of TCR clone 103930 (TRBV15, TRBJ2-1)
CVSPAEVDTARFF

SEQ ID NO: 207861 - protein, 15 aa, Homo sapiens
  CDR3 for alpha chain variable domain of TCR clone 103931 (TRAV39, TRAJ42)
CAGVNYGGSQGNLIF

SEQ ID NO: 207862 - protein, 15 aa, Homo sapiens
  CDR3 for beta chain variable domain of TCR clone 103931 (TRBV10-3, TRBJ1-1)
CAISDLGRANTEAFF

SEQ ID NO: 207863 - protein, 17 aa, Homo sapiens
  CDR3 for alpha chain variable domain of TCR clone 103932 (TRAV13-1, TRAJ45)
CAAGAMYSGGGADGLTF

SEQ ID NO: 207864 - protein, 12 aa, Homo sapiens
  CDR3 for beta chain variable domain of TCR clone 103932 (TRBV11-2, TRBJ2-1)
CASSPGNNEQFF

SEQ ID NO: 207865 - protein, 16 aa, Homo sapiens
  CDR3 for alpha chain variable domain of TCR clone 103933 (TRAV3, TRAJ37)
CAVRPHGSGNTGKLIF

SEQ ID NO: 207866 - protein, 17 aa, Homo sapiens
  CDR3 for beta chain variable domain of TCR clone 103933 (TRBV11-1, TRBJ2-3)
CQQLRRWGQGATDTQYF

SEQ ID NO: 207867 - protein, 15 aa, Homo sapiens
  CDR3 for alpha chain variable domain of TCR clone 103934 (TRAV3, TRAJ30)
CAVRDEYGRDYKIIF

SEQ ID NO: 207868 - protein, 16 aa, Homo sapiens
  CDR3 for beta chain variable domain of TCR clone 103934 (TRBV5-1, TRBJ2-5)
CASSLANHRGRETQYF

SEQ ID NO: 207869 - protein, 13 aa, Homo sapiens
  CDR3 for alpha chain variable domain of TCR clone 103935 (TRAV35, TRAJ58)
CAGLETSGSRLTF

SEQ ID NO: 207870 - protein, 15 aa, Homo sapiens
  CDR3 for beta chain variable domain of TCR clone 103935 (TRBV20-1, TRBJ2-1)
CSARFPAGGLNEQFF

SEQ ID NO: 207871 - protein, 14 aa, Homo sapiens
  CDR3 for alpha chain variable domain of TCR clone 103936 (TRAV12-3, TRAJ42)
CEMNYGGSQGNLIF

SEQ ID NO: 207872 - protein, 15 aa, Homo sapiens
  CDR3 for beta chain variable domain of TCR clone 103936 (TRBV5-7, TRBJ1-5)
CASSYGKLWDQPQHF

SEQ ID NO: 207873 - protein, 14 aa, Homo sapiens
  CDR3 for alpha chain variable domain of TCR clone 103937 (TRAV3, TRAJ22)
CDVRDYGSARQLTF

SEQ ID NO: 207874 - protein, 13 aa, Homo sapiens
  CDR3 for beta chain variable domain of TCR clone 103937 (TRBV11-2, TRBJ2-5)
CASGHGAKETQYF

SEQ ID NO: 207875 - protein, 16 aa, Homo sapiens
  CDR3 for alpha chain variable domain of TCR clone 103938 (TRAV12-3, TRAJ53)
CAMSPGSGGSNYKLIF

SEQ ID NO: 207876 - protein, 18 aa, Homo sapiens
  CDR3 for beta chain variable domain of TCR clone 103938 (TRBV7-9, TRBJ2-6)
CASSFPGAGISGANVLTF

SEQ ID NO: 207877 - protein, 15 aa, Homo sapiens
  CDR3 for alpha chain variable domain of TCR clone 103939 (TRAV26-1, TRAJ22)
CIVRVSFWFCKATDL

SEQ ID NO: 207878 - protein, 17 aa, Homo sapiens
  CDR3 for beta chain variable domain of TCR clone 103939 (TRBV7-2, TRBJ2-3)
CASSLEARGTSTDTQYF

SEQ ID NO: 207879 - protein, 16 aa, Homo sapiens
  CDR3 for alpha chain variable domain of TCR clone 103940 (TRAV16, TRAJ4)
CALSRMFSGCYNKLIF

SEQ ID NO: 207880 - protein, 16 aa, Homo sapiens
  CDR3 for beta chain variable domain of TCR clone 103940 (TRBV24-1, TRBJ2-3)
CATSDPGTGAIDTQYF

SEQ ID NO: 207881 - protein, 18 aa, Homo sapiens
  CDR3 for alpha chain variable domain of TCR clone 103941 (TRAV26-1, TRAJ23)
CIVRVGLEVWNQGGKLIL

SEQ ID NO: 207882 - protein, 15 aa, Homo sapiens
  CDR3 for beta chain variable domain of TCR clone 103941 (TRBV9, TRBJ1-6)
CASSVAGTGDSPLHF

SEQ ID NO: 207883 - protein, 15 aa, Homo sapiens
  CDR3 for alpha chain variable domain of TCR clone 103942 (TRAV16, TRAJ16)
CALQGGGSDGKKLLF

SEQ ID NO: 207884 - protein, 15 aa, Homo sapiens
  CDR3 for beta chain variable domain of TCR clone 103942 (TRBV20-1, TRBJ2-7)
CSARDRVSGMDEQYF

SEQ ID NO: 207885 - protein, 10 aa, Homo sapiens
  CDR3 for alpha chain variable domain of TCR clone 103943 (TRAV8-4, TRAJ43)
CAVSADDMRC

SEQ ID NO: 207886 - protein, 11 aa, Homo sapiens
  CDR3 for beta chain variable domain of TCR clone 103943 (TRBV12-4, TRBJ2-3)
CASTATDTQYF

SEQ ID NO: 207887 - protein, 13 aa, Homo sapiens
  CDR3 for alpha chain variable domain of TCR clone 103944 (TRAV23/DV6, TRAJ27)
CAASKPMQANHPL

SEQ ID NO: 207888 - protein, 14 aa, Homo sapiens
  CDR3 for beta chain variable domain of TCR clone 103944 (TRBV5-4, TRBJ1-1)
CASSLDSRRDEAFF

SEQ ID NO: 207889 - protein, 10 aa, Homo sapiens
  CDR3 for alpha chain variable domain of TCR clone 103945 (TRAV12-1, TRAJ37)
ARGNTGKLIF

SEQ ID NO: 207890 - protein, 18 aa, Homo sapiens
  CDR3 for beta chain variable domain of TCR clone 103945 (TRBV12-4, TRBJ2-4)
CASSRTGAVDVAKNIQYF

SEQ ID NO: 207891 - protein, 14 aa, Homo sapiens
  CDR3 for alpha chain variable domain of TCR clone 103946 (TRAV12-1, TRAJ12)
CVVTRMDSSYKLIF

SEQ ID NO: 207892 - protein, 13 aa, Homo sapiens
  CDR3 for beta chain variable domain of TCR clone 103946 (TRBV20-1, TRBJ1-1)
CSARGGGNNEAFF

SEQ ID NO: 207893 - protein, 12 aa, Homo sapiens
  CDR3 for alpha chain variable domain of TCR clone 103947 (TRAV25, TRAJ29)
CAGHSGNTTLVF

SEQ ID NO: 207894 - protein, 14 aa, Homo sapiens
  CDR3 for beta chain variable domain of TCR clone 103947 (TRBV6-1, TRBJ2-7)
CASTRTGDYYEQYF

SEQ ID NO: 207895 - protein, 14 aa, Homo sapiens
  CDR3 for alpha chain variable domain of TCR clone 103948 (TRAV1-2, TRAJ8)
CAVREDTGFQKLVF

SEQ ID NO: 207896 - protein, 15 aa, Homo sapiens
  CDR3 for beta chain variable domain of TCR clone 103948 (TRBV10-2, TRBJ2-6)
CASSGQGTGANVLTF

SEQ ID NO: 207897 - protein, 13 aa, Homo sapiens
  CDR3 for alpha chain variable domain of TCR clone 103949 (TRAV29/DV5, TRAJ29)
CAASAAGKTPLVL

SEQ ID NO: 207898 - protein, 14 aa, Homo sapiens
  CDR3 for beta chain variable domain of TCR clone 103949 (TRBV19, TRBJ2-3)
CASSAPRGTDTQYF

SEQ ID NO: 207899 - protein, 18 aa, Homo sapiens
  CDR3 for alpha chain variable domain of TCR clone 103950 (TRAV26-2, TRAJ54)
CILRDVEVGIQGAQKLVF

SEQ ID NO: 207900 - protein, 15 aa, Homo sapiens
  CDR3 for beta chain variable domain of TCR clone 103950 (TRBV9, TRBJ2-1)
CASSLAGSSYNEQFF

SEQ ID NO: 207901 - protein, 14 aa, Homo sapiens
  CDR3 for alpha chain variable domain of TCR clone 103951 (TRAV20, TRAJ39)
CAVQAGNAGNMLTF

SEQ ID NO: 207902 - protein, 13 aa, Homo sapiens
  CDR3 for beta chain variable domain of TCR clone 103951 (TRBV7-9, TRBJ2-1)
CASSLDVGNEQFF

SEQ ID NO: 207903 - protein, 12 aa, Homo sapiens
  CDR3 for alpha chain variable domain of TCR clone 103952 (TRAV12-3, TRAJ29)
CAARGGNTPLVF

SEQ ID NO: 207904 - protein, 17 aa, Homo sapiens
  CDR3 for beta chain variable domain of TCR clone 103952 (TRBV18, TRBJ2-1)
CASSPLAAGAGDNEQFF

SEQ ID NO: 207905 - protein, 11 aa, Homo sapiens
  CDR3 for alpha chain variable domain of TCR clone 103953 (TRAV35, TRAJ30)
CAGPGDYKIIF

SEQ ID NO: 207906 - protein, 12 aa, Homo sapiens
  CDR3 for beta chain variable domain of TCR clone 103953 (TRBV27, TRBJ2-1)
CASRGFYNEQFF

SEQ ID NO: 207907 - protein, 14 aa, Homo sapiens
  CDR3 for alpha chain variable domain of TCR clone 103954 (TRAV1-2, TRAJ8)
CAVREDTGFQKLVF

SEQ ID NO: 207908 - protein, 15 aa, Homo sapiens
  CDR3 for beta chain variable domain of TCR clone 103954 (TRBV20-1, TRBJ2-5)
CSAPPRTGFGETQYF

SEQ ID NO: 207909 - protein, 18 aa, Homo sapiens
  CDR3 for alpha chain variable domain of TCR clone 103955 (TRAV12-2, TRAJ30)
CAVKMTRSSLEKGHDFIF

SEQ ID NO: 207910 - protein, 15 aa, Homo sapiens
  CDR3 for beta chain variable domain of TCR clone 103955 (TRBV7-3, TRBJ2-3)
CASSLGLTLGDTQYF

SEQ ID NO: 207911 - protein, 13 aa, Homo sapiens
  CDR3 for alpha chain variable domain of TCR clone 103956 (TRAV12-2, TRAJ15)
CAVFNQAGTALIF

SEQ ID NO: 207912 - protein, 15 aa, Homo sapiens
  CDR3 for beta chain variable domain of TCR clone 103956 (TRBV7-8, TRBJ1-5)
CASSRGGVADQPQHF

SEQ ID NO: 207913 - protein, 12 aa, Homo sapiens
  CDR3 for alpha chain variable domain of TCR clone 103957 (TRAV13-1, TRAJ21)
CAAKEGFNKFYF

SEQ ID NO: 207914 - protein, 13 aa, Homo sapiens
  CDR3 for beta chain variable domain of TCR clone 103957 (TRBV27, TRBJ1-4)
CASSLMGDEKLFV

SEQ ID NO: 207915 - protein, 16 aa, Homo sapiens
  CDR3 for alpha chain variable domain of TCR clone 103958 (TRAV3, TRAJ10)
CAVRDGITGGGNKLTF

SEQ ID NO: 207916 - protein, 13 aa, Homo sapiens
  CDR3 for beta chain variable domain of TCR clone 103958 (TRBV28, TRBJ1-1)
CASSKQGWTEAFF

SEQ ID NO: 207917 - protein, 13 aa, Homo sapiens
  CDR3 for alpha chain variable domain of TCR clone 103959 (TRAV13-1, TRAJ39)
CAASIVMQATCAP

SEQ ID NO: 207918 - protein, 16 aa, Homo sapiens
  CDR3 for beta chain variable domain of TCR clone 103959 (TRBV20-1, TRBJ1-4)
CSAPGQGLLTNEKLFF

SEQ ID NO: 207919 - protein, 14 aa, Homo sapiens
  CDR3 for alpha chain variable domain of TCR clone 103960 (TRAV12-2, TRAJ13)
CAVKKTGGYQKVTF

SEQ ID NO: 207920 - protein, 13 aa, Homo sapiens
  CDR3 for beta chain variable domain of TCR clone 103960 (TRBV7-9, TRBJ1-2)
CASSLEQNYGYTF

SEQ ID NO: 207921 - protein, 14 aa, Homo sapiens
  CDR3 for alpha chain variable domain of TCR clone 103961 (TRAV12-3, TRAJ10)
SHVPLTGGGNKLTF

SEQ ID NO: 207922 - protein, 12 aa, Homo sapiens
  CDR3 for beta chain variable domain of TCR clone 103961 (TRBV7-9, TRBJ2-7)
CASSIKREEQYF

SEQ ID NO: 207923 - protein, 23 aa, Homo sapiens
  CDR3 for alpha chain variable domain of TCR clone 103962 (TRAV12-3, TRAJ6)
CAMSEHQEEATYLHLEEEPALLF

SEQ ID NO: 207924 - protein, 11 aa, Homo sapiens
  CDR3 for beta chain variable domain of TCR clone 103962 (TRBV20-1, TRBJ1-5)
CSAQGDQPQHF

SEQ ID NO: 207925 - protein, 14 aa, Homo sapiens
  CDR3 for alpha chain variable domain of TCR clone 103963 (TRAV8-3, TRAJ4)
CAVGASGVYNKLIF

SEQ ID NO: 207926 - protein, 16 aa, Homo sapiens
  CDR3 for beta chain variable domain of TCR clone 103963 (TRBV4-3, TRBJ2-2)
CASSHLQGSGTGELFF

SEQ ID NO: 207927 - protein, 14 aa, Homo sapiens
  CDR3 for alpha chain variable domain of TCR clone 103964 (TRAV2, TRAJ20)
CAVEDGTNDYKLSF

SEQ ID NO: 207928 - protein, 13 aa, Homo sapiens
  CDR3 for beta chain variable domain of TCR clone 103964 (TRBV7-2, TRBJ1-1)
CASSRNTNTEAVF

SEQ ID NO: 207929 - protein, 12 aa, Homo sapiens
  CDR3 for alpha chain variable domain of TCR clone 103965 (TRAV27, TRAJ42)
CAGGGSQGKLIF

SEQ ID NO: 207930 - protein, 13 aa, Homo sapiens
  CDR3 for beta chain variable domain of TCR clone 103965 (TRBV19, TRBJ2-7)
CASSIRSSYEQYF

SEQ ID NO: 207931 - protein, 12 aa, Homo sapiens
  CDR3 for alpha chain variable domain of TCR clone 103966 (TRAV12-3, TRAJ17)
CAMTLTGNKLTF

SEQ ID NO: 207932 - protein, 20 aa, Homo sapiens
  CDR3 for beta chain variable domain of TCR clone 103966 (TRBV7-8, TRBJ2-2)
CASSHLFPGPTIHITGELFL

SEQ ID NO: 207933 - protein, 13 aa, Homo sapiens
  CDR3 for alpha chain variable domain of TCR clone 103967 (TRAV13-2, TRAJ40)
CAETLPGTYKYIF

SEQ ID NO: 207934 - protein, 16 aa, Homo sapiens
  CDR3 for beta chain variable domain of TCR clone 103967 (TRBV20-1, TRBJ2-1)
CSARDFSGRIGDEQFL

SEQ ID NO: 207935 - protein, 12 aa, Homo sapiens
  CDR3 for alpha chain variable domain of TCR clone 103968 (TRAV13-1, TRAJ21)
CAAFSNFNKFYF

SEQ ID NO: 207936 - protein, 14 aa, Homo sapiens
  CDR3 for beta chain variable domain of TCR clone 103968 (TRBV4-1, TRBJ2-7)
CASRLTSGSYEQYF

SEQ ID NO: 207937 - protein, 14 aa, Homo sapiens
  CDR3 for alpha chain variable domain of TCR clone 103969 (TRAV1-2, TRAJ8)
FAVREDTGFQKLVF

SEQ ID NO: 207938 - protein, 14 aa, Homo sapiens
  CDR3 for beta chain variable domain of TCR clone 103969 (TRBV29-1, TRBJ2-3)
CSAGAGVGADTQYF

SEQ ID NO: 207939 - protein, 12 aa, Homo sapiens
  CDR3 for alpha chain variable domain of TCR clone 103970 (TRAV20, TRAJ56)
CAVTGANSKLTF

SEQ ID NO: 207940 - protein, 14 aa, Homo sapiens
  CDR3 for beta chain variable domain of TCR clone 103970 (TRBV20-1, TRBJ2-5)
CSALVPVYQETQYF

SEQ ID NO: 207941 - protein, 13 aa, Homo sapiens
  CDR3 for alpha chain variable domain of TCR clone 103971 (TRAV3, TRAJ43)
CAVKARNNNDMRF

SEQ ID NO: 207942 - protein, 16 aa, Homo sapiens
  CDR3 for beta chain variable domain of TCR clone 103971 (TRBV7-9, TRBJ2-3)
CASSFSVAGGTDTQHF

SEQ ID NO: 207943 - protein, 14 aa, Homo sapiens
  CDR3 for alpha chain variable domain of TCR clone 103972 (TRAV1-2, TRAJ8)
CAVREDTGFRKLVF

SEQ ID NO: 207944 - protein, 14 aa, Homo sapiens
  CDR3 for beta chain variable domain of TCR clone 103972 (TRBV11-2, TRBJ2-3)
CASSRLARTDTQYF

SEQ ID NO: 207945 - protein, 15 aa, Homo sapiens
  CDR3 for alpha chain variable domain of TCR clone 103973 (TRAV8-3, TRAJ45)
CASSYSGGGADGLTF

SEQ ID NO: 207946 - protein, 17 aa, Homo sapiens
  CDR3 for beta chain variable domain of TCR clone 103973 (TRBV4-1, TRBJ2-3)
CASSQVLQGGGTDTQYF

SEQ ID NO: 207947 - protein, 10 aa, Homo sapiens
  CDR3 for alpha chain variable domain of TCR clone 103974 (TRAV23/DV6, TRAJ57)
CAASSSLSQG

SEQ ID NO: 207948 - protein, 14 aa, Homo sapiens
  CDR3 for beta chain variable domain of TCR clone 103974 (TRBV25-1, TRBJ1-1)
CASTHLGGNTEAFF

SEQ ID NO: 207949 - protein, 15 aa, Homo sapiens
  CDR3 for alpha chain variable domain of TCR clone 103975 (TRAV8-6, TRAJ42)
CAVRGRKPRKSHLWK

SEQ ID NO: 207950 - protein, 12 aa, Homo sapiens
  CDR3 for beta chain variable domain of TCR clone 103975 (TRBV14, TRBJ2-5)
CASSQLKETQYF

SEQ ID NO: 207951 - protein, 17 aa, Homo sapiens
  CDR3 for alpha chain variable domain of TCR clone 103976 (TRAV3, TRAJ6)
CAVRDGPRAGGNYIPTF

SEQ ID NO: 207952 - protein, 14 aa, Homo sapiens
  CDR3 for beta chain variable domain of TCR clone 103976 (TRBV7-2, TRBJ2-7)
CASGPKTSFYEQYF

SEQ ID NO: 207953 - protein, 15 aa, Homo sapiens
  CDR3 for alpha chain variable domain of TCR clone 103977 (TRAV23/DV6, TRAJ45)
CAASARGGGADGLTF

SEQ ID NO: 207954 - protein, 15 aa, Homo sapiens
  CDR3 for beta chain variable domain of TCR clone 103977 (TRBV20-1, TRBJ2-7)
CSAESGTSGAYEQYF

SEQ ID NO: 207955 - protein, 18 aa, Homo sapiens
  CDR3 for alpha chain variable domain of TCR clone 103978 (TRAV26-1, TRAJ52)
CIVRVAGAGGTSYGKLTF

SEQ ID NO: 207956 - protein, 12 aa, Homo sapiens
  CDR3 for beta chain variable domain of TCR clone 103978 (TRBV7-9, TRBJ1-4)
CASSTDREKLFF

SEQ ID NO: 207957 - protein, 18 aa, Homo sapiens
  CDR3 for alpha chain variable domain of TCR clone 103979 (TRAV13-1, TRAJ52)
CAASKRSAGGTSYGKLTF

SEQ ID NO: 207958 - protein, 13 aa, Homo sapiens
  CDR3 for beta chain variable domain of TCR clone 103979 (TRBV12-4, TRBJ1-2)
CASSLRQGIGYTF

SEQ ID NO: 207959 - protein, 13 aa, Homo sapiens
  CDR3 for alpha chain variable domain of TCR clone 103980 (TRAV12-2, TRAJ10)
CAVPTGGGNKLTC

SEQ ID NO: 207960 - protein, 11 aa, Homo sapiens
  CDR3 for beta chain variable domain of TCR clone 103980 (TRBV6-1, TRBJ2-1)
CASISSNEQFF

SEQ ID NO: 207961 - protein, 14 aa, Homo sapiens
  CDR3 for alpha chain variable domain of TCR clone 103981 (TRAV12-1, TRAJ17)
CVVNYKAAGNKLTF

SEQ ID NO: 207962 - protein, 16 aa, Homo sapiens
  CDR3 for beta chain variable domain of TCR clone 103981 (TRBV7-6, TRBJ2-7)
CASSPWLDIREDEQYF

SEQ ID NO: 207963 - protein, 14 aa, Homo sapiens
  CDR3 for alpha chain variable domain of TCR clone 103982 (TRAV30, TRAJ50)
CGTALKTSYDKVIF

SEQ ID NO: 207964 - protein, 13 aa, Homo sapiens
  CDR3 for beta chain variable domain of TCR clone 103982 (TRBV6-3, TRBJ1-6)
CASSEGTGPPLHF

SEQ ID NO: 207965 - protein, 12 aa, Homo sapiens
  CDR3 for alpha chain variable domain of TCR clone 103983 (TRAV13-1, TRAJ5)
CAAKAGRRALTF

SEQ ID NO: 207966 - protein, 13 aa, Homo sapiens
  CDR3 for beta chain variable domain of TCR clone 103983 (TRBV7-9, TRBJ1-2)
CASSSKQNYGYTF

SEQ ID NO: 207967 - protein, 17 aa, Homo sapiens
  CDR3 for alpha chain variable domain of TCR clone 103984 (TRAV3, TRAJ6)
CAVRDGPRAGGSYIPTF

SEQ ID NO: 207968 - protein, 16 aa, Homo sapiens
  CDR3 for beta chain variable domain of TCR clone 103984 (TRBV7-2, TRBJ2-5)
CASSLESAGGRETQYF

SEQ ID NO: 207969 - protein, 15 aa, Homo sapiens
  CDR3 for alpha chain variable domain of TCR clone 103985 (TRAV8-2, TRAJ16)
CVVSDGFSDGQKLLF

SEQ ID NO: 207970 - protein, 14 aa, Homo sapiens
  CDR3 for beta chain variable domain of TCR clone 103985 (TRBV7-3, TRBJ1-1)
CASILGTGYTEAFF

SEQ ID NO: 207971 - protein, 12 aa, Homo sapiens
  CDR3 for alpha chain variable domain of TCR clone 103986 (TRAV1-2, TRAJ29)
CAIPSGNTPLVF

SEQ ID NO: 207972 - protein, 12 aa, Homo sapiens
  CDR3 for beta chain variable domain of TCR clone 103986 (TRBV12-4, TRBJ2-7)
CASSLGGYEQYF

SEQ ID NO: 207973 - protein, 12 aa, Homo sapiens
  CDR3 for alpha chain variable domain of TCR clone 103987 (TRAV25, TRAJ29)
CAGHSGNKPLVF

SEQ ID NO: 207974 - protein, 14 aa, Homo sapiens
  CDR3 for beta chain variable domain of TCR clone 103987 (TRBV6-1, TRBJ2-7)
CASTRTGDYYEQYF

SEQ ID NO: 207975 - protein, 14 aa, Homo sapiens
  CDR3 for alpha chain variable domain of TCR clone 103988 (TRAV29/DV5, TRAJ36)
CAARRKTGANNLFF

SEQ ID NO: 207976 - protein, 14 aa, Homo sapiens
  CDR3 for beta chain variable domain of TCR clone 103988 (TRBV12-5, TRBJ2-5)
CASGSRIHQETQYF

SEQ ID NO: 207977 - protein, 15 aa, Homo sapiens
  CDR3 for alpha chain variable domain of TCR clone 103989 (TRAV27, TRAJ38)
CAARRNAGNNRKLIW

SEQ ID NO: 207978 - protein, 15 aa, Homo sapiens
  CDR3 for beta chain variable domain of TCR clone 103989 (TRBV7-9, TRBJ2-2)
CASGPLDTFPGELFF

SEQ ID NO: 207979 - protein, 19 aa, Homo sapiens
  CDR3 for alpha chain variable domain of TCR clone 103990 (TRAV16, )
CALSGDIQNPDPAMYQLRD

SEQ ID NO: 207980 - protein, 16 aa, Homo sapiens
  CDR3 for beta chain variable domain of TCR clone 103990 (TRBV12-5, TRBJ2-5)
CASGPRTSGNQETQYF

SEQ ID NO: 207981 - protein, 13 aa, Homo sapiens
  CDR3 for alpha chain variable domain of TCR clone 103991 (TRAV2, TRAJ40)
CAVVTSGTYKYIF

SEQ ID NO: 207982 - protein, 16 aa, Homo sapiens
  CDR3 for beta chain variable domain of TCR clone 103991 (TRBV7-9, TRBJ1-3)
CASSLGAGSSGNTIYL

SEQ ID NO: 207983 - protein, 12 aa, Homo sapiens
  CDR3 for alpha chain variable domain of TCR clone 103992 (TRAV22, TRAJ29)
CAPPSGNTPLVF

SEQ ID NO: 207984 - protein, 14 aa, Homo sapiens
  CDR3 for beta chain variable domain of TCR clone 103992 (TRBV11-2, TRBJ2-7)
CASSIGAGAYEQYF

SEQ ID NO: 207985 - protein, 16 aa, Homo sapiens
  CDR3 for alpha chain variable domain of TCR clone 103993 (TRAV12-3, TRAJ10)
CAMKKGITGGGNKLTF

SEQ ID NO: 207986 - protein, 12 aa, Homo sapiens
  CDR3 for beta chain variable domain of TCR clone 103993 (TRBV20-1, TRBJ2-7)
CIAITPTKEQYF

SEQ ID NO: 207987 - protein, 16 aa, Homo sapiens
  CDR3 for alpha chain variable domain of TCR clone 103994 (TRAV26-1, TRAJ37)
CIVRGDGSGNTRKLIF

SEQ ID NO: 207988 - protein, 17 aa, Homo sapiens
  CDR3 for beta chain variable domain of TCR clone 103994 (TRBV4-1, TRBJ2-7)
CASSRDPLGVRGGEQYF

SEQ ID NO: 207989 - protein, 19 aa, Homo sapiens
  CDR3 for alpha chain variable domain of TCR clone 103995 (TRAV17, TRAJ17)
CATDGRPGVIKAAGSKLTF

SEQ ID NO: 207990 - protein, 17 aa, Homo sapiens
  CDR3 for beta chain variable domain of TCR clone 103995 (TRBV12-4, TRBJ1-1)
CASSLSGFRTMNTEAFF

SEQ ID NO: 207991 - protein, 14 aa, Homo sapiens
  CDR3 for alpha chain variable domain of TCR clone 103996 (TRAV1-2, TRAJ8)
CAVREDTGFQKLVF

SEQ ID NO: 207992 - protein, 17 aa, Homo sapiens
  CDR3 for beta chain variable domain of TCR clone 103996 (TRBV7-6, TRBJ2-3)
CASSLSTGRVASNTQYF

SEQ ID NO: 207993 - protein, 13 aa, Homo sapiens
  CDR3 for alpha chain variable domain of TCR clone 103997 (TRAV27, TRAJ41)
CAGEGNSGYALNF

SEQ ID NO: 207994 - protein, 17 aa, Homo sapiens
  CDR3 for beta chain variable domain of TCR clone 103997 (TRBV11-3, TRBJ2-3)
CASSPGSSGGRTDTQYF

SEQ ID NO: 207995 - protein, 14 aa, Homo sapiens
  CDR3 for alpha chain variable domain of TCR clone 103998 (TRAV1-2, TRAJ16)
CAVNRFSDGRKLLF

SEQ ID NO: 207996 - protein, 16 aa, Homo sapiens
  CDR3 for beta chain variable domain of TCR clone 103998 (TRBV7-3, TRBJ2-2)
CASSLKRGTLSGELFF

SEQ ID NO: 207997 - protein, 12 aa, Homo sapiens
  CDR3 for alpha chain variable domain of TCR clone 103999 (TRAV21, TRAJ11)
CAATSGYSTLTF

SEQ ID NO: 207998 - protein, 15 aa, Homo sapiens
  CDR3 for beta chain variable domain of TCR clone 103999 (TRBV7-2, TRBJ2-1)
CASSFQADEYNEQFF

SEQ ID NO: 207999 - protein, 15 aa, Homo sapiens
  CDR3 for alpha chain variable domain of TCR clone 104000 (TRAV17, TRAJ56)
CATEPFTGANSNLTF

SEQ ID NO: 208000 - protein, 15 aa, Homo sapiens
  CDR3 for beta chain variable domain of TCR clone 104000 (TRBV28, TRBJ1-5)
CASSRTGGYVQPQHF

SEQ ID NO: 208001 - protein, 13 aa, Homo sapiens
  CDR3 for alpha chain variable domain of TCR clone 104001 (TRAV36/DV7, TRAJ37)
CAVFSSNTGKLIF

SEQ ID NO: 208002 - protein, 14 aa, Homo sapiens
  CDR3 for beta chain variable domain of TCR clone 104001 (TRBV4-2, TRBJ2-1)
CASGLDRAYNEQFF

SEQ ID NO: 208003 - protein, 15 aa, Homo sapiens
  CDR3 for alpha chain variable domain of TCR clone 104002 (TRAV16, TRAJ12)
CSKWPLRDSSYKLIF

SEQ ID NO: 208004 - protein, 15 aa, Homo sapiens
  CDR3 for beta chain variable domain of TCR clone 104002 (TRBV27, TRBJ2-1)
CASSNGGGSSNEQFF

SEQ ID NO: 208005 - protein, 15 aa, Homo sapiens
  CDR3 for alpha chain variable domain of TCR clone 104003 (TRAV23/DV6, TRAJ28)
CAALLAYSVAGSYQL

SEQ ID NO: 208006 - protein, 15 aa, Homo sapiens
  CDR3 for beta chain variable domain of TCR clone 104003 (TRBV7-2, TRBJ2-1)
CASSLVAGRYNEQFF

SEQ ID NO: 208007 - protein, 13 aa, Homo sapiens
  CDR3 for alpha chain variable domain of TCR clone 104004 (TRAV13-2, TRAJ48)
CAEMDFGNEKLTF

SEQ ID NO: 208008 - protein, 17 aa, Homo sapiens
  CDR3 for beta chain variable domain of TCR clone 104004 (TRBV28, TRBJ2-5)
CASSFGGEWGGQETQYF

SEQ ID NO: 208009 - protein, 13 aa, Homo sapiens
  CDR3 for alpha chain variable domain of TCR clone 104005 (TRAV23/DV6, TRAJ58)
CAARLIRGSRFTF

SEQ ID NO: 208010 - protein, 13 aa, Homo sapiens
  CDR3 for beta chain variable domain of TCR clone 104005 (TRBV2, TRBJ1-6)
CADSGSYNSPLHF

SEQ ID NO: 208011 - protein, 11 aa, Homo sapiens
  CDR3 for alpha chain variable domain of TCR clone 104006 (TRAV21, TRAJ31)
CAVRNNARLMF

SEQ ID NO: 208012 - protein, 15 aa, Homo sapiens
  CDR3 for beta chain variable domain of TCR clone 104006 (TRBV11-3, TRBJ2-3)
CASLKDGREGDTQYF

SEQ ID NO: 208013 - protein, 18 aa, Homo sapiens
  CDR3 for alpha chain variable domain of TCR clone 104007 (TRAV13-1, TRAJ52)
CAAKNPNAGGTSYGKLTF

SEQ ID NO: 208014 - protein, 13 aa, Homo sapiens
  CDR3 for beta chain variable domain of TCR clone 104007 (TRBV24-1, TRBJ2-2)
CATSDWSTGELFF

SEQ ID NO: 208015 - protein, 13 aa, Homo sapiens
  CDR3 for alpha chain variable domain of TCR clone 104008 (TRAV13-2, TRAJ8)
CAFMNTGFQKLVF

SEQ ID NO: 208016 - protein, 17 aa, Homo sapiens
  CDR3 for beta chain variable domain of TCR clone 104008 (TRBV28, TRBJ2-1)
CASSSARQALAYNEQFF

SEQ ID NO: 208017 - protein, 11 aa, Homo sapiens
  CDR3 for alpha chain variable domain of TCR clone 104009 (TRAV8-3, TRAJ15)
CAVGPGTARIF

SEQ ID NO: 208018 - protein, 18 aa, Homo sapiens
  CDR3 for beta chain variable domain of TCR clone 104009 (TRBV18, TRBJ2-3)
CASSYTSGAAGGTDTQYF

SEQ ID NO: 208019 - protein, 13 aa, Homo sapiens
  CDR3 for alpha chain variable domain of TCR clone 104010 (TRAV17, TRAJ9)
CVTAITGGFKTIF

SEQ ID NO: 208020 - protein, 16 aa, Homo sapiens
  CDR3 for beta chain variable domain of TCR clone 104010 (TRBV15, TRBJ2-1)
CATSRNLAGGYNEQFF

SEQ ID NO: 208021 - protein, 14 aa, Homo sapiens
  CDR3 for alpha chain variable domain of TCR clone 104011 (TRAV1-2, TRAJ16)
CAVNRFSDGQKLLF

SEQ ID NO: 208022 - protein, 17 aa, Homo sapiens
  CDR3 for beta chain variable domain of TCR clone 104011 (TRBV4-1, TRBJ2-5)
CASSQDLTGGPIETQYF

SEQ ID NO: 208023 - protein, 14 aa, Homo sapiens
  CDR3 for alpha chain variable domain of TCR clone 104012 (TRAV12-1, TRAJ33)
CVVNPEDSKYQLIW

SEQ ID NO: 208024 - protein, 11 aa, Homo sapiens
  CDR3 for beta chain variable domain of TCR clone 104012 (TRBV7-6, TRBJ2-1)
CASSNYGEQFF

SEQ ID NO: 208025 - protein, 13 aa, Homo sapiens
  CDR3 for alpha chain variable domain of TCR clone 104013 (TRAV17, TRAJ15)
CATDARAGTALIF

SEQ ID NO: 208026 - protein, 15 aa, Homo sapiens
  CDR3 for beta chain variable domain of TCR clone 104013 (TRBV20-1, TRBJ2-7)
CSARDRVSRMDEQYF

SEQ ID NO: 208027 - protein, 10 aa, Homo sapiens
  CDR3 for alpha chain variable domain of TCR clone 104014 (TRAV16, TRAJ22)
SAMYLRQLTF

SEQ ID NO: 208028 - protein, 16 aa, Homo sapiens
  CDR3 for beta chain variable domain of TCR clone 104014 (TRBV10-3, TRBJ2-1)
CAISGVGDGGGGEQFF

SEQ ID NO: 208029 - protein, 15 aa, Homo sapiens
  CDR3 for alpha chain variable domain of TCR clone 104015 (TRAV4, TRAJ39)
CLVGPNNNAGNMLTF

SEQ ID NO: 208030 - protein, 13 aa, Homo sapiens
  CDR3 for beta chain variable domain of TCR clone 104015 (TRBV11-2, TRBJ2-5)
WASSSTGEETQYF

SEQ ID NO: 208031 - protein, 16 aa, Homo sapiens
  CDR3 for alpha chain variable domain of TCR clone 104016 (TRAV4, TRAJ22)
CLVGDLYAGSARQLTF

SEQ ID NO: 208032 - protein, 16 aa, Homo sapiens
  CDR3 for beta chain variable domain of TCR clone 104016 (TRBV7-9, TRBJ2-3)
CASSPWREVGTDTQYF

SEQ ID NO: 208033 - protein, 14 aa, Homo sapiens
  CDR3 for alpha chain variable domain of TCR clone 104017 (TRAV12-2, TRAJ13)
CAVTKTGGYQKVIF

SEQ ID NO: 208034 - protein, 15 aa, Homo sapiens
  CDR3 for beta chain variable domain of TCR clone 104017 (TRBV27, TRBJ2-1)
CASSNGGGSSNEQFF

SEQ ID NO: 208035 - protein, 13 aa, Homo sapiens
  CDR3 for alpha chain variable domain of TCR clone 104018 (TRAV17, TRAJ26)
CATVVNYGQNFVF

SEQ ID NO: 208036 - protein, 16 aa, Homo sapiens
  CDR3 for beta chain variable domain of TCR clone 104018 (TRBV2, TRBJ2-1)
CASSVGGSLSYNEQFF

SEQ ID NO: 208037 - protein, 14 aa, Homo sapiens
  CDR3 for alpha chain variable domain of TCR clone 104019 (TRAV16, TRAJ32)
CALKSGGATNKLIF

SEQ ID NO: 208038 - protein, 13 aa, Homo sapiens
  CDR3 for beta chain variable domain of TCR clone 104019 (TRBV12-5, TRBJ2-3)
CASGDRQSDTQYF

SEQ ID NO: 208039 - protein, 14 aa, Homo sapiens
  CDR3 for alpha chain variable domain of TCR clone 104020 (TRAV12-1, TRAJ30)
CVVNIGGRDDRIIF

SEQ ID NO: 208040 - protein, 13 aa, Homo sapiens
  CDR3 for beta chain variable domain of TCR clone 104020 (TRBV12-5, TRBJ2-1)
CASGLGRGNEQFF

SEQ ID NO: 208041 - protein, 13 aa, Homo sapiens
  CDR3 for alpha chain variable domain of TCR clone 104021 (TRAV8-6, TRAJ43)
CAVPGLRNNDMRF

SEQ ID NO: 208042 - protein, 15 aa, Homo sapiens
  CDR3 for beta chain variable domain of TCR clone 104021 (TRBV6-6, TRBJ2-4)
CASSHMGSGKNIQYF

SEQ ID NO: 208043 - protein, 11 aa, Homo sapiens
  CDR3 for alpha chain variable domain of TCR clone 104022 (TRAV2, TRAJ13)
CASGGYQKVTF

SEQ ID NO: 208044 - protein, 12 aa, Homo sapiens
  CDR3 for beta chain variable domain of TCR clone 104022 (TRBV18, TRBJ2-1)
CASSSDEDEQFF

SEQ ID NO: 208045 - protein, 13 aa, Homo sapiens
  CDR3 for alpha chain variable domain of TCR clone 104023 (TRAV13-2, TRAJ48)
CAEMDFGNEKLTF

SEQ ID NO: 208046 - protein, 13 aa, Homo sapiens
  CDR3 for beta chain variable domain of TCR clone 104023 (TRBV7-9, TRBJ1-2)
CTSSLKQNYGYTF

SEQ ID NO: 208047 - protein, 10 aa, Homo sapiens
  CDR3 for alpha chain variable domain of TCR clone 104024 (TRAV1-2, TRAJ20)
CAVTDYKLSF

SEQ ID NO: 208048 - protein, 15 aa, Homo sapiens
  CDR3 for beta chain variable domain of TCR clone 104024 (TRBV4-1, TRBJ1-4)
CASSDTGGTNEKLFF

SEQ ID NO: 208049 - protein, 16 aa, Homo sapiens
  CDR3 for alpha chain variable domain of TCR clone 104025 (TRAV13-1, TRAJ48)
CAASIFGNFGNEKLTF

SEQ ID NO: 208050 - protein, 16 aa, Homo sapiens
  CDR3 for beta chain variable domain of TCR clone 104025 (TRBV7-3, TRBJ2-2)
CASSLKRGTLSGELFF

SEQ ID NO: 208051 - protein, 13 aa, Homo sapiens
  CDR3 for alpha chain variable domain of TCR clone 104026 (TRAV26-1, TRAJ29)
CIVRRSGNTPLVF

SEQ ID NO: 208052 - protein, 16 aa, Homo sapiens
  CDR3 for beta chain variable domain of TCR clone 104026 (TRBV11-2, TRBJ2-7)
CASSLAPTGANYEQYF

SEQ ID NO: 208053 - protein, 16 aa, Homo sapiens
  CDR3 for alpha chain variable domain of TCR clone 104027 (TRAV3, TRAJ21)
CAVRDRSASTNFTLDL

SEQ ID NO: 208054 - protein, 14 aa, Homo sapiens
  CDR3 for beta chain variable domain of TCR clone 104027 (TRBV25-1, TRBJ1-1)
CASTHLGGNTEAFF

SEQ ID NO: 208055 - protein, 14 aa, Homo sapiens
  CDR3 for alpha chain variable domain of TCR clone 104028 (TRAV1-1, TRAJ34)
CAVSPSYNTDNLIF

SEQ ID NO: 208056 - protein, 16 aa, Homo sapiens
  CDR3 for beta chain variable domain of TCR clone 104028 (TRBV19, TRBJ2-1)
CASSSKGTRSYNEQFF

SEQ ID NO: 208057 - protein, 14 aa, Homo sapiens
  CDR3 for alpha chain variable domain of TCR clone 104029 (TRAV4, TRAJ17)
CLVGDMAAGNKLTF

SEQ ID NO: 208058 - protein, 14 aa, Homo sapiens
  CDR3 for beta chain variable domain of TCR clone 104029 (TRBV4-1, TRBJ2-7)
GASSPVAGGDEQYF

SEQ ID NO: 208059 - protein, 15 aa, Homo sapiens
  CDR3 for alpha chain variable domain of TCR clone 104030 (TRAV3, TRAJ3)
CAVRDMSSSASKISF

SEQ ID NO: 208060 - protein, 14 aa, Homo sapiens
  CDR3 for beta chain variable domain of TCR clone 104030 (TRBV19, TRBJ2-1)
CASPTFVLSGEQFF

SEQ ID NO: 208061 - protein, 15 aa, Homo sapiens
  CDR3 for alpha chain variable domain of TCR clone 104031 (TRAV1-2, TRAJ28)
CAVQYSGAGRYQLTF

SEQ ID NO: 208062 - protein, 13 aa, Homo sapiens
  CDR3 for beta chain variable domain of TCR clone 104031 (TRBV20-1, TRBJ2-7)
CSATHTSGYEQYF

SEQ ID NO: 208063 - protein, 13 aa, Homo sapiens
  CDR3 for alpha chain variable domain of TCR clone 104032 (TRAV38-1, TRAJ42)
CARWGGSQGNLIF

SEQ ID NO: 208064 - protein, 14 aa, Homo sapiens
  CDR3 for beta chain variable domain of TCR clone 104032 (TRBV27, TRBJ2-2)
CASSLGAATGELFF

SEQ ID NO: 208065 - protein, 13 aa, Homo sapiens
  CDR3 for alpha chain variable domain of TCR clone 104033 (TRAV23/DV6, TRAJ16)
CAASISAGQKLLF

SEQ ID NO: 208066 - protein, 15 aa, Homo sapiens
  CDR3 for beta chain variable domain of TCR clone 104033 (TRBV2, TRBJ2-2)
CASSRETVGTGELFF

SEQ ID NO: 208067 - protein, 16 aa, Homo sapiens
  CDR3 for alpha chain variable domain of TCR clone 104034 (TRAV3, TRAJ10)
CAGRDMRAGGGNKLTF

SEQ ID NO: 208068 - protein, 15 aa, Homo sapiens
  CDR3 for beta chain variable domain of TCR clone 104034 (TRBV11-2, TRBJ1-6)
CASTGFGTAVSPLHF

SEQ ID NO: 208069 - protein, 14 aa, Homo sapiens
  CDR3 for alpha chain variable domain of TCR clone 104035 (TRAV1-2, TRAJ8)
CAVREDTGFQKLVF

SEQ ID NO: 208070 - protein, 16 aa, Homo sapiens
  CDR3 for beta chain variable domain of TCR clone 104035 (TRBV20-1, TRBJ1-4)
CSAPGQGLLTNENLFF

SEQ ID NO: 208071 - protein, 13 aa, Homo sapiens
  CDR3 for alpha chain variable domain of TCR clone 104036 (TRAV29/DV5, TRAJ48)
CAASSFGNEKLTF

SEQ ID NO: 208072 - protein, 15 aa, Homo sapiens
  CDR3 for beta chain variable domain of TCR clone 104036 (TRBV7-2, TRBJ2-3)
CASSLASARTDTQYF

SEQ ID NO: 208073 - protein, 12 aa, Homo sapiens
  CDR3 for alpha chain variable domain of TCR clone 104037 (TRAV27, TRAJ9)
CAGESGGFKTIF

SEQ ID NO: 208074 - protein, 18 aa, Homo sapiens
  CDR3 for beta chain variable domain of TCR clone 104037 (TRBV10-2, TRBJ2-2)
CISAPAVHRKADAGELFF

SEQ ID NO: 208075 - protein, 15 aa, Homo sapiens
  CDR3 for alpha chain variable domain of TCR clone 104038 (TRAV29/DV5, TRAJ24)
CAASGATDSWGKFQF

SEQ ID NO: 208076 - protein, 15 aa, Homo sapiens
  CDR3 for beta chain variable domain of TCR clone 104038 (TRBV11-3, TRBJ2-3)
CASLKDGREGDTQYF

SEQ ID NO: 208077 - protein, 16 aa, Homo sapiens
  CDR3 for alpha chain variable domain of TCR clone 104039 (TRAV3, TRAJ37)
CALRGKGSGNTGKLIF

SEQ ID NO: 208078 - protein, 16 aa, Homo sapiens
  CDR3 for beta chain variable domain of TCR clone 104039 (TRBV12-5, TRBJ2-5)
CASGPRTSGNQETQYF

SEQ ID NO: 208079 - protein, 16 aa, Homo sapiens
  CDR3 for alpha chain variable domain of TCR clone 104040 (TRAV12-3, TRAJ53)
CAMSPGRGGRNYKLTF

SEQ ID NO: 208080 - protein, 11 aa, Homo sapiens
  CDR3 for beta chain variable domain of TCR clone 104040 (TRBV29-1, TRBJ2-5)
CSEDRTGTQYF

SEQ ID NO: 208081 - protein, 14 aa, Homo sapiens
  CDR3 for alpha chain variable domain of TCR clone 104041 (TRAV1-2, TRAJ16)
CAVNRFSDGQKLLF

SEQ ID NO: 208082 - protein, 18 aa, Homo sapiens
  CDR3 for beta chain variable domain of TCR clone 104041 (TRBV11-2, TRBJ2-3)
CASSVGGASRGAPNTQYF

SEQ ID NO: 208083 - protein, 12 aa, Homo sapiens
  CDR3 for alpha chain variable domain of TCR clone 104042 (TRAV30, TRAJ20)
CGTESNDYKLSF

SEQ ID NO: 208084 - protein, 15 aa, Homo sapiens
  CDR3 for beta chain variable domain of TCR clone 104042 (TRBV9, TRBJ2-7)
CASSAVPSPGYEQYF

SEQ ID NO: 208085 - protein, 13 aa, Homo sapiens
  CDR3 for alpha chain variable domain of TCR clone 104043 (TRAV2, TRAJ40)
CAVVTSGTYKYIF

SEQ ID NO: 208086 - protein, 13 aa, Homo sapiens
  CDR3 for beta chain variable domain of TCR clone 104043 (TRBV12-5, TRBJ2-3)
CASQNRGTDTQYF

SEQ ID NO: 208087 - protein, 16 aa, Homo sapiens
  CDR3 for alpha chain variable domain of TCR clone 104044 (TRAV3, TRAJ37)
CAVRGKGSGNTGKLIF

SEQ ID NO: 208088 - protein, 14 aa, Homo sapiens
  CDR3 for beta chain variable domain of TCR clone 104044 (TRBV7-2, TRBJ2-7)
CASSPKTSFYEQYS

SEQ ID NO: 208089 - protein, 13 aa, Homo sapiens
  CDR3 for alpha chain variable domain of TCR clone 104045 (TRAV12-1, TRAJ6)
CVVFPGGSYIPTF

SEQ ID NO: 208090 - protein, 14 aa, Homo sapiens
  CDR3 for beta chain variable domain of TCR clone 104045 (TRBV20-1, TRBJ1-3)
CSASPTRAGNTIYF

SEQ ID NO: 208091 - protein, 12 aa, Homo sapiens
  CDR3 for alpha chain variable domain of TCR clone 104046 (TRAV13-1, TRAJ21)
CAAKEGFNKFYF

SEQ ID NO: 208092 - protein, 14 aa, Homo sapiens
  CDR3 for beta chain variable domain of TCR clone 104046 (TRBV6-6, TRBJ2-7)
CASSDSGAGYEQYF

SEQ ID NO: 208093 - protein, 14 aa, Homo sapiens
  CDR3 for alpha chain variable domain of TCR clone 104047 (TRAV17, TRAJ12)
CATGEKDSSYKLIF

SEQ ID NO: 208094 - protein, 16 aa, Homo sapiens
  CDR3 for beta chain variable domain of TCR clone 104047 (TRBV11-2, TRBJ2-1)
CASSPRLAGVYNEQFF

SEQ ID NO: 208095 - protein, 13 aa, Homo sapiens
  CDR3 for alpha chain variable domain of TCR clone 104048 (TRAV21, TRAJ15)
CAVANQAGTALIS

SEQ ID NO: 208096 - protein, 13 aa, Homo sapiens
  CDR3 for beta chain variable domain of TCR clone 104048 (TRBV10-3, TRBJ2-7)
CASKLAVNYEQYF

SEQ ID NO: 208097 - protein, 12 aa, Homo sapiens
  CDR3 for alpha chain variable domain of TCR clone 104049 (TRAV12-1, TRAJ40)
CVVPSGTYKYIS

SEQ ID NO: 208098 - protein, 15 aa, Homo sapiens
  CDR3 for beta chain variable domain of TCR clone 104049 (TRBV12-4, TRBJ2-1)
CAGSPLSGRNSEQFF

SEQ ID NO: 208099 - protein, 14 aa, Homo sapiens
  CDR3 for alpha chain variable domain of TCR clone 104050 (TRAV13-1, TRAJ35)
CSASKGGFGNVLHC

SEQ ID NO: 208100 - protein, 13 aa, Homo sapiens
  CDR3 for beta chain variable domain of TCR clone 104050 (TRBV7-3, TRBJ1-1)
CASSQDWGAEAFF

SEQ ID NO: 208101 - protein, 17 aa, Homo sapiens
  CDR3 for alpha chain variable domain of TCR clone 104051 (TRAV8-3, TRAJ34)
CAIPGKLIFGPGTSLQV

SEQ ID NO: 208102 - protein, 15 aa, Homo sapiens
  CDR3 for beta chain variable domain of TCR clone 104051 (TRBV5-7, TRBJ2-1)
CASSRRLAGDNEQFF

SEQ ID NO: 208103 - protein, 17 aa, Homo sapiens
  CDR3 for alpha chain variable domain of TCR clone 104052 (TRAV3, TRAJ42)
CAVRDREYGGSQGNLIF

SEQ ID NO: 208104 - protein, 20 aa, Homo sapiens
  CDR3 for beta chain variable domain of TCR clone 104052 (TRBV28, TRBJ2-1)
CASTPIGRSPGLAGGNEQFF

SEQ ID NO: 208105 - protein, 15 aa, Homo sapiens
  CDR3 for alpha chain variable domain of TCR clone 104053 (TRAV3, TRAJ47)
CSVRDIGEYGNKLVF

SEQ ID NO: 208106 - protein, 14 aa, Homo sapiens
  CDR3 for beta chain variable domain of TCR clone 104053 (TRBV13, TRBJ2-5)
CASSLERVGETQYF

SEQ ID NO: 208107 - protein, 14 aa, Homo sapiens
  CDR3 for alpha chain variable domain of TCR clone 104054 (TRAV38-2/DV8, TRAJ30)
CAYMDGLGGDKVIF

SEQ ID NO: 208108 - protein, 15 aa, Homo sapiens
  CDR3 for beta chain variable domain of TCR clone 104054 (TRBV7-9, TRBJ2-2)
CASRPADRDTGELFF

SEQ ID NO: 208109 - protein, 12 aa, Homo sapiens
  CDR3 for alpha chain variable domain of TCR clone 104055 (TRAV27, TRAJ42)
CAGAGSQGNLIF

SEQ ID NO: 208110 - protein, 14 aa, Homo sapiens
  CDR3 for beta chain variable domain of TCR clone 104055 (TRBV2, TRBJ2-3)
CASSEGQNTDTQYF

SEQ ID NO: 208111 - protein, 14 aa, Homo sapiens
  CDR3 for alpha chain variable domain of TCR clone 104056 (TRAV1-2, TRAJ16)
CAVNRFSDGQKLLF

SEQ ID NO: 208112 - protein, 15 aa, Homo sapiens
  CDR3 for beta chain variable domain of TCR clone 104056 (TRBV7-9, TRBJ1-6)
CSSSSPGRGNSPLHF

SEQ ID NO: 208113 - protein, 14 aa, Homo sapiens
  CDR3 for alpha chain variable domain of TCR clone 104057 (TRAV1-2, TRAJ8)
CAVREDTGFQKLVF

SEQ ID NO: 208114 - protein, 12 aa, Homo sapiens
  CDR3 for beta chain variable domain of TCR clone 104057 (TRBV27, TRBJ2-2)
CASKLFTGELFS

SEQ ID NO: 208115 - protein, 11 aa, Homo sapiens
  CDR3 for alpha chain variable domain of TCR clone 104058 (TRAV1-2, TRAJ20)
CAVANDYKLSF

SEQ ID NO: 208116 - protein, 13 aa, Homo sapiens
  CDR3 for beta chain variable domain of TCR clone 104058 (TRBV7-3, TRBJ1-1)
CASSQEWGAEAFF

SEQ ID NO: 208117 - protein, 15 aa, Homo sapiens
  CDR3 for alpha chain variable domain of TCR clone 104059 (TRAV17, TRAJ37)
CATDHGSSNTGKLIF

SEQ ID NO: 208118 - protein, 16 aa, Homo sapiens
  CDR3 for beta chain variable domain of TCR clone 104059 (TRBV6-1, TRBJ2-5)
CASSETLDRGAETQYF

SEQ ID NO: 208119 - protein, 11 aa, Homo sapiens
  CDR3 for alpha chain variable domain of TCR clone 104060 (TRAV35, TRAJ30)
CAGPGDDKIIF

SEQ ID NO: 208120 - protein, 14 aa, Homo sapiens
  CDR3 for beta chain variable domain of TCR clone 104060 (TRBV7-2, TRBJ2-7)
CASSLPPGQGPQYF

SEQ ID NO: 208121 - protein, 13 aa, Homo sapiens
  CDR3 for alpha chain variable domain of TCR clone 104061 (TRAV8-3, TRAJ4)
WVFYSGGHNKLIF

SEQ ID NO: 208122 - protein, 15 aa, Homo sapiens
  CDR3 for beta chain variable domain of TCR clone 104061 (TRBV11-2, TRBJ1-2)
CASSLEGVQRNDYTF

SEQ ID NO: 208123 - protein, 18 aa, Homo sapiens
  CDR3 for alpha chain variable domain of TCR clone 104062 (TRAV1-2, TRAJ18)
CAVRDMGERGSTLGRLYF

SEQ ID NO: 208124 - protein, 16 aa, Homo sapiens
  CDR3 for beta chain variable domain of TCR clone 104062 (TRBV29-1, TRBJ1-2)
CSVEANRDIANYGYTF

SEQ ID NO: 208125 - protein, 12 aa, Homo sapiens
  CDR3 for alpha chain variable domain of TCR clone 104063 (TRAV13-2, TRAJ23)
CAERPRGGKLIF

SEQ ID NO: 208126 - protein, 16 aa, Homo sapiens
  CDR3 for beta chain variable domain of TCR clone 104063 (TRBV7-9, TRBJ1-2)
CASSLGFSSGEDGYTF

SEQ ID NO: 208127 - protein, 10 aa, Homo sapiens
  CDR3 for alpha chain variable domain of TCR clone 104064 (TRAV17, TRAJ36)
CATVAGNLFF

SEQ ID NO: 208128 - protein, 14 aa, Homo sapiens
  CDR3 for beta chain variable domain of TCR clone 104064 (TRBV19, TRBJ2-1)
CASPTFVLSGEQFF

SEQ ID NO: 208129 - protein, 14 aa, Homo sapiens
  CDR3 for alpha chain variable domain of TCR clone 104065 (TRAV8-3, TRAJ4)
CALGAAGGYNKLIF

SEQ ID NO: 208130 - protein, 15 aa, Homo sapiens
  CDR3 for beta chain variable domain of TCR clone 104065 (TRBV6-5, TRBJ2-1)
CASSYDAGAGNEQFF

SEQ ID NO: 208131 - protein, 10 aa, Homo sapiens
  CDR3 for alpha chain variable domain of TCR clone 104066 (TRAV5, TRAJ34)
CAEDTDKLIF

SEQ ID NO: 208132 - protein, 12 aa, Homo sapiens
  CDR3 for beta chain variable domain of TCR clone 104066 (TRBV11-2, TRBJ2-2)
CASSLGGGVLFF

SEQ ID NO: 208133 - protein, 16 aa, Homo sapiens
  CDR3 for alpha chain variable domain of TCR clone 104067 (TRAV30, TRAJ24)
CGTEIVDDDRWGKFQF

SEQ ID NO: 208134 - protein, 14 aa, Homo sapiens
  CDR3 for beta chain variable domain of TCR clone 104067 (TRBV12-5, TRBJ2-5)
CASGSRTHQETQYF

SEQ ID NO: 208135 - protein, 12 aa, Homo sapiens
  CDR3 for alpha chain variable domain of TCR clone 104068 (TRAV13-2, TRAJ31)
CAESYNNARLMF

SEQ ID NO: 208136 - protein, 18 aa, Homo sapiens
  CDR3 for beta chain variable domain of TCR clone 104068 (TRBV18, TRBJ1-3)
CASSPRGGAGPSGNTIYF

SEQ ID NO: 208137 - protein, 16 aa, Homo sapiens
  CDR3 for alpha chain variable domain of TCR clone 104069 (TRAV30, TRAJ24)
CGTEIVDADSWGTSQF

SEQ ID NO: 208138 - protein, 14 aa, Homo sapiens
  CDR3 for beta chain variable domain of TCR clone 104069 (TRBV12-5, TRBJ2-5)
CASGSRTHQETQYF

SEQ ID NO: 208139 - protein, 15 aa, Homo sapiens
  CDR3 for alpha chain variable domain of TCR clone 104070 (TRAV20, TRAJ43)
CAVQAGKSSNNDMRF

SEQ ID NO: 208140 - protein, 13 aa, Homo sapiens
  CDR3 for beta chain variable domain of TCR clone 104070 (TRBV27, TRBJ1-1)
CASSLSIGAEDFF

SEQ ID NO: 208141 - protein, 11 aa, Homo sapiens
  CDR3 for alpha chain variable domain of TCR clone 104071 (TRAV21, TRAJ34)
CAVTNTDKLIF

SEQ ID NO: 208142 - protein, 19 aa, Homo sapiens
  CDR3 for beta chain variable domain of TCR clone 104071 (TRBV7-2, TRBJ2-3)
WASSFLSRNWGGGTDTQYF

SEQ ID NO: 208143 - protein, 16 aa, Homo sapiens
  CDR3 for alpha chain variable domain of TCR clone 104072 (TRAV30, TRAJ24)
CGTEIVDADSWVKCQF

SEQ ID NO: 208144 - protein, 14 aa, Homo sapiens
  CDR3 for beta chain variable domain of TCR clone 104072 (TRBV12-5, TRBJ2-5)
CASGSRTHQETQYF

SEQ ID NO: 208145 - protein, 14 aa, Homo sapiens
  CDR3 for alpha chain variable domain of TCR clone 104073 (TRAV1-2, TRAJ8)
CAVREDTGFQKLVF

SEQ ID NO: 208146 - protein, 15 aa, Homo sapiens
  CDR3 for beta chain variable domain of TCR clone 104073 (TRBV10-2, TRBJ2-6)
CASSEQGTGANGLTF

SEQ ID NO: 208147 - protein, 14 aa, Homo sapiens
  CDR3 for alpha chain variable domain of TCR clone 104074 (TRAV1-2, TRAJ16)
CAVNRFSYGQKLLF

SEQ ID NO: 208148 - protein, 14 aa, Homo sapiens
  CDR3 for beta chain variable domain of TCR clone 104074 (TRBV19, TRBJ2-2)
CASSTLHRSGELFF

SEQ ID NO: 208149 - protein, 14 aa, Homo sapiens
  CDR3 for alpha chain variable domain of TCR clone 104075 (TRAV12-2, TRAJ40)
CAVKIPSGTYKYIF

SEQ ID NO: 208150 - protein, 15 aa, Homo sapiens
  CDR3 for beta chain variable domain of TCR clone 104075 (TRBV7-9, TRBJ2-2)
CASGPLDTFPGELFF

SEQ ID NO: 208151 - protein, 13 aa, Homo sapiens
  CDR3 for alpha chain variable domain of TCR clone 104076 (TRAV12-1, TRAJ26)
SATYLYYVQNFVF

SEQ ID NO: 208152 - protein, 15 aa, Homo sapiens
  CDR3 for beta chain variable domain of TCR clone 104076 (TRBV5-1, TRBJ2-6)
CASSLDPSGANVLTF

SEQ ID NO: 208153 - protein, 13 aa, Homo sapiens
  CDR3 for alpha chain variable domain of TCR clone 104077 (TRAV13-1, TRAJ12)
CAASPDSSYKLIF

SEQ ID NO: 208154 - protein, 15 aa, Homo sapiens
  CDR3 for beta chain variable domain of TCR clone 104077 (TRBV18, TRBJ2-1)
CASSPPSASYNEQFF

SEQ ID NO: 208155 - protein, 13 aa, Homo sapiens
  CDR3 for alpha chain variable domain of TCR clone 104078 (TRAV27, TRAJ29)
CAGAHSGNTPLVF

SEQ ID NO: 208156 - protein, 15 aa, Homo sapiens
  CDR3 for beta chain variable domain of TCR clone 104078 (TRBV12-4, TRBJ2-7)
CASSLGSGGPYEQYF

SEQ ID NO: 208157 - protein, 14 aa, Homo sapiens
  CDR3 for alpha chain variable domain of TCR clone 104079 (TRAV35, TRAJ33)
CAGSSQDSNYQLIW

SEQ ID NO: 208158 - protein, 14 aa, Homo sapiens
  CDR3 for beta chain variable domain of TCR clone 104079 (TRBV7-8, TRBJ2-3)
CASSLEAGTDTQYF

SEQ ID NO: 208159 - protein, 13 aa, Homo sapiens
  CDR3 for alpha chain variable domain of TCR clone 104080 (TRAV13-2, TRAJ5)
CAVMDTGRRALNF

SEQ ID NO: 208160 - protein, 12 aa, Homo sapiens
  CDR3 for beta chain variable domain of TCR clone 104080 (TRBV28, TRBJ2-7)
CASSFSSYEQYF

SEQ ID NO: 208161 - protein, 11 aa, Homo sapiens
  CDR3 for alpha chain variable domain of TCR clone 104081 (TRAV23/DV6, TRAJ47)
CAAGYGNKLVF

SEQ ID NO: 208162 - protein, 14 aa, Homo sapiens
  CDR3 for beta chain variable domain of TCR clone 104081 (TRBV7-2, TRBJ2-7)
CASRSQGAAYEQYF

SEQ ID NO: 208163 - protein, 15 aa, Homo sapiens
  CDR3 for alpha chain variable domain of TCR clone 104082 (TRAV12-3, TRAJ6)
CAMSATSGGGYIPTF

SEQ ID NO: 208164 - protein, 11 aa, Homo sapiens
  CDR3 for beta chain variable domain of TCR clone 104082 (TRBV20-1, TRBJ1-5)
CSAQGDQPQHF

SEQ ID NO: 208165 - protein, 14 aa, Homo sapiens
  CDR3 for alpha chain variable domain of TCR clone 104083 (TRAV12-1, TRAJ3)
CVVSGYSSASKVIF

SEQ ID NO: 208166 - protein, 14 aa, Homo sapiens
  CDR3 for beta chain variable domain of TCR clone 104083 (TRBV6-6, TRBJ1-3)
CASSRQGSGNTIYF

SEQ ID NO: 208167 - protein, 14 aa, Homo sapiens
  CDR3 for alpha chain variable domain of TCR clone 104084 (TRAV4, TRAJ9)
CLVGSGTGGFKTIF

SEQ ID NO: 208168 - protein, 15 aa, Homo sapiens
  CDR3 for beta chain variable domain of TCR clone 104084 (TRBV7-2, TRBJ2-1)
RASSLASGRVNEQFF

SEQ ID NO: 208169 - protein, 14 aa, Homo sapiens
  CDR3 for alpha chain variable domain of TCR clone 104085 (TRAV35, TRAJ33)
CAGSSQDINYQLIW

SEQ ID NO: 208170 - protein, 15 aa, Homo sapiens
  CDR3 for beta chain variable domain of TCR clone 104085 (TRBV5-1, TRBJ1-4)
FAPAAWKDGNEKLFF

SEQ ID NO: 208171 - protein, 15 aa, Homo sapiens
  CDR3 for alpha chain variable domain of TCR clone 104086 (TRAV38-1, TRAJ37)
CAFIFGSGNTGKLIF

SEQ ID NO: 208172 - protein, 14 aa, Homo sapiens
  CDR3 for beta chain variable domain of TCR clone 104086 (TRBV7-2, TRBJ2-7)
CASSLYPGRYEQYF

SEQ ID NO: 208173 - protein, 12 aa, Homo sapiens
  CDR3 for alpha chain variable domain of TCR clone 104087 (TRAV17, TRAJ12)
CATLRSSYKLIF

SEQ ID NO: 208174 - protein, 16 aa, Homo sapiens
  CDR3 for beta chain variable domain of TCR clone 104087 (TRBV28, TRBJ2-7)
CASSLFFETGGPEQYF

SEQ ID NO: 208175 - protein, 14 aa, Homo sapiens
  CDR3 for alpha chain variable domain of TCR clone 104088 (TRAV38-1, TRAJ40)
CALRPTLGTYKYIF

SEQ ID NO: 208176 - protein, 14 aa, Homo sapiens
  CDR3 for beta chain variable domain of TCR clone 104088 (TRBV5-4, TRBJ1-1)
CASSLDSRRDEAFF

SEQ ID NO: 208177 - protein, 15 aa, Homo sapiens
  CDR3 for alpha chain variable domain of TCR clone 104089 (TRAV38-1, TRAJ37)
CAFIFGSGSTGKLIF

SEQ ID NO: 208178 - protein, 12 aa, Homo sapiens
  CDR3 for beta chain variable domain of TCR clone 104089 (TRBV7-9, TRBJ2-7)
CASSLEGYEQYF

SEQ ID NO: 208179 - protein, 12 aa, Homo sapiens
  CDR3 for alpha chain variable domain of TCR clone 104090 (TRAV12-1, TRAJ40)
CVVYSGTYKDIF

SEQ ID NO: 208180 - protein, 14 aa, Homo sapiens
  CDR3 for beta chain variable domain of TCR clone 104090 (TRBV7-9, TRBJ2-5)
CASSLDTAQETQYF

SEQ ID NO: 208181 - protein, 12 aa, Homo sapiens
  CDR3 for alpha chain variable domain of TCR clone 104091 (TRAV2, TRAJ33)
CAVWGSNYQLIC

SEQ ID NO: 208182 - protein, 16 aa, Homo sapiens
  CDR3 for beta chain variable domain of TCR clone 104091 (TRBV20-1, TRBJ1-4)
CSAPGQGLLTNEKLFF

SEQ ID NO: 208183 - protein, 12 aa, Homo sapiens
  CDR3 for alpha chain variable domain of TCR clone 104092 (TRAV1-1, TRAJ39)
CAVPVVGNMLTF

SEQ ID NO: 208184 - protein, 15 aa, Homo sapiens
  CDR3 for beta chain variable domain of TCR clone 104092 (TRBV4-1, TRBJ1-4)
CASSDTGGTNEKLFF

SEQ ID NO: 208185 - protein, 17 aa, Homo sapiens
  CDR3 for alpha chain variable domain of TCR clone 104093 (TRAV26-1, TRAJ53)
CIVRVDDSGGSNYKLTF

SEQ ID NO: 208186 - protein, 14 aa, Homo sapiens
  CDR3 for beta chain variable domain of TCR clone 104093 (TRBV2, TRBJ2-3)
CAVGGTISTDTQYF

SEQ ID NO: 208187 - protein, 15 aa, Homo sapiens
  CDR3 for alpha chain variable domain of TCR clone 104094 (TRAV12-1, TRAJ41)
CVVNPGVNSGYALNF

SEQ ID NO: 208188 - protein, 11 aa, Homo sapiens
  CDR3 for beta chain variable domain of TCR clone 104094 (TRBV28, TRBJ2-7)
CASGPLPEQYF

SEQ ID NO: 208189 - protein, 14 aa, Homo sapiens
  CDR3 for alpha chain variable domain of TCR clone 104095 (TRAV1-2, TRAJ16)
CAVNRFSDGQKLLF

SEQ ID NO: 208190 - protein, 13 aa, Homo sapiens
  CDR3 for beta chain variable domain of TCR clone 104095 (TRBV24-1, TRBJ2-2)
RATSDWSTGELFF

SEQ ID NO: 208191 - protein, 13 aa, Homo sapiens
  CDR3 for alpha chain variable domain of TCR clone 104096 (TRAV26-1, TRAJ34)
CIVRPWITDKLIF

SEQ ID NO: 208192 - protein, 13 aa, Homo sapiens
  CDR3 for beta chain variable domain of TCR clone 104096 (TRBV5-1, TRBJ2-1)
CASSLGSYKEQFF

SEQ ID NO: 208193 - protein, 14 aa, Homo sapiens
  CDR3 for alpha chain variable domain of TCR clone 104097 (TRAV1-2, TRAJ12)
CAVSGTDSSYKLIF

SEQ ID NO: 208194 - protein, 15 aa, Homo sapiens
  CDR3 for beta chain variable domain of TCR clone 104097 (TRBV2, TRBJ2-4)
CASSGTNLAKNNQYF

SEQ ID NO: 208195 - protein, 13 aa, Homo sapiens
  CDR3 for alpha chain variable domain of TCR clone 104098 (TRAV3, TRAJ4)
CDVRDGGYNKLIF

SEQ ID NO: 208196 - protein, 15 aa, Homo sapiens
  CDR3 for beta chain variable domain of TCR clone 104098 (TRBV5-1, TRBJ2-1)
CASSPPRAPHNEQFF

SEQ ID NO: 208197 - protein, 15 aa, Homo sapiens
  CDR3 for alpha chain variable domain of TCR clone 104099 (TRAV17, TRAJ23)
CATDAEDNQGGKLIF

SEQ ID NO: 208198 - protein, 12 aa, Homo sapiens
  CDR3 for beta chain variable domain of TCR clone 104099 (TRBV2, TRBJ2-1)
CAKREGYNEQFI

SEQ ID NO: 208199 - protein, 14 aa, Homo sapiens
  CDR3 for alpha chain variable domain of TCR clone 104100 (TRAV12-2, TRAJ33)
CAVKRARSNYQLIW

SEQ ID NO: 208200 - protein, 11 aa, Homo sapiens
  CDR3 for beta chain variable domain of TCR clone 104100 (TRBV20-1, TRBJ2-7)
CSARTSYEQYF

SEQ ID NO: 208201 - protein, 13 aa, Homo sapiens
  CDR3 for alpha chain variable domain of TCR clone 104101 (TRAV13-2, TRAJ8)
CALMNTGFQKLVF

SEQ ID NO: 208202 - protein, 15 aa, Homo sapiens
  CDR3 for beta chain variable domain of TCR clone 104101 (TRBV19, TRBJ2-3)
CAAGDTNAPNDTQYF

SEQ ID NO: 208203 - protein, 13 aa, Homo sapiens
  CDR3 for alpha chain variable domain of TCR clone 104102 (TRAV12-1, TRAJ37)
CVVSSGNTGKLIF

SEQ ID NO: 208204 - protein, 12 aa, Homo sapiens
  CDR3 for beta chain variable domain of TCR clone 104102 (TRBV18, TRBJ2-7)
CASSLDSYEQYF

SEQ ID NO: 208205 - protein, 16 aa, Homo sapiens
  CDR3 for alpha chain variable domain of TCR clone 104103 (TRAV13-1, TRAJ22)
CAAKGGRSGSARQLTF

SEQ ID NO: 208206 - protein, 15 aa, Homo sapiens
  CDR3 for beta chain variable domain of TCR clone 104103 (TRBV9, TRBJ1-6)
CASSVAGTGDSSLHF

SEQ ID NO: 208207 - protein, 14 aa, Homo sapiens
  CDR3 for alpha chain variable domain of TCR clone 104104 (TRAV8-2, TRAJ4)
CVVSPSGGYNKLIF

SEQ ID NO: 208208 - protein, 17 aa, Homo sapiens
  CDR3 for beta chain variable domain of TCR clone 104104 (TRBV4-2, TRBJ2-2)
CASSPRTSGGSAGELFF

SEQ ID NO: 208209 - protein, 13 aa, Homo sapiens
  CDR3 for alpha chain variable domain of TCR clone 104105 (TRAV1-2, TRAJ9)
CAVLNTGGFKTIF

SEQ ID NO: 208210 - protein, 14 aa, Homo sapiens
  CDR3 for beta chain variable domain of TCR clone 104105 (TRBV6-1, TRBJ1-3)
CASVQGGGGNTIYF

SEQ ID NO: 208211 - protein, 14 aa, Homo sapiens
  CDR3 for alpha chain variable domain of TCR clone 104106 (TRAV29/DV5, TRAJ49)
CAASLSNTGNQVYF

SEQ ID NO: 208212 - protein, 15 aa, Homo sapiens
  CDR3 for beta chain variable domain of TCR clone 104106 (TRBV20-1, TRBJ2-1)
CSARGIGGTYNEQFF

SEQ ID NO: 208213 - protein, 13 aa, Homo sapiens
  CDR3 for alpha chain variable domain of TCR clone 104107 (TRAV38-1, TRAJ42)
CARWGGSQGNLIF

SEQ ID NO: 208214 - protein, 15 aa, Homo sapiens
  CDR3 for beta chain variable domain of TCR clone 104107 (TRBV6-5, TRBJ1-2)
CASSYSQAFNYGYTF

SEQ ID NO: 208215 - protein, 16 aa, Homo sapiens
  CDR3 for alpha chain variable domain of TCR clone 104108 (TRAV12-2, TRAJ32)
CAVNLGQGGATNKLIF

SEQ ID NO: 208216 - protein, 15 aa, Homo sapiens
  CDR3 for beta chain variable domain of TCR clone 104108 (TRBV20-1, TRBJ2-7)
CSARGTLAGGREQYF

SEQ ID NO: 208217 - protein, 14 aa, Homo sapiens
  CDR3 for alpha chain variable domain of TCR clone 104109 (TRAV8-1, TRAJ5)
CAVRTDTGRRALTF

SEQ ID NO: 208218 - protein, 14 aa, Homo sapiens
  CDR3 for beta chain variable domain of TCR clone 104109 (TRBV7-8, TRBJ2-3)
CASSFPGGQDTQYF

SEQ ID NO: 208219 - protein, 11 aa, Homo sapiens
  CDR3 for alpha chain variable domain of TCR clone 104110 (TRAV12-1, TRAJ26)
CVVAYGQNFVF

SEQ ID NO: 208220 - protein, 15 aa, Homo sapiens
  CDR3 for beta chain variable domain of TCR clone 104110 (TRBV12-4, TRBJ2-5)
CASSGTGQAQETRYF

SEQ ID NO: 208221 - protein, 16 aa, Homo sapiens
  CDR3 for alpha chain variable domain of TCR clone 104111 (TRAV21, TRAJ58)
CAVRGDRETSGSRLTF

SEQ ID NO: 208222 - protein, 12 aa, Homo sapiens
  CDR3 for beta chain variable domain of TCR clone 104111 (TRBV19, TRBJ2-3)
CASAGGAGTQYF

SEQ ID NO: 208223 - protein, 17 aa, Homo sapiens
  CDR3 for alpha chain variable domain of TCR clone 104112 (TRAV8-1, TRAJ43)
CAVTNDMRFGAGTRLTV

SEQ ID NO: 208224 - protein, 12 aa, Homo sapiens
  CDR3 for beta chain variable domain of TCR clone 104112 (TRBV29-1, TRBJ2-3)
CSVTGGADTQYF

SEQ ID NO: 208225 - protein, 11 aa, Homo sapiens
  CDR3 for alpha chain variable domain of TCR clone 104113 (TRAV13-1, TRAJ39)
CASHAGNMLTF

SEQ ID NO: 208226 - protein, 15 aa, Homo sapiens
  CDR3 for beta chain variable domain of TCR clone 104113 (TRBV10-2, TRBJ2-6)
CASSEQGTGANVLTF

SEQ ID NO: 208227 - protein, 12 aa, Homo sapiens
  CDR3 for alpha chain variable domain of TCR clone 104114 (TRAV12-3, TRAJ17)
CAMTLTGNKLTF

SEQ ID NO: 208228 - protein, 14 aa, Homo sapiens
  CDR3 for beta chain variable domain of TCR clone 104114 (TRBV20-1, TRBJ2-5)
CSARLLAGVETQYF

SEQ ID NO: 208229 - protein, 13 aa, Homo sapiens
  CDR3 for alpha chain variable domain of TCR clone 104115 (TRAV12-2, TRAJ39)
CAVNNNEGNMLTF

SEQ ID NO: 208230 - protein, 13 aa, Homo sapiens
  CDR3 for beta chain variable domain of TCR clone 104115 (TRBV2, TRBJ1-5)
CATAGPGNQPQHF

SEQ ID NO: 208231 - protein, 18 aa, Homo sapiens
  CDR3 for alpha chain variable domain of TCR clone 104116 (TRAV26-1, TRAJ22)
CIVRVSFWFCKATDLLIW

SEQ ID NO: 208232 - protein, 13 aa, Homo sapiens
  CDR3 for beta chain variable domain of TCR clone 104116 (TRBV7-9, TRBJ1-2)
CASSLKQNYGYSF

SEQ ID NO: 208233 - protein, 15 aa, Homo sapiens
  CDR3 for alpha chain variable domain of TCR clone 104117 (TRAV21, TRAJ24)
CAARSSTDSWGKLQF

SEQ ID NO: 208234 - protein, 15 aa, Homo sapiens
  CDR3 for beta chain variable domain of TCR clone 104117 (TRBV6-3, TRBJ2-7)
CASSSPGTVFYEQYF

SEQ ID NO: 208235 - protein, 16 aa, Homo sapiens
  CDR3 for alpha chain variable domain of TCR clone 104118 (TRAV12-1, TRAJ22)
CVVNLFLDRSARQLTF

SEQ ID NO: 208236 - protein, 15 aa, Homo sapiens
  CDR3 for beta chain variable domain of TCR clone 104118 (TRBV6-4, TRBJ2-7)
CASSDSIRGYDEQYF

SEQ ID NO: 208237 - protein, 13 aa, Homo sapiens
  CDR3 for alpha chain variable domain of TCR clone 104119 (TRAV35, TRAJ42)
CAGFPGSQGNLIF

SEQ ID NO: 208238 - protein, 16 aa, Homo sapiens
  CDR3 for beta chain variable domain of TCR clone 104119 (TRBV4-1, TRBJ2-7)
CASSQEWTSGPLEQYF

SEQ ID NO: 208239 - protein, 14 aa, Homo sapiens
  CDR3 for alpha chain variable domain of TCR clone 104120 (TRAV27, TRAJ23)
CAGLSYNQGGKLIF

SEQ ID NO: 208240 - protein, 15 aa, Homo sapiens
  CDR3 for beta chain variable domain of TCR clone 104120 (TRBV19, TRBJ2-2)
RASSLNRGVTGELFF

SEQ ID NO: 208241 - protein, 12 aa, Homo sapiens
  CDR3 for alpha chain variable domain of TCR clone 104121 (TRAV20, TRAJ39)
CAVGNAGNMLTF

SEQ ID NO: 208242 - protein, 17 aa, Homo sapiens
  CDR3 for beta chain variable domain of TCR clone 104121 (TRBV15, TRBJ1-2)
CATSGREIDVVNYGYTF

SEQ ID NO: 208243 - protein, 11 aa, Homo sapiens
  CDR3 for alpha chain variable domain of TCR clone 104122 (TRAV12-1, TRAJ26)
CVVAYGQNFVF

SEQ ID NO: 208244 - protein, 15 aa, Homo sapiens
  CDR3 for beta chain variable domain of TCR clone 104122 (TRBV12-4, TRBJ2-1)
CQQFRASGGPDEQFF

SEQ ID NO: 208245 - protein, 13 aa, Homo sapiens
  CDR3 for alpha chain variable domain of TCR clone 104123 (TRAV4, TRAJ27)
CLVGDPGAGKSTF

SEQ ID NO: 208246 - protein, 14 aa, Homo sapiens
  CDR3 for beta chain variable domain of TCR clone 104123 (TRBV7-2, TRBJ2-7)
CASSPKTSFYEQYF

SEQ ID NO: 208247 - protein, 16 aa, Homo sapiens
  CDR3 for alpha chain variable domain of TCR clone 104124 (TRAV26-1, TRAJ37)
CIVRGDGSGNTGKLIF

SEQ ID NO: 208248 - protein, 17 aa, Homo sapiens
  CDR3 for beta chain variable domain of TCR clone 104124 (TRBV4-1, TRBJ2-7)
CASSRDTLGVRGGEQYF

SEQ ID NO: 208249 - protein, 15 aa, Homo sapiens
  CDR3 for alpha chain variable domain of TCR clone 104125 (TRAV8-3, TRAJ45)
CASSYSGGGADGLNF

SEQ ID NO: 208250 - protein, 16 aa, Homo sapiens
  CDR3 for beta chain variable domain of TCR clone 104125 (TRBV20-1, TRBJ2-2)
CSASASGIPGAGELFF

SEQ ID NO: 208251 - protein, 12 aa, Homo sapiens
  CDR3 for alpha chain variable domain of TCR clone 104126 (TRAV13-1, TRAJ42)
VNYGGSQGNLVF

SEQ ID NO: 208252 - protein, 15 aa, Homo sapiens
  CDR3 for beta chain variable domain of TCR clone 104126 (TRBV20-1, TRBJ2-1)
CSASSAGSSYNEQFF

SEQ ID NO: 208253 - protein, 14 aa, Homo sapiens
  CDR3 for alpha chain variable domain of TCR clone 104127 (TRAV1-2, TRAJ8)
CAVREDTGFQKLVF

SEQ ID NO: 208254 - protein, 14 aa, Homo sapiens
  CDR3 for beta chain variable domain of TCR clone 104127 (TRBV6-1, TRBJ1-3)
RASVQGGGGNTIYF

SEQ ID NO: 208255 - protein, 14 aa, Homo sapiens
  CDR3 for alpha chain variable domain of TCR clone 104128 (TRAV21, TRAJ45)
CAVSSGGGADGLTF

SEQ ID NO: 208256 - protein, 12 aa, Homo sapiens
  CDR3 for beta chain variable domain of TCR clone 104128 (TRBV27, TRBJ2-2)
CASKLFTGELFF

SEQ ID NO: 208257 - protein, 11 aa, Homo sapiens
  CDR3 for alpha chain variable domain of TCR clone 104129 (TRAV2, TRAJ20)
CAVSDDYKLSF

SEQ ID NO: 208258 - protein, 14 aa, Homo sapiens
  CDR3 for beta chain variable domain of TCR clone 104129 (TRBV7-9, TRBJ2-1)
CASSIRQGWDEQFF

SEQ ID NO: 208259 - protein, 15 aa, Homo sapiens
  CDR3 for alpha chain variable domain of TCR clone 104130 (TRAV26-1, TRAJ29)
CIVRVEGSGNTPLVF

SEQ ID NO: 208260 - protein, 12 aa, Homo sapiens
  CDR3 for beta chain variable domain of TCR clone 104130 (TRBV7-8, TRBJ1-1)
CASSSLGGEAFF

SEQ ID NO: 208261 - protein, 13 aa, Homo sapiens
  CDR3 for alpha chain variable domain of TCR clone 104131 (TRAV12-3, TRAJ33)
CAMSVNSNYQLIW

SEQ ID NO: 208262 - protein, 14 aa, Homo sapiens
  CDR3 for beta chain variable domain of TCR clone 104131 (TRBV9, TRBJ2-4)
CASSPSGTSGFQYF

SEQ ID NO: 208263 - protein, 15 aa, Homo sapiens
  CDR3 for alpha chain variable domain of TCR clone 104132 (TRAV3, TRAJ17)
CAVSPKAAAGNKLTF

SEQ ID NO: 208264 - protein, 14 aa, Homo sapiens
  CDR3 for beta chain variable domain of TCR clone 104132 (TRBV5-1, TRBJ2-3)
CASSLFGPTDTQYF

SEQ ID NO: 208265 - protein, 16 aa, Homo sapiens
  CDR3 for alpha chain variable domain of TCR clone 104133 (TRAV27, TRAJ13)
CAGAKSDSGGYQKVTF

SEQ ID NO: 208266 - protein, 15 aa, Homo sapiens
  CDR3 for beta chain variable domain of TCR clone 104133 (TRBV29-1, TRBJ2-1)
CSVGRNALFYNEQFF

SEQ ID NO: 208267 - protein, 14 aa, Homo sapiens
  CDR3 for alpha chain variable domain of TCR clone 104134 (TRAV1-2, TRAJ16)
CAGNRFSDGQKLLF

SEQ ID NO: 208268 - protein, 11 aa, Homo sapiens
  CDR3 for beta chain variable domain of TCR clone 104134 (TRBV29-1, TRBJ2-5)
CSEDRTGTQYF

SEQ ID NO: 208269 - protein, 14 aa, Homo sapiens
  CDR3 for alpha chain variable domain of TCR clone 104135 (TRAV1-2, TRAJ8)
CAVREDTGFQKLEF

SEQ ID NO: 208270 - protein, 12 aa, Homo sapiens
  CDR3 for beta chain variable domain of TCR clone 104135 (TRBV29-1, TRBJ2-3)
CSVTGGADTQYF

SEQ ID NO: 208271 - protein, 13 aa, Homo sapiens
  CDR3 for alpha chain variable domain of TCR clone 104136 (TRAV17, TRAJ40)
CATAPGGTSKYIF

SEQ ID NO: 208272 - protein, 12 aa, Homo sapiens
  CDR3 for beta chain variable domain of TCR clone 104136 (TRBV2, TRBJ1-5)
CASSENRTPQHF

SEQ ID NO: 208273 - protein, 19 aa, Homo sapiens
  CDR3 for alpha chain variable domain of TCR clone 104137 (TRAV25, TRAJ20)
TATQTTDVGTLPHDYKLSF

SEQ ID NO: 208274 - protein, 17 aa, Homo sapiens
  CDR3 for beta chain variable domain of TCR clone 104137 (TRBV4-3, TRBJ2-1)
CASSQFSSGRASGEQFF

SEQ ID NO: 208275 - protein, 16 aa, Homo sapiens
  CDR3 for alpha chain variable domain of TCR clone 104138 (TRAV16, TRAJ52)
YALSAAGGTSYGKLTF

SEQ ID NO: 208276 - protein, 12 aa, Homo sapiens
  CDR3 for beta chain variable domain of TCR clone 104138 (TRBV12-4, TRBJ1-3)
CASSFSGNTIYF

SEQ ID NO: 208277 - protein, 14 aa, Homo sapiens
  CDR3 for alpha chain variable domain of TCR clone 104139 (TRAV1-2, TRAJ16)
CAVNRFSDGQTLLF

SEQ ID NO: 208278 - protein, 13 aa, Homo sapiens
  CDR3 for beta chain variable domain of TCR clone 104139 (TRBV10-3, TRBJ2-7)
CASKLAVNYEQYF

SEQ ID NO: 208279 - protein, 15 aa, Homo sapiens
  CDR3 for alpha chain variable domain of TCR clone 104140 (TRAV26-1, TRAJ56)
CIVRVATGANSKLTF

SEQ ID NO: 208280 - protein, 14 aa, Homo sapiens
  CDR3 for beta chain variable domain of TCR clone 104140 (TRBV6-1, TRBJ1-3)
CASVQGGGGNTIYF

SEQ ID NO: 208281 - protein, 10 aa, Homo sapiens
  CDR3 for alpha chain variable domain of TCR clone 104141 (TRAV3, TRAJ30)
CAVREIEIIF

SEQ ID NO: 208282 - protein, 15 aa, Homo sapiens
  CDR3 for beta chain variable domain of TCR clone 104141 (TRBV9, TRBJ1-6)
CASSVAGTGDSPLHF

SEQ ID NO: 208283 - protein, 15 aa, Homo sapiens
  CDR3 for alpha chain variable domain of TCR clone 104142 (TRAV27, TRAJ39)
ASTSAQENAGNMLTF

SEQ ID NO: 208284 - protein, 14 aa, Homo sapiens
  CDR3 for beta chain variable domain of TCR clone 104142 (TRBV15, TRBJ2-7)
CATSPDRGLYEQYF

SEQ ID NO: 208285 - protein, 15 aa, Homo sapiens
  CDR3 for alpha chain variable domain of TCR clone 104143 (TRAV27, TRAJ38)
CAARRNAGNNRKLIW

SEQ ID NO: 208286 - protein, 14 aa, Homo sapiens
  CDR3 for beta chain variable domain of TCR clone 104143 (TRBV13, TRBJ2-5)
CASSLGPRGETQYF

SEQ ID NO: 208287 - protein, 14 aa, Homo sapiens
  CDR3 for alpha chain variable domain of TCR clone 104144 (TRAV12-3, TRAJ57)
CAMSAGGGSEKLVF

SEQ ID NO: 208288 - protein, 14 aa, Homo sapiens
  CDR3 for beta chain variable domain of TCR clone 104144 (TRBV18, TRBJ2-5)
CASSPGVSQETQYF

SEQ ID NO: 208289 - protein, 12 aa, Homo sapiens
  CDR3 for alpha chain variable domain of TCR clone 104145 (TRAV13-1, TRAJ21)
CAAKEGFNRFYF

SEQ ID NO: 208290 - protein, 15 aa, Homo sapiens
  CDR3 for beta chain variable domain of TCR clone 104145 (TRBV25-1, TRBJ1-4)
CASSPGDSTNEELFF

SEQ ID NO: 208291 - protein, 12 aa, Homo sapiens
  CDR3 for alpha chain variable domain of TCR clone 104146 (TRAV13-1, TRAJ20)
CAASRGDYKLSF

SEQ ID NO: 208292 - protein, 15 aa, Homo sapiens
  CDR3 for beta chain variable domain of TCR clone 104146 (TRBV6-3, TRBJ2-3)
RLIHYSVGQADTQYF

SEQ ID NO: 208293 - protein, 12 aa, Homo sapiens
  CDR3 for alpha chain variable domain of TCR clone 104147 (TRAV21, TRAJ31)
CAVSTARGRLMF

SEQ ID NO: 208294 - protein, 14 aa, Homo sapiens
  CDR3 for beta chain variable domain of TCR clone 104147 (TRBV28, TRBJ2-7)
CASSLLRISYEQYF

SEQ ID NO: 208295 - protein, 11 aa, Homo sapiens
  CDR3 for alpha chain variable domain of TCR clone 104148 (TRAV1-2, TRAJ20)
CAVANDYKLSF

SEQ ID NO: 208296 - protein, 18 aa, Homo sapiens
  CDR3 for beta chain variable domain of TCR clone 104148 (TRBV20-1, TRBJ2-6)
CSAERTPTHGSGANVLTF

SEQ ID NO: 208297 - protein, 17 aa, Homo sapiens
  CDR3 for alpha chain variable domain of TCR clone 104149 (TRAV13-1, TRAJ52)
CAAGRNAGGTSYGKLTF

SEQ ID NO: 208298 - protein, 12 aa, Homo sapiens
  CDR3 for beta chain variable domain of TCR clone 104149 (TRBV19, TRBJ1-5)
CASSIAQQPQHF

SEQ ID NO: 208299 - protein, 13 aa, Homo sapiens
  CDR3 for alpha chain variable domain of TCR clone 104150 (TRAV36/DV7, TRAJ37)
CAVFSSNTGKLIF

SEQ ID NO: 208300 - protein, 15 aa, Homo sapiens
  CDR3 for beta chain variable domain of TCR clone 104150 (TRBV7-9, TRBJ1-6)
CASSSPGRGNSPLHF

SEQ ID NO: 208301 - protein, 15 aa, Homo sapiens
  CDR3 for alpha chain variable domain of TCR clone 104151 (TRAV36/DV7, TRAJ53)
CAVEGSGGSNYKLTF

SEQ ID NO: 208302 - protein, 13 aa, Homo sapiens
  CDR3 for beta chain variable domain of TCR clone 104151 (TRBV28, TRBJ2-5)
CAGVSRGEETQYF

SEQ ID NO: 208303 - protein, 14 aa, Homo sapiens
  CDR3 for alpha chain variable domain of TCR clone 104152 (TRAV8-2, TRAJ11)
CVVSEKSGYSTLTF

SEQ ID NO: 208304 - protein, 16 aa, Homo sapiens
  CDR3 for beta chain variable domain of TCR clone 104152 (TRBV28, TRBJ2-1)
CASSSPEYPRDNDQFF

SEQ ID NO: 208305 - protein, 16 aa, Homo sapiens
  CDR3 for alpha chain variable domain of TCR clone 104153 (TRAV30, TRAJ24)
CGTEIVDADRWGKFQF

SEQ ID NO: 208306 - protein, 15 aa, Homo sapiens
  CDR3 for beta chain variable domain of TCR clone 104153 (TRBV20-1, TRBJ2-7)
CSARDRVSGMDEQYF

SEQ ID NO: 208307 - protein, 13 aa, Homo sapiens
  CDR3 for alpha chain variable domain of TCR clone 104154 (TRAV1-1, TRAJ9)
CAAKNTGGFKTIF

SEQ ID NO: 208308 - protein, 13 aa, Homo sapiens
  CDR3 for beta chain variable domain of TCR clone 104154 (TRBV7-9, TRBJ1-2)
CASSLKRNYGYTF

SEQ ID NO: 208309 - protein, 13 aa, Homo sapiens
  CDR3 for alpha chain variable domain of TCR clone 104155 (TRAV1-2, TRAJ9)
CVALNTGGFKTIF

SEQ ID NO: 208310 - protein, 13 aa, Homo sapiens
  CDR3 for beta chain variable domain of TCR clone 104155 (TRBV11-2, TRBJ1-2)
CASSLDSPSGYTF

SEQ ID NO: 208311 - protein, 13 aa, Homo sapiens
  CDR3 for alpha chain variable domain of TCR clone 104156 (TRAV8-6, TRAJ49)
CAVITITGNQFYF

SEQ ID NO: 208312 - protein, 14 aa, Homo sapiens
  CDR3 for beta chain variable domain of TCR clone 104156 (TRBV5-1, TRBJ2-7)
CASSRGESLYEQYF

SEQ ID NO: 208313 - protein, 14 aa, Homo sapiens
  CDR3 for alpha chain variable domain of TCR clone 104157 (TRAV26-1, TRAJ39)
CIVRGSRAGNMLPF

SEQ ID NO: 208314 - protein, 15 aa, Homo sapiens
  CDR3 for beta chain variable domain of TCR clone 104157 (TRBV7-9, TRBJ1-5)
CASSQGHQPKQPQHF

SEQ ID NO: 208315 - protein, 13 aa, Homo sapiens
  CDR3 for alpha chain variable domain of TCR clone 104158 (TRAV12-2, TRAJ20)
CAVYPSNDYKLSF

SEQ ID NO: 208316 - protein, 14 aa, Homo sapiens
  CDR3 for beta chain variable domain of TCR clone 104158 (TRBV18, TRBJ2-5)
CASSPGVSQETQYF

SEQ ID NO: 208317 - protein, 15 aa, Homo sapiens
  CDR3 for alpha chain variable domain of TCR clone 104159 (TRAV4, TRAJ26)
CLVGDMNNYGQNFVF

SEQ ID NO: 208318 - protein, 16 aa, Homo sapiens
  CDR3 for beta chain variable domain of TCR clone 104159 (TRBV28, TRBJ1-4)
CASSSRAGAANEKLFF

SEQ ID NO: 208319 - protein, 13 aa, Homo sapiens
  CDR3 for alpha chain variable domain of TCR clone 104160 (TRAV36/DV7, TRAJ7)
CSGTRYGNNRLAF

SEQ ID NO: 208320 - protein, 14 aa, Homo sapiens
  CDR3 for beta chain variable domain of TCR clone 104160 (TRBV19, TRBJ2-1)
CASPTFVLSGEQFF

SEQ ID NO: 208321 - protein, 17 aa, Homo sapiens
  CDR3 for alpha chain variable domain of TCR clone 104161 (TRAV16, TRAJ58)
CITVLSNGETSGSRLTF

SEQ ID NO: 208322 - protein, 17 aa, Homo sapiens
  CDR3 for beta chain variable domain of TCR clone 104161 (TRBV18, TRBJ2-1)
RASSKGLSGGADNEQFF

SEQ ID NO: 208323 - protein, 16 aa, Homo sapiens
  CDR3 for alpha chain variable domain of TCR clone 104162 (TRAV12-2, TRAJ33)
CAVSPASMDSNYQLIW

SEQ ID NO: 208324 - protein, 17 aa, Homo sapiens
  CDR3 for beta chain variable domain of TCR clone 104162 (TRBV2, TRBJ1-4)
CASSKRELTQGEEKLFF

SEQ ID NO: 208325 - protein, 16 aa, Homo sapiens
  CDR3 for alpha chain variable domain of TCR clone 104163 (TRAV26-1, TRAJ31)
CIVRPPVLNNNARLMF

SEQ ID NO: 208326 - protein, 15 aa, Homo sapiens
  CDR3 for beta chain variable domain of TCR clone 104163 (TRBV12-4, TRBJ2-5)
CASSLGGQGRETQYF

SEQ ID NO: 208327 - protein, 14 aa, Homo sapiens
  CDR3 for alpha chain variable domain of TCR clone 104164 (TRAV8-3, TRAJ39)
CAVGANNAGNMLTF

SEQ ID NO: 208328 - protein, 12 aa, Homo sapiens
  CDR3 for beta chain variable domain of TCR clone 104164 (TRBV5-5, TRBJ2-5)
CASSYFGETQYF

SEQ ID NO: 208329 - protein, 15 aa, Homo sapiens
  CDR3 for alpha chain variable domain of TCR clone 104165 (TRAV3, TRAJ5)
CAVRDRKTGRRALSF

SEQ ID NO: 208330 - protein, 15 aa, Homo sapiens
  CDR3 for beta chain variable domain of TCR clone 104165 (TRBV7-8, TRBJ2-1)
CASSLADSLYNEQFF

SEQ ID NO: 208331 - protein, 12 aa, Homo sapiens
  CDR3 for alpha chain variable domain of TCR clone 104166 (TRAV12-3, TRAJ17)
CAMTLTGNKLTF

SEQ ID NO: 208332 - protein, 13 aa, Homo sapiens
  CDR3 for beta chain variable domain of TCR clone 104166 (TRBV11-3, TRBJ2-3)
CASSHDTKDTQYF

SEQ ID NO: 208333 - protein, 14 aa, Homo sapiens
  CDR3 for alpha chain variable domain of TCR clone 104167 (TRAV12-2, TRAJ24)
CAVIPADSWGKLQF

SEQ ID NO: 208334 - protein, 16 aa, Homo sapiens
  CDR3 for beta chain variable domain of TCR clone 104167 (TRBV6-4, TRBJ2-3)
APSEGGRAWGTDTQYF

SEQ ID NO: 208335 - protein, 16 aa, Homo sapiens
  CDR3 for alpha chain variable domain of TCR clone 104168 (TRAV12-2, TRAJ10)
CAVNRVLTGGGSKLTF

SEQ ID NO: 208336 - protein, 12 aa, Homo sapiens
  CDR3 for beta chain variable domain of TCR clone 104168 (TRBV28, TRBJ2-7)
CASSFSSYEQYF

SEQ ID NO: 208337 - protein, 13 aa, Homo sapiens
  CDR3 for alpha chain variable domain of TCR clone 104169 (TRAV12-2, TRAJ40)
CAVKRTGTYKYIF

SEQ ID NO: 208338 - protein, 16 aa, Homo sapiens
  CDR3 for beta chain variable domain of TCR clone 104169 (TRBV7-3, TRBJ2-2)
CASSLKRGTLSGELFF

SEQ ID NO: 208339 - protein, 11 aa, Homo sapiens
  CDR3 for alpha chain variable domain of TCR clone 104170 (TRAV12-1, TRAJ26)
CVVAYGQNFFF

SEQ ID NO: 208340 - protein, 15 aa, Homo sapiens
  CDR3 for beta chain variable domain of TCR clone 104170 (TRBV12-4, TRBJ2-5)
CASSGTGQAQETQYF

SEQ ID NO: 208341 - protein, 13 aa, Homo sapiens
  CDR3 for alpha chain variable domain of TCR clone 104171 (TRAV27, TRAJ42)
CAGARGSQGNLIF

SEQ ID NO: 208342 - protein, 15 aa, Homo sapiens
  CDR3 for beta chain variable domain of TCR clone 104171 (TRBV10-3, TRBJ2-2)
CAIRTYREDTGELFF

SEQ ID NO: 208343 - protein, 16 aa, Homo sapiens
  CDR3 for alpha chain variable domain of TCR clone 104172 (TRAV26-1, TRAJ48)
IASSDLSNFGNENLTF

SEQ ID NO: 208344 - protein, 14 aa, Homo sapiens
  CDR3 for beta chain variable domain of TCR clone 104172 (TRBV13, TRBJ2-7)
CASSLKGASYEQYF

SEQ ID NO: 208345 - protein, 13 aa, Homo sapiens
  CDR3 for alpha chain variable domain of TCR clone 104173 (TRAV2, TRAJ40)
CAVVTSGTYKYIF

SEQ ID NO: 208346 - protein, 14 aa, Homo sapiens
  CDR3 for beta chain variable domain of TCR clone 104173 (TRBV19, TRBJ2-1)
CAGPTFVLSGEQYF

SEQ ID NO: 208347 - protein, 17 aa, Homo sapiens
  CDR3 for alpha chain variable domain of TCR clone 104174 (TRAV3, TRAJ38)
CAVRDCLTAGNNRKLIW

SEQ ID NO: 208348 - protein, 14 aa, Homo sapiens
  CDR3 for beta chain variable domain of TCR clone 104174 (TRBV5-5, TRBJ1-5)
CASSGQGVDQPQHF

SEQ ID NO: 208349 - protein, 12 aa, Homo sapiens
  CDR3 for alpha chain variable domain of TCR clone 104175 (TRAV29/DV5, TRAJ26)
CAAIPSGQNFVF

SEQ ID NO: 208350 - protein, 15 aa, Homo sapiens
  CDR3 for beta chain variable domain of TCR clone 104175 (TRBV19, TRBJ1-5)
CASSGSGPRNQPQHF

SEQ ID NO: 208351 - protein, 15 aa, Homo sapiens
  CDR3 for alpha chain variable domain of TCR clone 104176 (TRAV17, TRAJ57)
CATGPSQGGSEKLVF

SEQ ID NO: 208352 - protein, 15 aa, Homo sapiens
  CDR3 for beta chain variable domain of TCR clone 104176 (TRBV5-1, TRBJ2-3)
CASSYTSGSTDTQYF

SEQ ID NO: 208353 - protein, 15 aa, Homo sapiens
  CDR3 for alpha chain variable domain of TCR clone 104177 (TRAV3, TRAJ45)
FAVRTPWGGADGLTF

SEQ ID NO: 208354 - protein, 16 aa, Homo sapiens
  CDR3 for beta chain variable domain of TCR clone 104177 (TRBV6-1, TRBJ2-2)
CASSFGQGANTGELFF

SEQ ID NO: 208355 - protein, 16 aa, Homo sapiens
  CDR3 for alpha chain variable domain of TCR clone 104178 (TRAV3, TRAJ37)
CAVRGRGSGNTGKLIF

SEQ ID NO: 208356 - protein, 15 aa, Homo sapiens
  CDR3 for beta chain variable domain of TCR clone 104178 (TRBV7-3, TRBJ2-1)
CASSLSSGSFDEQFF

SEQ ID NO: 208357 - protein, 13 aa, Homo sapiens
  CDR3 for alpha chain variable domain of TCR clone 104179 (TRAV38-2/DV8, TRAJ34)
CAYRNYNTDKLIF

SEQ ID NO: 208358 - protein, 15 aa, Homo sapiens
  CDR3 for beta chain variable domain of TCR clone 104179 (TRBV20-1, TRBJ2-5)
CSAERTGGLQETQYF

SEQ ID NO: 208359 - protein, 16 aa, Homo sapiens
  CDR3 for alpha chain variable domain of TCR clone 104180 (TRAV3, TRAJ10)
CAVRDMRAGGGNKLTF

SEQ ID NO: 208360 - protein, 16 aa, Homo sapiens
  CDR3 for beta chain variable domain of TCR clone 104180 (TRBV27, TRBJ2-2)
CASSSSGVSNTGELFF

SEQ ID NO: 208361 - protein, 13 aa, Homo sapiens
  CDR3 for alpha chain variable domain of TCR clone 104181 (TRAV16, TRAJ31)
CALSAHNNARLMF

SEQ ID NO: 208362 - protein, 17 aa, Homo sapiens
  CDR3 for beta chain variable domain of TCR clone 104181 (TRBV7-3, TRBJ2-3)
CASSLMKRMRGADTQYF

SEQ ID NO: 208363 - protein, 18 aa, Homo sapiens
  CDR3 for alpha chain variable domain of TCR clone 104182 (TRAV21, TRAJ52)
CAVRPSPVGGTSYGKLTF

SEQ ID NO: 208364 - protein, 15 aa, Homo sapiens
  CDR3 for beta chain variable domain of TCR clone 104182 (TRBV19, TRBJ1-1)
CASTSGQIQNTEAFF

SEQ ID NO: 208365 - protein, 11 aa, Homo sapiens
  CDR3 for alpha chain variable domain of TCR clone 104183 (TRAV21, TRAJ20)
CAGRDDYKLSF

SEQ ID NO: 208366 - protein, 14 aa, Homo sapiens
  CDR3 for beta chain variable domain of TCR clone 104183 (TRBV12-4, TRBJ1-1)
CASSFSQMNTEAFF

SEQ ID NO: 208367 - protein, 12 aa, Homo sapiens
  CDR3 for alpha chain variable domain of TCR clone 104184 (TRAV12-1, TRAJ40)
CVVYSGTFKYIF

SEQ ID NO: 208368 - protein, 18 aa, Homo sapiens
  CDR3 for beta chain variable domain of TCR clone 104184 (TRBV11-2, TRBJ2-3)
CASSLGGASRGAPNTQYF

SEQ ID NO: 208369 - protein, 16 aa, Homo sapiens
  CDR3 for alpha chain variable domain of TCR clone 104185 (TRAV3, TRAJ37)
CAVRGKRSGNTGKLIF

SEQ ID NO: 208370 - protein, 13 aa, Homo sapiens
  CDR3 for beta chain variable domain of TCR clone 104185 (TRBV7-2, TRBJ2-2)
CASSSVRAGELFF

SEQ ID NO: 208371 - protein, 14 aa, Homo sapiens
  CDR3 for alpha chain variable domain of TCR clone 104186 (TRAV13-1, TRAJ3)
CAAEVYSSASKIIF

SEQ ID NO: 208372 - protein, 14 aa, Homo sapiens
  CDR3 for beta chain variable domain of TCR clone 104186 (TRBV19, TRBJ2-5)
CASSSSGIQETQYF

SEQ ID NO: 208373 - protein, 14 aa, Homo sapiens
  CDR3 for alpha chain variable domain of TCR clone 104187 (TRAV8-1, TRAJ5)
CAVRTDTGRRALTF

SEQ ID NO: 208374 - protein, 18 aa, Homo sapiens
  CDR3 for beta chain variable domain of TCR clone 104187 (TRBV11-2, TRBJ2-3)
CASSLGGASRGAPNTQYF

SEQ ID NO: 208375 - protein, 18 aa, Homo sapiens
  CDR3 for alpha chain variable domain of TCR clone 104188 (TRAV21, TRAJ52)
CAVRPSPAGGTSYGKLTF

SEQ ID NO: 208376 - protein, 16 aa, Homo sapiens
  CDR3 for beta chain variable domain of TCR clone 104188 (TRBV7-3, TRBJ2-1)
CASSLEGYRSYNEQFV

SEQ ID NO: 208377 - protein, 14 aa, Homo sapiens
  CDR3 for alpha chain variable domain of TCR clone 104189 (TRAV12-1, TRAJ17)
CVVNYKAAGNKLTF

SEQ ID NO: 208378 - protein, 14 aa, Homo sapiens
  CDR3 for beta chain variable domain of TCR clone 104189 (TRBV23-1, TRBJ2-5)
CASSFLRSQETQYF

SEQ ID NO: 208379 - protein, 12 aa, Homo sapiens
  CDR3 for alpha chain variable domain of TCR clone 104190 (TRAV1-1, TRAJ39)
CAVPVVGNMLTF

SEQ ID NO: 208380 - protein, 14 aa, Homo sapiens
  CDR3 for beta chain variable domain of TCR clone 104190 (TRBV4-1, TRBJ2-2)
CASSQYPDTGELFF

SEQ ID NO: 208381 - protein, 12 aa, Homo sapiens
  CDR3 for alpha chain variable domain of TCR clone 104191 (TRAV1-2, TRAJ33)
CAALDSNYQLIW

SEQ ID NO: 208382 - protein, 13 aa, Homo sapiens
  CDR3 for beta chain variable domain of TCR clone 104191 (TRBV19, TRBJ1-2)
CASSISEDYGYTF

SEQ ID NO: 208383 - protein, 12 aa, Homo sapiens
  CDR3 for alpha chain variable domain of TCR clone 104192 (TRAV21, TRAJ8)
CAVNKGFQKLVF

SEQ ID NO: 208384 - protein, 13 aa, Homo sapiens
  CDR3 for beta chain variable domain of TCR clone 104192 (TRBV6-3, TRBJ2-1)
CASSYDNYNEQFF

SEQ ID NO: 208385 - protein, 12 aa, Homo sapiens
  CDR3 for alpha chain variable domain of TCR clone 104193 (TRAV21, TRAJ58)
CALSVSGSRLTF

SEQ ID NO: 208386 - protein, 13 aa, Homo sapiens
  CDR3 for beta chain variable domain of TCR clone 104193 (TRBV5-7, TRBJ1-2)
CASSLGVFNGYTF

SEQ ID NO: 208387 - protein, 13 aa, Homo sapiens
  CDR3 for alpha chain variable domain of TCR clone 104194 (TRAV27, TRAJ45)
CRSSGGGADGLTF

SEQ ID NO: 208388 - protein, 15 aa, Homo sapiens
  CDR3 for beta chain variable domain of TCR clone 104194 (TRBV12-4, TRBJ2-5)
CASSPPTGLRETQYF

SEQ ID NO: 208389 - protein, 15 aa, Homo sapiens
  CDR3 for alpha chain variable domain of TCR clone 104195 (TRAV17, TRAJ16)
CATALRFSDGQKLFF

SEQ ID NO: 208390 - protein, 14 aa, Homo sapiens
  CDR3 for beta chain variable domain of TCR clone 104195 (TRBV18, TRBJ2-5)
CASSPGVSQETQYF

SEQ ID NO: 208391 - protein, 13 aa, Homo sapiens
  CDR3 for alpha chain variable domain of TCR clone 104196 (TRAV17, TRAJ9)
CATDYTGGFKTIF

SEQ ID NO: 208392 - protein, 20 aa, Homo sapiens
  CDR3 for beta chain variable domain of TCR clone 104196 (TRBV7-8, TRBJ2-2)
CASSHLFPGPTIHITGELFF

SEQ ID NO: 208393 - protein, 10 aa, Homo sapiens
  CDR3 for alpha chain variable domain of TCR clone 104197 (TRAV21, TRAJ49)
CAMNDDQFYF

SEQ ID NO: 208394 - protein, 13 aa, Homo sapiens
  CDR3 for beta chain variable domain of TCR clone 104197 (TRBV12-4, TRBJ1-1)
CASSPGTGFEAFF

SEQ ID NO: 208395 - protein, 19 aa, Homo sapiens
  CDR3 for alpha chain variable domain of TCR clone 104198 (TRAV17, TRAJ54)
CFLLLCYGRGVQGAQKLVF

SEQ ID NO: 208396 - protein, 14 aa, Homo sapiens
  CDR3 for beta chain variable domain of TCR clone 104198 (TRBV7-6, TRBJ2-3)
CASSLGTVTDTQYF

SEQ ID NO: 208397 - protein, 12 aa, Homo sapiens
  CDR3 for alpha chain variable domain of TCR clone 104199 (TRAV16, TRAJ34)
CAHSYNTDKLIF

SEQ ID NO: 208398 - protein, 12 aa, Homo sapiens
  CDR3 for beta chain variable domain of TCR clone 104199 (TRBV7-2, TRBJ2-5)
CASSQYQETQYF

SEQ ID NO: 208399 - protein, 14 aa, Homo sapiens
  CDR3 for alpha chain variable domain of TCR clone 104200 (TRAV12-2, TRAJ13)
CAVKKTGGYQKVTF

SEQ ID NO: 208400 - protein, 15 aa, Homo sapiens
  CDR3 for beta chain variable domain of TCR clone 104200 (TRBV20-1, TRBJ2-7)
CSARDRASGMDEQYF

SEQ ID NO: 208401 - protein, 14 aa, Homo sapiens
  CDR3 for alpha chain variable domain of TCR clone 104201 (TRAV8-3, TRAJ4)
CAVGAAGGYNKLIF

SEQ ID NO: 208402 - protein, 15 aa, Homo sapiens
  CDR3 for beta chain variable domain of TCR clone 104201 (TRBV7-9, TRBJ2-7)
CASSSSGLAVYEQYF

SEQ ID NO: 208403 - protein, 17 aa, Homo sapiens
  CDR3 for alpha chain variable domain of TCR clone 104202 (TRAV3, TRAJ6)
CAVRDGPRAGGSYIPTF

SEQ ID NO: 208404 - protein, 15 aa, Homo sapiens
  CDR3 for beta chain variable domain of TCR clone 104202 (TRBV6-1, TRBJ1-5)
CASSELREGNQPQHF

SEQ ID NO: 208405 - protein, 10 aa, Homo sapiens
  CDR3 for alpha chain variable domain of TCR clone 104203 (TRAV26-2, TRAJ49)
CILLGNQIYF

SEQ ID NO: 208406 - protein, 13 aa, Homo sapiens
  CDR3 for beta chain variable domain of TCR clone 104203 (TRBV20-1, TRBJ2-7)
CSADPGATYEQYF

SEQ ID NO: 208407 - protein, 14 aa, Homo sapiens
  CDR3 for alpha chain variable domain of TCR clone 104204 (TRAV8-4, TRAJ8)
CAVSEDTGFQKLVF

SEQ ID NO: 208408 - protein, 16 aa, Homo sapiens
  CDR3 for beta chain variable domain of TCR clone 104204 (TRBV7-3, TRBJ2-1)
CASSKPLAGGYNGQFF

SEQ ID NO: 208409 - protein, 15 aa, Homo sapiens
  CDR3 for alpha chain variable domain of TCR clone 104205 (TRAV21, TRAJ53)
CATLNSGGSNYKLTF

SEQ ID NO: 208410 - protein, 14 aa, Homo sapiens
  CDR3 for beta chain variable domain of TCR clone 104205 (TRBV12-5, TRBJ2-5)
CASGSRTHQEAQYF

SEQ ID NO: 208411 - protein, 16 aa, Homo sapiens
  CDR3 for alpha chain variable domain of TCR clone 104206 (TRAV3, TRAJ5)
CAVRNLMDTDRRALTF

SEQ ID NO: 208412 - protein, 16 aa, Homo sapiens
  CDR3 for beta chain variable domain of TCR clone 104206 (TRBV4-2, TRBJ2-7)
CASSQEGLANSYEQYF

SEQ ID NO: 208413 - protein, 14 aa, Homo sapiens
  CDR3 for alpha chain variable domain of TCR clone 104207 (TRAV23/DV6, TRAJ17)
CAARGRAAGNKLPF

SEQ ID NO: 208414 - protein, 12 aa, Homo sapiens
  CDR3 for beta chain variable domain of TCR clone 104207 (TRBV7-9, TRBJ2-3)
CASSFITDTQYF

SEQ ID NO: 208415 - protein, 18 aa, Homo sapiens
  CDR3 for alpha chain variable domain of TCR clone 104208 (TRAV13-1, TRAJ52)
CAAKNPNAGGTSYGKLTF

SEQ ID NO: 208416 - protein, 17 aa, Homo sapiens
  CDR3 for beta chain variable domain of TCR clone 104208 (TRBV11-2, TRBJ2-1)
CASSLCPPGVEYNEQFF

SEQ ID NO: 208417 - protein, 17 aa, Homo sapiens
  CDR3 for alpha chain variable domain of TCR clone 104209 (TRAV23/DV6, TRAJ57)
CAASSTLSQRGSEKLVF

SEQ ID NO: 208418 - protein, 14 aa, Homo sapiens
  CDR3 for beta chain variable domain of TCR clone 104209 (TRBV25-1, TRBJ1-1)
CASTHLGGNTEAFF

SEQ ID NO: 208419 - protein, 14 aa, Homo sapiens
  CDR3 for alpha chain variable domain of TCR clone 104210 (TRAV16, TRAJ31)
CALSCRNNNARLMF

SEQ ID NO: 208420 - protein, 12 aa, Homo sapiens
  CDR3 for beta chain variable domain of TCR clone 104210 (TRBV11-2, TRBJ1-2)
CASSREGDGYTF

SEQ ID NO: 208421 - protein, 13 aa, Homo sapiens
  CDR3 for alpha chain variable domain of TCR clone 104211 (TRAV2, TRAJ15)
CAVASQAGTALIF

SEQ ID NO: 208422 - protein, 12 aa, Homo sapiens
  CDR3 for beta chain variable domain of TCR clone 104211 (TRBV5-1, TRBJ2-5)
CASSFSWETQYF

SEQ ID NO: 208423 - protein, 16 aa, Homo sapiens
  CDR3 for alpha chain variable domain of TCR clone 104212 (TRAV14/DV4, TRAJ53)
CAMREGGGGSNYKLTF

SEQ ID NO: 208424 - protein, 16 aa, Homo sapiens
  CDR3 for beta chain variable domain of TCR clone 104212 (TRBV7-8, TRBJ2-6)
CASRVGDSSGANVLTF

SEQ ID NO: 208425 - protein, 15 aa, Homo sapiens
  CDR3 for alpha chain variable domain of TCR clone 104213 (TRAV36/DV7, TRAJ54)
CAVEKPVQGAQKLLF

SEQ ID NO: 208426 - protein, 14 aa, Homo sapiens
  CDR3 for beta chain variable domain of TCR clone 104213 (TRBV4-3, TRBJ2-2)
CASSQGHVTGELFF

SEQ ID NO: 208427 - protein, 11 aa, Homo sapiens
  CDR3 for alpha chain variable domain of TCR clone 104214 (TRAV12-3, TRAJ49)
CAANTGNQFYF

SEQ ID NO: 208428 - protein, 13 aa, Homo sapiens
  CDR3 for beta chain variable domain of TCR clone 104214 (TRBV10-3, TRBJ2-7)
CASKLAVNYEQYF

SEQ ID NO: 208429 - protein, 12 aa, Homo sapiens
  CDR3 for alpha chain variable domain of TCR clone 104215 (TRAV12-3, TRAJ17)
CAMTLTGNKLTF

SEQ ID NO: 208430 - protein, 15 aa, Homo sapiens
  CDR3 for beta chain variable domain of TCR clone 104215 (TRBV7-6, TRBJ2-1)
CASSLGGQSHNEQFF

SEQ ID NO: 208431 - protein, 14 aa, Homo sapiens
  CDR3 for alpha chain variable domain of TCR clone 104216 (TRAV23/DV6, TRAJ37)
CAATASSITGKLIF

SEQ ID NO: 208432 - protein, 17 aa, Homo sapiens
  CDR3 for beta chain variable domain of TCR clone 104216 (TRBV4-1, TRBJ1-4)
CASSQEGPRGVEEKLFF

SEQ ID NO: 208433 - protein, 13 aa, Homo sapiens
  CDR3 for alpha chain variable domain of TCR clone 104217 (TRAV12-1, TRAJ26)
CVVRRNYGRNFVF

SEQ ID NO: 208434 - protein, 14 aa, Homo sapiens
  CDR3 for beta chain variable domain of TCR clone 104217 (TRBV4-2, TRBJ2-1)
CASGLDRAYNEQFF

SEQ ID NO: 208435 - protein, 12 aa, Homo sapiens
  CDR3 for alpha chain variable domain of TCR clone 104218 (TRAV17, TRAJ20)
CATLSNDYKLSF

SEQ ID NO: 208436 - protein, 14 aa, Homo sapiens
  CDR3 for beta chain variable domain of TCR clone 104218 (TRBV10-3, TRBJ1-2)
CAISEDTPYYGYTF

SEQ ID NO: 208437 - protein, 13 aa, Homo sapiens
  CDR3 for alpha chain variable domain of TCR clone 104219 (TRAV13-2, TRAJ40)
CAEFTSGPYKYIF

SEQ ID NO: 208438 - protein, 14 aa, Homo sapiens
  CDR3 for beta chain variable domain of TCR clone 104219 (TRBV10-2, TRBJ1-5)
CASSSTGRNQPQHF

SEQ ID NO: 208439 - protein, 11 aa, Homo sapiens
  CDR3 for alpha chain variable domain of TCR clone 104220 (TRAV13-1, TRAJ30)
CAASRDDKIIL

SEQ ID NO: 208440 - protein, 16 aa, Homo sapiens
  CDR3 for beta chain variable domain of TCR clone 104220 (TRBV7-9, TRBJ2-1)
CASSDVAGGSYNEQFF

SEQ ID NO: 208441 - protein, 12 aa, Homo sapiens
  CDR3 for alpha chain variable domain of TCR clone 104221 (TRAV1-1, TRAJ8)
CVGGTGFQKLVF

SEQ ID NO: 208442 - protein, 15 aa, Homo sapiens
  CDR3 for beta chain variable domain of TCR clone 104221 (TRBV7-9, TRBJ1-4)
CASSRTGGFNEKLFF

SEQ ID NO: 208443 - protein, 17 aa, Homo sapiens
  CDR3 for alpha chain variable domain of TCR clone 104222 (TRAV3, TRAJ6)
CAVRDGPRAGGSYIPTF

SEQ ID NO: 208444 - protein, 14 aa, Homo sapiens
  CDR3 for beta chain variable domain of TCR clone 104222 (TRBV11-2, TRBJ2-3)
CASSRLARTDTRYF

SEQ ID NO: 208445 - protein, 14 aa, Homo sapiens
  CDR3 for alpha chain variable domain of TCR clone 104223 (TRAV1-2, TRAJ16)
CAVNRFSDGQKLPF

SEQ ID NO: 208446 - protein, 17 aa, Homo sapiens
  CDR3 for beta chain variable domain of TCR clone 104223 (TRBV7-3, TRBJ2-3)
CASSLMKRMRGADTQYF

SEQ ID NO: 208447 - protein, 14 aa, Homo sapiens
  CDR3 for alpha chain variable domain of TCR clone 104224 (TRAV12-2, TRAJ53)
CRERVGGSNYKLTF

SEQ ID NO: 208448 - protein, 17 aa, Homo sapiens
  CDR3 for beta chain variable domain of TCR clone 104224 (TRBV7-3, TRBJ2-3)
CASSLMKRMRGADTQYF

SEQ ID NO: 208449 - protein, 13 aa, Homo sapiens
  CDR3 for alpha chain variable domain of TCR clone 104225 (TRAV17, TRAJ26)
CATVDNYGQNFVF

SEQ ID NO: 208450 - protein, 15 aa, Homo sapiens
  CDR3 for beta chain variable domain of TCR clone 104225 (TRBV5-1, TRBJ2-7)
CASSLNGGPAREQYF

SEQ ID NO: 208451 - protein, 21 aa, Homo sapiens
  CDR3 for alpha chain variable domain of TCR clone 104226 (TRAV1-1, TRAJ6)
CLLLLRCERLERTGGSYIPTF

SEQ ID NO: 208452 - protein, 15 aa, Homo sapiens
  CDR3 for beta chain variable domain of TCR clone 104226 (TRBV12-4, TRBJ2-5)
CASSPPTGLQETQYF

SEQ ID NO: 208453 - protein, 15 aa, Homo sapiens
  CDR3 for alpha chain variable domain of TCR clone 104227 (TRAV21, TRAJ40)
CAVRLQTSGTYKYIF

SEQ ID NO: 208454 - protein, 13 aa, Homo sapiens
  CDR3 for beta chain variable domain of TCR clone 104227 (TRBV7-2, TRBJ2-2)
CASSSVRAGELFF

SEQ ID NO: 208455 - protein, 14 aa, Homo sapiens
  CDR3 for alpha chain variable domain of TCR clone 104228 (TRAV12-1, TRAJ30)
CVVNIGGRDGKIIF

SEQ ID NO: 208456 - protein, 14 aa, Homo sapiens
  CDR3 for beta chain variable domain of TCR clone 104228 (TRBV7-6, TRBJ2-3)
CASSLGTVTNTRYF

SEQ ID NO: 208457 - protein, 13 aa, Homo sapiens
  CDR3 for alpha chain variable domain of TCR clone 104229 (TRAV35, TRAJ42)
CAGFPGSQGNLIF

SEQ ID NO: 208458 - protein, 14 aa, Homo sapiens
  CDR3 for beta chain variable domain of TCR clone 104229 (TRBV19, TRBJ2-1)
SASPTFVLSGEQFF

SEQ ID NO: 208459 - protein, 15 aa, Homo sapiens
  CDR3 for alpha chain variable domain of TCR clone 104230 (TRAV21, TRAJ53)
CATLNSGGSNYKLTL

SEQ ID NO: 208460 - protein, 15 aa, Homo sapiens
  CDR3 for beta chain variable domain of TCR clone 104230 (TRBV27, TRBJ2-1)
CASSNGGGSSNEQFF

SEQ ID NO: 208461 - protein, 12 aa, Homo sapiens
  CDR3 for alpha chain variable domain of TCR clone 104231 (TRAV12-3, TRAJ20)
CALVRGDYKLSF

SEQ ID NO: 208462 - protein, 12 aa, Homo sapiens
  CDR3 for beta chain variable domain of TCR clone 104231 (TRBV6-1, TRBJ2-7)
CASSDYSYEQYF

SEQ ID NO: 208463 - protein, 15 aa, Homo sapiens
  CDR3 for alpha chain variable domain of TCR clone 104232 (TRAV2, TRAJ9)
CAVEDRGTGGFKTIF

SEQ ID NO: 208464 - protein, 16 aa, Homo sapiens
  CDR3 for beta chain variable domain of TCR clone 104232 (TRBV24-1, TRBJ2-3)
SATSDPGTGATDTQYF

SEQ ID NO: 208465 - protein, 18 aa, Homo sapiens
  CDR3 for alpha chain variable domain of TCR clone 104233 (TRAV12-3, TRAJ52)
CAMSRTNAGGTSYGKLTF

SEQ ID NO: 208466 - protein, 17 aa, Homo sapiens
  CDR3 for beta chain variable domain of TCR clone 104233 (TRBV7-3, TRBJ2-3)
CACSLMKRMRGADTQYF

SEQ ID NO: 208467 - protein, 16 aa, Homo sapiens
  CDR3 for alpha chain variable domain of TCR clone 104234 (TRAV4, TRAJ9)
CLVGDPNRPGGFKIIF

SEQ ID NO: 208468 - protein, 16 aa, Homo sapiens
  CDR3 for beta chain variable domain of TCR clone 104234 (TRBV28, TRBJ1-4)
CASSPPYRGRSEKLFF

SEQ ID NO: 208469 - protein, 15 aa, Homo sapiens
  CDR3 for alpha chain variable domain of TCR clone 104235 (TRAV26-1, TRAJ29)
CIVRVEGSGNTPLVF

SEQ ID NO: 208470 - protein, 15 aa, Homo sapiens
  CDR3 for beta chain variable domain of TCR clone 104235 (TRBV11-2, TRBJ2-1)
CASSLTSGGYNEQFF

SEQ ID NO: 208471 - protein, 12 aa, Homo sapiens
  CDR3 for alpha chain variable domain of TCR clone 104236 (TRAV4, TRAJ6)
CLVPGGSYIPTF

SEQ ID NO: 208472 - protein, 12 aa, Homo sapiens
  CDR3 for beta chain variable domain of TCR clone 104236 (TRBV6-5, TRBJ2-3)
CASSDTTDTQYF

SEQ ID NO: 208473 - protein, 17 aa, Homo sapiens
  CDR3 for alpha chain variable domain of TCR clone 104237 (TRAV13-1, TRAJ28)
CAASPPYSGAGSYQLTF

SEQ ID NO: 208474 - protein, 14 aa, Homo sapiens
  CDR3 for beta chain variable domain of TCR clone 104237 (TRBV7-9, TRBJ2-7)
CASSPSGGQNEQYF

SEQ ID NO: 208475 - protein, 13 aa, Homo sapiens
  CDR3 for alpha chain variable domain of TCR clone 104238 (TRAV1-2, TRAJ12)
CAVSMDSSYKLIF

SEQ ID NO: 208476 - protein, 15 aa, Homo sapiens
  CDR3 for beta chain variable domain of TCR clone 104238 (TRBV5-1, TRBJ2-7)
CASSLMTSGSNEQYF

SEQ ID NO: 208477 - protein, 17 aa, Homo sapiens
  CDR3 for alpha chain variable domain of TCR clone 104239 (TRAV27, TRAJ26)
CAGTRAPLDNYGQNFVF

SEQ ID NO: 208478 - protein, 15 aa, Homo sapiens
  CDR3 for beta chain variable domain of TCR clone 104239 (TRBV11-2, TRBJ2-5)
CASSPRSGGLETQYF

SEQ ID NO: 208479 - protein, 14 aa, Homo sapiens
  CDR3 for alpha chain variable domain of TCR clone 104240 (TRAV12-2, TRAJ15)
CAPHTGQAGTALIF

SEQ ID NO: 208480 - protein, 17 aa, Homo sapiens
  CDR3 for beta chain variable domain of TCR clone 104240 (TRBV5-5, TRBJ1-2)
CASSLGSLDGQSEGDTF

SEQ ID NO: 208481 - protein, 15 aa, Homo sapiens
  CDR3 for alpha chain variable domain of TCR clone 104241 (TRAV3, TRAJ5)
CAVGDRKTGRRALTF

SEQ ID NO: 208482 - protein, 13 aa, Homo sapiens
  CDR3 for beta chain variable domain of TCR clone 104241 (TRBV10-3, TRBJ2-7)
CASKLAVNYEQYF

SEQ ID NO: 208483 - protein, 15 aa, Homo sapiens
  CDR3 for alpha chain variable domain of TCR clone 104242 (TRAV27, TRAJ38)
CAGRVNAGNNRKLIW

SEQ ID NO: 208484 - protein, 13 aa, Homo sapiens
  CDR3 for beta chain variable domain of TCR clone 104242 (TRBV20-1, TRBJ1-1)
CSARVGGNTEAFF

SEQ ID NO: 208485 - protein, 12 aa, Homo sapiens
  CDR3 for alpha chain variable domain of TCR clone 104243 (TRAV1-2, TRAJ34)
CAVREGHRQAHL

SEQ ID NO: 208486 - protein, 15 aa, Homo sapiens
  CDR3 for beta chain variable domain of TCR clone 104243 (TRBV27, TRBJ2-1)
CASSNGGGSSNEQFF

SEQ ID NO: 208487 - protein, 13 aa, Homo sapiens
  CDR3 for alpha chain variable domain of TCR clone 104244 (TRAV26-2, TRAJ43)
CILRAVNNNDMRF

SEQ ID NO: 208488 - protein, 15 aa, Homo sapiens
  CDR3 for beta chain variable domain of TCR clone 104244 (TRBV11-3, TRBJ2-3)
CASLKDGREGDTQYF

SEQ ID NO: 208489 - protein, 14 aa, Homo sapiens
  CDR3 for alpha chain variable domain of TCR clone 104245 (TRAV4, TRAJ9)
CLVGAGTGGFKTIF

SEQ ID NO: 208490 - protein, 14 aa, Homo sapiens
  CDR3 for beta chain variable domain of TCR clone 104245 (TRBV7-9, TRBJ2-4)
CASSLAMGGNIQYF

SEQ ID NO: 208491 - protein, 12 aa, Homo sapiens
  CDR3 for alpha chain variable domain of TCR clone 104246 (TRAV12-3, TRAJ17)
CAMTLTGNKLTF

SEQ ID NO: 208492 - protein, 20 aa, Homo sapiens
  CDR3 for beta chain variable domain of TCR clone 104246 (TRBV7-8, TRBJ2-2)
WASSHLFPGPTIHITGELFF

SEQ ID NO: 208493 - protein, 16 aa, Homo sapiens
  CDR3 for alpha chain variable domain of TCR clone 104247 (TRAV30, TRAJ24)
CGTAIVDADSWGKFQF

SEQ ID NO: 208494 - protein, 14 aa, Homo sapiens
  CDR3 for beta chain variable domain of TCR clone 104247 (TRBV20-1, TRBJ1-1)
CSAQTRIGGTEAFF

SEQ ID NO: 208495 - protein, 14 aa, Homo sapiens
  CDR3 for alpha chain variable domain of TCR clone 104248 (TRAV8-6, TRAJ36)
CAVSEKDGANNLFF

SEQ ID NO: 208496 - protein, 15 aa, Homo sapiens
  CDR3 for beta chain variable domain of TCR clone 104248 (TRBV10-3, TRBJ2-3)
CAISLTSGGTDTQYF

SEQ ID NO: 208497 - protein, 17 aa, Homo sapiens
  CDR3 for alpha chain variable domain of TCR clone 104249 (TRAV16, TRAJ42)
CALSPKLYGGSLGNLIF

SEQ ID NO: 208498 - protein, 13 aa, Homo sapiens
  CDR3 for beta chain variable domain of TCR clone 104249 (TRBV19, TRBJ1-5)
CASSTRRDQPQHF

SEQ ID NO: 208499 - protein, 15 aa, Homo sapiens
  CDR3 for alpha chain variable domain of TCR clone 104250 (TRAV26-2, TRAJ54)
CILRDVGQGAQKLGF

SEQ ID NO: 208500 - protein, 13 aa, Homo sapiens
  CDR3 for beta chain variable domain of TCR clone 104250 (TRBV7-9, TRBJ1-1)
CASSLAGVTEAFF

SEQ ID NO: 208501 - protein, 16 aa, Homo sapiens
  CDR3 for alpha chain variable domain of TCR clone 104251 (TRAV30, TRAJ24)
CGTEIVDADSWGKFQF

SEQ ID NO: 208502 - protein, 13 aa, Homo sapiens
  CDR3 for beta chain variable domain of TCR clone 104251 (TRBV11-2, TRBJ2-5)
CASSSTVEETQYF

SEQ ID NO: 208503 - protein, 11 aa, Homo sapiens
  CDR3 for alpha chain variable domain of TCR clone 104252 (TRAV1-2, TRAJ20)
CAVANDYKLGF

SEQ ID NO: 208504 - protein, 16 aa, Homo sapiens
  CDR3 for beta chain variable domain of TCR clone 104252 (TRBV4-3, TRBJ1-6)
CASSQDPGVYNSPLHF

SEQ ID NO: 208505 - protein, 14 aa, Homo sapiens
  CDR3 for alpha chain variable domain of TCR clone 104253 (TRAV1-2, TRAJ16)
CAVNRFSDGQKLLF

SEQ ID NO: 208506 - protein, 14 aa, Homo sapiens
  CDR3 for beta chain variable domain of TCR clone 104253 (TRBV7-8, TRBJ2-7)
CASTFRGGPNEQYF

SEQ ID NO: 208507 - protein, 14 aa, Homo sapiens
  CDR3 for alpha chain variable domain of TCR clone 104254 (TRAV8-2, TRAJ4)
CVVSPSGGYNKLLF

SEQ ID NO: 208508 - protein, 15 aa, Homo sapiens
  CDR3 for beta chain variable domain of TCR clone 104254 (TRBV2, TRBJ2-1)
CASSELAGSYNEQFF

SEQ ID NO: 208509 - protein, 15 aa, Homo sapiens
  CDR3 for alpha chain variable domain of TCR clone 104255 (TRAV38-1, TRAJ37)
CAFTHGSGNTGKLIF

SEQ ID NO: 208510 - protein, 12 aa, Homo sapiens
  CDR3 for beta chain variable domain of TCR clone 104255 (TRBV7-9, TRBJ2-7)
CASSFGSYEQYF

SEQ ID NO: 208511 - protein, 16 aa, Homo sapiens
  CDR3 for alpha chain variable domain of TCR clone 104256 (TRAV17, TRAJ36)
CATVSLNWGKQPLLWD

SEQ ID NO: 208512 - protein, 14 aa, Homo sapiens
  CDR3 for beta chain variable domain of TCR clone 104256 (TRBV5-1, TRBJ1-2)
CASSPQGANYGYTF

SEQ ID NO: 208513 - protein, 14 aa, Homo sapiens
  CDR3 for alpha chain variable domain of TCR clone 104257 (TRAV1-2, TRAJ16)
CAVNRFSAGQKLLF

SEQ ID NO: 208514 - protein, 15 aa, Homo sapiens
  CDR3 for beta chain variable domain of TCR clone 104257 (TRBV11-3, TRBJ2-3)
CASLKDGREGDTQYF

SEQ ID NO: 208515 - protein, 16 aa, Homo sapiens
  CDR3 for alpha chain variable domain of TCR clone 104258 (TRAV3, TRAJ37)
CAVRVRGSGHTGKLIF

SEQ ID NO: 208516 - protein, 11 aa, Homo sapiens
  CDR3 for beta chain variable domain of TCR clone 104258 (TRBV11-2, TRBJ2-2)
CASSLPGELFF

SEQ ID NO: 208517 - protein, 18 aa, Homo sapiens
  CDR3 for alpha chain variable domain of TCR clone 104259 (TRAV26-2, TRAJ45)
CILRLWGYSGGGADGLTF

SEQ ID NO: 208518 - protein, 17 aa, Homo sapiens
  CDR3 for beta chain variable domain of TCR clone 104259 (TRBV28, TRBJ2-3)
CASSPTPAGGRVNTQYF

SEQ ID NO: 208519 - protein, 15 aa, Homo sapiens
  CDR3 for alpha chain variable domain of TCR clone 104260 (TRAV26-1, TRAJ29)
CIVRVEGSGNTPLVF

SEQ ID NO: 208520 - protein, 13 aa, Homo sapiens
  CDR3 for beta chain variable domain of TCR clone 104260 (TRBV19, TRBJ1-2)
CASSQGQVYGHTF

SEQ ID NO: 208521 - protein, 11 aa, Homo sapiens
  CDR3 for alpha chain variable domain of TCR clone 104261 (TRAV4, TRAJ20)
CLVGDKVTTTS

SEQ ID NO: 208522 - protein, 15 aa, Homo sapiens
  CDR3 for beta chain variable domain of TCR clone 104261 (TRBV18, TRBJ2-7)
CASAPSSTGNYEQYF

SEQ ID NO: 208523 - protein, 14 aa, Homo sapiens
  CDR3 for alpha chain variable domain of TCR clone 104262 (TRAV13-1, TRAJ44)
CAAKATGTASKLTF

SEQ ID NO: 208524 - protein, 16 aa, Homo sapiens
  CDR3 for beta chain variable domain of TCR clone 104262 (TRBV7-9, TRBJ2-6)
CASSLKGPLRANGLTF

SEQ ID NO: 208525 - protein, 14 aa, Homo sapiens
  CDR3 for alpha chain variable domain of TCR clone 104263 (TRAV17, TRAJ57)
CATDPQGGSEKLVF

SEQ ID NO: 208526 - protein, 14 aa, Homo sapiens
  CDR3 for beta chain variable domain of TCR clone 104263 (TRBV4-2, TRBJ2-7)
CASSQGQTAYEQYF

SEQ ID NO: 208527 - protein, 12 aa, Homo sapiens
  CDR3 for alpha chain variable domain of TCR clone 104264 (TRAV12-3, TRAJ20)
CAMVRGDYKLSF

SEQ ID NO: 208528 - protein, 13 aa, Homo sapiens
  CDR3 for beta chain variable domain of TCR clone 104264 (TRBV4-2, TRBJ1-1)
CASSQAGNTEAFF

SEQ ID NO: 208529 - protein, 16 aa, Homo sapiens
  CDR3 for alpha chain variable domain of TCR clone 104265 (TRAV26-2, TRAJ48)
CILRPPFNFGNEKLTF

SEQ ID NO: 208530 - protein, 15 aa, Homo sapiens
  CDR3 for beta chain variable domain of TCR clone 104265 (TRBV27, TRBJ2-1)
CASSNGGGSSNEQFF

SEQ ID NO: 208531 - protein, 14 aa, Homo sapiens
  CDR3 for alpha chain variable domain of TCR clone 104266 (TRAV17, TRAJ5)
CATVALTGRRALTF

SEQ ID NO: 208532 - protein, 12 aa, Homo sapiens
  CDR3 for beta chain variable domain of TCR clone 104266 (TRBV11-2, TRBJ2-2)
CASSLGGGELFF

SEQ ID NO: 208533 - protein, 12 aa, Homo sapiens
  CDR3 for alpha chain variable domain of TCR clone 104267 (TRAV25, TRAJ29)
CAGPRGNTPLVF

SEQ ID NO: 208534 - protein, 14 aa, Homo sapiens
  CDR3 for beta chain variable domain of TCR clone 104267 (TRBV5-1, TRBJ2-7)
CASSRGESLYEQYF

SEQ ID NO: 208535 - protein, 13 aa, Homo sapiens
  CDR3 for alpha chain variable domain of TCR clone 104268 (TRAV2, TRAJ15)
CAVASQAGTALIF

SEQ ID NO: 208536 - protein, 13 aa, Homo sapiens
  CDR3 for beta chain variable domain of TCR clone 104268 (TRBV6-1, TRBJ2-1)
CAGMDPTNNEQFF

SEQ ID NO: 208537 - protein, 12 aa, Homo sapiens
  CDR3 for alpha chain variable domain of TCR clone 104269 (TRAV12-2, TRAJ4)
GWPEGGYNKLIF

SEQ ID NO: 208538 - protein, 12 aa, Homo sapiens
  CDR3 for beta chain variable domain of TCR clone 104269 (TRBV7-9, TRBJ2-7)
CASSLEGYEQYF

SEQ ID NO: 208539 - protein, 15 aa, Homo sapiens
  CDR3 for alpha chain variable domain of TCR clone 104270 (TRAV8-4, TRAJ40)
CAVSSITSGTYKYIY

SEQ ID NO: 208540 - protein, 13 aa, Homo sapiens
  CDR3 for beta chain variable domain of TCR clone 104270 (TRBV2, TRBJ2-1)
CATSRGTDNEQFF

SEQ ID NO: 208541 - protein, 12 aa, Homo sapiens
  CDR3 for alpha chain variable domain of TCR clone 104271 (TRAV12-3, TRAJ29)
CAAREGNTPLVF

SEQ ID NO: 208542 - protein, 17 aa, Homo sapiens
  CDR3 for beta chain variable domain of TCR clone 104271 (TRBV18, TRBJ2-1)
CASSTLAAGAGDNEQFF

SEQ ID NO: 208543 - protein, 14 aa, Homo sapiens
  CDR3 for alpha chain variable domain of TCR clone 104272 (TRAV13-1, TRAJ44)
CAAKATGTASKLTF

SEQ ID NO: 208544 - protein, 15 aa, Homo sapiens
  CDR3 for beta chain variable domain of TCR clone 104272 (TRBV7-2, TRBJ2-3)
CASSSTGLETDTQYF

SEQ ID NO: 208545 - protein, 16 aa, Homo sapiens
  CDR3 for alpha chain variable domain of TCR clone 104273 (TRAV30, TRAJ24)
CGTEIVDADSWGKFQF

SEQ ID NO: 208546 - protein, 12 aa, Homo sapiens
  CDR3 for beta chain variable domain of TCR clone 104273 (TRBV7-9, TRBJ1-1)
CASSLVRGEAFF

SEQ ID NO: 208547 - protein, 16 aa, Homo sapiens
  CDR3 for alpha chain variable domain of TCR clone 104274 (TRAV30, TRAJ24)
CGTEIVDADSGGKFQF

SEQ ID NO: 208548 - protein, 12 aa, Homo sapiens
  CDR3 for beta chain variable domain of TCR clone 104274 (TRBV11-2, TRBJ2-2)
CASSLGGGELFF

SEQ ID NO: 208549 - protein, 18 aa, Homo sapiens
  CDR3 for alpha chain variable domain of TCR clone 104275 (TRAV17, TRAJ45)
CATSLDLYSGGCADGLTF

SEQ ID NO: 208550 - protein, 13 aa, Homo sapiens
  CDR3 for beta chain variable domain of TCR clone 104275 (TRBV10-3, TRBJ2-7)
CASKLAVNYEQYF

SEQ ID NO: 208551 - protein, 14 aa, Homo sapiens
  CDR3 for alpha chain variable domain of TCR clone 104276 (TRAV12-3, TRAJ22)
CAMSLFGSARQLTF

SEQ ID NO: 208552 - protein, 11 aa, Homo sapiens
  CDR3 for beta chain variable domain of TCR clone 104276 (TRBV12-4, TRBJ2-2)
CASSSAGELLF

SEQ ID NO: 208553 - protein, 23 aa, Homo sapiens
  CDR3 for alpha chain variable domain of TCR clone 104277 (TRAV26-1, TRAJ38)
CIADNAGNNHIQNPDPAVYQLRD

SEQ ID NO: 208554 - protein, 19 aa, Homo sapiens
  CDR3 for beta chain variable domain of TCR clone 104277 (TRBV19, TRBJ2-5)
CASSIGQVTDFFLGETQYF

SEQ ID NO: 208555 - protein, 15 aa, Homo sapiens
  CDR3 for alpha chain variable domain of TCR clone 104278 (TRAV8-3, TRAJ23)
CAVDDRYNQGGKLIF

SEQ ID NO: 208556 - protein, 16 aa, Homo sapiens
  CDR3 for beta chain variable domain of TCR clone 104278 (TRBV11-2, TRBJ2-7)
CASSPTTGGVSYEQYF

SEQ ID NO: 208557 - protein, 13 aa, Homo sapiens
  CDR3 for alpha chain variable domain of TCR clone 104279 (TRAV12-1, TRAJ29)
CVVDTSGNTPLVF

SEQ ID NO: 208558 - protein, 12 aa, Homo sapiens
  CDR3 for beta chain variable domain of TCR clone 104279 (TRBV11-2, TRBJ2-2)
CASSLPTGELFF

SEQ ID NO: 208559 - protein, 15 aa, Homo sapiens
  CDR3 for alpha chain variable domain of TCR clone 104280 (TRAV27, TRAJ37)
CAGVGGSGNTGKLIF

SEQ ID NO: 208560 - protein, 15 aa, Homo sapiens
  CDR3 for beta chain variable domain of TCR clone 104280 (TRBV11-3, TRBJ2-3)
CASLKDGREGYTQYF

SEQ ID NO: 208561 - protein, 14 aa, Homo sapiens
  CDR3 for alpha chain variable domain of TCR clone 104281 (TRAV20, TRAJ42)
CAVQAGGSQGNLIF

SEQ ID NO: 208562 - protein, 14 aa, Homo sapiens
  CDR3 for beta chain variable domain of TCR clone 104281 (TRBV28, TRBJ1-2)
CASRIQGANYGYNF

SEQ ID NO: 208563 - protein, 16 aa, Homo sapiens
  CDR3 for alpha chain variable domain of TCR clone 104282 (TRAV3, TRAJ37)
CAVRVRGSGNTGKLIF

SEQ ID NO: 208564 - protein, 16 aa, Homo sapiens
  CDR3 for beta chain variable domain of TCR clone 104282 (TRBV11-3, TRBJ2-7)
CASSPTTGGVSYEQYF

SEQ ID NO: 208565 - protein, 15 aa, Homo sapiens
  CDR3 for alpha chain variable domain of TCR clone 104283 (TRAV8-2, TRAJ40)
CVVLGTTSGTYKYIF

SEQ ID NO: 208566 - protein, 16 aa, Homo sapiens
  CDR3 for beta chain variable domain of TCR clone 104283 (TRBV7-3, TRBJ2-1)
CASSLAGYRSYNEQFF

SEQ ID NO: 208567 - protein, 14 aa, Homo sapiens
  CDR3 for alpha chain variable domain of TCR clone 104284 (TRAV36/DV7, TRAJ57)
CAVGFPGGSEKLVF

SEQ ID NO: 208568 - protein, 16 aa, Homo sapiens
  CDR3 for beta chain variable domain of TCR clone 104284 (TRBV7-2, TRBJ2-5)
CASSYKTGISLENQYF

SEQ ID NO: 208569 - protein, 13 aa, Homo sapiens
  CDR3 for alpha chain variable domain of TCR clone 104285 (TRAV2, TRAJ40)
CAVVTSGTYKYIF

SEQ ID NO: 208570 - protein, 16 aa, Homo sapiens
  CDR3 for beta chain variable domain of TCR clone 104285 (TRBV19, TRBJ2-1)
CASSKAGPSSYDEQFF

SEQ ID NO: 208571 - protein, 14 aa, Homo sapiens
  CDR3 for alpha chain variable domain of TCR clone 104286 (TRAV12-3, TRAJ22)
CAMSLFGSVRQLTF

SEQ ID NO: 208572 - protein, 11 aa, Homo sapiens
  CDR3 for beta chain variable domain of TCR clone 104286 (TRBV12-4, TRBJ2-2)
CASSSAGELFF

SEQ ID NO: 208573 - protein, 11 aa, Homo sapiens
  CDR3 for alpha chain variable domain of TCR clone 104287 (TRAV2, TRAJ13)
CASGGYQKVTF

SEQ ID NO: 208574 - protein, 13 aa, Homo sapiens
  CDR3 for beta chain variable domain of TCR clone 104287 (TRBV10-3, TRBJ1-2)
CAISERDSYGYIF

SEQ ID NO: 208575 - protein, 15 aa, Homo sapiens
  CDR3 for alpha chain variable domain of TCR clone 104288 (TRAV21, TRAJ53)
CATLNSGSSNYKLTF

SEQ ID NO: 208576 - protein, 14 aa, Homo sapiens
  CDR3 for beta chain variable domain of TCR clone 104288 (TRBV7-2, TRBJ2-7)
CASRSQGAAYEQYF

SEQ ID NO: 208577 - protein, 13 aa, Homo sapiens
  CDR3 for alpha chain variable domain of TCR clone 104289 (TRAV26-2, TRAJ43)
CTLRAVNNNDMRF

SEQ ID NO: 208578 - protein, 14 aa, Homo sapiens
  CDR3 for beta chain variable domain of TCR clone 104289 (TRBV20-1, TRBJ1-1)
CSAQTRIGGTEAFF

SEQ ID NO: 208579 - protein, 15 aa, Homo sapiens
  CDR3 for alpha chain variable domain of TCR clone 104290 (TRAV3, TRAJ29)
CAVRDINAGNTPLVF

SEQ ID NO: 208580 - protein, 16 aa, Homo sapiens
  CDR3 for beta chain variable domain of TCR clone 104290 (TRBV4-1, TRBJ2-5)
CASSQTFYGDQETQYF

SEQ ID NO: 208581 - protein, 18 aa, Homo sapiens
  CDR3 for alpha chain variable domain of TCR clone 104291 (TRAV12-2, )
CAVEDIQNPDPAVYQLRD

SEQ ID NO: 208582 - protein, 13 aa, Homo sapiens
  CDR3 for beta chain variable domain of TCR clone 104291 (TRBV12-5, TRBJ2-3)
CASGDRQSDTQYF

SEQ ID NO: 208583 - protein, 15 aa, Homo sapiens
  CDR3 for alpha chain variable domain of TCR clone 104292 (TRAV12-1, TRAJ13)
CVVNPNSGGYQKVTF

SEQ ID NO: 208584 - protein, 13 aa, Homo sapiens
  CDR3 for beta chain variable domain of TCR clone 104292 (TRBV7-9, TRBJ1-2)
CASSLKQNYGYTF

SEQ ID NO: 208585 - protein, 14 aa, Homo sapiens
  CDR3 for alpha chain variable domain of TCR clone 104293 (TRAV1-2, TRAJ16)
CAVNRFSDGQKLLF

SEQ ID NO: 208586 - protein, 14 aa, Homo sapiens
  CDR3 for beta chain variable domain of TCR clone 104293 (TRBV20-1, TRBJ2-1)
CSAHPGLPYNEQFF

SEQ ID NO: 208587 - protein, 15 aa, Homo sapiens
  CDR3 for alpha chain variable domain of TCR clone 104294 (TRAV26-1, TRAJ29)
CISRVEGSGNTPLVF

SEQ ID NO: 208588 - protein, 15 aa, Homo sapiens
  CDR3 for beta chain variable domain of TCR clone 104294 (TRBV7-9, TRBJ1-5)
CASSQGHQPNQPQHF

SEQ ID NO: 208589 - protein, 13 aa, Homo sapiens
  CDR3 for alpha chain variable domain of TCR clone 104295 (TRAV30, TRAJ24)
CGTVTDSWGKLQC

SEQ ID NO: 208590 - protein, 15 aa, Homo sapiens
  CDR3 for beta chain variable domain of TCR clone 104295 (TRBV25-1, TRBJ1-4)
CASSPGDSTNEKLFF

SEQ ID NO: 208591 - protein, 18 aa, Homo sapiens
  CDR3 for alpha chain variable domain of TCR clone 104296 (TRAV3, TRAJ17)
CAVRARRGGRSCRQQANF

SEQ ID NO: 208592 - protein, 15 aa, Homo sapiens
  CDR3 for beta chain variable domain of TCR clone 104296 (TRBV12-4, TRBJ1-1)
CASSLAVSRGAEAFF

SEQ ID NO: 208593 - protein, 16 aa, Homo sapiens
  CDR3 for alpha chain variable domain of TCR clone 104297 (TRAV3, TRAJ21)
CAVRDIERGNFNKFYF

SEQ ID NO: 208594 - protein, 11 aa, Homo sapiens
  CDR3 for beta chain variable domain of TCR clone 104297 (TRBV12-4, TRBJ2-3)
CASTATDTQYF

SEQ ID NO: 208595 - protein, 16 aa, Homo sapiens
  CDR3 for alpha chain variable domain of TCR clone 104298 (TRAV30, TRAJ24)
CGTENVDADSWGKFQV

SEQ ID NO: 208596 - protein, 14 aa, Homo sapiens
  CDR3 for beta chain variable domain of TCR clone 104298 (TRBV12-5, TRBJ2-5)
CASGSRTHQETQYF

SEQ ID NO: 208597 - protein, 13 aa, Homo sapiens
  CDR3 for alpha chain variable domain of TCR clone 104299 (TRAV1-2, TRAJ12)
CAVSMDSSYKLIF

SEQ ID NO: 208598 - protein, 15 aa, Homo sapiens
  CDR3 for beta chain variable domain of TCR clone 104299 (TRBV27, TRBJ2-5)
CASSLRPSGGETQYF

SEQ ID NO: 208599 - protein, 14 aa, Homo sapiens
  CDR3 for alpha chain variable domain of TCR clone 104300 (TRAV29/DV5, TRAJ20)
CAASAPIEDYKLSF

SEQ ID NO: 208600 - protein, 13 aa, Homo sapiens
  CDR3 for beta chain variable domain of TCR clone 104300 (TRBV10-3, TRBJ2-7)
CASKLAVNYEQYF

SEQ ID NO: 208601 - protein, 13 aa, Homo sapiens
  CDR3 for alpha chain variable domain of TCR clone 104301 (TRAV1-2, TRAJ9)
CAALNTGGFKTVF

SEQ ID NO: 208602 - protein, 12 aa, Homo sapiens
  CDR3 for beta chain variable domain of TCR clone 104301 (TRBV11-3, TRBJ1-1)
CASSHRQGEAFF

SEQ ID NO: 208603 - protein, 15 aa, Homo sapiens
  CDR3 for alpha chain variable domain of TCR clone 104302 (TRAV8-2, TRAJ16)
CVGRDGFSDGQKLLF

SEQ ID NO: 208604 - protein, 14 aa, Homo sapiens
  CDR3 for beta chain variable domain of TCR clone 104302 (TRBV7-3, TRBJ1-1)
CASSLGTGYTEAFF

SEQ ID NO: 208605 - protein, 15 aa, Homo sapiens
  CDR3 for alpha chain variable domain of TCR clone 104303 (TRAV21, TRAJ24)
CAARSSTDSWGKLQF

SEQ ID NO: 208606 - protein, 15 aa, Homo sapiens
  CDR3 for beta chain variable domain of TCR clone 104303 (TRBV12-4, TRBJ2-5)
CASSPPTGLQETQYF

SEQ ID NO: 208607 - protein, 12 aa, Homo sapiens
  CDR3 for alpha chain variable domain of TCR clone 104304 (TRAV8-3, TRAJ26)
CAGDNYGQNFVF

SEQ ID NO: 208608 - protein, 12 aa, Homo sapiens
  CDR3 for beta chain variable domain of TCR clone 104304 (TRBV6-3, TRBJ2-7)
CASSLTPYEQYF

SEQ ID NO: 208609 - protein, 14 aa, Homo sapiens
  CDR3 for alpha chain variable domain of TCR clone 104305 (TRAV3, TRAJ21)
CAVESQANFNKFYF

SEQ ID NO: 208610 - protein, 15 aa, Homo sapiens
  CDR3 for beta chain variable domain of TCR clone 104305 (TRBV7-9, TRBJ1-4)
CASSATGGNNEKLFF

SEQ ID NO: 208611 - protein, 14 aa, Homo sapiens
  CDR3 for alpha chain variable domain of TCR clone 104306 (TRAV17, TRAJ54)
CATDANQGAQKLVF

SEQ ID NO: 208612 - protein, 12 aa, Homo sapiens
  CDR3 for beta chain variable domain of TCR clone 104306 (TRBV5-4, TRBJ2-7)
CASSPRTEEQYF

SEQ ID NO: 208613 - protein, 11 aa, Homo sapiens
  CDR3 for alpha chain variable domain of TCR clone 104307 (TRAV13-1, TRAJ23)
CAASSRGKLIF

SEQ ID NO: 208614 - protein, 13 aa, Homo sapiens
  CDR3 for beta chain variable domain of TCR clone 104307 (TRBV7-3, TRBJ2-5)
CASRFRGGETQYF

SEQ ID NO: 208615 - protein, 13 aa, Homo sapiens
  CDR3 for alpha chain variable domain of TCR clone 104308 (TRAV8-1, TRAJ30)
CAVIMNRDDKIIF

SEQ ID NO: 208616 - protein, 14 aa, Homo sapiens
  CDR3 for beta chain variable domain of TCR clone 104308 (TRBV7-2, TRBJ2-7)
CASSLPPGQGPQYF

SEQ ID NO: 208617 - protein, 17 aa, Homo sapiens
  CDR3 for alpha chain variable domain of TCR clone 104309 (TRAV3, TRAJ42)
CAVRDMDYGGSQGNLIF

SEQ ID NO: 208618 - protein, 15 aa, Homo sapiens
  CDR3 for beta chain variable domain of TCR clone 104309 (TRBV6-3, TRBJ2-7)
CASSSPGTVFYEQYF

SEQ ID NO: 208619 - protein, 16 aa, Homo sapiens
  CDR3 for alpha chain variable domain of TCR clone 104310 (TRAV8-3, TRAJ44)
CAVGASNTGTVSKLTF

SEQ ID NO: 208620 - protein, 15 aa, Homo sapiens
  CDR3 for beta chain variable domain of TCR clone 104310 (TRBV27, TRBJ1-5)
CASTFNRGSNQPQHF

SEQ ID NO: 208621 - protein, 16 aa, Homo sapiens
  CDR3 for alpha chain variable domain of TCR clone 104311 (TRAV35, TRAJ28)
CAGQRYSGAGSYQLTF

SEQ ID NO: 208622 - protein, 15 aa, Homo sapiens
  CDR3 for beta chain variable domain of TCR clone 104311 (TRBV20-1, TRBJ2-7)
CSAESGTSGAYEQYF

SEQ ID NO: 208623 - protein, 12 aa, Homo sapiens
  CDR3 for alpha chain variable domain of TCR clone 104312 (TRAV3, TRAJ27)
CAVRDKAGKSTL

SEQ ID NO: 208624 - protein, 14 aa, Homo sapiens
  CDR3 for beta chain variable domain of TCR clone 104312 (TRBV5-1, TRBJ1-2)
CASSVDSTNYGYTF

SEQ ID NO: 208625 - protein, 11 aa, Homo sapiens
  CDR3 for alpha chain variable domain of TCR clone 104313 (TRAV12-1, TRAJ34)
CVVNKGRELIF

SEQ ID NO: 208626 - protein, 11 aa, Homo sapiens
  CDR3 for beta chain variable domain of TCR clone 104313 (TRBV19, TRBJ1-1)
CASSIGSEAFF

SEQ ID NO: 208627 - protein, 15 aa, Homo sapiens
  CDR3 for alpha chain variable domain of TCR clone 104314 (TRAV26-1, TRAJ22)
CIVRVSFLFCKATDL

SEQ ID NO: 208628 - protein, 16 aa, Homo sapiens
  CDR3 for beta chain variable domain of TCR clone 104314 (TRBV24-1, TRBJ2-3)
CATSDPGTGATDTQYF

SEQ ID NO: 208629 - protein, 12 aa, Homo sapiens
  CDR3 for alpha chain variable domain of TCR clone 104315 (TRAV4, TRAJ21)
CLAGDNFNKFYF

SEQ ID NO: 208630 - protein, 17 aa, Homo sapiens
  CDR3 for beta chain variable domain of TCR clone 104315 (TRBV3-1, TRBJ2-7)
CASSQDLTGLSSYEQYF

SEQ ID NO: 208631 - protein, 14 aa, Homo sapiens
  CDR3 for alpha chain variable domain of TCR clone 104316 (TRAV12-3, TRAJ10)
SHLPLTGGGNKLTF

SEQ ID NO: 208632 - protein, 18 aa, Homo sapiens
  CDR3 for beta chain variable domain of TCR clone 104316 (TRBV4-1, TRBJ2-3)
CASSHQLAGGRSTDTQYF

SEQ ID NO: 208633 - protein, 15 aa, Homo sapiens
  CDR3 for alpha chain variable domain of TCR clone 104317 (TRAV25, TRAJ53)
CPTSNSGGSTYKLTF

SEQ ID NO: 208634 - protein, 14 aa, Homo sapiens
  CDR3 for beta chain variable domain of TCR clone 104317 (TRBV11-2, TRBJ2-3)
CASSRLARTDTQYF

SEQ ID NO: 208635 - protein, 14 aa, Homo sapiens
  CDR3 for alpha chain variable domain of TCR clone 104318 (TRAV12-1, TRAJ17)
CVVNYKAAGNKLTF

SEQ ID NO: 208636 - protein, 14 aa, Homo sapiens
  CDR3 for beta chain variable domain of TCR clone 104318 (TRBV28, TRBJ2-1)
CASSPATGYNEQFF

SEQ ID NO: 208637 - protein, 20 aa, Homo sapiens
  CDR3 for alpha chain variable domain of TCR clone 104319 (TRAV12-1, TRAJ42)
SSVIQPPTSVKGGSQGNLIF

SEQ ID NO: 208638 - protein, 13 aa, Homo sapiens
  CDR3 for beta chain variable domain of TCR clone 104319 (TRBV12-4, TRBJ1-2)
CASSLRQGKGYTF

SEQ ID NO: 208639 - protein, 16 aa, Homo sapiens
  CDR3 for alpha chain variable domain of TCR clone 104320 (TRAV27, TRAJ45)
CPPRGRRGGGADGLTF

SEQ ID NO: 208640 - protein, 12 aa, Homo sapiens
  CDR3 for beta chain variable domain of TCR clone 104320 (TRBV7-3, TRBJ2-1)
CASSFINNEQFF

SEQ ID NO: 208641 - protein, 16 aa, Homo sapiens
  CDR3 for alpha chain variable domain of TCR clone 104321 (TRAV30, TRAJ24)
CGTEIVDANSWGKFQF

SEQ ID NO: 208642 - protein, 14 aa, Homo sapiens
  CDR3 for beta chain variable domain of TCR clone 104321 (TRBV7-2, TRBJ2-7)
CASSPKTSFYEQYF

SEQ ID NO: 208643 - protein, 14 aa, Homo sapiens
  CDR3 for alpha chain variable domain of TCR clone 104322 (TRAV17, TRAJ33)
CATDARRSNYQLIW

SEQ ID NO: 208644 - protein, 14 aa, Homo sapiens
  CDR3 for beta chain variable domain of TCR clone 104322 (TRBV25-1, TRBJ1-4)
CASSGGGQPENLFF

SEQ ID NO: 208645 - protein, 10 aa, Homo sapiens
  CDR3 for alpha chain variable domain of TCR clone 104323 (TRAV38-2/DV8, TRAJ40)
CASGTYKYIF

SEQ ID NO: 208646 - protein, 16 aa, Homo sapiens
  CDR3 for beta chain variable domain of TCR clone 104323 (TRBV2, TRBJ2-5)
CASSARGLGGRETQYF

SEQ ID NO: 208647 - protein, 16 aa, Homo sapiens
  CDR3 for alpha chain variable domain of TCR clone 104324 (TRAV38-2/DV8, TRAJ47)
CAYRSAIMEYGNKLVF

SEQ ID NO: 208648 - protein, 14 aa, Homo sapiens
  CDR3 for beta chain variable domain of TCR clone 104324 (TRBV19, TRBJ2-7)
CASSIFAGTHEQYF

SEQ ID NO: 208649 - protein, 11 aa, Homo sapiens
  CDR3 for alpha chain variable domain of TCR clone 104325 (TRAV12-3, TRAJ43)
CAMSVSNDMRF

SEQ ID NO: 208650 - protein, 13 aa, Homo sapiens
  CDR3 for beta chain variable domain of TCR clone 104325 (TRBV19, TRBJ1-4)
CASSTTMGQKLFF

SEQ ID NO: 208651 - protein, 11 aa, Homo sapiens
  CDR3 for alpha chain variable domain of TCR clone 104326 (TRAV12-2, TRAJ31)
CAVTRWARLMF

SEQ ID NO: 208652 - protein, 15 aa, Homo sapiens
  CDR3 for beta chain variable domain of TCR clone 104326 (TRBV19, TRBJ2-7)
CASSIGGGIVNEQYF

SEQ ID NO: 208653 - protein, 14 aa, Homo sapiens
  CDR3 for alpha chain variable domain of TCR clone 104327 (TRAV8-1, TRAJ49)
CASSIANTGNQFYF

SEQ ID NO: 208654 - protein, 19 aa, Homo sapiens
  CDR3 for beta chain variable domain of TCR clone 104327 (TRBV28, TRBJ2-1)
CASSFSIRGSGRTRYEQFF

SEQ ID NO: 208655 - protein, 14 aa, Homo sapiens
  CDR3 for alpha chain variable domain of TCR clone 104328 (TRAV16, TRAJ54)
CALSGVQGAQKLEF

SEQ ID NO: 208656 - protein, 15 aa, Homo sapiens
  CDR3 for beta chain variable domain of TCR clone 104328 (TRBV18, TRBJ2-2)
CASSTSGLHTGELFF

SEQ ID NO: 208657 - protein, 13 aa, Homo sapiens
  CDR3 for alpha chain variable domain of TCR clone 104329 (TRAV12-1, TRAJ33)
CGDAPDSNYQLIW

SEQ ID NO: 208658 - protein, 14 aa, Homo sapiens
  CDR3 for beta chain variable domain of TCR clone 104329 (TRBV19, TRBJ2-1)
CASPTFVLSGGQFF

SEQ ID NO: 208659 - protein, 12 aa, Homo sapiens
  CDR3 for alpha chain variable domain of TCR clone 104330 (TRAV12-1, TRAJ40)
CVVYSGTYKDIF

SEQ ID NO: 208660 - protein, 14 aa, Homo sapiens
  CDR3 for beta chain variable domain of TCR clone 104330 (TRBV7-6, TRBJ2-1)
CASSLGGGADEQFF

SEQ ID NO: 208661 - protein, 16 aa, Homo sapiens
  CDR3 for alpha chain variable domain of TCR clone 104331 (TRAV8-3, TRAJ13)
CAVGAHPSGGYQKVTF

SEQ ID NO: 208662 - protein, 15 aa, Homo sapiens
  CDR3 for beta chain variable domain of TCR clone 104331 (TRBV19, TRBJ1-5)
CASSIVWADNQPQHF

SEQ ID NO: 208663 - protein, 13 aa, Homo sapiens
  CDR3 for alpha chain variable domain of TCR clone 104332 (TRAV21, TRAJ27)
CAARPGNAGKSTF

SEQ ID NO: 208664 - protein, 16 aa, Homo sapiens
  CDR3 for beta chain variable domain of TCR clone 104332 (TRBV10-3, TRBJ2-1)
CAISGVGDGGGGEQFF

SEQ ID NO: 208665 - protein, 12 aa, Homo sapiens
  CDR3 for alpha chain variable domain of TCR clone 104333 (TRAV12-3, TRAJ5)
CAMDTGRRALTF

SEQ ID NO: 208666 - protein, 12 aa, Homo sapiens
  CDR3 for beta chain variable domain of TCR clone 104333 (TRBV19, TRBJ2-1)
CASSRQGAEQFF

SEQ ID NO: 208667 - protein, 13 aa, Homo sapiens
  CDR3 for alpha chain variable domain of TCR clone 104334 (TRAV23/DV6, TRAJ16)
CAASISDGQKLLI

SEQ ID NO: 208668 - protein, 15 aa, Homo sapiens
  CDR3 for beta chain variable domain of TCR clone 104334 (TRBV2, TRBJ2-2)
CASSRETVGTGELFF

SEQ ID NO: 208669 - protein, 13 aa, Homo sapiens
  CDR3 for alpha chain variable domain of TCR clone 104335 (TRAV12-2, TRAJ45)
CPPERGGADGLTF

SEQ ID NO: 208670 - protein, 14 aa, Homo sapiens
  CDR3 for beta chain variable domain of TCR clone 104335 (TRBV18, TRBJ1-5)
CASSPGNSNQPQHF

SEQ ID NO: 208671 - protein, 14 aa, Homo sapiens
  CDR3 for alpha chain variable domain of TCR clone 104336 (TRAV1-2, TRAJ8)
CAVREDTGFQKLVF

SEQ ID NO: 208672 - protein, 16 aa, Homo sapiens
  CDR3 for beta chain variable domain of TCR clone 104336 (TRBV5-1, TRBJ2-3)
CASSLGLAVYTDTQYF

SEQ ID NO: 208673 - protein, 15 aa, Homo sapiens
  CDR3 for alpha chain variable domain of TCR clone 104337 (TRAV12-1, TRAJ44)
CVADLPTGTASKLTV

SEQ ID NO: 208674 - protein, 13 aa, Homo sapiens
  CDR3 for beta chain variable domain of TCR clone 104337 (TRBV6-5, TRBJ2-5)
CASSPQGGETQYF

SEQ ID NO: 208675 - protein, 18 aa, Homo sapiens
  CDR3 for alpha chain variable domain of TCR clone 104338 (TRAV21, TRAJ52)
CAVRPSPAGGTSYGTLTF

SEQ ID NO: 208676 - protein, 13 aa, Homo sapiens
  CDR3 for beta chain variable domain of TCR clone 104338 (TRBV2, TRBJ1-5)
CATAGPGNQPQHF

SEQ ID NO: 208677 - protein, 12 aa, Homo sapiens
  CDR3 for alpha chain variable domain of TCR clone 104339 (TRAV26-1, TRAJ26)
CIVFIYGQNFVS

SEQ ID NO: 208678 - protein, 13 aa, Homo sapiens
  CDR3 for beta chain variable domain of TCR clone 104339 (TRBV27, TRBJ1-1)
CASSLSIGAEAFF

SEQ ID NO: 208679 - protein, 12 aa, Homo sapiens
  CDR3 for alpha chain variable domain of TCR clone 104340 (TRAV17, TRAJ57)
CATDGGSEKLVF

SEQ ID NO: 208680 - protein, 12 aa, Homo sapiens
  CDR3 for beta chain variable domain of TCR clone 104340 (TRBV29-1, TRBJ2-2)
CSVDKYTGEPFF

SEQ ID NO: 208681 - protein, 12 aa, Homo sapiens
  CDR3 for alpha chain variable domain of TCR clone 104341 (TRAV12-3, TRAJ17)
CAVTLTGNKLTL

SEQ ID NO: 208682 - protein, 15 aa, Homo sapiens
  CDR3 for beta chain variable domain of TCR clone 104341 (TRBV20-1, TRBJ2-7)
CSARDRVSGMDEQYF

SEQ ID NO: 208683 - protein, 17 aa, Homo sapiens
  CDR3 for alpha chain variable domain of TCR clone 104342 (TRAV8-6, TRAJ58)
CAVSSWVGETSGSKLTF

SEQ ID NO: 208684 - protein, 14 aa, Homo sapiens
  CDR3 for beta chain variable domain of TCR clone 104342 (TRBV4-2, TRBJ2-1)
CASGLDRAYNEQFF

SEQ ID NO: 208685 - protein, 12 aa, Homo sapiens
  CDR3 for alpha chain variable domain of TCR clone 104343 (TRAV27, TRAJ36)
CAGMTGANNLFF

SEQ ID NO: 208686 - protein, 14 aa, Homo sapiens
  CDR3 for beta chain variable domain of TCR clone 104343 (TRBV12-4, TRBJ2-3)
YASSLVPSTDTQYF

SEQ ID NO: 208687 - protein, 14 aa, Homo sapiens
  CDR3 for alpha chain variable domain of TCR clone 104344 (TRAV12-2, TRAJ13)
CAVKKTGGYQKVTF

SEQ ID NO: 208688 - protein, 14 aa, Homo sapiens
  CDR3 for beta chain variable domain of TCR clone 104344 (TRBV19, TRBJ2-7)
CASSIFAGTYEQYF

SEQ ID NO: 208689 - protein, 11 aa, Homo sapiens
  CDR3 for alpha chain variable domain of TCR clone 104345 (TRAV1-2, TRAJ31)
CAVNNNARLMF

SEQ ID NO: 208690 - protein, 15 aa, Homo sapiens
  CDR3 for beta chain variable domain of TCR clone 104345 (TRBV28, TRBJ2-1)
CASSIIVGGRSEQFF

SEQ ID NO: 208691 - protein, 10 aa, Homo sapiens
  CDR3 for alpha chain variable domain of TCR clone 104346 (TRAV12-1, TRAJ20)
CVVNPRKLSF

SEQ ID NO: 208692 - protein, 14 aa, Homo sapiens
  CDR3 for beta chain variable domain of TCR clone 104346 (TRBV11-1, TRBJ2-7)
CASTFAVPSYEQYF

SEQ ID NO: 208693 - protein, 13 aa, Homo sapiens
  CDR3 for alpha chain variable domain of TCR clone 104347 (TRAV1-2, TRAJ9)
CAALNTGGFKTIF

SEQ ID NO: 208694 - protein, 14 aa, Homo sapiens
  CDR3 for beta chain variable domain of TCR clone 104347 (TRBV23-1, TRBJ2-5)
CASSFLRSQETQYF

SEQ ID NO: 208695 - protein, 13 aa, Homo sapiens
  CDR3 for alpha chain variable domain of TCR clone 104348 (TRAV29/DV5, TRAJ31)
CAASRNNNARLMF

SEQ ID NO: 208696 - protein, 16 aa, Homo sapiens
  CDR3 for beta chain variable domain of TCR clone 104348 (TRBV7-2, TRBJ2-3)
CASSLARASGISTQYF

SEQ ID NO: 208697 - protein, 12 aa, Homo sapiens
  CDR3 for alpha chain variable domain of TCR clone 104349 (TRAV16, TRAJ26)
CASKDGGQNFVF

SEQ ID NO: 208698 - protein, 13 aa, Homo sapiens
  CDR3 for beta chain variable domain of TCR clone 104349 (TRBV25-1, TRBJ1-1)
CASSDRGGAEAFF

SEQ ID NO: 208699 - protein, 15 aa, Homo sapiens
  CDR3 for alpha chain variable domain of TCR clone 104350 (TRAV3, TRAJ3)
CAVRDMSSSASKIIF

SEQ ID NO: 208700 - protein, 14 aa, Homo sapiens
  CDR3 for beta chain variable domain of TCR clone 104350 (TRBV19, TRBJ2-1)
CASPTVVLSGEQFF

SEQ ID NO: 208701 - protein, 12 aa, Homo sapiens
  CDR3 for alpha chain variable domain of TCR clone 104351 (TRAV13-1, TRAJ15)
CAASQAGTALIF

SEQ ID NO: 208702 - protein, 18 aa, Homo sapiens
  CDR3 for beta chain variable domain of TCR clone 104351 (TRBV7-9, TRBJ2-3)
CASSLPITGQISTDTQYF

SEQ ID NO: 208703 - protein, 16 aa, Homo sapiens
  CDR3 for alpha chain variable domain of TCR clone 104352 (TRAV4, TRAJ5)
CLVGPDHGHGQESTYF

SEQ ID NO: 208704 - protein, 15 aa, Homo sapiens
  CDR3 for beta chain variable domain of TCR clone 104352 (TRBV27, TRBJ2-5)
CASSLMPSGGETQYF

SEQ ID NO: 208705 - protein, 18 aa, Homo sapiens
  CDR3 for alpha chain variable domain of TCR clone 104353 (TRAV8-3, TRAJ4)
WVRDPTSNDPGGYNKLIF

SEQ ID NO: 208706 - protein, 13 aa, Homo sapiens
  CDR3 for beta chain variable domain of TCR clone 104353 (TRBV20-1, TRBJ1-2)
CSATGIQGSGYTS

SEQ ID NO: 208707 - protein, 13 aa, Homo sapiens
  CDR3 for alpha chain variable domain of TCR clone 104354 (TRAV12-2, TRAJ4)
CAVRSGGSNKLIF

SEQ ID NO: 208708 - protein, 15 aa, Homo sapiens
  CDR3 for beta chain variable domain of TCR clone 104354 (TRBV10-3, TRBJ2-1)
CAISDVQDRAYEQFF

SEQ ID NO: 208709 - protein, 12 aa, Homo sapiens
  CDR3 for alpha chain variable domain of TCR clone 104355 (TRAV13-2, TRAJ23)
CAERHRGGKLIF

SEQ ID NO: 208710 - protein, 16 aa, Homo sapiens
  CDR3 for beta chain variable domain of TCR clone 104355 (TRBV4-2, TRBJ2-7)
CASSQDGGSLRGEQYF

SEQ ID NO: 208711 - protein, 16 aa, Homo sapiens
  CDR3 for alpha chain variable domain of TCR clone 104356 (TRAV12-1, TRAJ22)
CVVNIISSGSARQLTF

SEQ ID NO: 208712 - protein, 16 aa, Homo sapiens
  CDR3 for beta chain variable domain of TCR clone 104356 (TRBV20-1, TRBJ2-1)
CSARDLKQGMNNEQFF

SEQ ID NO: 208713 - protein, 15 aa, Homo sapiens
  CDR3 for alpha chain variable domain of TCR clone 104357 (TRAV34, TRAJ38)
CGADFTPGNNRKLIW

SEQ ID NO: 208714 - protein, 16 aa, Homo sapiens
  CDR3 for beta chain variable domain of TCR clone 104357 (TRBV19, TRBJ2-1)
CASSKAGPSSYNEQFF

SEQ ID NO: 208715 - protein, 13 aa, Homo sapiens
  CDR3 for alpha chain variable domain of TCR clone 104358 (TRAV17, TRAJ9)
CATDYTGGFKTVF

SEQ ID NO: 208716 - protein, 16 aa, Homo sapiens
  CDR3 for beta chain variable domain of TCR clone 104358 (TRBV7-7, TRBJ2-1)
CASSLASGTSYNEQFL

SEQ ID NO: 208717 - protein, 14 aa, Homo sapiens
  CDR3 for alpha chain variable domain of TCR clone 104359 (TRAV23/DV6, TRAJ39)
CAASIGNAGNMLTF

SEQ ID NO: 208718 - protein, 12 aa, Homo sapiens
  CDR3 for beta chain variable domain of TCR clone 104359 (TRBV11-2, TRBJ2-2)
CASSLGGGELFF

SEQ ID NO: 208719 - protein, 16 aa, Homo sapiens
  CDR3 for alpha chain variable domain of TCR clone 104360 (TRAV8-3, TRAJ8)
CAVPRDRNTGFQKLVF

SEQ ID NO: 208720 - protein, 15 aa, Homo sapiens
  CDR3 for beta chain variable domain of TCR clone 104360 (TRBV6-1, TRBJ2-6)
CASSSRPSGANVLTF

SEQ ID NO: 208721 - protein, 13 aa, Homo sapiens
  CDR3 for alpha chain variable domain of TCR clone 104361 (TRAV25, TRAJ40)
CAGSALGTYKYIF

SEQ ID NO: 208722 - protein, 14 aa, Homo sapiens
  CDR3 for beta chain variable domain of TCR clone 104361 (TRBV7-2, TRBJ2-7)
CASRSQGAAYEQYF

SEQ ID NO: 208723 - protein, 14 aa, Homo sapiens
  CDR3 for alpha chain variable domain of TCR clone 104362 (TRAV29/DV5, TRAJ36)
CAARRKTGANNLFF

SEQ ID NO: 208724 - protein, 14 aa, Homo sapiens
  CDR3 for beta chain variable domain of TCR clone 104362 (TRBV6-5, TRBJ2-1)
CASRPQGRGNEQFF

SEQ ID NO: 208725 - protein, 14 aa, Homo sapiens
  CDR3 for alpha chain variable domain of TCR clone 104363 (TRAV2, TRAJ37)
CAVDFTSNTGKLIF

SEQ ID NO: 208726 - protein, 15 aa, Homo sapiens
  CDR3 for beta chain variable domain of TCR clone 104363 (TRBV20-1, TRBJ1-1)
CSASQGVTGNTEALF

SEQ ID NO: 208727 - protein, 14 aa, Homo sapiens
  CDR3 for alpha chain variable domain of TCR clone 104364 (TRAV1-1, TRAJ23)
CAVSIYNQGGKLIF

SEQ ID NO: 208728 - protein, 13 aa, Homo sapiens
  CDR3 for beta chain variable domain of TCR clone 104364 (TRBV20-1, TRBJ1-1)
CSARGGGNTEAFF

SEQ ID NO: 208729 - protein, 14 aa, Homo sapiens
  CDR3 for alpha chain variable domain of TCR clone 104365 (TRAV23/DV6, TRAJ37)
CAASTSSNRGKLIF

SEQ ID NO: 208730 - protein, 13 aa, Homo sapiens
  CDR3 for beta chain variable domain of TCR clone 104365 (TRBV7-7, TRBJ1-1)
CASSLGANTEAFF

SEQ ID NO: 208731 - protein, 14 aa, Homo sapiens
  CDR3 for alpha chain variable domain of TCR clone 104366 (TRAV12-1, TRAJ17)
CVGNYKAAGNKLTF

SEQ ID NO: 208732 - protein, 13 aa, Homo sapiens
  CDR3 for beta chain variable domain of TCR clone 104366 (TRBV19, TRBJ2-7)
CASRKAGGSEQYF

SEQ ID NO: 208733 - protein, 14 aa, Homo sapiens
  CDR3 for alpha chain variable domain of TCR clone 104367 (TRAV1-2, TRAJ16)
CAVNRFSDGQKLLF

SEQ ID NO: 208734 - protein, 14 aa, Homo sapiens
  CDR3 for beta chain variable domain of TCR clone 104367 (TRBV11-2, TRBJ2-3)
CASSRLARTDTRYF

SEQ ID NO: 208735 - protein, 12 aa, Homo sapiens
  CDR3 for alpha chain variable domain of TCR clone 104368 (TRAV30, TRAJ20)
CGTESNDYKLSF

SEQ ID NO: 208736 - protein, 15 aa, Homo sapiens
  CDR3 for beta chain variable domain of TCR clone 104368 (TRBV20-1, TRBJ2-7)
RSARDRVSGMDEQYF

SEQ ID NO: 208737 - protein, 14 aa, Homo sapiens
  CDR3 for alpha chain variable domain of TCR clone 104369 (TRAV16, TRAJ26)
CALSSANYGQHFVF

SEQ ID NO: 208738 - protein, 12 aa, Homo sapiens
  CDR3 for beta chain variable domain of TCR clone 104369 (TRBV6-5, TRBJ2-2)
CASRTGTGELFF

SEQ ID NO: 208739 - protein, 16 aa, Homo sapiens
  CDR3 for alpha chain variable domain of TCR clone 104370 (TRAV23/DV6, TRAJ9)
CAASTGGNTGGFKTIF

SEQ ID NO: 208740 - protein, 14 aa, Homo sapiens
  CDR3 for beta chain variable domain of TCR clone 104370 (TRBV9, TRBJ2-7)
CASSVGVGSYEQYF

SEQ ID NO: 208741 - protein, 13 aa, Homo sapiens
  CDR3 for alpha chain variable domain of TCR clone 104371 (TRAV23/DV6, TRAJ22)
CAPYSGSARQLTF

SEQ ID NO: 208742 - protein, 14 aa, Homo sapiens
  CDR3 for beta chain variable domain of TCR clone 104371 (TRBV7-2, TRBJ2-7)
CASSLPPGQGPQYF

SEQ ID NO: 208743 - protein, 18 aa, Homo sapiens
  CDR3 for alpha chain variable domain of TCR clone 104372 (TRAV13-2, TRAJ22)
CCLLLCLGWISSARQLTF

SEQ ID NO: 208744 - protein, 15 aa, Homo sapiens
  CDR3 for beta chain variable domain of TCR clone 104372 (TRBV7-2, TRBJ2-3)
CASSSTGLETDTQYF

SEQ ID NO: 208745 - protein, 15 aa, Homo sapiens
  CDR3 for alpha chain variable domain of TCR clone 104373 (TRAV12-3, TRAJ27)
CAMRAYNTNAGKSTF

SEQ ID NO: 208746 - protein, 13 aa, Homo sapiens
  CDR3 for beta chain variable domain of TCR clone 104373 (TRBV7-2, TRBJ2-5)
CASSQTSVETQYF

SEQ ID NO: 208747 - protein, 14 aa, Homo sapiens
  CDR3 for alpha chain variable domain of TCR clone 104374 (TRAV1-2, TRAJ16)
CAVNRFSDGQKLLF

SEQ ID NO: 208748 - protein, 13 aa, Homo sapiens
  CDR3 for beta chain variable domain of TCR clone 104374 (TRBV11-3, TRBJ1-2)
CASSQRTSRGYTF

SEQ ID NO: 208749 - protein, 11 aa, Homo sapiens
  CDR3 for alpha chain variable domain of TCR clone 104375 (TRAV12-1, TRAJ21)
CVVNNFNKFYF

SEQ ID NO: 208750 - protein, 14 aa, Homo sapiens
  CDR3 for beta chain variable domain of TCR clone 104375 (TRBV12-5, TRBJ2-5)
CASGSRTHQETQYF

SEQ ID NO: 208751 - protein, 13 aa, Homo sapiens
  CDR3 for alpha chain variable domain of TCR clone 104376 (TRAV12-1, TRAJ11)
CVVTRGGYSTLTF

SEQ ID NO: 208752 - protein, 15 aa, Homo sapiens
  CDR3 for beta chain variable domain of TCR clone 104376 (TRBV18, TRBJ2-1)
CASSPPSASYNEQFF

SEQ ID NO: 208753 - protein, 14 aa, Homo sapiens
  CDR3 for alpha chain variable domain of TCR clone 104377 (TRAV38-1, TRAJ40)
CALRPTSGTYKYIF

SEQ ID NO: 208754 - protein, 12 aa, Homo sapiens
  CDR3 for beta chain variable domain of TCR clone 104377 (TRBV11-2, TRBJ2-2)
CASSLPTGELFF

SEQ ID NO: 208755 - protein, 14 aa, Homo sapiens
  CDR3 for alpha chain variable domain of TCR clone 104378 (TRAV1-2, TRAJ16)
CAVNRFSDVQKLLF

SEQ ID NO: 208756 - protein, 14 aa, Homo sapiens
  CDR3 for beta chain variable domain of TCR clone 104378 (TRBV7-2, TRBJ2-7)
CASSPKTSFYEQYF

SEQ ID NO: 208757 - protein, 20 aa, Homo sapiens
  CDR3 for alpha chain variable domain of TCR clone 104379 (TRAV12-3, TRAJ41)
SLFIRDSQPSDSATPEALNL

SEQ ID NO: 208758 - protein, 13 aa, Homo sapiens
  CDR3 for beta chain variable domain of TCR clone 104379 (TRBV10-3, TRBJ2-3)
CAIRDTGADTQYF

SEQ ID NO: 208759 - protein, 12 aa, Homo sapiens
  CDR3 for alpha chain variable domain of TCR clone 104380 (TRAV27, TRAJ13)
CAGVRGYQKVTF

SEQ ID NO: 208760 - protein, 16 aa, Homo sapiens
  CDR3 for beta chain variable domain of TCR clone 104380 (TRBV28, TRBJ2-1)
CASSSSYSGSLSEQFF

SEQ ID NO: 208761 - protein, 15 aa, Homo sapiens
  CDR3 for alpha chain variable domain of TCR clone 104381 (TRAV8-3, TRAJ40)
CAAHSLGSGTYKYIF

SEQ ID NO: 208762 - protein, 16 aa, Homo sapiens
  CDR3 for beta chain variable domain of TCR clone 104381 (TRBV7-3, TRBJ2-3)
CASSLSGYRPEDTQYF

SEQ ID NO: 208763 - protein, 16 aa, Homo sapiens
  CDR3 for alpha chain variable domain of TCR clone 104382 (TRAV30, TRAJ24)
CGTEIVDADSWGKFQF

SEQ ID NO: 208764 - protein, 16 aa, Homo sapiens
  CDR3 for beta chain variable domain of TCR clone 104382 (TRBV2, TRBJ1-3)
CASSGGAGRSGNTIYF

SEQ ID NO: 208765 - protein, 12 aa, Homo sapiens
  CDR3 for alpha chain variable domain of TCR clone 104383 (TRAV12-3, TRAJ17)
CAMTLTGNKLTL

SEQ ID NO: 208766 - protein, 16 aa, Homo sapiens
  CDR3 for beta chain variable domain of TCR clone 104383 (TRBV19, TRBJ2-1)
CASSKAGPSSYNEQFF

SEQ ID NO: 208767 - protein, 17 aa, Homo sapiens
  CDR3 for alpha chain variable domain of TCR clone 104384 (TRAV26-2, TRAJ42)
CILRDVGYGVSQGNLIF

SEQ ID NO: 208768 - protein, 16 aa, Homo sapiens
  CDR3 for beta chain variable domain of TCR clone 104384 (TRBV12-4, TRBJ2-7)
CASSLIGGTGTYEQYF

SEQ ID NO: 208769 - protein, 14 aa, Homo sapiens
  CDR3 for alpha chain variable domain of TCR clone 104385 (TRAV12-3, TRAJ10)
SHLPLTGGGNKLTF

SEQ ID NO: 208770 - protein, 15 aa, Homo sapiens
  CDR3 for beta chain variable domain of TCR clone 104385 (TRBV10-3, TRBJ1-3)
CAISDSQGAGDTIYF

SEQ ID NO: 208771 - protein, 15 aa, Homo sapiens
  CDR3 for alpha chain variable domain of TCR clone 104386 (TRAV8-3, TRAJ44)
CAVGAGAGTASKLTF

SEQ ID NO: 208772 - protein, 12 aa, Homo sapiens
  CDR3 for beta chain variable domain of TCR clone 104386 (TRBV7-8, TRBJ2-4)
CASILGGNIQYF

SEQ ID NO: 208773 - protein, 14 aa, Homo sapiens
  CDR3 for alpha chain variable domain of TCR clone 104387 (TRAV21, TRAJ37)
CAVKGSSNTGRLIF

SEQ ID NO: 208774 - protein, 13 aa, Homo sapiens
  CDR3 for beta chain variable domain of TCR clone 104387 (TRBV7-2, TRBJ2-5)
CASSQTSVETQYF

SEQ ID NO: 208775 - protein, 11 aa, Homo sapiens
  CDR3 for alpha chain variable domain of TCR clone 104388 (TRAV12-2, TRAJ42)
CAPGSQGNPIF

SEQ ID NO: 208776 - protein, 14 aa, Homo sapiens
  CDR3 for beta chain variable domain of TCR clone 104388 (TRBV7-6, TRBJ2-3)
CASSLGTVTDTQYF

SEQ ID NO: 208777 - protein, 15 aa, Homo sapiens
  CDR3 for alpha chain variable domain of TCR clone 104389 (TRAV25, TRAJ53)
CPTSNSGGSNYKLTF

SEQ ID NO: 208778 - protein, 13 aa, Homo sapiens
  CDR3 for beta chain variable domain of TCR clone 104389 (TRBV4-1, TRBJ2-7)
CASSQGQAYEQYF

SEQ ID NO: 208779 - protein, 13 aa, Homo sapiens
  CDR3 for alpha chain variable domain of TCR clone 104390 (TRAV21, TRAJ40)
CAVRPSRAYKYIF

SEQ ID NO: 208780 - protein, 14 aa, Homo sapiens
  CDR3 for beta chain variable domain of TCR clone 104390 (TRBV7-6, TRBJ2-3)
CASSLGTVTDTQYF

SEQ ID NO: 208781 - protein, 14 aa, Homo sapiens
  CDR3 for alpha chain variable domain of TCR clone 104391 (TRAV12-3, TRAJ10)
SHLPLTGGGNKLTF

SEQ ID NO: 208782 - protein, 13 aa, Homo sapiens
  CDR3 for beta chain variable domain of TCR clone 104391 (TRBV5-7, TRBJ2-6)
CASTSSGANVLTF

SEQ ID NO: 208783 - protein, 12 aa, Homo sapiens
  CDR3 for alpha chain variable domain of TCR clone 104392 (TRAV27, TRAJ9)
CAGESGGFKTIF

SEQ ID NO: 208784 - protein, 12 aa, Homo sapiens
  CDR3 for beta chain variable domain of TCR clone 104392 (TRBV11-2, TRBJ2-1)
CASSPGNNEQFF

SEQ ID NO: 208785 - protein, 14 aa, Homo sapiens
  CDR3 for alpha chain variable domain of TCR clone 104393 (TRAV8-3, TRAJ4)
CAVGASGCYNKLIF

SEQ ID NO: 208786 - protein, 16 aa, Homo sapiens
  CDR3 for beta chain variable domain of TCR clone 104393 (TRBV4-3, TRBJ2-2)
CASSHLQGSGTGELFF

SEQ ID NO: 208787 - protein, 16 aa, Homo sapiens
  CDR3 for alpha chain variable domain of TCR clone 104394 (TRAV14/DV4, TRAJ54)
CAMREGRIQGAQKLVF

SEQ ID NO: 208788 - protein, 14 aa, Homo sapiens
  CDR3 for beta chain variable domain of TCR clone 104394 (TRBV7-2, TRBJ2-7)
CASRSQRAAYEQYF

SEQ ID NO: 208789 - protein, 13 aa, Homo sapiens
  CDR3 for alpha chain variable domain of TCR clone 104395 (TRAV27, TRAJ17)
CAGAATAGNKLTF

SEQ ID NO: 208790 - protein, 13 aa, Homo sapiens
  CDR3 for beta chain variable domain of TCR clone 104395 (TRBV7-9, TRBJ1-2)
CASSLKQNYGYTF

SEQ ID NO: 208791 - protein, 15 aa, Homo sapiens
  CDR3 for alpha chain variable domain of TCR clone 104396 (TRAV13-2, TRAJ40)
CAENRSRQGTYKYIF

SEQ ID NO: 208792 - protein, 15 aa, Homo sapiens
  CDR3 for beta chain variable domain of TCR clone 104396 (TRBV19, TRBJ2-1)
CASSMGWNSNNVQFF

SEQ ID NO: 208793 - protein, 13 aa, Homo sapiens
  CDR3 for alpha chain variable domain of TCR clone 104397 (TRAV12-1, TRAJ21)
CVVTLYNFNKFYF

SEQ ID NO: 208794 - protein, 13 aa, Homo sapiens
  CDR3 for beta chain variable domain of TCR clone 104397 (TRBV7-9, TRBJ1-2)
CASSLKQNYGYTF

SEQ ID NO: 208795 - protein, 14 aa, Homo sapiens
  CDR3 for alpha chain variable domain of TCR clone 104398 (TRAV3, TRAJ9)
CAVRLNIGGFKTIF

SEQ ID NO: 208796 - protein, 16 aa, Homo sapiens
  CDR3 for beta chain variable domain of TCR clone 104398 (TRBV12-5, TRBJ2-5)
CASGPRTSGNQETQYF

SEQ ID NO: 208797 - protein, 11 aa, Homo sapiens
  CDR3 for alpha chain variable domain of TCR clone 104399 (TRAV1-2, TRAJ20)
CAVANDYKLSF

SEQ ID NO: 208798 - protein, 18 aa, Homo sapiens
  CDR3 for beta chain variable domain of TCR clone 104399 (TRBV20-1, TRBJ2-6)
CCAETTPTHGSGANVLTF

SEQ ID NO: 208799 - protein, 14 aa, Homo sapiens
  CDR3 for alpha chain variable domain of TCR clone 104400 (TRAV26-1, TRAJ26)
CIVRATFLGQNFVF

SEQ ID NO: 208800 - protein, 16 aa, Homo sapiens
  CDR3 for beta chain variable domain of TCR clone 104400 (TRBV12-4, TRBJ2-7)
CASSSTGTGPSYEQYV

SEQ ID NO: 208801 - protein, 14 aa, Homo sapiens
  CDR3 for alpha chain variable domain of TCR clone 104401 (TRAV12-2, TRAJ40)
CAVKIPSGTYKYTF

SEQ ID NO: 208802 - protein, 15 aa, Homo sapiens
  CDR3 for beta chain variable domain of TCR clone 104401 (TRBV2, TRBJ2-7)
CASSEGLARSYEQYF

SEQ ID NO: 208803 - protein, 13 aa, Homo sapiens
  CDR3 for alpha chain variable domain of TCR clone 104402 (TRAV30, TRAJ34)
CGTVGYNTDKLIF

SEQ ID NO: 208804 - protein, 11 aa, Homo sapiens
  CDR3 for beta chain variable domain of TCR clone 104402 (TRBV6-1, TRBJ2-1)
CASRGYNEQFF

SEQ ID NO: 208805 - protein, 16 aa, Homo sapiens
  CDR3 for alpha chain variable domain of TCR clone 104403 (TRAV30, TRAJ24)
CGTEIVDADSWGKFQF

SEQ ID NO: 208806 - protein, 15 aa, Homo sapiens
  CDR3 for beta chain variable domain of TCR clone 104403 (TRBV20-1, TRBJ2-7)
CSARERVSGMDEQYF

SEQ ID NO: 208807 - protein, 16 aa, Homo sapiens
  CDR3 for alpha chain variable domain of TCR clone 104404 (TRAV3, TRAJ10)
CAVRDMRAGGGNKLTF

SEQ ID NO: 208808 - protein, 16 aa, Homo sapiens
  CDR3 for beta chain variable domain of TCR clone 104404 (TRBV7-2, TRBJ1-2)
CASSSNQDRRGHGYTF

SEQ ID NO: 208809 - protein, 15 aa, Homo sapiens
  CDR3 for alpha chain variable domain of TCR clone 104405 (TRAV26-1, TRAJ29)
CIVRVEGSGNTPLVF

SEQ ID NO: 208810 - protein, 14 aa, Homo sapiens
  CDR3 for beta chain variable domain of TCR clone 104405 (TRBV12-4, TRBJ2-5)
CASSLWQKQETQYF

SEQ ID NO: 208811 - protein, 14 aa, Homo sapiens
  CDR3 for alpha chain variable domain of TCR clone 104406 (TRAV23/DV6, TRAJ4)
CAAPSSGGYNKLIF

SEQ ID NO: 208812 - protein, 16 aa, Homo sapiens
  CDR3 for beta chain variable domain of TCR clone 104406 (TRBV19, TRBJ1-1)
CGSRFGGPVTGTEAFF

SEQ ID NO: 208813 - protein, 14 aa, Homo sapiens
  CDR3 for alpha chain variable domain of TCR clone 104407 (TRAV26-1, TRAJ44)
CISPLPGTASKLTF

SEQ ID NO: 208814 - protein, 13 aa, Homo sapiens
  CDR3 for beta chain variable domain of TCR clone 104407 (TRBV7-9, TRBJ1-2)
CASSLKQNYGYTF

SEQ ID NO: 208815 - protein, 12 aa, Homo sapiens
  CDR3 for alpha chain variable domain of TCR clone 104408 (TRAV12-2, TRAJ20)
CAVNRNDYKLSF

SEQ ID NO: 208816 - protein, 16 aa, Homo sapiens
  CDR3 for beta chain variable domain of TCR clone 104408 (TRBV7-3, TRBJ1-2)
CASRLGAPVPNYGYTF

SEQ ID NO: 208817 - protein, 12 aa, Homo sapiens
  CDR3 for alpha chain variable domain of TCR clone 104409 (TRAV12-2, TRAJ30)
CAVRNRDDKITF

SEQ ID NO: 208818 - protein, 15 aa, Homo sapiens
  CDR3 for beta chain variable domain of TCR clone 104409 (TRBV6-3, TRBJ1-5)
CASRVDRWSNQPQHF

SEQ ID NO: 208819 - protein, 11 aa, Homo sapiens
  CDR3 for alpha chain variable domain of TCR clone 104410 (TRAV35, TRAJ30)
CAGERDDKIIF

SEQ ID NO: 208820 - protein, 14 aa, Homo sapiens
  CDR3 for beta chain variable domain of TCR clone 104410 (TRBV15, TRBJ2-5)
CATSRDRGQETQYF

SEQ ID NO: 208821 - protein, 17 aa, Homo sapiens
  CDR3 for alpha chain variable domain of TCR clone 104411 (TRAV3, TRAJ12)
CAVRDGGRMDSSYQLIF

SEQ ID NO: 208822 - protein, 13 aa, Homo sapiens
  CDR3 for beta chain variable domain of TCR clone 104411 (TRBV4-2, TRBJ1-1)
CASSQAGNTEAFF

SEQ ID NO: 208823 - protein, 14 aa, Homo sapiens
  CDR3 for alpha chain variable domain of TCR clone 104412 (TRAV2, TRAJ37)
CAVDFTSNTGKLVF

SEQ ID NO: 208824 - protein, 14 aa, Homo sapiens
  CDR3 for beta chain variable domain of TCR clone 104412 (TRBV6-1, TRBJ1-3)
CASVQGGGGNTIYF

SEQ ID NO: 208825 - protein, 14 aa, Homo sapiens
  CDR3 for alpha chain variable domain of TCR clone 104413 (TRAV17, TRAJ57)
CATDPQGGSEKLVF

SEQ ID NO: 208826 - protein, 16 aa, Homo sapiens
  CDR3 for beta chain variable domain of TCR clone 104413 (TRBV7-3, TRBJ2-1)
CASSLSSGGGAKEQFF

SEQ ID NO: 208827 - protein, 11 aa, Homo sapiens
  CDR3 for alpha chain variable domain of TCR clone 104414 (TRAV12-1, TRAJ37)
CVVNTPGKLIF

SEQ ID NO: 208828 - protein, 13 aa, Homo sapiens
  CDR3 for beta chain variable domain of TCR clone 104414 (TRBV12-4, TRBJ1-5)
RASSPDRAQPQHF

SEQ ID NO: 208829 - protein, 16 aa, Homo sapiens
  CDR3 for alpha chain variable domain of TCR clone 104415 (TRAV12-3, TRAJ53)
CAMSPGSGGSNYKLTF

SEQ ID NO: 208830 - protein, 12 aa, Homo sapiens
  CDR3 for beta chain variable domain of TCR clone 104415 (TRBV7-2, TRBJ2-5)
CASSQYQETQYF

SEQ ID NO: 208831 - protein, 16 aa, Homo sapiens
  CDR3 for alpha chain variable domain of TCR clone 104416 (TRAV12-3, TRAJ53)
CAMSPGSGGSNYKLTF

SEQ ID NO: 208832 - protein, 15 aa, Homo sapiens
  CDR3 for beta chain variable domain of TCR clone 104416 (TRBV6-1, TRBJ2-1)
CASSELRGQYNEQFF

SEQ ID NO: 208833 - protein, 14 aa, Homo sapiens
  CDR3 for alpha chain variable domain of TCR clone 104417 (TRAV29/DV5, TRAJ45)
CAASFRGGADGLTF

SEQ ID NO: 208834 - protein, 13 aa, Homo sapiens
  CDR3 for beta chain variable domain of TCR clone 104417 (TRBV20-1, TRBJ1-1)
CSARGGGNTEAFF

SEQ ID NO: 208835 - protein, 13 aa, Homo sapiens
  CDR3 for alpha chain variable domain of TCR clone 104418 (TRAV21, TRAJ27)
CAARPGNAGKSTF

SEQ ID NO: 208836 - protein, 12 aa, Homo sapiens
  CDR3 for beta chain variable domain of TCR clone 104418 (TRBV6-3, TRBJ2-7)
CASLGSYYEQYF

SEQ ID NO: 208837 - protein, 14 aa, Homo sapiens
  CDR3 for alpha chain variable domain of TCR clone 104419 (TRAV26-1, TRAJ39)
CIVRGSRAGNMLTF

SEQ ID NO: 208838 - protein, 16 aa, Homo sapiens
  CDR3 for beta chain variable domain of TCR clone 104419 (TRBV7-6, TRBJ2-1)
CASSAPGPSSYNEQFF

SEQ ID NO: 208839 - protein, 15 aa, Homo sapiens
  CDR3 for alpha chain variable domain of TCR clone 104420 (TRAV2, TRAJ22)
CAVPSRGGSARQLTC

SEQ ID NO: 208840 - protein, 11 aa, Homo sapiens
  CDR3 for beta chain variable domain of TCR clone 104420 (TRBV27, TRBJ2-3)
CASSLGDTQYF

SEQ ID NO: 208841 - protein, 12 aa, Homo sapiens
  CDR3 for alpha chain variable domain of TCR clone 104421 (TRAV16, TRAJ10)
CSRTGGGNKLTF

SEQ ID NO: 208842 - protein, 13 aa, Homo sapiens
  CDR3 for beta chain variable domain of TCR clone 104421 (TRBV7-3, TRBJ1-2)
CASSLKRGYGYTF

SEQ ID NO: 208843 - protein, 15 aa, Homo sapiens
  CDR3 for alpha chain variable domain of TCR clone 104422 (TRAV2, TRAJ24)
CAVEVLTDSWGKFQF

SEQ ID NO: 208844 - protein, 14 aa, Homo sapiens
  CDR3 for beta chain variable domain of TCR clone 104422 (TRBV19, TRBJ2-1)
CASSMGSGLRSSSS

SEQ ID NO: 208845 - protein, 11 aa, Homo sapiens
  CDR3 for alpha chain variable domain of TCR clone 104423 (TRAV2, TRAJ13)
CASVGYQKVTF

SEQ ID NO: 208846 - protein, 15 aa, Homo sapiens
  CDR3 for beta chain variable domain of TCR clone 104423 (TRBV11-2, TRBJ2-2)
CASSSDRVNAGELFF

SEQ ID NO: 208847 - protein, 16 aa, Homo sapiens
  CDR3 for alpha chain variable domain of TCR clone 104424 (TRAV2, TRAJ4)
CAVEDRFSGGYNKLMF

SEQ ID NO: 208848 - protein, 13 aa, Homo sapiens
  CDR3 for beta chain variable domain of TCR clone 104424 (TRBV7-7, TRBJ2-5)
CASSRSGQETQYF

SEQ ID NO: 208849 - protein, 14 aa, Homo sapiens
  CDR3 for alpha chain variable domain of TCR clone 104425 (TRAV17, TRAJ57)
CATDPQGGSEKLVF

SEQ ID NO: 208850 - protein, 13 aa, Homo sapiens
  CDR3 for beta chain variable domain of TCR clone 104425 (TRBV2, TRBJ1-6)
CADSGSYNSPLHF

SEQ ID NO: 208851 - protein, 15 aa, Homo sapiens
  CDR3 for alpha chain variable domain of TCR clone 104426 (TRAV12-3, TRAJ6)
CAMSATTGGSYIPTF

SEQ ID NO: 208852 - protein, 15 aa, Homo sapiens
  CDR3 for beta chain variable domain of TCR clone 104426 (TRBV19, TRBJ2-4)
CASRGPRRGENIQYF

SEQ ID NO: 208853 - protein, 14 aa, Homo sapiens
  CDR3 for alpha chain variable domain of TCR clone 104427 (TRAV1-2, TRAJ16)
CAVNRFSDGQKLLF

SEQ ID NO: 208854 - protein, 15 aa, Homo sapiens
  CDR3 for beta chain variable domain of TCR clone 104427 (TRBV5-1, TRBJ1-1)
CASSLAPRGNTEAFF

SEQ ID NO: 208855 - protein, 15 aa, Homo sapiens
  CDR3 for alpha chain variable domain of TCR clone 104428 (TRAV26-1, TRAJ29)
CIVRVEGSGNTPLVF

SEQ ID NO: 208856 - protein, 15 aa, Homo sapiens
  CDR3 for beta chain variable domain of TCR clone 104428 (TRBV7-9, TRBJ1-5)
CASSQGHQPNQHQLF

SEQ ID NO: 208857 - protein, 16 aa, Homo sapiens
  CDR3 for alpha chain variable domain of TCR clone 104429 (TRAV26-1, TRAJ53)
CIVRVVMGGSNYKLTF

SEQ ID NO: 208858 - protein, 12 aa, Homo sapiens
  CDR3 for beta chain variable domain of TCR clone 104429 (TRBV7-9, TRBJ1-5)
CASSPQGQPQHF

SEQ ID NO: 208859 - protein, 22 aa, Homo sapiens
  CDR3 for alpha chain variable domain of TCR clone 104430 (TRAV3, TRAJ38)
CAVRDCLNAGNNHIQNPDPAVY

SEQ ID NO: 208860 - protein, 20 aa, Homo sapiens
  CDR3 for beta chain variable domain of TCR clone 104430 (TRBV7-8, TRBJ2-2)
CASSHLFPGPTIHITGELFF

SEQ ID NO: 208861 - protein, 14 aa, Homo sapiens
  CDR3 for alpha chain variable domain of TCR clone 104431 (TRAV3, TRAJ17)
CAVRDAAAGNKLTF

SEQ ID NO: 208862 - protein, 11 aa, Homo sapiens
  CDR3 for beta chain variable domain of TCR clone 104431 (TRBV11-2, TRBJ2-2)
CASSLPGELFF

SEQ ID NO: 208863 - protein, 15 aa, Homo sapiens
  CDR3 for alpha chain variable domain of TCR clone 104432 (TRAV26-1, TRAJ44)
CIVRIGTGTARKLTF

SEQ ID NO: 208864 - protein, 15 aa, Homo sapiens
  CDR3 for beta chain variable domain of TCR clone 104432 (TRBV7-6, TRBJ2-1)
CASSSLAGEGNEQFF

SEQ ID NO: 208865 - protein, 16 aa, Homo sapiens
  CDR3 for alpha chain variable domain of TCR clone 104433 (TRAV3, TRAJ37)
CAVRGKGSGNTGKLIF

SEQ ID NO: 208866 - protein, 17 aa, Homo sapiens
  CDR3 for beta chain variable domain of TCR clone 104433 (TRBV4-2, TRBJ1-1)
CASTQFGGGSGNTEAFF

SEQ ID NO: 208867 - protein, 17 aa, Homo sapiens
  CDR3 for alpha chain variable domain of TCR clone 104434 (TRAV3, TRAJ6)
CAVRDGPRAGGSYIPTF

SEQ ID NO: 208868 - protein, 18 aa, Homo sapiens
  CDR3 for beta chain variable domain of TCR clone 104434 (TRBV7-9, TRBJ2-7)
CASSLTTSGSRTWHEQYF

SEQ ID NO: 208869 - protein, 12 aa, Homo sapiens
  CDR3 for alpha chain variable domain of TCR clone 104435 (TRAV3, TRAJ20)
CAVRDGDYKLSF

SEQ ID NO: 208870 - protein, 17 aa, Homo sapiens
  CDR3 for beta chain variable domain of TCR clone 104435 (TRBV28, TRBJ2-1)
CASSLSVAGGPVDEQFF

SEQ ID NO: 208871 - protein, 16 aa, Homo sapiens
  CDR3 for alpha chain variable domain of TCR clone 104436 (TRAV12-1, TRAJ48)
CVVNMVSNFGNEKLNF

SEQ ID NO: 208872 - protein, 18 aa, Homo sapiens
  CDR3 for beta chain variable domain of TCR clone 104436 (TRBV11-2, TRBJ2-6)
CASSLNPFLGTGANVLTF

SEQ ID NO: 208873 - protein, 14 aa, Homo sapiens
  CDR3 for alpha chain variable domain of TCR clone 104437 (TRAV8-6, TRAJ35)
CAVSEKALGMFCIA

SEQ ID NO: 208874 - protein, 13 aa, Homo sapiens
  CDR3 for beta chain variable domain of TCR clone 104437 (TRBV11-2, TRBJ1-3)
CASSLEPVNTIYF

SEQ ID NO: 208875 - protein, 17 aa, Homo sapiens
  CDR3 for alpha chain variable domain of TCR clone 104438 (TRAV4, TRAJ18)
CLVGERSVGSTLGRLYF

SEQ ID NO: 208876 - protein, 12 aa, Homo sapiens
  CDR3 for beta chain variable domain of TCR clone 104438 (TRBV11-2, TRBJ2-3)
GASRGAPNTQYF

SEQ ID NO: 208877 - protein, 15 aa, Homo sapiens
  CDR3 for alpha chain variable domain of TCR clone 104439 (TRAV17, TRAJ22)
CATVAPSGSARQLTF

SEQ ID NO: 208878 - protein, 16 aa, Homo sapiens
  CDR3 for beta chain variable domain of TCR clone 104439 (TRBV7-3, TRBJ2-2)
CASSLKRGTLSGELFF

SEQ ID NO: 208879 - protein, 11 aa, Homo sapiens
  CDR3 for alpha chain variable domain of TCR clone 104440 (TRAV12-3, TRAJ27)
CAMANAGKSTF

SEQ ID NO: 208880 - protein, 16 aa, Homo sapiens
  CDR3 for beta chain variable domain of TCR clone 104440 (TRBV12-5, TRBJ2-5)
CASGPRTSGNQETQYF

SEQ ID NO: 208881 - protein, 11 aa, Homo sapiens
  CDR3 for alpha chain variable domain of TCR clone 104441 (TRAV21, TRAJ9)
CAVPGGFKTIF

SEQ ID NO: 208882 - protein, 12 aa, Homo sapiens
  CDR3 for beta chain variable domain of TCR clone 104441 (TRBV20-1, TRBJ2-3)
CSASVGTDTQYF

SEQ ID NO: 208883 - protein, 12 aa, Homo sapiens
  CDR3 for alpha chain variable domain of TCR clone 104442 (TRAV22, TRAJ22)
CAPGGSARQLTF

SEQ ID NO: 208884 - protein, 16 aa, Homo sapiens
  CDR3 for beta chain variable domain of TCR clone 104442 (TRBV12-5, TRBJ2-5)
CASGPRTSGNQETQYF

SEQ ID NO: 208885 - protein, 18 aa, Homo sapiens
  CDR3 for alpha chain variable domain of TCR clone 104443 (TRAV21, TRAJ52)
CAVRPSPAGGTSYGKLTF

SEQ ID NO: 208886 - protein, 14 aa, Homo sapiens
  CDR3 for beta chain variable domain of TCR clone 104443 (TRBV7-9, TRBJ1-1)
CASTPLQSYTEAFF

SEQ ID NO: 208887 - protein, 15 aa, Homo sapiens
  CDR3 for alpha chain variable domain of TCR clone 104444 (TRAV34, TRAJ38)
CGADFTPGNNRKRIW

SEQ ID NO: 208888 - protein, 16 aa, Homo sapiens
  CDR3 for beta chain variable domain of TCR clone 104444 (TRBV12-5, TRBJ2-5)
CASGPRTSGNQETQYF

SEQ ID NO: 208889 - protein, 14 aa, Homo sapiens
  CDR3 for alpha chain variable domain of TCR clone 104445 (TRAV12-3, TRAJ10)
SHLPLTGGGNKLTF

SEQ ID NO: 208890 - protein, 13 aa, Homo sapiens
  CDR3 for beta chain variable domain of TCR clone 104445 (TRBV20-1, TRBJ2-1)
TSGARPPGNEQFF

SEQ ID NO: 208891 - protein, 13 aa, Homo sapiens
  CDR3 for alpha chain variable domain of TCR clone 104446 (TRAV3, TRAJ21)
CAVREPDFNKFYF

SEQ ID NO: 208892 - protein, 15 aa, Homo sapiens
  CDR3 for beta chain variable domain of TCR clone 104446 (TRBV7-3, TRBJ2-1)
CASSPTGGGEVEQFF

SEQ ID NO: 208893 - protein, 17 aa, Homo sapiens
  CDR3 for alpha chain variable domain of TCR clone 104447 (TRAV8-6, TRAJ8)
CAVKEGIENTGFQKLVF

SEQ ID NO: 208894 - protein, 14 aa, Homo sapiens
  CDR3 for beta chain variable domain of TCR clone 104447 (TRBV19, TRBJ2-1)
CASPTFVLSGEQFF

SEQ ID NO: 208895 - protein, 15 aa, Homo sapiens
  CDR3 for alpha chain variable domain of TCR clone 104448 (TRAV1-1, TRAJ27)
CLLLLGWLRDDKIIF

SEQ ID NO: 208896 - protein, 14 aa, Homo sapiens
  CDR3 for beta chain variable domain of TCR clone 104448 (TRBV11-3, TRBJ1-6)
CASSFSGGDSPLHF

SEQ ID NO: 208897 - protein, 13 aa, Homo sapiens
  CDR3 for alpha chain variable domain of TCR clone 104449 (TRAV17, TRAJ54)
CATDLWGAQKLVF

SEQ ID NO: 208898 - protein, 14 aa, Homo sapiens
  CDR3 for beta chain variable domain of TCR clone 104449 (TRBV19, TRBJ1-5)
CASSKMTGPQPQHF

SEQ ID NO: 208899 - protein, 15 aa, Homo sapiens
  CDR3 for alpha chain variable domain of TCR clone 104450 (TRAV3, TRAJ12)
CAVRDRGDSSYKLIF

SEQ ID NO: 208900 - protein, 16 aa, Homo sapiens
  CDR3 for beta chain variable domain of TCR clone 104450 (TRBV7-3, TRBJ2-2)
CASSLKRGTLSGELFF

SEQ ID NO: 208901 - protein, 14 aa, Homo sapiens
  CDR3 for alpha chain variable domain of TCR clone 104451 (TRAV26-1, TRAJ45)
CIVRVVGGADGLTF

SEQ ID NO: 208902 - protein, 16 aa, Homo sapiens
  CDR3 for beta chain variable domain of TCR clone 104451 (TRBV7-9, TRBJ1-1)
CASSLTQVRSDTEAFF

SEQ ID NO: 208903 - protein, 16 aa, Homo sapiens
  CDR3 for alpha chain variable domain of TCR clone 104452 (TRAV38-1, TRAJ37)
GAFKGDGSSNTGKLIF

SEQ ID NO: 208904 - protein, 13 aa, Homo sapiens
  CDR3 for beta chain variable domain of TCR clone 104452 (TRBV12-4, TRBJ2-5)
CASSLFRRETQYF

SEQ ID NO: 208905 - protein, 15 aa, Homo sapiens
  CDR3 for alpha chain variable domain of TCR clone 104453 (TRAV8-4, TRAJ3)
CAVTGENHVQQCFQD

SEQ ID NO: 208906 - protein, 16 aa, Homo sapiens
  CDR3 for beta chain variable domain of TCR clone 104453 (TRBV4-2, TRBJ1-1)
CASSQAGFGMNTEAFF

SEQ ID NO: 208907 - protein, 11 aa, Homo sapiens
  CDR3 for alpha chain variable domain of TCR clone 104454 (TRAV13-1, TRAJ39)
CASHAGNMLTF

SEQ ID NO: 208908 - protein, 13 aa, Homo sapiens
  CDR3 for beta chain variable domain of TCR clone 104454 (TRBV24-1, TRBJ2-1)
CATSAGPYNEQFF

SEQ ID NO: 208909 - protein, 12 aa, Homo sapiens
  CDR3 for alpha chain variable domain of TCR clone 104455 (TRAV13-2, TRAJ23)
CAERNRGGKLIF

SEQ ID NO: 208910 - protein, 15 aa, Homo sapiens
  CDR3 for beta chain variable domain of TCR clone 104455 (TRBV7-9, TRBJ1-6)
CASSSPGRGNSPLHF

SEQ ID NO: 208911 - protein, 16 aa, Homo sapiens
  CDR3 for alpha chain variable domain of TCR clone 104456 (TRAV2, TRAJ22)
LQVREADAAEQRQLTF

SEQ ID NO: 208912 - protein, 16 aa, Homo sapiens
  CDR3 for beta chain variable domain of TCR clone 104456 (TRBV2, TRBJ2-5)
CASSETQGVGEETQYF

SEQ ID NO: 208913 - protein, 13 aa, Homo sapiens
  CDR3 for alpha chain variable domain of TCR clone 104457 (TRAV35, TRAJ36)
CAGPRIGANNLFF

SEQ ID NO: 208914 - protein, 15 aa, Homo sapiens
  CDR3 for beta chain variable domain of TCR clone 104457 (TRBV28, TRBJ2-5)
CASSPPWSYRETQYF

SEQ ID NO: 208915 - protein, 12 aa, Homo sapiens
  CDR3 for alpha chain variable domain of TCR clone 104458 (TRAV12-3, TRAJ17)
CAMTLTGNTLTF

SEQ ID NO: 208916 - protein, 12 aa, Homo sapiens
  CDR3 for beta chain variable domain of TCR clone 104458 (TRBV2, TRBJ2-1)
CAYGPPGNEQFF

SEQ ID NO: 208917 - protein, 11 aa, Homo sapiens
  CDR3 for alpha chain variable domain of TCR clone 104459 (TRAV3, TRAJ21)
CAVGNCNKFYF

SEQ ID NO: 208918 - protein, 14 aa, Homo sapiens
  CDR3 for beta chain variable domain of TCR clone 104459 (TRBV7-2, TRBJ2-7)
CASSPKTSFYEQYF

SEQ ID NO: 208919 - protein, 15 aa, Homo sapiens
  CDR3 for alpha chain variable domain of TCR clone 104460 (TRAV14/DV4, TRAJ12)
CAMTPPVDSSYKLIF

SEQ ID NO: 208920 - protein, 14 aa, Homo sapiens
  CDR3 for beta chain variable domain of TCR clone 104460 (TRBV19, TRBJ2-1)
CASSDKQGANEQFF

SEQ ID NO: 208921 - protein, 14 aa, Homo sapiens
  CDR3 for alpha chain variable domain of TCR clone 104461 (TRAV12-2, TRAJ5)
CAVNRSTGRRALTF

SEQ ID NO: 208922 - protein, 16 aa, Homo sapiens
  CDR3 for beta chain variable domain of TCR clone 104461 (TRBV7-3, TRBJ2-2)
CASSLKRGTLSWELFF

SEQ ID NO: 208923 - protein, 13 aa, Homo sapiens
  CDR3 for alpha chain variable domain of TCR clone 104462 (TRAV13-1, TRAJ6)
CAARRGGSYIPTF

SEQ ID NO: 208924 - protein, 16 aa, Homo sapiens
  CDR3 for beta chain variable domain of TCR clone 104462 (TRBV20-1, TRBJ1-4)
CSDPGQGLLTNEKLFF

SEQ ID NO: 208925 - protein, 13 aa, Homo sapiens
  CDR3 for alpha chain variable domain of TCR clone 104463 (TRAV26-2, TRAJ43)
CILRAVNNNDMRF

SEQ ID NO: 208926 - protein, 15 aa, Homo sapiens
  CDR3 for beta chain variable domain of TCR clone 104463 (TRBV28, TRBJ1-2)
CASSFLFGQEVGYTF

SEQ ID NO: 208927 - protein, 16 aa, Homo sapiens
  CDR3 for alpha chain variable domain of TCR clone 104464 (TRAV21, TRAJ37)
CAVRPRGSSNTGKLIC

SEQ ID NO: 208928 - protein, 13 aa, Homo sapiens
  CDR3 for beta chain variable domain of TCR clone 104464 (TRBV7-9, TRBJ2-5)
CASLSPGQETQYF

SEQ ID NO: 208929 - protein, 14 aa, Homo sapiens
  CDR3 for alpha chain variable domain of TCR clone 104465 (TRAV4, TRAJ9)
CLVGSGTGGFKTIF

SEQ ID NO: 208930 - protein, 11 aa, Homo sapiens
  CDR3 for beta chain variable domain of TCR clone 104465 (TRBV10-3, TRBJ2-7)
CAISEGLEQYF

SEQ ID NO: 208931 - protein, 10 aa, Homo sapiens
  CDR3 for alpha chain variable domain of TCR clone 104466 (TRAV23/DV6, TRAJ57)
CAASSTLSQG

SEQ ID NO: 208932 - protein, 15 aa, Homo sapiens
  CDR3 for beta chain variable domain of TCR clone 104466 (TRBV27, TRBJ1-4)
CVSSAQQDLNEKLFF

SEQ ID NO: 208933 - protein, 16 aa, Homo sapiens
  CDR3 for alpha chain variable domain of TCR clone 104467 (TRAV12-1, TRAJ48)
CVVNMVSNFGNEELTF

SEQ ID NO: 208934 - protein, 18 aa, Homo sapiens
  CDR3 for beta chain variable domain of TCR clone 104467 (TRBV11-2, TRBJ2-6)
CASSLNPFLGTGANVLTF

SEQ ID NO: 208935 - protein, 15 aa, Homo sapiens
  CDR3 for alpha chain variable domain of TCR clone 104468 (TRAV2, TRAJ13)
CATPSYSGGYQKVTF

SEQ ID NO: 208936 - protein, 14 aa, Homo sapiens
  CDR3 for beta chain variable domain of TCR clone 104468 (TRBV7-8, TRBJ2-3)
CASSLEAGTDTQYF

SEQ ID NO: 208937 - protein, 14 aa, Homo sapiens
  CDR3 for alpha chain variable domain of TCR clone 104469 (TRAV26-1, TRAJ34)
CIVRVAYNTGKLIF

SEQ ID NO: 208938 - protein, 19 aa, Homo sapiens
  CDR3 for beta chain variable domain of TCR clone 104469 (TRBV25-1, TRBJ2-2)
CAILVYRVDRGRKTGELFF

SEQ ID NO: 208939 - protein, 17 aa, Homo sapiens
  CDR3 for alpha chain variable domain of TCR clone 104470 (TRAV3, TRAJ6)
CAVRDGPRAGGNYIPTF

SEQ ID NO: 208940 - protein, 14 aa, Homo sapiens
  CDR3 for beta chain variable domain of TCR clone 104470 (TRBV7-2, TRBJ2-7)
CASSPKTSFYEQYV

SEQ ID NO: 208941 - protein, 17 aa, Homo sapiens
  CDR3 for alpha chain variable domain of TCR clone 104471 (TRAV8-6, TRAJ58)
CAVSSWVGETSGSRLTF

SEQ ID NO: 208942 - protein, 11 aa, Homo sapiens
  CDR3 for beta chain variable domain of TCR clone 104471 (TRBV12-4, TRBJ2-2)
CASSSAGELFF

SEQ ID NO: 208943 - protein, 12 aa, Homo sapiens
  CDR3 for alpha chain variable domain of TCR clone 104472 (TRAV12-2, TRAJ21)
CAIRYNFNKFYF

SEQ ID NO: 208944 - protein, 12 aa, Homo sapiens
  CDR3 for beta chain variable domain of TCR clone 104472 (TRBV7-8, TRBJ2-7)
CASSLGDREQYF

SEQ ID NO: 208945 - protein, 14 aa, Homo sapiens
  CDR3 for alpha chain variable domain of TCR clone 104473 (TRAV1-2, TRAJ8)
CAVREDTGFQKLVF

SEQ ID NO: 208946 - protein, 19 aa, Homo sapiens
  CDR3 for beta chain variable domain of TCR clone 104473 (TRBV19, TRBJ2-2)
CASTRPGLAGGRVTGELFF

SEQ ID NO: 208947 - protein, 16 aa, Homo sapiens
  CDR3 for alpha chain variable domain of TCR clone 104474 (TRAV21, TRAJ37)
CAVRTAGSSNTGKLIF

SEQ ID NO: 208948 - protein, 13 aa, Homo sapiens
  CDR3 for beta chain variable domain of TCR clone 104474 (TRBV7-9, TRBJ2-5)
CARLPSGRETQYF

SEQ ID NO: 208949 - protein, 14 aa, Homo sapiens
  CDR3 for alpha chain variable domain of TCR clone 104475 (TRAV12-2, TRAJ17)
CAVLFKAAGNKLTF

SEQ ID NO: 208950 - protein, 14 aa, Homo sapiens
  CDR3 for beta chain variable domain of TCR clone 104475 (TRBV12-5, TRBJ2-5)
CASGARTHQETQYF

SEQ ID NO: 208951 - protein, 14 aa, Homo sapiens
  CDR3 for alpha chain variable domain of TCR clone 104476 (TRAV1-2, TRAJ27)
CAVRSGTMQANQPL

SEQ ID NO: 208952 - protein, 15 aa, Homo sapiens
  CDR3 for beta chain variable domain of TCR clone 104476 (TRBV18, TRBJ2-7)
CASSPLQGRTYEQYF

SEQ ID NO: 208953 - protein, 13 aa, Homo sapiens
  CDR3 for alpha chain variable domain of TCR clone 104477 (TRAV13-2, TRAJ53)
CAENMGSNYKLTF

SEQ ID NO: 208954 - protein, 13 aa, Homo sapiens
  CDR3 for beta chain variable domain of TCR clone 104477 (TRBV20-1, TRBJ1-1)
CSARVGGNTEAFF

SEQ ID NO: 208955 - protein, 12 aa, Homo sapiens
  CDR3 for alpha chain variable domain of TCR clone 104478 (TRAV35, TRAJ39)
LAPNNPGNMLTF

SEQ ID NO: 208956 - protein, 16 aa, Homo sapiens
  CDR3 for beta chain variable domain of TCR clone 104478 (TRBV2, TRBJ2-3)
CASSTSVEGVTDTQYF

SEQ ID NO: 208957 - protein, 14 aa, Homo sapiens
  CDR3 for alpha chain variable domain of TCR clone 104479 (TRAV17, TRAJ15)
CATGPNKAGTALIF

SEQ ID NO: 208958 - protein, 15 aa, Homo sapiens
  CDR3 for beta chain variable domain of TCR clone 104479 (TRBV11-2, TRBJ2-2)
CASSSDRVNAGELFF

SEQ ID NO: 208959 - protein, 10 aa, Homo sapiens
  CDR3 for alpha chain variable domain of TCR clone 104480 (TRAV13-1, TRAJ27)
CAPLSRQINL

SEQ ID NO: 208960 - protein, 13 aa, Homo sapiens
  CDR3 for beta chain variable domain of TCR clone 104480 (TRBV28, TRBJ1-1)
CASSKQGWTEAFF

SEQ ID NO: 208961 - protein, 14 aa, Homo sapiens
  CDR3 for alpha chain variable domain of TCR clone 104481 (TRAV12-1, TRAJ33)
CVVNPEGSNYQLIW

SEQ ID NO: 208962 - protein, 11 aa, Homo sapiens
  CDR3 for beta chain variable domain of TCR clone 104481 (TRBV7-6, TRBJ2-1)
CASSNYGEQFF

SEQ ID NO: 208963 - protein, 17 aa, Homo sapiens
  CDR3 for alpha chain variable domain of TCR clone 104482 (TRAV4, TRAJ13)
CLVGFQGSSGGYQKVTF

SEQ ID NO: 208964 - protein, 18 aa, Homo sapiens
  CDR3 for beta chain variable domain of TCR clone 104482 (TRBV15, TRBJ2-3)
CATSRDGARSWDTDTQYF

SEQ ID NO: 208965 - protein, 15 aa, Homo sapiens
  CDR3 for alpha chain variable domain of TCR clone 104483 (TRAV25, TRAJ53)
CPTSNSGGSKYKLTF

SEQ ID NO: 208966 - protein, 14 aa, Homo sapiens
  CDR3 for beta chain variable domain of TCR clone 104483 (TRBV11-2, TRBJ2-3)
CASSRLARTDTQYF

SEQ ID NO: 208967 - protein, 13 aa, Homo sapiens
  CDR3 for alpha chain variable domain of TCR clone 104484 (TRAV1-2, TRAJ9)
CAVLNTGGFKTIF

SEQ ID NO: 208968 - protein, 14 aa, Homo sapiens
  CDR3 for beta chain variable domain of TCR clone 104484 (TRBV20-1, TRBJ2-3)
CSARGGTSTATQYF

SEQ ID NO: 208969 - protein, 18 aa, Homo sapiens
  CDR3 for alpha chain variable domain of TCR clone 104485 (TRAV21, TRAJ52)
CAVRPSPAGGTSYGKLTF

SEQ ID NO: 208970 - protein, 16 aa, Homo sapiens
  CDR3 for beta chain variable domain of TCR clone 104485 (TRBV19, TRBJ1-5)
CASSTWTGGGNQPQHF

SEQ ID NO: 208971 - protein, 19 aa, Homo sapiens
  CDR3 for alpha chain variable domain of TCR clone 104486 (TRAV2, TRAJ20)
ILQVREADAAVYRDCKLSF

SEQ ID NO: 208972 - protein, 15 aa, Homo sapiens
  CDR3 for beta chain variable domain of TCR clone 104486 (TRBV20-1, TRBJ2-7)
CSARDRVSGMDEQYF

SEQ ID NO: 208973 - protein, 12 aa, Homo sapiens
  CDR3 for alpha chain variable domain of TCR clone 104487 (TRAV29/DV5, TRAJ26)
CAASEYGQNFVF

SEQ ID NO: 208974 - protein, 17 aa, Homo sapiens
  CDR3 for beta chain variable domain of TCR clone 104487 (TRBV5-1, TRBJ2-1)
CASSMGLAGEGYNEQFF

SEQ ID NO: 208975 - protein, 16 aa, Homo sapiens
  CDR3 for alpha chain variable domain of TCR clone 104488 (TRAV3, TRAJ32)
CCERRNYGGATNKLIF

SEQ ID NO: 208976 - protein, 13 aa, Homo sapiens
  CDR3 for beta chain variable domain of TCR clone 104488 (TRBV7-9, TRBJ1-2)
CASSLKQNYGYTF

SEQ ID NO: 208977 - protein, 11 aa, Homo sapiens
  CDR3 for alpha chain variable domain of TCR clone 104489 (TRAV21, TRAJ34)
CAHYNTEKLIF

SEQ ID NO: 208978 - protein, 11 aa, Homo sapiens
  CDR3 for beta chain variable domain of TCR clone 104489 (TRBV29-1, TRBJ2-5)
CSEDRTGTQYF

SEQ ID NO: 208979 - protein, 14 aa, Homo sapiens
  CDR3 for alpha chain variable domain of TCR clone 104490 (TRAV12-2, TRAJ40)
CAVKIPSGTYNYIF

SEQ ID NO: 208980 - protein, 17 aa, Homo sapiens
  CDR3 for beta chain variable domain of TCR clone 104490 (TRBV7-8, TRBJ2-6)
CASSAGTGGAGANVLTF

SEQ ID NO: 208981 - protein, 13 aa, Homo sapiens
  CDR3 for alpha chain variable domain of TCR clone 104491 (TRAV36/DV7, TRAJ34)
CAVGEVNTDKLIF

SEQ ID NO: 208982 - protein, 11 aa, Homo sapiens
  CDR3 for beta chain variable domain of TCR clone 104491 (TRBV29-1, TRBJ2-5)
CSEDRTGTQYF

SEQ ID NO: 208983 - protein, 17 aa, Homo sapiens
  CDR3 for alpha chain variable domain of TCR clone 104492 (TRAV4, TRAJ13)
CLVGVQGSSGGYQKVTF

SEQ ID NO: 208984 - protein, 13 aa, Homo sapiens
  CDR3 for beta chain variable domain of TCR clone 104492 (TRBV7-9, TRBJ1-2)
CASSLKQNYGYTF

SEQ ID NO: 208985 - protein, 14 aa, Homo sapiens
  CDR3 for alpha chain variable domain of TCR clone 104493 (TRAV2, TRAJ9)
CAVEDRSGGFKTTF

SEQ ID NO: 208986 - protein, 14 aa, Homo sapiens
  CDR3 for beta chain variable domain of TCR clone 104493 (TRBV7-3, TRBJ2-1)
CASSLAGGTNEQFF

SEQ ID NO: 208987 - protein, 15 aa, Homo sapiens
  CDR3 for alpha chain variable domain of TCR clone 104494 (TRAV8-3, TRAJ27)
CAVGPSKTNAGKSTF

SEQ ID NO: 208988 - protein, 11 aa, Homo sapiens
  CDR3 for beta chain variable domain of TCR clone 104494 (TRBV29-1, TRBJ2-5)
CSEDRTGTQYF

SEQ ID NO: 208989 - protein, 14 aa, Homo sapiens
  CDR3 for alpha chain variable domain of TCR clone 104495 (TRAV27, TRAJ38)
CAGDRAGNNRKLIW

SEQ ID NO: 208990 - protein, 15 aa, Homo sapiens
  CDR3 for beta chain variable domain of TCR clone 104495 (TRBV28, TRBJ2-4)
CASRGLAGVKNIQYF

SEQ ID NO: 208991 - protein, 15 aa, Homo sapiens
  CDR3 for alpha chain variable domain of TCR clone 104496 (TRAV12-1, TRAJ42)
CVVTRDGGSQGNLIF

SEQ ID NO: 208992 - protein, 13 aa, Homo sapiens
  CDR3 for beta chain variable domain of TCR clone 104496 (TRBV7-9, TRBJ1-2)
CASSLKQNYGYTF

SEQ ID NO: 208993 - protein, 14 aa, Homo sapiens
  CDR3 for alpha chain variable domain of TCR clone 104497 (TRAV20, TRAJ29)
CAVQAWLGNTPLVF

SEQ ID NO: 208994 - protein, 15 aa, Homo sapiens
  CDR3 for beta chain variable domain of TCR clone 104497 (TRBV29-1, TRBJ2-7)
CSVEFFDRGSYEQYF

SEQ ID NO: 208995 - protein, 12 aa, Homo sapiens
  CDR3 for alpha chain variable domain of TCR clone 104498 (TRAV2, TRAJ31)
CAVEDNNARLMF

SEQ ID NO: 208996 - protein, 15 aa, Homo sapiens
  CDR3 for beta chain variable domain of TCR clone 104498 (TRBV2, TRBJ2-1)
CASSEEREGDNEQFF

SEQ ID NO: 208997 - protein, 16 aa, Homo sapiens
  CDR3 for alpha chain variable domain of TCR clone 104499 (TRAV3, TRAJ10)
CAVGDMRAGGGNKLTF

SEQ ID NO: 208998 - protein, 13 aa, Homo sapiens
  CDR3 for beta chain variable domain of TCR clone 104499 (TRBV6-1, TRBJ1-1)
CASSRQGNTEAFF

SEQ ID NO: 208999 - protein, 13 aa, Homo sapiens
  CDR3 for alpha chain variable domain of TCR clone 104500 (TRAV8-6, TRAJ33)
CAVSEGSNYQLIW

SEQ ID NO: 209000 - protein, 13 aa, Homo sapiens
  CDR3 for beta chain variable domain of TCR clone 104500 (TRBV19, TRBJ2-7)
CASSPRQSYEQYF

SEQ ID NO: 209001 - protein, 13 aa, Homo sapiens
  CDR3 for alpha chain variable domain of TCR clone 104501 (TRAV13-2, TRAJ15)
CAERPQAGTAPIF

SEQ ID NO: 209002 - protein, 15 aa, Homo sapiens
  CDR3 for beta chain variable domain of TCR clone 104501 (TRBV11-2, TRBJ2-7)
CASRFPGTGGYEQYF

SEQ ID NO: 209003 - protein, 13 aa, Homo sapiens
  CDR3 for alpha chain variable domain of TCR clone 104502 (TRAV2, TRAJ40)
CAVVTPGTYKYIF

SEQ ID NO: 209004 - protein, 16 aa, Homo sapiens
  CDR3 for beta chain variable domain of TCR clone 104502 (TRBV7-9, TRBJ1-3)
CASSLGAGSSGNTIYF

SEQ ID NO: 209005 - protein, 21 aa, Homo sapiens
  CDR3 for alpha chain variable domain of TCR clone 104503 (TRAV25, TRAJ7)
TATQTTDVGTYFCPGNNRLAF

SEQ ID NO: 209006 - protein, 14 aa, Homo sapiens
  CDR3 for beta chain variable domain of TCR clone 104503 (TRBV11-2, TRBJ2-2)
CASSLGLRVRELVF

SEQ ID NO: 209007 - protein, 15 aa, Homo sapiens
  CDR3 for alpha chain variable domain of TCR clone 104504 (TRAV26-1, TRAJ22)
CIVRVSFWFCQATDL

SEQ ID NO: 209008 - protein, 14 aa, Homo sapiens
  CDR3 for beta chain variable domain of TCR clone 104504 (TRBV18, TRBJ2-7)
CASSPRGGAYEQYF

SEQ ID NO: 209009 - protein, 13 aa, Homo sapiens
  CDR3 for alpha chain variable domain of TCR clone 104505 (TRAV36/DV7, TRAJ33)
CAVDMDGNYQLIW

SEQ ID NO: 209010 - protein, 16 aa, Homo sapiens
  CDR3 for beta chain variable domain of TCR clone 104505 (TRBV15, TRBJ2-3)
CATRLSGGRAPDTQYF

SEQ ID NO: 209011 - protein, 14 aa, Homo sapiens
  CDR3 for alpha chain variable domain of TCR clone 104506 (TRAV12-1, TRAJ20)
CVVNPLSNDYKLSF

SEQ ID NO: 209012 - protein, 15 aa, Homo sapiens
  CDR3 for beta chain variable domain of TCR clone 104506 (TRBV5-1, TRBJ2-3)
CASSVTSGSTDTQYF

SEQ ID NO: 209013 - protein, 13 aa, Homo sapiens
  CDR3 for alpha chain variable domain of TCR clone 104507 (TRAV27, TRAJ53)
CAGQGGSNYKMTF

SEQ ID NO: 209014 - protein, 13 aa, Homo sapiens
  CDR3 for beta chain variable domain of TCR clone 104507 (TRBV29-1, TRBJ1-1)
CSVESGFGTEAFF

SEQ ID NO: 209015 - protein, 15 aa, Homo sapiens
  CDR3 for alpha chain variable domain of TCR clone 104508 (TRAV35, TRAJ23)
CAGQRGYNQGGKLIF

SEQ ID NO: 209016 - protein, 16 aa, Homo sapiens
  CDR3 for beta chain variable domain of TCR clone 104508 (TRBV27, TRBJ2-1)
CASSSRLAWNYNEQFF

SEQ ID NO: 209017 - protein, 11 aa, Homo sapiens
  CDR3 for alpha chain variable domain of TCR clone 104509 (TRAV22, TRAJ30)
CAGNRDDKIIF

SEQ ID NO: 209018 - protein, 13 aa, Homo sapiens
  CDR3 for beta chain variable domain of TCR clone 104509 (TRBV4-1, TRBJ2-7)
CASSQGQAYEQYF

SEQ ID NO: 209019 - protein, 14 aa, Homo sapiens
  CDR3 for alpha chain variable domain of TCR clone 104510 (TRAV2, TRAJ9)
CAVEDRSGGFKTIF

SEQ ID NO: 209020 - protein, 14 aa, Homo sapiens
  CDR3 for beta chain variable domain of TCR clone 104510 (TRBV7-3, TRBJ2-1)
CASSLAGGTSEQFF

SEQ ID NO: 209021 - protein, 13 aa, Homo sapiens
  CDR3 for alpha chain variable domain of TCR clone 104511 (TRAV8-3, TRAJ44)
CAVVPGTASKLTF

SEQ ID NO: 209022 - protein, 13 aa, Homo sapiens
  CDR3 for beta chain variable domain of TCR clone 104511 (TRBV2, TRBJ1-5)
CATAGPGNQPQHF

SEQ ID NO: 209023 - protein, 16 aa, Homo sapiens
  CDR3 for alpha chain variable domain of TCR clone 104512 (TRAV20, TRAJ22)
CAVRLVSSGSARQLTF

SEQ ID NO: 209024 - protein, 14 aa, Homo sapiens
  CDR3 for beta chain variable domain of TCR clone 104512 (TRBV15, TRBJ2-5)
CATSRVSVRETQYF

SEQ ID NO: 209025 - protein, 12 aa, Homo sapiens
  CDR3 for alpha chain variable domain of TCR clone 104513 (TRAV27, TRAJ35)
CAGADFGNVLHC

SEQ ID NO: 209026 - protein, 17 aa, Homo sapiens
  CDR3 for beta chain variable domain of TCR clone 104513 (TRBV7-8, TRBJ2-6)
CASSAGTGGAGANVLTF

SEQ ID NO: 209027 - protein, 14 aa, Homo sapiens
  CDR3 for alpha chain variable domain of TCR clone 104514 (TRAV1-2, TRAJ16)
FAVNRFSDGQKLLF

SEQ ID NO: 209028 - protein, 14 aa, Homo sapiens
  CDR3 for beta chain variable domain of TCR clone 104514 (TRBV25-1, TRBJ1-1)
CASTHLGGNTEAFF

SEQ ID NO: 209029 - protein, 12 aa, Homo sapiens
  CDR3 for alpha chain variable domain of TCR clone 104515 (TRAV13-1, TRAJ15)
CAASQAGTALIF

SEQ ID NO: 209030 - protein, 14 aa, Homo sapiens
  CDR3 for beta chain variable domain of TCR clone 104515 (TRBV19, TRBJ2-5)
CASSMTGQQETQYF

SEQ ID NO: 209031 - protein, 14 aa, Homo sapiens
  CDR3 for alpha chain variable domain of TCR clone 104516 (TRAV38-1, TRAJ40)
CVLRPTSGTYKYIF

SEQ ID NO: 209032 - protein, 15 aa, Homo sapiens
  CDR3 for beta chain variable domain of TCR clone 104516 (TRBV20-1, TRBJ2-7)
CSARDRVSGMDEQYF

SEQ ID NO: 209033 - protein, 16 aa, Homo sapiens
  CDR3 for alpha chain variable domain of TCR clone 104517 (TRAV20, TRAJ22)
CAVQASSSGSARQLTF

SEQ ID NO: 209034 - protein, 12 aa, Homo sapiens
  CDR3 for beta chain variable domain of TCR clone 104517 (TRBV12-5, TRBJ2-5)
CASGQGVETQYF

SEQ ID NO: 209035 - protein, 12 aa, Homo sapiens
  CDR3 for alpha chain variable domain of TCR clone 104518 (TRAV21, TRAJ49)
CAVRNTGNKFYF

SEQ ID NO: 209036 - protein, 12 aa, Homo sapiens
  CDR3 for beta chain variable domain of TCR clone 104518 (TRBV7-9, TRBJ2-7)
CATRTDAYEQYF

SEQ ID NO: 209037 - protein, 15 aa, Homo sapiens
  CDR3 for alpha chain variable domain of TCR clone 104519 (TRAV1-2, TRAJ9)
CAVRDDGTGGFKPIF

SEQ ID NO: 209038 - protein, 17 aa, Homo sapiens
  CDR3 for beta chain variable domain of TCR clone 104519 (TRBV20-1, TRBJ2-1)
CSASSSGLAGSYNEQFF

SEQ ID NO: 209039 - protein, 12 aa, Homo sapiens
  CDR3 for alpha chain variable domain of TCR clone 104520 (TRAV21, TRAJ31)
CVLAGNNARLMF

SEQ ID NO: 209040 - protein, 17 aa, Homo sapiens
  CDR3 for beta chain variable domain of TCR clone 104520 (TRBV2, TRBJ2-1)
CASSRNSLLAGGDEQFF

SEQ ID NO: 209041 - protein, 11 aa, Homo sapiens
  CDR3 for alpha chain variable domain of TCR clone 104521 (TRAV40, TRAJ33)
CLLISNYQLIW

SEQ ID NO: 209042 - protein, 16 aa, Homo sapiens
  CDR3 for beta chain variable domain of TCR clone 104521 (TRBV27, TRBJ2-2)
CASSFRGLVRTGELFF

SEQ ID NO: 209043 - protein, 14 aa, Homo sapiens
  CDR3 for alpha chain variable domain of TCR clone 104522 (TRAV1-2, TRAJ16)
CAVNRFSDGQKLLC

SEQ ID NO: 209044 - protein, 14 aa, Homo sapiens
  CDR3 for beta chain variable domain of TCR clone 104522 (TRBV18, TRBJ2-7)
CASSPRGGAYEQYF

SEQ ID NO: 209045 - protein, 15 aa, Homo sapiens
  CDR3 for alpha chain variable domain of TCR clone 104523 (TRAV21, TRAJ37)
CAVRPTLSDTGKLIF

SEQ ID NO: 209046 - protein, 16 aa, Homo sapiens
  CDR3 for beta chain variable domain of TCR clone 104523 (TRBV24-1, TRBJ2-3)
CATSDRRQDLTDTQYF

SEQ ID NO: 209047 - protein, 11 aa, Homo sapiens
  CDR3 for alpha chain variable domain of TCR clone 104524 (TRAV2, TRAJ13)
CASGRYQKVTF

SEQ ID NO: 209048 - protein, 16 aa, Homo sapiens
  CDR3 for beta chain variable domain of TCR clone 104524 (TRBV6-1, TRBJ2-5)
CASSETLDRGAETQYF

SEQ ID NO: 209049 - protein, 12 aa, Homo sapiens
  CDR3 for alpha chain variable domain of TCR clone 104525 (TRAV17, TRAJ20)
CATQANDYKLSF

SEQ ID NO: 209050 - protein, 16 aa, Homo sapiens
  CDR3 for beta chain variable domain of TCR clone 104525 (TRBV20-1, TRBJ1-4)
CSAPGQGLLTNEKLFL

SEQ ID NO: 209051 - protein, 14 aa, Homo sapiens
  CDR3 for alpha chain variable domain of TCR clone 104526 (TRAV2, TRAJ9)
CAVEDRSGGFKTIF

SEQ ID NO: 209052 - protein, 14 aa, Homo sapiens
  CDR3 for beta chain variable domain of TCR clone 104526 (TRBV9, TRBJ2-1)
CASSVVAAYNEQFF

SEQ ID NO: 209053 - protein, 14 aa, Homo sapiens
  CDR3 for alpha chain variable domain of TCR clone 104527 (TRAV26-1, TRAJ38)
CIADNAGNNRKLIW

SEQ ID NO: 209054 - protein, 13 aa, Homo sapiens
  CDR3 for beta chain variable domain of TCR clone 104527 (TRBV20-1, TRBJ1-1)
SSARGGGNTEAFF

SEQ ID NO: 209055 - protein, 14 aa, Homo sapiens
  CDR3 for alpha chain variable domain of TCR clone 104528 (TRAV25, TRAJ27)
CAGPGNTNAGKSTC

SEQ ID NO: 209056 - protein, 16 aa, Homo sapiens
  CDR3 for beta chain variable domain of TCR clone 104528 (TRBV4-1, TRBJ2-6)
CASSQDGGPGANVLTF

SEQ ID NO: 209057 - protein, 15 aa, Homo sapiens
  CDR3 for alpha chain variable domain of TCR clone 104529 (TRAV41, TRAJ45)
CAASYSGGGADGLTF

SEQ ID NO: 209058 - protein, 14 aa, Homo sapiens
  CDR3 for beta chain variable domain of TCR clone 104529 (TRBV12-5, TRBJ2-5)
CASGSRTHQEAQYF

SEQ ID NO: 209059 - protein, 14 aa, Homo sapiens
  CDR3 for alpha chain variable domain of TCR clone 104530 (TRAV12-2, TRAJ13)
CTVKQTGGYQKVTF

SEQ ID NO: 209060 - protein, 15 aa, Homo sapiens
  CDR3 for beta chain variable domain of TCR clone 104530 (TRBV27, TRBJ2-1)
CASSNGGGSSNEQFF

SEQ ID NO: 209061 - protein, 16 aa, Homo sapiens
  CDR3 for alpha chain variable domain of TCR clone 104531 (TRAV30, TRAJ24)
CGTEIVDADSWGKFQF

SEQ ID NO: 209062 - protein, 18 aa, Homo sapiens
  CDR3 for beta chain variable domain of TCR clone 104531 (TRBV20-1, TRBJ2-3)
CSASGLAGGPGTTDTQYF

SEQ ID NO: 209063 - protein, 16 aa, Homo sapiens
  CDR3 for alpha chain variable domain of TCR clone 104532 (TRAV30, TRAJ24)
CGTEIVDADSWGKFQF

SEQ ID NO: 209064 - protein, 15 aa, Homo sapiens
  CDR3 for beta chain variable domain of TCR clone 104532 (TRBV12-4, TRBJ2-3)
CASSLVAGAADTQYF

SEQ ID NO: 209065 - protein, 10 aa, Homo sapiens
  CDR3 for alpha chain variable domain of TCR clone 104533 (TRAV30, TRAJ48)
CGIGNEILTF

SEQ ID NO: 209066 - protein, 14 aa, Homo sapiens
  CDR3 for beta chain variable domain of TCR clone 104533 (TRBV7-6, TRBJ2-3)
CASSVAGGTDTQYF

SEQ ID NO: 209067 - protein, 14 aa, Homo sapiens
  CDR3 for alpha chain variable domain of TCR clone 104534 (TRAV2, TRAJ9)
CAVDPNTGGFKTIF

SEQ ID NO: 209068 - protein, 14 aa, Homo sapiens
  CDR3 for beta chain variable domain of TCR clone 104534 (TRBV19, TRBJ2-1)
CASPTFVLSGEQFF

SEQ ID NO: 209069 - protein, 13 aa, Homo sapiens
  CDR3 for alpha chain variable domain of TCR clone 104535 (TRAV36/DV7, TRAJ49)
CAVEANTGNPFYF

SEQ ID NO: 209070 - protein, 13 aa, Homo sapiens
  CDR3 for beta chain variable domain of TCR clone 104535 (TRBV10-3, TRBJ2-7)
CASKLAVNYEQYF

SEQ ID NO: 209071 - protein, 15 aa, Homo sapiens
  CDR3 for alpha chain variable domain of TCR clone 104536 (TRAV12-1, TRAJ44)
CVVFVNTGTASKLTF

SEQ ID NO: 209072 - protein, 17 aa, Homo sapiens
  CDR3 for beta chain variable domain of TCR clone 104536 (TRBV7-8, TRBJ2-6)
CANSAGTGGAGANVLTF

SEQ ID NO: 209073 - protein, 15 aa, Homo sapiens
  CDR3 for alpha chain variable domain of TCR clone 104537 (TRAV17, TRAJ28)
CATVDSEAGSYQLTF

SEQ ID NO: 209074 - protein, 13 aa, Homo sapiens
  CDR3 for beta chain variable domain of TCR clone 104537 (TRBV5-4, TRBJ2-5)
CASSRQEGETQYF

SEQ ID NO: 209075 - protein, 15 aa, Homo sapiens
  CDR3 for alpha chain variable domain of TCR clone 104538 (TRAV27, TRAJ6)
CAGISSSGGSYIPTF

SEQ ID NO: 209076 - protein, 16 aa, Homo sapiens
  CDR3 for beta chain variable domain of TCR clone 104538 (TRBV5-7, TRBJ2-1)
CASSLGPGQYYNEQFF

SEQ ID NO: 209077 - protein, 17 aa, Homo sapiens
  CDR3 for alpha chain variable domain of TCR clone 104539 (TRAV4, TRAJ13)
CLVGVQGSSGGYQKVTL

SEQ ID NO: 209078 - protein, 18 aa, Homo sapiens
  CDR3 for beta chain variable domain of TCR clone 104539 (TRBV15, TRBJ2-3)
CATSRDGARSWDTDTQHF

SEQ ID NO: 209079 - protein, 14 aa, Homo sapiens
  CDR3 for alpha chain variable domain of TCR clone 104540 (TRAV26-1, TRAJ38)
CIADNAGNNRKLIW

SEQ ID NO: 209080 - protein, 15 aa, Homo sapiens
  CDR3 for beta chain variable domain of TCR clone 104540 (TRBV2, TRBJ2-1)
CASSEEREGDNEQFF

SEQ ID NO: 209081 - protein, 11 aa, Homo sapiens
  CDR3 for alpha chain variable domain of TCR clone 104541 (TRAV23/DV6, TRAJ47)
CAVGYGNKLVF

SEQ ID NO: 209082 - protein, 10 aa, Homo sapiens
  CDR3 for beta chain variable domain of TCR clone 104541 (TRBV12-4, TRBJ2-5)
CASSRETQYF

SEQ ID NO: 209083 - protein, 11 aa, Homo sapiens
  CDR3 for alpha chain variable domain of TCR clone 104542 (TRAV1-1, TRAJ23)
CAVRQGGKLIF

SEQ ID NO: 209084 - protein, 16 aa, Homo sapiens
  CDR3 for beta chain variable domain of TCR clone 104542 (TRBV20-1, TRBJ1-2)
CSASMGQGVANYGYTF

SEQ ID NO: 209085 - protein, 14 aa, Homo sapiens
  CDR3 for alpha chain variable domain of TCR clone 104543 (TRAV12-2, TRAJ17)
CAVLFKAAGNKLTF

SEQ ID NO: 209086 - protein, 13 aa, Homo sapiens
  CDR3 for beta chain variable domain of TCR clone 104543 (TRBV7-3, TRBJ1-1)
CASSQDWGAEASF

SEQ ID NO: 209087 - protein, 15 aa, Homo sapiens
  CDR3 for alpha chain variable domain of TCR clone 104544 (TRAV3, TRAJ47)
SAVRDIGEYGNKLVF

SEQ ID NO: 209088 - protein, 14 aa, Homo sapiens
  CDR3 for beta chain variable domain of TCR clone 104544 (TRBV13, TRBJ2-5)
CASSLERVGETQYF

SEQ ID NO: 209089 - protein, 12 aa, Homo sapiens
  CDR3 for alpha chain variable domain of TCR clone 104545 (TRAV17, TRAJ4)
CATDGGYNKLIF

SEQ ID NO: 209090 - protein, 16 aa, Homo sapiens
  CDR3 for beta chain variable domain of TCR clone 104545 (TRBV19, TRBJ2-2)
CASRSPGTGATGELFF

SEQ ID NO: 209091 - protein, 12 aa, Homo sapiens
  CDR3 for alpha chain variable domain of TCR clone 104546 (TRAV13-1, TRAJ21)
CAAKEGFNKFYF

SEQ ID NO: 209092 - protein, 15 aa, Homo sapiens
  CDR3 for beta chain variable domain of TCR clone 104546 (TRBV7-3, TRBJ2-2)
CASKANGANTGELFF

SEQ ID NO: 209093 - protein, 15 aa, Homo sapiens
  CDR3 for alpha chain variable domain of TCR clone 104547 (TRAV17, TRAJ57)
CATGPSQGGSEKLVF

SEQ ID NO: 209094 - protein, 14 aa, Homo sapiens
  CDR3 for beta chain variable domain of TCR clone 104547 (TRBV19, TRBJ2-1)
CASGKSTQYNEQFF

SEQ ID NO: 209095 - protein, 15 aa, Homo sapiens
  CDR3 for alpha chain variable domain of TCR clone 104548 (TRAV16, TRAJ17)
CAPSGNKAAGNKLTF

SEQ ID NO: 209096 - protein, 15 aa, Homo sapiens
  CDR3 for beta chain variable domain of TCR clone 104548 (TRBV20-1, TRBJ2-7)
CSARDRVSGMDEQYF

SEQ ID NO: 209097 - protein, 15 aa, Homo sapiens
  CDR3 for alpha chain variable domain of TCR clone 104549 (TRAV35, TRAJ34)
CAGTSIVRNTDKLIF

SEQ ID NO: 209098 - protein, 13 aa, Homo sapiens
  CDR3 for beta chain variable domain of TCR clone 104549 (TRBV6-4, TRBJ1-5)
CASSADLNQPQHF

SEQ ID NO: 209099 - protein, 13 aa, Homo sapiens
  CDR3 for alpha chain variable domain of TCR clone 104550 (TRAV21, TRAJ20)
CAVGLRVDYKLSF

SEQ ID NO: 209100 - protein, 14 aa, Homo sapiens
  CDR3 for beta chain variable domain of TCR clone 104550 (TRBV3-1, TRBJ2-5)
CASSQGPDQGTQYF

SEQ ID NO: 209101 - protein, 17 aa, Homo sapiens
  CDR3 for alpha chain variable domain of TCR clone 104551 (TRAV26-1, TRAJ46)
IASSESEKKSSGDKLTF

SEQ ID NO: 209102 - protein, 13 aa, Homo sapiens
  CDR3 for beta chain variable domain of TCR clone 104551 (TRBV12-5, TRBJ2-3)
CASGERQSDTQYF

SEQ ID NO: 209103 - protein, 15 aa, Homo sapiens
  CDR3 for alpha chain variable domain of TCR clone 104552 (TRAV5, TRAJ33)
CTEAPAMDSNYQLIW

SEQ ID NO: 209104 - protein, 12 aa, Homo sapiens
  CDR3 for beta chain variable domain of TCR clone 104552 (TRBV6-3, TRBJ2-7)
CASSLTPYEQYF

SEQ ID NO: 209105 - protein, 13 aa, Homo sapiens
  CDR3 for alpha chain variable domain of TCR clone 104553 (TRAV13-1, TRAJ20)
CAARVSNDYKLSF

SEQ ID NO: 209106 - protein, 12 aa, Homo sapiens
  CDR3 for beta chain variable domain of TCR clone 104553 (TRBV20-1, TRBJ2-1)
SSARLGTDEQFF

SEQ ID NO: 209107 - protein, 14 aa, Homo sapiens
  CDR3 for alpha chain variable domain of TCR clone 104554 (TRAV21, TRAJ48)
CAVRSNSGNEKLTF

SEQ ID NO: 209108 - protein, 15 aa, Homo sapiens
  CDR3 for beta chain variable domain of TCR clone 104554 (TRBV20-1, TRBJ2-7)
CSARDRVSGMDEQYF

SEQ ID NO: 209109 - protein, 11 aa, Homo sapiens
  CDR3 for alpha chain variable domain of TCR clone 104555 (TRAV13-2, TRAJ36)
CAETGANDLFF

SEQ ID NO: 209110 - protein, 13 aa, Homo sapiens
  CDR3 for beta chain variable domain of TCR clone 104555 (TRBV7-9, TRBJ2-4)
CATEGLAGNIQYF

SEQ ID NO: 209111 - protein, 15 aa, Homo sapiens
  CDR3 for alpha chain variable domain of TCR clone 104556 (TRAV8-3, TRAJ45)
CASSYSGGGADGLTF

SEQ ID NO: 209112 - protein, 17 aa, Homo sapiens
  CDR3 for beta chain variable domain of TCR clone 104556 (TRBV20-1, TRBJ2-1)
CSARDRRRASSYNEQFF

SEQ ID NO: 209113 - protein, 12 aa, Homo sapiens
  CDR3 for alpha chain variable domain of TCR clone 104557 (TRAV30, TRAJ43)
CGTEERGNDMRF

SEQ ID NO: 209114 - protein, 14 aa, Homo sapiens
  CDR3 for beta chain variable domain of TCR clone 104557 (TRBV7-9, TRBJ2-1)
CASSPRDSLYEQFF

SEQ ID NO: 209115 - protein, 14 aa, Homo sapiens
  CDR3 for alpha chain variable domain of TCR clone 104558 (TRAV12-1, TRAJ23)
CVVIVYNQEESLSS

SEQ ID NO: 209116 - protein, 13 aa, Homo sapiens
  CDR3 for beta chain variable domain of TCR clone 104558 (TRBV11-2, TRBJ2-5)
CASSFSSQETQYF

SEQ ID NO: 209117 - protein, 15 aa, Homo sapiens
  CDR3 for alpha chain variable domain of TCR clone 104559 (TRAV17, TRAJ54)
CATTRSEQGAQKLVF

SEQ ID NO: 209118 - protein, 16 aa, Homo sapiens
  CDR3 for beta chain variable domain of TCR clone 104559 (TRBV12-4, TRBJ2-3)
CASSLRLAENTDTQYF

SEQ ID NO: 209119 - protein, 12 aa, Homo sapiens
  CDR3 for alpha chain variable domain of TCR clone 104560 (TRAV25, TRAJ45)
EYSGGGADGLTF

SEQ ID NO: 209120 - protein, 19 aa, Homo sapiens
  CDR3 for beta chain variable domain of TCR clone 104560 (TRBV28, TRBJ2-7)
CASSYSGTSRLGWVYEQYF

SEQ ID NO: 209121 - protein, 14 aa, Homo sapiens
  CDR3 for alpha chain variable domain of TCR clone 104561 (TRAV3, TRAJ6)
CAVRDGMGRRKLHT

SEQ ID NO: 209122 - protein, 15 aa, Homo sapiens
  CDR3 for beta chain variable domain of TCR clone 104561 (TRBV5-1, TRBJ2-7)
CASSLGDFTTYEQYF

SEQ ID NO: 209123 - protein, 11 aa, Homo sapiens
  CDR3 for alpha chain variable domain of TCR clone 104562 (TRAV13-1, TRAJ8)
CAASGFQKLVF

SEQ ID NO: 209124 - protein, 16 aa, Homo sapiens
  CDR3 for beta chain variable domain of TCR clone 104562 (TRBV19, TRBJ1-5)
CASSTRGTRSNQPQHF

SEQ ID NO: 209125 - protein, 14 aa, Homo sapiens
  CDR3 for alpha chain variable domain of TCR clone 104563 (TRAV27, TRAJ15)
CAGFDNQAGTALIF

SEQ ID NO: 209126 - protein, 11 aa, Homo sapiens
  CDR3 for beta chain variable domain of TCR clone 104563 (TRBV29-1, TRBJ1-1)
CSVEVGTRTFS

SEQ ID NO: 209127 - protein, 13 aa, Homo sapiens
  CDR3 for alpha chain variable domain of TCR clone 104564 (TRAV8-4, TRAJ49)
CAVSDRTGNQFYF

SEQ ID NO: 209128 - protein, 16 aa, Homo sapiens
  CDR3 for beta chain variable domain of TCR clone 104564 (TRBV5-7, TRBJ2-5)
CASSLLGYPGVETQYF

SEQ ID NO: 209129 - protein, 14 aa, Homo sapiens
  CDR3 for alpha chain variable domain of TCR clone 104565 (TRAV1-2, TRAJ16)
CAVNRFSDGQKLLF

SEQ ID NO: 209130 - protein, 14 aa, Homo sapiens
  CDR3 for beta chain variable domain of TCR clone 104565 (TRBV19, TRBJ2-1)
CATSQGDTYNEQFF

SEQ ID NO: 209131 - protein, 13 aa, Homo sapiens
  CDR3 for alpha chain variable domain of TCR clone 104566 (TRAV13-1, TRAJ39)
CSKYSNAGNMLTF

SEQ ID NO: 209132 - protein, 15 aa, Homo sapiens
  CDR3 for beta chain variable domain of TCR clone 104566 (TRBV28, TRBJ2-5)
CASSPPWSYQETQYF

SEQ ID NO: 209133 - protein, 16 aa, Homo sapiens
  CDR3 for alpha chain variable domain of TCR clone 104567 (TRAV3, TRAJ6)
CAVRGGMGRRKLHTYI

SEQ ID NO: 209134 - protein, 15 aa, Homo sapiens
  CDR3 for beta chain variable domain of TCR clone 104567 (TRBV9, TRBJ2-1)
CASSLAGSSYNEQFF

SEQ ID NO: 209135 - protein, 13 aa, Homo sapiens
  CDR3 for alpha chain variable domain of TCR clone 104568 (TRAV2, TRAJ15)
CAVASQAGTALIF

SEQ ID NO: 209136 - protein, 13 aa, Homo sapiens
  CDR3 for beta chain variable domain of TCR clone 104568 (TRBV20-1, TRBJ1-6)
CSAPLGVGSPLHF

SEQ ID NO: 209137 - protein, 14 aa, Homo sapiens
  CDR3 for alpha chain variable domain of TCR clone 104569 (TRAV2, TRAJ9)
CAVEYRSGGFKTIF

SEQ ID NO: 209138 - protein, 13 aa, Homo sapiens
  CDR3 for beta chain variable domain of TCR clone 104569 (TRBV7-3, TRBJ2-5)
CASSFRGGETQYF

SEQ ID NO: 209139 - protein, 15 aa, Homo sapiens
  CDR3 for alpha chain variable domain of TCR clone 104570 (TRAV27, TRAJ38)
CAARRNAGNNRKLIG

SEQ ID NO: 209140 - protein, 17 aa, Homo sapiens
  CDR3 for beta chain variable domain of TCR clone 104570 (TRBV20-1, TRBJ2-2)
CSASGSGQGGLTGELFF

SEQ ID NO: 209141 - protein, 12 aa, Homo sapiens
  CDR3 for alpha chain variable domain of TCR clone 104571 (TRAV9-2, TRAJ36)
CALKKGANNLFF

SEQ ID NO: 209142 - protein, 13 aa, Homo sapiens
  CDR3 for beta chain variable domain of TCR clone 104571 (TRBV7-9, TRBJ2-7)
CASSFAGAYEQYF

SEQ ID NO: 209143 - protein, 12 aa, Homo sapiens
  CDR3 for alpha chain variable domain of TCR clone 104572 (TRAV13-1, TRAJ53)
AASGGSNYKLTF

SEQ ID NO: 209144 - protein, 17 aa, Homo sapiens
  CDR3 for beta chain variable domain of TCR clone 104572 (TRBV5-1, TRBJ2-2)
CASSLAGLSGGTGELFF

SEQ ID NO: 209145 - protein, 13 aa, Homo sapiens
  CDR3 for alpha chain variable domain of TCR clone 104573 (TRAV27, TRAJ45)
CRSSGGGAEGLTF

SEQ ID NO: 209146 - protein, 15 aa, Homo sapiens
  CDR3 for beta chain variable domain of TCR clone 104573 (TRBV9, TRBJ2-2)
CASSDFAGASGELFF

SEQ ID NO: 209147 - protein, 14 aa, Homo sapiens
  CDR3 for alpha chain variable domain of TCR clone 104574 (TRAV12-1, TRAJ3)
CVVNPGSSASKIIF

SEQ ID NO: 209148 - protein, 14 aa, Homo sapiens
  CDR3 for beta chain variable domain of TCR clone 104574 (TRBV25-1, TRBJ1-1)
CASTHLGGNTEAFF

SEQ ID NO: 209149 - protein, 13 aa, Homo sapiens
  CDR3 for alpha chain variable domain of TCR clone 104575 (TRAV3, TRAJ15)
CAVRDQAGTALIF

SEQ ID NO: 209150 - protein, 14 aa, Homo sapiens
  CDR3 for beta chain variable domain of TCR clone 104575 (TRBV13, TRBJ2-7)
CASSLKGASYEQYF

SEQ ID NO: 209151 - protein, 12 aa, Homo sapiens
  CDR3 for alpha chain variable domain of TCR clone 104576 (TRAV2, TRAJ9)
CAVGAGGFKTIF

SEQ ID NO: 209152 - protein, 15 aa, Homo sapiens
  CDR3 for beta chain variable domain of TCR clone 104576 (TRBV18, TRBJ1-2)
CASSPGNGLGYGYTF

SEQ ID NO: 209153 - protein, 12 aa, Homo sapiens
  CDR3 for alpha chain variable domain of TCR clone 104577 (TRAV13-1, TRAJ53)
AASGGSNYKLTF

SEQ ID NO: 209154 - protein, 12 aa, Homo sapiens
  CDR3 for beta chain variable domain of TCR clone 104577 (TRBV18, TRBJ1-4)
CASSPCREKLFF

SEQ ID NO: 209155 - protein, 16 aa, Homo sapiens
  CDR3 for alpha chain variable domain of TCR clone 104578 (TRAV35, TRAJ28)
CAGQKYSGAGSYQLTF

SEQ ID NO: 209156 - protein, 13 aa, Homo sapiens
  CDR3 for beta chain variable domain of TCR clone 104578 (TRBV19, TRBJ1-2)
CASSQGQVYGYIF

SEQ ID NO: 209157 - protein, 17 aa, Homo sapiens
  CDR3 for alpha chain variable domain of TCR clone 104579 (TRAV13-1, TRAJ52)
CAAGRNSGGTSYGKLTF

SEQ ID NO: 209158 - protein, 15 aa, Homo sapiens
  CDR3 for beta chain variable domain of TCR clone 104579 (TRBV6-3, TRBJ2-7)
CASSSPGTVFYEQYF

SEQ ID NO: 209159 - protein, 13 aa, Homo sapiens
  CDR3 for alpha chain variable domain of TCR clone 104580 (TRAV38-2/DV8, TRAJ34)
CAYRNYNTDKLIF

SEQ ID NO: 209160 - protein, 15 aa, Homo sapiens
  CDR3 for beta chain variable domain of TCR clone 104580 (TRBV20-1, TRBJ2-5)
GSAEGTGGLQETQYF

SEQ ID NO: 209161 - protein, 12 aa, Homo sapiens
  CDR3 for alpha chain variable domain of TCR clone 104581 (TRAV16, TRAJ10)
CSRTGGGNKLTF

SEQ ID NO: 209162 - protein, 16 aa, Homo sapiens
  CDR3 for beta chain variable domain of TCR clone 104581 (TRBV7-8, TRBJ2-4)
CASSAERTLAKNIQYF

SEQ ID NO: 209163 - protein, 13 aa, Homo sapiens
  CDR3 for alpha chain variable domain of TCR clone 104582 (TRAV17, TRAJ5)
CALRGTGRRALTF

SEQ ID NO: 209164 - protein, 13 aa, Homo sapiens
  CDR3 for beta chain variable domain of TCR clone 104582 (TRBV4-2, TRBJ1-1)
CASSQAGNTDAFF

SEQ ID NO: 209165 - protein, 13 aa, Homo sapiens
  CDR3 for alpha chain variable domain of TCR clone 104583 (TRAV2, TRAJ40)
YAVVTSGTYKYIF

SEQ ID NO: 209166 - protein, 15 aa, Homo sapiens
  CDR3 for beta chain variable domain of TCR clone 104583 (TRBV11-3, TRBJ2-3)
CASLKDEREGDTQYF

SEQ ID NO: 209167 - protein, 14 aa, Homo sapiens
  CDR3 for alpha chain variable domain of TCR clone 104584 (TRAV13-1, TRAJ4)
CAATLPSGYNKLIF

SEQ ID NO: 209168 - protein, 14 aa, Homo sapiens
  CDR3 for beta chain variable domain of TCR clone 104584 (TRBV19, TRBJ2-1)
CASPTFVSSGEQFF

SEQ ID NO: 209169 - protein, 12 aa, Homo sapiens
  CDR3 for alpha chain variable domain of TCR clone 104585 (TRAV21, TRAJ56)
CAVGVNRSKLTF

SEQ ID NO: 209170 - protein, 15 aa, Homo sapiens
  CDR3 for beta chain variable domain of TCR clone 104585 (TRBV9, TRBJ1-6)
CASSVAGTGDSPLHF

SEQ ID NO: 209171 - protein, 14 aa, Homo sapiens
  CDR3 for alpha chain variable domain of TCR clone 104586 (TRAV17, TRAJ37)
CATDGSSDTGKLIF

SEQ ID NO: 209172 - protein, 13 aa, Homo sapiens
  CDR3 for beta chain variable domain of TCR clone 104586 (TRBV11-2, TRBJ2-1)
CASSLDLVNEQFF

SEQ ID NO: 209173 - protein, 12 aa, Homo sapiens
  CDR3 for alpha chain variable domain of TCR clone 104587 (TRAV17, TRAJ12)
CAKLRSSYKLIF

SEQ ID NO: 209174 - protein, 16 aa, Homo sapiens
  CDR3 for beta chain variable domain of TCR clone 104587 (TRBV28, TRBJ2-7)
CASSLFFETGGPEQYF

SEQ ID NO: 209175 - protein, 14 aa, Homo sapiens
  CDR3 for alpha chain variable domain of TCR clone 104588 (TRAV1-2, TRAJ16)
CAVNRFSDVQKLLF

SEQ ID NO: 209176 - protein, 15 aa, Homo sapiens
  CDR3 for beta chain variable domain of TCR clone 104588 (TRBV9, TRBJ1-6)
CASSVAGTGDSTLHF

SEQ ID NO: 209177 - protein, 15 aa, Homo sapiens
  CDR3 for alpha chain variable domain of TCR clone 104589 (TRAV8-3, TRAJ28)
CAVAYSGAGGYQLTF

SEQ ID NO: 209178 - protein, 12 aa, Homo sapiens
  CDR3 for beta chain variable domain of TCR clone 104589 (TRBV5-1, TRBJ2-1)
CASIGGYNEQFF

SEQ ID NO: 209179 - protein, 17 aa, Homo sapiens
  CDR3 for alpha chain variable domain of TCR clone 104590 (TRAV3, TRAJ38)
CAVRDCLNAGNHRKLIW

SEQ ID NO: 209180 - protein, 14 aa, Homo sapiens
  CDR3 for beta chain variable domain of TCR clone 104590 (TRBV5-5, TRBJ1-5)
CASSGQGVDQPQHF

SEQ ID NO: 209181 - protein, 11 aa, Homo sapiens
  CDR3 for alpha chain variable domain of TCR clone 104591 (TRAV16, TRAJ42)
CALASQGNLIF

SEQ ID NO: 209182 - protein, 14 aa, Homo sapiens
  CDR3 for beta chain variable domain of TCR clone 104591 (TRBV19, TRBJ2-5)
CASSMTGQQETQYF

SEQ ID NO: 209183 - protein, 14 aa, Homo sapiens
  CDR3 for alpha chain variable domain of TCR clone 104592 (TRAV21, TRAJ45)
CAVSPGGGADGLTF

SEQ ID NO: 209184 - protein, 14 aa, Homo sapiens
  CDR3 for beta chain variable domain of TCR clone 104592 (TRBV20-1, TRBJ1-3)
CSASPTGAGNTIYF

SEQ ID NO: 209185 - protein, 16 aa, Homo sapiens
  CDR3 for alpha chain variable domain of TCR clone 104593 (TRAV12-3, TRAJ28)
CAMRANSGAGSYQLTF

SEQ ID NO: 209186 - protein, 16 aa, Homo sapiens
  CDR3 for beta chain variable domain of TCR clone 104593 (TRBV7-2, TRBJ1-3)
CASSRLEASSGKTIYF

SEQ ID NO: 209187 - protein, 14 aa, Homo sapiens
  CDR3 for alpha chain variable domain of TCR clone 104594 (TRAV12-3, TRAJ9)
CAMSPNTGGFKTIF

SEQ ID NO: 209188 - protein, 12 aa, Homo sapiens
  CDR3 for beta chain variable domain of TCR clone 104594 (TRBV19, TRBJ1-5)
CPSSIAQQPQHF

SEQ ID NO: 209189 - protein, 13 aa, Homo sapiens
  CDR3 for alpha chain variable domain of TCR clone 104595 (TRAV13-1, TRAJ6)
CAASKGGSYIPTF

SEQ ID NO: 209190 - protein, 14 aa, Homo sapiens
  CDR3 for beta chain variable domain of TCR clone 104595 (TRBV7-2, TRBJ2-1)
CASSLRVGYNEQFF

SEQ ID NO: 209191 - protein, 15 aa, Homo sapiens
  CDR3 for alpha chain variable domain of TCR clone 104596 (TRAV9-2, TRAJ9)
CALKLRNTGGFKTIF

SEQ ID NO: 209192 - protein, 13 aa, Homo sapiens
  CDR3 for beta chain variable domain of TCR clone 104596 (TRBV24-1, TRBJ1-4)
CATNNGRSEKLFF

SEQ ID NO: 209193 - protein, 13 aa, Homo sapiens
  CDR3 for alpha chain variable domain of TCR clone 104597 (TRAV21, TRAJ27)
CAARPGNAGKSTF

SEQ ID NO: 209194 - protein, 16 aa, Homo sapiens
  CDR3 for beta chain variable domain of TCR clone 104597 (TRBV20-1, TRBJ1-2)
CSASRGQGVANYGYTF

SEQ ID NO: 209195 - protein, 14 aa, Homo sapiens
  CDR3 for alpha chain variable domain of TCR clone 104598 (TRAV2, TRAJ9)
CAVEDRCGGFKTIF

SEQ ID NO: 209196 - protein, 12 aa, Homo sapiens
  CDR3 for beta chain variable domain of TCR clone 104598 (TRBV12-5, TRBJ2-5)
CASGQGVETQYF

SEQ ID NO: 209197 - protein, 14 aa, Homo sapiens
  CDR3 for alpha chain variable domain of TCR clone 104599 (TRAV8-4, TRAJ13)
CAVTLSGGYQKGTF

SEQ ID NO: 209198 - protein, 16 aa, Homo sapiens
  CDR3 for beta chain variable domain of TCR clone 104599 (TRBV5-7, TRBJ1-4)
CASSPSGGLKTEKLFF

SEQ ID NO: 209199 - protein, 15 aa, Homo sapiens
  CDR3 for alpha chain variable domain of TCR clone 104600 (TRAV2, TRAJ9)
CALAALNTGGFKTIF

SEQ ID NO: 209200 - protein, 14 aa, Homo sapiens
  CDR3 for beta chain variable domain of TCR clone 104600 (TRBV7-8, TRBJ2-5)
CASSATGGQETQYF

SEQ ID NO: 209201 - protein, 16 aa, Homo sapiens
  CDR3 for alpha chain variable domain of TCR clone 104601 (TRAV12-3, TRAJ53)
CAMSPGIGGSNYKLTF

SEQ ID NO: 209202 - protein, 15 aa, Homo sapiens
  CDR3 for beta chain variable domain of TCR clone 104601 (TRBV18, TRBJ2-7)
CASSPSSTGNYEQYF

SEQ ID NO: 209203 - protein, 18 aa, Homo sapiens
  CDR3 for alpha chain variable domain of TCR clone 104602 (TRAV21, TRAJ52)
CAVRPSPAGGTSYGKLPF

SEQ ID NO: 209204 - protein, 13 aa, Homo sapiens
  CDR3 for beta chain variable domain of TCR clone 104602 (TRBV29-1, TRBJ2-1)
CSVEGGRVNEQFF

SEQ ID NO: 209205 - protein, 11 aa, Homo sapiens
  CDR3 for alpha chain variable domain of TCR clone 104603 (TRAV35, TRAJ34)
CWARNTDKLIF

SEQ ID NO: 209206 - protein, 15 aa, Homo sapiens
  CDR3 for beta chain variable domain of TCR clone 104603 (TRBV5-1, TRBJ2-3)
CASSVTSGSTDTQYF

SEQ ID NO: 209207 - protein, 18 aa, Homo sapiens
  CDR3 for alpha chain variable domain of TCR clone 104604 (TRAV21, TRAJ53)
CAVKGGENSGGSNYKLAF

SEQ ID NO: 209208 - protein, 14 aa, Homo sapiens
  CDR3 for beta chain variable domain of TCR clone 104604 (TRBV11-3, TRBJ1-5)
LTGDRLYYNQPQHF

SEQ ID NO: 209209 - protein, 11 aa, Homo sapiens
  CDR3 for alpha chain variable domain of TCR clone 104605 (TRAV2, TRAJ33)
CAVESNYQLIW

SEQ ID NO: 209210 - protein, 12 aa, Homo sapiens
  CDR3 for beta chain variable domain of TCR clone 104605 (TRBV11-2, TRBJ2-3)
GASRGAPNTQYF

SEQ ID NO: 209211 - protein, 13 aa, Homo sapiens
  CDR3 for alpha chain variable domain of TCR clone 104606 (TRAV20, TRAJ37)
CAGCSSNTGNLIF

SEQ ID NO: 209212 - protein, 14 aa, Homo sapiens
  CDR3 for beta chain variable domain of TCR clone 104606 (TRBV20-1, TRBJ2-5)
CSARDGRAGETQYF

SEQ ID NO: 209213 - protein, 13 aa, Homo sapiens
  CDR3 for alpha chain variable domain of TCR clone 104607 (TRAV3, TRAJ26)
CAVSRGYGQNFVF

SEQ ID NO: 209214 - protein, 15 aa, Homo sapiens
  CDR3 for beta chain variable domain of TCR clone 104607 (TRBV6-1, TRBJ2-6)
CASSSRPSGANVLTF

SEQ ID NO: 209215 - protein, 13 aa, Homo sapiens
  CDR3 for alpha chain variable domain of TCR clone 104608 (TRAV8-6, TRAJ54)
CAVSEEGAQKLVF

SEQ ID NO: 209216 - protein, 11 aa, Homo sapiens
  CDR3 for beta chain variable domain of TCR clone 104608 (TRBV29-1, TRBJ2-5)
CSEDRTGTQYF

SEQ ID NO: 209217 - protein, 16 aa, Homo sapiens
  CDR3 for alpha chain variable domain of TCR clone 104609 (TRAV30, TRAJ24)
CGTEIVDADSWGKFQF

SEQ ID NO: 209218 - protein, 15 aa, Homo sapiens
  CDR3 for beta chain variable domain of TCR clone 104609 (TRBV19, TRBJ1-1)
CASTSGQMQNTEAFF

SEQ ID NO: 209219 - protein, 18 aa, Homo sapiens
  CDR3 for alpha chain variable domain of TCR clone 104610 (TRAV3, TRAJ13)
CAVRDFESGGYQKVTLEL

SEQ ID NO: 209220 - protein, 16 aa, Homo sapiens
  CDR3 for beta chain variable domain of TCR clone 104610 (TRBV27, TRBJ2-5)
SASSYGPGGQKETQYF

SEQ ID NO: 209221 - protein, 13 aa, Homo sapiens
  CDR3 for alpha chain variable domain of TCR clone 104611 (TRAV12-3, TRAJ40)
CAMSARGTYKYIF

SEQ ID NO: 209222 - protein, 16 aa, Homo sapiens
  CDR3 for beta chain variable domain of TCR clone 104611 (TRBV20-1, TRBJ2-3)
CSGEAGLAGGQETQYF

SEQ ID NO: 209223 - protein, 14 aa, Homo sapiens
  CDR3 for alpha chain variable domain of TCR clone 104612 (TRAV8-4, TRAJ4)
CAVSPSGGYNKLLF

SEQ ID NO: 209224 - protein, 15 aa, Homo sapiens
  CDR3 for beta chain variable domain of TCR clone 104612 (TRBV7-8, TRBJ2-3)
CASSLSADSGGAQYF

SEQ ID NO: 209225 - protein, 13 aa, Homo sapiens
  CDR3 for alpha chain variable domain of TCR clone 104613 (TRAV2, TRAJ23)
CAVMGNQGGKLIF

SEQ ID NO: 209226 - protein, 15 aa, Homo sapiens
  CDR3 for beta chain variable domain of TCR clone 104613 (TRBV19, TRBJ1-6)
CASSTKGAVGSPLHF

SEQ ID NO: 209227 - protein, 14 aa, Homo sapiens
  CDR3 for alpha chain variable domain of TCR clone 104614 (TRAV8-2, TRAJ11)
CVVSEKSGYSTLTF

SEQ ID NO: 209228 - protein, 16 aa, Homo sapiens
  CDR3 for beta chain variable domain of TCR clone 104614 (TRBV28, TRBJ2-1)
CASSSPEYPRNNEQFF

SEQ ID NO: 209229 - protein, 15 aa, Homo sapiens
  CDR3 for alpha chain variable domain of TCR clone 104615 (TRAV26-1, TRAJ48)
CIVRVGDFGNEKLTF

SEQ ID NO: 209230 - protein, 16 aa, Homo sapiens
  CDR3 for beta chain variable domain of TCR clone 104615 (TRBV4-1, TRBJ2-3)
CASSQRAGGITDTQYF

SEQ ID NO: 209231 - protein, 15 aa, Homo sapiens
  CDR3 for alpha chain variable domain of TCR clone 104616 (TRAV3, TRAJ37)
CAVRATSGNTGKLIF

SEQ ID NO: 209232 - protein, 15 aa, Homo sapiens
  CDR3 for beta chain variable domain of TCR clone 104616 (TRBV9, TRBJ1-6)
CASSVAGTGDSPLHF

SEQ ID NO: 209233 - protein, 14 aa, Homo sapiens
  CDR3 for alpha chain variable domain of TCR clone 104617 (TRAV1-2, TRAJ16)
CAVNRFSDGQKLFF

SEQ ID NO: 209234 - protein, 14 aa, Homo sapiens
  CDR3 for beta chain variable domain of TCR clone 104617 (TRBV19, TRBJ2-1)
CASPTFVLSGEQFF

SEQ ID NO: 209235 - protein, 15 aa, Homo sapiens
  CDR3 for alpha chain variable domain of TCR clone 104618 (TRAV17, TRAJ35)
CATAFAIGFGNVLHC

SEQ ID NO: 209236 - protein, 15 aa, Homo sapiens
  CDR3 for beta chain variable domain of TCR clone 104618 (TRBV7-9, TRBJ2-7)
CASSLALAEAYEQYF

SEQ ID NO: 209237 - protein, 10 aa, Homo sapiens
  CDR3 for alpha chain variable domain of TCR clone 104619 (TRAV1-2, TRAJ20)
CAVTDYKLSF

SEQ ID NO: 209238 - protein, 15 aa, Homo sapiens
  CDR3 for beta chain variable domain of TCR clone 104619 (TRBV6-3, TRBJ2-7)
CASSSPRTVFYEQYF

SEQ ID NO: 209239 - protein, 14 aa, Homo sapiens
  CDR3 for alpha chain variable domain of TCR clone 104620 (TRAV1-2, TRAJ16)
CAVNRFSAGQKLLF

SEQ ID NO: 209240 - protein, 13 aa, Homo sapiens
  CDR3 for beta chain variable domain of TCR clone 104620 (TRBV19, TRBJ1-2)
CASSVPGQDGYTF

SEQ ID NO: 209241 - protein, 13 aa, Homo sapiens
  CDR3 for alpha chain variable domain of TCR clone 104621 (TRAV12-3, TRAJ7)
CAVTPYGNNRLAF

SEQ ID NO: 209242 - protein, 16 aa, Homo sapiens
  CDR3 for beta chain variable domain of TCR clone 104621 (TRBV20-1, TRBJ1-4)
CSARPYGGELNEKLFF

SEQ ID NO: 209243 - protein, 14 aa, Homo sapiens
  CDR3 for alpha chain variable domain of TCR clone 104622 (TRAV38-1, TRAJ45)
CAYYSGGGADGLTF

SEQ ID NO: 209244 - protein, 15 aa, Homo sapiens
  CDR3 for beta chain variable domain of TCR clone 104622 (TRBV27, TRBJ2-1)
CASSNGGGSSNEQFF

SEQ ID NO: 209245 - protein, 14 aa, Homo sapiens
  CDR3 for alpha chain variable domain of TCR clone 104623 (TRAV20, TRAJ56)
CAVQFGAANSKLTF

SEQ ID NO: 209246 - protein, 14 aa, Homo sapiens
  CDR3 for beta chain variable domain of TCR clone 104623 (TRBV20-1, TRBJ2-7)
CSAKRGRSSYEQYF

SEQ ID NO: 209247 - protein, 14 aa, Homo sapiens
  CDR3 for alpha chain variable domain of TCR clone 104624 (TRAV1-2, TRAJ16)
CAINRFSDGQKLLF

SEQ ID NO: 209248 - protein, 14 aa, Homo sapiens
  CDR3 for beta chain variable domain of TCR clone 104624 (TRBV7-9, TRBJ2-3)
CASSLEDGTDTQYF

SEQ ID NO: 209249 - protein, 17 aa, Homo sapiens
  CDR3 for alpha chain variable domain of TCR clone 104625 (TRAV14/DV4, TRAJ53)
CIVRVDDSGGSNYKLTF

SEQ ID NO: 209250 - protein, 15 aa, Homo sapiens
  CDR3 for beta chain variable domain of TCR clone 104625 (TRBV20-1, TRBJ2-7)
CSARVPAAYFYEQYF

SEQ ID NO: 209251 - protein, 14 aa, Homo sapiens
  CDR3 for alpha chain variable domain of TCR clone 104626 (TRAV12-1, TRAJ17)
CVVNYKAAGNKLTF

SEQ ID NO: 209252 - protein, 12 aa, Homo sapiens
  CDR3 for beta chain variable domain of TCR clone 104626 (TRBV11-2, TRBJ2-1)
CASSPGNNEQFF

SEQ ID NO: 209253 - protein, 15 aa, Homo sapiens
  CDR3 for alpha chain variable domain of TCR clone 104627 (TRAV3, TRAJ5)
CAVRDKKTGRRALTF

SEQ ID NO: 209254 - protein, 15 aa, Homo sapiens
  CDR3 for beta chain variable domain of TCR clone 104627 (TRBV7-8, TRBJ2-1)
CASSLADSLYNEQFF

SEQ ID NO: 209255 - protein, 14 aa, Homo sapiens
  CDR3 for alpha chain variable domain of TCR clone 104628 (TRAV26-1, TRAJ48)
CIVRTNFGNEKLTF

SEQ ID NO: 209256 - protein, 12 aa, Homo sapiens
  CDR3 for beta chain variable domain of TCR clone 104628 (TRBV20-1, TRBJ2-7)
CSASAGANEQYF

SEQ ID NO: 209257 - protein, 17 aa, Homo sapiens
  CDR3 for alpha chain variable domain of TCR clone 104629 (TRAV3, TRAJ12)
CAVRDGGRMGSSYKLIF

SEQ ID NO: 209258 - protein, 16 aa, Homo sapiens
  CDR3 for beta chain variable domain of TCR clone 104629 (TRBV9, TRBJ2-2)
CASSAMGKGNTGELFF

SEQ ID NO: 209259 - protein, 13 aa, Homo sapiens
  CDR3 for alpha chain variable domain of TCR clone 104630 (TRAV17, TRAJ9)
CATDYTGSFKTIF

SEQ ID NO: 209260 - protein, 14 aa, Homo sapiens
  CDR3 for beta chain variable domain of TCR clone 104630 (TRBV19, TRBJ2-5)
CASSMTGQQETQYF

SEQ ID NO: 209261 - protein, 15 aa, Homo sapiens
  CDR3 for alpha chain variable domain of TCR clone 104631 (TRAV8-4, TRAJ11)
CAVSRALSGYSTLTL

SEQ ID NO: 209262 - protein, 13 aa, Homo sapiens
  CDR3 for beta chain variable domain of TCR clone 104631 (TRBV10-3, TRBJ2-7)
CASKLAVNYEQYF

SEQ ID NO: 209263 - protein, 10 aa, Homo sapiens
  CDR3 for alpha chain variable domain of TCR clone 104632 (TRAV8-4, TRAJ12)
WRDSSYKLIF

SEQ ID NO: 209264 - protein, 15 aa, Homo sapiens
  CDR3 for beta chain variable domain of TCR clone 104632 (TRBV11-3, TRBJ2-3)
CASLKDGREGDTQYF

SEQ ID NO: 209265 - protein, 15 aa, Homo sapiens
  CDR3 for alpha chain variable domain of TCR clone 104633 (TRAV8-2, TRAJ16)
CVVSDGFSEGQKLLF

SEQ ID NO: 209266 - protein, 14 aa, Homo sapiens
  CDR3 for beta chain variable domain of TCR clone 104633 (TRBV7-3, TRBJ1-1)
CASSLGTGYTEAFF

SEQ ID NO: 209267 - protein, 17 aa, Homo sapiens
  CDR3 for alpha chain variable domain of TCR clone 104634 (TRAV3, TRAJ12)
CAVRDGGRMDSSYKLIF

SEQ ID NO: 209268 - protein, 13 aa, Homo sapiens
  CDR3 for beta chain variable domain of TCR clone 104634 (TRBV19, TRBJ1-2)
CASSVPGQDGYTF

SEQ ID NO: 209269 - protein, 15 aa, Homo sapiens
  CDR3 for alpha chain variable domain of TCR clone 104635 (TRAV26-1, TRAJ29)
CIVRVEGLGNTPLVF

SEQ ID NO: 209270 - protein, 15 aa, Homo sapiens
  CDR3 for beta chain variable domain of TCR clone 104635 (TRBV28, TRBJ2-5)
CASSPGQGSIETQYF

SEQ ID NO: 209271 - protein, 16 aa, Homo sapiens
  CDR3 for alpha chain variable domain of TCR clone 104636 (TRAV8-2, TRAJ7)
CVVSEGPYYGNNRLAF

SEQ ID NO: 209272 - protein, 15 aa, Homo sapiens
  CDR3 for beta chain variable domain of TCR clone 104636 (TRBV27, TRBJ2-3)
CASSLGLAATDTQYF

SEQ ID NO: 209273 - protein, 14 aa, Homo sapiens
  CDR3 for alpha chain variable domain of TCR clone 104637 (TRAV2, TRAJ29)
CAVTPPSGNTPLVF

SEQ ID NO: 209274 - protein, 13 aa, Homo sapiens
  CDR3 for beta chain variable domain of TCR clone 104637 (TRBV11-2, TRBJ2-1)
CASSLGLAGGQFF

SEQ ID NO: 209275 - protein, 13 aa, Homo sapiens
  CDR3 for alpha chain variable domain of TCR clone 104638 (TRAV8-3, TRAJ44)
YAVVPGTASKLTF

SEQ ID NO: 209276 - protein, 14 aa, Homo sapiens
  CDR3 for beta chain variable domain of TCR clone 104638 (TRBV11-2, TRBJ2-3)
CASSRLARTDTQHF

SEQ ID NO: 209277 - protein, 13 aa, Homo sapiens
  CDR3 for alpha chain variable domain of TCR clone 104639 (TRAV8-6, TRAJ41)
CAVRENSGYALNF

SEQ ID NO: 209278 - protein, 17 aa, Homo sapiens
  CDR3 for beta chain variable domain of TCR clone 104639 (TRBV7-2, TRBJ2-3)
CASSLEARGTSTDTQYF

SEQ ID NO: 209279 - protein, 10 aa, Homo sapiens
  CDR3 for alpha chain variable domain of TCR clone 104640 (TRAV1-2, TRAJ20)
CACNDYKLSF

SEQ ID NO: 209280 - protein, 16 aa, Homo sapiens
  CDR3 for beta chain variable domain of TCR clone 104640 (TRBV20-1, TRBJ2-1)
CSARDLKQGMSNEQFF

SEQ ID NO: 209281 - protein, 14 aa, Homo sapiens
  CDR3 for alpha chain variable domain of TCR clone 104641 (TRAV13-1, TRAJ53)
CAASISGSNYKLTF

SEQ ID NO: 209282 - protein, 13 aa, Homo sapiens
  CDR3 for beta chain variable domain of TCR clone 104641 (TRBV7-9, TRBJ1-2)
CASSLKQNYGYTF

SEQ ID NO: 209283 - protein, 13 aa, Homo sapiens
  CDR3 for alpha chain variable domain of TCR clone 104642 (TRAV25, TRAJ54)
CAGTIQGAQKLVF

SEQ ID NO: 209284 - protein, 15 aa, Homo sapiens
  CDR3 for beta chain variable domain of TCR clone 104642 (TRBV19, TRBJ1-5)
CASSILTGENQAQHF

SEQ ID NO: 209285 - protein, 13 aa, Homo sapiens
  CDR3 for alpha chain variable domain of TCR clone 104643 (TRAV3, TRAJ21)
CAVREPDFNKFYF

SEQ ID NO: 209286 - protein, 13 aa, Homo sapiens
  CDR3 for beta chain variable domain of TCR clone 104643 (TRBV15, TRBJ1-6)
CATSGGLNSPLHF

SEQ ID NO: 209287 - protein, 13 aa, Homo sapiens
  CDR3 for alpha chain variable domain of TCR clone 104644 (TRAV20, TRAJ31)
CAVQAWNNARLMF

SEQ ID NO: 209288 - protein, 15 aa, Homo sapiens
  CDR3 for beta chain variable domain of TCR clone 104644 (TRBV12-4, TRBJ2-5)
CASSGTGQAQETQYF

SEQ ID NO: 209289 - protein, 14 aa, Homo sapiens
  CDR3 for alpha chain variable domain of TCR clone 104645 (TRAV1-2, TRAJ6)
CAVSLSGGSYIPTF

SEQ ID NO: 209290 - protein, 15 aa, Homo sapiens
  CDR3 for beta chain variable domain of TCR clone 104645 (TRBV28, TRBJ2-7)
WASSPGGRGFYEQYF

SEQ ID NO: 209291 - protein, 14 aa, Homo sapiens
  CDR3 for alpha chain variable domain of TCR clone 104646 (TRAV13-1, TRAJ3)
CAAEGYSSASKIIF

SEQ ID NO: 209292 - protein, 14 aa, Homo sapiens
  CDR3 for beta chain variable domain of TCR clone 104646 (TRBV19, TRBJ2-5)
CASSASGIQETQYF

SEQ ID NO: 209293 - protein, 13 aa, Homo sapiens
  CDR3 for alpha chain variable domain of TCR clone 104647 (TRAV21, TRAJ15)
CAVANQAGTALIF

SEQ ID NO: 209294 - protein, 16 aa, Homo sapiens
  CDR3 for beta chain variable domain of TCR clone 104647 (TRBV28, TRBJ1-5)
CASSLTGQGWNQPQHF

SEQ ID NO: 209295 - protein, 19 aa, Homo sapiens
  CDR3 for alpha chain variable domain of TCR clone 104648 (TRAV17, TRAJ40)
TASRAADTASYFCASKYIF

SEQ ID NO: 209296 - protein, 15 aa, Homo sapiens
  CDR3 for beta chain variable domain of TCR clone 104648 (TRBV4-1, TRBJ2-7)
CASSQNTGRLYEQYF

SEQ ID NO: 209297 - protein, 13 aa, Homo sapiens
  CDR3 for alpha chain variable domain of TCR clone 104649 (TRAV20, TRAJ37)
CAGCSSNTGKLIF

SEQ ID NO: 209298 - protein, 15 aa, Homo sapiens
  CDR3 for beta chain variable domain of TCR clone 104649 (TRBV5-1, TRBJ2-7)
CASSLDLTSSYEQYF

SEQ ID NO: 209299 - protein, 14 aa, Homo sapiens
  CDR3 for alpha chain variable domain of TCR clone 104650 (TRAV12-3, TRAJ10)
SHLPLTGGGNKLTF

SEQ ID NO: 209300 - protein, 15 aa, Homo sapiens
  CDR3 for beta chain variable domain of TCR clone 104650 (TRBV4-1, TRBJ1-4)
CASSDTGGTNETLFF

SEQ ID NO: 209301 - protein, 18 aa, Homo sapiens
  CDR3 for alpha chain variable domain of TCR clone 104651 (TRAV26-2, TRAJ45)
CILRLWGYSGGGADGLTF

SEQ ID NO: 209302 - protein, 17 aa, Homo sapiens
  CDR3 for beta chain variable domain of TCR clone 104651 (TRBV28, TRBJ2-3)
CASSTTPAGGRVDTQYF

SEQ ID NO: 209303 - protein, 14 aa, Homo sapiens
  CDR3 for alpha chain variable domain of TCR clone 104652 (TRAV13-1, TRAJ44)
CAAKPTGTASKLTF

SEQ ID NO: 209304 - protein, 17 aa, Homo sapiens
  CDR3 for beta chain variable domain of TCR clone 104652 (TRBV7-3, TRBJ2-3)
CASSLMKRMRGADTQYF

SEQ ID NO: 209305 - protein, 11 aa, Homo sapiens
  CDR3 for alpha chain variable domain of TCR clone 104653 (TRAV12-2, TRAJ26)
RAVEGGQNFVF

SEQ ID NO: 209306 - protein, 17 aa, Homo sapiens
  CDR3 for beta chain variable domain of TCR clone 104653 (TRBV20-1, TRBJ2-1)
CSASGGENTGAYNEQFF

SEQ ID NO: 209307 - protein, 13 aa, Homo sapiens
  CDR3 for alpha chain variable domain of TCR clone 104654 (TRAV1-1, TRAJ23)
CAVVDNQGGKLIF

SEQ ID NO: 209308 - protein, 16 aa, Homo sapiens
  CDR3 for beta chain variable domain of TCR clone 104654 (TRBV5-5, TRBJ1-2)
CASSPTWGRGLYGYTF

SEQ ID NO: 209309 - protein, 15 aa, Homo sapiens
  CDR3 for alpha chain variable domain of TCR clone 104655 (TRAV8-3, TRAJ45)
CASSYSGGGADGLTF

SEQ ID NO: 209310 - protein, 13 aa, Homo sapiens
  CDR3 for beta chain variable domain of TCR clone 104655 (TRBV6-5, TRBJ2-1)
CASRGRVGNEQFF

SEQ ID NO: 209311 - protein, 18 aa, Homo sapiens
  CDR3 for alpha chain variable domain of TCR clone 104656 (TRAV2, TRAJ20)
LQVREADAAVYRDCKLSF

SEQ ID NO: 209312 - protein, 17 aa, Homo sapiens
  CDR3 for beta chain variable domain of TCR clone 104656 (TRBV11-2, TRBJ2-1)
CASSLYPPGVEYNEQFF

SEQ ID NO: 209313 - protein, 17 aa, Homo sapiens
  CDR3 for alpha chain variable domain of TCR clone 104657 (TRAV3, TRAJ6)
CAVRDGPRAGGSYIPTF

SEQ ID NO: 209314 - protein, 15 aa, Homo sapiens
  CDR3 for beta chain variable domain of TCR clone 104657 (TRBV11-3, TRBJ2-7)
CASRPGPASSYEQYF

SEQ ID NO: 209315 - protein, 18 aa, Homo sapiens
  CDR3 for alpha chain variable domain of TCR clone 104658 (TRAV21, TRAJ52)
CAVRPSPAGGTSYGKLTF

SEQ ID NO: 209316 - protein, 13 aa, Homo sapiens
  CDR3 for beta chain variable domain of TCR clone 104658 (TRBV20-1, TRBJ1-1)
CSARVGGNTEDFF

SEQ ID NO: 209317 - protein, 14 aa, Homo sapiens
  CDR3 for alpha chain variable domain of TCR clone 104659 (TRAV21, TRAJ37)
CAVKGSSNTGKLIF

SEQ ID NO: 209318 - protein, 13 aa, Homo sapiens
  CDR3 for beta chain variable domain of TCR clone 104659 (TRBV7-9, TRBJ1-2)
CASSLKQNYGYTF

SEQ ID NO: 209319 - protein, 15 aa, Homo sapiens
  CDR3 for alpha chain variable domain of TCR clone 104660 (TRAV8-2, TRAJ40)
CVVSDRGSGTYRYIF

SEQ ID NO: 209320 - protein, 16 aa, Homo sapiens
  CDR3 for beta chain variable domain of TCR clone 104660 (TRBV12-5, TRBJ2-5)
CASGPRTSGNQETQYF

SEQ ID NO: 209321 - protein, 17 aa, Homo sapiens
  CDR3 for alpha chain variable domain of TCR clone 104661 (TRAV2, TRAJ32)
CCLLLWGGGGATNKLIF

SEQ ID NO: 209322 - protein, 14 aa, Homo sapiens
  CDR3 for beta chain variable domain of TCR clone 104661 (TRBV20-1, TRBJ1-1)
SAVLGGGGNTEAFF

SEQ ID NO: 209323 - protein, 16 aa, Homo sapiens
  CDR3 for alpha chain variable domain of TCR clone 104662 (TRAV12-2, TRAJ45)
CAVNRGSGGGADGLTF

SEQ ID NO: 209324 - protein, 12 aa, Homo sapiens
  CDR3 for beta chain variable domain of TCR clone 104662 (TRBV11-2, TRBJ2-2)
CASSLGGGELFF

SEQ ID NO: 209325 - protein, 14 aa, Homo sapiens
  CDR3 for alpha chain variable domain of TCR clone 104663 (TRAV23/DV6, TRAJ22)
CAASGSGSARQLTF

SEQ ID NO: 209326 - protein, 16 aa, Homo sapiens
  CDR3 for beta chain variable domain of TCR clone 104663 (TRBV19, TRBJ2-2)
CASSFPGQGLAGELFF

SEQ ID NO: 209327 - protein, 13 aa, Homo sapiens
  CDR3 for alpha chain variable domain of TCR clone 104664 (TRAV38-1, TRAJ42)
CARWGGSQGNLIF

SEQ ID NO: 209328 - protein, 17 aa, Homo sapiens
  CDR3 for beta chain variable domain of TCR clone 104664 (TRBV20-1, TRBJ2-1)
CSARDPLAGVWDSEQFF

SEQ ID NO: 209329 - protein, 16 aa, Homo sapiens
  CDR3 for alpha chain variable domain of TCR clone 104665 (TRAV12-2, TRAJ40)
CAVIRGGTSGTYKYIF

SEQ ID NO: 209330 - protein, 17 aa, Homo sapiens
  CDR3 for beta chain variable domain of TCR clone 104665 (TRBV18, TRBJ2-3)
CASSPFGDGGFTDTQYF

SEQ ID NO: 209331 - protein, 14 aa, Homo sapiens
  CDR3 for alpha chain variable domain of TCR clone 104666 (TRAV12-2, TRAJ17)
CAVLFKAAGNNLTF

SEQ ID NO: 209332 - protein, 15 aa, Homo sapiens
  CDR3 for beta chain variable domain of TCR clone 104666 (TRBV20-1, TRBJ2-7)
CSARDRVSGMDEQYF

SEQ ID NO: 209333 - protein, 14 aa, Homo sapiens
  CDR3 for alpha chain variable domain of TCR clone 104667 (TRAV1-2, TRAJ16)
CAVNRFSDGQKLLF

SEQ ID NO: 209334 - protein, 15 aa, Homo sapiens
  CDR3 for beta chain variable domain of TCR clone 104667 (TRBV5-7, TRBJ1-2)
CASSLAWTGGYGYTF

SEQ ID NO: 209335 - protein, 14 aa, Homo sapiens
  CDR3 for alpha chain variable domain of TCR clone 104668 (TRAV12-1, TRAJ43)
CVVNGRSNNNDMRF

SEQ ID NO: 209336 - protein, 12 aa, Homo sapiens
  CDR3 for beta chain variable domain of TCR clone 104668 (TRBV11-2, TRBJ2-2)
CASSLGGGELFF

SEQ ID NO: 209337 - protein, 13 aa, Homo sapiens
  CDR3 for alpha chain variable domain of TCR clone 104669 (TRAV3, TRAJ48)
CAVVPFGNEKLTF

SEQ ID NO: 209338 - protein, 15 aa, Homo sapiens
  CDR3 for beta chain variable domain of TCR clone 104669 (TRBV11-2, TRBJ2-1)
CASSSPSTRYNEQFF

SEQ ID NO: 209339 - protein, 16 aa, Homo sapiens
  CDR3 for alpha chain variable domain of TCR clone 104670 (TRAV3, TRAJ28)
CAVLPRSGAGSYQLTF

SEQ ID NO: 209340 - protein, 13 aa, Homo sapiens
  CDR3 for beta chain variable domain of TCR clone 104670 (TRBV12-4, TRBJ2-5)
CASRVAVQETQYF

SEQ ID NO: 209341 - protein, 13 aa, Homo sapiens
  CDR3 for alpha chain variable domain of TCR clone 104671 (TRAV21, TRAJ20)
CAVGVFADYKLSF

SEQ ID NO: 209342 - protein, 13 aa, Homo sapiens
  CDR3 for beta chain variable domain of TCR clone 104671 (TRBV7-2, TRBJ2-7)
CASSSPSGSEQYF

SEQ ID NO: 209343 - protein, 14 aa, Homo sapiens
  CDR3 for alpha chain variable domain of TCR clone 104672 (TRAV13-1, TRAJ5)
CAAHPDTGRRALTF

SEQ ID NO: 209344 - protein, 17 aa, Homo sapiens
  CDR3 for beta chain variable domain of TCR clone 104672 (TRBV11-2, TRBJ2-1)
CASSLYPPGVEYNEQFF

SEQ ID NO: 209345 - protein, 14 aa, Homo sapiens
  CDR3 for alpha chain variable domain of TCR clone 104673 (TRAV9-2, TRAJ36)
CALPWRTGANKLFF

SEQ ID NO: 209346 - protein, 14 aa, Homo sapiens
  CDR3 for beta chain variable domain of TCR clone 104673 (TRBV2, TRBJ1-2)
CASSELQVNYGYTF

SEQ ID NO: 209347 - protein, 19 aa, Homo sapiens
  CDR3 for alpha chain variable domain of TCR clone 104674 (TRAV2, TRAJ20)
ILQVREADAAVYRDCKLSF

SEQ ID NO: 209348 - protein, 16 aa, Homo sapiens
  CDR3 for beta chain variable domain of TCR clone 104674 (TRBV5-1, TRBJ2-5)
CASSSALLRAGETQYF

SEQ ID NO: 209349 - protein, 12 aa, Homo sapiens
  CDR3 for alpha chain variable domain of TCR clone 104675 (TRAV29/DV5, TRAJ49)
CAATDTGNQFYF

SEQ ID NO: 209350 - protein, 16 aa, Homo sapiens
  CDR3 for beta chain variable domain of TCR clone 104675 (TRBV2, TRBJ2-1)
CASSVGGSLSYNEQFF

SEQ ID NO: 209351 - protein, 16 aa, Homo sapiens
  CDR3 for alpha chain variable domain of TCR clone 104676 (TRAV30, TRAJ24)
CGTEIVDADSWGKFKF

SEQ ID NO: 209352 - protein, 14 aa, Homo sapiens
  CDR3 for beta chain variable domain of TCR clone 104676 (TRBV7-8, TRBJ2-3)
CASSLEAGTDTQYF

SEQ ID NO: 209353 - protein, 17 aa, Homo sapiens
  CDR3 for alpha chain variable domain of TCR clone 104677 (TRAV26-1, TRAJ53)
CIVRVDDSGGSNYKLTF

SEQ ID NO: 209354 - protein, 16 aa, Homo sapiens
  CDR3 for beta chain variable domain of TCR clone 104677 (TRBV12-5, TRBJ2-5)
CASGPRTSGNQETQYF

SEQ ID NO: 209355 - protein, 11 aa, Homo sapiens
  CDR3 for alpha chain variable domain of TCR clone 104678 (TRAV21, TRAJ34)
CAHYNTGKLIF

SEQ ID NO: 209356 - protein, 13 aa, Homo sapiens
  CDR3 for beta chain variable domain of TCR clone 104678 (TRBV20-1, TRBJ2-7)
CSADPGATYEQYF

SEQ ID NO: 209357 - protein, 14 aa, Homo sapiens
  CDR3 for alpha chain variable domain of TCR clone 104679 (TRAV29/DV5, TRAJ45)
CAPSFRGGADGLTF

SEQ ID NO: 209358 - protein, 11 aa, Homo sapiens
  CDR3 for beta chain variable domain of TCR clone 104679 (TRBV11-2, TRBJ2-2)
CASSLPGELFF

SEQ ID NO: 209359 - protein, 15 aa, Homo sapiens
  CDR3 for alpha chain variable domain of TCR clone 104680 (TRAV38-1, TRAJ37)
CAFIHGSGNTGKLIF

SEQ ID NO: 209360 - protein, 12 aa, Homo sapiens
  CDR3 for beta chain variable domain of TCR clone 104680 (TRBV7-9, TRBJ2-7)
CASSFDSYEQYF

SEQ ID NO: 209361 - protein, 15 aa, Homo sapiens
  CDR3 for alpha chain variable domain of TCR clone 104681 (TRAV16, TRAJ17)
FALSGNKAAGNKLTF

SEQ ID NO: 209362 - protein, 16 aa, Homo sapiens
  CDR3 for beta chain variable domain of TCR clone 104681 (TRBV7-6, TRBJ1-6)
CASSSLPAGEYSPLHF

SEQ ID NO: 209363 - protein, 12 aa, Homo sapiens
  CDR3 for alpha chain variable domain of TCR clone 104682 (TRAV13-1, TRAJ15)
CAASQAGTALIF

SEQ ID NO: 209364 - protein, 18 aa, Homo sapiens
  CDR3 for beta chain variable domain of TCR clone 104682 (TRBV7-9, TRBJ2-3)
CASSLPIDGQISTDTQYF

SEQ ID NO: 209365 - protein, 14 aa, Homo sapiens
  CDR3 for alpha chain variable domain of TCR clone 104683 (TRAV38-1, TRAJ45)
CAYYSGGGADGLTF

SEQ ID NO: 209366 - protein, 20 aa, Homo sapiens
  CDR3 for beta chain variable domain of TCR clone 104683 (TRBV28, TRBJ2-1)
CVSTPIGRSPGLAGGNEQFF

SEQ ID NO: 209367 - protein, 13 aa, Homo sapiens
  CDR3 for alpha chain variable domain of TCR clone 104684 (TRAV12-2, TRAJ39)
CAVNNNAGNMLTF

SEQ ID NO: 209368 - protein, 13 aa, Homo sapiens
  CDR3 for beta chain variable domain of TCR clone 104684 (TRBV12-4, TRBJ2-7)
CASSPTETYEQYF

SEQ ID NO: 209369 - protein, 15 aa, Homo sapiens
  CDR3 for alpha chain variable domain of TCR clone 104685 (TRAV8-3, TRAJ11)
CAVGLLNSGYSTLTF

SEQ ID NO: 209370 - protein, 16 aa, Homo sapiens
  CDR3 for beta chain variable domain of TCR clone 104685 (TRBV28, TRBJ2-1)
CASSLWGRTSGTLQLF

SEQ ID NO: 209371 - protein, 11 aa, Homo sapiens
  CDR3 for alpha chain variable domain of TCR clone 104686 (TRAV17, TRAJ9)
CATTGGFKTIF

SEQ ID NO: 209372 - protein, 15 aa, Homo sapiens
  CDR3 for beta chain variable domain of TCR clone 104686 (TRBV6-3, TRBJ2-7)
CASSSPGTVFYEQYF

SEQ ID NO: 209373 - protein, 13 aa, Homo sapiens
  CDR3 for alpha chain variable domain of TCR clone 104687 (TRAV8-3, TRAJ44)
CAVVPGTASKLTF

SEQ ID NO: 209374 - protein, 14 aa, Homo sapiens
  CDR3 for beta chain variable domain of TCR clone 104687 (TRBV11-2, TRBJ2-3)
CASSRLARTETQYF

SEQ ID NO: 209375 - protein, 15 aa, Homo sapiens
  CDR3 for alpha chain variable domain of TCR clone 104688 (TRAV8-4, TRAJ37)
CAVSRGSGNTGKLIF

SEQ ID NO: 209376 - protein, 12 aa, Homo sapiens
  CDR3 for beta chain variable domain of TCR clone 104688 (TRBV19, TRBJ2-1)
CASSMQDTEQFF

SEQ ID NO: 209377 - protein, 19 aa, Homo sapiens
  CDR3 for alpha chain variable domain of TCR clone 104689 (TRAV26-1, TRAJ52)
CIVRAHRNAGGTTYGKLTF

SEQ ID NO: 209378 - protein, 15 aa, Homo sapiens
  CDR3 for beta chain variable domain of TCR clone 104689 (TRBV12-4, TRBJ2-5)
CASSPPTGLQETQYF

SEQ ID NO: 209379 - protein, 16 aa, Homo sapiens
  CDR3 for alpha chain variable domain of TCR clone 104690 (TRAV16, TRAJ4)
CALSRMFSGGYSKLIF

SEQ ID NO: 209380 - protein, 12 aa, Homo sapiens
  CDR3 for beta chain variable domain of TCR clone 104690 (TRBV29-1, TRBJ2-3)
CSVTGGADTQYF

SEQ ID NO: 209381 - protein, 14 aa, Homo sapiens
  CDR3 for alpha chain variable domain of TCR clone 104691 (TRAV8-3, TRAJ39)
CAVGANNAGNMLTF

SEQ ID NO: 209382 - protein, 15 aa, Homo sapiens
  CDR3 for beta chain variable domain of TCR clone 104691 (TRBV7-6, TRBJ2-1)
CASSSLAGEGNEQFF

SEQ ID NO: 209383 - protein, 13 aa, Homo sapiens
  CDR3 for alpha chain variable domain of TCR clone 104692 (TRAV27, TRAJ45)
CRSSGGGADGLTF

SEQ ID NO: 209384 - protein, 15 aa, Homo sapiens
  CDR3 for beta chain variable domain of TCR clone 104692 (TRBV18, TRBJ2-1)
CASSPPSASYNEQFF

SEQ ID NO: 209385 - protein, 16 aa, Homo sapiens
  CDR3 for alpha chain variable domain of TCR clone 104693 (TRAV3, TRAJ37)
CAVRPHGSGNTGKLIF

SEQ ID NO: 209386 - protein, 15 aa, Homo sapiens
  CDR3 for beta chain variable domain of TCR clone 104693 (TRBV10-3, TRBJ2-3)
CAISLTSGGTETQYF

SEQ ID NO: 209387 - protein, 14 aa, Homo sapiens
  CDR3 for alpha chain variable domain of TCR clone 104694 (TRAV1-2, TRAJ16)
CAVNRFSDGQKLLF

SEQ ID NO: 209388 - protein, 15 aa, Homo sapiens
  CDR3 for beta chain variable domain of TCR clone 104694 (TRBV28, TRBJ2-2)
CASSLRTGNTGELFF

SEQ ID NO: 209389 - protein, 11 aa, Homo sapiens
  CDR3 for alpha chain variable domain of TCR clone 104695 (TRAV12-2, TRAJ31)
CAILNNARLMF

SEQ ID NO: 209390 - protein, 16 aa, Homo sapiens
  CDR3 for beta chain variable domain of TCR clone 104695 (TRBV13, TRBJ2-2)
CASSPKTGEHTGELFF

SEQ ID NO: 209391 - protein, 15 aa, Homo sapiens
  CDR3 for alpha chain variable domain of TCR clone 104696 (TRAV12-2, TRAJ50)
CAVNGLETSYDKLIF

SEQ ID NO: 209392 - protein, 16 aa, Homo sapiens
  CDR3 for beta chain variable domain of TCR clone 104696 (TRBV5-4, TRBJ2-3)
CASQQPGAGGADTQYF

SEQ ID NO: 209393 - protein, 14 aa, Homo sapiens
  CDR3 for alpha chain variable domain of TCR clone 104697 (TRAV12-2, TRAJ29)
CAVSRNSGNTPLVF

SEQ ID NO: 209394 - protein, 13 aa, Homo sapiens
  CDR3 for beta chain variable domain of TCR clone 104697 (TRBV12-4, TRBJ2-1)
CASSHYTDNEQFF

SEQ ID NO: 209395 - protein, 18 aa, Homo sapiens
  CDR3 for alpha chain variable domain of TCR clone 104698 (TRAV13-1, TRAJ52)
CAAKNPNAGGTSYGKLTF

SEQ ID NO: 209396 - protein, 12 aa, Homo sapiens
  CDR3 for beta chain variable domain of TCR clone 104698 (TRBV5-1, TRBJ2-3)
CASSILTDTQYF

SEQ ID NO: 209397 - protein, 12 aa, Homo sapiens
  CDR3 for alpha chain variable domain of TCR clone 104699 (TRAV23/DV6, TRAJ12)
CAVMDSSYKLIF

SEQ ID NO: 209398 - protein, 14 aa, Homo sapiens
  CDR3 for beta chain variable domain of TCR clone 104699 (TRBV20-1, TRBJ2-4)
CSARDRGQGGIQYF

SEQ ID NO: 209399 - protein, 16 aa, Homo sapiens
  CDR3 for alpha chain variable domain of TCR clone 104700 (TRAV13-1, TRAJ48)
CSKYRESNFGNEQLTF

SEQ ID NO: 209400 - protein, 17 aa, Homo sapiens
  CDR3 for beta chain variable domain of TCR clone 104700 (TRBV28, TRBJ2-1)
CASSSARQALTYNEQFF

SEQ ID NO: 209401 - protein, 15 aa, Homo sapiens
  CDR3 for alpha chain variable domain of TCR clone 104701 (TRAV36/DV7, TRAJ53)
CAVEGSGGSNYKLTF

SEQ ID NO: 209402 - protein, 16 aa, Homo sapiens
  CDR3 for beta chain variable domain of TCR clone 104701 (TRBV27, TRBJ2-2)
CDSSLSGFWVTGELFF

SEQ ID NO: 209403 - protein, 13 aa, Homo sapiens
  CDR3 for alpha chain variable domain of TCR clone 104702 (TRAV35, TRAJ42)
CAGFPGSQGNLIF

SEQ ID NO: 209404 - protein, 18 aa, Homo sapiens
  CDR3 for beta chain variable domain of TCR clone 104702 (TRBV11-2, TRBJ2-3)
CASSLGGASRGAPNTQYF

SEQ ID NO: 209405 - protein, 14 aa, Homo sapiens
  CDR3 for alpha chain variable domain of TCR clone 104703 (TRAV12-1, TRAJ43)
CVVNGRSNNNDMRF

SEQ ID NO: 209406 - protein, 13 aa, Homo sapiens
  CDR3 for beta chain variable domain of TCR clone 104703 (TRBV10-3, TRBJ2-7)
CASKRAVNYEQYF

SEQ ID NO: 209407 - protein, 16 aa, Homo sapiens
  CDR3 for alpha chain variable domain of TCR clone 104704 (TRAV1-1, TRAJ29)
CAVRSTRNSGNTPLVF

SEQ ID NO: 209408 - protein, 15 aa, Homo sapiens
  CDR3 for beta chain variable domain of TCR clone 104704 (TRBV25-1, TRBJ1-4)
CASSKRIATNEKLFF

SEQ ID NO: 209409 - protein, 14 aa, Homo sapiens
  CDR3 for alpha chain variable domain of TCR clone 104705 (TRAV29/DV5, TRAJ45)
CAASFRGGADGHTF

SEQ ID NO: 209410 - protein, 11 aa, Homo sapiens
  CDR3 for beta chain variable domain of TCR clone 104705 (TRBV11-2, TRBJ2-2)
CASSLPGELFF

SEQ ID NO: 209411 - protein, 14 aa, Homo sapiens
  CDR3 for alpha chain variable domain of TCR clone 104706 (TRAV12-3, TRAJ58)
CAMSTETSGSRLTF

SEQ ID NO: 209412 - protein, 15 aa, Homo sapiens
  CDR3 for beta chain variable domain of TCR clone 104706 (TRBV11-3, TRBJ2-3)
CASMKDGREGDTQYF

SEQ ID NO: 209413 - protein, 11 aa, Homo sapiens
  CDR3 for alpha chain variable domain of TCR clone 104707 (TRAV23/DV6, TRAJ43)
CAASSGNDMRF

SEQ ID NO: 209414 - protein, 11 aa, Homo sapiens
  CDR3 for beta chain variable domain of TCR clone 104707 (TRBV4-1, TRBJ1-2)
CASSQDPYPMA

SEQ ID NO: 209415 - protein, 14 aa, Homo sapiens
  CDR3 for alpha chain variable domain of TCR clone 104708 (TRAV35, TRAJ50)
FAGHRKTSYDKVIF

SEQ ID NO: 209416 - protein, 13 aa, Homo sapiens
  CDR3 for beta chain variable domain of TCR clone 104708 (TRBV7-7, TRBJ2-3)
CASSLSRADTQYF

SEQ ID NO: 209417 - protein, 15 aa, Homo sapiens
  CDR3 for alpha chain variable domain of TCR clone 104709 (TRAV17, TRAJ16)
CATAFRFSDGQKLLF

SEQ ID NO: 209418 - protein, 15 aa, Homo sapiens
  CDR3 for beta chain variable domain of TCR clone 104709 (TRBV13, TRBJ1-5)
CASSFGQGGVQPQHF

SEQ ID NO: 209419 - protein, 23 aa, Homo sapiens
  CDR3 for alpha chain variable domain of TCR clone 104710 (TRAV26-1, TRAJ38)
CIVRPLNAGNNHIQNPDPAVYQL

SEQ ID NO: 209420 - protein, 16 aa, Homo sapiens
  CDR3 for beta chain variable domain of TCR clone 104710 (TRBV12-5, TRBJ2-5)
CASGPRTSGNQETQYF

SEQ ID NO: 209421 - protein, 12 aa, Homo sapiens
  CDR3 for alpha chain variable domain of TCR clone 104711 (TRAV35, TRAJ39)
LAPNNAGNMLTF

SEQ ID NO: 209422 - protein, 17 aa, Homo sapiens
  CDR3 for beta chain variable domain of TCR clone 104711 (TRBV20-1, TRBJ2-2)
CSASGSGQGGLTGELFF

SEQ ID NO: 209423 - protein, 14 aa, Homo sapiens
  CDR3 for alpha chain variable domain of TCR clone 104712 (TRAV12-3, TRAJ9)
CAENLETGGFKTIF

SEQ ID NO: 209424 - protein, 16 aa, Homo sapiens
  CDR3 for beta chain variable domain of TCR clone 104712 (TRBV28, TRBJ2-5)
CASSFSPAGGWETQYF

SEQ ID NO: 209425 - protein, 14 aa, Homo sapiens
  CDR3 for alpha chain variable domain of TCR clone 104713 (TRAV12-3, TRAJ10)
SHPPLTGGGNKLTF

SEQ ID NO: 209426 - protein, 13 aa, Homo sapiens
  CDR3 for beta chain variable domain of TCR clone 104713 (TRBV20-1, TRBJ2-2)
CSASAAGTGELFF

SEQ ID NO: 209427 - protein, 13 aa, Homo sapiens
  CDR3 for alpha chain variable domain of TCR clone 104714 (TRAV27, TRAJ41)
CAGEGNSGYALNF

SEQ ID NO: 209428 - protein, 14 aa, Homo sapiens
  CDR3 for beta chain variable domain of TCR clone 104714 (TRBV7-9, TRBJ2-5)
CASSLVGGEETQYF

SEQ ID NO: 209429 - protein, 14 aa, Homo sapiens
  CDR3 for alpha chain variable domain of TCR clone 104715 (TRAV26-1, TRAJ21)
RIVRPPYNFNKFYF

SEQ ID NO: 209430 - protein, 14 aa, Homo sapiens
  CDR3 for beta chain variable domain of TCR clone 104715 (TRBV19, TRBJ2-1)
CASPTFVLSGEQFF

SEQ ID NO: 209431 - protein, 14 aa, Homo sapiens
  CDR3 for alpha chain variable domain of TCR clone 104716 (TRAV26-1, TRAJ40)
CIVRVARGTYKNIF

SEQ ID NO: 209432 - protein, 14 aa, Homo sapiens
  CDR3 for beta chain variable domain of TCR clone 104716 (TRBV7-3, TRBJ2-7)
CASSLKADSYEQYF

SEQ ID NO: 209433 - protein, 16 aa, Homo sapiens
  CDR3 for alpha chain variable domain of TCR clone 104717 (TRAV16, TRAJ4)
CALSRMFSGGYNKLIF

SEQ ID NO: 209434 - protein, 20 aa, Homo sapiens
  CDR3 for beta chain variable domain of TCR clone 104717 (TRBV28, TRBJ2-1)
CASTPIGRSPGLAGGNEQFF

SEQ ID NO: 209435 - protein, 15 aa, Homo sapiens
  CDR3 for alpha chain variable domain of TCR clone 104718 (TRAV3, TRAJ12)
CAVRDIRDSSYKLIF

SEQ ID NO: 209436 - protein, 15 aa, Homo sapiens
  CDR3 for beta chain variable domain of TCR clone 104718 (TRBV27, TRBJ2-7)
CASSFRNEQGYEQYF

SEQ ID NO: 209437 - protein, 14 aa, Homo sapiens
  CDR3 for alpha chain variable domain of TCR clone 104719 (TRAV8-3, TRAJ39)
CAVGANNAGNMLTF

SEQ ID NO: 209438 - protein, 13 aa, Homo sapiens
  CDR3 for beta chain variable domain of TCR clone 104719 (TRBV3-1, TRBJ1-1)
CASSPGVITEAFF

SEQ ID NO: 209439 - protein, 16 aa, Homo sapiens
  CDR3 for alpha chain variable domain of TCR clone 104720 (TRAV30, TRAJ24)
CGTEIVDADSWGKFQF

SEQ ID NO: 209440 - protein, 19 aa, Homo sapiens
  CDR3 for beta chain variable domain of TCR clone 104720 (TRBV25-1, TRBJ2-2)
CSILVYRVDRGRKTGELFF

SEQ ID NO: 209441 - protein, 13 aa, Homo sapiens
  CDR3 for alpha chain variable domain of TCR clone 104721 (TRAV12-1, TRAJ20)
CVVNRETDYKLSF

SEQ ID NO: 209442 - protein, 15 aa, Homo sapiens
  CDR3 for beta chain variable domain of TCR clone 104721 (TRBV5-1, TRBJ2-2)
CASSSQGGNTGELFF

SEQ ID NO: 209443 - protein, 14 aa, Homo sapiens
  CDR3 for alpha chain variable domain of TCR clone 104722 (TRAV12-2, TRAJ36)
CAVNISTGANNLFF

SEQ ID NO: 209444 - protein, 14 aa, Homo sapiens
  CDR3 for beta chain variable domain of TCR clone 104722 (TRBV25-1, TRBJ1-2)
CASSDTTGVVGYTF

SEQ ID NO: 209445 - protein, 14 aa, Homo sapiens
  CDR3 for alpha chain variable domain of TCR clone 104723 (TRAV12-1, TRAJ17)
CVVNPKAAGNKLTF

SEQ ID NO: 209446 - protein, 16 aa, Homo sapiens
  CDR3 for beta chain variable domain of TCR clone 104723 (TRBV20-1, TRBJ2-1)
CSASASGYSSYNEQFL

SEQ ID NO: 209447 - protein, 15 aa, Homo sapiens
  CDR3 for alpha chain variable domain of TCR clone 104724 (TRAV3, TRAJ10)
CAVRDATGGGNKLTF

SEQ ID NO: 209448 - protein, 12 aa, Homo sapiens
  CDR3 for beta chain variable domain of TCR clone 104724 (TRBV12-4, TRBJ2-7)
CASSLGGYEQYF

SEQ ID NO: 209449 - protein, 16 aa, Homo sapiens
  CDR3 for alpha chain variable domain of TCR clone 104725 (TRAV3, TRAJ37)
CAVRPHGSGNTGKLIF

SEQ ID NO: 209450 - protein, 14 aa, Homo sapiens
  CDR3 for beta chain variable domain of TCR clone 104725 (TRBV25-1, TRBJ1-1)
CASTHLGGNTEAFV

SEQ ID NO: 209451 - protein, 13 aa, Homo sapiens
  CDR3 for alpha chain variable domain of TCR clone 104726 (TRAV38-2/DV8, TRAJ34)
CAYRTWNTDKLIF

SEQ ID NO: 209452 - protein, 14 aa, Homo sapiens
  CDR3 for beta chain variable domain of TCR clone 104726 (TRBV7-2, TRBJ2-7)
CASRSQGAAYEQYF

SEQ ID NO: 209453 - protein, 14 aa, Homo sapiens
  CDR3 for alpha chain variable domain of TCR clone 104727 (TRAV13-2, TRAJ10)
CAETFTGVGNKLTF

SEQ ID NO: 209454 - protein, 16 aa, Homo sapiens
  CDR3 for beta chain variable domain of TCR clone 104727 (TRBV18, TRBJ2-7)
CASSPRSQGISYEQYF

SEQ ID NO: 209455 - protein, 12 aa, Homo sapiens
  CDR3 for alpha chain variable domain of TCR clone 104728 (TRAV12-3, TRAJ40)
CAMSSGTYKYIF

SEQ ID NO: 209456 - protein, 15 aa, Homo sapiens
  CDR3 for beta chain variable domain of TCR clone 104728 (TRBV7-3, TRBJ2-2)
CASSETGQGTGALFF

SEQ ID NO: 209457 - protein, 12 aa, Homo sapiens
  CDR3 for alpha chain variable domain of TCR clone 104729 (TRAV12-1, TRAJ40)
CVVYSGTYKYIF

SEQ ID NO: 209458 - protein, 15 aa, Homo sapiens
  CDR3 for beta chain variable domain of TCR clone 104729 (TRBV27, TRBJ2-1)
CASSNGGGSSNEQFL

SEQ ID NO: 209459 - protein, 12 aa, Homo sapiens
  CDR3 for alpha chain variable domain of TCR clone 104730 (TRAV12-3, TRAJ17)
CAMTLTGNKLTF

SEQ ID NO: 209460 - protein, 13 aa, Homo sapiens
  CDR3 for beta chain variable domain of TCR clone 104730 (TRBV7-3, TRBJ1-1)
CASSLDWGAEAFF

SEQ ID NO: 209461 - protein, 12 aa, Homo sapiens
  CDR3 for alpha chain variable domain of TCR clone 104731 (TRAV3, TRAJ20)
CAVRDGDYKLSF

SEQ ID NO: 209462 - protein, 18 aa, Homo sapiens
  CDR3 for beta chain variable domain of TCR clone 104731 (TRBV18, TRBJ2-3)
CASSYTSGAAGGTDTQYF

SEQ ID NO: 209463 - protein, 20 aa, Homo sapiens
  CDR3 for alpha chain variable domain of TCR clone 104732 (TRAV1-1, TRAJ4)
CLLLLRCEGFLSGGYNKLIF

SEQ ID NO: 209464 - protein, 16 aa, Homo sapiens
  CDR3 for beta chain variable domain of TCR clone 104732 (TRBV28, TRBJ1-4)
CASSPHYRGRSEKLFF

SEQ ID NO: 209465 - protein, 14 aa, Homo sapiens
  CDR3 for alpha chain variable domain of TCR clone 104733 (TRAV2, TRAJ39)
CAVEGDNVGNMLTF

SEQ ID NO: 209466 - protein, 14 aa, Homo sapiens
  CDR3 for beta chain variable domain of TCR clone 104733 (TRBV28, TRBJ2-4)
CASSPRAQGNIQYF

SEQ ID NO: 209467 - protein, 14 aa, Homo sapiens
  CDR3 for alpha chain variable domain of TCR clone 104734 (TRAV9-2, TRAJ39)
CALYIYNAGNMLTF

SEQ ID NO: 209468 - protein, 14 aa, Homo sapiens
  CDR3 for beta chain variable domain of TCR clone 104734 (TRBV7-9, TRBJ2-2)
CAGSLVQDTGELFF

SEQ ID NO: 209469 - protein, 14 aa, Homo sapiens
  CDR3 for alpha chain variable domain of TCR clone 104735 (TRAV12-3, TRAJ43)
CAMSLGGAGTRLTV

SEQ ID NO: 209470 - protein, 13 aa, Homo sapiens
  CDR3 for beta chain variable domain of TCR clone 104735 (TRBV7-9, TRBJ1-2)
CASSLKQNYGDTF

SEQ ID NO: 209471 - protein, 15 aa, Homo sapiens
  CDR3 for alpha chain variable domain of TCR clone 104736 (TRAV1-2, TRAJ26)
CAVRDLITMVRILSF

SEQ ID NO: 209472 - protein, 13 aa, Homo sapiens
  CDR3 for beta chain variable domain of TCR clone 104736 (TRBV19, TRBJ1-2)
CASSQGQVYGYTF

SEQ ID NO: 209473 - protein, 12 aa, Homo sapiens
  CDR3 for alpha chain variable domain of TCR clone 104737 (TRAV25, TRAJ33)
CAGPDSNYQLIW

SEQ ID NO: 209474 - protein, 14 aa, Homo sapiens
  CDR3 for beta chain variable domain of TCR clone 104737 (TRBV7-2, TRBJ2-5)
CASSPRGSSETQYF

SEQ ID NO: 209475 - protein, 14 aa, Homo sapiens
  CDR3 for alpha chain variable domain of TCR clone 104738 (TRAV14/DV4, TRAJ15)
CAMRRDQAGTALIF

SEQ ID NO: 209476 - protein, 11 aa, Homo sapiens
  CDR3 for beta chain variable domain of TCR clone 104738 (TRBV7-2, TRBJ2-7)
CASSSGMWQYF

SEQ ID NO: 209477 - protein, 13 aa, Homo sapiens
  CDR3 for alpha chain variable domain of TCR clone 104739 (TRAV12-2, TRAJ50)
CAVIVTSYDKVIF

SEQ ID NO: 209478 - protein, 16 aa, Homo sapiens
  CDR3 for beta chain variable domain of TCR clone 104739 (TRBV19, TRBJ2-1)
CASSKAGPSSYNEQFF

SEQ ID NO: 209479 - protein, 14 aa, Homo sapiens
  CDR3 for alpha chain variable domain of TCR clone 104740 (TRAV35, TRAJ33)
CAESSQDSNYQLIW

SEQ ID NO: 209480 - protein, 15 aa, Homo sapiens
  CDR3 for beta chain variable domain of TCR clone 104740 (TRBV20-1, TRBJ2-7)
CSAESGTSGAYEQYF

SEQ ID NO: 209481 - protein, 12 aa, Homo sapiens
  CDR3 for alpha chain variable domain of TCR clone 104741 (TRAV17, TRAJ12)
CATLRSSYKLIF

SEQ ID NO: 209482 - protein, 16 aa, Homo sapiens
  CDR3 for beta chain variable domain of TCR clone 104741 (TRBV28, TRBJ2-7)
CASSLIFETGGPEQYF

SEQ ID NO: 209483 - protein, 13 aa, Homo sapiens
  CDR3 for alpha chain variable domain of TCR clone 104742 (TRAV27, TRAJ53)
CAGQGGSNYNLTF

SEQ ID NO: 209484 - protein, 13 aa, Homo sapiens
  CDR3 for beta chain variable domain of TCR clone 104742 (TRBV29-1, TRBJ1-1)
CSVESGFGTEAFF

SEQ ID NO: 209485 - protein, 15 aa, Homo sapiens
  CDR3 for alpha chain variable domain of TCR clone 104743 (TRAV36/DV7, TRAJ53)
CAVEGSGGSNYKLTF

SEQ ID NO: 209486 - protein, 14 aa, Homo sapiens
  CDR3 for beta chain variable domain of TCR clone 104743 (TRBV25-1, TRBJ1-1)
CASTHLGGNTEAFF

SEQ ID NO: 209487 - protein, 13 aa, Homo sapiens
  CDR3 for alpha chain variable domain of TCR clone 104744 (TRAV17, TRAJ5)
CAPMDTGRRALTF

SEQ ID NO: 209488 - protein, 11 aa, Homo sapiens
  CDR3 for beta chain variable domain of TCR clone 104744 (TRBV11-2, TRBJ1-1)
CASSINTEAFF

SEQ ID NO: 209489 - protein, 14 aa, Homo sapiens
  CDR3 for alpha chain variable domain of TCR clone 104745 (TRAV38-2/DV8, TRAJ23)
CAYRSQNQGGKLIF

SEQ ID NO: 209490 - protein, 13 aa, Homo sapiens
  CDR3 for beta chain variable domain of TCR clone 104745 (TRBV24-1, TRBJ2-1)
CDTSAGPYNEQFF

SEQ ID NO: 209491 - protein, 11 aa, Homo sapiens
  CDR3 for alpha chain variable domain of TCR clone 104746 (TRAV12-2, TRAJ39)
CAVNNMLTFGG

SEQ ID NO: 209492 - protein, 12 aa, Homo sapiens
  CDR3 for beta chain variable domain of TCR clone 104746 (TRBV11-2, TRBJ2-2)
CASSLPTGELFF

SEQ ID NO: 209493 - protein, 17 aa, Homo sapiens
  CDR3 for alpha chain variable domain of TCR clone 104747 (TRAV29/DV5, TRAJ45)
CAADGPFSGGGADGLTF

SEQ ID NO: 209494 - protein, 14 aa, Homo sapiens
  CDR3 for beta chain variable domain of TCR clone 104747 (TRBV7-2, TRBJ2-7)
CASRSQGAAYEQYF

SEQ ID NO: 209495 - protein, 15 aa, Homo sapiens
  CDR3 for alpha chain variable domain of TCR clone 104748 (TRAV21, TRAJ53)
CATLNSGGSNYKLTF

SEQ ID NO: 209496 - protein, 16 aa, Homo sapiens
  CDR3 for beta chain variable domain of TCR clone 104748 (TRBV29-1, TRBJ1-2)
CSVEANRDIANYGYSF

SEQ ID NO: 209497 - protein, 10 aa, Homo sapiens
  CDR3 for alpha chain variable domain of TCR clone 104749 (TRAV12-1, TRAJ20)
CAIYFQRLQA

SEQ ID NO: 209498 - protein, 13 aa, Homo sapiens
  CDR3 for beta chain variable domain of TCR clone 104749 (TRBV20-1, TRBJ1-1)
CSARGGENTEAFF

SEQ ID NO: 209499 - protein, 13 aa, Homo sapiens
  CDR3 for alpha chain variable domain of TCR clone 104750 (TRAV16, TRAJ22)
SAMLAGSARQLTF

SEQ ID NO: 209500 - protein, 18 aa, Homo sapiens
  CDR3 for beta chain variable domain of TCR clone 104750 (TRBV7-2, TRBJ2-3)
CASSVETSRGRKADTQYF

SEQ ID NO: 209501 - protein, 15 aa, Homo sapiens
  CDR3 for alpha chain variable domain of TCR clone 104751 (TRAV27, TRAJ38)
CAARRNAGNNRKLIW

SEQ ID NO: 209502 - protein, 13 aa, Homo sapiens
  CDR3 for beta chain variable domain of TCR clone 104751 (TRBV7-3, TRBJ2-1)
CASSLDSYNEQLF

SEQ ID NO: 209503 - protein, 15 aa, Homo sapiens
  CDR3 for alpha chain variable domain of TCR clone 104752 (TRAV2, TRAJ22)
CAVPSRGGSARQLTV

SEQ ID NO: 209504 - protein, 11 aa, Homo sapiens
  CDR3 for beta chain variable domain of TCR clone 104752 (TRBV27, TRBJ2-3)
CASSLGDTQYF

SEQ ID NO: 209505 - protein, 14 aa, Homo sapiens
  CDR3 for alpha chain variable domain of TCR clone 104753 (TRAV13-1, TRAJ35)
CAASKGGFGSVLHC

SEQ ID NO: 209506 - protein, 14 aa, Homo sapiens
  CDR3 for beta chain variable domain of TCR clone 104753 (TRBV7-2, TRBJ2-7)
CASSPKTSFYEQYF

SEQ ID NO: 209507 - protein, 11 aa, Homo sapiens
  CDR3 for alpha chain variable domain of TCR clone 104754 (TRAV1-2, TRAJ40)
CAVPGTYKYIF

SEQ ID NO: 209508 - protein, 15 aa, Homo sapiens
  CDR3 for beta chain variable domain of TCR clone 104754 (TRBV5-7, TRBJ1-5)
CASSYGKLRDQPQHF

SEQ ID NO: 209509 - protein, 15 aa, Homo sapiens
  CDR3 for alpha chain variable domain of TCR clone 104755 (TRAV3, TRAJ20)
CAVRDINLSDYNLSF

SEQ ID NO: 209510 - protein, 15 aa, Homo sapiens
  CDR3 for beta chain variable domain of TCR clone 104755 (TRBV7-9, TRBJ1-6)
CASSSPGRGNSPLHF

SEQ ID NO: 209511 - protein, 15 aa, Homo sapiens
  CDR3 for alpha chain variable domain of TCR clone 104756 (TRAV8-2, TRAJ40)
CGVLGTTSGTYKYIF

SEQ ID NO: 209512 - protein, 16 aa, Homo sapiens
  CDR3 for beta chain variable domain of TCR clone 104756 (TRBV7-3, TRBJ2-1)
CASSLEGYRSYNEQFF

SEQ ID NO: 209513 - protein, 13 aa, Homo sapiens
  CDR3 for alpha chain variable domain of TCR clone 104757 (TRAV3, TRAJ33)
CAVRDRSNYQLIW

SEQ ID NO: 209514 - protein, 16 aa, Homo sapiens
  CDR3 for beta chain variable domain of TCR clone 104757 (TRBV4-2, TRBJ2-7)
CASRQDRGTSSYEQYF

SEQ ID NO: 209515 - protein, 11 aa, Homo sapiens
  CDR3 for alpha chain variable domain of TCR clone 104758 (TRAV1-2, TRAJ40)
CAVPGTYKYIF

SEQ ID NO: 209516 - protein, 14 aa, Homo sapiens
  CDR3 for beta chain variable domain of TCR clone 104758 (TRBV19, TRBJ2-7)
CASSIFAGTYEQYF

SEQ ID NO: 209517 - protein, 15 aa, Homo sapiens
  CDR3 for alpha chain variable domain of TCR clone 104759 (TRAV21, TRAJ53)
CATLNSGGSNYKLTF

SEQ ID NO: 209518 - protein, 13 aa, Homo sapiens
  CDR3 for beta chain variable domain of TCR clone 104759 (TRBV24-1, TRBJ2-1)
CATSAGPYNEQFF

SEQ ID NO: 209519 - protein, 14 aa, Homo sapiens
  CDR3 for alpha chain variable domain of TCR clone 104760 (TRAV1-2, TRAJ16)
CAVNRFSDGQKLLF

SEQ ID NO: 209520 - protein, 14 aa, Homo sapiens
  CDR3 for beta chain variable domain of TCR clone 104760 (TRBV28, TRBJ2-1)
CASSIQGTVGEQFF

SEQ ID NO: 209521 - protein, 15 aa, Homo sapiens
  CDR3 for alpha chain variable domain of TCR clone 104761 (TRAV1-2, TRAJ28)
CAVQYSGAGSYQLTF

SEQ ID NO: 209522 - protein, 13 aa, Homo sapiens
  CDR3 for beta chain variable domain of TCR clone 104761 (TRBV4-2, TRBJ1-1)
CASSQAGNTEALF

SEQ ID NO: 209523 - protein, 12 aa, Homo sapiens
  CDR3 for alpha chain variable domain of TCR clone 104762 (TRAV12-3, TRAJ17)
CAMTLTGDKLTF

SEQ ID NO: 209524 - protein, 15 aa, Homo sapiens
  CDR3 for beta chain variable domain of TCR clone 104762 (TRBV20-1, TRBJ2-7)
CSARDQVSGMDEQYF

SEQ ID NO: 209525 - protein, 12 aa, Homo sapiens
  CDR3 for alpha chain variable domain of TCR clone 104763 (TRAV12-1, TRAJ34)
CVVAGATDKLIF

SEQ ID NO: 209526 - protein, 15 aa, Homo sapiens
  CDR3 for beta chain variable domain of TCR clone 104763 (TRBV4-3, TRBJ2-3)
CASSLGTRSSDTQYF

SEQ ID NO: 209527 - protein, 16 aa, Homo sapiens
  CDR3 for alpha chain variable domain of TCR clone 104764 (TRAV14/DV4, TRAJ53)
CAMREGGGGSNYKLTF

SEQ ID NO: 209528 - protein, 14 aa, Homo sapiens
  CDR3 for beta chain variable domain of TCR clone 104764 (TRBV4-1, TRBJ2-5)
CASSRSGSGETQYF

SEQ ID NO: 209529 - protein, 16 aa, Homo sapiens
  CDR3 for alpha chain variable domain of TCR clone 104765 (TRAV3, TRAJ6)
CAVRDGMGRRKLHTYI

SEQ ID NO: 209530 - protein, 15 aa, Homo sapiens
  CDR3 for beta chain variable domain of TCR clone 104765 (TRBV5-1, TRBJ2-7)
CASSLGDFTTYGQYF

SEQ ID NO: 209531 - protein, 15 aa, Homo sapiens
  CDR3 for alpha chain variable domain of TCR clone 104766 (TRAV27, TRAJ38)
CAGRFDAGNNRKRIW

SEQ ID NO: 209532 - protein, 13 aa, Homo sapiens
  CDR3 for beta chain variable domain of TCR clone 104766 (TRBV20-1, TRBJ2-1)
TSGALPPGNEQFF

SEQ ID NO: 209533 - protein, 16 aa, Homo sapiens
  CDR3 for alpha chain variable domain of TCR clone 104767 (TRAV21, TRAJ52)
FAVTNAGGTSYGKLTF

SEQ ID NO: 209534 - protein, 11 aa, Homo sapiens
  CDR3 for beta chain variable domain of TCR clone 104767 (TRBV2, TRBJ1-1)
CASREGTEAFF

SEQ ID NO: 209535 - protein, 15 aa, Homo sapiens
  CDR3 for alpha chain variable domain of TCR clone 104768 (TRAV26-1, TRAJ23)
CIVRVAGYQGGKPIF

SEQ ID NO: 209536 - protein, 18 aa, Homo sapiens
  CDR3 for beta chain variable domain of TCR clone 104768 (TRBV28, TRBJ2-1)
CASSSTSGRANSYNEQFF

SEQ ID NO: 209537 - protein, 14 aa, Homo sapiens
  CDR3 for alpha chain variable domain of TCR clone 104769 (TRAV1-2, TRAJ8)
CAVREDTGFQKLVF

SEQ ID NO: 209538 - protein, 12 aa, Homo sapiens
  CDR3 for beta chain variable domain of TCR clone 104769 (TRBV11-2, TRBJ2-2)
CASSPGGGELFF

SEQ ID NO: 209539 - protein, 13 aa, Homo sapiens
  CDR3 for alpha chain variable domain of TCR clone 104770 (TRAV13-1, TRAJ9)
CAARGTGGFKNIF

SEQ ID NO: 209540 - protein, 12 aa, Homo sapiens
  CDR3 for beta chain variable domain of TCR clone 104770 (TRBV2, TRBJ2-1)
CAYGPPGNEQFF

SEQ ID NO: 209541 - protein, 14 aa, Homo sapiens
  CDR3 for alpha chain variable domain of TCR clone 104771 (TRAV12-1, TRAJ54)
CVVNIYQGAQKLVF

SEQ ID NO: 209542 - protein, 13 aa, Homo sapiens
  CDR3 for beta chain variable domain of TCR clone 104771 (TRBV19, TRBJ1-2)
CASSVPGQDGYTF

SEQ ID NO: 209543 - protein, 15 aa, Homo sapiens
  CDR3 for alpha chain variable domain of TCR clone 104772 (TRAV12-2, TRAJ43)
CAFDMRFGAGTRLTV

SEQ ID NO: 209544 - protein, 18 aa, Homo sapiens
  CDR3 for beta chain variable domain of TCR clone 104772 (TRBV20-1, TRBJ2-3)
CSASVLAGGPGTTDTQYF

SEQ ID NO: 209545 - protein, 14 aa, Homo sapiens
  CDR3 for alpha chain variable domain of TCR clone 104773 (TRAV1-2, TRAJ8)
RAVREDTGFQKLVF

SEQ ID NO: 209546 - protein, 15 aa, Homo sapiens
  CDR3 for beta chain variable domain of TCR clone 104773 (TRBV15, TRBJ1-1)
CATSLQGGRNTEAFF

SEQ ID NO: 209547 - protein, 18 aa, Homo sapiens
  CDR3 for alpha chain variable domain of TCR clone 104774 (TRAV38-2/DV8, TRAJ42)
GAYRSADLTGGSQGNLIF

SEQ ID NO: 209548 - protein, 12 aa, Homo sapiens
  CDR3 for beta chain variable domain of TCR clone 104774 (TRBV11-2, TRBJ2-2)
CASSLGGGELFF

SEQ ID NO: 209549 - protein, 12 aa, Homo sapiens
  CDR3 for alpha chain variable domain of TCR clone 104775 (TRAV1-2, TRAJ29)
CAVPSGNTPLVF

SEQ ID NO: 209550 - protein, 12 aa, Homo sapiens
  CDR3 for beta chain variable domain of TCR clone 104775 (TRBV28, TRBJ2-6)
CAIQAGANVLTF

SEQ ID NO: 209551 - protein, 14 aa, Homo sapiens
  CDR3 for alpha chain variable domain of TCR clone 104776 (TRAV1-2, TRAJ15)
CAVRDRQAGTALIF

SEQ ID NO: 209552 - protein, 15 aa, Homo sapiens
  CDR3 for beta chain variable domain of TCR clone 104776 (TRBV19, TRBJ2-7)
CASSPAGSGEALRYF

SEQ ID NO: 209553 - protein, 15 aa, Homo sapiens
  CDR3 for alpha chain variable domain of TCR clone 104777 (TRAV3, TRAJ29)
RAVRPGNSGNTPLVF

SEQ ID NO: 209554 - protein, 16 aa, Homo sapiens
  CDR3 for beta chain variable domain of TCR clone 104777 (TRBV24-1, TRBJ2-2)
CATSDPGTANTGELFF

SEQ ID NO: 209555 - protein, 11 aa, Homo sapiens
  CDR3 for alpha chain variable domain of TCR clone 104778 (TRAV3, TRAJ13)
CAVTSYQKVTF

SEQ ID NO: 209556 - protein, 15 aa, Homo sapiens
  CDR3 for beta chain variable domain of TCR clone 104778 (TRBV7-9, TRBJ2-7)
CASSSSGLAVYKQYF

SEQ ID NO: 209557 - protein, 14 aa, Homo sapiens
  CDR3 for alpha chain variable domain of TCR clone 104779 (TRAV38-1, TRAJ40)
CALRPTSGTYKYIF

SEQ ID NO: 209558 - protein, 15 aa, Homo sapiens
  CDR3 for beta chain variable domain of TCR clone 104779 (TRBV11-2, TRBJ2-2)
CASSSDRVNAGELFF

SEQ ID NO: 209559 - protein, 13 aa, Homo sapiens
  CDR3 for alpha chain variable domain of TCR clone 104780 (TRAV12-3, TRAJ7)
CAMSASGNNRLAF

SEQ ID NO: 209560 - protein, 13 aa, Homo sapiens
  CDR3 for beta chain variable domain of TCR clone 104780 (TRBV13, TRBJ2-5)
CSSLGPRGETQYF

SEQ ID NO: 209561 - protein, 13 aa, Homo sapiens
  CDR3 for alpha chain variable domain of TCR clone 104781 (TRAV36/DV7, TRAJ49)
CAGDSNTGNQLYF

SEQ ID NO: 209562 - protein, 12 aa, Homo sapiens
  CDR3 for beta chain variable domain of TCR clone 104781 (TRBV11-2, TRBJ2-2)
CASSLGGGELFF

SEQ ID NO: 209563 - protein, 19 aa, Homo sapiens
  CDR3 for alpha chain variable domain of TCR clone 104782 (TRAV2, TRAJ20)
ILQVREADAAVYRDCKLSF

SEQ ID NO: 209564 - protein, 17 aa, Homo sapiens
  CDR3 for beta chain variable domain of TCR clone 104782 (TRBV7-3, TRBJ2-2)
CASSLSGTSGGTGELFF

SEQ ID NO: 209565 - protein, 12 aa, Homo sapiens
  CDR3 for alpha chain variable domain of TCR clone 104783 (TRAV12-2, TRAJ31)
CAVNTPDARLMF

SEQ ID NO: 209566 - protein, 17 aa, Homo sapiens
  CDR3 for beta chain variable domain of TCR clone 104783 (TRBV20-1, TRBJ1-6)
CSARGGYTFSYNSPLLF

SEQ ID NO: 209567 - protein, 12 aa, Homo sapiens
  CDR3 for alpha chain variable domain of TCR clone 104784 (TRAV16, TRAJ21)
CALLGNFNKFYF

SEQ ID NO: 209568 - protein, 15 aa, Homo sapiens
  CDR3 for beta chain variable domain of TCR clone 104784 (TRBV3-1, TRBJ2-2)
CASSHAVRETGELFF

SEQ ID NO: 209569 - protein, 13 aa, Homo sapiens
  CDR3 for alpha chain variable domain of TCR clone 104785 (TRAV12-3, TRAJ33)
CAMSVNSNYQLIW

SEQ ID NO: 209570 - protein, 13 aa, Homo sapiens
  CDR3 for beta chain variable domain of TCR clone 104785 (TRBV7-2, TRBJ2-2)
CASSLAVTGELFC

SEQ ID NO: 209571 - protein, 13 aa, Homo sapiens
  CDR3 for alpha chain variable domain of TCR clone 104786 (TRAV26-2, TRAJ43)
CILRAVNNNDMRF

SEQ ID NO: 209572 - protein, 15 aa, Homo sapiens
  CDR3 for beta chain variable domain of TCR clone 104786 (TRBV7-2, TRBJ2-1)
CASSHGTGIYNEQFF

SEQ ID NO: 209573 - protein, 18 aa, Homo sapiens
  CDR3 for alpha chain variable domain of TCR clone 104787 (TRAV26-1, TRAJ57)
CIVRVALRFQGGSEKLVF

SEQ ID NO: 209574 - protein, 15 aa, Homo sapiens
  CDR3 for beta chain variable domain of TCR clone 104787 (TRBV27, TRBJ2-1)
CASSNGGGASNEQFF

SEQ ID NO: 209575 - protein, 12 aa, Homo sapiens
  CDR3 for alpha chain variable domain of TCR clone 104788 (TRAV13-1, TRAJ11)
CAGPSRYSTLTF

SEQ ID NO: 209576 - protein, 13 aa, Homo sapiens
  CDR3 for beta chain variable domain of TCR clone 104788 (TRBV12-4, TRBJ2-1)
CASSLSPSNEQFF

SEQ ID NO: 209577 - protein, 10 aa, Homo sapiens
  CDR3 for alpha chain variable domain of TCR clone 104789 (TRAV25, TRAJ20)
CAVNDYKLSF

SEQ ID NO: 209578 - protein, 17 aa, Homo sapiens
  CDR3 for beta chain variable domain of TCR clone 104789 (TRBV20-1, TRBJ2-1)
CSASSSGLAGSYNEQFF

SEQ ID NO: 209579 - protein, 21 aa, Homo sapiens
  CDR3 for alpha chain variable domain of TCR clone 104790 (TRAV1-1, TRAJ6)
CLLLLRCERLERTGGSYIATF

SEQ ID NO: 209580 - protein, 14 aa, Homo sapiens
  CDR3 for beta chain variable domain of TCR clone 104790 (TRBV7-2, TRBJ2-5)
CASSLSGGGETQYF

SEQ ID NO: 209581 - protein, 14 aa, Homo sapiens
  CDR3 for alpha chain variable domain of TCR clone 104791 (TRAV1-2, TRAJ16)
CAVNRFSDGQKLLF

SEQ ID NO: 209582 - protein, 15 aa, Homo sapiens
  CDR3 for beta chain variable domain of TCR clone 104791 (TRBV7-8, TRBJ1-1)
CASSLGDSRNTEAFF

SEQ ID NO: 209583 - protein, 16 aa, Homo sapiens
  CDR3 for alpha chain variable domain of TCR clone 104792 (TRAV12-3, TRAJ53)
CAMSPGSGGSNYKLTF

SEQ ID NO: 209584 - protein, 13 aa, Homo sapiens
  CDR3 for beta chain variable domain of TCR clone 104792 (TRBV19, TRBJ1-2)
CASSVPGQDGYIF

SEQ ID NO: 209585 - protein, 13 aa, Homo sapiens
  CDR3 for alpha chain variable domain of TCR clone 104793 (TRAV1-2, TRAJ12)
CAVSMDSSYKLIF

SEQ ID NO: 209586 - protein, 12 aa, Homo sapiens
  CDR3 for beta chain variable domain of TCR clone 104793 (TRBV12-5, TRBJ2-5)
CASGQGVETQYF

SEQ ID NO: 209587 - protein, 15 aa, Homo sapiens
  CDR3 for alpha chain variable domain of TCR clone 104794 (TRAV26-1, TRAJ44)
CIVRIGTGTASKLTF

SEQ ID NO: 209588 - protein, 12 aa, Homo sapiens
  CDR3 for beta chain variable domain of TCR clone 104794 (TRBV28, TRBJ2-6)
CAIQAGANVLTF

SEQ ID NO: 209589 - protein, 15 aa, Homo sapiens
  CDR3 for alpha chain variable domain of TCR clone 104795 (TRAV3, TRAJ20)
CAVRDIKLSDYKLSF

SEQ ID NO: 209590 - protein, 14 aa, Homo sapiens
  CDR3 for beta chain variable domain of TCR clone 104795 (TRBV7-9, TRBJ2-1)
CASSPRDSLYEQFF

SEQ ID NO: 209591 - protein, 16 aa, Homo sapiens
  CDR3 for alpha chain variable domain of TCR clone 104796 (TRAV12-1, TRAJ43)
CVVNPHRFGAGTRLTV

SEQ ID NO: 209592 - protein, 12 aa, Homo sapiens
  CDR3 for beta chain variable domain of TCR clone 104796 (TRBV29-1, TRBJ2-3)
CSVTGGADTQYF

SEQ ID NO: 209593 - protein, 14 aa, Homo sapiens
  CDR3 for alpha chain variable domain of TCR clone 104797 (TRAV17, TRAJ22)
CATSPSGSARQLTF

SEQ ID NO: 209594 - protein, 15 aa, Homo sapiens
  CDR3 for beta chain variable domain of TCR clone 104797 (TRBV4-1, TRBJ2-5)
CASSQWNLYQETQYF

SEQ ID NO: 209595 - protein, 11 aa, Homo sapiens
  CDR3 for alpha chain variable domain of TCR clone 104798 (TRAV2, TRAJ33)
CAVESNYQLIW

SEQ ID NO: 209596 - protein, 14 aa, Homo sapiens
  CDR3 for beta chain variable domain of TCR clone 104798 (TRBV12-4, TRBJ1-1)
CASRPGQGRTEAFF

SEQ ID NO: 209597 - protein, 11 aa, Homo sapiens
  CDR3 for alpha chain variable domain of TCR clone 104799 (TRAV2, TRAJ13)
CASGGYQKVTF

SEQ ID NO: 209598 - protein, 13 aa, Homo sapiens
  CDR3 for beta chain variable domain of TCR clone 104799 (TRBV7-7, TRBJ2-3)
CASSLSRADTQYF

SEQ ID NO: 209599 - protein, 16 aa, Homo sapiens
  CDR3 for alpha chain variable domain of TCR clone 104800 (TRAV3, TRAJ10)
CAVRDMRAGGGNKPTF

SEQ ID NO: 209600 - protein, 15 aa, Homo sapiens
  CDR3 for beta chain variable domain of TCR clone 104800 (TRBV7-2, TRBJ1-5)
CASSRGQGDNQPQHF

SEQ ID NO: 209601 - protein, 23 aa, Homo sapiens
  CDR3 for alpha chain variable domain of TCR clone 104801 (TRAV26-1, )
CIADNAGNSHIQNPDPAVYQLRD

SEQ ID NO: 209602 - protein, 13 aa, Homo sapiens
  CDR3 for beta chain variable domain of TCR clone 104801 (TRBV20-1, TRBJ1-1)
CSARGGGNTEAFL

SEQ ID NO: 209603 - protein, 17 aa, Homo sapiens
  CDR3 for alpha chain variable domain of TCR clone 104802 (TRAV36/DV7, TRAJ52)
CAVAQRAGGTSYGKLTF

SEQ ID NO: 209604 - protein, 15 aa, Homo sapiens
  CDR3 for beta chain variable domain of TCR clone 104802 (TRBV20-1, TRBJ2-7)
CSAESGASGAYEQYF

SEQ ID NO: 209605 - protein, 14 aa, Homo sapiens
  CDR3 for alpha chain variable domain of TCR clone 104803 (TRAV12-3, TRAJ10)
SHLPLTGGGNKLTF

SEQ ID NO: 209606 - protein, 14 aa, Homo sapiens
  CDR3 for beta chain variable domain of TCR clone 104803 (TRBV10-3, TRBJ1-2)
CAISDGGRNYGYTF

SEQ ID NO: 209607 - protein, 11 aa, Homo sapiens
  CDR3 for alpha chain variable domain of TCR clone 104804 (TRAV29/DV5, TRAJ31)
CAASYRDRLMF

SEQ ID NO: 209608 - protein, 19 aa, Homo sapiens
  CDR3 for beta chain variable domain of TCR clone 104804 (TRBV19, TRBJ2-5)
CASSIGQVTDVFLGETQYF

SEQ ID NO: 209609 - protein, 12 aa, Homo sapiens
  CDR3 for alpha chain variable domain of TCR clone 104805 (TRAV12-3, TRAJ34)
CAMGYNTAKLIF

SEQ ID NO: 209610 - protein, 14 aa, Homo sapiens
  CDR3 for beta chain variable domain of TCR clone 104805 (TRBV4-1, TRBJ2-2)
CASSQAVNTGELFF

SEQ ID NO: 209611 - protein, 13 aa, Homo sapiens
  CDR3 for alpha chain variable domain of TCR clone 104806 (TRAV8-6, TRAJ9)
CAVSDTGGSKTIF

SEQ ID NO: 209612 - protein, 16 aa, Homo sapiens
  CDR3 for beta chain variable domain of TCR clone 104806 (TRBV29-1, TRBJ1-2)
CSVEANRDIANYGYTF

SEQ ID NO: 209613 - protein, 14 aa, Homo sapiens
  CDR3 for alpha chain variable domain of TCR clone 104807 (TRAV1-2, TRAJ8)
CAVREDTGFQKLVF

SEQ ID NO: 209614 - protein, 15 aa, Homo sapiens
  CDR3 for beta chain variable domain of TCR clone 104807 (TRBV20-1, TRBJ2-7)
CSARVPAAYFYEQYF

SEQ ID NO: 209615 - protein, 18 aa, Homo sapiens
  CDR3 for alpha chain variable domain of TCR clone 104808 (TRAV21, TRAJ52)
CAVRPSPAGGTSYGKLTF

SEQ ID NO: 209616 - protein, 12 aa, Homo sapiens
  CDR3 for beta chain variable domain of TCR clone 104808 (TRBV12-4, TRBJ1-2)
CASSFIWLHLRF

SEQ ID NO: 209617 - protein, 12 aa, Homo sapiens
  CDR3 for alpha chain variable domain of TCR clone 104809 (TRAV13-2, TRAJ23)
CAERHRGGKLIF

SEQ ID NO: 209618 - protein, 15 aa, Homo sapiens
  CDR3 for beta chain variable domain of TCR clone 104809 (TRBV20-1, TRBJ1-4)
CSAREQGVANEKLFF

SEQ ID NO: 209619 - protein, 15 aa, Homo sapiens
  CDR3 for alpha chain variable domain of TCR clone 104810 (TRAV35, TRAJ23)
CAGQRGYNQGGKLIF

SEQ ID NO: 209620 - protein, 12 aa, Homo sapiens
  CDR3 for beta chain variable domain of TCR clone 104810 (TRBV7-8, TRBJ2-7)
CASSLGDREQYF

SEQ ID NO: 209621 - protein, 15 aa, Homo sapiens
  CDR3 for alpha chain variable domain of TCR clone 104811 (TRAV3, TRAJ5)
CAVRDLDTGRRALTF

SEQ ID NO: 209622 - protein, 17 aa, Homo sapiens
  CDR3 for beta chain variable domain of TCR clone 104811 (TRBV11-1, TRBJ2-6)
CASSPYGQGSGANVLTF

SEQ ID NO: 209623 - protein, 14 aa, Homo sapiens
  CDR3 for alpha chain variable domain of TCR clone 104812 (TRAV17, TRAJ11)
CATDTSRGYSTLTF

SEQ ID NO: 209624 - protein, 16 aa, Homo sapiens
  CDR3 for beta chain variable domain of TCR clone 104812 (TRBV7-3, TRBJ2-2)
CASSLKRGTLSGELFF

SEQ ID NO: 209625 - protein, 11 aa, Homo sapiens
  CDR3 for alpha chain variable domain of TCR clone 104813 (TRAV23/DV6, TRAJ58)
CAASLLRGETS

SEQ ID NO: 209626 - protein, 13 aa, Homo sapiens
  CDR3 for beta chain variable domain of TCR clone 104813 (TRBV6-4, TRBJ1-5)
CASSADLNQPQHF

SEQ ID NO: 209627 - protein, 13 aa, Homo sapiens
  CDR3 for alpha chain variable domain of TCR clone 104814 (TRAV12-2, TRAJ39)
CAVNNNAGNMLTF

SEQ ID NO: 209628 - protein, 13 aa, Homo sapiens
  CDR3 for beta chain variable domain of TCR clone 104814 (TRBV2, TRBJ1-5)
CVTAGPSNQPQHF

SEQ ID NO: 209629 - protein, 14 aa, Homo sapiens
  CDR3 for alpha chain variable domain of TCR clone 104815 (TRAV12-2, TRAJ52)
LAVPGGTSYGKLTF

SEQ ID NO: 209630 - protein, 12 aa, Homo sapiens
  CDR3 for beta chain variable domain of TCR clone 104815 (TRBV18, TRBJ2-1)
CASSPGTSEGFF

SEQ ID NO: 209631 - protein, 15 aa, Homo sapiens
  CDR3 for alpha chain variable domain of TCR clone 104816 (TRAV17, TRAJ57)
CATGPSQGGSEKLVF

SEQ ID NO: 209632 - protein, 16 aa, Homo sapiens
  CDR3 for beta chain variable domain of TCR clone 104816 (TRBV2, TRBJ1-4)
CASNLLQGATNEKLFF

SEQ ID NO: 209633 - protein, 14 aa, Homo sapiens
  CDR3 for alpha chain variable domain of TCR clone 104817 (TRAV1-2, TRAJ16)
CAVNRFSDGQKLLF

SEQ ID NO: 209634 - protein, 12 aa, Homo sapiens
  CDR3 for beta chain variable domain of TCR clone 104817 (TRBV7-9, TRBJ2-7)
CASSLEGYEQYV

SEQ ID NO: 209635 - protein, 19 aa, Homo sapiens
  CDR3 for alpha chain variable domain of TCR clone 104818 (TRAV40, )
CLPIPDIQNPDPALYQLRD

SEQ ID NO: 209636 - protein, 15 aa, Homo sapiens
  CDR3 for beta chain variable domain of TCR clone 104818 (TRBV2, TRBJ1-2)
CASSEIGGANYGYTF

SEQ ID NO: 209637 - protein, 14 aa, Homo sapiens
  CDR3 for alpha chain variable domain of TCR clone 104819 (TRAV1-2, TRAJ8)
CAVREDTGFQKLAF

SEQ ID NO: 209638 - protein, 12 aa, Homo sapiens
  CDR3 for beta chain variable domain of TCR clone 104819 (TRBV14, TRBJ2-7)
CASSRLKGEQYF

SEQ ID NO: 209639 - protein, 13 aa, Homo sapiens
  CDR3 for alpha chain variable domain of TCR clone 104820 (TRAV12-3, TRAJ33)
CAMSVYSNYQLIW

SEQ ID NO: 209640 - protein, 13 aa, Homo sapiens
  CDR3 for beta chain variable domain of TCR clone 104820 (TRBV7-2, TRBJ2-2)
CASSLAVTGELFF

SEQ ID NO: 209641 - protein, 13 aa, Homo sapiens
  CDR3 for alpha chain variable domain of TCR clone 104821 (TRAV8-6, TRAJ8)
CAVSNTGFQKLVF

SEQ ID NO: 209642 - protein, 13 aa, Homo sapiens
  CDR3 for beta chain variable domain of TCR clone 104821 (TRBV7-9, TRBJ2-3)
CASSPRGPDTQYF

SEQ ID NO: 209643 - protein, 12 aa, Homo sapiens
  CDR3 for alpha chain variable domain of TCR clone 104822 (TRAV12-1, TRAJ40)
CVFYSGTSKYIF

SEQ ID NO: 209644 - protein, 18 aa, Homo sapiens
  CDR3 for beta chain variable domain of TCR clone 104822 (TRBV12-4, TRBJ2-2)
CASSLVAGTRGRTGELFF

SEQ ID NO: 209645 - protein, 14 aa, Homo sapiens
  CDR3 for alpha chain variable domain of TCR clone 104823 (TRAV38-1, TRAJ40)
CALRPTSGTYKYIF

SEQ ID NO: 209646 - protein, 15 aa, Homo sapiens
  CDR3 for beta chain variable domain of TCR clone 104823 (TRBV7-2, TRBJ2-1)
CASSSGLAGGNEQFF

SEQ ID NO: 209647 - protein, 14 aa, Homo sapiens
  CDR3 for alpha chain variable domain of TCR clone 104824 (TRAV26-1, TRAJ39)
CIVRGSRAGNMLTF

SEQ ID NO: 209648 - protein, 15 aa, Homo sapiens
  CDR3 for beta chain variable domain of TCR clone 104824 (TRBV7-9, TRBJ1-5)
CASSQGHQPIQPQHF

SEQ ID NO: 209649 - protein, 15 aa, Homo sapiens
  CDR3 for alpha chain variable domain of TCR clone 104825 (TRAV21, TRAJ53)
CATLNSGGSNYKLTF

SEQ ID NO: 209650 - protein, 13 aa, Homo sapiens
  CDR3 for beta chain variable domain of TCR clone 104825 (TRBV13, TRBJ2-1)
CASILGGRGEQFF

SEQ ID NO: 209651 - protein, 15 aa, Homo sapiens
  CDR3 for alpha chain variable domain of TCR clone 104826 (TRAV12-1, TRAJ44)
CVVDTPQGTASTLTF

SEQ ID NO: 209652 - protein, 14 aa, Homo sapiens
  CDR3 for beta chain variable domain of TCR clone 104826 (TRBV7-9, TRBJ2-1)
CASSPRDSLYEQFF

SEQ ID NO: 209653 - protein, 14 aa, Homo sapiens
  CDR3 for alpha chain variable domain of TCR clone 104827 (TRAV2, TRAJ9)
CAVEDRSGGFKTIF

SEQ ID NO: 209654 - protein, 16 aa, Homo sapiens
  CDR3 for beta chain variable domain of TCR clone 104827 (TRBV7-3, TRBJ2-1)
CASSLEGYRSYNGQFF

SEQ ID NO: 209655 - protein, 14 aa, Homo sapiens
  CDR3 for alpha chain variable domain of TCR clone 104828 (TRAV12-2, TRAJ53)
CAVKGGGSNYKMTF

SEQ ID NO: 209656 - protein, 14 aa, Homo sapiens
  CDR3 for beta chain variable domain of TCR clone 104828 (TRBV7-7, TRBJ2-2)
CATRQDSDTGELFF

SEQ ID NO: 209657 - protein, 12 aa, Homo sapiens
  CDR3 for alpha chain variable domain of TCR clone 104829 (TRAV21, TRAJ11)
CAATSGYSTLTF

SEQ ID NO: 209658 - protein, 20 aa, Homo sapiens
  CDR3 for beta chain variable domain of TCR clone 104829 (TRBV7-8, TRBJ2-2)
CASSHLFPGPTIHITGELFF

SEQ ID NO: 209659 - protein, 11 aa, Homo sapiens
  CDR3 for alpha chain variable domain of TCR clone 104830 (TRAV30, TRAJ23)
CGTEIAGKLIF

SEQ ID NO: 209660 - protein, 16 aa, Homo sapiens
  CDR3 for beta chain variable domain of TCR clone 104830 (TRBV7-2, TRBJ2-7)
CASTSKAASGGYEQYF

SEQ ID NO: 209661 - protein, 14 aa, Homo sapiens
  CDR3 for alpha chain variable domain of TCR clone 104831 (TRAV3, TRAJ9)
CAVRGNTGGFKTIF

SEQ ID NO: 209662 - protein, 14 aa, Homo sapiens
  CDR3 for beta chain variable domain of TCR clone 104831 (TRBV15, TRBJ2-1)
CATSGVEDYNEQFS

SEQ ID NO: 209663 - protein, 14 aa, Homo sapiens
  CDR3 for alpha chain variable domain of TCR clone 104832 (TRAV12-3, TRAJ10)
SHLPLTGGGNKLTF

SEQ ID NO: 209664 - protein, 12 aa, Homo sapiens
  CDR3 for beta chain variable domain of TCR clone 104832 (TRBV14, TRBJ2-4)
CASSNLKSIQYF

SEQ ID NO: 209665 - protein, 13 aa, Homo sapiens
  CDR3 for alpha chain variable domain of TCR clone 104833 (TRAV13-1, TRAJ39)
CSKYSNAGNMLTF

SEQ ID NO: 209666 - protein, 11 aa, Homo sapiens
  CDR3 for beta chain variable domain of TCR clone 104833 (TRBV29-1, TRBJ2-5)
CSEDRTGTQYF

SEQ ID NO: 209667 - protein, 12 aa, Homo sapiens
  CDR3 for alpha chain variable domain of TCR clone 104834 (TRAV13-1, TRAJ21)
CAAKEGFNKFYF

SEQ ID NO: 209668 - protein, 13 aa, Homo sapiens
  CDR3 for beta chain variable domain of TCR clone 104834 (TRBV7-3, TRBJ2-1)
CASSLDSYNEQFF

SEQ ID NO: 209669 - protein, 13 aa, Homo sapiens
  CDR3 for alpha chain variable domain of TCR clone 104835 (TRAV13-1, TRAJ11)
CAARIRGYSTLTF

SEQ ID NO: 209670 - protein, 17 aa, Homo sapiens
  CDR3 for beta chain variable domain of TCR clone 104835 (TRBV4-3, TRBJ1-2)
CASSSRLQAGGSVGYTF

SEQ ID NO: 209671 - protein, 13 aa, Homo sapiens
  CDR3 for alpha chain variable domain of TCR clone 104836 (TRAV21, TRAJ27)
CAARPGNAVKSTF

SEQ ID NO: 209672 - protein, 13 aa, Homo sapiens
  CDR3 for beta chain variable domain of TCR clone 104836 (TRBV18, TRBJ2-7)
CASQSGGGYEQYF

SEQ ID NO: 209673 - protein, 18 aa, Homo sapiens
  CDR3 for alpha chain variable domain of TCR clone 104837 (TRAV26-2, TRAJ54)
CILRDVEVGIQGAQKLVF

SEQ ID NO: 209674 - protein, 16 aa, Homo sapiens
  CDR3 for beta chain variable domain of TCR clone 104837 (TRBV20-1, TRBJ1-5)
CSARDVGGGWIQPQHF

SEQ ID NO: 209675 - protein, 14 aa, Homo sapiens
  CDR3 for alpha chain variable domain of TCR clone 104838 (TRAV16, TRAJ29)
CALTRNSGNTPLVF

SEQ ID NO: 209676 - protein, 14 aa, Homo sapiens
  CDR3 for beta chain variable domain of TCR clone 104838 (TRBV19, TRBJ2-1)
YASPTFVLSGEQFF

SEQ ID NO: 209677 - protein, 12 aa, Homo sapiens
  CDR3 for alpha chain variable domain of TCR clone 104839 (TRAV12-1, TRAJ40)
CVVYSGTYKYIF

SEQ ID NO: 209678 - protein, 13 aa, Homo sapiens
  CDR3 for beta chain variable domain of TCR clone 104839 (TRBV11-2, TRBJ2-7)
CASSGTRPYEQYF

SEQ ID NO: 209679 - protein, 14 aa, Homo sapiens
  CDR3 for alpha chain variable domain of TCR clone 104840 (TRAV20, TRAJ42)
CAVQAGGSQGNLIF

SEQ ID NO: 209680 - protein, 12 aa, Homo sapiens
  CDR3 for beta chain variable domain of TCR clone 104840 (TRBV28, TRBJ2-3)
CASSLYRDTQYF

SEQ ID NO: 209681 - protein, 14 aa, Homo sapiens
  CDR3 for alpha chain variable domain of TCR clone 104841 (TRAV13-1, TRAJ40)
CAASMTSGTYKYIF

SEQ ID NO: 209682 - protein, 13 aa, Homo sapiens
  CDR3 for beta chain variable domain of TCR clone 104841 (TRBV2, TRBJ2-1)
CASISGGNNEQFF

SEQ ID NO: 209683 - protein, 17 aa, Homo sapiens
  CDR3 for alpha chain variable domain of TCR clone 104842 (TRAV12-3, TRAJ6)
CAMSARGGAGGSYIPTF

SEQ ID NO: 209684 - protein, 18 aa, Homo sapiens
  CDR3 for beta chain variable domain of TCR clone 104842 (TRBV7-9, TRBJ2-3)
CARSPRGTSGAGTDTQYF

SEQ ID NO: 209685 - protein, 14 aa, Homo sapiens
  CDR3 for alpha chain variable domain of TCR clone 104843 (TRAV22, TRAJ6)
CAGVGPGGSYIPTF

SEQ ID NO: 209686 - protein, 14 aa, Homo sapiens
  CDR3 for beta chain variable domain of TCR clone 104843 (TRBV4-1, TRBJ2-7)
CASSPVAGGDEQYF

SEQ ID NO: 209687 - protein, 13 aa, Homo sapiens
  CDR3 for alpha chain variable domain of TCR clone 104844 (TRAV21, TRAJ27)
CAARPGNAGKSTF

SEQ ID NO: 209688 - protein, 15 aa, Homo sapiens
  CDR3 for beta chain variable domain of TCR clone 104844 (TRBV7-9, TRBJ1-4)
CASSATGGNNEKLFF

SEQ ID NO: 209689 - protein, 15 aa, Homo sapiens
  CDR3 for alpha chain variable domain of TCR clone 104845 (TRAV8-3, TRAJ45)
CASSYSGGGAYGLTF

SEQ ID NO: 209690 - protein, 17 aa, Homo sapiens
  CDR3 for beta chain variable domain of TCR clone 104845 (TRBV7-8, TRBJ1-2)
CASSLRPLQGHLYGYTF

SEQ ID NO: 209691 - protein, 13 aa, Homo sapiens
  CDR3 for alpha chain variable domain of TCR clone 104846 (TRAV20, TRAJ20)
CAVQAGSGYNLSL

SEQ ID NO: 209692 - protein, 13 aa, Homo sapiens
  CDR3 for beta chain variable domain of TCR clone 104846 (TRBV3-1, TRBJ2-3)
CAGSQGGGDTQYF

SEQ ID NO: 209693 - protein, 12 aa, Homo sapiens
  CDR3 for alpha chain variable domain of TCR clone 104847 (TRAV16, TRAJ57)
CALEGGSEKLVF

SEQ ID NO: 209694 - protein, 12 aa, Homo sapiens
  CDR3 for beta chain variable domain of TCR clone 104847 (TRBV28, TRBJ2-7)
CASSGRPYEQCF

SEQ ID NO: 209695 - protein, 13 aa, Homo sapiens
  CDR3 for alpha chain variable domain of TCR clone 104848 (TRAV2, TRAJ40)
CAVVTSGTYKYIF

SEQ ID NO: 209696 - protein, 15 aa, Homo sapiens
  CDR3 for beta chain variable domain of TCR clone 104848 (TRBV28, TRBJ1-5)
CASSRTGGYVQPQHF

SEQ ID NO: 209697 - protein, 17 aa, Homo sapiens
  CDR3 for alpha chain variable domain of TCR clone 104849 (TRAV8-6, TRAJ58)
CAVSSWVGETSGSRLTF

SEQ ID NO: 209698 - protein, 14 aa, Homo sapiens
  CDR3 for beta chain variable domain of TCR clone 104849 (TRBV4-2, TRBJ2-1)
CASGLDRAYKEQFF

SEQ ID NO: 209699 - protein, 16 aa, Homo sapiens
  CDR3 for alpha chain variable domain of TCR clone 104850 (TRAV27, TRAJ52)
CAGAGAGGTSYGKLPF

SEQ ID NO: 209700 - protein, 17 aa, Homo sapiens
  CDR3 for beta chain variable domain of TCR clone 104850 (TRBV24-1, TRBJ2-3)
CATSDLPSGEDTDTQYF

SEQ ID NO: 209701 - protein, 14 aa, Homo sapiens
  CDR3 for alpha chain variable domain of TCR clone 104851 (TRAV13-1, TRAJ35)
CAASKGGFGNVLHC

SEQ ID NO: 209702 - protein, 14 aa, Homo sapiens
  CDR3 for beta chain variable domain of TCR clone 104851 (TRBV11-2, TRBJ1-5)
CASSLDRGRQPQHF

SEQ ID NO: 209703 - protein, 15 aa, Homo sapiens
  CDR3 for alpha chain variable domain of TCR clone 104852 (TRAV21, TRAJ32)
CAVNSCGGATNKLIF

SEQ ID NO: 209704 - protein, 18 aa, Homo sapiens
  CDR3 for beta chain variable domain of TCR clone 104852 (TRBV7-9, TRBJ2-1)
CASSTGLAEGSSYNEQFF

SEQ ID NO: 209705 - protein, 12 aa, Homo sapiens
  CDR3 for alpha chain variable domain of TCR clone 104853 (TRAV3, TRAJ39)
CAVIEWSNMLTF

SEQ ID NO: 209706 - protein, 14 aa, Homo sapiens
  CDR3 for beta chain variable domain of TCR clone 104853 (TRBV7-8, TRBJ2-3)
CASSFPDGQVTQYF

SEQ ID NO: 209707 - protein, 14 aa, Homo sapiens
  CDR3 for alpha chain variable domain of TCR clone 104854 (TRAV3, TRAJ9)
CAVRLNPGGFKTIF

SEQ ID NO: 209708 - protein, 15 aa, Homo sapiens
  CDR3 for beta chain variable domain of TCR clone 104854 (TRBV7-2, TRBJ2-1)
CASSLASGRVNEQFF

SEQ ID NO: 209709 - protein, 11 aa, Homo sapiens
  CDR3 for alpha chain variable domain of TCR clone 104855 (TRAV1-1, TRAJ16)
CAAGDGQKLLF

SEQ ID NO: 209710 - protein, 15 aa, Homo sapiens
  CDR3 for beta chain variable domain of TCR clone 104855 (TRBV4-2, TRBJ2-1)
CASSPSGGLYNEQFF

SEQ ID NO: 209711 - protein, 13 aa, Homo sapiens
  CDR3 for alpha chain variable domain of TCR clone 104856 (TRAV21, TRAJ27)
CDALNTNAGKSTF

SEQ ID NO: 209712 - protein, 14 aa, Homo sapiens
  CDR3 for beta chain variable domain of TCR clone 104856 (TRBV27, TRBJ1-1)
CASSLLSGLSEAFF

SEQ ID NO: 209713 - protein, 15 aa, Homo sapiens
  CDR3 for alpha chain variable domain of TCR clone 104857 (TRAV8-6, TRAJ10)
CAVSSKGGGGNKLTF

SEQ ID NO: 209714 - protein, 22 aa, Homo sapiens
  CDR3 for beta chain variable domain of TCR clone 104857 (TRBV4-2, TRBJ2-2)
CASSQEGATSGRVGAGTGELFF

SEQ ID NO: 209715 - protein, 16 aa, Homo sapiens
  CDR3 for alpha chain variable domain of TCR clone 104858 (TRAV30, TRAJ24)
CGTEIVDADSWGKFQF

SEQ ID NO: 209716 - protein, 12 aa, Homo sapiens
  CDR3 for beta chain variable domain of TCR clone 104858 (TRBV5-5, TRBJ2-5)
CASSYFGETQYF

SEQ ID NO: 209717 - protein, 17 aa, Homo sapiens
  CDR3 for alpha chain variable domain of TCR clone 104859 (TRAV8-3, TRAJ34)
CAIPGKLIFGTGTRLQV

SEQ ID NO: 209718 - protein, 15 aa, Homo sapiens
  CDR3 for beta chain variable domain of TCR clone 104859 (TRBV5-7, TRBJ2-1)
CTSSRRLAGDNEQFF

SEQ ID NO: 209719 - protein, 13 aa, Homo sapiens
  CDR3 for alpha chain variable domain of TCR clone 104860 (TRAV2, TRAJ29)
CAAHNSGNTPLVF

SEQ ID NO: 209720 - protein, 14 aa, Homo sapiens
  CDR3 for beta chain variable domain of TCR clone 104860 (TRBV7-9, TRBJ2-4)
CASSLAMGGNIQYF

SEQ ID NO: 209721 - protein, 14 aa, Homo sapiens
  CDR3 for alpha chain variable domain of TCR clone 104861 (TRAV12-3, TRAJ10)
SHLPLTGGGNKLTF

SEQ ID NO: 209722 - protein, 10 aa, Homo sapiens
  CDR3 for beta chain variable domain of TCR clone 104861 (TRBV15, TRBJ2-7)
AETGGYEQYF

SEQ ID NO: 209723 - protein, 13 aa, Homo sapiens
  CDR3 for alpha chain variable domain of TCR clone 104862 (TRAV13-1, TRAJ31)
CAASNGNNARLMF

SEQ ID NO: 209724 - protein, 12 aa, Homo sapiens
  CDR3 for beta chain variable domain of TCR clone 104862 (TRBV7-9, TRBJ2-7)
CASSIKREEQYF

SEQ ID NO: 209725 - protein, 14 aa, Homo sapiens
  CDR3 for alpha chain variable domain of TCR clone 104863 (TRAV2, TRAJ9)
CAVEDRSGGCKTIF

SEQ ID NO: 209726 - protein, 14 aa, Homo sapiens
  CDR3 for beta chain variable domain of TCR clone 104863 (TRBV3-1, TRBJ2-5)
CASSQGPDQETQYF

SEQ ID NO: 209727 - protein, 15 aa, Homo sapiens
  CDR3 for alpha chain variable domain of TCR clone 104864 (TRAV29/DV5, TRAJ42)
CAAKTDGGSQGNLIF

SEQ ID NO: 209728 - protein, 14 aa, Homo sapiens
  CDR3 for beta chain variable domain of TCR clone 104864 (TRBV7-2, TRBJ2-7)
CASSPKTSFYEQYF

SEQ ID NO: 209729 - protein, 16 aa, Homo sapiens
  CDR3 for alpha chain variable domain of TCR clone 104865 (TRAV12-3, TRAJ50)
CAMRDTMKTSYDKVIF

SEQ ID NO: 209730 - protein, 13 aa, Homo sapiens
  CDR3 for beta chain variable domain of TCR clone 104865 (TRBV4-1, TRBJ2-3)
CASSLDFTDTQYF

SEQ ID NO: 209731 - protein, 14 aa, Homo sapiens
  CDR3 for alpha chain variable domain of TCR clone 104866 (TRAV16, TRAJ42)
CALLAGGSQGNLIF

SEQ ID NO: 209732 - protein, 13 aa, Homo sapiens
  CDR3 for beta chain variable domain of TCR clone 104866 (TRBV7-9, TRBJ1-2)
CASSVKQNYGYTF

SEQ ID NO: 209733 - protein, 11 aa, Homo sapiens
  CDR3 for alpha chain variable domain of TCR clone 104867 (TRAV21, TRAJ34)
CAVTNTDKLIF

SEQ ID NO: 209734 - protein, 15 aa, Homo sapiens
  CDR3 for beta chain variable domain of TCR clone 104867 (TRBV6-5, TRBJ2-1)
CASSYDAGAGNEQFF

SEQ ID NO: 209735 - protein, 12 aa, Homo sapiens
  CDR3 for alpha chain variable domain of TCR clone 104868 (TRAV1-1, TRAJ39)
FAVPVVGNMLTF

SEQ ID NO: 209736 - protein, 15 aa, Homo sapiens
  CDR3 for beta chain variable domain of TCR clone 104868 (TRBV7-3, TRBJ2-2)
CASSETGQGTGELFF

SEQ ID NO: 209737 - protein, 14 aa, Homo sapiens
  CDR3 for alpha chain variable domain of TCR clone 104869 (TRAV3, TRAJ16)
CAVSGFSDGQKLLF

SEQ ID NO: 209738 - protein, 15 aa, Homo sapiens
  CDR3 for beta chain variable domain of TCR clone 104869 (TRBV7-2, TRBJ2-1)
CASSSGLAGGNEQFF

SEQ ID NO: 209739 - protein, 12 aa, Homo sapiens
  CDR3 for alpha chain variable domain of TCR clone 104870 (TRAV13-2, TRAJ23)
CAERHRGGKLIF

SEQ ID NO: 209740 - protein, 16 aa, Homo sapiens
  CDR3 for beta chain variable domain of TCR clone 104870 (TRBV10-3, TRBJ2-1)
CAISGVGDGGGGEQFF

SEQ ID NO: 209741 - protein, 16 aa, Homo sapiens
  CDR3 for alpha chain variable domain of TCR clone 104871 (TRAV12-2, TRAJ48)
CAVNPTPNFGNEKLTF

SEQ ID NO: 209742 - protein, 12 aa, Homo sapiens
  CDR3 for beta chain variable domain of TCR clone 104871 (TRBV9, TRBJ2-3)
CASSLRAGTQYF

SEQ ID NO: 209743 - protein, 18 aa, Homo sapiens
  CDR3 for alpha chain variable domain of TCR clone 104872 (TRAV21, TRAJ52)
CAVRPSPAGGTSYGKLTF

SEQ ID NO: 209744 - protein, 12 aa, Homo sapiens
  CDR3 for beta chain variable domain of TCR clone 104872 (TRBV11-2, TRBJ2-5)
CASSLDTQTQYF

SEQ ID NO: 209745 - protein, 12 aa, Homo sapiens
  CDR3 for alpha chain variable domain of TCR clone 104873 (TRAV13-2, TRAJ23)
CAERHRGGKLIF

SEQ ID NO: 209746 - protein, 15 aa, Homo sapiens
  CDR3 for beta chain variable domain of TCR clone 104873 (TRBV6-3, TRBJ2-7)
RASSSPGTVFYEQYF

SEQ ID NO: 209747 - protein, 12 aa, Homo sapiens
  CDR3 for alpha chain variable domain of TCR clone 104874 (TRAV36/DV7, TRAJ54)
CAVVRGAQKLVF

SEQ ID NO: 209748 - protein, 12 aa, Homo sapiens
  CDR3 for beta chain variable domain of TCR clone 104874 (TRBV12-4, TRBJ1-2)
CASSFIWLHLRF

SEQ ID NO: 209749 - protein, 12 aa, Homo sapiens
  CDR3 for alpha chain variable domain of TCR clone 104875 (TRAV12-3, TRAJ29)
CAAAKGNTPLVF

SEQ ID NO: 209750 - protein, 12 aa, Homo sapiens
  CDR3 for beta chain variable domain of TCR clone 104875 (TRBV11-2, TRBJ2-2)
CASSLGGGELFF

SEQ ID NO: 209751 - protein, 15 aa, Homo sapiens
  CDR3 for alpha chain variable domain of TCR clone 104876 (TRAV21, TRAJ37)
CAVRPTLSNTGKLIF

SEQ ID NO: 209752 - protein, 16 aa, Homo sapiens
  CDR3 for beta chain variable domain of TCR clone 104876 (TRBV24-1, TRBJ2-3)
CATSDRRQELTDTQYF

SEQ ID NO: 209753 - protein, 14 aa, Homo sapiens
  CDR3 for alpha chain variable domain of TCR clone 104877 (TRAV12-3, TRAJ10)
SHLPLTGGGNKLTF

SEQ ID NO: 209754 - protein, 11 aa, Homo sapiens
  CDR3 for beta chain variable domain of TCR clone 104877 (TRBV23-1, TRBJ2-7)
SSSGTGLEQYF

SEQ ID NO: 209755 - protein, 13 aa, Homo sapiens
  CDR3 for alpha chain variable domain of TCR clone 104878 (TRAV8-3, TRAJ48)
CAVVPFENEKLTF

SEQ ID NO: 209756 - protein, 19 aa, Homo sapiens
  CDR3 for beta chain variable domain of TCR clone 104878 (TRBV25-1, TRBJ2-2)
CAILVYRVDRGRKTGELFF

SEQ ID NO: 209757 - protein, 11 aa, Homo sapiens
  CDR3 for alpha chain variable domain of TCR clone 104879 (TRAV13-1, TRAJ49)
CACVGGNQCYF

SEQ ID NO: 209758 - protein, 16 aa, Homo sapiens
  CDR3 for beta chain variable domain of TCR clone 104879 (TRBV11-2, TRBJ2-2)
CASSLRTGNLIGELFF

SEQ ID NO: 209759 - protein, 14 aa, Homo sapiens
  CDR3 for alpha chain variable domain of TCR clone 104880 (TRAV8-6, TRAJ12)
CAVKAADSSYKLIF

SEQ ID NO: 209760 - protein, 15 aa, Homo sapiens
  CDR3 for beta chain variable domain of TCR clone 104880 (TRBV5-1, TRBJ2-5)
CASSLGLAEQGTQYF

SEQ ID NO: 209761 - protein, 12 aa, Homo sapiens
  CDR3 for alpha chain variable domain of TCR clone 104881 (TRAV12-1, TRAJ9)
CVVNPASFKTIF

SEQ ID NO: 209762 - protein, 16 aa, Homo sapiens
  CDR3 for beta chain variable domain of TCR clone 104881 (TRBV7-9, TRBJ1-1)
CASSLTQVRSNTEAFF

SEQ ID NO: 209763 - protein, 14 aa, Homo sapiens
  CDR3 for alpha chain variable domain of TCR clone 104882 (TRAV38-1, TRAJ39)
CAFSYNNAGNMLTF

SEQ ID NO: 209764 - protein, 15 aa, Homo sapiens
  CDR3 for beta chain variable domain of TCR clone 104882 (TRBV19, TRBJ2-6)
CASSIGPSGANVLTF

SEQ ID NO: 209765 - protein, 17 aa, Homo sapiens
  CDR3 for alpha chain variable domain of TCR clone 104883 (TRAV3, TRAJ6)
CAVRDGPRAGGSYIPTF

SEQ ID NO: 209766 - protein, 19 aa, Homo sapiens
  CDR3 for beta chain variable domain of TCR clone 104883 (TRBV11-3, TRBJ2-2)
CASSTRPGAKTTNTGELFF

SEQ ID NO: 209767 - protein, 14 aa, Homo sapiens
  CDR3 for alpha chain variable domain of TCR clone 104884 (TRAV9-2, TRAJ39)
CALYIYNAGNMLTF

SEQ ID NO: 209768 - protein, 17 aa, Homo sapiens
  CDR3 for beta chain variable domain of TCR clone 104884 (TRBV28, TRBJ1-5)
CASSLSWLVSSNQPLHF

SEQ ID NO: 209769 - protein, 14 aa, Homo sapiens
  CDR3 for alpha chain variable domain of TCR clone 104885 (TRAV29/DV5, TRAJ36)
CAARRKTGANNLFL

SEQ ID NO: 209770 - protein, 12 aa, Homo sapiens
  CDR3 for beta chain variable domain of TCR clone 104885 (TRBV12-4, TRBJ2-7)
CASSLGGYEQYF

SEQ ID NO: 209771 - protein, 13 aa, Homo sapiens
  CDR3 for alpha chain variable domain of TCR clone 104886 (TRAV2, TRAJ15)
CAVTSQAGTALIF

SEQ ID NO: 209772 - protein, 16 aa, Homo sapiens
  CDR3 for beta chain variable domain of TCR clone 104886 (TRBV5-1, TRBJ1-1)
CASSSGGNSLNTEAFF

SEQ ID NO: 209773 - protein, 16 aa, Homo sapiens
  CDR3 for alpha chain variable domain of TCR clone 104887 (TRAV30, TRAJ24)
CGTEIVDADSWGKFQF

SEQ ID NO: 209774 - protein, 15 aa, Homo sapiens
  CDR3 for beta chain variable domain of TCR clone 104887 (TRBV7-3, TRBJ2-1)
CASSLDGNSYNEQFF

SEQ ID NO: 209775 - protein, 11 aa, Homo sapiens
  CDR3 for alpha chain variable domain of TCR clone 104888 (TRAV12-1, TRAJ34)
CVVNKGRELIF

SEQ ID NO: 209776 - protein, 15 aa, Homo sapiens
  CDR3 for beta chain variable domain of TCR clone 104888 (TRBV13, TRBJ1-2)
CASSLGRQPGYGYTF

SEQ ID NO: 209777 - protein, 15 aa, Homo sapiens
  CDR3 for alpha chain variable domain of TCR clone 104889 (TRAV21, TRAJ32)
CAVNSYGGATNKLIF

SEQ ID NO: 209778 - protein, 18 aa, Homo sapiens
  CDR3 for beta chain variable domain of TCR clone 104889 (TRBV7-9, TRBJ2-1)
CARSTGLAEGSSYNEQFF

SEQ ID NO: 209779 - protein, 11 aa, Homo sapiens
  CDR3 for alpha chain variable domain of TCR clone 104890 (TRAV23/DV6, TRAJ58)
CAASLLRGETS

SEQ ID NO: 209780 - protein, 15 aa, Homo sapiens
  CDR3 for beta chain variable domain of TCR clone 104890 (TRBV9, TRBJ1-6)
CASSVAGTGDSPLHF

SEQ ID NO: 209781 - protein, 16 aa, Homo sapiens
  CDR3 for alpha chain variable domain of TCR clone 104891 (TRAV30, TRAJ24)
CGTEIVDADSWGKFQF

SEQ ID NO: 209782 - protein, 14 aa, Homo sapiens
  CDR3 for beta chain variable domain of TCR clone 104891 (TRBV7-8, TRBJ2-3)
CASSSRDSTDTQYF

SEQ ID NO: 209783 - protein, 16 aa, Homo sapiens
  CDR3 for alpha chain variable domain of TCR clone 104892 (TRAV26-1, TRAJ52)
CIVSNAGGTSYGKLTF

SEQ ID NO: 209784 - protein, 16 aa, Homo sapiens
  CDR3 for beta chain variable domain of TCR clone 104892 (TRBV5-1, TRBJ2-1)
CASSLEGRGLCNEQFF

SEQ ID NO: 209785 - protein, 16 aa, Homo sapiens
  CDR3 for alpha chain variable domain of TCR clone 104893 (TRAV13-1, TRAJ18)
CAARPNRGSTLGRLYF

SEQ ID NO: 209786 - protein, 15 aa, Homo sapiens
  CDR3 for beta chain variable domain of TCR clone 104893 (TRBV4-3, TRBJ2-7)
CASSQGDWGDYEQYF

SEQ ID NO: 209787 - protein, 12 aa, Homo sapiens
  CDR3 for alpha chain variable domain of TCR clone 104894 (TRAV27, TRAJ13)
CAGAGGYQTVTF

SEQ ID NO: 209788 - protein, 15 aa, Homo sapiens
  CDR3 for beta chain variable domain of TCR clone 104894 (TRBV20-1, TRBJ2-6)
CSARDRGPGANVLTF

SEQ ID NO: 209789 - protein, 11 aa, Homo sapiens
  CDR3 for alpha chain variable domain of TCR clone 104895 (TRAV21, TRAJ48)
CAADGNEKLTF

SEQ ID NO: 209790 - protein, 16 aa, Homo sapiens
  CDR3 for beta chain variable domain of TCR clone 104895 (TRBV12-4, TRBJ1-5)
CASSSGPRGSNQPQHF

SEQ ID NO: 209791 - protein, 12 aa, Homo sapiens
  CDR3 for alpha chain variable domain of TCR clone 104896 (TRAV12-3, TRAJ17)
CSMTLTGNKLTF

SEQ ID NO: 209792 - protein, 20 aa, Homo sapiens
  CDR3 for beta chain variable domain of TCR clone 104896 (TRBV19, TRBJ2-1)
CASSISRTVTSTRLNNEQFF

SEQ ID NO: 209793 - protein, 12 aa, Homo sapiens
  CDR3 for alpha chain variable domain of TCR clone 104897 (TRAV12-3, TRAJ17)
CAMTLKGNNLTF

SEQ ID NO: 209794 - protein, 15 aa, Homo sapiens
  CDR3 for beta chain variable domain of TCR clone 104897 (TRBV20-1, TRBJ2-7)
CSARDRVSGMDEQYF

SEQ ID NO: 209795 - protein, 11 aa, Homo sapiens
  CDR3 for alpha chain variable domain of TCR clone 104898 (TRAV12-3, TRAJ43)
CAMSVSNDMRF

SEQ ID NO: 209796 - protein, 16 aa, Homo sapiens
  CDR3 for beta chain variable domain of TCR clone 104898 (TRBV20-1, TRBJ2-1)
CSARASLGAVYNEQFF

SEQ ID NO: 209797 - protein, 11 aa, Homo sapiens
  CDR3 for alpha chain variable domain of TCR clone 104899 (TRAV27, TRAJ40)
SLTSGTYKYTF

SEQ ID NO: 209798 - protein, 12 aa, Homo sapiens
  CDR3 for beta chain variable domain of TCR clone 104899 (TRBV18, TRBJ2-3)
CQLNQNTDTQYF

SEQ ID NO: 209799 - protein, 19 aa, Homo sapiens
  CDR3 for alpha chain variable domain of TCR clone 104900 (TRAV26-1, TRAJ52)
CIVRAHRNAGGTSYGKLTF

SEQ ID NO: 209800 - protein, 15 aa, Homo sapiens
  CDR3 for beta chain variable domain of TCR clone 104900 (TRBV29-1, TRBJ2-1)
CSGRDRKSFYNEQFF

SEQ ID NO: 209801 - protein, 11 aa, Homo sapiens
  CDR3 for alpha chain variable domain of TCR clone 104901 (TRAV35, TRAJ12)
CWMDSSYKLIF

SEQ ID NO: 209802 - protein, 14 aa, Homo sapiens
  CDR3 for beta chain variable domain of TCR clone 104901 (TRBV28, TRBJ2-5)
CASSLYRGTETQYF

SEQ ID NO: 209803 - protein, 13 aa, Homo sapiens
  CDR3 for alpha chain variable domain of TCR clone 104902 (TRAV1-2, TRAJ9)
CAALNTGGFKAIF

SEQ ID NO: 209804 - protein, 16 aa, Homo sapiens
  CDR3 for beta chain variable domain of TCR clone 104902 (TRBV11-2, TRBJ2-1)
CASSPRLAGVYNEQFF

SEQ ID NO: 209805 - protein, 10 aa, Homo sapiens
  CDR3 for alpha chain variable domain of TCR clone 104903 (TRAV12-3, TRAJ49)
CAMNDDQFYF

SEQ ID NO: 209806 - protein, 15 aa, Homo sapiens
  CDR3 for beta chain variable domain of TCR clone 104903 (TRBV7-3, TRBJ2-3)
CASSLGLTLGDTQYF

SEQ ID NO: 209807 - protein, 14 aa, Homo sapiens
  CDR3 for alpha chain variable domain of TCR clone 104904 (TRAV12-1, TRAJ8)
CVVNSNAGFQKLVF

SEQ ID NO: 209808 - protein, 16 aa, Homo sapiens
  CDR3 for beta chain variable domain of TCR clone 104904 (TRBV20-1, TRBJ2-2)
CSARDDRVGLTGELFF

SEQ ID NO: 209809 - protein, 12 aa, Homo sapiens
  CDR3 for alpha chain variable domain of TCR clone 104905 (TRAV21, TRAJ23)
CAVGPQGRKLIF

SEQ ID NO: 209810 - protein, 13 aa, Homo sapiens
  CDR3 for beta chain variable domain of TCR clone 104905 (TRBV20-1, TRBJ2-7)
CSARTGAGYEQYF

SEQ ID NO: 209811 - protein, 15 aa, Homo sapiens
  CDR3 for alpha chain variable domain of TCR clone 104906 (TRAV2, TRAJ9)
CAVEDRGTGGFKTIF

SEQ ID NO: 209812 - protein, 14 aa, Homo sapiens
  CDR3 for beta chain variable domain of TCR clone 104906 (TRBV4-1, TRBJ2-2)
CASSRAVNTGELFF

SEQ ID NO: 209813 - protein, 14 aa, Homo sapiens
  CDR3 for alpha chain variable domain of TCR clone 104907 (TRAV12-2, TRAJ17)
CAVNIKAAGNKLTF

SEQ ID NO: 209814 - protein, 16 aa, Homo sapiens
  CDR3 for beta chain variable domain of TCR clone 104907 (TRBV20-1, TRBJ2-6)
CSASSQGYDGDNVLTF

SEQ ID NO: 209815 - protein, 15 aa, Homo sapiens
  CDR3 for alpha chain variable domain of TCR clone 104908 (TRAV17, TRAJ23)
CATDAEDHQGGKLIF

SEQ ID NO: 209816 - protein, 12 aa, Homo sapiens
  CDR3 for beta chain variable domain of TCR clone 104908 (TRBV2, TRBJ2-1)
CAKREGYNEQFF

SEQ ID NO: 209817 - protein, 13 aa, Homo sapiens
  CDR3 for alpha chain variable domain of TCR clone 104909 (TRAV8-6, TRAJ21)
CAVSPSSLNKFYF

SEQ ID NO: 209818 - protein, 13 aa, Homo sapiens
  CDR3 for beta chain variable domain of TCR clone 104909 (TRBV7-9, TRBJ1-2)
CASSLKQNYGYTF

SEQ ID NO: 209819 - protein, 13 aa, Homo sapiens
  CDR3 for alpha chain variable domain of TCR clone 104910 (TRAV3, TRAJ41)
CAVSSNSGYALTF

SEQ ID NO: 209820 - protein, 13 aa, Homo sapiens
  CDR3 for beta chain variable domain of TCR clone 104910 (TRBV20-1, TRBJ2-2)
CSALSGGAGELFF

SEQ ID NO: 209821 - protein, 13 aa, Homo sapiens
  CDR3 for alpha chain variable domain of TCR clone 104911 (TRAV36/DV7, TRAJ38)
CVANAGNNRKLIW

SEQ ID NO: 209822 - protein, 14 aa, Homo sapiens
  CDR3 for beta chain variable domain of TCR clone 104911 (TRBV7-2, TRBJ2-7)
CASSPRWEVNEQYF

SEQ ID NO: 209823 - protein, 13 aa, Homo sapiens
  CDR3 for alpha chain variable domain of TCR clone 104912 (TRAV1-2, TRAJ9)
CAALNNGGFKTIF

SEQ ID NO: 209824 - protein, 13 aa, Homo sapiens
  CDR3 for beta chain variable domain of TCR clone 104912 (TRBV4-1, TRBJ2-1)
CASSQAGGDEQFF

SEQ ID NO: 209825 - protein, 15 aa, Homo sapiens
  CDR3 for alpha chain variable domain of TCR clone 104913 (TRAV29/DV5, TRAJ29)
CAASERSSGNTPLVF

SEQ ID NO: 209826 - protein, 16 aa, Homo sapiens
  CDR3 for beta chain variable domain of TCR clone 104913 (TRBV7-3, TRBJ2-2)
CASSLKRGTLSGELFF

SEQ ID NO: 209827 - protein, 15 aa, Homo sapiens
  CDR3 for alpha chain variable domain of TCR clone 104914 (TRAV26-1, TRAJ22)
CIVRVSFWFRKATDL

SEQ ID NO: 209828 - protein, 12 aa, Homo sapiens
  CDR3 for beta chain variable domain of TCR clone 104914 (TRBV11-2, TRBJ2-2)
CASSLGGGELFF

SEQ ID NO: 209829 - protein, 15 aa, Homo sapiens
  CDR3 for alpha chain variable domain of TCR clone 104915 (TRAV25, TRAJ41)
CAGPWNSNSGYALNF

SEQ ID NO: 209830 - protein, 12 aa, Homo sapiens
  CDR3 for beta chain variable domain of TCR clone 104915 (TRBV12-5, TRBJ2-5)
CASGQGVETQYF

SEQ ID NO: 209831 - protein, 14 aa, Homo sapiens
  CDR3 for alpha chain variable domain of TCR clone 104916 (TRAV12-2, TRAJ13)
CAVKKTGGYHKVTF

SEQ ID NO: 209832 - protein, 15 aa, Homo sapiens
  CDR3 for beta chain variable domain of TCR clone 104916 (TRBV20-1, TRBJ2-1)
CSARGIGGTYNEQFF

SEQ ID NO: 209833 - protein, 11 aa, Homo sapiens
  CDR3 for alpha chain variable domain of TCR clone 104917 (TRAV27, TRAJ45)
CAGAQEEVLTD

SEQ ID NO: 209834 - protein, 11 aa, Homo sapiens
  CDR3 for beta chain variable domain of TCR clone 104917 (TRBV11-2, TRBJ2-1)
PPGVEYNEQFF

SEQ ID NO: 209835 - protein, 11 aa, Homo sapiens
  CDR3 for alpha chain variable domain of TCR clone 104918 (TRAV17, TRAJ9)
CGFTGGFKTIF

SEQ ID NO: 209836 - protein, 15 aa, Homo sapiens
  CDR3 for beta chain variable domain of TCR clone 104918 (TRBV19, TRBJ1-1)
CASTSGQIQNTEAFF

SEQ ID NO: 209837 - protein, 14 aa, Homo sapiens
  CDR3 for alpha chain variable domain of TCR clone 104919 (TRAV2, TRAJ9)
CAVDDRSGGFKTIF

SEQ ID NO: 209838 - protein, 15 aa, Homo sapiens
  CDR3 for beta chain variable domain of TCR clone 104919 (TRBV19, TRBJ2-1)
CASSHRDRGPNEQFF

SEQ ID NO: 209839 - protein, 15 aa, Homo sapiens
  CDR3 for alpha chain variable domain of TCR clone 104920 (TRAV8-4, TRAJ7)
CAGSGGNYGNNRLAF

SEQ ID NO: 209840 - protein, 11 aa, Homo sapiens
  CDR3 for beta chain variable domain of TCR clone 104920 (TRBV20-1, TRBJ2-1)
CSLSSGSEQFF

SEQ ID NO: 209841 - protein, 13 aa, Homo sapiens
  CDR3 for alpha chain variable domain of TCR clone 104921 (TRAV12-3, TRAJ9)
CAMWNTGGFKTIF

SEQ ID NO: 209842 - protein, 14 aa, Homo sapiens
  CDR3 for beta chain variable domain of TCR clone 104921 (TRBV11-2, TRBJ2-7)
CASSSTGEGYEQYF

SEQ ID NO: 209843 - protein, 12 aa, Homo sapiens
  CDR3 for alpha chain variable domain of TCR clone 104922 (TRAV38-2/DV8, TRAJ48)
CALLSGNEKLTF

SEQ ID NO: 209844 - protein, 15 aa, Homo sapiens
  CDR3 for beta chain variable domain of TCR clone 104922 (TRBV6-1, TRBJ2-1)
CASSELRGQYNERFF

SEQ ID NO: 209845 - protein, 16 aa, Homo sapiens
  CDR3 for alpha chain variable domain of TCR clone 104923 (TRAV26-1, TRAJ37)
CIVRGDGSGNTGKLIF

SEQ ID NO: 209846 - protein, 14 aa, Homo sapiens
  CDR3 for beta chain variable domain of TCR clone 104923 (TRBV5-1, TRBJ2-1)
CASSFGGGLNEQFF

SEQ ID NO: 209847 - protein, 11 aa, Homo sapiens
  CDR3 for alpha chain variable domain of TCR clone 104924 (TRAV21, TRAJ34)
CAHYNTDKLIF

SEQ ID NO: 209848 - protein, 12 aa, Homo sapiens
  CDR3 for beta chain variable domain of TCR clone 104924 (TRBV12-4, TRBJ2-7)
CASSLGGYEQYF

SEQ ID NO: 209849 - protein, 12 aa, Homo sapiens
  CDR3 for alpha chain variable domain of TCR clone 104925 (TRAV13-2, TRAJ23)
CAERHRGGKLIF

SEQ ID NO: 209850 - protein, 13 aa, Homo sapiens
  CDR3 for beta chain variable domain of TCR clone 104925 (TRBV7-9, TRBJ2-3)
RASSPGSTDTQYF

SEQ ID NO: 209851 - protein, 15 aa, Homo sapiens
  CDR3 for alpha chain variable domain of TCR clone 104926 (TRAV9-2, TRAJ56)
CALSDVDGANSKLTF

SEQ ID NO: 209852 - protein, 14 aa, Homo sapiens
  CDR3 for beta chain variable domain of TCR clone 104926 (TRBV5-1, TRBJ2-7)
CASSRGESLYEKYF

SEQ ID NO: 209853 - protein, 16 aa, Homo sapiens
  CDR3 for alpha chain variable domain of TCR clone 104927 (TRAV26-1, TRAJ53)
CIVRVAMGGSNYKLTF

SEQ ID NO: 209854 - protein, 12 aa, Homo sapiens
  CDR3 for beta chain variable domain of TCR clone 104927 (TRBV7-9, TRBJ1-5)
CASSPQGQPQLF

SEQ ID NO: 209855 - protein, 14 aa, Homo sapiens
  CDR3 for alpha chain variable domain of TCR clone 104928 (TRAV2, TRAJ9)
CAVEDRSGGFKTIF

SEQ ID NO: 209856 - protein, 17 aa, Homo sapiens
  CDR3 for beta chain variable domain of TCR clone 104928 (TRBV11-2, TRBJ2-3)
CASSLEANGLAGDTQYF

SEQ ID NO: 209857 - protein, 12 aa, Homo sapiens
  CDR3 for alpha chain variable domain of TCR clone 104929 (TRAV13-1, TRAJ21)
CAAKEGFNKFYF

SEQ ID NO: 209858 - protein, 15 aa, Homo sapiens
  CDR3 for beta chain variable domain of TCR clone 104929 (TRBV15, TRBJ1-5)
CATSRDPVSNQHQHF

SEQ ID NO: 209859 - protein, 13 aa, Homo sapiens
  CDR3 for alpha chain variable domain of TCR clone 104930 (TRAV3, TRAJ30)
CAVRDRGDDKIIF

SEQ ID NO: 209860 - protein, 16 aa, Homo sapiens
  CDR3 for beta chain variable domain of TCR clone 104930 (TRBV7-3, TRBJ2-2)
CASSLKRWTLSGELFF

SEQ ID NO: 209861 - protein, 15 aa, Homo sapiens
  CDR3 for alpha chain variable domain of TCR clone 104931 (TRAV8-3, TRAJ41)
CAVGSNSNSGYALNF

SEQ ID NO: 209862 - protein, 17 aa, Homo sapiens
  CDR3 for beta chain variable domain of TCR clone 104931 (TRBV25-1, TRBJ2-1)
GASSAYGQGRGVYEQFF

SEQ ID NO: 209863 - protein, 12 aa, Homo sapiens
  CDR3 for alpha chain variable domain of TCR clone 104932 (TRAV13-1, TRAJ27)
CSAHTNAGKSTF

SEQ ID NO: 209864 - protein, 13 aa, Homo sapiens
  CDR3 for beta chain variable domain of TCR clone 104932 (TRBV20-1, TRBJ1-1)
CSARGGGNTEAFF

SEQ ID NO: 209865 - protein, 21 aa, Homo sapiens
  CDR3 for alpha chain variable domain of TCR clone 104933 (TRAV12-1, TRAJ37)
CVVNGGLWQHRQTDLWARDNF

SEQ ID NO: 209866 - protein, 12 aa, Homo sapiens
  CDR3 for beta chain variable domain of TCR clone 104933 (TRBV20-1, TRBJ1-2)
CSAPGFNYGYTF

SEQ ID NO: 209867 - protein, 16 aa, Homo sapiens
  CDR3 for alpha chain variable domain of TCR clone 104934 (TRAV30, TRAJ24)
CGTEIVDADSWGKFQF

SEQ ID NO: 209868 - protein, 13 aa, Homo sapiens
  CDR3 for beta chain variable domain of TCR clone 104934 (TRBV7-3, TRBJ2-1)
CASSLIDRGEQFF

SEQ ID NO: 209869 - protein, 16 aa, Homo sapiens
  CDR3 for alpha chain variable domain of TCR clone 104935 (TRAV23/DV6, TRAJ9)
CAASIGGNTGGFKTIF

SEQ ID NO: 209870 - protein, 17 aa, Homo sapiens
  CDR3 for beta chain variable domain of TCR clone 104935 (TRBV11-2, TRBJ2-1)
CASSLYTPGVEYNEQFF

SEQ ID NO: 209871 - protein, 16 aa, Homo sapiens
  CDR3 for alpha chain variable domain of TCR clone 104936 (TRAV30, TRAJ24)
CGTETVDADSWGKFQF

SEQ ID NO: 209872 - protein, 17 aa, Homo sapiens
  CDR3 for beta chain variable domain of TCR clone 104936 (TRBV20-1, TRBJ2-1)
CSAPPRLAGTRYNEQFF

SEQ ID NO: 209873 - protein, 12 aa, Homo sapiens
  CDR3 for alpha chain variable domain of TCR clone 104937 (TRAV13-2, TRAJ8)
CAPWLGFQKLVF

SEQ ID NO: 209874 - protein, 15 aa, Homo sapiens
  CDR3 for beta chain variable domain of TCR clone 104937 (TRBV19, TRBJ1-1)
CASTSGQIQNTEAFF

SEQ ID NO: 209875 - protein, 15 aa, Homo sapiens
  CDR3 for alpha chain variable domain of TCR clone 104938 (TRAV21, TRAJ24)
CAARSSTDSWGKLQF

SEQ ID NO: 209876 - protein, 13 aa, Homo sapiens
  CDR3 for beta chain variable domain of TCR clone 104938 (TRBV12-4, TRBJ1-2)
CASSLRQGKGYTF

SEQ ID NO: 209877 - protein, 13 aa, Homo sapiens
  CDR3 for alpha chain variable domain of TCR clone 104939 (TRAV26-2, TRAJ43)
CILRAVNNNDMRF

SEQ ID NO: 209878 - protein, 14 aa, Homo sapiens
  CDR3 for beta chain variable domain of TCR clone 104939 (TRBV11-2, TRBJ1-2)
CASSLGTANYGYTF

SEQ ID NO: 209879 - protein, 12 aa, Homo sapiens
  CDR3 for alpha chain variable domain of TCR clone 104940 (TRAV26-1, TRAJ26)
CIVYNYGQNFVF

SEQ ID NO: 209880 - protein, 16 aa, Homo sapiens
  CDR3 for beta chain variable domain of TCR clone 104940 (TRBV11-2, TRBJ2-5)
CASSGQGYSPQETQYF

SEQ ID NO: 209881 - protein, 14 aa, Homo sapiens
  CDR3 for alpha chain variable domain of TCR clone 104941 (TRAV17, TRAJ15)
CATTTNQAGTALIF

SEQ ID NO: 209882 - protein, 16 aa, Homo sapiens
  CDR3 for beta chain variable domain of TCR clone 104941 (TRBV4-1, TRBJ2-7)
CASSRGDILSSYEQYF

SEQ ID NO: 209883 - protein, 11 aa, Homo sapiens
  CDR3 for alpha chain variable domain of TCR clone 104942 (TRAV12-1, TRAJ21)
CVVNNFNKFYF

SEQ ID NO: 209884 - protein, 14 aa, Homo sapiens
  CDR3 for beta chain variable domain of TCR clone 104942 (TRBV15, TRBJ1-5)
CATSREQSNQHQHF

SEQ ID NO: 209885 - protein, 15 aa, Homo sapiens
  CDR3 for alpha chain variable domain of TCR clone 104943 (TRAV17, TRAJ35)
CATAFVIGFGNVLHC

SEQ ID NO: 209886 - protein, 15 aa, Homo sapiens
  CDR3 for beta chain variable domain of TCR clone 104943 (TRBV7-3, TRBJ2-1)
CASSPTGGSRNEQFF

SEQ ID NO: 209887 - protein, 12 aa, Homo sapiens
  CDR3 for alpha chain variable domain of TCR clone 104944 (TRAV3, TRAJ27)
CAVIDKAGKSTF

SEQ ID NO: 209888 - protein, 13 aa, Homo sapiens
  CDR3 for beta chain variable domain of TCR clone 104944 (TRBV6-5, TRBJ2-5)
CASSPQGGETQYF

SEQ ID NO: 209889 - protein, 16 aa, Homo sapiens
  CDR3 for alpha chain variable domain of TCR clone 104945 (TRAV3, TRAJ10)
CAVRDMRAGGGNKLTF

SEQ ID NO: 209890 - protein, 16 aa, Homo sapiens
  CDR3 for beta chain variable domain of TCR clone 104945 (TRBV25-1, TRBJ1-1)
CASSGDRDRGRIEAFF

SEQ ID NO: 209891 - protein, 14 aa, Homo sapiens
  CDR3 for alpha chain variable domain of TCR clone 104946 (TRAV35, TRAJ22)
CAGLRPGSARQLAF

SEQ ID NO: 209892 - protein, 15 aa, Homo sapiens
  CDR3 for beta chain variable domain of TCR clone 104946 (TRBV12-4, TRBJ2-5)
CASSPPTGLQETRYF

SEQ ID NO: 209893 - protein, 16 aa, Homo sapiens
  CDR3 for alpha chain variable domain of TCR clone 104947 (TRAV1-2, TRAJ16)
CAPPGFQMARSCSLQG

SEQ ID NO: 209894 - protein, 14 aa, Homo sapiens
  CDR3 for beta chain variable domain of TCR clone 104947 (TRBV7-2, TRBJ2-7)
CASSPKTSFYEQYF

SEQ ID NO: 209895 - protein, 13 aa, Homo sapiens
  CDR3 for alpha chain variable domain of TCR clone 104948 (TRAV12-1, TRAJ40)
CVVPTSGTYKYIF

SEQ ID NO: 209896 - protein, 16 aa, Homo sapiens
  CDR3 for beta chain variable domain of TCR clone 104948 (TRBV12-4, TRBJ2-7)
CASSLIGGTGTYEQYF

SEQ ID NO: 209897 - protein, 14 aa, Homo sapiens
  CDR3 for alpha chain variable domain of TCR clone 104949 (TRAV12-1, TRAJ30)
CVVNIGGRDDKIIL

SEQ ID NO: 209898 - protein, 15 aa, Homo sapiens
  CDR3 for beta chain variable domain of TCR clone 104949 (TRBV18, TRBJ1-2)
CASSPSNTPNYGYTF

SEQ ID NO: 209899 - protein, 12 aa, Homo sapiens
  CDR3 for alpha chain variable domain of TCR clone 104950 (TRAV4, TRAJ26)
CLVGDYGQNFVF

SEQ ID NO: 209900 - protein, 13 aa, Homo sapiens
  CDR3 for beta chain variable domain of TCR clone 104950 (TRBV4-2, TRBJ1-1)
CASSQAGNTEAFF

SEQ ID NO: 209901 - protein, 15 aa, Homo sapiens
  CDR3 for alpha chain variable domain of TCR clone 104951 (TRAV17, TRAJ23)
CATDAEDNQGGKLIF

SEQ ID NO: 209902 - protein, 16 aa, Homo sapiens
  CDR3 for beta chain variable domain of TCR clone 104951 (TRBV13, TRBJ2-3)
CQQPLQGSGGRNTQYF

SEQ ID NO: 209903 - protein, 14 aa, Homo sapiens
  CDR3 for alpha chain variable domain of TCR clone 104952 (TRAV16, TRAJ32)
CALKSGGSTNKLIF

SEQ ID NO: 209904 - protein, 13 aa, Homo sapiens
  CDR3 for beta chain variable domain of TCR clone 104952 (TRBV15, TRBJ1-6)
CATSGGLNSPLHF

SEQ ID NO: 209905 - protein, 14 aa, Homo sapiens
  CDR3 for alpha chain variable domain of TCR clone 104953 (TRAV1-2, TRAJ16)
CAVNRFSDGQKLLF

SEQ ID NO: 209906 - protein, 14 aa, Homo sapiens
  CDR3 for beta chain variable domain of TCR clone 104953 (TRBV19, TRBJ2-1)
CASSMGSGRRSSSS

SEQ ID NO: 209907 - protein, 12 aa, Homo sapiens
  CDR3 for alpha chain variable domain of TCR clone 104954 (TRAV20, TRAJ54)
CAVQEGAQKLVL

SEQ ID NO: 209908 - protein, 17 aa, Homo sapiens
  CDR3 for beta chain variable domain of TCR clone 104954 (TRBV13, TRBJ2-3)
CASSLSRVAGGRNTQYF

SEQ ID NO: 209909 - protein, 12 aa, Homo sapiens
  CDR3 for alpha chain variable domain of TCR clone 104955 (TRAV21, TRAJ3)
CCFYSSASKIIF

SEQ ID NO: 209910 - protein, 14 aa, Homo sapiens
  CDR3 for beta chain variable domain of TCR clone 104955 (TRBV7-2, TRBJ2-7)
CASSPKTSFYEQYF

SEQ ID NO: 209911 - protein, 16 aa, Homo sapiens
  CDR3 for alpha chain variable domain of TCR clone 104956 (TRAV2, TRAJ53)
CAMSPGSGGSNYKLTF

SEQ ID NO: 209912 - protein, 11 aa, Homo sapiens
  CDR3 for beta chain variable domain of TCR clone 104956 (TRBV29-1, TRBJ2-5)
CSEDRTGTQYF

SEQ ID NO: 209913 - protein, 16 aa, Homo sapiens
  CDR3 for alpha chain variable domain of TCR clone 104957 (TRAV12-3, TRAJ53)
CAMSPGSGGSNYKLTF

SEQ ID NO: 209914 - protein, 16 aa, Homo sapiens
  CDR3 for beta chain variable domain of TCR clone 104957 (TRBV7-6, TRBJ2-1)
CASSAPGPSSYNEQFF

SEQ ID NO: 209915 - protein, 10 aa, Homo sapiens
  CDR3 for alpha chain variable domain of TCR clone 104958 (TRAV17, TRAJ36)
CATVAGNLFF

SEQ ID NO: 209916 - protein, 14 aa, Homo sapiens
  CDR3 for beta chain variable domain of TCR clone 104958 (TRBV18, TRBJ1-5)
CASSPGNSNQPQHF

SEQ ID NO: 209917 - protein, 15 aa, Homo sapiens
  CDR3 for alpha chain variable domain of TCR clone 104959 (TRAV17, TRAJ57)
WATGPSQGGSEKLVF

SEQ ID NO: 209918 - protein, 16 aa, Homo sapiens
  CDR3 for beta chain variable domain of TCR clone 104959 (TRBV12-4, TRBJ1-5)
CASSRPVGGSNQPQHF

SEQ ID NO: 209919 - protein, 15 aa, Homo sapiens
  CDR3 for alpha chain variable domain of TCR clone 104960 (TRAV3, TRAJ22)
CAVRDRGGSARQLTF

SEQ ID NO: 209920 - protein, 15 aa, Homo sapiens
  CDR3 for beta chain variable domain of TCR clone 104960 (TRBV7-9, TRBJ1-6)
CASSSPGRGNSPLHF

SEQ ID NO: 209921 - protein, 14 aa, Homo sapiens
  CDR3 for alpha chain variable domain of TCR clone 104961 (TRAV26-1, TRAJ57)
CIRAGQGGSGKLVF

SEQ ID NO: 209922 - protein, 13 aa, Homo sapiens
  CDR3 for beta chain variable domain of TCR clone 104961 (TRBV19, TRBJ2-7)
CASSLTTSYEQYF

SEQ ID NO: 209923 - protein, 14 aa, Homo sapiens
  CDR3 for alpha chain variable domain of TCR clone 104962 (TRAV3, TRAJ7)
CAVREEEREQQTRF

SEQ ID NO: 209924 - protein, 15 aa, Homo sapiens
  CDR3 for beta chain variable domain of TCR clone 104962 (TRBV12-4, TRBJ2-5)
CASSPPTGLQETQYF

SEQ ID NO: 209925 - protein, 12 aa, Homo sapiens
  CDR3 for alpha chain variable domain of TCR clone 104963 (TRAV12-2, TRAJ10)
WGVTGGGNKLTF

SEQ ID NO: 209926 - protein, 15 aa, Homo sapiens
  CDR3 for beta chain variable domain of TCR clone 104963 (TRBV15, TRBJ1-1)
CATSLQGGRNTEAFF

SEQ ID NO: 209927 - protein, 13 aa, Homo sapiens
  CDR3 for alpha chain variable domain of TCR clone 104964 (TRAV3, TRAJ21)
CAVREPDFNKFYF

SEQ ID NO: 209928 - protein, 14 aa, Homo sapiens
  CDR3 for beta chain variable domain of TCR clone 104964 (TRBV4-2, TRBJ2-1)
CASGLDRAYNEQFF

SEQ ID NO: 209929 - protein, 14 aa, Homo sapiens
  CDR3 for alpha chain variable domain of TCR clone 104965 (TRAV12-2, TRAJ17)
CAVLFKAACNKLTF

SEQ ID NO: 209930 - protein, 14 aa, Homo sapiens
  CDR3 for beta chain variable domain of TCR clone 104965 (TRBV7-2, TRBJ2-7)
CASRSQGAAYEQYF

SEQ ID NO: 209931 - protein, 16 aa, Homo sapiens
  CDR3 for alpha chain variable domain of TCR clone 104966 (TRAV17, TRAJ52)
CATGIIGGTSYGKRTF

SEQ ID NO: 209932 - protein, 12 aa, Homo sapiens
  CDR3 for beta chain variable domain of TCR clone 104966 (TRBV7-3, TRBJ2-1)
CASSFINNEQFF

SEQ ID NO: 209933 - protein, 14 aa, Homo sapiens
  CDR3 for alpha chain variable domain of TCR clone 104967 (TRAV12-2, TRAJ17)
CAVLFKAAGNKLTF

SEQ ID NO: 209934 - protein, 14 aa, Homo sapiens
  CDR3 for beta chain variable domain of TCR clone 104967 (TRBV2, TRBJ2-5)
CASKRDGTTETQYF

SEQ ID NO: 209935 - protein, 12 aa, Homo sapiens
  CDR3 for alpha chain variable domain of TCR clone 104968 (TRAV2, TRAJ31)
CTVEDNNARLMF

SEQ ID NO: 209936 - protein, 16 aa, Homo sapiens
  CDR3 for beta chain variable domain of TCR clone 104968 (TRBV10-3, TRBJ2-1)
CAISGVGDGGGGEQFF

SEQ ID NO: 209937 - protein, 12 aa, Homo sapiens
  CDR3 for alpha chain variable domain of TCR clone 104969 (TRAV21, TRAJ31)
CVLAGNNARLMF

SEQ ID NO: 209938 - protein, 15 aa, Homo sapiens
  CDR3 for beta chain variable domain of TCR clone 104969 (TRBV2, TRBJ2-1)
CASSEARSAYNEQFF

SEQ ID NO: 209939 - protein, 11 aa, Homo sapiens
  CDR3 for alpha chain variable domain of TCR clone 104970 (TRAV2, TRAJ13)
CASGGYQKVTF

SEQ ID NO: 209940 - protein, 14 aa, Homo sapiens
  CDR3 for beta chain variable domain of TCR clone 104970 (TRBV19, TRBJ2-1)
CTSSKDRGQDEQFF

SEQ ID NO: 209941 - protein, 16 aa, Homo sapiens
  CDR3 for alpha chain variable domain of TCR clone 104971 (TRAV17, TRAJ35)
CATAEGGIGFGNVLHC

SEQ ID NO: 209942 - protein, 16 aa, Homo sapiens
  CDR3 for beta chain variable domain of TCR clone 104971 (TRBV6-5, TRBJ2-7)
CASGSDPTSGFYEQYF

SEQ ID NO: 209943 - protein, 11 aa, Homo sapiens
  CDR3 for alpha chain variable domain of TCR clone 104972 (TRAV4, TRAJ23)
CLVAPGGKLIF

SEQ ID NO: 209944 - protein, 13 aa, Homo sapiens
  CDR3 for beta chain variable domain of TCR clone 104972 (TRBV15, TRBJ1-6)
CATSGGLNSPLHF

SEQ ID NO: 209945 - protein, 15 aa, Homo sapiens
  CDR3 for alpha chain variable domain of TCR clone 104973 (TRAV23/DV6, TRAJ53)
CAASFGGGSNYKLTF

SEQ ID NO: 209946 - protein, 15 aa, Homo sapiens
  CDR3 for beta chain variable domain of TCR clone 104973 (TRBV9, TRBJ1-6)
CASSVAGTGDSPLHF

SEQ ID NO: 209947 - protein, 16 aa, Homo sapiens
  CDR3 for alpha chain variable domain of TCR clone 104974 (TRAV8-4, TRAJ18)
CAVTANGGSTLGRLYF

SEQ ID NO: 209948 - protein, 14 aa, Homo sapiens
  CDR3 for beta chain variable domain of TCR clone 104974 (TRBV12-4, TRBJ1-2)
CAGSSAGHIYGYTF

SEQ ID NO: 209949 - protein, 16 aa, Homo sapiens
  CDR3 for alpha chain variable domain of TCR clone 104975 (TRAV27, TRAJ48)
TAAQPGDTGLYLPLTF

SEQ ID NO: 209950 - protein, 15 aa, Homo sapiens
  CDR3 for beta chain variable domain of TCR clone 104975 (TRBV7-9, TRBJ1-6)
CASSSPGRGNSPLHF

SEQ ID NO: 209951 - protein, 16 aa, Homo sapiens
  CDR3 for alpha chain variable domain of TCR clone 104976 (TRAV26-1, TRAJ53)
CIVRVAMGGSNYKLTF

SEQ ID NO: 209952 - protein, 12 aa, Homo sapiens
  CDR3 for beta chain variable domain of TCR clone 104976 (TRBV12-4, TRBJ2-7)
CASSLGGYEQYF

SEQ ID NO: 209953 - protein, 16 aa, Homo sapiens
  CDR3 for alpha chain variable domain of TCR clone 104977 (TRAV3, TRAJ40)
CAVRDRIASGTYKYIF

SEQ ID NO: 209954 - protein, 14 aa, Homo sapiens
  CDR3 for beta chain variable domain of TCR clone 104977 (TRBV7-3, TRBJ2-1)
CASSLAGGTNEQFF

SEQ ID NO: 209955 - protein, 13 aa, Homo sapiens
  CDR3 for alpha chain variable domain of TCR clone 104978 (TRAV21, TRAJ20)
CAVGVFADYKLSF

SEQ ID NO: 209956 - protein, 14 aa, Homo sapiens
  CDR3 for beta chain variable domain of TCR clone 104978 (TRBV4-2, TRBJ1-4)
CANSPSSGNEKLFF

SEQ ID NO: 209957 - protein, 15 aa, Homo sapiens
  CDR3 for alpha chain variable domain of TCR clone 104979 (TRAV12-3, TRAJ6)
CAMSATTGGSYIPTF

SEQ ID NO: 209958 - protein, 15 aa, Homo sapiens
  CDR3 for beta chain variable domain of TCR clone 104979 (TRBV7-6, TRBJ1-5)
CASSQSSGINQAQHF

SEQ ID NO: 209959 - protein, 13 aa, Homo sapiens
  CDR3 for alpha chain variable domain of TCR clone 104980 (TRAV8-3, TRAJ28)
CVVGAVGSYQLTF

SEQ ID NO: 209960 - protein, 15 aa, Homo sapiens
  CDR3 for beta chain variable domain of TCR clone 104980 (TRBV7-9, TRBJ1-5)
CASSQGHQPNQPQHF

SEQ ID NO: 209961 - protein, 13 aa, Homo sapiens
  CDR3 for alpha chain variable domain of TCR clone 104981 (TRAV12-2, TRAJ18)
CAVRGSTLGRLYF

SEQ ID NO: 209962 - protein, 20 aa, Homo sapiens
  CDR3 for beta chain variable domain of TCR clone 104981 (TRBV7-8, TRBJ2-2)
CASSHLFPGPTIHITGEPFF

SEQ ID NO: 209963 - protein, 14 aa, Homo sapiens
  CDR3 for alpha chain variable domain of TCR clone 104982 (TRAV2, TRAJ37)
CAVDFTSNTGKLIF

SEQ ID NO: 209964 - protein, 13 aa, Homo sapiens
  CDR3 for beta chain variable domain of TCR clone 104982 (TRBV20-1, TRBJ1-1)
CSAPLGGGTEAFY

SEQ ID NO: 209965 - protein, 14 aa, Homo sapiens
  CDR3 for alpha chain variable domain of TCR clone 104983 (TRAV2, TRAJ9)
CAVEDRSGGFKTIF

SEQ ID NO: 209966 - protein, 15 aa, Homo sapiens
  CDR3 for beta chain variable domain of TCR clone 104983 (TRBV12-4, TRBJ2-7)
CASSLGSGGPYEQYF

SEQ ID NO: 209967 - protein, 16 aa, Homo sapiens
  CDR3 for alpha chain variable domain of TCR clone 104984 (TRAV8-4, TRAJ18)
CAVSSDRGSTLGRLYF

SEQ ID NO: 209968 - protein, 13 aa, Homo sapiens
  CDR3 for beta chain variable domain of TCR clone 104984 (TRBV2, TRBJ1-4)
CASSERAGEKLFF

SEQ ID NO: 209969 - protein, 13 aa, Homo sapiens
  CDR3 for alpha chain variable domain of TCR clone 104985 (TRAV26-1, TRAJ48)
CIVRVVGDEKLTF

SEQ ID NO: 209970 - protein, 15 aa, Homo sapiens
  CDR3 for beta chain variable domain of TCR clone 104985 (TRBV5-1, TRBJ2-7)
CASSLNGGPAREQYF

SEQ ID NO: 209971 - protein, 16 aa, Homo sapiens
  CDR3 for alpha chain variable domain of TCR clone 104986 (TRAV30, TRAJ24)
CGTEIVDADSWWKFQF

SEQ ID NO: 209972 - protein, 15 aa, Homo sapiens
  CDR3 for beta chain variable domain of TCR clone 104986 (TRBV20-1, TRBJ2-7)
CSARDRVSGMDEQYF

SEQ ID NO: 209973 - protein, 12 aa, Homo sapiens
  CDR3 for alpha chain variable domain of TCR clone 104987 (TRAV13-1, TRAJ53)
AASGGSNYKLTF

SEQ ID NO: 209974 - protein, 12 aa, Homo sapiens
  CDR3 for beta chain variable domain of TCR clone 104987 (TRBV18, TRBJ1-4)
CASSPSRENLFF

SEQ ID NO: 209975 - protein, 12 aa, Homo sapiens
  CDR3 for alpha chain variable domain of TCR clone 104988 (TRAV16, TRAJ10)
CSRTGGGNKLTF

SEQ ID NO: 209976 - protein, 13 aa, Homo sapiens
  CDR3 for beta chain variable domain of TCR clone 104988 (TRBV15, TRBJ1-6)
CATSGGLNSPLHF

SEQ ID NO: 209977 - protein, 12 aa, Homo sapiens
  CDR3 for alpha chain variable domain of TCR clone 104989 (TRAV35, TRAJ39)
LAPNNAGNMLTF

SEQ ID NO: 209978 - protein, 14 aa, Homo sapiens
  CDR3 for beta chain variable domain of TCR clone 104989 (TRBV19, TRBJ2-1)
CASPTFVLSGEQFF

SEQ ID NO: 209979 - protein, 11 aa, Homo sapiens
  CDR3 for alpha chain variable domain of TCR clone 104990 (TRAV2, TRAJ4)
CAVGLYNKLIF

SEQ ID NO: 209980 - protein, 15 aa, Homo sapiens
  CDR3 for beta chain variable domain of TCR clone 104990 (TRBV7-2, TRBJ2-2)
CASSFQRGETGELFF

SEQ ID NO: 209981 - protein, 13 aa, Homo sapiens
  CDR3 for alpha chain variable domain of TCR clone 104991 (TRAV12-2, TRAJ20)
CAVYPSNDYKLSF

SEQ ID NO: 209982 - protein, 15 aa, Homo sapiens
  CDR3 for beta chain variable domain of TCR clone 104991 (TRBV12-4, TRBJ2-5)
CASSPPTGLQETQYF

SEQ ID NO: 209983 - protein, 16 aa, Homo sapiens
  CDR3 for alpha chain variable domain of TCR clone 104992 (TRAV17, TRAJ22)
CATGPISSGSARQLTF

SEQ ID NO: 209984 - protein, 13 aa, Homo sapiens
  CDR3 for beta chain variable domain of TCR clone 104992 (TRBV11-2, TRBJ2-1)
CARSLGLAGGRFF

SEQ ID NO: 209985 - protein, 12 aa, Homo sapiens
  CDR3 for alpha chain variable domain of TCR clone 104993 (TRAV1-2, TRAJ29)
CAVRNLNTPLVF

SEQ ID NO: 209986 - protein, 17 aa, Homo sapiens
  CDR3 for beta chain variable domain of TCR clone 104993 (TRBV7-8, TRBJ2-6)
CASSAGTGGAGANVLTF

SEQ ID NO: 209987 - protein, 13 aa, Homo sapiens
  CDR3 for alpha chain variable domain of TCR clone 104994 (TRAV12-2, TRAJ13)
CAVRSGGYQKVTF

SEQ ID NO: 209988 - protein, 15 aa, Homo sapiens
  CDR3 for beta chain variable domain of TCR clone 104994 (TRBV11-3, TRBJ2-1)
CASSLGDSSHNEQFF

SEQ ID NO: 209989 - protein, 14 aa, Homo sapiens
  CDR3 for alpha chain variable domain of TCR clone 104995 (TRAV1-2, TRAJ16)
CAVNRFSDGHKLLF

SEQ ID NO: 209990 - protein, 14 aa, Homo sapiens
  CDR3 for beta chain variable domain of TCR clone 104995 (TRBV7-9, TRBJ2-1)
CASSPRDSLYEQFF

SEQ ID NO: 209991 - protein, 14 aa, Homo sapiens
  CDR3 for alpha chain variable domain of TCR clone 104996 (TRAV12-2, TRAJ13)
CAVKKTGGYQKVTF

SEQ ID NO: 209992 - protein, 13 aa, Homo sapiens
  CDR3 for beta chain variable domain of TCR clone 104996 (TRBV24-1, TRBJ2-2)
CATSETNTGELFF

SEQ ID NO: 209993 - protein, 13 aa, Homo sapiens
  CDR3 for alpha chain variable domain of TCR clone 104997 (TRAV12-1, TRAJ40)
CVVPTSGAYKYIF

SEQ ID NO: 209994 - protein, 13 aa, Homo sapiens
  CDR3 for beta chain variable domain of TCR clone 104997 (TRBV4-2, TRBJ1-1)
CASSQAGNTEAFF

SEQ ID NO: 209995 - protein, 16 aa, Homo sapiens
  CDR3 for alpha chain variable domain of TCR clone 104998 (TRAV30, TRAJ24)
CGTEIVDADSWGRFQF

SEQ ID NO: 209996 - protein, 12 aa, Homo sapiens
  CDR3 for beta chain variable domain of TCR clone 104998 (TRBV11-2, TRBJ2-2)
CASSLPTGELFF

SEQ ID NO: 209997 - protein, 13 aa, Homo sapiens
  CDR3 for alpha chain variable domain of TCR clone 104999 (TRAV30, TRAJ20)
CGTEDRSDYRLSF

SEQ ID NO: 209998 - protein, 15 aa, Homo sapiens
  CDR3 for beta chain variable domain of TCR clone 104999 (TRBV2, TRBJ1-2)
CASTQVQDSNYGYTF

SEQ ID NO: 209999 - protein, 15 aa, Homo sapiens
  CDR3 for alpha chain variable domain of TCR clone 105000 (TRAV26-1, TRAJ44)
CIVRANTGTASKLTF

SEQ ID NO: 210000 - protein, 23 aa, Homo sapiens
  CDR3 for beta chain variable domain of TCR clone 105000 (TRBV2, TRBJ2-1)
CASRKGPSFLQLAVLRARDTAHR

SEQ ID NO: 210001 - protein, 15 aa, Homo sapiens
  CDR3 for alpha chain variable domain of TCR clone 105001 (TRAV25, TRAJ53)
CAATGGGGSNYKLTL

SEQ ID NO: 210002 - protein, 11 aa, Homo sapiens
  CDR3 for beta chain variable domain of TCR clone 105001 (TRBV11-3, TRBJ2-2)
CASSSGGELFF

SEQ ID NO: 210003 - protein, 14 aa, Homo sapiens
  CDR3 for alpha chain variable domain of TCR clone 105002 (TRAV3, TRAJ9)
CAVRLNTGGFKTIF

SEQ ID NO: 210004 - protein, 20 aa, Homo sapiens
  CDR3 for beta chain variable domain of TCR clone 105002 (TRBV28, TRBJ2-1)
CASTPIGRSPGLAGGNEQFF

SEQ ID NO: 210005 - protein, 17 aa, Homo sapiens
  CDR3 for alpha chain variable domain of TCR clone 105003 (TRAV13-1, TRAJ31)
CAPRDRLMFGDGTQLVM

SEQ ID NO: 210006 - protein, 12 aa, Homo sapiens
  CDR3 for beta chain variable domain of TCR clone 105003 (TRBV7-9, TRBJ2-7)
CASSLEGYEQYF

SEQ ID NO: 210007 - protein, 13 aa, Homo sapiens
  CDR3 for alpha chain variable domain of TCR clone 105004 (TRAV8-3, TRAJ28)
CAVGAVGGYQLTF

SEQ ID NO: 210008 - protein, 14 aa, Homo sapiens
  CDR3 for beta chain variable domain of TCR clone 105004 (TRBV4-1, TRBJ2-2)
CASSQAVNTGELFF

SEQ ID NO: 210009 - protein, 18 aa, Homo sapiens
  CDR3 for alpha chain variable domain of TCR clone 105005 (TRAV2, TRAJ32)
CCLLLCFHSGGATNKLIF

SEQ ID NO: 210010 - protein, 16 aa, Homo sapiens
  CDR3 for beta chain variable domain of TCR clone 105005 (TRBV7-9, TRBJ2-7)
CASSYPDREGGYEQYF

SEQ ID NO: 210011 - protein, 12 aa, Homo sapiens
  CDR3 for alpha chain variable domain of TCR clone 105006 (TRAV12-3, TRAJ17)
CAMTLTGNKLTF

SEQ ID NO: 210012 - protein, 15 aa, Homo sapiens
  CDR3 for beta chain variable domain of TCR clone 105006 (TRBV15, TRBJ1-5)
CATSRDPVSNQPQHF

SEQ ID NO: 210013 - protein, 14 aa, Homo sapiens
  CDR3 for alpha chain variable domain of TCR clone 105007 (TRAV12-2, TRAJ44)
CAVNPAGTASKLTF

SEQ ID NO: 210014 - protein, 14 aa, Homo sapiens
  CDR3 for beta chain variable domain of TCR clone 105007 (TRBV7-2, TRBJ1-3)
CASSRLRSGNTIYV

SEQ ID NO: 210015 - protein, 14 aa, Homo sapiens
  CDR3 for alpha chain variable domain of TCR clone 105008 (TRAV12-1, TRAJ42)
CVVIYGGSQGNLIF

SEQ ID NO: 210016 - protein, 14 aa, Homo sapiens
  CDR3 for beta chain variable domain of TCR clone 105008 (TRBV18, TRBJ2-5)
CASSPGVSQETQYF

SEQ ID NO: 210017 - protein, 14 aa, Homo sapiens
  CDR3 for alpha chain variable domain of TCR clone 105009 (TRAV12-3, TRAJ42)
CAMNYGGSQGNLIF

SEQ ID NO: 210018 - protein, 14 aa, Homo sapiens
  CDR3 for beta chain variable domain of TCR clone 105009 (TRBV5-1, TRBJ1-1)
CASSRTTGDTEAFF

SEQ ID NO: 210019 - protein, 16 aa, Homo sapiens
  CDR3 for alpha chain variable domain of TCR clone 105010 (TRAV20, TRAJ10)
CAVLRGLTGGGNKLTF

SEQ ID NO: 210020 - protein, 13 aa, Homo sapiens
  CDR3 for beta chain variable domain of TCR clone 105010 (TRBV12-5, TRBJ2-3)
CASGDRQSDTQYF

SEQ ID NO: 210021 - protein, 15 aa, Homo sapiens
  CDR3 for alpha chain variable domain of TCR clone 105011 (TRAV2, TRAJ9)
CAVEDRGTGGFKTIF

SEQ ID NO: 210022 - protein, 14 aa, Homo sapiens
  CDR3 for beta chain variable domain of TCR clone 105011 (TRBV19, TRBJ2-3)
CASSAPRGTDTQYF

SEQ ID NO: 210023 - protein, 13 aa, Homo sapiens
  CDR3 for alpha chain variable domain of TCR clone 105012 (TRAV14/DV4, TRAJ22)
CAVRDLSARQLTF

SEQ ID NO: 210024 - protein, 18 aa, Homo sapiens
  CDR3 for beta chain variable domain of TCR clone 105012 (TRBV19, TRBJ1-5)
CASSKGQVSIHSNQPQHF

SEQ ID NO: 210025 - protein, 18 aa, Homo sapiens
  CDR3 for alpha chain variable domain of TCR clone 105013 (TRAV13-1, TRAJ52)
FAAKNPNAGGTSYGKLTF

SEQ ID NO: 210026 - protein, 15 aa, Homo sapiens
  CDR3 for beta chain variable domain of TCR clone 105013 (TRBV6-1, TRBJ2-3)
CASSERGGITDTQYF

SEQ ID NO: 210027 - protein, 14 aa, Homo sapiens
  CDR3 for alpha chain variable domain of TCR clone 105014 (TRAV12-2, TRAJ38)
CAPQTAGNNRKLIW

SEQ ID NO: 210028 - protein, 18 aa, Homo sapiens
  CDR3 for beta chain variable domain of TCR clone 105014 (TRBV28, TRBJ1-3)
CASKTPVGQIGSGKTIYF

SEQ ID NO: 210029 - protein, 15 aa, Homo sapiens
  CDR3 for alpha chain variable domain of TCR clone 105015 (TRAV25, TRAJ52)
CAGRPGGTSYGKLTF

SEQ ID NO: 210030 - protein, 13 aa, Homo sapiens
  CDR3 for beta chain variable domain of TCR clone 105015 (TRBV19, TRBJ1-2)
CASSQGQVYGYTF

SEQ ID NO: 210031 - protein, 14 aa, Homo sapiens
  CDR3 for alpha chain variable domain of TCR clone 105016 (TRAV12-2, TRAJ44)
CAVNPAGTASKLTF

SEQ ID NO: 210032 - protein, 15 aa, Homo sapiens
  CDR3 for beta chain variable domain of TCR clone 105016 (TRBV7-2, TRBJ2-3)
CASSSTGLETDTQYF

SEQ ID NO: 210033 - protein, 15 aa, Homo sapiens
  CDR3 for alpha chain variable domain of TCR clone 105017 (TRAV13-1, TRAJ52)
FAATSPRTSYGKLTF

SEQ ID NO: 210034 - protein, 12 aa, Homo sapiens
  CDR3 for beta chain variable domain of TCR clone 105017 (TRBV7-8, TRBJ2-7)
CASSLGDREQYF

SEQ ID NO: 210035 - protein, 13 aa, Homo sapiens
  CDR3 for alpha chain variable domain of TCR clone 105018 (TRAV13-1, TRAJ21)
CAASIYNFNKFYF

SEQ ID NO: 210036 - protein, 14 aa, Homo sapiens
  CDR3 for beta chain variable domain of TCR clone 105018 (TRBV7-3, TRBJ2-1)
CASSLAGGTNEQFF

SEQ ID NO: 210037 - protein, 15 aa, Homo sapiens
  CDR3 for alpha chain variable domain of TCR clone 105019 (TRAV3, TRAJ21)
CAVREPDFNKFYLDL

SEQ ID NO: 210038 - protein, 13 aa, Homo sapiens
  CDR3 for beta chain variable domain of TCR clone 105019 (TRBV9, TRBJ2-1)
CASSPSGGNEQFF

SEQ ID NO: 210039 - protein, 17 aa, Homo sapiens
  CDR3 for alpha chain variable domain of TCR clone 105020 (TRAV1-1, TRAJ4)
CALYNKLIFGAGTRLAV

SEQ ID NO: 210040 - protein, 16 aa, Homo sapiens
  CDR3 for beta chain variable domain of TCR clone 105020 (TRBV7-3, TRBJ2-2)
CASSLKRGTLSGQLFF

SEQ ID NO: 210041 - protein, 13 aa, Homo sapiens
  CDR3 for alpha chain variable domain of TCR clone 105021 (TRAV21, TRAJ20)
CAVGLRVDYKLSF

SEQ ID NO: 210042 - protein, 16 aa, Homo sapiens
  CDR3 for beta chain variable domain of TCR clone 105021 (TRBV7-6, TRBJ2-2)
CASSPGLADYTGELFF

SEQ ID NO: 210043 - protein, 14 aa, Homo sapiens
  CDR3 for alpha chain variable domain of TCR clone 105022 (TRAV1-2, TRAJ16)
FAVNRFSDGQKLLF

SEQ ID NO: 210044 - protein, 12 aa, Homo sapiens
  CDR3 for beta chain variable domain of TCR clone 105022 (TRBV11-2, TRBJ2-2)
CASSLGGGELFF

SEQ ID NO: 210045 - protein, 13 aa, Homo sapiens
  CDR3 for alpha chain variable domain of TCR clone 105023 (TRAV3, TRAJ27)
CAVRPLGAGKSPF

SEQ ID NO: 210046 - protein, 15 aa, Homo sapiens
  CDR3 for beta chain variable domain of TCR clone 105023 (TRBV9, TRBJ1-6)
CASSVAGTGDSPLHF

SEQ ID NO: 210047 - protein, 12 aa, Homo sapiens
  CDR3 for alpha chain variable domain of TCR clone 105024 (TRAV21, TRAJ31)
CAVWGSNARLMF

SEQ ID NO: 210048 - protein, 16 aa, Homo sapiens
  CDR3 for beta chain variable domain of TCR clone 105024 (TRBV27, TRBJ2-5)
CASSYGPGGQKETQYF

SEQ ID NO: 210049 - protein, 13 aa, Homo sapiens
  CDR3 for alpha chain variable domain of TCR clone 105025 (TRAV2, TRAJ21)
CAVVDLNFNKFYF

SEQ ID NO: 210050 - protein, 15 aa, Homo sapiens
  CDR3 for beta chain variable domain of TCR clone 105025 (TRBV28, TRBJ2-5)
CASSPGQGSIETQYF

SEQ ID NO: 210051 - protein, 18 aa, Homo sapiens
  CDR3 for alpha chain variable domain of TCR clone 105026 (TRAV13-1, TRAJ52)
CAAKNPNAGGTSYGKLTF

SEQ ID NO: 210052 - protein, 16 aa, Homo sapiens
  CDR3 for beta chain variable domain of TCR clone 105026 (TRBV5-4, TRBJ2-1)
CASSLVGSGQDNEQFF

SEQ ID NO: 210053 - protein, 14 aa, Homo sapiens
  CDR3 for alpha chain variable domain of TCR clone 105027 (TRAV13-1, TRAJ10)
CAAKEPGGGNKRTF

SEQ ID NO: 210054 - protein, 15 aa, Homo sapiens
  CDR3 for beta chain variable domain of TCR clone 105027 (TRBV27, TRBJ2-1)
CASSNGGGSSNEQFF

SEQ ID NO: 210055 - protein, 13 aa, Homo sapiens
  CDR3 for alpha chain variable domain of TCR clone 105028 (TRAV8-3, TRAJ28)
CAVGAVGSYQLTF

SEQ ID NO: 210056 - protein, 15 aa, Homo sapiens
  CDR3 for beta chain variable domain of TCR clone 105028 (TRBV19, TRBJ1-1)
CASTSGQIQNTEAFF

SEQ ID NO: 210057 - protein, 23 aa, Homo sapiens
  CDR3 for alpha chain variable domain of TCR clone 105029 (TRAV26-1, TRAJ38)
CIADNAGNNHIQNPDPAVYQLRD

SEQ ID NO: 210058 - protein, 13 aa, Homo sapiens
  CDR3 for beta chain variable domain of TCR clone 105029 (TRBV20-1, TRBJ1-1)
CSARVGGNTEAFF

SEQ ID NO: 210059 - protein, 14 aa, Homo sapiens
  CDR3 for alpha chain variable domain of TCR clone 105030 (TRAV12-2, TRAJ13)
CAVKKTGGCQKVTF

SEQ ID NO: 210060 - protein, 11 aa, Homo sapiens
  CDR3 for beta chain variable domain of TCR clone 105030 (TRBV12-4, TRBJ2-3)
CASTATDTQYF

SEQ ID NO: 210061 - protein, 15 aa, Homo sapiens
  CDR3 for alpha chain variable domain of TCR clone 105031 (TRAV3, TRAJ4)
CAVRDGTGRYNKLIF

SEQ ID NO: 210062 - protein, 16 aa, Homo sapiens
  CDR3 for beta chain variable domain of TCR clone 105031 (TRBV27, TRBJ2-2)
CASSSSGVSNTGELFF

SEQ ID NO: 210063 - protein, 15 aa, Homo sapiens
  CDR3 for alpha chain variable domain of TCR clone 105032 (TRAV13-1, TRAJ44)
CAASRGGGTASKLTF

SEQ ID NO: 210064 - protein, 14 aa, Homo sapiens
  CDR3 for beta chain variable domain of TCR clone 105032 (TRBV4-1, TRBJ2-2)
CASSQAVNTGELFF

SEQ ID NO: 210065 - protein, 14 aa, Homo sapiens
  CDR3 for alpha chain variable domain of TCR clone 105033 (TRAV36/DV7, TRAJ44)
CRGANTGTASKLTF

SEQ ID NO: 210066 - protein, 14 aa, Homo sapiens
  CDR3 for beta chain variable domain of TCR clone 105033 (TRBV7-9, TRBJ1-4)
CAITEGEANEKLFF

SEQ ID NO: 210067 - protein, 14 aa, Homo sapiens
  CDR3 for alpha chain variable domain of TCR clone 105034 (TRAV1-2, TRAJ8)
CAVREDTGFQKLVF

SEQ ID NO: 210068 - protein, 12 aa, Homo sapiens
  CDR3 for beta chain variable domain of TCR clone 105034 (TRBV7-6, TRBJ2-7)
CASSLDPVEQYF

SEQ ID NO: 210069 - protein, 14 aa, Homo sapiens
  CDR3 for alpha chain variable domain of TCR clone 105035 (TRAV16, TRAJ39)
CALSKNNAGNMLTF

SEQ ID NO: 210070 - protein, 16 aa, Homo sapiens
  CDR3 for beta chain variable domain of TCR clone 105035 (TRBV7-9, TRBJ2-2)
CASSGFGGANTGELFF

SEQ ID NO: 210071 - protein, 15 aa, Homo sapiens
  CDR3 for alpha chain variable domain of TCR clone 105036 (TRAV26-1, TRAJ52)
CIVSDLGTSYGKLTF

SEQ ID NO: 210072 - protein, 14 aa, Homo sapiens
  CDR3 for beta chain variable domain of TCR clone 105036 (TRBV28, TRBJ2-2)
CASSMQGYTGELFF

SEQ ID NO: 210073 - protein, 16 aa, Homo sapiens
  CDR3 for alpha chain variable domain of TCR clone 105037 (TRAV1-1, TRAJ28)
FAVRDDSGAGSYQLTF

SEQ ID NO: 210074 - protein, 12 aa, Homo sapiens
  CDR3 for beta chain variable domain of TCR clone 105037 (TRBV11-2, TRBJ2-5)
CASSLDTQTQYF

SEQ ID NO: 210075 - protein, 13 aa, Homo sapiens
  CDR3 for alpha chain variable domain of TCR clone 105038 (TRAV26-1, TRAJ33)
CIVRVDSNYQLIL

SEQ ID NO: 210076 - protein, 15 aa, Homo sapiens
  CDR3 for beta chain variable domain of TCR clone 105038 (TRBV7-2, TRBJ1-5)
CASSFSAGINQPQHF

SEQ ID NO: 210077 - protein, 16 aa, Homo sapiens
  CDR3 for alpha chain variable domain of TCR clone 105039 (TRAV12-1, TRAJ45)
CVVIRYSGGGADGLTF

SEQ ID NO: 210078 - protein, 15 aa, Homo sapiens
  CDR3 for beta chain variable domain of TCR clone 105039 (TRBV2, TRBJ2-1)
CASSELAGSYNEQFF

SEQ ID NO: 210079 - protein, 15 aa, Homo sapiens
  CDR3 for alpha chain variable domain of TCR clone 105040 (TRAV21, TRAJ32)
CAVNSYGGATNKLIF

SEQ ID NO: 210080 - protein, 18 aa, Homo sapiens
  CDR3 for beta chain variable domain of TCR clone 105040 (TRBV7-9, TRBJ2-1)
CAISTGLAEGSSYNEQFF

SEQ ID NO: 210081 - protein, 12 aa, Homo sapiens
  CDR3 for alpha chain variable domain of TCR clone 105041 (TRAV12-1, TRAJ40)
CVVYSGTYKYIF

SEQ ID NO: 210082 - protein, 15 aa, Homo sapiens
  CDR3 for beta chain variable domain of TCR clone 105041 (TRBV7-3, TRBJ2-1)
CASSPTGGGEVEQFF

SEQ ID NO: 210083 - protein, 14 aa, Homo sapiens
  CDR3 for alpha chain variable domain of TCR clone 105042 (TRAV12-1, TRAJ17)
RVVSYKAAGNKLTF

SEQ ID NO: 210084 - protein, 17 aa, Homo sapiens
  CDR3 for beta chain variable domain of TCR clone 105042 (TRBV20-1, TRBJ2-1)
CSASSSGLAGSYNEQFF

SEQ ID NO: 210085 - protein, 13 aa, Homo sapiens
  CDR3 for alpha chain variable domain of TCR clone 105043 (TRAV27, TRAJ3)
ASLRGSSASKIIF

SEQ ID NO: 210086 - protein, 15 aa, Homo sapiens
  CDR3 for beta chain variable domain of TCR clone 105043 (TRBV28, TRBJ1-3)
CVSSMGWASGNTIYF

SEQ ID NO: 210087 - protein, 14 aa, Homo sapiens
  CDR3 for alpha chain variable domain of TCR clone 105044 (TRAV1-2, TRAJ16)
CAVYRFSDGQKLLF

SEQ ID NO: 210088 - protein, 14 aa, Homo sapiens
  CDR3 for beta chain variable domain of TCR clone 105044 (TRBV7-3, TRBJ1-1)
CASSLGTGYTEAFF

SEQ ID NO: 210089 - protein, 15 aa, Homo sapiens
  CDR3 for alpha chain variable domain of TCR clone 105045 (TRAV20, TRAJ23)
CAVQAVRNPGGKLIF

SEQ ID NO: 210090 - protein, 16 aa, Homo sapiens
  CDR3 for beta chain variable domain of TCR clone 105045 (TRBV27, TRBJ2-7)
CASSKQGRGWAYEQYF

SEQ ID NO: 210091 - protein, 15 aa, Homo sapiens
  CDR3 for alpha chain variable domain of TCR clone 105046 (TRAV13-2, TRAJ42)
CAERPYGGSQGNLIF

SEQ ID NO: 210092 - protein, 13 aa, Homo sapiens
  CDR3 for beta chain variable domain of TCR clone 105046 (TRBV12-4, TRBJ1-2)
CASSLRQGKGYTF

SEQ ID NO: 210093 - protein, 14 aa, Homo sapiens
  CDR3 for alpha chain variable domain of TCR clone 105047 (TRAV1-2, TRAJ16)
CAVNRFSDGQKLPF

SEQ ID NO: 210094 - protein, 15 aa, Homo sapiens
  CDR3 for beta chain variable domain of TCR clone 105047 (TRBV19, TRBJ1-5)
CASSIVWADNQPQHF

SEQ ID NO: 210095 - protein, 13 aa, Homo sapiens
  CDR3 for alpha chain variable domain of TCR clone 105048 (TRAV12-2, TRAJ20)
CAVYPSNDYKLSF

SEQ ID NO: 210096 - protein, 12 aa, Homo sapiens
  CDR3 for beta chain variable domain of TCR clone 105048 (TRBV7-9, TRBJ2-7)
CASSIKREEQYF

SEQ ID NO: 210097 - protein, 12 aa, Homo sapiens
  CDR3 for alpha chain variable domain of TCR clone 105049 (TRAV16, TRAJ27)
CALNTNAGKSTF

SEQ ID NO: 210098 - protein, 12 aa, Homo sapiens
  CDR3 for beta chain variable domain of TCR clone 105049 (TRBV29-1, TRBJ2-3)
CSVTGGADTQYF

SEQ ID NO: 210099 - protein, 15 aa, Homo sapiens
  CDR3 for alpha chain variable domain of TCR clone 105050 (TRAV3, TRAJ22)
CAVGDRGGSARQLTF

SEQ ID NO: 210100 - protein, 16 aa, Homo sapiens
  CDR3 for beta chain variable domain of TCR clone 105050 (TRBV4-2, TRBJ2-4)
CASSQELRRAKNIQYF

SEQ ID NO: 210101 - protein, 13 aa, Homo sapiens
  CDR3 for alpha chain variable domain of TCR clone 105051 (TRAV3, TRAJ4)
CAVRDGGYNKLIF

SEQ ID NO: 210102 - protein, 15 aa, Homo sapiens
  CDR3 for beta chain variable domain of TCR clone 105051 (TRBV5-1, TRBJ2-1)
YASSPPRAPYNEQFF

SEQ ID NO: 210103 - protein, 12 aa, Homo sapiens
  CDR3 for alpha chain variable domain of TCR clone 105052 (TRAV12-1, TRAJ17)
CAMTLTGNKLTF

SEQ ID NO: 210104 - protein, 14 aa, Homo sapiens
  CDR3 for beta chain variable domain of TCR clone 105052 (TRBV28, TRBJ2-1)
CASSPSTGYNEQFF

SEQ ID NO: 210105 - protein, 12 aa, Homo sapiens
  CDR3 for alpha chain variable domain of TCR clone 105053 (TRAV17, TRAJ57)
CATDGGSEKLVF

SEQ ID NO: 210106 - protein, 13 aa, Homo sapiens
  CDR3 for beta chain variable domain of TCR clone 105053 (TRBV7-9, TRBJ2-7)
CDSSFAGAYEQYF

SEQ ID NO: 210107 - protein, 13 aa, Homo sapiens
  CDR3 for alpha chain variable domain of TCR clone 105054 (TRAV12-2, TRAJ43)
SATYNCDGDDMRF

SEQ ID NO: 210108 - protein, 16 aa, Homo sapiens
  CDR3 for beta chain variable domain of TCR clone 105054 (TRBV2, TRBJ2-4)
CASSEAPGGEQNIQYF

SEQ ID NO: 210109 - protein, 13 aa, Homo sapiens
  CDR3 for alpha chain variable domain of TCR clone 105055 (TRAV26-1, TRAJ29)
CIVRRSGNTSLVF

SEQ ID NO: 210110 - protein, 16 aa, Homo sapiens
  CDR3 for beta chain variable domain of TCR clone 105055 (TRBV11-2, TRBJ2-7)
CASSLAPTGVNYEQYF

SEQ ID NO: 210111 - protein, 14 aa, Homo sapiens
  CDR3 for alpha chain variable domain of TCR clone 105056 (TRAV1-2, TRAJ16)
CAVNRFSDGQKLLF

SEQ ID NO: 210112 - protein, 15 aa, Homo sapiens
  CDR3 for beta chain variable domain of TCR clone 105056 (TRBV27, TRBJ2-7)
CASSTAGTGSYEQYF

SEQ ID NO: 210113 - protein, 14 aa, Homo sapiens
  CDR3 for alpha chain variable domain of TCR clone 105057 (TRAV2, TRAJ9)
CVVEDRSGGFKTIF

SEQ ID NO: 210114 - protein, 13 aa, Homo sapiens
  CDR3 for beta chain variable domain of TCR clone 105057 (TRBV12-4, TRBJ1-5)
CASSPDRAQPQHF

SEQ ID NO: 210115 - protein, 15 aa, Homo sapiens
  CDR3 for alpha chain variable domain of TCR clone 105058 (TRAV26-1, TRAJ29)
CIVRVEGSGNTPLVF

SEQ ID NO: 210116 - protein, 19 aa, Homo sapiens
  CDR3 for beta chain variable domain of TCR clone 105058 (TRBV4-1, TRBJ2-4)
CASSQDLGQGAGAKNIQYF

SEQ ID NO: 210117 - protein, 11 aa, Homo sapiens
  CDR3 for alpha chain variable domain of TCR clone 105059 (TRAV12-3, TRAJ43)
CAMSVSNDMRF

SEQ ID NO: 210118 - protein, 13 aa, Homo sapiens
  CDR3 for beta chain variable domain of TCR clone 105059 (TRBV27, TRBJ2-7)
CASSFSQGYEQYF

SEQ ID NO: 210119 - protein, 15 aa, Homo sapiens
  CDR3 for alpha chain variable domain of TCR clone 105060 (TRAV13-1, TRAJ4)
CAESLISGGYNKLIF

SEQ ID NO: 210120 - protein, 15 aa, Homo sapiens
  CDR3 for beta chain variable domain of TCR clone 105060 (TRBV28, TRBJ2-3)
CASTPRGENTDTQYF

SEQ ID NO: 210121 - protein, 15 aa, Homo sapiens
  CDR3 for alpha chain variable domain of TCR clone 105061 (TRAV3, TRAJ3)
CAVRDRRSSAPKIIF

SEQ ID NO: 210122 - protein, 13 aa, Homo sapiens
  CDR3 for beta chain variable domain of TCR clone 105061 (TRBV9, TRBJ2-5)
CASSPAGLGTQYF

SEQ ID NO: 210123 - protein, 12 aa, Homo sapiens
  CDR3 for alpha chain variable domain of TCR clone 105062 (TRAV12-3, TRAJ40)
CAMSSGTYKYIF

SEQ ID NO: 210124 - protein, 20 aa, Homo sapiens
  CDR3 for beta chain variable domain of TCR clone 105062 (TRBV7-8, TRBJ2-2)
CANSHLFPGPTIHITGELFF

SEQ ID NO: 210125 - protein, 12 aa, Homo sapiens
  CDR3 for alpha chain variable domain of TCR clone 105063 (TRAV13-1, TRAJ49)
CAASPMGNQFHF

SEQ ID NO: 210126 - protein, 13 aa, Homo sapiens
  CDR3 for beta chain variable domain of TCR clone 105063 (TRBV20-1, TRBJ2-2)
CSASAAGTGELFF

SEQ ID NO: 210127 - protein, 14 aa, Homo sapiens
  CDR3 for alpha chain variable domain of TCR clone 105064 (TRAV4, TRAJ17)
CLVGPQAAGNKLTF

SEQ ID NO: 210128 - protein, 15 aa, Homo sapiens
  CDR3 for beta chain variable domain of TCR clone 105064 (TRBV6-5, TRBJ2-1)
CASSYDAGAGNEQFF

SEQ ID NO: 210129 - protein, 14 aa, Homo sapiens
  CDR3 for alpha chain variable domain of TCR clone 105065 (TRAV12-2, TRAJ40)
CAVKIPSGTYKYIF

SEQ ID NO: 210130 - protein, 15 aa, Homo sapiens
  CDR3 for beta chain variable domain of TCR clone 105065 (TRBV7-9, TRBJ1-4)
CASSARTGGNEKLFF

SEQ ID NO: 210131 - protein, 16 aa, Homo sapiens
  CDR3 for alpha chain variable domain of TCR clone 105066 (TRAV8-3, TRAJ10)
CAVGPGVTGGGTKLTF

SEQ ID NO: 210132 - protein, 13 aa, Homo sapiens
  CDR3 for beta chain variable domain of TCR clone 105066 (TRBV18, TRBJ1-1)
CASSPGPSGEAFF

SEQ ID NO: 210133 - protein, 14 aa, Homo sapiens
  CDR3 for alpha chain variable domain of TCR clone 105067 (TRAV20, TRAJ56)
CAVQFGGANSKLTF

SEQ ID NO: 210134 - protein, 15 aa, Homo sapiens
  CDR3 for beta chain variable domain of TCR clone 105067 (TRBV15, TRBJ1-4)
CATSRDMGSYEKLFF

SEQ ID NO: 210135 - protein, 14 aa, Homo sapiens
  CDR3 for alpha chain variable domain of TCR clone 105068 (TRAV1-2, TRAJ16)
CAVNRFSDGHKLLF

SEQ ID NO: 210136 - protein, 13 aa, Homo sapiens
  CDR3 for beta chain variable domain of TCR clone 105068 (TRBV20-1, TRBJ1-1)
CSARGGGNTEAFF

SEQ ID NO: 210137 - protein, 14 aa, Homo sapiens
  CDR3 for alpha chain variable domain of TCR clone 105069 (TRAV13-1, TRAJ44)
CAAKATGTASKLTF

SEQ ID NO: 210138 - protein, 13 aa, Homo sapiens
  CDR3 for beta chain variable domain of TCR clone 105069 (TRBV5-5, TRBJ1-2)
CASSVWRGEDYAF

SEQ ID NO: 210139 - protein, 14 aa, Homo sapiens
  CDR3 for alpha chain variable domain of TCR clone 105070 (TRAV13-2, TRAJ6)
CAERGSGGSYIPTF

SEQ ID NO: 210140 - protein, 14 aa, Homo sapiens
  CDR3 for beta chain variable domain of TCR clone 105070 (TRBV19, TRBJ2-1)
CASPTFVLSGEQFF

SEQ ID NO: 210141 - protein, 16 aa, Homo sapiens
  CDR3 for alpha chain variable domain of TCR clone 105071 (TRAV12-2, TRAJ32)
CAVNLGQGGATNKLIF

SEQ ID NO: 210142 - protein, 13 aa, Homo sapiens
  CDR3 for beta chain variable domain of TCR clone 105071 (TRBV13, TRBJ2-5)
CASREQGGKTQYF

SEQ ID NO: 210143 - protein, 15 aa, Homo sapiens
  CDR3 for alpha chain variable domain of TCR clone 105072 (TRAV8-3, TRAJ11)
CAVGLLNSGYSTLTI

SEQ ID NO: 210144 - protein, 16 aa, Homo sapiens
  CDR3 for beta chain variable domain of TCR clone 105072 (TRBV7-9, TRBJ1-2)
CASSLGFSSGEDGYTF

SEQ ID NO: 210145 - protein, 12 aa, Homo sapiens
  CDR3 for alpha chain variable domain of TCR clone 105073 (TRAV2, TRAJ31)
CAVEDNNARLMF

SEQ ID NO: 210146 - protein, 13 aa, Homo sapiens
  CDR3 for beta chain variable domain of TCR clone 105073 (TRBV7-2, TRBJ2-2)
CASSLAVTGELFF

SEQ ID NO: 210147 - protein, 16 aa, Homo sapiens
  CDR3 for alpha chain variable domain of TCR clone 105074 (TRAV26-1, TRAJ45)
CIVEKYSGGGADGLTF

SEQ ID NO: 210148 - protein, 14 aa, Homo sapiens
  CDR3 for beta chain variable domain of TCR clone 105074 (TRBV4-2, TRBJ2-1)
CASGLDRAYNEQFF

SEQ ID NO: 210149 - protein, 11 aa, Homo sapiens
  CDR3 for alpha chain variable domain of TCR clone 105075 (TRAV13-1, TRAJ39)
CASHAGNMLTF

SEQ ID NO: 210150 - protein, 14 aa, Homo sapiens
  CDR3 for beta chain variable domain of TCR clone 105075 (TRBV11-3, TRBJ1-5)
CASSLDRGRQPQHF

SEQ ID NO: 210151 - protein, 14 aa, Homo sapiens
  CDR3 for alpha chain variable domain of TCR clone 105076 (TRAV13-2, TRAJ23)
CAENKSNQGGKLIF

SEQ ID NO: 210152 - protein, 15 aa, Homo sapiens
  CDR3 for beta chain variable domain of TCR clone 105076 (TRBV19, TRBJ2-4)
CASRGPRRGENIQYF

SEQ ID NO: 210153 - protein, 14 aa, Homo sapiens
  CDR3 for alpha chain variable domain of TCR clone 105077 (TRAV13-1, TRAJ44)
CAAKATGTASKLTF

SEQ ID NO: 210154 - protein, 15 aa, Homo sapiens
  CDR3 for beta chain variable domain of TCR clone 105077 (TRBV7-9, TRBJ1-4)
CASSRTGGFNEKLFF

SEQ ID NO: 210155 - protein, 15 aa, Homo sapiens
  CDR3 for alpha chain variable domain of TCR clone 105078 (TRAV20, TRAJ23)
CAVQAVRNQGGKLIF

SEQ ID NO: 210156 - protein, 18 aa, Homo sapiens
  CDR3 for beta chain variable domain of TCR clone 105078 (TRBV4-1, TRBJ1-6)
CASSQWDKKIIHPSTLRT

SEQ ID NO: 210157 - protein, 17 aa, Homo sapiens
  CDR3 for alpha chain variable domain of TCR clone 105079 (TRAV26-1, TRAJ53)
CIVRVDDSGGSNYKLTF

SEQ ID NO: 210158 - protein, 15 aa, Homo sapiens
  CDR3 for beta chain variable domain of TCR clone 105079 (TRBV20-1, TRBJ2-7)
CSARVPDAYFYEQYF

SEQ ID NO: 210159 - protein, 22 aa, Homo sapiens
  CDR3 for alpha chain variable domain of TCR clone 105080 (TRAV8-4, TRAJ9)
CAVRINTGGFKLSLEQEQDYLL

SEQ ID NO: 210160 - protein, 15 aa, Homo sapiens
  CDR3 for beta chain variable domain of TCR clone 105080 (TRBV10-2, TRBJ2-6)
CASSEQGTGANVLTF

SEQ ID NO: 210161 - protein, 14 aa, Homo sapiens
  CDR3 for alpha chain variable domain of TCR clone 105081 (TRAV13-1, TRAJ24)
CAASPADSWGKFQF

SEQ ID NO: 210162 - protein, 13 aa, Homo sapiens
  CDR3 for beta chain variable domain of TCR clone 105081 (TRBV19, TRBJ2-7)
CASRKAGGSEQYF

SEQ ID NO: 210163 - protein, 16 aa, Homo sapiens
  CDR3 for alpha chain variable domain of TCR clone 105082 (TRAV14/DV4, TRAJ21)
CAMREGPENNFNNFYF

SEQ ID NO: 210164 - protein, 12 aa, Homo sapiens
  CDR3 for beta chain variable domain of TCR clone 105082 (TRBV29-1, TRBJ2-2)
CSVDKYTGELFF

SEQ ID NO: 210165 - protein, 16 aa, Homo sapiens
  CDR3 for alpha chain variable domain of TCR clone 105083 (TRAV21, TRAJ45)
CAVSWGSGGGADGLTF

SEQ ID NO: 210166 - protein, 14 aa, Homo sapiens
  CDR3 for beta chain variable domain of TCR clone 105083 (TRBV4-3, TRBJ1-2)
CASSPGGSNYGYTF

SEQ ID NO: 210167 - protein, 19 aa, Homo sapiens
  CDR3 for alpha chain variable domain of TCR clone 105084 (TRAV2, TRAJ20)
ILQVREADAAVYRDCKLSV

SEQ ID NO: 210168 - protein, 15 aa, Homo sapiens
  CDR3 for beta chain variable domain of TCR clone 105084 (TRBV4-1, TRBJ1-4)
CASSDTGGTNEKLFF

SEQ ID NO: 210169 - protein, 13 aa, Homo sapiens
  CDR3 for alpha chain variable domain of TCR clone 105085 (TRAV13-2, TRAJ53)
CAENMGSNYKLTF

SEQ ID NO: 210170 - protein, 13 aa, Homo sapiens
  CDR3 for beta chain variable domain of TCR clone 105085 (TRBV4-1, TRBJ2-2)
FASSQENTGELFF

SEQ ID NO: 210171 - protein, 18 aa, Homo sapiens
  CDR3 for alpha chain variable domain of TCR clone 105086 (TRAV26-1, TRAJ23)
CIVRVGLEVWNQGGKLIF

SEQ ID NO: 210172 - protein, 17 aa, Homo sapiens
  CDR3 for beta chain variable domain of TCR clone 105086 (TRBV5-1, TRBJ2-5)
CASSPVALGQNQETQYF

SEQ ID NO: 210173 - protein, 11 aa, Homo sapiens
  CDR3 for alpha chain variable domain of TCR clone 105087 (TRAV35, TRAJ12)
RRMDSSYKLIF

SEQ ID NO: 210174 - protein, 17 aa, Homo sapiens
  CDR3 for beta chain variable domain of TCR clone 105087 (TRBV20-1, TRBJ2-2)
CSASGSGQGGLTGELFF

SEQ ID NO: 210175 - protein, 15 aa, Homo sapiens
  CDR3 for alpha chain variable domain of TCR clone 105088 (TRAV21, TRAJ53)
CATLNSGGSSYKLTF

SEQ ID NO: 210176 - protein, 15 aa, Homo sapiens
  CDR3 for beta chain variable domain of TCR clone 105088 (TRBV18, TRBJ2-1)
CASSPPSASYNEQFF

SEQ ID NO: 210177 - protein, 15 aa, Homo sapiens
  CDR3 for alpha chain variable domain of TCR clone 105089 (TRAV17, TRAJ56)
CATEPFTGANSKLTF

SEQ ID NO: 210178 - protein, 14 aa, Homo sapiens
  CDR3 for beta chain variable domain of TCR clone 105089 (TRBV19, TRBJ2-1)
CASPTFVVSGEQFF

SEQ ID NO: 210179 - protein, 14 aa, Homo sapiens
  CDR3 for alpha chain variable domain of TCR clone 105090 (TRAV1-2, TRAJ16)
CAVNRFSDCQKLLF

SEQ ID NO: 210180 - protein, 17 aa, Homo sapiens
  CDR3 for beta chain variable domain of TCR clone 105090 (TRBV7-8, TRBJ2-6)
CASSAGTGGAGANVLTF

SEQ ID NO: 210181 - protein, 16 aa, Homo sapiens
  CDR3 for alpha chain variable domain of TCR clone 105091 (TRAV4, TRAJ5)
CLVGPDHGHGQERTYF

SEQ ID NO: 210182 - protein, 15 aa, Homo sapiens
  CDR3 for beta chain variable domain of TCR clone 105091 (TRBV27, TRBJ2-5)
CASSLIPSGGETQYF

SEQ ID NO: 210183 - protein, 13 aa, Homo sapiens
  CDR3 for alpha chain variable domain of TCR clone 105092 (TRAV16, TRAJ34)
FALTGYNTDKLIF

SEQ ID NO: 210184 - protein, 13 aa, Homo sapiens
  CDR3 for beta chain variable domain of TCR clone 105092 (TRBV6-1, TRBJ2-1)
CASREDGGHEQFF

SEQ ID NO: 210185 - protein, 15 aa, Homo sapiens
  CDR3 for alpha chain variable domain of TCR clone 105093 (TRAV4, TRAJ42)
CLVGGYGGSQGNRIF

SEQ ID NO: 210186 - protein, 16 aa, Homo sapiens
  CDR3 for beta chain variable domain of TCR clone 105093 (TRBV27, TRBJ1-1)
CASSTRTGGVGTEAFF

SEQ ID NO: 210187 - protein, 14 aa, Homo sapiens
  CDR3 for alpha chain variable domain of TCR clone 105094 (TRAV12-1, TRAJ13)
CVVIDSGGYQKVTF

SEQ ID NO: 210188 - protein, 13 aa, Homo sapiens
  CDR3 for beta chain variable domain of TCR clone 105094 (TRBV4-2, TRBJ1-1)
CASSQAGNTEAFF

SEQ ID NO: 210189 - protein, 14 aa, Homo sapiens
  CDR3 for alpha chain variable domain of TCR clone 105095 (TRAV40, TRAJ41)
CLLGPPNSGNALNF

SEQ ID NO: 210190 - protein, 11 aa, Homo sapiens
  CDR3 for beta chain variable domain of TCR clone 105095 (TRBV19, TRBJ2-7)
CASSILGEQYF

SEQ ID NO: 210191 - protein, 16 aa, Homo sapiens
  CDR3 for alpha chain variable domain of TCR clone 105096 (TRAV8-4, TRAJ27)
CAVKEGGFTNAGKSTF

SEQ ID NO: 210192 - protein, 12 aa, Homo sapiens
  CDR3 for beta chain variable domain of TCR clone 105096 (TRBV28, TRBJ2-3)
CASSLYRDTQYF

SEQ ID NO: 210193 - protein, 19 aa, Homo sapiens
  CDR3 for alpha chain variable domain of TCR clone 105097 (TRAV26-1, TRAJ52)
CIVRAHRDAGGTSYGKLTF

SEQ ID NO: 210194 - protein, 15 aa, Homo sapiens
  CDR3 for beta chain variable domain of TCR clone 105097 (TRBV12-4, TRBJ2-5)
CASSPPTGLQETQYF

SEQ ID NO: 210195 - protein, 16 aa, Homo sapiens
  CDR3 for alpha chain variable domain of TCR clone 105098 (TRAV4, TRAJ22)
CLVGDLYSGSARQLTF

SEQ ID NO: 210196 - protein, 16 aa, Homo sapiens
  CDR3 for beta chain variable domain of TCR clone 105098 (TRBV7-9, TRBJ2-3)
CASSTWREVGTDTQYF

SEQ ID NO: 210197 - protein, 14 aa, Homo sapiens
  CDR3 for alpha chain variable domain of TCR clone 105099 (TRAV17, TRAJ11)
CATDTSRGYSTLTF

SEQ ID NO: 210198 - protein, 13 aa, Homo sapiens
  CDR3 for beta chain variable domain of TCR clone 105099 (TRBV7-9, TRBJ2-3)
CASSPGSTDTQYF

SEQ ID NO: 210199 - protein, 15 aa, Homo sapiens
  CDR3 for alpha chain variable domain of TCR clone 105100 (TRAV12-2, TRAJ20)
CAVKGGLGAGTTVTV

SEQ ID NO: 210200 - protein, 13 aa, Homo sapiens
  CDR3 for beta chain variable domain of TCR clone 105100 (TRBV12-4, TRBJ2-7)
CASSPGQLYEQYF

SEQ ID NO: 210201 - protein, 14 aa, Homo sapiens
  CDR3 for alpha chain variable domain of TCR clone 105101 (TRAV1-2, TRAJ16)
CAVNRFSDGQKLLF

SEQ ID NO: 210202 - protein, 17 aa, Homo sapiens
  CDR3 for beta chain variable domain of TCR clone 105101 (TRBV13, TRBJ2-3)
CASSLSRVAGGRNTQCF

SEQ ID NO: 210203 - protein, 14 aa, Homo sapiens
  CDR3 for alpha chain variable domain of TCR clone 105102 (TRAV3, TRAJ33)
CAVRDMGSNYQLIW

SEQ ID NO: 210204 - protein, 15 aa, Homo sapiens
  CDR3 for beta chain variable domain of TCR clone 105102 (TRBV20-1, TRBJ2-7)
CSARGPLAGGREQYF

SEQ ID NO: 210205 - protein, 10 aa, Homo sapiens
  CDR3 for alpha chain variable domain of TCR clone 105103 (TRAV2, TRAJ34)
CAVVNDKLIF

SEQ ID NO: 210206 - protein, 15 aa, Homo sapiens
  CDR3 for beta chain variable domain of TCR clone 105103 (TRBV3-1, TRBJ2-2)
CASSQDWTRAGELFC

SEQ ID NO: 210207 - protein, 13 aa, Homo sapiens
  CDR3 for alpha chain variable domain of TCR clone 105104 (TRAV13-1, TRAJ10)
CAALEGGGNKLTF

SEQ ID NO: 210208 - protein, 16 aa, Homo sapiens
  CDR3 for beta chain variable domain of TCR clone 105104 (TRBV12-4, TRBJ2-5)
CASSFFVRGRQETQYF

SEQ ID NO: 210209 - protein, 15 aa, Homo sapiens
  CDR3 for alpha chain variable domain of TCR clone 105105 (TRAV12-2, TRAJ53)
CAVNGGGGSNYKLPF

SEQ ID NO: 210210 - protein, 14 aa, Homo sapiens
  CDR3 for beta chain variable domain of TCR clone 105105 (TRBV19, TRBJ2-2)
CASSTLHRSGELFF

SEQ ID NO: 210211 - protein, 11 aa, Homo sapiens
  CDR3 for alpha chain variable domain of TCR clone 105106 (TRAV21, TRAJ49)
CAVSFGNQFYF

SEQ ID NO: 210212 - protein, 15 aa, Homo sapiens
  CDR3 for beta chain variable domain of TCR clone 105106 (TRBV10-3, TRBJ2-1)
CATTGGPGQGDEQFF

SEQ ID NO: 210213 - protein, 14 aa, Homo sapiens
  CDR3 for alpha chain variable domain of TCR clone 105107 (TRAV12-3, TRAJ6)
CAMSATGGSYIPTF

SEQ ID NO: 210214 - protein, 16 aa, Homo sapiens
  CDR3 for beta chain variable domain of TCR clone 105107 (TRBV4-2, TRBJ2-1)
CASSPRAGQGVNEQFF

SEQ ID NO: 210215 - protein, 13 aa, Homo sapiens
  CDR3 for alpha chain variable domain of TCR clone 105108 (TRAV3, TRAJ30)
CAVRDRGDDKIIF

SEQ ID NO: 210216 - protein, 16 aa, Homo sapiens
  CDR3 for beta chain variable domain of TCR clone 105108 (TRBV7-3, TRBJ2-2)
CASSLKRGTVSGELFF

SEQ ID NO: 210217 - protein, 19 aa, Homo sapiens
  CDR3 for alpha chain variable domain of TCR clone 105109 (TRAV8-3, TRAJ34)
LSTSVLWVWGLRNTDKLIF

SEQ ID NO: 210218 - protein, 16 aa, Homo sapiens
  CDR3 for beta chain variable domain of TCR clone 105109 (TRBV24-1, TRBJ2-3)
CATSDPGTGATDTQYF

SEQ ID NO: 210219 - protein, 13 aa, Homo sapiens
  CDR3 for alpha chain variable domain of TCR clone 105110 (TRAV21, TRAJ27)
CAALNTNAGKSTF

SEQ ID NO: 210220 - protein, 14 aa, Homo sapiens
  CDR3 for beta chain variable domain of TCR clone 105110 (TRBV27, TRBJ1-1)
CASSLLSGRSEAFF

SEQ ID NO: 210221 - protein, 14 aa, Homo sapiens
  CDR3 for alpha chain variable domain of TCR clone 105111 (TRAV12-2, TRAJ40)
CAVKIPSGTYKYIF

SEQ ID NO: 210222 - protein, 18 aa, Homo sapiens
  CDR3 for beta chain variable domain of TCR clone 105111 (TRBV7-8, TRBJ2-1)
CASSPAEGLAGGLNEQFF

SEQ ID NO: 210223 - protein, 16 aa, Homo sapiens
  CDR3 for alpha chain variable domain of TCR clone 105112 (TRAV30, TRAJ24)
CGTEIVDADSWGKFQF

SEQ ID NO: 210224 - protein, 14 aa, Homo sapiens
  CDR3 for beta chain variable domain of TCR clone 105112 (TRBV6-6, TRBJ1-6)
CASSFEGTTSPLHF

SEQ ID NO: 210225 - protein, 11 aa, Homo sapiens
  CDR3 for alpha chain variable domain of TCR clone 105113 (TRAV16, TRAJ33)
CALHSNYQLIW

SEQ ID NO: 210226 - protein, 14 aa, Homo sapiens
  CDR3 for beta chain variable domain of TCR clone 105113 (TRBV7-2, TRBJ2-7)
CASSLYPGRYEQYF

SEQ ID NO: 210227 - protein, 17 aa, Homo sapiens
  CDR3 for alpha chain variable domain of TCR clone 105114 (TRAV12-1, TRAJ42)
CVVMRMNYGGSQGNLIF

SEQ ID NO: 210228 - protein, 13 aa, Homo sapiens
  CDR3 for beta chain variable domain of TCR clone 105114 (TRBV7-2, TRBJ1-1)
CASSLTRPAEAFF

SEQ ID NO: 210229 - protein, 14 aa, Homo sapiens
  CDR3 for alpha chain variable domain of TCR clone 105115 (TRAV12-2, TRAJ33)
CAVKRARSNYQLIR

SEQ ID NO: 210230 - protein, 15 aa, Homo sapiens
  CDR3 for beta chain variable domain of TCR clone 105115 (TRBV20-1, TRBJ2-7)
CSARDRVSGMDEQYF

SEQ ID NO: 210231 - protein, 19 aa, Homo sapiens
  CDR3 for alpha chain variable domain of TCR clone 105116 (TRAV17, TRAJ17)
CATDGRPGVIKAAGNKRTF

SEQ ID NO: 210232 - protein, 17 aa, Homo sapiens
  CDR3 for beta chain variable domain of TCR clone 105116 (TRBV12-4, TRBJ1-1)
CASSLSGFRTMNTEAFF

SEQ ID NO: 210233 - protein, 15 aa, Homo sapiens
  CDR3 for alpha chain variable domain of TCR clone 105117 (TRAV17, TRAJ16)
CVTALRFSDGQKLLF

SEQ ID NO: 210234 - protein, 15 aa, Homo sapiens
  CDR3 for beta chain variable domain of TCR clone 105117 (TRBV20-1, TRBJ1-1)
CSASRGVTGNTEAFF

SEQ ID NO: 210235 - protein, 13 aa, Homo sapiens
  CDR3 for alpha chain variable domain of TCR clone 105118 (TRAV17, TRAJ21)
CATDGGDFNKFYF

SEQ ID NO: 210236 - protein, 11 aa, Homo sapiens
  CDR3 for beta chain variable domain of TCR clone 105118 (TRBV11-2, TRBJ1-1)
CASSINTEAFF

SEQ ID NO: 210237 - protein, 17 aa, Homo sapiens
  CDR3 for alpha chain variable domain of TCR clone 105119 (TRAV26-2, TRAJ42)
CILRDVGYGGSQGNLIF

SEQ ID NO: 210238 - protein, 13 aa, Homo sapiens
  CDR3 for beta chain variable domain of TCR clone 105119 (TRBV7-9, TRBJ1-2)
CASSLKQNYGYTF

SEQ ID NO: 210239 - protein, 13 aa, Homo sapiens
  CDR3 for alpha chain variable domain of TCR clone 105120 (TRAV13-1, TRAJ48)
CARSNLGNEKLTF

SEQ ID NO: 210240 - protein, 14 aa, Homo sapiens
  CDR3 for beta chain variable domain of TCR clone 105120 (TRBV7-3, TRBJ2-2)
CASSLLGSTGELFF

SEQ ID NO: 210241 - protein, 15 aa, Homo sapiens
  CDR3 for alpha chain variable domain of TCR clone 105121 (TRAV17, TRAJ57)
CATGPSQGGSEKLVF

SEQ ID NO: 210242 - protein, 14 aa, Homo sapiens
  CDR3 for beta chain variable domain of TCR clone 105121 (TRBV28, TRBJ1-1)
CASSSEQGYTEAFF

SEQ ID NO: 210243 - protein, 13 aa, Homo sapiens
  CDR3 for alpha chain variable domain of TCR clone 105122 (TRAV13-1, TRAJ33)
CAAGRAGNYQLIW

SEQ ID NO: 210244 - protein, 15 aa, Homo sapiens
  CDR3 for beta chain variable domain of TCR clone 105122 (TRBV2, TRBJ2-7)
EDSAMYFCASSEQYF

SEQ ID NO: 210245 - protein, 12 aa, Homo sapiens
  CDR3 for alpha chain variable domain of TCR clone 105123 (TRAV12-1, TRAJ20)
CVVNPDDYKLSF

SEQ ID NO: 210246 - protein, 13 aa, Homo sapiens
  CDR3 for beta chain variable domain of TCR clone 105123 (TRBV7-3, TRBJ1-1)
CASSQDWGAEAFF

SEQ ID NO: 210247 - protein, 12 aa, Homo sapiens
  CDR3 for alpha chain variable domain of TCR clone 105124 (TRAV13-2, TRAJ13)
CRETGGYQKVTF

SEQ ID NO: 210248 - protein, 15 aa, Homo sapiens
  CDR3 for beta chain variable domain of TCR clone 105124 (TRBV4-1, TRBJ1-4)
CASSDTGGTNEKLFF

SEQ ID NO: 210249 - protein, 10 aa, Homo sapiens
  CDR3 for alpha chain variable domain of TCR clone 105125 (TRAV36/DV7, TRAJ13)
CAAGYQKVTF

SEQ ID NO: 210250 - protein, 14 aa, Homo sapiens
  CDR3 for beta chain variable domain of TCR clone 105125 (TRBV18, TRBJ2-5)
CASSPGVSQETQYF

SEQ ID NO: 210251 - protein, 16 aa, Homo sapiens
  CDR3 for alpha chain variable domain of TCR clone 105126 (TRAV3, TRAJ37)
CAVRPHGSGNTGKLIF

SEQ ID NO: 210252 - protein, 15 aa, Homo sapiens
  CDR3 for beta chain variable domain of TCR clone 105126 (TRBV20-1, TRBJ2-7)
CSARDRVSGMDKQYF

SEQ ID NO: 210253 - protein, 14 aa, Homo sapiens
  CDR3 for alpha chain variable domain of TCR clone 105127 (TRAV36/DV7, TRAJ57)
CAVGFPGGSEKLVF

SEQ ID NO: 210254 - protein, 12 aa, Homo sapiens
  CDR3 for beta chain variable domain of TCR clone 105127 (TRBV19, TRBJ2-7)
CASTSGTYEQHF

SEQ ID NO: 210255 - protein, 17 aa, Homo sapiens
  CDR3 for alpha chain variable domain of TCR clone 105128 (TRAV3, )
CAVSSNSGYPEPCPCRV

SEQ ID NO: 210256 - protein, 13 aa, Homo sapiens
  CDR3 for beta chain variable domain of TCR clone 105128 (TRBV20-1, TRBJ2-2)
CSALSGGAGELFF

SEQ ID NO: 210257 - protein, 14 aa, Homo sapiens
  CDR3 for alpha chain variable domain of TCR clone 105129 (TRAV13-1, TRAJ44)
FAAKATGTASKLTF

SEQ ID NO: 210258 - protein, 17 aa, Homo sapiens
  CDR3 for beta chain variable domain of TCR clone 105129 (TRBV7-3, TRBJ2-3)
CASSLMKRMRGADTQYF

SEQ ID NO: 210259 - protein, 12 aa, Homo sapiens
  CDR3 for alpha chain variable domain of TCR clone 105130 (TRAV1-2, TRAJ39)
CAVPVVGNMLTF

SEQ ID NO: 210260 - protein, 17 aa, Homo sapiens
  CDR3 for beta chain variable domain of TCR clone 105130 (TRBV28, TRBJ2-5)
CASSTPEGDALQETQYF

SEQ ID NO: 210261 - protein, 13 aa, Homo sapiens
  CDR3 for alpha chain variable domain of TCR clone 105131 (TRAV1-1, TRAJ13)
CAVNSGGYQKVTF

SEQ ID NO: 210262 - protein, 12 aa, Homo sapiens
  CDR3 for beta chain variable domain of TCR clone 105131 (TRBV28, TRBJ2-1)
CASSVQIIEQFF

SEQ ID NO: 210263 - protein, 12 aa, Homo sapiens
  CDR3 for alpha chain variable domain of TCR clone 105132 (TRAV3, TRAJ39)
CAVIEWSNMLTF

SEQ ID NO: 210264 - protein, 12 aa, Homo sapiens
  CDR3 for beta chain variable domain of TCR clone 105132 (TRBV11-2, TRBJ2-2)
CASSLGGGELFF

SEQ ID NO: 210265 - protein, 15 aa, Homo sapiens
  CDR3 for alpha chain variable domain of TCR clone 105133 (TRAV12-1, TRAJ45)
CVVLSGGGGADGLTF

SEQ ID NO: 210266 - protein, 12 aa, Homo sapiens
  CDR3 for beta chain variable domain of TCR clone 105133 (TRBV12-5, TRBJ2-5)
CASGQGVDTQYF

SEQ ID NO: 210267 - protein, 14 aa, Homo sapiens
  CDR3 for alpha chain variable domain of TCR clone 105134 (TRAV14/DV4, TRAJ42)
CPRGSLRSQGNLIF

SEQ ID NO: 210268 - protein, 16 aa, Homo sapiens
  CDR3 for beta chain variable domain of TCR clone 105134 (TRBV24-1, TRBJ2-2)
CATSDTGQGGTGELFF

SEQ ID NO: 210269 - protein, 13 aa, Homo sapiens
  CDR3 for alpha chain variable domain of TCR clone 105135 (TRAV3, TRAJ27)
CAVRERGAGKSTF

SEQ ID NO: 210270 - protein, 14 aa, Homo sapiens
  CDR3 for beta chain variable domain of TCR clone 105135 (TRBV7-3, TRBJ2-1)
CASSALAGGPEQFF

SEQ ID NO: 210271 - protein, 12 aa, Homo sapiens
  CDR3 for alpha chain variable domain of TCR clone 105136 (TRAV12-3, TRAJ17)
CAMTLTGNKLTF

SEQ ID NO: 210272 - protein, 16 aa, Homo sapiens
  CDR3 for beta chain variable domain of TCR clone 105136 (TRBV20-1, TRBJ2-1)
CSARSTSESSYNEQFF

SEQ ID NO: 210273 - protein, 13 aa, Homo sapiens
  CDR3 for alpha chain variable domain of TCR clone 105137 (TRAV30, TRAJ27)
CGTGNTNAGKSTF

SEQ ID NO: 210274 - protein, 17 aa, Homo sapiens
  CDR3 for beta chain variable domain of TCR clone 105137 (TRBV11-2, TRBJ2-1)
CASSLYPPGVEYNEQFF

SEQ ID NO: 210275 - protein, 14 aa, Homo sapiens
  CDR3 for alpha chain variable domain of TCR clone 105138 (TRAV12-2, TRAJ45)
CAVNIGGGADGFTF

SEQ ID NO: 210276 - protein, 13 aa, Homo sapiens
  CDR3 for beta chain variable domain of TCR clone 105138 (TRBV19, TRBJ2-2)
CASSIWSTGELFF

SEQ ID NO: 210277 - protein, 14 aa, Homo sapiens
  CDR3 for alpha chain variable domain of TCR clone 105139 (TRAV8-4, TRAJ13)
CAVTLSGGYQKVTF

SEQ ID NO: 210278 - protein, 13 aa, Homo sapiens
  CDR3 for beta chain variable domain of TCR clone 105139 (TRBV6-1, TRBJ1-2)
CASSVGQGTGYTF

SEQ ID NO: 210279 - protein, 14 aa, Homo sapiens
  CDR3 for alpha chain variable domain of TCR clone 105140 (TRAV1-2, TRAJ16)
CAVNRFSDGQKLIF

SEQ ID NO: 210280 - protein, 15 aa, Homo sapiens
  CDR3 for beta chain variable domain of TCR clone 105140 (TRBV11-2, TRBJ1-1)
CASSSRSSLLLSLDK

SEQ ID NO: 210281 - protein, 12 aa, Homo sapiens
  CDR3 for alpha chain variable domain of TCR clone 105141 (TRAV21, TRAJ13)
PGPSGGYQKVTF

SEQ ID NO: 210282 - protein, 16 aa, Homo sapiens
  CDR3 for beta chain variable domain of TCR clone 105141 (TRBV20-1, TRBJ1-4)
CSAPGQGLLTNEKLFF

SEQ ID NO: 210283 - protein, 17 aa, Homo sapiens
  CDR3 for alpha chain variable domain of TCR clone 105142 (TRAV1-1, TRAJ4)
CALYNKLIFGAGTRLAV

SEQ ID NO: 210284 - protein, 18 aa, Homo sapiens
  CDR3 for beta chain variable domain of TCR clone 105142 (TRBV27, TRBJ2-7)
CASRTGQSFPGARDEQYF

SEQ ID NO: 210285 - protein, 15 aa, Homo sapiens
  CDR3 for alpha chain variable domain of TCR clone 105143 (TRAV12-3, TRAJ58)
CAMRRQETSGSRLTF

SEQ ID NO: 210286 - protein, 13 aa, Homo sapiens
  CDR3 for beta chain variable domain of TCR clone 105143 (TRBV7-3, TRBJ1-1)
CASSQDWGAEAFF

SEQ ID NO: 210287 - protein, 14 aa, Homo sapiens
  CDR3 for alpha chain variable domain of TCR clone 105144 (TRAV9-2, TRAJ39)
CVLYIYNAGNMLTF

SEQ ID NO: 210288 - protein, 15 aa, Homo sapiens
  CDR3 for beta chain variable domain of TCR clone 105144 (TRBV28, TRBJ1-5)
CASSRPRTGNQPQHF

SEQ ID NO: 210289 - protein, 13 aa, Homo sapiens
  CDR3 for alpha chain variable domain of TCR clone 105145 (TRAV2, TRAJ40)
CAVVISGTYKYIF

SEQ ID NO: 210290 - protein, 14 aa, Homo sapiens
  CDR3 for beta chain variable domain of TCR clone 105145 (TRBV7-2, TRBJ2-7)
CASRSQGAAYEQYF

SEQ ID NO: 210291 - protein, 13 aa, Homo sapiens
  CDR3 for alpha chain variable domain of TCR clone 105146 (TRAV23/DV6, TRAJ22)
CAPYSGSARQLTF

SEQ ID NO: 210292 - protein, 15 aa, Homo sapiens
  CDR3 for beta chain variable domain of TCR clone 105146 (TRBV11-2, TRBJ1-6)
CDSSLDPWAVSPLHF

SEQ ID NO: 210293 - protein, 13 aa, Homo sapiens
  CDR3 for alpha chain variable domain of TCR clone 105147 (TRAV29/DV5, TRAJ31)
CAASRNNNARLMV

SEQ ID NO: 210294 - protein, 12 aa, Homo sapiens
  CDR3 for beta chain variable domain of TCR clone 105147 (TRBV14, TRBJ1-1)
CASSQLKGLAFF

SEQ ID NO: 210295 - protein, 13 aa, Homo sapiens
  CDR3 for alpha chain variable domain of TCR clone 105148 (TRAV21, TRAJ3)
CAVRGSSASKIIF

SEQ ID NO: 210296 - protein, 17 aa, Homo sapiens
  CDR3 for beta chain variable domain of TCR clone 105148 (TRBV5-7, TRBJ2-5)
CASSWIQDRGREGAQYF

SEQ ID NO: 210297 - protein, 14 aa, Homo sapiens
  CDR3 for alpha chain variable domain of TCR clone 105149 (TRAV4, TRAJ17)
CLVGDMAAGNKLTF

SEQ ID NO: 210298 - protein, 12 aa, Homo sapiens
  CDR3 for beta chain variable domain of TCR clone 105149 (TRBV12-5, TRBJ2-5)
CASGQGVETQYF

SEQ ID NO: 210299 - protein, 14 aa, Homo sapiens
  CDR3 for alpha chain variable domain of TCR clone 105150 (TRAV25, TRAJ22)
CAVRSSGSARQLTF

SEQ ID NO: 210300 - protein, 16 aa, Homo sapiens
  CDR3 for beta chain variable domain of TCR clone 105150 (TRBV4-2, TRBJ1-1)
CASSPYPGRAAPEAFF

SEQ ID NO: 210301 - protein, 14 aa, Homo sapiens
  CDR3 for alpha chain variable domain of TCR clone 105151 (TRAV12-3, TRAJ10)
SHLPLTGGGNKLTF

SEQ ID NO: 210302 - protein, 15 aa, Homo sapiens
  CDR3 for beta chain variable domain of TCR clone 105151 (TRBV4-3, TRBJ2-7)
CASSQDLGSSYEQYF

SEQ ID NO: 210303 - protein, 12 aa, Homo sapiens
  CDR3 for alpha chain variable domain of TCR clone 105152 (TRAV12-2, TRAJ31)
CAVNTPDARLMF

SEQ ID NO: 210304 - protein, 17 aa, Homo sapiens
  CDR3 for beta chain variable domain of TCR clone 105152 (TRBV20-1, TRBJ1-6)
CSARGGYTFSYNSPLHV

SEQ ID NO: 210305 - protein, 12 aa, Homo sapiens
  CDR3 for alpha chain variable domain of TCR clone 105153 (TRAV2, TRAJ9)
CAVGAGGFKTIF

SEQ ID NO: 210306 - protein, 11 aa, Homo sapiens
  CDR3 for beta chain variable domain of TCR clone 105153 (TRBV13, TRBJ2-2)
CASSPRTGGHT

SEQ ID NO: 210307 - protein, 13 aa, Homo sapiens
  CDR3 for alpha chain variable domain of TCR clone 105154 (TRAV12-1, TRAJ16)
CVVNGPDGQKLLF

SEQ ID NO: 210308 - protein, 15 aa, Homo sapiens
  CDR3 for beta chain variable domain of TCR clone 105154 (TRBV28, TRBJ1-3)
CASSMGWASGNTIYF

SEQ ID NO: 210309 - protein, 15 aa, Homo sapiens
  CDR3 for alpha chain variable domain of TCR clone 105155 (TRAV38-1, TRAJ37)
CAFIFGSGNTGKLIF

SEQ ID NO: 210310 - protein, 12 aa, Homo sapiens
  CDR3 for beta chain variable domain of TCR clone 105155 (TRBV7-9, TRBJ2-7)
CASSLEDYEQYF

SEQ ID NO: 210311 - protein, 14 aa, Homo sapiens
  CDR3 for alpha chain variable domain of TCR clone 105156 (TRAV1-2, TRAJ8)
CAVREDTGFQKLVF

SEQ ID NO: 210312 - protein, 14 aa, Homo sapiens
  CDR3 for beta chain variable domain of TCR clone 105156 (TRBV7-9, TRBJ1-1)
CASSLGGANTGAFF

SEQ ID NO: 210313 - protein, 12 aa, Homo sapiens
  CDR3 for alpha chain variable domain of TCR clone 105157 (TRAV16, TRAJ12)
CALEDSSYKLIF

SEQ ID NO: 210314 - protein, 16 aa, Homo sapiens
  CDR3 for beta chain variable domain of TCR clone 105157 (TRBV25-1, TRBJ1-1)
CASSGDRDRGRIEAFF

SEQ ID NO: 210315 - protein, 18 aa, Homo sapiens
  CDR3 for alpha chain variable domain of TCR clone 105158 (TRAV21, TRAJ52)
CAVRPSPAGGTSYGKLTS

SEQ ID NO: 210316 - protein, 15 aa, Homo sapiens
  CDR3 for beta chain variable domain of TCR clone 105158 (TRBV19, TRBJ1-1)
CASTSGQIQNTEAFF

SEQ ID NO: 210317 - protein, 17 aa, Homo sapiens
  CDR3 for alpha chain variable domain of TCR clone 105159 (TRAV17, TRAJ28)
CATDPRRGGAGSYQLTC

SEQ ID NO: 210318 - protein, 16 aa, Homo sapiens
  CDR3 for beta chain variable domain of TCR clone 105159 (TRBV25-1, TRBJ1-1)
CASSGDRDRGRIEAFF

SEQ ID NO: 210319 - protein, 12 aa, Homo sapiens
  CDR3 for alpha chain variable domain of TCR clone 105160 (TRAV17, TRAJ20)
CATDSNDYKLSF

SEQ ID NO: 210320 - protein, 13 aa, Homo sapiens
  CDR3 for beta chain variable domain of TCR clone 105160 (TRBV10-3, TRBJ2-7)
CASKLAVNYEQYF

SEQ ID NO: 210321 - protein, 14 aa, Homo sapiens
  CDR3 for alpha chain variable domain of TCR clone 105161 (TRAV1-2, TRAJ8)
CAVREDTGFQKLVL

SEQ ID NO: 210322 - protein, 16 aa, Homo sapiens
  CDR3 for beta chain variable domain of TCR clone 105161 (TRBV4-1, TRBJ1-4)
CASSQDLRRGGEKLFF

SEQ ID NO: 210323 - protein, 14 aa, Homo sapiens
  CDR3 for alpha chain variable domain of TCR clone 105162 (TRAV20, TRAJ20)
CAVLRGYNDYKLSF

SEQ ID NO: 210324 - protein, 13 aa, Homo sapiens
  CDR3 for beta chain variable domain of TCR clone 105162 (TRBV19, TRBJ2-5)
CASSETAPETQYF

SEQ ID NO: 210325 - protein, 18 aa, Homo sapiens
  CDR3 for alpha chain variable domain of TCR clone 105163 (TRAV13-1, TRAJ52)
CAAKNPNAGGISYGKLTF

SEQ ID NO: 210326 - protein, 17 aa, Homo sapiens
  CDR3 for beta chain variable domain of TCR clone 105163 (TRBV11-2, TRBJ2-1)
CASSLYPPGVEYNEQFF

SEQ ID NO: 210327 - protein, 14 aa, Homo sapiens
  CDR3 for alpha chain variable domain of TCR clone 105164 (TRAV12-2, TRAJ13)
CAVKKTGGYQKVTF

SEQ ID NO: 210328 - protein, 15 aa, Homo sapiens
  CDR3 for beta chain variable domain of TCR clone 105164 (TRBV7-6, TRBJ2-1)
CASSSLAGEGNEQFF

SEQ ID NO: 210329 - protein, 18 aa, Homo sapiens
  CDR3 for alpha chain variable domain of TCR clone 105165 (TRAV12-3, TRAJ52)
CAMSVGGAGGTSYGKLTF

SEQ ID NO: 210330 - protein, 17 aa, Homo sapiens
  CDR3 for beta chain variable domain of TCR clone 105165 (TRBV13, TRBJ2-3)
CASSRSRVAGGRNTQYF

SEQ ID NO: 210331 - protein, 14 aa, Homo sapiens
  CDR3 for alpha chain variable domain of TCR clone 105166 (TRAV1-2, TRAJ16)
CAVNRFSDGQKLLF

SEQ ID NO: 210332 - protein, 16 aa, Homo sapiens
  CDR3 for beta chain variable domain of TCR clone 105166 (TRBV9, TRBJ2-7)
CASSVGLGGGTYEQYF

SEQ ID NO: 210333 - protein, 11 aa, Homo sapiens
  CDR3 for alpha chain variable domain of TCR clone 105167 (TRAV21, TRAJ34)
CAVTNTYKLIF

SEQ ID NO: 210334 - protein, 12 aa, Homo sapiens
  CDR3 for beta chain variable domain of TCR clone 105167 (TRBV7-9, TRBJ1-1)
CASSLVRGEAFF

SEQ ID NO: 210335 - protein, 14 aa, Homo sapiens
  CDR3 for alpha chain variable domain of TCR clone 105168 (TRAV26-1, TRAJ48)
CIVRVGFGNEKLTF

SEQ ID NO: 210336 - protein, 13 aa, Homo sapiens
  CDR3 for beta chain variable domain of TCR clone 105168 (TRBV11-3, TRBJ2-3)
CASSHDTKDTQYY

SEQ ID NO: 210337 - protein, 15 aa, Homo sapiens
  CDR3 for alpha chain variable domain of TCR clone 105169 (TRAV27, TRAJ38)
CAARRNAGNNRKLIW

SEQ ID NO: 210338 - protein, 14 aa, Homo sapiens
  CDR3 for beta chain variable domain of TCR clone 105169 (TRBV11-2, TRBJ2-3)
CASSLGGGANTQYF

SEQ ID NO: 210339 - protein, 17 aa, Homo sapiens
  CDR3 for alpha chain variable domain of TCR clone 105170 (TRAV38-2/DV8, TRAJ45)
CAYRSMYSGGGADGLTF

SEQ ID NO: 210340 - protein, 15 aa, Homo sapiens
  CDR3 for beta chain variable domain of TCR clone 105170 (TRBV12-4, TRBJ1-1)
CASSLAVSRGAEAFF

SEQ ID NO: 210341 - protein, 14 aa, Homo sapiens
  CDR3 for alpha chain variable domain of TCR clone 105171 (TRAV12-1, TRAJ17)
CVVNYKAAGNKLTF

SEQ ID NO: 210342 - protein, 13 aa, Homo sapiens
  CDR3 for beta chain variable domain of TCR clone 105171 (TRBV12-4, TRBJ2-3)
CASSSPLGGTQYF

SEQ ID NO: 210343 - protein, 15 aa, Homo sapiens
  CDR3 for alpha chain variable domain of TCR clone 105172 (TRAV12-2, TRAJ53)
CAVNGGGGSNYKLTF

SEQ ID NO: 210344 - protein, 11 aa, Homo sapiens
  CDR3 for beta chain variable domain of TCR clone 105172 (TRBV6-3, TRBJ2-3)
CATGQADTQYF

SEQ ID NO: 210345 - protein, 12 aa, Homo sapiens
  CDR3 for alpha chain variable domain of TCR clone 105173 (TRAV2, TRAJ9)
CAVGAGGFKTIF

SEQ ID NO: 210346 - protein, 12 aa, Homo sapiens
  CDR3 for beta chain variable domain of TCR clone 105173 (TRBV24-1, TRBJ2-3)
CATSDSTDTQYF

SEQ ID NO: 210347 - protein, 14 aa, Homo sapiens
  CDR3 for alpha chain variable domain of TCR clone 105174 (TRAV12-2, TRAJ40)
CAVKIPSGTYKYIF

SEQ ID NO: 210348 - protein, 14 aa, Homo sapiens
  CDR3 for beta chain variable domain of TCR clone 105174 (TRBV6-1, TRBJ1-1)
CASSENDRTTEAFF

SEQ ID NO: 210349 - protein, 16 aa, Homo sapiens
  CDR3 for alpha chain variable domain of TCR clone 105175 (TRAV3, TRAJ18)
CAVRDGRGSTLGRLYF

SEQ ID NO: 210350 - protein, 14 aa, Homo sapiens
  CDR3 for beta chain variable domain of TCR clone 105175 (TRBV19, TRBJ2-1)
CASPTFVLSGEQFF

SEQ ID NO: 210351 - protein, 15 aa, Homo sapiens
  CDR3 for alpha chain variable domain of TCR clone 105176 (TRAV17, TRAJ35)
CATAFVIGFGIVLHC

SEQ ID NO: 210352 - protein, 15 aa, Homo sapiens
  CDR3 for beta chain variable domain of TCR clone 105176 (TRBV7-9, TRBJ2-7)
CASSLALAEAYEQYF

SEQ ID NO: 210353 - protein, 16 aa, Homo sapiens
  CDR3 for alpha chain variable domain of TCR clone 105177 (TRAV14/DV4, TRAJ21)
CAMREVPENNFNKFYF

SEQ ID NO: 210354 - protein, 12 aa, Homo sapiens
  CDR3 for beta chain variable domain of TCR clone 105177 (TRBV29-1, TRBJ2-2)
CSVDKYTGELFF

SEQ ID NO: 210355 - protein, 14 aa, Homo sapiens
  CDR3 for alpha chain variable domain of TCR clone 105178 (TRAV1-2, TRAJ16)
CAVNRFSDCQKLLF

SEQ ID NO: 210356 - protein, 15 aa, Homo sapiens
  CDR3 for beta chain variable domain of TCR clone 105178 (TRBV29-1, TRBJ2-7)
CSVEFFDRGSYEQYF

SEQ ID NO: 210357 - protein, 13 aa, Homo sapiens
  CDR3 for alpha chain variable domain of TCR clone 105179 (TRAV13-1, TRAJ21)
CAASIYNFNKFYF

SEQ ID NO: 210358 - protein, 16 aa, Homo sapiens
  CDR3 for beta chain variable domain of TCR clone 105179 (TRBV3-1, TRBJ2-7)
CASSQGATGVAYEQYF

SEQ ID NO: 210359 - protein, 15 aa, Homo sapiens
  CDR3 for alpha chain variable domain of TCR clone 105180 (TRAV13-1, TRAJ17)
CAASIERAAGNKLTF

SEQ ID NO: 210360 - protein, 16 aa, Homo sapiens
  CDR3 for beta chain variable domain of TCR clone 105180 (TRBV13, TRBJ2-2)
CASSPRTGEHTGELFF

SEQ ID NO: 210361 - protein, 13 aa, Homo sapiens
  CDR3 for alpha chain variable domain of TCR clone 105181 (TRAV12-1, TRAJ21)
CVVTLYNFNKFYF

SEQ ID NO: 210362 - protein, 12 aa, Homo sapiens
  CDR3 for beta chain variable domain of TCR clone 105181 (TRBV11-2, TRBJ2-2)
CASSLPTGELFF

SEQ ID NO: 210363 - protein, 11 aa, Homo sapiens
  CDR3 for alpha chain variable domain of TCR clone 105182 (TRAV13-1, TRAJ23)
CAASSRGKLIF

SEQ ID NO: 210364 - protein, 15 aa, Homo sapiens
  CDR3 for beta chain variable domain of TCR clone 105182 (TRBV7-9, TRBJ2-2)
CASGPLDTFPGELFF

SEQ ID NO: 210365 - protein, 17 aa, Homo sapiens
  CDR3 for alpha chain variable domain of TCR clone 105183 (TRAV13-1, TRAJ52)
CAAGRNAGGTSNGKLTF

SEQ ID NO: 210366 - protein, 13 aa, Homo sapiens
  CDR3 for beta chain variable domain of TCR clone 105183 (TRBV7-2, TRBJ1-1)
CASNLKGAKVAFF

SEQ ID NO: 210367 - protein, 14 aa, Homo sapiens
  CDR3 for alpha chain variable domain of TCR clone 105184 (TRAV1-2, TRAJ16)
CAVNRFSGGQKLLF

SEQ ID NO: 210368 - protein, 14 aa, Homo sapiens
  CDR3 for beta chain variable domain of TCR clone 105184 (TRBV7-2, TRBJ2-5)
CASSPLGQSETQYF

SEQ ID NO: 210369 - protein, 12 aa, Homo sapiens
  CDR3 for alpha chain variable domain of TCR clone 105185 (TRAV23/DV6, TRAJ24)
CATNDSWGKLQF

SEQ ID NO: 210370 - protein, 16 aa, Homo sapiens
  CDR3 for beta chain variable domain of TCR clone 105185 (TRBV12-4, TRBJ2-5)
CASSLSTSGGKETQYF

SEQ ID NO: 210371 - protein, 15 aa, Homo sapiens
  CDR3 for alpha chain variable domain of TCR clone 105186 (TRAV13-1, TRAJ17)
CAASIERAAGNKLTF

SEQ ID NO: 210372 - protein, 14 aa, Homo sapiens
  CDR3 for beta chain variable domain of TCR clone 105186 (TRBV5-7, TRBJ1-5)
CASSRTGGGQPQHF

SEQ ID NO: 210373 - protein, 12 aa, Homo sapiens
  CDR3 for alpha chain variable domain of TCR clone 105187 (TRAV35, TRAJ12)
GRRRDSSYKLIF

SEQ ID NO: 210374 - protein, 14 aa, Homo sapiens
  CDR3 for beta chain variable domain of TCR clone 105187 (TRBV19, TRBJ1-1)
CASSPNRGDTEAFF

SEQ ID NO: 210375 - protein, 16 aa, Homo sapiens
  CDR3 for alpha chain variable domain of TCR clone 105188 (TRAV12-3, TRAJ53)
CAMSVGSGGSNYKLTF

SEQ ID NO: 210376 - protein, 13 aa, Homo sapiens
  CDR3 for beta chain variable domain of TCR clone 105188 (TRBV7-6, TRBJ1-2)
CASSLVADYGYIF

SEQ ID NO: 210377 - protein, 16 aa, Homo sapiens
  CDR3 for alpha chain variable domain of TCR clone 105189 (TRAV1-1, TRAJ45)
CAVRAYPGGGADGLTF

SEQ ID NO: 210378 - protein, 13 aa, Homo sapiens
  CDR3 for beta chain variable domain of TCR clone 105189 (TRBV20-1, TRBJ1-2)
CSARGTADYGYTF

SEQ ID NO: 210379 - protein, 14 aa, Homo sapiens
  CDR3 for alpha chain variable domain of TCR clone 105190 (TRAV34, TRAJ22)
CGADTSGSARQLTF

SEQ ID NO: 210380 - protein, 16 aa, Homo sapiens
  CDR3 for beta chain variable domain of TCR clone 105190 (TRBV2, TRBJ2-3)
CQPRGAPRRWTDTQYF

SEQ ID NO: 210381 - protein, 16 aa, Homo sapiens
  CDR3 for alpha chain variable domain of TCR clone 105191 (TRAV8-3, TRAJ28)
CAVPPQRGAGSYQLTL

SEQ ID NO: 210382 - protein, 13 aa, Homo sapiens
  CDR3 for beta chain variable domain of TCR clone 105191 (TRBV7-6, TRBJ2-3)
CASSLRSDNTQYF

SEQ ID NO: 210383 - protein, 13 aa, Homo sapiens
  CDR3 for alpha chain variable domain of TCR clone 105192 (TRAV1-1, TRAJ9)
CAAKNTGGFKTIF

SEQ ID NO: 210384 - protein, 13 aa, Homo sapiens
  CDR3 for beta chain variable domain of TCR clone 105192 (TRBV20-1, TRBJ2-1)
QCSIGGSANEQFF

SEQ ID NO: 210385 - protein, 16 aa, Homo sapiens
  CDR3 for alpha chain variable domain of TCR clone 105193 (TRAV12-3, TRAJ37)
CAVRTAGSSNTGKLIF

SEQ ID NO: 210386 - protein, 13 aa, Homo sapiens
  CDR3 for beta chain variable domain of TCR clone 105193 (TRBV7-9, TRBJ2-5)
CASLPSGRETQYF

SEQ ID NO: 210387 - protein, 10 aa, Homo sapiens
  CDR3 for alpha chain variable domain of TCR clone 105194 (TRAV6, TRAJ36)
PLSTANNLFF

SEQ ID NO: 210388 - protein, 14 aa, Homo sapiens
  CDR3 for beta chain variable domain of TCR clone 105194 (TRBV10-2, TRBJ1-5)
CASSSTGRNQPQHF

SEQ ID NO: 210389 - protein, 23 aa, Homo sapiens
  CDR3 for alpha chain variable domain of TCR clone 105195 (TRAV27, TRAJ47)
TAAQPGDTGLCLSIVEYGNKLVF

SEQ ID NO: 210390 - protein, 18 aa, Homo sapiens
  CDR3 for beta chain variable domain of TCR clone 105195 (TRBV2, TRBJ2-1)
CASRGLAGGPRTYNEQFF

SEQ ID NO: 210391 - protein, 23 aa, Homo sapiens
  CDR3 for alpha chain variable domain of TCR clone 105196 (TRAV26-1, TRAJ38)
CIADNAGNNHIQNPDPAVYPLSD

SEQ ID NO: 210392 - protein, 13 aa, Homo sapiens
  CDR3 for beta chain variable domain of TCR clone 105196 (TRBV20-1, TRBJ1-1)
CSARGGGNTEAFF

SEQ ID NO: 210393 - protein, 12 aa, Homo sapiens
  CDR3 for alpha chain variable domain of TCR clone 105197 (TRAV21, TRAJ31)
CVLAGNNARLMS

SEQ ID NO: 210394 - protein, 16 aa, Homo sapiens
  CDR3 for beta chain variable domain of TCR clone 105197 (TRBV27, TRBJ2-5)
CASSFGPGGTKETQYF

SEQ ID NO: 210395 - protein, 13 aa, Homo sapiens
  CDR3 for alpha chain variable domain of TCR clone 105198 (TRAV38-2/DV8, TRAJ34)
CAYRNYNTDKRIF

SEQ ID NO: 210396 - protein, 15 aa, Homo sapiens
  CDR3 for beta chain variable domain of TCR clone 105198 (TRBV20-1, TRBJ2-5)
CSAEGTGGLQETQYF

SEQ ID NO: 210397 - protein, 14 aa, Homo sapiens
  CDR3 for alpha chain variable domain of TCR clone 105199 (TRAV4, TRAJ30)
CLVGDMDRDDKIIF

SEQ ID NO: 210398 - protein, 16 aa, Homo sapiens
  CDR3 for beta chain variable domain of TCR clone 105199 (TRBV20-1, TRBJ1-4)
CSAPGQGLLTNEKLFF

SEQ ID NO: 210399 - protein, 12 aa, Homo sapiens
  CDR3 for alpha chain variable domain of TCR clone 105200 (TRAV3, TRAJ20)
CAVRDPDYKLSF

SEQ ID NO: 210400 - protein, 14 aa, Homo sapiens
  CDR3 for beta chain variable domain of TCR clone 105200 (TRBV28, TRBJ1-2)
CASRIQGANYGYTF

SEQ ID NO: 210401 - protein, 13 aa, Homo sapiens
  CDR3 for alpha chain variable domain of TCR clone 105201 (TRAV8-3, TRAJ36)
CAVGATGANNLFF

SEQ ID NO: 210402 - protein, 14 aa, Homo sapiens
  CDR3 for beta chain variable domain of TCR clone 105201 (TRBV7-9, TRBJ2-4)
CASSFVGTKNIQYF

SEQ ID NO: 210403 - protein, 18 aa, Homo sapiens
  CDR3 for alpha chain variable domain of TCR clone 105202 (TRAV26-1, TRAJ23)
CIVRVGLELWNQGGKLIF

SEQ ID NO: 210404 - protein, 16 aa, Homo sapiens
  CDR3 for beta chain variable domain of TCR clone 105202 (TRBV12-4, TRBJ2-5)
CASSFFVRGRQETQYF

SEQ ID NO: 210405 - protein, 10 aa, Homo sapiens
  CDR3 for alpha chain variable domain of TCR clone 105203 (TRAV38-1, TRAJ34)
CAFMDDKLIF

SEQ ID NO: 210406 - protein, 14 aa, Homo sapiens
  CDR3 for beta chain variable domain of TCR clone 105203 (TRBV7-2, TRBJ2-2)
CASSLNSNTGELLF

SEQ ID NO: 210407 - protein, 12 aa, Homo sapiens
  CDR3 for alpha chain variable domain of TCR clone 105204 (TRAV23/DV6, TRAJ24)
CAANDSWGTLQF

SEQ ID NO: 210408 - protein, 16 aa, Homo sapiens
  CDR3 for beta chain variable domain of TCR clone 105204 (TRBV12-4, TRBJ2-5)
CASSLSTSGGKETQYF

SEQ ID NO: 210409 - protein, 11 aa, Homo sapiens
  CDR3 for alpha chain variable domain of TCR clone 105205 (TRAV1-2, TRAJ40)
CAVPGTYKYIF

SEQ ID NO: 210410 - protein, 15 aa, Homo sapiens
  CDR3 for beta chain variable domain of TCR clone 105205 (TRBV25-1, TRBJ1-4)
CTSSPGDSTNEELFF

SEQ ID NO: 210411 - protein, 14 aa, Homo sapiens
  CDR3 for alpha chain variable domain of TCR clone 105206 (TRAV38-1, TRAJ29)
CAFITPSGNTPLVF

SEQ ID NO: 210412 - protein, 15 aa, Homo sapiens
  CDR3 for beta chain variable domain of TCR clone 105206 (TRBV6-1, TRBJ2-3)
CASSERGGITDTQYF

SEQ ID NO: 210413 - protein, 13 aa, Homo sapiens
  CDR3 for alpha chain variable domain of TCR clone 105207 (TRAV3, TRAJ29)
CAVRDIIDTPIVF

SEQ ID NO: 210414 - protein, 14 aa, Homo sapiens
  CDR3 for beta chain variable domain of TCR clone 105207 (TRBV27, TRBJ2-1)
CASSATGGYNEQFF

SEQ ID NO: 210415 - protein, 14 aa, Homo sapiens
  CDR3 for alpha chain variable domain of TCR clone 105208 (TRAV12-2, TRAJ13)
CAVKKTGGYQKVTF

SEQ ID NO: 210416 - protein, 13 aa, Homo sapiens
  CDR3 for beta chain variable domain of TCR clone 105208 (TRBV10-3, TRBJ2-7)
CASKLTVNYEQYF

SEQ ID NO: 210417 - protein, 14 aa, Homo sapiens
  CDR3 for alpha chain variable domain of TCR clone 105209 (TRAV20, TRAJ56)
CAVQFGGANSKLTF

SEQ ID NO: 210418 - protein, 14 aa, Homo sapiens
  CDR3 for beta chain variable domain of TCR clone 105209 (TRBV7-2, TRBJ1-1)
CASSFLTGTAEAFF

SEQ ID NO: 210419 - protein, 12 aa, Homo sapiens
  CDR3 for alpha chain variable domain of TCR clone 105210 (TRAV9-2, TRAJ3)
CALYSSASTIIF

SEQ ID NO: 210420 - protein, 16 aa, Homo sapiens
  CDR3 for beta chain variable domain of TCR clone 105210 (TRBV10-2, TRBJ1-5)
CASSVRDRASNQPQHF

SEQ ID NO: 210421 - protein, 17 aa, Homo sapiens
  CDR3 for alpha chain variable domain of TCR clone 105211 (TRAV4, TRAJ13)
CLVGVQGSSGGYQNVTF

SEQ ID NO: 210422 - protein, 16 aa, Homo sapiens
  CDR3 for beta chain variable domain of TCR clone 105211 (TRBV28, TRBJ2-7)
CASSLFFETGGPEQYF

SEQ ID NO: 210423 - protein, 12 aa, Homo sapiens
  CDR3 for alpha chain variable domain of TCR clone 105212 (TRAV1-1, TRAJ8)
CAGGTGFQKLVF

SEQ ID NO: 210424 - protein, 13 aa, Homo sapiens
  CDR3 for beta chain variable domain of TCR clone 105212 (TRBV7-9, TRBJ1-2)
CASSVKQNYGYTF

SEQ ID NO: 210425 - protein, 11 aa, Homo sapiens
  CDR3 for alpha chain variable domain of TCR clone 105213 (TRAV2, TRAJ33)
CAVDSNYPLIW

SEQ ID NO: 210426 - protein, 13 aa, Homo sapiens
  CDR3 for beta chain variable domain of TCR clone 105213 (TRBV7-2, TRBJ2-7)
CASSSPSGSEQYF

SEQ ID NO: 210427 - protein, 14 aa, Homo sapiens
  CDR3 for alpha chain variable domain of TCR clone 105214 (TRAV14/DV4, TRAJ57)
CAMREEGGSEKLVF

SEQ ID NO: 210428 - protein, 17 aa, Homo sapiens
  CDR3 for beta chain variable domain of TCR clone 105214 (TRBV10-3, TRBJ1-2)
CAISEARDRGLEYGYTF

SEQ ID NO: 210429 - protein, 11 aa, Homo sapiens
  CDR3 for alpha chain variable domain of TCR clone 105215 (TRAV1-1, TRAJ23)
CAVRQAGKLIF

SEQ ID NO: 210430 - protein, 20 aa, Homo sapiens
  CDR3 for beta chain variable domain of TCR clone 105215 (TRBV7-8, TRBJ2-2)
CASSHLFPGPTIHITGELFF

SEQ ID NO: 210431 - protein, 14 aa, Homo sapiens
  CDR3 for alpha chain variable domain of TCR clone 105216 (TRAV2, TRAJ29)
CAVEDRVGNTPPVC

SEQ ID NO: 210432 - protein, 15 aa, Homo sapiens
  CDR3 for beta chain variable domain of TCR clone 105216 (TRBV10-3, TRBJ2-1)
CAISDVQDRAYEQFF

SEQ ID NO: 210433 - protein, 13 aa, Homo sapiens
  CDR3 for alpha chain variable domain of TCR clone 105217 (TRAV12-2, TRAJ6)
CAVNVSRKLHTYI

SEQ ID NO: 210434 - protein, 12 aa, Homo sapiens
  CDR3 for beta chain variable domain of TCR clone 105217 (TRBV29-1, TRBJ2-3)
CSFTGGADTQYF

SEQ ID NO: 210435 - protein, 16 aa, Homo sapiens
  CDR3 for alpha chain variable domain of TCR clone 105218 (TRAV12-3, TRAJ53)
CAMSPGSGGSNYKLTF

SEQ ID NO: 210436 - protein, 16 aa, Homo sapiens
  CDR3 for beta chain variable domain of TCR clone 105218 (TRBV15, TRBJ2-5)
CATSRYLEAAQETQYF

SEQ ID NO: 210437 - protein, 14 aa, Homo sapiens
  CDR3 for alpha chain variable domain of TCR clone 105219 (TRAV12-2, TRAJ11)
CAVNRESGYSTLTF

SEQ ID NO: 210438 - protein, 10 aa, Homo sapiens
  CDR3 for beta chain variable domain of TCR clone 105219 (TRBV20-1, TRBJ2-5)
FSARFETQYF

SEQ ID NO: 210439 - protein, 14 aa, Homo sapiens
  CDR3 for alpha chain variable domain of TCR clone 105220 (TRAV35, TRAJ22)
CAGLRPGPARQLTF

SEQ ID NO: 210440 - protein, 13 aa, Homo sapiens
  CDR3 for beta chain variable domain of TCR clone 105220 (TRBV27, TRBJ1-1)
CASSLSIGAEAFF

SEQ ID NO: 210441 - protein, 12 aa, Homo sapiens
  CDR3 for alpha chain variable domain of TCR clone 105221 (TRAV12-1, TRAJ20)
CVVNIDDYKLSF

SEQ ID NO: 210442 - protein, 13 aa, Homo sapiens
  CDR3 for beta chain variable domain of TCR clone 105221 (TRBV7-3, TRBJ2-5)
CASSVRGRETQYF

SEQ ID NO: 210443 - protein, 16 aa, Homo sapiens
  CDR3 for alpha chain variable domain of TCR clone 105222 (TRAV12-1, TRAJ42)
CVVTPYYGGSQGNLIF

SEQ ID NO: 210444 - protein, 14 aa, Homo sapiens
  CDR3 for beta chain variable domain of TCR clone 105222 (TRBV7-2, TRBJ2-7)
CASRSQGAAYEQYF

SEQ ID NO: 210445 - protein, 10 aa, Homo sapiens
  CDR3 for alpha chain variable domain of TCR clone 105223 (TRAV1-2, TRAJ31)
WVSEDARLMF

SEQ ID NO: 210446 - protein, 14 aa, Homo sapiens
  CDR3 for beta chain variable domain of TCR clone 105223 (TRBV19, TRBJ2-1)
CASPTFVLSGEQFF

SEQ ID NO: 210447 - protein, 17 aa, Homo sapiens
  CDR3 for alpha chain variable domain of TCR clone 105224 (TRAV12-1, TRAJ42)
CVVMRMNYGGSQGNLIF

SEQ ID NO: 210448 - protein, 13 aa, Homo sapiens
  CDR3 for beta chain variable domain of TCR clone 105224 (TRBV7-2, TRBJ1-1)
CASSLARPAEAFL

SEQ ID NO: 210449 - protein, 14 aa, Homo sapiens
  CDR3 for alpha chain variable domain of TCR clone 105225 (TRAV12-2, TRAJ36)
CAVNPPTGANSLFF

SEQ ID NO: 210450 - protein, 13 aa, Homo sapiens
  CDR3 for beta chain variable domain of TCR clone 105225 (TRBV20-1, TRBJ1-6)
CSAPTGLGSPLHF

SEQ ID NO: 210451 - protein, 13 aa, Homo sapiens
  CDR3 for alpha chain variable domain of TCR clone 105226 (TRAV2, TRAJ40)
CAVVASGTYKYIF

SEQ ID NO: 210452 - protein, 14 aa, Homo sapiens
  CDR3 for beta chain variable domain of TCR clone 105226 (TRBV19, TRBJ2-1)
CASPTFVVSGEQFF

SEQ ID NO: 210453 - protein, 16 aa, Homo sapiens
  CDR3 for alpha chain variable domain of TCR clone 105227 (TRAV3, TRAJ37)
CAVRGRGSGNTGKLIL

SEQ ID NO: 210454 - protein, 13 aa, Homo sapiens
  CDR3 for beta chain variable domain of TCR clone 105227 (TRBV14, TRBJ2-7)
CASSQDRRGEQYF

SEQ ID NO: 210455 - protein, 14 aa, Homo sapiens
  CDR3 for alpha chain variable domain of TCR clone 105228 (TRAV12-2, TRAJ49)
CAVTLGLYGNQFYF

SEQ ID NO: 210456 - protein, 12 aa, Homo sapiens
  CDR3 for beta chain variable domain of TCR clone 105228 (TRBV7-8, TRBJ2-7)
CASSLGDREQYF

SEQ ID NO: 210457 - protein, 14 aa, Homo sapiens
  CDR3 for alpha chain variable domain of TCR clone 105229 (TRAV8-3, TRAJ4)
CAVGAAGGYNKLIS

SEQ ID NO: 210458 - protein, 15 aa, Homo sapiens
  CDR3 for beta chain variable domain of TCR clone 105229 (TRBV6-3, TRBJ2-7)
CASSSPGTVFYEQYF

SEQ ID NO: 210459 - protein, 14 aa, Homo sapiens
  CDR3 for alpha chain variable domain of TCR clone 105230 (TRAV1-2, TRAJ16)
CAVNRFSDGQKLLF

SEQ ID NO: 210460 - protein, 15 aa, Homo sapiens
  CDR3 for beta chain variable domain of TCR clone 105230 (TRBV10-3, TRBJ2-2)
CAMGEGKTNTGELFF

SEQ ID NO: 210461 - protein, 12 aa, Homo sapiens
  CDR3 for alpha chain variable domain of TCR clone 105231 (TRAV13-1, TRAJ49)
CAAPNTGNQFYF

SEQ ID NO: 210462 - protein, 17 aa, Homo sapiens
  CDR3 for beta chain variable domain of TCR clone 105231 (TRBV25-1, TRBJ2-7)
CARSDARVVFSSYEQYF

SEQ ID NO: 210463 - protein, 18 aa, Homo sapiens
  CDR3 for alpha chain variable domain of TCR clone 105232 (TRAV26-2, TRAJ54)
CILRDVEVGIQGAQKLVF

SEQ ID NO: 210464 - protein, 20 aa, Homo sapiens
  CDR3 for beta chain variable domain of TCR clone 105232 (TRBV7-8, TRBJ2-2)
CASSHLFPGPTIHITGELFF

SEQ ID NO: 210465 - protein, 14 aa, Homo sapiens
  CDR3 for alpha chain variable domain of TCR clone 105233 (TRAV21, TRAJ28)
CAVGSGAGSYHLTF

SEQ ID NO: 210466 - protein, 14 aa, Homo sapiens
  CDR3 for beta chain variable domain of TCR clone 105233 (TRBV18, TRBJ1-4)
CASSPGPNGEKLFF

SEQ ID NO: 210467 - protein, 12 aa, Homo sapiens
  CDR3 for alpha chain variable domain of TCR clone 105234 (TRAV2, TRAJ9)
CAVGAGGFKIIF

SEQ ID NO: 210468 - protein, 16 aa, Homo sapiens
  CDR3 for beta chain variable domain of TCR clone 105234 (TRBV13, TRBJ2-2)
CASSPRTGEHTGELFF

SEQ ID NO: 210469 - protein, 17 aa, Homo sapiens
  CDR3 for alpha chain variable domain of TCR clone 105235 (TRAV27, TRAJ18)
CAGLHRGRGSTLGRLYF

SEQ ID NO: 210470 - protein, 14 aa, Homo sapiens
  CDR3 for beta chain variable domain of TCR clone 105235 (TRBV20-1, TRBJ1-5)
CSARVRGSNQPQHF

SEQ ID NO: 210471 - protein, 18 aa, Homo sapiens
  CDR3 for alpha chain variable domain of TCR clone 105236 (TRAV13-1, TRAJ52)
CAAKNPNAGGTSYGKLTF

SEQ ID NO: 210472 - protein, 13 aa, Homo sapiens
  CDR3 for beta chain variable domain of TCR clone 105236 (TRBV7-2, TRBJ1-4)
CASSLAGLEKLFF

SEQ ID NO: 210473 - protein, 14 aa, Homo sapiens
  CDR3 for alpha chain variable domain of TCR clone 105237 (TRAV26-1, TRAJ45)
SIEVTGGGADGLTF

SEQ ID NO: 210474 - protein, 13 aa, Homo sapiens
  CDR3 for beta chain variable domain of TCR clone 105237 (TRBV7-6, TRBJ1-2)
CASSLVADYGYTF

SEQ ID NO: 210475 - protein, 16 aa, Homo sapiens
  CDR3 for alpha chain variable domain of TCR clone 105238 (TRAV12-1, TRAJ45)
CVVIRYSGGGADGLPF

SEQ ID NO: 210476 - protein, 12 aa, Homo sapiens
  CDR3 for beta chain variable domain of TCR clone 105238 (TRBV6-5, TRBJ2-2)
CASRQITGELFF

SEQ ID NO: 210477 - protein, 13 aa, Homo sapiens
  CDR3 for alpha chain variable domain of TCR clone 105239 (TRAV14/DV4, TRAJ23)
CAMREMKGGKLIF

SEQ ID NO: 210478 - protein, 15 aa, Homo sapiens
  CDR3 for beta chain variable domain of TCR clone 105239 (TRBV6-3, TRBJ2-1)
CASSYASDSYNEQFF

SEQ ID NO: 210479 - protein, 12 aa, Homo sapiens
  CDR3 for alpha chain variable domain of TCR clone 105240 (TRAV16, TRAJ10)
CSRTGGGNKLSF

SEQ ID NO: 210480 - protein, 15 aa, Homo sapiens
  CDR3 for beta chain variable domain of TCR clone 105240 (TRBV6-3, TRBJ2-7)
CASSSPGTVFYEQYF

SEQ ID NO: 210481 - protein, 10 aa, Homo sapiens
  CDR3 for alpha chain variable domain of TCR clone 105241 (TRAV21, TRAJ49)
CAVTGNQFYF

SEQ ID NO: 210482 - protein, 15 aa, Homo sapiens
  CDR3 for beta chain variable domain of TCR clone 105241 (TRBV6-1, TRBJ2-3)
CASTTLAGHKDTQYF

SEQ ID NO: 210483 - protein, 15 aa, Homo sapiens
  CDR3 for alpha chain variable domain of TCR clone 105242 (TRAV8-1, TRAJ6)
CAVNTPPGGSYIPTF

SEQ ID NO: 210484 - protein, 12 aa, Homo sapiens
  CDR3 for beta chain variable domain of TCR clone 105242 (TRBV12-4, TRBJ2-3)
CASSLGQDTQYF

SEQ ID NO: 210485 - protein, 14 aa, Homo sapiens
  CDR3 for alpha chain variable domain of TCR clone 105243 (TRAV9-2, TRAJ39)
CALYIYNAGNMLTF

SEQ ID NO: 210486 - protein, 17 aa, Homo sapiens
  CDR3 for beta chain variable domain of TCR clone 105243 (TRBV28, TRBJ2-7)
CASSPLHRASGVYEQYF

SEQ ID NO: 210487 - protein, 16 aa, Homo sapiens
  CDR3 for alpha chain variable domain of TCR clone 105244 (TRAV3, TRAJ37)
CAVRGKGSGNTGKRIF

SEQ ID NO: 210488 - protein, 12 aa, Homo sapiens
  CDR3 for beta chain variable domain of TCR clone 105244 (TRBV12-4, TRBJ2-3)
CASSTLPDTQYF

SEQ ID NO: 210489 - protein, 10 aa, Homo sapiens
  CDR3 for alpha chain variable domain of TCR clone 105245 (TRAV8-3, TRAJ43)
CAVALADMRF

SEQ ID NO: 210490 - protein, 17 aa, Homo sapiens
  CDR3 for beta chain variable domain of TCR clone 105245 (TRBV25-1, TRBJ2-1)
CASSAYGQGRGVYEQFF

SEQ ID NO: 210491 - protein, 13 aa, Homo sapiens
  CDR3 for alpha chain variable domain of TCR clone 105246 (TRAV39, TRAJ33)
CAVEFSSNYQLIW

SEQ ID NO: 210492 - protein, 18 aa, Homo sapiens
  CDR3 for beta chain variable domain of TCR clone 105246 (TRBV2, TRBJ2-2)
CQQSTGTSGGGNTGELFF

SEQ ID NO: 210493 - protein, 13 aa, Homo sapiens
  CDR3 for alpha chain variable domain of TCR clone 105247 (TRAV13-1, TRAJ9)
CAASGTGRFKTIF

SEQ ID NO: 210494 - protein, 13 aa, Homo sapiens
  CDR3 for beta chain variable domain of TCR clone 105247 (TRBV12-4, TRBJ2-7)
CASSLERVREQYF

SEQ ID NO: 210495 - protein, 16 aa, Homo sapiens
  CDR3 for alpha chain variable domain of TCR clone 105248 (TRAV8-6, TRAJ39)
CAVMPMNNNAGNMLTF

SEQ ID NO: 210496 - protein, 16 aa, Homo sapiens
  CDR3 for beta chain variable domain of TCR clone 105248 (TRBV15, TRBJ2-5)
CATSRYREAAQETQYF

SEQ ID NO: 210497 - protein, 14 aa, Homo sapiens
  CDR3 for alpha chain variable domain of TCR clone 105249 (TRAV27, TRAJ37)
CAGERSSNTGKLIF

SEQ ID NO: 210498 - protein, 17 aa, Homo sapiens
  CDR3 for beta chain variable domain of TCR clone 105249 (TRBV11-3, TRBJ1-6)
CASSLDWGPIHPSTLGT

SEQ ID NO: 210499 - protein, 20 aa, Homo sapiens
  CDR3 for alpha chain variable domain of TCR clone 105250 (TRAV34, TRAJ52)
PAQPCRHLPLWSRPYGKLTF

SEQ ID NO: 210500 - protein, 13 aa, Homo sapiens
  CDR3 for beta chain variable domain of TCR clone 105250 (TRBV7-3, TRBJ1-1)
CASSQDWGAEAFF

SEQ ID NO: 210501 - protein, 23 aa, Homo sapiens
  CDR3 for alpha chain variable domain of TCR clone 105251 (TRAV26-1, )
CIADNADNNHIQNPDPAVYQLRD

SEQ ID NO: 210502 - protein, 12 aa, Homo sapiens
  CDR3 for beta chain variable domain of TCR clone 105251 (TRBV11-2, TRBJ2-2)
CASSLGGGELFF

SEQ ID NO: 210503 - protein, 15 aa, Homo sapiens
  CDR3 for alpha chain variable domain of TCR clone 105252 (TRAV3, TRAJ22)
CAVRDRGGSARQLPF

SEQ ID NO: 210504 - protein, 17 aa, Homo sapiens
  CDR3 for beta chain variable domain of TCR clone 105252 (TRBV28, TRBJ2-5)
CASSTPEGDALQETQYF

SEQ ID NO: 210505 - protein, 18 aa, Homo sapiens
  CDR3 for alpha chain variable domain of TCR clone 105253 (TRAV21, TRAJ52)
CAVRPSPAGGTSYGKLTF

SEQ ID NO: 210506 - protein, 19 aa, Homo sapiens
  CDR3 for beta chain variable domain of TCR clone 105253 (TRBV7-2, TRBJ2-3)
CASSLLSRNWGGGTDTQYF

SEQ ID NO: 210507 - protein, 12 aa, Homo sapiens
  CDR3 for alpha chain variable domain of TCR clone 105254 (TRAV21, TRAJ49)
CAVRNTGNQLYF

SEQ ID NO: 210508 - protein, 12 aa, Homo sapiens
  CDR3 for beta chain variable domain of TCR clone 105254 (TRBV7-9, TRBJ2-7)
CATRTDAYEQYF

SEQ ID NO: 210509 - protein, 16 aa, Homo sapiens
  CDR3 for alpha chain variable domain of TCR clone 105255 (TRAV14/DV4, TRAJ54)
CAMREGRIQGAQKLVF

SEQ ID NO: 210510 - protein, 12 aa, Homo sapiens
  CDR3 for beta chain variable domain of TCR clone 105255 (TRBV7-9, TRBJ2-7)
CASSIKREEQYF

SEQ ID NO: 210511 - protein, 18 aa, Homo sapiens
  CDR3 for alpha chain variable domain of TCR clone 105256 (TRAV35, TRAJ28)
CAGHNYPLSGAGSYQLTF

SEQ ID NO: 210512 - protein, 15 aa, Homo sapiens
  CDR3 for beta chain variable domain of TCR clone 105256 (TRBV3-1, TRBJ2-2)
CASSQDWTRAGELFF

SEQ ID NO: 210513 - protein, 14 aa, Homo sapiens
  CDR3 for alpha chain variable domain of TCR clone 105257 (TRAV12-2, TRAJ17)
CAALFKAAGNKLTF

SEQ ID NO: 210514 - protein, 15 aa, Homo sapiens
  CDR3 for beta chain variable domain of TCR clone 105257 (TRBV19, TRBJ1-1)
CASTSGQIQNTEAFF

SEQ ID NO: 210515 - protein, 14 aa, Homo sapiens
  CDR3 for alpha chain variable domain of TCR clone 105258 (TRAV1-2, TRAJ8)
CAVREDTGFQKLVF

SEQ ID NO: 210516 - protein, 17 aa, Homo sapiens
  CDR3 for beta chain variable domain of TCR clone 105258 (TRBV19, TRBJ2-6)
CASSTGQVFSGANVLTF

SEQ ID NO: 210517 - protein, 14 aa, Homo sapiens
  CDR3 for alpha chain variable domain of TCR clone 105259 (TRAV34, TRAJ44)
CGADGTGTASKLTF

SEQ ID NO: 210518 - protein, 17 aa, Homo sapiens
  CDR3 for beta chain variable domain of TCR clone 105259 (TRBV28, TRBJ1-5)
CASSLSWLVSSNQPQHF

SEQ ID NO: 210519 - protein, 14 aa, Homo sapiens
  CDR3 for alpha chain variable domain of TCR clone 105260 (TRAV26-1, TRAJ21)
CIVRPPYNFNKFYF

SEQ ID NO: 210520 - protein, 16 aa, Homo sapiens
  CDR3 for beta chain variable domain of TCR clone 105260 (TRBV4-2, TRBJ2-3)
CASSQELAGDTDTQYF

SEQ ID NO: 210521 - protein, 12 aa, Homo sapiens
  CDR3 for alpha chain variable domain of TCR clone 105261 (TRAV3, TRAJ27)
FAVRDGAGKSTF

SEQ ID NO: 210522 - protein, 13 aa, Homo sapiens
  CDR3 for beta chain variable domain of TCR clone 105261 (TRBV10-3, TRBJ1-2)
CAINADLNYGYTF

SEQ ID NO: 210523 - protein, 15 aa, Homo sapiens
  CDR3 for alpha chain variable domain of TCR clone 105262 (TRAV13-2, TRAJ45)
FAESDSGGGADGLTF

SEQ ID NO: 210524 - protein, 17 aa, Homo sapiens
  CDR3 for beta chain variable domain of TCR clone 105262 (TRBV27, TRBJ1-6)
CASSLDQLSSYNSPLHF

SEQ ID NO: 210525 - protein, 11 aa, Homo sapiens
  CDR3 for alpha chain variable domain of TCR clone 105263 (TRAV8-3, TRAJ15)
CAVGPGTALIF

SEQ ID NO: 210526 - protein, 18 aa, Homo sapiens
  CDR3 for beta chain variable domain of TCR clone 105263 (TRBV18, TRBJ2-3)
CASSYTSWAAGGTDTQYF

SEQ ID NO: 210527 - protein, 14 aa, Homo sapiens
  CDR3 for alpha chain variable domain of TCR clone 105264 (TRAV2, TRAJ9)
CAVEDRSGGFRTIF

SEQ ID NO: 210528 - protein, 14 aa, Homo sapiens
  CDR3 for beta chain variable domain of TCR clone 105264 (TRBV18, TRBJ1-5)
CASSLQGAQPPQHF

SEQ ID NO: 210529 - protein, 15 aa, Homo sapiens
  CDR3 for alpha chain variable domain of TCR clone 105265 (TRAV17, TRAJ56)
CATEPFTGANSKLTF

SEQ ID NO: 210530 - protein, 15 aa, Homo sapiens
  CDR3 for beta chain variable domain of TCR clone 105265 (TRBV10-3, TRBJ2-1)
CATNGGPGQGDEQFF

SEQ ID NO: 210531 - protein, 13 aa, Homo sapiens
  CDR3 for alpha chain variable domain of TCR clone 105266 (TRAV26-1, TRAJ36)
CIVVGTGANNLFF

SEQ ID NO: 210532 - protein, 13 aa, Homo sapiens
  CDR3 for beta chain variable domain of TCR clone 105266 (TRBV6-5, TRBJ2-6)
CASSTSGPLSLDF

SEQ ID NO: 210533 - protein, 14 aa, Homo sapiens
  CDR3 for alpha chain variable domain of TCR clone 105267 (TRAV3, TRAJ22)
CAVRDYRSARQLTF

SEQ ID NO: 210534 - protein, 13 aa, Homo sapiens
  CDR3 for beta chain variable domain of TCR clone 105267 (TRBV11-2, TRBJ2-5)
CASGHGAKETQYF

SEQ ID NO: 210535 - protein, 12 aa, Homo sapiens
  CDR3 for alpha chain variable domain of TCR clone 105268 (TRAV13-1, TRAJ21)
CAAKEGFNNFYF

SEQ ID NO: 210536 - protein, 15 aa, Homo sapiens
  CDR3 for beta chain variable domain of TCR clone 105268 (TRBV7-9, TRBJ1-6)
CASSSPGRGNSPLHF

SEQ ID NO: 210537 - protein, 14 aa, Homo sapiens
  CDR3 for alpha chain variable domain of TCR clone 105269 (TRAV12-2, TRAJ44)
CAVNPAGTASKLTF

SEQ ID NO: 210538 - protein, 15 aa, Homo sapiens
  CDR3 for beta chain variable domain of TCR clone 105269 (TRBV27, TRBJ2-5)
CASSLYPRGGETQYF

SEQ ID NO: 210539 - protein, 13 aa, Homo sapiens
  CDR3 for alpha chain variable domain of TCR clone 105270 (TRAV8-3, TRAJ44)
CAVVPGTASKLTF

SEQ ID NO: 210540 - protein, 15 aa, Homo sapiens
  CDR3 for beta chain variable domain of TCR clone 105270 (TRBV7-2, TRBJ2-1)
CASTHGTGIYNEQFF

SEQ ID NO: 210541 - protein, 11 aa, Homo sapiens
  CDR3 for alpha chain variable domain of TCR clone 105271 (TRAV1-2, TRAJ20)
CAVANDYRLSF

SEQ ID NO: 210542 - protein, 18 aa, Homo sapiens
  CDR3 for beta chain variable domain of TCR clone 105271 (TRBV20-1, TRBJ2-6)
CSAETTPTHGSGAKVLTF

SEQ ID NO: 210543 - protein, 12 aa, Homo sapiens
  CDR3 for alpha chain variable domain of TCR clone 105272 (TRAV35, TRAJ43)
CAGAYNNDDMRF

SEQ ID NO: 210544 - protein, 14 aa, Homo sapiens
  CDR3 for beta chain variable domain of TCR clone 105272 (TRBV2, TRBJ2-2)
CASSWQGATGELFF

SEQ ID NO: 210545 - protein, 18 aa, Homo sapiens
  CDR3 for alpha chain variable domain of TCR clone 105273 (TRAV13-1, TRAJ52)
CAASKRSACGTSYGKLTF

SEQ ID NO: 210546 - protein, 13 aa, Homo sapiens
  CDR3 for beta chain variable domain of TCR clone 105273 (TRBV12-4, TRBJ1-2)
CASSLRQGEGYTF

SEQ ID NO: 210547 - protein, 13 aa, Homo sapiens
  CDR3 for alpha chain variable domain of TCR clone 105274 (TRAV17, TRAJ9)
CATDYTGGFKTIF

SEQ ID NO: 210548 - protein, 14 aa, Homo sapiens
  CDR3 for beta chain variable domain of TCR clone 105274 (TRBV19, TRBJ2-5)
CASSMTGLQETQYF

SEQ ID NO: 210549 - protein, 13 aa, Homo sapiens
  CDR3 for alpha chain variable domain of TCR clone 105275 (TRAV12-2, TRAJ49)
CAVNMRTGNQVYF

SEQ ID NO: 210550 - protein, 11 aa, Homo sapiens
  CDR3 for beta chain variable domain of TCR clone 105275 (TRBV5-5, TRBJ1-1)
CASSLGVEAFF

SEQ ID NO: 210551 - protein, 18 aa, Homo sapiens
  CDR3 for alpha chain variable domain of TCR clone 105276 (TRAV21, TRAJ52)
CAVMPSPAGGTSYGKLTF

SEQ ID NO: 210552 - protein, 13 aa, Homo sapiens
  CDR3 for beta chain variable domain of TCR clone 105276 (TRBV29-1, TRBJ2-2)
CSVYREDTGELFF

SEQ ID NO: 210553 - protein, 15 aa, Homo sapiens
  CDR3 for alpha chain variable domain of TCR clone 105277 (TRAV17, TRAJ16)
CATALRFSDGQKLLF

SEQ ID NO: 210554 - protein, 17 aa, Homo sapiens
  CDR3 for beta chain variable domain of TCR clone 105277 (TRBV7-7, TRBJ1-4)
CASSLVGQGASNEKLFF

SEQ ID NO: 210555 - protein, 14 aa, Homo sapiens
  CDR3 for alpha chain variable domain of TCR clone 105278 (TRAV13-1, TRAJ6)
CAASITGGSYIPTF

SEQ ID NO: 210556 - protein, 17 aa, Homo sapiens
  CDR3 for beta chain variable domain of TCR clone 105278 (TRBV4-1, TRBJ1-4)
CASSQEGPRGVEEKLFF

SEQ ID NO: 210557 - protein, 14 aa, Homo sapiens
  CDR3 for alpha chain variable domain of TCR clone 105279 (TRAV21, TRAJ35)
HAVMPIGFGNVLHC

SEQ ID NO: 210558 - protein, 12 aa, Homo sapiens
  CDR3 for beta chain variable domain of TCR clone 105279 (TRBV7-9, TRBJ2-7)
CASSIKREEQYF

SEQ ID NO: 210559 - protein, 13 aa, Homo sapiens
  CDR3 for alpha chain variable domain of TCR clone 105280 (TRAV12-2, TRAJ6)
CAVNVSRKLHTYI

SEQ ID NO: 210560 - protein, 13 aa, Homo sapiens
  CDR3 for beta chain variable domain of TCR clone 105280 (TRBV24-1, TRBJ2-7)
CHQPWDSSYEQYF

SEQ ID NO: 210561 - protein, 14 aa, Homo sapiens
  CDR3 for alpha chain variable domain of TCR clone 105281 (TRAV1-2, TRAJ16)
CAVNRFSDGQKLLF

SEQ ID NO: 210562 - protein, 15 aa, Homo sapiens
  CDR3 for beta chain variable domain of TCR clone 105281 (TRBV18, TRBJ2-3)
CASSSLAGGSDTQYF

SEQ ID NO: 210563 - protein, 12 aa, Homo sapiens
  CDR3 for alpha chain variable domain of TCR clone 105282 (TRAV21, TRAJ11)
CAVGGGNSTLTF

SEQ ID NO: 210564 - protein, 15 aa, Homo sapiens
  CDR3 for beta chain variable domain of TCR clone 105282 (TRBV6-1, TRBJ2-7)
CASSEPIAATTEQYF

SEQ ID NO: 210565 - protein, 16 aa, Homo sapiens
  CDR3 for alpha chain variable domain of TCR clone 105283 (TRAV30, TRAJ24)
CGTEIVDADSWGKFQF

SEQ ID NO: 210566 - protein, 13 aa, Homo sapiens
  CDR3 for beta chain variable domain of TCR clone 105283 (TRBV19, TRBJ1-1)
CASSITGESEAFF

SEQ ID NO: 210567 - protein, 14 aa, Homo sapiens
  CDR3 for alpha chain variable domain of TCR clone 105284 (TRAV12-1, TRAJ43)
CVVNGRSNNNDMRF

SEQ ID NO: 210568 - protein, 14 aa, Homo sapiens
  CDR3 for beta chain variable domain of TCR clone 105284 (TRBV4-2, TRBJ1-5)
CASSQDSINQPQHF

SEQ ID NO: 210569 - protein, 11 aa, Homo sapiens
  CDR3 for alpha chain variable domain of TCR clone 105285 (TRAV27, TRAJ47)
SIVEYGNRLVF

SEQ ID NO: 210570 - protein, 18 aa, Homo sapiens
  CDR3 for beta chain variable domain of TCR clone 105285 (TRBV2, TRBJ2-1)
CASRGLAGGPRTYNEQFF

SEQ ID NO: 210571 - protein, 15 aa, Homo sapiens
  CDR3 for alpha chain variable domain of TCR clone 105286 (TRAV21, TRAJ32)
CAVNSYGGATNKLIF

SEQ ID NO: 210572 - protein, 13 aa, Homo sapiens
  CDR3 for beta chain variable domain of TCR clone 105286 (TRBV7-3, TRBJ1-1)
CASSQDWGAEAFF

SEQ ID NO: 210573 - protein, 12 aa, Homo sapiens
  CDR3 for alpha chain variable domain of TCR clone 105287 (TRAV8-3, TRAJ26)
CAGDNYGQNFVF

SEQ ID NO: 210574 - protein, 13 aa, Homo sapiens
  CDR3 for beta chain variable domain of TCR clone 105287 (TRBV6-1, TRBJ1-1)
CASSRQGNTEAFF

SEQ ID NO: 210575 - protein, 15 aa, Homo sapiens
  CDR3 for alpha chain variable domain of TCR clone 105288 (TRAV2, TRAJ32)
CAVANYGGATNKLIF

SEQ ID NO: 210576 - protein, 15 aa, Homo sapiens
  CDR3 for beta chain variable domain of TCR clone 105288 (TRBV7-7, TRBJ2-5)
CASSQLERAEETQHF

SEQ ID NO: 210577 - protein, 14 aa, Homo sapiens
  CDR3 for alpha chain variable domain of TCR clone 105289 (TRAV1-2, TRAJ16)
CAVNRFSDGQKLLF

SEQ ID NO: 210578 - protein, 17 aa, Homo sapiens
  CDR3 for beta chain variable domain of TCR clone 105289 (TRBV2, TRBJ1-6)
CASSLRSGGLMTSPLHF

SEQ ID NO: 210579 - protein, 13 aa, Homo sapiens
  CDR3 for alpha chain variable domain of TCR clone 105290 (TRAV12-1, TRAJ6)
CVVYPGGSYIPTF

SEQ ID NO: 210580 - protein, 13 aa, Homo sapiens
  CDR3 for beta chain variable domain of TCR clone 105290 (TRBV20-1, TRBJ1-3)
CSAGAYSGSTIYF

SEQ ID NO: 210581 - protein, 14 aa, Homo sapiens
  CDR3 for alpha chain variable domain of TCR clone 105291 (TRAV35, TRAJ13)
CAGSPSGGYQKVTF

SEQ ID NO: 210582 - protein, 14 aa, Homo sapiens
  CDR3 for beta chain variable domain of TCR clone 105291 (TRBV28, TRBJ1-5)
CASSRTGLNQPQHF

SEQ ID NO: 210583 - protein, 16 aa, Homo sapiens
  CDR3 for alpha chain variable domain of TCR clone 105292 (TRAV30, TRAJ24)
CGTEIVDADSWGKFQF

SEQ ID NO: 210584 - protein, 13 aa, Homo sapiens
  CDR3 for beta chain variable domain of TCR clone 105292 (TRBV20-1, TRBJ1-1)
CSARGVGNTEAFF

SEQ ID NO: 210585 - protein, 13 aa, Homo sapiens
  CDR3 for alpha chain variable domain of TCR clone 105293 (TRAV8-4, TRAJ9)
CAVSETGGFKTIF

SEQ ID NO: 210586 - protein, 16 aa, Homo sapiens
  CDR3 for beta chain variable domain of TCR clone 105293 (TRBV4-2, TRBJ2-3)
CASSQELAGDTDTQYF

SEQ ID NO: 210587 - protein, 14 aa, Homo sapiens
  CDR3 for alpha chain variable domain of TCR clone 105294 (TRAV12-2, TRAJ17)
CAVLFKAAGNKLTF

SEQ ID NO: 210588 - protein, 15 aa, Homo sapiens
  CDR3 for beta chain variable domain of TCR clone 105294 (TRBV10-3, TRBJ2-3)
CAISLTSGGTDTQYF

SEQ ID NO: 210589 - protein, 11 aa, Homo sapiens
  CDR3 for alpha chain variable domain of TCR clone 105295 (TRAV1-2, TRAJ20)
CAVANDYKLSF

SEQ ID NO: 210590 - protein, 15 aa, Homo sapiens
  CDR3 for beta chain variable domain of TCR clone 105295 (TRBV6-5, TRBJ1-2)
CASSYSQAVNYGYTF

SEQ ID NO: 210591 - protein, 15 aa, Homo sapiens
  CDR3 for alpha chain variable domain of TCR clone 105296 (TRAV3, TRAJ11)
CAVRDRGSGYSTLTF

SEQ ID NO: 210592 - protein, 16 aa, Homo sapiens
  CDR3 for beta chain variable domain of TCR clone 105296 (TRBV12-4, TRBJ1-5)
CASSRPVGGSNQPQHF

SEQ ID NO: 210593 - protein, 17 aa, Homo sapiens
  CDR3 for alpha chain variable domain of TCR clone 105297 (TRAV3, TRAJ6)
CAVRGGPRAGGSDIPTF

SEQ ID NO: 210594 - protein, 14 aa, Homo sapiens
  CDR3 for beta chain variable domain of TCR clone 105297 (TRBV7-2, TRBJ2-7)
CASSPKTSFYEQYF

SEQ ID NO: 210595 - protein, 14 aa, Homo sapiens
  CDR3 for alpha chain variable domain of TCR clone 105298 (TRAV13-1, TRAJ3)
CAASKSSSASKIIF

SEQ ID NO: 210596 - protein, 17 aa, Homo sapiens
  CDR3 for beta chain variable domain of TCR clone 105298 (TRBV12-4, TRBJ2-3)
CASSGPGLAGGADTQYF

SEQ ID NO: 210597 - protein, 14 aa, Homo sapiens
  CDR3 for alpha chain variable domain of TCR clone 105299 (TRAV12-3, TRAJ10)
SHLPLTGGGNKLTF

SEQ ID NO: 210598 - protein, 13 aa, Homo sapiens
  CDR3 for beta chain variable domain of TCR clone 105299 (TRBV20-1, TRBJ1-2)
CSARDQGAYGYTF

SEQ ID NO: 210599 - protein, 16 aa, Homo sapiens
  CDR3 for alpha chain variable domain of TCR clone 105300 (TRAV30, TRAJ24)
CSTEIVDADSWGKFQF

SEQ ID NO: 210600 - protein, 15 aa, Homo sapiens
  CDR3 for beta chain variable domain of TCR clone 105300 (TRBV7-9, TRBJ1-4)
CASSARTGGNEKLFF

SEQ ID NO: 210601 - protein, 11 aa, Homo sapiens
  CDR3 for alpha chain variable domain of TCR clone 105301 (TRAV12-1, TRAJ30)
CVVNGQDKIIF

SEQ ID NO: 210602 - protein, 14 aa, Homo sapiens
  CDR3 for beta chain variable domain of TCR clone 105301 (TRBV12-5, TRBJ2-5)
CASGSRTHQETQYF

SEQ ID NO: 210603 - protein, 11 aa, Homo sapiens
  CDR3 for alpha chain variable domain of TCR clone 105302 (TRAV12-3, TRAJ43)
CAMSVSNDMRF

SEQ ID NO: 210604 - protein, 13 aa, Homo sapiens
  CDR3 for beta chain variable domain of TCR clone 105302 (TRBV4-1, TRBJ2-2)
CASSQENTGELFF

SEQ ID NO: 210605 - protein, 15 aa, Homo sapiens
  CDR3 for alpha chain variable domain of TCR clone 105303 (TRAV12-2, TRAJ53)
CAVNGGGGSNYKLTF

SEQ ID NO: 210606 - protein, 14 aa, Homo sapiens
  CDR3 for beta chain variable domain of TCR clone 105303 (TRBV20-1, TRBJ2-1)
CSAQIGGSANEQFF

SEQ ID NO: 210607 - protein, 15 aa, Homo sapiens
  CDR3 for alpha chain variable domain of TCR clone 105304 (TRAV13-1, TRAJ44)
CAASRGGGTASKLTF

SEQ ID NO: 210608 - protein, 15 aa, Homo sapiens
  CDR3 for beta chain variable domain of TCR clone 105304 (TRBV12-4, TRBJ2-5)
CASSPPTGLQETQYF

SEQ ID NO: 210609 - protein, 16 aa, Homo sapiens
  CDR3 for alpha chain variable domain of TCR clone 105305 (TRAV14/DV4, TRAJ53)
CAMREGGGGSNYKLTF

SEQ ID NO: 210610 - protein, 15 aa, Homo sapiens
  CDR3 for beta chain variable domain of TCR clone 105305 (TRBV6-5, TRBJ2-1)
CASSYDAGAGNEQFF

SEQ ID NO: 210611 - protein, 14 aa, Homo sapiens
  CDR3 for alpha chain variable domain of TCR clone 105306 (TRAV8-2, TRAJ4)
CVVSPSGGYNKLIF

SEQ ID NO: 210612 - protein, 15 aa, Homo sapiens
  CDR3 for beta chain variable domain of TCR clone 105306 (TRBV4-1, TRBJ1-4)
CASSETGGTNEKLFF

SEQ ID NO: 210613 - protein, 14 aa, Homo sapiens
  CDR3 for alpha chain variable domain of TCR clone 105307 (TRAV38-1, TRAJ40)
CALRPTSGTYKYIF

SEQ ID NO: 210614 - protein, 14 aa, Homo sapiens
  CDR3 for beta chain variable domain of TCR clone 105307 (TRBV18, TRBJ2-3)
CASSGLADTDTQYF

SEQ ID NO: 210615 - protein, 13 aa, Homo sapiens
  CDR3 for alpha chain variable domain of TCR clone 105308 (TRAV26-2, TRAJ57)
CILSRGGSENLVF

SEQ ID NO: 210616 - protein, 16 aa, Homo sapiens
  CDR3 for beta chain variable domain of TCR clone 105308 (TRBV18, TRBJ1-5)
CASSPRTGGGNQPQHF

SEQ ID NO: 210617 - protein, 12 aa, Homo sapiens
  CDR3 for alpha chain variable domain of TCR clone 105309 (TRAV29/DV5, TRAJ49)
CAATDTGNQFYF

SEQ ID NO: 210618 - protein, 16 aa, Homo sapiens
  CDR3 for beta chain variable domain of TCR clone 105309 (TRBV13, TRBJ2-2)
CASSPRTGEHTGELFF

SEQ ID NO: 210619 - protein, 12 aa, Homo sapiens
  CDR3 for alpha chain variable domain of TCR clone 105310 (TRAV21, TRAJ23)
CAVPNQGGKLIF

SEQ ID NO: 210620 - protein, 15 aa, Homo sapiens
  CDR3 for beta chain variable domain of TCR clone 105310 (TRBV27, TRBJ2-1)
CASSVGAGTGPEQFF

SEQ ID NO: 210621 - protein, 15 aa, Homo sapiens
  CDR3 for alpha chain variable domain of TCR clone 105311 (TRAV12-1, TRAJ10)
CVVNKLTGGGNKLTF

SEQ ID NO: 210622 - protein, 17 aa, Homo sapiens
  CDR3 for beta chain variable domain of TCR clone 105311 (TRBV5-1, TRBJ1-6)
CASGPSLQGSDNSPLHF

SEQ ID NO: 210623 - protein, 12 aa, Homo sapiens
  CDR3 for alpha chain variable domain of TCR clone 105312 (TRAV20, TRAJ54)
CAVQEGAQKLVF

SEQ ID NO: 210624 - protein, 17 aa, Homo sapiens
  CDR3 for beta chain variable domain of TCR clone 105312 (TRBV13, TRBJ2-3)
CASSLSRVAGGRDTQYF

SEQ ID NO: 210625 - protein, 12 aa, Homo sapiens
  CDR3 for alpha chain variable domain of TCR clone 105313 (TRAV13-1, TRAJ21)
CAAKEGFNKFYF

SEQ ID NO: 210626 - protein, 14 aa, Homo sapiens
  CDR3 for beta chain variable domain of TCR clone 105313 (TRBV19, TRBJ2-1)
CASKDPSSYNEQFF

SEQ ID NO: 210627 - protein, 15 aa, Homo sapiens
  CDR3 for alpha chain variable domain of TCR clone 105314 (TRAV26-1, TRAJ22)
CIVRVSFWFCKATDL

SEQ ID NO: 210628 - protein, 13 aa, Homo sapiens
  CDR3 for beta chain variable domain of TCR clone 105314 (TRBV7-9, TRBJ1-2)
CASSLTQNYGYTF

SEQ ID NO: 210629 - protein, 11 aa, Homo sapiens
  CDR3 for alpha chain variable domain of TCR clone 105315 (TRAV4, TRAJ23)
CLVAPGGKLIF

SEQ ID NO: 210630 - protein, 15 aa, Homo sapiens
  CDR3 for beta chain variable domain of TCR clone 105315 (TRBV7-2, TRBJ2-1)
CASRFQADEYNEQFF

SEQ ID NO: 210631 - protein, 18 aa, Homo sapiens
  CDR3 for alpha chain variable domain of TCR clone 105316 (TRAV26-1, TRAJ23)
CIVRVGLEVWNQGGKLIF

SEQ ID NO: 210632 - protein, 14 aa, Homo sapiens
  CDR3 for beta chain variable domain of TCR clone 105316 (TRBV19, TRBJ2-1)
CASPTFVLSGEQFF

SEQ ID NO: 210633 - protein, 13 aa, Homo sapiens
  CDR3 for alpha chain variable domain of TCR clone 105317 (TRAV29/DV5, TRAJ58)
CAGEETSGSRLTS

SEQ ID NO: 210634 - protein, 15 aa, Homo sapiens
  CDR3 for beta chain variable domain of TCR clone 105317 (TRBV11-2, TRBJ1-6)
CASTGFGTAVSPLHF

SEQ ID NO: 210635 - protein, 14 aa, Homo sapiens
  CDR3 for alpha chain variable domain of TCR clone 105318 (TRAV38-1, TRAJ45)
CASHSGGGADGLTF

SEQ ID NO: 210636 - protein, 13 aa, Homo sapiens
  CDR3 for beta chain variable domain of TCR clone 105318 (TRBV10-3, TRBJ1-2)
CAISERDSYGYPF

SEQ ID NO: 210637 - protein, 14 aa, Homo sapiens
  CDR3 for alpha chain variable domain of TCR clone 105319 (TRAV36/DV7, TRAJ41)
CAVEAQDSGYALNF

SEQ ID NO: 210638 - protein, 13 aa, Homo sapiens
  CDR3 for beta chain variable domain of TCR clone 105319 (TRBV7-3, TRBJ1-1)
CASSQDWGAEAFF

SEQ ID NO: 210639 - protein, 15 aa, Homo sapiens
  CDR3 for alpha chain variable domain of TCR clone 105320 (TRAV30, TRAJ32)
CGTEILGGATNKLIF

SEQ ID NO: 210640 - protein, 15 aa, Homo sapiens
  CDR3 for beta chain variable domain of TCR clone 105320 (TRBV7-2, TRBJ2-1)
CASSSGLAGGNEQFF

SEQ ID NO: 210641 - protein, 15 aa, Homo sapiens
  CDR3 for alpha chain variable domain of TCR clone 105321 (TRAV3, TRAJ5)
CAVRDLDTGRRALTF

SEQ ID NO: 210642 - protein, 18 aa, Homo sapiens
  CDR3 for beta chain variable domain of TCR clone 105321 (TRBV11-2, TRBJ2-3)
CASSLGGASRGAPNTQYF

SEQ ID NO: 210643 - protein, 12 aa, Homo sapiens
  CDR3 for alpha chain variable domain of TCR clone 105322 (TRAV16, TRAJ8)
CAPLGGFQKLVF

SEQ ID NO: 210644 - protein, 15 aa, Homo sapiens
  CDR3 for beta chain variable domain of TCR clone 105322 (TRBV7-9, TRBJ1-5)
CASSQGHQPNQPQHF

SEQ ID NO: 210645 - protein, 12 aa, Homo sapiens
  CDR3 for alpha chain variable domain of TCR clone 105323 (TRAV12-2, TRAJ44)
CADTGTASKLTF

SEQ ID NO: 210646 - protein, 13 aa, Homo sapiens
  CDR3 for beta chain variable domain of TCR clone 105323 (TRBV7-3, TRBJ2-1)
CASSLDSYNEQFF

SEQ ID NO: 210647 - protein, 15 aa, Homo sapiens
  CDR3 for alpha chain variable domain of TCR clone 105324 (TRAV8-2, TRAJ40)
CVVLGTTSGTYKYIF

SEQ ID NO: 210648 - protein, 16 aa, Homo sapiens
  CDR3 for beta chain variable domain of TCR clone 105324 (TRBV7-3, TRBJ2-1)
CASSLEAYRSYNEQFF

SEQ ID NO: 210649 - protein, 13 aa, Homo sapiens
  CDR3 for alpha chain variable domain of TCR clone 105325 (TRAV12-3, TRAJ13)
CAMTSGGYQKVTF

SEQ ID NO: 210650 - protein, 13 aa, Homo sapiens
  CDR3 for beta chain variable domain of TCR clone 105325 (TRBV7-9, TRBJ1-2)
CASSVKQNYGYTF

SEQ ID NO: 210651 - protein, 11 aa, Homo sapiens
  CDR3 for alpha chain variable domain of TCR clone 105326 (TRAV21, TRAJ11)
CAVNGYSTLTF

SEQ ID NO: 210652 - protein, 13 aa, Homo sapiens
  CDR3 for beta chain variable domain of TCR clone 105326 (TRBV4-1, TRBJ2-2)
CASSQENTGELFF

SEQ ID NO: 210653 - protein, 13 aa, Homo sapiens
  CDR3 for alpha chain variable domain of TCR clone 105327 (TRAV12-2, TRAJ18)
CAVRGSTLGRLYF

SEQ ID NO: 210654 - protein, 18 aa, Homo sapiens
  CDR3 for beta chain variable domain of TCR clone 105327 (TRBV27, TRBJ2-3)
CASSLSGASGRGTDTQYF

SEQ ID NO: 210655 - protein, 14 aa, Homo sapiens
  CDR3 for alpha chain variable domain of TCR clone 105328 (TRAV12-1, TRAJ26)
CLVKGSNYGQNFVF

SEQ ID NO: 210656 - protein, 15 aa, Homo sapiens
  CDR3 for beta chain variable domain of TCR clone 105328 (TRBV10-2, TRBJ2-6)
CASSEQGTGANVLTF

SEQ ID NO: 210657 - protein, 16 aa, Homo sapiens
  CDR3 for alpha chain variable domain of TCR clone 105329 (TRAV12-2, TRAJ10)
CAVNRVLTGGGNKRTF

SEQ ID NO: 210658 - protein, 12 aa, Homo sapiens
  CDR3 for beta chain variable domain of TCR clone 105329 (TRBV28, TRBJ2-7)
CASSFSSYEQYF

SEQ ID NO: 210659 - protein, 14 aa, Homo sapiens
  CDR3 for alpha chain variable domain of TCR clone 105330 (TRAV13-1, TRAJ24)
CAASPADSWGKFQF

SEQ ID NO: 210660 - protein, 14 aa, Homo sapiens
  CDR3 for beta chain variable domain of TCR clone 105330 (TRBV5-5, TRBJ1-5)
CASSGQGVDQPQHF

SEQ ID NO: 210661 - protein, 14 aa, Homo sapiens
  CDR3 for alpha chain variable domain of TCR clone 105331 (TRAV12-2, TRAJ17)
CAVLFKAAGNKLTF

SEQ ID NO: 210662 - protein, 15 aa, Homo sapiens
  CDR3 for beta chain variable domain of TCR clone 105331 (TRBV19, TRBJ2-1)
CASSSPGVPLDEQFF

SEQ ID NO: 210663 - protein, 14 aa, Homo sapiens
  CDR3 for alpha chain variable domain of TCR clone 105332 (TRAV4, TRAJ26)
CLLGPHNYGQNFVF

SEQ ID NO: 210664 - protein, 17 aa, Homo sapiens
  CDR3 for beta chain variable domain of TCR clone 105332 (TRBV24-1, TRBJ2-1)
CATSDVSTSGTYNEQFF

SEQ ID NO: 210665 - protein, 14 aa, Homo sapiens
  CDR3 for alpha chain variable domain of TCR clone 105333 (TRAV1-2, TRAJ16)
CAVNRFSDGQKLLF

SEQ ID NO: 210666 - protein, 12 aa, Homo sapiens
  CDR3 for beta chain variable domain of TCR clone 105333 (TRBV14, TRBJ2-4)
CASSNLKSIQYF

SEQ ID NO: 210667 - protein, 14 aa, Homo sapiens
  CDR3 for alpha chain variable domain of TCR clone 105334 (TRAV17, TRAJ33)
CATDARRSNYQLIW

SEQ ID NO: 210668 - protein, 14 aa, Homo sapiens
  CDR3 for beta chain variable domain of TCR clone 105334 (TRBV5-1, TRBJ1-1)
CASSLERVGTEAFF

SEQ ID NO: 210669 - protein, 10 aa, Homo sapiens
  CDR3 for alpha chain variable domain of TCR clone 105335 (TRAV23/DV6, TRAJ43)
CAAAVAALEQ

SEQ ID NO: 210670 - protein, 16 aa, Homo sapiens
  CDR3 for beta chain variable domain of TCR clone 105335 (TRBV18, TRBJ1-2)
CASSPPERVTIYGYAF

SEQ ID NO: 210671 - protein, 11 aa, Homo sapiens
  CDR3 for alpha chain variable domain of TCR clone 105336 (TRAV2, TRAJ33)
CAVESNYQLIW

SEQ ID NO: 210672 - protein, 17 aa, Homo sapiens
  CDR3 for beta chain variable domain of TCR clone 105336 (TRBV19, TRBJ1-1)
CASTSGQIQNTEASLDK

SEQ ID NO: 210673 - protein, 12 aa, Homo sapiens
  CDR3 for alpha chain variable domain of TCR clone 105337 (TRAV13-1, TRAJ21)
CEAKEGFNKFYF

SEQ ID NO: 210674 - protein, 20 aa, Homo sapiens
  CDR3 for beta chain variable domain of TCR clone 105337 (TRBV28, TRBJ2-1)
CASTPIGRSPGLAGGNEQFF

SEQ ID NO: 210675 - protein, 14 aa, Homo sapiens
  CDR3 for alpha chain variable domain of TCR clone 105338 (TRAV1-1, TRAJ27)
CAVICNTNAGKSTF

SEQ ID NO: 210676 - protein, 14 aa, Homo sapiens
  CDR3 for beta chain variable domain of TCR clone 105338 (TRBV25-1, TRBJ1-1)
CASTHLGGNTEAFF

SEQ ID NO: 210677 - protein, 15 aa, Homo sapiens
  CDR3 for alpha chain variable domain of TCR clone 105339 (TRAV3, TRAJ5)
CAVRDLDTGRGELTF

SEQ ID NO: 210678 - protein, 13 aa, Homo sapiens
  CDR3 for beta chain variable domain of TCR clone 105339 (TRBV12-4, TRBJ2-7)
CASSPTETYEQYF

SEQ ID NO: 210679 - protein, 14 aa, Homo sapiens
  CDR3 for alpha chain variable domain of TCR clone 105340 (TRAV2, TRAJ37)
CAVDFNSNTGKLIF

SEQ ID NO: 210680 - protein, 13 aa, Homo sapiens
  CDR3 for beta chain variable domain of TCR clone 105340 (TRBV20-1, TRBJ1-1)
CSAPLGGGTEAFF

SEQ ID NO: 210681 - protein, 13 aa, Homo sapiens
  CDR3 for alpha chain variable domain of TCR clone 105341 (TRAV21, TRAJ27)
CAARPGNAGKSTF

SEQ ID NO: 210682 - protein, 16 aa, Homo sapiens
  CDR3 for beta chain variable domain of TCR clone 105341 (TRBV7-9, TRBJ1-2)
CASSLGFSSGEDGYTF

SEQ ID NO: 210683 - protein, 14 aa, Homo sapiens
  CDR3 for alpha chain variable domain of TCR clone 105342 (TRAV12-2, TRAJ53)
CRERGGGSNYKLTF

SEQ ID NO: 210684 - protein, 13 aa, Homo sapiens
  CDR3 for beta chain variable domain of TCR clone 105342 (TRBV10-3, TRBJ2-7)
CASKLAVNYEQYF

SEQ ID NO: 210685 - protein, 16 aa, Homo sapiens
  CDR3 for alpha chain variable domain of TCR clone 105343 (TRAV27, TRAJ13)
CAGAKSDSGGYQKVTF

SEQ ID NO: 210686 - protein, 14 aa, Homo sapiens
  CDR3 for beta chain variable domain of TCR clone 105343 (TRBV7-2, TRBJ1-1)
CASSFLTGTTEAFF

SEQ ID NO: 210687 - protein, 12 aa, Homo sapiens
  CDR3 for alpha chain variable domain of TCR clone 105344 (TRAV12-2, TRAJ31)
CAVDTPDARLMF

SEQ ID NO: 210688 - protein, 12 aa, Homo sapiens
  CDR3 for beta chain variable domain of TCR clone 105344 (TRBV12-4, TRBJ2-7)
CASSLGGYEQYF

SEQ ID NO: 210689 - protein, 14 aa, Homo sapiens
  CDR3 for alpha chain variable domain of TCR clone 105345 (TRAV12-2, TRAJ13)
CAVRKTGGYQKVTF

SEQ ID NO: 210690 - protein, 15 aa, Homo sapiens
  CDR3 for beta chain variable domain of TCR clone 105345 (TRBV11-2, TRBJ2-2)
CASSSDRVNAGELFF

SEQ ID NO: 210691 - protein, 15 aa, Homo sapiens
  CDR3 for alpha chain variable domain of TCR clone 105346 (TRAV25, TRAJ53)
CPTSNSEGSNYKLTF

SEQ ID NO: 210692 - protein, 14 aa, Homo sapiens
  CDR3 for beta chain variable domain of TCR clone 105346 (TRBV11-2, TRBJ2-3)
CASSRLARTDTQYF

SEQ ID NO: 210693 - protein, 13 aa, Homo sapiens
  CDR3 for alpha chain variable domain of TCR clone 105347 (TRAV27, TRAJ53)
CAGQGGSNYKLTS

SEQ ID NO: 210694 - protein, 13 aa, Homo sapiens
  CDR3 for beta chain variable domain of TCR clone 105347 (TRBV29-1, TRBJ1-1)
CSVESGFGTEAFF

SEQ ID NO: 210695 - protein, 16 aa, Homo sapiens
  CDR3 for alpha chain variable domain of TCR clone 105348 (TRAV12-3, TRAJ53)
CPMSPGSGGSNYKLTF

SEQ ID NO: 210696 - protein, 11 aa, Homo sapiens
  CDR3 for beta chain variable domain of TCR clone 105348 (TRBV29-1, TRBJ2-5)
CSEDRTGTQYF

SEQ ID NO: 210697 - protein, 14 aa, Homo sapiens
  CDR3 for alpha chain variable domain of TCR clone 105349 (TRAV8-3, TRAJ4)
CAVGAAGGYNKLIF

SEQ ID NO: 210698 - protein, 13 aa, Homo sapiens
  CDR3 for beta chain variable domain of TCR clone 105349 (TRBV27, TRBJ2-7)
CASSLTTGYEQYF

SEQ ID NO: 210699 - protein, 12 aa, Homo sapiens
  CDR3 for alpha chain variable domain of TCR clone 105350 (TRAV12-3, TRAJ17)
CAMTPTGNKLTF

SEQ ID NO: 210700 - protein, 15 aa, Homo sapiens
  CDR3 for beta chain variable domain of TCR clone 105350 (TRBV20-1, TRBJ2-7)
CSARDRGSGMDEQYF

SEQ ID NO: 210701 - protein, 14 aa, Homo sapiens
  CDR3 for alpha chain variable domain of TCR clone 105351 (TRAV29/DV5, TRAJ22)
CAASATGSARQLTF

SEQ ID NO: 210702 - protein, 14 aa, Homo sapiens
  CDR3 for beta chain variable domain of TCR clone 105351 (TRBV19, TRBJ2-1)
CASGPGLAPNEQFF

SEQ ID NO: 210703 - protein, 14 aa, Homo sapiens
  CDR3 for alpha chain variable domain of TCR clone 105352 (TRAV25, TRAJ44)
CAVFPTGTASKLTF

SEQ ID NO: 210704 - protein, 13 aa, Homo sapiens
  CDR3 for beta chain variable domain of TCR clone 105352 (TRBV7-9, TRBJ2-3)
CASSPGSTDTQYF

SEQ ID NO: 210705 - protein, 14 aa, Homo sapiens
  CDR3 for alpha chain variable domain of TCR clone 105353 (TRAV1-2, TRAJ8)
CAVRGDTGFQKLVF

SEQ ID NO: 210706 - protein, 12 aa, Homo sapiens
  CDR3 for beta chain variable domain of TCR clone 105353 (TRBV24-1, TRBJ1-1)
CATLYPDTEAFF

SEQ ID NO: 210707 - protein, 13 aa, Homo sapiens
  CDR3 for alpha chain variable domain of TCR clone 105354 (TRAV8-3, TRAJ6)
CAVGSGGRYIPTF

SEQ ID NO: 210708 - protein, 14 aa, Homo sapiens
  CDR3 for beta chain variable domain of TCR clone 105354 (TRBV11-2, TRBJ1-1)
CASSTQRGRTEAFF

SEQ ID NO: 210709 - protein, 21 aa, Homo sapiens
  CDR3 for alpha chain variable domain of TCR clone 105355 (TRAV1-1, TRAJ6)
CLLLLRYERLERTGGSYIPTF

SEQ ID NO: 210710 - protein, 13 aa, Homo sapiens
  CDR3 for beta chain variable domain of TCR clone 105355 (TRBV10-2, TRBJ2-7)
CASGASGGYEQYF

SEQ ID NO: 210711 - protein, 11 aa, Homo sapiens
  CDR3 for alpha chain variable domain of TCR clone 105356 (TRAV4, TRAJ23)
CLVAPGGKLIF

SEQ ID NO: 210712 - protein, 13 aa, Homo sapiens
  CDR3 for beta chain variable domain of TCR clone 105356 (TRBV7-9, TRBJ1-2)
CASSLKQNYGYTC

SEQ ID NO: 210713 - protein, 14 aa, Homo sapiens
  CDR3 for alpha chain variable domain of TCR clone 105357 (TRAV13-1, TRAJ44)
CAAKATGTASKLPF

SEQ ID NO: 210714 - protein, 14 aa, Homo sapiens
  CDR3 for beta chain variable domain of TCR clone 105357 (TRBV19, TRBJ2-2)
CDSSTLHRSGELFF

SEQ ID NO: 210715 - protein, 13 aa, Homo sapiens
  CDR3 for alpha chain variable domain of TCR clone 105358 (TRAV21, TRAJ49)
CAVRQSTGNQIYF

SEQ ID NO: 210716 - protein, 13 aa, Homo sapiens
  CDR3 for beta chain variable domain of TCR clone 105358 (TRBV6-6, TRBJ1-5)
CASRAYQDQPQHF

SEQ ID NO: 210717 - protein, 15 aa, Homo sapiens
  CDR3 for alpha chain variable domain of TCR clone 105359 (TRAV26-1, TRAJ29)
CIVRVEGSGNTPLVF

SEQ ID NO: 210718 - protein, 14 aa, Homo sapiens
  CDR3 for beta chain variable domain of TCR clone 105359 (TRBV7-9, TRBJ1-5)
CQQPRYQPNQPQHF

SEQ ID NO: 210719 - protein, 13 aa, Homo sapiens
  CDR3 for alpha chain variable domain of TCR clone 105360 (TRAV8-6, TRAJ5)
CSVLDTGRRALTF

SEQ ID NO: 210720 - protein, 12 aa, Homo sapiens
  CDR3 for beta chain variable domain of TCR clone 105360 (TRBV7-9, TRBJ1-6)
CASSASESPLHF

SEQ ID NO: 210721 - protein, 12 aa, Homo sapiens
  CDR3 for alpha chain variable domain of TCR clone 105361 (TRAV13-1, TRAJ21)
CAAKEGFNKFYF

SEQ ID NO: 210722 - protein, 15 aa, Homo sapiens
  CDR3 for beta chain variable domain of TCR clone 105361 (TRBV20-1, TRBJ2-7)
CSASDRVSGMDEQYF

SEQ ID NO: 210723 - protein, 14 aa, Homo sapiens
  CDR3 for alpha chain variable domain of TCR clone 105362 (TRAV1-2, TRAJ8)
CAVREDTGFQKLVF

SEQ ID NO: 210724 - protein, 17 aa, Homo sapiens
  CDR3 for beta chain variable domain of TCR clone 105362 (TRBV7-6, TRBJ2-5)
CASSPGLADPWGETQYF

SEQ ID NO: 210725 - protein, 15 aa, Homo sapiens
  CDR3 for alpha chain variable domain of TCR clone 105363 (TRAV3, TRAJ22)
CAVRDRGGSARQLTF

SEQ ID NO: 210726 - protein, 16 aa, Homo sapiens
  CDR3 for beta chain variable domain of TCR clone 105363 (TRBV5-4, TRBJ2-3)
CASQQPGACGADTQYF

SEQ ID NO: 210727 - protein, 14 aa, Homo sapiens
  CDR3 for alpha chain variable domain of TCR clone 105364 (TRAV2, TRAJ37)
CAVDFTINTGKLIF

SEQ ID NO: 210728 - protein, 13 aa, Homo sapiens
  CDR3 for beta chain variable domain of TCR clone 105364 (TRBV20-1, TRBJ1-1)
CSAPLGGGTEAFF

SEQ ID NO: 210729 - protein, 16 aa, Homo sapiens
  CDR3 for alpha chain variable domain of TCR clone 105365 (TRAV30, TRAJ24)
CGTEIVDADSLGKFQF

SEQ ID NO: 210730 - protein, 15 aa, Homo sapiens
  CDR3 for beta chain variable domain of TCR clone 105365 (TRBV20-1, TRBJ2-7)
CSARDRVSGMDEQYF

SEQ ID NO: 210731 - protein, 16 aa, Homo sapiens
  CDR3 for alpha chain variable domain of TCR clone 105366 (TRAV1-2, TRAJ10)
CAVRGVLTGGGNKLTF

SEQ ID NO: 210732 - protein, 12 aa, Homo sapiens
  CDR3 for beta chain variable domain of TCR clone 105366 (TRBV12-4, TRBJ2-7)
CASSVGGYEQYF

SEQ ID NO: 210733 - protein, 16 aa, Homo sapiens
  CDR3 for alpha chain variable domain of TCR clone 105367 (TRAV3, TRAJ10)
CAVRDMRAGGGKKLTF

SEQ ID NO: 210734 - protein, 15 aa, Homo sapiens
  CDR3 for beta chain variable domain of TCR clone 105367 (TRBV9, TRBJ1-6)
CASSVAGTGDSPLHF

SEQ ID NO: 210735 - protein, 14 aa, Homo sapiens
  CDR3 for alpha chain variable domain of TCR clone 105368 (TRAV20, TRAJ29)
CAVQAWVGNTPLVF

SEQ ID NO: 210736 - protein, 15 aa, Homo sapiens
  CDR3 for beta chain variable domain of TCR clone 105368 (TRBV29-1, TRBJ2-7)
CSVEFSDRGSYEQYF

SEQ ID NO: 210737 - protein, 17 aa, Homo sapiens
  CDR3 for alpha chain variable domain of TCR clone 105369 (TRAV13-1, TRAJ31)
CAPRDRLMFGDGTQLVV

SEQ ID NO: 210738 - protein, 15 aa, Homo sapiens
  CDR3 for beta chain variable domain of TCR clone 105369 (TRBV5-1, TRBJ2-1)
CASSPPRAPYNEQFF

SEQ ID NO: 210739 - protein, 14 aa, Homo sapiens
  CDR3 for alpha chain variable domain of TCR clone 105370 (TRAV1-1, TRAJ33)
CAVRPEDSNYPLIW

SEQ ID NO: 210740 - protein, 15 aa, Homo sapiens
  CDR3 for beta chain variable domain of TCR clone 105370 (TRBV20-1, TRBJ2-1)
CSARSPGGPGNEQFF

SEQ ID NO: 210741 - protein, 18 aa, Homo sapiens
  CDR3 for alpha chain variable domain of TCR clone 105371 (TRAV21, TRAJ52)
CAVRPSPAGGTSYGKLTF

SEQ ID NO: 210742 - protein, 17 aa, Homo sapiens
  CDR3 for beta chain variable domain of TCR clone 105371 (TRBV25-1, TRBJ2-7)
CASSDARVVFSSYEQYF

SEQ ID NO: 210743 - protein, 12 aa, Homo sapiens
  CDR3 for alpha chain variable domain of TCR clone 105372 (TRAV21, TRAJ29)
CAVTSGNTPLVS

SEQ ID NO: 210744 - protein, 15 aa, Homo sapiens
  CDR3 for beta chain variable domain of TCR clone 105372 (TRBV12-4, TRBJ1-2)
CASRLGVAGNYGYTF

SEQ ID NO: 210745 - protein, 16 aa, Homo sapiens
  CDR3 for alpha chain variable domain of TCR clone 105373 (TRAV30, TRAJ24)
CGTEVVDADSWGKFPF

SEQ ID NO: 210746 - protein, 14 aa, Homo sapiens
  CDR3 for beta chain variable domain of TCR clone 105373 (TRBV12-5, TRBJ2-5)
CASGSRTHQETQYF

SEQ ID NO: 210747 - protein, 11 aa, Homo sapiens
  CDR3 for alpha chain variable domain of TCR clone 105374 (TRAV2, TRAJ13)
CASGGYQKVTF

SEQ ID NO: 210748 - protein, 15 aa, Homo sapiens
  CDR3 for beta chain variable domain of TCR clone 105374 (TRBV27, TRBJ1-5)
CASSLGQGSVQPQHF

SEQ ID NO: 210749 - protein, 12 aa, Homo sapiens
  CDR3 for alpha chain variable domain of TCR clone 105375 (TRAV22, TRAJ22)
CAPGGSARQLTF

SEQ ID NO: 210750 - protein, 13 aa, Homo sapiens
  CDR3 for beta chain variable domain of TCR clone 105375 (TRBV15, TRBJ1-6)
CATSGGLNSPLHC

SEQ ID NO: 210751 - protein, 14 aa, Homo sapiens
  CDR3 for alpha chain variable domain of TCR clone 105376 (TRAV8-2, TRAJ4)
CVVSPSGGYNQLIF

SEQ ID NO: 210752 - protein, 15 aa, Homo sapiens
  CDR3 for beta chain variable domain of TCR clone 105376 (TRBV2, TRBJ2-1)
CASSELAGSYNEQFF

SEQ ID NO: 210753 - protein, 12 aa, Homo sapiens
  CDR3 for alpha chain variable domain of TCR clone 105377 (TRAV29/DV5, TRAJ29)
CASHSGNTPLVF

SEQ ID NO: 210754 - protein, 15 aa, Homo sapiens
  CDR3 for beta chain variable domain of TCR clone 105377 (TRBV7-2, TRBJ2-1)
CASRKTGSSYNEQFF

SEQ ID NO: 210755 - protein, 14 aa, Homo sapiens
  CDR3 for alpha chain variable domain of TCR clone 105378 (TRAV4, TRAJ17)
CLVGPQAAGNKLTF

SEQ ID NO: 210756 - protein, 14 aa, Homo sapiens
  CDR3 for beta chain variable domain of TCR clone 105378 (TRBV7-9, TRBJ1-1)
CASSLGHGNTEAFF

SEQ ID NO: 210757 - protein, 15 aa, Homo sapiens
  CDR3 for alpha chain variable domain of TCR clone 105379 (TRAV27, TRAJ38)
CAARRNAGNNRKLIW

SEQ ID NO: 210758 - protein, 14 aa, Homo sapiens
  CDR3 for beta chain variable domain of TCR clone 105379 (TRBV2, TRBJ2-1)
CASRTGSSYNEQFF

SEQ ID NO: 210759 - protein, 12 aa, Homo sapiens
  CDR3 for alpha chain variable domain of TCR clone 105380 (TRAV3, TRAJ31)
CAVRDGNARLMF

SEQ ID NO: 210760 - protein, 13 aa, Homo sapiens
  CDR3 for beta chain variable domain of TCR clone 105380 (TRBV3-1, TRBJ2-7)
CASSLRDGYEQYF

SEQ ID NO: 210761 - protein, 14 aa, Homo sapiens
  CDR3 for alpha chain variable domain of TCR clone 105381 (TRAV12-2, TRAJ44)
CAVNPAGTASELTF

SEQ ID NO: 210762 - protein, 16 aa, Homo sapiens
  CDR3 for beta chain variable domain of TCR clone 105381 (TRBV2, TRBJ2-1)
CASSVGGSLSYNEQFF

SEQ ID NO: 210763 - protein, 16 aa, Homo sapiens
  CDR3 for alpha chain variable domain of TCR clone 105382 (TRAV3, TRAJ37)
CAVRVRGAGNTGKLIF

SEQ ID NO: 210764 - protein, 13 aa, Homo sapiens
  CDR3 for beta chain variable domain of TCR clone 105382 (TRBV14, TRBJ2-1)
CASSQDRRNEQFF

SEQ ID NO: 210765 - protein, 14 aa, Homo sapiens
  CDR3 for alpha chain variable domain of TCR clone 105383 (TRAV4, TRAJ26)
CLVGPHNYGQNFVF

SEQ ID NO: 210766 - protein, 17 aa, Homo sapiens
  CDR3 for beta chain variable domain of TCR clone 105383 (TRBV24-1, TRBJ2-1)
CATSDVSTSGTYNEKFF

SEQ ID NO: 210767 - protein, 11 aa, Homo sapiens
  CDR3 for alpha chain variable domain of TCR clone 105384 (TRAV1-1, TRAJ23)
CAVRQGGKLIL

SEQ ID NO: 210768 - protein, 14 aa, Homo sapiens
  CDR3 for beta chain variable domain of TCR clone 105384 (TRBV19, TRBJ2-1)
CASPTFVLSGEQFF

SEQ ID NO: 210769 - protein, 13 aa, Homo sapiens
  CDR3 for alpha chain variable domain of TCR clone 105385 (TRAV1-2, TRAJ9)
CAALNTGGFKTIF

SEQ ID NO: 210770 - protein, 20 aa, Homo sapiens
  CDR3 for beta chain variable domain of TCR clone 105385 (TRBV28, TRBJ2-1)
CASTPIGRSPGLARGNEQFF

SEQ ID NO: 210771 - protein, 16 aa, Homo sapiens
  CDR3 for alpha chain variable domain of TCR clone 105386 (TRAV30, TRAJ24)
CGTEIVDADSWGKFQF

SEQ ID NO: 210772 - protein, 14 aa, Homo sapiens
  CDR3 for beta chain variable domain of TCR clone 105386 (TRBV9, TRBJ2-4)
CASSPSGTSGCQYF

SEQ ID NO: 210773 - protein, 14 aa, Homo sapiens
  CDR3 for alpha chain variable domain of TCR clone 105387 (TRAV17, TRAJ31)
CATVLRNNNARLMF

SEQ ID NO: 210774 - protein, 14 aa, Homo sapiens
  CDR3 for beta chain variable domain of TCR clone 105387 (TRBV12-4, TRBJ2-5)
CASSLGQKQETQYF

SEQ ID NO: 210775 - protein, 13 aa, Homo sapiens
  CDR3 for alpha chain variable domain of TCR clone 105388 (TRAV26-1, TRAJ30)
CIVRVESNDKIIF

SEQ ID NO: 210776 - protein, 15 aa, Homo sapiens
  CDR3 for beta chain variable domain of TCR clone 105388 (TRBV6-1, TRBJ2-3)
CVSSERGGITDTQYF

SEQ ID NO: 210777 - protein, 13 aa, Homo sapiens
  CDR3 for alpha chain variable domain of TCR clone 105389 (TRAV12-2, TRAJ15)
CAVFNQAGTALIF

SEQ ID NO: 210778 - protein, 23 aa, Homo sapiens
  CDR3 for beta chain variable domain of TCR clone 105389 (TRBV7-8, TRBJ1-5)
RRTPPCISGPAAGGGGADQPQHF

SEQ ID NO: 210779 - protein, 14 aa, Homo sapiens
  CDR3 for alpha chain variable domain of TCR clone 105390 (TRAV3, TRAJ36)
CAVRDGTGANNLFF

SEQ ID NO: 210780 - protein, 16 aa, Homo sapiens
  CDR3 for beta chain variable domain of TCR clone 105390 (TRBV7-3, TRBJ2-5)
CASIQLGGSVQETQYF

SEQ ID NO: 210781 - protein, 11 aa, Homo sapiens
  CDR3 for alpha chain variable domain of TCR clone 105391 (TRAV27, TRAJ47)
SIVEYGNKLVC

SEQ ID NO: 210782 - protein, 18 aa, Homo sapiens
  CDR3 for beta chain variable domain of TCR clone 105391 (TRBV2, TRBJ2-1)
CASRGLAGGPRTYNEQFF

SEQ ID NO: 210783 - protein, 16 aa, Homo sapiens
  CDR3 for alpha chain variable domain of TCR clone 105392 (TRAV1-2, TRAJ18)
CAVRVERGSTLGRLYF

SEQ ID NO: 210784 - protein, 16 aa, Homo sapiens
  CDR3 for beta chain variable domain of TCR clone 105392 (TRBV20-1, TRBJ2-7)
CSASTSGRLSPYEQYF

SEQ ID NO: 210785 - protein, 13 aa, Homo sapiens
  CDR3 for alpha chain variable domain of TCR clone 105393 (TRAV38-1, TRAJ42)
CARWGGSQGNLIF

SEQ ID NO: 210786 - protein, 12 aa, Homo sapiens
  CDR3 for beta chain variable domain of TCR clone 105393 (TRBV11-2, TRBJ2-2)
CASSLGGGELFF

SEQ ID NO: 210787 - protein, 11 aa, Homo sapiens
  CDR3 for alpha chain variable domain of TCR clone 105394 (TRAV3, TRAJ21)
CALGNFNKFYF

SEQ ID NO: 210788 - protein, 14 aa, Homo sapiens
  CDR3 for beta chain variable domain of TCR clone 105394 (TRBV6-3, TRBJ1-1)
CASSYHSKNTEAFF

SEQ ID NO: 210789 - protein, 17 aa, Homo sapiens
  CDR3 for alpha chain variable domain of TCR clone 105395 (TRAV3, TRAJ6)
CAVRDGPRAGGSYIPTF

SEQ ID NO: 210790 - protein, 16 aa, Homo sapiens
  CDR3 for beta chain variable domain of TCR clone 105395 (TRBV15, TRBJ2-3)
CATRLSGGRAPDTQYF

SEQ ID NO: 210791 - protein, 16 aa, Homo sapiens
  CDR3 for alpha chain variable domain of TCR clone 105396 (TRAV3, TRAJ10)
CAVRDMRSGGGNKLTF

SEQ ID NO: 210792 - protein, 14 aa, Homo sapiens
  CDR3 for beta chain variable domain of TCR clone 105396 (TRBV6-1, TRBJ1-3)
CASVQGGGGNTIYF

SEQ ID NO: 210793 - protein, 15 aa, Homo sapiens
  CDR3 for alpha chain variable domain of TCR clone 105397 (TRAV12-1, TRAJ36)
CVVNEHQTGANNLFF

SEQ ID NO: 210794 - protein, 12 aa, Homo sapiens
  CDR3 for beta chain variable domain of TCR clone 105397 (TRBV29-1, TRBJ2-3)
CSVTGGADTQNF

SEQ ID NO: 210795 - protein, 16 aa, Homo sapiens
  CDR3 for alpha chain variable domain of TCR clone 105398 (TRAV23/DV6, TRAJ9)
CAASIGGNTGGFKTIF

SEQ ID NO: 210796 - protein, 14 aa, Homo sapiens
  CDR3 for beta chain variable domain of TCR clone 105398 (TRBV11-2, TRBJ2-1)
CASTTGQGNNEQFF

SEQ ID NO: 210797 - protein, 11 aa, Homo sapiens
  CDR3 for alpha chain variable domain of TCR clone 105399 (TRAV1-2, TRAJ31)
CAVKNDARLMF

SEQ ID NO: 210798 - protein, 12 aa, Homo sapiens
  CDR3 for beta chain variable domain of TCR clone 105399 (TRBV20-1, TRBJ2-5)
CSAPRSQETQYF

SEQ ID NO: 210799 - protein, 13 aa, Homo sapiens
  CDR3 for alpha chain variable domain of TCR clone 105400 (TRAV29/DV5, TRAJ31)
CAASRNNNARLMF

SEQ ID NO: 210800 - protein, 18 aa, Homo sapiens
  CDR3 for beta chain variable domain of TCR clone 105400 (TRBV5-8, TRBJ2-7)
CASSPHYRVWATSSTSGR

SEQ ID NO: 210801 - protein, 14 aa, Homo sapiens
  CDR3 for alpha chain variable domain of TCR clone 105401 (TRAV4, TRAJ30)
CLVGDMNRDDKIIF

SEQ ID NO: 210802 - protein, 16 aa, Homo sapiens
  CDR3 for beta chain variable domain of TCR clone 105401 (TRBV20-1, TRBJ1-4)
CSAPGQGLLTNDKLFF

SEQ ID NO: 210803 - protein, 13 aa, Homo sapiens
  CDR3 for alpha chain variable domain of TCR clone 105402 (TRAV13-2, TRAJ13)
CAERPGGYQKVTF

SEQ ID NO: 210804 - protein, 16 aa, Homo sapiens
  CDR3 for beta chain variable domain of TCR clone 105402 (TRBV20-1, TRBJ1-4)
CSAPGQGLLTNEKLFF

SEQ ID NO: 210805 - protein, 11 aa, Homo sapiens
  CDR3 for alpha chain variable domain of TCR clone 105403 (TRAV12-1, TRAJ43)
CVEYDNNDMRF

SEQ ID NO: 210806 - protein, 14 aa, Homo sapiens
  CDR3 for beta chain variable domain of TCR clone 105403 (TRBV7-2, TRBJ1-1)
CASSFLTGTTEAFF

SEQ ID NO: 210807 - protein, 16 aa, Homo sapiens
  CDR3 for alpha chain variable domain of TCR clone 105404 (TRAV21, TRAJ33)
CAVSPASMDSNYQLIW

SEQ ID NO: 210808 - protein, 17 aa, Homo sapiens
  CDR3 for beta chain variable domain of TCR clone 105404 (TRBV2, TRBJ1-4)
CASSKREFTQGEEKLFF

SEQ ID NO: 210809 - protein, 18 aa, Homo sapiens
  CDR3 for alpha chain variable domain of TCR clone 105405 (TRAV26-2, TRAJ54)
CILRDVEVGIQRAQKLVF

SEQ ID NO: 210810 - protein, 17 aa, Homo sapiens
  CDR3 for beta chain variable domain of TCR clone 105405 (TRBV20-1, TRBJ1-5)
CSASLSPGQGGNQPQHF

SEQ ID NO: 210811 - protein, 17 aa, Homo sapiens
  CDR3 for alpha chain variable domain of TCR clone 105406 (TRAV36/DV7, TRAJ52)
CAVAQRAGGTSYGKLTF

SEQ ID NO: 210812 - protein, 15 aa, Homo sapiens
  CDR3 for beta chain variable domain of TCR clone 105406 (TRBV10-1, TRBJ2-3)
CASSATSGGFDTQYF

SEQ ID NO: 210813 - protein, 14 aa, Homo sapiens
  CDR3 for alpha chain variable domain of TCR clone 105407 (TRAV3, TRAJ40)
CAVRDRRGTYKYIF

SEQ ID NO: 210814 - protein, 15 aa, Homo sapiens
  CDR3 for beta chain variable domain of TCR clone 105407 (TRBV11-1, TRBJ1-3)
CASTDHRAFGNTIYF

SEQ ID NO: 210815 - protein, 16 aa, Homo sapiens
  CDR3 for alpha chain variable domain of TCR clone 105408 (TRAV26-1, TRAJ53)
CIVRVAMGGSNYKLTF

SEQ ID NO: 210816 - protein, 16 aa, Homo sapiens
  CDR3 for beta chain variable domain of TCR clone 105408 (TRBV28, TRBJ2-7)
CASSLFLETGGPEQYF

SEQ ID NO: 210817 - protein, 12 aa, Homo sapiens
  CDR3 for alpha chain variable domain of TCR clone 105409 (TRAV26-2, TRAJ21)
CILRGNFNKFYF

SEQ ID NO: 210818 - protein, 14 aa, Homo sapiens
  CDR3 for beta chain variable domain of TCR clone 105409 (TRBV7-9, TRBJ1-1)
CASTPLQSYTEAFF

SEQ ID NO: 210819 - protein, 14 aa, Homo sapiens
  CDR3 for alpha chain variable domain of TCR clone 105410 (TRAV12-2, TRAJ45)
CAVYSGGVADGLTF

SEQ ID NO: 210820 - protein, 14 aa, Homo sapiens
  CDR3 for beta chain variable domain of TCR clone 105410 (TRBV6-5, TRBJ1-2)
CASTRGGGSDGYTF

SEQ ID NO: 210821 - protein, 12 aa, Homo sapiens
  CDR3 for alpha chain variable domain of TCR clone 105411 (TRAV12-3, TRAJ17)
CAMTLTGNKLTF

SEQ ID NO: 210822 - protein, 20 aa, Homo sapiens
  CDR3 for beta chain variable domain of TCR clone 105411 (TRBV19, TRBJ2-1)
CASSISRAVTSTRLNNEQFF

SEQ ID NO: 210823 - protein, 12 aa, Homo sapiens
  CDR3 for alpha chain variable domain of TCR clone 105412 (TRAV3, TRAJ7)
CADLLWEQKTRF

SEQ ID NO: 210824 - protein, 13 aa, Homo sapiens
  CDR3 for beta chain variable domain of TCR clone 105412 (TRBV7-3, TRBJ2-5)
CASSFRGGETQYF

SEQ ID NO: 210825 - protein, 14 aa, Homo sapiens
  CDR3 for alpha chain variable domain of TCR clone 105413 (TRAV2, TRAJ23)
CAVMEDNQGGKLIF

SEQ ID NO: 210826 - protein, 15 aa, Homo sapiens
  CDR3 for beta chain variable domain of TCR clone 105413 (TRBV6-3, TRBJ2-2)
CASSFLATLTGELFF

SEQ ID NO: 210827 - protein, 16 aa, Homo sapiens
  CDR3 for alpha chain variable domain of TCR clone 105414 (TRAV3, TRAJ28)
CAVLPRFGAGSYQLTF

SEQ ID NO: 210828 - protein, 13 aa, Homo sapiens
  CDR3 for beta chain variable domain of TCR clone 105414 (TRBV12-4, TRBJ2-5)
CASRLAVQETQYF

SEQ ID NO: 210829 - protein, 12 aa, Homo sapiens
  CDR3 for alpha chain variable domain of TCR clone 105415 (TRAV20, TRAJ49)
CAVNKDGNQFYF

SEQ ID NO: 210830 - protein, 17 aa, Homo sapiens
  CDR3 for beta chain variable domain of TCR clone 105415 (TRBV19, TRBJ2-6)
CASSSGTVFSGANVLTF

SEQ ID NO: 210831 - protein, 16 aa, Homo sapiens
  CDR3 for alpha chain variable domain of TCR clone 105416 (TRAV30, TRAJ24)
CGTEIVDADSWGKFQF

SEQ ID NO: 210832 - protein, 16 aa, Homo sapiens
  CDR3 for beta chain variable domain of TCR clone 105416 (TRBV7-3, TRBJ2-3)
CASSLSGYRPEDTQYF

SEQ ID NO: 210833 - protein, 16 aa, Homo sapiens
  CDR3 for alpha chain variable domain of TCR clone 105417 (TRAV21, TRAJ33)
CAVSPASMDSNSQLIW

SEQ ID NO: 210834 - protein, 17 aa, Homo sapiens
  CDR3 for beta chain variable domain of TCR clone 105417 (TRBV2, TRBJ1-4)
CASSKRELTQGEEKLFF

SEQ ID NO: 210835 - protein, 17 aa, Homo sapiens
  CDR3 for alpha chain variable domain of TCR clone 105418 (TRAV4, TRAJ13)
CLVGVQGSSVGYQKVTF

SEQ ID NO: 210836 - protein, 18 aa, Homo sapiens
  CDR3 for beta chain variable domain of TCR clone 105418 (TRBV15, TRBJ2-3)
CATSRDGARSWDTDTQYF

SEQ ID NO: 210837 - protein, 19 aa, Homo sapiens
  CDR3 for alpha chain variable domain of TCR clone 105419 (TRAV3, TRAJ6)
CAVRDRNPSRSGGSYIATF

SEQ ID NO: 210838 - protein, 15 aa, Homo sapiens
  CDR3 for beta chain variable domain of TCR clone 105419 (TRBV18, TRBJ2-7)
CASSPTFMDSYEQYF

SEQ ID NO: 210839 - protein, 23 aa, Homo sapiens
  CDR3 for alpha chain variable domain of TCR clone 105420 (TRAV26-1, TRAJ38)
CIADNAGNNHIQNPVPAVYQLRD

SEQ ID NO: 210840 - protein, 13 aa, Homo sapiens
  CDR3 for beta chain variable domain of TCR clone 105420 (TRBV20-1, TRBJ1-1)
CSARGGGNTEAFF

SEQ ID NO: 210841 - protein, 12 aa, Homo sapiens
  CDR3 for alpha chain variable domain of TCR clone 105421 (TRAV8-3, TRAJ20)
CAVGANDYKLSF

SEQ ID NO: 210842 - protein, 14 aa, Homo sapiens
  CDR3 for beta chain variable domain of TCR clone 105421 (TRBV11-2, TRBJ2-7)
CASSLGAGAYEQYF

SEQ ID NO: 210843 - protein, 13 aa, Homo sapiens
  CDR3 for alpha chain variable domain of TCR clone 105422 (TRAV2, TRAJ40)
CAVATSGTYKYIF

SEQ ID NO: 210844 - protein, 16 aa, Homo sapiens
  CDR3 for beta chain variable domain of TCR clone 105422 (TRBV2, TRBJ2-1)
CASSVGGSLSYNEQFF

SEQ ID NO: 210845 - protein, 11 aa, Homo sapiens
  CDR3 for alpha chain variable domain of TCR clone 105423 (TRAV2, TRAJ33)
CAVESNYQLIW

SEQ ID NO: 210846 - protein, 14 aa, Homo sapiens
  CDR3 for beta chain variable domain of TCR clone 105423 (TRBV7-6, TRBJ2-7)
CASSFRQGADEQYF

SEQ ID NO: 210847 - protein, 13 aa, Homo sapiens
  CDR3 for alpha chain variable domain of TCR clone 105424 (TRAV38-2/DV8, TRAJ34)
CAYRTWNTDKLIF

SEQ ID NO: 210848 - protein, 16 aa, Homo sapiens
  CDR3 for beta chain variable domain of TCR clone 105424 (TRBV12-5, TRBJ2-5)
CASGPRTSGNQETQYF

SEQ ID NO: 210849 - protein, 14 aa, Homo sapiens
  CDR3 for alpha chain variable domain of TCR clone 105425 (TRAV13-1, TRAJ44)
CAAKATGTASKLTF

SEQ ID NO: 210850 - protein, 12 aa, Homo sapiens
  CDR3 for beta chain variable domain of TCR clone 105425 (TRBV7-8, TRBJ2-7)
CARSLGDREQYF

SEQ ID NO: 210851 - protein, 13 aa, Homo sapiens
  CDR3 for alpha chain variable domain of TCR clone 105426 (TRAV27, TRAJ45)
CRSSGGGANGLTF

SEQ ID NO: 210852 - protein, 15 aa, Homo sapiens
  CDR3 for beta chain variable domain of TCR clone 105426 (TRBV20-1, TRBJ2-7)
CSARDRVSGMDEQYF

SEQ ID NO: 210853 - protein, 12 aa, Homo sapiens
  CDR3 for alpha chain variable domain of TCR clone 105427 (TRAV30, TRAJ39)
CGRGSAGNMLTF

SEQ ID NO: 210854 - protein, 14 aa, Homo sapiens
  CDR3 for beta chain variable domain of TCR clone 105427 (TRBV10-3, TRBJ2-1)
CAIRTDRGLNEQFF

SEQ ID NO: 210855 - protein, 13 aa, Homo sapiens
  CDR3 for alpha chain variable domain of TCR clone 105428 (TRAV21, TRAJ27)
CAARPGHAGKSTF

SEQ ID NO: 210856 - protein, 15 aa, Homo sapiens
  CDR3 for beta chain variable domain of TCR clone 105428 (TRBV11-3, TRBJ2-7)
CASSPGPASSYEQYF

SEQ ID NO: 210857 - protein, 16 aa, Homo sapiens
  CDR3 for alpha chain variable domain of TCR clone 105429 (TRAV38-1, TRAJ37)
CAFKGDGSSNTGKLIF

SEQ ID NO: 210858 - protein, 13 aa, Homo sapiens
  CDR3 for beta chain variable domain of TCR clone 105429 (TRBV12-4, TRBJ2-5)
CASRLFRRETQYF

SEQ ID NO: 210859 - protein, 14 aa, Homo sapiens
  CDR3 for alpha chain variable domain of TCR clone 105430 (TRAV8-3, TRAJ44)
CAVGLTGTASKLIF

SEQ ID NO: 210860 - protein, 12 aa, Homo sapiens
  CDR3 for beta chain variable domain of TCR clone 105430 (TRBV7-3, TRBJ2-1)
CASSLGFNEQFF

SEQ ID NO: 210861 - protein, 14 aa, Homo sapiens
  CDR3 for alpha chain variable domain of TCR clone 105431 (TRAV1-2, TRAJ16)
CAVNRFSDGQKLLF

SEQ ID NO: 210862 - protein, 16 aa, Homo sapiens
  CDR3 for beta chain variable domain of TCR clone 105431 (TRBV12-5, TRBJ2-5)
CASGPRTSGNQETKYF

SEQ ID NO: 210863 - protein, 15 aa, Homo sapiens
  CDR3 for alpha chain variable domain of TCR clone 105432 (TRAV12-1, TRAJ44)
CVADLPTGTASKLTF

SEQ ID NO: 210864 - protein, 13 aa, Homo sapiens
  CDR3 for beta chain variable domain of TCR clone 105432 (TRBV6-5, TRBJ2-5)
CSSSPQGGETQYF

SEQ ID NO: 210865 - protein, 13 aa, Homo sapiens
  CDR3 for alpha chain variable domain of TCR clone 105433 (TRAV8-2, TRAJ49)
CVVTPNTGNQIYF

SEQ ID NO: 210866 - protein, 15 aa, Homo sapiens
  CDR3 for beta chain variable domain of TCR clone 105433 (TRBV11-2, TRBJ2-1)
CASSLTSGGYNEQFF

SEQ ID NO: 210867 - protein, 17 aa, Homo sapiens
  CDR3 for alpha chain variable domain of TCR clone 105434 (TRAV36/DV7, TRAJ52)
CAVARRAGGTSYGKLTF

SEQ ID NO: 210868 - protein, 15 aa, Homo sapiens
  CDR3 for beta chain variable domain of TCR clone 105434 (TRBV6-5, TRBJ1-2)
CASSYSQAFNYGYTF

SEQ ID NO: 210869 - protein, 15 aa, Homo sapiens
  CDR3 for alpha chain variable domain of TCR clone 105435 (TRAV21, TRAJ57)
CAVIINQGGSEKLVF

SEQ ID NO: 210870 - protein, 14 aa, Homo sapiens
  CDR3 for beta chain variable domain of TCR clone 105435 (TRBV5-1, TRBJ2-2)
CASSLIWIPGELFF

SEQ ID NO: 210871 - protein, 14 aa, Homo sapiens
  CDR3 for alpha chain variable domain of TCR clone 105436 (TRAV2, TRAJ37)
CAVDFTSNTGQLIF

SEQ ID NO: 210872 - protein, 13 aa, Homo sapiens
  CDR3 for beta chain variable domain of TCR clone 105436 (TRBV20-1, TRBJ1-1)
CSAPLGGGTEAFF

SEQ ID NO: 210873 - protein, 13 aa, Homo sapiens
  CDR3 for alpha chain variable domain of TCR clone 105437 (TRAV20, TRAJ48)
CAVQGVGNEKLTF

SEQ ID NO: 210874 - protein, 19 aa, Homo sapiens
  CDR3 for beta chain variable domain of TCR clone 105437 (TRBV2, TRBJ2-2)
CASSKPGLAGGGNTGELFF

SEQ ID NO: 210875 - protein, 15 aa, Homo sapiens
  CDR3 for alpha chain variable domain of TCR clone 105438 (TRAV34, TRAJ38)
CGADFTPGNNRKLIW

SEQ ID NO: 210876 - protein, 14 aa, Homo sapiens
  CDR3 for beta chain variable domain of TCR clone 105438 (TRBV7-2, TRBJ1-1)
CASSFLTGKTEAFF

SEQ ID NO: 210877 - protein, 14 aa, Homo sapiens
  CDR3 for alpha chain variable domain of TCR clone 105439 (TRAV12-2, TRAJ53)
CRELGGGSNYKLTF

SEQ ID NO: 210878 - protein, 14 aa, Homo sapiens
  CDR3 for beta chain variable domain of TCR clone 105439 (TRBV19, TRBJ2-2)
CASSTLHRSGELFF

SEQ ID NO: 210879 - protein, 15 aa, Homo sapiens
  CDR3 for alpha chain variable domain of TCR clone 105440 (TRAV12-2, TRAJ53)
CAVNGGGGSNYKLTF

SEQ ID NO: 210880 - protein, 12 aa, Homo sapiens
  CDR3 for beta chain variable domain of TCR clone 105440 (TRBV7-6, TRBJ2-5)
CASSLSQGTQYF

SEQ ID NO: 210881 - protein, 11 aa, Homo sapiens
  CDR3 for alpha chain variable domain of TCR clone 105441 (TRAV3, TRAJ13)
CAVTSYQKVTF

SEQ ID NO: 210882 - protein, 15 aa, Homo sapiens
  CDR3 for beta chain variable domain of TCR clone 105441 (TRBV7-9, TRBJ2-7)
CASSSSGLADYEQYF

SEQ ID NO: 210883 - protein, 13 aa, Homo sapiens
  CDR3 for alpha chain variable domain of TCR clone 105442 (TRAV21, TRAJ27)
CAARPGNAGKSTF

SEQ ID NO: 210884 - protein, 20 aa, Homo sapiens
  CDR3 for beta chain variable domain of TCR clone 105442 (TRBV7-8, TRBJ2-2)
CASSHLFLGPTIHITGELFF

SEQ ID NO: 210885 - protein, 12 aa, Homo sapiens
  CDR3 for alpha chain variable domain of TCR clone 105443 (TRAV36/DV7, TRAJ40)
CAVGTGTYKYIF

SEQ ID NO: 210886 - protein, 13 aa, Homo sapiens
  CDR3 for beta chain variable domain of TCR clone 105443 (TRBV13, TRBJ2-1)
CASTPGSYNEQFF

SEQ ID NO: 210887 - protein, 17 aa, Homo sapiens
  CDR3 for alpha chain variable domain of TCR clone 105444 (TRAV3, TRAJ6)
CVVRDGPRAGGSYIPTF

SEQ ID NO: 210888 - protein, 18 aa, Homo sapiens
  CDR3 for beta chain variable domain of TCR clone 105444 (TRBV7-9, TRBJ2-7)
CASSLTTSGSRTWYEQYF

SEQ ID NO: 210889 - protein, 12 aa, Homo sapiens
  CDR3 for alpha chain variable domain of TCR clone 105445 (TRAV8-3, TRAJ26)
CAGDNYGQNFVF

SEQ ID NO: 210890 - protein, 17 aa, Homo sapiens
  CDR3 for beta chain variable domain of TCR clone 105445 (TRBV25-1, TRBJ2-1)
CASSAYGQGRGVYEQFF

SEQ ID NO: 210891 - protein, 12 aa, Homo sapiens
  CDR3 for alpha chain variable domain of TCR clone 105446 (TRAV8-3, TRAJ43)
CAVGAGNNDMSF

SEQ ID NO: 210892 - protein, 14 aa, Homo sapiens
  CDR3 for beta chain variable domain of TCR clone 105446 (TRBV4-2, TRBJ1-5)
CASSRDRGNQPQHF

SEQ ID NO: 210893 - protein, 13 aa, Homo sapiens
  CDR3 for alpha chain variable domain of TCR clone 105447 (TRAV13-1, TRAJ21)
CAASIYNFNKFYF

SEQ ID NO: 210894 - protein, 13 aa, Homo sapiens
  CDR3 for beta chain variable domain of TCR clone 105447 (TRBV27, TRBJ1-4)
CASSLMGDEKLFS

SEQ ID NO: 210895 - protein, 16 aa, Homo sapiens
  CDR3 for alpha chain variable domain of TCR clone 105448 (TRAV3, TRAJ37)
CAVRVRGSGNTGKLIF

SEQ ID NO: 210896 - protein, 12 aa, Homo sapiens
  CDR3 for beta chain variable domain of TCR clone 105448 (TRBV28, TRBJ2-3)
CASSLYRDTQHF

SEQ ID NO: 210897 - protein, 15 aa, Homo sapiens
  CDR3 for alpha chain variable domain of TCR clone 105449 (TRAV21, TRAJ24)
CAARSSTDSWGKLQF

SEQ ID NO: 210898 - protein, 11 aa, Homo sapiens
  CDR3 for beta chain variable domain of TCR clone 105449 (TRBV11-2, TRBJ2-2)
CASSLHGELFF

SEQ ID NO: 210899 - protein, 14 aa, Homo sapiens
  CDR3 for alpha chain variable domain of TCR clone 105450 (TRAV2, TRAJ9)
CAVEDRSGGFKTIF

SEQ ID NO: 210900 - protein, 16 aa, Homo sapiens
  CDR3 for beta chain variable domain of TCR clone 105450 (TRBV24-1, TRBJ2-3)
CATSDPGTGATDTQYF

SEQ ID NO: 210901 - protein, 13 aa, Homo sapiens
  CDR3 for alpha chain variable domain of TCR clone 105451 (TRAV13-1, TRAJ6)
CAKGSGGSYIPTF

SEQ ID NO: 210902 - protein, 15 aa, Homo sapiens
  CDR3 for beta chain variable domain of TCR clone 105451 (TRBV2, TRBJ2-1)
CASSELAGSYNEQFF

SEQ ID NO: 210903 - protein, 11 aa, Homo sapiens
  CDR3 for alpha chain variable domain of TCR clone 105452 (TRAV13-1, TRAJ39)
CASHAGNMLTF

SEQ ID NO: 210904 - protein, 16 aa, Homo sapiens
  CDR3 for beta chain variable domain of TCR clone 105452 (TRBV19, TRBJ2-1)
CASSKAGPSSYNEQFF

SEQ ID NO: 210905 - protein, 23 aa, Homo sapiens
  CDR3 for alpha chain variable domain of TCR clone 105453 (TRAV26-1, TRAJ38)
CIADNAGNNHIQNPDPAVYQLSD

SEQ ID NO: 210906 - protein, 17 aa, Homo sapiens
  CDR3 for beta chain variable domain of TCR clone 105453 (TRBV11-2, TRBJ2-6)
CASSQRDIFSGANVLTF

SEQ ID NO: 210907 - protein, 11 aa, Homo sapiens
  CDR3 for alpha chain variable domain of TCR clone 105454 (TRAV2, TRAJ13)
CASGGYQKVTF

SEQ ID NO: 210908 - protein, 16 aa, Homo sapiens
  CDR3 for beta chain variable domain of TCR clone 105454 (TRBV9, TRBJ2-1)
CASSVGGGGNYNEQFF

SEQ ID NO: 210909 - protein, 14 aa, Homo sapiens
  CDR3 for alpha chain variable domain of TCR clone 105455 (TRAV1-2, TRAJ16)
CAVNRFSDGQKLLF

SEQ ID NO: 210910 - protein, 16 aa, Homo sapiens
  CDR3 for beta chain variable domain of TCR clone 105455 (TRBV7-3, TRBJ2-5)
CASIQPGGSVQETQYF

SEQ ID NO: 210911 - protein, 13 aa, Homo sapiens
  CDR3 for alpha chain variable domain of TCR clone 105456 (TRAV21, TRAJ57)
CAGTQGGSEKLVF

SEQ ID NO: 210912 - protein, 11 aa, Homo sapiens
  CDR3 for beta chain variable domain of TCR clone 105456 (TRBV11-2, TRBJ2-2)
CASSLPGELFF

SEQ ID NO: 210913 - protein, 14 aa, Homo sapiens
  CDR3 for alpha chain variable domain of TCR clone 105457 (TRAV38-1, TRAJ29)
CAFITPSGNTPLVF

SEQ ID NO: 210914 - protein, 18 aa, Homo sapiens
  CDR3 for beta chain variable domain of TCR clone 105457 (TRBV7-9, TRBJ2-7)
CASSLTTSGSRTWYEQYF

SEQ ID NO: 210915 - protein, 15 aa, Homo sapiens
  CDR3 for alpha chain variable domain of TCR clone 105458 (TRAV3, TRAJ5)
CAVRDLDTGRRALTF

SEQ ID NO: 210916 - protein, 13 aa, Homo sapiens
  CDR3 for beta chain variable domain of TCR clone 105458 (TRBV18, TRBJ2-1)
CASGLASNNEQFF

SEQ ID NO: 210917 - protein, 14 aa, Homo sapiens
  CDR3 for alpha chain variable domain of TCR clone 105459 (TRAV27, TRAJ37)
CAGERSSNTGNLIF

SEQ ID NO: 210918 - protein, 15 aa, Homo sapiens
  CDR3 for beta chain variable domain of TCR clone 105459 (TRBV11-3, TRBJ1-6)
CASSLDWGANSPLHF

SEQ ID NO: 210919 - protein, 10 aa, Homo sapiens
  CDR3 for alpha chain variable domain of TCR clone 105460 (TRAV23/DV6, TRAJ57)
CAASSTLSQG

SEQ ID NO: 210920 - protein, 16 aa, Homo sapiens
  CDR3 for beta chain variable domain of TCR clone 105460 (TRBV2, TRBJ2-1)
CASSVGGSLSYNEQFF

SEQ ID NO: 210921 - protein, 12 aa, Homo sapiens
  CDR3 for alpha chain variable domain of TCR clone 105461 (TRAV8-1, TRAJ26)
CAVNSYGQNFVF

SEQ ID NO: 210922 - protein, 12 aa, Homo sapiens
  CDR3 for beta chain variable domain of TCR clone 105461 (TRBV12-4, TRBJ2-7)
CASSLGGYEQYF

SEQ ID NO: 210923 - protein, 13 aa, Homo sapiens
  CDR3 for alpha chain variable domain of TCR clone 105462 (TRAV12-3, TRAJ56)
CALATGANSKLTF

SEQ ID NO: 210924 - protein, 12 aa, Homo sapiens
  CDR3 for beta chain variable domain of TCR clone 105462 (TRBV10-2, TRBJ2-3)
RASSPESDTQYF

SEQ ID NO: 210925 - protein, 23 aa, Homo sapiens
  CDR3 for alpha chain variable domain of TCR clone 105463 (TRAV10, TRAJ32)
CVVSPAVVLQTSSSFELALCLLS

SEQ ID NO: 210926 - protein, 14 aa, Homo sapiens
  CDR3 for beta chain variable domain of TCR clone 105463 (TRBV5-4, TRBJ2-2)
CASRLDGGTGELFF

SEQ ID NO: 210927 - protein, 11 aa, Homo sapiens
  CDR3 for alpha chain variable domain of TCR clone 105464 (TRAV2, TRAJ31)
CAAGPPARLMF

SEQ ID NO: 210928 - protein, 13 aa, Homo sapiens
  CDR3 for beta chain variable domain of TCR clone 105464 (TRBV4-1, TRBJ2-3)
CASSQPPTDTKYF

SEQ ID NO: 210929 - protein, 19 aa, Homo sapiens
  CDR3 for alpha chain variable domain of TCR clone 105465 (TRAV26-1, TRAJ52)
CIVRAHRNAGGTSYGKLTF

SEQ ID NO: 210930 - protein, 15 aa, Homo sapiens
  CDR3 for beta chain variable domain of TCR clone 105465 (TRBV29-1, TRBJ2-1)
CSGRYRKSSYNEQFF

SEQ ID NO: 210931 - protein, 18 aa, Homo sapiens
  CDR3 for alpha chain variable domain of TCR clone 105466 (TRAV21, TRAJ52)
CSVRPSPAGGTSYGKLTF

SEQ ID NO: 210932 - protein, 14 aa, Homo sapiens
  CDR3 for beta chain variable domain of TCR clone 105466 (TRBV6-1, TRBJ1-3)
CASVQGGGGNTIYF

SEQ ID NO: 210933 - protein, 14 aa, Homo sapiens
  CDR3 for alpha chain variable domain of TCR clone 105467 (TRAV26-1, TRAJ34)
FIVRVAYNTDKLIF

SEQ ID NO: 210934 - protein, 14 aa, Homo sapiens
  CDR3 for beta chain variable domain of TCR clone 105467 (TRBV12-5, TRBJ2-5)
CASGSRTHQETQYF

SEQ ID NO: 210935 - protein, 18 aa, Homo sapiens
  CDR3 for alpha chain variable domain of TCR clone 105468 (TRAV21, TRAJ52)
CAVRPSPAGGTSYGELTF

SEQ ID NO: 210936 - protein, 15 aa, Homo sapiens
  CDR3 for beta chain variable domain of TCR clone 105468 (TRBV20-1, TRBJ2-7)
CSARDRVSGMDEQYF

SEQ ID NO: 210937 - protein, 11 aa, Homo sapiens
  CDR3 for alpha chain variable domain of TCR clone 105469 (TRAV23/DV6, TRAJ48)
CAPRWGAKLTF

SEQ ID NO: 210938 - protein, 14 aa, Homo sapiens
  CDR3 for beta chain variable domain of TCR clone 105469 (TRBV29-1, TRBJ1-3)
CSVADRVVGNTIYF

SEQ ID NO: 210939 - protein, 12 aa, Homo sapiens
  CDR3 for alpha chain variable domain of TCR clone 105470 (TRAV1-1, TRAJ8)
CAGGTGFQKLVF

SEQ ID NO: 210940 - protein, 17 aa, Homo sapiens
  CDR3 for beta chain variable domain of TCR clone 105470 (TRBV7-9, TRBJ1-4)
CASSRTGGLMKNCFLAV

SEQ ID NO: 210941 - protein, 16 aa, Homo sapiens
  CDR3 for alpha chain variable domain of TCR clone 105471 (TRAV13-1, TRAJ17)
CAASKGVKAAGNKLTF

SEQ ID NO: 210942 - protein, 15 aa, Homo sapiens
  CDR3 for beta chain variable domain of TCR clone 105471 (TRBV20-1, TRBJ1-5)
CSAREGGYSNQPQHS

SEQ ID NO: 210943 - protein, 17 aa, Homo sapiens
  CDR3 for alpha chain variable domain of TCR clone 105472 (TRAV3, TRAJ6)
CAVGDGPRAGGSYIPTF

SEQ ID NO: 210944 - protein, 12 aa, Homo sapiens
  CDR3 for beta chain variable domain of TCR clone 105472 (TRBV11-2, TRBJ2-2)
CASSLGGGELFF

SEQ ID NO: 210945 - protein, 13 aa, Homo sapiens
  CDR3 for alpha chain variable domain of TCR clone 105473 (TRAV17, TRAJ39)
CATEDNAGNMLTF

SEQ ID NO: 210946 - protein, 14 aa, Homo sapiens
  CDR3 for beta chain variable domain of TCR clone 105473 (TRBV7-2, TRBJ2-7)
CASSPKTSFYEQYF

SEQ ID NO: 210947 - protein, 14 aa, Homo sapiens
  CDR3 for alpha chain variable domain of TCR clone 105474 (TRAV26-1, TRAJ39)
CIVFTNNAGNMLTF

SEQ ID NO: 210948 - protein, 15 aa, Homo sapiens
  CDR3 for beta chain variable domain of TCR clone 105474 (TRBV19, TRBJ2-4)
CASSLTGLTKNIQDF

SEQ ID NO: 210949 - protein, 14 aa, Homo sapiens
  CDR3 for alpha chain variable domain of TCR clone 105475 (TRAV13-1, TRAJ40)
CAASMTSGTYKYIF

SEQ ID NO: 210950 - protein, 15 aa, Homo sapiens
  CDR3 for beta chain variable domain of TCR clone 105475 (TRBV7-3, TRBJ2-1)
CASSPTGGGEVKQFF

SEQ ID NO: 210951 - protein, 16 aa, Homo sapiens
  CDR3 for alpha chain variable domain of TCR clone 105476 (TRAV1-1, TRAJ29)
CAVRSTRNSGNTPLVF

SEQ ID NO: 210952 - protein, 14 aa, Homo sapiens
  CDR3 for beta chain variable domain of TCR clone 105476 (TRBV25-1, TRBJ1-1)
CASTHLGGNTEAFF

SEQ ID NO: 210953 - protein, 14 aa, Homo sapiens
  CDR3 for alpha chain variable domain of TCR clone 105477 (TRAV29/DV5, TRAJ36)
CAARRKTGANNLFF

SEQ ID NO: 210954 - protein, 14 aa, Homo sapiens
  CDR3 for beta chain variable domain of TCR clone 105477 (TRBV7-2, TRBJ1-2)
CASSRGGTNYGYTF

SEQ ID NO: 210955 - protein, 15 aa, Homo sapiens
  CDR3 for alpha chain variable domain of TCR clone 105478 (TRAV8-3, TRAJ15)
CAVGAPNQAGTALIF

SEQ ID NO: 210956 - protein, 14 aa, Homo sapiens
  CDR3 for beta chain variable domain of TCR clone 105478 (TRBV20-1, TRBJ2-1)
CSSNDEASYNEQFF

SEQ ID NO: 210957 - protein, 16 aa, Homo sapiens
  CDR3 for alpha chain variable domain of TCR clone 105479 (TRAV12-3, TRAJ53)
CAMSPGSGGSNYKLTF

SEQ ID NO: 210958 - protein, 17 aa, Homo sapiens
  CDR3 for beta chain variable domain of TCR clone 105479 (TRBV4-2, TRBJ2-1)
CASSQEGGQGRGNEQFF

SEQ ID NO: 210959 - protein, 13 aa, Homo sapiens
  CDR3 for alpha chain variable domain of TCR clone 105480 (TRAV38-1, TRAJ42)
CARWGGSQGNLIF

SEQ ID NO: 210960 - protein, 17 aa, Homo sapiens
  CDR3 for beta chain variable domain of TCR clone 105480 (TRBV20-1, TRBJ2-1)
CSARAPLAGAWDNEQFF

SEQ ID NO: 210961 - protein, 13 aa, Homo sapiens
  CDR3 for alpha chain variable domain of TCR clone 105481 (TRAV12-3, TRAJ33)
CAMSVNSNYQLIW

SEQ ID NO: 210962 - protein, 14 aa, Homo sapiens
  CDR3 for beta chain variable domain of TCR clone 105481 (TRBV19, TRBJ1-5)
CASSLGPGGEPQHF

SEQ ID NO: 210963 - protein, 14 aa, Homo sapiens
  CDR3 for alpha chain variable domain of TCR clone 105482 (TRAV13-1, TRAJ9)
CAASALTGGFKTIF

SEQ ID NO: 210964 - protein, 13 aa, Homo sapiens
  CDR3 for beta chain variable domain of TCR clone 105482 (TRBV7-3, TRBJ1-1)
CASSQDWGAEAFF

SEQ ID NO: 210965 - protein, 13 aa, Homo sapiens
  CDR3 for alpha chain variable domain of TCR clone 105483 (TRAV8-3, TRAJ44)
CAVVPGTASKLTF

SEQ ID NO: 210966 - protein, 14 aa, Homo sapiens
  CDR3 for beta chain variable domain of TCR clone 105483 (TRBV11-2, TRBJ2-3)
CASSRLARTETQHF

SEQ ID NO: 210967 - protein, 20 aa, Homo sapiens
  CDR3 for alpha chain variable domain of TCR clone 105484 (TRAV12-3, TRAJ52)
CAMTQSYQNAGGTSYGKLTF

SEQ ID NO: 210968 - protein, 13 aa, Homo sapiens
  CDR3 for beta chain variable domain of TCR clone 105484 (TRBV4-2, TRBJ1-1)
CASSQAGNTEAFF

SEQ ID NO: 210969 - protein, 22 aa, Homo sapiens
  CDR3 for alpha chain variable domain of TCR clone 105485 (TRAV34, TRAJ52)
STSVEQTRRSNAGGTSYGKLTF

SEQ ID NO: 210970 - protein, 15 aa, Homo sapiens
  CDR3 for beta chain variable domain of TCR clone 105485 (TRBV7-9, TRBJ1-6)
CDSSSPGRGNSPLHF

SEQ ID NO: 210971 - protein, 14 aa, Homo sapiens
  CDR3 for alpha chain variable domain of TCR clone 105486 (TRAV1-2, TRAJ8)
CAVREDTGFQKLGF

SEQ ID NO: 210972 - protein, 15 aa, Homo sapiens
  CDR3 for beta chain variable domain of TCR clone 105486 (TRBV12-4, TRBJ2-5)
CASSPPTGLQETQYF

SEQ ID NO: 210973 - protein, 13 aa, Homo sapiens
  CDR3 for alpha chain variable domain of TCR clone 105487 (TRAV3, TRAJ31)
CAVREGNNARLLF

SEQ ID NO: 210974 - protein, 15 aa, Homo sapiens
  CDR3 for beta chain variable domain of TCR clone 105487 (TRBV6-1, TRBJ1-1)
CASRTPGQLNTEAFF

SEQ ID NO: 210975 - protein, 13 aa, Homo sapiens
  CDR3 for alpha chain variable domain of TCR clone 105488 (TRAV8-3, TRAJ36)
CAVGATGANNLFF

SEQ ID NO: 210976 - protein, 13 aa, Homo sapiens
  CDR3 for beta chain variable domain of TCR clone 105488 (TRBV7-9, TRBJ1-5)
CASSLRNDQPQHF

SEQ ID NO: 210977 - protein, 11 aa, Homo sapiens
  CDR3 for alpha chain variable domain of TCR clone 105489 (TRAV2, TRAJ13)
CASGGYHKVTF

SEQ ID NO: 210978 - protein, 20 aa, Homo sapiens
  CDR3 for beta chain variable domain of TCR clone 105489 (TRBV28, TRBJ2-1)
CASTPIGRSPGLAGGNEQFF

SEQ ID NO: 210979 - protein, 15 aa, Homo sapiens
  CDR3 for alpha chain variable domain of TCR clone 105490 (TRAV26-1, TRAJ29)
CIVRVEGSGNTPLVF

SEQ ID NO: 210980 - protein, 17 aa, Homo sapiens
  CDR3 for beta chain variable domain of TCR clone 105490 (TRBV4-1, TRBJ1-5)
CASSQQPPTVANQPQHF

SEQ ID NO: 210981 - protein, 13 aa, Homo sapiens
  CDR3 for alpha chain variable domain of TCR clone 105491 (TRAV13-1, TRAJ13)
CAASKGGYQKVTF

SEQ ID NO: 210982 - protein, 16 aa, Homo sapiens
  CDR3 for beta chain variable domain of TCR clone 105491 (TRBV18, TRBJ1-2)
CASSPPERVTIYGYSF

SEQ ID NO: 210983 - protein, 13 aa, Homo sapiens
  CDR3 for alpha chain variable domain of TCR clone 105492 (TRAV2, TRAJ40)
CAVVTSGTYKYIF

SEQ ID NO: 210984 - protein, 14 aa, Homo sapiens
  CDR3 for beta chain variable domain of TCR clone 105492 (TRBV7-9, TRBJ1-4)
CAITEGEANEKLFF

SEQ ID NO: 210985 - protein, 11 aa, Homo sapiens
  CDR3 for alpha chain variable domain of TCR clone 105493 (TRAV4, TRAJ28)
CLVGDNRAETR

SEQ ID NO: 210986 - protein, 13 aa, Homo sapiens
  CDR3 for beta chain variable domain of TCR clone 105493 (TRBV20-1, TRBJ2-7)
CSATHTSGYEQYF

SEQ ID NO: 210987 - protein, 13 aa, Homo sapiens
  CDR3 for alpha chain variable domain of TCR clone 105494 (TRAV1-2, TRAJ9)
CAALNTGGFKTIF

SEQ ID NO: 210988 - protein, 13 aa, Homo sapiens
  CDR3 for beta chain variable domain of TCR clone 105494 (TRBV24-1, TRBJ2-2)
CATTATRTGELFF

SEQ ID NO: 210989 - protein, 11 aa, Homo sapiens
  CDR3 for alpha chain variable domain of TCR clone 105495 (TRAV21, TRAJ48)
CAVDGNEKLTF

SEQ ID NO: 210990 - protein, 16 aa, Homo sapiens
  CDR3 for beta chain variable domain of TCR clone 105495 (TRBV12-4, TRBJ1-5)
CASSSGPRGINQPQHF

SEQ ID NO: 210991 - protein, 13 aa, Homo sapiens
  CDR3 for alpha chain variable domain of TCR clone 105496 (TRAV8-4, TRAJ10)
CAAFTGGGNKFTF

SEQ ID NO: 210992 - protein, 15 aa, Homo sapiens
  CDR3 for beta chain variable domain of TCR clone 105496 (TRBV2, TRBJ2-3)
CASSDFEKATDTQYF

SEQ ID NO: 210993 - protein, 14 aa, Homo sapiens
  CDR3 for alpha chain variable domain of TCR clone 105497 (TRAV17, TRAJ12)
CAILPMDSSYKLIF

SEQ ID NO: 210994 - protein, 13 aa, Homo sapiens
  CDR3 for beta chain variable domain of TCR clone 105497 (TRBV10-3, TRBJ2-7)
CASKLAVNYEQYF

SEQ ID NO: 210995 - protein, 13 aa, Homo sapiens
  CDR3 for alpha chain variable domain of TCR clone 105498 (TRAV29/DV5, TRAJ31)
CAASRNNNARLML

SEQ ID NO: 210996 - protein, 12 aa, Homo sapiens
  CDR3 for beta chain variable domain of TCR clone 105498 (TRBV14, TRBJ2-5)
CASSQLKETQYF

SEQ ID NO: 210997 - protein, 16 aa, Homo sapiens
  CDR3 for alpha chain variable domain of TCR clone 105499 (TRAV26-1, TRAJ53)
CIFRVAMGGSNYKLTF

SEQ ID NO: 210998 - protein, 12 aa, Homo sapiens
  CDR3 for beta chain variable domain of TCR clone 105499 (TRBV7-9, TRBJ1-5)
CASSPQGQPQHF

SEQ ID NO: 210999 - protein, 13 aa, Homo sapiens
  CDR3 for alpha chain variable domain of TCR clone 105500 (TRAV17, TRAJ7)
CATDNYGNNRLAF

SEQ ID NO: 211000 - protein, 13 aa, Homo sapiens
  CDR3 for beta chain variable domain of TCR clone 105500 (TRBV7-2, TRBJ1-6)
CASSLGSNSPLHF

SEQ ID NO: 211001 - protein, 15 aa, Homo sapiens
  CDR3 for alpha chain variable domain of TCR clone 105501 (TRAV26-1, TRAJ22)
CIVRVSFWFCKATVL

SEQ ID NO: 211002 - protein, 13 aa, Homo sapiens
  CDR3 for beta chain variable domain of TCR clone 105501 (TRBV7-9, TRBJ1-2)
CASSLKQNYGYTF

SEQ ID NO: 211003 - protein, 13 aa, Homo sapiens
  CDR3 for alpha chain variable domain of TCR clone 105502 (TRAV13-2, TRAJ53)
CAENMGSNYILTF

SEQ ID NO: 211004 - protein, 13 aa, Homo sapiens
  CDR3 for beta chain variable domain of TCR clone 105502 (TRBV4-1, TRBJ2-2)
CASSQENTGELFF

SEQ ID NO: 211005 - protein, 14 aa, Homo sapiens
  CDR3 for alpha chain variable domain of TCR clone 105503 (TRAV13-2, TRAJ11)
CAETGNPGYSTLTF

SEQ ID NO: 211006 - protein, 11 aa, Homo sapiens
  CDR3 for beta chain variable domain of TCR clone 105503 (TRBV10-3, TRBJ2-7)
CAISEGLEQYF

SEQ ID NO: 211007 - protein, 11 aa, Homo sapiens
  CDR3 for alpha chain variable domain of TCR clone 105504 (TRAV3, TRAJ21)
CAVGNFNTFYF

SEQ ID NO: 211008 - protein, 16 aa, Homo sapiens
  CDR3 for beta chain variable domain of TCR clone 105504 (TRBV19, TRBJ2-1)
CAGSKAGPSSYNEQFF

SEQ ID NO: 211009 - protein, 17 aa, Homo sapiens
  CDR3 for alpha chain variable domain of TCR clone 105505 (TRAV3, TRAJ6)
CAVRDGPRAEGSYIPTF

SEQ ID NO: 211010 - protein, 14 aa, Homo sapiens
  CDR3 for beta chain variable domain of TCR clone 105505 (TRBV20-1, TRBJ2-7)
CSAKRGRSSYEQYF

SEQ ID NO: 211011 - protein, 14 aa, Homo sapiens
  CDR3 for alpha chain variable domain of TCR clone 105506 (TRAV20, TRAJ22)
CAVALGGSARQLTF

SEQ ID NO: 211012 - protein, 15 aa, Homo sapiens
  CDR3 for beta chain variable domain of TCR clone 105506 (TRBV5-1, TRBJ2-1)
CASKGLAGVYNEQFF

SEQ ID NO: 211013 - protein, 12 aa, Homo sapiens
  CDR3 for alpha chain variable domain of TCR clone 105507 (TRAV8-3, TRAJ43)
CAVGAGNDDMRF

SEQ ID NO: 211014 - protein, 14 aa, Homo sapiens
  CDR3 for beta chain variable domain of TCR clone 105507 (TRBV11-2, TRBJ1-5)
CASSSRTGNQPQHF

SEQ ID NO: 211015 - protein, 13 aa, Homo sapiens
  CDR3 for alpha chain variable domain of TCR clone 105508 (TRAV12-2, TRAJ3)
CAFQYSSASTIIF

SEQ ID NO: 211016 - protein, 11 aa, Homo sapiens
  CDR3 for beta chain variable domain of TCR clone 105508 (TRBV20-1, TRBJ2-3)
CSGTSSTTQYF

SEQ ID NO: 211017 - protein, 13 aa, Homo sapiens
  CDR3 for alpha chain variable domain of TCR clone 105509 (TRAV2, TRAJ40)
CTVVSSGTYKYIF

SEQ ID NO: 211018 - protein, 14 aa, Homo sapiens
  CDR3 for beta chain variable domain of TCR clone 105509 (TRBV19, TRBJ2-1)
CASPTFVLSGEQFF

SEQ ID NO: 211019 - protein, 15 aa, Homo sapiens
  CDR3 for alpha chain variable domain of TCR clone 105510 (TRAV1-2, TRAJ28)
CAFQYSGAGSYQLTF

SEQ ID NO: 211020 - protein, 13 aa, Homo sapiens
  CDR3 for beta chain variable domain of TCR clone 105510 (TRBV20-1, TRBJ2-7)
CSATHTSGYEQYF

SEQ ID NO: 211021 - protein, 14 aa, Homo sapiens
  CDR3 for alpha chain variable domain of TCR clone 105511 (TRAV2, TRAJ3)
CAVRPYSSASKIIF

SEQ ID NO: 211022 - protein, 17 aa, Homo sapiens
  CDR3 for beta chain variable domain of TCR clone 105511 (TRBV7-6, TRBJ2-5)
CASSSPQAGDPSETQYV

SEQ ID NO: 211023 - protein, 15 aa, Homo sapiens
  CDR3 for alpha chain variable domain of TCR clone 105512 (TRAV12-3, TRAJ6)
CAMSATTGGSYIPTF

SEQ ID NO: 211024 - protein, 14 aa, Homo sapiens
  CDR3 for beta chain variable domain of TCR clone 105512 (TRBV4-1, TRBJ2-3)
CASSQDWSTDTQYF

SEQ ID NO: 211025 - protein, 12 aa, Homo sapiens
  CDR3 for alpha chain variable domain of TCR clone 105513 (TRAV12-3, TRAJ17)
CAMTLTGNKLTF

SEQ ID NO: 211026 - protein, 20 aa, Homo sapiens
  CDR3 for beta chain variable domain of TCR clone 105513 (TRBV19, TRBJ2-1)
CASSISRTGTSTRLNNEQFF

SEQ ID NO: 211027 - protein, 13 aa, Homo sapiens
  CDR3 for alpha chain variable domain of TCR clone 105514 (TRAV1-2, TRAJ9)
CAALNTGGFKTIF

SEQ ID NO: 211028 - protein, 15 aa, Homo sapiens
  CDR3 for beta chain variable domain of TCR clone 105514 (TRBV19, TRBJ1-1)
CASTSGQIQNAEAFF

SEQ ID NO: 211029 - protein, 12 aa, Homo sapiens
  CDR3 for alpha chain variable domain of TCR clone 105515 (TRAV13-1, TRAJ21)
CAAKEGFNKFYF

SEQ ID NO: 211030 - protein, 14 aa, Homo sapiens
  CDR3 for beta chain variable domain of TCR clone 105515 (TRBV7-3, TRBJ2-1)
CASSLAGGTNEQFF

SEQ ID NO: 211031 - protein, 22 aa, Homo sapiens
  CDR3 for alpha chain variable domain of TCR clone 105516 (TRAV36/DV7, TRAJ38)
CVANAGNNHIQNPDPAVYQLRD

SEQ ID NO: 211032 - protein, 14 aa, Homo sapiens
  CDR3 for beta chain variable domain of TCR clone 105516 (TRBV7-2, TRBJ2-7)
CASSLRWEANEQYF

SEQ ID NO: 211033 - protein, 14 aa, Homo sapiens
  CDR3 for alpha chain variable domain of TCR clone 105517 (TRAV9-2, TRAJ39)
CALYIYNSGNMLTF

SEQ ID NO: 211034 - protein, 17 aa, Homo sapiens
  CDR3 for beta chain variable domain of TCR clone 105517 (TRBV28, TRBJ2-5)
CASSTPEGDALQETQYF

SEQ ID NO: 211035 - protein, 13 aa, Homo sapiens
  CDR3 for alpha chain variable domain of TCR clone 105518 (TRAV12-1, TRAJ11)
CVVTRGGYSPLTF

SEQ ID NO: 211036 - protein, 13 aa, Homo sapiens
  CDR3 for beta chain variable domain of TCR clone 105518 (TRBV20-1, TRBJ1-2)
CSARDQGAYGYTF

SEQ ID NO: 211037 - protein, 13 aa, Homo sapiens
  CDR3 for alpha chain variable domain of TCR clone 105519 (TRAV21, TRAJ20)
CAVSRLGDYKFSF

SEQ ID NO: 211038 - protein, 13 aa, Homo sapiens
  CDR3 for beta chain variable domain of TCR clone 105519 (TRBV7-3, TRBJ1-1)
CASSPAGGLEAFF

SEQ ID NO: 211039 - protein, 12 aa, Homo sapiens
  CDR3 for alpha chain variable domain of TCR clone 105520 (TRAV12-3, TRAJ17)
CAMTLTGNKLTF

SEQ ID NO: 211040 - protein, 14 aa, Homo sapiens
  CDR3 for beta chain variable domain of TCR clone 105520 (TRBV4-2, TRBJ2-3)
CASRETRAPGMQYF

SEQ ID NO: 211041 - protein, 12 aa, Homo sapiens
  CDR3 for alpha chain variable domain of TCR clone 105521 (TRAV13-2, TRAJ8)
CAPWLGFQKLVF

SEQ ID NO: 211042 - protein, 13 aa, Homo sapiens
  CDR3 for beta chain variable domain of TCR clone 105521 (TRBV7-3, TRBJ1-5)
CASSLDSNQPQHF

SEQ ID NO: 211043 - protein, 13 aa, Homo sapiens
  CDR3 for alpha chain variable domain of TCR clone 105522 (TRAV12-2, TRAJ10)
CAVPTGGGNKITF

SEQ ID NO: 211044 - protein, 11 aa, Homo sapiens
  CDR3 for beta chain variable domain of TCR clone 105522 (TRBV6-1, TRBJ2-1)
CASISSNEQFF

SEQ ID NO: 211045 - protein, 13 aa, Homo sapiens
  CDR3 for alpha chain variable domain of TCR clone 105523 (TRAV12-1, TRAJ5)
CVVNLPGRRALTF

SEQ ID NO: 211046 - protein, 14 aa, Homo sapiens
  CDR3 for beta chain variable domain of TCR clone 105523 (TRBV7-8, TRBJ2-3)
CASSLEAGTDTQYF

SEQ ID NO: 211047 - protein, 17 aa, Homo sapiens
  CDR3 for alpha chain variable domain of TCR clone 105524 (TRAV12-2, TRAJ52)
CAVNPYAGGTSDGKLTF

SEQ ID NO: 211048 - protein, 16 aa, Homo sapiens
  CDR3 for beta chain variable domain of TCR clone 105524 (TRBV5-5, TRBJ2-2)
CASSGRREGATGELFF

SEQ ID NO: 211049 - protein, 15 aa, Homo sapiens
  CDR3 for alpha chain variable domain of TCR clone 105525 (TRAV13-1, TRAJ17)
CAASIHGGCRKQANF

SEQ ID NO: 211050 - protein, 14 aa, Homo sapiens
  CDR3 for beta chain variable domain of TCR clone 105525 (TRBV20-1, TRBJ2-4)
CSARDRGQGGIQYF

SEQ ID NO: 211051 - protein, 13 aa, Homo sapiens
  CDR3 for alpha chain variable domain of TCR clone 105526 (TRAV5, TRAJ37)
CAEDSGNTGKLIF

SEQ ID NO: 211052 - protein, 13 aa, Homo sapiens
  CDR3 for beta chain variable domain of TCR clone 105526 (TRBV5-1, TRBJ1-2)
CASSIDRPEGYTF

SEQ ID NO: 211053 - protein, 14 aa, Homo sapiens
  CDR3 for alpha chain variable domain of TCR clone 105527 (TRAV38-1, TRAJ28)
CAFTSGAGSYQLTF

SEQ ID NO: 211054 - protein, 16 aa, Homo sapiens
  CDR3 for beta chain variable domain of TCR clone 105527 (TRBV12-5, TRBJ2-5)
CASGPRTSGNQETQYF

SEQ ID NO: 211055 - protein, 14 aa, Homo sapiens
  CDR3 for alpha chain variable domain of TCR clone 105528 (TRAV26-1, TRAJ21)
CIVRVGHNFNKFYF

SEQ ID NO: 211056 - protein, 15 aa, Homo sapiens
  CDR3 for beta chain variable domain of TCR clone 105528 (TRBV4-3, TRBJ2-1)
CAISQGLAGSNEQFF

SEQ ID NO: 211057 - protein, 16 aa, Homo sapiens
  CDR3 for alpha chain variable domain of TCR clone 105529 (TRAV16, TRAJ52)
CALSGVGGTSYVKLTF

SEQ ID NO: 211058 - protein, 14 aa, Homo sapiens
  CDR3 for beta chain variable domain of TCR clone 105529 (TRBV19, TRBJ1-2)
CASSLQGQAYGYTF

SEQ ID NO: 211059 - protein, 15 aa, Homo sapiens
  CDR3 for alpha chain variable domain of TCR clone 105530 (TRAV3, TRAJ11)
CAVRDRGSGYSTLTF

SEQ ID NO: 211060 - protein, 12 aa, Homo sapiens
  CDR3 for beta chain variable domain of TCR clone 105530 (TRBV20-1, TRBJ2-1)
CSARLGTDEQFF

SEQ ID NO: 211061 - protein, 12 aa, Homo sapiens
  CDR3 for alpha chain variable domain of TCR clone 105531 (TRAV8-3, TRAJ20)
CAVGANDYKLSF

SEQ ID NO: 211062 - protein, 15 aa, Homo sapiens
  CDR3 for beta chain variable domain of TCR clone 105531 (TRBV19, TRBJ2-1)
CASNAQGLAGREQFF

SEQ ID NO: 211063 - protein, 13 aa, Homo sapiens
  CDR3 for alpha chain variable domain of TCR clone 105532 (TRAV21, TRAJ57)
CAVIEGGSEKLVF

SEQ ID NO: 211064 - protein, 18 aa, Homo sapiens
  CDR3 for beta chain variable domain of TCR clone 105532 (TRBV4-1, TRBJ1-5)
CASSQDPRGQGLNQPQHF

SEQ ID NO: 211065 - protein, 14 aa, Homo sapiens
  CDR3 for alpha chain variable domain of TCR clone 105533 (TRAV13-1, TRAJ8)
CAASMSTGFQELVF

SEQ ID NO: 211066 - protein, 13 aa, Homo sapiens
  CDR3 for beta chain variable domain of TCR clone 105533 (TRBV13, TRBJ2-1)
CASTPGSYNEQFF

SEQ ID NO: 211067 - protein, 12 aa, Homo sapiens
  CDR3 for alpha chain variable domain of TCR clone 105534 (TRAV12-3, TRAJ17)
CAMALTGNKLTF

SEQ ID NO: 211068 - protein, 16 aa, Homo sapiens
  CDR3 for beta chain variable domain of TCR clone 105534 (TRBV13, TRBJ2-2)
CASSPRTGEHTGELFF

SEQ ID NO: 211069 - protein, 13 aa, Homo sapiens
  CDR3 for alpha chain variable domain of TCR clone 105535 (TRAV13-1, TRAJ33)
CAASRASNYQLIW

SEQ ID NO: 211070 - protein, 12 aa, Homo sapiens
  CDR3 for beta chain variable domain of TCR clone 105535 (TRBV11-2, TRBJ1-2)
CASSREGDGYTF

SEQ ID NO: 211071 - protein, 18 aa, Homo sapiens
  CDR3 for alpha chain variable domain of TCR clone 105536 (TRAV13-1, TRAJ52)
CAASKRSAGGTSYGKLTF

SEQ ID NO: 211072 - protein, 14 aa, Homo sapiens
  CDR3 for beta chain variable domain of TCR clone 105536 (TRBV4-2, TRBJ2-3)
CASRETRAPGMQYF

SEQ ID NO: 211073 - protein, 12 aa, Homo sapiens
  CDR3 for alpha chain variable domain of TCR clone 105537 (TRAV25, TRAJ5)
CAGGGGRRALTF

SEQ ID NO: 211074 - protein, 15 aa, Homo sapiens
  CDR3 for beta chain variable domain of TCR clone 105537 (TRBV19, TRBJ2-4)
CASRGPRRGENSQYF

SEQ ID NO: 211075 - protein, 18 aa, Homo sapiens
  CDR3 for alpha chain variable domain of TCR clone 105538 (TRAV26-2, TRAJ45)
CILRLWGYSGGGADGLAF

SEQ ID NO: 211076 - protein, 17 aa, Homo sapiens
  CDR3 for beta chain variable domain of TCR clone 105538 (TRBV28, TRBJ2-3)
CASSPTPAGGRVDTQYF

SEQ ID NO: 211077 - protein, 14 aa, Homo sapiens
  CDR3 for alpha chain variable domain of TCR clone 105539 (TRAV20, TRAJ42)
CAVQAGGGQGNLIF

SEQ ID NO: 211078 - protein, 14 aa, Homo sapiens
  CDR3 for beta chain variable domain of TCR clone 105539 (TRBV28, TRBJ1-2)
CASRIQGADYGYTF

SEQ ID NO: 211079 - protein, 16 aa, Homo sapiens
  CDR3 for alpha chain variable domain of TCR clone 105540 (TRAV8-3, TRAJ10)
CAVGPGVTGGGNNLTF

SEQ ID NO: 211080 - protein, 13 aa, Homo sapiens
  CDR3 for beta chain variable domain of TCR clone 105540 (TRBV18, TRBJ1-1)
CASSPGPSGEAFF

SEQ ID NO: 211081 - protein, 13 aa, Homo sapiens
  CDR3 for alpha chain variable domain of TCR clone 105541 (TRAV27, TRAJ56)
CAGKPGANSKLTF

SEQ ID NO: 211082 - protein, 17 aa, Homo sapiens
  CDR3 for beta chain variable domain of TCR clone 105541 (TRBV20-1, TRBJ2-1)
CSASSSGLAGSYNEQFF

SEQ ID NO: 211083 - protein, 12 aa, Homo sapiens
  CDR3 for alpha chain variable domain of TCR clone 105542 (TRAV21, TRAJ26)
CAVDNYGQNFVF

SEQ ID NO: 211084 - protein, 16 aa, Homo sapiens
  CDR3 for beta chain variable domain of TCR clone 105542 (TRBV7-9, TRBJ1-2)
CASSLGFSSGEDGYTF

SEQ ID NO: 211085 - protein, 15 aa, Homo sapiens
  CDR3 for alpha chain variable domain of TCR clone 105543 (TRAV1-2, TRAJ9)
CAVRDDGTGGFNTIF

SEQ ID NO: 211086 - protein, 17 aa, Homo sapiens
  CDR3 for beta chain variable domain of TCR clone 105543 (TRBV20-1, TRBJ2-1)
CSASSSGLAGSYNEQFF

SEQ ID NO: 211087 - protein, 16 aa, Homo sapiens
  CDR3 for alpha chain variable domain of TCR clone 105544 (TRAV4, TRAJ22)
CLVGDLYSGSARQLTF

SEQ ID NO: 211088 - protein, 14 aa, Homo sapiens
  CDR3 for beta chain variable domain of TCR clone 105544 (TRBV28, TRBJ2-3)
CASSWRGWADTQYF

SEQ ID NO: 211089 - protein, 14 aa, Homo sapiens
  CDR3 for alpha chain variable domain of TCR clone 105545 (TRAV8-1, TRAJ9)
CAVNAWTGGFKTIF

SEQ ID NO: 211090 - protein, 15 aa, Homo sapiens
  CDR3 for beta chain variable domain of TCR clone 105545 (TRBV28, TRBJ2-1)
CASSGLAEVDNEQFF

SEQ ID NO: 211091 - protein, 12 aa, Homo sapiens
  CDR3 for alpha chain variable domain of TCR clone 105546 (TRAV3, TRAJ21)
CAVYYNFNKFYF

SEQ ID NO: 211092 - protein, 13 aa, Homo sapiens
  CDR3 for beta chain variable domain of TCR clone 105546 (TRBV7-6, TRBJ2-3)
CASSLRSDNTQYF

SEQ ID NO: 211093 - protein, 13 aa, Homo sapiens
  CDR3 for alpha chain variable domain of TCR clone 105547 (TRAV16, TRAJ28)
CALTGAGRYQLTF

SEQ ID NO: 211094 - protein, 16 aa, Homo sapiens
  CDR3 for beta chain variable domain of TCR clone 105547 (TRBV28, TRBJ1-5)
CASSLTGQGWNQPQHF

SEQ ID NO: 211095 - protein, 14 aa, Homo sapiens
  CDR3 for alpha chain variable domain of TCR clone 105548 (TRAV38-1, TRAJ45)
CASHSGGGADGLTF

SEQ ID NO: 211096 - protein, 13 aa, Homo sapiens
  CDR3 for beta chain variable domain of TCR clone 105548 (TRBV10-3, TRBJ1-2)
CAISERDSCGYTF

SEQ ID NO: 211097 - protein, 12 aa, Homo sapiens
  CDR3 for alpha chain variable domain of TCR clone 105549 (TRAV13-1, TRAJ21)
CAAKESFNKFYF

SEQ ID NO: 211098 - protein, 14 aa, Homo sapiens
  CDR3 for beta chain variable domain of TCR clone 105549 (TRBV5-4, TRBJ1-1)
CASSLDSRRDEAFF

SEQ ID NO: 211099 - protein, 12 aa, Homo sapiens
  CDR3 for alpha chain variable domain of TCR clone 105550 (TRAV17, TRAJ12)
CATLRSSYKLIF

SEQ ID NO: 211100 - protein, 16 aa, Homo sapiens
  CDR3 for beta chain variable domain of TCR clone 105550 (TRBV4-1, TRBJ2-3)
CASSQSTSGAEDTQYF

SEQ ID NO: 211101 - protein, 16 aa, Homo sapiens
  CDR3 for alpha chain variable domain of TCR clone 105551 (TRAV1-2, TRAJ10)
CAVRGVLTGGGNKLTF

SEQ ID NO: 211102 - protein, 13 aa, Homo sapiens
  CDR3 for beta chain variable domain of TCR clone 105551 (TRBV7-7, TRBJ2-2)
CASSLTSAGELFF

SEQ ID NO: 211103 - protein, 14 aa, Homo sapiens
  CDR3 for alpha chain variable domain of TCR clone 105552 (TRAV12-2, TRAJ4)
CAEDLSGGYNKLIF

SEQ ID NO: 211104 - protein, 13 aa, Homo sapiens
  CDR3 for beta chain variable domain of TCR clone 105552 (TRBV7-9, TRBJ1-2)
CASSLKQNYCYTF

SEQ ID NO: 211105 - protein, 11 aa, Homo sapiens
  CDR3 for alpha chain variable domain of TCR clone 105553 (TRAV2, TRAJ33)
CAVDSNYQLIW

SEQ ID NO: 211106 - protein, 15 aa, Homo sapiens
  CDR3 for beta chain variable domain of TCR clone 105553 (TRBV19, TRBJ1-2)
CASSVGQILNYGYTF

SEQ ID NO: 211107 - protein, 12 aa, Homo sapiens
  CDR3 for alpha chain variable domain of TCR clone 105554 (TRAV12-3, TRAJ17)
CAMTLTGNKLTF

SEQ ID NO: 211108 - protein, 13 aa, Homo sapiens
  CDR3 for beta chain variable domain of TCR clone 105554 (TRBV20-1, TRBJ1-1)
CSPRGGGNTEAFF

SEQ ID NO: 211109 - protein, 16 aa, Homo sapiens
  CDR3 for alpha chain variable domain of TCR clone 105555 (TRAV26-1, TRAJ32)
CIVRTNYGGATNKRIF

SEQ ID NO: 211110 - protein, 14 aa, Homo sapiens
  CDR3 for beta chain variable domain of TCR clone 105555 (TRBV27, TRBJ1-1)
CASSLLSGLSEAFF

SEQ ID NO: 211111 - protein, 11 aa, Homo sapiens
  CDR3 for alpha chain variable domain of TCR clone 105556 (TRAV12-3, TRAJ43)
CAMSVSNDMRF

SEQ ID NO: 211112 - protein, 20 aa, Homo sapiens
  CDR3 for beta chain variable domain of TCR clone 105556 (TRBV19, TRBJ2-1)
CASSISRTVTSTRLNNEQFF

SEQ ID NO: 211113 - protein, 12 aa, Homo sapiens
  CDR3 for alpha chain variable domain of TCR clone 105557 (TRAV35, TRAJ30)
CAGQLADDKIIF

SEQ ID NO: 211114 - protein, 13 aa, Homo sapiens
  CDR3 for beta chain variable domain of TCR clone 105557 (TRBV7-9, TRBJ2-1)
CASSWESYNEQFF

SEQ ID NO: 211115 - protein, 15 aa, Homo sapiens
  CDR3 for alpha chain variable domain of TCR clone 105558 (TRAV3, TRAJ4)
CAVRDGTGGYNKLIF

SEQ ID NO: 211116 - protein, 16 aa, Homo sapiens
  CDR3 for beta chain variable domain of TCR clone 105558 (TRBV27, TRBJ2-2)
CASSSSGVSNTGELCF

SEQ ID NO: 211117 - protein, 13 aa, Homo sapiens
  CDR3 for alpha chain variable domain of TCR clone 105559 (TRAV27, TRAJ39)
CAGVNNAGNMLTF

SEQ ID NO: 211118 - protein, 13 aa, Homo sapiens
  CDR3 for beta chain variable domain of TCR clone 105559 (TRBV7-3, TRBJ1-1)
CASSQDWGAEAFF

SEQ ID NO: 211119 - protein, 12 aa, Homo sapiens
  CDR3 for alpha chain variable domain of TCR clone 105560 (TRAV12-3, TRAJ40)
CAVTSGTYKYIF

SEQ ID NO: 211120 - protein, 15 aa, Homo sapiens
  CDR3 for beta chain variable domain of TCR clone 105560 (TRBV7-3, TRBJ2-2)
CASSLTGQGTGELFF

SEQ ID NO: 211121 - protein, 10 aa, Homo sapiens
  CDR3 for alpha chain variable domain of TCR clone 105561 (TRAV38-1, TRAJ34)
CAFMDDKPIF

SEQ ID NO: 211122 - protein, 14 aa, Homo sapiens
  CDR3 for beta chain variable domain of TCR clone 105561 (TRBV7-2, TRBJ2-2)
CASSLNSNTGELFF

SEQ ID NO: 211123 - protein, 15 aa, Homo sapiens
  CDR3 for alpha chain variable domain of TCR clone 105562 (TRAV23/DV6, TRAJ15)
CAALPAGRNCSDLWY

SEQ ID NO: 211124 - protein, 14 aa, Homo sapiens
  CDR3 for beta chain variable domain of TCR clone 105562 (TRBV7-9, TRBJ1-2)
CASSRQGANYGYTF

SEQ ID NO: 211125 - protein, 14 aa, Homo sapiens
  CDR3 for alpha chain variable domain of TCR clone 105563 (TRAV1-2, TRAJ16)
CTVNRFSDGQKLLF

SEQ ID NO: 211126 - protein, 16 aa, Homo sapiens
  CDR3 for beta chain variable domain of TCR clone 105563 (TRBV20-1, TRBJ1-4)
CSAPGQGLLTNEKLFF

SEQ ID NO: 211127 - protein, 14 aa, Homo sapiens
  CDR3 for alpha chain variable domain of TCR clone 105564 (TRAV1-1, TRAJ27)
CAVIYNTNAGKSTF

SEQ ID NO: 211128 - protein, 16 aa, Homo sapiens
  CDR3 for beta chain variable domain of TCR clone 105564 (TRBV28, TRBJ2-7)
CASSFPDRRLTYEQYF

SEQ ID NO: 211129 - protein, 15 aa, Homo sapiens
  CDR3 for alpha chain variable domain of TCR clone 105565 (TRAV26-1, TRAJ17)
CIVRVVKAAGNKLTF

SEQ ID NO: 211130 - protein, 13 aa, Homo sapiens
  CDR3 for beta chain variable domain of TCR clone 105565 (TRBV7-9, TRBJ2-3)
CASSPGSTDTQYF

SEQ ID NO: 211131 - protein, 16 aa, Homo sapiens
  CDR3 for alpha chain variable domain of TCR clone 105566 (TRAV30, TRAJ24)
CGTEIVDADSWGKFQF

SEQ ID NO: 211132 - protein, 13 aa, Homo sapiens
  CDR3 for beta chain variable domain of TCR clone 105566 (TRBV19, TRBJ1-2)
CASSQGQVYGYTF

SEQ ID NO: 211133 - protein, 11 aa, Homo sapiens
  CDR3 for alpha chain variable domain of TCR clone 105567 (TRAV2, TRAJ23)
CAVETRGKLIF

SEQ ID NO: 211134 - protein, 13 aa, Homo sapiens
  CDR3 for beta chain variable domain of TCR clone 105567 (TRBV7-2, TRBJ2-7)
CASSSPSGSEQYF

SEQ ID NO: 211135 - protein, 17 aa, Homo sapiens
  CDR3 for alpha chain variable domain of TCR clone 105568 (TRAV12-2, TRAJ22)
CAVNRIPFSGSARQLTF

SEQ ID NO: 211136 - protein, 13 aa, Homo sapiens
  CDR3 for beta chain variable domain of TCR clone 105568 (TRBV11-3, TRBJ1-1)
CASRSNRDTEAFF

SEQ ID NO: 211137 - protein, 18 aa, Homo sapiens
  CDR3 for alpha chain variable domain of TCR clone 105569 (TRAV26-1, TRAJ23)
CIVRVGLEVWNQGGKLIF

SEQ ID NO: 211138 - protein, 15 aa, Homo sapiens
  CDR3 for beta chain variable domain of TCR clone 105569 (TRBV20-1, TRBJ2-7)
CSARDRVSGMDEQYF

SEQ ID NO: 211139 - protein, 12 aa, Homo sapiens
  CDR3 for alpha chain variable domain of TCR clone 105570 (TRAV17, TRAJ45)
CAQDGGADGLTF

SEQ ID NO: 211140 - protein, 12 aa, Homo sapiens
  CDR3 for beta chain variable domain of TCR clone 105570 (TRBV27, TRBJ2-5)
CASSPTGETQYF

SEQ ID NO: 211141 - protein, 15 aa, Homo sapiens
  CDR3 for alpha chain variable domain of TCR clone 105571 (TRAV3, TRAJ23)
CAVRDRGNKGGKLIF

SEQ ID NO: 211142 - protein, 15 aa, Homo sapiens
  CDR3 for beta chain variable domain of TCR clone 105571 (TRBV7-3, TRBJ2-1)
CQQLAPSGSYNEQFF

SEQ ID NO: 211143 - protein, 17 aa, Homo sapiens
  CDR3 for alpha chain variable domain of TCR clone 105572 (TRAV26-2, TRAJ42)
CILRDDGYGGSQGNLIF

SEQ ID NO: 211144 - protein, 16 aa, Homo sapiens
  CDR3 for beta chain variable domain of TCR clone 105572 (TRBV12-4, TRBJ2-7)
CASSLIGGTGTYEQYF

SEQ ID NO: 211145 - protein, 16 aa, Homo sapiens
  CDR3 for alpha chain variable domain of TCR clone 105573 (TRAV14/DV4, TRAJ54)
CAMREGRIQGAQKLVF

SEQ ID NO: 211146 - protein, 15 aa, Homo sapiens
  CDR3 for beta chain variable domain of TCR clone 105573 (TRBV19, TRBJ1-2)
CASSVGQVLNYGYTF

SEQ ID NO: 211147 - protein, 14 aa, Homo sapiens
  CDR3 for alpha chain variable domain of TCR clone 105574 (TRAV2, TRAJ9)
CAVEDRSGGCKTIF

SEQ ID NO: 211148 - protein, 16 aa, Homo sapiens
  CDR3 for beta chain variable domain of TCR clone 105574 (TRBV7-3, TRBJ2-2)
CASSLKRGTLSGELFF

SEQ ID NO: 211149 - protein, 14 aa, Homo sapiens
  CDR3 for alpha chain variable domain of TCR clone 105575 (TRAV26-1, TRAJ34)
CIVRVAYNTDKPIF

SEQ ID NO: 211150 - protein, 16 aa, Homo sapiens
  CDR3 for beta chain variable domain of TCR clone 105575 (TRBV7-3, TRBJ2-2)
CASSLKRGTLSGELFF

SEQ ID NO: 211151 - protein, 15 aa, Homo sapiens
  CDR3 for alpha chain variable domain of TCR clone 105576 (TRAV12-2, TRAJ53)
CAVNGGGGSNYKLTF

SEQ ID NO: 211152 - protein, 14 aa, Homo sapiens
  CDR3 for beta chain variable domain of TCR clone 105576 (TRBV7-9, TRBJ2-2)
CASSGLADTGELFF

SEQ ID NO: 211153 - protein, 14 aa, Homo sapiens
  CDR3 for alpha chain variable domain of TCR clone 105577 (TRAV17, TRAJ12)
CAILPMDSSYKLIF

SEQ ID NO: 211154 - protein, 16 aa, Homo sapiens
  CDR3 for beta chain variable domain of TCR clone 105577 (TRBV12-4, TRBJ1-5)
CASSRPVGGSNQPQHF

SEQ ID NO: 211155 - protein, 14 aa, Homo sapiens
  CDR3 for alpha chain variable domain of TCR clone 105578 (TRAV35, TRAJ33)
CAGSSQDSNYQLIW

SEQ ID NO: 211156 - protein, 15 aa, Homo sapiens
  CDR3 for beta chain variable domain of TCR clone 105578 (TRBV19, TRBJ2-1)
CASSTGTSSYNEQFF

SEQ ID NO: 211157 - protein, 14 aa, Homo sapiens
  CDR3 for alpha chain variable domain of TCR clone 105579 (TRAV17, TRAJ39)
CATDPVRARNMLTF

SEQ ID NO: 211158 - protein, 15 aa, Homo sapiens
  CDR3 for beta chain variable domain of TCR clone 105579 (TRBV13, TRBJ1-5)
CASSFGQGGVQPQHF

SEQ ID NO: 211159 - protein, 13 aa, Homo sapiens
  CDR3 for alpha chain variable domain of TCR clone 105580 (TRAV13-1, TRAJ11)
CAAVLAGYSTLTF

SEQ ID NO: 211160 - protein, 15 aa, Homo sapiens
  CDR3 for beta chain variable domain of TCR clone 105580 (TRBV10-2, TRBJ2-6)
CASSEQGTGANVLTF

SEQ ID NO: 211161 - protein, 16 aa, Homo sapiens
  CDR3 for alpha chain variable domain of TCR clone 105581 (TRAV3, TRAJ10)
CAVRDMNAGGGNKLTF

SEQ ID NO: 211162 - protein, 14 aa, Homo sapiens
  CDR3 for beta chain variable domain of TCR clone 105581 (TRBV7-2, TRBJ2-7)
CASRSQGAAYEQYF

SEQ ID NO: 211163 - protein, 13 aa, Homo sapiens
  CDR3 for alpha chain variable domain of TCR clone 105582 (TRAV3, TRAJ21)
CAVREPDFNKFYF

SEQ ID NO: 211164 - protein, 15 aa, Homo sapiens
  CDR3 for beta chain variable domain of TCR clone 105582 (TRBV20-1, TRBJ1-1)
CSVSRGVTGNTEAFF

SEQ ID NO: 211165 - protein, 14 aa, Homo sapiens
  CDR3 for alpha chain variable domain of TCR clone 105583 (TRAV26-1, TRAJ38)
CIADNAGNNRKLIW

SEQ ID NO: 211166 - protein, 16 aa, Homo sapiens
  CDR3 for beta chain variable domain of TCR clone 105583 (TRBV5-1, TRBJ2-1)
CASSPLGSGGYNEQFF

SEQ ID NO: 211167 - protein, 15 aa, Homo sapiens
  CDR3 for alpha chain variable domain of TCR clone 105584 (TRAV12-1, TRAJ4)
CVVNPFSGGDNKLIF

SEQ ID NO: 211168 - protein, 16 aa, Homo sapiens
  CDR3 for beta chain variable domain of TCR clone 105584 (TRBV5-1, TRBJ1-1)
CASSKTGTEVGTEAFF

SEQ ID NO: 211169 - protein, 13 aa, Homo sapiens
  CDR3 for alpha chain variable domain of TCR clone 105585 (TRAV17, TRAJ22)
CAHHSGSARQLTF

SEQ ID NO: 211170 - protein, 15 aa, Homo sapiens
  CDR3 for beta chain variable domain of TCR clone 105585 (TRBV4-1, TRBJ2-7)
CASSQQGQGFDEQYF

SEQ ID NO: 211171 - protein, 13 aa, Homo sapiens
  CDR3 for alpha chain variable domain of TCR clone 105586 (TRAV17, TRAJ40)
CAGALGGTYKYIF

SEQ ID NO: 211172 - protein, 14 aa, Homo sapiens
  CDR3 for beta chain variable domain of TCR clone 105586 (TRBV11-2, TRBJ2-3)
CASSRLARADTQYF

SEQ ID NO: 211173 - protein, 15 aa, Homo sapiens
  CDR3 for alpha chain variable domain of TCR clone 105587 (TRAV3, TRAJ5)
CAVRDLDTGRRALTF

SEQ ID NO: 211174 - protein, 14 aa, Homo sapiens
  CDR3 for beta chain variable domain of TCR clone 105587 (TRBV15, TRBJ2-3)
CATRSGTSTDTQYF

SEQ ID NO: 211175 - protein, 16 aa, Homo sapiens
  CDR3 for alpha chain variable domain of TCR clone 105588 (TRAV30, TRAJ24)
CGTEIVDADSWGKFQF

SEQ ID NO: 211176 - protein, 17 aa, Homo sapiens
  CDR3 for beta chain variable domain of TCR clone 105588 (TRBV11-2, TRBJ2-1)
CASSLYPPGVEYNEHFF

SEQ ID NO: 211177 - protein, 12 aa, Homo sapiens
  CDR3 for alpha chain variable domain of TCR clone 105589 (TRAV12-2, TRAJ7)
CAGMRGNNRLAF

SEQ ID NO: 211178 - protein, 17 aa, Homo sapiens
  CDR3 for beta chain variable domain of TCR clone 105589 (TRBV7-9, TRBJ2-3)
CASSPTVAGDLTDTQYF

SEQ ID NO: 211179 - protein, 18 aa, Homo sapiens
  CDR3 for alpha chain variable domain of TCR clone 105590 (TRAV26-1, TRAJ5)
CIVRVVPPRDTGRRPLTF

SEQ ID NO: 211180 - protein, 15 aa, Homo sapiens
  CDR3 for beta chain variable domain of TCR clone 105590 (TRBV7-9, TRBJ2-7)
CASSLPMGQANEQYF

SEQ ID NO: 211181 - protein, 11 aa, Homo sapiens
  CDR3 for alpha chain variable domain of TCR clone 105591 (TRAV1-1, TRAJ23)
CAVRQGGKLIF

SEQ ID NO: 211182 - protein, 12 aa, Homo sapiens
  CDR3 for beta chain variable domain of TCR clone 105591 (TRBV19, TRBJ1-5)
CASSIGQQPQHF

SEQ ID NO: 211183 - protein, 11 aa, Homo sapiens
  CDR3 for alpha chain variable domain of TCR clone 105592 (TRAV27, TRAJ47)
CRSNQGNKLVF

SEQ ID NO: 211184 - protein, 16 aa, Homo sapiens
  CDR3 for beta chain variable domain of TCR clone 105592 (TRBV7-9, TRBJ2-1)
CDSSDVAGGSYNEQFF

SEQ ID NO: 211185 - protein, 18 aa, Homo sapiens
  CDR3 for alpha chain variable domain of TCR clone 105593 (TRAV29/DV5, TRAJ52)
CAAGFRGAGGTSYGKLTF

SEQ ID NO: 211186 - protein, 13 aa, Homo sapiens
  CDR3 for beta chain variable domain of TCR clone 105593 (TRBV18, TRBJ1-1)
CASSPNGDTEAFF

SEQ ID NO: 211187 - protein, 15 aa, Homo sapiens
  CDR3 for alpha chain variable domain of TCR clone 105594 (TRAV21, TRAJ37)
CAVRPTFSNTGKLIF

SEQ ID NO: 211188 - protein, 16 aa, Homo sapiens
  CDR3 for beta chain variable domain of TCR clone 105594 (TRBV24-1, TRBJ2-3)
CATSDRRQDLTDTQYF

SEQ ID NO: 211189 - protein, 11 aa, Homo sapiens
  CDR3 for alpha chain variable domain of TCR clone 105595 (TRAV2, TRAJ13)
CASGGYQKVTF

SEQ ID NO: 211190 - protein, 13 aa, Homo sapiens
  CDR3 for beta chain variable domain of TCR clone 105595 (TRBV2, TRBJ2-7)
CATSMGLVYEQYF

SEQ ID NO: 211191 - protein, 14 aa, Homo sapiens
  CDR3 for alpha chain variable domain of TCR clone 105596 (TRAV35, TRAJ22)
CAGLRPGSARQLTF

SEQ ID NO: 211192 - protein, 14 aa, Homo sapiens
  CDR3 for beta chain variable domain of TCR clone 105596 (TRBV4-1, TRBJ2-7)
CASSPVAGGDEQYL

SEQ ID NO: 211193 - protein, 12 aa, Homo sapiens
  CDR3 for alpha chain variable domain of TCR clone 105597 (TRAV12-1, TRAJ40)
CVVSSGTYKYIF

SEQ ID NO: 211194 - protein, 14 aa, Homo sapiens
  CDR3 for beta chain variable domain of TCR clone 105597 (TRBV20-1, TRBJ2-2)
CSAPHTANTGELFF

SEQ ID NO: 211195 - protein, 18 aa, Homo sapiens
  CDR3 for alpha chain variable domain of TCR clone 105598 (TRAV26-1, TRAJ22)
CIVRVALISSGSARQMTF

SEQ ID NO: 211196 - protein, 13 aa, Homo sapiens
  CDR3 for beta chain variable domain of TCR clone 105598 (TRBV13, TRBJ2-5)
CASSPEVGETQYF

SEQ ID NO: 211197 - protein, 14 aa, Homo sapiens
  CDR3 for alpha chain variable domain of TCR clone 105599 (TRAV27, TRAJ38)
CAARRNAGNNHIQN

SEQ ID NO: 211198 - protein, 13 aa, Homo sapiens
  CDR3 for beta chain variable domain of TCR clone 105599 (TRBV12-5, TRBJ2-3)
CASGDRQSDTQYF

SEQ ID NO: 211199 - protein, 14 aa, Homo sapiens
  CDR3 for alpha chain variable domain of TCR clone 105600 (TRAV13-1, TRAJ44)
CAAKATDTASKLTF

SEQ ID NO: 211200 - protein, 13 aa, Homo sapiens
  CDR3 for beta chain variable domain of TCR clone 105600 (TRBV5-5, TRBJ1-2)
CASSFWRGEDYTF

SEQ ID NO: 211201 - protein, 13 aa, Homo sapiens
  CDR3 for alpha chain variable domain of TCR clone 105601 (TRAV21, TRAJ27)
CAARPGNAGKSTF

SEQ ID NO: 211202 - protein, 16 aa, Homo sapiens
  CDR3 for beta chain variable domain of TCR clone 105601 (TRBV13, TRBJ2-2)
CASSPRTGEHTGELFF

SEQ ID NO: 211203 - protein, 10 aa, Homo sapiens
  CDR3 for alpha chain variable domain of TCR clone 105602 (TRAV2, TRAJ15)
RGQAGTALIF

SEQ ID NO: 211204 - protein, 14 aa, Homo sapiens
  CDR3 for beta chain variable domain of TCR clone 105602 (TRBV7-2, TRBJ2-7)
CASSPKTSFYEQYF

SEQ ID NO: 211205 - protein, 11 aa, Homo sapiens
  CDR3 for alpha chain variable domain of TCR clone 105603 (TRAV20, TRAJ23)
CARNQGGKLIF

SEQ ID NO: 211206 - protein, 16 aa, Homo sapiens
  CDR3 for beta chain variable domain of TCR clone 105603 (TRBV7-8, TRBJ2-5)
CASSFGGQPAQETQYF

SEQ ID NO: 211207 - protein, 15 aa, Homo sapiens
  CDR3 for alpha chain variable domain of TCR clone 105604 (TRAV8-3, TRAJ27)
CAVGPSKTNAGNSTF

SEQ ID NO: 211208 - protein, 13 aa, Homo sapiens
  CDR3 for beta chain variable domain of TCR clone 105604 (TRBV12-5, TRBJ1-2)
CASGVRTGNGYTF

SEQ ID NO: 211209 - protein, 13 aa, Homo sapiens
  CDR3 for alpha chain variable domain of TCR clone 105605 (TRAV26-2, TRAJ43)
CILRAVNNNDMRF

SEQ ID NO: 211210 - protein, 15 aa, Homo sapiens
  CDR3 for beta chain variable domain of TCR clone 105605 (TRBV7-2, TRBJ2-1)
CASTHVTGIYNEQFF

SEQ ID NO: 211211 - protein, 15 aa, Homo sapiens
  CDR3 for alpha chain variable domain of TCR clone 105606 (TRAV12-2, TRAJ53)
CAVNGGGGSNYKLSF

SEQ ID NO: 211212 - protein, 14 aa, Homo sapiens
  CDR3 for beta chain variable domain of TCR clone 105606 (TRBV19, TRBJ2-2)
CASSTLHRSGELFF

SEQ ID NO: 211213 - protein, 14 aa, Homo sapiens
  CDR3 for alpha chain variable domain of TCR clone 105607 (TRAV1-2, TRAJ16)
CAVNRVSDGQKLLF

SEQ ID NO: 211214 - protein, 14 aa, Homo sapiens
  CDR3 for beta chain variable domain of TCR clone 105607 (TRBV19, TRBJ2-2)
CASSTLHRSGELFF

SEQ ID NO: 211215 - protein, 16 aa, Homo sapiens
  CDR3 for alpha chain variable domain of TCR clone 105608 (TRAV3, TRAJ21)
CAVRDIERGNFNKFYF

SEQ ID NO: 211216 - protein, 15 aa, Homo sapiens
  CDR3 for beta chain variable domain of TCR clone 105608 (TRBV7-6, TRBJ2-5)
CASSKPTGPRETQYF

SEQ ID NO: 211217 - protein, 12 aa, Homo sapiens
  CDR3 for alpha chain variable domain of TCR clone 105609 (TRAV12-3, TRAJ17)
CAMTLTGNKLTF

SEQ ID NO: 211218 - protein, 13 aa, Homo sapiens
  CDR3 for beta chain variable domain of TCR clone 105609 (TRBV7-9, TRBJ1-2)
CASSLKKNYGYTF

SEQ ID NO: 211219 - protein, 15 aa, Homo sapiens
  CDR3 for alpha chain variable domain of TCR clone 105610 (TRAV26-1, TRAJ56)
FIVRVDNGANSKLTF

SEQ ID NO: 211220 - protein, 15 aa, Homo sapiens
  CDR3 for beta chain variable domain of TCR clone 105610 (TRBV20-1, TRBJ2-7)
CSARDPTEVGHEQYF

SEQ ID NO: 211221 - protein, 12 aa, Homo sapiens
  CDR3 for alpha chain variable domain of TCR clone 105611 (TRAV12-3, TRAJ17)
CAMTLTGNKLTF

SEQ ID NO: 211222 - protein, 20 aa, Homo sapiens
  CDR3 for beta chain variable domain of TCR clone 105611 (TRBV7-8, TRBJ2-2)
CASGHLFPGPTIHITGELFF

SEQ ID NO: 211223 - protein, 14 aa, Homo sapiens
  CDR3 for alpha chain variable domain of TCR clone 105612 (TRAV1-2, TRAJ8)
CAVREYTGFQKLVF

SEQ ID NO: 211224 - protein, 12 aa, Homo sapiens
  CDR3 for beta chain variable domain of TCR clone 105612 (TRBV14, TRBJ2-7)
CASSRLKGEQYF

SEQ ID NO: 211225 - protein, 13 aa, Homo sapiens
  CDR3 for alpha chain variable domain of TCR clone 105613 (TRAV2, TRAJ40)
CAVVTSGTYKYIF

SEQ ID NO: 211226 - protein, 16 aa, Homo sapiens
  CDR3 for beta chain variable domain of TCR clone 105613 (TRBV11-3, TRBJ2-5)
CASSSVVAGSTETQYF

SEQ ID NO: 211227 - protein, 14 aa, Homo sapiens
  CDR3 for alpha chain variable domain of TCR clone 105614 (TRAV3, TRAJ17)
CAVRNAAAGNKLTF

SEQ ID NO: 211228 - protein, 16 aa, Homo sapiens
  CDR3 for beta chain variable domain of TCR clone 105614 (TRBV20-1, TRBJ1-2)
CSASMGQGVANYGYTF

SEQ ID NO: 211229 - protein, 17 aa, Homo sapiens
  CDR3 for alpha chain variable domain of TCR clone 105615 (TRAV3, TRAJ6)
CAVRDGPRAGGSSIPTF

SEQ ID NO: 211230 - protein, 18 aa, Homo sapiens
  CDR3 for beta chain variable domain of TCR clone 105615 (TRBV7-9, TRBJ2-7)
CASSLTTSGSRTWYEQYF

SEQ ID NO: 211231 - protein, 17 aa, Homo sapiens
  CDR3 for alpha chain variable domain of TCR clone 105616 (TRAV12-2, TRAJ52)
CAVNPYAGGTSYGKLTF

SEQ ID NO: 211232 - protein, 17 aa, Homo sapiens
  CDR3 for beta chain variable domain of TCR clone 105616 (TRBV13, TRBJ2-3)
CASSLSRVAGGRNTQYF

SEQ ID NO: 211233 - protein, 12 aa, Homo sapiens
  CDR3 for alpha chain variable domain of TCR clone 105617 (TRAV13-2, TRAJ23)
CAERHRGGKLIF

SEQ ID NO: 211234 - protein, 16 aa, Homo sapiens
  CDR3 for beta chain variable domain of TCR clone 105617 (TRBV12-5, TRBJ2-5)
CASGPRTSGHQETQYF

SEQ ID NO: 211235 - protein, 17 aa, Homo sapiens
  CDR3 for alpha chain variable domain of TCR clone 105618 (TRAV3, TRAJ42)
CAVRDRDYGGSQGNIIF

SEQ ID NO: 211236 - protein, 15 aa, Homo sapiens
  CDR3 for beta chain variable domain of TCR clone 105618 (TRBV4-1, TRBJ1-4)
CASSDTGGTNEKLFF

SEQ ID NO: 211237 - protein, 14 aa, Homo sapiens
  CDR3 for alpha chain variable domain of TCR clone 105619 (TRAV8-3, TRAJ6)
CAVGASGGSYLPTF

SEQ ID NO: 211238 - protein, 17 aa, Homo sapiens
  CDR3 for beta chain variable domain of TCR clone 105619 (TRBV18, TRBJ2-2)
CASSPSDPWQNTGELFF

SEQ ID NO: 211239 - protein, 13 aa, Homo sapiens
  CDR3 for alpha chain variable domain of TCR clone 105620 (TRAV2, TRAJ40)
CAVVTSGTYKYIF

SEQ ID NO: 211240 - protein, 13 aa, Homo sapiens
  CDR3 for beta chain variable domain of TCR clone 105620 (TRBV4-1, TRBJ2-2)
CASSQENTGELFF

SEQ ID NO: 211241 - protein, 14 aa, Homo sapiens
  CDR3 for alpha chain variable domain of TCR clone 105621 (TRAV1-2, TRAJ15)
CAVRDRQAGTALIF

SEQ ID NO: 211242 - protein, 14 aa, Homo sapiens
  CDR3 for beta chain variable domain of TCR clone 105621 (TRBV9, TRBJ2-4)
CASSPSGTSGFQYF

SEQ ID NO: 211243 - protein, 12 aa, Homo sapiens
  CDR3 for alpha chain variable domain of TCR clone 105622 (TRAV8-3, TRAJ27)
CAVGAEAGKSTF

SEQ ID NO: 211244 - protein, 14 aa, Homo sapiens
  CDR3 for beta chain variable domain of TCR clone 105622 (TRBV2, TRBJ2-1)
CASRLIVCHDEQFF

SEQ ID NO: 211245 - protein, 16 aa, Homo sapiens
  CDR3 for alpha chain variable domain of TCR clone 105623 (TRAV36/DV7, TRAJ33)
WRPGNKVQDRNYQLIW

SEQ ID NO: 211246 - protein, 15 aa, Homo sapiens
  CDR3 for beta chain variable domain of TCR clone 105623 (TRBV29-1, TRBJ2-1)
CSVGRHALFYNEQFF

SEQ ID NO: 211247 - protein, 13 aa, Homo sapiens
  CDR3 for alpha chain variable domain of TCR clone 105624 (TRAV2, TRAJ40)
CDVVTSGTYKYIF

SEQ ID NO: 211248 - protein, 15 aa, Homo sapiens
  CDR3 for beta chain variable domain of TCR clone 105624 (TRBV6-3, TRBJ2-7)
CASSSPGTVFYEQYF

SEQ ID NO: 211249 - protein, 15 aa, Homo sapiens
  CDR3 for alpha chain variable domain of TCR clone 105625 (TRAV23/DV6, TRAJ18)
CAARYRGSTLGRLYF

SEQ ID NO: 211250 - protein, 15 aa, Homo sapiens
  CDR3 for beta chain variable domain of TCR clone 105625 (TRBV7-8, TRBJ2-1)
CASSLADSLYNERFF

SEQ ID NO: 211251 - protein, 14 aa, Homo sapiens
  CDR3 for alpha chain variable domain of TCR clone 105626 (TRAV13-1, TRAJ6)
CAASITGGSYIPTF

SEQ ID NO: 211252 - protein, 14 aa, Homo sapiens
  CDR3 for beta chain variable domain of TCR clone 105626 (TRBV5-7, TRBJ1-5)
CASSRTGGGQPQHF

SEQ ID NO: 211253 - protein, 14 aa, Homo sapiens
  CDR3 for alpha chain variable domain of TCR clone 105627 (TRAV12-2, TRAJ17)
CDVLFKAAGNKLTF

SEQ ID NO: 211254 - protein, 17 aa, Homo sapiens
  CDR3 for beta chain variable domain of TCR clone 105627 (TRBV20-1, TRBJ2-2)
CSASGSGQGGLTGELFF

SEQ ID NO: 211255 - protein, 15 aa, Homo sapiens
  CDR3 for alpha chain variable domain of TCR clone 105628 (TRAV17, TRAJ22)
CATVAPSGSARQLTF

SEQ ID NO: 211256 - protein, 14 aa, Homo sapiens
  CDR3 for beta chain variable domain of TCR clone 105628 (TRBV4-1, TRBJ2-2)
CASSQAVNTGEPFF

SEQ ID NO: 211257 - protein, 15 aa, Homo sapiens
  CDR3 for alpha chain variable domain of TCR clone 105629 (TRAV26-1, TRAJ42)
CIGRVKGGSQGNLIF

SEQ ID NO: 211258 - protein, 14 aa, Homo sapiens
  CDR3 for beta chain variable domain of TCR clone 105629 (TRBV19, TRBJ2-2)
CATTGHANTGELFF

SEQ ID NO: 211259 - protein, 16 aa, Homo sapiens
  CDR3 for alpha chain variable domain of TCR clone 105630 (TRAV3, TRAJ4)
CAVRPSPSGGYNKLIF

SEQ ID NO: 211260 - protein, 15 aa, Homo sapiens
  CDR3 for beta chain variable domain of TCR clone 105630 (TRBV7-3, TRBJ2-1)
CASSPTGGGEVEQFF

SEQ ID NO: 211261 - protein, 10 aa, Homo sapiens
  CDR3 for alpha chain variable domain of TCR clone 105631 (TRAV1-2, TRAJ34)
CAVNTDKPIF

SEQ ID NO: 211262 - protein, 18 aa, Homo sapiens
  CDR3 for beta chain variable domain of TCR clone 105631 (TRBV7-9, TRBJ2-7)
CASSLTTSGSRTWYEQYF

SEQ ID NO: 211263 - protein, 11 aa, Homo sapiens
  CDR3 for alpha chain variable domain of TCR clone 105632 (TRAV27, TRAJ36)
CRMTGANNLFF

SEQ ID NO: 211264 - protein, 14 aa, Homo sapiens
  CDR3 for beta chain variable domain of TCR clone 105632 (TRBV12-4, TRBJ2-3)
CASSLVPSTDTQYF

SEQ ID NO: 211265 - protein, 14 aa, Homo sapiens
  CDR3 for alpha chain variable domain of TCR clone 105633 (TRAV26-1, TRAJ38)
CIADNAGNNRKLIW

SEQ ID NO: 211266 - protein, 15 aa, Homo sapiens
  CDR3 for beta chain variable domain of TCR clone 105633 (TRBV9, TRBJ2-1)
CASSRAGSSYNEQFF

SEQ ID NO: 211267 - protein, 13 aa, Homo sapiens
  CDR3 for alpha chain variable domain of TCR clone 105634 (TRAV13-1, TRAJ13)
CAASKGGYQKVTF

SEQ ID NO: 211268 - protein, 16 aa, Homo sapiens
  CDR3 for beta chain variable domain of TCR clone 105634 (TRBV18, TRBJ1-2)
CASSTPERVTIYGYTF

SEQ ID NO: 211269 - protein, 14 aa, Homo sapiens
  CDR3 for alpha chain variable domain of TCR clone 105635 (TRAV26-1, TRAJ44)
CISPLPGTASTLTF

SEQ ID NO: 211270 - protein, 16 aa, Homo sapiens
  CDR3 for beta chain variable domain of TCR clone 105635 (TRBV19, TRBJ2-1)
CASSKAGPSSYNEQFF

SEQ ID NO: 211271 - protein, 10 aa, Homo sapiens
  CDR3 for alpha chain variable domain of TCR clone 105636 (TRAV21, TRAJ34)
CAADTDKLIF

SEQ ID NO: 211272 - protein, 16 aa, Homo sapiens
  CDR3 for beta chain variable domain of TCR clone 105636 (TRBV6-5, TRBJ2-2)
CASSHVSRAKPGELFF

SEQ ID NO: 211273 - protein, 12 aa, Homo sapiens
  CDR3 for alpha chain variable domain of TCR clone 105637 (TRAV27, TRAJ34)
CAEPYNTDKLIF

SEQ ID NO: 211274 - protein, 13 aa, Homo sapiens
  CDR3 for beta chain variable domain of TCR clone 105637 (TRBV12-5, TRBJ2-3)
CASGDRQSDTQYF

SEQ ID NO: 211275 - protein, 13 aa, Homo sapiens
  CDR3 for alpha chain variable domain of TCR clone 105638 (TRAV35, TRAJ21)
CAGQLSNFNNFYF

SEQ ID NO: 211276 - protein, 11 aa, Homo sapiens
  CDR3 for beta chain variable domain of TCR clone 105638 (TRBV7-6, TRBJ2-5)
CASSSQETQYF

SEQ ID NO: 211277 - protein, 14 aa, Homo sapiens
  CDR3 for alpha chain variable domain of TCR clone 105639 (TRAV1-2, TRAJ16)
CVVNRFSDGQKLLF

SEQ ID NO: 211278 - protein, 13 aa, Homo sapiens
  CDR3 for beta chain variable domain of TCR clone 105639 (TRBV19, TRBJ1-2)
CASSVPGQDGYTF

SEQ ID NO: 211279 - protein, 14 aa, Homo sapiens
  CDR3 for alpha chain variable domain of TCR clone 105640 (TRAV12-3, TRAJ10)
SHLPLTGGGNKLTF

SEQ ID NO: 211280 - protein, 15 aa, Homo sapiens
  CDR3 for beta chain variable domain of TCR clone 105640 (TRBV5-7, TRBJ2-5)
CASSPQAGRRETQYF

SEQ ID NO: 211281 - protein, 17 aa, Homo sapiens
  CDR3 for alpha chain variable domain of TCR clone 105641 (TRAV1-2, TRAJ8)
CAVRDPDENTGFQKLVF

SEQ ID NO: 211282 - protein, 16 aa, Homo sapiens
  CDR3 for beta chain variable domain of TCR clone 105641 (TRBV7-9, TRBJ2-2)
CASSGSGGANTGELFF

SEQ ID NO: 211283 - protein, 13 aa, Homo sapiens
  CDR3 for alpha chain variable domain of TCR clone 105642 (TRAV12-1, TRAJ3)
CVVNPRGASKIIF

SEQ ID NO: 211284 - protein, 15 aa, Homo sapiens
  CDR3 for beta chain variable domain of TCR clone 105642 (TRBV4-3, TRBJ2-7)
CASSSGLAGSYEQYF

SEQ ID NO: 211285 - protein, 14 aa, Homo sapiens
  CDR3 for alpha chain variable domain of TCR clone 105643 (TRAV8-3, TRAJ4)
CAVGAAGGYTKLIF

SEQ ID NO: 211286 - protein, 15 aa, Homo sapiens
  CDR3 for beta chain variable domain of TCR clone 105643 (TRBV20-1, TRBJ2-5)
CSAPPRTGFGETQYF

SEQ ID NO: 211287 - protein, 12 aa, Homo sapiens
  CDR3 for alpha chain variable domain of TCR clone 105644 (TRAV8-3, TRAJ26)
CAGDNYGHNFVF

SEQ ID NO: 211288 - protein, 15 aa, Homo sapiens
  CDR3 for beta chain variable domain of TCR clone 105644 (TRBV11-2, TRBJ2-1)
CASSLGTSGLNEQFF

SEQ ID NO: 211289 - protein, 11 aa, Homo sapiens
  CDR3 for alpha chain variable domain of TCR clone 105645 (TRAV2, TRAJ33)
CAVESNYQLIW

SEQ ID NO: 211290 - protein, 13 aa, Homo sapiens
  CDR3 for beta chain variable domain of TCR clone 105645 (TRBV11-2, TRBJ2-5)
CASSFSSQETQYF

SEQ ID NO: 211291 - protein, 11 aa, Homo sapiens
  CDR3 for alpha chain variable domain of TCR clone 105646 (TRAV1-1, TRAJ23)
CAVRQGGKLIF

SEQ ID NO: 211292 - protein, 20 aa, Homo sapiens
  CDR3 for beta chain variable domain of TCR clone 105646 (TRBV7-8, TRBJ2-2)
GASSHLFPGPTIHITGELFF

SEQ ID NO: 211293 - protein, 13 aa, Homo sapiens
  CDR3 for alpha chain variable domain of TCR clone 105647 (TRAV17, TRAJ9)
CATDYTGGFKTIF

SEQ ID NO: 211294 - protein, 14 aa, Homo sapiens
  CDR3 for beta chain variable domain of TCR clone 105647 (TRBV20-1, TRBJ2-7)
CSAKTGTGGYEQYF

SEQ ID NO: 211295 - protein, 16 aa, Homo sapiens
  CDR3 for alpha chain variable domain of TCR clone 105648 (TRAV35, TRAJ20)
CWADPSSGLNDYKLSF

SEQ ID NO: 211296 - protein, 16 aa, Homo sapiens
  CDR3 for beta chain variable domain of TCR clone 105648 (TRBV4-3, TRBJ1-6)
CASSAQPGGEGSPLHF

SEQ ID NO: 211297 - protein, 14 aa, Homo sapiens
  CDR3 for alpha chain variable domain of TCR clone 105649 (TRAV8-1, TRAJ5)
CAVSMDTGRRALTF

SEQ ID NO: 211298 - protein, 16 aa, Homo sapiens
  CDR3 for beta chain variable domain of TCR clone 105649 (TRBV19, TRBJ2-1)
CASSKAGPSSYNEQFF

SEQ ID NO: 211299 - protein, 13 aa, Homo sapiens
  CDR3 for alpha chain variable domain of TCR clone 105650 (TRAV3, TRAJ21)
CAVREPDFNKFYF

SEQ ID NO: 211300 - protein, 15 aa, Homo sapiens
  CDR3 for beta chain variable domain of TCR clone 105650 (TRBV28, TRBJ2-5)
CASSPPWSYQETQYF

SEQ ID NO: 211301 - protein, 15 aa, Homo sapiens
  CDR3 for alpha chain variable domain of TCR clone 105651 (TRAV12-1, TRAJ37)
CVVNIMGGNTGKLIF

SEQ ID NO: 211302 - protein, 12 aa, Homo sapiens
  CDR3 for beta chain variable domain of TCR clone 105651 (TRBV2, TRBJ2-7)
CASARVGYEQYF

SEQ ID NO: 211303 - protein, 17 aa, Homo sapiens
  CDR3 for alpha chain variable domain of TCR clone 105652 (TRAV4, TRAJ42)
CLVGVLNYGGSQGNLIF

SEQ ID NO: 211304 - protein, 12 aa, Homo sapiens
  CDR3 for beta chain variable domain of TCR clone 105652 (TRBV20-1, TRBJ2-1)
CSAQYTYNGQFF

SEQ ID NO: 211305 - protein, 14 aa, Homo sapiens
  CDR3 for alpha chain variable domain of TCR clone 105653 (TRAV13-1, TRAJ44)
CAAKATVTASKLTF

SEQ ID NO: 211306 - protein, 14 aa, Homo sapiens
  CDR3 for beta chain variable domain of TCR clone 105653 (TRBV19, TRBJ2-2)
CASSTLHRSGELFF

SEQ ID NO: 211307 - protein, 16 aa, Homo sapiens
  CDR3 for alpha chain variable domain of TCR clone 105654 (TRAV30, TRAJ24)
CGIEIVDADSWGKFQF

SEQ ID NO: 211308 - protein, 12 aa, Homo sapiens
  CDR3 for beta chain variable domain of TCR clone 105654 (TRBV11-2, TRBJ2-2)
CASSLGGGELFF

SEQ ID NO: 211309 - protein, 15 aa, Homo sapiens
  CDR3 for alpha chain variable domain of TCR clone 105655 (TRAV8-4, TRAJ3)
CAVSDPYSSASKIIF

SEQ ID NO: 211310 - protein, 16 aa, Homo sapiens
  CDR3 for beta chain variable domain of TCR clone 105655 (TRBV2, TRBJ2-1)
CASSVGGSLSYNEQFS

SEQ ID NO: 211311 - protein, 13 aa, Homo sapiens
  CDR3 for alpha chain variable domain of TCR clone 105656 (TRAV26-2, TRAJ57)
CILSRGGSGKLVF

SEQ ID NO: 211312 - protein, 16 aa, Homo sapiens
  CDR3 for beta chain variable domain of TCR clone 105656 (TRBV18, TRBJ1-5)
CASSPRTGGGNQPQHF

SEQ ID NO: 211313 - protein, 13 aa, Homo sapiens
  CDR3 for alpha chain variable domain of TCR clone 105657 (TRAV12-3, TRAJ9)
CAMSADGGFKTIF

SEQ ID NO: 211314 - protein, 13 aa, Homo sapiens
  CDR3 for beta chain variable domain of TCR clone 105657 (TRBV7-3, TRBJ1-1)
CASSQDWGAEAFF

SEQ ID NO: 211315 - protein, 12 aa, Homo sapiens
  CDR3 for alpha chain variable domain of TCR clone 105658 (TRAV13-1, TRAJ21)
CAAKEGFNKFYF

SEQ ID NO: 211316 - protein, 15 aa, Homo sapiens
  CDR3 for beta chain variable domain of TCR clone 105658 (TRBV15, TRBJ1-1)
CATSLQGGRNTEAFF

SEQ ID NO: 211317 - protein, 12 aa, Homo sapiens
  CDR3 for alpha chain variable domain of TCR clone 105659 (TRAV1-1, TRAJ24)
CAATDSWGKLQF

SEQ ID NO: 211318 - protein, 15 aa, Homo sapiens
  CDR3 for beta chain variable domain of TCR clone 105659 (TRBV20-1, TRBJ2-7)
CSARDRVSGMDEQYF

SEQ ID NO: 211319 - protein, 20 aa, Homo sapiens
  CDR3 for alpha chain variable domain of TCR clone 105660 (TRAV12-1, TRAJ42)
SSVIQSPTSVKGGSQGNLIF

SEQ ID NO: 211320 - protein, 18 aa, Homo sapiens
  CDR3 for beta chain variable domain of TCR clone 105660 (TRBV11-2, TRBJ2-3)
CASSLGGASRGAPNTQYF

SEQ ID NO: 211321 - protein, 16 aa, Homo sapiens
  CDR3 for alpha chain variable domain of TCR clone 105661 (TRAV3, TRAJ37)
CAVRGKGSGNTGKLIF

SEQ ID NO: 211322 - protein, 15 aa, Homo sapiens
  CDR3 for beta chain variable domain of TCR clone 105661 (TRBV7-9, TRBJ1-6)
CASSSPGRGNSPHHF

SEQ ID NO: 211323 - protein, 13 aa, Homo sapiens
  CDR3 for alpha chain variable domain of TCR clone 105662 (TRAV3, TRAJ27)
CAVRPLGAGKSTF

SEQ ID NO: 211324 - protein, 15 aa, Homo sapiens
  CDR3 for beta chain variable domain of TCR clone 105662 (TRBV16, TRBJ1-5)
CASSQSGTADQPQHF

SEQ ID NO: 211325 - protein, 17 aa, Homo sapiens
  CDR3 for alpha chain variable domain of TCR clone 105663 (TRAV1-1, TRAJ15)
CLLLLRCPNQAGTALIF

SEQ ID NO: 211326 - protein, 16 aa, Homo sapiens
  CDR3 for beta chain variable domain of TCR clone 105663 (TRBV4-3, TRBJ2-1)
CASSPALDRGVNEQFF

SEQ ID NO: 211327 - protein, 13 aa, Homo sapiens
  CDR3 for alpha chain variable domain of TCR clone 105664 (TRAV23/DV6, TRAJ15)
CSKLHQAGTALIF

SEQ ID NO: 211328 - protein, 13 aa, Homo sapiens
  CDR3 for beta chain variable domain of TCR clone 105664 (TRBV11-3, TRBJ1-2)
CASSLPGDVGYTF

SEQ ID NO: 211329 - protein, 18 aa, Homo sapiens
  CDR3 for alpha chain variable domain of TCR clone 105665 (TRAV12-3, TRAJ52)
CAMSRTNAGGTSYGKMTF

SEQ ID NO: 211330 - protein, 16 aa, Homo sapiens
  CDR3 for beta chain variable domain of TCR clone 105665 (TRBV7-3, TRBJ2-3)
ELSLMKRMRGADTQYF

SEQ ID NO: 211331 - protein, 14 aa, Homo sapiens
  CDR3 for alpha chain variable domain of TCR clone 105666 (TRAV29/DV5, TRAJ36)
CAARRKTGANNLFF

SEQ ID NO: 211332 - protein, 11 aa, Homo sapiens
  CDR3 for beta chain variable domain of TCR clone 105666 (TRBV19, TRBJ1-2)
CASSISSGYTF

SEQ ID NO: 211333 - protein, 15 aa, Homo sapiens
  CDR3 for alpha chain variable domain of TCR clone 105667 (TRAV27, TRAJ50)
CAGVGRGTSYDQVIF

SEQ ID NO: 211334 - protein, 14 aa, Homo sapiens
  CDR3 for beta chain variable domain of TCR clone 105667 (TRBV7-2, TRBJ1-1)
CASSFYDLNTEAFF

SEQ ID NO: 211335 - protein, 13 aa, Homo sapiens
  CDR3 for alpha chain variable domain of TCR clone 105668 (TRAV17, TRAJ54)
CATSWGGDQKLVF

SEQ ID NO: 211336 - protein, 15 aa, Homo sapiens
  CDR3 for beta chain variable domain of TCR clone 105668 (TRBV4-3, TRBJ2-3)
CASSPSLLSTDTQYF

SEQ ID NO: 211337 - protein, 14 aa, Homo sapiens
  CDR3 for alpha chain variable domain of TCR clone 105669 (TRAV35, TRAJ50)
CAGHRKTSYDKVIF

SEQ ID NO: 211338 - protein, 14 aa, Homo sapiens
  CDR3 for beta chain variable domain of TCR clone 105669 (TRBV4-1, TRBJ1-1)
CASSRSGQSFEAFF

SEQ ID NO: 211339 - protein, 13 aa, Homo sapiens
  CDR3 for alpha chain variable domain of TCR clone 105670 (TRAV27, TRAJ45)
CRSSGGGADGLTF

SEQ ID NO: 211340 - protein, 17 aa, Homo sapiens
  CDR3 for beta chain variable domain of TCR clone 105670 (TRBV11-2, TRBJ2-1)
CASSLYPPGVAYNEQFF

SEQ ID NO: 211341 - protein, 14 aa, Homo sapiens
  CDR3 for alpha chain variable domain of TCR clone 105671 (TRAV26-2, TRAJ38)
CILYNAGNNRKMIW

SEQ ID NO: 211342 - protein, 14 aa, Homo sapiens
  CDR3 for beta chain variable domain of TCR clone 105671 (TRBV19, TRBJ2-1)
CASPTFVLSGEQFF

SEQ ID NO: 211343 - protein, 16 aa, Homo sapiens
  CDR3 for alpha chain variable domain of TCR clone 105672 (TRAV1-2, TRAJ10)
CAVRGVLAGGGNKLTF

SEQ ID NO: 211344 - protein, 16 aa, Homo sapiens
  CDR3 for beta chain variable domain of TCR clone 105672 (TRBV4-2, TRBJ2-5)
CASSQELVGSQETQYF

SEQ ID NO: 211345 - protein, 14 aa, Homo sapiens
  CDR3 for alpha chain variable domain of TCR clone 105673 (TRAV26-1, TRAJ38)
CIADNAGNNRKLSW

SEQ ID NO: 211346 - protein, 14 aa, Homo sapiens
  CDR3 for beta chain variable domain of TCR clone 105673 (TRBV20-1, TRBJ1-1)
CSAQTRIGGTEAFF

SEQ ID NO: 211347 - protein, 16 aa, Homo sapiens
  CDR3 for alpha chain variable domain of TCR clone 105674 (TRAV3, TRAJ10)
CAVRDMRAGGGNKLTF

SEQ ID NO: 211348 - protein, 16 aa, Homo sapiens
  CDR3 for beta chain variable domain of TCR clone 105674 (TRBV29-1, TRBJ2-7)
CSVEVVGTSGSYEQYF

SEQ ID NO: 211349 - protein, 18 aa, Homo sapiens
  CDR3 for alpha chain variable domain of TCR clone 105675 (TRAV12-3, TRAJ52)
CAMSRTNAGGTSYGKLTF

SEQ ID NO: 211350 - protein, 14 aa, Homo sapiens
  CDR3 for beta chain variable domain of TCR clone 105675 (TRBV4-1, TRBJ2-2)
CASSQAVNTGELFF

SEQ ID NO: 211351 - protein, 16 aa, Homo sapiens
  CDR3 for alpha chain variable domain of TCR clone 105676 (TRAV12-2, TRAJ18)
CAVTTDRGSTLGKLYF

SEQ ID NO: 211352 - protein, 14 aa, Homo sapiens
  CDR3 for beta chain variable domain of TCR clone 105676 (TRBV4-2, TRBJ1-5)
CASSQDSINQPQHF

SEQ ID NO: 211353 - protein, 13 aa, Homo sapiens
  CDR3 for alpha chain variable domain of TCR clone 105677 (TRAV3, TRAJ20)
CAVRDGGDYKLSS

SEQ ID NO: 211354 - protein, 16 aa, Homo sapiens
  CDR3 for beta chain variable domain of TCR clone 105677 (TRBV4-1, TRBJ2-5)
CASSQTSGGPLETQYF

SEQ ID NO: 211355 - protein, 14 aa, Homo sapiens
  CDR3 for alpha chain variable domain of TCR clone 105678 (TRAV12-3, TRAJ30)
CAISLLNRDDKIIF

SEQ ID NO: 211356 - protein, 12 aa, Homo sapiens
  CDR3 for beta chain variable domain of TCR clone 105678 (TRBV11-2, TRBJ2-2)
CASSLGGGELFF

SEQ ID NO: 211357 - protein, 15 aa, Homo sapiens
  CDR3 for alpha chain variable domain of TCR clone 105679 (TRAV1-2, TRAJ15)
CAVDVMGSAGTALLF

SEQ ID NO: 211358 - protein, 13 aa, Homo sapiens
  CDR3 for beta chain variable domain of TCR clone 105679 (TRBV20-1, TRBJ1-1)
CSAFDRENTEAFF

SEQ ID NO: 211359 - protein, 15 aa, Homo sapiens
  CDR3 for alpha chain variable domain of TCR clone 105680 (TRAV8-3, TRAJ27)
CAVGPSKTNAGKSTF

SEQ ID NO: 211360 - protein, 14 aa, Homo sapiens
  CDR3 for beta chain variable domain of TCR clone 105680 (TRBV11-2, TRBJ2-3)
CAGSRLARTDTQYF

SEQ ID NO: 211361 - protein, 14 aa, Homo sapiens
  CDR3 for alpha chain variable domain of TCR clone 105681 (TRAV8-4, TRAJ43)
CAVSDPRNNNDMRF

SEQ ID NO: 211362 - protein, 15 aa, Homo sapiens
  CDR3 for beta chain variable domain of TCR clone 105681 (TRBV4-2, TRBJ1-2)
CASSQRTGGRDGYAF

SEQ ID NO: 211363 - protein, 12 aa, Homo sapiens
  CDR3 for alpha chain variable domain of TCR clone 105682 (TRAV12-3, TRAJ17)
CAMTLTGNKLTF

SEQ ID NO: 211364 - protein, 15 aa, Homo sapiens
  CDR3 for beta chain variable domain of TCR clone 105682 (TRBV27, TRBJ1-5)
CASSLGTGFDQPQHL

SEQ ID NO: 211365 - protein, 15 aa, Homo sapiens
  CDR3 for alpha chain variable domain of TCR clone 105683 (TRAV13-2, TRAJ8)
CAPGGRNTGFQKLVF

SEQ ID NO: 211366 - protein, 16 aa, Homo sapiens
  CDR3 for beta chain variable domain of TCR clone 105683 (TRBV6-1, TRBJ2-5)
CASSETLDRGAETQYF

SEQ ID NO: 211367 - protein, 14 aa, Homo sapiens
  CDR3 for alpha chain variable domain of TCR clone 105684 (TRAV1-2, TRAJ16)
CAVNRFSDGQKLLF

SEQ ID NO: 211368 - protein, 14 aa, Homo sapiens
  CDR3 for beta chain variable domain of TCR clone 105684 (TRBV20-1, TRBJ2-3)
CSARVRGSTDTQYF

SEQ ID NO: 211369 - protein, 12 aa, Homo sapiens
  CDR3 for alpha chain variable domain of TCR clone 105685 (TRAV12-3, TRAJ17)
CAMTLTGNKLTF

SEQ ID NO: 211370 - protein, 16 aa, Homo sapiens
  CDR3 for beta chain variable domain of TCR clone 105685 (TRBV18, TRBJ1-5)
CASSPSTGNSNQPQHF

SEQ ID NO: 211371 - protein, 13 aa, Homo sapiens
  CDR3 for alpha chain variable domain of TCR clone 105686 (TRAV8-6, TRAJ49)
CAAITNTGNQFYF

SEQ ID NO: 211372 - protein, 14 aa, Homo sapiens
  CDR3 for beta chain variable domain of TCR clone 105686 (TRBV5-1, TRBJ2-7)
CASSRGESLYEQYF

SEQ ID NO: 211373 - protein, 20 aa, Homo sapiens
  CDR3 for alpha chain variable domain of TCR clone 105687 (TRAV21, TRAJ4)
AASQPGDSATLAGGYNKLIF

SEQ ID NO: 211374 - protein, 19 aa, Homo sapiens
  CDR3 for beta chain variable domain of TCR clone 105687 (TRBV18, TRBJ1-3)
CASSPLSRTGMSSGNTIYV

SEQ ID NO: 211375 - protein, 22 aa, Homo sapiens
  CDR3 for alpha chain variable domain of TCR clone 105688 (TRAV2, TRAJ10)
ILQVREADAAVYYTGGGNKLTF

SEQ ID NO: 211376 - protein, 13 aa, Homo sapiens
  CDR3 for beta chain variable domain of TCR clone 105688 (TRBV7-9, TRBJ1-2)
CASSLKQNYGYTF

SEQ ID NO: 211377 - protein, 10 aa, Homo sapiens
  CDR3 for alpha chain variable domain of TCR clone 105689 (TRAV12-3, TRAJ49)
CAMNDDQFYF

SEQ ID NO: 211378 - protein, 17 aa, Homo sapiens
  CDR3 for beta chain variable domain of TCR clone 105689 (TRBV20-1, TRBJ2-2)
CSASGSGQGGLTGELFF

SEQ ID NO: 211379 - protein, 13 aa, Homo sapiens
  CDR3 for alpha chain variable domain of TCR clone 105690 (TRAV1-2, TRAJ9)
CAALNTGGFKTIF

SEQ ID NO: 211380 - protein, 14 aa, Homo sapiens
  CDR3 for beta chain variable domain of TCR clone 105690 (TRBV2, TRBJ2-3)
CASSEGQNTDTQYF

SEQ ID NO: 211381 - protein, 16 aa, Homo sapiens
  CDR3 for alpha chain variable domain of TCR clone 105691 (TRAV30, TRAJ24)
CGTEIVDADSWGKLQF

SEQ ID NO: 211382 - protein, 13 aa, Homo sapiens
  CDR3 for beta chain variable domain of TCR clone 105691 (TRBV11-2, TRBJ2-5)
CASSSTGEETQYF

SEQ ID NO: 211383 - protein, 14 aa, Homo sapiens
  CDR3 for alpha chain variable domain of TCR clone 105692 (TRAV35, TRAJ42)
CAGRYGGSEGNLIF

SEQ ID NO: 211384 - protein, 15 aa, Homo sapiens
  CDR3 for beta chain variable domain of TCR clone 105692 (TRBV7-9, TRBJ2-1)
CASSLGWGRANEQFF

SEQ ID NO: 211385 - protein, 14 aa, Homo sapiens
  CDR3 for alpha chain variable domain of TCR clone 105693 (TRAV27, TRAJ23)
CAGLSYNQGGKLIF

SEQ ID NO: 211386 - protein, 15 aa, Homo sapiens
  CDR3 for beta chain variable domain of TCR clone 105693 (TRBV19, TRBJ2-2)
CASSLNRGATGELFF

SEQ ID NO: 211387 - protein, 17 aa, Homo sapiens
  CDR3 for alpha chain variable domain of TCR clone 105694 (TRAV23/DV6, TRAJ57)
CAASSTLSQGGSEKLVF

SEQ ID NO: 211388 - protein, 17 aa, Homo sapiens
  CDR3 for beta chain variable domain of TCR clone 105694 (TRBV10-3, TRBJ2-6)
CAISESTAPSGANDLTF

SEQ ID NO: 211389 - protein, 13 aa, Homo sapiens
  CDR3 for alpha chain variable domain of TCR clone 105695 (TRAV2, TRAJ40)
CAVVTSGTYKYIF

SEQ ID NO: 211390 - protein, 17 aa, Homo sapiens
  CDR3 for beta chain variable domain of TCR clone 105695 (TRBV7-3, TRBJ2-3)
CASSLMKRMRGADTLYF

SEQ ID NO: 211391 - protein, 12 aa, Homo sapiens
  CDR3 for alpha chain variable domain of TCR clone 105696 (TRAV20, TRAJ39)
CAVGNAGNMLTF

SEQ ID NO: 211392 - protein, 15 aa, Homo sapiens
  CDR3 for beta chain variable domain of TCR clone 105696 (TRBV7-9, TRBJ2-7)
CASSPGGGLTYEQYF

SEQ ID NO: 211393 - protein, 18 aa, Homo sapiens
  CDR3 for alpha chain variable domain of TCR clone 105697 (TRAV26-1, TRAJ46)
TIASSESEKKSSGDKLTF

SEQ ID NO: 211394 - protein, 13 aa, Homo sapiens
  CDR3 for beta chain variable domain of TCR clone 105697 (TRBV12-5, TRBJ2-3)
CASGDRQSDTQYF

SEQ ID NO: 211395 - protein, 14 aa, Homo sapiens
  CDR3 for alpha chain variable domain of TCR clone 105698 (TRAV12-2, TRAJ40)
CAVKIPSGTSKYIF

SEQ ID NO: 211396 - protein, 13 aa, Homo sapiens
  CDR3 for beta chain variable domain of TCR clone 105698 (TRBV7-9, TRBJ1-2)
CASSLKQNYGYTF

SEQ ID NO: 211397 - protein, 15 aa, Homo sapiens
  CDR3 for alpha chain variable domain of TCR clone 105699 (TRAV21, TRAJ24)
CAARSSTDSWGKLQF

SEQ ID NO: 211398 - protein, 15 aa, Homo sapiens
  CDR3 for beta chain variable domain of TCR clone 105699 (TRBV11-3, TRBJ2-3)
CASLKDGREGDTQYF

SEQ ID NO: 211399 - protein, 19 aa, Homo sapiens
  CDR3 for alpha chain variable domain of TCR clone 105700 (TRAV38-1, TRAJ53)
CAFMKHGLESGGSNYKLTF

SEQ ID NO: 211400 - protein, 13 aa, Homo sapiens
  CDR3 for beta chain variable domain of TCR clone 105700 (TRBV19, TRBJ2-7)
CASSPRQAYEQYF

SEQ ID NO: 211401 - protein, 14 aa, Homo sapiens
  CDR3 for alpha chain variable domain of TCR clone 105701 (TRAV13-1, TRAJ44)
CAAKATGTASKLTF

SEQ ID NO: 211402 - protein, 17 aa, Homo sapiens
  CDR3 for beta chain variable domain of TCR clone 105701 (TRBV7-3, TRBJ2-3)
CASSLMKRMPGADTQYF

SEQ ID NO: 211403 - protein, 16 aa, Homo sapiens
  CDR3 for alpha chain variable domain of TCR clone 105702 (TRAV1-1, TRAJ28)
CAARDDSGAGSYQLTF

SEQ ID NO: 211404 - protein, 12 aa, Homo sapiens
  CDR3 for beta chain variable domain of TCR clone 105702 (TRBV11-2, TRBJ2-5)
CASSLDTQTQYF

SEQ ID NO: 211405 - protein, 21 aa, Homo sapiens
  CDR3 for alpha chain variable domain of TCR clone 105703 (TRAV2, TRAJ30)
ILQVREADAAVYYWGDDKIIF

SEQ ID NO: 211406 - protein, 16 aa, Homo sapiens
  CDR3 for beta chain variable domain of TCR clone 105703 (TRBV15, TRBJ2-1)
CATSRNLAGGYNEQFF

SEQ ID NO: 211407 - protein, 15 aa, Homo sapiens
  CDR3 for alpha chain variable domain of TCR clone 105704 (TRAV21, TRAJ53)
CATLTSGGSNYKLTF

SEQ ID NO: 211408 - protein, 15 aa, Homo sapiens
  CDR3 for beta chain variable domain of TCR clone 105704 (TRBV27, TRBJ2-1)
CASSNGGGSSNEQFF

SEQ ID NO: 211409 - protein, 13 aa, Homo sapiens
  CDR3 for alpha chain variable domain of TCR clone 105705 (TRAV22, TRAJ29)
CAVGGSGNTPLVF

SEQ ID NO: 211410 - protein, 15 aa, Homo sapiens
  CDR3 for beta chain variable domain of TCR clone 105705 (TRBV18, TRBJ2-1)
CASSPPSASYNEQFF

SEQ ID NO: 211411 - protein, 14 aa, Homo sapiens
  CDR3 for alpha chain variable domain of TCR clone 105706 (TRAV12-2, TRAJ32)
CAHPESGASNKLIF

SEQ ID NO: 211412 - protein, 14 aa, Homo sapiens
  CDR3 for beta chain variable domain of TCR clone 105706 (TRBV4-2, TRBJ2-3)
CASRETRAPGMQYF

SEQ ID NO: 211413 - protein, 15 aa, Homo sapiens
  CDR3 for alpha chain variable domain of TCR clone 105707 (TRAV17, TRAJ37)
CATDGGSSNTGKLIF

SEQ ID NO: 211414 - protein, 12 aa, Homo sapiens
  CDR3 for beta chain variable domain of TCR clone 105707 (TRBV11-2, TRBJ2-2)
CASSLGGGELFF

SEQ ID NO: 211415 - protein, 12 aa, Homo sapiens
  CDR3 for alpha chain variable domain of TCR clone 105708 (TRAV16, TRAJ56)
CAPTGANSKLTF

SEQ ID NO: 211416 - protein, 14 aa, Homo sapiens
  CDR3 for beta chain variable domain of TCR clone 105708 (TRBV7-8, TRBJ2-3)
CASSLEAGTDTQYF

SEQ ID NO: 211417 - protein, 10 aa, Homo sapiens
  CDR3 for alpha chain variable domain of TCR clone 105709 (TRAV12-3, TRAJ49)
CAVHGNQFYF

SEQ ID NO: 211418 - protein, 11 aa, Homo sapiens
  CDR3 for beta chain variable domain of TCR clone 105709 (TRBV12-4, TRBJ2-3)
CASTATDTQYF

SEQ ID NO: 211419 - protein, 14 aa, Homo sapiens
  CDR3 for alpha chain variable domain of TCR clone 105710 (TRAV26-1, TRAJ54)
CIVRRTQGAQKLVF

SEQ ID NO: 211420 - protein, 12 aa, Homo sapiens
  CDR3 for beta chain variable domain of TCR clone 105710 (TRBV12-4, TRBJ2-7)
CASSLGGYEQYF

SEQ ID NO: 211421 - protein, 14 aa, Homo sapiens
  CDR3 for alpha chain variable domain of TCR clone 105711 (TRAV17, TRAJ42)
CATDAPGSQGNLIF

SEQ ID NO: 211422 - protein, 13 aa, Homo sapiens
  CDR3 for beta chain variable domain of TCR clone 105711 (TRBV7-7, TRBJ1-5)
CASSPGNNQPQHF

SEQ ID NO: 211423 - protein, 14 aa, Homo sapiens
  CDR3 for alpha chain variable domain of TCR clone 105712 (TRAV13-1, TRAJ44)
CAAKATGTASKLTF

SEQ ID NO: 211424 - protein, 13 aa, Homo sapiens
  CDR3 for beta chain variable domain of TCR clone 105712 (TRBV14, TRBJ2-7)
CASSQDRRYEQYF

SEQ ID NO: 211425 - protein, 18 aa, Homo sapiens
  CDR3 for alpha chain variable domain of TCR clone 105713 (TRAV17, TRAJ45)
CATSLDLYSGGGADGLTS

SEQ ID NO: 211426 - protein, 15 aa, Homo sapiens
  CDR3 for beta chain variable domain of TCR clone 105713 (TRBV11-2, TRBJ2-1)
CASSKNRGLIYEQFF

SEQ ID NO: 211427 - protein, 14 aa, Homo sapiens
  CDR3 for alpha chain variable domain of TCR clone 105714 (TRAV12-3, TRAJ10)
SHLPPTGGGNKLTF

SEQ ID NO: 211428 - protein, 16 aa, Homo sapiens
  CDR3 for beta chain variable domain of TCR clone 105714 (TRBV19, TRBJ1-1)
CASRFGGPVTGTEAFF

SEQ ID NO: 211429 - protein, 13 aa, Homo sapiens
  CDR3 for alpha chain variable domain of TCR clone 105715 (TRAV36/DV7, TRAJ37)
CAVFSSNTGKLIF

SEQ ID NO: 211430 - protein, 16 aa, Homo sapiens
  CDR3 for beta chain variable domain of TCR clone 105715 (TRBV12-4, TRBJ2-5)
CASSCFVRGRQETQYF

SEQ ID NO: 211431 - protein, 13 aa, Homo sapiens
  CDR3 for alpha chain variable domain of TCR clone 105716 (TRAV1-1, TRAJ9)
CAAKNTGGFKTIF

SEQ ID NO: 211432 - protein, 14 aa, Homo sapiens
  CDR3 for beta chain variable domain of TCR clone 105716 (TRBV4-1, TRBJ2-2)
CASSQAVNTGELFF

SEQ ID NO: 211433 - protein, 17 aa, Homo sapiens
  CDR3 for alpha chain variable domain of TCR clone 105717 (TRAV13-2, TRAJ42)
CAEKGKNYGGSQGNLIF

SEQ ID NO: 211434 - protein, 16 aa, Homo sapiens
  CDR3 for beta chain variable domain of TCR clone 105717 (TRBV7-9, TRBJ2-1)
CASSLGTGWDYNEQFV

SEQ ID NO: 211435 - protein, 11 aa, Homo sapiens
  CDR3 for alpha chain variable domain of TCR clone 105718 (TRAV29/DV5, TRAJ49)
CAAVPGNQFYF

SEQ ID NO: 211436 - protein, 13 aa, Homo sapiens
  CDR3 for beta chain variable domain of TCR clone 105718 (TRBV7-9, TRBJ1-2)
CASSLKQNYGYTF

SEQ ID NO: 211437 - protein, 13 aa, Homo sapiens
  CDR3 for alpha chain variable domain of TCR clone 105719 (TRAV8-3, TRAJ15)
CAVGIQAGTALIF

SEQ ID NO: 211438 - protein, 17 aa, Homo sapiens
  CDR3 for beta chain variable domain of TCR clone 105719 (TRBV20-1, TRBJ2-1)
CSARDPLAGVYYNEQFF

SEQ ID NO: 211439 - protein, 14 aa, Homo sapiens
  CDR3 for alpha chain variable domain of TCR clone 105720 (TRAV13-1, TRAJ40)
CAASMTSGTYKYIF

SEQ ID NO: 211440 - protein, 15 aa, Homo sapiens
  CDR3 for beta chain variable domain of TCR clone 105720 (TRBV7-3, TRBJ2-1)
CASSPTWGGEVEQFF

SEQ ID NO: 211441 - protein, 16 aa, Homo sapiens
  CDR3 for alpha chain variable domain of TCR clone 105721 (TRAV35, TRAJ28)
CAGQRYSGAGSYQLTF

SEQ ID NO: 211442 - protein, 13 aa, Homo sapiens
  CDR3 for beta chain variable domain of TCR clone 105721 (TRBV19, TRBJ1-2)
CASSQGQVYGYTF

SEQ ID NO: 211443 - protein, 14 aa, Homo sapiens
  CDR3 for alpha chain variable domain of TCR clone 105722 (TRAV1-2, TRAJ16)
CAVNRFSDGQKLLF

SEQ ID NO: 211444 - protein, 13 aa, Homo sapiens
  CDR3 for beta chain variable domain of TCR clone 105722 (TRBV10-3, TRBJ2-5)
CAMTSGAGETQYF

SEQ ID NO: 211445 - protein, 14 aa, Homo sapiens
  CDR3 for alpha chain variable domain of TCR clone 105723 (TRAV2, TRAJ37)
CAVDFTSNTGKLIF

SEQ ID NO: 211446 - protein, 13 aa, Homo sapiens
  CDR3 for beta chain variable domain of TCR clone 105723 (TRBV20-1, TRBJ1-1)
CSAPLGGGTKAFF

SEQ ID NO: 211447 - protein, 14 aa, Homo sapiens
  CDR3 for alpha chain variable domain of TCR clone 105724 (TRAV1-2, TRAJ8)
CAVIEDTGFQKLVF

SEQ ID NO: 211448 - protein, 14 aa, Homo sapiens
  CDR3 for beta chain variable domain of TCR clone 105724 (TRBV7-9, TRBJ1-1)
CASTPLQSYTEAFF

SEQ ID NO: 211449 - protein, 19 aa, Homo sapiens
  CDR3 for alpha chain variable domain of TCR clone 105725 (TRAV16, )
CALSGDIQNPDPAVYKLRD

SEQ ID NO: 211450 - protein, 16 aa, Homo sapiens
  CDR3 for beta chain variable domain of TCR clone 105725 (TRBV12-5, TRBJ2-5)
CASGPRTSGNQETQYF

SEQ ID NO: 211451 - protein, 14 aa, Homo sapiens
  CDR3 for alpha chain variable domain of TCR clone 105726 (TRAV1-1, TRAJ35)
CAVRSIGFGNVLHC

SEQ ID NO: 211452 - protein, 15 aa, Homo sapiens
  CDR3 for beta chain variable domain of TCR clone 105726 (TRBV28, TRBJ2-7)
CASSPGGRGFYEQYF

SEQ ID NO: 211453 - protein, 12 aa, Homo sapiens
  CDR3 for alpha chain variable domain of TCR clone 105727 (TRAV8-3, TRAJ20)
CAVGANDYKLSF

SEQ ID NO: 211454 - protein, 14 aa, Homo sapiens
  CDR3 for beta chain variable domain of TCR clone 105727 (TRBV5-1, TRBJ2-7)
CASSRGESLYEQYF

SEQ ID NO: 211455 - protein, 15 aa, Homo sapiens
  CDR3 for alpha chain variable domain of TCR clone 105728 (TRAV21, TRAJ13)
CAVRPTSGGYQKVTF

SEQ ID NO: 211456 - protein, 14 aa, Homo sapiens
  CDR3 for beta chain variable domain of TCR clone 105728 (TRBV19, TRBJ2-1)
CASPTFVLSGEQFF

SEQ ID NO: 211457 - protein, 13 aa, Homo sapiens
  CDR3 for alpha chain variable domain of TCR clone 105729 (TRAV13-1, TRAJ21)
CAASIYNFNKFYF

SEQ ID NO: 211458 - protein, 13 aa, Homo sapiens
  CDR3 for beta chain variable domain of TCR clone 105729 (TRBV27, IGHJ2)
CASSLMGDEKLFF

SEQ ID NO: 211459 - protein, 13 aa, Homo sapiens
  CDR3 for alpha chain variable domain of TCR clone 105730 (TRAV27, TRAJ45)
CRSSGGGADGLTF

SEQ ID NO: 211460 - protein, 12 aa, Homo sapiens
  CDR3 for beta chain variable domain of TCR clone 105730 (TRBV19, TRBJ2-1)
CASSQISNEQFF

SEQ ID NO: 211461 - protein, 17 aa, Homo sapiens
  CDR3 for alpha chain variable domain of TCR clone 105731 (TRAV3, TRAJ12)
CAVRGGGRMDSSYKLIF

SEQ ID NO: 211462 - protein, 13 aa, Homo sapiens
  CDR3 for beta chain variable domain of TCR clone 105731 (TRBV4-2, TRBJ1-1)
CASSQAGNTEAFF

SEQ ID NO: 211463 - protein, 13 aa, Homo sapiens
  CDR3 for alpha chain variable domain of TCR clone 105732 (TRAV2, TRAJ40)
CAVVTSGTYKYIF

SEQ ID NO: 211464 - protein, 14 aa, Homo sapiens
  CDR3 for beta chain variable domain of TCR clone 105732 (TRBV9, TRBJ2-1)
CASSVDPRGKEQFF

SEQ ID NO: 211465 - protein, 15 aa, Homo sapiens
  CDR3 for alpha chain variable domain of TCR clone 105733 (TRAV12-3, TRAJ11)
CAMSEENSGYSTLTF

SEQ ID NO: 211466 - protein, 14 aa, Homo sapiens
  CDR3 for beta chain variable domain of TCR clone 105733 (TRBV28, TRBJ1-1)
CASSLWWSLAEAFF

SEQ ID NO: 211467 - protein, 13 aa, Homo sapiens
  CDR3 for alpha chain variable domain of TCR clone 105734 (TRAV17, TRAJ13)
CATDSGGYQKVTF

SEQ ID NO: 211468 - protein, 15 aa, Homo sapiens
  CDR3 for beta chain variable domain of TCR clone 105734 (TRBV6-6, TRBJ2-5)
CASSPGGGLEETQYF

SEQ ID NO: 211469 - protein, 16 aa, Homo sapiens
  CDR3 for alpha chain variable domain of TCR clone 105735 (TRAV3, TRAJ37)
CAVRGKGSGNTGKLIF

SEQ ID NO: 211470 - protein, 18 aa, Homo sapiens
  CDR3 for beta chain variable domain of TCR clone 105735 (TRBV12-4, TRBJ2-2)
CASNLVAGTRGRTGELFF

SEQ ID NO: 211471 - protein, 13 aa, Homo sapiens
  CDR3 for alpha chain variable domain of TCR clone 105736 (TRAV17, TRAJ9)
CAKDYTGGFKTIF

SEQ ID NO: 211472 - protein, 14 aa, Homo sapiens
  CDR3 for beta chain variable domain of TCR clone 105736 (TRBV19, TRBJ2-5)
CASSMTGQQETQYF

SEQ ID NO: 211473 - protein, 16 aa, Homo sapiens
  CDR3 for alpha chain variable domain of TCR clone 105737 (TRAV16, TRAJ4)
CALSRMFSGGYNKLII

SEQ ID NO: 211474 - protein, 16 aa, Homo sapiens
  CDR3 for beta chain variable domain of TCR clone 105737 (TRBV24-1, TRBJ2-3)
CATSDPGTGATDTQYF

SEQ ID NO: 211475 - protein, 15 aa, Homo sapiens
  CDR3 for alpha chain variable domain of TCR clone 105738 (TRAV17, TRAJ56)
CATERFTGANSKLTF

SEQ ID NO: 211476 - protein, 15 aa, Homo sapiens
  CDR3 for beta chain variable domain of TCR clone 105738 (TRBV28, TRBJ1-5)
CASSRTGGYVQPQHF

SEQ ID NO: 211477 - protein, 15 aa, Homo sapiens
  CDR3 for alpha chain variable domain of TCR clone 105739 (TRAV26-1, TRAJ15)
CIVRAANQAGTARIF

SEQ ID NO: 211478 - protein, 15 aa, Homo sapiens
  CDR3 for beta chain variable domain of TCR clone 105739 (TRBV20-1, TRBJ1-1)
CSARSAATSNTEAFF

SEQ ID NO: 211479 - protein, 13 aa, Homo sapiens
  CDR3 for alpha chain variable domain of TCR clone 105740 (TRAV13-1, TRAJ6)
CAASSGGSYIPTF

SEQ ID NO: 211480 - protein, 15 aa, Homo sapiens
  CDR3 for beta chain variable domain of TCR clone 105740 (TRBV12-4, TRBJ2-5)
CASNPPTGLQETQYF

SEQ ID NO: 211481 - protein, 12 aa, Homo sapiens
  CDR3 for alpha chain variable domain of TCR clone 105741 (TRAV1-2, TRAJ8)
CAVRTGFQKLVF

SEQ ID NO: 211482 - protein, 15 aa, Homo sapiens
  CDR3 for beta chain variable domain of TCR clone 105741 (TRBV9, TRBJ1-6)
CASSVAGTGDSPLHF

SEQ ID NO: 211483 - protein, 11 aa, Homo sapiens
  CDR3 for alpha chain variable domain of TCR clone 105742 (TRAV12-1, TRAJ26)
GVVAYGQNFVF

SEQ ID NO: 211484 - protein, 15 aa, Homo sapiens
  CDR3 for beta chain variable domain of TCR clone 105742 (TRBV12-4, TRBJ2-5)
CASSGTGQAQETQYF

SEQ ID NO: 211485 - protein, 12 aa, Homo sapiens
  CDR3 for alpha chain variable domain of TCR clone 105743 (TRAV12-1, TRAJ40)
CVVYSGTYKYIF

SEQ ID NO: 211486 - protein, 17 aa, Homo sapiens
  CDR3 for beta chain variable domain of TCR clone 105743 (TRBV11-3, TRBJ1-5)
CASSPLKGLRGNQPQHF

SEQ ID NO: 211487 - protein, 14 aa, Homo sapiens
  CDR3 for alpha chain variable domain of TCR clone 105744 (TRAV12-3, TRAJ42)
CAMNYGGSKGNLIF

SEQ ID NO: 211488 - protein, 15 aa, Homo sapiens
  CDR3 for beta chain variable domain of TCR clone 105744 (TRBV5-7, TRBJ1-5)
CASSYGKLWDQPQHF

SEQ ID NO: 211489 - protein, 14 aa, Homo sapiens
  CDR3 for alpha chain variable domain of TCR clone 105745 (TRAV1-1, TRAJ27)
CAVIYNTNAGKSTF

SEQ ID NO: 211490 - protein, 16 aa, Homo sapiens
  CDR3 for beta chain variable domain of TCR clone 105745 (TRBV27, TRBJ2-2)
CASSFRGLVRTGELFF

SEQ ID NO: 211491 - protein, 14 aa, Homo sapiens
  CDR3 for alpha chain variable domain of TCR clone 105746 (TRAV3, TRAJ22)
CAVRDYGSARQLTF

SEQ ID NO: 211492 - protein, 16 aa, Homo sapiens
  CDR3 for beta chain variable domain of TCR clone 105746 (TRBV5-4, TRBJ2-3)
CASQQPGAGGADTQYF

SEQ ID NO: 211493 - protein, 13 aa, Homo sapiens
  CDR3 for alpha chain variable domain of TCR clone 105747 (TRAV6, TRAJ20)
CALAVSNDYKLSF

SEQ ID NO: 211494 - protein, 16 aa, Homo sapiens
  CDR3 for beta chain variable domain of TCR clone 105747 (TRBV7-9, TRBJ2-1)
CASSDVAGGSYNEQFL

SEQ ID NO: 211495 - protein, 13 aa, Homo sapiens
  CDR3 for alpha chain variable domain of TCR clone 105748 (TRAV20, TRAJ54)
CAVQTGGAQKLVF

SEQ ID NO: 211496 - protein, 14 aa, Homo sapiens
  CDR3 for beta chain variable domain of TCR clone 105748 (TRBV20-1, TRBJ2-7)
CSAKTGTGGYEQYF

SEQ ID NO: 211497 - protein, 12 aa, Homo sapiens
  CDR3 for alpha chain variable domain of TCR clone 105749 (TRAV12-2, TRAJ10)
WGVTGGGNKLTF

SEQ ID NO: 211498 - protein, 13 aa, Homo sapiens
  CDR3 for beta chain variable domain of TCR clone 105749 (TRBV12-4, TRBJ1-1)
CASSPGTGFEAFF

SEQ ID NO: 211499 - protein, 17 aa, Homo sapiens
  CDR3 for alpha chain variable domain of TCR clone 105750 (TRAV36/DV7, TRAJ52)
CAVAQRAGGTSYGKLTF

SEQ ID NO: 211500 - protein, 11 aa, Homo sapiens
  CDR3 for beta chain variable domain of TCR clone 105750 (TRBV6-1, TRBJ1-3)
CKGGGGNTIYF

SEQ ID NO: 211501 - protein, 16 aa, Homo sapiens
  CDR3 for alpha chain variable domain of TCR clone 105751 (TRAV3, TRAJ37)
CAVSGKGSGNTGKLIF

SEQ ID NO: 211502 - protein, 12 aa, Homo sapiens
  CDR3 for beta chain variable domain of TCR clone 105751 (TRBV11-2, TRBJ2-2)
CASSLGGGELFF

SEQ ID NO: 211503 - protein, 14 aa, Homo sapiens
  CDR3 for alpha chain variable domain of TCR clone 105752 (TRAV8-3, TRAJ27)
CAGGRNTNSGKSTF

SEQ ID NO: 211504 - protein, 15 aa, Homo sapiens
  CDR3 for beta chain variable domain of TCR clone 105752 (TRBV11-3, TRBJ2-5)
CASSLRGRVQETQYF

SEQ ID NO: 211505 - protein, 19 aa, Homo sapiens
  CDR3 for alpha chain variable domain of TCR clone 105753 (TRAV1-2, TRAJ26)
CLLPLCCEIPDNYGQNFVF

SEQ ID NO: 211506 - protein, 17 aa, Homo sapiens
  CDR3 for beta chain variable domain of TCR clone 105753 (TRBV28, TRBJ2-5)
CASSRQGGLAGAETQYF

SEQ ID NO: 211507 - protein, 11 aa, Homo sapiens
  CDR3 for alpha chain variable domain of TCR clone 105754 (TRAV20, TRAJ23)
CACNQGGKLIF

SEQ ID NO: 211508 - protein, 16 aa, Homo sapiens
  CDR3 for beta chain variable domain of TCR clone 105754 (TRBV7-8, TRBJ2-5)
CASSFGGQPAQETQYC

SEQ ID NO: 211509 - protein, 19 aa, Homo sapiens
  CDR3 for alpha chain variable domain of TCR clone 105755 (TRAV26-1, TRAJ52)
CIVRAHRNAGGTSYGKLTF

SEQ ID NO: 211510 - protein, 15 aa, Homo sapiens
  CDR3 for beta chain variable domain of TCR clone 105755 (TRBV12-3, TRBJ2-5)
CASSPPTGLQETQYF

SEQ ID NO: 211511 - protein, 14 aa, Homo sapiens
  CDR3 for alpha chain variable domain of TCR clone 105756 (TRAV21, TRAJ8)
CALQRDTGFQKLVF

SEQ ID NO: 211512 - protein, 15 aa, Homo sapiens
  CDR3 for beta chain variable domain of TCR clone 105756 (TRBV9, TRBJ1-6)
CASSVAGTGDSPLHF

SEQ ID NO: 211513 - protein, 16 aa, Homo sapiens
  CDR3 for alpha chain variable domain of TCR clone 105757 (TRAV26-1, TRAJ37)
CIVRGDGSGNTGKLIF

SEQ ID NO: 211514 - protein, 17 aa, Homo sapiens
  CDR3 for beta chain variable domain of TCR clone 105757 (TRBV4-1, TRBJ2-7)
CASSRDPLGARGGEQYF

SEQ ID NO: 211515 - protein, 12 aa, Homo sapiens
  CDR3 for alpha chain variable domain of TCR clone 105758 (TRAV13-2, TRAJ23)
CAERHRGGKLIF

SEQ ID NO: 211516 - protein, 14 aa, Homo sapiens
  CDR3 for beta chain variable domain of TCR clone 105758 (TRBV18, TRBJ1-4)
CASSPGPNGEKLFF

SEQ ID NO: 211517 - protein, 15 aa, Homo sapiens
  CDR3 for alpha chain variable domain of TCR clone 105759 (TRAV8-3, TRAJ23)
CAVGDRYNQGGKLIF

SEQ ID NO: 211518 - protein, 22 aa, Homo sapiens
  CDR3 for beta chain variable domain of TCR clone 105759 (TRBV29-1, TRBJ2-5)
TVSKMSPEDSSIYLCSAGTQYF

SEQ ID NO: 211519 - protein, 15 aa, Homo sapiens
  CDR3 for alpha chain variable domain of TCR clone 105760 (TRAV26-1, TRAJ40)
CIVRVTTSGTYKYIF

SEQ ID NO: 211520 - protein, 15 aa, Homo sapiens
  CDR3 for beta chain variable domain of TCR clone 105760 (TRBV20-1, TRBJ2-5)
CSAEGTGGLQETQYF

SEQ ID NO: 211521 - protein, 19 aa, Homo sapiens
  CDR3 for alpha chain variable domain of TCR clone 105761 (TRAV1-2, TRAJ26)
CLLPLCCERPDNYGQNFVF

SEQ ID NO: 211522 - protein, 16 aa, Homo sapiens
  CDR3 for beta chain variable domain of TCR clone 105761 (TRBV7-3, TRBJ2-2)
CASSLKRGTLSGELFF

SEQ ID NO: 211523 - protein, 12 aa, Homo sapiens
  CDR3 for alpha chain variable domain of TCR clone 105762 (TRAV26-1, TRAJ26)
CIGFIYGQNFVF

SEQ ID NO: 211524 - protein, 13 aa, Homo sapiens
  CDR3 for beta chain variable domain of TCR clone 105762 (TRBV27, TRBJ1-1)
CASSLSIGAEAFF

SEQ ID NO: 211525 - protein, 14 aa, Homo sapiens
  CDR3 for alpha chain variable domain of TCR clone 105763 (TRAV38-1, TRAJ29)
CAFITPSGNTPLVF

SEQ ID NO: 211526 - protein, 13 aa, Homo sapiens
  CDR3 for beta chain variable domain of TCR clone 105763 (TRBV12-4, TRBJ2-7)
CASSPTETYEQYF

SEQ ID NO: 211527 - protein, 15 aa, Homo sapiens
  CDR3 for alpha chain variable domain of TCR clone 105764 (TRAV3, TRAJ36)
CAVRASQTGANNLFF

SEQ ID NO: 211528 - protein, 13 aa, Homo sapiens
  CDR3 for beta chain variable domain of TCR clone 105764 (TRBV28, TRBJ1-1)
CASSKQGWTEAFF

SEQ ID NO: 211529 - protein, 16 aa, Homo sapiens
  CDR3 for alpha chain variable domain of TCR clone 105765 (TRAV30, TRAJ24)
CGTEIVDADSWGKFQL

SEQ ID NO: 211530 - protein, 15 aa, Homo sapiens
  CDR3 for beta chain variable domain of TCR clone 105765 (TRBV5-1, TRBJ1-1)
CASSSTTGTNTEAFF

SEQ ID NO: 211531 - protein, 16 aa, Homo sapiens
  CDR3 for alpha chain variable domain of TCR clone 105766 (TRAV30, TRAJ24)
CCTEIVDADSWGKFQF

SEQ ID NO: 211532 - protein, 13 aa, Homo sapiens
  CDR3 for beta chain variable domain of TCR clone 105766 (TRBV7-2, TRBJ1-4)
CASSLAGLEKLFF

SEQ ID NO: 211533 - protein, 18 aa, Homo sapiens
  CDR3 for alpha chain variable domain of TCR clone 105767 (TRAV21, TRAJ52)
CAVRPSPAGGTSYGKLTF

SEQ ID NO: 211534 - protein, 13 aa, Homo sapiens
  CDR3 for beta chain variable domain of TCR clone 105767 (TRBV19, TRBJ1-1)
CASSITGESEAFF

SEQ ID NO: 211535 - protein, 10 aa, Homo sapiens
  CDR3 for alpha chain variable domain of TCR clone 105768 (TRAV21, TRAJ31)
CAVDNARLMF

SEQ ID NO: 211536 - protein, 14 aa, Homo sapiens
  CDR3 for beta chain variable domain of TCR clone 105768 (TRBV7-2, TRBJ1-1)
CASSFLTGTTEAFF

SEQ ID NO: 211537 - protein, 10 aa, Homo sapiens
  CDR3 for alpha chain variable domain of TCR clone 105769 (TRAV17, TRAJ36)
CATVAGNLFF

SEQ ID NO: 211538 - protein, 14 aa, Homo sapiens
  CDR3 for beta chain variable domain of TCR clone 105769 (TRBV20-1, TRBJ2-2)
CSAASGGNTGELFF

SEQ ID NO: 211539 - protein, 11 aa, Homo sapiens
  CDR3 for alpha chain variable domain of TCR clone 105770 (TRAV21, TRAJ11)
CAVNGYSTLTF

SEQ ID NO: 211540 - protein, 13 aa, Homo sapiens
  CDR3 for beta chain variable domain of TCR clone 105770 (TRBV12-4, TRBJ2-5)
CASRLAVQETQYF

SEQ ID NO: 211541 - protein, 12 aa, Homo sapiens
  CDR3 for alpha chain variable domain of TCR clone 105771 (TRAV17, TRAJ40)
CWALGGTYKYIF

SEQ ID NO: 211542 - protein, 16 aa, Homo sapiens
  CDR3 for beta chain variable domain of TCR clone 105771 (TRBV7-2, TRBJ1-4)
CASSLAPGRRDEKLFF

SEQ ID NO: 211543 - protein, 14 aa, Homo sapiens
  CDR3 for alpha chain variable domain of TCR clone 105772 (TRAV2, TRAJ9)
CAVEDRSGGFKTIF

SEQ ID NO: 211544 - protein, 13 aa, Homo sapiens
  CDR3 for beta chain variable domain of TCR clone 105772 (TRBV2, TRBJ2-7)
CASSVGGSGEQYF

SEQ ID NO: 211545 - protein, 16 aa, Homo sapiens
  CDR3 for alpha chain variable domain of TCR clone 105773 (TRAV3, TRAJ37)
CAVRGKGSGNTGKQIF

SEQ ID NO: 211546 - protein, 13 aa, Homo sapiens
  CDR3 for beta chain variable domain of TCR clone 105773 (TRBV14, TRBJ2-7)
CASSQDRRYEQYF

SEQ ID NO: 211547 - protein, 14 aa, Homo sapiens
  CDR3 for alpha chain variable domain of TCR clone 105774 (TRAV9-2, TRAJ39)
CALYIYNAGNMLTF

SEQ ID NO: 211548 - protein, 13 aa, Homo sapiens
  CDR3 for beta chain variable domain of TCR clone 105774 (TRBV10-3, TRBJ1-2)
CAISERDSYGYTF

SEQ ID NO: 211549 - protein, 13 aa, Homo sapiens
  CDR3 for alpha chain variable domain of TCR clone 105775 (TRAV12-2, TRAJ13)
CAVKAGGYQKVTF

SEQ ID NO: 211550 - protein, 15 aa, Homo sapiens
  CDR3 for beta chain variable domain of TCR clone 105775 (TRBV5-1, TRBJ1-1)
CASSLNDFKNTEAFF

SEQ ID NO: 211551 - protein, 12 aa, Homo sapiens
  CDR3 for alpha chain variable domain of TCR clone 105776 (TRAV17, TRAJ57)
CATDGGSEKLVF

SEQ ID NO: 211552 - protein, 16 aa, Homo sapiens
  CDR3 for beta chain variable domain of TCR clone 105776 (TRBV7-3, TRBJ2-2)
CASSLKRGTLSGELFF

SEQ ID NO: 211553 - protein, 11 aa, Homo sapiens
  CDR3 for alpha chain variable domain of TCR clone 105777 (TRAV21, TRAJ11)
CAVNGYSTLTF

SEQ ID NO: 211554 - protein, 11 aa, Homo sapiens
  CDR3 for beta chain variable domain of TCR clone 105777 (TRBV19, TRBJ1-1)
CASSIGREAFF

SEQ ID NO: 211555 - protein, 15 aa, Homo sapiens
  CDR3 for alpha chain variable domain of TCR clone 105778 (TRAV26-1, TRAJ29)
CIVRVEGYGNTPLVF

SEQ ID NO: 211556 - protein, 14 aa, Homo sapiens
  CDR3 for beta chain variable domain of TCR clone 105778 (TRBV18, TRBJ2-5)
CASSPGVSQETQYF

SEQ ID NO: 211557 - protein, 14 aa, Homo sapiens
  CDR3 for alpha chain variable domain of TCR clone 105779 (TRAV35, TRAJ42)
CAGRYGGSQGNLIF

SEQ ID NO: 211558 - protein, 14 aa, Homo sapiens
  CDR3 for beta chain variable domain of TCR clone 105779 (TRBV7-2, TRBJ2-7)
CASSPKTSFYEQYF

SEQ ID NO: 211559 - protein, 15 aa, Homo sapiens
  CDR3 for alpha chain variable domain of TCR clone 105780 (TRAV21, TRAJ53)
CATLTSGGSNYKLTF

SEQ ID NO: 211560 - protein, 17 aa, Homo sapiens
  CDR3 for beta chain variable domain of TCR clone 105780 (TRBV4-1, TRBJ2-3)
CASSQGYVSGGTDTQYF

SEQ ID NO: 211561 - protein, 17 aa, Homo sapiens
  CDR3 for alpha chain variable domain of TCR clone 105781 (TRAV2, TRAJ22)
ILQVREADAAEQRQLTF

SEQ ID NO: 211562 - protein, 16 aa, Homo sapiens
  CDR3 for beta chain variable domain of TCR clone 105781 (TRBV2, TRBJ2-5)
YASSETQGVGEETQYF

SEQ ID NO: 211563 - protein, 13 aa, Homo sapiens
  CDR3 for alpha chain variable domain of TCR clone 105782 (TRAV1-1, TRAJ23)
CAVVANHGGKLIF

SEQ ID NO: 211564 - protein, 16 aa, Homo sapiens
  CDR3 for beta chain variable domain of TCR clone 105782 (TRBV5-5, TRBJ1-2)
CASSPTWGRGLYGYTF

SEQ ID NO: 211565 - protein, 18 aa, Homo sapiens
  CDR3 for alpha chain variable domain of TCR clone 105783 (TRAV21, TRAJ52)
CAVRPSPAGGTSYGKLTF

SEQ ID NO: 211566 - protein, 16 aa, Homo sapiens
  CDR3 for beta chain variable domain of TCR clone 105783 (TRBV11-2, TRBJ2-1)
CASARGSYSHHNEQFF

SEQ ID NO: 211567 - protein, 13 aa, Homo sapiens
  CDR3 for alpha chain variable domain of TCR clone 105784 (TRAV13-1, TRAJ39)
CSKYSNAGNMLTF

SEQ ID NO: 211568 - protein, 13 aa, Homo sapiens
  CDR3 for beta chain variable domain of TCR clone 105784 (TRBV12-5, TRBJ2-1)
CASGLGRGNEQFF

SEQ ID NO: 211569 - protein, 16 aa, Homo sapiens
  CDR3 for alpha chain variable domain of TCR clone 105785 (TRAV30, TRAJ24)
CGTEIVDADSWGKFRF

SEQ ID NO: 211570 - protein, 13 aa, Homo sapiens
  CDR3 for beta chain variable domain of TCR clone 105785 (TRBV18, TRBJ1-2)
CASSASATEGYTF

SEQ ID NO: 211571 - protein, 15 aa, Homo sapiens
  CDR3 for alpha chain variable domain of TCR clone 105786 (TRAV26-1, TRAJ17)
RIVRVVKAAGNKLTF

SEQ ID NO: 211572 - protein, 16 aa, Homo sapiens
  CDR3 for beta chain variable domain of TCR clone 105786 (TRBV7-9, TRBJ2-1)
CASSLVSGPSYNEQFF

SEQ ID NO: 211573 - protein, 15 aa, Homo sapiens
  CDR3 for alpha chain variable domain of TCR clone 105787 (TRAV8-3, TRAJ6)
CAVGPLGGGSYIPKF

SEQ ID NO: 211574 - protein, 14 aa, Homo sapiens
  CDR3 for beta chain variable domain of TCR clone 105787 (TRBV19, TRBJ2-2)
CASSTGQGAGELFF

SEQ ID NO: 211575 - protein, 12 aa, Homo sapiens
  CDR3 for alpha chain variable domain of TCR clone 105788 (TRAV8-2, TRAJ6)
CVVSKGSYIPTF

SEQ ID NO: 211576 - protein, 16 aa, Homo sapiens
  CDR3 for beta chain variable domain of TCR clone 105788 (TRBV19, TRBJ2-3)
CASSPGAASRTDTQYF

SEQ ID NO: 211577 - protein, 16 aa, Homo sapiens
  CDR3 for alpha chain variable domain of TCR clone 105789 (TRAV30, TRAJ24)
CGTEIVDADSWGKFQF

SEQ ID NO: 211578 - protein, 18 aa, Homo sapiens
  CDR3 for beta chain variable domain of TCR clone 105789 (TRBV7-9, TRBJ2-7)
WASSLTTSGSRTWYEQYF

SEQ ID NO: 211579 - protein, 13 aa, Homo sapiens
  CDR3 for alpha chain variable domain of TCR clone 105790 (TRAV2, TRAJ36)
CAVDRTGANNLFF

SEQ ID NO: 211580 - protein, 12 aa, Homo sapiens
  CDR3 for beta chain variable domain of TCR clone 105790 (TRBV19, TRBJ1-1)
CASMNRYTEAFF

SEQ ID NO: 211581 - protein, 12 aa, Homo sapiens
  CDR3 for alpha chain variable domain of TCR clone 105791 (TRAV13-1, TRAJ53)
AASGGSNYKLTF

SEQ ID NO: 211582 - protein, 15 aa, Homo sapiens
  CDR3 for beta chain variable domain of TCR clone 105791 (TRBV5-1, TRBJ2-1)
CASGPPRAPYNEQFF

SEQ ID NO: 211583 - protein, 14 aa, Homo sapiens
  CDR3 for alpha chain variable domain of TCR clone 105792 (TRAV35, TRAJ42)
CAGRYGGSQGNLIF

SEQ ID NO: 211584 - protein, 15 aa, Homo sapiens
  CDR3 for beta chain variable domain of TCR clone 105792 (TRBV7-9, TRBJ2-1)
CASSLGWGGANEQFF

SEQ ID NO: 211585 - protein, 19 aa, Homo sapiens
  CDR3 for alpha chain variable domain of TCR clone 105793 (TRAV13-1, TRAJ52)
CAASPYQNAGGTSYGKRTF

SEQ ID NO: 211586 - protein, 14 aa, Homo sapiens
  CDR3 for beta chain variable domain of TCR clone 105793 (TRBV19, TRBJ2-7)
CASTVQGRPYEQYF

SEQ ID NO: 211587 - protein, 15 aa, Homo sapiens
  CDR3 for alpha chain variable domain of TCR clone 105794 (TRAV3, TRAJ27)
CAVRAGGHQCRQINL

SEQ ID NO: 211588 - protein, 15 aa, Homo sapiens
  CDR3 for beta chain variable domain of TCR clone 105794 (TRBV28, TRBJ2-1)
CASSGLAEVDNEQFF

SEQ ID NO: 211589 - protein, 16 aa, Homo sapiens
  CDR3 for alpha chain variable domain of TCR clone 105795 (TRAV30, TRAJ24)
CGTEIVDADSWGKFQF

SEQ ID NO: 211590 - protein, 13 aa, Homo sapiens
  CDR3 for beta chain variable domain of TCR clone 105795 (TRBV20-1, TRBJ2-1)
CSARSSPRDEQFF

SEQ ID NO: 211591 - protein, 13 aa, Homo sapiens
  CDR3 for alpha chain variable domain of TCR clone 105796 (TRAV8-3, TRAJ40)
CAVGAQYLRNLQI

SEQ ID NO: 211592 - protein, 16 aa, Homo sapiens
  CDR3 for beta chain variable domain of TCR clone 105796 (TRBV12-4, TRBJ1-5)
CASSRPVGGSNQPQHF

SEQ ID NO: 211593 - protein, 11 aa, Homo sapiens
  CDR3 for alpha chain variable domain of TCR clone 105797 (TRAV13-1, TRAJ40)
CAVSGTYKYIF

SEQ ID NO: 211594 - protein, 15 aa, Homo sapiens
  CDR3 for beta chain variable domain of TCR clone 105797 (TRBV7-3, TRBJ2-2)
CASSETGQGTGELFF

SEQ ID NO: 211595 - protein, 18 aa, Homo sapiens
  CDR3 for alpha chain variable domain of TCR clone 105798 (TRAV13-1, TRAJ52)
CAAKNPNAGGTSYGKLTF

SEQ ID NO: 211596 - protein, 15 aa, Homo sapiens
  CDR3 for beta chain variable domain of TCR clone 105798 (TRBV4-1, TRBJ2-7)
CASGQNTGRLYEQYF

SEQ ID NO: 211597 - protein, 14 aa, Homo sapiens
  CDR3 for alpha chain variable domain of TCR clone 105799 (TRAV1-2, TRAJ27)
CAVISGTNAGKSTF

SEQ ID NO: 211598 - protein, 15 aa, Homo sapiens
  CDR3 for beta chain variable domain of TCR clone 105799 (TRBV18, TRBJ2-7)
CASSPLQGRTYEQYF

SEQ ID NO: 211599 - protein, 12 aa, Homo sapiens
  CDR3 for alpha chain variable domain of TCR clone 105800 (TRAV21, TRAJ11)
CAVRGGNSTLPF

SEQ ID NO: 211600 - protein, 15 aa, Homo sapiens
  CDR3 for beta chain variable domain of TCR clone 105800 (TRBV6-1, TRBJ2-7)
CASSEPIAATTEQYF

SEQ ID NO: 211601 - protein, 11 aa, Homo sapiens
  CDR3 for alpha chain variable domain of TCR clone 105801 (TRAV1-1, TRAJ16)
CSAGDGQKLLF

SEQ ID NO: 211602 - protein, 15 aa, Homo sapiens
  CDR3 for beta chain variable domain of TCR clone 105801 (TRBV28, TRBJ1-2)
CASIPQGSDDYGYTF

SEQ ID NO: 211603 - protein, 10 aa, Homo sapiens
  CDR3 for alpha chain variable domain of TCR clone 105802 (TRAV1-2, TRAJ31)
CAFFDARLMF

SEQ ID NO: 211604 - protein, 13 aa, Homo sapiens
  CDR3 for beta chain variable domain of TCR clone 105802 (TRBV7-9, TRBJ2-1)
CASSWESYNEQFF

SEQ ID NO: 211605 - protein, 18 aa, Homo sapiens
  CDR3 for alpha chain variable domain of TCR clone 105803 (TRAV13-1, TRAJ52)
CSAKNPNAGGTSYGNLTF

SEQ ID NO: 211606 - protein, 15 aa, Homo sapiens
  CDR3 for beta chain variable domain of TCR clone 105803 (TRBV6-1, TRBJ2-3)
CASSERGGITDTQYF

SEQ ID NO: 211607 - protein, 13 aa, Homo sapiens
  CDR3 for alpha chain variable domain of TCR clone 105804 (TRAV22, TRAJ29)
CAVGGSGNTPLGF

SEQ ID NO: 211608 - protein, 13 aa, Homo sapiens
  CDR3 for beta chain variable domain of TCR clone 105804 (TRBV4-2, TRBJ1-1)
CASSQAGNTEAFF

SEQ ID NO: 211609 - protein, 12 aa, Homo sapiens
  CDR3 for alpha chain variable domain of TCR clone 105805 (TRAV12-3, TRAJ17)
CAMTLTGNNLTF

SEQ ID NO: 211610 - protein, 15 aa, Homo sapiens
  CDR3 for beta chain variable domain of TCR clone 105805 (TRBV20-1, TRBJ2-7)
CSARDQVSGMDEQYF

SEQ ID NO: 211611 - protein, 12 aa, Homo sapiens
  CDR3 for alpha chain variable domain of TCR clone 105806 (TRAV20, TRAJ39)
CAVGNAGNMLTF

SEQ ID NO: 211612 - protein, 15 aa, Homo sapiens
  CDR3 for beta chain variable domain of TCR clone 105806 (TRBV4-1, TRBJ2-5)
CASSQWDLYQETQYF

SEQ ID NO: 211613 - protein, 12 aa, Homo sapiens
  CDR3 for alpha chain variable domain of TCR clone 105807 (TRAV13-2, TRAJ23)
CAERHRGGKLIF

SEQ ID NO: 211614 - protein, 13 aa, Homo sapiens
  CDR3 for beta chain variable domain of TCR clone 105807 (TRBV12-4, TRBJ2-7)
CASSPTETYEQYF

SEQ ID NO: 211615 - protein, 16 aa, Homo sapiens
  CDR3 for alpha chain variable domain of TCR clone 105808 (TRAV3, TRAJ10)
CAVRDMRAGGGNKLTF

SEQ ID NO: 211616 - protein, 16 aa, Homo sapiens
  CDR3 for beta chain variable domain of TCR clone 105808 (TRBV4-2, TRBJ2-3)
CASSQELAGDTDTQYF

SEQ ID NO: 211617 - protein, 14 aa, Homo sapiens
  CDR3 for alpha chain variable domain of TCR clone 105809 (TRAV8-4, TRAJ15)
CAVTIREAGTALIV

SEQ ID NO: 211618 - protein, 13 aa, Homo sapiens
  CDR3 for beta chain variable domain of TCR clone 105809 (TRBV10-3, TRBJ2-7)
CAISEKGGYEQYF

SEQ ID NO: 211619 - protein, 15 aa, Homo sapiens
  CDR3 for alpha chain variable domain of TCR clone 105810 (TRAV17, TRAJ22)
CATVAPSGSARQLTF

SEQ ID NO: 211620 - protein, 14 aa, Homo sapiens
  CDR3 for beta chain variable domain of TCR clone 105810 (TRBV2, TRBJ1-5)
CASSGTVSNQPQHF

SEQ ID NO: 211621 - protein, 16 aa, Homo sapiens
  CDR3 for alpha chain variable domain of TCR clone 105811 (TRAV4, TRAJ22)
CLVGDLYSGSARQLTF

SEQ ID NO: 211622 - protein, 13 aa, Homo sapiens
  CDR3 for beta chain variable domain of TCR clone 105811 (TRBV9, TRBJ2-1)
CASSPSGGNEQFF

SEQ ID NO: 211623 - protein, 14 aa, Homo sapiens
  CDR3 for alpha chain variable domain of TCR clone 105812 (TRAV1-2, TRAJ8)
CAVSEDTGFQKLVF

SEQ ID NO: 211624 - protein, 14 aa, Homo sapiens
  CDR3 for beta chain variable domain of TCR clone 105812 (TRBV7-9, TRBJ1-1)
CASSLGGANTEAFF

SEQ ID NO: 211625 - protein, 12 aa, Homo sapiens
  CDR3 for alpha chain variable domain of TCR clone 105813 (TRAV13-2, TRAJ23)
FAERHRGGKLIF

SEQ ID NO: 211626 - protein, 13 aa, Homo sapiens
  CDR3 for beta chain variable domain of TCR clone 105813 (TRBV7-9, TRBJ2-3)
CASSPGSTDTQYF

SEQ ID NO: 211627 - protein, 15 aa, Homo sapiens
  CDR3 for alpha chain variable domain of TCR clone 105814 (TRAV3, TRAJ5)
CAVRDLDTGRRALTF

SEQ ID NO: 211628 - protein, 13 aa, Homo sapiens
  CDR3 for beta chain variable domain of TCR clone 105814 (TRBV20-1, TRBJ1-1)
CSARLGQGTEAFF

SEQ ID NO: 211629 - protein, 14 aa, Homo sapiens
  CDR3 for alpha chain variable domain of TCR clone 105815 (TRAV1-1, TRAJ27)
CAVIYNTNAGKSTF

SEQ ID NO: 211630 - protein, 15 aa, Homo sapiens
  CDR3 for beta chain variable domain of TCR clone 105815 (TRBV7-3, TRBJ2-1)
CASSPTGGGEVEQFF

SEQ ID NO: 211631 - protein, 11 aa, Homo sapiens
  CDR3 for alpha chain variable domain of TCR clone 105816 (TRAV17, TRAJ9)
CATTGGFKTIF

SEQ ID NO: 211632 - protein, 14 aa, Homo sapiens
  CDR3 for beta chain variable domain of TCR clone 105816 (TRBV7-9, TRBJ2-2)
CASSGLADTGVLFF

SEQ ID NO: 211633 - protein, 15 aa, Homo sapiens
  CDR3 for alpha chain variable domain of TCR clone 105817 (TRAV12-3, TRAJ6)
CAMSATTGGSYIPTF

SEQ ID NO: 211634 - protein, 16 aa, Homo sapiens
  CDR3 for beta chain variable domain of TCR clone 105817 (TRBV20-1, TRBJ1-2)
CSASMGQGLANYGYTF

SEQ ID NO: 211635 - protein, 14 aa, Homo sapiens
  CDR3 for alpha chain variable domain of TCR clone 105818 (TRAV8-4, TRAJ9)
CAVRIDTGGFKTIF

SEQ ID NO: 211636 - protein, 14 aa, Homo sapiens
  CDR3 for beta chain variable domain of TCR clone 105818 (TRBV5-1, TRBJ1-1)
CASSLQGASTEAFF

SEQ ID NO: 211637 - protein, 16 aa, Homo sapiens
  CDR3 for alpha chain variable domain of TCR clone 105819 (TRAV3, TRAJ27)
CAVIDPQGTNAGKSTF

SEQ ID NO: 211638 - protein, 17 aa, Homo sapiens
  CDR3 for beta chain variable domain of TCR clone 105819 (TRBV4-1, TRBJ2-7)
CASSQGRGLQTSYEQYF

SEQ ID NO: 211639 - protein, 10 aa, Homo sapiens
  CDR3 for alpha chain variable domain of TCR clone 105820 (TRAV21, TRAJ34)
CAADTDKLIF

SEQ ID NO: 211640 - protein, 16 aa, Homo sapiens
  CDR3 for beta chain variable domain of TCR clone 105820 (TRBV6-5, TRBJ2-2)
CASRHVSRAQPGELFF

SEQ ID NO: 211641 - protein, 12 aa, Homo sapiens
  CDR3 for alpha chain variable domain of TCR clone 105821 (TRAV21, TRAJ13)
PGPSGGYQKVTF

SEQ ID NO: 211642 - protein, 15 aa, Homo sapiens
  CDR3 for beta chain variable domain of TCR clone 105821 (TRBV7-9, TRBJ1-6)
CASSSPGRGNSPRHF

SEQ ID NO: 211643 - protein, 14 aa, Homo sapiens
  CDR3 for alpha chain variable domain of TCR clone 105822 (TRAV12-3, TRAJ10)
SHLPLTGGGNKLTF

SEQ ID NO: 211644 - protein, 13 aa, Homo sapiens
  CDR3 for beta chain variable domain of TCR clone 105822 (TRBV20-1, TRBJ2-7)
CSARSGHPYEQYF

SEQ ID NO: 211645 - protein, 18 aa, Homo sapiens
  CDR3 for alpha chain variable domain of TCR clone 105823 (TRAV26-1, TRAJ56)
CTVRVASRVTGANSKLTF

SEQ ID NO: 211646 - protein, 15 aa, Homo sapiens
  CDR3 for beta chain variable domain of TCR clone 105823 (TRBV7-9, TRBJ2-5)
CASSDTGRGRETQYF

SEQ ID NO: 211647 - protein, 14 aa, Homo sapiens
  CDR3 for alpha chain variable domain of TCR clone 105824 (TRAV13-1, TRAJ44)
CAAKATGTASKLTF

SEQ ID NO: 211648 - protein, 18 aa, Homo sapiens
  CDR3 for beta chain variable domain of TCR clone 105824 (TRBV25-1, TRBJ1-2)
CASSGLQNGQGLIFGYTF

SEQ ID NO: 211649 - protein, 12 aa, Homo sapiens
  CDR3 for alpha chain variable domain of TCR clone 105825 (TRAV2, TRAJ10)
CASTGRGNKLTF

SEQ ID NO: 211650 - protein, 12 aa, Homo sapiens
  CDR3 for beta chain variable domain of TCR clone 105825 (TRBV5-1, TRBJ2-5)
CASSLGLETQYF

SEQ ID NO: 211651 - protein, 13 aa, Homo sapiens
  CDR3 for alpha chain variable domain of TCR clone 105826 (TRAV12-3, TRAJ40)
CAMSDSGTDKYIF

SEQ ID NO: 211652 - protein, 14 aa, Homo sapiens
  CDR3 for beta chain variable domain of TCR clone 105826 (TRBV7-2, TRBJ1-5)
CASSTQGAGQPQHF

SEQ ID NO: 211653 - protein, 12 aa, Homo sapiens
  CDR3 for alpha chain variable domain of TCR clone 105827 (TRAV17, TRAJ30)
CVPERRDDKIIF

SEQ ID NO: 211654 - protein, 12 aa, Homo sapiens
  CDR3 for beta chain variable domain of TCR clone 105827 (TRBV7-9, TRBJ1-6)
CASSLMTSPLHF

SEQ ID NO: 211655 - protein, 13 aa, Homo sapiens
  CDR3 for alpha chain variable domain of TCR clone 105828 (TRAV13-1, TRAJ21)
CAASIYDFNKFYF

SEQ ID NO: 211656 - protein, 16 aa, Homo sapiens
  CDR3 for beta chain variable domain of TCR clone 105828 (TRBV12-4, TRBJ1-5)
CASSRPVGGSNQPQHF

SEQ ID NO: 211657 - protein, 17 aa, Homo sapiens
  CDR3 for alpha chain variable domain of TCR clone 105829 (TRAV14/DV4, TRAJ28)
CAMRGTSSGAGSYQLPF

SEQ ID NO: 211658 - protein, 13 aa, Homo sapiens
  CDR3 for beta chain variable domain of TCR clone 105829 (TRBV28, TRBJ2-5)
CASSFAGGETQYF

SEQ ID NO: 211659 - protein, 13 aa, Homo sapiens
  CDR3 for alpha chain variable domain of TCR clone 105830 (TRAV1-1, TRAJ9)
CAAKNTGGFKTFF

SEQ ID NO: 211660 - protein, 14 aa, Homo sapiens
  CDR3 for beta chain variable domain of TCR clone 105830 (TRBV20-1, TRBJ2-1)
CSAQIGGSANEQFF

SEQ ID NO: 211661 - protein, 13 aa, Homo sapiens
  CDR3 for alpha chain variable domain of TCR clone 105831 (TRAV12-2, TRAJ20)
CAVYPSNDYKLSF

SEQ ID NO: 211662 - protein, 16 aa, Homo sapiens
  CDR3 for beta chain variable domain of TCR clone 105831 (TRBV19, TRBJ2-3)
CASSPGAASRTDTQYF

SEQ ID NO: 211663 - protein, 14 aa, Homo sapiens
  CDR3 for alpha chain variable domain of TCR clone 105832 (TRAV12-2, TRAJ15)
CAPHTGQAGTALIF

SEQ ID NO: 211664 - protein, 15 aa, Homo sapiens
  CDR3 for beta chain variable domain of TCR clone 105832 (TRBV18, TRBJ1-5)
CASSPSGRSNQPQHF

SEQ ID NO: 211665 - protein, 14 aa, Homo sapiens
  CDR3 for alpha chain variable domain of TCR clone 105833 (TRAV16, TRAJ33)
CALSAMHSNYQLIW

SEQ ID NO: 211666 - protein, 17 aa, Homo sapiens
  CDR3 for beta chain variable domain of TCR clone 105833 (TRBV25-1, TRBJ2-7)
CASSDARVVFSSYEQYF

SEQ ID NO: 211667 - protein, 14 aa, Homo sapiens
  CDR3 for alpha chain variable domain of TCR clone 105834 (TRAV1-2, TRAJ16)
CAVNRFSDGQKLLF

SEQ ID NO: 211668 - protein, 18 aa, Homo sapiens
  CDR3 for beta chain variable domain of TCR clone 105834 (TRBV28, TRBJ2-1)
CASSPRASGVSSYNEQFF

SEQ ID NO: 211669 - protein, 11 aa, Homo sapiens
  CDR3 for alpha chain variable domain of TCR clone 105835 (TRAV12-3, TRAJ43)
CAMSVSNDIRF

SEQ ID NO: 211670 - protein, 14 aa, Homo sapiens
  CDR3 for beta chain variable domain of TCR clone 105835 (TRBV20-1, TRBJ1-1)
SAVLHLGGGTEAFF

SEQ ID NO: 211671 - protein, 13 aa, Homo sapiens
  CDR3 for alpha chain variable domain of TCR clone 105836 (TRAV12-1, TRAJ39)
CVALNNAGNMLTF

SEQ ID NO: 211672 - protein, 14 aa, Homo sapiens
  CDR3 for beta chain variable domain of TCR clone 105836 (TRBV7-6, TRBJ2-3)
CASSLGTVTDTQYF

SEQ ID NO: 211673 - protein, 12 aa, Homo sapiens
  CDR3 for alpha chain variable domain of TCR clone 105837 (TRAV12-1, TRAJ15)
CVVNQAGTALIF

SEQ ID NO: 211674 - protein, 14 aa, Homo sapiens
  CDR3 for beta chain variable domain of TCR clone 105837 (TRBV7-6, TRBJ2-3)
CASSLGTVTDTQYF

SEQ ID NO: 211675 - protein, 17 aa, Homo sapiens
  CDR3 for alpha chain variable domain of TCR clone 105838 (TRAV8-6, TRAJ58)
CAVSSWVGETSGSRLTF

SEQ ID NO: 211676 - protein, 17 aa, Homo sapiens
  CDR3 for beta chain variable domain of TCR clone 105838 (TRBV4-1, TRBJ1-4)
CASSQEGPRGVEEKLFF

SEQ ID NO: 211677 - protein, 14 aa, Homo sapiens
  CDR3 for alpha chain variable domain of TCR clone 105839 (TRAV1-2, TRAJ8)
CTVREDTGFQKLVF

SEQ ID NO: 211678 - protein, 17 aa, Homo sapiens
  CDR3 for beta chain variable domain of TCR clone 105839 (TRBV7-3, TRBJ2-5)
CASSLGSGRSGSETQYF

SEQ ID NO: 211679 - protein, 17 aa, Homo sapiens
  CDR3 for alpha chain variable domain of TCR clone 105840 (TRAV3, TRAJ6)
CAVRDGPRAGGSEIPTF

SEQ ID NO: 211680 - protein, 14 aa, Homo sapiens
  CDR3 for beta chain variable domain of TCR clone 105840 (TRBV7-2, TRBJ2-7)
CASSPKTSFYEQYF

SEQ ID NO: 211681 - protein, 18 aa, Homo sapiens
  CDR3 for alpha chain variable domain of TCR clone 105841 (TRAV9-2, TRAJ52)
CALSRHNAGGTSYGKLTC

SEQ ID NO: 211682 - protein, 13 aa, Homo sapiens
  CDR3 for beta chain variable domain of TCR clone 105841 (TRBV7-9, TRBJ1-2)
CASSLKQNYGYTF

SEQ ID NO: 211683 - protein, 14 aa, Homo sapiens
  CDR3 for alpha chain variable domain of TCR clone 105842 (TRAV12-3, TRAJ42)
CAMNYGGSQGNLIF

SEQ ID NO: 211684 - protein, 16 aa, Homo sapiens
  CDR3 for beta chain variable domain of TCR clone 105842 (TRBV13, TRBJ2-2)
CASSPRTGEHTGELFF

SEQ ID NO: 211685 - protein, 14 aa, Homo sapiens
  CDR3 for alpha chain variable domain of TCR clone 105843 (TRAV16, TRAJ44)
CALSTTGTASNLTF

SEQ ID NO: 211686 - protein, 14 aa, Homo sapiens
  CDR3 for beta chain variable domain of TCR clone 105843 (TRBV20-1, TRBJ2-7)
CSAISREASYEQYF

SEQ ID NO: 211687 - protein, 14 aa, Homo sapiens
  CDR3 for alpha chain variable domain of TCR clone 105844 (TRAV13-2, TRAJ43)
CAEIPTYNNNDMRF

SEQ ID NO: 211688 - protein, 15 aa, Homo sapiens
  CDR3 for beta chain variable domain of TCR clone 105844 (TRBV7-9, TRBJ2-2)
CASGPLDTFPGELFV

SEQ ID NO: 211689 - protein, 13 aa, Homo sapiens
  CDR3 for alpha chain variable domain of TCR clone 105845 (TRAV3, TRAJ3)
CAVADSSASKIIF

SEQ ID NO: 211690 - protein, 16 aa, Homo sapiens
  CDR3 for beta chain variable domain of TCR clone 105845 (TRBV12-5, TRBJ2-5)
CASGPRTSGNQETQYF

SEQ ID NO: 211691 - protein, 14 aa, Homo sapiens
  CDR3 for alpha chain variable domain of TCR clone 105846 (TRAV4, TRAJ9)
CLVGSGTGGFKTIF

SEQ ID NO: 211692 - protein, 15 aa, Homo sapiens
  CDR3 for beta chain variable domain of TCR clone 105846 (TRBV7-2, TRBJ2-1)
CASSLASGRVNEQLF

SEQ ID NO: 211693 - protein, 14 aa, Homo sapiens
  CDR3 for alpha chain variable domain of TCR clone 105847 (TRAV25, TRAJ35)
CARRREGFGNVLHC

SEQ ID NO: 211694 - protein, 13 aa, Homo sapiens
  CDR3 for beta chain variable domain of TCR clone 105847 (TRBV7-2, TRBJ1-4)
CASSLAGLEKLFF

SEQ ID NO: 211695 - protein, 14 aa, Homo sapiens
  CDR3 for alpha chain variable domain of TCR clone 105848 (TRAV35, TRAJ13)
CAGSPSGGNQKVTF

SEQ ID NO: 211696 - protein, 17 aa, Homo sapiens
  CDR3 for beta chain variable domain of TCR clone 105848 (TRBV7-6, TRBJ2-5)
CASSPGLADPWGETQYF

SEQ ID NO: 211697 - protein, 15 aa, Homo sapiens
  CDR3 for alpha chain variable domain of TCR clone 105849 (TRAV17, TRAJ57)
CATGPSQGGSEKLVF

SEQ ID NO: 211698 - protein, 18 aa, Homo sapiens
  CDR3 for beta chain variable domain of TCR clone 105849 (TRBV7-9, TRBJ2-7)
CASSLATSGSRTWYEQYF

SEQ ID NO: 211699 - protein, 13 aa, Homo sapiens
  CDR3 for alpha chain variable domain of TCR clone 105850 (TRAV13-1, TRAJ43)
CAASKNNNNDMRF

SEQ ID NO: 211700 - protein, 16 aa, Homo sapiens
  CDR3 for beta chain variable domain of TCR clone 105850 (TRBV12-4, TRBJ1-5)
CASSRPVGGSNQPQHF

SEQ ID NO: 211701 - protein, 14 aa, Homo sapiens
  CDR3 for alpha chain variable domain of TCR clone 105851 (TRAV26-1, TRAJ39)
CIVRGSRAGNMHTF

SEQ ID NO: 211702 - protein, 15 aa, Homo sapiens
  CDR3 for beta chain variable domain of TCR clone 105851 (TRBV7-9, TRBJ1-5)
CASSQGHQPNQPQHF

SEQ ID NO: 211703 - protein, 14 aa, Homo sapiens
  CDR3 for alpha chain variable domain of TCR clone 105852 (TRAV12-1, TRAJ15)
CVVNRNKAGTALIF

SEQ ID NO: 211704 - protein, 14 aa, Homo sapiens
  CDR3 for beta chain variable domain of TCR clone 105852 (TRBV19, TRBJ1-1)
CATTSGTRGTEAFF

SEQ ID NO: 211705 - protein, 19 aa, Homo sapiens
  CDR3 for alpha chain variable domain of TCR clone 105853 (TRAV25, TRAJ20)
TATQTTDVGILPHDYKLSF

SEQ ID NO: 211706 - protein, 14 aa, Homo sapiens
  CDR3 for beta chain variable domain of TCR clone 105853 (TRBV12-5, TRBJ2-5)
CASGSRTHQETQYF

SEQ ID NO: 211707 - protein, 12 aa, Homo sapiens
  CDR3 for alpha chain variable domain of TCR clone 105854 (TRAV26-2, TRAJ21)
CILKGNFNKFYF

SEQ ID NO: 211708 - protein, 14 aa, Homo sapiens
  CDR3 for beta chain variable domain of TCR clone 105854 (TRBV7-9, TRBJ1-1)
CASTPLQSDTEAFF

SEQ ID NO: 211709 - protein, 11 aa, Homo sapiens
  CDR3 for alpha chain variable domain of TCR clone 105855 (TRAV3, TRAJ21)
CAVGNFNKFYF

SEQ ID NO: 211710 - protein, 13 aa, Homo sapiens
  CDR3 for beta chain variable domain of TCR clone 105855 (TRBV7-2, TRBJ2-7)
CASSSPSGSEQYF

SEQ ID NO: 211711 - protein, 23 aa, Homo sapiens
  CDR3 for alpha chain variable domain of TCR clone 105856 (TRAV1-1, TRAJ11)
LLQELQMKDSASYFCAGYSTLTF

SEQ ID NO: 211712 - protein, 13 aa, Homo sapiens
  CDR3 for beta chain variable domain of TCR clone 105856 (TRBV19, TRBJ1-2)
CASSVPGQDGYTF

SEQ ID NO: 211713 - protein, 14 aa, Homo sapiens
  CDR3 for alpha chain variable domain of TCR clone 105857 (TRAV12-1, TRAJ43)
CVVNGRSNNNDMRF

SEQ ID NO: 211714 - protein, 17 aa, Homo sapiens
  CDR3 for beta chain variable domain of TCR clone 105857 (TRBV7-3, TRBJ2-5)
CASSLGSGRSGSETQYF

SEQ ID NO: 211715 - protein, 15 aa, Homo sapiens
  CDR3 for alpha chain variable domain of TCR clone 105858 (TRAV8-6, TRAJ6)
CAVSGESGGRYIPTF

SEQ ID NO: 211716 - protein, 14 aa, Homo sapiens
  CDR3 for beta chain variable domain of TCR clone 105858 (TRBV9, TRBJ2-4)
CASSPSGTSGFQYF

SEQ ID NO: 211717 - protein, 15 aa, Homo sapiens
  CDR3 for alpha chain variable domain of TCR clone 105859 (TRAV8-3, TRAJ27)
CAVGPSKTNAGKSTF

SEQ ID NO: 211718 - protein, 12 aa, Homo sapiens
  CDR3 for beta chain variable domain of TCR clone 105859 (TRBV11-2, TRBJ2-2)
CASSLGGGELFL

SEQ ID NO: 211719 - protein, 15 aa, Homo sapiens
  CDR3 for alpha chain variable domain of TCR clone 105860 (TRAV34, TRAJ38)
CGADFTPGNNRKLSW

SEQ ID NO: 211720 - protein, 14 aa, Homo sapiens
  CDR3 for beta chain variable domain of TCR clone 105860 (TRBV12-5, TRBJ2-5)
CASGSRTHQETQYF

SEQ ID NO: 211721 - protein, 15 aa, Homo sapiens
  CDR3 for alpha chain variable domain of TCR clone 105861 (TRAV14/DV4, TRAJ10)
CAMSELTGGGNKLTF

SEQ ID NO: 211722 - protein, 18 aa, Homo sapiens
  CDR3 for beta chain variable domain of TCR clone 105861 (TRBV7-9, TRBJ2-7)
CASSLTTSGSRTWYEQYF

SEQ ID NO: 211723 - protein, 14 aa, Homo sapiens
  CDR3 for alpha chain variable domain of TCR clone 105862 (TRAV12-2, TRAJ17)
CAVLFKAAGNKLTF

SEQ ID NO: 211724 - protein, 16 aa, Homo sapiens
  CDR3 for beta chain variable domain of TCR clone 105862 (TRBV24-1, TRBJ2-3)
CATSDPGTGATDTQYF

SEQ ID NO: 211725 - protein, 15 aa, Homo sapiens
  CDR3 for alpha chain variable domain of TCR clone 105863 (TRAV12-1, TRAJ42)
CVVTRDGGSQGNLIF

SEQ ID NO: 211726 - protein, 13 aa, Homo sapiens
  CDR3 for beta chain variable domain of TCR clone 105863 (TRBV11-2, TRBJ2-3)
CQQLRRGANTQYF

SEQ ID NO: 211727 - protein, 14 aa, Homo sapiens
  CDR3 for alpha chain variable domain of TCR clone 105864 (TRAV2, TRAJ9)
CAVEDRSGGFKTIF

SEQ ID NO: 211728 - protein, 13 aa, Homo sapiens
  CDR3 for beta chain variable domain of TCR clone 105864 (TRBV6-5, TRBJ2-7)
CASRTSGIHEQYF

SEQ ID NO: 211729 - protein, 14 aa, Homo sapiens
  CDR3 for alpha chain variable domain of TCR clone 105865 (TRAV26-1, TRAJ21)
CIAHTTSTNFTLYL

SEQ ID NO: 211730 - protein, 15 aa, Homo sapiens
  CDR3 for beta chain variable domain of TCR clone 105865 (TRBV20-1, TRBJ2-7)
CSARDRVSGMDEQYF

SEQ ID NO: 211731 - protein, 16 aa, Homo sapiens
  CDR3 for alpha chain variable domain of TCR clone 105866 (TRAV17, TRAJ54)
CATDSDIIQGAQKLVF

SEQ ID NO: 211732 - protein, 13 aa, Homo sapiens
  CDR3 for beta chain variable domain of TCR clone 105866 (TRBV19, TRBJ1-2)
CASSVPGQDGYTF

SEQ ID NO: 211733 - protein, 13 aa, Homo sapiens
  CDR3 for alpha chain variable domain of TCR clone 105867 (TRAV26-2, TRAJ43)
CILRAVNNNDMRF

SEQ ID NO: 211734 - protein, 14 aa, Homo sapiens
  CDR3 for beta chain variable domain of TCR clone 105867 (TRBV7-3, TRBJ2-2)
CASSSGGYTGELFF

SEQ ID NO: 211735 - protein, 13 aa, Homo sapiens
  CDR3 for alpha chain variable domain of TCR clone 105868 (TRAV8-3, TRAJ28)
CAVGAVGSYQLTF

SEQ ID NO: 211736 - protein, 14 aa, Homo sapiens
  CDR3 for beta chain variable domain of TCR clone 105868 (TRBV2, TRBJ2-7)
CASSLTSGGYEQYF

SEQ ID NO: 211737 - protein, 13 aa, Homo sapiens
  CDR3 for alpha chain variable domain of TCR clone 105869 (TRAV1-1, TRAJ23)
CAVVANPGGKLIF

SEQ ID NO: 211738 - protein, 16 aa, Homo sapiens
  CDR3 for beta chain variable domain of TCR clone 105869 (TRBV5-5, TRBJ1-2)
CASSPTWGRGLYGYTF

SEQ ID NO: 211739 - protein, 14 aa, Homo sapiens
  CDR3 for alpha chain variable domain of TCR clone 105870 (TRAV8-3, TRAJ31)
CAVGRGLNNARLMF

SEQ ID NO: 211740 - protein, 11 aa, Homo sapiens
  CDR3 for beta chain variable domain of TCR clone 105870 (TRBV7-2, TRBJ2-2)
CASSLAGGAYR

SEQ ID NO: 211741 - protein, 14 aa, Homo sapiens
  CDR3 for alpha chain variable domain of TCR clone 105871 (TRAV13-2, TRAJ17)
CAENSKAAGNKLTF

SEQ ID NO: 211742 - protein, 11 aa, Homo sapiens
  CDR3 for beta chain variable domain of TCR clone 105871 (TRBV12-4, TRBJ2-3)
CASTATDTQYF

SEQ ID NO: 211743 - protein, 13 aa, Homo sapiens
  CDR3 for alpha chain variable domain of TCR clone 105872 (TRAV2, TRAJ21)
CAVEDLNFNKFYF

SEQ ID NO: 211744 - protein, 16 aa, Homo sapiens
  CDR3 for beta chain variable domain of TCR clone 105872 (TRBV19, TRBJ2-2)
CASRSPGTGATGELFF

SEQ ID NO: 211745 - protein, 14 aa, Homo sapiens
  CDR3 for alpha chain variable domain of TCR clone 105873 (TRAV25, TRAJ22)
CAVRSSCSARQLTF

SEQ ID NO: 211746 - protein, 16 aa, Homo sapiens
  CDR3 for beta chain variable domain of TCR clone 105873 (TRBV4-2, TRBJ1-1)
CASSPSPGRAAPEAFF

SEQ ID NO: 211747 - protein, 13 aa, Homo sapiens
  CDR3 for alpha chain variable domain of TCR clone 105874 (TRAV36/DV7, TRAJ53)
CALSGGSNYKRTF

SEQ ID NO: 211748 - protein, 13 aa, Homo sapiens
  CDR3 for beta chain variable domain of TCR clone 105874 (TRBV28, TRBJ2-7)
CASSLPSRYEQYF

SEQ ID NO: 211749 - protein, 12 aa, Homo sapiens
  CDR3 for alpha chain variable domain of TCR clone 105875 (TRAV10, TRAJ43)
CVVVRVGNDMRF

SEQ ID NO: 211750 - protein, 15 aa, Homo sapiens
  CDR3 for beta chain variable domain of TCR clone 105875 (TRBV2, TRBJ2-7)
CASSEGLARSHEQYF

SEQ ID NO: 211751 - protein, 13 aa, Homo sapiens
  CDR3 for alpha chain variable domain of TCR clone 105876 (TRAV36/DV7, TRAJ53)
CALSGGSNYKPTF

SEQ ID NO: 211752 - protein, 13 aa, Homo sapiens
  CDR3 for beta chain variable domain of TCR clone 105876 (TRBV28, TRBJ2-4)
CASSQSSKNIQYF

SEQ ID NO: 211753 - protein, 14 aa, Homo sapiens
  CDR3 for alpha chain variable domain of TCR clone 105877 (TRAV1-2, TRAJ8)
CAVREDTGFQKLVF

SEQ ID NO: 211754 - protein, 14 aa, Homo sapiens
  CDR3 for beta chain variable domain of TCR clone 105877 (TRBV12-4, TRBJ2-5)
CASSLWQKQETQYF

SEQ ID NO: 211755 - protein, 13 aa, Homo sapiens
  CDR3 for alpha chain variable domain of TCR clone 105878 (TRAV12-3, TRAJ56)
CALATGANGKLTF

SEQ ID NO: 211756 - protein, 12 aa, Homo sapiens
  CDR3 for beta chain variable domain of TCR clone 105878 (TRBV10-2, TRBJ2-3)
CASSPESDTQYF

SEQ ID NO: 211757 - protein, 14 aa, Homo sapiens
  CDR3 for alpha chain variable domain of TCR clone 105879 (TRAV8-3, TRAJ4)
CAVGAAGGYNKLIF

SEQ ID NO: 211758 - protein, 15 aa, Homo sapiens
  CDR3 for beta chain variable domain of TCR clone 105879 (TRBV6-5, TRBJ2-1)
CASSYDAGAGNEQIF

SEQ ID NO: 211759 - protein, 15 aa, Homo sapiens
  CDR3 for alpha chain variable domain of TCR clone 105880 (TRAV13-1, TRAJ44)
CAASRNTGTASKLTF

SEQ ID NO: 211760 - protein, 14 aa, Homo sapiens
  CDR3 for beta chain variable domain of TCR clone 105880 (TRBV2, TRBJ2-7)
CASSLTSGGYEHYF

SEQ ID NO: 211761 - protein, 13 aa, Homo sapiens
  CDR3 for alpha chain variable domain of TCR clone 105881 (TRAV1-2, TRAJ9)
CAALNTGGFKTIF

SEQ ID NO: 211762 - protein, 13 aa, Homo sapiens
  CDR3 for beta chain variable domain of TCR clone 105881 (TRBV19, TRBJ1-2)
CASSDPGQDGYTF

SEQ ID NO: 211763 - protein, 14 aa, Homo sapiens
  CDR3 for alpha chain variable domain of TCR clone 105882 (TRAV12-2, TRAJ15)
CAPHTGQAGTALIF

SEQ ID NO: 211764 - protein, 16 aa, Homo sapiens
  CDR3 for beta chain variable domain of TCR clone 105882 (TRBV7-9, TRBJ1-2)
CASSLGFSSGEDGYTF

SEQ ID NO: 211765 - protein, 14 aa, Homo sapiens
  CDR3 for alpha chain variable domain of TCR clone 105883 (TRAV35, TRAJ47)
CAGQGEEYGNKLVF

SEQ ID NO: 211766 - protein, 12 aa, Homo sapiens
  CDR3 for beta chain variable domain of TCR clone 105883 (TRBV28, TRBJ2-3)
CASSLYRDTQYF

SEQ ID NO: 211767 - protein, 16 aa, Homo sapiens
  CDR3 for alpha chain variable domain of TCR clone 105884 (TRAV30, TRAJ28)
CGTDKYSGAGSYQLTF

SEQ ID NO: 211768 - protein, 13 aa, Homo sapiens
  CDR3 for beta chain variable domain of TCR clone 105884 (TRBV19, TRBJ1-2)
CASSISEDYGYTF

SEQ ID NO: 211769 - protein, 15 aa, Homo sapiens
  CDR3 for alpha chain variable domain of TCR clone 105885 (TRAV8-2, TRAJ13)
CVVSDLSGGYQKVTF

SEQ ID NO: 211770 - protein, 16 aa, Homo sapiens
  CDR3 for beta chain variable domain of TCR clone 105885 (TRBV27, TRBJ2-2)
YASSFRGLVRTGELFF

SEQ ID NO: 211771 - protein, 16 aa, Homo sapiens
  CDR3 for alpha chain variable domain of TCR clone 105886 (TRAV14/DV4, TRAJ21)
CAMREGPENNINKFYF

SEQ ID NO: 211772 - protein, 12 aa, Homo sapiens
  CDR3 for beta chain variable domain of TCR clone 105886 (TRBV29-1, TRBJ2-2)
CSVDKYTGELFF

SEQ ID NO: 211773 - protein, 10 aa, Homo sapiens
  CDR3 for alpha chain variable domain of TCR clone 105887 (TRAV8-4, TRAJ43)
CAVSADNMRF

SEQ ID NO: 211774 - protein, 15 aa, Homo sapiens
  CDR3 for beta chain variable domain of TCR clone 105887 (TRBV5-1, TRBJ2-3)
CASSVTSGSTDTQYF

SEQ ID NO: 211775 - protein, 12 aa, Homo sapiens
  CDR3 for alpha chain variable domain of TCR clone 105888 (TRAV12-3, TRAJ3)
CAIDSSASKIIF

SEQ ID NO: 211776 - protein, 17 aa, Homo sapiens
  CDR3 for beta chain variable domain of TCR clone 105888 (TRBV7-9, TRBJ2-3)
CASSLEEAGAYPDTQYF

SEQ ID NO: 211777 - protein, 13 aa, Homo sapiens
  CDR3 for alpha chain variable domain of TCR clone 105889 (TRAV27, TRAJ57)
CRSAQGGSEKLVF

SEQ ID NO: 211778 - protein, 15 aa, Homo sapiens
  CDR3 for beta chain variable domain of TCR clone 105889 (TRBV20-1, TRBJ2-7)
CSAESGTSGAYEQYF

SEQ ID NO: 211779 - protein, 15 aa, Homo sapiens
  CDR3 for alpha chain variable domain of TCR clone 105890 (TRAV17, TRAJ16)
CATALRFSDGQKLLF

SEQ ID NO: 211780 - protein, 12 aa, Homo sapiens
  CDR3 for beta chain variable domain of TCR clone 105890 (TRBV2, TRBJ2-7)
CASSDPGYEQYF

SEQ ID NO: 211781 - protein, 10 aa, Homo sapiens
  CDR3 for alpha chain variable domain of TCR clone 105891 (TRAV8-4, TRAJ43)
CAVSADDRRF

SEQ ID NO: 211782 - protein, 13 aa, Homo sapiens
  CDR3 for beta chain variable domain of TCR clone 105891 (TRBV12-4, TRBJ2-5)
CASSPGTEETQYF

SEQ ID NO: 211783 - protein, 11 aa, Homo sapiens
  CDR3 for alpha chain variable domain of TCR clone 105892 (TRAV13-1, TRAJ40)
CAVSGTYKYIF

SEQ ID NO: 211784 - protein, 14 aa, Homo sapiens
  CDR3 for beta chain variable domain of TCR clone 105892 (TRBV5-1, TRBJ2-7)
CASSRGESLYEQYF

SEQ ID NO: 211785 - protein, 14 aa, Homo sapiens
  CDR3 for alpha chain variable domain of TCR clone 105893 (TRAV13-1, TRAJ20)
CAARPGSNDYKLSF

SEQ ID NO: 211786 - protein, 15 aa, Homo sapiens
  CDR3 for beta chain variable domain of TCR clone 105893 (TRBV7-9, TRBJ1-4)
CASSRTGGFNEKLFF

SEQ ID NO: 211787 - protein, 14 aa, Homo sapiens
  CDR3 for alpha chain variable domain of TCR clone 105894 (TRAV1-2, TRAJ16)
CAVNRFSDGQKLLF

SEQ ID NO: 211788 - protein, 14 aa, Homo sapiens
  CDR3 for beta chain variable domain of TCR clone 105894 (TRBV5-1, TRBJ2-3)
CASSRGQGGGTQYF

SEQ ID NO: 211789 - protein, 14 aa, Homo sapiens
  CDR3 for alpha chain variable domain of TCR clone 105895 (TRAV16, TRAJ42)
CALLAGGSQGNLIF

SEQ ID NO: 211790 - protein, 16 aa, Homo sapiens
  CDR3 for beta chain variable domain of TCR clone 105895 (TRBV19, TRBJ2-2)
CASRSPGTGATGELFF

SEQ ID NO: 211791 - protein, 14 aa, Homo sapiens
  CDR3 for alpha chain variable domain of TCR clone 105896 (TRAV1-2, TRAJ8)
CAVREDTGLQKLVF

SEQ ID NO: 211792 - protein, 13 aa, Homo sapiens
  CDR3 for beta chain variable domain of TCR clone 105896 (TRBV4-2, TRBJ2-2)
CASEDRGTGELFF

SEQ ID NO: 211793 - protein, 13 aa, Homo sapiens
  CDR3 for alpha chain variable domain of TCR clone 105897 (TRAV6, TRAJ20)
CALAVSNDYKPSF

SEQ ID NO: 211794 - protein, 16 aa, Homo sapiens
  CDR3 for beta chain variable domain of TCR clone 105897 (TRBV7-9, TRBJ2-1)
CASSDVAGGSYNEQFF

SEQ ID NO: 211795 - protein, 16 aa, Homo sapiens
  CDR3 for alpha chain variable domain of TCR clone 105898 (TRAV38-1, TRAJ56)
CAFMKRQTGANSKLTF

SEQ ID NO: 211796 - protein, 14 aa, Homo sapiens
  CDR3 for beta chain variable domain of TCR clone 105898 (TRBV19, TRBJ2-1)
CASPTFVLSGEQFF

SEQ ID NO: 211797 - protein, 19 aa, Homo sapiens
  CDR3 for alpha chain variable domain of TCR clone 105899 (TRAV1-2, TRAJ26)
CLLPLCCERPDNYGQNFVF

SEQ ID NO: 211798 - protein, 14 aa, Homo sapiens
  CDR3 for beta chain variable domain of TCR clone 105899 (TRBV7-2, TRBJ2-7)
CASSPKTSFYEQYF

SEQ ID NO: 211799 - protein, 15 aa, Homo sapiens
  CDR3 for alpha chain variable domain of TCR clone 105900 (TRAV21, TRAJ53)
CATLNSGGSNYKLTL

SEQ ID NO: 211800 - protein, 14 aa, Homo sapiens
  CDR3 for beta chain variable domain of TCR clone 105900 (TRBV7-2, TRBJ2-7)
CASRSQGAAYEQYF

SEQ ID NO: 211801 - protein, 14 aa, Homo sapiens
  CDR3 for alpha chain variable domain of TCR clone 105901 (TRAV9-2, TRAJ35)
CALRSIGFGNVLHC

SEQ ID NO: 211802 - protein, 14 aa, Homo sapiens
  CDR3 for beta chain variable domain of TCR clone 105901 (TRBV7-3, TRBJ2-1)
CASSLSGSYNEQFF

SEQ ID NO: 211803 - protein, 10 aa, Homo sapiens
  CDR3 for alpha chain variable domain of TCR clone 105902 (TRAV13-2, TRAJ20)
CAENICRLQA

SEQ ID NO: 211804 - protein, 15 aa, Homo sapiens
  CDR3 for beta chain variable domain of TCR clone 105902 (TRBV18, TRBJ1-2)
CASSPGNGLGYGYTL

SEQ ID NO: 211805 - protein, 13 aa, Homo sapiens
  CDR3 for alpha chain variable domain of TCR clone 105903 (TRAV3, TRAJ36)
CAVRDTGANNLFF

SEQ ID NO: 211806 - protein, 14 aa, Homo sapiens
  CDR3 for beta chain variable domain of TCR clone 105903 (TRBV4-1, TRBJ2-7)
CASIPSREGFEQYF

SEQ ID NO: 211807 - protein, 13 aa, Homo sapiens
  CDR3 for alpha chain variable domain of TCR clone 105904 (TRAV12-1, TRAJ29)
CVVKGSGNTPLVF

SEQ ID NO: 211808 - protein, 14 aa, Homo sapiens
  CDR3 for beta chain variable domain of TCR clone 105904 (TRBV7-2, TRBJ1-2)
CASSQTGSTYGYTF

SEQ ID NO: 211809 - protein, 17 aa, Homo sapiens
  CDR3 for alpha chain variable domain of TCR clone 105905 (TRAV3, TRAJ6)
CAVRDGPRAGGSYIPTF

SEQ ID NO: 211810 - protein, 16 aa, Homo sapiens
  CDR3 for beta chain variable domain of TCR clone 105905 (TRBV7-2, TRBJ2-7)
CASSPKTSFYESTSGR

SEQ ID NO: 211811 - protein, 14 aa, Homo sapiens
  CDR3 for alpha chain variable domain of TCR clone 105906 (TRAV30, TRAJ33)
CGPERRFSNYQLIW

SEQ ID NO: 211812 - protein, 16 aa, Homo sapiens
  CDR3 for beta chain variable domain of TCR clone 105906 (TRBV7-3, TRBJ2-2)
CASSLKRGTLSGELFF

SEQ ID NO: 211813 - protein, 15 aa, Homo sapiens
  CDR3 for alpha chain variable domain of TCR clone 105907 (TRAV8-1, TRAJ23)
CAVNSHYNQGGKLIF

SEQ ID NO: 211814 - protein, 15 aa, Homo sapiens
  CDR3 for beta chain variable domain of TCR clone 105907 (TRBV7-9, TRBJ1-5)
CASSQGHQPNQPQHF

SEQ ID NO: 211815 - protein, 13 aa, Homo sapiens
  CDR3 for alpha chain variable domain of TCR clone 105908 (TRAV12-1, TRAJ43)
CVVSHHNNNDMRF

SEQ ID NO: 211816 - protein, 14 aa, Homo sapiens
  CDR3 for beta chain variable domain of TCR clone 105908 (TRBV25-1, TRBJ1-1)
CASTHLGGNTEAFF

SEQ ID NO: 211817 - protein, 15 aa, Homo sapiens
  CDR3 for alpha chain variable domain of TCR clone 105909 (TRAV4, TRAJ39)
CLVGPNNNAGNMLTF

SEQ ID NO: 211818 - protein, 14 aa, Homo sapiens
  CDR3 for beta chain variable domain of TCR clone 105909 (TRBV19, TRBJ2-7)
CASNFRDTFAGMYF

SEQ ID NO: 211819 - protein, 13 aa, Homo sapiens
  CDR3 for alpha chain variable domain of TCR clone 105910 (TRAV35, TRAJ36)
CAGPRLGANNLFF

SEQ ID NO: 211820 - protein, 15 aa, Homo sapiens
  CDR3 for beta chain variable domain of TCR clone 105910 (TRBV20-1, TRBJ2-7)
CSARDRVSGMDEQYF

SEQ ID NO: 211821 - protein, 15 aa, Homo sapiens
  CDR3 for alpha chain variable domain of TCR clone 105911 (TRAV23/DV6, TRAJ44)
CAARLLTGTASKLPF

SEQ ID NO: 211822 - protein, 15 aa, Homo sapiens
  CDR3 for beta chain variable domain of TCR clone 105911 (TRBV12-4, TRBJ1-5)
CASTLNRVSNQPQHF

SEQ ID NO: 211823 - protein, 12 aa, Homo sapiens
  CDR3 for alpha chain variable domain of TCR clone 105912 (TRAV17, TRAJ12)
CAGGDRSYKLIF

SEQ ID NO: 211824 - protein, 12 aa, Homo sapiens
  CDR3 for beta chain variable domain of TCR clone 105912 (TRBV29-1, TRBJ1-1)
CSESDGNTEAFF

SEQ ID NO: 211825 - protein, 16 aa, Homo sapiens
  CDR3 for alpha chain variable domain of TCR clone 105913 (TRAV3, TRAJ10)
CAVRDMRAGGGNKLTF

SEQ ID NO: 211826 - protein, 16 aa, Homo sapiens
  CDR3 for beta chain variable domain of TCR clone 105913 (TRBV19, TRBJ2-2)
CASRSPGTGATGELFF

SEQ ID NO: 211827 - protein, 16 aa, Homo sapiens
  CDR3 for alpha chain variable domain of TCR clone 105914 (TRAV12-1, TRAJ18)
CVVNPRGGSTLGRLYF

SEQ ID NO: 211828 - protein, 14 aa, Homo sapiens
  CDR3 for beta chain variable domain of TCR clone 105914 (TRBV27, TRBJ2-1)
CASRPMGQGVEQFF

SEQ ID NO: 211829 - protein, 12 aa, Homo sapiens
  CDR3 for alpha chain variable domain of TCR clone 105915 (TRAV27, TRAJ34)
CAGAKNTDKLIF

SEQ ID NO: 211830 - protein, 17 aa, Homo sapiens
  CDR3 for beta chain variable domain of TCR clone 105915 (TRBV13, TRBJ2-3)
CASSLSRVAGGRNTQYF

SEQ ID NO: 211831 - protein, 12 aa, Homo sapiens
  CDR3 for alpha chain variable domain of TCR clone 105916 (TRAV8-3, TRAJ26)
CAVDNYGQNFVF

SEQ ID NO: 211832 - protein, 18 aa, Homo sapiens
  CDR3 for beta chain variable domain of TCR clone 105916 (TRBV12-4, TRBJ2-2)
CASSLVAGTRGRTGELFF

SEQ ID NO: 211833 - protein, 14 aa, Homo sapiens
  CDR3 for alpha chain variable domain of TCR clone 105917 (TRAV12-2, TRAJ24)
CAVTPADSWGRLQF

SEQ ID NO: 211834 - protein, 16 aa, Homo sapiens
  CDR3 for beta chain variable domain of TCR clone 105917 (TRBV6-4, TRBJ2-3)
APSEGGRAWGTDTQYF

SEQ ID NO: 211835 - protein, 12 aa, Homo sapiens
  CDR3 for alpha chain variable domain of TCR clone 105918 (TRAV16, TRAJ10)
CSRTGVGNKLTF

SEQ ID NO: 211836 - protein, 15 aa, Homo sapiens
  CDR3 for beta chain variable domain of TCR clone 105918 (TRBV6-3, TRBJ2-7)
CASSSPGTVFYEQYF

SEQ ID NO: 211837 - protein, 12 aa, Homo sapiens
  CDR3 for alpha chain variable domain of TCR clone 105919 (TRAV12-2, TRAJ10)
WGVTGGGNKLTF

SEQ ID NO: 211838 - protein, 15 aa, Homo sapiens
  CDR3 for beta chain variable domain of TCR clone 105919 (TRBV28, TRBJ1-2)
CASSSPRRGNYGYTF

SEQ ID NO: 211839 - protein, 12 aa, Homo sapiens
  CDR3 for alpha chain variable domain of TCR clone 105920 (TRAV2, TRAJ33)
CAFMDNNYQLIW

SEQ ID NO: 211840 - protein, 16 aa, Homo sapiens
  CDR3 for beta chain variable domain of TCR clone 105920 (TRBV2, TRBJ2-7)
CASSEPWTGPSYEQYF

SEQ ID NO: 211841 - protein, 14 aa, Homo sapiens
  CDR3 for alpha chain variable domain of TCR clone 105921 (TRAV8-4, TRAJ5)
CAVSTDTGRRALTL

SEQ ID NO: 211842 - protein, 18 aa, Homo sapiens
  CDR3 for beta chain variable domain of TCR clone 105921 (TRBV4-1, TRBJ2-1)
CASSLVGGELAGFNEQFF

SEQ ID NO: 211843 - protein, 12 aa, Homo sapiens
  CDR3 for alpha chain variable domain of TCR clone 105922 (TRAV12-1, TRAJ11)
CGDPRGYSTLTF

SEQ ID NO: 211844 - protein, 13 aa, Homo sapiens
  CDR3 for beta chain variable domain of TCR clone 105922 (TRBV20-1, TRBJ1-2)
CSARDQGAYGYTF

SEQ ID NO: 211845 - protein, 15 aa, Homo sapiens
  CDR3 for alpha chain variable domain of TCR clone 105923 (TRAV13-1, TRAJ6)
CAASRGAGGSYIPTF

SEQ ID NO: 211846 - protein, 17 aa, Homo sapiens
  CDR3 for beta chain variable domain of TCR clone 105923 (TRBV7-3, TRBJ2-3)
CASSLMKRMRGADTQYF

SEQ ID NO: 211847 - protein, 15 aa, Homo sapiens
  CDR3 for alpha chain variable domain of TCR clone 105924 (TRAV12-2, TRAJ8)
CAVREENTGFQKLVF

SEQ ID NO: 211848 - protein, 15 aa, Homo sapiens
  CDR3 for beta chain variable domain of TCR clone 105924 (TRBV18, TRBJ1-1)
CASSPRQGENTEAFF

SEQ ID NO: 211849 - protein, 13 aa, Homo sapiens
  CDR3 for alpha chain variable domain of TCR clone 105925 (TRAV38-2/DV8, TRAJ34)
CAYRTWNTAKLIF

SEQ ID NO: 211850 - protein, 18 aa, Homo sapiens
  CDR3 for beta chain variable domain of TCR clone 105925 (TRBV6-6, TRBJ1-3)
CASSYSKWDSISGNTIYF

SEQ ID NO: 211851 - protein, 14 aa, Homo sapiens
  CDR3 for alpha chain variable domain of TCR clone 105926 (TRAV1-2, TRAJ8)
CAVREDTGFQKLVF

SEQ ID NO: 211852 - protein, 12 aa, Homo sapiens
  CDR3 for beta chain variable domain of TCR clone 105926 (TRBV2, TRBJ2-1)
CAYGPPGNEQFV

SEQ ID NO: 211853 - protein, 13 aa, Homo sapiens
  CDR3 for alpha chain variable domain of TCR clone 105927 (TRAV21, TRAJ57)
CAVTQGGSEKLVF

SEQ ID NO: 211854 - protein, 11 aa, Homo sapiens
  CDR3 for beta chain variable domain of TCR clone 105927 (TRBV12-4, TRBJ2-3)
CASTATDTQYF

SEQ ID NO: 211855 - protein, 21 aa, Homo sapiens
  CDR3 for alpha chain variable domain of TCR clone 105928 (TRAV1-1, TRAJ6)
CLLLLRCERLERTGGSYIPTF

SEQ ID NO: 211856 - protein, 13 aa, Homo sapiens
  CDR3 for beta chain variable domain of TCR clone 105928 (TRBV10-2, TRBJ2-7)
CASWASGGYEQYF

SEQ ID NO: 211857 - protein, 12 aa, Homo sapiens
  CDR3 for alpha chain variable domain of TCR clone 105929 (TRAV21, TRAJ49)
CAVNDGGNQFYF

SEQ ID NO: 211858 - protein, 16 aa, Homo sapiens
  CDR3 for beta chain variable domain of TCR clone 105929 (TRBV7-3, TRBJ2-1)
CASSLVSGSSNNEQFF

SEQ ID NO: 211859 - protein, 13 aa, Homo sapiens
  CDR3 for alpha chain variable domain of TCR clone 105930 (TRAV13-2, TRAJ48)
CAEMDFGNEKLTF

SEQ ID NO: 211860 - protein, 13 aa, Homo sapiens
  CDR3 for beta chain variable domain of TCR clone 105930 (TRBV13, TRBJ2-5)
FASSPEVGETQYF

SEQ ID NO: 211861 - protein, 16 aa, Homo sapiens
  CDR3 for alpha chain variable domain of TCR clone 105931 (TRAV12-3, TRAJ53)
CAMSPGSGGSNYKLTF

SEQ ID NO: 211862 - protein, 14 aa, Homo sapiens
  CDR3 for beta chain variable domain of TCR clone 105931 (TRBV20-1, TRBJ2-4)
CSARDRGQGGIQYF

SEQ ID NO: 211863 - protein, 14 aa, Homo sapiens
  CDR3 for alpha chain variable domain of TCR clone 105932 (TRAV1-2, TRAJ16)
CAVNRFSDGQKLLF

SEQ ID NO: 211864 - protein, 15 aa, Homo sapiens
  CDR3 for beta chain variable domain of TCR clone 105932 (TRBV5-7, TRBJ2-7)
CASSLGPGRGHEQYF

SEQ ID NO: 211865 - protein, 13 aa, Homo sapiens
  CDR3 for alpha chain variable domain of TCR clone 105933 (TRAV16, TRAJ26)
CITMLCLGQNFVF

SEQ ID NO: 211866 - protein, 12 aa, Homo sapiens
  CDR3 for beta chain variable domain of TCR clone 105933 (TRBV11-2, TRBJ2-1)
CASSPGNNEQFF

SEQ ID NO: 211867 - protein, 14 aa, Homo sapiens
  CDR3 for alpha chain variable domain of TCR clone 105934 (TRAV34, TRAJ44)
CGADGTGTASKLTF

SEQ ID NO: 211868 - protein, 13 aa, Homo sapiens
  CDR3 for beta chain variable domain of TCR clone 105934 (TRBV28, TRBJ2-5)
CASSFAGGETQYF

SEQ ID NO: 211869 - protein, 14 aa, Homo sapiens
  CDR3 for alpha chain variable domain of TCR clone 105935 (TRAV26-1, TRAJ38)
CIADNAGNNRKLIW

SEQ ID NO: 211870 - protein, 15 aa, Homo sapiens
  CDR3 for beta chain variable domain of TCR clone 105935 (TRBV11-2, TRBJ2-2)
CASSSDRVNAGELFF

SEQ ID NO: 211871 - protein, 14 aa, Homo sapiens
  CDR3 for alpha chain variable domain of TCR clone 105936 (TRAV26-1, TRAJ34)
CIVRVAYNTDKLIF

SEQ ID NO: 211872 - protein, 13 aa, Homo sapiens
  CDR3 for beta chain variable domain of TCR clone 105936 (TRBV13, TRBJ2-5)
CASSPEVGETQYF

SEQ ID NO: 211873 - protein, 16 aa, Homo sapiens
  CDR3 for alpha chain variable domain of TCR clone 105937 (TRAV12-2, TRAJ45)
CAVIFLSGGGADGLTF

SEQ ID NO: 211874 - protein, 15 aa, Homo sapiens
  CDR3 for beta chain variable domain of TCR clone 105937 (TRBV28, TRBJ2-2)
CASSLPGAGVGELFF

SEQ ID NO: 211875 - protein, 15 aa, Homo sapiens
  CDR3 for alpha chain variable domain of TCR clone 105938 (TRAV25, TRAJ52)
CAGRPGGTSYGKLTF

SEQ ID NO: 211876 - protein, 16 aa, Homo sapiens
  CDR3 for beta chain variable domain of TCR clone 105938 (TRBV13, TRBJ2-2)
CASSPRTGEHTGELFF

SEQ ID NO: 211877 - protein, 13 aa, Homo sapiens
  CDR3 for alpha chain variable domain of TCR clone 105939 (TRAV1-2, TRAJ9)
CAVLNTGGFKTIL

SEQ ID NO: 211878 - protein, 14 aa, Homo sapiens
  CDR3 for beta chain variable domain of TCR clone 105939 (TRBV5-1, TRBJ2-2)
CASSLGGGSGELFF

SEQ ID NO: 211879 - protein, 14 aa, Homo sapiens
  CDR3 for alpha chain variable domain of TCR clone 105940 (TRAV12-2, TRAJ13)
CAVKKTGGYQKVTF

SEQ ID NO: 211880 - protein, 17 aa, Homo sapiens
  CDR3 for beta chain variable domain of TCR clone 105940 (TRBV13, TRBJ2-3)
RASSLSRVAGGRNTQYF

SEQ ID NO: 211881 - protein, 14 aa, Homo sapiens
  CDR3 for alpha chain variable domain of TCR clone 105941 (TRAV8-4, TRAJ9)
CAVRINTGGFKTIF

SEQ ID NO: 211882 - protein, 13 aa, Homo sapiens
  CDR3 for beta chain variable domain of TCR clone 105941 (TRBV20-1, TRBJ1-6)
CSAPLGVGSPLHF

SEQ ID NO: 211883 - protein, 14 aa, Homo sapiens
  CDR3 for alpha chain variable domain of TCR clone 105942 (TRAV1-2, TRAJ16)
CAVNRFSDGQKLLF

SEQ ID NO: 211884 - protein, 13 aa, Homo sapiens
  CDR3 for beta chain variable domain of TCR clone 105942 (TRBV7-9, TRBJ1-2)
CANSLKQDYGYTF

SEQ ID NO: 211885 - protein, 20 aa, Homo sapiens
  CDR3 for alpha chain variable domain of TCR clone 105943 (TRAV21, TRAJ22)
SLVTQPPTLKSSGSARQLTF

SEQ ID NO: 211886 - protein, 16 aa, Homo sapiens
  CDR3 for beta chain variable domain of TCR clone 105943 (TRBV7-3, TRBJ2-2)
CASSLKRGILSGELFF

SEQ ID NO: 211887 - protein, 16 aa, Homo sapiens
  CDR3 for alpha chain variable domain of TCR clone 105944 (TRAV4, TRAJ9)
CLVGDPNRPGGFKTIF

SEQ ID NO: 211888 - protein, 14 aa, Homo sapiens
  CDR3 for beta chain variable domain of TCR clone 105944 (TRBV4-1, TRBJ2-2)
CASSQAVNTGELFF

SEQ ID NO: 211889 - protein, 12 aa, Homo sapiens
  CDR3 for alpha chain variable domain of TCR clone 105945 (TRAV23/DV6, TRAJ30)
CAASKGDDKNIF

SEQ ID NO: 211890 - protein, 17 aa, Homo sapiens
  CDR3 for beta chain variable domain of TCR clone 105945 (TRBV13, TRBJ2-3)
CASSLSRVAGGRNTQYF

SEQ ID NO: 211891 - protein, 15 aa, Homo sapiens
  CDR3 for alpha chain variable domain of TCR clone 105946 (TRAV16, TRAJ4)
CALPSLSGGYNKLIF

SEQ ID NO: 211892 - protein, 16 aa, Homo sapiens
  CDR3 for beta chain variable domain of TCR clone 105946 (TRBV24-1, TRBJ2-3)
CATSDPGTGATDTQYF

SEQ ID NO: 211893 - protein, 15 aa, Homo sapiens
  CDR3 for alpha chain variable domain of TCR clone 105947 (TRAV8-4, TRAJ37)
CAVSRGSGNTGKLIF

SEQ ID NO: 211894 - protein, 14 aa, Homo sapiens
  CDR3 for beta chain variable domain of TCR clone 105947 (TRBV4-1, TRBJ2-2)
CASSQAVNTGELFF

SEQ ID NO: 211895 - protein, 15 aa, Homo sapiens
  CDR3 for alpha chain variable domain of TCR clone 105948 (TRAV26-1, TRAJ29)
CIVRVEGSGNTPLVF

SEQ ID NO: 211896 - protein, 15 aa, Homo sapiens
  CDR3 for beta chain variable domain of TCR clone 105948 (TRBV25-1, TRBJ1-6)
CASSGDRGLNSPLHF

SEQ ID NO: 211897 - protein, 14 aa, Homo sapiens
  CDR3 for alpha chain variable domain of TCR clone 105949 (TRAV13-2, TRAJ17)
CAENSKAAGNKLTF

SEQ ID NO: 211898 - protein, 14 aa, Homo sapiens
  CDR3 for beta chain variable domain of TCR clone 105949 (TRBV19, TRBJ2-1)
CASPTLVLSGEQFF

SEQ ID NO: 211899 - protein, 10 aa, Homo sapiens
  CDR3 for alpha chain variable domain of TCR clone 105950 (TRAV16, TRAJ22)
SAMYLRQLTF

SEQ ID NO: 211900 - protein, 15 aa, Homo sapiens
  CDR3 for beta chain variable domain of TCR clone 105950 (TRBV7-9, TRBJ1-6)
CASSSPERGNSPLHF

SEQ ID NO: 211901 - protein, 10 aa, Homo sapiens
  CDR3 for alpha chain variable domain of TCR clone 105951 (TRAV12-3, TRAJ18)
CAMSAEAQPW

SEQ ID NO: 211902 - protein, 12 aa, Homo sapiens
  CDR3 for beta chain variable domain of TCR clone 105951 (TRBV11-2, TRBJ2-5)
CASSLGQETQYF

SEQ ID NO: 211903 - protein, 15 aa, Homo sapiens
  CDR3 for alpha chain variable domain of TCR clone 105952 (TRAV26-1, TRAJ44)
CIVRANTGTASKLTF

SEQ ID NO: 211904 - protein, 13 aa, Homo sapiens
  CDR3 for beta chain variable domain of TCR clone 105952 (TRBV19, TRBJ1-2)
CASSVPGQDGYTF

SEQ ID NO: 211905 - protein, 15 aa, Homo sapiens
  CDR3 for alpha chain variable domain of TCR clone 105953 (TRAV8-4, TRAJ10)
CAVSDQVGGGNKLTF

SEQ ID NO: 211906 - protein, 16 aa, Homo sapiens
  CDR3 for beta chain variable domain of TCR clone 105953 (TRBV20-1, TRBJ2-1)
CSARDVTPPPYNEQFF

SEQ ID NO: 211907 - protein, 15 aa, Homo sapiens
  CDR3 for alpha chain variable domain of TCR clone 105954 (TRAV23/DV6, TRAJ13)
CAAWPGGGGYQKVAF

SEQ ID NO: 211908 - protein, 13 aa, Homo sapiens
  CDR3 for beta chain variable domain of TCR clone 105954 (TRBV2, TRBJ1-1)
CASSEGGNTEAFF

SEQ ID NO: 211909 - protein, 12 aa, Homo sapiens
  CDR3 for alpha chain variable domain of TCR clone 105955 (TRAV13-1, TRAJ21)
CAAKEGFNKFYF

SEQ ID NO: 211910 - protein, 14 aa, Homo sapiens
  CDR3 for beta chain variable domain of TCR clone 105955 (TRBV5-4, TRBJ1-1)
CASSLDSRRDEAIF

SEQ ID NO: 211911 - protein, 14 aa, Homo sapiens
  CDR3 for alpha chain variable domain of TCR clone 105956 (TRAV17, TRAJ57)
CATDPQGGSEKLVF

SEQ ID NO: 211912 - protein, 19 aa, Homo sapiens
  CDR3 for beta chain variable domain of TCR clone 105956 (TRBV11-2, TRBJ1-3)
CASRKEFGTGRTPGNTIYF

SEQ ID NO: 211913 - protein, 15 aa, Homo sapiens
  CDR3 for alpha chain variable domain of TCR clone 105957 (TRAV13-1, TRAJ6)
CAAIHPSGGSYIPTF

SEQ ID NO: 211914 - protein, 13 aa, Homo sapiens
  CDR3 for beta chain variable domain of TCR clone 105957 (TRBV27, TRBJ1-1)
CASSLSIGAEAFF

SEQ ID NO: 211915 - protein, 13 aa, Homo sapiens
  CDR3 for alpha chain variable domain of TCR clone 105958 (TRAV13-2, TRAJ48)
CAETDFGNEKLTF

SEQ ID NO: 211916 - protein, 15 aa, Homo sapiens
  CDR3 for beta chain variable domain of TCR clone 105958 (TRBV7-9, TRBJ1-6)
CASGSPGRGNSPLHF

SEQ ID NO: 211917 - protein, 13 aa, Homo sapiens
  CDR3 for alpha chain variable domain of TCR clone 105959 (TRAV3, TRAJ21)
CAVREPDFNKFYF

SEQ ID NO: 211918 - protein, 13 aa, Homo sapiens
  CDR3 for beta chain variable domain of TCR clone 105959 (TRBV15, TRBJ2-7)
CATSTTGHYEQYF

SEQ ID NO: 211919 - protein, 16 aa, Homo sapiens
  CDR3 for alpha chain variable domain of TCR clone 105960 (TRAV13-1, TRAJ18)
CAAGRMRGSTLGRLYF

SEQ ID NO: 211920 - protein, 16 aa, Homo sapiens
  CDR3 for beta chain variable domain of TCR clone 105960 (TRBV27, TRBJ1-1)
CASSSRGRTGYTEAFF

SEQ ID NO: 211921 - protein, 13 aa, Homo sapiens
  CDR3 for alpha chain variable domain of TCR clone 105961 (TRAV12-1, TRAJ31)
CVVNMNNNARLMF

SEQ ID NO: 211922 - protein, 15 aa, Homo sapiens
  CDR3 for beta chain variable domain of TCR clone 105961 (TRBV4-1, TRBJ1-2)
CASSQGQWAAYGYTF

SEQ ID NO: 211923 - protein, 16 aa, Homo sapiens
  CDR3 for alpha chain variable domain of TCR clone 105962 (TRAV16, TRAJ52)
CALSAAGGTSYGKLTF

SEQ ID NO: 211924 - protein, 12 aa, Homo sapiens
  CDR3 for beta chain variable domain of TCR clone 105962 (TRBV24-1, TRBJ1-1)
CATLYPDTEAFF

SEQ ID NO: 211925 - protein, 17 aa, Homo sapiens
  CDR3 for alpha chain variable domain of TCR clone 105963 (TRAV3, TRAJ42)
CAVRDRDYGGSQGNLIF

SEQ ID NO: 211926 - protein, 13 aa, Homo sapiens
  CDR3 for beta chain variable domain of TCR clone 105963 (TRBV5-7, TRBJ1-2)
CASSLIRAPGYTF

SEQ ID NO: 211927 - protein, 11 aa, Homo sapiens
  CDR3 for alpha chain variable domain of TCR clone 105964 (TRAV12-3, TRAJ43)
CAMSVSNDMRF

SEQ ID NO: 211928 - protein, 12 aa, Homo sapiens
  CDR3 for beta chain variable domain of TCR clone 105964 (TRBV20-1, TRBJ1-1)
QCSTWGGAEAFF

SEQ ID NO: 211929 - protein, 11 aa, Homo sapiens
  CDR3 for alpha chain variable domain of TCR clone 105965 (TRAV12-3, TRAJ43)
CAMSVSNDMRF

SEQ ID NO: 211930 - protein, 13 aa, Homo sapiens
  CDR3 for beta chain variable domain of TCR clone 105965 (TRBV20-1, TRBJ1-1)
FSAPLGGGTEAFF

SEQ ID NO: 211931 - protein, 15 aa, Homo sapiens
  CDR3 for alpha chain variable domain of TCR clone 105966 (TRAV38-1, TRAJ30)
CAFMMSYGGDDRIIF

SEQ ID NO: 211932 - protein, 16 aa, Homo sapiens
  CDR3 for beta chain variable domain of TCR clone 105966 (TRBV7-9, TRBJ2-7)
CASSFGLAGPSYEQYF

SEQ ID NO: 211933 - protein, 14 aa, Homo sapiens
  CDR3 for alpha chain variable domain of TCR clone 105967 (TRAV38-1, TRAJ27)
CAFIHNTNAGKSTF

SEQ ID NO: 211934 - protein, 12 aa, Homo sapiens
  CDR3 for beta chain variable domain of TCR clone 105967 (TRBV7-8, TRBJ2-7)
CASSLGDREQYV

SEQ ID NO: 211935 - protein, 19 aa, Homo sapiens
  CDR3 for alpha chain variable domain of TCR clone 105968 (TRAV8-3, TRAJ8)
LSTSVLWDPMNTGFQKLVF

SEQ ID NO: 211936 - protein, 13 aa, Homo sapiens
  CDR3 for beta chain variable domain of TCR clone 105968 (TRBV27, TRBJ2-7)
CASSFVSSYEQYF

SEQ ID NO: 211937 - protein, 14 aa, Homo sapiens
  CDR3 for alpha chain variable domain of TCR clone 105969 (TRAV26-1, TRAJ38)
CIADNAGNNRKLIW

SEQ ID NO: 211938 - protein, 13 aa, Homo sapiens
  CDR3 for beta chain variable domain of TCR clone 105969 (TRBV19, TRBJ1-2)
CASSVPGQDGYTV

SEQ ID NO: 211939 - protein, 18 aa, Homo sapiens
  CDR3 for alpha chain variable domain of TCR clone 105970 (TRAV8-3, TRAJ44)
CAVVPLIPALPVNSPLGL

SEQ ID NO: 211940 - protein, 15 aa, Homo sapiens
  CDR3 for beta chain variable domain of TCR clone 105970 (TRBV27, TRBJ1-5)
CASTFNRGSNQPQHF

SEQ ID NO: 211941 - protein, 17 aa, Homo sapiens
  CDR3 for alpha chain variable domain of TCR clone 105971 (TRAV3, TRAJ6)
CAVRDGPRAGGSYIPTF

SEQ ID NO: 211942 - protein, 16 aa, Homo sapiens
  CDR3 for beta chain variable domain of TCR clone 105971 (TRBV29-1, TRBJ1-2)
CSVEANRDIANYGYTF

SEQ ID NO: 211943 - protein, 13 aa, Homo sapiens
  CDR3 for alpha chain variable domain of TCR clone 105972 (TRAV12-1, TRAJ16)
CVVNGPDGQKLLF

SEQ ID NO: 211944 - protein, 13 aa, Homo sapiens
  CDR3 for beta chain variable domain of TCR clone 105972 (TRBV2, TRBJ1-1)
SARNPTGGFHAFF

SEQ ID NO: 211945 - protein, 12 aa, Homo sapiens
  CDR3 for alpha chain variable domain of TCR clone 105973 (TRAV1-1, TRAJ8)
CAGGTGFQKLVF

SEQ ID NO: 211946 - protein, 14 aa, Homo sapiens
  CDR3 for beta chain variable domain of TCR clone 105973 (TRBV7-2, TRBJ2-7)
CASRSQGAAYEQYF

SEQ ID NO: 211947 - protein, 14 aa, Homo sapiens
  CDR3 for alpha chain variable domain of TCR clone 105974 (TRAV12-2, TRAJ5)
CAVNRSTGRRALTF

SEQ ID NO: 211948 - protein, 14 aa, Homo sapiens
  CDR3 for beta chain variable domain of TCR clone 105974 (TRBV12-5, TRBJ2-5)
CASGSRTHQETQYF

SEQ ID NO: 211949 - protein, 14 aa, Homo sapiens
  CDR3 for alpha chain variable domain of TCR clone 105975 (TRAV1-2, TRAJ16)
CAVNRFSDGQKLLF

SEQ ID NO: 211950 - protein, 11 aa, Homo sapiens
  CDR3 for beta chain variable domain of TCR clone 105975 (TRBV23-1, TRBJ2-7)
SSSGTGLEQYF

SEQ ID NO: 211951 - protein, 14 aa, Homo sapiens
  CDR3 for alpha chain variable domain of TCR clone 105976 (TRAV3, TRAJ34)
CAVRAPGNTDKLIF

SEQ ID NO: 211952 - protein, 14 aa, Homo sapiens
  CDR3 for beta chain variable domain of TCR clone 105976 (TRBV7-7, TRBJ2-1)
CASSSGLASNEQFF

SEQ ID NO: 211953 - protein, 16 aa, Homo sapiens
  CDR3 for alpha chain variable domain of TCR clone 105977 (TRAV12-2, TRAJ28)
CAVITDSGAGSYHLTF

SEQ ID NO: 211954 - protein, 12 aa, Homo sapiens
  CDR3 for beta chain variable domain of TCR clone 105977 (TRBV9, TRBJ2-2)
CASSLVTGELFF

SEQ ID NO: 211955 - protein, 14 aa, Homo sapiens
  CDR3 for alpha chain variable domain of TCR clone 105978 (TRAV20, TRAJ16)
CAVRFFSDGQKLLF

SEQ ID NO: 211956 - protein, 18 aa, Homo sapiens
  CDR3 for beta chain variable domain of TCR clone 105978 (TRBV11-2, TRBJ2-3)
CASSLGGASRGAPNTQYF

SEQ ID NO: 211957 - protein, 15 aa, Homo sapiens
  CDR3 for alpha chain variable domain of TCR clone 105979 (TRAV12-3, TRAJ6)
CAMSATTGGSYIPTF

SEQ ID NO: 211958 - protein, 15 aa, Homo sapiens
  CDR3 for beta chain variable domain of TCR clone 105979 (TRBV12-4, TRBJ2-1)
CASSLLATGNNEQFF

SEQ ID NO: 211959 - protein, 15 aa, Homo sapiens
  CDR3 for alpha chain variable domain of TCR clone 105980 (TRAV12-3, TRAJ49)
CAMTAPGNTGNQFYF

SEQ ID NO: 211960 - protein, 15 aa, Homo sapiens
  CDR3 for beta chain variable domain of TCR clone 105980 (TRBV20-1, TRBJ2-7)
CSARDRVSGMDEQYF

SEQ ID NO: 211961 - protein, 15 aa, Homo sapiens
  CDR3 for alpha chain variable domain of TCR clone 105981 (TRAV3, TRAJ3)
CAVRDMSSSASKIIF

SEQ ID NO: 211962 - protein, 14 aa, Homo sapiens
  CDR3 for beta chain variable domain of TCR clone 105981 (TRBV6-6, TRBJ2-7)
CASSIAGGVDEQYS

SEQ ID NO: 211963 - protein, 16 aa, Homo sapiens
  CDR3 for alpha chain variable domain of TCR clone 105982 (TRAV3, TRAJ37)
CAVRVRGSGNTGKLIF

SEQ ID NO: 211964 - protein, 16 aa, Homo sapiens
  CDR3 for beta chain variable domain of TCR clone 105982 (TRBV9, TRBJ2-1)
CASSVGGGGNYNEQFF

SEQ ID NO: 211965 - protein, 12 aa, Homo sapiens
  CDR3 for alpha chain variable domain of TCR clone 105983 (TRAV27, TRAJ9)
CAGESGGFKTIF

SEQ ID NO: 211966 - protein, 17 aa, Homo sapiens
  CDR3 for beta chain variable domain of TCR clone 105983 (TRBV13, TRBJ2-3)
CASSLSRVAGGRNTQYF

SEQ ID NO: 211967 - protein, 16 aa, Homo sapiens
  CDR3 for alpha chain variable domain of TCR clone 105984 (TRAV3, TRAJ37)
CAVRPHGSGNTGKLIF

SEQ ID NO: 211968 - protein, 17 aa, Homo sapiens
  CDR3 for beta chain variable domain of TCR clone 105984 (TRBV20-1, TRBJ2-1)
CSSSSSGLAGSYNEQFF

SEQ ID NO: 211969 - protein, 16 aa, Homo sapiens
  CDR3 for alpha chain variable domain of TCR clone 105985 (TRAV29/DV5, TRAJ53)
CAASLNSGGSNYKLTF

SEQ ID NO: 211970 - protein, 19 aa, Homo sapiens
  CDR3 for beta chain variable domain of TCR clone 105985 (TRBV28, TRBJ2-7)
CASSYSGTSRLGWVYEQYF

SEQ ID NO: 211971 - protein, 13 aa, Homo sapiens
  CDR3 for alpha chain variable domain of TCR clone 105986 (TRAV2, TRAJ40)
CAVVTSGTYKYIF

SEQ ID NO: 211972 - protein, 13 aa, Homo sapiens
  CDR3 for beta chain variable domain of TCR clone 105986 (TRBV7-9, TRBJ2-2)
CASSLDPTGELFF

SEQ ID NO: 211973 - protein, 13 aa, Homo sapiens
  CDR3 for alpha chain variable domain of TCR clone 105987 (TRAV17, TRAJ8)
CATGPVGFQKLVF

SEQ ID NO: 211974 - protein, 15 aa, Homo sapiens
  CDR3 for beta chain variable domain of TCR clone 105987 (TRBV20-1, TRBJ2-5)
CSAGRLPSGQGTQYF

SEQ ID NO: 211975 - protein, 13 aa, Homo sapiens
  CDR3 for alpha chain variable domain of TCR clone 105988 (TRAV12-1, TRAJ3)
CVVNPRVASKIIF

SEQ ID NO: 211976 - protein, 13 aa, Homo sapiens
  CDR3 for beta chain variable domain of TCR clone 105988 (TRBV28, TRBJ1-5)
CASSDRGNQPQHF

SEQ ID NO: 211977 - protein, 12 aa, Homo sapiens
  CDR3 for alpha chain variable domain of TCR clone 105989 (TRAV12-2, TRAJ10)
WGVTGGGNKLTF

SEQ ID NO: 211978 - protein, 16 aa, Homo sapiens
  CDR3 for beta chain variable domain of TCR clone 105989 (TRBV6-4, TRBJ1-2)
CAGSEAVGDPNYGYTF

SEQ ID NO: 211979 - protein, 12 aa, Homo sapiens
  CDR3 for alpha chain variable domain of TCR clone 105990 (TRAV36/DV7, TRAJ54)
CAVVRGAQKLVF

SEQ ID NO: 211980 - protein, 20 aa, Homo sapiens
  CDR3 for beta chain variable domain of TCR clone 105990 (TRBV7-8, TRBJ2-2)
CASSHLFPGPTIHITGELFF

SEQ ID NO: 211981 - protein, 14 aa, Homo sapiens
  CDR3 for alpha chain variable domain of TCR clone 105991 (TRAV30, TRAJ26)
CGTEIVSYGQNFVF

SEQ ID NO: 211982 - protein, 12 aa, Homo sapiens
  CDR3 for beta chain variable domain of TCR clone 105991 (TRBV12-4, TRBJ2-7)
CASSLGGYEQYF

SEQ ID NO: 211983 - protein, 14 aa, Homo sapiens
  CDR3 for alpha chain variable domain of TCR clone 105992 (TRAV30, TRAJ33)
CGTVAPRSHYQLIW

SEQ ID NO: 211984 - protein, 18 aa, Homo sapiens
  CDR3 for beta chain variable domain of TCR clone 105992 (TRBV11-2, TRBJ2-3)
CASSLGGASRGAPNTQYF

SEQ ID NO: 211985 - protein, 14 aa, Homo sapiens
  CDR3 for alpha chain variable domain of TCR clone 105993 (TRAV1-2, TRAJ8)
CAVREDTGFQNLVF

SEQ ID NO: 211986 - protein, 15 aa, Homo sapiens
  CDR3 for beta chain variable domain of TCR clone 105993 (TRBV20-1, TRBJ2-7)
CSARDRVSGMDEQYF

SEQ ID NO: 211987 - protein, 14 aa, Homo sapiens
  CDR3 for alpha chain variable domain of TCR clone 105994 (TRAV12-2, TRAJ9)
CAVSFGTGGFKTIF

SEQ ID NO: 211988 - protein, 17 aa, Homo sapiens
  CDR3 for beta chain variable domain of TCR clone 105994 (TRBV4-1, TRBJ2-5)
CASSQDLTGGPIETQYF

SEQ ID NO: 211989 - protein, 15 aa, Homo sapiens
  CDR3 for alpha chain variable domain of TCR clone 105995 (TRAV8-2, TRAJ15)
CVVTMGNQAGTALIF

SEQ ID NO: 211990 - protein, 14 aa, Homo sapiens
  CDR3 for beta chain variable domain of TCR clone 105995 (TRBV7-6, TRBJ2-3)
CASSLGTVTDTQYF

SEQ ID NO: 211991 - protein, 13 aa, Homo sapiens
  CDR3 for alpha chain variable domain of TCR clone 105996 (TRAV25, TRAJ10)
CAGRTGGGNRLTF

SEQ ID NO: 211992 - protein, 15 aa, Homo sapiens
  CDR3 for beta chain variable domain of TCR clone 105996 (TRBV19, TRBJ2-1)
CASSSPGVPLDEQFF

SEQ ID NO: 211993 - protein, 15 aa, Homo sapiens
  CDR3 for alpha chain variable domain of TCR clone 105997 (TRAV8-3, TRAJ45)
CASSYSGGGADGLTF

SEQ ID NO: 211994 - protein, 16 aa, Homo sapiens
  CDR3 for beta chain variable domain of TCR clone 105997 (TRBV11-3, TRBJ2-5)
CASSSVVAGSTETQYF

SEQ ID NO: 211995 - protein, 15 aa, Homo sapiens
  CDR3 for alpha chain variable domain of TCR clone 105998 (TRAV8-3, TRAJ40)
CAAPSLCSGTYRYIF

SEQ ID NO: 211996 - protein, 16 aa, Homo sapiens
  CDR3 for beta chain variable domain of TCR clone 105998 (TRBV7-3, TRBJ2-3)
CASSLSGYRPEDTQYF

SEQ ID NO: 211997 - protein, 13 aa, Homo sapiens
  CDR3 for alpha chain variable domain of TCR clone 105999 (TRAV21, TRAJ27)
CAARPGNAGKSTF

SEQ ID NO: 211998 - protein, 14 aa, Homo sapiens
  CDR3 for beta chain variable domain of TCR clone 105999 (TRBV7-2, TRBJ2-1)
CASSRGGARNEQFF

SEQ ID NO: 211999 - protein, 12 aa, Homo sapiens
  CDR3 for alpha chain variable domain of TCR clone 106000 (TRAV21, TRAJ11)
CAVRGGNSTLTF

SEQ ID NO: 212000 - protein, 13 aa, Homo sapiens
  CDR3 for beta chain variable domain of TCR clone 106000 (TRBV7-3, TRBJ1-1)
CASSQDWGAEAFF

SEQ ID NO: 212001 - protein, 12 aa, Homo sapiens
  CDR3 for alpha chain variable domain of TCR clone 106001 (TRAV10, TRAJ43)
CVVVRVGNDLRF

SEQ ID NO: 212002 - protein, 15 aa, Homo sapiens
  CDR3 for beta chain variable domain of TCR clone 106001 (TRBV2, TRBJ2-7)
CASSEGLARSYEQYF

SEQ ID NO: 212003 - protein, 11 aa, Homo sapiens
  CDR3 for alpha chain variable domain of TCR clone 106002 (TRAV23/DV6, TRAJ58)
CAARLLRGETS

SEQ ID NO: 212004 - protein, 16 aa, Homo sapiens
  CDR3 for beta chain variable domain of TCR clone 106002 (TRBV13, TRBJ2-2)
CASSPRTGEHTGELFF

SEQ ID NO: 212005 - protein, 17 aa, Homo sapiens
  CDR3 for alpha chain variable domain of TCR clone 106003 (TRAV12-3, TRAJ6)
CAMRARGGAGGSYIPTF

SEQ ID NO: 212006 - protein, 12 aa, Homo sapiens
  CDR3 for beta chain variable domain of TCR clone 106003 (TRBV12-4, TRBJ2-3)
CASSTLPDTQYF

SEQ ID NO: 212007 - protein, 14 aa, Homo sapiens
  CDR3 for alpha chain variable domain of TCR clone 106004 (TRAV26-1, TRAJ40)
CIVRLLSGTYKYIF

SEQ ID NO: 212008 - protein, 15 aa, Homo sapiens
  CDR3 for beta chain variable domain of TCR clone 106004 (TRBV4-1, TRBJ1-4)
CASSDTGGTNEKLFF

SEQ ID NO: 212009 - protein, 16 aa, Homo sapiens
  CDR3 for alpha chain variable domain of TCR clone 106005 (TRAV12-2, )
CAVEDIQNPDPAVYQL

SEQ ID NO: 212010 - protein, 20 aa, Homo sapiens
  CDR3 for beta chain variable domain of TCR clone 106005 (TRBV11-3, TRBJ2-7)
CASSQRTSGSLRAVLRAGHQ

SEQ ID NO: 212011 - protein, 12 aa, Homo sapiens
  CDR3 for alpha chain variable domain of TCR clone 106006 (TRAV12-3, TRAJ17)
CAMTLTDNKLTF

SEQ ID NO: 212012 - protein, 12 aa, Homo sapiens
  CDR3 for beta chain variable domain of TCR clone 106006 (TRBV2, TRBJ2-1)
CAYGPPGNEQFF

SEQ ID NO: 212013 - protein, 13 aa, Homo sapiens
  CDR3 for alpha chain variable domain of TCR clone 106007 (TRAV35, TRAJ36)
CAGPRIGANNLFF

SEQ ID NO: 212014 - protein, 15 aa, Homo sapiens
  CDR3 for beta chain variable domain of TCR clone 106007 (TRBV28, TRBJ2-5)
CASSPPWAYQETQYF

SEQ ID NO: 212015 - protein, 13 aa, Homo sapiens
  CDR3 for alpha chain variable domain of TCR clone 106008 (TRAV2, TRAJ15)
CAVASQAGTALIF

SEQ ID NO: 212016 - protein, 14 aa, Homo sapiens
  CDR3 for beta chain variable domain of TCR clone 106008 (TRBV27, TRBJ2-5)
CASSSLKGWETQYF

SEQ ID NO: 212017 - protein, 15 aa, Homo sapiens
  CDR3 for alpha chain variable domain of TCR clone 106009 (TRAV25, TRAJ52)
CAGTSGGTSYGKLTF

SEQ ID NO: 212018 - protein, 15 aa, Homo sapiens
  CDR3 for beta chain variable domain of TCR clone 106009 (TRBV7-8, TRBJ2-1)
CASSLADSLYNEQFF

SEQ ID NO: 212019 - protein, 17 aa, Homo sapiens
  CDR3 for alpha chain variable domain of TCR clone 106010 (TRAV8-3, TRAJ34)
CAIPGKLIFGPGTRLQV

SEQ ID NO: 212020 - protein, 15 aa, Homo sapiens
  CDR3 for beta chain variable domain of TCR clone 106010 (TRBV5-7, TRBJ2-1)
CASSRRLAGDNEQFF

SEQ ID NO: 212021 - protein, 12 aa, Homo sapiens
  CDR3 for alpha chain variable domain of TCR clone 106011 (TRAV12-2, TRAJ4)
GWPAGGYNKLIF

SEQ ID NO: 212022 - protein, 16 aa, Homo sapiens
  CDR3 for beta chain variable domain of TCR clone 106011 (TRBV6-1, TRBJ2-5)
CASSETLDRGAETQYF

SEQ ID NO: 212023 - protein, 12 aa, Homo sapiens
  CDR3 for alpha chain variable domain of TCR clone 106012 (TRAV26-1, TRAJ31)
CIVRNNNARLMF

SEQ ID NO: 212024 - protein, 15 aa, Homo sapiens
  CDR3 for beta chain variable domain of TCR clone 106012 (TRBV20-1, TRBJ2-4)
CSARDLTGGPNMQYF

SEQ ID NO: 212025 - protein, 13 aa, Homo sapiens
  CDR3 for alpha chain variable domain of TCR clone 106013 (TRAV29/DV5, TRAJ29)
CAASAAGNTPLVF

SEQ ID NO: 212026 - protein, 13 aa, Homo sapiens
  CDR3 for beta chain variable domain of TCR clone 106013 (TRBV12-4, TRBJ1-2)
CASSLRQGKGYTF

SEQ ID NO: 212027 - protein, 13 aa, Homo sapiens
  CDR3 for alpha chain variable domain of TCR clone 106014 (TRAV29/DV5, TRAJ31)
CAASRNNNARLIF

SEQ ID NO: 212028 - protein, 12 aa, Homo sapiens
  CDR3 for beta chain variable domain of TCR clone 106014 (TRBV11-2, TRBJ2-1)
CASSPGNNEQFF

SEQ ID NO: 212029 - protein, 14 aa, Homo sapiens
  CDR3 for alpha chain variable domain of TCR clone 106015 (TRAV8-3, TRAJ12)
CAVGARDSSYKLIF

SEQ ID NO: 212030 - protein, 13 aa, Homo sapiens
  CDR3 for beta chain variable domain of TCR clone 106015 (TRBV15, TRBJ1-6)
CATSGGLNSPLHF

SEQ ID NO: 212031 - protein, 12 aa, Homo sapiens
  CDR3 for alpha chain variable domain of TCR clone 106016 (TRAV16, TRAJ10)
CARTGGGNKLTF

SEQ ID NO: 212032 - protein, 15 aa, Homo sapiens
  CDR3 for beta chain variable domain of TCR clone 106016 (TRBV6-3, TRBJ2-7)
CASSSPGTVFYEQYF

SEQ ID NO: 212033 - protein, 11 aa, Homo sapiens
  CDR3 for alpha chain variable domain of TCR clone 106017 (TRAV1-2, TRAJ40)
CAVPGTYKYIF

SEQ ID NO: 212034 - protein, 12 aa, Homo sapiens
  CDR3 for beta chain variable domain of TCR clone 106017 (TRBV11-2, TRBJ2-1)
CASSPGNNEQFF

SEQ ID NO: 212035 - protein, 13 aa, Homo sapiens
  CDR3 for alpha chain variable domain of TCR clone 106018 (TRAV13-1, TRAJ37)
CAARSGNTGNLIF

SEQ ID NO: 212036 - protein, 14 aa, Homo sapiens
  CDR3 for beta chain variable domain of TCR clone 106018 (TRBV12-4, TRBJ2-3)
CASSLGQGTDTQYF

SEQ ID NO: 212037 - protein, 13 aa, Homo sapiens
  CDR3 for alpha chain variable domain of TCR clone 106019 (TRAV12-1, TRAJ40)
CVVPTSGTYKYIF

SEQ ID NO: 212038 - protein, 14 aa, Homo sapiens
  CDR3 for beta chain variable domain of TCR clone 106019 (TRBV7-2, TRBJ2-7)
CASSPKTSFYEQYF

SEQ ID NO: 212039 - protein, 11 aa, Homo sapiens
  CDR3 for alpha chain variable domain of TCR clone 106020 (TRAV23/DV6, TRAJ48)
CAPRWGEKLTF

SEQ ID NO: 212040 - protein, 11 aa, Homo sapiens
  CDR3 for beta chain variable domain of TCR clone 106020 (TRBV11-2, TRBJ2-2)
CASSLPGELFF

SEQ ID NO: 212041 - protein, 12 aa, Homo sapiens
  CDR3 for alpha chain variable domain of TCR clone 106021 (TRAV16, TRAJ10)
CSRTGGGNKLTF

SEQ ID NO: 212042 - protein, 16 aa, Homo sapiens
  CDR3 for beta chain variable domain of TCR clone 106021 (TRBV18, TRBJ2-4)
CASSPPYSGAKNIQYF

SEQ ID NO: 212043 - protein, 15 aa, Homo sapiens
  CDR3 for alpha chain variable domain of TCR clone 106022 (TRAV17, TRAJ35)
CATAFVIGFGNVLLC

SEQ ID NO: 212044 - protein, 16 aa, Homo sapiens
  CDR3 for beta chain variable domain of TCR clone 106022 (TRBV11-2, TRBJ2-7)
CASSPLAGGPRYEQYF

SEQ ID NO: 212045 - protein, 15 aa, Homo sapiens
  CDR3 for alpha chain variable domain of TCR clone 106023 (TRAV12-1, TRAJ45)
CVVLSGGGGADGLTF

SEQ ID NO: 212046 - protein, 16 aa, Homo sapiens
  CDR3 for beta chain variable domain of TCR clone 106023 (TRBV6-5, TRBJ2-1)
CASSETLAGHYNERFF

SEQ ID NO: 212047 - protein, 15 aa, Homo sapiens
  CDR3 for alpha chain variable domain of TCR clone 106024 (TRAV1-2, TRAJ28)
CAVQYSGAGSYQLTF

SEQ ID NO: 212048 - protein, 13 aa, Homo sapiens
  CDR3 for beta chain variable domain of TCR clone 106024 (TRBV4-2, TRBJ1-1)
CASSHAGNTEAFF

SEQ ID NO: 212049 - protein, 14 aa, Homo sapiens
  CDR3 for alpha chain variable domain of TCR clone 106025 (TRAV12-2, TRAJ40)
CAVKIPSGTYKYIF

SEQ ID NO: 212050 - protein, 12 aa, Homo sapiens
  CDR3 for beta chain variable domain of TCR clone 106025 (TRBV11-2, TRBJ2-2)
CASSLGGGELFF

SEQ ID NO: 212051 - protein, 16 aa, Homo sapiens
  CDR3 for alpha chain variable domain of TCR clone 106026 (TRAV12-2, TRAJ6)
CAAPLAGSGGSYIPTF

SEQ ID NO: 212052 - protein, 13 aa, Homo sapiens
  CDR3 for beta chain variable domain of TCR clone 106026 (TRBV7-3, TRBJ1-1)
CASSQDWGAEAFF

SEQ ID NO: 212053 - protein, 11 aa, Homo sapiens
  CDR3 for alpha chain variable domain of TCR clone 106027 (TRAV12-3, TRAJ41)
CAMSAREALNF

SEQ ID NO: 212054 - protein, 16 aa, Homo sapiens
  CDR3 for beta chain variable domain of TCR clone 106027 (TRBV7-8, TRBJ2-3)
CASSTEGQRETDTQYF

SEQ ID NO: 212055 - protein, 14 aa, Homo sapiens
  CDR3 for alpha chain variable domain of TCR clone 106028 (TRAV12-3, TRAJ12)
CAMSEVDSRYKLIF

SEQ ID NO: 212056 - protein, 12 aa, Homo sapiens
  CDR3 for beta chain variable domain of TCR clone 106028 (TRBV18, TRBJ1-4)
CASSPSREKLFF

SEQ ID NO: 212057 - protein, 12 aa, Homo sapiens
  CDR3 for alpha chain variable domain of TCR clone 106029 (TRAV27, TRAJ9)
CAGESGGFKTIF

SEQ ID NO: 212058 - protein, 14 aa, Homo sapiens
  CDR3 for beta chain variable domain of TCR clone 106029 (TRBV7-6, TRBJ2-3)
CASSLGTVTDTQYF

SEQ ID NO: 212059 - protein, 13 aa, Homo sapiens
  CDR3 for alpha chain variable domain of TCR clone 106030 (TRAV12-2, TRAJ10)
CAVPTGGGNKLTF

SEQ ID NO: 212060 - protein, 19 aa, Homo sapiens
  CDR3 for beta chain variable domain of TCR clone 106030 (TRBV28, TRBJ2-7)
CASSYSGTSRLGWVYEQYF

SEQ ID NO: 212061 - protein, 19 aa, Homo sapiens
  CDR3 for alpha chain variable domain of TCR clone 106031 (TRAV29/DV5, TRAJ49)
CSVLLCSKLTVDTGNQFHF

SEQ ID NO: 212062 - protein, 17 aa, Homo sapiens
  CDR3 for beta chain variable domain of TCR clone 106031 (TRBV13, TRBJ2-3)
CASSLSRVAGGRNTQYF

SEQ ID NO: 212063 - protein, 12 aa, Homo sapiens
  CDR3 for alpha chain variable domain of TCR clone 106032 (TRAV12-3, TRAJ43)
CAIISNNNDMRF

SEQ ID NO: 212064 - protein, 15 aa, Homo sapiens
  CDR3 for beta chain variable domain of TCR clone 106032 (TRBV27, TRBJ1-4)
CASSPRHATNEKLFF

SEQ ID NO: 212065 - protein, 15 aa, Homo sapiens
  CDR3 for alpha chain variable domain of TCR clone 106033 (TRAV35, TRAJ50)
CVGQLRKTSYDKVIF

SEQ ID NO: 212066 - protein, 12 aa, Homo sapiens
  CDR3 for beta chain variable domain of TCR clone 106033 (TRBV5-1, TRBJ2-5)
CASSLGLETQYF

SEQ ID NO: 212067 - protein, 11 aa, Homo sapiens
  CDR3 for alpha chain variable domain of TCR clone 106034 (TRAV2, TRAJ33)
CAVESNYQLIW

SEQ ID NO: 212068 - protein, 16 aa, Homo sapiens
  CDR3 for beta chain variable domain of TCR clone 106034 (TRBV12-4, TRBJ2-5)
CASSFFVRGRQETQYF

SEQ ID NO: 212069 - protein, 14 aa, Homo sapiens
  CDR3 for alpha chain variable domain of TCR clone 106035 (TRAV2, TRAJ37)
CAVDFTSNTGKLIF

SEQ ID NO: 212070 - protein, 16 aa, Homo sapiens
  CDR3 for beta chain variable domain of TCR clone 106035 (TRBV20-1, TRBJ1-1)
CSARALTQGMNTEAFF

SEQ ID NO: 212071 - protein, 15 aa, Homo sapiens
  CDR3 for alpha chain variable domain of TCR clone 106036 (TRAV38-1, TRAJ37)
CAFIHGSGNTGKLIF

SEQ ID NO: 212072 - protein, 14 aa, Homo sapiens
  CDR3 for beta chain variable domain of TCR clone 106036 (TRBV7-2, TRBJ2-7)
CASSPKTSFYEQYF

SEQ ID NO: 212073 - protein, 13 aa, Homo sapiens
  CDR3 for alpha chain variable domain of TCR clone 106037 (TRAV13-1, TRAJ6)
CAARRGGSYLPTF

SEQ ID NO: 212074 - protein, 16 aa, Homo sapiens
  CDR3 for beta chain variable domain of TCR clone 106037 (TRBV7-9, TRBJ2-2)
CASSLATGVGTGELFF

SEQ ID NO: 212075 - protein, 13 aa, Homo sapiens
  CDR3 for alpha chain variable domain of TCR clone 106038 (TRAV17, TRAJ40)
CATRPSGTYKYIF

SEQ ID NO: 212076 - protein, 16 aa, Homo sapiens
  CDR3 for beta chain variable domain of TCR clone 106038 (TRBV19, TRBJ2-5)
CASSSGTSGSQETQYF

SEQ ID NO: 212077 - protein, 14 aa, Homo sapiens
  CDR3 for alpha chain variable domain of TCR clone 106039 (TRAV8-3, TRAJ11)
CAVGSNSGYSTLPF

SEQ ID NO: 212078 - protein, 14 aa, Homo sapiens
  CDR3 for beta chain variable domain of TCR clone 106039 (TRBV5-1, TRBJ2-7)
CASSLTSGGYEQYF

SEQ ID NO: 212079 - protein, 12 aa, Homo sapiens
  CDR3 for alpha chain variable domain of TCR clone 106040 (TRAV20, TRAJ39)
CAVGNAGNMLTF

SEQ ID NO: 212080 - protein, 14 aa, Homo sapiens
  CDR3 for beta chain variable domain of TCR clone 106040 (TRBV7-8, TRBJ2-3)
CASSLEAGTDTQYF

SEQ ID NO: 212081 - protein, 11 aa, Homo sapiens
  CDR3 for alpha chain variable domain of TCR clone 106041 (TRAV3, TRAJ21)
CAVGNFNEFYF

SEQ ID NO: 212082 - protein, 14 aa, Homo sapiens
  CDR3 for beta chain variable domain of TCR clone 106041 (TRBV18, TRBJ2-5)
CASSPGVSQETQYF

SEQ ID NO: 212083 - protein, 14 aa, Homo sapiens
  CDR3 for alpha chain variable domain of TCR clone 106042 (TRAV8-2, TRAJ45)
CVVSAGRGADGLTF

SEQ ID NO: 212084 - protein, 12 aa, Homo sapiens
  CDR3 for beta chain variable domain of TCR clone 106042 (TRBV12-4, TRBJ2-1)
CASSLVRVEQFF

SEQ ID NO: 212085 - protein, 16 aa, Homo sapiens
  CDR3 for alpha chain variable domain of TCR clone 106043 (TRAV3, TRAJ37)
CAVRGKGSGNTGKLIF

SEQ ID NO: 212086 - protein, 13 aa, Homo sapiens
  CDR3 for beta chain variable domain of TCR clone 106043 (TRBV4-2, TRBJ1-1)
CASSQAGNTEASF

SEQ ID NO: 212087 - protein, 13 aa, Homo sapiens
  CDR3 for alpha chain variable domain of TCR clone 106044 (TRAV8-1, TRAJ27)
CAVSPRNAGKSTF

SEQ ID NO: 212088 - protein, 17 aa, Homo sapiens
  CDR3 for beta chain variable domain of TCR clone 106044 (TRBV19, TRBJ2-3)
CASSIDPAGGGTDTQYF

SEQ ID NO: 212089 - protein, 18 aa, Homo sapiens
  CDR3 for alpha chain variable domain of TCR clone 106045 (TRAV13-1, TRAJ52)
CAAKNPNAGGTSYGKLTF

SEQ ID NO: 212090 - protein, 13 aa, Homo sapiens
  CDR3 for beta chain variable domain of TCR clone 106045 (TRBV7-7, TRBJ2-3)
CASSLSRADTQYF

SEQ ID NO: 212091 - protein, 12 aa, Homo sapiens
  CDR3 for alpha chain variable domain of TCR clone 106046 (TRAV12-1, TRAJ40)
CVFYSGTYKYIF

SEQ ID NO: 212092 - protein, 12 aa, Homo sapiens
  CDR3 for beta chain variable domain of TCR clone 106046 (TRBV7-3, TRBJ2-1)
CASSFINNEQFL

SEQ ID NO: 212093 - protein, 14 aa, Homo sapiens
  CDR3 for alpha chain variable domain of TCR clone 106047 (TRAV12-2, TRAJ40)
CAVKIPSGTYKYIF

SEQ ID NO: 212094 - protein, 15 aa, Homo sapiens
  CDR3 for beta chain variable domain of TCR clone 106047 (TRBV5-1, TRBJ2-5)
CASSFGGPPQETQYF

SEQ ID NO: 212095 - protein, 16 aa, Homo sapiens
  CDR3 for alpha chain variable domain of TCR clone 106048 (TRAV3, TRAJ37)
CAVRPHGSGNTGKLIF

SEQ ID NO: 212096 - protein, 16 aa, Homo sapiens
  CDR3 for beta chain variable domain of TCR clone 106048 (TRBV19, TRBJ2-1)
CASSSKGTRSYNEQFF

SEQ ID NO: 212097 - protein, 18 aa, Homo sapiens
  CDR3 for alpha chain variable domain of TCR clone 106049 (TRAV21, TRAJ52)
CAVRPSPAGGTGYGKLTF

SEQ ID NO: 212098 - protein, 16 aa, Homo sapiens
  CDR3 for beta chain variable domain of TCR clone 106049 (TRBV7-3, TRBJ2-1)
CASSLEGYRSYNEQFF

SEQ ID NO: 212099 - protein, 14 aa, Homo sapiens
  CDR3 for alpha chain variable domain of TCR clone 106050 (TRAV8-3, TRAJ36)
CAVGPITGANNLFF

SEQ ID NO: 212100 - protein, 16 aa, Homo sapiens
  CDR3 for beta chain variable domain of TCR clone 106050 (TRBV4-1, TRBJ1-2)
CASSQDAGQVLYGYTF

SEQ ID NO: 212101 - protein, 16 aa, Homo sapiens
  CDR3 for alpha chain variable domain of TCR clone 106051 (TRAV41, TRAJ53)
CAVRFGSGGSNYKLTF

SEQ ID NO: 212102 - protein, 12 aa, Homo sapiens
  CDR3 for beta chain variable domain of TCR clone 106051 (TRBV12-4, TRBJ2-7)
CASSLGGYEQYF

SEQ ID NO: 212103 - protein, 17 aa, Homo sapiens
  CDR3 for alpha chain variable domain of TCR clone 106052 (TRAV3, TRAJ42)
CAVRDRDYGGSQGNLIF

SEQ ID NO: 212104 - protein, 14 aa, Homo sapiens
  CDR3 for beta chain variable domain of TCR clone 106052 (TRBV19, TRBJ2-2)
CASSTLHRSGELFF

SEQ ID NO: 212105 - protein, 15 aa, Homo sapiens
  CDR3 for alpha chain variable domain of TCR clone 106053 (TRAV3, TRAJ22)
CAVRDRGGSARPLTF

SEQ ID NO: 212106 - protein, 15 aa, Homo sapiens
  CDR3 for beta chain variable domain of TCR clone 106053 (TRBV27, TRBJ1-4)
CASSAQQDLNEKLFF

SEQ ID NO: 212107 - protein, 16 aa, Homo sapiens
  CDR3 for alpha chain variable domain of TCR clone 106054 (TRAV3, TRAJ18)
CAVRDGRGSTLRRLYF

SEQ ID NO: 212108 - protein, 15 aa, Homo sapiens
  CDR3 for beta chain variable domain of TCR clone 106054 (TRBV7-9, TRBJ1-6)
CASSSPGRGNSPLHF

SEQ ID NO: 212109 - protein, 15 aa, Homo sapiens
  CDR3 for alpha chain variable domain of TCR clone 106055 (TRAV26-1, TRAJ3)
CIVRSGYSSASKIIF

SEQ ID NO: 212110 - protein, 16 aa, Homo sapiens
  CDR3 for beta chain variable domain of TCR clone 106055 (TRBV12-5, TRBJ2-5)
CASGPRTSGNQETQYF

SEQ ID NO: 212111 - protein, 17 aa, Homo sapiens
  CDR3 for alpha chain variable domain of TCR clone 106056 (TRAV26-1, TRAJ53)
CIVRVDDSGGSNYKLTF

SEQ ID NO: 212112 - protein, 15 aa, Homo sapiens
  CDR3 for beta chain variable domain of TCR clone 106056 (TRBV20-1, TRBJ2-7)
CSAESGTSGAYEQYF

SEQ ID NO: 212113 - protein, 15 aa, Homo sapiens
  CDR3 for alpha chain variable domain of TCR clone 106057 (TRAV26-1, TRAJ29)
CIVRVEGSGNTPLVF

SEQ ID NO: 212114 - protein, 17 aa, Homo sapiens
  CDR3 for beta chain variable domain of TCR clone 106057 (TRBV20-1, TRBJ2-1)
CSARDPLAGVWDNEQFF

SEQ ID NO: 212115 - protein, 13 aa, Homo sapiens
  CDR3 for alpha chain variable domain of TCR clone 106058 (TRAV26-1, TRAJ48)
CIVRVVGDEKLTF

SEQ ID NO: 212116 - protein, 16 aa, Homo sapiens
  CDR3 for beta chain variable domain of TCR clone 106058 (TRBV11-2, TRBJ1-2)
CASSLDTGGADYGYTF

SEQ ID NO: 212117 - protein, 11 aa, Homo sapiens
  CDR3 for alpha chain variable domain of TCR clone 106059 (TRAV12-3, TRAJ43)
CAMSVSNDMRF

SEQ ID NO: 212118 - protein, 13 aa, Homo sapiens
  CDR3 for beta chain variable domain of TCR clone 106059 (TRBV20-1, TRBJ1-1)
CSATLGEGTEAFF

SEQ ID NO: 212119 - protein, 14 aa, Homo sapiens
  CDR3 for alpha chain variable domain of TCR clone 106060 (TRAV8-4, TRAJ27)
CAVSKGTNAGKSTF

SEQ ID NO: 212120 - protein, 14 aa, Homo sapiens
  CDR3 for beta chain variable domain of TCR clone 106060 (TRBV19, TRBJ2-1)
CASPTFVLSGEQFF

SEQ ID NO: 212121 - protein, 11 aa, Homo sapiens
  CDR3 for alpha chain variable domain of TCR clone 106061 (TRAV12-1, TRAJ8)
CVVTGFQKLVF

SEQ ID NO: 212122 - protein, 14 aa, Homo sapiens
  CDR3 for beta chain variable domain of TCR clone 106061 (TRBV6-1, TRBJ1-3)
CASVQGGGGNTIYF

SEQ ID NO: 212123 - protein, 12 aa, Homo sapiens
  CDR3 for alpha chain variable domain of TCR clone 106062 (TRAV29/DV5, TRAJ41)
CAASASGYALNF

SEQ ID NO: 212124 - protein, 15 aa, Homo sapiens
  CDR3 for beta chain variable domain of TCR clone 106062 (TRBV11-3, TRBJ2-3)
CASLKDGREGDTQYF

SEQ ID NO: 212125 - protein, 16 aa, Homo sapiens
  CDR3 for alpha chain variable domain of TCR clone 106063 (TRAV30, TRAJ24)
CGTEIVDADSRGKFQF

SEQ ID NO: 212126 - protein, 13 aa, Homo sapiens
  CDR3 for beta chain variable domain of TCR clone 106063 (TRBV4-1, TRBJ2-2)
CASSQENTGELFF

SEQ ID NO: 212127 - protein, 14 aa, Homo sapiens
  CDR3 for alpha chain variable domain of TCR clone 106064 (TRAV12-3, TRAJ10)
SHLPLTGGGNKLTF

SEQ ID NO: 212128 - protein, 15 aa, Homo sapiens
  CDR3 for beta chain variable domain of TCR clone 106064 (TRBV10-2, TRBJ2-6)
CASSGQGTGANVLTF

SEQ ID NO: 212129 - protein, 15 aa, Homo sapiens
  CDR3 for alpha chain variable domain of TCR clone 106065 (TRAV21, TRAJ24)
CAARSPTDSWGKLQF

SEQ ID NO: 212130 - protein, 11 aa, Homo sapiens
  CDR3 for beta chain variable domain of TCR clone 106065 (TRBV11-3, TRBJ2-2)
CASSLPGELFF

SEQ ID NO: 212131 - protein, 12 aa, Homo sapiens
  CDR3 for alpha chain variable domain of TCR clone 106066 (TRAV2, TRAJ24)
CAATDSWGKFQF

SEQ ID NO: 212132 - protein, 14 aa, Homo sapiens
  CDR3 for beta chain variable domain of TCR clone 106066 (TRBV11-2, TRBJ2-3)
CASSRLARTDTQYF

SEQ ID NO: 212133 - protein, 16 aa, Homo sapiens
  CDR3 for alpha chain variable domain of TCR clone 106067 (TRAV3, TRAJ42)
CAVRDIEGGSQGNLIF

SEQ ID NO: 212134 - protein, 13 aa, Homo sapiens
  CDR3 for beta chain variable domain of TCR clone 106067 (TRBV19, TRBJ1-2)
CASSQGQVYGYTF

SEQ ID NO: 212135 - protein, 14 aa, Homo sapiens
  CDR3 for alpha chain variable domain of TCR clone 106068 (TRAV12-3, TRAJ56)
CAMSVTGANSKLTF

SEQ ID NO: 212136 - protein, 17 aa, Homo sapiens
  CDR3 for beta chain variable domain of TCR clone 106068 (TRBV20-1, TRBJ2-3)
CSASLLGRGGSAGTQYF

SEQ ID NO: 212137 - protein, 12 aa, Homo sapiens
  CDR3 for alpha chain variable domain of TCR clone 106069 (TRAV23/DV6, TRAJ30)
CAASKGDDKIIF

SEQ ID NO: 212138 - protein, 14 aa, Homo sapiens
  CDR3 for beta chain variable domain of TCR clone 106069 (TRBV13, TRBJ2-5)
CASSLGPRGETQYF

SEQ ID NO: 212139 - protein, 14 aa, Homo sapiens
  CDR3 for alpha chain variable domain of TCR clone 106070 (TRAV12-3, TRAJ10)
SHLPLTGGGNKLTF

SEQ ID NO: 212140 - protein, 13 aa, Homo sapiens
  CDR3 for beta chain variable domain of TCR clone 106070 (TRBV7-6, TRBJ2-3)
CASSLAAGDTQYF

SEQ ID NO: 212141 - protein, 14 aa, Homo sapiens
  CDR3 for alpha chain variable domain of TCR clone 106071 (TRAV3, TRAJ36)
CAVRDGTGANNLLF

SEQ ID NO: 212142 - protein, 16 aa, Homo sapiens
  CDR3 for beta chain variable domain of TCR clone 106071 (TRBV20-1, TRBJ2-6)
CSAREGPGVGANVLTF

SEQ ID NO: 212143 - protein, 17 aa, Homo sapiens
  CDR3 for alpha chain variable domain of TCR clone 106072 (TRAV20, TRAJ28)
CAVQGGYSGAGSYQLPF

SEQ ID NO: 212144 - protein, 15 aa, Homo sapiens
  CDR3 for beta chain variable domain of TCR clone 106072 (TRBV7-2, TRBJ2-7)
CASSLSSGRTYEQYF

SEQ ID NO: 212145 - protein, 14 aa, Homo sapiens
  CDR3 for alpha chain variable domain of TCR clone 106073 (TRAV12-2, TRAJ13)
CAVKKTGGYQKVTF

SEQ ID NO: 212146 - protein, 14 aa, Homo sapiens
  CDR3 for beta chain variable domain of TCR clone 106073 (TRBV19, TRBJ2-1)
CASGRAGPGNEQFF

SEQ ID NO: 212147 - protein, 14 aa, Homo sapiens
  CDR3 for alpha chain variable domain of TCR clone 106074 (TRAV12-2, TRAJ17)
CAVLFKAAGNKLTF

SEQ ID NO: 212148 - protein, 14 aa, Homo sapiens
  CDR3 for beta chain variable domain of TCR clone 106074 (TRBV7-3, TRBJ1-1)
CASSLKGGNTEASF

SEQ ID NO: 212149 - protein, 14 aa, Homo sapiens
  CDR3 for alpha chain variable domain of TCR clone 106075 (TRAV8-1, TRAJ5)
CAVRTDTGRRALTF

SEQ ID NO: 212150 - protein, 13 aa, Homo sapiens
  CDR3 for beta chain variable domain of TCR clone 106075 (TRBV3-1, TRBJ1-1)
CASSPGVITEAFF

SEQ ID NO: 212151 - protein, 14 aa, Homo sapiens
  CDR3 for alpha chain variable domain of TCR clone 106076 (TRAV8-6, TRAJ52)
CAVIGGTSYGKLTF

SEQ ID NO: 212152 - protein, 12 aa, Homo sapiens
  CDR3 for beta chain variable domain of TCR clone 106076 (TRBV5-1, TRBJ2-7)
CASSFRGYEQYF

SEQ ID NO: 212153 - protein, 14 aa, Homo sapiens
  CDR3 for alpha chain variable domain of TCR clone 106077 (TRAV14/DV4, TRAJ42)
CPRGSLRSQGNLIF

SEQ ID NO: 212154 - protein, 12 aa, Homo sapiens
  CDR3 for beta chain variable domain of TCR clone 106077 (TRBV11-2, TRBJ2-2)
CASSLGGGELFF

SEQ ID NO: 212155 - protein, 14 aa, Homo sapiens
  CDR3 for alpha chain variable domain of TCR clone 106078 (TRAV26-1, TRAJ39)
CIVRGSRAGNMLTF

SEQ ID NO: 212156 - protein, 15 aa, Homo sapiens
  CDR3 for beta chain variable domain of TCR clone 106078 (TRBV7-9, TRBJ1-5)
CASSQGDQPNQPQHF

SEQ ID NO: 212157 - protein, 16 aa, Homo sapiens
  CDR3 for alpha chain variable domain of TCR clone 106079 (TRAV35, TRAJ28)
CAGQRYSVAGSYQLTF

SEQ ID NO: 212158 - protein, 13 aa, Homo sapiens
  CDR3 for beta chain variable domain of TCR clone 106079 (TRBV19, TRBJ1-2)
CASSQGQVYGYTF

SEQ ID NO: 212159 - protein, 10 aa, Homo sapiens
  CDR3 for alpha chain variable domain of TCR clone 106080 (TRAV1-2, TRAJ31)
CAFFDARLMF

SEQ ID NO: 212160 - protein, 12 aa, Homo sapiens
  CDR3 for beta chain variable domain of TCR clone 106080 (TRBV3-1, TRBJ2-1)
CASSQAYNEQFF

SEQ ID NO: 212161 - protein, 15 aa, Homo sapiens
  CDR3 for alpha chain variable domain of TCR clone 106081 (TRAV20, TRAJ6)
CAVRLQSGGSYIPTF

SEQ ID NO: 212162 - protein, 14 aa, Homo sapiens
  CDR3 for beta chain variable domain of TCR clone 106081 (TRBV12-4, TRBJ2-7)
CACSASGGWYEQYF

SEQ ID NO: 212163 - protein, 13 aa, Homo sapiens
  CDR3 for alpha chain variable domain of TCR clone 106082 (TRAV3, TRAJ20)
CCEAFCNDYKLSF

SEQ ID NO: 212164 - protein, 18 aa, Homo sapiens
  CDR3 for beta chain variable domain of TCR clone 106082 (TRBV3-1, TRBJ1-2)
CASSQDVIGWNGDYGYTF

SEQ ID NO: 212165 - protein, 15 aa, Homo sapiens
  CDR3 for alpha chain variable domain of TCR clone 106083 (TRAV21, TRAJ53)
CATLNSGGSNYKLTF

SEQ ID NO: 212166 - protein, 16 aa, Homo sapiens
  CDR3 for beta chain variable domain of TCR clone 106083 (TRBV9, TRBJ2-1)
CASSVGGGGNYNEQFF

SEQ ID NO: 212167 - protein, 13 aa, Homo sapiens
  CDR3 for alpha chain variable domain of TCR clone 106084 (TRAV26-1, TRAJ29)
CIVRRSGNTPLVF

SEQ ID NO: 212168 - protein, 16 aa, Homo sapiens
  CDR3 for beta chain variable domain of TCR clone 106084 (TRBV11-2, TRBJ2-7)
CASSFAPTGVNYEQYF

SEQ ID NO: 212169 - protein, 11 aa, Homo sapiens
  CDR3 for alpha chain variable domain of TCR clone 106085 (TRAV12-2, TRAJ43)
CAVKKLRDMRF

SEQ ID NO: 212170 - protein, 19 aa, Homo sapiens
  CDR3 for beta chain variable domain of TCR clone 106085 (TRBV15, TRBJ1-4)
CATSRYGTGDPNEKLFLAV

SEQ ID NO: 212171 - protein, 15 aa, Homo sapiens
  CDR3 for alpha chain variable domain of TCR clone 106086 (TRAV8-4, TRAJ48)
CAVSAAYFGNEKLTF

SEQ ID NO: 212172 - protein, 12 aa, Homo sapiens
  CDR3 for beta chain variable domain of TCR clone 106086 (TRBV3-1, TRBJ2-5)
CASSQRGGTQYF

SEQ ID NO: 212173 - protein, 15 aa, Homo sapiens
  CDR3 for alpha chain variable domain of TCR clone 106087 (TRAV27, TRAJ50)
CAGRERGTSYDKVIF

SEQ ID NO: 212174 - protein, 16 aa, Homo sapiens
  CDR3 for beta chain variable domain of TCR clone 106087 (TRBV10-3, TRBJ1-5)
CAISDQVGAPNHPQHF

SEQ ID NO: 212175 - protein, 14 aa, Homo sapiens
  CDR3 for alpha chain variable domain of TCR clone 106088 (TRAV1-2, TRAJ17)
CAVGLGAAGNKLTF

SEQ ID NO: 212176 - protein, 18 aa, Homo sapiens
  CDR3 for beta chain variable domain of TCR clone 106088 (TRBV7-9, TRBJ2-7)
CASSLTTSGSRTWYEQYF

SEQ ID NO: 212177 - protein, 12 aa, Homo sapiens
  CDR3 for alpha chain variable domain of TCR clone 106089 (TRAV12-3, TRAJ17)
CAMTLTGNKLTF

SEQ ID NO: 212178 - protein, 14 aa, Homo sapiens
  CDR3 for beta chain variable domain of TCR clone 106089 (TRBV4-3, TRBJ2-1)
CASSQDRWRGEQFF

SEQ ID NO: 212179 - protein, 15 aa, Homo sapiens
  CDR3 for alpha chain variable domain of TCR clone 106090 (TRAV20, TRAJ50)
CAVRQMKTSYDKLIF

SEQ ID NO: 212180 - protein, 17 aa, Homo sapiens
  CDR3 for beta chain variable domain of TCR clone 106090 (TRBV28, TRBJ2-7)
CASSPLHRASGVYEQYF

SEQ ID NO: 212181 - protein, 12 aa, Homo sapiens
  CDR3 for alpha chain variable domain of TCR clone 106091 (TRAV29/DV5, TRAJ15)
CASNQAGTALIF

SEQ ID NO: 212182 - protein, 15 aa, Homo sapiens
  CDR3 for beta chain variable domain of TCR clone 106091 (TRBV7-9, TRBJ1-6)
CASSSPGRGNSPLHF

SEQ ID NO: 212183 - protein, 11 aa, Homo sapiens
  CDR3 for alpha chain variable domain of TCR clone 106092 (TRAV2, TRAJ33)
CAVDSNYQLIW

SEQ ID NO: 212184 - protein, 11 aa, Homo sapiens
  CDR3 for beta chain variable domain of TCR clone 106092 (TRBV11-2, TRBJ1-1)
CASSINTEAFF

SEQ ID NO: 212185 - protein, 12 aa, Homo sapiens
  CDR3 for alpha chain variable domain of TCR clone 106093 (TRAV2, TRAJ9)
CAVGAGGFKTIF

SEQ ID NO: 212186 - protein, 19 aa, Homo sapiens
  CDR3 for beta chain variable domain of TCR clone 106093 (TRBV7-9, TRBJ2-6)
CASSLESAIVLPGANVLTF

SEQ ID NO: 212187 - protein, 16 aa, Homo sapiens
  CDR3 for alpha chain variable domain of TCR clone 106094 (TRAV3, TRAJ23)
CAVKIGIYNQGGKLIF

SEQ ID NO: 212188 - protein, 18 aa, Homo sapiens
  CDR3 for beta chain variable domain of TCR clone 106094 (TRBV5-1, TRBJ1-6)
CASSPGQTRIPYNSPLHF

SEQ ID NO: 212189 - protein, 15 aa, Homo sapiens
  CDR3 for alpha chain variable domain of TCR clone 106095 (TRAV25, TRAJ10)
CAGPLLTGGGNKLTF

SEQ ID NO: 212190 - protein, 14 aa, Homo sapiens
  CDR3 for beta chain variable domain of TCR clone 106095 (TRBV13, TRBJ2-5)
CASYRRLAEETQYF

SEQ ID NO: 212191 - protein, 15 aa, Homo sapiens
  CDR3 for alpha chain variable domain of TCR clone 106096 (TRAV26-2, TRAJ26)
CILRDFDNYGQNSVF

SEQ ID NO: 212192 - protein, 14 aa, Homo sapiens
  CDR3 for beta chain variable domain of TCR clone 106096 (TRBV29-1, TRBJ2-5)
CSFWTPYAGETQYF

SEQ ID NO: 212193 - protein, 17 aa, Homo sapiens
  CDR3 for alpha chain variable domain of TCR clone 106097 (TRAV3, TRAJ12)
CAVRDGGRVDSSYKLIF

SEQ ID NO: 212194 - protein, 17 aa, Homo sapiens
  CDR3 for beta chain variable domain of TCR clone 106097 (TRBV4-2, TRBJ1-1)
CASTQFGGGSGNTEAFF

SEQ ID NO: 212195 - protein, 16 aa, Homo sapiens
  CDR3 for alpha chain variable domain of TCR clone 106098 (TRAV30, TRAJ24)
CGTEIVDADSWGKFQF

SEQ ID NO: 212196 - protein, 13 aa, Homo sapiens
  CDR3 for beta chain variable domain of TCR clone 106098 (TRBV4-1, TRBJ2-1)
CASSQEVQYEQFF

SEQ ID NO: 212197 - protein, 17 aa, Homo sapiens
  CDR3 for alpha chain variable domain of TCR clone 106099 (TRAV3, TRAJ6)
CAVRDGPRAGGSYVPTF

SEQ ID NO: 212198 - protein, 12 aa, Homo sapiens
  CDR3 for beta chain variable domain of TCR clone 106099 (TRBV11-2, TRBJ2-2)
CASSLGGGELFF

SEQ ID NO: 212199 - protein, 11 aa, Homo sapiens
  CDR3 for alpha chain variable domain of TCR clone 106100 (TRAV8-4, TRAJ34)
WAVSWTDKLIF

SEQ ID NO: 212200 - protein, 14 aa, Homo sapiens
  CDR3 for beta chain variable domain of TCR clone 106100 (TRBV7-9, TRBJ2-3)
CASSLEDGTDTQYF

SEQ ID NO: 212201 - protein, 15 aa, Homo sapiens
  CDR3 for alpha chain variable domain of TCR clone 106101 (TRAV8-3, TRAJ27)
CAVGPSKTNAGESTF

SEQ ID NO: 212202 - protein, 15 aa, Homo sapiens
  CDR3 for beta chain variable domain of TCR clone 106101 (TRBV7-2, TRBJ2-1)
CASNSGLAGGNEQFF

SEQ ID NO: 212203 - protein, 14 aa, Homo sapiens
  CDR3 for alpha chain variable domain of TCR clone 106102 (TRAV2, TRAJ9)
CAVEDRSGGFKTIF

SEQ ID NO: 212204 - protein, 14 aa, Homo sapiens
  CDR3 for beta chain variable domain of TCR clone 106102 (TRBV11-2, TRBJ2-3)
CASSLGGGANTQYF

SEQ ID NO: 212205 - protein, 12 aa, Homo sapiens
  CDR3 for alpha chain variable domain of TCR clone 106103 (TRAV12-3, TRAJ40)
CAMSSGTYKYIF

SEQ ID NO: 212206 - protein, 15 aa, Homo sapiens
  CDR3 for beta chain variable domain of TCR clone 106103 (TRBV7-3, TRBJ2-2)
CASSETRQGTGELFF

SEQ ID NO: 212207 - protein, 15 aa, Homo sapiens
  CDR3 for alpha chain variable domain of TCR clone 106104 (TRAV12-1, TRAJ5)
CVVNMLETGRRALTF

SEQ ID NO: 212208 - protein, 15 aa, Homo sapiens
  CDR3 for beta chain variable domain of TCR clone 106104 (TRBV27, TRBJ1-6)
CASSFDRGLGSPLHF

SEQ ID NO: 212209 - protein, 14 aa, Homo sapiens
  CDR3 for alpha chain variable domain of TCR clone 106105 (TRAV1-2, TRAJ16)
CSVNRFSDGQKLLF

SEQ ID NO: 212210 - protein, 16 aa, Homo sapiens
  CDR3 for beta chain variable domain of TCR clone 106105 (TRBV12-4, TRBJ1-5)
CASSRPVGGSNQPQHF

SEQ ID NO: 212211 - protein, 13 aa, Homo sapiens
  CDR3 for alpha chain variable domain of TCR clone 106106 (TRAV12-1, TRAJ40)
CVVPTSGTYKYIF

SEQ ID NO: 212212 - protein, 16 aa, Homo sapiens
  CDR3 for beta chain variable domain of TCR clone 106106 (TRBV7-9, TRBJ1-2)
CASSLGFSSGEDGDTF

SEQ ID NO: 212213 - protein, 15 aa, Homo sapiens
  CDR3 for alpha chain variable domain of TCR clone 106107 (TRAV26-2, TRAJ26)
CILRDFDNYGQNFFF

SEQ ID NO: 212214 - protein, 14 aa, Homo sapiens
  CDR3 for beta chain variable domain of TCR clone 106107 (TRBV29-1, TRBJ2-5)
CSFWTPYAGETQYF

SEQ ID NO: 212215 - protein, 12 aa, Homo sapiens
  CDR3 for alpha chain variable domain of TCR clone 106108 (TRAV13-1, TRAJ21)
CAAKEGFNKFYF

SEQ ID NO: 212216 - protein, 17 aa, Homo sapiens
  CDR3 for beta chain variable domain of TCR clone 106108 (TRBV20-1, TRBJ2-1)
CSASSSGLAGAYNEQFF

SEQ ID NO: 212217 - protein, 15 aa, Homo sapiens
  CDR3 for alpha chain variable domain of TCR clone 106109 (TRAV8-2, TRAJ24)
CVVSDRTDSWGKWQF

SEQ ID NO: 212218 - protein, 11 aa, Homo sapiens
  CDR3 for beta chain variable domain of TCR clone 106109 (TRBV20-1, TRBJ1-2)
CSVQGAGGYTF

SEQ ID NO: 212219 - protein, 13 aa, Homo sapiens
  CDR3 for alpha chain variable domain of TCR clone 106110 (TRAV2, TRAJ29)
CAAGNSGNTPLVF

SEQ ID NO: 212220 - protein, 14 aa, Homo sapiens
  CDR3 for beta chain variable domain of TCR clone 106110 (TRBV6-1, TRBJ1-3)
CASVQGGGGNTIYF

SEQ ID NO: 212221 - protein, 11 aa, Homo sapiens
  CDR3 for alpha chain variable domain of TCR clone 106111 (TRAV12-1, TRAJ30)
CVVNGQDKIIF

SEQ ID NO: 212222 - protein, 13 aa, Homo sapiens
  CDR3 for beta chain variable domain of TCR clone 106111 (TRBV5-4, TRBJ1-1)
CASSFQVNTEAFF

SEQ ID NO: 212223 - protein, 13 aa, Homo sapiens
  CDR3 for alpha chain variable domain of TCR clone 106112 (TRAV17, TRAJ5)
CAPMDTGRRALTF

SEQ ID NO: 212224 - protein, 12 aa, Homo sapiens
  CDR3 for beta chain variable domain of TCR clone 106112 (TRBV11-2, TRBJ2-2)
CASSLPTGELFF

SEQ ID NO: 212225 - protein, 11 aa, Homo sapiens
  CDR3 for alpha chain variable domain of TCR clone 106113 (TRAV12-3, TRAJ41)
CAMNAREALNF

SEQ ID NO: 212226 - protein, 16 aa, Homo sapiens
  CDR3 for beta chain variable domain of TCR clone 106113 (TRBV7-8, TRBJ2-3)
CASSTEGQRETDTQYV

SEQ ID NO: 212227 - protein, 13 aa, Homo sapiens
  CDR3 for alpha chain variable domain of TCR clone 106114 (TRAV35, TRAJ48)
CAGHEFGNEKLTF

SEQ ID NO: 212228 - protein, 14 aa, Homo sapiens
  CDR3 for beta chain variable domain of TCR clone 106114 (TRBV19, TRBJ2-1)
CDSPTFVLSGEQFF

SEQ ID NO: 212229 - protein, 12 aa, Homo sapiens
  CDR3 for alpha chain variable domain of TCR clone 106115 (TRAV38-1, TRAJ47)
CAFETYGNKLVF

SEQ ID NO: 212230 - protein, 15 aa, Homo sapiens
  CDR3 for beta chain variable domain of TCR clone 106115 (TRBV5-1, TRBJ2-7)
CASSLNGGPAREQYF

SEQ ID NO: 212231 - protein, 16 aa, Homo sapiens
  CDR3 for alpha chain variable domain of TCR clone 106116 (TRAV2, TRAJ4)
CAVEDRFSGGYNKLIF

SEQ ID NO: 212232 - protein, 14 aa, Homo sapiens
  CDR3 for beta chain variable domain of TCR clone 106116 (TRBV7-2, TRBJ2-5)
CASSPRGSSETQYF

SEQ ID NO: 212233 - protein, 13 aa, Homo sapiens
  CDR3 for alpha chain variable domain of TCR clone 106117 (TRAV12-3, TRAJ30)
CAMCAKWDDKIIF

SEQ ID NO: 212234 - protein, 14 aa, Homo sapiens
  CDR3 for beta chain variable domain of TCR clone 106117 (TRBV7-2, TRBJ2-7)
CASRSQGAAYEQYF

SEQ ID NO: 212235 - protein, 14 aa, Homo sapiens
  CDR3 for alpha chain variable domain of TCR clone 106118 (TRAV4, TRAJ26)
CLVGPQNYGQNFVF

SEQ ID NO: 212236 - protein, 17 aa, Homo sapiens
  CDR3 for beta chain variable domain of TCR clone 106118 (TRBV24-1, TRBJ2-1)
CATSDVSTSGTYNEQFF

SEQ ID NO: 212237 - protein, 13 aa, Homo sapiens
  CDR3 for alpha chain variable domain of TCR clone 106119 (TRAV12-3, TRAJ13)
CAMGTGGYQKVTF

SEQ ID NO: 212238 - protein, 15 aa, Homo sapiens
  CDR3 for beta chain variable domain of TCR clone 106119 (TRBV3-1, TRBJ1-3)
CASSVRERAGNTIYF

SEQ ID NO: 212239 - protein, 15 aa, Homo sapiens
  CDR3 for alpha chain variable domain of TCR clone 106120 (TRAV25, TRAJ53)
CPTSNSGGSNYKLTF

SEQ ID NO: 212240 - protein, 13 aa, Homo sapiens
  CDR3 for beta chain variable domain of TCR clone 106120 (TRBV19, TRBJ2-7)
CASSPRQSYEQYF

SEQ ID NO: 212241 - protein, 13 aa, Homo sapiens
  CDR3 for alpha chain variable domain of TCR clone 106121 (TRAV8-1, TRAJ39)
CAGLNNAGNMLTF

SEQ ID NO: 212242 - protein, 15 aa, Homo sapiens
  CDR3 for beta chain variable domain of TCR clone 106121 (TRBV19, TRBJ1-2)
CASSVGQVLNYGYTF

SEQ ID NO: 212243 - protein, 12 aa, Homo sapiens
  CDR3 for alpha chain variable domain of TCR clone 106122 (TRAV27, TRAJ20)
CAGTFNDYKLSF

SEQ ID NO: 212244 - protein, 14 aa, Homo sapiens
  CDR3 for beta chain variable domain of TCR clone 106122 (TRBV7-2, TRBJ1-1)
CASSFLTGTTEAFF

SEQ ID NO: 212245 - protein, 14 aa, Homo sapiens
  CDR3 for alpha chain variable domain of TCR clone 106123 (TRAV29/DV5, TRAJ32)
CAAAYGGATNKLIF

SEQ ID NO: 212246 - protein, 14 aa, Homo sapiens
  CDR3 for beta chain variable domain of TCR clone 106123 (TRBV4-2, TRBJ2-1)
CASGLGRAYNEQFF

SEQ ID NO: 212247 - protein, 14 aa, Homo sapiens
  CDR3 for alpha chain variable domain of TCR clone 106124 (TRAV12-1, TRAJ17)
CVVNYKAAGNKLTF

SEQ ID NO: 212248 - protein, 17 aa, Homo sapiens
  CDR3 for beta chain variable domain of TCR clone 106124 (TRBV20-1, TRBJ2-1)
CSASSSGLAGSYNEQYF

SEQ ID NO: 212249 - protein, 14 aa, Homo sapiens
  CDR3 for alpha chain variable domain of TCR clone 106125 (TRAV9-2, TRAJ39)
CALYIYNAGNMLTF

SEQ ID NO: 212250 - protein, 12 aa, Homo sapiens
  CDR3 for beta chain variable domain of TCR clone 106125 (TRBV7-8, TRBJ2-7)
CASSLGDREQYF

SEQ ID NO: 212251 - protein, 16 aa, Homo sapiens
  CDR3 for alpha chain variable domain of TCR clone 106126 (TRAV30, TRAJ24)
CGTEIVDADSWGKFQF

SEQ ID NO: 212252 - protein, 15 aa, Homo sapiens
  CDR3 for beta chain variable domain of TCR clone 106126 (TRBV4-3, TRBJ1-4)
CASSQETGSYEKLFF

SEQ ID NO: 212253 - protein, 13 aa, Homo sapiens
  CDR3 for alpha chain variable domain of TCR clone 106127 (TRAV8-3, TRAJ4)
CPAFSGGYNKLIF

SEQ ID NO: 212254 - protein, 13 aa, Homo sapiens
  CDR3 for beta chain variable domain of TCR clone 106127 (TRBV20-1, TRBJ1-3)
CSAGAYSGNTIYF

SEQ ID NO: 212255 - protein, 18 aa, Homo sapiens
  CDR3 for alpha chain variable domain of TCR clone 106128 (TRAV13-1, TRAJ52)
CAASKRSAGGTSYGKLTF

SEQ ID NO: 212256 - protein, 15 aa, Homo sapiens
  CDR3 for beta chain variable domain of TCR clone 106128 (TRBV7-8, TRBJ2-3)
CASSLMSGNTDTQYF

SEQ ID NO: 212257 - protein, 13 aa, Homo sapiens
  CDR3 for alpha chain variable domain of TCR clone 106129 (TRAV8-3, TRAJ40)
CAVDPSGTYKYIF

SEQ ID NO: 212258 - protein, 14 aa, Homo sapiens
  CDR3 for beta chain variable domain of TCR clone 106129 (TRBV7-2, TRBJ2-7)
CASSPKTSFYEQYF

SEQ ID NO: 212259 - protein, 16 aa, Homo sapiens
  CDR3 for alpha chain variable domain of TCR clone 106130 (TRAV3, TRAJ37)
CAVRGKGYGNTGKLIF

SEQ ID NO: 212260 - protein, 15 aa, Homo sapiens
  CDR3 for beta chain variable domain of TCR clone 106130 (TRBV7-3, TRBJ2-2)
CASSETGQGTGELFF

SEQ ID NO: 212261 - protein, 16 aa, Homo sapiens
  CDR3 for alpha chain variable domain of TCR clone 106131 (TRAV30, TRAJ24)
CGTEIVDADSWGKFQF

SEQ ID NO: 212262 - protein, 15 aa, Homo sapiens
  CDR3 for beta chain variable domain of TCR clone 106131 (TRBV20-1, TRBJ2-7)
CSARDRFSGMDEQYF

SEQ ID NO: 212263 - protein, 12 aa, Homo sapiens
  CDR3 for alpha chain variable domain of TCR clone 106132 (TRAV12-3, TRAJ17)
CAMTLTGNKLTF

SEQ ID NO: 212264 - protein, 13 aa, Homo sapiens
  CDR3 for beta chain variable domain of TCR clone 106132 (TRBV12-4, TRBJ2-5)
CASRLAVQETQYF

SEQ ID NO: 212265 - protein, 18 aa, Homo sapiens
  CDR3 for alpha chain variable domain of TCR clone 106133 (TRAV9-2, TRAJ52)
CALSRHNAGGISYGKLTF

SEQ ID NO: 212266 - protein, 13 aa, Homo sapiens
  CDR3 for beta chain variable domain of TCR clone 106133 (TRBV7-9, TRBJ1-2)
CASSLKQNYGYTF

SEQ ID NO: 212267 - protein, 14 aa, Homo sapiens
  CDR3 for alpha chain variable domain of TCR clone 106134 (TRAV12-2, TRAJ40)
CAVKIPSGTYKYIF

SEQ ID NO: 212268 - protein, 17 aa, Homo sapiens
  CDR3 for beta chain variable domain of TCR clone 106134 (TRBV13, TRBJ2-3)
CGSSLSRVAGGRNTQYF

SEQ ID NO: 212269 - protein, 14 aa, Homo sapiens
  CDR3 for alpha chain variable domain of TCR clone 106135 (TRAV17, TRAJ56)
CATVPAGANSKLTF

SEQ ID NO: 212270 - protein, 14 aa, Homo sapiens
  CDR3 for beta chain variable domain of TCR clone 106135 (TRBV11-2, TRBJ2-7)
CASSSTGEGYEQYF

SEQ ID NO: 212271 - protein, 11 aa, Homo sapiens
  CDR3 for alpha chain variable domain of TCR clone 106136 (TRAV2, TRAJ33)
CAVESNYQLIW

SEQ ID NO: 212272 - protein, 19 aa, Homo sapiens
  CDR3 for beta chain variable domain of TCR clone 106136 (TRBV19, TRBJ2-5)
CASSIGQVTDFFLGETQYF

SEQ ID NO: 212273 - protein, 15 aa, Homo sapiens
  CDR3 for alpha chain variable domain of TCR clone 106137 (TRAV17, TRAJ22)
CATVAPSGSARQLTF

SEQ ID NO: 212274 - protein, 16 aa, Homo sapiens
  CDR3 for beta chain variable domain of TCR clone 106137 (TRBV13, TRBJ2-2)
CASSPRTGEHTGELFF

SEQ ID NO: 212275 - protein, 15 aa, Homo sapiens
  CDR3 for alpha chain variable domain of TCR clone 106138 (TRAV12-1, TRAJ45)
CVVLSGGGGADGLTF

SEQ ID NO: 212276 - protein, 14 aa, Homo sapiens
  CDR3 for beta chain variable domain of TCR clone 106138 (TRBV6-1, TRBJ1-3)
CASVQGGGGNTIYF

SEQ ID NO: 212277 - protein, 12 aa, Homo sapiens
  CDR3 for alpha chain variable domain of TCR clone 106139 (TRAV35, TRAJ49)
CAGWNAGNQFYF

SEQ ID NO: 212278 - protein, 15 aa, Homo sapiens
  CDR3 for beta chain variable domain of TCR clone 106139 (TRBV27, TRBJ1-5)
CASSLGTGFDQPQHF

SEQ ID NO: 212279 - protein, 17 aa, Homo sapiens
  CDR3 for alpha chain variable domain of TCR clone 106140 (TRAV3, TRAJ6)
CAVRDGTRAGGNYIPTF

SEQ ID NO: 212280 - protein, 14 aa, Homo sapiens
  CDR3 for beta chain variable domain of TCR clone 106140 (TRBV7-2, TRBJ2-7)
CASSPKTSFYEQYF

SEQ ID NO: 212281 - protein, 11 aa, Homo sapiens
  CDR3 for alpha chain variable domain of TCR clone 106141 (TRAV2, TRAJ13)
CASGGYQKVTF

SEQ ID NO: 212282 - protein, 13 aa, Homo sapiens
  CDR3 for beta chain variable domain of TCR clone 106141 (TRBV29-1, TRBJ1-3)
CSVEGGSGNTIYF

SEQ ID NO: 212283 - protein, 15 aa, Homo sapiens
  CDR3 for alpha chain variable domain of TCR clone 106142 (TRAV8-3, TRAJ15)
CAVGAPNQAGTVLIF

SEQ ID NO: 212284 - protein, 14 aa, Homo sapiens
  CDR3 for beta chain variable domain of TCR clone 106142 (TRBV20-1, TRBJ2-1)
CSPNDEASYNEQFF

SEQ ID NO: 212285 - protein, 17 aa, Homo sapiens
  CDR3 for alpha chain variable domain of TCR clone 106143 (TRAV3, TRAJ6)
CAVRDGPRAGGSYIPTF

SEQ ID NO: 212286 - protein, 14 aa, Homo sapiens
  CDR3 for beta chain variable domain of TCR clone 106143 (TRBV7-9, TRBJ2-2)
CASSLVQDTGELFF

SEQ ID NO: 212287 - protein, 12 aa, Homo sapiens
  CDR3 for alpha chain variable domain of TCR clone 106144 (TRAV20, TRAJ54)
CAVQEGAQKLVF

SEQ ID NO: 212288 - protein, 17 aa, Homo sapiens
  CDR3 for beta chain variable domain of TCR clone 106144 (TRBV13, TRBJ2-3)
CTSSLSRVAGGRNTQYF

SEQ ID NO: 212289 - protein, 12 aa, Homo sapiens
  CDR3 for alpha chain variable domain of TCR clone 106145 (TRAV2, TRAJ47)
CCDREYGNKLVF

SEQ ID NO: 212290 - protein, 17 aa, Homo sapiens
  CDR3 for beta chain variable domain of TCR clone 106145 (TRBV15, TRBJ1-5)
CATSRVKGIYSNQPQHF

SEQ ID NO: 212291 - protein, 12 aa, Homo sapiens
  CDR3 for alpha chain variable domain of TCR clone 106146 (TRAV1-2, TRAJ29)
CAVPSGNTPLVF

SEQ ID NO: 212292 - protein, 12 aa, Homo sapiens
  CDR3 for beta chain variable domain of TCR clone 106146 (TRBV11-2, TRBJ2-2)
CASSLGGGELFF

SEQ ID NO: 212293 - protein, 14 aa, Homo sapiens
  CDR3 for alpha chain variable domain of TCR clone 106147 (TRAV2, TRAJ9)
CAVEDRSGGFKNIF

SEQ ID NO: 212294 - protein, 17 aa, Homo sapiens
  CDR3 for beta chain variable domain of TCR clone 106147 (TRBV7-8, TRBJ2-6)
CASSAGTGGAGANVLTF

SEQ ID NO: 212295 - protein, 14 aa, Homo sapiens
  CDR3 for alpha chain variable domain of TCR clone 106148 (TRAV12-2, TRAJ40)
CAVKIPSGTYKYIF

SEQ ID NO: 212296 - protein, 16 aa, Homo sapiens
  CDR3 for beta chain variable domain of TCR clone 106148 (TRBV4-1, TRBJ2-2)
CASSQESGQATGELFF

SEQ ID NO: 212297 - protein, 14 aa, Homo sapiens
  CDR3 for alpha chain variable domain of TCR clone 106149 (TRAV1-2, TRAJ16)
CAVNRFSDGQKLLF

SEQ ID NO: 212298 - protein, 12 aa, Homo sapiens
  CDR3 for beta chain variable domain of TCR clone 106149 (TRBV4-1, TRBJ2-3)
CASSQGTDTQYF

SEQ ID NO: 212299 - protein, 15 aa, Homo sapiens
  CDR3 for alpha chain variable domain of TCR clone 106150 (TRAV14/DV4, TRAJ33)
CAMREGRDSNYQLIW

SEQ ID NO: 212300 - protein, 16 aa, Homo sapiens
  CDR3 for beta chain variable domain of TCR clone 106150 (TRBV12-5, TRBJ2-5)
CASGPRASGNQETQYF

SEQ ID NO: 212301 - protein, 14 aa, Homo sapiens
  CDR3 for alpha chain variable domain of TCR clone 106151 (TRAV1-2, TRAJ8)
GAVREDTGFQKLVF

SEQ ID NO: 212302 - protein, 15 aa, Homo sapiens
  CDR3 for beta chain variable domain of TCR clone 106151 (TRBV20-1, TRBJ2-7)
CSARDRVSGMDEQYF

SEQ ID NO: 212303 - protein, 13 aa, Homo sapiens
  CDR3 for alpha chain variable domain of TCR clone 106152 (TRAV12-3, TRAJ13)
CAMGTWGYQKVTF

SEQ ID NO: 212304 - protein, 14 aa, Homo sapiens
  CDR3 for beta chain variable domain of TCR clone 106152 (TRBV7-2, TRBJ2-5)
CASSTGGELKTQYF

SEQ ID NO: 212305 - protein, 13 aa, Homo sapiens
  CDR3 for alpha chain variable domain of TCR clone 106153 (TRAV12-2, TRAJ37)
CAGGSGNTGKLIL

SEQ ID NO: 212306 - protein, 17 aa, Homo sapiens
  CDR3 for beta chain variable domain of TCR clone 106153 (TRBV11-2, TRBJ2-1)
CASSLYPPGVEYNEQFF

SEQ ID NO: 212307 - protein, 14 aa, Homo sapiens
  CDR3 for alpha chain variable domain of TCR clone 106154 (TRAV12-1, TRAJ42)
CVVIYGGSQGNLIF

SEQ ID NO: 212308 - protein, 15 aa, Homo sapiens
  CDR3 for beta chain variable domain of TCR clone 106154 (TRBV10-2, TRBJ2-6)
CASSEQGTGANVLTF

SEQ ID NO: 212309 - protein, 11 aa, Homo sapiens
  CDR3 for alpha chain variable domain of TCR clone 106155 (TRAV12-3, TRAJ43)
CAMSVSNDMRF

SEQ ID NO: 212310 - protein, 14 aa, Homo sapiens
  CDR3 for beta chain variable domain of TCR clone 106155 (TRBV4-1, TRBJ2-2)
CASSQAVNTGELFF

SEQ ID NO: 212311 - protein, 16 aa, Homo sapiens
  CDR3 for alpha chain variable domain of TCR clone 106156 (TRAV1-2, TRAJ10)
CAVRGVLTGGGNKLTF

SEQ ID NO: 212312 - protein, 13 aa, Homo sapiens
  CDR3 for beta chain variable domain of TCR clone 106156 (TRBV4-1, TRBJ2-2)
CASSQENTGELFF

SEQ ID NO: 212313 - protein, 14 aa, Homo sapiens
  CDR3 for alpha chain variable domain of TCR clone 106157 (TRAV12-1, TRAJ3)
CVVDPGSSASKIIF

SEQ ID NO: 212314 - protein, 14 aa, Homo sapiens
  CDR3 for beta chain variable domain of TCR clone 106157 (TRBV20-1, TRBJ2-3)
CSARGGTSTDTQYF

SEQ ID NO: 212315 - protein, 13 aa, Homo sapiens
  CDR3 for alpha chain variable domain of TCR clone 106158 (TRAV30, TRAJ6)
CGTEAGGSYIPTF

SEQ ID NO: 212316 - protein, 12 aa, Homo sapiens
  CDR3 for beta chain variable domain of TCR clone 106158 (TRBV11-2, TRBJ2-2)
CASSLGGGELFF

SEQ ID NO: 212317 - protein, 18 aa, Homo sapiens
  CDR3 for alpha chain variable domain of TCR clone 106159 (TRAV21, TRAJ52)
CAVRPSPAGGTSDGKLTF

SEQ ID NO: 212318 - protein, 13 aa, Homo sapiens
  CDR3 for beta chain variable domain of TCR clone 106159 (TRBV7-3, TRBJ1-1)
CASSQDWGAEAFF

SEQ ID NO: 212319 - protein, 18 aa, Homo sapiens
  CDR3 for alpha chain variable domain of TCR clone 106160 (TRAV13-1, TRAJ52)
CAAKNPNAGGTSYGKLTF

SEQ ID NO: 212320 - protein, 14 aa, Homo sapiens
  CDR3 for beta chain variable domain of TCR clone 106160 (TRBV4-2, TRBJ2-1)
CASGLDRAYNEQFF

SEQ ID NO: 212321 - protein, 13 aa, Homo sapiens
  CDR3 for alpha chain variable domain of TCR clone 106161 (TRAV13-1, TRAJ21)
CAASIYNFKKFYF

SEQ ID NO: 212322 - protein, 15 aa, Homo sapiens
  CDR3 for beta chain variable domain of TCR clone 106161 (TRBV7-8, TRBJ1-5)
CASSLAGQPNQPQHF

SEQ ID NO: 212323 - protein, 16 aa, Homo sapiens
  CDR3 for alpha chain variable domain of TCR clone 106162 (TRAV13-1, TRAJ37)
CAASSLGSSNTGKLIF

SEQ ID NO: 212324 - protein, 12 aa, Homo sapiens
  CDR3 for beta chain variable domain of TCR clone 106162 (TRBV6-1, TRBJ2-5)
CARSEGRETQYF

SEQ ID NO: 212325 - protein, 13 aa, Homo sapiens
  CDR3 for alpha chain variable domain of TCR clone 106163 (TRAV35, TRAJ42)
CAGFPGSPGNLIF

SEQ ID NO: 212326 - protein, 14 aa, Homo sapiens
  CDR3 for beta chain variable domain of TCR clone 106163 (TRBV4-1, TRBJ2-2)
CASSQAVNTGELFF

SEQ ID NO: 212327 - protein, 14 aa, Homo sapiens
  CDR3 for alpha chain variable domain of TCR clone 106164 (TRAV1-2, TRAJ16)
CAVNRFSDGQKLLF

SEQ ID NO: 212328 - protein, 16 aa, Homo sapiens
  CDR3 for beta chain variable domain of TCR clone 106164 (TRBV20-1, TRBJ1-4)
CSAPGQGLLANEKLFF

SEQ ID NO: 212329 - protein, 13 aa, Homo sapiens
  CDR3 for alpha chain variable domain of TCR clone 106165 (TRAV12-3, TRAJ33)
CAMSVNSNYQLIW

SEQ ID NO: 212330 - protein, 13 aa, Homo sapiens
  CDR3 for beta chain variable domain of TCR clone 106165 (TRBV7-2, TRBJ2-2)
CASGLAVTGELFF

SEQ ID NO: 212331 - protein, 23 aa, Homo sapiens
  CDR3 for alpha chain variable domain of TCR clone 106166 (TRAV4, TRAJ26)
IPADRKSSTLSLPRVYYGQDFVF

SEQ ID NO: 212332 - protein, 16 aa, Homo sapiens
  CDR3 for beta chain variable domain of TCR clone 106166 (TRBV7-2, TRBJ1-2)
CASSSNQDRRGHGYTF

SEQ ID NO: 212333 - protein, 12 aa, Homo sapiens
  CDR3 for alpha chain variable domain of TCR clone 106167 (TRAV16, TRAJ57)
CALEGGSEKLVF

SEQ ID NO: 212334 - protein, 12 aa, Homo sapiens
  CDR3 for beta chain variable domain of TCR clone 106167 (TRBV28, TRBJ2-7)
CVSSGRPYEQYF

SEQ ID NO: 212335 - protein, 12 aa, Homo sapiens
  CDR3 for alpha chain variable domain of TCR clone 106168 (TRAV2, TRAJ24)
CAATDSWGRFQF

SEQ ID NO: 212336 - protein, 13 aa, Homo sapiens
  CDR3 for beta chain variable domain of TCR clone 106168 (TRBV5-8, TRBJ1-1)
CASSLGGGTEAFF

SEQ ID NO: 212337 - protein, 11 aa, Homo sapiens
  CDR3 for alpha chain variable domain of TCR clone 106169 (TRAV2, TRAJ13)
CASVGYQKVTF

SEQ ID NO: 212338 - protein, 11 aa, Homo sapiens
  CDR3 for beta chain variable domain of TCR clone 106169 (TRBV6-3, TRBJ2-3)
CATGQADTQYF

SEQ ID NO: 212339 - protein, 15 aa, Homo sapiens
  CDR3 for alpha chain variable domain of TCR clone 106170 (TRAV8-3, TRAJ27)
CAVGPSKTNAGKSTF

SEQ ID NO: 212340 - protein, 13 aa, Homo sapiens
  CDR3 for beta chain variable domain of TCR clone 106170 (TRBV12-4, TRBJ1-2)
CASSLRQGKGYTF

SEQ ID NO: 212341 - protein, 14 aa, Homo sapiens
  CDR3 for alpha chain variable domain of TCR clone 106171 (TRAV1-2, TRAJ16)
CAVNRFSDGQKLLF

SEQ ID NO: 212342 - protein, 15 aa, Homo sapiens
  CDR3 for beta chain variable domain of TCR clone 106171 (TRBV7-9, TRBJ1-4)
CASSRTEGFNEKLFF

SEQ ID NO: 212343 - protein, 13 aa, Homo sapiens
  CDR3 for alpha chain variable domain of TCR clone 106172 (TRAV38-1, TRAJ42)
CARWGGSQGNFIF

SEQ ID NO: 212344 - protein, 10 aa, Homo sapiens
  CDR3 for beta chain variable domain of TCR clone 106172 (TRBV2, TRBJ2-5)
CASSAATQYF

SEQ ID NO: 212345 - protein, 16 aa, Homo sapiens
  CDR3 for alpha chain variable domain of TCR clone 106173 (TRAV26-1, TRAJ23)
CIVRVHPYNQGGKLIF

SEQ ID NO: 212346 - protein, 15 aa, Homo sapiens
  CDR3 for beta chain variable domain of TCR clone 106173 (TRBV5-7, TRBJ2-7)
CASSPYFEGPYEQYF

SEQ ID NO: 212347 - protein, 11 aa, Homo sapiens
  CDR3 for alpha chain variable domain of TCR clone 106174 (TRAV1-2, TRAJ20)
CAVANDDKLSF

SEQ ID NO: 212348 - protein, 18 aa, Homo sapiens
  CDR3 for beta chain variable domain of TCR clone 106174 (TRBV20-1, TRBJ2-6)
CSAETTPTHGSGANVLTF

SEQ ID NO: 212349 - protein, 15 aa, Homo sapiens
  CDR3 for alpha chain variable domain of TCR clone 106175 (TRAV23/DV6, TRAJ37)
CAAGEGSSNTGKLNF

SEQ ID NO: 212350 - protein, 17 aa, Homo sapiens
  CDR3 for beta chain variable domain of TCR clone 106175 (TRBV20-1, TRBJ2-7)
CSATRAGGVAGVEEQYF

SEQ ID NO: 212351 - protein, 14 aa, Homo sapiens
  CDR3 for alpha chain variable domain of TCR clone 106176 (TRAV13-1, TRAJ35)
CSASKGGFGNGLHC

SEQ ID NO: 212352 - protein, 13 aa, Homo sapiens
  CDR3 for beta chain variable domain of TCR clone 106176 (TRBV7-3, TRBJ1-1)
CASSQDWGAEAFF

SEQ ID NO: 212353 - protein, 16 aa, Homo sapiens
  CDR3 for alpha chain variable domain of TCR clone 106177 (TRAV30, TRAJ24)
CGTEIVDADSWGKFQF

SEQ ID NO: 212354 - protein, 15 aa, Homo sapiens
  CDR3 for beta chain variable domain of TCR clone 106177 (TRBV20-1, TRBJ2-7)
CSARDRVSGMDEQYC

SEQ ID NO: 212355 - protein, 12 aa, Homo sapiens
  CDR3 for alpha chain variable domain of TCR clone 106178 (TRAV17, TRAJ57)
CATDGGSEKLVF

SEQ ID NO: 212356 - protein, 14 aa, Homo sapiens
  CDR3 for beta chain variable domain of TCR clone 106178 (TRBV11-2, TRBJ1-2)
CASSLGTANYGYTF

SEQ ID NO: 212357 - protein, 16 aa, Homo sapiens
  CDR3 for alpha chain variable domain of TCR clone 106179 (TRAV12-2, TRAJ10)
CAVNRVLTGGGNKLTF

SEQ ID NO: 212358 - protein, 12 aa, Homo sapiens
  CDR3 for beta chain variable domain of TCR clone 106179 (TRBV28, TRBJ2-7)
CASSLSSYEQYL

SEQ ID NO: 212359 - protein, 13 aa, Homo sapiens
  CDR3 for alpha chain variable domain of TCR clone 106180 (TRAV16, TRAJ34)
CALSPYNTDKLIF

SEQ ID NO: 212360 - protein, 15 aa, Homo sapiens
  CDR3 for beta chain variable domain of TCR clone 106180 (TRBV12-4, TRBJ2-5)
CASSPPTGLRETQYF

SEQ ID NO: 212361 - protein, 13 aa, Homo sapiens
  CDR3 for alpha chain variable domain of TCR clone 106181 (TRAV20, TRAJ40)
CAVPFSGTYKYIF

SEQ ID NO: 212362 - protein, 17 aa, Homo sapiens
  CDR3 for beta chain variable domain of TCR clone 106181 (TRBV13, TRBJ2-3)
CASSLSRVAGGRNTQYF

SEQ ID NO: 212363 - protein, 11 aa, Homo sapiens
  CDR3 for alpha chain variable domain of TCR clone 106182 (TRAV2, TRAJ33)
CAVESNYQLIW

SEQ ID NO: 212364 - protein, 16 aa, Homo sapiens
  CDR3 for beta chain variable domain of TCR clone 106182 (TRBV4-1, TRBJ2-3)
CASSQRAGGLTDTQYF

SEQ ID NO: 212365 - protein, 14 aa, Homo sapiens
  CDR3 for alpha chain variable domain of TCR clone 106183 (TRAV8-1, TRAJ24)
CAVNAADSWGKLQF

SEQ ID NO: 212366 - protein, 16 aa, Homo sapiens
  CDR3 for beta chain variable domain of TCR clone 106183 (TRBV4-3, TRBJ2-1)
CASSPAQDRGVNEQFF

SEQ ID NO: 212367 - protein, 15 aa, Homo sapiens
  CDR3 for alpha chain variable domain of TCR clone 106184 (TRAV27, TRAJ38)
CAARRNAGNNRKLIW

SEQ ID NO: 212368 - protein, 16 aa, Homo sapiens
  CDR3 for beta chain variable domain of TCR clone 106184 (TRBV19, TRBJ2-2)
CASSFPGQGLAGELFF

SEQ ID NO: 212369 - protein, 13 aa, Homo sapiens
  CDR3 for alpha chain variable domain of TCR clone 106185 (TRAV25, TRAJ17)
CAGLRAAGNKLTF

SEQ ID NO: 212370 - protein, 12 aa, Homo sapiens
  CDR3 for beta chain variable domain of TCR clone 106185 (TRBV7-9, TRBJ2-7)
CASSIKREEQYF

SEQ ID NO: 212371 - protein, 15 aa, Homo sapiens
  CDR3 for alpha chain variable domain of TCR clone 106186 (TRAV21, TRAJ40)
CAVRPQTSGTYKYIF

SEQ ID NO: 212372 - protein, 15 aa, Homo sapiens
  CDR3 for beta chain variable domain of TCR clone 106186 (TRBV5-1, TRBJ1-1)
CASSSTTGTNTEAFF

SEQ ID NO: 212373 - protein, 14 aa, Homo sapiens
  CDR3 for alpha chain variable domain of TCR clone 106187 (TRAV17, TRAJ4)
CATVPSGGYNKLIF

SEQ ID NO: 212374 - protein, 12 aa, Homo sapiens
  CDR3 for beta chain variable domain of TCR clone 106187 (TRBV7-8, TRBJ2-1)
CASSLGHNEQFF

SEQ ID NO: 212375 - protein, 13 aa, Homo sapiens
  CDR3 for alpha chain variable domain of TCR clone 106188 (TRAV35, TRAJ42)
CAGFPGSQGNLIF

SEQ ID NO: 212376 - protein, 15 aa, Homo sapiens
  CDR3 for beta chain variable domain of TCR clone 106188 (TRBV7-3, TRBJ2-2)
CASSETGQGTGELFF

SEQ ID NO: 212377 - protein, 14 aa, Homo sapiens
  CDR3 for alpha chain variable domain of TCR clone 106189 (TRAV1-2, TRAJ16)
CAVNRFSDGQKLLF

SEQ ID NO: 212378 - protein, 17 aa, Homo sapiens
  CDR3 for beta chain variable domain of TCR clone 106189 (TRBV7-2, TRBJ2-3)
CASSLEARGTSTDTQYF

SEQ ID NO: 212379 - protein, 14 aa, Homo sapiens
  CDR3 for alpha chain variable domain of TCR clone 106190 (TRAV8-2, TRAJ37)
CVVSISGNTGKLIF

SEQ ID NO: 212380 - protein, 13 aa, Homo sapiens
  CDR3 for beta chain variable domain of TCR clone 106190 (TRBV7-8, TRBJ2-7)
RCVRLTEMGEQYF

SEQ ID NO: 212381 - protein, 16 aa, Homo sapiens
  CDR3 for alpha chain variable domain of TCR clone 106191 (TRAV13-1, TRAJ37)
CAASSLCSSNTGKLIF

SEQ ID NO: 212382 - protein, 12 aa, Homo sapiens
  CDR3 for beta chain variable domain of TCR clone 106191 (TRBV6-1, TRBJ2-5)
CASSEGRETQYF

SEQ ID NO: 212383 - protein, 15 aa, Homo sapiens
  CDR3 for alpha chain variable domain of TCR clone 106192 (TRAV3, TRAJ5)
CAVRDLDTGRRALTF

SEQ ID NO: 212384 - protein, 11 aa, Homo sapiens
  CDR3 for beta chain variable domain of TCR clone 106192 (TRBV7-9, TRBJ2-5)
CASSLGETQYF

SEQ ID NO: 212385 - protein, 14 aa, Homo sapiens
  CDR3 for alpha chain variable domain of TCR clone 106193 (TRAV12-1, TRAJ17)
CVVNYKAAGNKLTF

SEQ ID NO: 212386 - protein, 17 aa, Homo sapiens
  CDR3 for beta chain variable domain of TCR clone 106193 (TRBV20-1, TRBJ2-1)
CSASSSGLAGAYDEQFF

SEQ ID NO: 212387 - protein, 16 aa, Homo sapiens
  CDR3 for alpha chain variable domain of TCR clone 106194 (TRAV30, TRAJ24)
CGTEIVDADSWGKFQF

SEQ ID NO: 212388 - protein, 14 aa, Homo sapiens
  CDR3 for beta chain variable domain of TCR clone 106194 (TRBV12-5, TRBJ2-5)
CASGARTDQETQYF

SEQ ID NO: 212389 - protein, 13 aa, Homo sapiens
  CDR3 for alpha chain variable domain of TCR clone 106195 (TRAV27, TRAJ42)
CAGARGSQGNLIF

SEQ ID NO: 212390 - protein, 15 aa, Homo sapiens
  CDR3 for beta chain variable domain of TCR clone 106195 (TRBV24-1, TRBJ2-1)
CATRASGGQYNEQFF

SEQ ID NO: 212391 - protein, 16 aa, Homo sapiens
  CDR3 for alpha chain variable domain of TCR clone 106196 (TRAV3, TRAJ3)
CAVRDRAESSASKIIF

SEQ ID NO: 212392 - protein, 13 aa, Homo sapiens
  CDR3 for beta chain variable domain of TCR clone 106196 (TRBV10-3, TRBJ2-7)
CASKLAVNYEQYF

SEQ ID NO: 212393 - protein, 13 aa, Homo sapiens
  CDR3 for alpha chain variable domain of TCR clone 106197 (TRAV23/DV6, TRAJ47)
CAASMTRGNNLVF

SEQ ID NO: 212394 - protein, 14 aa, Homo sapiens
  CDR3 for beta chain variable domain of TCR clone 106197 (TRBV7-3, TRBJ1-1)
CASSLKGGNTEAFF

SEQ ID NO: 212395 - protein, 14 aa, Homo sapiens
  CDR3 for alpha chain variable domain of TCR clone 106198 (TRAV3, TRAJ16)
CCERLKSDVQKLLF

SEQ ID NO: 212396 - protein, 15 aa, Homo sapiens
  CDR3 for beta chain variable domain of TCR clone 106198 (TRBV28, TRBJ2-7)
CASSPGGRGFYEQYF

SEQ ID NO: 212397 - protein, 12 aa, Homo sapiens
  CDR3 for alpha chain variable domain of TCR clone 106199 (TRAV12-1, TRAJ40)
CVVYSGTYKYIF

SEQ ID NO: 212398 - protein, 18 aa, Homo sapiens
  CDR3 for beta chain variable domain of TCR clone 106199 (TRBV11-2, TRBJ2-3)
CASSLGGASRGASNTQYF

SEQ ID NO: 212399 - protein, 18 aa, Homo sapiens
  CDR3 for alpha chain variable domain of TCR clone 106200 (TRAV17, TRAJ28)
CATDPRRGSGAGSYQLTF

SEQ ID NO: 212400 - protein, 14 aa, Homo sapiens
  CDR3 for beta chain variable domain of TCR clone 106200 (TRBV13, TRBJ2-5)
CASSLDYPQETQYF

SEQ ID NO: 212401 - protein, 13 aa, Homo sapiens
  CDR3 for alpha chain variable domain of TCR clone 106201 (TRAV8-4, TRAJ10)
CAAFTGGGNKLTF

SEQ ID NO: 212402 - protein, 11 aa, Homo sapiens
  CDR3 for beta chain variable domain of TCR clone 106201 (TRBV11-2, TRBJ1-1)
CASSINTEAFS

SEQ ID NO: 212403 - protein, 12 aa, Homo sapiens
  CDR3 for alpha chain variable domain of TCR clone 106202 (TRAV21, TRAJ6)
CAVKGGSYIPTF

SEQ ID NO: 212404 - protein, 13 aa, Homo sapiens
  CDR3 for beta chain variable domain of TCR clone 106202 (TRBV11-2, TRBJ1-1)
CASSVTENTEAFF

SEQ ID NO: 212405 - protein, 18 aa, Homo sapiens
  CDR3 for alpha chain variable domain of TCR clone 106203 (TRAV21, TRAJ52)
CAVRPSPAGGTSYGRLTF

SEQ ID NO: 212406 - protein, 16 aa, Homo sapiens
  CDR3 for beta chain variable domain of TCR clone 106203 (TRBV7-3, TRBJ2-1)
CASSLEGYRSYNEQFF

SEQ ID NO: 212407 - protein, 14 aa, Homo sapiens
  CDR3 for alpha chain variable domain of TCR clone 106204 (TRAV20, TRAJ17)
CAVQARAAGNKLTF

SEQ ID NO: 212408 - protein, 13 aa, Homo sapiens
  CDR3 for beta chain variable domain of TCR clone 106204 (TRBV19, TRBJ1-2)
CASSPTLNYGDTF

SEQ ID NO: 212409 - protein, 11 aa, Homo sapiens
  CDR3 for alpha chain variable domain of TCR clone 106205 (TRAV29/DV5, TRAJ37)
CATSNTGKLIF

SEQ ID NO: 212410 - protein, 14 aa, Homo sapiens
  CDR3 for beta chain variable domain of TCR clone 106205 (TRBV25-1, TRBJ1-1)
CASTHLGGNTEAFF

SEQ ID NO: 212411 - protein, 12 aa, Homo sapiens
  CDR3 for alpha chain variable domain of TCR clone 106206 (TRAV13-1, TRAJ42)
VNYGGSQGDLIF

SEQ ID NO: 212412 - protein, 15 aa, Homo sapiens
  CDR3 for beta chain variable domain of TCR clone 106206 (TRBV20-1, TRBJ2-1)
CSASSAGSSYNEQFF

SEQ ID NO: 212413 - protein, 12 aa, Homo sapiens
  CDR3 for alpha chain variable domain of TCR clone 106207 (TRAV12-3, TRAJ21)
CAMSNNFNKFYF

SEQ ID NO: 212414 - protein, 14 aa, Homo sapiens
  CDR3 for beta chain variable domain of TCR clone 106207 (TRBV28, TRBJ2-1)
CASSIQGTVGEQFF

SEQ ID NO: 212415 - protein, 14 aa, Homo sapiens
  CDR3 for alpha chain variable domain of TCR clone 106208 (TRAV26-1, TRAJ30)
CIVRPRNRDDKIIF

SEQ ID NO: 212416 - protein, 17 aa, Homo sapiens
  CDR3 for beta chain variable domain of TCR clone 106208 (TRBV13, TRBJ2-3)
CASSLSRVAGGRNTQYF

SEQ ID NO: 212417 - protein, 16 aa, Homo sapiens
  CDR3 for alpha chain variable domain of TCR clone 106209 (TRAV4, TRAJ37)
CLVGWFVSSNTGKLIF

SEQ ID NO: 212418 - protein, 15 aa, Homo sapiens
  CDR3 for beta chain variable domain of TCR clone 106209 (TRBV12-4, TRBJ2-3)
CASSLAERPTDTQYF

SEQ ID NO: 212419 - protein, 14 aa, Homo sapiens
  CDR3 for alpha chain variable domain of TCR clone 106210 (TRAV16, TRAJ33)
CALSAMDSNYQLIW

SEQ ID NO: 212420 - protein, 17 aa, Homo sapiens
  CDR3 for beta chain variable domain of TCR clone 106210 (TRBV25-1, TRBJ2-7)
CASSDARVVFSAYEQYF

SEQ ID NO: 212421 - protein, 14 aa, Homo sapiens
  CDR3 for alpha chain variable domain of TCR clone 106211 (TRAV12-2, TRAJ17)
CAVNIKAAGNKLTF

SEQ ID NO: 212422 - protein, 16 aa, Homo sapiens
  CDR3 for beta chain variable domain of TCR clone 106211 (TRBV20-1, TRBJ2-6)
CSASSQGYDGANVLIF

SEQ ID NO: 212423 - protein, 18 aa, Homo sapiens
  CDR3 for alpha chain variable domain of TCR clone 106212 (TRAV21, TRAJ53)
CAVKGGENSGGSNYKLTF

SEQ ID NO: 212424 - protein, 19 aa, Homo sapiens
  CDR3 for beta chain variable domain of TCR clone 106212 (TRBV25-1, TRBJ2-2)
CAILVYRVDRGRKTGELFF

SEQ ID NO: 212425 - protein, 12 aa, Homo sapiens
  CDR3 for alpha chain variable domain of TCR clone 106213 (TRAV29/DV5, TRAJ49)
CAATDTGNQFYF

SEQ ID NO: 212426 - protein, 13 aa, Homo sapiens
  CDR3 for beta chain variable domain of TCR clone 106213 (TRBV7-7, TRBJ2-3)
CASSLSRADTQYF

SEQ ID NO: 212427 - protein, 15 aa, Homo sapiens
  CDR3 for alpha chain variable domain of TCR clone 106214 (TRAV26-1, TRAJ23)
CIVRVAGYQGGKLIF

SEQ ID NO: 212428 - protein, 15 aa, Homo sapiens
  CDR3 for beta chain variable domain of TCR clone 106214 (TRBV7-9, TRBJ1-5)
CASSQGHQPNQPQHF

SEQ ID NO: 212429 - protein, 11 aa, Homo sapiens
  CDR3 for alpha chain variable domain of TCR clone 106215 (TRAV21, TRAJ34)
CAHYNTDKLIF

SEQ ID NO: 212430 - protein, 16 aa, Homo sapiens
  CDR3 for beta chain variable domain of TCR clone 106215 (TRBV7-2, TRBJ2-1)
CASSLVRASGGNEQFF

SEQ ID NO: 212431 - protein, 12 aa, Homo sapiens
  CDR3 for alpha chain variable domain of TCR clone 106216 (TRAV13-1, TRAJ53)
AASGGSNYKLTF

SEQ ID NO: 212432 - protein, 17 aa, Homo sapiens
  CDR3 for beta chain variable domain of TCR clone 106216 (TRBV7-2, TRBJ2-3)
CASSSYSGTRRADTQYF

SEQ ID NO: 212433 - protein, 14 aa, Homo sapiens
  CDR3 for alpha chain variable domain of TCR clone 106217 (TRAV12-3, TRAJ22)
CAMSLFGSARQLTF

SEQ ID NO: 212434 - protein, 16 aa, Homo sapiens
  CDR3 for beta chain variable domain of TCR clone 106217 (TRBV6-1, TRBJ2-5)
CASSETLDRGAETQYF

SEQ ID NO: 212435 - protein, 13 aa, Homo sapiens
  CDR3 for alpha chain variable domain of TCR clone 106218 (TRAV12-2, TRAJ34)
CAVRGYNTDKLIF

SEQ ID NO: 212436 - protein, 15 aa, Homo sapiens
  CDR3 for beta chain variable domain of TCR clone 106218 (TRBV28, TRBJ2-1)
CASRTGAGVIARQFL

SEQ ID NO: 212437 - protein, 14 aa, Homo sapiens
  CDR3 for alpha chain variable domain of TCR clone 106219 (TRAV12-2, TRAJ45)
CAVNIGGGADGLTF

SEQ ID NO: 212438 - protein, 11 aa, Homo sapiens
  CDR3 for beta chain variable domain of TCR clone 106219 (TRBV29-1, TRBJ2-5)
CSEDRTGTQYF

SEQ ID NO: 212439 - protein, 17 aa, Homo sapiens
  CDR3 for alpha chain variable domain of TCR clone 106220 (TRAV35, TRAJ47)
GLLDCRTHTEYGNKLVF

SEQ ID NO: 212440 - protein, 16 aa, Homo sapiens
  CDR3 for beta chain variable domain of TCR clone 106220 (TRBV12-4, TRBJ1-5)
CASRQPVEGSNQPQHF

SEQ ID NO: 212441 - protein, 13 aa, Homo sapiens
  CDR3 for alpha chain variable domain of TCR clone 106221 (TRAV12-3, TRAJ5)
CAMRPTGRRALTF

SEQ ID NO: 212442 - protein, 13 aa, Homo sapiens
  CDR3 for beta chain variable domain of TCR clone 106221 (TRBV12-4, TRBJ1-1)
CASSFGEDTEAFF

SEQ ID NO: 212443 - protein, 14 aa, Homo sapiens
  CDR3 for alpha chain variable domain of TCR clone 106222 (TRAV12-2, TRAJ13)
CAVTKTGGYQKVTF

SEQ ID NO: 212444 - protein, 12 aa, Homo sapiens
  CDR3 for beta chain variable domain of TCR clone 106222 (TRBV12-4, TRBJ1-2)
CASSFIWLHLRF

SEQ ID NO: 212445 - protein, 15 aa, Homo sapiens
  CDR3 for alpha chain variable domain of TCR clone 106223 (TRAV13-1, TRAJ32)
CAASIYGGATNKLIF

SEQ ID NO: 212446 - protein, 15 aa, Homo sapiens
  CDR3 for beta chain variable domain of TCR clone 106223 (TRBV5-1, TRBJ2-3)
CASSVTSGSTDTQYF

SEQ ID NO: 212447 - protein, 14 aa, Homo sapiens
  CDR3 for alpha chain variable domain of TCR clone 106224 (TRAV8-3, TRAJ4)
CAVGAAGGYNKLIF

SEQ ID NO: 212448 - protein, 17 aa, Homo sapiens
  CDR3 for beta chain variable domain of TCR clone 106224 (TRBV13, TRBJ2-3)
CANSLSRVAGGRNTQYF

SEQ ID NO: 212449 - protein, 14 aa, Homo sapiens
  CDR3 for alpha chain variable domain of TCR clone 106225 (TRAV17, TRAJ35)
CATYRPGFGNVLHC

SEQ ID NO: 212450 - protein, 19 aa, Homo sapiens
  CDR3 for beta chain variable domain of TCR clone 106225 (TRBV11-3, TRBJ2-2)
CASSTRPGAKTTNTGELFF

SEQ ID NO: 212451 - protein, 11 aa, Homo sapiens
  CDR3 for alpha chain variable domain of TCR clone 106226 (TRAV12-2, TRAJ26)
CPSQGGQNFVF

SEQ ID NO: 212452 - protein, 13 aa, Homo sapiens
  CDR3 for beta chain variable domain of TCR clone 106226 (TRBV27, TRBJ1-1)
CASSLSIGAEAFF

SEQ ID NO: 212453 - protein, 15 aa, Homo sapiens
  CDR3 for alpha chain variable domain of TCR clone 106227 (TRAV1-2, TRAJ15)
CAVDVMGSAGTALIF

SEQ ID NO: 212454 - protein, 13 aa, Homo sapiens
  CDR3 for beta chain variable domain of TCR clone 106227 (TRBV20-1, TRBJ1-1)
CSAFDRENTEAFC

SEQ ID NO: 212455 - protein, 13 aa, Homo sapiens
  CDR3 for alpha chain variable domain of TCR clone 106228 (TRAV12-3, TRAJ13)
CNEEFWGYQKVTF

SEQ ID NO: 212456 - protein, 13 aa, Homo sapiens
  CDR3 for beta chain variable domain of TCR clone 106228 (TRBV29-1, TRBJ2-5)
CSARDRVEETQYF

SEQ ID NO: 212457 - protein, 13 aa, Homo sapiens
  CDR3 for alpha chain variable domain of TCR clone 106229 (TRAV2, TRAJ12)
CAVGADSSYKLIF

SEQ ID NO: 212458 - protein, 13 aa, Homo sapiens
  CDR3 for beta chain variable domain of TCR clone 106229 (TRBV20-1, TRBJ2-1)
CSARSSPRDEQLF

SEQ ID NO: 212459 - protein, 11 aa, Homo sapiens
  CDR3 for alpha chain variable domain of TCR clone 106230 (TRAV12-3, TRAJ20)
CAMSYDYKLSF

SEQ ID NO: 212460 - protein, 15 aa, Homo sapiens
  CDR3 for beta chain variable domain of TCR clone 106230 (TRBV9, TRBJ1-6)
CASSVAGTGDSPLHF

SEQ ID NO: 212461 - protein, 16 aa, Homo sapiens
  CDR3 for alpha chain variable domain of TCR clone 106231 (TRAV20, TRAJ10)
CAVLRGLTGGGNKLTF

SEQ ID NO: 212462 - protein, 14 aa, Homo sapiens
  CDR3 for beta chain variable domain of TCR clone 106231 (TRBV19, TRBJ1-5)
CASRAPNSFLSQHF

SEQ ID NO: 212463 - protein, 16 aa, Homo sapiens
  CDR3 for alpha chain variable domain of TCR clone 106232 (TRAV17, TRAJ52)
CATSNAGGTSYGKLTF

SEQ ID NO: 212464 - protein, 16 aa, Homo sapiens
  CDR3 for beta chain variable domain of TCR clone 106232 (TRBV7-3, TRBJ2-2)
CASSLKRGTLSGELFF

SEQ ID NO: 212465 - protein, 14 aa, Homo sapiens
  CDR3 for alpha chain variable domain of TCR clone 106233 (TRAV12-2, TRAJ40)
CAVKIPSGTYKYIF

SEQ ID NO: 212466 - protein, 14 aa, Homo sapiens
  CDR3 for beta chain variable domain of TCR clone 106233 (TRBV19, TRBJ2-1)
CASSMGSGATEQFF

SEQ ID NO: 212467 - protein, 13 aa, Homo sapiens
  CDR3 for alpha chain variable domain of TCR clone 106234 (TRAV13-2, TRAJ53)
CAENMGSNYKLTL

SEQ ID NO: 212468 - protein, 13 aa, Homo sapiens
  CDR3 for beta chain variable domain of TCR clone 106234 (TRBV4-1, TRBJ2-2)
CASSQENTGELFF

SEQ ID NO: 212469 - protein, 15 aa, Homo sapiens
  CDR3 for alpha chain variable domain of TCR clone 106235 (TRAV26-1, TRAJ40)
CIGRVTTSGTYKYIF

SEQ ID NO: 212470 - protein, 12 aa, Homo sapiens
  CDR3 for beta chain variable domain of TCR clone 106235 (TRBV7-9, TRBJ1-4)
CASSTDREKLFF

SEQ ID NO: 212471 - protein, 16 aa, Homo sapiens
  CDR3 for alpha chain variable domain of TCR clone 106236 (TRAV30, TRAJ24)
CGTGIVDADSWGKFQF

SEQ ID NO: 212472 - protein, 14 aa, Homo sapiens
  CDR3 for beta chain variable domain of TCR clone 106236 (TRBV12-5, TRBJ2-5)
CASGSRTHQEAQYF

SEQ ID NO: 212473 - protein, 15 aa, Homo sapiens
  CDR3 for alpha chain variable domain of TCR clone 106237 (TRAV17, TRAJ13)
CATVPNSGGYQKVTF

SEQ ID NO: 212474 - protein, 13 aa, Homo sapiens
  CDR3 for beta chain variable domain of TCR clone 106237 (TRBV3-1, TRBJ1-5)
CASSQAGGQTQHF

SEQ ID NO: 212475 - protein, 12 aa, Homo sapiens
  CDR3 for alpha chain variable domain of TCR clone 106238 (TRAV8-4, TRAJ37)
CAKSSNTGKLIF

SEQ ID NO: 212476 - protein, 16 aa, Homo sapiens
  CDR3 for beta chain variable domain of TCR clone 106238 (TRBV7-7, TRBJ2-1)
CASSLASGTSYNEQFF

SEQ ID NO: 212477 - protein, 12 aa, Homo sapiens
  CDR3 for alpha chain variable domain of TCR clone 106239 (TRAV8-3, TRAJ20)
CAVGANDYKLSF

SEQ ID NO: 212478 - protein, 15 aa, Homo sapiens
  CDR3 for beta chain variable domain of TCR clone 106239 (TRBV27, TRBJ2-3)
CASSLGLAATDTQYF

SEQ ID NO: 212479 - protein, 13 aa, Homo sapiens
  CDR3 for alpha chain variable domain of TCR clone 106240 (TRAV36/DV7, TRAJ37)
CAVFSSNTGKLIF

SEQ ID NO: 212480 - protein, 14 aa, Homo sapiens
  CDR3 for beta chain variable domain of TCR clone 106240 (TRBV7-2, TRBJ2-7)
CASSPKTSFYEQYF

SEQ ID NO: 212481 - protein, 17 aa, Homo sapiens
  CDR3 for alpha chain variable domain of TCR clone 106241 (TRAV3, TRAJ12)
CAVRDGGRLDSSYKLIF

SEQ ID NO: 212482 - protein, 13 aa, Homo sapiens
  CDR3 for beta chain variable domain of TCR clone 106241 (TRBV15, TRBJ1-6)
CATSGGLNSPLHF

SEQ ID NO: 212483 - protein, 16 aa, Homo sapiens
  CDR3 for alpha chain variable domain of TCR clone 106242 (TRAV30, TRAJ24)
CGTEIVDADSWGKFQF

SEQ ID NO: 212484 - protein, 14 aa, Homo sapiens
  CDR3 for beta chain variable domain of TCR clone 106242 (TRBV20-1, TRBJ1-1)
CGAQTRIGGTEAFF

SEQ ID NO: 212485 - protein, 14 aa, Homo sapiens
  CDR3 for alpha chain variable domain of TCR clone 106243 (TRAV12-2, TRAJ13)
CAVKKTGGYQKVTF

SEQ ID NO: 212486 - protein, 17 aa, Homo sapiens
  CDR3 for beta chain variable domain of TCR clone 106243 (TRBV11-2, TRBJ2-3)
CQQLRGGLAGAPNTQYF

SEQ ID NO: 212487 - protein, 10 aa, Homo sapiens
  CDR3 for alpha chain variable domain of TCR clone 106244 (TRAV12-2, TRAJ48)
CAVTSEKLTF

SEQ ID NO: 212488 - protein, 15 aa, Homo sapiens
  CDR3 for beta chain variable domain of TCR clone 106244 (TRBV18, TRBJ2-1)
CASSPPSASYNEQFF

SEQ ID NO: 212489 - protein, 14 aa, Homo sapiens
  CDR3 for alpha chain variable domain of TCR clone 106245 (TRAV38-1, TRAJ43)
CAFLKHNNNNDMRF

SEQ ID NO: 212490 - protein, 17 aa, Homo sapiens
  CDR3 for beta chain variable domain of TCR clone 106245 (TRBV7-7, TRBJ1-4)
CASSLVGQGASNEKLFF

SEQ ID NO: 212491 - protein, 14 aa, Homo sapiens
  CDR3 for alpha chain variable domain of TCR clone 106246 (TRAV26-1, TRAJ38)
CIADNAGNNRKLIW

SEQ ID NO: 212492 - protein, 16 aa, Homo sapiens
  CDR3 for beta chain variable domain of TCR clone 106246 (TRBV20-1, TRBJ2-7)
SSASTSGRLSSYEQYF

SEQ ID NO: 212493 - protein, 12 aa, Homo sapiens
  CDR3 for alpha chain variable domain of TCR clone 106247 (TRAV16, TRAJ22)
CALEVSAKQLTF

SEQ ID NO: 212494 - protein, 14 aa, Homo sapiens
  CDR3 for beta chain variable domain of TCR clone 106247 (TRBV11-2, TRBJ2-3)
CASSSIASTDTQYF

SEQ ID NO: 212495 - protein, 11 aa, Homo sapiens
  CDR3 for alpha chain variable domain of TCR clone 106248 (TRAV13-1, TRAJ43)
CAAHNNNDMRF

SEQ ID NO: 212496 - protein, 15 aa, Homo sapiens
  CDR3 for beta chain variable domain of TCR clone 106248 (TRBV6-1, TRBJ2-2)
CASSRLRGDTGELFV

SEQ ID NO: 212497 - protein, 15 aa, Homo sapiens
  CDR3 for alpha chain variable domain of TCR clone 106249 (TRAV23/DV6, TRAJ37)
CAAGEGSSNTGKLIF

SEQ ID NO: 212498 - protein, 16 aa, Homo sapiens
  CDR3 for beta chain variable domain of TCR clone 106249 (TRBV7-9, TRBJ1-2)
CASSLGFSSGEDGYTF

SEQ ID NO: 212499 - protein, 18 aa, Homo sapiens
  CDR3 for alpha chain variable domain of TCR clone 106250 (TRAV26-1, TRAJ56)
CIVRVASRVTGANSKLTF

SEQ ID NO: 212500 - protein, 18 aa, Homo sapiens
  CDR3 for beta chain variable domain of TCR clone 106250 (TRBV4-1, TRBJ2-3)
CASSHQLAGGRSTDTQYF

SEQ ID NO: 212501 - protein, 12 aa, Homo sapiens
  CDR3 for alpha chain variable domain of TCR clone 106251 (TRAV2, TRAJ5)
CALDTGRRALTF

SEQ ID NO: 212502 - protein, 15 aa, Homo sapiens
  CDR3 for beta chain variable domain of TCR clone 106251 (TRBV10-3, TRBJ2-1)
CAISDVQDRAYEQFI

SEQ ID NO: 212503 - protein, 12 aa, Homo sapiens
  CDR3 for alpha chain variable domain of TCR clone 106252 (TRAV12-3, TRAJ17)
SHLPLTGNKLTF

SEQ ID NO: 212504 - protein, 15 aa, Homo sapiens
  CDR3 for beta chain variable domain of TCR clone 106252 (TRBV20-1, TRBJ2-7)
CSARDRVSGMDEQYF

SEQ ID NO: 212505 - protein, 13 aa, Homo sapiens
  CDR3 for alpha chain variable domain of TCR clone 106253 (TRAV20, TRAJ49)
CAVQARTGNPFYF

SEQ ID NO: 212506 - protein, 11 aa, Homo sapiens
  CDR3 for beta chain variable domain of TCR clone 106253 (TRBV11-2, TRBJ1-1)
CASSINTEAFF

SEQ ID NO: 212507 - protein, 16 aa, Homo sapiens
  CDR3 for alpha chain variable domain of TCR clone 106254 (TRAV23/DV6, TRAJ9)
CAASIGGNTGGFKTNF

SEQ ID NO: 212508 - protein, 17 aa, Homo sapiens
  CDR3 for beta chain variable domain of TCR clone 106254 (TRBV13, TRBJ2-3)
CASSLSRVAGGRNTQYF

SEQ ID NO: 212509 - protein, 11 aa, Homo sapiens
  CDR3 for alpha chain variable domain of TCR clone 106255 (TRAV1-2, TRAJ40)
CAVPGTYKYIF

SEQ ID NO: 212510 - protein, 14 aa, Homo sapiens
  CDR3 for beta chain variable domain of TCR clone 106255 (TRBV2, TRBJ2-1)
CASSEALIYNEQFF

SEQ ID NO: 212511 - protein, 13 aa, Homo sapiens
  CDR3 for alpha chain variable domain of TCR clone 106256 (TRAV8-3, TRAJ28)
CAVGAVGSYQLTF

SEQ ID NO: 212512 - protein, 17 aa, Homo sapiens
  CDR3 for beta chain variable domain of TCR clone 106256 (TRBV11-2, TRBJ2-1)
CASSLYPPGVECNEQFF

SEQ ID NO: 212513 - protein, 14 aa, Homo sapiens
  CDR3 for alpha chain variable domain of TCR clone 106257 (TRAV3, TRAJ28)
CAVRRGAGSYQLTF

SEQ ID NO: 212514 - protein, 16 aa, Homo sapiens
  CDR3 for beta chain variable domain of TCR clone 106257 (TRBV4-1, TRBJ2-7)
CASSQEWTSGPREQYF

SEQ ID NO: 212515 - protein, 12 aa, Homo sapiens
  CDR3 for alpha chain variable domain of TCR clone 106258 (TRAV1-1, TRAJ8)
CAGGTGFQKLVF

SEQ ID NO: 212516 - protein, 15 aa, Homo sapiens
  CDR3 for beta chain variable domain of TCR clone 106258 (TRBV20-1, TRBJ2-7)
CSARDRVAGMDEQYF

SEQ ID NO: 212517 - protein, 18 aa, Homo sapiens
  CDR3 for alpha chain variable domain of TCR clone 106259 (TRAV17, TRAJ45)
CATSIDLYSGGGADGLTF

SEQ ID NO: 212518 - protein, 15 aa, Homo sapiens
  CDR3 for beta chain variable domain of TCR clone 106259 (TRBV11-2, TRBJ2-1)
CASSKNRGLIYEQFF

SEQ ID NO: 212519 - protein, 13 aa, Homo sapiens
  CDR3 for alpha chain variable domain of TCR clone 106260 (TRAV8-6, TRAJ13)
CAVRDGGYQKVTF

SEQ ID NO: 212520 - protein, 16 aa, Homo sapiens
  CDR3 for beta chain variable domain of TCR clone 106260 (TRBV12-5, TRBJ2-5)
CASGPRTSGNQETQYF

SEQ ID NO: 212521 - protein, 14 aa, Homo sapiens
  CDR3 for alpha chain variable domain of TCR clone 106261 (TRAV12-2, TRAJ17)
CAVLFKAAGNKLTF

SEQ ID NO: 212522 - protein, 15 aa, Homo sapiens
  CDR3 for beta chain variable domain of TCR clone 106261 (TRBV19, TRBJ1-1)
CASTSGQIQNTEAFF

SEQ ID NO: 212523 - protein, 21 aa, Homo sapiens
  CDR3 for alpha chain variable domain of TCR clone 106262 (TRAV34, TRAJ44)
PAMQASTSVEQTTGTASKLTF

SEQ ID NO: 212524 - protein, 15 aa, Homo sapiens
  CDR3 for beta chain variable domain of TCR clone 106262 (TRBV11-3, TRBJ2-3)
CASLKDGREGDTQYF

SEQ ID NO: 212525 - protein, 11 aa, Homo sapiens
  CDR3 for alpha chain variable domain of TCR clone 106263 (TRAV27, TRAJ40)
SLTSGTYKYIF

SEQ ID NO: 212526 - protein, 12 aa, Homo sapiens
  CDR3 for beta chain variable domain of TCR clone 106263 (TRBV18, TRBJ2-3)
CQLKQNTDTQYF

SEQ ID NO: 212527 - protein, 13 aa, Homo sapiens
  CDR3 for alpha chain variable domain of TCR clone 106264 (TRAV16, TRAJ11)
CALMNSGYSTLTF

SEQ ID NO: 212528 - protein, 12 aa, Homo sapiens
  CDR3 for beta chain variable domain of TCR clone 106264 (TRBV11-2, TRBJ2-2)
CASSLGGGELFF

SEQ ID NO: 212529 - protein, 15 aa, Homo sapiens
  CDR3 for alpha chain variable domain of TCR clone 106265 (TRAV40, TRAJ45)
CLLGYLGGGADGLTF

SEQ ID NO: 212530 - protein, 13 aa, Homo sapiens
  CDR3 for beta chain variable domain of TCR clone 106265 (TRBV7-9, TRBJ1-2)
CASSLKQNYGYTF

SEQ ID NO: 212531 - protein, 13 aa, Homo sapiens
  CDR3 for alpha chain variable domain of TCR clone 106266 (TRAV13-1, TRAJ11)
CAAVLAGYSTLTF

SEQ ID NO: 212532 - protein, 14 aa, Homo sapiens
  CDR3 for beta chain variable domain of TCR clone 106266 (TRBV6-1, TRBJ1-3)
CASVQGGGGNTIYF

SEQ ID NO: 212533 - protein, 18 aa, Homo sapiens
  CDR3 for alpha chain variable domain of TCR clone 106267 (TRAV17, TRAJ45)
CATSLDLYSGGGADGLTF

SEQ ID NO: 212534 - protein, 16 aa, Homo sapiens
  CDR3 for beta chain variable domain of TCR clone 106267 (TRBV7-3, TRBJ2-2)
CASSLKRGTLSGELFF

SEQ ID NO: 212535 - protein, 16 aa, Homo sapiens
  CDR3 for alpha chain variable domain of TCR clone 106268 (TRAV20, TRAJ10)
CAVLWGLTGGGNKLTF

SEQ ID NO: 212536 - protein, 14 aa, Homo sapiens
  CDR3 for beta chain variable domain of TCR clone 106268 (TRBV19, TRBJ1-5)
CASRAPDSFLSQHF

SEQ ID NO: 212537 - protein, 12 aa, Homo sapiens
  CDR3 for alpha chain variable domain of TCR clone 106269 (TRAV29/DV5, TRAJ49)
CAATATGNQFYF

SEQ ID NO: 212538 - protein, 15 aa, Homo sapiens
  CDR3 for beta chain variable domain of TCR clone 106269 (TRBV20-1, TRBJ1-5)
CSAREGGYSNQPQHF

SEQ ID NO: 212539 - protein, 16 aa, Homo sapiens
  CDR3 for alpha chain variable domain of TCR clone 106270 (TRAV26-1, TRAJ37)
CIVRGDGSGNTGKLIF

SEQ ID NO: 212540 - protein, 15 aa, Homo sapiens
  CDR3 for beta chain variable domain of TCR clone 106270 (TRBV20-1, TRBJ2-7)
CSARDRVSGMDEQYF

SEQ ID NO: 212541 - protein, 16 aa, Homo sapiens
  CDR3 for alpha chain variable domain of TCR clone 106271 (TRAV30, TRAJ24)
CGTEIVEADSWGKFQF

SEQ ID NO: 212542 - protein, 14 aa, Homo sapiens
  CDR3 for beta chain variable domain of TCR clone 106271 (TRBV20-1, TRBJ1-1)
CSAQTRIGGTEAFF

SEQ ID NO: 212543 - protein, 14 aa, Homo sapiens
  CDR3 for alpha chain variable domain of TCR clone 106272 (TRAV26-1, TRAJ38)
CIADNAGHNRKLIW

SEQ ID NO: 212544 - protein, 17 aa, Homo sapiens
  CDR3 for beta chain variable domain of TCR clone 106272 (TRBV7-9, TRBJ2-3)
CASSPTVAGDLTDTQYF

SEQ ID NO: 212545 - protein, 18 aa, Homo sapiens
  CDR3 for alpha chain variable domain of TCR clone 106273 (TRAV29/DV5, TRAJ52)
CAAGFRRAGGTSYGKLTF

SEQ ID NO: 212546 - protein, 16 aa, Homo sapiens
  CDR3 for beta chain variable domain of TCR clone 106273 (TRBV7-3, TRBJ2-2)
CASSLKRGTLSGELFF

SEQ ID NO: 212547 - protein, 14 aa, Homo sapiens
  CDR3 for alpha chain variable domain of TCR clone 106274 (TRAV12-2, TRAJ30)
CVVNIGNRDDKIIF

SEQ ID NO: 212548 - protein, 14 aa, Homo sapiens
  CDR3 for beta chain variable domain of TCR clone 106274 (TRBV7-9, TRBJ2-5)
CASSPRPSGETQYF

SEQ ID NO: 212549 - protein, 14 aa, Homo sapiens
  CDR3 for alpha chain variable domain of TCR clone 106275 (TRAV20, TRAJ29)
CAVQAWVGNTPLVF

SEQ ID NO: 212550 - protein, 13 aa, Homo sapiens
  CDR3 for beta chain variable domain of TCR clone 106275 (TRBV12-4, TRBJ1-2)
CASSLRQGKGYTF

SEQ ID NO: 212551 - protein, 19 aa, Homo sapiens
  CDR3 for alpha chain variable domain of TCR clone 106276 (TRAV3, TRAJ6)
CAVRDRNPSRSGGSYIPTF

SEQ ID NO: 212552 - protein, 16 aa, Homo sapiens
  CDR3 for beta chain variable domain of TCR clone 106276 (TRBV13, TRBJ2-2)
CASSPRTGEHTGELFF

SEQ ID NO: 212553 - protein, 14 aa, Homo sapiens
  CDR3 for alpha chain variable domain of TCR clone 106277 (TRAV20, TRAJ56)
CAVQFGGANSKLTF

SEQ ID NO: 212554 - protein, 14 aa, Homo sapiens
  CDR3 for beta chain variable domain of TCR clone 106277 (TRBV20-1, TRBJ2-7)
CSAKRGRSSYEQDF

SEQ ID NO: 212555 - protein, 11 aa, Homo sapiens
  CDR3 for alpha chain variable domain of TCR clone 106278 (TRAV12-2, TRAJ6)
CAVEGSYIPTF

SEQ ID NO: 212556 - protein, 15 aa, Homo sapiens
  CDR3 for beta chain variable domain of TCR clone 106278 (TRBV7-3, TRBJ2-2)
CASSETGQGTGELFF

SEQ ID NO: 212557 - protein, 17 aa, Homo sapiens
  CDR3 for alpha chain variable domain of TCR clone 106279 (TRAV13-1, TRAJ31)
CAPRDRLMFGDGTQLVV

SEQ ID NO: 212558 - protein, 18 aa, Homo sapiens
  CDR3 for beta chain variable domain of TCR clone 106279 (TRBV7-9, TRBJ2-7)
CASSLTTSGSRTWYEQYF

SEQ ID NO: 212559 - protein, 15 aa, Homo sapiens
  CDR3 for alpha chain variable domain of TCR clone 106280 (TRAV25, TRAJ52)
CAGRPGGTSYGKLTF

SEQ ID NO: 212560 - protein, 16 aa, Homo sapiens
  CDR3 for beta chain variable domain of TCR clone 106280 (TRBV7-9, TRBJ1-2)
CASSLGFSSGEDGYTF

SEQ ID NO: 212561 - protein, 15 aa, Homo sapiens
  CDR3 for alpha chain variable domain of TCR clone 106281 (TRAV8-3, TRAJ27)
CAVGPSQTNAGKSTF

SEQ ID NO: 212562 - protein, 12 aa, Homo sapiens
  CDR3 for beta chain variable domain of TCR clone 106281 (TRBV11-2, TRBJ2-2)
CASSLGGGELFF

SEQ ID NO: 212563 - protein, 13 aa, Homo sapiens
  CDR3 for alpha chain variable domain of TCR clone 106282 (TRAV13-1, TRAJ40)
CAARTSGTYKYIF

SEQ ID NO: 212564 - protein, 17 aa, Homo sapiens
  CDR3 for beta chain variable domain of TCR clone 106282 (TRBV4-1, TRBJ2-3)
CASSQGYVSGGTDTQYC

SEQ ID NO: 212565 - protein, 14 aa, Homo sapiens
  CDR3 for alpha chain variable domain of TCR clone 106283 (TRAV8-2, TRAJ4)
CVVSPSGGYNKLIF

SEQ ID NO: 212566 - protein, 18 aa, Homo sapiens
  CDR3 for beta chain variable domain of TCR clone 106283 (TRBV12-4, TRBJ2-2)
CASSLVAGTRGRTGELFF

SEQ ID NO: 212567 - protein, 17 aa, Homo sapiens
  CDR3 for alpha chain variable domain of TCR clone 106284 (TRAV23/DV6, TRAJ57)
CAASSTLSQGGSEKLVF

SEQ ID NO: 212568 - protein, 14 aa, Homo sapiens
  CDR3 for beta chain variable domain of TCR clone 106284 (TRBV25-1, TRBJ1-1)
CASTQLGGNTEAFF

SEQ ID NO: 212569 - protein, 14 aa, Homo sapiens
  CDR3 for alpha chain variable domain of TCR clone 106285 (TRAV12-2, TRAJ6)
CVPLRPGGSYIPAF

SEQ ID NO: 212570 - protein, 18 aa, Homo sapiens
  CDR3 for beta chain variable domain of TCR clone 106285 (TRBV4-1, TRBJ2-3)
CASSLPPNRGPFTDTQYF

SEQ ID NO: 212571 - protein, 18 aa, Homo sapiens
  CDR3 for alpha chain variable domain of TCR clone 106286 (TRAV13-1, TRAJ52)
CAAKNPNAGGTSYGKLTC

SEQ ID NO: 212572 - protein, 15 aa, Homo sapiens
  CDR3 for beta chain variable domain of TCR clone 106286 (TRBV6-1, TRBJ2-3)
CASSERGGITDTQYF

SEQ ID NO: 212573 - protein, 13 aa, Homo sapiens
  CDR3 for alpha chain variable domain of TCR clone 106287 (TRAV13-1, TRAJ21)
CAASIYNFNKFYF

SEQ ID NO: 212574 - protein, 14 aa, Homo sapiens
  CDR3 for beta chain variable domain of TCR clone 106287 (TRBV12-4, TRBJ1-1)
CASSLGTGGTEAFF

SEQ ID NO: 212575 - protein, 13 aa, Homo sapiens
  CDR3 for alpha chain variable domain of TCR clone 106288 (TRAV17, TRAJ9)
CATDYTGGFKTIF

SEQ ID NO: 212576 - protein, 11 aa, Homo sapiens
  CDR3 for beta chain variable domain of TCR clone 106288 (TRBV12-4, TRBJ2-3)
CASTATDTQYF

SEQ ID NO: 212577 - protein, 17 aa, Homo sapiens
  CDR3 for alpha chain variable domain of TCR clone 106289 (TRAV8-6, TRAJ58)
CAVSSWVGETSGSRLTF

SEQ ID NO: 212578 - protein, 17 aa, Homo sapiens
  CDR3 for beta chain variable domain of TCR clone 106289 (TRBV4-3, TRBJ1-2)
CASSSRLQAWGSVGYTF

SEQ ID NO: 212579 - protein, 14 aa, Homo sapiens
  CDR3 for alpha chain variable domain of TCR clone 106290 (TRAV35, TRAJ42)
CAGRYGGSQGNLIF

SEQ ID NO: 212580 - protein, 15 aa, Homo sapiens
  CDR3 for beta chain variable domain of TCR clone 106290 (TRBV7-9, TRBJ2-1)
CDSSLGWGRANEQFF

SEQ ID NO: 212581 - protein, 13 aa, Homo sapiens
  CDR3 for alpha chain variable domain of TCR clone 106291 (TRAV8-3, TRAJ28)
CAVGAVGSYQLTF

SEQ ID NO: 212582 - protein, 14 aa, Homo sapiens
  CDR3 for beta chain variable domain of TCR clone 106291 (TRBV7-2, TRBJ2-7)
CAIRSQGAAYEQYF

SEQ ID NO: 212583 - protein, 11 aa, Homo sapiens
  CDR3 for alpha chain variable domain of TCR clone 106292 (TRAV17, TRAJ9)
CATTGGIKTIF

SEQ ID NO: 212584 - protein, 11 aa, Homo sapiens
  CDR3 for beta chain variable domain of TCR clone 106292 (TRBV29-1, TRBJ2-5)
CSEDRTGTQYF

SEQ ID NO: 212585 - protein, 13 aa, Homo sapiens
  CDR3 for alpha chain variable domain of TCR clone 106293 (TRAV12-1, TRAJ9)
WVVLNTGGFKTIF

SEQ ID NO: 212586 - protein, 13 aa, Homo sapiens
  CDR3 for beta chain variable domain of TCR clone 106293 (TRBV20-1, TRBJ1-1)
CSARGGGNTEAFF

SEQ ID NO: 212587 - protein, 14 aa, Homo sapiens
  CDR3 for alpha chain variable domain of TCR clone 106294 (TRAV9-2, TRAJ39)
CALYIYNAGNMLTF

SEQ ID NO: 212588 - protein, 14 aa, Homo sapiens
  CDR3 for beta chain variable domain of TCR clone 106294 (TRBV5-4, TRBJ1-1)
CASSLDSRRDEAFF

SEQ ID NO: 212589 - protein, 16 aa, Homo sapiens
  CDR3 for alpha chain variable domain of TCR clone 106295 (TRAV35, TRAJ28)
CAGQRYSGSGSYQLTF

SEQ ID NO: 212590 - protein, 14 aa, Homo sapiens
  CDR3 for beta chain variable domain of TCR clone 106295 (TRBV18, TRBJ2-7)
CASSPRGGAYEQYF

SEQ ID NO: 212591 - protein, 11 aa, Homo sapiens
  CDR3 for alpha chain variable domain of TCR clone 106296 (TRAV21, TRAJ34)
CAPLDTDKLIF

SEQ ID NO: 212592 - protein, 15 aa, Homo sapiens
  CDR3 for beta chain variable domain of TCR clone 106296 (TRBV11-3, TRBJ2-3)
CASLKDGREGDTQYF

SEQ ID NO: 212593 - protein, 12 aa, Homo sapiens
  CDR3 for alpha chain variable domain of TCR clone 106297 (TRAV8-3, TRAJ20)
CAVGANYYQLSF

SEQ ID NO: 212594 - protein, 16 aa, Homo sapiens
  CDR3 for beta chain variable domain of TCR clone 106297 (TRBV19, TRBJ2-2)
CASRSPGTGATGELFF

SEQ ID NO: 212595 - protein, 17 aa, Homo sapiens
  CDR3 for alpha chain variable domain of TCR clone 106298 (TRAV13-1, TRAJ52)
CAASSGAGGTSYGKLTF

SEQ ID NO: 212596 - protein, 14 aa, Homo sapiens
  CDR3 for beta chain variable domain of TCR clone 106298 (TRBV12-5, TRBJ2-5)
CASGSRTHQETQYF

SEQ ID NO: 212597 - protein, 15 aa, Homo sapiens
  CDR3 for alpha chain variable domain of TCR clone 106299 (TRAV26-1, TRAJ23)
FIVRVAGYQGGKLIF

SEQ ID NO: 212598 - protein, 18 aa, Homo sapiens
  CDR3 for beta chain variable domain of TCR clone 106299 (TRBV28, TRBJ2-1)
CASSSTSGRANSYNEQFF

SEQ ID NO: 212599 - protein, 14 aa, Homo sapiens
  CDR3 for alpha chain variable domain of TCR clone 106300 (TRAV2, TRAJ22)
CAVVRGGSARQLTF

SEQ ID NO: 212600 - protein, 14 aa, Homo sapiens
  CDR3 for beta chain variable domain of TCR clone 106300 (TRBV19, TRBJ2-1)
CASPTFVLSGEQFF

SEQ ID NO: 212601 - protein, 15 aa, Homo sapiens
  CDR3 for alpha chain variable domain of TCR clone 106301 (TRAV26-1, TRAJ29)
CIDRVEGSGKTPLVF

SEQ ID NO: 212602 - protein, 15 aa, Homo sapiens
  CDR3 for beta chain variable domain of TCR clone 106301 (TRBV7-9, TRBJ1-5)
CASSQGHQPNQPQHF

SEQ ID NO: 212603 - protein, 12 aa, Homo sapiens
  CDR3 for alpha chain variable domain of TCR clone 106302 (TRAV13-1, TRAJ15)
CAASQAGTALIF

SEQ ID NO: 212604 - protein, 14 aa, Homo sapiens
  CDR3 for beta chain variable domain of TCR clone 106302 (TRBV19, TRBJ2-2)
CASSTLHRSGELFC

SEQ ID NO: 212605 - protein, 14 aa, Homo sapiens
  CDR3 for alpha chain variable domain of TCR clone 106303 (TRAV1-2, TRAJ16)
CAVNRFSDGQKLLF

SEQ ID NO: 212606 - protein, 15 aa, Homo sapiens
  CDR3 for beta chain variable domain of TCR clone 106303 (TRBV9, TRBJ1-6)
CASSVAGTADSPLHF

SEQ ID NO: 212607 - protein, 14 aa, Homo sapiens
  CDR3 for alpha chain variable domain of TCR clone 106304 (TRAV13-1, TRAJ44)
CAAKAAGTASKLTF

SEQ ID NO: 212608 - protein, 17 aa, Homo sapiens
  CDR3 for beta chain variable domain of TCR clone 106304 (TRBV7-3, TRBJ2-3)
CASSLMKRMRGADTQYF

SEQ ID NO: 212609 - protein, 14 aa, Homo sapiens
  CDR3 for alpha chain variable domain of TCR clone 106305 (TRAV17, TRAJ6)
CATDASGGSYITTF

SEQ ID NO: 212610 - protein, 19 aa, Homo sapiens
  CDR3 for beta chain variable domain of TCR clone 106305 (TRBV4-3, TRBJ2-7)
CASSQEFIGWQVTPYEQYF

SEQ ID NO: 212611 - protein, 14 aa, Homo sapiens
  CDR3 for alpha chain variable domain of TCR clone 106306 (TRAV10, TRAJ34)
CVVSRGGDTDKLIF

SEQ ID NO: 212612 - protein, 16 aa, Homo sapiens
  CDR3 for beta chain variable domain of TCR clone 106306 (TRBV2, TRBJ2-4)
YASSEAPGGEQNIQYF

SEQ ID NO: 212613 - protein, 15 aa, Homo sapiens
  CDR3 for alpha chain variable domain of TCR clone 106307 (TRAV4, TRAJ3)
CLVGDSDSSASKIIF

SEQ ID NO: 212614 - protein, 15 aa, Homo sapiens
  CDR3 for beta chain variable domain of TCR clone 106307 (TRBV28, TRBJ2-1)
CASSGLAEVDNEQFF

SEQ ID NO: 212615 - protein, 14 aa, Homo sapiens
  CDR3 for alpha chain variable domain of TCR clone 106308 (TRAV2, TRAJ9)
CAVEDRSGGFKTIF

SEQ ID NO: 212616 - protein, 15 aa, Homo sapiens
  CDR3 for beta chain variable domain of TCR clone 106308 (TRBV7-2, TRBJ2-1)
CASSLVAGRYNEQFF

SEQ ID NO: 212617 - protein, 16 aa, Homo sapiens
  CDR3 for alpha chain variable domain of TCR clone 106309 (TRAV3, TRAJ37)
CAVRGKGSGNTGKLIF

SEQ ID NO: 212618 - protein, 13 aa, Homo sapiens
  CDR3 for beta chain variable domain of TCR clone 106309 (TRBV2, TRBJ1-5)
CATAGPGNQPQHF

SEQ ID NO: 212619 - protein, 11 aa, Homo sapiens
  CDR3 for alpha chain variable domain of TCR clone 106310 (TRAV29/DV5, TRAJ31)
CAASYRDRLMF

SEQ ID NO: 212620 - protein, 13 aa, Homo sapiens
  CDR3 for beta chain variable domain of TCR clone 106310 (TRBV19, TRBJ2-5)
CASSIGQVTDFFL

SEQ ID NO: 212621 - protein, 14 aa, Homo sapiens
  CDR3 for alpha chain variable domain of TCR clone 106311 (TRAV12-2, TRAJ17)
CAVLFKAAGNKLTF

SEQ ID NO: 212622 - protein, 17 aa, Homo sapiens
  CDR3 for beta chain variable domain of TCR clone 106311 (TRBV20-1, TRBJ2-2)
GSASGSGQGGLTGEPFF

SEQ ID NO: 212623 - protein, 12 aa, Homo sapiens
  CDR3 for alpha chain variable domain of TCR clone 106312 (TRAV12-1, TRAJ40)
CVFYSGTYKYIF

SEQ ID NO: 212624 - protein, 18 aa, Homo sapiens
  CDR3 for beta chain variable domain of TCR clone 106312 (TRBV12-4, TRBJ2-2)
CASSLVAGTRGRTVELFF

SEQ ID NO: 212625 - protein, 14 aa, Homo sapiens
  CDR3 for alpha chain variable domain of TCR clone 106313 (TRAV2, TRAJ9)
CAVEDRGGGFKTIF

SEQ ID NO: 212626 - protein, 16 aa, Homo sapiens
  CDR3 for beta chain variable domain of TCR clone 106313 (TRBV15, TRBJ2-7)
CATSRDGGIPSYEQYF

SEQ ID NO: 212627 - protein, 12 aa, Homo sapiens
  CDR3 for alpha chain variable domain of TCR clone 106314 (TRAV20, TRAJ36)
CAQVTGANNLFF

SEQ ID NO: 212628 - protein, 14 aa, Homo sapiens
  CDR3 for beta chain variable domain of TCR clone 106314 (TRBV28, TRBJ2-1)
CASKMTGQGNEQFF

SEQ ID NO: 212629 - protein, 16 aa, Homo sapiens
  CDR3 for alpha chain variable domain of TCR clone 106315 (TRAV3, TRAJ40)
CAVRDRIASGTYKYIF

SEQ ID NO: 212630 - protein, 16 aa, Homo sapiens
  CDR3 for beta chain variable domain of TCR clone 106315 (TRBV6-1, TRBJ1-2)
CASSEANAIINYGYTF

SEQ ID NO: 212631 - protein, 13 aa, Homo sapiens
  CDR3 for alpha chain variable domain of TCR clone 106316 (TRAV12-2, TRAJ10)
CAVPTGGGNKLTF

SEQ ID NO: 212632 - protein, 15 aa, Homo sapiens
  CDR3 for beta chain variable domain of TCR clone 106316 (TRBV4-1, TRBJ2-5)
CASSQSRGDQETQYF

SEQ ID NO: 212633 - protein, 13 aa, Homo sapiens
  CDR3 for alpha chain variable domain of TCR clone 106317 (TRAV13-1, TRAJ27)
CAASTHQCRQINL

SEQ ID NO: 212634 - protein, 15 aa, Homo sapiens
  CDR3 for beta chain variable domain of TCR clone 106317 (TRBV27, TRBJ2-2)
CQQFSGTSSHRGAVF

SEQ ID NO: 212635 - protein, 17 aa, Homo sapiens
  CDR3 for alpha chain variable domain of TCR clone 106318 (TRAV3, TRAJ42)
CAVRDRDYGGSQGNLIF

SEQ ID NO: 212636 - protein, 15 aa, Homo sapiens
  CDR3 for beta chain variable domain of TCR clone 106318 (TRBV9, TRBJ2-1)
CQQRRWRGNYNEQFF

SEQ ID NO: 212637 - protein, 16 aa, Homo sapiens
  CDR3 for alpha chain variable domain of TCR clone 106319 (TRAV3, TRAJ21)
CAVRDIERGNFNKFYF

SEQ ID NO: 212638 - protein, 14 aa, Homo sapiens
  CDR3 for beta chain variable domain of TCR clone 106319 (TRBV11-2, TRBJ2-5)
CASSRTGGIETQYF

SEQ ID NO: 212639 - protein, 16 aa, Homo sapiens
  CDR3 for alpha chain variable domain of TCR clone 106320 (TRAV12-3, TRAJ53)
CAMSPGSVGSNYKLTF

SEQ ID NO: 212640 - protein, 18 aa, Homo sapiens
  CDR3 for beta chain variable domain of TCR clone 106320 (TRBV11-2, TRBJ1-6)
CASSLAVQGLSLNSPLHF

SEQ ID NO: 212641 - protein, 14 aa, Homo sapiens
  CDR3 for alpha chain variable domain of TCR clone 106321 (TRAV35, TRAJ40)
CAWSTTSGTYKYIF

SEQ ID NO: 212642 - protein, 13 aa, Homo sapiens
  CDR3 for beta chain variable domain of TCR clone 106321 (TRBV20-1, TRBJ1-6)
CSAPLGVGSPLHF

SEQ ID NO: 212643 - protein, 17 aa, Homo sapiens
  CDR3 for alpha chain variable domain of TCR clone 106322 (TRAV8-3, TRAJ38)
CAVGASNAGNNHIQNPD

SEQ ID NO: 212644 - protein, 15 aa, Homo sapiens
  CDR3 for beta chain variable domain of TCR clone 106322 (TRBV11-3, TRBJ1-3)
CASSLFGPSGNTIYF

SEQ ID NO: 212645 - protein, 12 aa, Homo sapiens
  CDR3 for alpha chain variable domain of TCR clone 106323 (TRAV1-2, TRAJ8)
CAVRTGFQKLVF

SEQ ID NO: 212646 - protein, 13 aa, Homo sapiens
  CDR3 for beta chain variable domain of TCR clone 106323 (TRBV7-9, TRBJ2-3)
CASSPGSTDTQYF

SEQ ID NO: 212647 - protein, 15 aa, Homo sapiens
  CDR3 for alpha chain variable domain of TCR clone 106324 (TRAV19, TRAJ8)
CALSGPNTGFQKLVV

SEQ ID NO: 212648 - protein, 14 aa, Homo sapiens
  CDR3 for beta chain variable domain of TCR clone 106324 (TRBV7-2, TRBJ2-7)
CASSPKTSFYEQYF

SEQ ID NO: 212649 - protein, 12 aa, Homo sapiens
  CDR3 for alpha chain variable domain of TCR clone 106325 (TRAV4, TRAJ6)
CLAQGGSYIPTF

SEQ ID NO: 212650 - protein, 12 aa, Homo sapiens
  CDR3 for beta chain variable domain of TCR clone 106325 (TRBV6-5, TRBJ2-3)
CASSDTTDTQYF

SEQ ID NO: 212651 - protein, 16 aa, Homo sapiens
  CDR3 for alpha chain variable domain of TCR clone 106326 (TRAV36/DV7, TRAJ30)
CAVETYGLDRDDKIIF

SEQ ID NO: 212652 - protein, 16 aa, Homo sapiens
  CDR3 for beta chain variable domain of TCR clone 106326 (TRBV7-3, TRBJ2-2)
CASSLKRGTLSGELFF

SEQ ID NO: 212653 - protein, 14 aa, Homo sapiens
  CDR3 for alpha chain variable domain of TCR clone 106327 (TRAV12-2, TRAJ40)
CAVKIPSGTYKYIF

SEQ ID NO: 212654 - protein, 11 aa, Homo sapiens
  CDR3 for beta chain variable domain of TCR clone 106327 (TRBV7-9, TRBJ1-6)
CASSSNSPLHF

SEQ ID NO: 212655 - protein, 13 aa, Homo sapiens
  CDR3 for alpha chain variable domain of TCR clone 106328 (TRAV13-1, TRAJ10)
CAATAGGGNKLTF

SEQ ID NO: 212656 - protein, 12 aa, Homo sapiens
  CDR3 for beta chain variable domain of TCR clone 106328 (TRBV7-3, TRBJ2-1)
CASSFQSGPQCF

SEQ ID NO: 212657 - protein, 13 aa, Homo sapiens
  CDR3 for alpha chain variable domain of TCR clone 106329 (TRAV2, TRAJ20)
CAVEDPSEYKLSF

SEQ ID NO: 212658 - protein, 14 aa, Homo sapiens
  CDR3 for beta chain variable domain of TCR clone 106329 (TRBV27, TRBJ2-2)
CASRPGVNTGELFF

SEQ ID NO: 212659 - protein, 14 aa, Homo sapiens
  CDR3 for alpha chain variable domain of TCR clone 106330 (TRAV23/DV6, TRAJ53)
CAARSGGSNYTLTF

SEQ ID NO: 212660 - protein, 14 aa, Homo sapiens
  CDR3 for beta chain variable domain of TCR clone 106330 (TRBV27, TRBJ1-1)
CASSPQGKRAEAFF

SEQ ID NO: 212661 - protein, 14 aa, Homo sapiens
  CDR3 for alpha chain variable domain of TCR clone 106331 (TRAV3, TRAJ8)
CAVSLNTGFQKLVF

SEQ ID NO: 212662 - protein, 10 aa, Homo sapiens
  CDR3 for beta chain variable domain of TCR clone 106331 (TRBV7-9, TRBJ1-1)
CASSFTEAFF

SEQ ID NO: 212663 - protein, 12 aa, Homo sapiens
  CDR3 for alpha chain variable domain of TCR clone 106332 (TRAV3, TRAJ31)
CAAQRANARLMF

SEQ ID NO: 212664 - protein, 16 aa, Homo sapiens
  CDR3 for beta chain variable domain of TCR clone 106332 (TRBV19, TRBJ2-2)
CASSAAGTGGTGELFF

SEQ ID NO: 212665 - protein, 11 aa, Homo sapiens
  CDR3 for alpha chain variable domain of TCR clone 106333 (TRAV21, TRAJ48)
CAVDGNEKLTF

SEQ ID NO: 212666 - protein, 17 aa, Homo sapiens
  CDR3 for beta chain variable domain of TCR clone 106333 (TRBV20-1, TRBJ2-1)
CSASSSGLAGSYNEQFF

SEQ ID NO: 212667 - protein, 13 aa, Homo sapiens
  CDR3 for alpha chain variable domain of TCR clone 106334 (TRAV2, TRAJ29)
CAAGNSGNTPLVF

SEQ ID NO: 212668 - protein, 16 aa, Homo sapiens
  CDR3 for beta chain variable domain of TCR clone 106334 (TRBV7-9, TRBJ1-2)
CASSPGGGAINYGYTL

SEQ ID NO: 212669 - protein, 13 aa, Homo sapiens
  CDR3 for alpha chain variable domain of TCR clone 106335 (TRAV3, TRAJ30)
CAVRDRGGDKIIF

SEQ ID NO: 212670 - protein, 14 aa, Homo sapiens
  CDR3 for beta chain variable domain of TCR clone 106335 (TRBV5-1, TRBJ1-1)
CASSRTTGDTEAFF

SEQ ID NO: 212671 - protein, 14 aa, Homo sapiens
  CDR3 for alpha chain variable domain of TCR clone 106336 (TRAV17, TRAJ56)
CATVPAVANSKLTF

SEQ ID NO: 212672 - protein, 13 aa, Homo sapiens
  CDR3 for beta chain variable domain of TCR clone 106336 (TRBV12-4, TRBJ2-2)
CASSITGSGELFF

SEQ ID NO: 212673 - protein, 11 aa, Homo sapiens
  CDR3 for alpha chain variable domain of TCR clone 106337 (TRAV21, TRAJ34)
CAVTNTDKLIF

SEQ ID NO: 212674 - protein, 17 aa, Homo sapiens
  CDR3 for beta chain variable domain of TCR clone 106337 (TRBV28, TRBJ2-1)
CASSSARQALTYNEQFF

SEQ ID NO: 212675 - protein, 16 aa, Homo sapiens
  CDR3 for alpha chain variable domain of TCR clone 106338 (TRAV16, TRAJ4)
CALSRMFSGGYNKLIF

SEQ ID NO: 212676 - protein, 14 aa, Homo sapiens
  CDR3 for beta chain variable domain of TCR clone 106338 (TRBV11-2, TRBJ2-3)
CASSRLARTDTQYF

SEQ ID NO: 212677 - protein, 14 aa, Homo sapiens
  CDR3 for alpha chain variable domain of TCR clone 106339 (TRAV26-1, TRAJ34)
CIVRVAYNTDKLIF

SEQ ID NO: 212678 - protein, 15 aa, Homo sapiens
  CDR3 for beta chain variable domain of TCR clone 106339 (TRBV20-1, TRBJ2-7)
CSARVAAAYFYEQYF

SEQ ID NO: 212679 - protein, 15 aa, Homo sapiens
  CDR3 for alpha chain variable domain of TCR clone 106340 (TRAV21, TRAJ53)
CATLNSGGSNYKLTF

SEQ ID NO: 212680 - protein, 16 aa, Homo sapiens
  CDR3 for beta chain variable domain of TCR clone 106340 (TRBV19, TRBJ2-2)
CASSTARAPNTGELFF

SEQ ID NO: 212681 - protein, 13 aa, Homo sapiens
  CDR3 for alpha chain variable domain of TCR clone 106341 (TRAV27, TRAJ6)
CAGGTRGSYIPTF

SEQ ID NO: 212682 - protein, 14 aa, Homo sapiens
  CDR3 for beta chain variable domain of TCR clone 106341 (TRBV24-1, TRBJ1-1)
CATSIPRGDTEAFF

SEQ ID NO: 212683 - protein, 12 aa, Homo sapiens
  CDR3 for alpha chain variable domain of TCR clone 106342 (TRAV12-3, TRAJ40)
CAVSSGTYKYIF

SEQ ID NO: 212684 - protein, 15 aa, Homo sapiens
  CDR3 for beta chain variable domain of TCR clone 106342 (TRBV7-9, TRBJ2-7)
CDSSPGGGLTYEQYF

SEQ ID NO: 212685 - protein, 12 aa, Homo sapiens
  CDR3 for alpha chain variable domain of TCR clone 106343 (TRAV17, TRAJ20)
CATQSNDYKISF

SEQ ID NO: 212686 - protein, 13 aa, Homo sapiens
  CDR3 for beta chain variable domain of TCR clone 106343 (TRBV10-3, TRBJ1-1)
CAIIPEGGTEAFF

SEQ ID NO: 212687 - protein, 13 aa, Homo sapiens
  CDR3 for alpha chain variable domain of TCR clone 106344 (TRAV35, TRAJ42)
CDGLPGSQGNLIF

SEQ ID NO: 212688 - protein, 14 aa, Homo sapiens
  CDR3 for beta chain variable domain of TCR clone 106344 (TRBV19, TRBJ2-1)
CASPTFVLSGEQFF

SEQ ID NO: 212689 - protein, 13 aa, Homo sapiens
  CDR3 for alpha chain variable domain of TCR clone 106345 (TRAV2, TRAJ40)
CAVVTSGTYKYIF

SEQ ID NO: 212690 - protein, 16 aa, Homo sapiens
  CDR3 for beta chain variable domain of TCR clone 106345 (TRBV29-1, TRBJ1-2)
CSVEANRDIANYGHTF

SEQ ID NO: 212691 - protein, 10 aa, Homo sapiens
  CDR3 for alpha chain variable domain of TCR clone 106346 (TRAV1-2, TRAJ16)
CAPRGQKLLF

SEQ ID NO: 212692 - protein, 15 aa, Homo sapiens
  CDR3 for beta chain variable domain of TCR clone 106346 (TRBV28, TRBJ2-1)
CASSIIAGGRSEQFF

SEQ ID NO: 212693 - protein, 11 aa, Homo sapiens
  CDR3 for alpha chain variable domain of TCR clone 106347 (TRAV3, TRAJ21)
CAVGNLNKFHF

SEQ ID NO: 212694 - protein, 16 aa, Homo sapiens
  CDR3 for beta chain variable domain of TCR clone 106347 (TRBV19, TRBJ2-1)
CASSKAGPSSYNEQFF

SEQ ID NO: 212695 - protein, 14 aa, Homo sapiens
  CDR3 for alpha chain variable domain of TCR clone 106348 (TRAV1-2, TRAJ16)
CAVNRFSDGQKLLF

SEQ ID NO: 212696 - protein, 15 aa, Homo sapiens
  CDR3 for beta chain variable domain of TCR clone 106348 (TRBV6-1, TRBJ2-5)
CASSEFPLMGETQYF

SEQ ID NO: 212697 - protein, 15 aa, Homo sapiens
  CDR3 for alpha chain variable domain of TCR clone 106349 (TRAV12-3, TRAJ6)
CAMSATTGGSYIPTF

SEQ ID NO: 212698 - protein, 15 aa, Homo sapiens
  CDR3 for beta chain variable domain of TCR clone 106349 (TRBV7-8, TRBJ2-1)
CASSLADSLYNEQFF

SEQ ID NO: 212699 - protein, 14 aa, Homo sapiens
  CDR3 for alpha chain variable domain of TCR clone 106350 (TRAV13-1, TRAJ35)
CAASKGGFGNVLHC

SEQ ID NO: 212700 - protein, 18 aa, Homo sapiens
  CDR3 for beta chain variable domain of TCR clone 106350 (TRBV27, TRBJ2-3)
CASSLSGTSGRGTDTQYF

SEQ ID NO: 212701 - protein, 12 aa, Homo sapiens
  CDR3 for alpha chain variable domain of TCR clone 106351 (TRAV8-6, TRAJ11)
FAVSSGYSTLTF

SEQ ID NO: 212702 - protein, 11 aa, Homo sapiens
  CDR3 for beta chain variable domain of TCR clone 106351 (TRBV20-1, TRBJ1-5)
CSAQGDQPQHF

SEQ ID NO: 212703 - protein, 13 aa, Homo sapiens
  CDR3 for alpha chain variable domain of TCR clone 106352 (TRAV1-2, TRAJ9)
CAVLNTGGFKTIF

SEQ ID NO: 212704 - protein, 14 aa, Homo sapiens
  CDR3 for beta chain variable domain of TCR clone 106352 (TRBV19, TRBJ2-1)
CASPTFVMSGEQFF

SEQ ID NO: 212705 - protein, 13 aa, Homo sapiens
  CDR3 for alpha chain variable domain of TCR clone 106353 (TRAV13-2, TRAJ15)
CAESNQAGTALIF

SEQ ID NO: 212706 - protein, 11 aa, Homo sapiens
  CDR3 for beta chain variable domain of TCR clone 106353 (TRBV23-1, TRBJ2-7)
SSSGTGLEQYF

SEQ ID NO: 212707 - protein, 14 aa, Homo sapiens
  CDR3 for alpha chain variable domain of TCR clone 106354 (TRAV1-1, TRAJ33)
CAVRPEDSNYQLIW

SEQ ID NO: 212708 - protein, 16 aa, Homo sapiens
  CDR3 for beta chain variable domain of TCR clone 106354 (TRBV20-1, TRBJ1-4)
CSAPGQGLLTNEKLFF

SEQ ID NO: 212709 - protein, 12 aa, Homo sapiens
  CDR3 for alpha chain variable domain of TCR clone 106355 (TRAV21, TRAJ11)
CAATSGYSTLTL

SEQ ID NO: 212710 - protein, 16 aa, Homo sapiens
  CDR3 for beta chain variable domain of TCR clone 106355 (TRBV28, TRBJ2-2)
CASSLEGGSNTGELFF

SEQ ID NO: 212711 - protein, 14 aa, Homo sapiens
  CDR3 for alpha chain variable domain of TCR clone 106356 (TRAV8-4, TRAJ9)
CAVRITTGGFKTIF

SEQ ID NO: 212712 - protein, 15 aa, Homo sapiens
  CDR3 for beta chain variable domain of TCR clone 106356 (TRBV10-2, TRBJ2-6)
CASSEQGTGANVLTF

SEQ ID NO: 212713 - protein, 12 aa, Homo sapiens
  CDR3 for alpha chain variable domain of TCR clone 106357 (TRAV20, TRAJ37)
CWCSSNAGKLIF

SEQ ID NO: 212714 - protein, 11 aa, Homo sapiens
  CDR3 for beta chain variable domain of TCR clone 106357 (TRBV12-4, TRBJ2-3)
CASTATDTQYF

SEQ ID NO: 212715 - protein, 13 aa, Homo sapiens
  CDR3 for alpha chain variable domain of TCR clone 106358 (TRAV8-3, TRAJ43)
CAVVPYNNNDTRF

SEQ ID NO: 212716 - protein, 17 aa, Homo sapiens
  CDR3 for beta chain variable domain of TCR clone 106358 (TRBV7-7, TRBJ1-1)
CASIGDRPNLGVTEAFF

SEQ ID NO: 212717 - protein, 13 aa, Homo sapiens
  CDR3 for alpha chain variable domain of TCR clone 106359 (TRAV13-1, TRAJ21)
CAASIYNFNKFYF

SEQ ID NO: 212718 - protein, 15 aa, Homo sapiens
  CDR3 for beta chain variable domain of TCR clone 106359 (TRBV5-5, TRBJ2-7)
CASSWEAGGPYEQYF

SEQ ID NO: 212719 - protein, 13 aa, Homo sapiens
  CDR3 for alpha chain variable domain of TCR clone 106360 (TRAV2, TRAJ15)
CAVASQAGTALIF

SEQ ID NO: 212720 - protein, 15 aa, Homo sapiens
  CDR3 for beta chain variable domain of TCR clone 106360 (TRBV6-5, TRBJ2-1)
CASSYDAGAGNEQFF

SEQ ID NO: 212721 - protein, 15 aa, Homo sapiens
  CDR3 for alpha chain variable domain of TCR clone 106361 (TRAV1-2, TRAJ26)
CAVRDLITMVRILSL

SEQ ID NO: 212722 - protein, 14 aa, Homo sapiens
  CDR3 for beta chain variable domain of TCR clone 106361 (TRBV27, TRBJ2-1)
CASSATGGYNEQFF

SEQ ID NO: 212723 - protein, 13 aa, Homo sapiens
  CDR3 for alpha chain variable domain of TCR clone 106362 (TRAV23/DV6, TRAJ22)
FAPWGGSARQLTF

SEQ ID NO: 212724 - protein, 14 aa, Homo sapiens
  CDR3 for beta chain variable domain of TCR clone 106362 (TRBV18, TRBJ2-7)
CASSPTSGGYEQYF

SEQ ID NO: 212725 - protein, 16 aa, Homo sapiens
  CDR3 for alpha chain variable domain of TCR clone 106363 (TRAV3, TRAJ37)
CAVRPHGSGNTVKLIF

SEQ ID NO: 212726 - protein, 17 aa, Homo sapiens
  CDR3 for beta chain variable domain of TCR clone 106363 (TRBV5-1, TRBJ2-5)
CASSPVALGQNQETQYF

SEQ ID NO: 212727 - protein, 16 aa, Homo sapiens
  CDR3 for alpha chain variable domain of TCR clone 106364 (TRAV8-3, TRAJ13)
CAVGAYPSGGYQKVTF

SEQ ID NO: 212728 - protein, 15 aa, Homo sapiens
  CDR3 for beta chain variable domain of TCR clone 106364 (TRBV6-1, TRBJ2-3)
CASSERGGITDTQYF

SEQ ID NO: 212729 - protein, 12 aa, Homo sapiens
  CDR3 for alpha chain variable domain of TCR clone 106365 (TRAV3, TRAJ43)
CAVRDPNNDMRF

SEQ ID NO: 212730 - protein, 13 aa, Homo sapiens
  CDR3 for beta chain variable domain of TCR clone 106365 (TRBV19, TRBJ1-2)
CASSVPGQDGDTF

SEQ ID NO: 212731 - protein, 16 aa, Homo sapiens
  CDR3 for alpha chain variable domain of TCR clone 106366 (TRAV3, TRAJ23)
CAVKIGIYNQGGKLIF

SEQ ID NO: 212732 - protein, 17 aa, Homo sapiens
  CDR3 for beta chain variable domain of TCR clone 106366 (TRBV10-3, TRBJ2-6)
CAISESTAPSGANVLTL

SEQ ID NO: 212733 - protein, 11 aa, Homo sapiens
  CDR3 for alpha chain variable domain of TCR clone 106367 (TRAV26-1, TRAJ27)
CIDPNAGKSTF

SEQ ID NO: 212734 - protein, 18 aa, Homo sapiens
  CDR3 for beta chain variable domain of TCR clone 106367 (TRBV7-9, TRBJ2-6)
CASSFPGAWISGANVLTF

SEQ ID NO: 212735 - protein, 15 aa, Homo sapiens
  CDR3 for alpha chain variable domain of TCR clone 106368 (TRAV4, TRAJ39)
CLVGPNNNAGNMRTF

SEQ ID NO: 212736 - protein, 14 aa, Homo sapiens
  CDR3 for beta chain variable domain of TCR clone 106368 (TRBV11-2, TRBJ2-5)
CASSRTGGIETQYF

SEQ ID NO: 212737 - protein, 14 aa, Homo sapiens
  CDR3 for alpha chain variable domain of TCR clone 106369 (TRAV26-1, TRAJ48)
CIVRVPFGNEKLTF

SEQ ID NO: 212738 - protein, 16 aa, Homo sapiens
  CDR3 for beta chain variable domain of TCR clone 106369 (TRBV18, TRBJ2-7)
CASSPYLSIRGDEQYF

SEQ ID NO: 212739 - protein, 14 aa, Homo sapiens
  CDR3 for alpha chain variable domain of TCR clone 106370 (TRAV13-1, TRAJ44)
CAAKATGTASKLTY

SEQ ID NO: 212740 - protein, 17 aa, Homo sapiens
  CDR3 for beta chain variable domain of TCR clone 106370 (TRBV7-3, TRBJ2-3)
CASSLMKRMRGADTQYF

SEQ ID NO: 212741 - protein, 17 aa, Homo sapiens
  CDR3 for alpha chain variable domain of TCR clone 106371 (TRAV3, TRAJ6)
CAVRDGPRAGGSYIPTF

SEQ ID NO: 212742 - protein, 15 aa, Homo sapiens
  CDR3 for beta chain variable domain of TCR clone 106371 (TRBV11-2, TRBJ1-6)
CASSLDPWAVSPLHF

SEQ ID NO: 212743 - protein, 13 aa, Homo sapiens
  CDR3 for alpha chain variable domain of TCR clone 106372 (TRAV21, TRAJ27)
CAARPANAGKSTF

SEQ ID NO: 212744 - protein, 12 aa, Homo sapiens
  CDR3 for beta chain variable domain of TCR clone 106372 (TRBV11-2, TRBJ2-2)
CASSLGGGELFF

SEQ ID NO: 212745 - protein, 13 aa, Homo sapiens
  CDR3 for alpha chain variable domain of TCR clone 106373 (TRAV35, TRAJ43)
CAGYPYNNNDMRF

SEQ ID NO: 212746 - protein, 15 aa, Homo sapiens
  CDR3 for beta chain variable domain of TCR clone 106373 (TRBV25-1, TRBJ1-4)
CATSKRIATNEKLFF

SEQ ID NO: 212747 - protein, 11 aa, Homo sapiens
  CDR3 for alpha chain variable domain of TCR clone 106374 (TRAV2, TRAJ33)
CAVESNYQLIW

SEQ ID NO: 212748 - protein, 15 aa, Homo sapiens
  CDR3 for beta chain variable domain of TCR clone 106374 (TRBV19, TRBJ1-1)
CASTSGQIQKTEAFF

SEQ ID NO: 212749 - protein, 11 aa, Homo sapiens
  CDR3 for alpha chain variable domain of TCR clone 106375 (TRAV2, TRAJ33)
CAVDSNYQLIW

SEQ ID NO: 212750 - protein, 14 aa, Homo sapiens
  CDR3 for beta chain variable domain of TCR clone 106375 (TRBV11-2, TRBJ2-3)
CASNRLARTDTQYF

SEQ ID NO: 212751 - protein, 16 aa, Homo sapiens
  CDR3 for alpha chain variable domain of TCR clone 106376 (TRAV27, TRAJ52)
CAGAPAGGTSYGKLTF

SEQ ID NO: 212752 - protein, 12 aa, Homo sapiens
  CDR3 for beta chain variable domain of TCR clone 106376 (TRBV27, TRBJ2-1)
CASRGFYNGQFF

SEQ ID NO: 212753 - protein, 13 aa, Homo sapiens
  CDR3 for alpha chain variable domain of TCR clone 106377 (TRAV13-2, TRAJ48)
CAEMDFGNEKLTF

SEQ ID NO: 212754 - protein, 13 aa, Homo sapiens
  CDR3 for beta chain variable domain of TCR clone 106377 (TRBV7-2, TRBJ2-1)
CASSLGQLNEQFF

SEQ ID NO: 212755 - protein, 13 aa, Homo sapiens
  CDR3 for alpha chain variable domain of TCR clone 106378 (TRAV1-2, TRAJ9)
CAVLNTGGFKTIF

SEQ ID NO: 212756 - protein, 15 aa, Homo sapiens
  CDR3 for beta chain variable domain of TCR clone 106378 (TRBV5-1, TRBJ2-5)
CASSFKGGDQETQYF

SEQ ID NO: 212757 - protein, 14 aa, Homo sapiens
  CDR3 for alpha chain variable domain of TCR clone 106379 (TRAV35, TRAJ39)
CAGQLGNAGNMLTF

SEQ ID NO: 212758 - protein, 11 aa, Homo sapiens
  CDR3 for beta chain variable domain of TCR clone 106379 (TRBV5-5, TRBJ2-2)
CASSLSRGEFF

SEQ ID NO: 212759 - protein, 12 aa, Homo sapiens
  CDR3 for alpha chain variable domain of TCR clone 106380 (TRAV4, TRAJ26)
CLVGDYGQNFVF

SEQ ID NO: 212760 - protein, 16 aa, Homo sapiens
  CDR3 for beta chain variable domain of TCR clone 106380 (TRBV7-2, TRBJ1-2)
CASSSNQDRRGHGYSF

SEQ ID NO: 212761 - protein, 10 aa, Homo sapiens
  CDR3 for alpha chain variable domain of TCR clone 106381 (TRAV8-4, TRAJ43)
CAVSADDMRF

SEQ ID NO: 212762 - protein, 15 aa, Homo sapiens
  CDR3 for beta chain variable domain of TCR clone 106381 (TRBV4-3, TRBJ2-7)
CASSQGGRGIYEQYF

SEQ ID NO: 212763 - protein, 14 aa, Homo sapiens
  CDR3 for alpha chain variable domain of TCR clone 106382 (TRAV12-2, TRAJ36)
CAVKISTGANNLFF

SEQ ID NO: 212764 - protein, 14 aa, Homo sapiens
  CDR3 for beta chain variable domain of TCR clone 106382 (TRBV25-1, TRBJ1-2)
CASSDTTGVVGYSF

SEQ ID NO: 212765 - protein, 14 aa, Homo sapiens
  CDR3 for alpha chain variable domain of TCR clone 106383 (TRAV1-2, TRAJ16)
CAVNRFSDGQKLLF

SEQ ID NO: 212766 - protein, 16 aa, Homo sapiens
  CDR3 for beta chain variable domain of TCR clone 106383 (TRBV6-5, TRBJ1-2)
CASRRPITQGAYGYTF

SEQ ID NO: 212767 - protein, 16 aa, Homo sapiens
  CDR3 for alpha chain variable domain of TCR clone 106384 (TRAV30, TRAJ24)
CGTEIVDADSWGKFQF

SEQ ID NO: 212768 - protein, 15 aa, Homo sapiens
  CDR3 for beta chain variable domain of TCR clone 106384 (TRBV7-2, TRBJ2-2)
CASRRLGQNTGELFF

SEQ ID NO: 212769 - protein, 16 aa, Homo sapiens
  CDR3 for alpha chain variable domain of TCR clone 106385 (TRAV2, TRAJ23)
CVGGKLIFGQGTELSV

SEQ ID NO: 212770 - protein, 20 aa, Homo sapiens
  CDR3 for beta chain variable domain of TCR clone 106385 (TRBV20-1, TRBJ2-5)
CSARAGLAGRLAGHLETQYL

SEQ ID NO: 212771 - protein, 17 aa, Homo sapiens
  CDR3 for alpha chain variable domain of TCR clone 106386 (TRAV13-1, TRAJ52)
CAASSGAGGTSYGKLTF

SEQ ID NO: 212772 - protein, 15 aa, Homo sapiens
  CDR3 for beta chain variable domain of TCR clone 106386 (TRBV5-1, TRBJ2-3)
CASRNQAGSTDTQYF

SEQ ID NO: 212773 - protein, 14 aa, Homo sapiens
  CDR3 for alpha chain variable domain of TCR clone 106387 (TRAV2, TRAJ26)
CAVERDNYGQNFVF

SEQ ID NO: 212774 - protein, 15 aa, Homo sapiens
  CDR3 for beta chain variable domain of TCR clone 106387 (TRBV28, TRBJ2-4)
CASGAPLLAKNIQYF

SEQ ID NO: 212775 - protein, 13 aa, Homo sapiens
  CDR3 for alpha chain variable domain of TCR clone 106388 (TRAV12-2, TRAJ37)
CAGGSGNTGKLIF

SEQ ID NO: 212776 - protein, 13 aa, Homo sapiens
  CDR3 for beta chain variable domain of TCR clone 106388 (TRBV7-9, TRBJ1-2)
CASSLKQNYGYTF

SEQ ID NO: 212777 - protein, 16 aa, Homo sapiens
  CDR3 for alpha chain variable domain of TCR clone 106389 (TRAV8-2, TRAJ7)
CVVSEGPYYWNNRLAF

SEQ ID NO: 212778 - protein, 15 aa, Homo sapiens
  CDR3 for beta chain variable domain of TCR clone 106389 (TRBV27, TRBJ2-3)
CASSLGLAATDTQYF

SEQ ID NO: 212779 - protein, 14 aa, Homo sapiens
  CDR3 for alpha chain variable domain of TCR clone 106390 (TRAV26-1, TRAJ45)
CIEVTGGGADGLNF

SEQ ID NO: 212780 - protein, 19 aa, Homo sapiens
  CDR3 for beta chain variable domain of TCR clone 106390 (TRBV19, TRBJ2-2)
CASTRPGLAGGRVTGELFF

SEQ ID NO: 212781 - protein, 14 aa, Homo sapiens
  CDR3 for alpha chain variable domain of TCR clone 106391 (TRAV3, TRAJ22)
CAVRDYGSAKQLTF

SEQ ID NO: 212782 - protein, 13 aa, Homo sapiens
  CDR3 for beta chain variable domain of TCR clone 106391 (TRBV11-2, TRBJ2-5)
CASGHGAKETQYF

SEQ ID NO: 212783 - protein, 11 aa, Homo sapiens
  CDR3 for alpha chain variable domain of TCR clone 106392 (TRAV21, TRAJ39)
LLVNAGNMLTF

SEQ ID NO: 212784 - protein, 13 aa, Homo sapiens
  CDR3 for beta chain variable domain of TCR clone 106392 (TRBV7-2, TRBJ2-4)
CASSREHANIQYF

SEQ ID NO: 212785 - protein, 17 aa, Homo sapiens
  CDR3 for alpha chain variable domain of TCR clone 106393 (TRAV8-1, TRAJ42)
CAVKWGNYGGSQGNLIF

SEQ ID NO: 212786 - protein, 16 aa, Homo sapiens
  CDR3 for beta chain variable domain of TCR clone 106393 (TRBV11-2, TRBJ2-2)
CASSLRTGNLIGELFF

SEQ ID NO: 212787 - protein, 14 aa, Homo sapiens
  CDR3 for alpha chain variable domain of TCR clone 106394 (TRAV13-1, TRAJ44)
CAALDTGTASKLTF

SEQ ID NO: 212788 - protein, 16 aa, Homo sapiens
  CDR3 for beta chain variable domain of TCR clone 106394 (TRBV2, TRBJ2-7)
CASSEPWTGPSYEQYF

SEQ ID NO: 212789 - protein, 13 aa, Homo sapiens
  CDR3 for alpha chain variable domain of TCR clone 106395 (TRAV8-3, TRAJ28)
CAVGTVGSYQLTF

SEQ ID NO: 212790 - protein, 14 aa, Homo sapiens
  CDR3 for beta chain variable domain of TCR clone 106395 (TRBV7-2, TRBJ2-7)
CASRSQGAAYEQYF

SEQ ID NO: 212791 - protein, 13 aa, Homo sapiens
  CDR3 for alpha chain variable domain of TCR clone 106396 (TRAV21, TRAJ27)
CAARPGNAGKSTF

SEQ ID NO: 212792 - protein, 14 aa, Homo sapiens
  CDR3 for beta chain variable domain of TCR clone 106396 (TRBV11-2, TRBJ1-2)
CASSLGTANYGYTF

SEQ ID NO: 212793 - protein, 10 aa, Homo sapiens
  CDR3 for alpha chain variable domain of TCR clone 106397 (TRAV21, TRAJ31)
CAVDNARLMF

SEQ ID NO: 212794 - protein, 13 aa, Homo sapiens
  CDR3 for beta chain variable domain of TCR clone 106397 (TRBV4-1, TRBJ1-1)
CASSRKMNTEAFS

SEQ ID NO: 212795 - protein, 13 aa, Homo sapiens
  CDR3 for alpha chain variable domain of TCR clone 106398 (TRAV27, TRAJ18)
CAGRGSTLGRLYF

SEQ ID NO: 212796 - protein, 15 aa, Homo sapiens
  CDR3 for beta chain variable domain of TCR clone 106398 (TRBV5-4, TRBJ1-3)
CASSLDMPPGNTIYF

SEQ ID NO: 212797 - protein, 15 aa, Homo sapiens
  CDR3 for alpha chain variable domain of TCR clone 106399 (TRAV3, TRAJ22)
CAVRDRGGSAGQLTF

SEQ ID NO: 212798 - protein, 15 aa, Homo sapiens
  CDR3 for beta chain variable domain of TCR clone 106399 (TRBV11-2, TRBJ1-1)
CASSSRSSLLLSLDK

SEQ ID NO: 212799 - protein, 12 aa, Homo sapiens
  CDR3 for alpha chain variable domain of TCR clone 106400 (TRAV13-1, TRAJ21)
CAAKEGFNKFYF

SEQ ID NO: 212800 - protein, 14 aa, Homo sapiens
  CDR3 for beta chain variable domain of TCR clone 106400 (TRBV5-4, TRBJ1-1)
CASSLHSRRDEAFF

SEQ ID NO: 212801 - protein, 14 aa, Homo sapiens
  CDR3 for alpha chain variable domain of TCR clone 106401 (TRAV16, TRAJ57)
CALPTQGGSEKLVF

SEQ ID NO: 212802 - protein, 20 aa, Homo sapiens
  CDR3 for beta chain variable domain of TCR clone 106401 (TRBV28, TRBJ1-3)
CASWGGASLWKHHIFWRGKL

SEQ ID NO: 212803 - protein, 15 aa, Homo sapiens
  CDR3 for alpha chain variable domain of TCR clone 106402 (TRAV13-1, TRAJ36)
CAASIRQTGANSLFF

SEQ ID NO: 212804 - protein, 15 aa, Homo sapiens
  CDR3 for beta chain variable domain of TCR clone 106402 (TRBV3-1, TRBJ2-1)
CASSQQPSGGNEQFF

SEQ ID NO: 212805 - protein, 13 aa, Homo sapiens
  CDR3 for alpha chain variable domain of TCR clone 106403 (TRAV13-1, TRAJ33)
CAAWTDSNYQLIW

SEQ ID NO: 212806 - protein, 15 aa, Homo sapiens
  CDR3 for beta chain variable domain of TCR clone 106403 (TRBV7-3, TRBJ2-2)
CASSETGQGTGELFF

SEQ ID NO: 212807 - protein, 13 aa, Homo sapiens
  CDR3 for alpha chain variable domain of TCR clone 106404 (TRAV5, TRAJ30)
CAEIANRDDKIIF

SEQ ID NO: 212808 - protein, 14 aa, Homo sapiens
  CDR3 for beta chain variable domain of TCR clone 106404 (TRBV4-1, TRBJ2-2)
CASSQAVNTGDLFF

SEQ ID NO: 212809 - protein, 13 aa, Homo sapiens
  CDR3 for alpha chain variable domain of TCR clone 106405 (TRAV12-1, TRAJ33)
CGDAPASNYQLIW

SEQ ID NO: 212810 - protein, 12 aa, Homo sapiens
  CDR3 for beta chain variable domain of TCR clone 106405 (TRBV11-2, TRBJ2-2)
CASSLGGGELFF

SEQ ID NO: 212811 - protein, 12 aa, Homo sapiens
  CDR3 for alpha chain variable domain of TCR clone 106406 (TRAV13-1, TRAJ20)
CAASMGDYKLSF

SEQ ID NO: 212812 - protein, 14 aa, Homo sapiens
  CDR3 for beta chain variable domain of TCR clone 106406 (TRBV19, TRBJ2-1)
CASPTFVLSGEQFF

SEQ ID NO: 212813 - protein, 15 aa, Homo sapiens
  CDR3 for alpha chain variable domain of TCR clone 106407 (TRAV3, TRAJ20)
CGVRDIKLSDYKLSF

SEQ ID NO: 212814 - protein, 15 aa, Homo sapiens
  CDR3 for beta chain variable domain of TCR clone 106407 (TRBV7-9, TRBJ1-6)
CASSSPGRGNSPLHF

SEQ ID NO: 212815 - protein, 15 aa, Homo sapiens
  CDR3 for alpha chain variable domain of TCR clone 106408 (TRAV2, TRAJ9)
CAVEDRGTGGFKTIF

SEQ ID NO: 212816 - protein, 20 aa, Homo sapiens
  CDR3 for beta chain variable domain of TCR clone 106408 (TRBV28, TRBJ2-1)
CASTPIGRSPGLAGGNEQFF

SEQ ID NO: 212817 - protein, 13 aa, Homo sapiens
  CDR3 for alpha chain variable domain of TCR clone 106409 (TRAV23/DV6, TRAJ22)
CAPWGGSARQLTF

SEQ ID NO: 212818 - protein, 14 aa, Homo sapiens
  CDR3 for beta chain variable domain of TCR clone 106409 (TRBV18, TRBJ2-7)
CASSPTSGGYEQYV

SEQ ID NO: 212819 - protein, 14 aa, Homo sapiens
  CDR3 for alpha chain variable domain of TCR clone 106410 (TRAV12-3, TRAJ12)
CAMSEVDSSYKLIV

SEQ ID NO: 212820 - protein, 12 aa, Homo sapiens
  CDR3 for beta chain variable domain of TCR clone 106410 (TRBV18, TRBJ1-4)
CASSPSREKLFF

SEQ ID NO: 212821 - protein, 17 aa, Homo sapiens
  CDR3 for alpha chain variable domain of TCR clone 106411 (TRAV38-2/DV8, TRAJ45)
CAYRSRYSGGGADGLTF

SEQ ID NO: 212822 - protein, 14 aa, Homo sapiens
  CDR3 for beta chain variable domain of TCR clone 106411 (TRBV7-2, TRBJ2-7)
CASSPKTSFYEQYF

SEQ ID NO: 212823 - protein, 11 aa, Homo sapiens
  CDR3 for alpha chain variable domain of TCR clone 106412 (TRAV12-3, TRAJ49)
CAANTGNQFYF

SEQ ID NO: 212824 - protein, 16 aa, Homo sapiens
  CDR3 for beta chain variable domain of TCR clone 106412 (TRBV20-1, TRBJ1-4)
CSAPGQGLLTNEKLFF

SEQ ID NO: 212825 - protein, 13 aa, Homo sapiens
  CDR3 for alpha chain variable domain of TCR clone 106413 (TRAV3, TRAJ21)
CSVREPDFNKFYF

SEQ ID NO: 212826 - protein, 18 aa, Homo sapiens
  CDR3 for beta chain variable domain of TCR clone 106413 (TRBV11-2, TRBJ2-3)
CASSLGGASRGAPNTQYF

SEQ ID NO: 212827 - protein, 12 aa, Homo sapiens
  CDR3 for alpha chain variable domain of TCR clone 106414 (TRAV1-2, TRAJ26)
CAVRYYGQNFAF

SEQ ID NO: 212828 - protein, 14 aa, Homo sapiens
  CDR3 for beta chain variable domain of TCR clone 106414 (TRBV11-1, TRBJ2-7)
CASSFRQGSYEQYF

SEQ ID NO: 212829 - protein, 15 aa, Homo sapiens
  CDR3 for alpha chain variable domain of TCR clone 106415 (TRAV4, TRAJ8)
CLVGGQHTGFQKLVF

SEQ ID NO: 212830 - protein, 15 aa, Homo sapiens
  CDR3 for beta chain variable domain of TCR clone 106415 (TRBV7-9, TRBJ2-5)
CASSNRDYLQETQYF

SEQ ID NO: 212831 - protein, 15 aa, Homo sapiens
  CDR3 for alpha chain variable domain of TCR clone 106416 (TRAV26-1, TRAJ17)
CIVRVVKAAGNKLTF

SEQ ID NO: 212832 - protein, 17 aa, Homo sapiens
  CDR3 for beta chain variable domain of TCR clone 106416 (TRBV4-1, TRBJ2-3)
CASSQDPAGGPLDTQYF

SEQ ID NO: 212833 - protein, 12 aa, Homo sapiens
  CDR3 for alpha chain variable domain of TCR clone 106417 (TRAV21, TRAJ11)
CAATSGYSTLTF

SEQ ID NO: 212834 - protein, 14 aa, Homo sapiens
  CDR3 for beta chain variable domain of TCR clone 106417 (TRBV20-1, TRBJ2-7)
CSAPELVGVGEQYF

SEQ ID NO: 212835 - protein, 14 aa, Homo sapiens
  CDR3 for alpha chain variable domain of TCR clone 106418 (TRAV1-2, TRAJ16)
CAVNRFSDGQKLLF

SEQ ID NO: 212836 - protein, 16 aa, Homo sapiens
  CDR3 for beta chain variable domain of TCR clone 106418 (TRBV29-1, TRBJ2-7)
CSVVVVGTSGSYEQYF

SEQ ID NO: 212837 - protein, 12 aa, Homo sapiens
  CDR3 for alpha chain variable domain of TCR clone 106419 (TRAV22, TRAJ29)
CAPPSGNTPLVF

SEQ ID NO: 212838 - protein, 16 aa, Homo sapiens
  CDR3 for beta chain variable domain of TCR clone 106419 (TRBV11-2, TRBJ2-7)
CASSLGAGPTSSTSGR

SEQ ID NO: 212839 - protein, 14 aa, Homo sapiens
  CDR3 for alpha chain variable domain of TCR clone 106420 (TRAV12-2, TRAJ44)
CAVNKAGTASKLTF

SEQ ID NO: 212840 - protein, 12 aa, Homo sapiens
  CDR3 for beta chain variable domain of TCR clone 106420 (TRBV19, TRBJ1-4)
CASKDWHGGLFF

SEQ ID NO: 212841 - protein, 15 aa, Homo sapiens
  CDR3 for alpha chain variable domain of TCR clone 106421 (TRAV12-3, TRAJ6)
CAMSATTGESYIPTF

SEQ ID NO: 212842 - protein, 16 aa, Homo sapiens
  CDR3 for beta chain variable domain of TCR clone 106421 (TRBV20-1, TRBJ1-2)
CSASMGQGVANYGYTF

SEQ ID NO: 212843 - protein, 16 aa, Homo sapiens
  CDR3 for alpha chain variable domain of TCR clone 106422 (TRAV21, TRAJ52)
CAVTNAGGTSHGKLTF

SEQ ID NO: 212844 - protein, 11 aa, Homo sapiens
  CDR3 for beta chain variable domain of TCR clone 106422 (TRBV2, TRBJ1-1)
CASREGTEAFF

SEQ ID NO: 212845 - protein, 15 aa, Homo sapiens
  CDR3 for alpha chain variable domain of TCR clone 106423 (TRAV8-3, TRAJ45)
CASSYSGGGADGLTF

SEQ ID NO: 212846 - protein, 15 aa, Homo sapiens
  CDR3 for beta chain variable domain of TCR clone 106423 (TRBV10-1, TRBJ2-3)
CASSATSGGFDTQYF

SEQ ID NO: 212847 - protein, 14 aa, Homo sapiens
  CDR3 for alpha chain variable domain of TCR clone 106424 (TRAV12-1, TRAJ17)
CVVNYKAAGNKLTF

SEQ ID NO: 212848 - protein, 15 aa, Homo sapiens
  CDR3 for beta chain variable domain of TCR clone 106424 (TRBV7-6, TRBJ1-1)
CASSPQGGANTEAFF

SEQ ID NO: 212849 - protein, 11 aa, Homo sapiens
  CDR3 for alpha chain variable domain of TCR clone 106425 (TRAV3, TRAJ21)
CAVGNFNKFYF

SEQ ID NO: 212850 - protein, 14 aa, Homo sapiens
  CDR3 for beta chain variable domain of TCR clone 106425 (TRBV7-9, TRBJ2-5)
CASSLDTAQETQYF

SEQ ID NO: 212851 - protein, 11 aa, Homo sapiens
  CDR3 for alpha chain variable domain of TCR clone 106426 (TRAV21, TRAJ31)
CAVRNNARLMF

SEQ ID NO: 212852 - protein, 13 aa, Homo sapiens
  CDR3 for beta chain variable domain of TCR clone 106426 (TRBV7-3, TRBJ1-1)
CASSQDWGAEAFF

SEQ ID NO: 212853 - protein, 15 aa, Homo sapiens
  CDR3 for alpha chain variable domain of TCR clone 106427 (TRAV17, TRAJ57)
CATGPSQGGSEKPVF

SEQ ID NO: 212854 - protein, 14 aa, Homo sapiens
  CDR3 for beta chain variable domain of TCR clone 106427 (TRBV11-2, TRBJ1-2)
CASSLYRGNYGYTF

SEQ ID NO: 212855 - protein, 15 aa, Homo sapiens
  CDR3 for alpha chain variable domain of TCR clone 106428 (TRAV27, TRAJ38)
CAARRNAGNNRKLML

SEQ ID NO: 212856 - protein, 13 aa, Homo sapiens
  CDR3 for beta chain variable domain of TCR clone 106428 (TRBV12-5, TRBJ2-3)
CASGDRQSDTQYF

SEQ ID NO: 212857 - protein, 16 aa, Homo sapiens
  CDR3 for alpha chain variable domain of TCR clone 106429 (TRAV29/DV5, TRAJ36)
CAASAHYQSGANNLFF

SEQ ID NO: 212858 - protein, 16 aa, Homo sapiens
  CDR3 for beta chain variable domain of TCR clone 106429 (TRBV4-3, TRBJ2-3)
CASSQELAGDADTQYF

SEQ ID NO: 212859 - protein, 14 aa, Homo sapiens
  CDR3 for alpha chain variable domain of TCR clone 106430 (TRAV1-2, TRAJ16)
CAVNRFSDGQKLLF

SEQ ID NO: 212860 - protein, 16 aa, Homo sapiens
  CDR3 for beta chain variable domain of TCR clone 106430 (TRBV12-4, TRBJ1-5)
YASSRPVGGSNQPQHF

SEQ ID NO: 212861 - protein, 11 aa, Homo sapiens
  CDR3 for alpha chain variable domain of TCR clone 106431 (TRAV1-2, TRAJ31)
CAVNNNARLMF

SEQ ID NO: 212862 - protein, 14 aa, Homo sapiens
  CDR3 for beta chain variable domain of TCR clone 106431 (TRBV28, TRBJ2-1)
CQQYNGGGRSEQFF

SEQ ID NO: 212863 - protein, 14 aa, Homo sapiens
  CDR3 for alpha chain variable domain of TCR clone 106432 (TRAV1-2, TRAJ16)
CAVNRFSDGQKLLF

SEQ ID NO: 212864 - protein, 14 aa, Homo sapiens
  CDR3 for beta chain variable domain of TCR clone 106432 (TRBV7-8, TRBJ2-5)
CASSATGGQETQYF

SEQ ID NO: 212865 - protein, 11 aa, Homo sapiens
  CDR3 for alpha chain variable domain of TCR clone 106433 (TRAV12-2, TRAJ43)
CASPIGNDMRF

SEQ ID NO: 212866 - protein, 12 aa, Homo sapiens
  CDR3 for beta chain variable domain of TCR clone 106433 (TRBV3-1, TRBJ2-1)
CASSQGSSGQFF

SEQ ID NO: 212867 - protein, 13 aa, Homo sapiens
  CDR3 for alpha chain variable domain of TCR clone 106434 (TRAV41, TRAJ48)
SVPVNFGNEKLTF

SEQ ID NO: 212868 - protein, 16 aa, Homo sapiens
  CDR3 for beta chain variable domain of TCR clone 106434 (TRBV12-5, TRBJ2-5)
CASGPRTSGNQETHYF

SEQ ID NO: 212869 - protein, 14 aa, Homo sapiens
  CDR3 for alpha chain variable domain of TCR clone 106435 (TRAV13-1, TRAJ52)
CAAAGGTSYGKLTF

SEQ ID NO: 212870 - protein, 17 aa, Homo sapiens
  CDR3 for beta chain variable domain of TCR clone 106435 (TRBV19, TRBJ1-1)
CASSKSGTGGPYTEDFF

SEQ ID NO: 212871 - protein, 15 aa, Homo sapiens
  CDR3 for alpha chain variable domain of TCR clone 106436 (TRAV12-3, TRAJ6)
CAMSATTGGSYIPTF

SEQ ID NO: 212872 - protein, 14 aa, Homo sapiens
  CDR3 for beta chain variable domain of TCR clone 106436 (TRBV4-2, TRBJ2-1)
CASGLDRAYNEQFF

SEQ ID NO: 212873 - protein, 17 aa, Homo sapiens
  CDR3 for alpha chain variable domain of TCR clone 106437 (TRAV3, TRAJ38)
CAVRACLNAGNNRKLIW

SEQ ID NO: 212874 - protein, 14 aa, Homo sapiens
  CDR3 for beta chain variable domain of TCR clone 106437 (TRBV5-5, TRBJ1-5)
CASSGQGVDQPQHF

SEQ ID NO: 212875 - protein, 15 aa, Homo sapiens
  CDR3 for alpha chain variable domain of TCR clone 106438 (TRAV8-2, TRAJ40)
CVVLGTTSGTYKYIF

SEQ ID NO: 212876 - protein, 16 aa, Homo sapiens
  CDR3 for beta chain variable domain of TCR clone 106438 (TRBV7-3, TRBJ2-1)
CASSLEGYRSYYEQFF

SEQ ID NO: 212877 - protein, 13 aa, Homo sapiens
  CDR3 for alpha chain variable domain of TCR clone 106439 (TRAV8-6, TRAJ21)
CAVSPSSLNKSYF

SEQ ID NO: 212878 - protein, 14 aa, Homo sapiens
  CDR3 for beta chain variable domain of TCR clone 106439 (TRBV7-9, TRBJ2-5)
CASSLDTAQETQYF

SEQ ID NO: 212879 - protein, 13 aa, Homo sapiens
  CDR3 for alpha chain variable domain of TCR clone 106440 (TRAV35, TRAJ21)
CAGQLTNFNKFYF

SEQ ID NO: 212880 - protein, 11 aa, Homo sapiens
  CDR3 for beta chain variable domain of TCR clone 106440 (TRBV7-6, TRBJ2-5)
CASSSQETQYF

SEQ ID NO: 212881 - protein, 14 aa, Homo sapiens
  CDR3 for alpha chain variable domain of TCR clone 106441 (TRAV12-2, TRAJ17)
CAVLFKAAGNKLTF

SEQ ID NO: 212882 - protein, 14 aa, Homo sapiens
  CDR3 for beta chain variable domain of TCR clone 106441 (TRBV15, TRBJ2-3)
CATRSGTSTDTQYF

SEQ ID NO: 212883 - protein, 16 aa, Homo sapiens
  CDR3 for alpha chain variable domain of TCR clone 106442 (TRAV12-1, TRAJ43)
CVVNPHRFGAGTRLTV

SEQ ID NO: 212884 - protein, 16 aa, Homo sapiens
  CDR3 for beta chain variable domain of TCR clone 106442 (TRBV27, TRBJ2-2)
CASSSTGSGDTGELFF

SEQ ID NO: 212885 - protein, 14 aa, Homo sapiens
  CDR3 for alpha chain variable domain of TCR clone 106443 (TRAV1-2, TRAJ16)
CAVDRFSDGQKLLF

SEQ ID NO: 212886 - protein, 16 aa, Homo sapiens
  CDR3 for beta chain variable domain of TCR clone 106443 (TRBV19, TRBJ2-1)
CASSKAGPSSYNEQFF

SEQ ID NO: 212887 - protein, 10 aa, Homo sapiens
  CDR3 for alpha chain variable domain of TCR clone 106444 (TRAV12-3, TRAJ18)
CAMSAEAQAW

SEQ ID NO: 212888 - protein, 13 aa, Homo sapiens
  CDR3 for beta chain variable domain of TCR clone 106444 (TRBV15, TRBJ1-6)
CATSGGLNSPLHF

SEQ ID NO: 212889 - protein, 11 aa, Homo sapiens
  CDR3 for alpha chain variable domain of TCR clone 106445 (TRAV1-1, TRAJ23)
CAVRQGGKLIF

SEQ ID NO: 212890 - protein, 18 aa, Homo sapiens
  CDR3 for beta chain variable domain of TCR clone 106445 (TRBV4-1, TRBJ1-5)
CASSQDPRGQGLNQPQHS

SEQ ID NO: 212891 - protein, 14 aa, Homo sapiens
  CDR3 for alpha chain variable domain of TCR clone 106446 (TRAV1-2, TRAJ23)
CLLPLCCQGGKLIF

SEQ ID NO: 212892 - protein, 16 aa, Homo sapiens
  CDR3 for beta chain variable domain of TCR clone 106446 (TRBV11-2, TRBJ1-1)
CASSLRQGGEHSKAFF

SEQ ID NO: 212893 - protein, 17 aa, Homo sapiens
  CDR3 for alpha chain variable domain of TCR clone 106447 (TRAV23/DV6, TRAJ57)
CAASSTLSQGGSEKLVF

SEQ ID NO: 212894 - protein, 13 aa, Homo sapiens
  CDR3 for beta chain variable domain of TCR clone 106447 (TRBV24-1, TRBJ2-2)
CATSDWSTGELFF

SEQ ID NO: 212895 - protein, 13 aa, Homo sapiens
  CDR3 for alpha chain variable domain of TCR clone 106448 (TRAV12-2, TRAJ10)
CAVPTGGGNKLTF

SEQ ID NO: 212896 - protein, 14 aa, Homo sapiens
  CDR3 for beta chain variable domain of TCR clone 106448 (TRBV14, TRBJ2-1)
CASSQVQGRGEQFF

SEQ ID NO: 212897 - protein, 13 aa, Homo sapiens
  CDR3 for alpha chain variable domain of TCR clone 106449 (TRAV13-1, TRAJ20)
CAARFSNDYKLSF

SEQ ID NO: 212898 - protein, 12 aa, Homo sapiens
  CDR3 for beta chain variable domain of TCR clone 106449 (TRBV20-1, TRBJ2-1)
CSARLGTDEQFF

SEQ ID NO: 212899 - protein, 14 aa, Homo sapiens
  CDR3 for alpha chain variable domain of TCR clone 106450 (TRAV1-2, TRAJ16)
CAVNRFSDGQKLLF

SEQ ID NO: 212900 - protein, 15 aa, Homo sapiens
  CDR3 for beta chain variable domain of TCR clone 106450 (TRBV7-9, TRBJ1-6)
CASSSPRRGNSPLHF

SEQ ID NO: 212901 - protein, 13 aa, Homo sapiens
  CDR3 for alpha chain variable domain of TCR clone 106451 (TRAV27, TRAJ6)
CAGGTRGSYIPTF

SEQ ID NO: 212902 - protein, 16 aa, Homo sapiens
  CDR3 for beta chain variable domain of TCR clone 106451 (TRBV4-1, TRBJ2-7)
CASSLTAGQATYEQYF

SEQ ID NO: 212903 - protein, 15 aa, Homo sapiens
  CDR3 for alpha chain variable domain of TCR clone 106452 (TRAV17, TRAJ23)
CATDAEDNQGGKLIF

SEQ ID NO: 212904 - protein, 12 aa, Homo sapiens
  CDR3 for beta chain variable domain of TCR clone 106452 (TRBV2, TRBJ2-1)
WAKREGYNEQFF

SEQ ID NO: 212905 - protein, 11 aa, Homo sapiens
  CDR3 for alpha chain variable domain of TCR clone 106453 (TRAV17, TRAJ31)
CATSNNTRLMF

SEQ ID NO: 212906 - protein, 16 aa, Homo sapiens
  CDR3 for beta chain variable domain of TCR clone 106453 (TRBV7-8, TRBJ2-4)
CASSAERTLAKNIQYF

SEQ ID NO: 212907 - protein, 12 aa, Homo sapiens
  CDR3 for alpha chain variable domain of TCR clone 106454 (TRAV25, TRAJ20)
CAGRSNDYKLSL

SEQ ID NO: 212908 - protein, 15 aa, Homo sapiens
  CDR3 for beta chain variable domain of TCR clone 106454 (TRBV7-6, TRBJ2-7)
CASSGRRDTFGEQYF

SEQ ID NO: 212909 - protein, 15 aa, Homo sapiens
  CDR3 for alpha chain variable domain of TCR clone 106455 (TRAV8-4, TRAJ48)
CAVSAAYFGHEKLTF

SEQ ID NO: 212910 - protein, 12 aa, Homo sapiens
  CDR3 for beta chain variable domain of TCR clone 106455 (TRBV3-1, TRBJ2-5)
CASSQRGETQYF

SEQ ID NO: 212911 - protein, 11 aa, Homo sapiens
  CDR3 for alpha chain variable domain of TCR clone 106456 (TRAV12-1, TRAJ21)
CVVYNFNKFYF

SEQ ID NO: 212912 - protein, 14 aa, Homo sapiens
  CDR3 for beta chain variable domain of TCR clone 106456 (TRBV19, TRBJ2-7)
CASSMGQGAIEQYF

SEQ ID NO: 212913 - protein, 16 aa, Homo sapiens
  CDR3 for alpha chain variable domain of TCR clone 106457 (TRAV3, TRAJ21)
CAVRDIERGNFNKFYF

SEQ ID NO: 212914 - protein, 15 aa, Homo sapiens
  CDR3 for beta chain variable domain of TCR clone 106457 (TRBV28, TRBJ1-3)
CASSMGWASGNTIYF

SEQ ID NO: 212915 - protein, 14 aa, Homo sapiens
  CDR3 for alpha chain variable domain of TCR clone 106458 (TRAV14/DV4, TRAJ15)
CAMRRDQAGTALIF

SEQ ID NO: 212916 - protein, 13 aa, Homo sapiens
  CDR3 for beta chain variable domain of TCR clone 106458 (TRBV2, TRBJ1-1)
CASSEGGNTEAFF

SEQ ID NO: 212917 - protein, 10 aa, Homo sapiens
  CDR3 for alpha chain variable domain of TCR clone 106459 (TRAV2, TRAJ15)
RGQAGTALIL

SEQ ID NO: 212918 - protein, 12 aa, Homo sapiens
  CDR3 for beta chain variable domain of TCR clone 106459 (TRBV11-2, TRBJ2-2)
CASSLGGGELFF

SEQ ID NO: 212919 - protein, 14 aa, Homo sapiens
  CDR3 for alpha chain variable domain of TCR clone 106460 (TRAV2, TRAJ9)
CAVEDRSGGFKTIF

SEQ ID NO: 212920 - protein, 14 aa, Homo sapiens
  CDR3 for beta chain variable domain of TCR clone 106460 (TRBV20-1, TRBJ2-7)
CSAPELAGVGEQYF

SEQ ID NO: 212921 - protein, 13 aa, Homo sapiens
  CDR3 for alpha chain variable domain of TCR clone 106461 (TRAV17, TRAJ26)
CATVDNYGQNFVF

SEQ ID NO: 212922 - protein, 16 aa, Homo sapiens
  CDR3 for beta chain variable domain of TCR clone 106461 (TRBV2, TRBJ2-1)
CDSSVGGSLSYNEQFF

SEQ ID NO: 212923 - protein, 11 aa, Homo sapiens
  CDR3 for alpha chain variable domain of TCR clone 106462 (TRAV23/DV6, TRAJ47)
CAAGYGNKLVF

SEQ ID NO: 212924 - protein, 13 aa, Homo sapiens
  CDR3 for beta chain variable domain of TCR clone 106462 (TRBV4-2, TRBJ1-1)
CASSQAGNTEAFF

SEQ ID NO: 212925 - protein, 20 aa, Homo sapiens
  CDR3 for alpha chain variable domain of TCR clone 106463 (TRAV27, TRAJ10)
ASTSVPSRGILTGGGHKLTF

SEQ ID NO: 212926 - protein, 15 aa, Homo sapiens
  CDR3 for beta chain variable domain of TCR clone 106463 (TRBV9, TRBJ2-3)
CASSLEGGLTDTQYF

SEQ ID NO: 212927 - protein, 14 aa, Homo sapiens
  CDR3 for alpha chain variable domain of TCR clone 106464 (TRAV27, TRAJ36)
CAGPPKRGSNNLFF

SEQ ID NO: 212928 - protein, 15 aa, Homo sapiens
  CDR3 for beta chain variable domain of TCR clone 106464 (TRBV18, TRBJ2-7)
CASSPASTPNYEQYF

SEQ ID NO: 212929 - protein, 11 aa, Homo sapiens
  CDR3 for alpha chain variable domain of TCR clone 106465 (TRAV4, TRAJ21)
CRIYNFNKFYF

SEQ ID NO: 212930 - protein, 13 aa, Homo sapiens
  CDR3 for beta chain variable domain of TCR clone 106465 (TRBV6-1, TRBJ2-7)
CASSADTSYERYF

SEQ ID NO: 212931 - protein, 11 aa, Homo sapiens
  CDR3 for alpha chain variable domain of TCR clone 106466 (TRAV12-3, TRAJ43)
CAMSVSNDMRF

SEQ ID NO: 212932 - protein, 15 aa, Homo sapiens
  CDR3 for beta chain variable domain of TCR clone 106466 (TRBV28, TRBJ1-3)
CASSMGWASGNTIYF

SEQ ID NO: 212933 - protein, 15 aa, Homo sapiens
  CDR3 for alpha chain variable domain of TCR clone 106467 (TRAV3, TRAJ27)
CAVRGFTPMQANQPL

SEQ ID NO: 212934 - protein, 12 aa, Homo sapiens
  CDR3 for beta chain variable domain of TCR clone 106467 (TRBV11-2, TRBJ2-2)
CTSSLGGGELFF

SEQ ID NO: 212935 - protein, 11 aa, Homo sapiens
  CDR3 for alpha chain variable domain of TCR clone 106468 (TRAV12-1, TRAJ34)
CVVNKGRELIF

SEQ ID NO: 212936 - protein, 15 aa, Homo sapiens
  CDR3 for beta chain variable domain of TCR clone 106468 (TRBV7-2, TRBJ2-1)
CASSSGLAGGNEQFF

SEQ ID NO: 212937 - protein, 14 aa, Homo sapiens
  CDR3 for alpha chain variable domain of TCR clone 106469 (TRAV25, TRAJ44)
CAAKFTGTASKLTF

SEQ ID NO: 212938 - protein, 13 aa, Homo sapiens
  CDR3 for beta chain variable domain of TCR clone 106469 (TRBV7-9, TRBJ1-2)
CASSLKQNYGYTF

SEQ ID NO: 212939 - protein, 15 aa, Homo sapiens
  CDR3 for alpha chain variable domain of TCR clone 106470 (TRAV29/DV5, TRAJ24)
CAASGATDSWGKFQF

SEQ ID NO: 212940 - protein, 12 aa, Homo sapiens
  CDR3 for beta chain variable domain of TCR clone 106470 (TRBV11-2, TRBJ2-2)
CASSLPTGELSF

SEQ ID NO: 212941 - protein, 15 aa, Homo sapiens
  CDR3 for alpha chain variable domain of TCR clone 106471 (TRAV21, TRAJ53)
CATLNSGGSNYKLTF

SEQ ID NO: 212942 - protein, 14 aa, Homo sapiens
  CDR3 for beta chain variable domain of TCR clone 106471 (TRBV27, TRBJ2-7)
CASSFRDGPYEQYF

SEQ ID NO: 212943 - protein, 13 aa, Homo sapiens
  CDR3 for alpha chain variable domain of TCR clone 106472 (TRAV17, TRAJ9)
CATDYTGGFKTIF

SEQ ID NO: 212944 - protein, 17 aa, Homo sapiens
  CDR3 for beta chain variable domain of TCR clone 106472 (TRBV10-3, TRBJ1-2)
CAISETRDRGLEYGYTF

SEQ ID NO: 212945 - protein, 14 aa, Homo sapiens
  CDR3 for alpha chain variable domain of TCR clone 106473 (TRAV1-2, TRAJ8)
CAVREDTGFQKLVF

SEQ ID NO: 212946 - protein, 14 aa, Homo sapiens
  CDR3 for beta chain variable domain of TCR clone 106473 (TRBV6-1, TRBJ2-1)
CASSEATRVNEQFF

SEQ ID NO: 212947 - protein, 17 aa, Homo sapiens
  CDR3 for alpha chain variable domain of TCR clone 106474 (TRAV4, TRAJ18)
CLVGERSVGSTLGRLYF

SEQ ID NO: 212948 - protein, 13 aa, Homo sapiens
  CDR3 for beta chain variable domain of TCR clone 106474 (TRBV15, TRBJ1-6)
CATSGGLNSPLHF

SEQ ID NO: 212949 - protein, 15 aa, Homo sapiens
  CDR3 for alpha chain variable domain of TCR clone 106475 (TRAV20, TRAJ43)
CAVQAGKRSNNDMRF

SEQ ID NO: 212950 - protein, 13 aa, Homo sapiens
  CDR3 for beta chain variable domain of TCR clone 106475 (TRBV27, TRBJ1-1)
CASSLSIGAEAFF

SEQ ID NO: 212951 - protein, 14 aa, Homo sapiens
  CDR3 for alpha chain variable domain of TCR clone 106476 (TRAV12-2, TRAJ45)
CAVYSGGGADGLTF

SEQ ID NO: 212952 - protein, 17 aa, Homo sapiens
  CDR3 for beta chain variable domain of TCR clone 106476 (TRBV7-8, TRBJ2-6)
CASSAGTGGAGANVLTF

SEQ ID NO: 212953 - protein, 15 aa, Homo sapiens
  CDR3 for alpha chain variable domain of TCR clone 106477 (TRAV21, TRAJ53)
CATLNSGGSNYNLTF

SEQ ID NO: 212954 - protein, 15 aa, Homo sapiens
  CDR3 for beta chain variable domain of TCR clone 106477 (TRBV20-1, TRBJ2-7)
CSARDRVSGMDEQYF

SEQ ID NO: 212955 - protein, 14 aa, Homo sapiens
  CDR3 for alpha chain variable domain of TCR clone 106478 (TRAV12-1, TRAJ17)
CVVNFKAAGNKLTF

SEQ ID NO: 212956 - protein, 16 aa, Homo sapiens
  CDR3 for beta chain variable domain of TCR clone 106478 (TRBV6-6, TRBJ1-5)
CASSYSTLVGNQPQHF

SEQ ID NO: 212957 - protein, 13 aa, Homo sapiens
  CDR3 for alpha chain variable domain of TCR clone 106479 (TRAV30, TRAJ34)
CGSVGYNTDKLIF

SEQ ID NO: 212958 - protein, 16 aa, Homo sapiens
  CDR3 for beta chain variable domain of TCR clone 106479 (TRBV7-9, TRBJ1-2)
CASSLGFSSGEDGYTF

SEQ ID NO: 212959 - protein, 12 aa, Homo sapiens
  CDR3 for alpha chain variable domain of TCR clone 106480 (TRAV13-1, TRAJ53)
AASGGSNYKLTF

SEQ ID NO: 212960 - protein, 13 aa, Homo sapiens
  CDR3 for beta chain variable domain of TCR clone 106480 (TRBV12-4, TRBJ1-2)
CASSLRQGKGYTF

SEQ ID NO: 212961 - protein, 15 aa, Homo sapiens
  CDR3 for alpha chain variable domain of TCR clone 106481 (TRAV27, TRAJ50)
FAGVGRGTSYDKVIF

SEQ ID NO: 212962 - protein, 14 aa, Homo sapiens
  CDR3 for beta chain variable domain of TCR clone 106481 (TRBV7-2, TRBJ1-1)
CASSFYDLNTEAFF

SEQ ID NO: 212963 - protein, 11 aa, Homo sapiens
  CDR3 for alpha chain variable domain of TCR clone 106482 (TRAV17, TRAJ9)
CATTGGFKTIF

SEQ ID NO: 212964 - protein, 14 aa, Homo sapiens
  CDR3 for beta chain variable domain of TCR clone 106482 (TRBV7-2, TRBJ1-1)
CASSFLTGTTEAFF

SEQ ID NO: 212965 - protein, 11 aa, Homo sapiens
  CDR3 for alpha chain variable domain of TCR clone 106483 (TRAV2, TRAJ13)
CASGGYQKVTF

SEQ ID NO: 212966 - protein, 15 aa, Homo sapiens
  CDR3 for beta chain variable domain of TCR clone 106483 (TRBV19, TRBJ2-4)
CASRGPRRGENSQYF

SEQ ID NO: 212967 - protein, 14 aa, Homo sapiens
  CDR3 for alpha chain variable domain of TCR clone 106484 (TRAV17, TRAJ37)
CATDGSSNTGKLIF

SEQ ID NO: 212968 - protein, 13 aa, Homo sapiens
  CDR3 for beta chain variable domain of TCR clone 106484 (TRBV11-2, TRBJ2-1)
CASSLDLVNDQFF

SEQ ID NO: 212969 - protein, 11 aa, Homo sapiens
  CDR3 for alpha chain variable domain of TCR clone 106485 (TRAV21, TRAJ48)
CAVDGNEKLTF

SEQ ID NO: 212970 - protein, 16 aa, Homo sapiens
  CDR3 for beta chain variable domain of TCR clone 106485 (TRBV28, TRBJ1-5)
CASSLTGQGWNQPQHF

SEQ ID NO: 212971 - protein, 12 aa, Homo sapiens
  CDR3 for alpha chain variable domain of TCR clone 106486 (TRAV12-3, TRAJ20)
RAMVRGDYKLSF

SEQ ID NO: 212972 - protein, 14 aa, Homo sapiens
  CDR3 for beta chain variable domain of TCR clone 106486 (TRBV20-1, TRBJ2-7)
CSAISREASYEQYF

SEQ ID NO: 212973 - protein, 13 aa, Homo sapiens
  CDR3 for alpha chain variable domain of TCR clone 106487 (TRAV12-3, TRAJ40)
CAMSDSGTYTYIF

SEQ ID NO: 212974 - protein, 14 aa, Homo sapiens
  CDR3 for beta chain variable domain of TCR clone 106487 (TRBV7-2, TRBJ1-5)
CASSTQGAGQPQHF

SEQ ID NO: 212975 - protein, 13 aa, Homo sapiens
  CDR3 for alpha chain variable domain of TCR clone 106488 (TRAV13-1, TRAJ41)
CADAPNSGYALNF

SEQ ID NO: 212976 - protein, 13 aa, Homo sapiens
  CDR3 for beta chain variable domain of TCR clone 106488 (TRBV19, TRBJ2-7)
CTSEGTTTYEQYF

SEQ ID NO: 212977 - protein, 14 aa, Homo sapiens
  CDR3 for alpha chain variable domain of TCR clone 106489 (TRAV17, TRAJ57)
CATDPQGGSEKLVF

SEQ ID NO: 212978 - protein, 14 aa, Homo sapiens
  CDR3 for beta chain variable domain of TCR clone 106489 (TRBV7-8, TRBJ2-7)
CASSPRDRVYEEYF

SEQ ID NO: 212979 - protein, 21 aa, Homo sapiens
  CDR3 for alpha chain variable domain of TCR clone 106490 (TRAV8-4, TRAJ47)
HLTKPSAHMSDAAERGNNLVF

SEQ ID NO: 212980 - protein, 14 aa, Homo sapiens
  CDR3 for beta chain variable domain of TCR clone 106490 (TRBV7-9, TRBJ2-1)
CASSPRDSLYEQFF

SEQ ID NO: 212981 - protein, 12 aa, Homo sapiens
  CDR3 for alpha chain variable domain of TCR clone 106491 (TRAV1-2, TRAJ33)
CAALDSNYQLIW

SEQ ID NO: 212982 - protein, 14 aa, Homo sapiens
  CDR3 for beta chain variable domain of TCR clone 106491 (TRBV7-8, TRBJ2-3)
CASSFKSSTDTQYF

SEQ ID NO: 212983 - protein, 13 aa, Homo sapiens
  CDR3 for alpha chain variable domain of TCR clone 106492 (TRAV12-3, TRAJ33)
CAMSVNSNYQLIW

SEQ ID NO: 212984 - protein, 15 aa, Homo sapiens
  CDR3 for beta chain variable domain of TCR clone 106492 (TRBV12-4, TRBJ2-2)
CACSFKSANTGELFF

SEQ ID NO: 212985 - protein, 16 aa, Homo sapiens
  CDR3 for alpha chain variable domain of TCR clone 106493 (TRAV1-2, TRAJ10)
CAVRGVLTGGGNKLTF

SEQ ID NO: 212986 - protein, 20 aa, Homo sapiens
  CDR3 for beta chain variable domain of TCR clone 106493 (TRBV7-8, TRBJ2-2)
CASSHLFPGPNIHITGELFF

SEQ ID NO: 212987 - protein, 15 aa, Homo sapiens
  CDR3 for alpha chain variable domain of TCR clone 106494 (TRAV8-3, TRAJ45)
CASSYSGGGADGLTF

SEQ ID NO: 212988 - protein, 15 aa, Homo sapiens
  CDR3 for beta chain variable domain of TCR clone 106494 (TRBV11-2, TRBJ1-6)
CASSLDPWAVSPLHF

SEQ ID NO: 212989 - protein, 12 aa, Homo sapiens
  CDR3 for alpha chain variable domain of TCR clone 106495 (TRAV26-2, TRAJ21)
CILKGNFNKFYF

SEQ ID NO: 212990 - protein, 16 aa, Homo sapiens
  CDR3 for beta chain variable domain of TCR clone 106495 (TRBV6-1, TRBJ2-5)
CASSETLDRGAETQYF

SEQ ID NO: 212991 - protein, 18 aa, Homo sapiens
  CDR3 for alpha chain variable domain of TCR clone 106496 (TRAV21, TRAJ52)
CAVRPSPAGGTSYGKLTF

SEQ ID NO: 212992 - protein, 16 aa, Homo sapiens
  CDR3 for beta chain variable domain of TCR clone 106496 (TRBV6-1, TRBJ1-3)
CASVQGGVETPYILER

SEQ ID NO: 212993 - protein, 17 aa, Homo sapiens
  CDR3 for alpha chain variable domain of TCR clone 106497 (TRAV3, TRAJ42)
CAVRDRDYGGSQGNLIF

SEQ ID NO: 212994 - protein, 14 aa, Homo sapiens
  CDR3 for beta chain variable domain of TCR clone 106497 (TRBV19, TRBJ2-2)
CTSSGQGIAGKLFF

SEQ ID NO: 212995 - protein, 14 aa, Homo sapiens
  CDR3 for alpha chain variable domain of TCR clone 106498 (TRAV1-2, TRAJ16)
CAVNRFSDGQKLLF

SEQ ID NO: 212996 - protein, 16 aa, Homo sapiens
  CDR3 for beta chain variable domain of TCR clone 106498 (TRBV7-2, TRBJ2-5)
CASSPRGRGGGETQYF

SEQ ID NO: 212997 - protein, 12 aa, Homo sapiens
  CDR3 for alpha chain variable domain of TCR clone 106499 (TRAV21, TRAJ27)
CAPPGNAGKSTF

SEQ ID NO: 212998 - protein, 13 aa, Homo sapiens
  CDR3 for beta chain variable domain of TCR clone 106499 (TRBV2, TRBJ1-1)
CARSPTGGFHAFF

SEQ ID NO: 212999 - protein, 12 aa, Homo sapiens
  CDR3 for alpha chain variable domain of TCR clone 106500 (TRAV13-1, TRAJ21)
CAEKEGFNKFYF

SEQ ID NO: 213000 - protein, 15 aa, Homo sapiens
  CDR3 for beta chain variable domain of TCR clone 106500 (TRBV7-9, TRBJ1-6)
CASSSPGRGNSPLHF

SEQ ID NO: 213001 - protein, 16 aa, Homo sapiens
  CDR3 for alpha chain variable domain of TCR clone 106501 (TRAV30, TRAJ24)
CGTEIVDADSWGKFQF

SEQ ID NO: 213002 - protein, 16 aa, Homo sapiens
  CDR3 for beta chain variable domain of TCR clone 106501 (TRBV24-1, TRBJ2-3)
CATSGYRDRDTDTQYF

SEQ ID NO: 213003 - protein, 15 aa, Homo sapiens
  CDR3 for alpha chain variable domain of TCR clone 106502 (TRAV8-3, TRAJ45)
CASSYSGGGADGLTF

SEQ ID NO: 213004 - protein, 13 aa, Homo sapiens
  CDR3 for beta chain variable domain of TCR clone 106502 (TRBV10-3, TRBJ2-7)
CASKRAVSYEQYF

SEQ ID NO: 213005 - protein, 16 aa, Homo sapiens
  CDR3 for alpha chain variable domain of TCR clone 106503 (TRAV30, TRAJ24)
CGTEIVEADSWGKFQF

SEQ ID NO: 213006 - protein, 18 aa, Homo sapiens
  CDR3 for beta chain variable domain of TCR clone 106503 (TRBV7-9, TRBJ2-7)
CASSLTTSGSRTWYEQYF

SEQ ID NO: 213007 - protein, 13 aa, Homo sapiens
  CDR3 for alpha chain variable domain of TCR clone 106504 (TRAV26-2, TRAJ57)
CILSRGGSEKLVF

SEQ ID NO: 213008 - protein, 15 aa, Homo sapiens
  CDR3 for beta chain variable domain of TCR clone 106504 (TRBV4-1, TRBJ1-4)
CASSDTGGTNEKLFF

SEQ ID NO: 213009 - protein, 21 aa, Homo sapiens
  CDR3 for alpha chain variable domain of TCR clone 106505 (TRAV1-1, TRAJ6)
CLLLLRCERLERTGGGYIPTF

SEQ ID NO: 213010 - protein, 13 aa, Homo sapiens
  CDR3 for beta chain variable domain of TCR clone 106505 (TRBV10-2, TRBJ2-7)
CASGASGGYEQYF

SEQ ID NO: 213011 - protein, 14 aa, Homo sapiens
  CDR3 for alpha chain variable domain of TCR clone 106506 (TRAV25, TRAJ23)
CAGQGDKQGGKLIF

SEQ ID NO: 213012 - protein, 12 aa, Homo sapiens
  CDR3 for beta chain variable domain of TCR clone 106506 (TRBV7-9, TRBJ1-1)
CASSLVRGEAFF

SEQ ID NO: 213013 - protein, 18 aa, Homo sapiens
  CDR3 for alpha chain variable domain of TCR clone 106507 (TRAV21, TRAJ52)
CTVRPSPAGGTSYGKLTF

SEQ ID NO: 213014 - protein, 17 aa, Homo sapiens
  CDR3 for beta chain variable domain of TCR clone 106507 (TRBV25-1, TRBJ2-1)
CASSAYGQGRGVYEQFF

SEQ ID NO: 213015 - protein, 13 aa, Homo sapiens
  CDR3 for alpha chain variable domain of TCR clone 106508 (TRAV27, TRAJ56)
CAGKPGANSKLTF

SEQ ID NO: 213016 - protein, 14 aa, Homo sapiens
  CDR3 for beta chain variable domain of TCR clone 106508 (TRBV25-1, TRBJ1-1)
CASTHLGGNTEAFF

SEQ ID NO: 213017 - protein, 15 aa, Homo sapiens
  CDR3 for alpha chain variable domain of TCR clone 106509 (TRAV13-1, TRAJ11)
CAASNRNSGYSTLTF

SEQ ID NO: 213018 - protein, 15 aa, Homo sapiens
  CDR3 for beta chain variable domain of TCR clone 106509 (TRBV29-1, TRBJ2-1)
CSGRDRKSSYNEQFF

SEQ ID NO: 213019 - protein, 11 aa, Homo sapiens
  CDR3 for alpha chain variable domain of TCR clone 106510 (TRAV12-2, TRAJ43)
CAAYNNNDMRF

SEQ ID NO: 213020 - protein, 12 aa, Homo sapiens
  CDR3 for beta chain variable domain of TCR clone 106510 (TRBV11-2, TRBJ2-5)
CASSLDTQTQYF

SEQ ID NO: 213021 - protein, 20 aa, Homo sapiens
  CDR3 for alpha chain variable domain of TCR clone 106511 (TRAV25, TRAJ21)
TATQTTDVGTYPLSFNKFYF

SEQ ID NO: 213022 - protein, 14 aa, Homo sapiens
  CDR3 for beta chain variable domain of TCR clone 106511 (TRBV6-1, TRBJ2-1)
CASAKEGFYNEQFF

SEQ ID NO: 213023 - protein, 17 aa, Homo sapiens
  CDR3 for alpha chain variable domain of TCR clone 106512 (TRAV3, TRAJ42)
CAVRDRDCGGSQGNLIF

SEQ ID NO: 213024 - protein, 14 aa, Homo sapiens
  CDR3 for beta chain variable domain of TCR clone 106512 (TRBV7-2, TRBJ2-5)
CASSPRGSSETQYF

SEQ ID NO: 213025 - protein, 15 aa, Homo sapiens
  CDR3 for alpha chain variable domain of TCR clone 106513 (TRAV26-2, TRAJ28)
CILVESGAGSYQLTF

SEQ ID NO: 213026 - protein, 12 aa, Homo sapiens
  CDR3 for beta chain variable domain of TCR clone 106513 (TRBV5-4, TRBJ2-5)
CASSSTRETQYF

SEQ ID NO: 213027 - protein, 11 aa, Homo sapiens
  CDR3 for alpha chain variable domain of TCR clone 106514 (TRAV21, TRAJ34)
CAHYNTEKLIF

SEQ ID NO: 213028 - protein, 13 aa, Homo sapiens
  CDR3 for beta chain variable domain of TCR clone 106514 (TRBV7-6, TRBJ1-2)
CASSLVADYGYTF

SEQ ID NO: 213029 - protein, 13 aa, Homo sapiens
  CDR3 for alpha chain variable domain of TCR clone 106515 (TRAV23/DV6, TRAJ22)
CAPYSGSARHLTF

SEQ ID NO: 213030 - protein, 13 aa, Homo sapiens
  CDR3 for beta chain variable domain of TCR clone 106515 (TRBV6-1, TRBJ1-1)
CASSRQGNTEAFF

SEQ ID NO: 213031 - protein, 10 aa, Homo sapiens
  CDR3 for alpha chain variable domain of TCR clone 106516 (TRAV25, TRAJ53)
CAGSNYKLTF

SEQ ID NO: 213032 - protein, 12 aa, Homo sapiens
  CDR3 for beta chain variable domain of TCR clone 106516 (TRBV12-5, TRBJ2-5)
CASGQGVETQYF

SEQ ID NO: 213033 - protein, 16 aa, Homo sapiens
  CDR3 for alpha chain variable domain of TCR clone 106517 (TRAV3, TRAJ40)
CAVRDRIASGTYKYIF

SEQ ID NO: 213034 - protein, 16 aa, Homo sapiens
  CDR3 for beta chain variable domain of TCR clone 106517 (TRBV6-1, TRBJ1-2)
CASSEANSIINYGYAF

SEQ ID NO: 213035 - protein, 13 aa, Homo sapiens
  CDR3 for alpha chain variable domain of TCR clone 106518 (TRAV38-1, TRAJ52)
CAFRGTSYGKLTF

SEQ ID NO: 213036 - protein, 15 aa, Homo sapiens
  CDR3 for beta chain variable domain of TCR clone 106518 (TRBV7-8, TRBJ2-5)
CASSDAAGSKETQYF

SEQ ID NO: 213037 - protein, 14 aa, Homo sapiens
  CDR3 for alpha chain variable domain of TCR clone 106519 (TRAV12-1, TRAJ42)
CVVIYGGSQGNLIF

SEQ ID NO: 213038 - protein, 17 aa, Homo sapiens
  CDR3 for beta chain variable domain of TCR clone 106519 (TRBV3-1, TRBJ2-6)
CASSPNTGPAGANVLTV

SEQ ID NO: 213039 - protein, 12 aa, Homo sapiens
  CDR3 for alpha chain variable domain of TCR clone 106520 (TRAV3, TRAJ7)
CADLLWEQQTRF

SEQ ID NO: 213040 - protein, 15 aa, Homo sapiens
  CDR3 for beta chain variable domain of TCR clone 106520 (TRBV19, TRBJ2-1)
CASSLETSGYNEQFF

SEQ ID NO: 213041 - protein, 16 aa, Homo sapiens
  CDR3 for alpha chain variable domain of TCR clone 106521 (TRAV3, TRAJ37)
CAVRPHGSGNTSKLIF

SEQ ID NO: 213042 - protein, 16 aa, Homo sapiens
  CDR3 for beta chain variable domain of TCR clone 106521 (TRBV9, TRBJ1-2)
CASSVEEKVSPYGYTF

SEQ ID NO: 213043 - protein, 10 aa, Homo sapiens
  CDR3 for alpha chain variable domain of TCR clone 106522 (TRAV26-1, TRAJ22)
SSGSARQLTF

SEQ ID NO: 213044 - protein, 12 aa, Homo sapiens
  CDR3 for beta chain variable domain of TCR clone 106522 (TRBV11-2, TRBJ2-2)
CASSLGGGELFF

SEQ ID NO: 213045 - protein, 16 aa, Homo sapiens
  CDR3 for alpha chain variable domain of TCR clone 106523 (TRAV12-3, TRAJ56)
CAMSPGHTGANSKLTF

SEQ ID NO: 213046 - protein, 15 aa, Homo sapiens
  CDR3 for beta chain variable domain of TCR clone 106523 (TRBV6-5, TRBJ1-2)
CASSYSQAFNYGYTF

SEQ ID NO: 213047 - protein, 17 aa, Homo sapiens
  CDR3 for alpha chain variable domain of TCR clone 106524 (TRAV26-1, TRAJ53)
CIVRVDDSGGSNYKLTF

SEQ ID NO: 213048 - protein, 15 aa, Homo sapiens
  CDR3 for beta chain variable domain of TCR clone 106524 (TRBV20-1, TRBJ2-7)
CSARVPAAYFHEQYF

SEQ ID NO: 213049 - protein, 14 aa, Homo sapiens
  CDR3 for alpha chain variable domain of TCR clone 106525 (TRAV38-1, TRAJ45)
CASHSGGGADGLTF

SEQ ID NO: 213050 - protein, 13 aa, Homo sapiens
  CDR3 for beta chain variable domain of TCR clone 106525 (TRBV24-1, TRBJ2-2)
CATSDWSTGELFF

SEQ ID NO: 213051 - protein, 13 aa, Homo sapiens
  CDR3 for alpha chain variable domain of TCR clone 106526 (TRAV1-2, TRAJ27)
CAVFNTNAGKSTF

SEQ ID NO: 213052 - protein, 17 aa, Homo sapiens
  CDR3 for beta chain variable domain of TCR clone 106526 (TRBV11-2, TRBJ2-4)
WASSLGEGEGGKNIQYF

SEQ ID NO: 213053 - protein, 17 aa, Homo sapiens
  CDR3 for alpha chain variable domain of TCR clone 106527 (TRAV3, TRAJ6)
CAVRDGPRAGGSYIPTF

SEQ ID NO: 213054 - protein, 13 aa, Homo sapiens
  CDR3 for beta chain variable domain of TCR clone 106527 (TRBV19, TRBJ2-7)
CASSIDRTYEQYV

SEQ ID NO: 213055 - protein, 14 aa, Homo sapiens
  CDR3 for alpha chain variable domain of TCR clone 106528 (TRAV6, TRAJ6)
CALPTSGGSYIPTF

SEQ ID NO: 213056 - protein, 17 aa, Homo sapiens
  CDR3 for beta chain variable domain of TCR clone 106528 (TRBV5-1, TRBJ2-5)
RASSPVALGQNQETQYF

SEQ ID NO: 213057 - protein, 14 aa, Homo sapiens
  CDR3 for alpha chain variable domain of TCR clone 106529 (TRAV17, TRAJ56)
CATVPAGANSKLTF

SEQ ID NO: 213058 - protein, 14 aa, Homo sapiens
  CDR3 for beta chain variable domain of TCR clone 106529 (TRBV25-1, TRBJ1-1)
CASTHLGGNTEAFF

SEQ ID NO: 213059 - protein, 14 aa, Homo sapiens
  CDR3 for alpha chain variable domain of TCR clone 106530 (TRAV3, TRAJ21)
CAVESQANFNKFYF

SEQ ID NO: 213060 - protein, 18 aa, Homo sapiens
  CDR3 for beta chain variable domain of TCR clone 106530 (TRBV7-9, TRBJ2-1)
CASSLAVSGTSGRNEQVF

SEQ ID NO: 213061 - protein, 10 aa, Homo sapiens
  CDR3 for alpha chain variable domain of TCR clone 106531 (TRAV29/DV5, TRAJ48)
CAAGGEKLTF

SEQ ID NO: 213062 - protein, 14 aa, Homo sapiens
  CDR3 for beta chain variable domain of TCR clone 106531 (TRBV7-9, TRBJ2-5)
CASSLAPDQETQYV

SEQ ID NO: 213063 - protein, 15 aa, Homo sapiens
  CDR3 for alpha chain variable domain of TCR clone 106532 (TRAV1-2, TRAJ35)
CAVRDREGFGNVLHC

SEQ ID NO: 213064 - protein, 13 aa, Homo sapiens
  CDR3 for beta chain variable domain of TCR clone 106532 (TRBV3-1, TRBJ1-1)
CASSPGVITEAFF

SEQ ID NO: 213065 - protein, 14 aa, Homo sapiens
  CDR3 for alpha chain variable domain of TCR clone 106533 (TRAV1-1, TRAJ27)
CAVIYNTHAGKSTF

SEQ ID NO: 213066 - protein, 14 aa, Homo sapiens
  CDR3 for beta chain variable domain of TCR clone 106533 (TRBV25-1, TRBJ1-1)
CASTHLGGNTEAFF

SEQ ID NO: 213067 - protein, 14 aa, Homo sapiens
  CDR3 for alpha chain variable domain of TCR clone 106534 (TRAV12-1, TRAJ12)
CVVTRMDSSYKLIS

SEQ ID NO: 213068 - protein, 14 aa, Homo sapiens
  CDR3 for beta chain variable domain of TCR clone 106534 (TRBV4-1, TRBJ2-2)
CASSQAVNTGELFF

SEQ ID NO: 213069 - protein, 14 aa, Homo sapiens
  CDR3 for alpha chain variable domain of TCR clone 106535 (TRAV20, TRAJ37)
CAVQSSSNTGKLIF

SEQ ID NO: 213070 - protein, 18 aa, Homo sapiens
  CDR3 for beta chain variable domain of TCR clone 106535 (TRBV4-1, TRBJ2-1)
CASSLVGGELAGFNEQFF

SEQ ID NO: 213071 - protein, 14 aa, Homo sapiens
  CDR3 for alpha chain variable domain of TCR clone 106536 (TRAV13-1, TRAJ44)
CAAKATGTASNLTF

SEQ ID NO: 213072 - protein, 12 aa, Homo sapiens
  CDR3 for beta chain variable domain of TCR clone 106536 (TRBV7-8, TRBJ2-7)
CASSLGDREQYF

SEQ ID NO: 213073 - protein, 13 aa, Homo sapiens
  CDR3 for alpha chain variable domain of TCR clone 106537 (TRAV27, TRAJ41)
CAGEGNSGYALNF

SEQ ID NO: 213074 - protein, 15 aa, Homo sapiens
  CDR3 for beta chain variable domain of TCR clone 106537 (TRBV28, TRBJ1-2)
CASSRWGASNYGYTF

SEQ ID NO: 213075 - protein, 20 aa, Homo sapiens
  CDR3 for alpha chain variable domain of TCR clone 106538 (TRAV12-3, TRAJ41)
SLFIRDSQPSDSATPEALNF

SEQ ID NO: 213076 - protein, 18 aa, Homo sapiens
  CDR3 for beta chain variable domain of TCR clone 106538 (TRBV12-4, TRBJ2-2)
CASSRSGGAIPNTGELFF

SEQ ID NO: 213077 - protein, 14 aa, Homo sapiens
  CDR3 for alpha chain variable domain of TCR clone 106539 (TRAV4, TRAJ6)
CLVGEAGGSYIPTF

SEQ ID NO: 213078 - protein, 16 aa, Homo sapiens
  CDR3 for beta chain variable domain of TCR clone 106539 (TRBV12-5, TRBJ2-5)
CASGPRTSGNQETQYF

SEQ ID NO: 213079 - protein, 15 aa, Homo sapiens
  CDR3 for alpha chain variable domain of TCR clone 106540 (TRAV12-2, TRAJ53)
CAVNKGGGSNYKLTF

SEQ ID NO: 213080 - protein, 15 aa, Homo sapiens
  CDR3 for beta chain variable domain of TCR clone 106540 (TRBV5-1, TRBJ2-5)
CASSLGLGEIKTQYF

SEQ ID NO: 213081 - protein, 11 aa, Homo sapiens
  CDR3 for alpha chain variable domain of TCR clone 106541 (TRAV12-1, TRAJ43)
CVEYDNNDMRF

SEQ ID NO: 213082 - protein, 17 aa, Homo sapiens
  CDR3 for beta chain variable domain of TCR clone 106541 (TRBV20-1, TRBJ2-1)
CSARDPLAGVWDNEQFL

SEQ ID NO: 213083 - protein, 18 aa, Homo sapiens
  CDR3 for alpha chain variable domain of TCR clone 106542 (TRAV26-2, TRAJ54)
CILRDVEVGIQGAQRLVF

SEQ ID NO: 213084 - protein, 15 aa, Homo sapiens
  CDR3 for beta chain variable domain of TCR clone 106542 (TRBV29-1, TRBJ2-1)
CSVPTGLALYNEQFF

SEQ ID NO: 213085 - protein, 12 aa, Homo sapiens
  CDR3 for alpha chain variable domain of TCR clone 106543 (TRAV13-2, TRAJ39)
CAENNAGNMLNF

SEQ ID NO: 213086 - protein, 13 aa, Homo sapiens
  CDR3 for beta chain variable domain of TCR clone 106543 (TRBV7-6, TRBJ1-1)
CASSLKLGTEAFF

SEQ ID NO: 213087 - protein, 12 aa, Homo sapiens
  CDR3 for alpha chain variable domain of TCR clone 106544 (TRAV2, TRAJ31)
CAVKDNNARLMF

SEQ ID NO: 213088 - protein, 16 aa, Homo sapiens
  CDR3 for beta chain variable domain of TCR clone 106544 (TRBV10-3, TRBJ2-1)
CAISGVGDGGGGEQFF

SEQ ID NO: 213089 - protein, 14 aa, Homo sapiens
  CDR3 for alpha chain variable domain of TCR clone 106545 (TRAV2, TRAJ15)
CAVGTGQAGTALIF

SEQ ID NO: 213090 - protein, 18 aa, Homo sapiens
  CDR3 for beta chain variable domain of TCR clone 106545 (TRBV12-4, TRBJ2-2)
CASSLVAGTRGRTGELFF

SEQ ID NO: 213091 - protein, 17 aa, Homo sapiens
  CDR3 for alpha chain variable domain of TCR clone 106546 (TRAV26-2, TRAJ42)
CILRDVGYGGSQGNLIF

SEQ ID NO: 213092 - protein, 16 aa, Homo sapiens
  CDR3 for beta chain variable domain of TCR clone 106546 (TRBV12-4, TRBJ2-7)
CASSLIGGTGAYEQYF

SEQ ID NO: 213093 - protein, 15 aa, Homo sapiens
  CDR3 for alpha chain variable domain of TCR clone 106547 (TRAV8-3, TRAJ27)
CAVGPSKTNAGKSAF

SEQ ID NO: 213094 - protein, 13 aa, Homo sapiens
  CDR3 for beta chain variable domain of TCR clone 106547 (TRBV7-2, TRBJ2-7)
CASSSPSGSEQYF

SEQ ID NO: 213095 - protein, 14 aa, Homo sapiens
  CDR3 for alpha chain variable domain of TCR clone 106548 (TRAV14/DV4, TRAJ49)
CAFNRYLTGNQFYF

SEQ ID NO: 213096 - protein, 14 aa, Homo sapiens
  CDR3 for beta chain variable domain of TCR clone 106548 (TRBV28, TRBJ2-7)
CASSLLRISYEQYF

SEQ ID NO: 213097 - protein, 14 aa, Homo sapiens
  CDR3 for alpha chain variable domain of TCR clone 106549 (TRAV17, TRAJ31)
CATVLRNNNARLMF

SEQ ID NO: 213098 - protein, 15 aa, Homo sapiens
  CDR3 for beta chain variable domain of TCR clone 106549 (TRBV11-3, TRBJ2-3)
CASLKDGREGDTQYF

SEQ ID NO: 213099 - protein, 14 aa, Homo sapiens
  CDR3 for alpha chain variable domain of TCR clone 106550 (TRAV27, TRAJ58)
CAGDGETSGSRLTF

SEQ ID NO: 213100 - protein, 14 aa, Homo sapiens
  CDR3 for beta chain variable domain of TCR clone 106550 (TRBV7-2, TRBJ2-7)
CASSPKTSFYEQYF

SEQ ID NO: 213101 - protein, 12 aa, Homo sapiens
  CDR3 for alpha chain variable domain of TCR clone 106551 (TRAV27, TRAJ35)
CAGADFGNVLHC

SEQ ID NO: 213102 - protein, 16 aa, Homo sapiens
  CDR3 for beta chain variable domain of TCR clone 106551 (TRBV7-3, TRBJ2-2)
YASSLKRGTLSGELFF

SEQ ID NO: 213103 - protein, 12 aa, Homo sapiens
  CDR3 for alpha chain variable domain of TCR clone 106552 (TRAV21, TRAJ29)
CAVTSGNTPLVF

SEQ ID NO: 213104 - protein, 15 aa, Homo sapiens
  CDR3 for beta chain variable domain of TCR clone 106552 (TRBV12-4, TRBJ1-2)
RASRLGVAGNYGYTF

SEQ ID NO: 213105 - protein, 13 aa, Homo sapiens
  CDR3 for alpha chain variable domain of TCR clone 106553 (TRAV20, TRAJ48)
CDVHLFGDEKLTF

SEQ ID NO: 213106 - protein, 15 aa, Homo sapiens
  CDR3 for beta chain variable domain of TCR clone 106553 (TRBV6-5, TRBJ2-6)
CASSQWEAGANVLTF

SEQ ID NO: 213107 - protein, 16 aa, Homo sapiens
  CDR3 for alpha chain variable domain of TCR clone 106554 (TRAV12-2, TRAJ6)
CAAPLAGSGGSYIPTF

SEQ ID NO: 213108 - protein, 10 aa, Homo sapiens
  CDR3 for beta chain variable domain of TCR clone 106554 (TRBV28, TRBJ1-2)
CVSSSDRAVF

SEQ ID NO: 213109 - protein, 13 aa, Homo sapiens
  CDR3 for alpha chain variable domain of TCR clone 106555 (TRAV12-3, TRAJ33)
CAMIVNSNYQLIW

SEQ ID NO: 213110 - protein, 16 aa, Homo sapiens
  CDR3 for beta chain variable domain of TCR clone 106555 (TRBV7-3, TRBJ2-3)
CASSLSGYRPEDTQYF

SEQ ID NO: 213111 - protein, 14 aa, Homo sapiens
  CDR3 for alpha chain variable domain of TCR clone 106556 (TRAV19, TRAJ16)
CALSEVSDGQKLLF

SEQ ID NO: 213112 - protein, 15 aa, Homo sapiens
  CDR3 for beta chain variable domain of TCR clone 106556 (TRBV20-1, TRBJ1-5)
CSARAWDRVNQPQHF

SEQ ID NO: 213113 - protein, 11 aa, Homo sapiens
  CDR3 for alpha chain variable domain of TCR clone 106557 (TRAV3, TRAJ21)
CAVGNFNKFYF

SEQ ID NO: 213114 - protein, 14 aa, Homo sapiens
  CDR3 for beta chain variable domain of TCR clone 106557 (TRBV7-3, TRBJ2-7)
CASSLSGVSYEQYF

SEQ ID NO: 213115 - protein, 13 aa, Homo sapiens
  CDR3 for alpha chain variable domain of TCR clone 106558 (TRAV13-1, TRAJ5)
CPASDTGRRALTF

SEQ ID NO: 213116 - protein, 12 aa, Homo sapiens
  CDR3 for beta chain variable domain of TCR clone 106558 (TRBV28, TRBJ2-3)
CASSLYRDTQYF

SEQ ID NO: 213117 - protein, 13 aa, Homo sapiens
  CDR3 for alpha chain variable domain of TCR clone 106559 (TRAV1-2, TRAJ9)
CAVLNTGGFKTIF

SEQ ID NO: 213118 - protein, 14 aa, Homo sapiens
  CDR3 for beta chain variable domain of TCR clone 106559 (TRBV20-1, TRBJ2-3)
CSARGGTSTGTQYF

SEQ ID NO: 213119 - protein, 16 aa, Homo sapiens
  CDR3 for alpha chain variable domain of TCR clone 106560 (TRAV23/DV6, TRAJ30)
CAASVCADANRDDKII

SEQ ID NO: 213120 - protein, 11 aa, Homo sapiens
  CDR3 for beta chain variable domain of TCR clone 106560 (TRBV19, TRBJ2-3)
CHRPRGDTQYF

SEQ ID NO: 213121 - protein, 14 aa, Homo sapiens
  CDR3 for alpha chain variable domain of TCR clone 106561 (TRAV8-3, TRAJ39)
CAVGANNAGNMLTF

SEQ ID NO: 213122 - protein, 15 aa, Homo sapiens
  CDR3 for beta chain variable domain of TCR clone 106561 (TRBV20-1, TRBJ2-7)
CSARDRVSGMDEQYF

SEQ ID NO: 213123 - protein, 12 aa, Homo sapiens
  CDR3 for alpha chain variable domain of TCR clone 106562 (TRAV13-1, TRAJ42)
SVLRGSQGDLIF

SEQ ID NO: 213124 - protein, 13 aa, Homo sapiens
  CDR3 for beta chain variable domain of TCR clone 106562 (TRBV2, TRBJ1-4)
CASSELGVEKLFF

SEQ ID NO: 213125 - protein, 16 aa, Homo sapiens
  CDR3 for alpha chain variable domain of TCR clone 106563 (TRAV30, TRAJ24)
CGTEIVDADSWGKFQF

SEQ ID NO: 213126 - protein, 13 aa, Homo sapiens
  CDR3 for beta chain variable domain of TCR clone 106563 (TRBV7-9, TRBJ2-7)
CASSLGLVGEQYF

SEQ ID NO: 213127 - protein, 15 aa, Homo sapiens
  CDR3 for alpha chain variable domain of TCR clone 106564 (TRAV12-3, TRAJ4)
CAMTRGSGSYNKLIF

SEQ ID NO: 213128 - protein, 14 aa, Homo sapiens
  CDR3 for beta chain variable domain of TCR clone 106564 (TRBV4-3, TRBJ2-3)
CASSQAETVDTQYF

SEQ ID NO: 213129 - protein, 14 aa, Homo sapiens
  CDR3 for alpha chain variable domain of TCR clone 106565 (TRAV12-1, TRAJ42)
CVVIYGGSQGNLIF

SEQ ID NO: 213130 - protein, 17 aa, Homo sapiens
  CDR3 for beta chain variable domain of TCR clone 106565 (TRBV3-1, TRBJ2-6)
CASSPNTGTAGANVLTF

SEQ ID NO: 213131 - protein, 12 aa, Homo sapiens
  CDR3 for alpha chain variable domain of TCR clone 106566 (TRAV13-1, TRAJ15)
RAASQAGTALIF

SEQ ID NO: 213132 - protein, 18 aa, Homo sapiens
  CDR3 for beta chain variable domain of TCR clone 106566 (TRBV7-9, TRBJ2-3)
CASSLPINGQISTDTQYF

SEQ ID NO: 213133 - protein, 13 aa, Homo sapiens
  CDR3 for alpha chain variable domain of TCR clone 106567 (TRAV17, TRAJ40)
CAGALGGTYKYIF

SEQ ID NO: 213134 - protein, 16 aa, Homo sapiens
  CDR3 for beta chain variable domain of TCR clone 106567 (TRBV7-2, IGHJ2)
CASSLAPGRRDEKLFF

SEQ ID NO: 213135 - protein, 16 aa, Homo sapiens
  CDR3 for alpha chain variable domain of TCR clone 106568 (TRAV21, TRAJ37)
CAVRTAGSSNTGKLIF

SEQ ID NO: 213136 - protein, 13 aa, Homo sapiens
  CDR3 for beta chain variable domain of TCR clone 106568 (TRBV7-9, TRBJ2-5)
CAILPSGRETQYF

SEQ ID NO: 213137 - protein, 13 aa, Homo sapiens
  CDR3 for alpha chain variable domain of TCR clone 106569 (TRAV22, TRAJ48)
CAVERFGNEKLTF

SEQ ID NO: 213138 - protein, 13 aa, Homo sapiens
  CDR3 for beta chain variable domain of TCR clone 106569 (TRBV19, TRBJ1-2)
CASSVPGQDGYTF

SEQ ID NO: 213139 - protein, 11 aa, Homo sapiens
  CDR3 for alpha chain variable domain of TCR clone 106570 (TRAV2, TRAJ33)
CAVDSNYQLIW

SEQ ID NO: 213140 - protein, 14 aa, Homo sapiens
  CDR3 for beta chain variable domain of TCR clone 106570 (TRBV11-2, TRBJ2-7)
CASSLGAGAYEQYF

SEQ ID NO: 213141 - protein, 12 aa, Homo sapiens
  CDR3 for alpha chain variable domain of TCR clone 106571 (TRAV16, TRAJ22)
CALEVSARQLTF

SEQ ID NO: 213142 - protein, 14 aa, Homo sapiens
  CDR3 for beta chain variable domain of TCR clone 106571 (TRBV11-2, TRBJ2-3)
CASSSIASTDSQYF

SEQ ID NO: 213143 - protein, 15 aa, Homo sapiens
  CDR3 for alpha chain variable domain of TCR clone 106572 (TRAV35, TRAJ40)
CAGQLWDSGTYKYTF

SEQ ID NO: 213144 - protein, 12 aa, Homo sapiens
  CDR3 for beta chain variable domain of TCR clone 106572 (TRBV7-8, TRBJ2-7)
CASSLAGYEQYF

SEQ ID NO: 213145 - protein, 15 aa, Homo sapiens
  CDR3 for alpha chain variable domain of TCR clone 106573 (TRAV3, TRAJ42)
CAVRGGTGSQGNLIF

SEQ ID NO: 213146 - protein, 18 aa, Homo sapiens
  CDR3 for beta chain variable domain of TCR clone 106573 (TRBV11-2, TRBJ2-3)
CASSLGGASRGAPNTQYF

SEQ ID NO: 213147 - protein, 12 aa, Homo sapiens
  CDR3 for alpha chain variable domain of TCR clone 106574 (TRAV25, TRAJ20)
CAGRSNDYKLSF

SEQ ID NO: 213148 - protein, 15 aa, Homo sapiens
  CDR3 for beta chain variable domain of TCR clone 106574 (TRBV7-6, TRBJ2-7)
CASSGRRDTFGEQHF

SEQ ID NO: 213149 - protein, 16 aa, Homo sapiens
  CDR3 for alpha chain variable domain of TCR clone 106575 (TRAV26-2, TRAJ57)
CILRDVGSGGSEELVF

SEQ ID NO: 213150 - protein, 13 aa, Homo sapiens
  CDR3 for beta chain variable domain of TCR clone 106575 (TRBV18, TRBJ2-3)
CASSPGVTDTQYF

SEQ ID NO: 213151 - protein, 12 aa, Homo sapiens
  CDR3 for alpha chain variable domain of TCR clone 106576 (TRAV20, TRAJ20)
CAVRFNDYKLSF

SEQ ID NO: 213152 - protein, 14 aa, Homo sapiens
  CDR3 for beta chain variable domain of TCR clone 106576 (TRBV20-1, TRBJ2-1)
CSAQIGGSANEQLF

SEQ ID NO: 213153 - protein, 13 aa, Homo sapiens
  CDR3 for alpha chain variable domain of TCR clone 106577 (TRAV2, TRAJ15)
CAVASQAGTALIF

SEQ ID NO: 213154 - protein, 12 aa, Homo sapiens
  CDR3 for beta chain variable domain of TCR clone 106577 (TRBV12-5, TRBJ2-5)
CASGQGVETQYF

SEQ ID NO: 213155 - protein, 15 aa, Homo sapiens
  CDR3 for alpha chain variable domain of TCR clone 106578 (TRAV8-6, TRAJ37)
CAVIFSSGNTGKLIF

SEQ ID NO: 213156 - protein, 15 aa, Homo sapiens
  CDR3 for beta chain variable domain of TCR clone 106578 (TRBV25-1, TRBJ2-4)
CAGSETESAKNIQYF

SEQ ID NO: 213157 - protein, 11 aa, Homo sapiens
  CDR3 for alpha chain variable domain of TCR clone 106579 (TRAV2, TRAJ13)
CASGGYQKVTF

SEQ ID NO: 213158 - protein, 14 aa, Homo sapiens
  CDR3 for beta chain variable domain of TCR clone 106579 (TRBV19, TRBJ2-7)
CASSIFAGTYEQYF

SEQ ID NO: 213159 - protein, 16 aa, Homo sapiens
  CDR3 for alpha chain variable domain of TCR clone 106580 (TRAV12-3, TRAJ53)
CAMSPGSGGSNYKLTF

SEQ ID NO: 213160 - protein, 15 aa, Homo sapiens
  CDR3 for beta chain variable domain of TCR clone 106580 (TRBV6-1, TRBJ2-3)
CASSERGGITDTQYF

SEQ ID NO: 213161 - protein, 13 aa, Homo sapiens
  CDR3 for alpha chain variable domain of TCR clone 106581 (TRAV2, TRAJ11)
CAVEEIGYSTLTF

SEQ ID NO: 213162 - protein, 17 aa, Homo sapiens
  CDR3 for beta chain variable domain of TCR clone 106581 (TRBV7-2, TRBJ2-1)
WASSRGTSGAVGWEQFF

SEQ ID NO: 213163 - protein, 11 aa, Homo sapiens
  CDR3 for alpha chain variable domain of TCR clone 106582 (TRAV12-2, TRAJ49)
CAVHTGNQFYF

SEQ ID NO: 213164 - protein, 15 aa, Homo sapiens
  CDR3 for beta chain variable domain of TCR clone 106582 (TRBV7-9, TRBJ1-6)
CASSSPGRGNSPLHF

SEQ ID NO: 213165 - protein, 14 aa, Homo sapiens
  CDR3 for alpha chain variable domain of TCR clone 106583 (TRAV12-2, TRAJ13)
CAVKKTGGYQKVTF

SEQ ID NO: 213166 - protein, 15 aa, Homo sapiens
  CDR3 for beta chain variable domain of TCR clone 106583 (TRBV27, TRBJ2-1)
CASSNGGGSSIEQFF

SEQ ID NO: 213167 - protein, 11 aa, Homo sapiens
  CDR3 for alpha chain variable domain of TCR clone 106584 (TRAV1-2, TRAJ20)
CAVANDYKLSC

SEQ ID NO: 213168 - protein, 18 aa, Homo sapiens
  CDR3 for beta chain variable domain of TCR clone 106584 (TRBV20-1, TRBJ2-6)
CSAETTPTHGSGANVLTF

SEQ ID NO: 213169 - protein, 14 aa, Homo sapiens
  CDR3 for alpha chain variable domain of TCR clone 106585 (TRAV17, TRAJ34)
CATGSPEGTDKLIF

SEQ ID NO: 213170 - protein, 13 aa, Homo sapiens
  CDR3 for beta chain variable domain of TCR clone 106585 (TRBV11-2, TRBJ2-7)
CASSGTRPYEQYF

SEQ ID NO: 213171 - protein, 14 aa, Homo sapiens
  CDR3 for alpha chain variable domain of TCR clone 106586 (TRAV1-2, TRAJ8)
CAVREDTGLQKLVF

SEQ ID NO: 213172 - protein, 16 aa, Homo sapiens
  CDR3 for beta chain variable domain of TCR clone 106586 (TRBV12-5, TRBJ2-5)
CASGPRTSGNQETQYF

SEQ ID NO: 213173 - protein, 14 aa, Homo sapiens
  CDR3 for alpha chain variable domain of TCR clone 106587 (TRAV8-2, TRAJ4)
CVVSPSGGYNKLIF

SEQ ID NO: 213174 - protein, 17 aa, Homo sapiens
  CDR3 for beta chain variable domain of TCR clone 106587 (TRBV28, TRBJ2-2)
CASSSYSYRGNTGELFF

SEQ ID NO: 213175 - protein, 15 aa, Homo sapiens
  CDR3 for alpha chain variable domain of TCR clone 106588 (TRAV8-3, TRAJ41)
CAVGSSSNSGYAPNF

SEQ ID NO: 213176 - protein, 17 aa, Homo sapiens
  CDR3 for beta chain variable domain of TCR clone 106588 (TRBV25-1, TRBJ2-1)
CASSAYGQGRGVYEQFF

SEQ ID NO: 213177 - protein, 12 aa, Homo sapiens
  CDR3 for alpha chain variable domain of TCR clone 106589 (TRAV4, TRAJ26)
CLVGDYGQNFVF

SEQ ID NO: 213178 - protein, 15 aa, Homo sapiens
  CDR3 for beta chain variable domain of TCR clone 106589 (TRBV7-2, TRBJ1-2)
CSSSNQDRRGHGYTF

SEQ ID NO: 213179 - protein, 14 aa, Homo sapiens
  CDR3 for alpha chain variable domain of TCR clone 106590 (TRAV8-4, TRAJ48)
CAVSETFGNEKLTF

SEQ ID NO: 213180 - protein, 16 aa, Homo sapiens
  CDR3 for beta chain variable domain of TCR clone 106590 (TRBV12-4, TRBJ2-7)
CASSLIGGTGTYEQYF

SEQ ID NO: 213181 - protein, 12 aa, Homo sapiens
  CDR3 for alpha chain variable domain of TCR clone 106591 (TRAV17, TRAJ4)
CATDGGYNKLIF

SEQ ID NO: 213182 - protein, 13 aa, Homo sapiens
  CDR3 for beta chain variable domain of TCR clone 106591 (TRBV29-1, TRBJ2-2)
CSTIGVNTGELFF

SEQ ID NO: 213183 - protein, 18 aa, Homo sapiens
  CDR3 for alpha chain variable domain of TCR clone 106592 (TRAV21, TRAJ52)
CAVRPSPAGGTSYGKRTF

SEQ ID NO: 213184 - protein, 15 aa, Homo sapiens
  CDR3 for beta chain variable domain of TCR clone 106592 (TRBV5-7, TRBJ2-7)
CASSGGRPVPYEQYF

SEQ ID NO: 213185 - protein, 15 aa, Homo sapiens
  CDR3 for alpha chain variable domain of TCR clone 106593 (TRAV35, TRAJ40)
CAGVPGASGTYKYIF

SEQ ID NO: 213186 - protein, 17 aa, Homo sapiens
  CDR3 for beta chain variable domain of TCR clone 106593 (TRBV13, TRBJ2-3)
CASSLSRVAGGRNTQYF

SEQ ID NO: 213187 - protein, 14 aa, Homo sapiens
  CDR3 for alpha chain variable domain of TCR clone 106594 (TRAV3, TRAJ17)
CAVRDAAAGNKLTF

SEQ ID NO: 213188 - protein, 15 aa, Homo sapiens
  CDR3 for beta chain variable domain of TCR clone 106594 (TRBV10-3, TRBJ2-3)
CAISLTSGGTDTQYF

SEQ ID NO: 213189 - protein, 14 aa, Homo sapiens
  CDR3 for alpha chain variable domain of TCR clone 106595 (TRAV21, TRAJ35)
CAVMPLGFGNVLHC

SEQ ID NO: 213190 - protein, 12 aa, Homo sapiens
  CDR3 for beta chain variable domain of TCR clone 106595 (TRBV7-9, TRBJ2-7)
YASSIKREEQYF

SEQ ID NO: 213191 - protein, 16 aa, Homo sapiens
  CDR3 for alpha chain variable domain of TCR clone 106596 (TRAV30, TRAJ24)
CGTEIVDADSWRKFQF

SEQ ID NO: 213192 - protein, 15 aa, Homo sapiens
  CDR3 for beta chain variable domain of TCR clone 106596 (TRBV12-4, TRBJ2-2)
CASSPNDSGTGELFF

SEQ ID NO: 213193 - protein, 16 aa, Homo sapiens
  CDR3 for alpha chain variable domain of TCR clone 106597 (TRAV35, TRAJ42)
GRMERYYGGSQGNLIF

SEQ ID NO: 213194 - protein, 14 aa, Homo sapiens
  CDR3 for beta chain variable domain of TCR clone 106597 (TRBV25-1, TRBJ1-1)
CASTHLGGNTEAFF

SEQ ID NO: 213195 - protein, 15 aa, Homo sapiens
  CDR3 for alpha chain variable domain of TCR clone 106598 (TRAV4, TRAJ39)
CLVGPNNNAGNMLTF

SEQ ID NO: 213196 - protein, 16 aa, Homo sapiens
  CDR3 for beta chain variable domain of TCR clone 106598 (TRBV5-7, TRBJ2-7)
PAANEGGGRGSYEQYF

SEQ ID NO: 213197 - protein, 17 aa, Homo sapiens
  CDR3 for alpha chain variable domain of TCR clone 106599 (TRAV13-1, TRAJ52)
CAAGRNAGGTRYGKLTF

SEQ ID NO: 213198 - protein, 13 aa, Homo sapiens
  CDR3 for beta chain variable domain of TCR clone 106599 (TRBV7-2, TRBJ1-1)
CASNLKGAKVAFF

SEQ ID NO: 213199 - protein, 17 aa, Homo sapiens
  CDR3 for alpha chain variable domain of TCR clone 106600 (TRAV3, TRAJ12)
CAVRDGGRMDSSCKLIF

SEQ ID NO: 213200 - protein, 16 aa, Homo sapiens
  CDR3 for beta chain variable domain of TCR clone 106600 (TRBV9, TRBJ2-2)
CASSAMGKGNTGELFF

SEQ ID NO: 213201 - protein, 16 aa, Homo sapiens
  CDR3 for alpha chain variable domain of TCR clone 106601 (TRAV16, TRAJ4)
CALSRMFSGGYNKLIF

SEQ ID NO: 213202 - protein, 15 aa, Homo sapiens
  CDR3 for beta chain variable domain of TCR clone 106601 (TRBV7-2, TRBJ1-5)
CASSPGTGADQPQHF

SEQ ID NO: 213203 - protein, 11 aa, Homo sapiens
  CDR3 for alpha chain variable domain of TCR clone 106602 (TRAV21, TRAJ20)
CAVSDDYKLSF

SEQ ID NO: 213204 - protein, 14 aa, Homo sapiens
  CDR3 for beta chain variable domain of TCR clone 106602 (TRBV12-4, TRBJ1-1)
CASSFSQMNTEAFF

SEQ ID NO: 213205 - protein, 14 aa, Homo sapiens
  CDR3 for alpha chain variable domain of TCR clone 106603 (TRAV26-1, TRAJ38)
CIADNAGNNRKLIW

SEQ ID NO: 213206 - protein, 13 aa, Homo sapiens
  CDR3 for beta chain variable domain of TCR clone 106603 (TRBV7-9, TRBJ2-5)
CASLPSGRETQYF

SEQ ID NO: 213207 - protein, 15 aa, Homo sapiens
  CDR3 for alpha chain variable domain of TCR clone 106604 (TRAV3, TRAJ22)
CAVRDRGGSARQLTF

SEQ ID NO: 213208 - protein, 12 aa, Homo sapiens
  CDR3 for beta chain variable domain of TCR clone 106604 (TRBV12-4, TRBJ1-3)
CASSFSGNTIYF

SEQ ID NO: 213209 - protein, 14 aa, Homo sapiens
  CDR3 for alpha chain variable domain of TCR clone 106605 (TRAV2, TRAJ9)
CAVEDRSGGFKTIF

SEQ ID NO: 213210 - protein, 13 aa, Homo sapiens
  CDR3 for beta chain variable domain of TCR clone 106605 (TRBV12-4, TRBJ1-5)
CANSPDRAQPQHF

SEQ ID NO: 213211 - protein, 17 aa, Homo sapiens
  CDR3 for alpha chain variable domain of TCR clone 106606 (TRAV3, TRAJ38)
CAVRGCLNAGNNRKLIW

SEQ ID NO: 213212 - protein, 16 aa, Homo sapiens
  CDR3 for beta chain variable domain of TCR clone 106606 (TRBV20-1, TRBJ1-4)
CSDPGQGLLTNEKLFF

SEQ ID NO: 213213 - protein, 18 aa, Homo sapiens
  CDR3 for alpha chain variable domain of TCR clone 106607 (TRAV13-1, TRAJ52)
CAAKNTNAGGTSYGKLTF

SEQ ID NO: 213214 - protein, 15 aa, Homo sapiens
  CDR3 for beta chain variable domain of TCR clone 106607 (TRBV28, TRBJ2-1)
CASSIIAGGRSEQFF

SEQ ID NO: 213215 - protein, 14 aa, Homo sapiens
  CDR3 for alpha chain variable domain of TCR clone 106608 (TRAV30, TRAJ26)
CGTAIVSYGQNFVF

SEQ ID NO: 213216 - protein, 13 aa, Homo sapiens
  CDR3 for beta chain variable domain of TCR clone 106608 (TRBV7-3, TRBJ1-1)
CASSQDWGAEAFF

SEQ ID NO: 213217 - protein, 15 aa, Homo sapiens
  CDR3 for alpha chain variable domain of TCR clone 106609 (TRAV27, TRAJ38)
CAARRNAGNNRKLIW

SEQ ID NO: 213218 - protein, 14 aa, Homo sapiens
  CDR3 for beta chain variable domain of TCR clone 106609 (TRBV10-2, TRBJ1-5)
CASSSTGRNQPQHF

SEQ ID NO: 213219 - protein, 12 aa, Homo sapiens
  CDR3 for alpha chain variable domain of TCR clone 106610 (TRAV8-3, TRAJ43)
CAVGAGNNDMRF

SEQ ID NO: 213220 - protein, 15 aa, Homo sapiens
  CDR3 for beta chain variable domain of TCR clone 106610 (TRBV9, TRBJ1-6)
CASSVAGTGDSPLHF

SEQ ID NO: 213221 - protein, 10 aa, Homo sapiens
  CDR3 for alpha chain variable domain of TCR clone 106611 (TRAV12-3, TRAJ49)
CAMNDDQFYF

SEQ ID NO: 213222 - protein, 16 aa, Homo sapiens
  CDR3 for beta chain variable domain of TCR clone 106611 (TRBV27, TRBJ2-2)
CASSCRGLVRTGELFF

SEQ ID NO: 213223 - protein, 13 aa, Homo sapiens
  CDR3 for alpha chain variable domain of TCR clone 106612 (TRAV3, TRAJ21)
CAVGNFNKFYLDL

SEQ ID NO: 213224 - protein, 13 aa, Homo sapiens
  CDR3 for beta chain variable domain of TCR clone 106612 (TRBV4-2, TRBJ2-1)
CASSPGTYNEQFF

SEQ ID NO: 213225 - protein, 14 aa, Homo sapiens
  CDR3 for alpha chain variable domain of TCR clone 106613 (TRAV6, TRAJ6)
CALPTSGGSYIPTF

SEQ ID NO: 213226 - protein, 16 aa, Homo sapiens
  CDR3 for beta chain variable domain of TCR clone 106613 (TRBV2, TRBJ2-3)
CASSTSVEGVTDTQYF

SEQ ID NO: 213227 - protein, 18 aa, Homo sapiens
  CDR3 for alpha chain variable domain of TCR clone 106614 (TRAV9-2, TRAJ52)
CALSRHNAGGTSYGKLTF

SEQ ID NO: 213228 - protein, 13 aa, Homo sapiens
  CDR3 for beta chain variable domain of TCR clone 106614 (TRBV15, TRBJ2-7)
CATSTTGHYEQYF

SEQ ID NO: 213229 - protein, 12 aa, Homo sapiens
  CDR3 for alpha chain variable domain of TCR clone 106615 (TRAV21, TRAJ49)
CAVTNTGNQFYF

SEQ ID NO: 213230 - protein, 16 aa, Homo sapiens
  CDR3 for beta chain variable domain of TCR clone 106615 (TRBV13, TRBJ2-3)
CQQPLQGSGGGNTQYF

SEQ ID NO: 213231 - protein, 15 aa, Homo sapiens
  CDR3 for alpha chain variable domain of TCR clone 106616 (TRAV12-3, TRAJ47)
CAMSALVEYGNKLVF

SEQ ID NO: 213232 - protein, 13 aa, Homo sapiens
  CDR3 for beta chain variable domain of TCR clone 106616 (TRBV7-7, TRBJ2-3)
CASSLSRADTQYF

SEQ ID NO: 213233 - protein, 18 aa, Homo sapiens
  CDR3 for alpha chain variable domain of TCR clone 106617 (TRAV13-1, TRAJ52)
CAAKNPNAGGTSYGKLTF

SEQ ID NO: 213234 - protein, 18 aa, Homo sapiens
  CDR3 for beta chain variable domain of TCR clone 106617 (TRBV4-3, TRBJ1-2)
CASSQDGQSAPSDYGYTF

SEQ ID NO: 213235 - protein, 15 aa, Homo sapiens
  CDR3 for alpha chain variable domain of TCR clone 106618 (TRAV8-3, TRAJ27)
CAVGPSKTNAGKSTF

SEQ ID NO: 213236 - protein, 16 aa, Homo sapiens
  CDR3 for beta chain variable domain of TCR clone 106618 (TRBV7-7, TRBJ2-1)
CASSLASGTSYNEQFF

SEQ ID NO: 213237 - protein, 12 aa, Homo sapiens
  CDR3 for alpha chain variable domain of TCR clone 106619 (TRAV12-3, TRAJ40)
CAMSSGTYKYIF

SEQ ID NO: 213238 - protein, 20 aa, Homo sapiens
  CDR3 for beta chain variable domain of TCR clone 106619 (TRBV7-8, TRBJ2-2)
CASSHLFPGPTTHITGELFF

SEQ ID NO: 213239 - protein, 14 aa, Homo sapiens
  CDR3 for alpha chain variable domain of TCR clone 106620 (TRAV21, TRAJ35)
CAVMPIGFGNVLHC

SEQ ID NO: 213240 - protein, 15 aa, Homo sapiens
  CDR3 for beta chain variable domain of TCR clone 106620 (TRBV11-3, TRBJ2-3)
CASSAGTVVTNTQYF

SEQ ID NO: 213241 - protein, 18 aa, Homo sapiens
  CDR3 for alpha chain variable domain of TCR clone 106621 (TRAV20, TRAJ4)
CAVQPYYMFSGGYNKLIF

SEQ ID NO: 213242 - protein, 13 aa, Homo sapiens
  CDR3 for beta chain variable domain of TCR clone 106621 (TRBV19, TRBJ2-3)
CATWDKSTDTQYF

SEQ ID NO: 213243 - protein, 17 aa, Homo sapiens
  CDR3 for alpha chain variable domain of TCR clone 106622 (TRAV26-1, TRAJ53)
CIVRVDDSGGSNFKLTF

SEQ ID NO: 213244 - protein, 15 aa, Homo sapiens
  CDR3 for beta chain variable domain of TCR clone 106622 (TRBV20-1, TRBJ2-7)
CSARVPAAYFYEQYF

SEQ ID NO: 213245 - protein, 11 aa, Homo sapiens
  CDR3 for alpha chain variable domain of TCR clone 106623 (TRAV36/DV7, TRAJ53)
CAVEVEVATIN

SEQ ID NO: 213246 - protein, 15 aa, Homo sapiens
  CDR3 for beta chain variable domain of TCR clone 106623 (TRBV2, TRBJ1-4)
CASSERRGTNEKLFF

SEQ ID NO: 213247 - protein, 13 aa, Homo sapiens
  CDR3 for alpha chain variable domain of TCR clone 106624 (TRAV9-2, TRAJ53)
CVLSGGSNYKLTF

SEQ ID NO: 213248 - protein, 17 aa, Homo sapiens
  CDR3 for beta chain variable domain of TCR clone 106624 (TRBV11-2, TRBJ2-1)
CASSLYPPGVEYNEQFF

SEQ ID NO: 213249 - protein, 15 aa, Homo sapiens
  CDR3 for alpha chain variable domain of TCR clone 106625 (TRAV2, TRAJ15)
CAVEDREQAGTALIS

SEQ ID NO: 213250 - protein, 13 aa, Homo sapiens
  CDR3 for beta chain variable domain of TCR clone 106625 (TRBV10-2, TRBJ2-3)
CASSESGDHTQYF

SEQ ID NO: 213251 - protein, 14 aa, Homo sapiens
  CDR3 for alpha chain variable domain of TCR clone 106626 (TRAV26-1, TRAJ45)
CIEVTGGGADGLTF

SEQ ID NO: 213252 - protein, 19 aa, Homo sapiens
  CDR3 for beta chain variable domain of TCR clone 106626 (TRBV19, TRBJ2-2)
CASTRPGLARGRVTGELFF

SEQ ID NO: 213253 - protein, 12 aa, Homo sapiens
  CDR3 for alpha chain variable domain of TCR clone 106627 (TRAV29/DV5, TRAJ34)
CAASGNTDKLIF

SEQ ID NO: 213254 - protein, 13 aa, Homo sapiens
  CDR3 for beta chain variable domain of TCR clone 106627 (TRBV10-3, TRBJ2-7)
CASKLAVNYEQYF

SEQ ID NO: 213255 - protein, 12 aa, Homo sapiens
  CDR3 for alpha chain variable domain of TCR clone 106628 (TRAV3, TRAJ43)
CAVRDPNNDMRF

SEQ ID NO: 213256 - protein, 12 aa, Homo sapiens
  CDR3 for beta chain variable domain of TCR clone 106628 (TRBV11-2, TRBJ2-2)
CASSLGGGELFF

SEQ ID NO: 213257 - protein, 16 aa, Homo sapiens
  CDR3 for alpha chain variable domain of TCR clone 106629 (TRAV35, TRAJ28)
CAGQKYSGAGSYQLTF

SEQ ID NO: 213258 - protein, 13 aa, Homo sapiens
  CDR3 for beta chain variable domain of TCR clone 106629 (TRBV19, TRBJ1-2)
CASSQGQVYRYTF

SEQ ID NO: 213259 - protein, 16 aa, Homo sapiens
  CDR3 for alpha chain variable domain of TCR clone 106630 (TRAV16, TRAJ4)
CSRSRMFSGGYNKLIF

SEQ ID NO: 213260 - protein, 16 aa, Homo sapiens
  CDR3 for beta chain variable domain of TCR clone 106630 (TRBV24-1, TRBJ2-3)
CATSDPGTGATDTQYF

SEQ ID NO: 213261 - protein, 18 aa, Homo sapiens
  CDR3 for alpha chain variable domain of TCR clone 106631 (TRAV21, TRAJ52)
CAVRPSPAGGTSFGKLTF

SEQ ID NO: 213262 - protein, 15 aa, Homo sapiens
  CDR3 for beta chain variable domain of TCR clone 106631 (TRBV7-9, TRBJ2-7)
CASSSSGLAVYEQYF

SEQ ID NO: 213263 - protein, 12 aa, Homo sapiens
  CDR3 for alpha chain variable domain of TCR clone 106632 (TRAV1-2, TRAJ29)
CAVPSGNTPVVF

SEQ ID NO: 213264 - protein, 14 aa, Homo sapiens
  CDR3 for beta chain variable domain of TCR clone 106632 (TRBV18, TRBJ2-5)
CASSPGVSQETQYF

SEQ ID NO: 213265 - protein, 12 aa, Homo sapiens
  CDR3 for alpha chain variable domain of TCR clone 106633 (TRAV12-3, TRAJ29)
CAMSFRKHTSCL

SEQ ID NO: 213266 - protein, 14 aa, Homo sapiens
  CDR3 for beta chain variable domain of TCR clone 106633 (TRBV7-3, TRBJ2-1)
CASSLAGGTNEQFF

SEQ ID NO: 213267 - protein, 10 aa, Homo sapiens
  CDR3 for alpha chain variable domain of TCR clone 106634 (TRAV8-4, TRAJ43)
CAVSADDMRF

SEQ ID NO: 213268 - protein, 17 aa, Homo sapiens
  CDR3 for beta chain variable domain of TCR clone 106634 (TRBV20-1, TRBJ2-2)
CSASGSGQGGLTGELFF

SEQ ID NO: 213269 - protein, 12 aa, Homo sapiens
  CDR3 for alpha chain variable domain of TCR clone 106635 (TRAV12-2, TRAJ8)
CAVNTGFQKLVF

SEQ ID NO: 213270 - protein, 14 aa, Homo sapiens
  CDR3 for beta chain variable domain of TCR clone 106635 (TRBV25-1, TRBJ1-1)
CASTHLGGNTEAFF

SEQ ID NO: 213271 - protein, 18 aa, Homo sapiens
  CDR3 for alpha chain variable domain of TCR clone 106636 (TRAV12-2, TRAJ52)
CAVRPSPAGGTSYGKLTF

SEQ ID NO: 213272 - protein, 17 aa, Homo sapiens
  CDR3 for beta chain variable domain of TCR clone 106636 (TRBV13, TRBJ2-3)
CASSLSRVAGGRNTQYF

SEQ ID NO: 213273 - protein, 14 aa, Homo sapiens
  CDR3 for alpha chain variable domain of TCR clone 106637 (TRAV12-2, TRAJ11)
CAVEGGAGYSTLTF

SEQ ID NO: 213274 - protein, 16 aa, Homo sapiens
  CDR3 for beta chain variable domain of TCR clone 106637 (TRBV6-1, TRBJ1-2)
CASSGAWQGRSHGYTF

SEQ ID NO: 213275 - protein, 14 aa, Homo sapiens
  CDR3 for alpha chain variable domain of TCR clone 106638 (TRAV13-1, TRAJ35)
CAASKGGFGNVLHC

SEQ ID NO: 213276 - protein, 15 aa, Homo sapiens
  CDR3 for beta chain variable domain of TCR clone 106638 (TRBV6-3, TRBJ1-2)
CASSYRGQGRVGYTF

SEQ ID NO: 213277 - protein, 14 aa, Homo sapiens
  CDR3 for alpha chain variable domain of TCR clone 106639 (TRAV1-2, TRAJ8)
CALREDTGFQKLVF

SEQ ID NO: 213278 - protein, 16 aa, Homo sapiens
  CDR3 for beta chain variable domain of TCR clone 106639 (TRBV27, TRBJ2-2)
CASSFRGLVRTGELFF

SEQ ID NO: 213279 - protein, 14 aa, Homo sapiens
  CDR3 for alpha chain variable domain of TCR clone 106640 (TRAV20, TRAJ22)
CAVALGGSARHLTF

SEQ ID NO: 213280 - protein, 15 aa, Homo sapiens
  CDR3 for beta chain variable domain of TCR clone 106640 (TRBV7-2, TRBJ1-1)
CASSFAGDRDTEAFF

SEQ ID NO: 213281 - protein, 17 aa, Homo sapiens
  CDR3 for alpha chain variable domain of TCR clone 106641 (TRAV3, TRAJ6)
CAVRDGPRAGGSYIPTF

SEQ ID NO: 213282 - protein, 13 aa, Homo sapiens
  CDR3 for beta chain variable domain of TCR clone 106641 (TRBV5-7, TRBJ1-2)
CASSLGTGYGYTF

SEQ ID NO: 213283 - protein, 15 aa, Homo sapiens
  CDR3 for alpha chain variable domain of TCR clone 106642 (TRAV8-3, TRAJ41)
CALGSNSNSGYALNF

SEQ ID NO: 213284 - protein, 17 aa, Homo sapiens
  CDR3 for beta chain variable domain of TCR clone 106642 (TRBV25-1, TRBJ2-1)
CASSAYGQGRGVYEQFF

SEQ ID NO: 213285 - protein, 16 aa, Homo sapiens
  CDR3 for alpha chain variable domain of TCR clone 106643 (TRAV30, TRAJ49)
SAAQRVGPNTGNQFYF

SEQ ID NO: 213286 - protein, 15 aa, Homo sapiens
  CDR3 for beta chain variable domain of TCR clone 106643 (TRBV2, TRBJ2-1)
CASSELAGSYNEQSF

SEQ ID NO: 213287 - protein, 14 aa, Homo sapiens
  CDR3 for alpha chain variable domain of TCR clone 106644 (TRAV1-1, TRAJ23)
CAVSIYNQGGKLIF

SEQ ID NO: 213288 - protein, 16 aa, Homo sapiens
  CDR3 for beta chain variable domain of TCR clone 106644 (TRBV28, TRBJ2-1)
CASSSPEYPRDNEQFF

SEQ ID NO: 213289 - protein, 11 aa, Homo sapiens
  CDR3 for alpha chain variable domain of TCR clone 106645 (TRAV21, TRAJ11)
GAVNGYSTLTF

SEQ ID NO: 213290 - protein, 11 aa, Homo sapiens
  CDR3 for beta chain variable domain of TCR clone 106645 (TRBV19, TRBJ1-1)
CASSIGSEAFF

SEQ ID NO: 213291 - protein, 14 aa, Homo sapiens
  CDR3 for alpha chain variable domain of TCR clone 106646 (TRAV29/DV5, TRAJ34)
CAASASRETDKLIF

SEQ ID NO: 213292 - protein, 11 aa, Homo sapiens
  CDR3 for beta chain variable domain of TCR clone 106646 (TRBV7-8, TRBJ2-7)
CASSLSLEQYF

SEQ ID NO: 213293 - protein, 11 aa, Homo sapiens
  CDR3 for alpha chain variable domain of TCR clone 106647 (TRAV21, TRAJ34)
CAVTNTDKLIF

SEQ ID NO: 213294 - protein, 11 aa, Homo sapiens
  CDR3 for beta chain variable domain of TCR clone 106647 (TRBV29-1, TRBJ2-5)
CSEDRTGTQYF

SEQ ID NO: 213295 - protein, 14 aa, Homo sapiens
  CDR3 for alpha chain variable domain of TCR clone 106648 (TRAV12-1, TRAJ23)
CVVSVYNQGGKLIF

SEQ ID NO: 213296 - protein, 15 aa, Homo sapiens
  CDR3 for beta chain variable domain of TCR clone 106648 (TRBV20-1, TRBJ1-5)
CSAKPPGQGPQPQHF

SEQ ID NO: 213297 - protein, 14 aa, Homo sapiens
  CDR3 for alpha chain variable domain of TCR clone 106649 (TRAV12-2, TRAJ40)
CAVKIPSGTYKYIL

SEQ ID NO: 213298 - protein, 17 aa, Homo sapiens
  CDR3 for beta chain variable domain of TCR clone 106649 (TRBV7-8, TRBJ2-6)
CASSAGTGGAGANVLTF

SEQ ID NO: 213299 - protein, 13 aa, Homo sapiens
  CDR3 for alpha chain variable domain of TCR clone 106650 (TRAV13-2, TRAJ53)
CAENMGSIYKLTF

SEQ ID NO: 213300 - protein, 13 aa, Homo sapiens
  CDR3 for beta chain variable domain of TCR clone 106650 (TRBV4-1, TRBJ2-2)
CASSQENTGELFF

SEQ ID NO: 213301 - protein, 16 aa, Homo sapiens
  CDR3 for alpha chain variable domain of TCR clone 106651 (TRAV26-1, TRAJ53)
CIVRVAMGGSNYKLTF

SEQ ID NO: 213302 - protein, 11 aa, Homo sapiens
  CDR3 for beta chain variable domain of TCR clone 106651 (TRBV19, TRBJ1-1)
CASSIGSEAFF

SEQ ID NO: 213303 - protein, 14 aa, Homo sapiens
  CDR3 for alpha chain variable domain of TCR clone 106652 (TRAV8-4, TRAJ54)
CAVSEVLGAQKLGF

SEQ ID NO: 213304 - protein, 15 aa, Homo sapiens
  CDR3 for beta chain variable domain of TCR clone 106652 (TRBV6-1, TRBJ2-6)
CASSSRPSGANVLTF

SEQ ID NO: 213305 - protein, 14 aa, Homo sapiens
  CDR3 for alpha chain variable domain of TCR clone 106653 (TRAV1-2, TRAJ16)
CAVNRFSDGRKLLF

SEQ ID NO: 213306 - protein, 13 aa, Homo sapiens
  CDR3 for beta chain variable domain of TCR clone 106653 (TRBV6-6, TRBJ2-7)
CASSPKHLAEQYF

SEQ ID NO: 213307 - protein, 14 aa, Homo sapiens
  CDR3 for alpha chain variable domain of TCR clone 106654 (TRAV16, TRAJ17)
CAPRIKAAGNKLTF

SEQ ID NO: 213308 - protein, 12 aa, Homo sapiens
  CDR3 for beta chain variable domain of TCR clone 106654 (TRBV20-1, TRBJ2-7)
CSAITPTKEQYF

SEQ ID NO: 213309 - protein, 16 aa, Homo sapiens
  CDR3 for alpha chain variable domain of TCR clone 106655 (TRAV3, TRAJ37)
CAVRGNGSGNTGKLIF

SEQ ID NO: 213310 - protein, 13 aa, Homo sapiens
  CDR3 for beta chain variable domain of TCR clone 106655 (TRBV7-2, TRBJ2-2)
CASSSVRAGELFF

SEQ ID NO: 213311 - protein, 11 aa, Homo sapiens
  CDR3 for alpha chain variable domain of TCR clone 106656 (TRAV1-2, TRAJ31)
CAVDNNARLMF

SEQ ID NO: 213312 - protein, 15 aa, Homo sapiens
  CDR3 for beta chain variable domain of TCR clone 106656 (TRBV28, TRBJ2-1)
CDSSIIAGGRSEQFF

SEQ ID NO: 213313 - protein, 11 aa, Homo sapiens
  CDR3 for alpha chain variable domain of TCR clone 106657 (TRAV3, TRAJ21)
CAVGNFNKFYF

SEQ ID NO: 213314 - protein, 14 aa, Homo sapiens
  CDR3 for beta chain variable domain of TCR clone 106657 (TRBV20-1, TRBJ2-5)
CSALVPGYQETQYF

SEQ ID NO: 213315 - protein, 12 aa, Homo sapiens
  CDR3 for alpha chain variable domain of TCR clone 106658 (TRAV8-4, TRAJ43)
CAVSVNNNDMRF

SEQ ID NO: 213316 - protein, 14 aa, Homo sapiens
  CDR3 for beta chain variable domain of TCR clone 106658 (TRBV7-2, TRBJ2-7)
CASSPKTSFYEQYF

SEQ ID NO: 213317 - protein, 12 aa, Homo sapiens
  CDR3 for alpha chain variable domain of TCR clone 106659 (TRAV25, TRAJ11)
CAGASGYSTLTF

SEQ ID NO: 213318 - protein, 12 aa, Homo sapiens
  CDR3 for beta chain variable domain of TCR clone 106659 (TRBV7-8, TRBJ2-5)
CASSLRAETQYF

SEQ ID NO: 213319 - protein, 12 aa, Homo sapiens
  CDR3 for alpha chain variable domain of TCR clone 106660 (TRAV16, TRAJ8)
CAPLGGFQKLVF

SEQ ID NO: 213320 - protein, 15 aa, Homo sapiens
  CDR3 for beta chain variable domain of TCR clone 106660 (TRBV6-3, TRBJ2-7)
CASSSPGTVFYEQYF

SEQ ID NO: 213321 - protein, 16 aa, Homo sapiens
  CDR3 for alpha chain variable domain of TCR clone 106661 (TRAV13-1, TRAJ37)
CAASSLGSSSTGKLIF

SEQ ID NO: 213322 - protein, 12 aa, Homo sapiens
  CDR3 for beta chain variable domain of TCR clone 106661 (TRBV6-1, TRBJ2-5)
CASSEGRETQYF

SEQ ID NO: 213323 - protein, 16 aa, Homo sapiens
  CDR3 for alpha chain variable domain of TCR clone 106662 (TRAV16, TRAJ52)
CALSAAGGTSYGKLTF

SEQ ID NO: 213324 - protein, 15 aa, Homo sapiens
  CDR3 for beta chain variable domain of TCR clone 106662 (TRBV9, TRBJ1-6)
CASSVAGTGDSPLHF

SEQ ID NO: 213325 - protein, 13 aa, Homo sapiens
  CDR3 for alpha chain variable domain of TCR clone 106663 (TRAV12-2, TRAJ20)
CAVYPSNDYKLSF

SEQ ID NO: 213326 - protein, 16 aa, Homo sapiens
  CDR3 for beta chain variable domain of TCR clone 106663 (TRBV7-3, TRBJ2-2)
CASSLKRGTLSGELFF

SEQ ID NO: 213327 - protein, 20 aa, Homo sapiens
  CDR3 for alpha chain variable domain of TCR clone 106664 (TRAV25, TRAJ21)
TATQTTDVGTYPLSFNKFYF

SEQ ID NO: 213328 - protein, 14 aa, Homo sapiens
  CDR3 for beta chain variable domain of TCR clone 106664 (TRBV4-1, TRBJ2-2)
CASSQAVNTGELFF

SEQ ID NO: 213329 - protein, 15 aa, Homo sapiens
  CDR3 for alpha chain variable domain of TCR clone 106665 (TRAV35, TRAJ40)
CAGQLGTSGTYKYIF

SEQ ID NO: 213330 - protein, 11 aa, Homo sapiens
  CDR3 for beta chain variable domain of TCR clone 106665 (TRBV23-1, TRBJ2-7)
SASGTGLEQYF

SEQ ID NO: 213331 - protein, 14 aa, Homo sapiens
  CDR3 for alpha chain variable domain of TCR clone 106666 (TRAV38-1, TRAJ29)
CAFITPSGNKPLVF

SEQ ID NO: 213332 - protein, 15 aa, Homo sapiens
  CDR3 for beta chain variable domain of TCR clone 106666 (TRBV5-1, TRBJ2-1)
CASSPPRAPYNEQFF

SEQ ID NO: 213333 - protein, 14 aa, Homo sapiens
  CDR3 for alpha chain variable domain of TCR clone 106667 (TRAV13-1, TRAJ35)
CAASKGGFGNWLHC

SEQ ID NO: 213334 - protein, 13 aa, Homo sapiens
  CDR3 for beta chain variable domain of TCR clone 106667 (TRBV7-3, TRBJ1-1)
CASSQDWGAEAFF

SEQ ID NO: 213335 - protein, 14 aa, Homo sapiens
  CDR3 for alpha chain variable domain of TCR clone 106668 (TRAV26-1, TRAJ39)
CLVRGSRAGNMLTF

SEQ ID NO: 213336 - protein, 15 aa, Homo sapiens
  CDR3 for beta chain variable domain of TCR clone 106668 (TRBV7-9, TRBJ1-5)
CASSQGHQPNQPQHF

SEQ ID NO: 213337 - protein, 14 aa, Homo sapiens
  CDR3 for alpha chain variable domain of TCR clone 106669 (TRAV21, TRAJ35)
CAVMPIGFGNVLHC

SEQ ID NO: 213338 - protein, 12 aa, Homo sapiens
  CDR3 for beta chain variable domain of TCR clone 106669 (TRBV28, TRBJ2-6)
CAIQAGANVLTF

SEQ ID NO: 213339 - protein, 16 aa, Homo sapiens
  CDR3 for alpha chain variable domain of TCR clone 106670 (TRAV30, TRAJ24)
CGTEIVDADSWGKFQL

SEQ ID NO: 213340 - protein, 14 aa, Homo sapiens
  CDR3 for beta chain variable domain of TCR clone 106670 (TRBV20-1, TRBJ1-1)
CSAQTRIGGTEAFF

SEQ ID NO: 213341 - protein, 14 aa, Homo sapiens
  CDR3 for alpha chain variable domain of TCR clone 106671 (TRAV12-3, TRAJ10)
SHLPLTGGVNKLTF

SEQ ID NO: 213342 - protein, 15 aa, Homo sapiens
  CDR3 for beta chain variable domain of TCR clone 106671 (TRBV13, TRBJ2-1)
CASSLLSGLNNEQFF

SEQ ID NO: 213343 - protein, 14 aa, Homo sapiens
  CDR3 for alpha chain variable domain of TCR clone 106672 (TRAV12-3, TRAJ10)
SHLPLTGGGNKLTF

SEQ ID NO: 213344 - protein, 17 aa, Homo sapiens
  CDR3 for beta chain variable domain of TCR clone 106672 (TRBV5-1, TRBJ2-5)
CASSLLGLAANQETQYF

SEQ ID NO: 213345 - protein, 13 aa, Homo sapiens
  CDR3 for alpha chain variable domain of TCR clone 106673 (TRAV13-2, TRAJ22)
CLGWISSARQLTF

SEQ ID NO: 213346 - protein, 15 aa, Homo sapiens
  CDR3 for beta chain variable domain of TCR clone 106673 (TRBV7-2, TRBJ2-3)
CASSSTGLETDTQYF

SEQ ID NO: 213347 - protein, 16 aa, Homo sapiens
  CDR3 for alpha chain variable domain of TCR clone 106674 (TRAV30, TRAJ24)
CGTEIVDADSWGKFQF

SEQ ID NO: 213348 - protein, 13 aa, Homo sapiens
  CDR3 for beta chain variable domain of TCR clone 106674 (TRBV10-3, TRBJ2-7)
CASKLAVDYEQYF

SEQ ID NO: 213349 - protein, 15 aa, Homo sapiens
  CDR3 for alpha chain variable domain of TCR clone 106675 (TRAV16, TRAJ10)
CALRERTGGGNKLTF

SEQ ID NO: 213350 - protein, 14 aa, Homo sapiens
  CDR3 for beta chain variable domain of TCR clone 106675 (TRBV5-5, TRBJ2-7)
CASSLGQGTYEQYF

SEQ ID NO: 213351 - protein, 12 aa, Homo sapiens
  CDR3 for alpha chain variable domain of TCR clone 106676 (TRAV27, TRAJ35)
CAGADFGNVLHC

SEQ ID NO: 213352 - protein, 10 aa, Homo sapiens
  CDR3 for beta chain variable domain of TCR clone 106676 (TRBV12-4, TRBJ2-7)
CASLTFEQYF

SEQ ID NO: 213353 - protein, 11 aa, Homo sapiens
  CDR3 for alpha chain variable domain of TCR clone 106677 (TRAV12-2, TRAJ49)
CALQGGNQFYF

SEQ ID NO: 213354 - protein, 14 aa, Homo sapiens
  CDR3 for beta chain variable domain of TCR clone 106677 (TRBV6-1, TRBJ1-3)
CASVQGGGGNTIYF

SEQ ID NO: 213355 - protein, 15 aa, Homo sapiens
  CDR3 for alpha chain variable domain of TCR clone 106678 (TRAV38-1, TRAJ57)
CAFMKHQGGSEKLVF

SEQ ID NO: 213356 - protein, 12 aa, Homo sapiens
  CDR3 for beta chain variable domain of TCR clone 106678 (TRBV28, TRBJ2-1)
CASSLRFDEQFF

SEQ ID NO: 213357 - protein, 14 aa, Homo sapiens
  CDR3 for alpha chain variable domain of TCR clone 106679 (TRAV3, TRAJ9)
CAVRLKTGGFKTIF

SEQ ID NO: 213358 - protein, 15 aa, Homo sapiens
  CDR3 for beta chain variable domain of TCR clone 106679 (TRBV7-2, TRBJ2-1)
CASSLASGRVNEQFF

SEQ ID NO: 213359 - protein, 16 aa, Homo sapiens
  CDR3 for alpha chain variable domain of TCR clone 106680 (TRAV30, TRAJ24)
CGTEIVDADSWGKFQF

SEQ ID NO: 213360 - protein, 15 aa, Homo sapiens
  CDR3 for beta chain variable domain of TCR clone 106680 (TRBV20-1, TRBJ2-7)
GSARDRVSGMDEQYF

SEQ ID NO: 213361 - protein, 16 aa, Homo sapiens
  CDR3 for alpha chain variable domain of TCR clone 106681 (TRAV21, TRAJ52)
CAVTNAGGTSYGKLTF

SEQ ID NO: 213362 - protein, 12 aa, Homo sapiens
  CDR3 for beta chain variable domain of TCR clone 106681 (TRBV7-9, TRBJ1-1)
CASSPSSTEAFF

SEQ ID NO: 213363 - protein, 15 aa, Homo sapiens
  CDR3 for alpha chain variable domain of TCR clone 106682 (TRAV17, TRAJ16)
CATALRFSDGQKLLF

SEQ ID NO: 213364 - protein, 14 aa, Homo sapiens
  CDR3 for beta chain variable domain of TCR clone 106682 (TRBV12-5, TRBJ2-5)
CASGSRTHQETQYF

SEQ ID NO: 213365 - protein, 15 aa, Homo sapiens
  CDR3 for alpha chain variable domain of TCR clone 106683 (TRAV26-1, TRAJ15)
CIVRAANQAGTALIF

SEQ ID NO: 213366 - protein, 15 aa, Homo sapiens
  CDR3 for beta chain variable domain of TCR clone 106683 (TRBV20-1, TRBJ1-1)
CSARSAATSNTEAFC

SEQ ID NO: 213367 - protein, 10 aa, Homo sapiens
  CDR3 for alpha chain variable domain of TCR clone 106684 (TRAV8-4, TRAJ43)
CAVSADDMRC

SEQ ID NO: 213368 - protein, 16 aa, Homo sapiens
  CDR3 for beta chain variable domain of TCR clone 106684 (TRBV12-5, TRBJ2-5)
CASGPRTSGNQETQYF

SEQ ID NO: 213369 - protein, 12 aa, Homo sapiens
  CDR3 for alpha chain variable domain of TCR clone 106685 (TRAV8-4, TRAJ24)
CAVSGRWGKLQF

SEQ ID NO: 213370 - protein, 14 aa, Homo sapiens
  CDR3 for beta chain variable domain of TCR clone 106685 (TRBV12-4, TRBJ2-5)
CASSSTEGTKTQYF

SEQ ID NO: 213371 - protein, 20 aa, Homo sapiens
  CDR3 for alpha chain variable domain of TCR clone 106686 (TRAV12-3, TRAJ41)
SLFIRDSQPSDSATPEALNF

SEQ ID NO: 213372 - protein, 15 aa, Homo sapiens
  CDR3 for beta chain variable domain of TCR clone 106686 (TRBV5-1, TRBJ2-7)
CASSLDLTSYYEQYF

SEQ ID NO: 213373 - protein, 14 aa, Homo sapiens
  CDR3 for alpha chain variable domain of TCR clone 106687 (TRAV12-3, TRAJ10)
SHLPLTGGGNKLTF

SEQ ID NO: 213374 - protein, 12 aa, Homo sapiens
  CDR3 for beta chain variable domain of TCR clone 106687 (TRBV7-3, TRBJ2-5)
CASSSPGGTQYV

SEQ ID NO: 213375 - protein, 14 aa, Homo sapiens
  CDR3 for alpha chain variable domain of TCR clone 106688 (TRAV23/DV6, TRAJ4)
CADNLSGGYNKLIF

SEQ ID NO: 213376 - protein, 17 aa, Homo sapiens
  CDR3 for beta chain variable domain of TCR clone 106688 (TRBV4-1, TRBJ1-3)
CASSPQRGIRFGNTIYF

SEQ ID NO: 213377 - protein, 13 aa, Homo sapiens
  CDR3 for alpha chain variable domain of TCR clone 106689 (TRAV27, TRAJ56)
CAGKPGANSKLTF

SEQ ID NO: 213378 - protein, 17 aa, Homo sapiens
  CDR3 for beta chain variable domain of TCR clone 106689 (TRBV5-1, TRBJ2-7)
FAPAADTPGQIPYEQYF

SEQ ID NO: 213379 - protein, 13 aa, Homo sapiens
  CDR3 for alpha chain variable domain of TCR clone 106690 (TRAV29/DV5, TRAJ44)
CAASTGTASKLTF

SEQ ID NO: 213380 - protein, 15 aa, Homo sapiens
  CDR3 for beta chain variable domain of TCR clone 106690 (TRBV28, TRBJ2-5)
CASSPPWSYQETQYF

SEQ ID NO: 213381 - protein, 14 aa, Homo sapiens
  CDR3 for alpha chain variable domain of TCR clone 106691 (TRAV2, TRAJ22)
CAVGRGGSARKLTF

SEQ ID NO: 213382 - protein, 12 aa, Homo sapiens
  CDR3 for beta chain variable domain of TCR clone 106691 (TRBV19, TRBJ2-1)
CASSMQDTEQFF

SEQ ID NO: 213383 - protein, 13 aa, Homo sapiens
  CDR3 for alpha chain variable domain of TCR clone 106692 (TRAV30, TRAJ24)
CGTVTDSWGKLQV

SEQ ID NO: 213384 - protein, 15 aa, Homo sapiens
  CDR3 for beta chain variable domain of TCR clone 106692 (TRBV19, TRBJ1-1)
CASTSGQIQNTEAFF

SEQ ID NO: 213385 - protein, 12 aa, Homo sapiens
  CDR3 for alpha chain variable domain of TCR clone 106693 (TRAV26-1, TRAJ54)
CIGGWGAQELVF

SEQ ID NO: 213386 - protein, 14 aa, Homo sapiens
  CDR3 for beta chain variable domain of TCR clone 106693 (TRBV11-2, TRBJ1-2)
CASSSGQAGDGYTF

SEQ ID NO: 213387 - protein, 15 aa, Homo sapiens
  CDR3 for alpha chain variable domain of TCR clone 106694 (TRAV8-3, TRAJ45)
CASSYSGGGADGLTL

SEQ ID NO: 213388 - protein, 18 aa, Homo sapiens
  CDR3 for beta chain variable domain of TCR clone 106694 (TRBV18, TRBJ1-3)
CASSPRGGAGPSGNTIYF

SEQ ID NO: 213389 - protein, 12 aa, Homo sapiens
  CDR3 for alpha chain variable domain of TCR clone 106695 (TRAV12-1, TRAJ9)
CVVNPASFKTIF

SEQ ID NO: 213390 - protein, 17 aa, Homo sapiens
  CDR3 for beta chain variable domain of TCR clone 106695 (TRBV25-1, TRBJ2-7)
CASSDARVVFSSYEQYF

SEQ ID NO: 213391 - protein, 16 aa, Homo sapiens
  CDR3 for alpha chain variable domain of TCR clone 106696 (TRAV16, TRAJ52)
CALSAAGGTRYGKLTF

SEQ ID NO: 213392 - protein, 19 aa, Homo sapiens
  CDR3 for beta chain variable domain of TCR clone 106696 (TRBV19, TRBJ2-5)
CASSIGQVTDFFLGETQYF

SEQ ID NO: 213393 - protein, 14 aa, Homo sapiens
  CDR3 for alpha chain variable domain of TCR clone 106697 (TRAV25, TRAJ35)
CARRMEGFGNLLHC

SEQ ID NO: 213394 - protein, 13 aa, Homo sapiens
  CDR3 for beta chain variable domain of TCR clone 106697 (TRBV7-2, TRBJ1-4)
CASSLAGLEKLFF

SEQ ID NO: 213395 - protein, 16 aa, Homo sapiens
  CDR3 for alpha chain variable domain of TCR clone 106698 (TRAV26-1, TRAJ23)
FIVRVHPYNQGGKLIF

SEQ ID NO: 213396 - protein, 13 aa, Homo sapiens
  CDR3 for beta chain variable domain of TCR clone 106698 (TRBV20-1, TRBJ2-5)
CSARGDYQETQYF

SEQ ID NO: 213397 - protein, 16 aa, Homo sapiens
  CDR3 for alpha chain variable domain of TCR clone 106699 (TRAV17, TRAJ53)
CATYALSGGSNYKLTF

SEQ ID NO: 213398 - protein, 12 aa, Homo sapiens
  CDR3 for beta chain variable domain of TCR clone 106699 (TRBV5-1, TRBJ2-7)
CASSFRGYEQYF

SEQ ID NO: 213399 - protein, 10 aa, Homo sapiens
  CDR3 for alpha chain variable domain of TCR clone 106700 (TRAV21, TRAJ31)
CAVDNAGLMF

SEQ ID NO: 213400 - protein, 13 aa, Homo sapiens
  CDR3 for beta chain variable domain of TCR clone 106700 (TRBV4-1, TRBJ1-1)
CASSRKMNTEAFF

SEQ ID NO: 213401 - protein, 12 aa, Homo sapiens
  CDR3 for alpha chain variable domain of TCR clone 106701 (TRAV12-1, TRAJ31)
CVASLLRARLMF

SEQ ID NO: 213402 - protein, 15 aa, Homo sapiens
  CDR3 for beta chain variable domain of TCR clone 106701 (TRBV3-1, TRBJ1-2)
CASSHTGQGGYGYTF

SEQ ID NO: 213403 - protein, 12 aa, Homo sapiens
  CDR3 for alpha chain variable domain of TCR clone 106702 (TRAV17, TRAJ4)
CATDGGYNKLIF

SEQ ID NO: 213404 - protein, 15 aa, Homo sapiens
  CDR3 for beta chain variable domain of TCR clone 106702 (TRBV28, TRBJ1-2)
CASIPQGSDDYGYTF

SEQ ID NO: 213405 - protein, 16 aa, Homo sapiens
  CDR3 for alpha chain variable domain of TCR clone 106703 (TRAV12-3, TRAJ28)
CAMRANSGAGSYQLTF

SEQ ID NO: 213406 - protein, 12 aa, Homo sapiens
  CDR3 for beta chain variable domain of TCR clone 106703 (TRBV11-2, TRBJ2-2)
CASSLPTGELFF

SEQ ID NO: 213407 - protein, 15 aa, Homo sapiens
  CDR3 for alpha chain variable domain of TCR clone 106704 (TRAV26-1, TRAJ38)
FIVRAEGGNNRKLIW

SEQ ID NO: 213408 - protein, 14 aa, Homo sapiens
  CDR3 for beta chain variable domain of TCR clone 106704 (TRBV7-6, TRBJ2-5)
CASSSPSGSETQYF

SEQ ID NO: 213409 - protein, 10 aa, Homo sapiens
  CDR3 for alpha chain variable domain of TCR clone 106705 (TRAV29/DV5, TRAJ34)
CAEDTDKLIF

SEQ ID NO: 213410 - protein, 15 aa, Homo sapiens
  CDR3 for beta chain variable domain of TCR clone 106705 (TRBV10-2, TRBJ2-6)
CASSEQGTGANVLTF

SEQ ID NO: 213411 - protein, 14 aa, Homo sapiens
  CDR3 for alpha chain variable domain of TCR clone 106706 (TRAV20, TRAJ56)
CAVQFGGANSKLTF

SEQ ID NO: 213412 - protein, 14 aa, Homo sapiens
  CDR3 for beta chain variable domain of TCR clone 106706 (TRBV4-3, TRBJ2-2)
CASSQGHVTGELFF

SEQ ID NO: 213413 - protein, 15 aa, Homo sapiens
  CDR3 for alpha chain variable domain of TCR clone 106707 (TRAV12-1, TRAJ9)
CVVSFGDTGCFKTIF

SEQ ID NO: 213414 - protein, 13 aa, Homo sapiens
  CDR3 for beta chain variable domain of TCR clone 106707 (TRBV2, TRBJ1-4)
CASSERAGEKLFF

SEQ ID NO: 213415 - protein, 12 aa, Homo sapiens
  CDR3 for alpha chain variable domain of TCR clone 106708 (TRAV1-2, TRAJ29)
CAVPSGNTPLVF

SEQ ID NO: 213416 - protein, 16 aa, Homo sapiens
  CDR3 for beta chain variable domain of TCR clone 106708 (TRBV11-2, TRBJ1-2)
CASSLDTGGADYGYTF

SEQ ID NO: 213417 - protein, 14 aa, Homo sapiens
  CDR3 for alpha chain variable domain of TCR clone 106709 (TRAV2, TRAJ37)
CAVDFTSNTGKLIF

SEQ ID NO: 213418 - protein, 15 aa, Homo sapiens
  CDR3 for beta chain variable domain of TCR clone 106709 (TRBV3-1, TRBJ2-7)
CASSQEWTGSYEQYF

SEQ ID NO: 213419 - protein, 15 aa, Homo sapiens
  CDR3 for alpha chain variable domain of TCR clone 106710 (TRAV14/DV4, TRAJ10)
CAMRELTGGGTKLTF

SEQ ID NO: 213420 - protein, 18 aa, Homo sapiens
  CDR3 for beta chain variable domain of TCR clone 106710 (TRBV7-9, TRBJ2-7)
CASSLTTSGSRTWYEQYF

SEQ ID NO: 213421 - protein, 12 aa, Homo sapiens
  CDR3 for alpha chain variable domain of TCR clone 106711 (TRAV26-1, TRAJ31)
CLVRNNNARLMF

SEQ ID NO: 213422 - protein, 15 aa, Homo sapiens
  CDR3 for beta chain variable domain of TCR clone 106711 (TRBV20-1, TRBJ2-4)
CSARDLTGGPNIQYF

SEQ ID NO: 213423 - protein, 16 aa, Homo sapiens
  CDR3 for alpha chain variable domain of TCR clone 106712 (TRAV30, TRAJ24)
CGTEIEDADSWGKFQF

SEQ ID NO: 213424 - protein, 12 aa, Homo sapiens
  CDR3 for beta chain variable domain of TCR clone 106712 (TRBV11-2, TRBJ2-1)
CASSPGNNEQFF

SEQ ID NO: 213425 - protein, 15 aa, Homo sapiens
  CDR3 for alpha chain variable domain of TCR clone 106713 (TRAV35, TRAJ50)
CAGQLRKTSYDKVIF

SEQ ID NO: 213426 - protein, 14 aa, Homo sapiens
  CDR3 for beta chain variable domain of TCR clone 106713 (TRBV19, TRBJ1-5)
CASRAPDSFLSQHF

SEQ ID NO: 213427 - protein, 12 aa, Homo sapiens
  CDR3 for alpha chain variable domain of TCR clone 106714 (TRAV3, TRAJ31)
WAVRDGNARLMF

SEQ ID NO: 213428 - protein, 18 aa, Homo sapiens
  CDR3 for beta chain variable domain of TCR clone 106714 (TRBV7-2, TRBJ2-3)
CASSLKREGSGITDTQYF

SEQ ID NO: 213429 - protein, 17 aa, Homo sapiens
  CDR3 for alpha chain variable domain of TCR clone 106715 (TRAV26-1, TRAJ53)
CIVRVDDSGGSNYKLTF

SEQ ID NO: 213430 - protein, 15 aa, Homo sapiens
  CDR3 for beta chain variable domain of TCR clone 106715 (TRBV4-1, TRBJ2-5)
CASSQWDLYQETQYF

SEQ ID NO: 213431 - protein, 12 aa, Homo sapiens
  CDR3 for alpha chain variable domain of TCR clone 106716 (TRAV1-1, TRAJ39)
CAVPVVGNMLTF

SEQ ID NO: 213432 - protein, 13 aa, Homo sapiens
  CDR3 for beta chain variable domain of TCR clone 106716 (TRBV12-4, TRBJ2-5)
CASRLAVQETQYF

SEQ ID NO: 213433 - protein, 15 aa, Homo sapiens
  CDR3 for alpha chain variable domain of TCR clone 106717 (TRAV35, TRAJ33)
CAGPGGGDSNYQLIW

SEQ ID NO: 213434 - protein, 11 aa, Homo sapiens
  CDR3 for beta chain variable domain of TCR clone 106717 (TRBV10-3, TRBJ2-7)
CAISEGLEQYF

SEQ ID NO: 213435 - protein, 14 aa, Homo sapiens
  CDR3 for alpha chain variable domain of TCR clone 106718 (TRAV1-2, TRAJ16)
CAVNRFSDGQKLLF

SEQ ID NO: 213436 - protein, 14 aa, Homo sapiens
  CDR3 for beta chain variable domain of TCR clone 106718 (TRBV14, TRBJ2-1)
CASSQVQGRGKQFF

SEQ ID NO: 213437 - protein, 15 aa, Homo sapiens
  CDR3 for alpha chain variable domain of TCR clone 106719 (TRAV3, TRAJ29)
CAVRDPYSGNTPLVF

SEQ ID NO: 213438 - protein, 17 aa, Homo sapiens
  CDR3 for beta chain variable domain of TCR clone 106719 (TRBV20-1, TRBJ2-1)
CSARDPLAGVWDNEQFF

SEQ ID NO: 213439 - protein, 14 aa, Homo sapiens
  CDR3 for alpha chain variable domain of TCR clone 106720 (TRAV26-1, TRAJ40)
CIVRLLSGTYKYLF

SEQ ID NO: 213440 - protein, 13 aa, Homo sapiens
  CDR3 for beta chain variable domain of TCR clone 106720 (TRBV3-1, TRBJ1-1)
CASSQLQGAEAFF

SEQ ID NO: 213441 - protein, 15 aa, Homo sapiens
  CDR3 for alpha chain variable domain of TCR clone 106721 (TRAV3, TRAJ12)
CAVRDIRDSSYKLIF

SEQ ID NO: 213442 - protein, 12 aa, Homo sapiens
  CDR3 for beta chain variable domain of TCR clone 106721 (TRBV28, TRBJ2-3)
CASSLYRDTQYF

SEQ ID NO: 213443 - protein, 12 aa, Homo sapiens
  CDR3 for alpha chain variable domain of TCR clone 106722 (TRAV12-3, TRAJ17)
CAMTLTGTKLTF

SEQ ID NO: 213444 - protein, 15 aa, Homo sapiens
  CDR3 for beta chain variable domain of TCR clone 106722 (TRBV20-1, TRBJ2-7)
CSARERVSGMDEQYF

SEQ ID NO: 213445 - protein, 14 aa, Homo sapiens
  CDR3 for alpha chain variable domain of TCR clone 106723 (TRAV12-3, TRAJ33)
CAMSVPGSYYQLIW

SEQ ID NO: 213446 - protein, 12 aa, Homo sapiens
  CDR3 for beta chain variable domain of TCR clone 106723 (TRBV7-8, TRBJ2-7)
CASSLGDREQYF

SEQ ID NO: 213447 - protein, 12 aa, Homo sapiens
  CDR3 for alpha chain variable domain of TCR clone 106724 (TRAV1-2, TRAJ33)
CAALDSNYQLIW

SEQ ID NO: 213448 - protein, 16 aa, Homo sapiens
  CDR3 for beta chain variable domain of TCR clone 106724 (TRBV5-1, TRBJ2-5)
CASSLSLAGAQETQYF

SEQ ID NO: 213449 - protein, 15 aa, Homo sapiens
  CDR3 for alpha chain variable domain of TCR clone 106725 (TRAV24, TRAJ18)
CAFIPRGSTLGRLYF

SEQ ID NO: 213450 - protein, 14 aa, Homo sapiens
  CDR3 for beta chain variable domain of TCR clone 106725 (TRBV28, TRBJ2-3)
CASSFVQGTDTQYF

SEQ ID NO: 213451 - protein, 18 aa, Homo sapiens
  CDR3 for alpha chain variable domain of TCR clone 106726 (TRAV21, TRAJ52)
CAVRSSPAGGTSYGKLTF

SEQ ID NO: 213452 - protein, 13 aa, Homo sapiens
  CDR3 for beta chain variable domain of TCR clone 106726 (TRBV27, TRBJ1-1)
CASSLSIGAEAFF

SEQ ID NO: 213453 - protein, 16 aa, Homo sapiens
  CDR3 for alpha chain variable domain of TCR clone 106727 (TRAV16, TRAJ52)
CALSAAGGTSYGKLTF

SEQ ID NO: 213454 - protein, 14 aa, Homo sapiens
  CDR3 for beta chain variable domain of TCR clone 106727 (TRBV6-1, TRBJ1-3)
CASVQGGGGNTIYF

SEQ ID NO: 213455 - protein, 14 aa, Homo sapiens
  CDR3 for alpha chain variable domain of TCR clone 106728 (TRAV1-2, TRAJ16)
CAVNRFSDGQKLLF

SEQ ID NO: 213456 - protein, 15 aa, Homo sapiens
  CDR3 for beta chain variable domain of TCR clone 106728 (TRBV2, TRBJ2-2)
CASSRETVGTGELFF

SEQ ID NO: 213457 - protein, 13 aa, Homo sapiens
  CDR3 for alpha chain variable domain of TCR clone 106729 (TRAV29/DV5, TRAJ47)
CAASEEYGNKLVF

SEQ ID NO: 213458 - protein, 15 aa, Homo sapiens
  CDR3 for beta chain variable domain of TCR clone 106729 (TRBV7-9, TRBJ1-4)
CASSARTGGNEKLFF

SEQ ID NO: 213459 - protein, 14 aa, Homo sapiens
  CDR3 for alpha chain variable domain of TCR clone 106730 (TRAV1-2, TRAJ17)
CAVNRFSDGNKLTF

SEQ ID NO: 213460 - protein, 11 aa, Homo sapiens
  CDR3 for beta chain variable domain of TCR clone 106730 (TRBV29-1, TRBJ2-5)
CSEDRTGTQYF

SEQ ID NO: 213461 - protein, 11 aa, Homo sapiens
  CDR3 for alpha chain variable domain of TCR clone 106731 (TRAV17, TRAJ43)
CATPRSNDMRF

SEQ ID NO: 213462 - protein, 12 aa, Homo sapiens
  CDR3 for beta chain variable domain of TCR clone 106731 (TRBV25-1, TRBJ1-1)
CASRHMNTEAFF

SEQ ID NO: 213463 - protein, 15 aa, Homo sapiens
  CDR3 for alpha chain variable domain of TCR clone 106732 (TRAV8-2, TRAJ40)
CVVLGTTSGTYKNIF

SEQ ID NO: 213464 - protein, 16 aa, Homo sapiens
  CDR3 for beta chain variable domain of TCR clone 106732 (TRBV7-3, TRBJ2-1)
CASSLEGYRSYNEQFF

SEQ ID NO: 213465 - protein, 14 aa, Homo sapiens
  CDR3 for alpha chain variable domain of TCR clone 106733 (TRAV9-2, TRAJ6)
CALSDPGGRYIPTF

SEQ ID NO: 213466 - protein, 16 aa, Homo sapiens
  CDR3 for beta chain variable domain of TCR clone 106733 (TRBV19, TRBJ2-2)
CASRSPGTGATGELFF

SEQ ID NO: 213467 - protein, 15 aa, Homo sapiens
  CDR3 for alpha chain variable domain of TCR clone 106734 (TRAV21, TRAJ24)
CAARSSTDIWGKLQF

SEQ ID NO: 213468 - protein, 12 aa, Homo sapiens
  CDR3 for beta chain variable domain of TCR clone 106734 (TRBV11-2, TRBJ2-2)
CASSLGGGELFF

SEQ ID NO: 213469 - protein, 15 aa, Homo sapiens
  CDR3 for alpha chain variable domain of TCR clone 106735 (TRAV12-1, TRAJ45)
CVVLSGGGGADGLTF

SEQ ID NO: 213470 - protein, 14 aa, Homo sapiens
  CDR3 for beta chain variable domain of TCR clone 106735 (TRBV11-2, TRBJ2-5)
CASSRIGGIETQYF

SEQ ID NO: 213471 - protein, 12 aa, Homo sapiens
  CDR3 for alpha chain variable domain of TCR clone 106736 (TRAV12-1, )
CVVNKRLATTIS

SEQ ID NO: 213472 - protein, 15 aa, Homo sapiens
  CDR3 for beta chain variable domain of TCR clone 106736 (TRBV18, TRBJ2-1)
CASSPPSASYNEQFF

SEQ ID NO: 213473 - protein, 14 aa, Homo sapiens
  CDR3 for alpha chain variable domain of TCR clone 106737 (TRAV1-2, TRAJ8)
CAVREDTGFQKLLF

SEQ ID NO: 213474 - protein, 16 aa, Homo sapiens
  CDR3 for beta chain variable domain of TCR clone 106737 (TRBV12-5, TRBJ2-5)
CASGPRTSGNQETQYF

SEQ ID NO: 213475 - protein, 14 aa, Homo sapiens
  CDR3 for alpha chain variable domain of TCR clone 106738 (TRAV17, TRAJ57)
CATDPQGGSEKLVF

SEQ ID NO: 213476 - protein, 11 aa, Homo sapiens
  CDR3 for beta chain variable domain of TCR clone 106738 (TRBV12-4, TRBJ2-3)
CASTATDTQYF

SEQ ID NO: 213477 - protein, 14 aa, Homo sapiens
  CDR3 for alpha chain variable domain of TCR clone 106739 (TRAV27, TRAJ45)
CVGGEEEVLTDSPF

SEQ ID NO: 213478 - protein, 13 aa, Homo sapiens
  CDR3 for beta chain variable domain of TCR clone 106739 (TRBV20-1, TRBJ1-1)
CSAPEGGNTEAFF

SEQ ID NO: 213479 - protein, 15 aa, Homo sapiens
  CDR3 for alpha chain variable domain of TCR clone 106740 (TRAV34, TRAJ38)
CGADFTPGNNRKLIW

SEQ ID NO: 213480 - protein, 15 aa, Homo sapiens
  CDR3 for beta chain variable domain of TCR clone 106740 (TRBV6-3, TRBJ2-7)
CASSSPGTVFYEQYF

SEQ ID NO: 213481 - protein, 11 aa, Homo sapiens
  CDR3 for alpha chain variable domain of TCR clone 106741 (TRAV1-1, TRAJ23)
CAVRQGGRLIF

SEQ ID NO: 213482 - protein, 13 aa, Homo sapiens
  CDR3 for beta chain variable domain of TCR clone 106741 (TRBV7-3, TRBJ1-1)
CASSQDWGAEAFF

SEQ ID NO: 213483 - protein, 19 aa, Homo sapiens
  CDR3 for alpha chain variable domain of TCR clone 106742 (TRAV2, TRAJ20)
ILQVREADAAVYRDRKLSF

SEQ ID NO: 213484 - protein, 13 aa, Homo sapiens
  CDR3 for beta chain variable domain of TCR clone 106742 (TRBV15, TRBJ1-6)
CATSGGLNSPLHF

SEQ ID NO: 213485 - protein, 10 aa, Homo sapiens
  CDR3 for alpha chain variable domain of TCR clone 106743 (TRAV38-1, TRAJ34)
CAFMDDKLIF

SEQ ID NO: 213486 - protein, 15 aa, Homo sapiens
  CDR3 for beta chain variable domain of TCR clone 106743 (TRBV4-1, TRBJ1-4)
CASSDTGGTNEKLFF

SEQ ID NO: 213487 - protein, 18 aa, Homo sapiens
  CDR3 for alpha chain variable domain of TCR clone 106744 (TRAV1-2, TRAJ18)
CAVRDMGDRGSTLGRLYV

SEQ ID NO: 213488 - protein, 16 aa, Homo sapiens
  CDR3 for beta chain variable domain of TCR clone 106744 (TRBV29-1, TRBJ1-2)
CSVEANRDIANYGYTF

SEQ ID NO: 213489 - protein, 12 aa, Homo sapiens
  CDR3 for alpha chain variable domain of TCR clone 106745 (TRAV1-2, TRAJ17)
CAVRAAGNKLTF

SEQ ID NO: 213490 - protein, 16 aa, Homo sapiens
  CDR3 for beta chain variable domain of TCR clone 106745 (TRBV20-1, TRBJ2-1)
CSAPGLAGSYSDERFF

SEQ ID NO: 213491 - protein, 15 aa, Homo sapiens
  CDR3 for alpha chain variable domain of TCR clone 106746 (TRAV8-4, TRAJ37)
CAVSRGAGNTGKLIF

SEQ ID NO: 213492 - protein, 16 aa, Homo sapiens
  CDR3 for beta chain variable domain of TCR clone 106746 (TRBV7-3, TRBJ2-3)
CASSLSGYRPEDTQYF

SEQ ID NO: 213493 - protein, 14 aa, Homo sapiens
  CDR3 for alpha chain variable domain of TCR clone 106747 (TRAV27, TRAJ22)
CAGLPSGSARQLTF

SEQ ID NO: 213494 - protein, 13 aa, Homo sapiens
  CDR3 for beta chain variable domain of TCR clone 106747 (TRBV19, TRBJ1-2)
CASSVPGQDGYTF

SEQ ID NO: 213495 - protein, 14 aa, Homo sapiens
  CDR3 for alpha chain variable domain of TCR clone 106748 (TRAV35, TRAJ22)
CAGLRPGSARQLTF

SEQ ID NO: 213496 - protein, 14 aa, Homo sapiens
  CDR3 for beta chain variable domain of TCR clone 106748 (TRBV4-1, TRBJ2-7)
CASSPVAGEDEQYF

SEQ ID NO: 213497 - protein, 13 aa, Homo sapiens
  CDR3 for alpha chain variable domain of TCR clone 106749 (TRAV2, TRAJ21)
CAVEDLNFNKFYF

SEQ ID NO: 213498 - protein, 15 aa, Homo sapiens
  CDR3 for beta chain variable domain of TCR clone 106749 (TRBV28, TRBJ2-5)
CASRPGQGSIETQYF

SEQ ID NO: 213499 - protein, 13 aa, Homo sapiens
  CDR3 for alpha chain variable domain of TCR clone 106750 (TRAV20, TRAJ40)
CAVPSSGTYKYIF

SEQ ID NO: 213500 - protein, 13 aa, Homo sapiens
  CDR3 for beta chain variable domain of TCR clone 106750 (TRBV15, TRBJ2-5)
CATSQIGEETQYF

SEQ ID NO: 213501 - protein, 14 aa, Homo sapiens
  CDR3 for alpha chain variable domain of TCR clone 106751 (TRAV8-2, TRAJ4)
CVVSPSGGYNKLIF

SEQ ID NO: 213502 - protein, 14 aa, Homo sapiens
  CDR3 for beta chain variable domain of TCR clone 106751 (TRBV5-1, TRBJ2-7)
CASSRGESLYEQYF

SEQ ID NO: 213503 - protein, 14 aa, Homo sapiens
  CDR3 for alpha chain variable domain of TCR clone 106752 (TRAV34, TRAJ44)
CGADGTGTASKLTF

SEQ ID NO: 213504 - protein, 13 aa, Homo sapiens
  CDR3 for beta chain variable domain of TCR clone 106752 (TRBV10-3, TRBJ1-2)
CAISERDSYGYTF

SEQ ID NO: 213505 - protein, 14 aa, Homo sapiens
  CDR3 for alpha chain variable domain of TCR clone 106753 (TRAV1-2, TRAJ8)
CAVREDTGFQKLVF

SEQ ID NO: 213506 - protein, 12 aa, Homo sapiens
  CDR3 for beta chain variable domain of TCR clone 106753 (TRBV11-2, TRBJ2-2)
CTSSLGGGELFF

SEQ ID NO: 213507 - protein, 15 aa, Homo sapiens
  CDR3 for alpha chain variable domain of TCR clone 106754 (TRAV35, TRAJ38)
CAGFSNAGNNRKLIW

SEQ ID NO: 213508 - protein, 15 aa, Homo sapiens
  CDR3 for beta chain variable domain of TCR clone 106754 (TRBV7-8, TRBJ2-1)
CASSLAGGLYNEQLF

SEQ ID NO: 213509 - protein, 17 aa, Homo sapiens
  CDR3 for alpha chain variable domain of TCR clone 106755 (TRAV3, TRAJ42)
CAVRDRDYGGSQGNRIF

SEQ ID NO: 213510 - protein, 15 aa, Homo sapiens
  CDR3 for beta chain variable domain of TCR clone 106755 (TRBV6-3, TRBJ2-7)
CASSSPGTVFYEQYF

SEQ ID NO: 213511 - protein, 13 aa, Homo sapiens
  CDR3 for alpha chain variable domain of TCR clone 106756 (TRAV20, TRAJ49)
CAVQARTGNQFYF

SEQ ID NO: 213512 - protein, 15 aa, Homo sapiens
  CDR3 for beta chain variable domain of TCR clone 106756 (TRBV9, TRBJ2-1)
CASSLAGSSYNEQFF

SEQ ID NO: 213513 - protein, 14 aa, Homo sapiens
  CDR3 for alpha chain variable domain of TCR clone 106757 (TRAV23/DV6, TRAJ57)
CAAALKGGSEKLVF

SEQ ID NO: 213514 - protein, 12 aa, Homo sapiens
  CDR3 for beta chain variable domain of TCR clone 106757 (TRBV11-2, TRBJ2-5)
CASSLVGETQYF

SEQ ID NO: 213515 - protein, 14 aa, Homo sapiens
  CDR3 for alpha chain variable domain of TCR clone 106758 (TRAV12-2, TRAJ13)
CAVKKTGGYQKVTF

SEQ ID NO: 213516 - protein, 13 aa, Homo sapiens
  CDR3 for beta chain variable domain of TCR clone 106758 (TRBV7-9, TRBJ1-1)
CASTQGMNTEAFF

SEQ ID NO: 213517 - protein, 13 aa, Homo sapiens
  CDR3 for alpha chain variable domain of TCR clone 106759 (TRAV13-1, TRAJ6)
CAASKGGSYIPKF

SEQ ID NO: 213518 - protein, 14 aa, Homo sapiens
  CDR3 for beta chain variable domain of TCR clone 106759 (TRBV7-2, TRBJ2-1)
CASSLGVGYNEQFF

SEQ ID NO: 213519 - protein, 13 aa, Homo sapiens
  CDR3 for alpha chain variable domain of TCR clone 106760 (TRAV1-2, TRAJ9)
CAVLNTGGFKAIF

SEQ ID NO: 213520 - protein, 17 aa, Homo sapiens
  CDR3 for beta chain variable domain of TCR clone 106760 (TRBV13, TRBJ2-3)
CASSLSRVAGGRNTQYF

SEQ ID NO: 213521 - protein, 10 aa, Homo sapiens
  CDR3 for alpha chain variable domain of TCR clone 106761 (TRAV21, TRAJ31)
CAVDNARLMF

SEQ ID NO: 213522 - protein, 15 aa, Homo sapiens
  CDR3 for beta chain variable domain of TCR clone 106761 (TRBV4-1, TRBJ1-1)
CASSRKMNTEAFLDK

SEQ ID NO: 213523 - protein, 14 aa, Homo sapiens
  CDR3 for alpha chain variable domain of TCR clone 106762 (TRAV26-1, TRAJ39)
CIVRGSGAGNMLTF

SEQ ID NO: 213524 - protein, 15 aa, Homo sapiens
  CDR3 for beta chain variable domain of TCR clone 106762 (TRBV28, TRBJ2-5)
CASSPGQGSIETQYF

SEQ ID NO: 213525 - protein, 13 aa, Homo sapiens
  CDR3 for alpha chain variable domain of TCR clone 106763 (TRAV17, TRAJ9)
CATDYTGGFKTIF

SEQ ID NO: 213526 - protein, 16 aa, Homo sapiens
  CDR3 for beta chain variable domain of TCR clone 106763 (TRBV7-7, TRBJ2-1)
CASSLASGTCYNEQFF

SEQ ID NO: 213527 - protein, 12 aa, Homo sapiens
  CDR3 for alpha chain variable domain of TCR clone 106764 (TRAV27, TRAJ35)
CAGADFGNVLHC

SEQ ID NO: 213528 - protein, 16 aa, Homo sapiens
  CDR3 for beta chain variable domain of TCR clone 106764 (TRBV6-1, TRBJ2-1)
CASILRQRSSYNEQFF

SEQ ID NO: 213529 - protein, 16 aa, Homo sapiens
  CDR3 for alpha chain variable domain of TCR clone 106765 (TRAV12-2, TRAJ45)
CAVNMYSGGGADGLTF

SEQ ID NO: 213530 - protein, 14 aa, Homo sapiens
  CDR3 for beta chain variable domain of TCR clone 106765 (TRBV25-1, TRBJ1-1)
CASTHLGGNTEAFF

SEQ ID NO: 213531 - protein, 14 aa, Homo sapiens
  CDR3 for alpha chain variable domain of TCR clone 106766 (TRAV8-4, TRAJ27)
CAVSKGTNAGKSTC

SEQ ID NO: 213532 - protein, 16 aa, Homo sapiens
  CDR3 for beta chain variable domain of TCR clone 106766 (TRBV2, TRBJ2-7)
CASSSTRRGSSYEQYF

SEQ ID NO: 213533 - protein, 18 aa, Homo sapiens
  CDR3 for alpha chain variable domain of TCR clone 106767 (TRAV12-3, TRAJ52)
CAMGRTNAGGTSYGKLTF

SEQ ID NO: 213534 - protein, 17 aa, Homo sapiens
  CDR3 for beta chain variable domain of TCR clone 106767 (TRBV7-3, TRBJ2-3)
CASSLMKRMRGADTQYF

SEQ ID NO: 213535 - protein, 15 aa, Homo sapiens
  CDR3 for alpha chain variable domain of TCR clone 106768 (TRAV23/DV6, TRAJ37)
CAAGEGSSNTGKLIV

SEQ ID NO: 213536 - protein, 17 aa, Homo sapiens
  CDR3 for beta chain variable domain of TCR clone 106768 (TRBV20-1, TRBJ2-7)
CSATRAGGVAGVEEQYF

SEQ ID NO: 213537 - protein, 12 aa, Homo sapiens
  CDR3 for alpha chain variable domain of TCR clone 106769 (TRAV17, TRAJ20)
CATDSNDYKLSF

SEQ ID NO: 213538 - protein, 16 aa, Homo sapiens
  CDR3 for beta chain variable domain of TCR clone 106769 (TRBV7-2, TRBJ1-4)
CASSPVGRFDREKLFF

SEQ ID NO: 213539 - protein, 16 aa, Homo sapiens
  CDR3 for alpha chain variable domain of TCR clone 106770 (TRAV26-1, TRAJ32)
CIVRTNYGGATKKLIF

SEQ ID NO: 213540 - protein, 14 aa, Homo sapiens
  CDR3 for beta chain variable domain of TCR clone 106770 (TRBV27, TRBJ1-1)
CASSLLSGLSEAFF

SEQ ID NO: 213541 - protein, 21 aa, Homo sapiens
  CDR3 for alpha chain variable domain of TCR clone 106771 (TRAV8-3, TRAJ10)
CAVGHTHGRRKQTHLWDRPSA

SEQ ID NO: 213542 - protein, 10 aa, Homo sapiens
  CDR3 for beta chain variable domain of TCR clone 106771 (TRBV20-1, TRBJ2-5)
CSARFETQYF

SEQ ID NO: 213543 - protein, 14 aa, Homo sapiens
  CDR3 for alpha chain variable domain of TCR clone 106772 (TRAV14/DV4, TRAJ42)
CPRGSLRSQGNLIF

SEQ ID NO: 213544 - protein, 17 aa, Homo sapiens
  CDR3 for beta chain variable domain of TCR clone 106772 (TRBV11-2, TRBJ2-1)
CASSLYPTGVEYNEQFF

SEQ ID NO: 213545 - protein, 21 aa, Homo sapiens
  CDR3 for alpha chain variable domain of TCR clone 106773 (TRAV8-3, TRAJ6)
CAVGGEEATYLHLEEEPALLF

SEQ ID NO: 213546 - protein, 14 aa, Homo sapiens
  CDR3 for beta chain variable domain of TCR clone 106773 (TRBV5-1, TRBJ2-7)
CASSRGESLYEQDF

SEQ ID NO: 213547 - protein, 14 aa, Homo sapiens
  CDR3 for alpha chain variable domain of TCR clone 106774 (TRAV20, TRAJ56)
CAVQFGGANSKLTF

SEQ ID NO: 213548 - protein, 14 aa, Homo sapiens
  CDR3 for beta chain variable domain of TCR clone 106774 (TRBV20-1, TRBJ2-7)
CSAKRGRSSYEQYY

SEQ ID NO: 213549 - protein, 13 aa, Homo sapiens
  CDR3 for alpha chain variable domain of TCR clone 106775 (TRAV27, TRAJ45)
CRSSGGRADGLTF

SEQ ID NO: 213550 - protein, 17 aa, Homo sapiens
  CDR3 for beta chain variable domain of TCR clone 106775 (TRBV11-2, TRBJ2-1)
CASSLYPPGVEYNEQFF

SEQ ID NO: 213551 - protein, 17 aa, Homo sapiens
  CDR3 for alpha chain variable domain of TCR clone 106776 (TRAV29/DV5, TRAJ52)
CAASARAVGTSYGKLTF

SEQ ID NO: 213552 - protein, 15 aa, Homo sapiens
  CDR3 for beta chain variable domain of TCR clone 106776 (TRBV4-2, TRBJ1-1)
CASSQRSSGRTEAFF

SEQ ID NO: 213553 - protein, 14 aa, Homo sapiens
  CDR3 for alpha chain variable domain of TCR clone 106777 (TRAV1-2, TRAJ8)
CAVREDTGFQTLVF

SEQ ID NO: 213554 - protein, 11 aa, Homo sapiens
  CDR3 for beta chain variable domain of TCR clone 106777 (TRBV11-3, TRBJ2-7)
CASSRTYEQYF

SEQ ID NO: 213555 - protein, 15 aa, Homo sapiens
  CDR3 for alpha chain variable domain of TCR clone 106778 (TRAV3, TRAJ22)
CAVRDRGRSARQLTF

SEQ ID NO: 213556 - protein, 13 aa, Homo sapiens
  CDR3 for beta chain variable domain of TCR clone 106778 (TRBV2, TRBJ1-5)
CATAGPGNQPQHF

SEQ ID NO: 213557 - protein, 15 aa, Homo sapiens
  CDR3 for alpha chain variable domain of TCR clone 106779 (TRAV3, TRAJ9)
CAVRARNTGGFKTIF

SEQ ID NO: 213558 - protein, 16 aa, Homo sapiens
  CDR3 for beta chain variable domain of TCR clone 106779 (TRBV7-3, TRBJ2-1)
CASSKPLAGGYNEQFF

SEQ ID NO: 213559 - protein, 14 aa, Homo sapiens
  CDR3 for alpha chain variable domain of TCR clone 106780 (TRAV13-2, TRAJ32)
CAENYGGATNKLIF

SEQ ID NO: 213560 - protein, 15 aa, Homo sapiens
  CDR3 for beta chain variable domain of TCR clone 106780 (TRBV6-1, TRBJ2-5)
CASSEGWGTQETQYF

SEQ ID NO: 213561 - protein, 14 aa, Homo sapiens
  CDR3 for alpha chain variable domain of TCR clone 106781 (TRAV29/DV5, TRAJ36)
CAARRKTGANNLFF

SEQ ID NO: 213562 - protein, 14 aa, Homo sapiens
  CDR3 for beta chain variable domain of TCR clone 106781 (TRBV12-5, TRBJ2-5)
CASVSRTHQETQYF

SEQ ID NO: 213563 - protein, 16 aa, Homo sapiens
  CDR3 for alpha chain variable domain of TCR clone 106782 (TRAV13-1, TRAJ48)
CAASIFGNFGNEKLTF

SEQ ID NO: 213564 - protein, 16 aa, Homo sapiens
  CDR3 for beta chain variable domain of TCR clone 106782 (TRBV7-2, TRBJ2-6)
CASSERRASGANVLTV

SEQ ID NO: 213565 - protein, 18 aa, Homo sapiens
  CDR3 for alpha chain variable domain of TCR clone 106783 (TRAV21, TRAJ52)
CAVRPSPAGGTSYGKLTF

SEQ ID NO: 213566 - protein, 14 aa, Homo sapiens
  CDR3 for beta chain variable domain of TCR clone 106783 (TRBV19, TRBJ2-5)
CASSMTGQQETQYF

SEQ ID NO: 213567 - protein, 14 aa, Homo sapiens
  CDR3 for alpha chain variable domain of TCR clone 106784 (TRAV38-1, TRAJ28)
CAFTSGAGSYQLTF

SEQ ID NO: 213568 - protein, 12 aa, Homo sapiens
  CDR3 for beta chain variable domain of TCR clone 106784 (TRBV7-9, TRBJ1-5)
CASSPQGQPQHF

SEQ ID NO: 213569 - protein, 16 aa, Homo sapiens
  CDR3 for alpha chain variable domain of TCR clone 106785 (TRAV4, TRAJ37)
CLVGWFGPSNTGKLIF

SEQ ID NO: 213570 - protein, 15 aa, Homo sapiens
  CDR3 for beta chain variable domain of TCR clone 106785 (TRBV12-4, TRBJ2-3)
CASSLAERPTDTQYF

SEQ ID NO: 213571 - protein, 15 aa, Homo sapiens
  CDR3 for alpha chain variable domain of TCR clone 106786 (TRAV23/DV6, TRAJ18)
CAARYRGSTLERLYF

SEQ ID NO: 213572 - protein, 13 aa, Homo sapiens
  CDR3 for beta chain variable domain of TCR clone 106786 (TRBV7-2, TRBJ2-7)
CASSSPSGSEQYF

SEQ ID NO: 213573 - protein, 16 aa, Homo sapiens
  CDR3 for alpha chain variable domain of TCR clone 106787 (TRAV3, TRAJ6)
CAVRDGMGRRKLHTYL

SEQ ID NO: 213574 - protein, 15 aa, Homo sapiens
  CDR3 for beta chain variable domain of TCR clone 106787 (TRBV5-1, TRBJ2-7)
CASSLGDFTTYEQYF

SEQ ID NO: 213575 - protein, 14 aa, Homo sapiens
  CDR3 for alpha chain variable domain of TCR clone 106788 (TRAV13-1, TRAJ23)
CAASRLGRGGKLIF

SEQ ID NO: 213576 - protein, 16 aa, Homo sapiens
  CDR3 for beta chain variable domain of TCR clone 106788 (TRBV12-5, TRBJ2-5)
CASGPRTSGNQETQYF

SEQ ID NO: 213577 - protein, 14 aa, Homo sapiens
  CDR3 for alpha chain variable domain of TCR clone 106789 (TRAV12-2, TRAJ40)
CAVKTPSGTYNYIF

SEQ ID NO: 213578 - protein, 14 aa, Homo sapiens
  CDR3 for beta chain variable domain of TCR clone 106789 (TRBV20-1, TRBJ1-1)
CSAQTRIGGTEAFF

SEQ ID NO: 213579 - protein, 12 aa, Homo sapiens
  CDR3 for alpha chain variable domain of TCR clone 106790 (TRAV12-3, TRAJ17)
CAMTLTGTKLTF

SEQ ID NO: 213580 - protein, 15 aa, Homo sapiens
  CDR3 for beta chain variable domain of TCR clone 106790 (TRBV11-2, TRBJ2-2)
CASSSDRVNAGELFF

SEQ ID NO: 213581 - protein, 13 aa, Homo sapiens
  CDR3 for alpha chain variable domain of TCR clone 106791 (TRAV12-3, TRAJ13)
CAMTSRGYQKVTF

SEQ ID NO: 213582 - protein, 13 aa, Homo sapiens
  CDR3 for beta chain variable domain of TCR clone 106791 (TRBV7-9, TRBJ1-2)
CASSLKQNYGYTF

SEQ ID NO: 213583 - protein, 16 aa, Homo sapiens
  CDR3 for alpha chain variable domain of TCR clone 106792 (TRAV13-2, TRAJ32)
CAENMNYSGATNKLIF

SEQ ID NO: 213584 - protein, 14 aa, Homo sapiens
  CDR3 for beta chain variable domain of TCR clone 106792 (TRBV4-3, TRBJ2-7)
CASSQDVAGGEQYF

SEQ ID NO: 213585 - protein, 14 aa, Homo sapiens
  CDR3 for alpha chain variable domain of TCR clone 106793 (TRAV38-1, TRAJ40)
CALRPTSGTYKYIF

SEQ ID NO: 213586 - protein, 14 aa, Homo sapiens
  CDR3 for beta chain variable domain of TCR clone 106793 (TRBV7-9, TRBJ2-1)
CASSPRDSLYEQFF

SEQ ID NO: 213587 - protein, 14 aa, Homo sapiens
  CDR3 for alpha chain variable domain of TCR clone 106794 (TRAV1-2, TRAJ8)
CAVREDTGFQKLVF

SEQ ID NO: 213588 - protein, 13 aa, Homo sapiens
  CDR3 for beta chain variable domain of TCR clone 106794 (TRBV28, TRBJ2-7)
CASSPSGTYEQYF

SEQ ID NO: 213589 - protein, 13 aa, Homo sapiens
  CDR3 for alpha chain variable domain of TCR clone 106795 (TRAV1-1, TRAJ9)
CAAKNIGCFKTIF

SEQ ID NO: 213590 - protein, 14 aa, Homo sapiens
  CDR3 for beta chain variable domain of TCR clone 106795 (TRBV20-1, TRBJ2-1)
CSAQIGGSANEQFF

SEQ ID NO: 213591 - protein, 14 aa, Homo sapiens
  CDR3 for alpha chain variable domain of TCR clone 106796 (TRAV12-3, TRAJ56)
CAMSVTGATSKLTF

SEQ ID NO: 213592 - protein, 17 aa, Homo sapiens
  CDR3 for beta chain variable domain of TCR clone 106796 (TRBV20-1, TRBJ2-3)
CSASLLGRGGSADTQYF

SEQ ID NO: 213593 - protein, 15 aa, Homo sapiens
  CDR3 for alpha chain variable domain of TCR clone 106797 (TRAV17, TRAJ23)
CATDAEDNQGGKLIF

SEQ ID NO: 213594 - protein, 16 aa, Homo sapiens
  CDR3 for beta chain variable domain of TCR clone 106797 (TRBV7-3, TRBJ2-2)
CASSLKRGTLSGELFF

SEQ ID NO: 213595 - protein, 14 aa, Homo sapiens
  CDR3 for alpha chain variable domain of TCR clone 106798 (TRAV17, TRAJ22)
CATSPSGSARQLTF

SEQ ID NO: 213596 - protein, 15 aa, Homo sapiens
  CDR3 for beta chain variable domain of TCR clone 106798 (TRBV4-1, TRBJ2-5)
CASSQLDLYQETQYF

SEQ ID NO: 213597 - protein, 12 aa, Homo sapiens
  CDR3 for alpha chain variable domain of TCR clone 106799 (TRAV25, TRAJ53)
CQSGGSNYKLKF

SEQ ID NO: 213598 - protein, 15 aa, Homo sapiens
  CDR3 for beta chain variable domain of TCR clone 106799 (TRBV5-1, TRBJ2-2)
CASSWTSPNTGELFF

SEQ ID NO: 213599 - protein, 15 aa, Homo sapiens
  CDR3 for alpha chain variable domain of TCR clone 106800 (TRAV12-1, TRAJ44)
FVVFVNTGTASKLTF

SEQ ID NO: 213600 - protein, 17 aa, Homo sapiens
  CDR3 for beta chain variable domain of TCR clone 106800 (TRBV7-8, TRBJ2-6)
CASSAGTGGAGANVLTF

SEQ ID NO: 213601 - protein, 14 aa, Homo sapiens
  CDR3 for alpha chain variable domain of TCR clone 106801 (TRAV8-3, TRAJ4)
CAVGAAGGYNKLIF

SEQ ID NO: 213602 - protein, 13 aa, Homo sapiens
  CDR3 for beta chain variable domain of TCR clone 106801 (TRBV20-1, TRBJ2-5)
CSAREAFQETQYF

SEQ ID NO: 213603 - protein, 17 aa, Homo sapiens
  CDR3 for alpha chain variable domain of TCR clone 106802 (TRAV13-1, TRAJ52)
CAAGRNAGGTSYGKLTF

SEQ ID NO: 213604 - protein, 13 aa, Homo sapiens
  CDR3 for beta chain variable domain of TCR clone 106802 (TRBV7-2, TRBJ1-1)
CASNLKGAKVAIF

SEQ ID NO: 213605 - protein, 12 aa, Homo sapiens
  CDR3 for alpha chain variable domain of TCR clone 106803 (TRAV26-1, TRAJ17)
CAMTLTGNKLTF

SEQ ID NO: 213606 - protein, 15 aa, Homo sapiens
  CDR3 for beta chain variable domain of TCR clone 106803 (TRBV20-1, TRBJ2-7)
CSARDRVSGMDEQYF

SEQ ID NO: 213607 - protein, 14 aa, Homo sapiens
  CDR3 for alpha chain variable domain of TCR clone 106804 (TRAV9-2, TRAJ39)
CALYIYNAGNMLTF

SEQ ID NO: 213608 - protein, 13 aa, Homo sapiens
  CDR3 for beta chain variable domain of TCR clone 106804 (TRBV12-4, TRBJ1-5)
CASSPDRAQPQHF

SEQ ID NO: 213609 - protein, 12 aa, Homo sapiens
  CDR3 for alpha chain variable domain of TCR clone 106805 (TRAV3, TRAJ20)
CAVRDGDYKLSF

SEQ ID NO: 213610 - protein, 13 aa, Homo sapiens
  CDR3 for beta chain variable domain of TCR clone 106805 (TRBV4-1, TRBJ2-2)
CASSQENTGELFF

SEQ ID NO: 213611 - protein, 10 aa, Homo sapiens
  CDR3 for alpha chain variable domain of TCR clone 106806 (TRAV12-3, TRAJ49)
CAMNDDQFYF

SEQ ID NO: 213612 - protein, 15 aa, Homo sapiens
  CDR3 for beta chain variable domain of TCR clone 106806 (TRBV3-1, TRBJ2-7)
CASSQEWTGSYEQYF

SEQ ID NO: 213613 - protein, 16 aa, Homo sapiens
  CDR3 for alpha chain variable domain of TCR clone 106807 (TRAV12-2, TRAJ43)
CAGEDMRFGAGTRLTV

SEQ ID NO: 213614 - protein, 16 aa, Homo sapiens
  CDR3 for beta chain variable domain of TCR clone 106807 (TRBV2, TRBJ2-4)
CASSEAPGGEQNIQYF

SEQ ID NO: 213615 - protein, 13 aa, Homo sapiens
  CDR3 for alpha chain variable domain of TCR clone 106808 (TRAV17, TRAJ26)
CATVDNYGQNFVF

SEQ ID NO: 213616 - protein, 16 aa, Homo sapiens
  CDR3 for beta chain variable domain of TCR clone 106808 (TRBV9, TRBJ2-7)
CASSVGLGGGTYKQYF

SEQ ID NO: 213617 - protein, 14 aa, Homo sapiens
  CDR3 for alpha chain variable domain of TCR clone 106809 (TRAV12-2, TRAJ40)
CAVKIPSGTYNYIF

SEQ ID NO: 213618 - protein, 12 aa, Homo sapiens
  CDR3 for beta chain variable domain of TCR clone 106809 (TRBV11-2, TRBJ2-2)
CASSLGGGELFF

SEQ ID NO: 213619 - protein, 14 aa, Homo sapiens
  CDR3 for alpha chain variable domain of TCR clone 106810 (TRAV13-1, TRAJ52)
CAANGGTSYGKLTF

SEQ ID NO: 213620 - protein, 17 aa, Homo sapiens
  CDR3 for beta chain variable domain of TCR clone 106810 (TRBV7-3, TRBJ2-3)
CASSLMKRMRGADTQYF

SEQ ID NO: 213621 - protein, 15 aa, Homo sapiens
  CDR3 for alpha chain variable domain of TCR clone 106811 (TRAV13-1, TRAJ17)
CAASIERAAGNKLTF

SEQ ID NO: 213622 - protein, 14 aa, Homo sapiens
  CDR3 for beta chain variable domain of TCR clone 106811 (TRBV7-3, TRBJ1-1)
CASSLKGGNTEAFF

SEQ ID NO: 213623 - protein, 12 aa, Homo sapiens
  CDR3 for alpha chain variable domain of TCR clone 106812 (TRAV12-3, TRAJ17)
CAMTLTGNKLTF

SEQ ID NO: 213624 - protein, 14 aa, Homo sapiens
  CDR3 for beta chain variable domain of TCR clone 106812 (TRBV19, TRBJ2-7)
CASSIRLGDHEQYF

SEQ ID NO: 213625 - protein, 11 aa, Homo sapiens
  CDR3 for alpha chain variable domain of TCR clone 106813 (TRAV1-1, TRAJ23)
CAVRQGGKLIF

SEQ ID NO: 213626 - protein, 15 aa, Homo sapiens
  CDR3 for beta chain variable domain of TCR clone 106813 (TRBV2, TRBJ2-1)
CASSELAGSYNEQFF

SEQ ID NO: 213627 - protein, 15 aa, Homo sapiens
  CDR3 for alpha chain variable domain of TCR clone 106814 (TRAV3, TRAJ11)
CAVRDRGSGYSTLTF

SEQ ID NO: 213628 - protein, 17 aa, Homo sapiens
  CDR3 for beta chain variable domain of TCR clone 106814 (TRBV12-4, TRBJ2-1)
CASSPGLAGGRINEQFF

SEQ ID NO: 213629 - protein, 15 aa, Homo sapiens
  CDR3 for alpha chain variable domain of TCR clone 106815 (TRAV13-1, TRAJ32)
CAASINGGATNKLIF

SEQ ID NO: 213630 - protein, 12 aa, Homo sapiens
  CDR3 for beta chain variable domain of TCR clone 106815 (TRBV7-6, TRBJ2-3)
CASSTGTDTQYF

SEQ ID NO: 213631 - protein, 11 aa, Homo sapiens
  CDR3 for alpha chain variable domain of TCR clone 106816 (TRAV4, TRAJ23)
CLVAPGGKLIF

SEQ ID NO: 213632 - protein, 15 aa, Homo sapiens
  CDR3 for beta chain variable domain of TCR clone 106816 (TRBV7-2, TRBJ2-1)
CASSFQADEHNEQFF

SEQ ID NO: 213633 - protein, 15 aa, Homo sapiens
  CDR3 for alpha chain variable domain of TCR clone 106817 (TRAV20, TRAJ43)
CAVQAGKSSNNDMRC

SEQ ID NO: 213634 - protein, 14 aa, Homo sapiens
  CDR3 for beta chain variable domain of TCR clone 106817 (TRBV27, TRBJ2-1)
CASRHLGGGKEQFF

SEQ ID NO: 213635 - protein, 11 aa, Homo sapiens
  CDR3 for alpha chain variable domain of TCR clone 106818 (TRAV1-1, TRAJ23)
CAVRQGGKLIF

SEQ ID NO: 213636 - protein, 14 aa, Homo sapiens
  CDR3 for beta chain variable domain of TCR clone 106818 (TRBV19, TRBJ2-1)
CASTTFVLSGEQFF

SEQ ID NO: 213637 - protein, 14 aa, Homo sapiens
  CDR3 for alpha chain variable domain of TCR clone 106819 (TRAV13-1, TRAJ9)
CAAGALTGGFKTIF

SEQ ID NO: 213638 - protein, 16 aa, Homo sapiens
  CDR3 for beta chain variable domain of TCR clone 106819 (TRBV7-8, TRBJ2-4)
CASSAERTLAKNIQYF

SEQ ID NO: 213639 - protein, 15 aa, Homo sapiens
  CDR3 for alpha chain variable domain of TCR clone 106820 (TRAV3, TRAJ42)
CAVRGGTGSQGNLIC

SEQ ID NO: 213640 - protein, 14 aa, Homo sapiens
  CDR3 for beta chain variable domain of TCR clone 106820 (TRBV19, TRBJ1-2)
CASSSLFARDVYTF

SEQ ID NO: 213641 - protein, 13 aa, Homo sapiens
  CDR3 for alpha chain variable domain of TCR clone 106821 (TRAV1-2, TRAJ9)
CAALNTGGFKTIF

SEQ ID NO: 213642 - protein, 16 aa, Homo sapiens
  CDR3 for beta chain variable domain of TCR clone 106821 (TRBV11-2, TRBJ2-7)
CASSPTTGGVSYEQYF

SEQ ID NO: 213643 - protein, 15 aa, Homo sapiens
  CDR3 for alpha chain variable domain of TCR clone 106822 (TRAV3, TRAJ4)
CAVRDGTGGYNTLIF

SEQ ID NO: 213644 - protein, 16 aa, Homo sapiens
  CDR3 for beta chain variable domain of TCR clone 106822 (TRBV27, TRBJ2-2)
CASSSSGVSNTGELFF

SEQ ID NO: 213645 - protein, 13 aa, Homo sapiens
  CDR3 for alpha chain variable domain of TCR clone 106823 (TRAV30, TRAJ31)
CGTEITNNARLMF

SEQ ID NO: 213646 - protein, 15 aa, Homo sapiens
  CDR3 for beta chain variable domain of TCR clone 106823 (TRBV9, TRBJ1-6)
CASSVAGTGDSPLHF

SEQ ID NO: 213647 - protein, 14 aa, Homo sapiens
  CDR3 for alpha chain variable domain of TCR clone 106824 (TRAV16, TRAJ17)
CALSGRAAGNKLTF

SEQ ID NO: 213648 - protein, 15 aa, Homo sapiens
  CDR3 for beta chain variable domain of TCR clone 106824 (TRBV3-1, TRBJ1-2)
CASSPTRLPKGGYTF

SEQ ID NO: 213649 - protein, 11 aa, Homo sapiens
  CDR3 for alpha chain variable domain of TCR clone 106825 (TRAV12-3, TRAJ27)
CAMANAGKSTF

SEQ ID NO: 213650 - protein, 14 aa, Homo sapiens
  CDR3 for beta chain variable domain of TCR clone 106825 (TRBV4-1, TRBJ2-2)
CASSQAVNTGQLFF

SEQ ID NO: 213651 - protein, 13 aa, Homo sapiens
  CDR3 for alpha chain variable domain of TCR clone 106826 (TRAV21, TRAJ56)
CAVRTGANSKLTV

SEQ ID NO: 213652 - protein, 15 aa, Homo sapiens
  CDR3 for beta chain variable domain of TCR clone 106826 (TRBV7-9, TRBJ1-1)
CASSHRGTVNTEAFF

SEQ ID NO: 213653 - protein, 13 aa, Homo sapiens
  CDR3 for alpha chain variable domain of TCR clone 106827 (TRAV8-6, TRAJ49)
CAVIMNTGNQFYF

SEQ ID NO: 213654 - protein, 14 aa, Homo sapiens
  CDR3 for beta chain variable domain of TCR clone 106827 (TRBV5-1, TRBJ2-7)
CASSRGESLYEQYF

SEQ ID NO: 213655 - protein, 15 aa, Homo sapiens
  CDR3 for alpha chain variable domain of TCR clone 106828 (TRAV1-2, TRAJ15)
CAVDVMGSAGTALIF

SEQ ID NO: 213656 - protein, 13 aa, Homo sapiens
  CDR3 for beta chain variable domain of TCR clone 106828 (TRBV7-9, TRBJ2-5)
CASTPVGQETQYF

SEQ ID NO: 213657 - protein, 15 aa, Homo sapiens
  CDR3 for alpha chain variable domain of TCR clone 106829 (TRAV8-3, TRAJ27)
CAVSPSKTNAGKSTF

SEQ ID NO: 213658 - protein, 12 aa, Homo sapiens
  CDR3 for beta chain variable domain of TCR clone 106829 (TRBV11-2, TRBJ2-2)
CASSLGGGELFF

SEQ ID NO: 213659 - protein, 16 aa, Homo sapiens
  CDR3 for alpha chain variable domain of TCR clone 106830 (TRAV8-3, TRAJ44)
CAVGPLNTGTASKLTS

SEQ ID NO: 213660 - protein, 18 aa, Homo sapiens
  CDR3 for beta chain variable domain of TCR clone 106830 (TRBV3-1, TRBJ2-1)
CASSQDLPGRPLFDEQFF

SEQ ID NO: 213661 - protein, 14 aa, Homo sapiens
  CDR3 for alpha chain variable domain of TCR clone 106831 (TRAV17, TRAJ57)
CATDPQGGSEKLVF

SEQ ID NO: 213662 - protein, 14 aa, Homo sapiens
  CDR3 for beta chain variable domain of TCR clone 106831 (TRBV7-9, TRBJ2-2)
CASSLVQDTGELFF

SEQ ID NO: 213663 - protein, 18 aa, Homo sapiens
  CDR3 for alpha chain variable domain of TCR clone 106832 (TRAV29/DV5, TRAJ52)
CAAGFRGAGGTSYGKLTF

SEQ ID NO: 213664 - protein, 16 aa, Homo sapiens
  CDR3 for beta chain variable domain of TCR clone 106832 (TRBV7-3, TRBJ2-2)
CASSLKRGTLSRELFF

SEQ ID NO: 213665 - protein, 13 aa, Homo sapiens
  CDR3 for alpha chain variable domain of TCR clone 106833 (TRAV8-4, TRAJ36)
CAVSEGGANNLFF

SEQ ID NO: 213666 - protein, 12 aa, Homo sapiens
  CDR3 for beta chain variable domain of TCR clone 106833 (TRBV28, TRBJ2-7)
CASTDNHYEQYF

SEQ ID NO: 213667 - protein, 12 aa, Homo sapiens
  CDR3 for alpha chain variable domain of TCR clone 106834 (TRAV12-2, TRAJ36)
CAAPRGANNLFF

SEQ ID NO: 213668 - protein, 14 aa, Homo sapiens
  CDR3 for beta chain variable domain of TCR clone 106834 (TRBV25-1, TRBJ1-1)
CASTHLGGNTEAFF

SEQ ID NO: 213669 - protein, 15 aa, Homo sapiens
  CDR3 for alpha chain variable domain of TCR clone 106835 (TRAV17, TRAJ57)
CATGPSQGGSEKLVF

SEQ ID NO: 213670 - protein, 14 aa, Homo sapiens
  CDR3 for beta chain variable domain of TCR clone 106835 (TRBV12-5, TRBJ2-5)
CASGLRTHQETQYF

SEQ ID NO: 213671 - protein, 13 aa, Homo sapiens
  CDR3 for alpha chain variable domain of TCR clone 106836 (TRAV1-2, TRAJ9)
CAALNTGGFKTIF

SEQ ID NO: 213672 - protein, 15 aa, Homo sapiens
  CDR3 for beta chain variable domain of TCR clone 106836 (TRBV27, TRBJ1-6)
CASSFDRGLGSPLHF

SEQ ID NO: 213673 - protein, 11 aa, Homo sapiens
  CDR3 for alpha chain variable domain of TCR clone 106837 (TRAV4, TRAJ31)
CLVGDNARLMF

SEQ ID NO: 213674 - protein, 15 aa, Homo sapiens
  CDR3 for beta chain variable domain of TCR clone 106837 (TRBV10-2, TRBJ2-6)
CASSEQGAGANVLTF

SEQ ID NO: 213675 - protein, 14 aa, Homo sapiens
  CDR3 for alpha chain variable domain of TCR clone 106838 (TRAV17, TRAJ57)
CATDPQGGAEKLVF

SEQ ID NO: 213676 - protein, 14 aa, Homo sapiens
  CDR3 for beta chain variable domain of TCR clone 106838 (TRBV7-8, TRBJ2-7)
CASSPRDRVYEQYF

SEQ ID NO: 213677 - protein, 13 aa, Homo sapiens
  CDR3 for alpha chain variable domain of TCR clone 106839 (TRAV20, TRAJ34)
CAVRSYNTDQLIF

SEQ ID NO: 213678 - protein, 12 aa, Homo sapiens
  CDR3 for beta chain variable domain of TCR clone 106839 (TRBV11-2, TRBJ2-1)
CASSPGNNEQFF

SEQ ID NO: 213679 - protein, 15 aa, Homo sapiens
  CDR3 for alpha chain variable domain of TCR clone 106840 (TRAV21, TRAJ24)
CAARSSTDSWGKLQF

SEQ ID NO: 213680 - protein, 13 aa, Homo sapiens
  CDR3 for beta chain variable domain of TCR clone 106840 (TRBV11-2, TRBJ2-5)
CASSSPGEETQYF

SEQ ID NO: 213681 - protein, 14 aa, Homo sapiens
  CDR3 for alpha chain variable domain of TCR clone 106841 (TRAV8-4, TRAJ27)
CAVSKGTNAGKSTF

SEQ ID NO: 213682 - protein, 16 aa, Homo sapiens
  CDR3 for beta chain variable domain of TCR clone 106841 (TRBV2, TRBJ2-7)
CASSPTRRGSSYEQYF

SEQ ID NO: 213683 - protein, 14 aa, Homo sapiens
  CDR3 for alpha chain variable domain of TCR clone 106842 (TRAV12-2, TRAJ13)
CAVKKTGGYQKVTF

SEQ ID NO: 213684 - protein, 13 aa, Homo sapiens
  CDR3 for beta chain variable domain of TCR clone 106842 (TRBV7-2, TRBJ1-5)
CQQPEGGPQPQHF

SEQ ID NO: 213685 - protein, 11 aa, Homo sapiens
  CDR3 for alpha chain variable domain of TCR clone 106843 (TRAV27, TRAJ40)
SLTSGTYNYIF

SEQ ID NO: 213686 - protein, 13 aa, Homo sapiens
  CDR3 for beta chain variable domain of TCR clone 106843 (TRBV2, TRBJ2-5)
CASGTPYQETQYF

SEQ ID NO: 213687 - protein, 14 aa, Homo sapiens
  CDR3 for alpha chain variable domain of TCR clone 106844 (TRAV1-1, TRAJ27)
CAVIYNTNAGKSTF

SEQ ID NO: 213688 - protein, 15 aa, Homo sapiens
  CDR3 for beta chain variable domain of TCR clone 106844 (TRBV7-2, TRBJ2-1)
CASSSGLAGGNEQFI

SEQ ID NO: 213689 - protein, 11 aa, Homo sapiens
  CDR3 for alpha chain variable domain of TCR clone 106845 (TRAV4, TRAJ31)
CLVGDNARLMF

SEQ ID NO: 213690 - protein, 18 aa, Homo sapiens
  CDR3 for beta chain variable domain of TCR clone 106845 (TRBV11-2, TRBJ2-3)
CASSLGGASRGAPNTQYF

SEQ ID NO: 213691 - protein, 13 aa, Homo sapiens
  CDR3 for alpha chain variable domain of TCR clone 106846 (TRAV12-2, TRAJ37)
CAGGSGNTGKLIF

SEQ ID NO: 213692 - protein, 14 aa, Homo sapiens
  CDR3 for beta chain variable domain of TCR clone 106846 (TRBV6-1, TRBJ2-6)
CASQQGAGPNVLTF

SEQ ID NO: 213693 - protein, 16 aa, Homo sapiens
  CDR3 for alpha chain variable domain of TCR clone 106847 (TRAV39, TRAJ32)
CAVDMEYGGATNKLIF

SEQ ID NO: 213694 - protein, 14 aa, Homo sapiens
  CDR3 for beta chain variable domain of TCR clone 106847 (TRBV9, TRBJ2-4)
CASSPSGTSGYQYF

SEQ ID NO: 213695 - protein, 16 aa, Homo sapiens
  CDR3 for alpha chain variable domain of TCR clone 106848 (TRAV21, TRAJ52)
RAVTNAGGTSYGKLTF

SEQ ID NO: 213696 - protein, 13 aa, Homo sapiens
  CDR3 for beta chain variable domain of TCR clone 106848 (TRBV20-1, TRBJ2-3)
CSARLAGTDTQYF

SEQ ID NO: 213697 - protein, 14 aa, Homo sapiens
  CDR3 for alpha chain variable domain of TCR clone 106849 (TRAV8-6, TRAJ37)
CAVRLSGNTGKLIF

SEQ ID NO: 213698 - protein, 14 aa, Homo sapiens
  CDR3 for beta chain variable domain of TCR clone 106849 (TRBV13, TRBJ2-5)
CASSLERVGETQYF

SEQ ID NO: 213699 - protein, 12 aa, Homo sapiens
  CDR3 for alpha chain variable domain of TCR clone 106850 (TRAV12-3, TRAJ40)
CAMSSGTYKYIF

SEQ ID NO: 213700 - protein, 14 aa, Homo sapiens
  CDR3 for beta chain variable domain of TCR clone 106850 (TRBV7-2, TRBJ2-7)
CASSPKTSFYEQYF

SEQ ID NO: 213701 - protein, 12 aa, Homo sapiens
  CDR3 for alpha chain variable domain of TCR clone 106851 (TRAV12-3, TRAJ17)
CAMTLTGNNLTF

SEQ ID NO: 213702 - protein, 15 aa, Homo sapiens
  CDR3 for beta chain variable domain of TCR clone 106851 (TRBV20-1, TRBJ2-7)
CSARDRVSGMDEQHF

SEQ ID NO: 213703 - protein, 12 aa, Homo sapiens
  CDR3 for alpha chain variable domain of TCR clone 106852 (TRAV1-2, TRAJ26)
CAVSPYGQNFVF

SEQ ID NO: 213704 - protein, 14 aa, Homo sapiens
  CDR3 for beta chain variable domain of TCR clone 106852 (TRBV5-1, TRBJ2-7)
CASSFASGVNEQYC

SEQ ID NO: 213705 - protein, 23 aa, Homo sapiens
  CDR3 for alpha chain variable domain of TCR clone 106853 (TRAV26-1, TRAJ38)
CIADNAGNNHIQNPDPAVYQLRD

SEQ ID NO: 213706 - protein, 15 aa, Homo sapiens
  CDR3 for beta chain variable domain of TCR clone 106853 (TRBV27, TRBJ2-1)
CAISNGGGSSNEQFF

SEQ ID NO: 213707 - protein, 11 aa, Homo sapiens
  CDR3 for alpha chain variable domain of TCR clone 106854 (TRAV12-1, TRAJ34)
CVVNKGRELIF

SEQ ID NO: 213708 - protein, 15 aa, Homo sapiens
  CDR3 for beta chain variable domain of TCR clone 106854 (TRBV19, TRBJ1-1)
CASTSGQIQNTEAFF

SEQ ID NO: 213709 - protein, 16 aa, Homo sapiens
  CDR3 for alpha chain variable domain of TCR clone 106855 (TRAV36/DV7, TRAJ30)
CAVETYGLDRDDKIIF

SEQ ID NO: 213710 - protein, 11 aa, Homo sapiens
  CDR3 for beta chain variable domain of TCR clone 106855 (TRBV29-1, TRBJ2-5)
CSEDRTGTQYF

SEQ ID NO: 213711 - protein, 15 aa, Homo sapiens
  CDR3 for alpha chain variable domain of TCR clone 106856 (TRAV2, TRAJ15)
CAVEDRGQAGTALIF

SEQ ID NO: 213712 - protein, 13 aa, Homo sapiens
  CDR3 for beta chain variable domain of TCR clone 106856 (TRBV10-2, TRBJ2-7)
CASGASGCYEQYF

SEQ ID NO: 213713 - protein, 18 aa, Homo sapiens
  CDR3 for alpha chain variable domain of TCR clone 106857 (TRAV26-2, TRAJ45)
CILRVDKYSGGGADGLTF

SEQ ID NO: 213714 - protein, 16 aa, Homo sapiens
  CDR3 for beta chain variable domain of TCR clone 106857 (TRBV2, TRBJ1-4)
CASNLLQGATNETLFF

SEQ ID NO: 213715 - protein, 10 aa, Homo sapiens
  CDR3 for alpha chain variable domain of TCR clone 106858 (TRAV20, TRAJ22)
FAAPARQLTF

SEQ ID NO: 213716 - protein, 14 aa, Homo sapiens
  CDR3 for beta chain variable domain of TCR clone 106858 (TRBV19, TRBJ2-1)
CASSMGSGATEQFF

SEQ ID NO: 213717 - protein, 13 aa, Homo sapiens
  CDR3 for alpha chain variable domain of TCR clone 106859 (TRAV20, TRAJ20)
CAVRDFNDYKLSF

SEQ ID NO: 213718 - protein, 17 aa, Homo sapiens
  CDR3 for beta chain variable domain of TCR clone 106859 (TRBV4-1, TRBJ2-1)
CASSPLRTTSSYNEQFF

SEQ ID NO: 213719 - protein, 18 aa, Homo sapiens
  CDR3 for alpha chain variable domain of TCR clone 106860 (TRAV12-3, TRAJ52)
CAMSVGGAGGTSYGKLTF

SEQ ID NO: 213720 - protein, 20 aa, Homo sapiens
  CDR3 for beta chain variable domain of TCR clone 106860 (TRBV7-8, TRBJ2-2)
CASSHLFPGPTIHITGELFF

SEQ ID NO: 213721 - protein, 16 aa, Homo sapiens
  CDR3 for alpha chain variable domain of TCR clone 106861 (TRAV4, TRAJ5)
CLVGPDHGHGQESTYF

SEQ ID NO: 213722 - protein, 11 aa, Homo sapiens
  CDR3 for beta chain variable domain of TCR clone 106861 (TRBV6-3, TRBJ2-3)
CATGQADTQYF

SEQ ID NO: 213723 - protein, 13 aa, Homo sapiens
  CDR3 for alpha chain variable domain of TCR clone 106862 (TRAV20, TRAJ54)
CAVQAGGAQKLVS

SEQ ID NO: 213724 - protein, 14 aa, Homo sapiens
  CDR3 for beta chain variable domain of TCR clone 106862 (TRBV20-1, TRBJ2-7)
CSAKTGTGGYEQYF

SEQ ID NO: 213725 - protein, 16 aa, Homo sapiens
  CDR3 for alpha chain variable domain of TCR clone 106863 (TRAV12-3, TRAJ53)
CAMSPGSGGRNYKLTF

SEQ ID NO: 213726 - protein, 15 aa, Homo sapiens
  CDR3 for beta chain variable domain of TCR clone 106863 (TRBV27, TRBJ2-1)
CASSNGGGSSNEQFF

SEQ ID NO: 213727 - protein, 12 aa, Homo sapiens
  CDR3 for alpha chain variable domain of TCR clone 106864 (TRAV21, TRAJ31)
CAVSPARGRLMF

SEQ ID NO: 213728 - protein, 14 aa, Homo sapiens
  CDR3 for beta chain variable domain of TCR clone 106864 (TRBV28, TRBJ2-7)
CASSLLRIAYEQYF

SEQ ID NO: 213729 - protein, 12 aa, Homo sapiens
  CDR3 for alpha chain variable domain of TCR clone 106865 (TRAV12-3, TRAJ17)
CAMTHTGNKLTF

SEQ ID NO: 213730 - protein, 15 aa, Homo sapiens
  CDR3 for beta chain variable domain of TCR clone 106865 (TRBV20-1, TRBJ2-7)
CSARDRVSGMDEQYL

SEQ ID NO: 213731 - protein, 14 aa, Homo sapiens
  CDR3 for alpha chain variable domain of TCR clone 106866 (TRAV9-2, TRAJ39)
CALYIYNAGNMLTF

SEQ ID NO: 213732 - protein, 12 aa, Homo sapiens
  CDR3 for beta chain variable domain of TCR clone 106866 (TRBV7-3, TRBJ1-1)
CASSHGGTEAFF

SEQ ID NO: 213733 - protein, 14 aa, Homo sapiens
  CDR3 for alpha chain variable domain of TCR clone 106867 (TRAV1-1, TRAJ27)
CAVIYNTNAGKSTF

SEQ ID NO: 213734 - protein, 13 aa, Homo sapiens
  CDR3 for beta chain variable domain of TCR clone 106867 (TRBV12-5, TRBJ1-2)
CASGVRTGNGDTF

SEQ ID NO: 213735 - protein, 15 aa, Homo sapiens
  CDR3 for alpha chain variable domain of TCR clone 106868 (TRAV3, TRAJ22)
YAVRDRGGSARQLTF

SEQ ID NO: 213736 - protein, 20 aa, Homo sapiens
  CDR3 for beta chain variable domain of TCR clone 106868 (TRBV11-2, TRBJ1-6)
CASSLVFATGGSVHPSTLGT

SEQ ID NO: 213737 - protein, 14 aa, Homo sapiens
  CDR3 for alpha chain variable domain of TCR clone 106869 (TRAV2, TRAJ9)
CAVEDRSGGFKTIF

SEQ ID NO: 213738 - protein, 16 aa, Homo sapiens
  CDR3 for beta chain variable domain of TCR clone 106869 (TRBV29-1, TRBJ2-2)
CSVEKTSEGNTGELFF

SEQ ID NO: 213739 - protein, 15 aa, Homo sapiens
  CDR3 for alpha chain variable domain of TCR clone 106870 (TRAV26-1, TRAJ29)
CIVRVEGSGNTPLVF

SEQ ID NO: 213740 - protein, 12 aa, Homo sapiens
  CDR3 for beta chain variable domain of TCR clone 106870 (TRBV7-9, TRBJ2-7)
CASSLEGYEQYF

SEQ ID NO: 213741 - protein, 10 aa, Homo sapiens
  CDR3 for alpha chain variable domain of TCR clone 106871 (TRAV16, TRAJ22)
SAMYLRQLTF

SEQ ID NO: 213742 - protein, 15 aa, Homo sapiens
  CDR3 for beta chain variable domain of TCR clone 106871 (TRBV7-9, TRBJ1-6)
CSSSSPGRGNSPLHF

SEQ ID NO: 213743 - protein, 13 aa, Homo sapiens
  CDR3 for alpha chain variable domain of TCR clone 106872 (TRAV8-3, TRAJ43)
CAVVPYNNNDMRF

SEQ ID NO: 213744 - protein, 16 aa, Homo sapiens
  CDR3 for beta chain variable domain of TCR clone 106872 (TRBV12-5, TRBJ2-5)
CASGPRTSGNQETQYF

SEQ ID NO: 213745 - protein, 13 aa, Homo sapiens
  CDR3 for alpha chain variable domain of TCR clone 106873 (TRAV1-2, TRAJ9)
CAALNTGGFKTIF

SEQ ID NO: 213746 - protein, 13 aa, Homo sapiens
  CDR3 for beta chain variable domain of TCR clone 106873 (TRBV19, TRBJ1-2)
CASSVPGQDGYDF

SEQ ID NO: 213747 - protein, 14 aa, Homo sapiens
  CDR3 for alpha chain variable domain of TCR clone 106874 (TRAV12-3, TRAJ10)
SHLPLTGGGNKLTF

SEQ ID NO: 213748 - protein, 14 aa, Homo sapiens
  CDR3 for beta chain variable domain of TCR clone 106874 (TRBV7-2, TRBJ2-2)
CASGLNSNTGELFF

SEQ ID NO: 213749 - protein, 14 aa, Homo sapiens
  CDR3 for alpha chain variable domain of TCR clone 106875 (TRAV2, TRAJ37)
CAVDSTSNTGKLIF

SEQ ID NO: 213750 - protein, 13 aa, Homo sapiens
  CDR3 for beta chain variable domain of TCR clone 106875 (TRBV4-1, TRBJ2-2)
CASSQENTGELFF

SEQ ID NO: 213751 - protein, 14 aa, Homo sapiens
  CDR3 for alpha chain variable domain of TCR clone 106876 (TRAV12-2, TRAJ13)
CAVKNTGGYQKVTF

SEQ ID NO: 213752 - protein, 14 aa, Homo sapiens
  CDR3 for beta chain variable domain of TCR clone 106876 (TRBV5-5, TRBJ2-7)
CASSLGQGTYEQYF

SEQ ID NO: 213753 - protein, 16 aa, Homo sapiens
  CDR3 for alpha chain variable domain of TCR clone 106877 (TRAV12-2, TRAJ32)
CAVNLGQGGATHKLIF

SEQ ID NO: 213754 - protein, 15 aa, Homo sapiens
  CDR3 for beta chain variable domain of TCR clone 106877 (TRBV20-1, TRBJ2-7)
CSARGPLAGGREQYF

SEQ ID NO: 213755 - protein, 16 aa, Homo sapiens
  CDR3 for alpha chain variable domain of TCR clone 106878 (TRAV2, TRAJ36)
CAVEDRGNWGKQPLRW

SEQ ID NO: 213756 - protein, 14 aa, Homo sapiens
  CDR3 for beta chain variable domain of TCR clone 106878 (TRBV7-9, TRBJ2-5)
CASSLDTAQETQYF

SEQ ID NO: 213757 - protein, 15 aa, Homo sapiens
  CDR3 for alpha chain variable domain of TCR clone 106879 (TRAV17, TRAJ52)
CATEAGGPSYGKLTF

SEQ ID NO: 213758 - protein, 14 aa, Homo sapiens
  CDR3 for beta chain variable domain of TCR clone 106879 (TRBV28, TRBJ1-5)
CASSLGVLVKPQHF

SEQ ID NO: 213759 - protein, 11 aa, Homo sapiens
  CDR3 for alpha chain variable domain of TCR clone 106880 (TRAV2, TRAJ13)
CASGGYQKVTF

SEQ ID NO: 213760 - protein, 15 aa, Homo sapiens
  CDR3 for beta chain variable domain of TCR clone 106880 (TRBV27, TRBJ2-2)
CQQFIRFWVTGELFF

SEQ ID NO: 213761 - protein, 15 aa, Homo sapiens
  CDR3 for alpha chain variable domain of TCR clone 106881 (TRAV12-2, TRAJ43)
CAFDMRFGAGTRLTV

SEQ ID NO: 213762 - protein, 15 aa, Homo sapiens
  CDR3 for beta chain variable domain of TCR clone 106881 (TRBV9, TRBJ1-6)
CASSVAGTGDSPLHF

SEQ ID NO: 213763 - protein, 14 aa, Homo sapiens
  CDR3 for alpha chain variable domain of TCR clone 106882 (TRAV12-1, TRAJ17)
CVVNYKAAGNKLTF

SEQ ID NO: 213764 - protein, 14 aa, Homo sapiens
  CDR3 for beta chain variable domain of TCR clone 106882 (TRBV7-2, TRBJ1-2)
CASSQTGSTYGYTF

SEQ ID NO: 213765 - protein, 10 aa, Homo sapiens
  CDR3 for alpha chain variable domain of TCR clone 106883 (TRAV26-1, TRAJ15)
CIVSLNFFWF

SEQ ID NO: 213766 - protein, 15 aa, Homo sapiens
  CDR3 for beta chain variable domain of TCR clone 106883 (TRBV7-6, TRBJ1-5)
CASSQSSGINQPQHF

SEQ ID NO: 213767 - protein, 13 aa, Homo sapiens
  CDR3 for alpha chain variable domain of TCR clone 106884 (TRAV26-1, TRAJ36)
CIVVGTGANYLFF

SEQ ID NO: 213768 - protein, 13 aa, Homo sapiens
  CDR3 for beta chain variable domain of TCR clone 106884 (TRBV6-5, TRBJ2-6)
CASSTSGPLRLDF

SEQ ID NO: 213769 - protein, 15 aa, Homo sapiens
  CDR3 for alpha chain variable domain of TCR clone 106885 (TRAV25, TRAJ52)
CAGRPGGTSYGKLIF

SEQ ID NO: 213770 - protein, 17 aa, Homo sapiens
  CDR3 for beta chain variable domain of TCR clone 106885 (TRBV7-8, TRBJ2-6)
CASSAGTGGAGANVLTF

SEQ ID NO: 213771 - protein, 13 aa, Homo sapiens
  CDR3 for alpha chain variable domain of TCR clone 106886 (TRAV8-4, TRAJ10)
CAAFTGGGNKLTF

SEQ ID NO: 213772 - protein, 15 aa, Homo sapiens
  CDR3 for beta chain variable domain of TCR clone 106886 (TRBV20-1, TRBJ2-7)
CSARDRVSGMDEQYF

SEQ ID NO: 213773 - protein, 11 aa, Homo sapiens
  CDR3 for alpha chain variable domain of TCR clone 106887 (TRAV2, TRAJ13)
CASGGYQKVTF

SEQ ID NO: 213774 - protein, 13 aa, Homo sapiens
  CDR3 for beta chain variable domain of TCR clone 106887 (TRBV12-4, TRBJ1-2)
CAGSLRQGKGYTF

SEQ ID NO: 213775 - protein, 14 aa, Homo sapiens
  CDR3 for alpha chain variable domain of TCR clone 106888 (TRAV13-1, TRAJ40)
CAASMTSGTYEYIF

SEQ ID NO: 213776 - protein, 23 aa, Homo sapiens
  CDR3 for beta chain variable domain of TCR clone 106888 (TRBV7-3, TRBJ2-1)
GGTQPCISVPAARRGGGEVEQFF

SEQ ID NO: 213777 - protein, 15 aa, Homo sapiens
  CDR3 for alpha chain variable domain of TCR clone 106889 (TRAV27, TRAJ38)
CAARRNAGNNRKLIW

SEQ ID NO: 213778 - protein, 13 aa, Homo sapiens
  CDR3 for beta chain variable domain of TCR clone 106889 (TRBV12-5, TRBJ2-3)
CTSGDRQSDTQYF

SEQ ID NO: 213779 - protein, 13 aa, Homo sapiens
  CDR3 for alpha chain variable domain of TCR clone 106890 (TRAV8-4, TRAJ27)
CAVSPRNAGKSTF

SEQ ID NO: 213780 - protein, 17 aa, Homo sapiens
  CDR3 for beta chain variable domain of TCR clone 106890 (TRBV19, TRBJ2-3)
CASSIDTAGGGTDTQYF

SEQ ID NO: 213781 - protein, 15 aa, Homo sapiens
  CDR3 for alpha chain variable domain of TCR clone 106891 (TRAV35, TRAJ52)
CAGPRGGTSYGKLTF

SEQ ID NO: 213782 - protein, 14 aa, Homo sapiens
  CDR3 for beta chain variable domain of TCR clone 106891 (TRBV20-1, TRBJ2-7)
CSAWTALSSYEHYF

SEQ ID NO: 213783 - protein, 13 aa, Homo sapiens
  CDR3 for alpha chain variable domain of TCR clone 106892 (TRAV1-2, TRAJ9)
GAALNTGGFKTIF

SEQ ID NO: 213784 - protein, 13 aa, Homo sapiens
  CDR3 for beta chain variable domain of TCR clone 106892 (TRBV19, TRBJ1-2)
CASSVPGQDGYTF

SEQ ID NO: 213785 - protein, 22 aa, Homo sapiens
  CDR3 for alpha chain variable domain of TCR clone 106893 (TRAV1-1, TRAJ11)
CLLLLRCERLKLMNSGYSTLTF

SEQ ID NO: 213786 - protein, 15 aa, Homo sapiens
  CDR3 for beta chain variable domain of TCR clone 106893 (TRBV9, TRBJ1-6)
CASSVAGTGDSPLHF

SEQ ID NO: 213787 - protein, 13 aa, Homo sapiens
  CDR3 for alpha chain variable domain of TCR clone 106894 (TRAV36/DV7, TRAJ54)
CAVCTQGAQKLVS

SEQ ID NO: 213788 - protein, 13 aa, Homo sapiens
  CDR3 for beta chain variable domain of TCR clone 106894 (TRBV7-6, TRBJ2-7)
CASSLDHTHEQYF

SEQ ID NO: 213789 - protein, 14 aa, Homo sapiens
  CDR3 for alpha chain variable domain of TCR clone 106895 (TRAV3, TRAJ7)
CAVREEEREQQTRF

SEQ ID NO: 213790 - protein, 14 aa, Homo sapiens
  CDR3 for beta chain variable domain of TCR clone 106895 (TRBV13, TRBJ2-5)
CASSLGPRGETQYF

SEQ ID NO: 213791 - protein, 12 aa, Homo sapiens
  CDR3 for alpha chain variable domain of TCR clone 106896 (TRAV8-3, TRAJ20)
CAVGANDYKLSF

SEQ ID NO: 213792 - protein, 15 aa, Homo sapiens
  CDR3 for beta chain variable domain of TCR clone 106896 (TRBV9, TRBJ1-6)
CASSVAGTGDSPLHF

SEQ ID NO: 213793 - protein, 12 aa, Homo sapiens
  CDR3 for alpha chain variable domain of TCR clone 106897 (TRAV13-1, TRAJ15)
CAASQAGTAPIF

SEQ ID NO: 213794 - protein, 18 aa, Homo sapiens
  CDR3 for beta chain variable domain of TCR clone 106897 (TRBV7-9, TRBJ2-3)
CASSLPINGQISTDTQYF

SEQ ID NO: 213795 - protein, 15 aa, Homo sapiens
  CDR3 for alpha chain variable domain of TCR clone 106898 (TRAV12-3, TRAJ6)
CAMSATTGGSYIPTF

SEQ ID NO: 213796 - protein, 14 aa, Homo sapiens
  CDR3 for beta chain variable domain of TCR clone 106898 (TRBV12-4, TRBJ1-1)
CASSLGTGGTEAFF

SEQ ID NO: 213797 - protein, 14 aa, Homo sapiens
  CDR3 for alpha chain variable domain of TCR clone 106899 (TRAV8-1, TRAJ5)
CAVRTDTGRRALTF

SEQ ID NO: 213798 - protein, 14 aa, Homo sapiens
  CDR3 for beta chain variable domain of TCR clone 106899 (TRBV5-5, TRBJ1-2)
CASSLDPYNYGYAF

SEQ ID NO: 213799 - protein, 13 aa, Homo sapiens
  CDR3 for alpha chain variable domain of TCR clone 106900 (TRAV2, TRAJ15)
CAVASQAGTALIF

SEQ ID NO: 213800 - protein, 12 aa, Homo sapiens
  CDR3 for beta chain variable domain of TCR clone 106900 (TRBV7-9, TRBJ2-7)
CASSLEGYEQYF

SEQ ID NO: 213801 - protein, 13 aa, Homo sapiens
  CDR3 for alpha chain variable domain of TCR clone 106901 (TRAV13-2, TRAJ13)
CAERPGGYQKVTF

SEQ ID NO: 213802 - protein, 15 aa, Homo sapiens
  CDR3 for beta chain variable domain of TCR clone 106901 (TRBV11-3, TRBJ2-7)
CASSPGPVSSYEQYF

SEQ ID NO: 213803 - protein, 15 aa, Homo sapiens
  CDR3 for alpha chain variable domain of TCR clone 106902 (TRAV30, TRAJ57)
CGTAIPQGGSEKLGF

SEQ ID NO: 213804 - protein, 13 aa, Homo sapiens
  CDR3 for beta chain variable domain of TCR clone 106902 (TRBV7-9, TRBJ1-2)
CASSPSNFWGYTF

SEQ ID NO: 213805 - protein, 13 aa, Homo sapiens
  CDR3 for alpha chain variable domain of TCR clone 106903 (TRAV12-2, TRAJ48)
CAAPNFGNEKLTF

SEQ ID NO: 213806 - protein, 15 aa, Homo sapiens
  CDR3 for beta chain variable domain of TCR clone 106903 (TRBV28, TRBJ2-5)
CASSPPWSYQETQYF

SEQ ID NO: 213807 - protein, 13 aa, Homo sapiens
  CDR3 for alpha chain variable domain of TCR clone 106904 (TRAV2, TRAJ40)
CAVVTSGTYNYIF

SEQ ID NO: 213808 - protein, 14 aa, Homo sapiens
  CDR3 for beta chain variable domain of TCR clone 106904 (TRBV20-1, TRBJ1-1)
CSAMGGTANTEAFF

SEQ ID NO: 213809 - protein, 14 aa, Homo sapiens
  CDR3 for alpha chain variable domain of TCR clone 106905 (TRAV13-1, TRAJ35)
CAASKGGFGNVLHC

SEQ ID NO: 213810 - protein, 14 aa, Homo sapiens
  CDR3 for beta chain variable domain of TCR clone 106905 (TRBV20-1, TRBJ2-1)
CSAQIGGSANEQFF

SEQ ID NO: 213811 - protein, 15 aa, Homo sapiens
  CDR3 for alpha chain variable domain of TCR clone 106906 (TRAV29/DV5, TRAJ53)
CAASARGGSNYKLTF

SEQ ID NO: 213812 - protein, 17 aa, Homo sapiens
  CDR3 for beta chain variable domain of TCR clone 106906 (TRBV7-8, TRBJ2-6)
CASSAGTGGAGANVLTF

SEQ ID NO: 213813 - protein, 15 aa, Homo sapiens
  CDR3 for alpha chain variable domain of TCR clone 106907 (TRAV21, TRAJ40)
CAVRSQTSGTYKYIF

SEQ ID NO: 213814 - protein, 13 aa, Homo sapiens
  CDR3 for beta chain variable domain of TCR clone 106907 (TRBV7-2, TRBJ2-2)
CASSSVRAGELFF

SEQ ID NO: 213815 - protein, 15 aa, Homo sapiens
  CDR3 for alpha chain variable domain of TCR clone 106908 (TRAV8-6, TRAJ9)
CAVSDRYTGGFKTIF

SEQ ID NO: 213816 - protein, 16 aa, Homo sapiens
  CDR3 for beta chain variable domain of TCR clone 106908 (TRBV19, TRBJ2-3)
CASSPEWDRGTDTQYF

SEQ ID NO: 213817 - protein, 14 aa, Homo sapiens
  CDR3 for alpha chain variable domain of TCR clone 106909 (TRAV20, TRAJ22)
CAVALGGSARQLTC

SEQ ID NO: 213818 - protein, 15 aa, Homo sapiens
  CDR3 for beta chain variable domain of TCR clone 106909 (TRBV7-2, TRBJ1-1)
CASSFAGDRDTEAFF

SEQ ID NO: 213819 - protein, 15 aa, Homo sapiens
  CDR3 for alpha chain variable domain of TCR clone 106910 (TRAV26-1, TRAJ22)
CIVRVSVWFCKATDL

SEQ ID NO: 213820 - protein, 13 aa, Homo sapiens
  CDR3 for beta chain variable domain of TCR clone 106910 (TRBV7-9, TRBJ1-2)
CASSLKQNYGYTF

SEQ ID NO: 213821 - protein, 13 aa, Homo sapiens
  CDR3 for alpha chain variable domain of TCR clone 106911 (TRAV2, TRAJ36)
CAVDQTGANNLFF

SEQ ID NO: 213822 - protein, 12 aa, Homo sapiens
  CDR3 for beta chain variable domain of TCR clone 106911 (TRBV19, TRBJ1-1)
CASMNRYTEAVF

SEQ ID NO: 213823 - protein, 14 aa, Homo sapiens
  CDR3 for alpha chain variable domain of TCR clone 106912 (TRAV12-1, TRAJ23)
CVVNIPNQGGKLIF

SEQ ID NO: 213824 - protein, 18 aa, Homo sapiens
  CDR3 for beta chain variable domain of TCR clone 106912 (TRBV27, TRBJ2-7)
CASRTGQFFPGARDEQYF

SEQ ID NO: 213825 - protein, 15 aa, Homo sapiens
  CDR3 for alpha chain variable domain of TCR clone 106913 (TRAV1-1, TRAJ5)
RAVRHMDTGRRALTF

SEQ ID NO: 213826 - protein, 17 aa, Homo sapiens
  CDR3 for beta chain variable domain of TCR clone 106913 (TRBV28, TRBJ2-7)
CASSPGLAGGDSSEQYF

SEQ ID NO: 213827 - protein, 11 aa, Homo sapiens
  CDR3 for alpha chain variable domain of TCR clone 106914 (TRAV12-3, TRAJ43)
CAMNVSNDMRF

SEQ ID NO: 213828 - protein, 16 aa, Homo sapiens
  CDR3 for beta chain variable domain of TCR clone 106914 (TRBV7-3, TRBJ2-2)
CASSLKRGTLSGELFF

SEQ ID NO: 213829 - protein, 14 aa, Homo sapiens
  CDR3 for alpha chain variable domain of TCR clone 106915 (TRAV13-2, TRAJ9)
CAENSFTGGFKTIF

SEQ ID NO: 213830 - protein, 12 aa, Homo sapiens
  CDR3 for beta chain variable domain of TCR clone 106915 (TRBV2, TRBJ2-1)
CAYGPPGNEQFF

SEQ ID NO: 213831 - protein, 11 aa, Homo sapiens
  CDR3 for alpha chain variable domain of TCR clone 106916 (TRAV12-2, TRAJ31)
CAVTRWARLMF

SEQ ID NO: 213832 - protein, 12 aa, Homo sapiens
  CDR3 for beta chain variable domain of TCR clone 106916 (TRBV5-1, TRBJ2-7)
CASSFRGYEQYF

SEQ ID NO: 213833 - protein, 14 aa, Homo sapiens
  CDR3 for alpha chain variable domain of TCR clone 106917 (TRAV1-2, TRAJ16)
CAVNRFSDGQKLLF

SEQ ID NO: 213834 - protein, 15 aa, Homo sapiens
  CDR3 for beta chain variable domain of TCR clone 106917 (TRBV7-9, TRBJ1-6)
FASSSPGRGNSPLHF

SEQ ID NO: 213835 - protein, 15 aa, Homo sapiens
  CDR3 for alpha chain variable domain of TCR clone 106918 (TRAV3, TRAJ17)
CAVRDTGAAGNKLTF

SEQ ID NO: 213836 - protein, 13 aa, Homo sapiens
  CDR3 for beta chain variable domain of TCR clone 106918 (TRBV10-2, TRBJ2-7)
CASGASGGYEQYF

SEQ ID NO: 213837 - protein, 14 aa, Homo sapiens
  CDR3 for alpha chain variable domain of TCR clone 106919 (TRAV13-1, TRAJ40)
CAARSTSGTHKYIF

SEQ ID NO: 213838 - protein, 15 aa, Homo sapiens
  CDR3 for beta chain variable domain of TCR clone 106919 (TRBV18, TRBJ1-5)
CASSETGGNNQPQHF

SEQ ID NO: 213839 - protein, 22 aa, Homo sapiens
  CDR3 for alpha chain variable domain of TCR clone 106920 (TRAV2, TRAJ38)
CAVEDFPNAGNNHIQNPDPAVY

SEQ ID NO: 213840 - protein, 13 aa, Homo sapiens
  CDR3 for beta chain variable domain of TCR clone 106920 (TRBV10-3, TRBJ2-7)
CASKLAVNYEQYF

SEQ ID NO: 213841 - protein, 12 aa, Homo sapiens
  CDR3 for alpha chain variable domain of TCR clone 106921 (TRAV23/DV6, TRAJ30)
CAASKGDDEIIF

SEQ ID NO: 213842 - protein, 18 aa, Homo sapiens
  CDR3 for beta chain variable domain of TCR clone 106921 (TRBV10-3, TRBJ2-3)
CAISESRVGPMRGDTQYF

SEQ ID NO: 213843 - protein, 15 aa, Homo sapiens
  CDR3 for alpha chain variable domain of TCR clone 106922 (TRAV38-1, TRAJ37)
CAFIHGSGNTGKLIF

SEQ ID NO: 213844 - protein, 15 aa, Homo sapiens
  CDR3 for beta chain variable domain of TCR clone 106922 (TRBV11-3, TRBJ2-3)
CASLKDGREGDTQYF

SEQ ID NO: 213845 - protein, 14 aa, Homo sapiens
  CDR3 for alpha chain variable domain of TCR clone 106923 (TRAV12-2, TRAJ9)
CAVNALEGGFKTIF

SEQ ID NO: 213846 - protein, 16 aa, Homo sapiens
  CDR3 for beta chain variable domain of TCR clone 106923 (TRBV19, TRBJ1-6)
CASSVAPVAGNSPLHF

SEQ ID NO: 213847 - protein, 12 aa, Homo sapiens
  CDR3 for alpha chain variable domain of TCR clone 106924 (TRAV12-3, TRAJ20)
CAMVRGDNKLSF

SEQ ID NO: 213848 - protein, 12 aa, Homo sapiens
  CDR3 for beta chain variable domain of TCR clone 106924 (TRBV6-1, TRBJ2-7)
CASSDYSYEQYF

SEQ ID NO: 213849 - protein, 14 aa, Homo sapiens
  CDR3 for alpha chain variable domain of TCR clone 106925 (TRAV1-2, TRAJ16)
CAVSRFSDGQKLLF

SEQ ID NO: 213850 - protein, 14 aa, Homo sapiens
  CDR3 for beta chain variable domain of TCR clone 106925 (TRBV7-9, TRBJ2-2)
CASSTVLGRGELFF

SEQ ID NO: 213851 - protein, 13 aa, Homo sapiens
  CDR3 for alpha chain variable domain of TCR clone 106926 (TRAV23/DV6, TRAJ58)
CAASEIGGSRLTF

SEQ ID NO: 213852 - protein, 13 aa, Homo sapiens
  CDR3 for beta chain variable domain of TCR clone 106926 (TRBV3-1, TRBJ1-5)
CTSSQFGDQPQHF

SEQ ID NO: 213853 - protein, 16 aa, Homo sapiens
  CDR3 for alpha chain variable domain of TCR clone 106927 (TRAV3, TRAJ37)
CAVRVRGSGNTGKLIF

SEQ ID NO: 213854 - protein, 13 aa, Homo sapiens
  CDR3 for beta chain variable domain of TCR clone 106927 (TRBV7-9, TRBJ1-2)
CASSLKQNCGYTF

SEQ ID NO: 213855 - protein, 15 aa, Homo sapiens
  CDR3 for alpha chain variable domain of TCR clone 106928 (TRAV2, TRAJ22)
CAVPSRGGSARQLTF

SEQ ID NO: 213856 - protein, 12 aa, Homo sapiens
  CDR3 for beta chain variable domain of TCR clone 106928 (TRBV7-9, TRBJ2-7)
CASSFGSYEQYF

SEQ ID NO: 213857 - protein, 12 aa, Homo sapiens
  CDR3 for alpha chain variable domain of TCR clone 106929 (TRAV12-3, TRAJ17)
CAMTLTGNKLTF

SEQ ID NO: 213858 - protein, 17 aa, Homo sapiens
  CDR3 for beta chain variable domain of TCR clone 106929 (TRBV7-3, TRBJ2-3)
CASSLMKRRRGADTQYF

SEQ ID NO: 213859 - protein, 15 aa, Homo sapiens
  CDR3 for alpha chain variable domain of TCR clone 106930 (TRAV17, TRAJ57)
CATGPSQGGSEKLVF

SEQ ID NO: 213860 - protein, 18 aa, Homo sapiens
  CDR3 for beta chain variable domain of TCR clone 106930 (TRBV7-9, TRBJ2-7)
CASSLTTSGSMTWYEQYF

SEQ ID NO: 213861 - protein, 12 aa, Homo sapiens
  CDR3 for alpha chain variable domain of TCR clone 106931 (TRAV8-6, TRAJ43)
CAVSNNNNDMRF

SEQ ID NO: 213862 - protein, 15 aa, Homo sapiens
  CDR3 for beta chain variable domain of TCR clone 106931 (TRBV7-3, TRBJ2-6)
CASSLGGSGANVLSF

SEQ ID NO: 213863 - protein, 16 aa, Homo sapiens
  CDR3 for alpha chain variable domain of TCR clone 106932 (TRAV16, TRAJ4)
CALSRMFSGGYNKLIL

SEQ ID NO: 213864 - protein, 16 aa, Homo sapiens
  CDR3 for beta chain variable domain of TCR clone 106932 (TRBV24-1, TRBJ2-3)
CATSDPGTGATDTQYF

SEQ ID NO: 213865 - protein, 16 aa, Homo sapiens
  CDR3 for alpha chain variable domain of TCR clone 106933 (TRAV16, TRAJ4)
CALSRMFSGGYNKLIF

SEQ ID NO: 213866 - protein, 16 aa, Homo sapiens
  CDR3 for beta chain variable domain of TCR clone 106933 (TRBV24-1, TRBJ2-3)
CATSDHGTGATDTQYF

SEQ ID NO: 213867 - protein, 13 aa, Homo sapiens
  CDR3 for alpha chain variable domain of TCR clone 106934 (TRAV25, TRAJ47)
CAGHREYGNKLVF

SEQ ID NO: 213868 - protein, 21 aa, Homo sapiens
  CDR3 for beta chain variable domain of TCR clone 106934 (TRBV7-8, TRBJ2-5)
CASSLASGGGSKRPSTSGQAR

SEQ ID NO: 213869 - protein, 12 aa, Homo sapiens
  CDR3 for alpha chain variable domain of TCR clone 106935 (TRAV8-3, TRAJ20)
CAVGANDYKLSF

SEQ ID NO: 213870 - protein, 17 aa, Homo sapiens
  CDR3 for beta chain variable domain of TCR clone 106935 (TRBV13, TRBJ2-3)
YASSLSRVAGGRNTQYF

SEQ ID NO: 213871 - protein, 14 aa, Homo sapiens
  CDR3 for alpha chain variable domain of TCR clone 106936 (TRAV12-2, TRAJ13)
CAVKKTGGYQKVTF

SEQ ID NO: 213872 - protein, 13 aa, Homo sapiens
  CDR3 for beta chain variable domain of TCR clone 106936 (TRBV27, TRBJ2-7)
CASSFSQGYEQYF

SEQ ID NO: 213873 - protein, 16 aa, Homo sapiens
  CDR3 for alpha chain variable domain of TCR clone 106937 (TRAV12-3, TRAJ53)
CAMSPGSGGSNYKLTF

SEQ ID NO: 213874 - protein, 18 aa, Homo sapiens
  CDR3 for beta chain variable domain of TCR clone 106937 (TRBV25-1, TRBJ1-2)
CASSGLQNGQGLIFGYTF

SEQ ID NO: 213875 - protein, 17 aa, Homo sapiens
  CDR3 for alpha chain variable domain of TCR clone 106938 (TRAV26-1, TRAJ53)
CIVRVDDSGGSNYKLKF

SEQ ID NO: 213876 - protein, 15 aa, Homo sapiens
  CDR3 for beta chain variable domain of TCR clone 106938 (TRBV20-1, TRBJ2-7)
CSARDRVSGMDEQYF

SEQ ID NO: 213877 - protein, 13 aa, Homo sapiens
  CDR3 for alpha chain variable domain of TCR clone 106939 (TRAV26-1, TRAJ12)
CIVRPDSSYKLIF

SEQ ID NO: 213878 - protein, 17 aa, Homo sapiens
  CDR3 for beta chain variable domain of TCR clone 106939 (TRBV5-5, TRBJ1-2)
CASSLGSLDGQSEGYTF

SEQ ID NO: 213879 - protein, 14 aa, Homo sapiens
  CDR3 for alpha chain variable domain of TCR clone 106940 (TRAV12-1, TRAJ38)
CVVHNAGTNRKLIW

SEQ ID NO: 213880 - protein, 13 aa, Homo sapiens
  CDR3 for beta chain variable domain of TCR clone 106940 (TRBV19, TRBJ2-1)
CATSRGVYNEQFF

SEQ ID NO: 213881 - protein, 10 aa, Homo sapiens
  CDR3 for alpha chain variable domain of TCR clone 106941 (TRAV1-2, TRAJ34)
CAVNTAKLIF

SEQ ID NO: 213882 - protein, 13 aa, Homo sapiens
  CDR3 for beta chain variable domain of TCR clone 106941 (TRBV10-1, TRBJ2-1)
CASSAGPDNEQFF

SEQ ID NO: 213883 - protein, 18 aa, Homo sapiens
  CDR3 for alpha chain variable domain of TCR clone 106942 (TRAV21, TRAJ52)
CAVRPSPAGGTSYGKLTF

SEQ ID NO: 213884 - protein, 13 aa, Homo sapiens
  CDR3 for beta chain variable domain of TCR clone 106942 (TRBV7-3, TRBJ1-1)
CASSHDWGAEAFF

SEQ ID NO: 213885 - protein, 11 aa, Homo sapiens
  CDR3 for alpha chain variable domain of TCR clone 106943 (TRAV1-1, TRAJ23)
CAVRQGGKLIF

SEQ ID NO: 213886 - protein, 14 aa, Homo sapiens
  CDR3 for beta chain variable domain of TCR clone 106943 (TRBV20-1, TRBJ2-4)
CSASGRVGENIQYF

SEQ ID NO: 213887 - protein, 12 aa, Homo sapiens
  CDR3 for alpha chain variable domain of TCR clone 106944 (TRAV1-2, TRAJ33)
CAALDSNYQLIW

SEQ ID NO: 213888 - protein, 13 aa, Homo sapiens
  CDR3 for beta chain variable domain of TCR clone 106944 (TRBV2, TRBJ1-4)
CASSERAGEKLFF

SEQ ID NO: 213889 - protein, 12 aa, Homo sapiens
  CDR3 for alpha chain variable domain of TCR clone 106945 (TRAV25, TRAJ38)
CAGTGNNRKLIW

SEQ ID NO: 213890 - protein, 14 aa, Homo sapiens
  CDR3 for beta chain variable domain of TCR clone 106945 (TRBV5-4, TRBJ1-1)
CASSLGSRRDEAFF

SEQ ID NO: 213891 - protein, 14 aa, Homo sapiens
  CDR3 for alpha chain variable domain of TCR clone 106946 (TRAV1-2, TRAJ8)
CAVREDTGCQKLVF

SEQ ID NO: 213892 - protein, 15 aa, Homo sapiens
  CDR3 for beta chain variable domain of TCR clone 106946 (TRBV20-1, TRBJ2-7)
CSARDRVSGMDEQYF

SEQ ID NO: 213893 - protein, 11 aa, Homo sapiens
  CDR3 for alpha chain variable domain of TCR clone 106947 (TRAV26-1, TRAJ27)
CIDPNAGKSTF

SEQ ID NO: 213894 - protein, 18 aa, Homo sapiens
  CDR3 for beta chain variable domain of TCR clone 106947 (TRBV7-9, TRBJ2-6)
CASIFPGAGISGANVLTF

SEQ ID NO: 213895 - protein, 13 aa, Homo sapiens
  CDR3 for alpha chain variable domain of TCR clone 106948 (TRAV27, TRAJ54)
CAGAGQGAQKLVF

SEQ ID NO: 213896 - protein, 15 aa, Homo sapiens
  CDR3 for beta chain variable domain of TCR clone 106948 (TRBV18, TRBJ2-6)
CASSPSYAGAKVLTF

SEQ ID NO: 213897 - protein, 15 aa, Homo sapiens
  CDR3 for alpha chain variable domain of TCR clone 106949 (TRAV12-2, TRAJ50)
CAVNGLETSYDKVIF

SEQ ID NO: 213898 - protein, 13 aa, Homo sapiens
  CDR3 for beta chain variable domain of TCR clone 106949 (TRBV7-9, TRBJ1-2)
CASSLKQNYGYTF

SEQ ID NO: 213899 - protein, 12 aa, Homo sapiens
  CDR3 for alpha chain variable domain of TCR clone 106950 (TRAV3, TRAJ17)
CAVRSCRQQANF

SEQ ID NO: 213900 - protein, 15 aa, Homo sapiens
  CDR3 for beta chain variable domain of TCR clone 106950 (TRBV6-3, TRBJ2-7)
CASSSPGTVFYEQYF

SEQ ID NO: 213901 - protein, 14 aa, Homo sapiens
  CDR3 for alpha chain variable domain of TCR clone 106951 (TRAV16, TRAJ57)
CALPTQGGSETLVF

SEQ ID NO: 213902 - protein, 15 aa, Homo sapiens
  CDR3 for beta chain variable domain of TCR clone 106951 (TRBV28, TRBJ1-3)
CASWGGHLSGNTIYF

SEQ ID NO: 213903 - protein, 16 aa, Homo sapiens
  CDR3 for alpha chain variable domain of TCR clone 106952 (TRAV8-3, TRAJ22)
CALDLLGPGSARQLTF

SEQ ID NO: 213904 - protein, 14 aa, Homo sapiens
  CDR3 for beta chain variable domain of TCR clone 106952 (TRBV11-2, TRBJ2-7)
CASSLELEGYEQYF

SEQ ID NO: 213905 - protein, 12 aa, Homo sapiens
  CDR3 for alpha chain variable domain of TCR clone 106953 (TRAV8-1, TRAJ6)
CASSGGSHIPTF

SEQ ID NO: 213906 - protein, 12 aa, Homo sapiens
  CDR3 for beta chain variable domain of TCR clone 106953 (TRBV19, TRBJ1-1)
CASMNRYTEAFF

SEQ ID NO: 213907 - protein, 11 aa, Homo sapiens
  CDR3 for alpha chain variable domain of TCR clone 106954 (TRAV27, TRAJ47)
SVVEYGNKLVF

SEQ ID NO: 213908 - protein, 18 aa, Homo sapiens
  CDR3 for beta chain variable domain of TCR clone 106954 (TRBV2, TRBJ2-1)
CASRGLAGGPRTYNEQFF

SEQ ID NO: 213909 - protein, 15 aa, Homo sapiens
  CDR3 for alpha chain variable domain of TCR clone 106955 (TRAV12-2, TRAJ53)
CAVNGGGGSNYKLTF

SEQ ID NO: 213910 - protein, 19 aa, Homo sapiens
  CDR3 for beta chain variable domain of TCR clone 106955 (TRBV7-2, TRBJ2-3)
CASSFLSRNWGGGTDTQYF

SEQ ID NO: 213911 - protein, 14 aa, Homo sapiens
  CDR3 for alpha chain variable domain of TCR clone 106956 (TRAV2, TRAJ12)
CAVDAMDSSYNLIF

SEQ ID NO: 213912 - protein, 13 aa, Homo sapiens
  CDR3 for beta chain variable domain of TCR clone 106956 (TRBV19, TRBJ2-1)
CASKVGAGGEQFF

SEQ ID NO: 213913 - protein, 14 aa, Homo sapiens
  CDR3 for alpha chain variable domain of TCR clone 106957 (TRAV8-6, TRAJ13)
CAVSGRGGYQKVTF

SEQ ID NO: 213914 - protein, 18 aa, Homo sapiens
  CDR3 for beta chain variable domain of TCR clone 106957 (TRBV11-2, TRBJ2-3)
CASSLGGASRGAPNTQYF

SEQ ID NO: 213915 - protein, 13 aa, Homo sapiens
  CDR3 for alpha chain variable domain of TCR clone 106958 (TRAV12-1, TRAJ20)
CVVNRETDYKPSF

SEQ ID NO: 213916 - protein, 15 aa, Homo sapiens
  CDR3 for beta chain variable domain of TCR clone 106958 (TRBV14, TRBJ2-1)
CASSLGLAGGTEQFF

SEQ ID NO: 213917 - protein, 17 aa, Homo sapiens
  CDR3 for alpha chain variable domain of TCR clone 106959 (TRAV3, TRAJ6)
CAVRDGPRAGGSYIPTF

SEQ ID NO: 213918 - protein, 12 aa, Homo sapiens
  CDR3 for beta chain variable domain of TCR clone 106959 (TRBV18, TRBJ1-4)
CASSPSREKLFF

SEQ ID NO: 213919 - protein, 15 aa, Homo sapiens
  CDR3 for alpha chain variable domain of TCR clone 106960 (TRAV26-2, TRAJ57)
CILRDIRGGSERLVF

SEQ ID NO: 213920 - protein, 15 aa, Homo sapiens
  CDR3 for beta chain variable domain of TCR clone 106960 (TRBV2, TRBJ2-1)
CASDIGLAGEGEQFF

SEQ ID NO: 213921 - protein, 13 aa, Homo sapiens
  CDR3 for alpha chain variable domain of TCR clone 106961 (TRAV2, TRAJ40)
CAVVTSGTYKYIF

SEQ ID NO: 213922 - protein, 15 aa, Homo sapiens
  CDR3 for beta chain variable domain of TCR clone 106961 (TRBV11-3, TRBJ2-5)
CASSLRGRVQETQYF

SEQ ID NO: 213923 - protein, 16 aa, Homo sapiens
  CDR3 for alpha chain variable domain of TCR clone 106962 (TRAV3, TRAJ37)
CAVRVRGSGNTGKLIF

SEQ ID NO: 213924 - protein, 12 aa, Homo sapiens
  CDR3 for beta chain variable domain of TCR clone 106962 (TRBV11-2, TRBJ2-2)
CASSLPTGELFF

SEQ ID NO: 213925 - protein, 11 aa, Homo sapiens
  CDR3 for alpha chain variable domain of TCR clone 106963 (TRAV2, TRAJ23)
CAVETRGKLIF

SEQ ID NO: 213926 - protein, 14 aa, Homo sapiens
  CDR3 for beta chain variable domain of TCR clone 106963 (TRBV2, TRBJ2-3)
CASSEGQNTDRQYF

SEQ ID NO: 213927 - protein, 14 aa, Homo sapiens
  CDR3 for alpha chain variable domain of TCR clone 106964 (TRAV23/DV6, TRAJ4)
CAANLSGGYNKLIF

SEQ ID NO: 213928 - protein, 10 aa, Homo sapiens
  CDR3 for beta chain variable domain of TCR clone 106964 (TRBV7-9, TRBJ2-3)
CSSPTDTQYF

SEQ ID NO: 213929 - protein, 13 aa, Homo sapiens
  CDR3 for alpha chain variable domain of TCR clone 106965 (TRAV8-3, TRAJ48)
CAVVPFGNEKLTF

SEQ ID NO: 213930 - protein, 14 aa, Homo sapiens
  CDR3 for beta chain variable domain of TCR clone 106965 (TRBV12-5, TRBJ2-5)
CAGGSRTHQETQYF

SEQ ID NO: 213931 - protein, 13 aa, Homo sapiens
  CDR3 for alpha chain variable domain of TCR clone 106966 (TRAV12-1, TRAJ11)
CVVTRGGYSTLTL

SEQ ID NO: 213932 - protein, 13 aa, Homo sapiens
  CDR3 for beta chain variable domain of TCR clone 106966 (TRBV20-1, TRBJ1-2)
CSARDQGAYGYTF

SEQ ID NO: 213933 - protein, 14 aa, Homo sapiens
  CDR3 for alpha chain variable domain of TCR clone 106967 (TRAV13-1, TRAJ23)
CAASRLGRGGRLIF

SEQ ID NO: 213934 - protein, 15 aa, Homo sapiens
  CDR3 for beta chain variable domain of TCR clone 106967 (TRBV7-2, TRBJ2-1)
CASSLVAGRYNEQFF

SEQ ID NO: 213935 - protein, 14 aa, Homo sapiens
  CDR3 for alpha chain variable domain of TCR clone 106968 (TRAV12-1, TRAJ3)
CGAARYSSASKIIF

SEQ ID NO: 213936 - protein, 15 aa, Homo sapiens
  CDR3 for beta chain variable domain of TCR clone 106968 (TRBV7-2, TRBJ2-6)
CASSREGSGAKVLTF

SEQ ID NO: 213937 - protein, 13 aa, Homo sapiens
  CDR3 for alpha chain variable domain of TCR clone 106969 (TRAV26-1, TRAJ34)
CIVRPWITDKLIF

SEQ ID NO: 213938 - protein, 13 aa, Homo sapiens
  CDR3 for beta chain variable domain of TCR clone 106969 (TRBV29-1, TRBJ1-1)
CSVGDSRNTEAFF

SEQ ID NO: 213939 - protein, 14 aa, Homo sapiens
  CDR3 for alpha chain variable domain of TCR clone 106970 (TRAV26-1, TRAJ38)
CIADNAGNNRKLIW

SEQ ID NO: 213940 - protein, 12 aa, Homo sapiens
  CDR3 for beta chain variable domain of TCR clone 106970 (TRBV27, TRBJ2-1)
CASRGFYNEQFF

SEQ ID NO: 213941 - protein, 12 aa, Homo sapiens
  CDR3 for alpha chain variable domain of TCR clone 106971 (TRAV12-1, TRAJ40)
CVVYSGTYKYIF

SEQ ID NO: 213942 - protein, 15 aa, Homo sapiens
  CDR3 for beta chain variable domain of TCR clone 106971 (TRBV11-2, TRBJ1-2)
CASSPRAGWNYGYTF

SEQ ID NO: 213943 - protein, 14 aa, Homo sapiens
  CDR3 for alpha chain variable domain of TCR clone 106972 (TRAV12-2, TRAJ17)
CAVLFKAAGNKLTF

SEQ ID NO: 213944 - protein, 14 aa, Homo sapiens
  CDR3 for beta chain variable domain of TCR clone 106972 (TRBV7-2, TRBJ2-7)
CASSPETSFYEQYF

SEQ ID NO: 213945 - protein, 16 aa, Homo sapiens
  CDR3 for alpha chain variable domain of TCR clone 106973 (TRAV13-1, TRAJ45)
CAARGSRKGGADGLTF

SEQ ID NO: 213946 - protein, 14 aa, Homo sapiens
  CDR3 for beta chain variable domain of TCR clone 106973 (TRBV7-2, TRBJ1-1)
CASSFLTGTTEAFF

SEQ ID NO: 213947 - protein, 17 aa, Homo sapiens
  CDR3 for alpha chain variable domain of TCR clone 106974 (TRAV17, TRAJ52)
CATERPSGGTSYGKLTF

SEQ ID NO: 213948 - protein, 13 aa, Homo sapiens
  CDR3 for beta chain variable domain of TCR clone 106974 (TRBV19, TRBJ1-2)
CASSVPGQDGYTF

SEQ ID NO: 213949 - protein, 12 aa, Homo sapiens
  CDR3 for alpha chain variable domain of TCR clone 106975 (TRAV27, TRAJ35)
CAGADFGNVLHC

SEQ ID NO: 213950 - protein, 16 aa, Homo sapiens
  CDR3 for beta chain variable domain of TCR clone 106975 (TRBV12-5, TRBJ2-5)
CASGPRTSGNQETQYF

SEQ ID NO: 213951 - protein, 11 aa, Homo sapiens
  CDR3 for alpha chain variable domain of TCR clone 106976 (TRAV35, TRAJ22)
CAGPGVGQLTF

SEQ ID NO: 213952 - protein, 15 aa, Homo sapiens
  CDR3 for beta chain variable domain of TCR clone 106976 (TRBV7-9, TRBJ1-5)
CASSQGHQPNQPQHF

SEQ ID NO: 213953 - protein, 14 aa, Homo sapiens
  CDR3 for alpha chain variable domain of TCR clone 106977 (TRAV12-3, TRAJ9)
CAMSPNTGGFKTIF

SEQ ID NO: 213954 - protein, 15 aa, Homo sapiens
  CDR3 for beta chain variable domain of TCR clone 106977 (TRBV7-8, TRBJ1-2)
CASSLVRDGGLGYTF

SEQ ID NO: 213955 - protein, 17 aa, Homo sapiens
  CDR3 for alpha chain variable domain of TCR clone 106978 (TRAV3, TRAJ6)
CAVRDGPRAGGCYIPTF

SEQ ID NO: 213956 - protein, 20 aa, Homo sapiens
  CDR3 for beta chain variable domain of TCR clone 106978 (TRBV28, TRBJ2-1)
CASTPIGRSPGLAGGNEQFF

SEQ ID NO: 213957 - protein, 12 aa, Homo sapiens
  CDR3 for alpha chain variable domain of TCR clone 106979 (TRAV13-1, TRAJ20)
CAASTGDYKLSF

SEQ ID NO: 213958 - protein, 14 aa, Homo sapiens
  CDR3 for beta chain variable domain of TCR clone 106979 (TRBV20-1, TRBJ2-5)
CSASDSGSGETQYF

SEQ ID NO: 213959 - protein, 10 aa, Homo sapiens
  CDR3 for alpha chain variable domain of TCR clone 106980 (TRAV23/DV6, TRAJ57)
CSASSTLSQG

SEQ ID NO: 213960 - protein, 13 aa, Homo sapiens
  CDR3 for beta chain variable domain of TCR clone 106980 (TRBV25-1, TRBJ1-1)
CQHPPGGNTEAFF

SEQ ID NO: 213961 - protein, 18 aa, Homo sapiens
  CDR3 for alpha chain variable domain of TCR clone 106981 (TRAV29/DV5, TRAJ52)
CAASFRGAGGTSYGKLTF

SEQ ID NO: 213962 - protein, 16 aa, Homo sapiens
  CDR3 for beta chain variable domain of TCR clone 106981 (TRBV7-3, TRBJ2-2)
CASSLKRGTLSGELFF

SEQ ID NO: 213963 - protein, 11 aa, Homo sapiens
  CDR3 for alpha chain variable domain of TCR clone 106982 (TRAV21, TRAJ39)
LLVNAGNMLTF

SEQ ID NO: 213964 - protein, 13 aa, Homo sapiens
  CDR3 for beta chain variable domain of TCR clone 106982 (TRBV4-1, TRBJ2-1)
CASSQEVQYEQFF

SEQ ID NO: 213965 - protein, 15 aa, Homo sapiens
  CDR3 for alpha chain variable domain of TCR clone 106983 (TRAV12-2, TRAJ56)
CAVNPFTGANSKLTF

SEQ ID NO: 213966 - protein, 13 aa, Homo sapiens
  CDR3 for beta chain variable domain of TCR clone 106983 (TRBV20-1, TRBJ1-2)
CSARDRVYGGYTL

SEQ ID NO: 213967 - protein, 15 aa, Homo sapiens
  CDR3 for alpha chain variable domain of TCR clone 106984 (TRAV26-1, TRAJ29)
CIVRVEGSGNTPLVF

SEQ ID NO: 213968 - protein, 17 aa, Homo sapiens
  CDR3 for beta chain variable domain of TCR clone 106984 (TRBV7-3, TRBJ2-5)
CASSLGSGRSGSETQYF

SEQ ID NO: 213969 - protein, 12 aa, Homo sapiens
  CDR3 for alpha chain variable domain of TCR clone 106985 (TRAV12-3, TRAJ17)
CAMTLTGNKLTF

SEQ ID NO: 213970 - protein, 15 aa, Homo sapiens
  CDR3 for beta chain variable domain of TCR clone 106985 (TRBV7-9, TRBJ1-6)
CASSSATADNSPPHF

SEQ ID NO: 213971 - protein, 14 aa, Homo sapiens
  CDR3 for alpha chain variable domain of TCR clone 106986 (TRAV2, TRAJ9)
CAVEDRSGGFKTTF

SEQ ID NO: 213972 - protein, 14 aa, Homo sapiens
  CDR3 for beta chain variable domain of TCR clone 106986 (TRBV4-1, TRBJ2-2)
CASSQAVNTGELFF

SEQ ID NO: 213973 - protein, 14 aa, Homo sapiens
  CDR3 for alpha chain variable domain of TCR clone 106987 (TRAV8-3, TRAJ39)
CAVGANNAGNMLTF

SEQ ID NO: 213974 - protein, 16 aa, Homo sapiens
  CDR3 for beta chain variable domain of TCR clone 106987 (TRBV5-1, TRBJ2-2)
CASSSRTGGRTGELFF

SEQ ID NO: 213975 - protein, 15 aa, Homo sapiens
  CDR3 for alpha chain variable domain of TCR clone 106988 (TRAV20, TRAJ43)
CAVQAGKSSNNDMRF

SEQ ID NO: 213976 - protein, 13 aa, Homo sapiens
  CDR3 for beta chain variable domain of TCR clone 106988 (TRBV29-1, TRBJ2-1)
CSVEGGRVNEQFF

SEQ ID NO: 213977 - protein, 12 aa, Homo sapiens
  CDR3 for alpha chain variable domain of TCR clone 106989 (TRAV21, TRAJ31)
CAVSPARGRLMC

SEQ ID NO: 213978 - protein, 14 aa, Homo sapiens
  CDR3 for beta chain variable domain of TCR clone 106989 (TRBV28, TRBJ2-7)
CASSLLRISYEQYF

SEQ ID NO: 213979 - protein, 13 aa, Homo sapiens
  CDR3 for alpha chain variable domain of TCR clone 106990 (TRAV30, TRAJ39)
CGTEKNAGNMLTF

SEQ ID NO: 213980 - protein, 12 aa, Homo sapiens
  CDR3 for beta chain variable domain of TCR clone 106990 (TRBV14, TRBJ2-7)
CASSSLKGEQYF

SEQ ID NO: 213981 - protein, 14 aa, Homo sapiens
  CDR3 for alpha chain variable domain of TCR clone 106991 (TRAV4, TRAJ9)
CLVGSGTGGFKTIF

SEQ ID NO: 213982 - protein, 12 aa, Homo sapiens
  CDR3 for beta chain variable domain of TCR clone 106991 (TRBV28, TRBJ1-1)
CASNSGDTEAFF

SEQ ID NO: 213983 - protein, 15 aa, Homo sapiens
  CDR3 for alpha chain variable domain of TCR clone 106992 (TRAV4, TRAJ39)
CLVGPNNHAGNMLTF

SEQ ID NO: 213984 - protein, 13 aa, Homo sapiens
  CDR3 for beta chain variable domain of TCR clone 106992 (TRBV11-2, TRBJ2-5)
CASSSTGEETQYF

SEQ ID NO: 213985 - protein, 16 aa, Homo sapiens
  CDR3 for alpha chain variable domain of TCR clone 106993 (TRAV12-3, TRAJ53)
CAMSPGSGGSNYKLTF

SEQ ID NO: 213986 - protein, 12 aa, Homo sapiens
  CDR3 for beta chain variable domain of TCR clone 106993 (TRBV6-1, TRBJ2-7)
CASSDYSYEQYF

SEQ ID NO: 213987 - protein, 13 aa, Homo sapiens
  CDR3 for alpha chain variable domain of TCR clone 106994 (TRAV17, TRAJ5)
CALRGTGRGALTF

SEQ ID NO: 213988 - protein, 14 aa, Homo sapiens
  CDR3 for beta chain variable domain of TCR clone 106994 (TRBV6-1, TRBJ1-4)
CASGTLATNEKLFF

SEQ ID NO: 213989 - protein, 13 aa, Homo sapiens
  CDR3 for alpha chain variable domain of TCR clone 106995 (TRAV21, TRAJ57)
CAVTQGGSEKLVF

SEQ ID NO: 213990 - protein, 13 aa, Homo sapiens
  CDR3 for beta chain variable domain of TCR clone 106995 (TRBV19, TRBJ2-7)
CASRKAGGSEQYF

SEQ ID NO: 213991 - protein, 14 aa, Homo sapiens
  CDR3 for alpha chain variable domain of TCR clone 106996 (TRAV13-2, TRAJ43)
CAVIPTYNNNDMRF

SEQ ID NO: 213992 - protein, 14 aa, Homo sapiens
  CDR3 for beta chain variable domain of TCR clone 106996 (TRBV12-5, TRBJ2-5)
CASGSRTHQETQYF

SEQ ID NO: 213993 - protein, 17 aa, Homo sapiens
  CDR3 for alpha chain variable domain of TCR clone 106997 (TRAV3, TRAJ42)
CAVRDRDYGGSQGNLIF

SEQ ID NO: 213994 - protein, 16 aa, Homo sapiens
  CDR3 for beta chain variable domain of TCR clone 106997 (TRBV5-4, TRBJ2-3)
CASSWGTSGGTDTQYF

SEQ ID NO: 213995 - protein, 14 aa, Homo sapiens
  CDR3 for alpha chain variable domain of TCR clone 106998 (TRAV13-2, TRAJ43)
CAEIPTYNNNCMRF

SEQ ID NO: 213996 - protein, 15 aa, Homo sapiens
  CDR3 for beta chain variable domain of TCR clone 106998 (TRBV7-9, TRBJ2-2)
CASGPLDTFPGELFF

SEQ ID NO: 213997 - protein, 16 aa, Homo sapiens
  CDR3 for alpha chain variable domain of TCR clone 106999 (TRAV3, TRAJ37)
CSVRPHGSGNTGKLIF

SEQ ID NO: 213998 - protein, 14 aa, Homo sapiens
  CDR3 for beta chain variable domain of TCR clone 106999 (TRBV20-1, TRBJ2-1)
CSARGGSSYNEQFF

SEQ ID NO: 213999 - protein, 11 aa, Homo sapiens
  CDR3 for alpha chain variable domain of TCR clone 107000 (TRAV17, TRAJ39)
CATNPYNMLTF

SEQ ID NO: 214000 - protein, 13 aa, Homo sapiens
  CDR3 for beta chain variable domain of TCR clone 107000 (TRBV7-8, TRBJ2-1)
CASTRDAVDEQLF

SEQ ID NO: 214001 - protein, 11 aa, Homo sapiens
  CDR3 for alpha chain variable domain of TCR clone 107001 (TRAV2, TRAJ13)
CASGGYQKVTF

SEQ ID NO: 214002 - protein, 13 aa, Homo sapiens
  CDR3 for beta chain variable domain of TCR clone 107001 (TRBV5-1, TRBJ2-1)
CASSLGSYNEQFF

SEQ ID NO: 214003 - protein, 18 aa, Homo sapiens
  CDR3 for alpha chain variable domain of TCR clone 107002 (TRAV21, TRAJ52)
CAVRPSPAGGTSYGKLTF

SEQ ID NO: 214004 - protein, 11 aa, Homo sapiens
  CDR3 for beta chain variable domain of TCR clone 107002 (TRBV6-3, TRBJ2-3)
CATGQADTQYF

SEQ ID NO: 214005 - protein, 11 aa, Homo sapiens
  CDR3 for alpha chain variable domain of TCR clone 107003 (TRAV12-1, TRAJ3)
CVVSSASKIIF

SEQ ID NO: 214006 - protein, 15 aa, Homo sapiens
  CDR3 for beta chain variable domain of TCR clone 107003 (TRBV20-1, TRBJ2-5)
GSASGTSGGGETQYF

SEQ ID NO: 214007 - protein, 13 aa, Homo sapiens
  CDR3 for alpha chain variable domain of TCR clone 107004 (TRAV2, TRAJ40)
CAVVTSGTYNYIF

SEQ ID NO: 214008 - protein, 16 aa, Homo sapiens
  CDR3 for beta chain variable domain of TCR clone 107004 (TRBV29-1, TRBJ1-2)
CSVEANRDIANYGYTF

SEQ ID NO: 214009 - protein, 13 aa, Homo sapiens
  CDR3 for alpha chain variable domain of TCR clone 107005 (TRAV8-3, TRAJ4)
WVFYSSGYNKLIF

SEQ ID NO: 214010 - protein, 14 aa, Homo sapiens
  CDR3 for beta chain variable domain of TCR clone 107005 (TRBV7-9, TRBJ2-3)
CASSLEDGTDTQYF

SEQ ID NO: 214011 - protein, 12 aa, Homo sapiens
  CDR3 for alpha chain variable domain of TCR clone 107006 (TRAV9-2, TRAJ42)
NNYGGSQGNLIF

SEQ ID NO: 214012 - protein, 18 aa, Homo sapiens
  CDR3 for beta chain variable domain of TCR clone 107006 (TRBV4-1, TRBJ1-4)
CASSPRTGGAWTNEKLFF

SEQ ID NO: 214013 - protein, 15 aa, Homo sapiens
  CDR3 for alpha chain variable domain of TCR clone 107007 (TRAV13-2, TRAJ40)
CAENLSRQGTYKYIF

SEQ ID NO: 214014 - protein, 15 aa, Homo sapiens
  CDR3 for beta chain variable domain of TCR clone 107007 (TRBV19, TRBJ2-1)
CASSMGWNSNNEQFF

SEQ ID NO: 214015 - protein, 13 aa, Homo sapiens
  CDR3 for alpha chain variable domain of TCR clone 107008 (TRAV12-2, TRAJ39)
CAVNNNAGNMLTF

SEQ ID NO: 214016 - protein, 13 aa, Homo sapiens
  CDR3 for beta chain variable domain of TCR clone 107008 (TRBV2, TRBJ1-5)
CATAGPGNEPQHF

SEQ ID NO: 214017 - protein, 12 aa, Homo sapiens
  CDR3 for alpha chain variable domain of TCR clone 107009 (TRAV3, TRAJ20)
CAVRVPDYKLSF

SEQ ID NO: 214018 - protein, 15 aa, Homo sapiens
  CDR3 for beta chain variable domain of TCR clone 107009 (TRBV9, TRBJ1-6)
CASSVAGTGDSPLHF

SEQ ID NO: 214019 - protein, 15 aa, Homo sapiens
  CDR3 for alpha chain variable domain of TCR clone 107010 (TRAV12-3, TRAJ6)
GAMSATTGGSYIPTF

SEQ ID NO: 214020 - protein, 16 aa, Homo sapiens
  CDR3 for beta chain variable domain of TCR clone 107010 (TRBV20-1, TRBJ1-2)
CSASMGQGVANYGYTF

SEQ ID NO: 214021 - protein, 16 aa, Homo sapiens
  CDR3 for alpha chain variable domain of TCR clone 107011 (TRAV25, TRAJ24)
CAQRRGTTDSWGKLQL

SEQ ID NO: 214022 - protein, 14 aa, Homo sapiens
  CDR3 for beta chain variable domain of TCR clone 107011 (TRBV6-6, TRBJ1-5)
CASSYGPANQPQHF

SEQ ID NO: 214023 - protein, 15 aa, Homo sapiens
  CDR3 for alpha chain variable domain of TCR clone 107012 (TRAV3, TRAJ22)
CAVRDRGGSARQLTF

SEQ ID NO: 214024 - protein, 14 aa, Homo sapiens
  CDR3 for beta chain variable domain of TCR clone 107012 (TRBV7-2, TRBJ2-2)
CASSLAPNTGELFF

SEQ ID NO: 214025 - protein, 13 aa, Homo sapiens
  CDR3 for alpha chain variable domain of TCR clone 107013 (TRAV13-1, TRAJ9)
CAASGTGGCKTIF

SEQ ID NO: 214026 - protein, 13 aa, Homo sapiens
  CDR3 for beta chain variable domain of TCR clone 107013 (TRBV12-4, TRBJ2-7)
CASSLERVREQYF

SEQ ID NO: 214027 - protein, 12 aa, Homo sapiens
  CDR3 for alpha chain variable domain of TCR clone 107014 (TRAV13-1, TRAJ21)
RAAKEGFNKFYF

SEQ ID NO: 214028 - protein, 18 aa, Homo sapiens
  CDR3 for beta chain variable domain of TCR clone 107014 (TRBV20-1, TRBJ2-6)
CSAETTPTHGSGANVLTF

SEQ ID NO: 214029 - protein, 15 aa, Homo sapiens
  CDR3 for alpha chain variable domain of TCR clone 107015 (TRAV26-1, TRAJ37)
CIVKTGPSNTGKLIF

SEQ ID NO: 214030 - protein, 12 aa, Homo sapiens
  CDR3 for beta chain variable domain of TCR clone 107015 (TRBV7-8, TRBJ2-7)
CASSLGDREQYF

SEQ ID NO: 214031 - protein, 16 aa, Homo sapiens
  CDR3 for alpha chain variable domain of TCR clone 107016 (TRAV16, TRAJ4)
CALSRMFSGGYNKLIF

SEQ ID NO: 214032 - protein, 16 aa, Homo sapiens
  CDR3 for beta chain variable domain of TCR clone 107016 (TRBV7-9, TRBJ1-2)
CASSLGFSSGEDGYTF

SEQ ID NO: 214033 - protein, 13 aa, Homo sapiens
  CDR3 for alpha chain variable domain of TCR clone 107017 (TRAV13-1, TRAJ5)
CAARVTGRRALNF

SEQ ID NO: 214034 - protein, 15 aa, Homo sapiens
  CDR3 for beta chain variable domain of TCR clone 107017 (TRBV7-9, TRBJ2-7)
CASSPGGGLTYEQYF

SEQ ID NO: 214035 - protein, 15 aa, Homo sapiens
  CDR3 for alpha chain variable domain of TCR clone 107018 (TRAV8-3, TRAJ27)
CAVGPSKTNAGKSTF

SEQ ID NO: 214036 - protein, 13 aa, Homo sapiens
  CDR3 for beta chain variable domain of TCR clone 107018 (TRBV19, TRBJ1-5)
CASSMRGYQPQHF

SEQ ID NO: 214037 - protein, 14 aa, Homo sapiens
  CDR3 for alpha chain variable domain of TCR clone 107019 (TRAV13-1, TRAJ40)
CAASMTSGTYKYIF

SEQ ID NO: 214038 - protein, 20 aa, Homo sapiens
  CDR3 for beta chain variable domain of TCR clone 107019 (TRBV7-8, TRBJ2-2)
CASSHLFPGPTIHITGELFF

SEQ ID NO: 214039 - protein, 16 aa, Homo sapiens
  CDR3 for alpha chain variable domain of TCR clone 107020 (TRAV30, TRAJ24)
CGPEIVGADSWGKFQF

SEQ ID NO: 214040 - protein, 15 aa, Homo sapiens
  CDR3 for beta chain variable domain of TCR clone 107020 (TRBV7-9, TRBJ1-4)
CASSARTGGNEKLFF

SEQ ID NO: 214041 - protein, 11 aa, Homo sapiens
  CDR3 for alpha chain variable domain of TCR clone 107021 (TRAV17, TRAJ31)
CATSKNARLMF

SEQ ID NO: 214042 - protein, 16 aa, Homo sapiens
  CDR3 for beta chain variable domain of TCR clone 107021 (TRBV7-8, TRBJ2-4)
CASSAERTLAKNIQYF

SEQ ID NO: 214043 - protein, 12 aa, Homo sapiens
  CDR3 for alpha chain variable domain of TCR clone 107022 (TRAV3, TRAJ29)
CAALPGNTPLVF

SEQ ID NO: 214044 - protein, 15 aa, Homo sapiens
  CDR3 for beta chain variable domain of TCR clone 107022 (TRBV7-9, TRBJ1-5)
CASSQGHQPNQPQHF

SEQ ID NO: 214045 - protein, 20 aa, Homo sapiens
  CDR3 for alpha chain variable domain of TCR clone 107023 (TRAV26-1, TRAJ47)
CCVLLHRQSSFTEYGNKLVF

SEQ ID NO: 214046 - protein, 14 aa, Homo sapiens
  CDR3 for beta chain variable domain of TCR clone 107023 (TRBV7-2, TRBJ1-2)
CASSRGGTNYGYTF

SEQ ID NO: 214047 - protein, 15 aa, Homo sapiens
  CDR3 for alpha chain variable domain of TCR clone 107024 (TRAV17, TRAJ23)
CATDAEDNQGGKLIF

SEQ ID NO: 214048 - protein, 15 aa, Homo sapiens
  CDR3 for beta chain variable domain of TCR clone 107024 (TRBV7-9, TRBJ1-6)
CASSSPGRGNSPLHF

SEQ ID NO: 214049 - protein, 16 aa, Homo sapiens
  CDR3 for alpha chain variable domain of TCR clone 107025 (TRAV21, TRAJ52)
CAVTNAGGTSYGKLTF

SEQ ID NO: 214050 - protein, 14 aa, Homo sapiens
  CDR3 for beta chain variable domain of TCR clone 107025 (TRBV7-6, TRBJ2-3)
CASSLGTVTDTQYF

SEQ ID NO: 214051 - protein, 18 aa, Homo sapiens
  CDR3 for alpha chain variable domain of TCR clone 107026 (TRAV1-2, TRAJ18)
CAVRDMGDRGSTLVRLYF

SEQ ID NO: 214052 - protein, 16 aa, Homo sapiens
  CDR3 for beta chain variable domain of TCR clone 107026 (TRBV29-1, TRBJ1-2)
CSVEANRDIANYGYTF

SEQ ID NO: 214053 - protein, 14 aa, Homo sapiens
  CDR3 for alpha chain variable domain of TCR clone 107027 (TRAV1-2, TRAJ16)
CAVNRFSDGQKLLF

SEQ ID NO: 214054 - protein, 13 aa, Homo sapiens
  CDR3 for beta chain variable domain of TCR clone 107027 (TRBV7-9, TRBJ1-2)
CASILKQNYGYTF

SEQ ID NO: 214055 - protein, 12 aa, Homo sapiens
  CDR3 for alpha chain variable domain of TCR clone 107028 (TRAV17, TRAJ57)
CATDGGSEKLVF

SEQ ID NO: 214056 - protein, 14 aa, Homo sapiens
  CDR3 for beta chain variable domain of TCR clone 107028 (TRBV7-2, TRBJ2-7)
CASSPKTSFYEQYF

SEQ ID NO: 214057 - protein, 10 aa, Homo sapiens
  CDR3 for alpha chain variable domain of TCR clone 107029 (TRAV12-1, TRAJ37)
ARGNTGELIF

SEQ ID NO: 214058 - protein, 14 aa, Homo sapiens
  CDR3 for beta chain variable domain of TCR clone 107029 (TRBV7-2, TRBJ2-3)
CQQLRTGGTDTQYF

SEQ ID NO: 214059 - protein, 15 aa, Homo sapiens
  CDR3 for alpha chain variable domain of TCR clone 107030 (TRAV25, TRAJ52)
CAGRPGGTSYGKQTF

SEQ ID NO: 214060 - protein, 17 aa, Homo sapiens
  CDR3 for beta chain variable domain of TCR clone 107030 (TRBV7-8, TRBJ2-6)
CASSAGTGGAGANVLTF

SEQ ID NO: 214061 - protein, 14 aa, Homo sapiens
  CDR3 for alpha chain variable domain of TCR clone 107031 (TRAV12-2, TRAJ40)
CAVKIPSGTYKYIF

SEQ ID NO: 214062 - protein, 14 aa, Homo sapiens
  CDR3 for beta chain variable domain of TCR clone 107031 (TRBV7-2, TRBJ2-7)
CASSPKSSFYEQYF

SEQ ID NO: 214063 - protein, 10 aa, Homo sapiens
  CDR3 for alpha chain variable domain of TCR clone 107032 (TRAV12-2, TRAJ52)
CAANRWWYYL

SEQ ID NO: 214064 - protein, 13 aa, Homo sapiens
  CDR3 for beta chain variable domain of TCR clone 107032 (TRBV15, TRBJ2-7)
CATSTTGHYEQYF

SEQ ID NO: 214065 - protein, 14 aa, Homo sapiens
  CDR3 for alpha chain variable domain of TCR clone 107033 (TRAV20, TRAJ37)
CAVQSSSNTGKLIF

SEQ ID NO: 214066 - protein, 14 aa, Homo sapiens
  CDR3 for beta chain variable domain of TCR clone 107033 (TRBV4-1, TRBJ2-2)
CASSQAVNTGELFF

SEQ ID NO: 214067 - protein, 12 aa, Homo sapiens
  CDR3 for alpha chain variable domain of TCR clone 107034 (TRAV21, TRAJ31)
CILAGNNARLMF

SEQ ID NO: 214068 - protein, 16 aa, Homo sapiens
  CDR3 for beta chain variable domain of TCR clone 107034 (TRBV27, TRBJ2-5)
CASSFGPGGTKETQYF

SEQ ID NO: 214069 - protein, 14 aa, Homo sapiens
  CDR3 for alpha chain variable domain of TCR clone 107035 (TRAV13-2, TRAJ17)
CAENPKAAGNKLTF

SEQ ID NO: 214070 - protein, 14 aa, Homo sapiens
  CDR3 for beta chain variable domain of TCR clone 107035 (TRBV4-1, TRBJ2-2)
CASSQAVNTGELFF

SEQ ID NO: 214071 - protein, 14 aa, Homo sapiens
  CDR3 for alpha chain variable domain of TCR clone 107036 (TRAV8-6, TRAJ12)
CAVKAADSSYKLIF

SEQ ID NO: 214072 - protein, 15 aa, Homo sapiens
  CDR3 for beta chain variable domain of TCR clone 107036 (TRBV5-1, TRBJ2-5)
CASSLGLAEQATQYF

SEQ ID NO: 214073 - protein, 14 aa, Homo sapiens
  CDR3 for alpha chain variable domain of TCR clone 107037 (TRAV9-2, TRAJ38)
CALSRAGNNRKLIW

SEQ ID NO: 214074 - protein, 13 aa, Homo sapiens
  CDR3 for beta chain variable domain of TCR clone 107037 (TRBV14, TRBJ1-1)
CASSQEAGTEAFF

SEQ ID NO: 214075 - protein, 17 aa, Homo sapiens
  CDR3 for alpha chain variable domain of TCR clone 107038 (TRAV3, TRAJ6)
CAVRDGPRAGGSYIPTF

SEQ ID NO: 214076 - protein, 14 aa, Homo sapiens
  CDR3 for beta chain variable domain of TCR clone 107038 (TRBV12-5, TRBJ2-5)
CASCSRTHQETQYF

SEQ ID NO: 214077 - protein, 17 aa, Homo sapiens
  CDR3 for alpha chain variable domain of TCR clone 107039 (TRAV3, TRAJ13)
RAVRDMRRTGGYQKVTF

SEQ ID NO: 214078 - protein, 14 aa, Homo sapiens
  CDR3 for beta chain variable domain of TCR clone 107039 (TRBV5-1, TRBJ2-7)
CASSLTGSGYEQYF

SEQ ID NO: 214079 - protein, 16 aa, Homo sapiens
  CDR3 for alpha chain variable domain of TCR clone 107040 (TRAV3, TRAJ5)
CAVRNLMDTGRRALTF

SEQ ID NO: 214080 - protein, 12 aa, Homo sapiens
  CDR3 for beta chain variable domain of TCR clone 107040 (TRBV14, TRBJ2-5)
CASSQLKETQYF

SEQ ID NO: 214081 - protein, 15 aa, Homo sapiens
  CDR3 for alpha chain variable domain of TCR clone 107041 (TRAV17, TRAJ56)
CATEPSTGANSKLTF

SEQ ID NO: 214082 - protein, 14 aa, Homo sapiens
  CDR3 for beta chain variable domain of TCR clone 107041 (TRBV19, TRBJ2-1)
CASPTFVLSGEQFF

SEQ ID NO: 214083 - protein, 17 aa, Homo sapiens
  CDR3 for alpha chain variable domain of TCR clone 107042 (TRAV3, TRAJ42)
CAVRDRDYGGSQGNLIF

SEQ ID NO: 214084 - protein, 16 aa, Homo sapiens
  CDR3 for beta chain variable domain of TCR clone 107042 (TRBV7-9, TRBJ2-1)
CASSDVAGGSYNEQFF

SEQ ID NO: 214085 - protein, 15 aa, Homo sapiens
  CDR3 for alpha chain variable domain of TCR clone 107043 (TRAV35, TRAJ40)
CAGQLGTSGTYKYIF

SEQ ID NO: 214086 - protein, 14 aa, Homo sapiens
  CDR3 for beta chain variable domain of TCR clone 107043 (TRBV7-3, TRBJ2-1)
CASSLAGGTYEQFF

SEQ ID NO: 214087 - protein, 12 aa, Homo sapiens
  CDR3 for alpha chain variable domain of TCR clone 107044 (TRAV8-1, TRAJ6)
CASSGGSYIPTF

SEQ ID NO: 214088 - protein, 12 aa, Homo sapiens
  CDR3 for beta chain variable domain of TCR clone 107044 (TRBV19, TRBJ1-1)
CASMNRYAEAFF

SEQ ID NO: 214089 - protein, 16 aa, Homo sapiens
  CDR3 for alpha chain variable domain of TCR clone 107045 (TRAV4, TRAJ9)
CLVGVPNRPGGFKTIF

SEQ ID NO: 214090 - protein, 16 aa, Homo sapiens
  CDR3 for beta chain variable domain of TCR clone 107045 (TRBV28, TRBJ1-4)
CASSPPYRGRSEKLFF

SEQ ID NO: 214091 - protein, 14 aa, Homo sapiens
  CDR3 for alpha chain variable domain of TCR clone 107046 (TRAV2, TRAJ9)
CAVEDRSGGFKTIF

SEQ ID NO: 214092 - protein, 14 aa, Homo sapiens
  CDR3 for beta chain variable domain of TCR clone 107046 (TRBV11-2, TRBJ1-2)
CASSLGTANYGYTF

SEQ ID NO: 214093 - protein, 11 aa, Homo sapiens
  CDR3 for alpha chain variable domain of TCR clone 107047 (TRAV2, TRAJ33)
RAVDSNYQLIW

SEQ ID NO: 214094 - protein, 12 aa, Homo sapiens
  CDR3 for beta chain variable domain of TCR clone 107047 (TRBV11-2, TRBJ2-2)
CASSLGGGELFF

SEQ ID NO: 214095 - protein, 13 aa, Homo sapiens
  CDR3 for alpha chain variable domain of TCR clone 107048 (TRAV1-2, TRAJ9)
CAVLNTGGLKTIF

SEQ ID NO: 214096 - protein, 17 aa, Homo sapiens
  CDR3 for beta chain variable domain of TCR clone 107048 (TRBV13, TRBJ2-3)
CASSLSRVAGGRNTQYF

SEQ ID NO: 214097 - protein, 17 aa, Homo sapiens
  CDR3 for alpha chain variable domain of TCR clone 107049 (TRAV3, TRAJ6)
CAVRDGPRAGGSYIPTF

SEQ ID NO: 214098 - protein, 16 aa, Homo sapiens
  CDR3 for beta chain variable domain of TCR clone 107049 (TRBV27, TRBJ2-2)
CASSCRGLVRTGELFF

SEQ ID NO: 214099 - protein, 14 aa, Homo sapiens
  CDR3 for alpha chain variable domain of TCR clone 107050 (TRAV13-1, TRAJ9)
CAASALTGGFKTIF

SEQ ID NO: 214100 - protein, 13 aa, Homo sapiens
  CDR3 for beta chain variable domain of TCR clone 107050 (TRBV20-1, TRBJ1-1)
CSAGTVGKAEAFF

SEQ ID NO: 214101 - protein, 14 aa, Homo sapiens
  CDR3 for alpha chain variable domain of TCR clone 107051 (TRAV26-1, TRAJ34)
CIVRDAYNTDKLIF

SEQ ID NO: 214102 - protein, 15 aa, Homo sapiens
  CDR3 for beta chain variable domain of TCR clone 107051 (TRBV20-1, TRBJ2-7)
CSARVPAAYFYEQYF

SEQ ID NO: 214103 - protein, 15 aa, Homo sapiens
  CDR3 for alpha chain variable domain of TCR clone 107052 (TRAV8-3, TRAJ27)
CAVGPSKTNAGKSTF

SEQ ID NO: 214104 - protein, 15 aa, Homo sapiens
  CDR3 for beta chain variable domain of TCR clone 107052 (TRBV7-2, TRBJ2-1)
CPSSSGLAGGNEQFF

SEQ ID NO: 214105 - protein, 18 aa, Homo sapiens
  CDR3 for alpha chain variable domain of TCR clone 107053 (TRAV26-1, TRAJ52)
CIVRVEGAGGTSYGKLTF

SEQ ID NO: 214106 - protein, 13 aa, Homo sapiens
  CDR3 for beta chain variable domain of TCR clone 107053 (TRBV7-2, TRBJ2-1)
CASNRDRWNEQFF

SEQ ID NO: 214107 - protein, 23 aa, Homo sapiens
  CDR3 for alpha chain variable domain of TCR clone 107054 (TRAV8-3, )
CAVVTTRIPDIQNPDPAVYHLRD

SEQ ID NO: 214108 - protein, 14 aa, Homo sapiens
  CDR3 for beta chain variable domain of TCR clone 107054 (TRBV11-2, TRBJ2-7)
CASSPSTTSYEQYF

SEQ ID NO: 214109 - protein, 15 aa, Homo sapiens
  CDR3 for alpha chain variable domain of TCR clone 107055 (TRAV26-1, TRAJ44)
CIVRIGTGTDSKLTL

SEQ ID NO: 214110 - protein, 15 aa, Homo sapiens
  CDR3 for beta chain variable domain of TCR clone 107055 (TRBV7-6, TRBJ2-1)
CASSSLAGEGNEQFF

SEQ ID NO: 214111 - protein, 17 aa, Homo sapiens
  CDR3 for alpha chain variable domain of TCR clone 107056 (TRAV38-1, TRAJ28)
CAFIKPTSGAGSYQLTF

SEQ ID NO: 214112 - protein, 15 aa, Homo sapiens
  CDR3 for beta chain variable domain of TCR clone 107056 (TRBV5-1, TRBJ2-4)
CASSLGGGGSYIQYF

SEQ ID NO: 214113 - protein, 17 aa, Homo sapiens
  CDR3 for alpha chain variable domain of TCR clone 107057 (TRAV1-1, TRAJ28)
CAVDPAYSGAGSYQLTF

SEQ ID NO: 214114 - protein, 14 aa, Homo sapiens
  CDR3 for beta chain variable domain of TCR clone 107057 (TRBV19, TRBJ2-1)
CASPTVVLSGEQFF

SEQ ID NO: 214115 - protein, 15 aa, Homo sapiens
  CDR3 for alpha chain variable domain of TCR clone 107058 (TRAV13-2, TRAJ45)
CAEHHSGGGADGPTF

SEQ ID NO: 214116 - protein, 15 aa, Homo sapiens
  CDR3 for beta chain variable domain of TCR clone 107058 (TRBV7-2, TRBJ2-7)
CASSLALGSAYEQYF

SEQ ID NO: 214117 - protein, 13 aa, Homo sapiens
  CDR3 for alpha chain variable domain of TCR clone 107059 (TRAV35, TRAJ57)
CAGSQGGSEKLVF

SEQ ID NO: 214118 - protein, 14 aa, Homo sapiens
  CDR3 for beta chain variable domain of TCR clone 107059 (TRBV25-1, TRBJ1-1)
CASTHLGGYTEAFF

SEQ ID NO: 214119 - protein, 14 aa, Homo sapiens
  CDR3 for alpha chain variable domain of TCR clone 107060 (TRAV12-3, TRAJ56)
CAMSATGANSKLTF

SEQ ID NO: 214120 - protein, 17 aa, Homo sapiens
  CDR3 for beta chain variable domain of TCR clone 107060 (TRBV20-1, TRBJ2-3)
CSASLLGRGGSADTQYF

SEQ ID NO: 214121 - protein, 16 aa, Homo sapiens
  CDR3 for alpha chain variable domain of TCR clone 107061 (TRAV16, TRAJ4)
CALSRMFSGGYNKLIF

SEQ ID NO: 214122 - protein, 19 aa, Homo sapiens
  CDR3 for beta chain variable domain of TCR clone 107061 (TRBV28, TRBJ2-7)
YASSYSGTSRLGWVYEQYF

SEQ ID NO: 214123 - protein, 22 aa, Homo sapiens
  CDR3 for alpha chain variable domain of TCR clone 107062 (TRAV27, TRAJ38)
CAARRNAGNNHIHNPDPAVYQL

SEQ ID NO: 214124 - protein, 13 aa, Homo sapiens
  CDR3 for beta chain variable domain of TCR clone 107062 (TRBV12-5, TRBJ2-3)
CASGDRQSDTQYF

SEQ ID NO: 214125 - protein, 14 aa, Homo sapiens
  CDR3 for alpha chain variable domain of TCR clone 107063 (TRAV1-2, TRAJ8)
CAVREDTGFQKLVF

SEQ ID NO: 214126 - protein, 14 aa, Homo sapiens
  CDR3 for beta chain variable domain of TCR clone 107063 (TRBV7-9, TRBJ2-5)
CASSLDTAQETQYF

SEQ ID NO: 214127 - protein, 14 aa, Homo sapiens
  CDR3 for alpha chain variable domain of TCR clone 107064 (TRAV23/DV6, TRAJ57)
CAASNQGGSEKMVF

SEQ ID NO: 214128 - protein, 13 aa, Homo sapiens
  CDR3 for beta chain variable domain of TCR clone 107064 (TRBV11-2, TRBJ2-7)
CASSSYPSYEQYF

SEQ ID NO: 214129 - protein, 14 aa, Homo sapiens
  CDR3 for alpha chain variable domain of TCR clone 107065 (TRAV1-2, TRAJ16)
CAVNRFSDGQKLLF

SEQ ID NO: 214130 - protein, 14 aa, Homo sapiens
  CDR3 for beta chain variable domain of TCR clone 107065 (TRBV5-1, TRBJ1-2)
CASSVDSTNYGYTF

SEQ ID NO: 214131 - protein, 12 aa, Homo sapiens
  CDR3 for alpha chain variable domain of TCR clone 107066 (TRAV35, TRAJ34)
CAGRGTPTSSSF

SEQ ID NO: 214132 - protein, 14 aa, Homo sapiens
  CDR3 for beta chain variable domain of TCR clone 107066 (TRBV5-1, TRBJ2-7)
CASSRGESLYEQYF

SEQ ID NO: 214133 - protein, 14 aa, Homo sapiens
  CDR3 for alpha chain variable domain of TCR clone 107067 (TRAV1-2, TRAJ17)
CALRRGAAGNKLTL

SEQ ID NO: 214134 - protein, 13 aa, Homo sapiens
  CDR3 for beta chain variable domain of TCR clone 107067 (TRBV9, TRBJ2-1)
CASSVGQGGEQFF

SEQ ID NO: 214135 - protein, 13 aa, Homo sapiens
  CDR3 for alpha chain variable domain of TCR clone 107068 (TRAV13-2, TRAJ22)
CLGWISSARQLTF

SEQ ID NO: 214136 - protein, 13 aa, Homo sapiens
  CDR3 for beta chain variable domain of TCR clone 107068 (TRBV7-3, TRBJ1-1)
CASSQDWGAEAFF

SEQ ID NO: 214137 - protein, 14 aa, Homo sapiens
  CDR3 for alpha chain variable domain of TCR clone 107069 (TRAV17, TRAJ34)
CATDSLEGTDKLIF

SEQ ID NO: 214138 - protein, 15 aa, Homo sapiens
  CDR3 for beta chain variable domain of TCR clone 107069 (TRBV6-3, TRBJ2-7)
CASSSPGTVFYEQYF

SEQ ID NO: 214139 - protein, 17 aa, Homo sapiens
  CDR3 for alpha chain variable domain of TCR clone 107070 (TRAV3, TRAJ6)
CSVRDGPRAGGSYIPTL

SEQ ID NO: 214140 - protein, 14 aa, Homo sapiens
  CDR3 for beta chain variable domain of TCR clone 107070 (TRBV7-2, TRBJ2-7)
CASSPKTSFYEQYF

SEQ ID NO: 214141 - protein, 13 aa, Homo sapiens
  CDR3 for alpha chain variable domain of TCR clone 107071 (TRAV2, TRAJ40)
CAVVTSGTYKYIF

SEQ ID NO: 214142 - protein, 14 aa, Homo sapiens
  CDR3 for beta chain variable domain of TCR clone 107071 (TRBV15, TRBJ2-3)
CATRSGTSTDTQYF

SEQ ID NO: 214143 - protein, 13 aa, Homo sapiens
  CDR3 for alpha chain variable domain of TCR clone 107072 (TRAV26-2, TRAJ43)
CILRAVNNNDMRF

SEQ ID NO: 214144 - protein, 16 aa, Homo sapiens
  CDR3 for beta chain variable domain of TCR clone 107072 (TRBV20-1, TRBJ1-2)
CSASMGQGVANYGYTF

SEQ ID NO: 214145 - protein, 12 aa, Homo sapiens
  CDR3 for alpha chain variable domain of TCR clone 107073 (TRAV26-1, TRAJ26)
CIVYNYGQNFVF

SEQ ID NO: 214146 - protein, 15 aa, Homo sapiens
  CDR3 for beta chain variable domain of TCR clone 107073 (TRBV7-2, TRBJ2-3)
CASSVRGGSTDTQYF

SEQ ID NO: 214147 - protein, 15 aa, Homo sapiens
  CDR3 for alpha chain variable domain of TCR clone 107074 (TRAV3, TRAJ3)
CAVRDRRSSASRIIF

SEQ ID NO: 214148 - protein, 13 aa, Homo sapiens
  CDR3 for beta chain variable domain of TCR clone 107074 (TRBV9, TRBJ2-5)
CASSPAGLGTQYF

SEQ ID NO: 214149 - protein, 17 aa, Homo sapiens
  CDR3 for alpha chain variable domain of TCR clone 107075 (TRAV13-1, TRAJ28)
CVASPPYSGAGSYQLTF

SEQ ID NO: 214150 - protein, 12 aa, Homo sapiens
  CDR3 for beta chain variable domain of TCR clone 107075 (TRBV11-2, TRBJ2-2)
CASSLGGGELFF

SEQ ID NO: 214151 - protein, 11 aa, Homo sapiens
  CDR3 for alpha chain variable domain of TCR clone 107076 (TRAV1-2, TRAJ20)
CAVANDYKLSF

SEQ ID NO: 214152 - protein, 13 aa, Homo sapiens
  CDR3 for beta chain variable domain of TCR clone 107076 (TRBV5-5, TRBJ2-3)
CASSWTGGDTQYF

SEQ ID NO: 214153 - protein, 15 aa, Homo sapiens
  CDR3 for alpha chain variable domain of TCR clone 107077 (TRAV8-4, TRAJ47)
CAVSDPEEYGNKLVF

SEQ ID NO: 214154 - protein, 15 aa, Homo sapiens
  CDR3 for beta chain variable domain of TCR clone 107077 (TRBV11-2, TRBJ2-1)
CASSLGPDSYNERFF

SEQ ID NO: 214155 - protein, 12 aa, Homo sapiens
  CDR3 for alpha chain variable domain of TCR clone 107078 (TRAV13-2, TRAJ23)
CAERHRGGKLIF

SEQ ID NO: 214156 - protein, 15 aa, Homo sapiens
  CDR3 for beta chain variable domain of TCR clone 107078 (TRBV5-1, TRBJ2-7)
CASSLMTSGSNEQYF

SEQ ID NO: 214157 - protein, 15 aa, Homo sapiens
  CDR3 for alpha chain variable domain of TCR clone 107079 (TRAV12-2, TRAJ53)
CAVNGGGGSNYKLTF

SEQ ID NO: 214158 - protein, 12 aa, Homo sapiens
  CDR3 for beta chain variable domain of TCR clone 107079 (TRBV11-2, TRBJ2-1)
CAGSPGNNEQFF

SEQ ID NO: 214159 - protein, 13 aa, Homo sapiens
  CDR3 for alpha chain variable domain of TCR clone 107080 (TRAV27, TRAJ49)
CAPRPYTGNQVYF

SEQ ID NO: 214160 - protein, 18 aa, Homo sapiens
  CDR3 for beta chain variable domain of TCR clone 107080 (TRBV7-3, TRBJ2-5)
CASSLGGAAQGRWETQYF

SEQ ID NO: 214161 - protein, 17 aa, Homo sapiens
  CDR3 for alpha chain variable domain of TCR clone 107081 (TRAV27, TRAJ42)
CAERVIYYGGSQGNLIF

SEQ ID NO: 214162 - protein, 13 aa, Homo sapiens
  CDR3 for beta chain variable domain of TCR clone 107081 (TRBV2, TRBJ2-7)
CASSVGGSGEQYF

SEQ ID NO: 214163 - protein, 14 aa, Homo sapiens
  CDR3 for alpha chain variable domain of TCR clone 107082 (TRAV17, TRAJ57)
CATDASGGSEKLVF

SEQ ID NO: 214164 - protein, 14 aa, Homo sapiens
  CDR3 for beta chain variable domain of TCR clone 107082 (TRBV4-2, TRBJ2-1)
CASGLERAYNEQFF

SEQ ID NO: 214165 - protein, 15 aa, Homo sapiens
  CDR3 for alpha chain variable domain of TCR clone 107083 (TRAV41, TRAJ45)
CAASHSGGGADGLTF

SEQ ID NO: 214166 - protein, 14 aa, Homo sapiens
  CDR3 for beta chain variable domain of TCR clone 107083 (TRBV12-5, TRBJ2-5)
CASGSRTHQETQYF

SEQ ID NO: 214167 - protein, 13 aa, Homo sapiens
  CDR3 for alpha chain variable domain of TCR clone 107084 (TRAV8-4, TRAJ49)
CAVRTLTGNQFYF

SEQ ID NO: 214168 - protein, 14 aa, Homo sapiens
  CDR3 for beta chain variable domain of TCR clone 107084 (TRBV7-2, TRBJ1-1)
CASSFLTGTTEAFF

SEQ ID NO: 214169 - protein, 11 aa, Homo sapiens
  CDR3 for alpha chain variable domain of TCR clone 107085 (TRAV1-2, TRAJ20)
CAVANDYKLSF

SEQ ID NO: 214170 - protein, 17 aa, Homo sapiens
  CDR3 for beta chain variable domain of TCR clone 107085 (TRBV10-3, TRBJ1-1)
CAISESGTGGGTTEAFF

SEQ ID NO: 214171 - protein, 15 aa, Homo sapiens
  CDR3 for alpha chain variable domain of TCR clone 107086 (TRAV2, TRAJ15)
CAVEDRKKAGTALIF

SEQ ID NO: 214172 - protein, 17 aa, Homo sapiens
  CDR3 for beta chain variable domain of TCR clone 107086 (TRBV19, TRBJ2-6)
CASSTGQVFSGANVLTF

SEQ ID NO: 214173 - protein, 12 aa, Homo sapiens
  CDR3 for alpha chain variable domain of TCR clone 107087 (TRAV1-1, TRAJ9)
CAVDTGGFKTIF

SEQ ID NO: 214174 - protein, 14 aa, Homo sapiens
  CDR3 for beta chain variable domain of TCR clone 107087 (TRBV20-1, TRBJ2-5)
CSARDGRAGETQYF

SEQ ID NO: 214175 - protein, 14 aa, Homo sapiens
  CDR3 for alpha chain variable domain of TCR clone 107088 (TRAV12-2, TRAJ15)
CAPHTGQAGTALIF

SEQ ID NO: 214176 - protein, 16 aa, Homo sapiens
  CDR3 for beta chain variable domain of TCR clone 107088 (TRBV4-1, TRBJ2-3)
CASSQSTSGAEDTQYF

SEQ ID NO: 214177 - protein, 14 aa, Homo sapiens
  CDR3 for alpha chain variable domain of TCR clone 107089 (TRAV12-2, TRAJ17)
CAALFKAAGNKLPF

SEQ ID NO: 214178 - protein, 16 aa, Homo sapiens
  CDR3 for beta chain variable domain of TCR clone 107089 (TRBV20-1, TRBJ2-2)
CSASASGIPGAGELFF

SEQ ID NO: 214179 - protein, 14 aa, Homo sapiens
  CDR3 for alpha chain variable domain of TCR clone 107090 (TRAV1-2, TRAJ6)
CAVSLSGGSYIPSF

SEQ ID NO: 214180 - protein, 15 aa, Homo sapiens
  CDR3 for beta chain variable domain of TCR clone 107090 (TRBV28, TRBJ2-7)
CASSPGGRGFYEQYF

SEQ ID NO: 214181 - protein, 14 aa, Homo sapiens
  CDR3 for alpha chain variable domain of TCR clone 107091 (TRAV12-3, TRAJ56)
CAMSVTGDNSKLTF

SEQ ID NO: 214182 - protein, 17 aa, Homo sapiens
  CDR3 for beta chain variable domain of TCR clone 107091 (TRBV20-1, TRBJ2-3)
CSASLLGRGGSADTQYF

SEQ ID NO: 214183 - protein, 14 aa, Homo sapiens
  CDR3 for alpha chain variable domain of TCR clone 107092 (TRAV1-2, TRAJ16)
FAVNRFSDGQKLLF

SEQ ID NO: 214184 - protein, 16 aa, Homo sapiens
  CDR3 for beta chain variable domain of TCR clone 107092 (TRBV19, TRBJ2-3)
CASSPEWDRGTDTQYF

SEQ ID NO: 214185 - protein, 18 aa, Homo sapiens
  CDR3 for alpha chain variable domain of TCR clone 107093 (TRAV26-1, TRAJ22)
CIVRVALISSGSARQLTF

SEQ ID NO: 214186 - protein, 17 aa, Homo sapiens
  CDR3 for beta chain variable domain of TCR clone 107093 (TRBV11-2, TRBJ2-1)
CASSLYPPGVEYNEQFF

SEQ ID NO: 214187 - protein, 10 aa, Homo sapiens
  CDR3 for alpha chain variable domain of TCR clone 107094 (TRAV23/DV6, TRAJ57)
CAASSTLSQG

SEQ ID NO: 214188 - protein, 13 aa, Homo sapiens
  CDR3 for beta chain variable domain of TCR clone 107094 (TRBV7-2, TRBJ1-4)
CASSLAGLEKLFF

SEQ ID NO: 214189 - protein, 14 aa, Homo sapiens
  CDR3 for alpha chain variable domain of TCR clone 107095 (TRAV26-1, TRAJ34)
CIVRVAYNTDKLIF

SEQ ID NO: 214190 - protein, 15 aa, Homo sapiens
  CDR3 for beta chain variable domain of TCR clone 107095 (TRBV20-1, TRBJ2-1)
CSARVPAAYFYEQFF

SEQ ID NO: 214191 - protein, 14 aa, Homo sapiens
  CDR3 for alpha chain variable domain of TCR clone 107096 (TRAV8-4, TRAJ40)
CAVIPTSGTYKYIF

SEQ ID NO: 214192 - protein, 15 aa, Homo sapiens
  CDR3 for beta chain variable domain of TCR clone 107096 (TRBV7-2, TRBJ2-1)
CASTSASGDYNAQFF

SEQ ID NO: 214193 - protein, 13 aa, Homo sapiens
  CDR3 for alpha chain variable domain of TCR clone 107097 (TRAV1-2, TRAJ9)
CAALNTGGFKTIF

SEQ ID NO: 214194 - protein, 14 aa, Homo sapiens
  CDR3 for beta chain variable domain of TCR clone 107097 (TRBV7-9, TRBJ2-1)
CASSDNSGYNEQFF

SEQ ID NO: 214195 - protein, 12 aa, Homo sapiens
  CDR3 for alpha chain variable domain of TCR clone 107098 (TRAV12-1, TRAJ40)
GVFYSGTYKYIF

SEQ ID NO: 214196 - protein, 18 aa, Homo sapiens
  CDR3 for beta chain variable domain of TCR clone 107098 (TRBV12-4, TRBJ2-2)
CASSLVAGTRGRTGELFF

SEQ ID NO: 214197 - protein, 12 aa, Homo sapiens
  CDR3 for alpha chain variable domain of TCR clone 107099 (TRAV17, TRAJ29)
CYASSGNTPLVF

SEQ ID NO: 214198 - protein, 11 aa, Homo sapiens
  CDR3 for beta chain variable domain of TCR clone 107099 (TRBV7-8, TRBJ2-7)
CASSLSLEQYF

SEQ ID NO: 214199 - protein, 12 aa, Homo sapiens
  CDR3 for alpha chain variable domain of TCR clone 107100 (TRAV23/DV6, TRAJ24)
CAANDSWGKLQF

SEQ ID NO: 214200 - protein, 16 aa, Homo sapiens
  CDR3 for beta chain variable domain of TCR clone 107100 (TRBV12-4, TRBJ2-5)
LASSLSTSGGKETQYF

SEQ ID NO: 214201 - protein, 13 aa, Homo sapiens
  CDR3 for alpha chain variable domain of TCR clone 107101 (TRAV13-1, TRAJ5)
CAVSDTGRRALTF

SEQ ID NO: 214202 - protein, 12 aa, Homo sapiens
  CDR3 for beta chain variable domain of TCR clone 107101 (TRBV28, TRBJ2-3)
CASSLYRDTQYF

SEQ ID NO: 214203 - protein, 13 aa, Homo sapiens
  CDR3 for alpha chain variable domain of TCR clone 107102 (TRAV12-1, TRAJ29)
CLVRNSGNTPLVF

SEQ ID NO: 214204 - protein, 14 aa, Homo sapiens
  CDR3 for beta chain variable domain of TCR clone 107102 (TRBV7-2, TRBJ2-7)
CASRSQGAAYEQYF

SEQ ID NO: 214205 - protein, 16 aa, Homo sapiens
  CDR3 for alpha chain variable domain of TCR clone 107103 (TRAV16, TRAJ52)
CALSAAGGTSYGKLTF

SEQ ID NO: 214206 - protein, 19 aa, Homo sapiens
  CDR3 for beta chain variable domain of TCR clone 107103 (TRBV12-4, TRBJ1-5)
CTSVPAADRSGGSNQPQHF

SEQ ID NO: 214207 - protein, 14 aa, Homo sapiens
  CDR3 for alpha chain variable domain of TCR clone 107104 (TRAV9-2, TRAJ39)
CALYIYNTGNMLTF

SEQ ID NO: 214208 - protein, 14 aa, Homo sapiens
  CDR3 for beta chain variable domain of TCR clone 107104 (TRBV6-1, TRBJ1-3)
CASVQGGGGNTIYF

SEQ ID NO: 214209 - protein, 12 aa, Homo sapiens
  CDR3 for alpha chain variable domain of TCR clone 107105 (TRAV3, TRAJ26)
CAVRDYGQNFVF

SEQ ID NO: 214210 - protein, 16 aa, Homo sapiens
  CDR3 for beta chain variable domain of TCR clone 107105 (TRBV11-2, TRBJ1-2)
CASSPSGREVNYGYTF

SEQ ID NO: 214211 - protein, 17 aa, Homo sapiens
  CDR3 for alpha chain variable domain of TCR clone 107106 (TRAV13-1, TRAJ31)
CAPRDRLMFGDGTQLVV

SEQ ID NO: 214212 - protein, 14 aa, Homo sapiens
  CDR3 for beta chain variable domain of TCR clone 107106 (TRBV7-9, TRBJ2-1)
CASSPRDSLYEQFF

SEQ ID NO: 214213 - protein, 16 aa, Homo sapiens
  CDR3 for alpha chain variable domain of TCR clone 107107 (TRAV26-1, TRAJ37)
CIVRGDGSGNTGKLIF

SEQ ID NO: 214214 - protein, 13 aa, Homo sapiens
  CDR3 for beta chain variable domain of TCR clone 107107 (TRBV6-4, TRBJ2-1)
CASSVEREEEQFF

SEQ ID NO: 214215 - protein, 17 aa, Homo sapiens
  CDR3 for alpha chain variable domain of TCR clone 107108 (TRAV8-6, TRAJ58)
CAVSSWVGETSGSRLTF

SEQ ID NO: 214216 - protein, 15 aa, Homo sapiens
  CDR3 for beta chain variable domain of TCR clone 107108 (TRBV7-2, TRBJ1-2)
CASSPRAGWNYGYTF

SEQ ID NO: 214217 - protein, 11 aa, Homo sapiens
  CDR3 for alpha chain variable domain of TCR clone 107109 (TRAV1-1, TRAJ23)
CAARQGGKLIF

SEQ ID NO: 214218 - protein, 16 aa, Homo sapiens
  CDR3 for beta chain variable domain of TCR clone 107109 (TRBV19, TRBJ2-1)
CASSKAGPSSYNEQFF

SEQ ID NO: 214219 - protein, 15 aa, Homo sapiens
  CDR3 for alpha chain variable domain of TCR clone 107110 (TRAV3, TRAJ27)
CAVRAGGHQCRQINL

SEQ ID NO: 214220 - protein, 15 aa, Homo sapiens
  CDR3 for beta chain variable domain of TCR clone 107110 (TRBV4-1, TRBJ2-3)
CASSRGRGIPDTQYF

SEQ ID NO: 214221 - protein, 16 aa, Homo sapiens
  CDR3 for alpha chain variable domain of TCR clone 107111 (TRAV12-2, TRAJ32)
CAVNMNYGGATNKLIF

SEQ ID NO: 214222 - protein, 14 aa, Homo sapiens
  CDR3 for beta chain variable domain of TCR clone 107111 (TRBV2, TRBJ2-1)
CASSDRAYYNEQFF

SEQ ID NO: 214223 - protein, 14 aa, Homo sapiens
  CDR3 for alpha chain variable domain of TCR clone 107112 (TRAV8-1, TRAJ34)
CAVITTYNTDKPIF

SEQ ID NO: 214224 - protein, 14 aa, Homo sapiens
  CDR3 for beta chain variable domain of TCR clone 107112 (TRBV11-3, TRBJ1-3)
CASSHNGQGNTIYF

SEQ ID NO: 214225 - protein, 20 aa, Homo sapiens
  CDR3 for alpha chain variable domain of TCR clone 107113 (TRAV1-1, TRAJ4)
CLLLLRCEGFLSGGCNKLIF

SEQ ID NO: 214226 - protein, 16 aa, Homo sapiens
  CDR3 for beta chain variable domain of TCR clone 107113 (TRBV28, TRBJ1-4)
CASSPPYRGRSEKLFF

SEQ ID NO: 214227 - protein, 14 aa, Homo sapiens
  CDR3 for alpha chain variable domain of TCR clone 107114 (TRAV27, TRAJ22)
CAGVVPGSARQLTF

SEQ ID NO: 214228 - protein, 14 aa, Homo sapiens
  CDR3 for beta chain variable domain of TCR clone 107114 (TRBV25-1, TRBJ1-1)
CASTHLGGNTEAFF

SEQ ID NO: 214229 - protein, 17 aa, Homo sapiens
  CDR3 for alpha chain variable domain of TCR clone 107115 (TRAV8-1, TRAJ43)
CAVTNDMRFGAGTRLTV

SEQ ID NO: 214230 - protein, 12 aa, Homo sapiens
  CDR3 for beta chain variable domain of TCR clone 107115 (TRBV14, TRBJ2-7)
CASSSLKGEQYF

SEQ ID NO: 214231 - protein, 15 aa, Homo sapiens
  CDR3 for alpha chain variable domain of TCR clone 107116 (TRAV12-3, TRAJ11)
CAMSEENSGYSTLTF

SEQ ID NO: 214232 - protein, 13 aa, Homo sapiens
  CDR3 for beta chain variable domain of TCR clone 107116 (TRBV20-1, TRBJ1-6)
CSAPLGVGSPLHF

SEQ ID NO: 214233 - protein, 14 aa, Homo sapiens
  CDR3 for alpha chain variable domain of TCR clone 107117 (TRAV21, TRAJ45)
CAVSSGGGADGLTF

SEQ ID NO: 214234 - protein, 16 aa, Homo sapiens
  CDR3 for beta chain variable domain of TCR clone 107117 (TRBV7-3, TRBJ2-2)
CASSLKRGTLSGELFF

SEQ ID NO: 214235 - protein, 14 aa, Homo sapiens
  CDR3 for alpha chain variable domain of TCR clone 107118 (TRAV1-2, TRAJ16)
CAVNRFSDGQKLLF

SEQ ID NO: 214236 - protein, 14 aa, Homo sapiens
  CDR3 for beta chain variable domain of TCR clone 107118 (TRBV19, TRBJ2-1)
CASPTFVLSGERFF

SEQ ID NO: 214237 - protein, 13 aa, Homo sapiens
  CDR3 for alpha chain variable domain of TCR clone 107119 (TRAV21, TRAJ27)
CAARPGNAGKSTF

SEQ ID NO: 214238 - protein, 15 aa, Homo sapiens
  CDR3 for beta chain variable domain of TCR clone 107119 (TRBV27, TRBJ2-7)
CASSLFGTGLDEQYF

SEQ ID NO: 214239 - protein, 14 aa, Homo sapiens
  CDR3 for alpha chain variable domain of TCR clone 107120 (TRAV1-1, TRAJ30)
CAVRSFNRDDKIIF

SEQ ID NO: 214240 - protein, 15 aa, Homo sapiens
  CDR3 for beta chain variable domain of TCR clone 107120 (TRBV27, TRBJ1-4)
CASSAQQDLNEKLFF

SEQ ID NO: 214241 - protein, 13 aa, Homo sapiens
  CDR3 for alpha chain variable domain of TCR clone 107121 (TRAV8-4, TRAJ30)
CAVSVNRDDKIIF

SEQ ID NO: 214242 - protein, 13 aa, Homo sapiens
  CDR3 for beta chain variable domain of TCR clone 107121 (TRBV3-1, TRBJ2-2)
CASLARGPGELFF

SEQ ID NO: 214243 - protein, 13 aa, Homo sapiens
  CDR3 for alpha chain variable domain of TCR clone 107122 (TRAV3, TRAJ15)
CAVRDQAGTALIF

SEQ ID NO: 214244 - protein, 15 aa, Homo sapiens
  CDR3 for beta chain variable domain of TCR clone 107122 (TRBV11-1, TRBJ2-7)
CASSLNYGASYEQYI

SEQ ID NO: 214245 - protein, 18 aa, Homo sapiens
  CDR3 for alpha chain variable domain of TCR clone 107123 (TRAV21, TRAJ52)
CAVRPSPAGGTSYGKLTF

SEQ ID NO: 214246 - protein, 16 aa, Homo sapiens
  CDR3 for beta chain variable domain of TCR clone 107123 (TRBV4-2, TRBJ2-7)
CASSQDGVERGYEQYF

SEQ ID NO: 214247 - protein, 14 aa, Homo sapiens
  CDR3 for alpha chain variable domain of TCR clone 107124 (TRAV1-2, TRAJ8)
CAVREHTGFQKLVF

SEQ ID NO: 214248 - protein, 12 aa, Homo sapiens
  CDR3 for beta chain variable domain of TCR clone 107124 (TRBV7-8, TRBJ2-7)
CASSLGDREQYF

SEQ ID NO: 214249 - protein, 16 aa, Homo sapiens
  CDR3 for alpha chain variable domain of TCR clone 107125 (TRAV27, TRAJ13)
CAGAKSDSGGYQKVTF

SEQ ID NO: 214250 - protein, 11 aa, Homo sapiens
  CDR3 for beta chain variable domain of TCR clone 107125 (TRBV12-4, TRBJ2-3)
CASTATDTQYF

SEQ ID NO: 214251 - protein, 12 aa, Homo sapiens
  CDR3 for alpha chain variable domain of TCR clone 107126 (TRAV3, TRAJ20)
CAVSDPDYKLSF

SEQ ID NO: 214252 - protein, 13 aa, Homo sapiens
  CDR3 for beta chain variable domain of TCR clone 107126 (TRBV18, TRBJ1-1)
CASSPETKPEAFF

SEQ ID NO: 214253 - protein, 16 aa, Homo sapiens
  CDR3 for alpha chain variable domain of TCR clone 107127 (TRAV26-1, TRAJ23)
CIVRPRFYNQGGKLIF

SEQ ID NO: 214254 - protein, 15 aa, Homo sapiens
  CDR3 for beta chain variable domain of TCR clone 107127 (TRBV20-1, TRBJ1-1)
CSARGGGTLKLSLDK

SEQ ID NO: 214255 - protein, 13 aa, Homo sapiens
  CDR3 for alpha chain variable domain of TCR clone 107128 (TRAV21, TRAJ45)
CAVMGGGADGLTF

SEQ ID NO: 214256 - protein, 14 aa, Homo sapiens
  CDR3 for beta chain variable domain of TCR clone 107128 (TRBV4-3, TRBJ1-4)
CASSPLQRNETLFF

SEQ ID NO: 214257 - protein, 12 aa, Homo sapiens
  CDR3 for alpha chain variable domain of TCR clone 107129 (TRAV12-1, TRAJ40)
CVVYSGTYKYIF

SEQ ID NO: 214258 - protein, 17 aa, Homo sapiens
  CDR3 for beta chain variable domain of TCR clone 107129 (TRBV19, TRBJ2-6)
CASSTGQVFSGANVLTF

SEQ ID NO: 214259 - protein, 19 aa, Homo sapiens
  CDR3 for alpha chain variable domain of TCR clone 107130 (TRAV26-1, TRAJ52)
CIVRAHRNAGVTSYGKLTF

SEQ ID NO: 214260 - protein, 15 aa, Homo sapiens
  CDR3 for beta chain variable domain of TCR clone 107130 (TRBV12-4, TRBJ2-5)
CASSPPTGLQETQYF

SEQ ID NO: 214261 - protein, 15 aa, Homo sapiens
  CDR3 for alpha chain variable domain of TCR clone 107131 (TRAV21, TRAJ53)
CATLNSGGSNYKLTF

SEQ ID NO: 214262 - protein, 13 aa, Homo sapiens
  CDR3 for beta chain variable domain of TCR clone 107131 (TRBV12-4, TRBJ2-7)
CASSFVPAAEQYF

SEQ ID NO: 214263 - protein, 14 aa, Homo sapiens
  CDR3 for alpha chain variable domain of TCR clone 107132 (TRAV1-2, TRAJ8)
CAVREDTGFQKLVF

SEQ ID NO: 214264 - protein, 15 aa, Homo sapiens
  CDR3 for beta chain variable domain of TCR clone 107132 (TRBV20-1, TRBJ2-5)
CSAEGTGGLQETQYF

SEQ ID NO: 214265 - protein, 15 aa, Homo sapiens
  CDR3 for alpha chain variable domain of TCR clone 107133 (TRAV12-2, TRAJ8)
CPVREENTGFQKLVF

SEQ ID NO: 214266 - protein, 16 aa, Homo sapiens
  CDR3 for beta chain variable domain of TCR clone 107133 (TRBV7-3, TRBJ2-2)
CASSLKRGTLSGELFF

SEQ ID NO: 214267 - protein, 12 aa, Homo sapiens
  CDR3 for alpha chain variable domain of TCR clone 107134 (TRAV27, TRAJ9)
CAGESGGFKTIF

SEQ ID NO: 214268 - protein, 14 aa, Homo sapiens
  CDR3 for beta chain variable domain of TCR clone 107134 (TRBV4-1, TRBJ2-2)
CASSQAVNTGELFF

SEQ ID NO: 214269 - protein, 13 aa, Homo sapiens
  CDR3 for alpha chain variable domain of TCR clone 107135 (TRAV17, TRAJ4)
CATKSGGYNKLIL

SEQ ID NO: 214270 - protein, 14 aa, Homo sapiens
  CDR3 for beta chain variable domain of TCR clone 107135 (TRBV20-1, TRBJ1-5)
CSARDDRGNQPQHF

SEQ ID NO: 214271 - protein, 11 aa, Homo sapiens
  CDR3 for alpha chain variable domain of TCR clone 107136 (TRAV21, TRAJ11)
CAVNGYSTLTF

SEQ ID NO: 214272 - protein, 12 aa, Homo sapiens
  CDR3 for beta chain variable domain of TCR clone 107136 (TRBV7-8, TRBJ2-7)
CASSLGDREQYF

SEQ ID NO: 214273 - protein, 14 aa, Homo sapiens
  CDR3 for alpha chain variable domain of TCR clone 107137 (TRAV13-1, TRAJ40)
CAARSTSGTYKNIF

SEQ ID NO: 214274 - protein, 15 aa, Homo sapiens
  CDR3 for beta chain variable domain of TCR clone 107137 (TRBV18, TRBJ1-5)
CASSETGGNNQPQHF

SEQ ID NO: 214275 - protein, 13 aa, Homo sapiens
  CDR3 for alpha chain variable domain of TCR clone 107138 (TRAV2, TRAJ47)
CAVDREYGNKLVV

SEQ ID NO: 214276 - protein, 17 aa, Homo sapiens
  CDR3 for beta chain variable domain of TCR clone 107138 (TRBV15, TRBJ1-5)
CATSRVKGIYSNQPQHF

SEQ ID NO: 214277 - protein, 15 aa, Homo sapiens
  CDR3 for alpha chain variable domain of TCR clone 107139 (TRAV27, TRAJ38)
CAARRNAGNNRKLIW

SEQ ID NO: 214278 - protein, 15 aa, Homo sapiens
  CDR3 for beta chain variable domain of TCR clone 107139 (TRBV10-2, TRBJ2-6)
CASSEQGTGANVLTF

SEQ ID NO: 214279 - protein, 18 aa, Homo sapiens
  CDR3 for alpha chain variable domain of TCR clone 107140 (TRAV29/DV5, TRAJ52)
CAARFRGAGGTSYGKLTF

SEQ ID NO: 214280 - protein, 16 aa, Homo sapiens
  CDR3 for beta chain variable domain of TCR clone 107140 (TRBV7-3, TRBJ2-2)
CASSLKRGTLSGELFF

SEQ ID NO: 214281 - protein, 14 aa, Homo sapiens
  CDR3 for alpha chain variable domain of TCR clone 107141 (TRAV4, TRAJ26)
CLVGPHTYGQNFVF

SEQ ID NO: 214282 - protein, 17 aa, Homo sapiens
  CDR3 for beta chain variable domain of TCR clone 107141 (TRBV24-1, TRBJ2-1)
CATSDVSTSGTYNEQFF

SEQ ID NO: 214283 - protein, 17 aa, Homo sapiens
  CDR3 for alpha chain variable domain of TCR clone 107142 (TRAV36/DV7, TRAJ52)
CAVAQRAGGTSYGKLTF

SEQ ID NO: 214284 - protein, 17 aa, Homo sapiens
  CDR3 for beta chain variable domain of TCR clone 107142 (TRBV13, TRBJ2-3)
CASSLSRVAGGRNTQYF

SEQ ID NO: 214285 - protein, 13 aa, Homo sapiens
  CDR3 for alpha chain variable domain of TCR clone 107143 (TRAV35, TRAJ48)
CAGHEFGNEKLTF

SEQ ID NO: 214286 - protein, 13 aa, Homo sapiens
  CDR3 for beta chain variable domain of TCR clone 107143 (TRBV7-2, TRBJ1-6)
CASSLVGPSPLHF

SEQ ID NO: 214287 - protein, 17 aa, Homo sapiens
  CDR3 for alpha chain variable domain of TCR clone 107144 (TRAV3, TRAJ42)
CAVRDRDYGGSKGNLIF

SEQ ID NO: 214288 - protein, 17 aa, Homo sapiens
  CDR3 for beta chain variable domain of TCR clone 107144 (TRBV7-9, TRBJ2-3)
CASSPTVAGDLTDTQYF

SEQ ID NO: 214289 - protein, 14 aa, Homo sapiens
  CDR3 for alpha chain variable domain of TCR clone 107145 (TRAV12-1, TRAJ33)
CVVNPEDSNYQLIW

SEQ ID NO: 214290 - protein, 11 aa, Homo sapiens
  CDR3 for beta chain variable domain of TCR clone 107145 (TRBV7-6, TRBJ2-1)
CDSSNYGEQFF

SEQ ID NO: 214291 - protein, 14 aa, Homo sapiens
  CDR3 for alpha chain variable domain of TCR clone 107146 (TRAV1-2, TRAJ16)
CAVNRFSDGQKLLF

SEQ ID NO: 214292 - protein, 16 aa, Homo sapiens
  CDR3 for beta chain variable domain of TCR clone 107146 (TRBV7-9, TRBJ2-7)
CASSYPDREGGYEQYF

SEQ ID NO: 214293 - protein, 14 aa, Homo sapiens
  CDR3 for alpha chain variable domain of TCR clone 107147 (TRAV1-2, TRAJ8)
CAVREDTGFQKLVF

SEQ ID NO: 214294 - protein, 13 aa, Homo sapiens
  CDR3 for beta chain variable domain of TCR clone 107147 (TRBV25-1, TRBJ1-1)
CQHPPGGNTEAFF

SEQ ID NO: 214295 - protein, 16 aa, Homo sapiens
  CDR3 for alpha chain variable domain of TCR clone 107148 (TRAV13-1, TRAJ48)
CAASIFGNFGNEKLTF

SEQ ID NO: 214296 - protein, 15 aa, Homo sapiens
  CDR3 for beta chain variable domain of TCR clone 107148 (TRBV5-1, TRBJ2-2)
CASSSQGGNTGELFF

SEQ ID NO: 214297 - protein, 14 aa, Homo sapiens
  CDR3 for alpha chain variable domain of TCR clone 107149 (TRAV1-2, TRAJ16)
CAVNRFSDGQKLLF

SEQ ID NO: 214298 - protein, 14 aa, Homo sapiens
  CDR3 for beta chain variable domain of TCR clone 107149 (TRBV7-9, TRBJ2-2)
RASSLGHRTGELFF

SEQ ID NO: 214299 - protein, 11 aa, Homo sapiens
  CDR3 for alpha chain variable domain of TCR clone 107150 (TRAV21, TRAJ27)
CAVRMQANQPL

SEQ ID NO: 214300 - protein, 15 aa, Homo sapiens
  CDR3 for beta chain variable domain of TCR clone 107150 (TRBV4-1, TRBJ1-4)
CASSDTGGTNEKLFF

SEQ ID NO: 214301 - protein, 14 aa, Homo sapiens
  CDR3 for alpha chain variable domain of TCR clone 107151 (TRAV3, TRAJ22)
CAVRDSGSARQLTF

SEQ ID NO: 214302 - protein, 14 aa, Homo sapiens
  CDR3 for beta chain variable domain of TCR clone 107151 (TRBV7-2, TRBJ2-2)
CASRGQGAAGELFF

SEQ ID NO: 214303 - protein, 18 aa, Homo sapiens
  CDR3 for alpha chain variable domain of TCR clone 107152 (TRAV13-1, TRAJ52)
CAAKNPNAGGTSYGKLTF

SEQ ID NO: 214304 - protein, 17 aa, Homo sapiens
  CDR3 for beta chain variable domain of TCR clone 107152 (TRBV7-8, TRBJ2-1)
CASSPPTGTLAYNEQFF

SEQ ID NO: 214305 - protein, 13 aa, Homo sapiens
  CDR3 for alpha chain variable domain of TCR clone 107153 (TRAV8-6, TRAJ49)
CAAITNTGNQFYF

SEQ ID NO: 214306 - protein, 12 aa, Homo sapiens
  CDR3 for beta chain variable domain of TCR clone 107153 (TRBV12-4, TRBJ2-7)
CASSLGGYEQYF

SEQ ID NO: 214307 - protein, 15 aa, Homo sapiens
  CDR3 for alpha chain variable domain of TCR clone 107154 (TRAV21, TRAJ37)
CAVRPTLSNTGKLIF

SEQ ID NO: 214308 - protein, 13 aa, Homo sapiens
  CDR3 for beta chain variable domain of TCR clone 107154 (TRBV7-9, TRBJ1-2)
CASSLKQNYGYTF

SEQ ID NO: 214309 - protein, 17 aa, Homo sapiens
  CDR3 for alpha chain variable domain of TCR clone 107155 (TRAV16, TRAJ26)
CALRLWSEFCLWSRNQF

SEQ ID NO: 214310 - protein, 14 aa, Homo sapiens
  CDR3 for beta chain variable domain of TCR clone 107155 (TRBV7-2, TRBJ2-7)
CASRSQGAAYEQYF

SEQ ID NO: 214311 - protein, 14 aa, Homo sapiens
  CDR3 for alpha chain variable domain of TCR clone 107156 (TRAV9-2, TRAJ39)
CALYIYNAGNMLTF

SEQ ID NO: 214312 - protein, 13 aa, Homo sapiens
  CDR3 for beta chain variable domain of TCR clone 107156 (TRBV12-4, TRBJ2-7)
CASSPGQLYEQYF

SEQ ID NO: 214313 - protein, 14 aa, Homo sapiens
  CDR3 for alpha chain variable domain of TCR clone 107157 (TRAV1-2, TRAJ8)
CAVREDTGFQKLVF

SEQ ID NO: 214314 - protein, 15 aa, Homo sapiens
  CDR3 for beta chain variable domain of TCR clone 107157 (TRBV6-3, TRBJ2-7)
CASSSSGTVLYEQYF

SEQ ID NO: 214315 - protein, 14 aa, Homo sapiens
  CDR3 for alpha chain variable domain of TCR clone 107158 (TRAV20, TRAJ42)
CAVQAGGSQGNLIF

SEQ ID NO: 214316 - protein, 14 aa, Homo sapiens
  CDR3 for beta chain variable domain of TCR clone 107158 (TRBV28, TRBJ1-2)
CARRIQGANYGYTF

SEQ ID NO: 214317 - protein, 14 aa, Homo sapiens
  CDR3 for alpha chain variable domain of TCR clone 107159 (TRAV26-1, TRAJ21)
CIVRPPYNFNKFYF

SEQ ID NO: 214318 - protein, 14 aa, Homo sapiens
  CDR3 for beta chain variable domain of TCR clone 107159 (TRBV7-8, TRBJ2-3)
CASSLEAGTDTQYF

SEQ ID NO: 214319 - protein, 13 aa, Homo sapiens
  CDR3 for alpha chain variable domain of TCR clone 107160 (TRAV35, TRAJ40)
CAGQLSGTYKYIL

SEQ ID NO: 214320 - protein, 14 aa, Homo sapiens
  CDR3 for beta chain variable domain of TCR clone 107160 (TRBV3-1, TRBJ2-5)
CASSLQLAGETQYF

SEQ ID NO: 214321 - protein, 16 aa, Homo sapiens
  CDR3 for alpha chain variable domain of TCR clone 107161 (TRAV1-1, TRAJ29)
CAVRSTRNSGNTPLVF

SEQ ID NO: 214322 - protein, 14 aa, Homo sapiens
  CDR3 for beta chain variable domain of TCR clone 107161 (TRBV7-2, TRBJ2-7)
CASSPKTSFYEQHF

SEQ ID NO: 214323 - protein, 14 aa, Homo sapiens
  CDR3 for alpha chain variable domain of TCR clone 107162 (TRAV12-2, TRAJ17)
CAVLFKAAGNKLTF

SEQ ID NO: 214324 - protein, 14 aa, Homo sapiens
  CDR3 for beta chain variable domain of TCR clone 107162 (TRBV11-2, TRBJ1-2)
CASSLYRGNYGYTF

SEQ ID NO: 214325 - protein, 11 aa, Homo sapiens
  CDR3 for alpha chain variable domain of TCR clone 107163 (TRAV1-2, TRAJ40)
CAVPGTYKYIF

SEQ ID NO: 214326 - protein, 16 aa, Homo sapiens
  CDR3 for beta chain variable domain of TCR clone 107163 (TRBV13, TRBJ2-2)
CASSLGRGYGTGELFF

SEQ ID NO: 214327 - protein, 14 aa, Homo sapiens
  CDR3 for alpha chain variable domain of TCR clone 107164 (TRAV35, TRAJ22)
CAGLRPGSARQLTF

SEQ ID NO: 214328 - protein, 14 aa, Homo sapiens
  CDR3 for beta chain variable domain of TCR clone 107164 (TRBV20-1, TRBJ2-7)
CSAPELAGVGEQYF

SEQ ID NO: 214329 - protein, 17 aa, Homo sapiens
  CDR3 for alpha chain variable domain of TCR clone 107165 (TRAV3, TRAJ12)
CAVRDGGRMDSSYKLIF

SEQ ID NO: 214330 - protein, 13 aa, Homo sapiens
  CDR3 for beta chain variable domain of TCR clone 107165 (TRBV15, TRBJ1-6)
CATSGGVNSPLHF

SEQ ID NO: 214331 - protein, 14 aa, Homo sapiens
  CDR3 for alpha chain variable domain of TCR clone 107166 (TRAV12-3, TRAJ10)
SHLPLTGGGNKLTF

SEQ ID NO: 214332 - protein, 15 aa, Homo sapiens
  CDR3 for beta chain variable domain of TCR clone 107166 (TRBV28, TRBJ2-7)
CASRPWDRFSYEQYF

SEQ ID NO: 214333 - protein, 14 aa, Homo sapiens
  CDR3 for alpha chain variable domain of TCR clone 107167 (TRAV9-2, TRAJ39)
CALYIYNAGNMLTF

SEQ ID NO: 214334 - protein, 15 aa, Homo sapiens
  CDR3 for beta chain variable domain of TCR clone 107167 (TRBV11-3, TRBJ2-7)
CASSPGPASSYEQYF

SEQ ID NO: 214335 - protein, 12 aa, Homo sapiens
  CDR3 for alpha chain variable domain of TCR clone 107168 (TRAV3, TRAJ20)
CAVRDSDYKLSF

SEQ ID NO: 214336 - protein, 15 aa, Homo sapiens
  CDR3 for beta chain variable domain of TCR clone 107168 (TRBV2, TRBJ2-2)
CASSRETVGTGELFF

SEQ ID NO: 214337 - protein, 14 aa, Homo sapiens
  CDR3 for alpha chain variable domain of TCR clone 107169 (TRAV38-1, TRAJ39)
CAFAYNNAGNMLTF

SEQ ID NO: 214338 - protein, 15 aa, Homo sapiens
  CDR3 for beta chain variable domain of TCR clone 107169 (TRBV19, TRBJ2-6)
CASSIGPSGANVLSF

SEQ ID NO: 214339 - protein, 12 aa, Homo sapiens
  CDR3 for alpha chain variable domain of TCR clone 107170 (TRAV13-1, TRAJ53)
AASGGSNYKLTF

SEQ ID NO: 214340 - protein, 15 aa, Homo sapiens
  CDR3 for beta chain variable domain of TCR clone 107170 (TRBV5-1, TRBJ2-1)
CASSPPRAPYNEQFC

SEQ ID NO: 214341 - protein, 14 aa, Homo sapiens
  CDR3 for alpha chain variable domain of TCR clone 107171 (TRAV20, TRAJ29)
CAVQAWVGNTPLVF

SEQ ID NO: 214342 - protein, 13 aa, Homo sapiens
  CDR3 for beta chain variable domain of TCR clone 107171 (TRBV7-6, TRBJ2-3)
CASSLRSDNTQYF

SEQ ID NO: 214343 - protein, 15 aa, Homo sapiens
  CDR3 for alpha chain variable domain of TCR clone 107172 (TRAV12-2, TRAJ43)
CAFDMRFGAGTRLTV

SEQ ID NO: 214344 - protein, 18 aa, Homo sapiens
  CDR3 for beta chain variable domain of TCR clone 107172 (TRBV7-9, TRBJ2-7)
CASSLTTSGSRTWYEQYF

SEQ ID NO: 214345 - protein, 16 aa, Homo sapiens
  CDR3 for alpha chain variable domain of TCR clone 107173 (TRAV3, TRAJ37)
CAVRVRGSGNTGKLTF

SEQ ID NO: 214346 - protein, 13 aa, Homo sapiens
  CDR3 for beta chain variable domain of TCR clone 107173 (TRBV14, TRBJ2-1)
CASSQDRRNEQFF

SEQ ID NO: 214347 - protein, 14 aa, Homo sapiens
  CDR3 for alpha chain variable domain of TCR clone 107174 (TRAV2, TRAJ9)
CAVEDRRGGFKTIF

SEQ ID NO: 214348 - protein, 12 aa, Homo sapiens
  CDR3 for beta chain variable domain of TCR clone 107174 (TRBV7-9, TRBJ2-7)
CASSLEGYEQYF

SEQ ID NO: 214349 - protein, 18 aa, Homo sapiens
  CDR3 for alpha chain variable domain of TCR clone 107175 (TRAV3, TRAJ17)
CAVRARRGGRSCRQQANF

SEQ ID NO: 214350 - protein, 14 aa, Homo sapiens
  CDR3 for beta chain variable domain of TCR clone 107175 (TRBV4-1, TRBJ2-3)
CASSQDSGTDTQYF

SEQ ID NO: 214351 - protein, 16 aa, Homo sapiens
  CDR3 for alpha chain variable domain of TCR clone 107176 (TRAV20, TRAJ53)
CAVRRGSGGSNYKMTF

SEQ ID NO: 214352 - protein, 12 aa, Homo sapiens
  CDR3 for beta chain variable domain of TCR clone 107176 (TRBV29-1, TRBJ2-3)
CSVVLGADTQYF

SEQ ID NO: 214353 - protein, 14 aa, Homo sapiens
  CDR3 for alpha chain variable domain of TCR clone 107177 (TRAV1-2, TRAJ16)
CAVNRFSDGQKLLF

SEQ ID NO: 214354 - protein, 15 aa, Homo sapiens
  CDR3 for beta chain variable domain of TCR clone 107177 (TRBV7-9, TRBJ1-4)
CASSARAGGNEKLFF

SEQ ID NO: 214355 - protein, 15 aa, Homo sapiens
  CDR3 for alpha chain variable domain of TCR clone 107178 (TRAV26-1, TRAJ29)
CIVRVEGSGNTHLVF

SEQ ID NO: 214356 - protein, 15 aa, Homo sapiens
  CDR3 for beta chain variable domain of TCR clone 107178 (TRBV28, TRBJ2-5)
CASSPGQGSIETQYF

SEQ ID NO: 214357 - protein, 15 aa, Homo sapiens
  CDR3 for alpha chain variable domain of TCR clone 107179 (TRAV8-3, TRAJ45)
CASSYSGGGADGLTF

SEQ ID NO: 214358 - protein, 13 aa, Homo sapiens
  CDR3 for beta chain variable domain of TCR clone 107179 (TRBV10-3, TRBJ2-7)
CASKLALNYEQYF

SEQ ID NO: 214359 - protein, 13 aa, Homo sapiens
  CDR3 for alpha chain variable domain of TCR clone 107180 (TRAV35, TRAJ32)
CAGVGGATNKLIF

SEQ ID NO: 214360 - protein, 17 aa, Homo sapiens
  CDR3 for beta chain variable domain of TCR clone 107180 (TRBV4-3, TRBJ2-1)
CASSPFSSGRASGEQFF

SEQ ID NO: 214361 - protein, 16 aa, Homo sapiens
  CDR3 for alpha chain variable domain of TCR clone 107181 (TRAV16, TRAJ4)
CALSRMFSGGYNKLIF

SEQ ID NO: 214362 - protein, 20 aa, Homo sapiens
  CDR3 for beta chain variable domain of TCR clone 107181 (TRBV4-3, TRBJ2-4)
CASSQGRWTGGLRSLNIQYF

SEQ ID NO: 214363 - protein, 14 aa, Homo sapiens
  CDR3 for alpha chain variable domain of TCR clone 107182 (TRAV26-2, TRAJ32)
CCVGYGGDTNKLIF

SEQ ID NO: 214364 - protein, 14 aa, Homo sapiens
  CDR3 for beta chain variable domain of TCR clone 107182 (TRBV4-2, TRBJ2-1)
CASGLDRAYNEQFF

SEQ ID NO: 214365 - protein, 15 aa, Homo sapiens
  CDR3 for alpha chain variable domain of TCR clone 107183 (TRAV26-2, TRAJ45)
CVLRDRVDQEEVLTD

SEQ ID NO: 214366 - protein, 15 aa, Homo sapiens
  CDR3 for beta chain variable domain of TCR clone 107183 (TRBV7-6, TRBJ2-5)
CASSKPTGPQETQYF

SEQ ID NO: 214367 - protein, 14 aa, Homo sapiens
  CDR3 for alpha chain variable domain of TCR clone 107184 (TRAV4, TRAJ3)
CLVAPYSSASKIIF

SEQ ID NO: 214368 - protein, 15 aa, Homo sapiens
  CDR3 for beta chain variable domain of TCR clone 107184 (TRBV20-1, TRBJ2-7)
CSARDRVSGMDEQYF

SEQ ID NO: 214369 - protein, 13 aa, Homo sapiens
  CDR3 for alpha chain variable domain of TCR clone 107185 (TRAV27, TRAJ45)
CRSSGGGADGLTF

SEQ ID NO: 214370 - protein, 13 aa, Homo sapiens
  CDR3 for beta chain variable domain of TCR clone 107185 (TRBV20-1, TRBJ1-1)
CSARGGGNTEAFF

SEQ ID NO: 214371 - protein, 15 aa, Homo sapiens
  CDR3 for alpha chain variable domain of TCR clone 107186 (TRAV26-1, TRAJ29)
CIVRVEGLGKTPLVF

SEQ ID NO: 214372 - protein, 14 aa, Homo sapiens
  CDR3 for beta chain variable domain of TCR clone 107186 (TRBV18, TRBJ2-5)
CASSPGVSQETQYF

SEQ ID NO: 214373 - protein, 16 aa, Homo sapiens
  CDR3 for alpha chain variable domain of TCR clone 107187 (TRAV26-1, TRAJ48)
CIVRVGANFGNEKLTF

SEQ ID NO: 214374 - protein, 14 aa, Homo sapiens
  CDR3 for beta chain variable domain of TCR clone 107187 (TRBV20-1, TRBJ2-7)
CSAKRGRSSYEQYF

SEQ ID NO: 214375 - protein, 16 aa, Homo sapiens
  CDR3 for alpha chain variable domain of TCR clone 107188 (TRAV12-3, TRAJ28)
CAMRANSGAGSYQLTF

SEQ ID NO: 214376 - protein, 18 aa, Homo sapiens
  CDR3 for beta chain variable domain of TCR clone 107188 (TRBV7-9, TRBJ2-7)
CASSLTTSGSRTWYEQYF

SEQ ID NO: 214377 - protein, 12 aa, Homo sapiens
  CDR3 for alpha chain variable domain of TCR clone 107189 (TRAV1-2, TRAJ20)
CAVREVGYKLSF

SEQ ID NO: 214378 - protein, 14 aa, Homo sapiens
  CDR3 for beta chain variable domain of TCR clone 107189 (TRBV7-9, TRBJ2-7)
CASSLEAVGDEQYF

SEQ ID NO: 214379 - protein, 14 aa, Homo sapiens
  CDR3 for alpha chain variable domain of TCR clone 107190 (TRAV16, TRAJ17)
CAPRINAAGNKLTF

SEQ ID NO: 214380 - protein, 17 aa, Homo sapiens
  CDR3 for beta chain variable domain of TCR clone 107190 (TRBV7-2, TRBJ2-3)
CASSSYSGTRRADTQYF

SEQ ID NO: 214381 - protein, 15 aa, Homo sapiens
  CDR3 for alpha chain variable domain of TCR clone 107191 (TRAV8-3, TRAJ45)
CASSYSGGGSDGLTF

SEQ ID NO: 214382 - protein, 16 aa, Homo sapiens
  CDR3 for beta chain variable domain of TCR clone 107191 (TRBV7-9, TRBJ2-2)
CASSGFGGANTGELFF

SEQ ID NO: 214383 - protein, 14 aa, Homo sapiens
  CDR3 for alpha chain variable domain of TCR clone 107192 (TRAV1-1, TRAJ27)
CAVIYNTNAGKSTF

SEQ ID NO: 214384 - protein, 18 aa, Homo sapiens
  CDR3 for beta chain variable domain of TCR clone 107192 (TRBV7-3, TRBJ2-1)
CASSSTLASGRAMVSSSS

SEQ ID NO: 214385 - protein, 16 aa, Homo sapiens
  CDR3 for alpha chain variable domain of TCR clone 107193 (TRAV3, TRAJ10)
CAVRDMRAGGGNKLTL

SEQ ID NO: 214386 - protein, 16 aa, Homo sapiens
  CDR3 for beta chain variable domain of TCR clone 107193 (TRBV19, TRBJ2-2)
CASSFPGQGLAGELFF

SEQ ID NO: 214387 - protein, 11 aa, Homo sapiens
  CDR3 for alpha chain variable domain of TCR clone 107194 (TRAV17, TRAJ36)
CAPTGANNLFF

SEQ ID NO: 214388 - protein, 15 aa, Homo sapiens
  CDR3 for beta chain variable domain of TCR clone 107194 (TRBV12-4, TRBJ1-1)
CASSWSQTGNTEAFF

SEQ ID NO: 214389 - protein, 13 aa, Homo sapiens
  CDR3 for alpha chain variable domain of TCR clone 107195 (TRAV3, TRAJ29)
CAVRDIIDTPLVF

SEQ ID NO: 214390 - protein, 14 aa, Homo sapiens
  CDR3 for beta chain variable domain of TCR clone 107195 (TRBV27, TRBJ2-1)
CACSATGGYNEQFF

SEQ ID NO: 214391 - protein, 16 aa, Homo sapiens
  CDR3 for alpha chain variable domain of TCR clone 107196 (TRAV3, TRAJ23)
CAVKIGISNQGGKLIF

SEQ ID NO: 214392 - protein, 17 aa, Homo sapiens
  CDR3 for beta chain variable domain of TCR clone 107196 (TRBV10-3, TRBJ2-6)
CAISESTAPSGANVLTF

SEQ ID NO: 214393 - protein, 12 aa, Homo sapiens
  CDR3 for alpha chain variable domain of TCR clone 107197 (TRAV8-4, TRAJ43)
CAVSVNNNDMRF

SEQ ID NO: 214394 - protein, 14 aa, Homo sapiens
  CDR3 for beta chain variable domain of TCR clone 107197 (TRBV11-2, TRBJ1-2)
CASSWGTANYGYTF

SEQ ID NO: 214395 - protein, 12 aa, Homo sapiens
  CDR3 for alpha chain variable domain of TCR clone 107198 (TRAV13-1, TRAJ42)
SVLRGSQGNLIF

SEQ ID NO: 214396 - protein, 13 aa, Homo sapiens
  CDR3 for beta chain variable domain of TCR clone 107198 (TRBV2, TRBJ1-4)
CARSELGVEKLFF

SEQ ID NO: 214397 - protein, 17 aa, Homo sapiens
  CDR3 for alpha chain variable domain of TCR clone 107199 (TRAV3, TRAJ6)
CAVRDGPRAGGSYIPTF

SEQ ID NO: 214398 - protein, 11 aa, Homo sapiens
  CDR3 for beta chain variable domain of TCR clone 107199 (TRBV27, TRBJ2-3)
CASSLGDTQYF

SEQ ID NO: 214399 - protein, 14 aa, Homo sapiens
  CDR3 for alpha chain variable domain of TCR clone 107200 (TRAV1-2, TRAJ16)
CAVNRFSDGQKLLF

SEQ ID NO: 214400 - protein, 17 aa, Homo sapiens
  CDR3 for beta chain variable domain of TCR clone 107200 (TRBV7-3, TRBJ2-3)
CASSRGLAGEVPDTQYF

SEQ ID NO: 214401 - protein, 16 aa, Homo sapiens
  CDR3 for alpha chain variable domain of TCR clone 107201 (TRAV14/DV4, TRAJ21)
CAMREGPENNFNKFYF

SEQ ID NO: 214402 - protein, 12 aa, Homo sapiens
  CDR3 for beta chain variable domain of TCR clone 107201 (TRBV29-1, TRBJ2-2)
CSVDKYPGELFF

SEQ ID NO: 214403 - protein, 11 aa, Homo sapiens
  CDR3 for alpha chain variable domain of TCR clone 107202 (TRAV9-2, TRAJ43)
YALNNNNDMRF

SEQ ID NO: 214404 - protein, 13 aa, Homo sapiens
  CDR3 for beta chain variable domain of TCR clone 107202 (TRBV20-1, TRBJ2-1)
CSASTGTSNEQFF

SEQ ID NO: 214405 - protein, 15 aa, Homo sapiens
  CDR3 for alpha chain variable domain of TCR clone 107203 (TRAV26-1, TRAJ29)
CIVRVEGSGNTPLVF

SEQ ID NO: 214406 - protein, 12 aa, Homo sapiens
  CDR3 for beta chain variable domain of TCR clone 107203 (TRBV7-9, TRBJ2-7)
CASSIKREEQYF

SEQ ID NO: 214407 - protein, 16 aa, Homo sapiens
  CDR3 for alpha chain variable domain of TCR clone 107204 (TRAV3, TRAJ37)
CAVRGKGSGNTGKLIF

SEQ ID NO: 214408 - protein, 15 aa, Homo sapiens
  CDR3 for beta chain variable domain of TCR clone 107204 (TRBV5-1, TRBJ2-7)
CASSLNGGPEREQYF

SEQ ID NO: 214409 - protein, 14 aa, Homo sapiens
  CDR3 for alpha chain variable domain of TCR clone 107205 (TRAV2, TRAJ3)
CAVRPYSSASKIIF

SEQ ID NO: 214410 - protein, 16 aa, Homo sapiens
  CDR3 for beta chain variable domain of TCR clone 107205 (TRBV7-6, TRBJ2-5)
CQQLPQAGDPSETQYF

SEQ ID NO: 214411 - protein, 15 aa, Homo sapiens
  CDR3 for alpha chain variable domain of TCR clone 107206 (TRAV13-1, TRAJ5)
CAASPRGHGQESTYF

SEQ ID NO: 214412 - protein, 11 aa, Homo sapiens
  CDR3 for beta chain variable domain of TCR clone 107206 (TRBV11-2, TRBJ2-2)
CASSLPGELFL

SEQ ID NO: 214413 - protein, 15 aa, Homo sapiens
  CDR3 for alpha chain variable domain of TCR clone 107207 (TRAV17, TRAJ52)
CATEAGGTSYGKLTF

SEQ ID NO: 214414 - protein, 13 aa, Homo sapiens
  CDR3 for beta chain variable domain of TCR clone 107207 (TRBV4-2, TRBJ1-1)
CASSQAGNTEAFF

SEQ ID NO: 214415 - protein, 15 aa, Homo sapiens
  CDR3 for alpha chain variable domain of TCR clone 107208 (TRAV3, TRAJ12)
CAVRDIRDSSYKFIF

SEQ ID NO: 214416 - protein, 16 aa, Homo sapiens
  CDR3 for beta chain variable domain of TCR clone 107208 (TRBV2, TRBJ1-1)
CASSPPNRGMNTEAFF

SEQ ID NO: 214417 - protein, 17 aa, Homo sapiens
  CDR3 for alpha chain variable domain of TCR clone 107209 (TRAV3, TRAJ6)
CAVRDGPRAGGSYIPTF

SEQ ID NO: 214418 - protein, 13 aa, Homo sapiens
  CDR3 for beta chain variable domain of TCR clone 107209 (TRBV7-3, TRBJ1-1)
CASSLTQGTEAFF

SEQ ID NO: 214419 - protein, 12 aa, Homo sapiens
  CDR3 for alpha chain variable domain of TCR clone 107210 (TRAV1-1, TRAJ8)
CAGGTGFQKLVF

SEQ ID NO: 214420 - protein, 15 aa, Homo sapiens
  CDR3 for beta chain variable domain of TCR clone 107210 (TRBV7-9, TRBJ1-4)
CARSRTGGFNEKLFF

SEQ ID NO: 214421 - protein, 17 aa, Homo sapiens
  CDR3 for alpha chain variable domain of TCR clone 107211 (TRAV3, TRAJ6)
CAVRDGPRAGGSYIPTF

SEQ ID NO: 214422 - protein, 20 aa, Homo sapiens
  CDR3 for beta chain variable domain of TCR clone 107211 (TRBV28, TRBJ2-1)
CASTPIGRSPGLAGGNKQFF

SEQ ID NO: 214423 - protein, 16 aa, Homo sapiens
  CDR3 for alpha chain variable domain of TCR clone 107212 (TRAV26-1, TRAJ48)
CIVREPPNFGNEKLTF

SEQ ID NO: 214424 - protein, 18 aa, Homo sapiens
  CDR3 for beta chain variable domain of TCR clone 107212 (TRBV7-3, TRBJ2-1)
CASSLTDPRVAAYNEQFF

SEQ ID NO: 214425 - protein, 16 aa, Homo sapiens
  CDR3 for alpha chain variable domain of TCR clone 107213 (TRAV30, TRAJ24)
CGTEIVEADSWGKFQF

SEQ ID NO: 214426 - protein, 15 aa, Homo sapiens
  CDR3 for beta chain variable domain of TCR clone 107213 (TRBV20-1, TRBJ2-7)
CSARDRVSGMDEQYF

SEQ ID NO: 214427 - protein, 12 aa, Homo sapiens
  CDR3 for alpha chain variable domain of TCR clone 107214 (TRAV29/DV5, TRAJ15)
CASNQAVTALIF

SEQ ID NO: 214428 - protein, 15 aa, Homo sapiens
  CDR3 for beta chain variable domain of TCR clone 107214 (TRBV11-2, TRBJ2-2)
CASSSDRVNAGELFF

SEQ ID NO: 214429 - protein, 23 aa, Homo sapiens
  CDR3 for alpha chain variable domain of TCR clone 107215 (TRAV12-2, TRAJ36)
SLLIRDSQPSDSATLERANNLFF

SEQ ID NO: 214430 - protein, 13 aa, Homo sapiens
  CDR3 for beta chain variable domain of TCR clone 107215 (TRBV7-9, TRBJ2-5)
CASLPSGRETQYF

SEQ ID NO: 214431 - protein, 12 aa, Homo sapiens
  CDR3 for alpha chain variable domain of TCR clone 107216 (TRAV12-3, TRAJ17)
CAMTLTGNKLTF

SEQ ID NO: 214432 - protein, 13 aa, Homo sapiens
  CDR3 for beta chain variable domain of TCR clone 107216 (TRBV19, TRBJ1-4)
CASPTQGNEKLFF

SEQ ID NO: 214433 - protein, 18 aa, Homo sapiens
  CDR3 for alpha chain variable domain of TCR clone 107217 (TRAV26-2, TRAJ45)
CILRVDKYSGGGADGLTF

SEQ ID NO: 214434 - protein, 16 aa, Homo sapiens
  CDR3 for beta chain variable domain of TCR clone 107217 (TRBV29-1, TRBJ2-6)
CSVEDITYSGANVLTF

SEQ ID NO: 214435 - protein, 14 aa, Homo sapiens
  CDR3 for alpha chain variable domain of TCR clone 107218 (TRAV13-2, TRAJ33)
CAGRDQDSDYQLIW

SEQ ID NO: 214436 - protein, 17 aa, Homo sapiens
  CDR3 for beta chain variable domain of TCR clone 107218 (TRBV7-8, TRBJ2-6)
CASSAGTGGAGANVLTF

SEQ ID NO: 214437 - protein, 14 aa, Homo sapiens
  CDR3 for alpha chain variable domain of TCR clone 107219 (TRAV13-1, TRAJ3)
CAASKSSSASKIIF

SEQ ID NO: 214438 - protein, 13 aa, Homo sapiens
  CDR3 for beta chain variable domain of TCR clone 107219 (TRBV25-1, TRBJ2-5)
CASSESVRETQYF

SEQ ID NO: 214439 - protein, 14 aa, Homo sapiens
  CDR3 for alpha chain variable domain of TCR clone 107220 (TRAV12-3, TRAJ10)
SHLSLTGGGNKLTF

SEQ ID NO: 214440 - protein, 16 aa, Homo sapiens
  CDR3 for beta chain variable domain of TCR clone 107220 (TRBV4-1, TRBJ1-4)
CASSQDLRRGGEKLFF

SEQ ID NO: 214441 - protein, 12 aa, Homo sapiens
  CDR3 for alpha chain variable domain of TCR clone 107221 (TRAV38-1, TRAJ47)
CAFETYGNKLVF

SEQ ID NO: 214442 - protein, 13 aa, Homo sapiens
  CDR3 for beta chain variable domain of TCR clone 107221 (TRBV6-5, TRBJ2-5)
CASSPQGGETQYF

SEQ ID NO: 214443 - protein, 14 aa, Homo sapiens
  CDR3 for alpha chain variable domain of TCR clone 107222 (TRAV26-1, TRAJ39)
CIVRGSRAGNMLTF

SEQ ID NO: 214444 - protein, 15 aa, Homo sapiens
  CDR3 for beta chain variable domain of TCR clone 107222 (TRBV7-9, TRBJ1-5)
CASSQGHQPNQPRDF

SEQ ID NO: 214445 - protein, 14 aa, Homo sapiens
  CDR3 for alpha chain variable domain of TCR clone 107223 (TRAV1-2, TRAJ8)
CAVREDTGFQKLAF

SEQ ID NO: 214446 - protein, 15 aa, Homo sapiens
  CDR3 for beta chain variable domain of TCR clone 107223 (TRBV6-3, TRBJ2-7)
CASSSPGTVFYEQYV

SEQ ID NO: 214447 - protein, 14 aa, Homo sapiens
  CDR3 for alpha chain variable domain of TCR clone 107224 (TRAV1-2, TRAJ8)
CAVREDTGFQKPVF

SEQ ID NO: 214448 - protein, 13 aa, Homo sapiens
  CDR3 for beta chain variable domain of TCR clone 107224 (TRBV7-3, TRBJ2-1)
CASSLDSYNEQFF

SEQ ID NO: 214449 - protein, 12 aa, Homo sapiens
  CDR3 for alpha chain variable domain of TCR clone 107225 (TRAV36/DV7, TRAJ26)
CAVDNYGQNFVF

SEQ ID NO: 214450 - protein, 16 aa, Homo sapiens
  CDR3 for beta chain variable domain of TCR clone 107225 (TRBV7-3, TRBJ2-2)
CASSLTGAGTTGELFF

SEQ ID NO: 214451 - protein, 12 aa, Homo sapiens
  CDR3 for alpha chain variable domain of TCR clone 107226 (TRAV13-1, TRAJ21)
CAAKEGFNKFYF

SEQ ID NO: 214452 - protein, 12 aa, Homo sapiens
  CDR3 for beta chain variable domain of TCR clone 107226 (TRBV18, TRBJ2-1)
CASSSDEDEQFF

SEQ ID NO: 214453 - protein, 14 aa, Homo sapiens
  CDR3 for alpha chain variable domain of TCR clone 107227 (TRAV12-1, TRAJ23)
CVVIVYNQGGKLIF

SEQ ID NO: 214454 - protein, 13 aa, Homo sapiens
  CDR3 for beta chain variable domain of TCR clone 107227 (TRBV11-2, TRBJ2-5)
CASSFSSQENQYF

SEQ ID NO: 214455 - protein, 18 aa, Homo sapiens
  CDR3 for alpha chain variable domain of TCR clone 107228 (TRAV9-2, TRAJ52)
CALSRHNAGGTSYGKLTF

SEQ ID NO: 214456 - protein, 14 aa, Homo sapiens
  CDR3 for beta chain variable domain of TCR clone 107228 (TRBV4-1, TRBJ2-2)
CASSQAVNTGELFF

SEQ ID NO: 214457 - protein, 13 aa, Homo sapiens
  CDR3 for alpha chain variable domain of TCR clone 107229 (TRAV27, TRAJ57)
CRSAQGGSERLVF

SEQ ID NO: 214458 - protein, 11 aa, Homo sapiens
  CDR3 for beta chain variable domain of TCR clone 107229 (TRBV11-2, TRBJ1-1)
CASSINTEASF

SEQ ID NO: 214459 - protein, 12 aa, Homo sapiens
  CDR3 for alpha chain variable domain of TCR clone 107230 (TRAV35, TRAJ30)
CAGLNRDDKIIF

SEQ ID NO: 214460 - protein, 15 aa, Homo sapiens
  CDR3 for beta chain variable domain of TCR clone 107230 (TRBV18, TRBJ2-3)
CASSPLVGETDTQYF

SEQ ID NO: 214461 - protein, 16 aa, Homo sapiens
  CDR3 for alpha chain variable domain of TCR clone 107231 (TRAV12-2, TRAJ10)
CAVNRVLTGGGNKLTF

SEQ ID NO: 214462 - protein, 14 aa, Homo sapiens
  CDR3 for beta chain variable domain of TCR clone 107231 (TRBV19, TRBJ2-1)
CASPTFVLSGEQFF

SEQ ID NO: 214463 - protein, 14 aa, Homo sapiens
  CDR3 for alpha chain variable domain of TCR clone 107232 (TRAV1-2, TRAJ8)
CAAREDTGFQKLVF

SEQ ID NO: 214464 - protein, 15 aa, Homo sapiens
  CDR3 for beta chain variable domain of TCR clone 107232 (TRBV6-3, TRBJ2-7)
CASSSPGTVFYEQHF

SEQ ID NO: 214465 - protein, 13 aa, Homo sapiens
  CDR3 for alpha chain variable domain of TCR clone 107233 (TRAV12-3, TRAJ48)
CAMSLVGNEKLTF

SEQ ID NO: 214466 - protein, 11 aa, Homo sapiens
  CDR3 for beta chain variable domain of TCR clone 107233 (TRBV7-2, TRBJ2-7)
CASSSGLRQYF

SEQ ID NO: 214467 - protein, 12 aa, Homo sapiens
  CDR3 for alpha chain variable domain of TCR clone 107234 (TRAV13-2, TRAJ23)
CAERHRGGKLIF

SEQ ID NO: 214468 - protein, 15 aa, Homo sapiens
  CDR3 for beta chain variable domain of TCR clone 107234 (TRBV6-3, TRBJ2-7)
CASSSPWTVFYEQYF

SEQ ID NO: 214469 - protein, 13 aa, Homo sapiens
  CDR3 for alpha chain variable domain of TCR clone 107235 (TRAV12-1, TRAJ21)
CVVTLYNFNKFYF

SEQ ID NO: 214470 - protein, 20 aa, Homo sapiens
  CDR3 for beta chain variable domain of TCR clone 107235 (TRBV7-8, TRBJ2-1)
CDSSLAHRLAGVRSYNEQFF

SEQ ID NO: 214471 - protein, 17 aa, Homo sapiens
  CDR3 for alpha chain variable domain of TCR clone 107236 (TRAV3, TRAJ38)
CAVRDCLNAGNNRKLIW

SEQ ID NO: 214472 - protein, 12 aa, Homo sapiens
  CDR3 for beta chain variable domain of TCR clone 107236 (TRBV6-3, TRBJ2-7)
CASSRQGYEQYF

SEQ ID NO: 214473 - protein, 13 aa, Homo sapiens
  CDR3 for alpha chain variable domain of TCR clone 107237 (TRAV12-1, TRAJ34)
CVVTGYNTDKLIF

SEQ ID NO: 214474 - protein, 14 aa, Homo sapiens
  CDR3 for beta chain variable domain of TCR clone 107237 (TRBV7-2, TRBJ2-7)
CASSPKTSFYEQYF

SEQ ID NO: 214475 - protein, 16 aa, Homo sapiens
  CDR3 for alpha chain variable domain of TCR clone 107238 (TRAV16, TRAJ52)
CALSAAGGTSYGKLIF

SEQ ID NO: 214476 - protein, 12 aa, Homo sapiens
  CDR3 for beta chain variable domain of TCR clone 107238 (TRBV12-4, TRBJ1-3)
CASSFSGNTIYF

SEQ ID NO: 214477 - protein, 15 aa, Homo sapiens
  CDR3 for alpha chain variable domain of TCR clone 107239 (TRAV25, TRAJ53)
CPTSNSGGSNYKLPF

SEQ ID NO: 214478 - protein, 14 aa, Homo sapiens
  CDR3 for beta chain variable domain of TCR clone 107239 (TRBV11-2, TRBJ2-3)
CASSRLARTDTQYF

SEQ ID NO: 214479 - protein, 14 aa, Homo sapiens
  CDR3 for alpha chain variable domain of TCR clone 107240 (TRAV38-1, TRAJ45)
CAYYSGGGADGLTF

SEQ ID NO: 214480 - protein, 16 aa, Homo sapiens
  CDR3 for beta chain variable domain of TCR clone 107240 (TRBV7-2, TRBJ2-6)
CASSLAGRSGANVLTF

SEQ ID NO: 214481 - protein, 17 aa, Homo sapiens
  CDR3 for alpha chain variable domain of TCR clone 107241 (TRAV3, TRAJ6)
CAVRDGPSAGGNYIPTF

SEQ ID NO: 214482 - protein, 14 aa, Homo sapiens
  CDR3 for beta chain variable domain of TCR clone 107241 (TRBV7-2, TRBJ2-7)
CASSPKTSFYEQYF

SEQ ID NO: 214483 - protein, 14 aa, Homo sapiens
  CDR3 for alpha chain variable domain of TCR clone 107242 (TRAV1-2, TRAJ16)
FAVNRFSDGQKLLF

SEQ ID NO: 214484 - protein, 15 aa, Homo sapiens
  CDR3 for beta chain variable domain of TCR clone 107242 (TRBV19, TRBJ1-5)
CASSIVWADNQPQHF

SEQ ID NO: 214485 - protein, 16 aa, Homo sapiens
  CDR3 for alpha chain variable domain of TCR clone 107243 (TRAV3, TRAJ6)
CAVRDGMGRRKRHTYI

SEQ ID NO: 214486 - protein, 15 aa, Homo sapiens
  CDR3 for beta chain variable domain of TCR clone 107243 (TRBV9, TRBJ2-1)
CASSLAGSSYNEQFF

SEQ ID NO: 214487 - protein, 14 aa, Homo sapiens
  CDR3 for alpha chain variable domain of TCR clone 107244 (TRAV8-6, TRAJ30)
CAVSFVNRDDKIIF

SEQ ID NO: 214488 - protein, 13 aa, Homo sapiens
  CDR3 for beta chain variable domain of TCR clone 107244 (TRBV5-4, TRBJ2-5)
CASSPVSQETQYF

SEQ ID NO: 214489 - protein, 17 aa, Homo sapiens
  CDR3 for alpha chain variable domain of TCR clone 107245 (TRAV17, TRAJ28)
CATDPRRGGAGSYQLTF

SEQ ID NO: 214490 - protein, 15 aa, Homo sapiens
  CDR3 for beta chain variable domain of TCR clone 107245 (TRBV11-2, TRBJ2-1)
CASSKNRGLVYEQFF

SEQ ID NO: 214491 - protein, 14 aa, Homo sapiens
  CDR3 for alpha chain variable domain of TCR clone 107246 (TRAV20, TRAJ17)
CAMRREAAGNKLTF

SEQ ID NO: 214492 - protein, 13 aa, Homo sapiens
  CDR3 for beta chain variable domain of TCR clone 107246 (TRBV23-1, TRBJ2-1)
CASNRETYNEQFF

SEQ ID NO: 214493 - protein, 16 aa, Homo sapiens
  CDR3 for alpha chain variable domain of TCR clone 107247 (TRAV3, TRAJ10)
CAVRDMRAGGGNKLTF

SEQ ID NO: 214494 - protein, 13 aa, Homo sapiens
  CDR3 for beta chain variable domain of TCR clone 107247 (TRBV7-9, TRBJ2-5)
CASLPSGRETQYF

SEQ ID NO: 214495 - protein, 14 aa, Homo sapiens
  CDR3 for alpha chain variable domain of TCR clone 107248 (TRAV12-2, TRAJ13)
CAVKKTGGYQKVTF

SEQ ID NO: 214496 - protein, 15 aa, Homo sapiens
  CDR3 for beta chain variable domain of TCR clone 107248 (TRBV9, TRBJ1-6)
CASSVAGTGDSPLHV

SEQ ID NO: 214497 - protein, 16 aa, Homo sapiens
  CDR3 for alpha chain variable domain of TCR clone 107249 (TRAV13-1, TRAJ48)
CAASIFGNFGNEKLTF

SEQ ID NO: 214498 - protein, 15 aa, Homo sapiens
  CDR3 for beta chain variable domain of TCR clone 107249 (TRBV7-2, TRBJ1-2)
CASSLVSGGDYGYTF

SEQ ID NO: 214499 - protein, 14 aa, Homo sapiens
  CDR3 for alpha chain variable domain of TCR clone 107250 (TRAV8-6, TRAJ12)
CAVKAADSSYKLIF

SEQ ID NO: 214500 - protein, 15 aa, Homo sapiens
  CDR3 for beta chain variable domain of TCR clone 107250 (TRBV5-1, TRBJ2-5)
CASSRGLAEQETQYF

SEQ ID NO: 214501 - protein, 17 aa, Homo sapiens
  CDR3 for alpha chain variable domain of TCR clone 107251 (TRAV8-3, TRAJ10)
EASNTVILTGGGNKLTF

SEQ ID NO: 214502 - protein, 16 aa, Homo sapiens
  CDR3 for beta chain variable domain of TCR clone 107251 (TRBV7-9, TRBJ1-2)
CASSLGFSAGEDGYTF

SEQ ID NO: 214503 - protein, 14 aa, Homo sapiens
  CDR3 for alpha chain variable domain of TCR clone 107252 (TRAV13-2, TRAJ29)
CAEGTFETNTPPVF

SEQ ID NO: 214504 - protein, 13 aa, Homo sapiens
  CDR3 for beta chain variable domain of TCR clone 107252 (TRBV2, TRBJ1-1)
CASNLLRNTEAFF

SEQ ID NO: 214505 - protein, 22 aa, Homo sapiens
  CDR3 for alpha chain variable domain of TCR clone 107253 (TRAV26-1, TRAJ30)
CIVRVRTEMTRSSLEKGHYFIF

SEQ ID NO: 214506 - protein, 18 aa, Homo sapiens
  CDR3 for beta chain variable domain of TCR clone 107253 (TRBV4-1, TRBJ1-5)
CASSQDPRGQGLNQPQHF

SEQ ID NO: 214507 - protein, 18 aa, Homo sapiens
  CDR3 for alpha chain variable domain of TCR clone 107254 (TRAV13-1, TRAJ52)
CAAKNPNAGGTSYGKLTF

SEQ ID NO: 214508 - protein, 15 aa, Homo sapiens
  CDR3 for beta chain variable domain of TCR clone 107254 (TRBV7-3, TRBJ2-1)
CASSPTGGGEVEQFF

SEQ ID NO: 214509 - protein, 14 aa, Homo sapiens
  CDR3 for alpha chain variable domain of TCR clone 107255 (TRAV26-1, TRAJ49)
CIVRPSNTGNQFYF

SEQ ID NO: 214510 - protein, 12 aa, Homo sapiens
  CDR3 for beta chain variable domain of TCR clone 107255 (TRBV11-2, TRBJ2-1)
CASSPGNNEQFF

SEQ ID NO: 214511 - protein, 14 aa, Homo sapiens
  CDR3 for alpha chain variable domain of TCR clone 107256 (TRAV2, TRAJ23)
CAVGLRNQGGKLSF

SEQ ID NO: 214512 - protein, 15 aa, Homo sapiens
  CDR3 for beta chain variable domain of TCR clone 107256 (TRBV6-5, TRBJ2-5)
CASSPLAGGIETQYF

SEQ ID NO: 214513 - protein, 12 aa, Homo sapiens
  CDR3 for alpha chain variable domain of TCR clone 107257 (TRAV23/DV6, TRAJ24)
CAANDSWGKLQV

SEQ ID NO: 214514 - protein, 16 aa, Homo sapiens
  CDR3 for beta chain variable domain of TCR clone 107257 (TRBV12-4, TRBJ2-5)
CASSLSTSGGKETQYF

SEQ ID NO: 214515 - protein, 18 aa, Homo sapiens
  CDR3 for alpha chain variable domain of TCR clone 107258 (TRAV13-1, TRAJ52)
CAAKNPNAGGTSYGKRTF

SEQ ID NO: 214516 - protein, 18 aa, Homo sapiens
  CDR3 for beta chain variable domain of TCR clone 107258 (TRBV4-1, TRBJ1-4)
CASSPRTGGAWTNEKLFF

SEQ ID NO: 214517 - protein, 11 aa, Homo sapiens
  CDR3 for alpha chain variable domain of TCR clone 107259 (TRAV12-2, TRAJ31)
CAVTRWARHMF

SEQ ID NO: 214518 - protein, 15 aa, Homo sapiens
  CDR3 for beta chain variable domain of TCR clone 107259 (TRBV19, TRBJ2-7)
CASSIGGGLVNEQYF

SEQ ID NO: 214519 - protein, 12 aa, Homo sapiens
  CDR3 for alpha chain variable domain of TCR clone 107260 (TRAV8-3, TRAJ26)
CAGDDYGQNFVF

SEQ ID NO: 214520 - protein, 11 aa, Homo sapiens
  CDR3 for beta chain variable domain of TCR clone 107260 (TRBV29-1, TRBJ2-5)
CSEDRTGTQYF

SEQ ID NO: 214521 - protein, 12 aa, Homo sapiens
  CDR3 for alpha chain variable domain of TCR clone 107261 (TRAV2, TRAJ33)
FAFMDSNYQLIW

SEQ ID NO: 214522 - protein, 16 aa, Homo sapiens
  CDR3 for beta chain variable domain of TCR clone 107261 (TRBV2, TRBJ2-7)
CASSEPWTGPSYEQYF

SEQ ID NO: 214523 - protein, 15 aa, Homo sapiens
  CDR3 for alpha chain variable domain of TCR clone 107262 (TRAV8-3, TRAJ11)
CAVGLFNSGYSTLTF

SEQ ID NO: 214524 - protein, 15 aa, Homo sapiens
  CDR3 for beta chain variable domain of TCR clone 107262 (TRBV13, TRBJ2-1)
CASSLLSGLNNEQFF

SEQ ID NO: 214525 - protein, 11 aa, Homo sapiens
  CDR3 for alpha chain variable domain of TCR clone 107263 (TRAV4, TRAJ23)
CLVAPGGKLIF

SEQ ID NO: 214526 - protein, 13 aa, Homo sapiens
  CDR3 for beta chain variable domain of TCR clone 107263 (TRBV7-9, TRBJ1-2)
CASSVKQNYGYTF

SEQ ID NO: 214527 - protein, 15 aa, Homo sapiens
  CDR3 for alpha chain variable domain of TCR clone 107264 (TRAV1-1, TRAJ4)
CAVRAFSGGYNKLIF

SEQ ID NO: 214528 - protein, 14 aa, Homo sapiens
  CDR3 for beta chain variable domain of TCR clone 107264 (TRBV7-9, TRBJ1-1)
CASTPLQSYTEAFF

SEQ ID NO: 214529 - protein, 12 aa, Homo sapiens
  CDR3 for alpha chain variable domain of TCR clone 107265 (TRAV13-1, TRAJ21)
CSAKEGFNKFYF

SEQ ID NO: 214530 - protein, 18 aa, Homo sapiens
  CDR3 for beta chain variable domain of TCR clone 107265 (TRBV20-1, TRBJ2-6)
CSAETTPTHGSGANVLTF

SEQ ID NO: 214531 - protein, 12 aa, Homo sapiens
  CDR3 for alpha chain variable domain of TCR clone 107266 (TRAV8-6, TRAJ33)
CAVTDRNYQLIW

SEQ ID NO: 214532 - protein, 15 aa, Homo sapiens
  CDR3 for beta chain variable domain of TCR clone 107266 (TRBV4-3, TRBJ1-2)
CASSRGQGRNYGYTF

SEQ ID NO: 214533 - protein, 11 aa, Homo sapiens
  CDR3 for alpha chain variable domain of TCR clone 107267 (TRAV3, TRAJ21)
CAVGNLNKFYF

SEQ ID NO: 214534 - protein, 13 aa, Homo sapiens
  CDR3 for beta chain variable domain of TCR clone 107267 (TRBV7-3, TRBJ1-1)
CASSQDWGAEAFF

SEQ ID NO: 214535 - protein, 13 aa, Homo sapiens
  CDR3 for alpha chain variable domain of TCR clone 107268 (TRAV9-2, TRAJ53)
CALSGGSNYKLTF

SEQ ID NO: 214536 - protein, 17 aa, Homo sapiens
  CDR3 for beta chain variable domain of TCR clone 107268 (TRBV11-2, TRBJ2-1)
CASSLYPPWVEYNEQFF

SEQ ID NO: 214537 - protein, 15 aa, Homo sapiens
  CDR3 for alpha chain variable domain of TCR clone 107269 (TRAV26-1, TRAJ29)
CIVRVTNSGNTPLVF

SEQ ID NO: 214538 - protein, 14 aa, Homo sapiens
  CDR3 for beta chain variable domain of TCR clone 107269 (TRBV25-1, TRBJ1-1)
CASTHLGGNTEAFF

SEQ ID NO: 214539 - protein, 13 aa, Homo sapiens
  CDR3 for alpha chain variable domain of TCR clone 107270 (TRAV8-3, TRAJ40)
CAVGAQYLRNLQI

SEQ ID NO: 214540 - protein, 15 aa, Homo sapiens
  CDR3 for beta chain variable domain of TCR clone 107270 (TRBV7-9, TRBJ2-1)
CASSLGWGRANEQFF

SEQ ID NO: 214541 - protein, 16 aa, Homo sapiens
  CDR3 for alpha chain variable domain of TCR clone 107271 (TRAV16, TRAJ4)
CALSRMFSGGYNKLIF

SEQ ID NO: 214542 - protein, 15 aa, Homo sapiens
  CDR3 for beta chain variable domain of TCR clone 107271 (TRBV12-4, TRBJ2-5)
CASSPPTGLQETQYF

SEQ ID NO: 214543 - protein, 14 aa, Homo sapiens
  CDR3 for alpha chain variable domain of TCR clone 107272 (TRAV2, TRAJ9)
CAVEDRSGGFKNIF

SEQ ID NO: 214544 - protein, 18 aa, Homo sapiens
  CDR3 for beta chain variable domain of TCR clone 107272 (TRBV11-2, TRBJ2-3)
CASSLGGASRGAPNTQYF

SEQ ID NO: 214545 - protein, 14 aa, Homo sapiens
  CDR3 for alpha chain variable domain of TCR clone 107273 (TRAV12-3, TRAJ10)
SHLPLTGGGNKLTF

SEQ ID NO: 214546 - protein, 18 aa, Homo sapiens
  CDR3 for beta chain variable domain of TCR clone 107273 (TRBV7-6, TRBJ2-1)
CASSPRTSGMSSYNEQFF

SEQ ID NO: 214547 - protein, 16 aa, Homo sapiens
  CDR3 for alpha chain variable domain of TCR clone 107274 (TRAV23/DV6, TRAJ21)
CVASSGGGTTSTNFTL

SEQ ID NO: 214548 - protein, 11 aa, Homo sapiens
  CDR3 for beta chain variable domain of TCR clone 107274 (TRBV7-8, TRBJ2-7)
CASSLSLEQYF

SEQ ID NO: 214549 - protein, 11 aa, Homo sapiens
  CDR3 for alpha chain variable domain of TCR clone 107275 (TRAV12-2, TRAJ36)
CAVDGANNLFF

SEQ ID NO: 214550 - protein, 13 aa, Homo sapiens
  CDR3 for beta chain variable domain of TCR clone 107275 (TRBV28, TRBJ2-5)
CAGVSRGEEAQYF

SEQ ID NO: 214551 - protein, 12 aa, Homo sapiens
  CDR3 for alpha chain variable domain of TCR clone 107276 (TRAV12-1, TRAJ34)
CVVAGATDKLIF

SEQ ID NO: 214552 - protein, 16 aa, Homo sapiens
  CDR3 for beta chain variable domain of TCR clone 107276 (TRBV7-2, TRBJ1-2)
CASSSNQDRRGHGYTV

SEQ ID NO: 214553 - protein, 14 aa, Homo sapiens
  CDR3 for alpha chain variable domain of TCR clone 107277 (TRAV12-3, TRAJ29)
RAMSPYSGNTPLVF

SEQ ID NO: 214554 - protein, 15 aa, Homo sapiens
  CDR3 for beta chain variable domain of TCR clone 107277 (TRBV27, TRBJ2-1)
CASSNGGGSSNEQFF

SEQ ID NO: 214555 - protein, 10 aa, Homo sapiens
  CDR3 for alpha chain variable domain of TCR clone 107278 (TRAV5, TRAJ34)
CAEDTDKLIF

SEQ ID NO: 214556 - protein, 12 aa, Homo sapiens
  CDR3 for beta chain variable domain of TCR clone 107278 (TRBV11-2, TRBJ2-1)
CASSPGNNEQFF

SEQ ID NO: 214557 - protein, 14 aa, Homo sapiens
  CDR3 for alpha chain variable domain of TCR clone 107279 (TRAV12-1, TRAJ4)
CVVPLKSGYDKLIF

SEQ ID NO: 214558 - protein, 13 aa, Homo sapiens
  CDR3 for beta chain variable domain of TCR clone 107279 (TRBV27, TRBJ2-7)
CASGRGGAYEQYF

SEQ ID NO: 214559 - protein, 13 aa, Homo sapiens
  CDR3 for alpha chain variable domain of TCR clone 107280 (TRAV27, TRAJ45)
CRSSGGGADGLTF

SEQ ID NO: 214560 - protein, 17 aa, Homo sapiens
  CDR3 for beta chain variable domain of TCR clone 107280 (TRBV11-2, TRBJ2-1)
CGSSLYPPGVEYNEQFF

SEQ ID NO: 214561 - protein, 17 aa, Homo sapiens
  CDR3 for alpha chain variable domain of TCR clone 107281 (TRAV8-2, TRAJ16)
CVVSDGFQMARSCSLQG

SEQ ID NO: 214562 - protein, 14 aa, Homo sapiens
  CDR3 for beta chain variable domain of TCR clone 107281 (TRBV7-3, TRBJ1-1)
CASSLGTGYTEAFF

SEQ ID NO: 214563 - protein, 15 aa, Homo sapiens
  CDR3 for alpha chain variable domain of TCR clone 107282 (TRAV26-1, TRAJ29)
CIVRVEGSGNKLLVF

SEQ ID NO: 214564 - protein, 15 aa, Homo sapiens
  CDR3 for beta chain variable domain of TCR clone 107282 (TRBV7-9, TRBJ1-5)
CASSQGHQPNQPQHF

SEQ ID NO: 214565 - protein, 14 aa, Homo sapiens
  CDR3 for alpha chain variable domain of TCR clone 107283 (TRAV38-1, TRAJ39)
CAFAYYNAGNMLTF

SEQ ID NO: 214566 - protein, 15 aa, Homo sapiens
  CDR3 for beta chain variable domain of TCR clone 107283 (TRBV19, TRBJ2-6)
CASSIGPSGANVLTF

SEQ ID NO: 214567 - protein, 13 aa, Homo sapiens
  CDR3 for alpha chain variable domain of TCR clone 107284 (TRAV26-2, TRAJ43)
CILRAVNNNDMRF

SEQ ID NO: 214568 - protein, 16 aa, Homo sapiens
  CDR3 for beta chain variable domain of TCR clone 107284 (TRBV5-1, TRBJ2-5)
CASSPSSGARTETQYF

SEQ ID NO: 214569 - protein, 19 aa, Homo sapiens
  CDR3 for alpha chain variable domain of TCR clone 107285 (TRAV26-1, TRAJ52)
CIVRAHRNAGVTSYGKLTF

SEQ ID NO: 214570 - protein, 15 aa, Homo sapiens
  CDR3 for beta chain variable domain of TCR clone 107285 (TRBV29-1, TRBJ2-1)
CSGRDRKSSYNEQFF

SEQ ID NO: 214571 - protein, 12 aa, Homo sapiens
  CDR3 for alpha chain variable domain of TCR clone 107286 (TRAV21, TRAJ13)
PGPSGGYQKVTL

SEQ ID NO: 214572 - protein, 15 aa, Homo sapiens
  CDR3 for beta chain variable domain of TCR clone 107286 (TRBV7-9, TRBJ1-6)
CASSSPGRGNSPLHF

SEQ ID NO: 214573 - protein, 18 aa, Homo sapiens
  CDR3 for alpha chain variable domain of TCR clone 107287 (TRAV12-3, TRAJ52)
CAMSVGGAGGTSYGKVTF

SEQ ID NO: 214574 - protein, 14 aa, Homo sapiens
  CDR3 for beta chain variable domain of TCR clone 107287 (TRBV7-2, TRBJ2-7)
CASRSQGAAYEQYF

SEQ ID NO: 214575 - protein, 16 aa, Homo sapiens
  CDR3 for alpha chain variable domain of TCR clone 107288 (TRAV14/DV4, TRAJ53)
CAMREGGGGSNYKLTF

SEQ ID NO: 214576 - protein, 12 aa, Homo sapiens
  CDR3 for beta chain variable domain of TCR clone 107288 (TRBV12-4, TRBJ1-1)
CASSLAGLEAFF

SEQ ID NO: 214577 - protein, 11 aa, Homo sapiens
  CDR3 for alpha chain variable domain of TCR clone 107289 (TRAV21, TRAJ11)
CAVNGYSTLTF

SEQ ID NO: 214578 - protein, 15 aa, Homo sapiens
  CDR3 for beta chain variable domain of TCR clone 107289 (TRBV7-2, TRBJ2-3)
CASSLASARTDTQYF

SEQ ID NO: 214579 - protein, 12 aa, Homo sapiens
  CDR3 for alpha chain variable domain of TCR clone 107290 (TRAV2, TRAJ33)
CAFMDSNYQLIW

SEQ ID NO: 214580 - protein, 15 aa, Homo sapiens
  CDR3 for beta chain variable domain of TCR clone 107290 (TRBV7-2, TRBJ2-1)
CASTHGTGIYNEQFF

SEQ ID NO: 214581 - protein, 11 aa, Homo sapiens
  CDR3 for alpha chain variable domain of TCR clone 107291 (TRAV17, TRAJ36)
CAPTVANNLFF

SEQ ID NO: 214582 - protein, 13 aa, Homo sapiens
  CDR3 for beta chain variable domain of TCR clone 107291 (TRBV12-4, TRBJ2-7)
CASSPTETYEQYF

SEQ ID NO: 214583 - protein, 13 aa, Homo sapiens
  CDR3 for alpha chain variable domain of TCR clone 107292 (TRAV3, TRAJ15)
CAVRDQAGPALIF

SEQ ID NO: 214584 - protein, 15 aa, Homo sapiens
  CDR3 for beta chain variable domain of TCR clone 107292 (TRBV11-1, TRBJ2-7)
CASSLNYGASYEQYF

SEQ ID NO: 214585 - protein, 16 aa, Homo sapiens
  CDR3 for alpha chain variable domain of TCR clone 107293 (TRAV30, TRAJ24)
CGPEIVDADSWGKFQF

SEQ ID NO: 214586 - protein, 13 aa, Homo sapiens
  CDR3 for beta chain variable domain of TCR clone 107293 (TRBV7-2, TRBJ1-4)
CASSLAGLEKLFF

SEQ ID NO: 214587 - protein, 13 aa, Homo sapiens
  CDR3 for alpha chain variable domain of TCR clone 107294 (TRAV1-1, TRAJ7)
CAVSPLWEQQTRF

SEQ ID NO: 214588 - protein, 13 aa, Homo sapiens
  CDR3 for beta chain variable domain of TCR clone 107294 (TRBV13, TRBJ1-1)
CASSPRMNTEAFF

SEQ ID NO: 214589 - protein, 16 aa, Homo sapiens
  CDR3 for alpha chain variable domain of TCR clone 107295 (TRAV20, TRAJ38)
CAVQASNAGNNRKLIW

SEQ ID NO: 214590 - protein, 16 aa, Homo sapiens
  CDR3 for beta chain variable domain of TCR clone 107295 (TRBV7-8, TRBJ2-6)
CASRVGDSSGANGLTF

SEQ ID NO: 214591 - protein, 12 aa, Homo sapiens
  CDR3 for alpha chain variable domain of TCR clone 107296 (TRAV2, TRAJ40)
CCGSSGTYKYIF

SEQ ID NO: 214592 - protein, 14 aa, Homo sapiens
  CDR3 for beta chain variable domain of TCR clone 107296 (TRBV19, TRBJ2-1)
CASPTFVLSGEQFF

SEQ ID NO: 214593 - protein, 13 aa, Homo sapiens
  CDR3 for alpha chain variable domain of TCR clone 107297 (TRAV12-2, TRAJ18)
CAVRGSTLGRLYF

SEQ ID NO: 214594 - protein, 20 aa, Homo sapiens
  CDR3 for beta chain variable domain of TCR clone 107297 (TRBV7-8, TRBJ2-2)
WASSHLFPGPTIHITGELFF

SEQ ID NO: 214595 - protein, 13 aa, Homo sapiens
  CDR3 for alpha chain variable domain of TCR clone 107298 (TRAV30, TRAJ29)
CGTEDSGNTPLVF

SEQ ID NO: 214596 - protein, 17 aa, Homo sapiens
  CDR3 for beta chain variable domain of TCR clone 107298 (TRBV11-2, TRBJ2-1)
CASSLYPPGVEYNEQFF

SEQ ID NO: 214597 - protein, 13 aa, Homo sapiens
  CDR3 for alpha chain variable domain of TCR clone 107299 (TRAV1-1, TRAJ11)
CAVLNSGYSTITF

SEQ ID NO: 214598 - protein, 17 aa, Homo sapiens
  CDR3 for beta chain variable domain of TCR clone 107299 (TRBV6-3, TRBJ2-2)
CASSYAGQGINTGELFF

SEQ ID NO: 214599 - protein, 13 aa, Homo sapiens
  CDR3 for alpha chain variable domain of TCR clone 107300 (TRAV29/DV5, TRAJ31)
CAASRNNNARLMF

SEQ ID NO: 214600 - protein, 14 aa, Homo sapiens
  CDR3 for beta chain variable domain of TCR clone 107300 (TRBV7-2, TRBJ2-2)
CASRGQGAAGELFF

SEQ ID NO: 214601 - protein, 16 aa, Homo sapiens
  CDR3 for alpha chain variable domain of TCR clone 107301 (TRAV3, TRAJ21)
CAVRDIERGNFSKFYF

SEQ ID NO: 214602 - protein, 16 aa, Homo sapiens
  CDR3 for beta chain variable domain of TCR clone 107301 (TRBV11-2, TRBJ1-1)
CASSLRQGGEHSKAFF

SEQ ID NO: 214603 - protein, 13 aa, Homo sapiens
  CDR3 for alpha chain variable domain of TCR clone 107302 (TRAV5, TRAJ30)
CAEIANRDDKSIF

SEQ ID NO: 214604 - protein, 14 aa, Homo sapiens
  CDR3 for beta chain variable domain of TCR clone 107302 (TRBV4-1, TRBJ2-2)
CASSQAVNTGELFF

SEQ ID NO: 214605 - protein, 14 aa, Homo sapiens
  CDR3 for alpha chain variable domain of TCR clone 107303 (TRAV27, TRAJ23)
CAGAFDNQGGKLIF

SEQ ID NO: 214606 - protein, 15 aa, Homo sapiens
  CDR3 for beta chain variable domain of TCR clone 107303 (TRBV7-3, TRBJ2-7)
CASSLTGQGKYEKYF

SEQ ID NO: 214607 - protein, 18 aa, Homo sapiens
  CDR3 for alpha chain variable domain of TCR clone 107304 (TRAV12-3, TRAJ52)
CAMSVGGAGGTSYGKLTF

SEQ ID NO: 214608 - protein, 13 aa, Homo sapiens
  CDR3 for beta chain variable domain of TCR clone 107304 (TRBV12-5, TRBJ2-3)
CASGDRQSDTQYF

SEQ ID NO: 214609 - protein, 14 aa, Homo sapiens
  CDR3 for alpha chain variable domain of TCR clone 107305 (TRAV9-2, TRAJ39)
CALYIYNAGNMLTF

SEQ ID NO: 214610 - protein, 13 aa, Homo sapiens
  CDR3 for beta chain variable domain of TCR clone 107305 (TRBV7-9, TRBJ2-5)
CASLLSGRETQYF

SEQ ID NO: 214611 - protein, 16 aa, Homo sapiens
  CDR3 for alpha chain variable domain of TCR clone 107306 (TRAV30, TRAJ24)
CGTEIVDADSWGKFQF

SEQ ID NO: 214612 - protein, 12 aa, Homo sapiens
  CDR3 for beta chain variable domain of TCR clone 107306 (TRBV7-8, TRBJ2-7)
CASSLGGREQYF

SEQ ID NO: 214613 - protein, 13 aa, Homo sapiens
  CDR3 for alpha chain variable domain of TCR clone 107307 (TRAV21, TRAJ3)
CCEPYSRASKIIF

SEQ ID NO: 214614 - protein, 15 aa, Homo sapiens
  CDR3 for beta chain variable domain of TCR clone 107307 (TRBV7-3, TRBJ2-1)
CASSPTGGGEVEQFF

SEQ ID NO: 214615 - protein, 17 aa, Homo sapiens
  CDR3 for alpha chain variable domain of TCR clone 107308 (TRAV20, TRAJ4)
CAVQLVLFSGGYNKLIF

SEQ ID NO: 214616 - protein, 15 aa, Homo sapiens
  CDR3 for beta chain variable domain of TCR clone 107308 (TRBV6-1, TRBJ2-3)
CASSERGGITDTQYF

SEQ ID NO: 214617 - protein, 13 aa, Homo sapiens
  CDR3 for alpha chain variable domain of TCR clone 107309 (TRAV21, TRAJ15)
CAVANQAGTALIF

SEQ ID NO: 214618 - protein, 13 aa, Homo sapiens
  CDR3 for beta chain variable domain of TCR clone 107309 (TRBV7-2, TRBJ2-2)
CASSLAVTGELFF

SEQ ID NO: 214619 - protein, 14 aa, Homo sapiens
  CDR3 for alpha chain variable domain of TCR clone 107310 (TRAV25, TRAJ23)
CAGQGDNQGGELIF

SEQ ID NO: 214620 - protein, 12 aa, Homo sapiens
  CDR3 for beta chain variable domain of TCR clone 107310 (TRBV7-9, TRBJ1-1)
CASSLVRGEAFF

SEQ ID NO: 214621 - protein, 14 aa, Homo sapiens
  CDR3 for alpha chain variable domain of TCR clone 107311 (TRAV29/DV5, TRAJ36)
CVARRKTGANNLFF

SEQ ID NO: 214622 - protein, 14 aa, Homo sapiens
  CDR3 for beta chain variable domain of TCR clone 107311 (TRBV12-5, TRBJ2-5)
CASGSRTHQETQYF

SEQ ID NO: 214623 - protein, 12 aa, Homo sapiens
  CDR3 for alpha chain variable domain of TCR clone 107312 (TRAV2, TRAJ31)
CAVEDNSARLMF

SEQ ID NO: 214624 - protein, 14 aa, Homo sapiens
  CDR3 for beta chain variable domain of TCR clone 107312 (TRBV7-3, TRBJ1-1)
CASSLGTGYTEAFF

SEQ ID NO: 214625 - protein, 14 aa, Homo sapiens
  CDR3 for alpha chain variable domain of TCR clone 107313 (TRAV17, TRAJ39)
CATDPVRAGNMLTF

SEQ ID NO: 214626 - protein, 15 aa, Homo sapiens
  CDR3 for beta chain variable domain of TCR clone 107313 (TRBV13, TRBJ1-5)
CASSFGEGGVQPQHF

SEQ ID NO: 214627 - protein, 18 aa, Homo sapiens
  CDR3 for alpha chain variable domain of TCR clone 107314 (TRAV12-3, TRAJ52)
CAMSRTNAGGTSYGKLTF

SEQ ID NO: 214628 - protein, 17 aa, Homo sapiens
  CDR3 for beta chain variable domain of TCR clone 107314 (TRBV7-3, TRBJ2-3)
CASSLMKRMRGADTQHF

SEQ ID NO: 214629 - protein, 16 aa, Homo sapiens
  CDR3 for alpha chain variable domain of TCR clone 107315 (TRAV30, TRAJ24)
CGTEIVDADSWGKFQF

SEQ ID NO: 214630 - protein, 15 aa, Homo sapiens
  CDR3 for beta chain variable domain of TCR clone 107315 (TRBV9, TRBJ1-6)
CAGSVAGTGDSPLHF

SEQ ID NO: 214631 - protein, 13 aa, Homo sapiens
  CDR3 for alpha chain variable domain of TCR clone 107316 (TRAV29/DV5, TRAJ49)
CAASTNTGNQFYF

SEQ ID NO: 214632 - protein, 14 aa, Homo sapiens
  CDR3 for beta chain variable domain of TCR clone 107316 (TRBV7-2, TRBJ2-7)
CANSLPPGQGPQYF

SEQ ID NO: 214633 - protein, 14 aa, Homo sapiens
  CDR3 for alpha chain variable domain of TCR clone 107317 (TRAV13-2, TRAJ17)
CAENSKAAGNKLTF

SEQ ID NO: 214634 - protein, 11 aa, Homo sapiens
  CDR3 for beta chain variable domain of TCR clone 107317 (TRBV6-3, TRBJ2-3)
CATGKADTQYF

SEQ ID NO: 214635 - protein, 15 aa, Homo sapiens
  CDR3 for alpha chain variable domain of TCR clone 107318 (TRAV1-2, TRAJ15)
CAVDVMGSAGTVLIF

SEQ ID NO: 214636 - protein, 13 aa, Homo sapiens
  CDR3 for beta chain variable domain of TCR clone 107318 (TRBV20-1, TRBJ1-1)
CSAFDRENTEAFF

SEQ ID NO: 214637 - protein, 11 aa, Homo sapiens
  CDR3 for alpha chain variable domain of TCR clone 107319 (TRAV1-2, TRAJ20)
CAVSNDYKLSF

SEQ ID NO: 214638 - protein, 16 aa, Homo sapiens
  CDR3 for beta chain variable domain of TCR clone 107319 (TRBV20-1, TRBJ1-4)
CSAPGQGLLTNEKLFF

SEQ ID NO: 214639 - protein, 16 aa, Homo sapiens
  CDR3 for alpha chain variable domain of TCR clone 107320 (TRAV27, TRAJ53)
CAAPEGSGGSNYKLKF

SEQ ID NO: 214640 - protein, 15 aa, Homo sapiens
  CDR3 for beta chain variable domain of TCR clone 107320 (TRBV20-1, TRBJ1-1)
CSASRGVTGNTEAFF

SEQ ID NO: 214641 - protein, 14 aa, Homo sapiens
  CDR3 for alpha chain variable domain of TCR clone 107321 (TRAV17, TRAJ6)
CATNPAGGSYIPTF

SEQ ID NO: 214642 - protein, 14 aa, Homo sapiens
  CDR3 for beta chain variable domain of TCR clone 107321 (TRBV18, TRBJ2-7)
CASSPRGGAYEQYF

SEQ ID NO: 214643 - protein, 14 aa, Homo sapiens
  CDR3 for alpha chain variable domain of TCR clone 107322 (TRAV8-2, TRAJ37)
CVVSISGNTGKLIF

SEQ ID NO: 214644 - protein, 18 aa, Homo sapiens
  CDR3 for beta chain variable domain of TCR clone 107322 (TRBV7-9, TRBJ2-7)
CASSLTTSGSRTWYEQYF

SEQ ID NO: 214645 - protein, 16 aa, Homo sapiens
  CDR3 for alpha chain variable domain of TCR clone 107323 (TRAV21, TRAJ37)
CAVRPRGSSTTGKLIF

SEQ ID NO: 214646 - protein, 13 aa, Homo sapiens
  CDR3 for beta chain variable domain of TCR clone 107323 (TRBV7-9, TRBJ2-5)
CASLSPGQETQYF

SEQ ID NO: 214647 - protein, 14 aa, Homo sapiens
  CDR3 for alpha chain variable domain of TCR clone 107324 (TRAV12-1, TRAJ9)
CVVTGNTGGFKTIF

SEQ ID NO: 214648 - protein, 13 aa, Homo sapiens
  CDR3 for beta chain variable domain of TCR clone 107324 (TRBV20-1, TRBJ1-1)
CSARAGGNTEAFF

SEQ ID NO: 214649 - protein, 16 aa, Homo sapiens
  CDR3 for alpha chain variable domain of TCR clone 107325 (TRAV4, TRAJ5)
CLVGPYHGHGQESTYF

SEQ ID NO: 214650 - protein, 15 aa, Homo sapiens
  CDR3 for beta chain variable domain of TCR clone 107325 (TRBV27, TRBJ2-5)
CASSLIPSGGETQYF

SEQ ID NO: 214651 - protein, 14 aa, Homo sapiens
  CDR3 for alpha chain variable domain of TCR clone 107326 (TRAV26-1, TRAJ39)
CIVFTDNAGNMLTF

SEQ ID NO: 214652 - protein, 15 aa, Homo sapiens
  CDR3 for beta chain variable domain of TCR clone 107326 (TRBV19, TRBJ2-4)
CVSSLTGLTKNIQYF

SEQ ID NO: 214653 - protein, 17 aa, Homo sapiens
  CDR3 for alpha chain variable domain of TCR clone 107327 (TRAV23/DV6, TRAJ57)
CSASSTLSQGGSEKLVF

SEQ ID NO: 214654 - protein, 14 aa, Homo sapiens
  CDR3 for beta chain variable domain of TCR clone 107327 (TRBV19, TRBJ2-1)
CASSKDRGQDEQFF

SEQ ID NO: 214655 - protein, 16 aa, Homo sapiens
  CDR3 for alpha chain variable domain of TCR clone 107328 (TRAV30, TRAJ24)
CGTEIVDADSWGKFQF

SEQ ID NO: 214656 - protein, 12 aa, Homo sapiens
  CDR3 for beta chain variable domain of TCR clone 107328 (TRBV6-3, TRBJ2-1)
CASSGSYNEQFF

SEQ ID NO: 214657 - protein, 13 aa, Homo sapiens
  CDR3 for alpha chain variable domain of TCR clone 107329 (TRAV27, TRAJ41)
CAGEGNSGYALNF

SEQ ID NO: 214658 - protein, 15 aa, Homo sapiens
  CDR3 for beta chain variable domain of TCR clone 107329 (TRBV20-1, TRBJ2-7)
CSAESGTSGAYEQYF

SEQ ID NO: 214659 - protein, 13 aa, Homo sapiens
  CDR3 for alpha chain variable domain of TCR clone 107330 (TRAV13-1, TRAJ21)
CAASIYNFNKFYF

SEQ ID NO: 214660 - protein, 13 aa, Homo sapiens
  CDR3 for beta chain variable domain of TCR clone 107330 (TRBV27, TRBJ1-4)
SASSLMGDEKLFF

SEQ ID NO: 214661 - protein, 14 aa, Homo sapiens
  CDR3 for alpha chain variable domain of TCR clone 107331 (TRAV12-3, TRAJ10)
SHLPLAGGGNKLTF

SEQ ID NO: 214662 - protein, 13 aa, Homo sapiens
  CDR3 for beta chain variable domain of TCR clone 107331 (TRBV12-4, TRBJ1-1)
CASSPGTGFEAFF

SEQ ID NO: 214663 - protein, 14 aa, Homo sapiens
  CDR3 for alpha chain variable domain of TCR clone 107332 (TRAV20, TRAJ18)
CAVGRGSTLGRLYF

SEQ ID NO: 214664 - protein, 15 aa, Homo sapiens
  CDR3 for beta chain variable domain of TCR clone 107332 (TRBV7-9, TRBJ1-6)
CASSSPGRGNSPLHF

SEQ ID NO: 214665 - protein, 14 aa, Homo sapiens
  CDR3 for alpha chain variable domain of TCR clone 107333 (TRAV3, TRAJ33)
CAVRDMDSNYQLIW

SEQ ID NO: 214666 - protein, 19 aa, Homo sapiens
  CDR3 for beta chain variable domain of TCR clone 107333 (TRBV7-3, TRBJ1-2)
CASSFPQGNDGELWLRLRF

SEQ ID NO: 214667 - protein, 12 aa, Homo sapiens
  CDR3 for alpha chain variable domain of TCR clone 107334 (TRAV30, TRAJ43)
CGTEERGNDMRF

SEQ ID NO: 214668 - protein, 15 aa, Homo sapiens
  CDR3 for beta chain variable domain of TCR clone 107334 (TRBV18, TRBJ2-7)
CASSPLQGRTYEQYF

SEQ ID NO: 214669 - protein, 15 aa, Homo sapiens
  CDR3 for alpha chain variable domain of TCR clone 107335 (TRAV12-2, TRAJ53)
CAVNGGGGSNYKLIF

SEQ ID NO: 214670 - protein, 17 aa, Homo sapiens
  CDR3 for beta chain variable domain of TCR clone 107335 (TRBV7-3, TRBJ2-3)
CASSLMKRMRGADTQYF

SEQ ID NO: 214671 - protein, 16 aa, Homo sapiens
  CDR3 for alpha chain variable domain of TCR clone 107336 (TRAV17, TRAJ54)
CATDSDIIQGAQKLVF

SEQ ID NO: 214672 - protein, 14 aa, Homo sapiens
  CDR3 for beta chain variable domain of TCR clone 107336 (TRBV19, TRBJ2-1)
CASPTFVLSGEQFF

SEQ ID NO: 214673 - protein, 13 aa, Homo sapiens
  CDR3 for alpha chain variable domain of TCR clone 107337 (TRAV3, TRAJ13)
CAVRDGGYQKVTF

SEQ ID NO: 214674 - protein, 14 aa, Homo sapiens
  CDR3 for beta chain variable domain of TCR clone 107337 (TRBV15, TRBJ2-2)
CATSSAWNTGELFF

SEQ ID NO: 214675 - protein, 12 aa, Homo sapiens
  CDR3 for alpha chain variable domain of TCR clone 107338 (TRAV3, TRAJ43)
CAVRDPNNDMSF

SEQ ID NO: 214676 - protein, 15 aa, Homo sapiens
  CDR3 for beta chain variable domain of TCR clone 107338 (TRBV27, TRBJ1-5)
CASSLGTGFDQPQHF

SEQ ID NO: 214677 - protein, 15 aa, Homo sapiens
  CDR3 for alpha chain variable domain of TCR clone 107339 (TRAV8-2, TRAJ15)
CVVTMGNQAGTALIF

SEQ ID NO: 214678 - protein, 15 aa, Homo sapiens
  CDR3 for beta chain variable domain of TCR clone 107339 (TRBV28, TRBJ2-1)
CASSIIAGGRSEQFF

SEQ ID NO: 214679 - protein, 15 aa, Homo sapiens
  CDR3 for alpha chain variable domain of TCR clone 107340 (TRAV4, TRAJ39)
CLVGPNNNAGNMLTF

SEQ ID NO: 214680 - protein, 15 aa, Homo sapiens
  CDR3 for beta chain variable domain of TCR clone 107340 (TRBV7-8, TRBJ2-1)
CASSLADSLYNEQFF

SEQ ID NO: 214681 - protein, 12 aa, Homo sapiens
  CDR3 for alpha chain variable domain of TCR clone 107341 (TRAV26-2, TRAJ48)
CILRKGNEKVTF

SEQ ID NO: 214682 - protein, 14 aa, Homo sapiens
  CDR3 for beta chain variable domain of TCR clone 107341 (TRBV28, TRBJ2-7)
CASSTLRGRFEQYF

SEQ ID NO: 214683 - protein, 15 aa, Homo sapiens
  CDR3 for alpha chain variable domain of TCR clone 107342 (TRAV23/DV6, TRAJ33)
CAASNSGGGNYQLIW

SEQ ID NO: 214684 - protein, 14 aa, Homo sapiens
  CDR3 for beta chain variable domain of TCR clone 107342 (TRBV7-2, TRBJ2-5)
CASSPRGSSETQYF

SEQ ID NO: 214685 - protein, 17 aa, Homo sapiens
  CDR3 for alpha chain variable domain of TCR clone 107343 (TRAV3, TRAJ42)
CAVRDRDYGGSQGNLIF

SEQ ID NO: 214686 - protein, 14 aa, Homo sapiens
  CDR3 for beta chain variable domain of TCR clone 107343 (TRBV12-4, TRBJ1-6)
CASNLQGKGSPLHF

SEQ ID NO: 214687 - protein, 14 aa, Homo sapiens
  CDR3 for alpha chain variable domain of TCR clone 107344 (TRAV17, TRAJ57)
CATDPQGGSEKLVF

SEQ ID NO: 214688 - protein, 12 aa, Homo sapiens
  CDR3 for beta chain variable domain of TCR clone 107344 (TRBV2, TRBJ2-1)
CAYGPPGNEQFF

SEQ ID NO: 214689 - protein, 16 aa, Homo sapiens
  CDR3 for alpha chain variable domain of TCR clone 107345 (TRAV30, TRAJ24)
CGTEIVDADSWGKFQF

SEQ ID NO: 214690 - protein, 18 aa, Homo sapiens
  CDR3 for beta chain variable domain of TCR clone 107345 (TRBV4-1, TRBJ2-3)
CASSHQLAGGRSTDTQYF

SEQ ID NO: 214691 - protein, 12 aa, Homo sapiens
  CDR3 for alpha chain variable domain of TCR clone 107346 (TRAV23/DV6, TRAJ31)
CADRRIGARLMF

SEQ ID NO: 214692 - protein, 13 aa, Homo sapiens
  CDR3 for beta chain variable domain of TCR clone 107346 (TRBV28, TRBJ2-7)
CASKAGGVYEQYF

SEQ ID NO: 214693 - protein, 13 aa, Homo sapiens
  CDR3 for alpha chain variable domain of TCR clone 107347 (TRAV8-4, TRAJ10)
CAAFTGGGNKLTF

SEQ ID NO: 214694 - protein, 15 aa, Homo sapiens
  CDR3 for beta chain variable domain of TCR clone 107347 (TRBV2, TRBJ2-3)
CASSDSERATDTQYF

SEQ ID NO: 214695 - protein, 17 aa, Homo sapiens
  CDR3 for alpha chain variable domain of TCR clone 107348 (TRAV3, TRAJ6)
CAVRDGPRAGGSYIPTF

SEQ ID NO: 214696 - protein, 15 aa, Homo sapiens
  CDR3 for beta chain variable domain of TCR clone 107348 (TRBV20-1, TRBJ1-1)
CSASWDRSLNTEAFF

SEQ ID NO: 214697 - protein, 16 aa, Homo sapiens
  CDR3 for alpha chain variable domain of TCR clone 107349 (TRAV1-1, TRAJ29)
CAVRSTRNSGNTPLVF

SEQ ID NO: 214698 - protein, 16 aa, Homo sapiens
  CDR3 for beta chain variable domain of TCR clone 107349 (TRBV27, TRBJ1-1)
CASSSRGRMGYTEAFF

SEQ ID NO: 214699 - protein, 22 aa, Homo sapiens
  CDR3 for alpha chain variable domain of TCR clone 107350 (TRAV27, TRAJ38)
CAGRFNAGNNHIQNPDPAVYQL

SEQ ID NO: 214700 - protein, 13 aa, Homo sapiens
  CDR3 for beta chain variable domain of TCR clone 107350 (TRBV20-1, TRBJ1-1)
CSARGGGNTEAFF

SEQ ID NO: 214701 - protein, 13 aa, Homo sapiens
  CDR3 for alpha chain variable domain of TCR clone 107351 (TRAV3, TRAJ21)
CAVREPDFNKFYF

SEQ ID NO: 214702 - protein, 14 aa, Homo sapiens
  CDR3 for beta chain variable domain of TCR clone 107351 (TRBV20-1, TRBJ2-7)
CSAKRGRSSYEQYF

SEQ ID NO: 214703 - protein, 18 aa, Homo sapiens
  CDR3 for alpha chain variable domain of TCR clone 107352 (TRAV21, TRAJ52)
CAVRPSPAGGTSYGKLTF

SEQ ID NO: 214704 - protein, 15 aa, Homo sapiens
  CDR3 for beta chain variable domain of TCR clone 107352 (TRBV7-2, TRBJ2-7)
CASSSGLAGRREQYF

SEQ ID NO: 214705 - protein, 15 aa, Homo sapiens
  CDR3 for alpha chain variable domain of TCR clone 107353 (TRAV12-3, TRAJ11)
CAMSEENSGYSTLTF

SEQ ID NO: 214706 - protein, 16 aa, Homo sapiens
  CDR3 for beta chain variable domain of TCR clone 107353 (TRBV5-1, TRBJ2-7)
CASSLEGLAGLYERYF

SEQ ID NO: 214707 - protein, 14 aa, Homo sapiens
  CDR3 for alpha chain variable domain of TCR clone 107354 (TRAV12-2, TRAJ17)
CAVNIKAAGNKLTF

SEQ ID NO: 214708 - protein, 13 aa, Homo sapiens
  CDR3 for beta chain variable domain of TCR clone 107354 (TRBV10-3, TRBJ2-7)
CASKLAVNYEQYF

SEQ ID NO: 214709 - protein, 15 aa, Homo sapiens
  CDR3 for alpha chain variable domain of TCR clone 107355 (TRAV17, TRAJ57)
CATGPSQGGSEKLVF

SEQ ID NO: 214710 - protein, 15 aa, Homo sapiens
  CDR3 for beta chain variable domain of TCR clone 107355 (TRBV19, TRBJ1-6)
CASSTQGAVGSPLHF

SEQ ID NO: 214711 - protein, 13 aa, Homo sapiens
  CDR3 for alpha chain variable domain of TCR clone 107356 (TRAV12-1, TRAJ33)
CGDAPDSNYQLIW

SEQ ID NO: 214712 - protein, 15 aa, Homo sapiens
  CDR3 for beta chain variable domain of TCR clone 107356 (TRBV27, TRBJ2-1)
CASSNGGGPSNEQFF

SEQ ID NO: 214713 - protein, 11 aa, Homo sapiens
  CDR3 for alpha chain variable domain of TCR clone 107357 (TRAV12-1, TRAJ21)
CVVYNFNKFYF

SEQ ID NO: 214714 - protein, 14 aa, Homo sapiens
  CDR3 for beta chain variable domain of TCR clone 107357 (TRBV19, TRBJ2-7)
CASSMGQGEIEQYF

SEQ ID NO: 214715 - protein, 12 aa, Homo sapiens
  CDR3 for alpha chain variable domain of TCR clone 107358 (TRAV21, TRAJ37)
CAVRDNTGKLIF

SEQ ID NO: 214716 - protein, 14 aa, Homo sapiens
  CDR3 for beta chain variable domain of TCR clone 107358 (TRBV19, TRBJ2-1)
CASEVTGARNEQFF

SEQ ID NO: 214717 - protein, 14 aa, Homo sapiens
  CDR3 for alpha chain variable domain of TCR clone 107359 (TRAV1-2, TRAJ16)
CAVNRFSDGQKLLF

SEQ ID NO: 214718 - protein, 14 aa, Homo sapiens
  CDR3 for beta chain variable domain of TCR clone 107359 (TRBV4-2, TRBJ2-5)
CASSQDRGRETQYF

SEQ ID NO: 214719 - protein, 18 aa, Homo sapiens
  CDR3 for alpha chain variable domain of TCR clone 107360 (TRAV13-1, TRAJ52)
CAAKNPNAGGTSYGKLTF

SEQ ID NO: 214720 - protein, 15 aa, Homo sapiens
  CDR3 for beta chain variable domain of TCR clone 107360 (TRBV28, TRBJ2-5)
CASSSGRAIQETQYF

SEQ ID NO: 214721 - protein, 15 aa, Homo sapiens
  CDR3 for alpha chain variable domain of TCR clone 107361 (TRAV4, TRAJ39)
CLVGPNNNAGNMLTF

SEQ ID NO: 214722 - protein, 16 aa, Homo sapiens
  CDR3 for beta chain variable domain of TCR clone 107361 (TRBV13, TRBJ2-2)
CASSPRTGEHTGELVF

SEQ ID NO: 214723 - protein, 15 aa, Homo sapiens
  CDR3 for alpha chain variable domain of TCR clone 107362 (TRAV21, TRAJ13)
CAVRPTSGGYQKVTF

SEQ ID NO: 214724 - protein, 14 aa, Homo sapiens
  CDR3 for beta chain variable domain of TCR clone 107362 (TRBV11-2, TRBJ1-2)
CASSLGTANYGYTF

SEQ ID NO: 214725 - protein, 14 aa, Homo sapiens
  CDR3 for alpha chain variable domain of TCR clone 107363 (TRAV13-1, TRAJ40)
CAASMTSGTYKYIF

SEQ ID NO: 214726 - protein, 15 aa, Homo sapiens
  CDR3 for beta chain variable domain of TCR clone 107363 (TRBV7-3, TRBJ2-1)
CASSPTGGGEVEQFV

SEQ ID NO: 214727 - protein, 17 aa, Homo sapiens
  CDR3 for alpha chain variable domain of TCR clone 107364 (TRAV8-6, TRAJ58)
CAVSSWVGETSGSRLPF

SEQ ID NO: 214728 - protein, 16 aa, Homo sapiens
  CDR3 for beta chain variable domain of TCR clone 107364 (TRBV20-1, TRBJ1-4)
CSAPGQGLLTNEKLFF

SEQ ID NO: 214729 - protein, 12 aa, Homo sapiens
  CDR3 for alpha chain variable domain of TCR clone 107365 (TRAV1-1, TRAJ23)
CAVTNQGGKLIF

SEQ ID NO: 214730 - protein, 14 aa, Homo sapiens
  CDR3 for beta chain variable domain of TCR clone 107365 (TRBV7-2, TRBJ2-7)
CASSPKTSFYEQYF

SEQ ID NO: 214731 - protein, 15 aa, Homo sapiens
  CDR3 for alpha chain variable domain of TCR clone 107366 (TRAV12-1, TRAJ44)
CVVFVNTGTASKLTF

SEQ ID NO: 214732 - protein, 17 aa, Homo sapiens
  CDR3 for beta chain variable domain of TCR clone 107366 (TRBV11-2, TRBJ2-1)
CASSLYPPGVEYNEQFF

SEQ ID NO: 214733 - protein, 15 aa, Homo sapiens
  CDR3 for alpha chain variable domain of TCR clone 107367 (TRAV14/DV4, TRAJ46)
CAMREKKSSGDKLTF

SEQ ID NO: 214734 - protein, 13 aa, Homo sapiens
  CDR3 for beta chain variable domain of TCR clone 107367 (TRBV20-1, TRBJ2-5)
CSAREAFQEAQYF

SEQ ID NO: 214735 - protein, 12 aa, Homo sapiens
  CDR3 for alpha chain variable domain of TCR clone 107368 (TRAV12-2, TRAJ10)
WGVTGGGSKLTF

SEQ ID NO: 214736 - protein, 14 aa, Homo sapiens
  CDR3 for beta chain variable domain of TCR clone 107368 (TRBV27, TRBJ2-7)
CASATGTERREQYF

SEQ ID NO: 214737 - protein, 15 aa, Homo sapiens
  CDR3 for alpha chain variable domain of TCR clone 107369 (TRAV1-1, TRAJ20)
CAVGDNVANDYKLSF

SEQ ID NO: 214738 - protein, 17 aa, Homo sapiens
  CDR3 for beta chain variable domain of TCR clone 107369 (TRBV7-2, TRBJ2-3)
CASSLAGGLAGTAGQYF

SEQ ID NO: 214739 - protein, 13 aa, Homo sapiens
  CDR3 for alpha chain variable domain of TCR clone 107370 (TRAV12-2, TRAJ12)
CAVNWDSSYKLIF

SEQ ID NO: 214740 - protein, 15 aa, Homo sapiens
  CDR3 for beta chain variable domain of TCR clone 107370 (TRBV19, TRBJ2-1)
CASSSPGVPLDEQFF

SEQ ID NO: 214741 - protein, 12 aa, Homo sapiens
  CDR3 for alpha chain variable domain of TCR clone 107371 (TRAV25, TRAJ11)
CAGYSGYSTLTF

SEQ ID NO: 214742 - protein, 13 aa, Homo sapiens
  CDR3 for beta chain variable domain of TCR clone 107371 (TRBV7-9, TRBJ1-2)
CAGSLKQNYGYTF

SEQ ID NO: 214743 - protein, 12 aa, Homo sapiens
  CDR3 for alpha chain variable domain of TCR clone 107372 (TRAV17, TRAJ36)
CATLTGANNLFF

SEQ ID NO: 214744 - protein, 15 aa, Homo sapiens
  CDR3 for beta chain variable domain of TCR clone 107372 (TRBV19, TRBJ1-2)
CASSTKTDTNYGYAF

SEQ ID NO: 214745 - protein, 12 aa, Homo sapiens
  CDR3 for alpha chain variable domain of TCR clone 107373 (TRAV13-1, TRAJ21)
CAAKEGFNKFYF

SEQ ID NO: 214746 - protein, 14 aa, Homo sapiens
  CDR3 for beta chain variable domain of TCR clone 107373 (TRBV7-9, TRBJ2-5)
CASSLDTAQETQYF

SEQ ID NO: 214747 - protein, 15 aa, Homo sapiens
  CDR3 for alpha chain variable domain of TCR clone 107374 (TRAV35, TRAJ23)
CAGPLGNNQGGTLIF

SEQ ID NO: 214748 - protein, 14 aa, Homo sapiens
  CDR3 for beta chain variable domain of TCR clone 107374 (TRBV7-9, TRBJ1-1)
CASTPLQSYTEAFF

SEQ ID NO: 214749 - protein, 14 aa, Homo sapiens
  CDR3 for alpha chain variable domain of TCR clone 107375 (TRAV38-1, TRAJ29)
CAFITPSGNTPLVF

SEQ ID NO: 214750 - protein, 11 aa, Homo sapiens
  CDR3 for beta chain variable domain of TCR clone 107375 (TRBV12-4, TRBJ2-7)
CATPEKGEQYF

SEQ ID NO: 214751 - protein, 16 aa, Homo sapiens
  CDR3 for alpha chain variable domain of TCR clone 107376 (TRAV12-2, TRAJ45)
CAVIFLSVGGADGLTF

SEQ ID NO: 214752 - protein, 19 aa, Homo sapiens
  CDR3 for beta chain variable domain of TCR clone 107376 (TRBV28, TRBJ2-4)
CASSFQPGGPAHSKNIQYF

SEQ ID NO: 214753 - protein, 14 aa, Homo sapiens
  CDR3 for alpha chain variable domain of TCR clone 107377 (TRAV8-1, TRAJ24)
CAVNAADSWGKLQF

SEQ ID NO: 214754 - protein, 16 aa, Homo sapiens
  CDR3 for beta chain variable domain of TCR clone 107377 (TRBV4-3, TRBJ2-1)
CASSRALDRGVNEQFF

SEQ ID NO: 214755 - protein, 14 aa, Homo sapiens
  CDR3 for alpha chain variable domain of TCR clone 107378 (TRAV35, TRAJ13)
CAGSPSGGYQKVTF

SEQ ID NO: 214756 - protein, 14 aa, Homo sapiens
  CDR3 for beta chain variable domain of TCR clone 107378 (TRBV7-2, TRBJ2-7)
CASSPKTSFYEQYF

SEQ ID NO: 214757 - protein, 15 aa, Homo sapiens
  CDR3 for alpha chain variable domain of TCR clone 107379 (TRAV2, TRAJ9)
CAVEDRGTGGFKTIF

SEQ ID NO: 214758 - protein, 15 aa, Homo sapiens
  CDR3 for beta chain variable domain of TCR clone 107379 (TRBV7-9, TRBJ1-4)
CASSARTGGDEKLFF

SEQ ID NO: 214759 - protein, 15 aa, Homo sapiens
  CDR3 for alpha chain variable domain of TCR clone 107380 (TRAV12-3, TRAJ8)
CAMSLLNTGFQKLVF

SEQ ID NO: 214760 - protein, 15 aa, Homo sapiens
  CDR3 for beta chain variable domain of TCR clone 107380 (TRBV7-8, TRBJ1-1)
CASSLGDSRNTEAFF

SEQ ID NO: 214761 - protein, 13 aa, Homo sapiens
  CDR3 for alpha chain variable domain of TCR clone 107381 (TRAV13-1, TRAJ21)
CAASIYNFNKFYF

SEQ ID NO: 214762 - protein, 16 aa, Homo sapiens
  CDR3 for beta chain variable domain of TCR clone 107381 (TRBV19, TRBJ1-6)
CASSVAPVAGNSPLHF

SEQ ID NO: 214763 - protein, 14 aa, Homo sapiens
  CDR3 for alpha chain variable domain of TCR clone 107382 (TRAV8-3, TRAJ9)
CAVVHNTGGFKTIS

SEQ ID NO: 214764 - protein, 14 aa, Homo sapiens
  CDR3 for beta chain variable domain of TCR clone 107382 (TRBV7-3, TRBJ2-2)
CASSSGGYTGELFF

SEQ ID NO: 214765 - protein, 16 aa, Homo sapiens
  CDR3 for alpha chain variable domain of TCR clone 107383 (TRAV8-6, TRAJ4)
CAVSPTFSGGHNKLIF

SEQ ID NO: 214766 - protein, 14 aa, Homo sapiens
  CDR3 for beta chain variable domain of TCR clone 107383 (TRBV29-1, TRBJ2-2)
CSVVTSGAPGELFF

SEQ ID NO: 214767 - protein, 11 aa, Homo sapiens
  CDR3 for alpha chain variable domain of TCR clone 107384 (TRAV26-1, TRAJ27)
RIDPNAGKSTF

SEQ ID NO: 214768 - protein, 18 aa, Homo sapiens
  CDR3 for beta chain variable domain of TCR clone 107384 (TRBV7-9, TRBJ2-6)
CASSFPGAGISGANVLTF

SEQ ID NO: 214769 - protein, 16 aa, Homo sapiens
  CDR3 for alpha chain variable domain of TCR clone 107385 (TRAV12-3, TRAJ53)
CAMSPGSGGRNHKLTF

SEQ ID NO: 214770 - protein, 11 aa, Homo sapiens
  CDR3 for beta chain variable domain of TCR clone 107385 (TRBV29-1, TRBJ2-5)
CSEDRTGTQYF

SEQ ID NO: 214771 - protein, 17 aa, Homo sapiens
  CDR3 for alpha chain variable domain of TCR clone 107386 (TRAV8-6, TRAJ58)
CAVSSWVGETRGSRLTF

SEQ ID NO: 214772 - protein, 17 aa, Homo sapiens
  CDR3 for beta chain variable domain of TCR clone 107386 (TRBV4-3, TRBJ1-2)
CASSSRLQAGGSVGYTF

SEQ ID NO: 214773 - protein, 11 aa, Homo sapiens
  CDR3 for alpha chain variable domain of TCR clone 107387 (TRAV17, TRAJ36)
CAPTGANNLFF

SEQ ID NO: 214774 - protein, 12 aa, Homo sapiens
  CDR3 for beta chain variable domain of TCR clone 107387 (TRBV29-1, TRBJ2-3)
CSVTGGADTRYF

SEQ ID NO: 214775 - protein, 14 aa, Homo sapiens
  CDR3 for alpha chain variable domain of TCR clone 107388 (TRAV16, TRAJ33)
CALSAMDSNYQLIW

SEQ ID NO: 214776 - protein, 14 aa, Homo sapiens
  CDR3 for beta chain variable domain of TCR clone 107388 (TRBV4-2, TRBJ2-1)
CASGLDGAYNEQFF

SEQ ID NO: 214777 - protein, 15 aa, Homo sapiens
  CDR3 for alpha chain variable domain of TCR clone 107389 (TRAV26-1, TRAJ29)
FIVRVEGSGNTPLVF

SEQ ID NO: 214778 - protein, 14 aa, Homo sapiens
  CDR3 for beta chain variable domain of TCR clone 107389 (TRBV25-1, TRBJ1-1)
CASTHLGGNTEAFF

SEQ ID NO: 214779 - protein, 16 aa, Homo sapiens
  CDR3 for alpha chain variable domain of TCR clone 107390 (TRAV3, TRAJ37)
CAVRGKGSGNTGKLIF

SEQ ID NO: 214780 - protein, 15 aa, Homo sapiens
  CDR3 for beta chain variable domain of TCR clone 107390 (TRBV7-9, TRBJ1-6)
CASSSPGRGNSPLLF

SEQ ID NO: 214781 - protein, 10 aa, Homo sapiens
  CDR3 for alpha chain variable domain of TCR clone 107391 (TRAV20, TRAJ22)
CAAPARQLAF

SEQ ID NO: 214782 - protein, 11 aa, Homo sapiens
  CDR3 for beta chain variable domain of TCR clone 107391 (TRBV29-1, TRBJ2-5)
CSEDRTGTQYF

SEQ ID NO: 214783 - protein, 15 aa, Homo sapiens
  CDR3 for alpha chain variable domain of TCR clone 107392 (TRAV26-1, TRAJ22)
CIVRVSFWFCKATDH

SEQ ID NO: 214784 - protein, 13 aa, Homo sapiens
  CDR3 for beta chain variable domain of TCR clone 107392 (TRBV7-9, TRBJ1-2)
CASSLKQNYGYTF

SEQ ID NO: 214785 - protein, 13 aa, Homo sapiens
  CDR3 for alpha chain variable domain of TCR clone 107393 (TRAV24, TRAJ42)
CAFSTGSQGNLIF

SEQ ID NO: 214786 - protein, 17 aa, Homo sapiens
  CDR3 for beta chain variable domain of TCR clone 107393 (TRBV11-2, TRBJ2-1)
CASSLYPPGVEYNEQFF

SEQ ID NO: 214787 - protein, 16 aa, Homo sapiens
  CDR3 for alpha chain variable domain of TCR clone 107394 (TRAV30, TRAJ24)
CGTEIEDADSWGKFQV

SEQ ID NO: 214788 - protein, 14 aa, Homo sapiens
  CDR3 for beta chain variable domain of TCR clone 107394 (TRBV12-5, TRBJ2-5)
CASGSRTHQETQYF

SEQ ID NO: 214789 - protein, 14 aa, Homo sapiens
  CDR3 for alpha chain variable domain of TCR clone 107395 (TRAV12-2, TRAJ11)
CVVNRESGYSTLTF

SEQ ID NO: 214790 - protein, 10 aa, Homo sapiens
  CDR3 for beta chain variable domain of TCR clone 107395 (TRBV20-1, TRBJ2-5)
CSARFETQYF

SEQ ID NO: 214791 - protein, 14 aa, Homo sapiens
  CDR3 for alpha chain variable domain of TCR clone 107396 (TRAV12-2, TRAJ15)
CAPHTGQAGTALIF

SEQ ID NO: 214792 - protein, 15 aa, Homo sapiens
  CDR3 for beta chain variable domain of TCR clone 107396 (TRBV5-7, TRBJ1-5)
CAGSYGKLWDQPQHF

SEQ ID NO: 214793 - protein, 12 aa, Homo sapiens
  CDR3 for alpha chain variable domain of TCR clone 107397 (TRAV29/DV5, TRAJ27)
CAASTNAGKSTF

SEQ ID NO: 214794 - protein, 13 aa, Homo sapiens
  CDR3 for beta chain variable domain of TCR clone 107397 (TRBV6-5, TRBJ2-7)
CAGSYSGQYEQYF

SEQ ID NO: 214795 - protein, 13 aa, Homo sapiens
  CDR3 for alpha chain variable domain of TCR clone 107398 (TRAV22, TRAJ29)
CAVGGSGNTPLVF

SEQ ID NO: 214796 - protein, 16 aa, Homo sapiens
  CDR3 for beta chain variable domain of TCR clone 107398 (TRBV10-3, TRBJ2-1)
CASRGGGRGDYNEQFF

SEQ ID NO: 214797 - protein, 13 aa, Homo sapiens
  CDR3 for alpha chain variable domain of TCR clone 107399 (TRAV20, TRAJ34)
CAVSSYNTDKLIF

SEQ ID NO: 214798 - protein, 14 aa, Homo sapiens
  CDR3 for beta chain variable domain of TCR clone 107399 (TRBV7-2, TRBJ1-1)
CASSFLTGTTEAFF

SEQ ID NO: 214799 - protein, 10 aa, Homo sapiens
  CDR3 for alpha chain variable domain of TCR clone 107400 (TRAV12-1, TRAJ43)
CVVHNNDMRF

SEQ ID NO: 214800 - protein, 13 aa, Homo sapiens
  CDR3 for beta chain variable domain of TCR clone 107400 (TRBV12-4, TRBJ1-2)
CASSSGQTVISTF

SEQ ID NO: 214801 - protein, 12 aa, Homo sapiens
  CDR3 for alpha chain variable domain of TCR clone 107401 (TRAV17, TRAJ57)
CATDGGSEKLVF

SEQ ID NO: 214802 - protein, 13 aa, Homo sapiens
  CDR3 for beta chain variable domain of TCR clone 107401 (TRBV7-9, TRBJ2-7)
CARSFAGAYEQYF

SEQ ID NO: 214803 - protein, 18 aa, Homo sapiens
  CDR3 for alpha chain variable domain of TCR clone 107402 (TRAV26-2, TRAJ45)
CILRVDKYSGGGADGITF

SEQ ID NO: 214804 - protein, 14 aa, Homo sapiens
  CDR3 for beta chain variable domain of TCR clone 107402 (TRBV7-2, TRBJ2-7)
CASRSQGAAYEQYF

SEQ ID NO: 214805 - protein, 13 aa, Homo sapiens
  CDR3 for alpha chain variable domain of TCR clone 107403 (TRAV16, TRAJ34)
CALISYNTDKLIF

SEQ ID NO: 214806 - protein, 14 aa, Homo sapiens
  CDR3 for beta chain variable domain of TCR clone 107403 (TRBV7-2, TRBJ2-7)
CASSGLAGRGEQYF

SEQ ID NO: 214807 - protein, 13 aa, Homo sapiens
  CDR3 for alpha chain variable domain of TCR clone 107404 (TRAV27, TRAJ29)
CAGAHSGNTPLVF

SEQ ID NO: 214808 - protein, 18 aa, Homo sapiens
  CDR3 for beta chain variable domain of TCR clone 107404 (TRBV6-6, TRBJ1-3)
CASSYSKWDSISGNTIYS

SEQ ID NO: 214809 - protein, 14 aa, Homo sapiens
  CDR3 for alpha chain variable domain of TCR clone 107405 (TRAV12-1, TRAJ17)
CVVNYKAAGNKLTF

SEQ ID NO: 214810 - protein, 15 aa, Homo sapiens
  CDR3 for beta chain variable domain of TCR clone 107405 (TRBV29-1, TRBJ2-7)
CSVEFFDRGSYEQYF

SEQ ID NO: 214811 - protein, 16 aa, Homo sapiens
  CDR3 for alpha chain variable domain of TCR clone 107406 (TRAV3, TRAJ21)
CALRDIERGNFNKFYF

SEQ ID NO: 214812 - protein, 14 aa, Homo sapiens
  CDR3 for beta chain variable domain of TCR clone 107406 (TRBV12-4, TRBJ2-5)
CASSLSSGRETQYF

SEQ ID NO: 214813 - protein, 16 aa, Homo sapiens
  CDR3 for alpha chain variable domain of TCR clone 107407 (TRAV27, TRAJ13)
CAGAKSDSGGYQKVTF

SEQ ID NO: 214814 - protein, 18 aa, Homo sapiens
  CDR3 for beta chain variable domain of TCR clone 107407 (TRBV4-1, TRBJ1-4)
CASSPRTGGAWTNEKLFF

SEQ ID NO: 214815 - protein, 15 aa, Homo sapiens
  CDR3 for alpha chain variable domain of TCR clone 107408 (TRAV12-3, TRAJ42)
CAMSGHGGSQGNLIF

SEQ ID NO: 214816 - protein, 15 aa, Homo sapiens
  CDR3 for beta chain variable domain of TCR clone 107408 (TRBV5-1, TRBJ1-4)
CASSTVGTRDEKLFF

SEQ ID NO: 214817 - protein, 16 aa, Homo sapiens
  CDR3 for alpha chain variable domain of TCR clone 107409 (TRAV20, TRAJ22)
CAVQASSSGSARQLTI

SEQ ID NO: 214818 - protein, 13 aa, Homo sapiens
  CDR3 for beta chain variable domain of TCR clone 107409 (TRBV7-2, TRBJ2-5)
CASSQTSVETQYF

SEQ ID NO: 214819 - protein, 15 aa, Homo sapiens
  CDR3 for alpha chain variable domain of TCR clone 107410 (TRAV3, TRAJ13)
CAVRVYSGGYQEVTF

SEQ ID NO: 214820 - protein, 15 aa, Homo sapiens
  CDR3 for beta chain variable domain of TCR clone 107410 (TRBV5-7, TRBJ1-2)
CASSLGVAANYGYTF

SEQ ID NO: 214821 - protein, 13 aa, Homo sapiens
  CDR3 for alpha chain variable domain of TCR clone 107411 (TRAV27, TRAJ45)
CRSSGGGADGLTF

SEQ ID NO: 214822 - protein, 15 aa, Homo sapiens
  CDR3 for beta chain variable domain of TCR clone 107411 (TRBV20-1, TRBJ2-7)
CSARDRVAGMDEQYF

SEQ ID NO: 214823 - protein, 14 aa, Homo sapiens
  CDR3 for alpha chain variable domain of TCR clone 107412 (TRAV26-1, TRAJ39)
CIVRGSRAGNMLTF

SEQ ID NO: 214824 - protein, 15 aa, Homo sapiens
  CDR3 for beta chain variable domain of TCR clone 107412 (TRBV7-9, TRBJ1-5)
CTSSQGHQPNQPQHF

SEQ ID NO: 214825 - protein, 14 aa, Homo sapiens
  CDR3 for alpha chain variable domain of TCR clone 107413 (TRAV38-1, TRAJ45)
CASHSGGGADGLTF

SEQ ID NO: 214826 - protein, 13 aa, Homo sapiens
  CDR3 for beta chain variable domain of TCR clone 107413 (TRBV7-2, TRBJ2-2)
CASSLAVTGELFF

SEQ ID NO: 214827 - protein, 12 aa, Homo sapiens
  CDR3 for alpha chain variable domain of TCR clone 107414 (TRAV30, TRAJ43)
CGTEERGNDMRF

SEQ ID NO: 214828 - protein, 13 aa, Homo sapiens
  CDR3 for beta chain variable domain of TCR clone 107414 (TRBV27, TRBJ2-7)
CASSFSKGYEQYF

SEQ ID NO: 214829 - protein, 13 aa, Homo sapiens
  CDR3 for alpha chain variable domain of TCR clone 107415 (TRAV23/DV6, TRAJ22)
CAPWGGSASQLTF

SEQ ID NO: 214830 - protein, 14 aa, Homo sapiens
  CDR3 for beta chain variable domain of TCR clone 107415 (TRBV18, TRBJ2-7)
CASSPTSGGYEQYF

SEQ ID NO: 214831 - protein, 17 aa, Homo sapiens
  CDR3 for alpha chain variable domain of TCR clone 107416 (TRAV26-1, TRAJ37)
CIVRVITGSSNTGKLIF

SEQ ID NO: 214832 - protein, 14 aa, Homo sapiens
  CDR3 for beta chain variable domain of TCR clone 107416 (TRBV19, TRBJ2-1)
CASPTFVLSGEQFF

SEQ ID NO: 214833 - protein, 15 aa, Homo sapiens
  CDR3 for alpha chain variable domain of TCR clone 107417 (TRAV3, TRAJ4)
CAVRDGTGGYNKLIF

SEQ ID NO: 214834 - protein, 13 aa, Homo sapiens
  CDR3 for beta chain variable domain of TCR clone 107417 (TRBV12-4, TRBJ2-7)
CASSPTETYEQYF

SEQ ID NO: 214835 - protein, 12 aa, Homo sapiens
  CDR3 for alpha chain variable domain of TCR clone 107418 (TRAV1-1, TRAJ39)
CAVPVVGNMLTF

SEQ ID NO: 214836 - protein, 18 aa, Homo sapiens
  CDR3 for beta chain variable domain of TCR clone 107418 (TRBV6-3, TRBJ2-5)
CTSVPAVTGDSSGEAQYF

SEQ ID NO: 214837 - protein, 15 aa, Homo sapiens
  CDR3 for alpha chain variable domain of TCR clone 107419 (TRAV12-1, TRAJ42)
CLVTRDGGSQGNLIF

SEQ ID NO: 214838 - protein, 14 aa, Homo sapiens
  CDR3 for beta chain variable domain of TCR clone 107419 (TRBV11-2, TRBJ2-3)
CASSLGGGANTQYF

SEQ ID NO: 214839 - protein, 15 aa, Homo sapiens
  CDR3 for alpha chain variable domain of TCR clone 107420 (TRAV13-1, TRAJ44)
CAASRNTGTASKLTF

SEQ ID NO: 214840 - protein, 14 aa, Homo sapiens
  CDR3 for beta chain variable domain of TCR clone 107420 (TRBV11-2, TRBJ1-2)
CASSLYRGNYGYSF

SEQ ID NO: 214841 - protein, 15 aa, Homo sapiens
  CDR3 for alpha chain variable domain of TCR clone 107421 (TRAV27, TRAJ38)
CAARRNAGNNRKLIW

SEQ ID NO: 214842 - protein, 13 aa, Homo sapiens
  CDR3 for beta chain variable domain of TCR clone 107421 (TRBV12-5, TRBJ2-5)
CASGDRQSDTQYF

SEQ ID NO: 214843 - protein, 14 aa, Homo sapiens
  CDR3 for alpha chain variable domain of TCR clone 107422 (TRAV9-2, TRAJ39)
CALYIYNAGNMLTF

SEQ ID NO: 214844 - protein, 15 aa, Homo sapiens
  CDR3 for beta chain variable domain of TCR clone 107422 (TRBV27, TRBJ1-6)
CASSFDRGLGPPLHF

SEQ ID NO: 214845 - protein, 15 aa, Homo sapiens
  CDR3 for alpha chain variable domain of TCR clone 107423 (TRAV26-1, TRAJ22)
CIVRVSFWFCKATDL

SEQ ID NO: 214846 - protein, 13 aa, Homo sapiens
  CDR3 for beta chain variable domain of TCR clone 107423 (TRBV7-9, TRBJ1-2)
CASSLKQNYGNTF

SEQ ID NO: 214847 - protein, 15 aa, Homo sapiens
  CDR3 for alpha chain variable domain of TCR clone 107424 (TRAV12-2, TRAJ10)
GRGWRITGGGNKLTF

SEQ ID NO: 214848 - protein, 17 aa, Homo sapiens
  CDR3 for beta chain variable domain of TCR clone 107424 (TRBV13, TRBJ2-3)
CASSLSRVAGGRNTQYF

SEQ ID NO: 214849 - protein, 16 aa, Homo sapiens
  CDR3 for alpha chain variable domain of TCR clone 107425 (TRAV12-2, TRAJ32)
CAVNLGQGGATNKLIF

SEQ ID NO: 214850 - protein, 13 aa, Homo sapiens
  CDR3 for beta chain variable domain of TCR clone 107425 (TRBV10-3, TRBJ2-7)
CASKLAVNYEQYF

SEQ ID NO: 214851 - protein, 13 aa, Homo sapiens
  CDR3 for alpha chain variable domain of TCR clone 107426 (TRAV13-2, TRAJ53)
CAENMGSNYKLTF

SEQ ID NO: 214852 - protein, 13 aa, Homo sapiens
  CDR3 for beta chain variable domain of TCR clone 107426 (TRBV4-1, TRBJ2-2)
CANSQENTGELFF

SEQ ID NO: 214853 - protein, 11 aa, Homo sapiens
  CDR3 for alpha chain variable domain of TCR clone 107427 (TRAV2, TRAJ13)
CASGGYQKVTF

SEQ ID NO: 214854 - protein, 16 aa, Homo sapiens
  CDR3 for beta chain variable domain of TCR clone 107427 (TRBV6-1, TRBJ2-5)
CASSETLDWGAETQYF

SEQ ID NO: 214855 - protein, 11 aa, Homo sapiens
  CDR3 for alpha chain variable domain of TCR clone 107428 (TRAV8-4, TRAJ34)
CAVSWTDKLIF

SEQ ID NO: 214856 - protein, 13 aa, Homo sapiens
  CDR3 for beta chain variable domain of TCR clone 107428 (TRBV7-9, TRBJ1-2)
CASSLKQNYGYTF

SEQ ID NO: 214857 - protein, 14 aa, Homo sapiens
  CDR3 for alpha chain variable domain of TCR clone 107429 (TRAV8-1, TRAJ39)
CAVNASNAGNMPTF

SEQ ID NO: 214858 - protein, 13 aa, Homo sapiens
  CDR3 for beta chain variable domain of TCR clone 107429 (TRBV12-4, TRBJ2-5)
CASSPGTEETQYF

SEQ ID NO: 214859 - protein, 14 aa, Homo sapiens
  CDR3 for alpha chain variable domain of TCR clone 107430 (TRAV34, TRAJ44)
CGADGTGTASKLTF

SEQ ID NO: 214860 - protein, 17 aa, Homo sapiens
  CDR3 for beta chain variable domain of TCR clone 107430 (TRBV11-2, TRBJ2-1)
CASGLYPPGVEYNEQFF

SEQ ID NO: 214861 - protein, 15 aa, Homo sapiens
  CDR3 for alpha chain variable domain of TCR clone 107431 (TRAV13-1, TRAJ52)
SYYNAGGTSYGKLTF

SEQ ID NO: 214862 - protein, 11 aa, Homo sapiens
  CDR3 for beta chain variable domain of TCR clone 107431 (TRBV12-4, TRBJ2-2)
CASSSAGEPFF

SEQ ID NO: 214863 - protein, 10 aa, Homo sapiens
  CDR3 for alpha chain variable domain of TCR clone 107432 (TRAV3, TRAJ12)
CAVRDEMVRL

SEQ ID NO: 214864 - protein, 15 aa, Homo sapiens
  CDR3 for beta chain variable domain of TCR clone 107432 (TRBV5-5, TRBJ1-5)
CASSLKGGGEQPQHF

SEQ ID NO: 214865 - protein, 17 aa, Homo sapiens
  CDR3 for alpha chain variable domain of TCR clone 107433 (TRAV4, TRAJ18)
CLVGERSVGSTLGRLYF

SEQ ID NO: 214866 - protein, 13 aa, Homo sapiens
  CDR3 for beta chain variable domain of TCR clone 107433 (TRBV19, TRBJ1-2)
CASSVPGQDGYTF

SEQ ID NO: 214867 - protein, 12 aa, Homo sapiens
  CDR3 for alpha chain variable domain of TCR clone 107434 (TRAV17, TRAJ20)
CATDSKDYKLSF

SEQ ID NO: 214868 - protein, 16 aa, Homo sapiens
  CDR3 for beta chain variable domain of TCR clone 107434 (TRBV7-2, TRBJ1-2)
CASSSNQDRRGHGYTF

SEQ ID NO: 214869 - protein, 12 aa, Homo sapiens
  CDR3 for alpha chain variable domain of TCR clone 107435 (TRAV6, TRAJ30)
CAPEVRDDKIIF

SEQ ID NO: 214870 - protein, 15 aa, Homo sapiens
  CDR3 for beta chain variable domain of TCR clone 107435 (TRBV9, TRBJ1-6)
CASSVAGTGDSPLHF

SEQ ID NO: 214871 - protein, 13 aa, Homo sapiens
  CDR3 for alpha chain variable domain of TCR clone 107436 (TRAV13-1, TRAJ11)
CAAVLAGYSTLTS

SEQ ID NO: 214872 - protein, 17 aa, Homo sapiens
  CDR3 for beta chain variable domain of TCR clone 107436 (TRBV25-1, TRBJ2-7)
CASSDARVVFSSYEQYF

SEQ ID NO: 214873 - protein, 15 aa, Homo sapiens
  CDR3 for alpha chain variable domain of TCR clone 107437 (TRAV12-1, TRAJ45)
CVVLSGGGGADGLTF

SEQ ID NO: 214874 - protein, 14 aa, Homo sapiens
  CDR3 for beta chain variable domain of TCR clone 107437 (TRBV4-1, TRBJ2-2)
CASSQAVNTGELFF

SEQ ID NO: 214875 - protein, 13 aa, Homo sapiens
  CDR3 for alpha chain variable domain of TCR clone 107438 (TRAV8-3, TRAJ48)
CAVVPFGNEKLTF

SEQ ID NO: 214876 - protein, 12 aa, Homo sapiens
  CDR3 for beta chain variable domain of TCR clone 107438 (TRBV7-9, TRBJ2-7)
CASSFGSYEQYF

SEQ ID NO: 214877 - protein, 11 aa, Homo sapiens
  CDR3 for alpha chain variable domain of TCR clone 107439 (TRAV26-1, TRAJ37)
CIVRVGRKLIF

SEQ ID NO: 214878 - protein, 15 aa, Homo sapiens
  CDR3 for beta chain variable domain of TCR clone 107439 (TRBV4-2, TRBJ1-1)
CASSQEDLPRTEAFF

SEQ ID NO: 214879 - protein, 13 aa, Homo sapiens
  CDR3 for alpha chain variable domain of TCR clone 107440 (TRAV26-2, TRAJ43)
CILRAVNNNDMRF

SEQ ID NO: 214880 - protein, 16 aa, Homo sapiens
  CDR3 for beta chain variable domain of TCR clone 107440 (TRBV28, TRBJ2-7)
CASSSGTSGRGYEQYF

SEQ ID NO: 214881 - protein, 11 aa, Homo sapiens
  CDR3 for alpha chain variable domain of TCR clone 107441 (TRAV21, TRAJ44)
CAHYNTDKLIF

SEQ ID NO: 214882 - protein, 17 aa, Homo sapiens
  CDR3 for beta chain variable domain of TCR clone 107441 (TRBV7-3, TRBJ2-3)
CASSLMKRMRGADTQYF

SEQ ID NO: 214883 - protein, 13 aa, Homo sapiens
  CDR3 for alpha chain variable domain of TCR clone 107442 (TRAV8-3, TRAJ43)
CAVGPDNNNDMRF

SEQ ID NO: 214884 - protein, 14 aa, Homo sapiens
  CDR3 for beta chain variable domain of TCR clone 107442 (TRBV19, TRBJ2-1)
CASPTSVLSGEQFF

SEQ ID NO: 214885 - protein, 14 aa, Homo sapiens
  CDR3 for alpha chain variable domain of TCR clone 107443 (TRAV16, TRAJ48)
CALTPGFGNEKLTF

SEQ ID NO: 214886 - protein, 15 aa, Homo sapiens
  CDR3 for beta chain variable domain of TCR clone 107443 (TRBV7-3, TRBJ2-1)
CASSPTGGGEVEQFF

SEQ ID NO: 214887 - protein, 17 aa, Homo sapiens
  CDR3 for alpha chain variable domain of TCR clone 107444 (TRAV3, TRAJ12)
CAVRDGGRMDSSYKLIF

SEQ ID NO: 214888 - protein, 13 aa, Homo sapiens
  CDR3 for beta chain variable domain of TCR clone 107444 (TRBV19, TRBJ1-2)
CASSQGQVYGYTF

SEQ ID NO: 214889 - protein, 13 aa, Homo sapiens
  CDR3 for alpha chain variable domain of TCR clone 107445 (TRAV38-2/DV8, TRAJ34)
CAYRNYNTDKLIF

SEQ ID NO: 214890 - protein, 15 aa, Homo sapiens
  CDR3 for beta chain variable domain of TCR clone 107445 (TRBV20-1, TRBJ2-5)
CSAEGTGGLHETQYF

SEQ ID NO: 214891 - protein, 14 aa, Homo sapiens
  CDR3 for alpha chain variable domain of TCR clone 107446 (TRAV8-3, TRAJ44)
CAVGNTGTASKLTF

SEQ ID NO: 214892 - protein, 15 aa, Homo sapiens
  CDR3 for beta chain variable domain of TCR clone 107446 (TRBV28, TRBJ2-7)
CASSFRGQGRYEQHF

SEQ ID NO: 214893 - protein, 14 aa, Homo sapiens
  CDR3 for alpha chain variable domain of TCR clone 107447 (TRAV17, TRAJ34)
CATDSLEGTDKLIF

SEQ ID NO: 214894 - protein, 14 aa, Homo sapiens
  CDR3 for beta chain variable domain of TCR clone 107447 (TRBV12-5, TRBJ2-5)
CASGSRTHQETQYF

SEQ ID NO: 214895 - protein, 15 aa, Homo sapiens
  CDR3 for alpha chain variable domain of TCR clone 107448 (TRAV26-1, TRAJ56)
CVVRVATGANSKLTF

SEQ ID NO: 214896 - protein, 15 aa, Homo sapiens
  CDR3 for beta chain variable domain of TCR clone 107448 (TRBV27, TRBJ2-7)
CASSPQREGQREQYF

SEQ ID NO: 214897 - protein, 16 aa, Homo sapiens
  CDR3 for alpha chain variable domain of TCR clone 107449 (TRAV12-3, TRAJ53)
CAMSPGSGGSNYKLTF

SEQ ID NO: 214898 - protein, 11 aa, Homo sapiens
  CDR3 for beta chain variable domain of TCR clone 107449 (TRBV12-4, TRBJ2-3)
CASSSVRGRYF

SEQ ID NO: 214899 - protein, 18 aa, Homo sapiens
  CDR3 for alpha chain variable domain of TCR clone 107450 (TRAV8-3, TRAJ4)
WVRDPTSNDPGGYNKLLF

SEQ ID NO: 214900 - protein, 13 aa, Homo sapiens
  CDR3 for beta chain variable domain of TCR clone 107450 (TRBV20-1, TRBJ1-2)
CSATGIQGSGYTF

SEQ ID NO: 214901 - protein, 14 aa, Homo sapiens
  CDR3 for alpha chain variable domain of TCR clone 107451 (TRAV35, TRAJ42)
CAGRYGGSQGNLIF

SEQ ID NO: 214902 - protein, 17 aa, Homo sapiens
  CDR3 for beta chain variable domain of TCR clone 107451 (TRBV5-1, TRBJ2-2)
CASSLAGLSGGTGELFF

SEQ ID NO: 214903 - protein, 13 aa, Homo sapiens
  CDR3 for alpha chain variable domain of TCR clone 107452 (TRAV13-1, TRAJ6)
CAARRGGSHIPTF

SEQ ID NO: 214904 - protein, 16 aa, Homo sapiens
  CDR3 for beta chain variable domain of TCR clone 107452 (TRBV7-9, TRBJ2-2)
CASSLATGVGTGELFF

SEQ ID NO: 214905 - protein, 12 aa, Homo sapiens
  CDR3 for alpha chain variable domain of TCR clone 107453 (TRAV13-1, TRAJ21)
CAAREGFNKFYF

SEQ ID NO: 214906 - protein, 18 aa, Homo sapiens
  CDR3 for beta chain variable domain of TCR clone 107453 (TRBV20-1, TRBJ2-6)
CSAETTPTHGSGANVLTF

SEQ ID NO: 214907 - protein, 15 aa, Homo sapiens
  CDR3 for alpha chain variable domain of TCR clone 107454 (TRAV20, TRAJ6)
CAVRLQSGGSYIPTF

SEQ ID NO: 214908 - protein, 13 aa, Homo sapiens
  CDR3 for beta chain variable domain of TCR clone 107454 (TRBV12-4, TRBJ2-7)
CQQRFGGWYEQYF

SEQ ID NO: 214909 - protein, 11 aa, Homo sapiens
  CDR3 for alpha chain variable domain of TCR clone 107455 (TRAV1-1, TRAJ5)
CAVRVRRALTF

SEQ ID NO: 214910 - protein, 15 aa, Homo sapiens
  CDR3 for beta chain variable domain of TCR clone 107455 (TRBV27, TRBJ2-1)
CASSNGGGSSNEQFF

SEQ ID NO: 214911 - protein, 13 aa, Homo sapiens
  CDR3 for alpha chain variable domain of TCR clone 107456 (TRAV29/DV5, TRAJ31)
CAASRNNNARLMF

SEQ ID NO: 214912 - protein, 15 aa, Homo sapiens
  CDR3 for beta chain variable domain of TCR clone 107456 (TRBV13, TRBJ1-5)
CASSLTGRGHQPQHF

SEQ ID NO: 214913 - protein, 17 aa, Homo sapiens
  CDR3 for alpha chain variable domain of TCR clone 107457 (TRAV3, TRAJ6)
CSVRDGPRAGGSYIPTF

SEQ ID NO: 214914 - protein, 19 aa, Homo sapiens
  CDR3 for beta chain variable domain of TCR clone 107457 (TRBV25-1, TRBJ2-2)
CAILVYRVDRGRKTGELFF

SEQ ID NO: 214915 - protein, 13 aa, Homo sapiens
  CDR3 for alpha chain variable domain of TCR clone 107458 (TRAV13-2, TRAJ13)
CAERPGGYQKVTF

SEQ ID NO: 214916 - protein, 19 aa, Homo sapiens
  CDR3 for beta chain variable domain of TCR clone 107458 (TRBV4-1, TRBJ2-1)
CASSHGPLPGLGSRNEQFF

SEQ ID NO: 214917 - protein, 13 aa, Homo sapiens
  CDR3 for alpha chain variable domain of TCR clone 107459 (TRAV2, TRAJ24)
CAVGSTDRGKLQF

SEQ ID NO: 214918 - protein, 13 aa, Homo sapiens
  CDR3 for beta chain variable domain of TCR clone 107459 (TRBV27, TRBJ2-7)
CASSFSQGYEQYF

SEQ ID NO: 214919 - protein, 14 aa, Homo sapiens
  CDR3 for alpha chain variable domain of TCR clone 107460 (TRAV1-2, TRAJ6)
CAVSLSGGSYIPTF

SEQ ID NO: 214920 - protein, 15 aa, Homo sapiens
  CDR3 for beta chain variable domain of TCR clone 107460 (TRBV28, TRBJ2-7)
CASSSGGRGFYEQYF

SEQ ID NO: 214921 - protein, 14 aa, Homo sapiens
  CDR3 for alpha chain variable domain of TCR clone 107461 (TRAV1-2, TRAJ8)
CAVREDTGFRKLVF

SEQ ID NO: 214922 - protein, 19 aa, Homo sapiens
  CDR3 for beta chain variable domain of TCR clone 107461 (TRBV25-1, TRBJ2-2)
CAILVYRVDRGRKTGELFF

SEQ ID NO: 214923 - protein, 15 aa, Homo sapiens
  CDR3 for alpha chain variable domain of TCR clone 107462 (TRAV21, TRAJ24)
CAARSSTDSWGKLQF

SEQ ID NO: 214924 - protein, 15 aa, Homo sapiens
  CDR3 for beta chain variable domain of TCR clone 107462 (TRBV4-1, TRBJ2-7)
CASSQNTGRLYEQYV

SEQ ID NO: 214925 - protein, 17 aa, Homo sapiens
  CDR3 for alpha chain variable domain of TCR clone 107463 (TRAV4, TRAJ42)
CLVGVLNYGRSQGNLIF

SEQ ID NO: 214926 - protein, 12 aa, Homo sapiens
  CDR3 for beta chain variable domain of TCR clone 107463 (TRBV20-1, TRBJ2-1)
CSAQYTYNEQFF

SEQ ID NO: 214927 - protein, 12 aa, Homo sapiens
  CDR3 for alpha chain variable domain of TCR clone 107464 (TRAV21, TRAJ49)
CAVTNTGNPFYF

SEQ ID NO: 214928 - protein, 17 aa, Homo sapiens
  CDR3 for beta chain variable domain of TCR clone 107464 (TRBV13, TRBJ2-3)
CASSLSRVAGGRNTQYF

SEQ ID NO: 214929 - protein, 16 aa, Homo sapiens
  CDR3 for alpha chain variable domain of TCR clone 107465 (TRAV8-3, TRAJ10)
CAVGPILTGVGSKLTF

SEQ ID NO: 214930 - protein, 16 aa, Homo sapiens
  CDR3 for beta chain variable domain of TCR clone 107465 (TRBV7-2, TRBJ2-5)
CASSSKWLSGQETQYF

SEQ ID NO: 214931 - protein, 13 aa, Homo sapiens
  CDR3 for alpha chain variable domain of TCR clone 107466 (TRAV21, TRAJ57)
CAVTQGRSEKLVF

SEQ ID NO: 214932 - protein, 17 aa, Homo sapiens
  CDR3 for beta chain variable domain of TCR clone 107466 (TRBV20-1, TRBJ2-2)
CSASGSGQGGLTGELFF

SEQ ID NO: 214933 - protein, 16 aa, Homo sapiens
  CDR3 for alpha chain variable domain of TCR clone 107467 (TRAV2, TRAJ4)
CAVEDRFSGVYNKLIF

SEQ ID NO: 214934 - protein, 13 aa, Homo sapiens
  CDR3 for beta chain variable domain of TCR clone 107467 (TRBV7-7, TRBJ2-5)
CASSRSGQETQYF

SEQ ID NO: 214935 - protein, 11 aa, Homo sapiens
  CDR3 for alpha chain variable domain of TCR clone 107468 (TRAV2, TRAJ13)
CASGGHQKVTF

SEQ ID NO: 214936 - protein, 18 aa, Homo sapiens
  CDR3 for beta chain variable domain of TCR clone 107468 (TRBV19, TRBJ2-6)
CASIGPTSGGSGANVLTF

SEQ ID NO: 214937 - protein, 11 aa, Homo sapiens
  CDR3 for alpha chain variable domain of TCR clone 107469 (TRAV29/DV5, TRAJ49)
CAAVPGNQFYF

SEQ ID NO: 214938 - protein, 15 aa, Homo sapiens
  CDR3 for beta chain variable domain of TCR clone 107469 (TRBV7-9, TRBJ1-5)
CASSQGHQPNQPQHF

SEQ ID NO: 214939 - protein, 14 aa, Homo sapiens
  CDR3 for alpha chain variable domain of TCR clone 107470 (TRAV21, TRAJ15)
CAVSLNQAGTALFF

SEQ ID NO: 214940 - protein, 11 aa, Homo sapiens
  CDR3 for beta chain variable domain of TCR clone 107470 (TRBV20-1, TRBJ2-7)
CSARTSYEQYF

SEQ ID NO: 214941 - protein, 12 aa, Homo sapiens
  CDR3 for alpha chain variable domain of TCR clone 107471 (TRAV16, TRAJ10)
CSRTGGGNKLTF

SEQ ID NO: 214942 - protein, 15 aa, Homo sapiens
  CDR3 for beta chain variable domain of TCR clone 107471 (TRBV28, TRBJ1-2)
CASSSHSIANYGYTF

SEQ ID NO: 214943 - protein, 13 aa, Homo sapiens
  CDR3 for alpha chain variable domain of TCR clone 107472 (TRAV20, TRAJ21)
CAVQSMEFNKFYF

SEQ ID NO: 214944 - protein, 14 aa, Homo sapiens
  CDR3 for beta chain variable domain of TCR clone 107472 (TRBV19, TRBJ2-1)
CASPTFVLSGEQFF

SEQ ID NO: 214945 - protein, 14 aa, Homo sapiens
  CDR3 for alpha chain variable domain of TCR clone 107473 (TRAV9-2, TRAJ39)
CALYIYNAGNMLTF

SEQ ID NO: 214946 - protein, 16 aa, Homo sapiens
  CDR3 for beta chain variable domain of TCR clone 107473 (TRBV20-1, TRBJ1-1)
CSARALTQGMNTEAFF

SEQ ID NO: 214947 - protein, 14 aa, Homo sapiens
  CDR3 for alpha chain variable domain of TCR clone 107474 (TRAV21, TRAJ45)
CAVSSGGGADGLTF

SEQ ID NO: 214948 - protein, 12 aa, Homo sapiens
  CDR3 for beta chain variable domain of TCR clone 107474 (TRBV19, TRBJ2-1)
CASSRQGAEQSF

SEQ ID NO: 214949 - protein, 16 aa, Homo sapiens
  CDR3 for alpha chain variable domain of TCR clone 107475 (TRAV2, TRAJ4)
CAVEDRFSGGYNKLIF

SEQ ID NO: 214950 - protein, 13 aa, Homo sapiens
  CDR3 for beta chain variable domain of TCR clone 107475 (TRBV10-3, TRBJ2-7)
CASKLAVNYEQYF

SEQ ID NO: 214951 - protein, 12 aa, Homo sapiens
  CDR3 for alpha chain variable domain of TCR clone 107476 (TRAV12-3, TRAJ40)
CAMSTGTYKYIF

SEQ ID NO: 214952 - protein, 15 aa, Homo sapiens
  CDR3 for beta chain variable domain of TCR clone 107476 (TRBV7-3, TRBJ2-2)
CASSETGQGTGELFF

SEQ ID NO: 214953 - protein, 13 aa, Homo sapiens
  CDR3 for alpha chain variable domain of TCR clone 107477 (TRAV16, TRAJ29)
CALSRRGNTPLVF

SEQ ID NO: 214954 - protein, 15 aa, Homo sapiens
  CDR3 for beta chain variable domain of TCR clone 107477 (TRBV4-1, TRBJ2-3)
CASSRGQGIPETQYF

SEQ ID NO: 214955 - protein, 17 aa, Homo sapiens
  CDR3 for alpha chain variable domain of TCR clone 107478 (TRAV12-2, TRAJ6)
CAPQGPPRAGGSYIPTF

SEQ ID NO: 214956 - protein, 16 aa, Homo sapiens
  CDR3 for beta chain variable domain of TCR clone 107478 (TRBV19, TRBJ2-2)
CASGTARASNTGELFF

SEQ ID NO: 214957 - protein, 15 aa, Homo sapiens
  CDR3 for alpha chain variable domain of TCR clone 107479 (TRAV26-1, TRAJ17)
CIVRVVKAAGNKLTF

SEQ ID NO: 214958 - protein, 16 aa, Homo sapiens
  CDR3 for beta chain variable domain of TCR clone 107479 (TRBV7-9, TRBJ2-1)
YASSLVSGPSYNEQFF

SEQ ID NO: 214959 - protein, 18 aa, Homo sapiens
  CDR3 for alpha chain variable domain of TCR clone 107480 (TRAV8-3, TRAJ4)
WVRDPTSNDPGGYNKLIF

SEQ ID NO: 214960 - protein, 17 aa, Homo sapiens
  CDR3 for beta chain variable domain of TCR clone 107480 (TRBV13, TRBJ2-3)
CASSLSRVAGGRNTQYF

SEQ ID NO: 214961 - protein, 13 aa, Homo sapiens
  CDR3 for alpha chain variable domain of TCR clone 107481 (TRAV8-3, TRAJ42)
CARYGGSQGNPIF

SEQ ID NO: 214962 - protein, 14 aa, Homo sapiens
  CDR3 for beta chain variable domain of TCR clone 107481 (TRBV20-1, TRBJ2-1)
CSALDRGTYNEQFF

SEQ ID NO: 214963 - protein, 12 aa, Homo sapiens
  CDR3 for alpha chain variable domain of TCR clone 107482 (TRAV2, TRAJ10)
CASTGGGNKLTF

SEQ ID NO: 214964 - protein, 14 aa, Homo sapiens
  CDR3 for beta chain variable domain of TCR clone 107482 (TRBV7-2, TRBJ2-2)
CASRGQEAAGELFF

SEQ ID NO: 214965 - protein, 12 aa, Homo sapiens
  CDR3 for alpha chain variable domain of TCR clone 107483 (TRAV35, TRAJ39)
LAPNNAGNMLTF

SEQ ID NO: 214966 - protein, 16 aa, Homo sapiens
  CDR3 for beta chain variable domain of TCR clone 107483 (TRBV2, TRBJ2-3)
CASSTSVEGVTDKQYF

SEQ ID NO: 214967 - protein, 15 aa, Homo sapiens
  CDR3 for alpha chain variable domain of TCR clone 107484 (TRAV3, TRAJ27)
CAVRDPLTNAGTSTF

SEQ ID NO: 214968 - protein, 15 aa, Homo sapiens
  CDR3 for beta chain variable domain of TCR clone 107484 (TRBV28, TRBJ2-1)
CASSIIAGGRSEQFF

SEQ ID NO: 214969 - protein, 16 aa, Homo sapiens
  CDR3 for alpha chain variable domain of TCR clone 107485 (TRAV14/DV4, TRAJ54)
CAMREGRIQGAQKLVF

SEQ ID NO: 214970 - protein, 13 aa, Homo sapiens
  CDR3 for beta chain variable domain of TCR clone 107485 (TRBV14, TRBJ2-7)
CASSQDRRYEQYF

SEQ ID NO: 214971 - protein, 15 aa, Homo sapiens
  CDR3 for alpha chain variable domain of TCR clone 107486 (TRAV1-2, TRAJ15)
CAVDVMGSAGTALIF

SEQ ID NO: 214972 - protein, 13 aa, Homo sapiens
  CDR3 for beta chain variable domain of TCR clone 107486 (TRBV20-1, TRBJ1-1)
CSAVDRENTEAFF

SEQ ID NO: 214973 - protein, 13 aa, Homo sapiens
  CDR3 for alpha chain variable domain of TCR clone 107487 (TRAV13-1, TRAJ21)
CAASIYNFNKFYF

SEQ ID NO: 214974 - protein, 19 aa, Homo sapiens
  CDR3 for beta chain variable domain of TCR clone 107487 (TRBV25-1, TRBJ2-2)
CAILVYRVDRGRKTGELFF

SEQ ID NO: 214975 - protein, 14 aa, Homo sapiens
  CDR3 for alpha chain variable domain of TCR clone 107488 (TRAV12-2, TRAJ13)
CAVKKTGGYQKVTF

SEQ ID NO: 214976 - protein, 15 aa, Homo sapiens
  CDR3 for beta chain variable domain of TCR clone 107488 (TRBV6-1, TRBJ2-7)
CASSEPIAATTEQYF

SEQ ID NO: 214977 - protein, 15 aa, Homo sapiens
  CDR3 for alpha chain variable domain of TCR clone 107489 (TRAV13-1, TRAJ44)
CTASRGGGTASKLTF

SEQ ID NO: 214978 - protein, 14 aa, Homo sapiens
  CDR3 for beta chain variable domain of TCR clone 107489 (TRBV7-2, TRBJ2-5)
CASSPRGSSETQYF

SEQ ID NO: 214979 - protein, 12 aa, Homo sapiens
  CDR3 for alpha chain variable domain of TCR clone 107490 (TRAV2, TRAJ31)
CAVEDNNARLMF

SEQ ID NO: 214980 - protein, 15 aa, Homo sapiens
  CDR3 for beta chain variable domain of TCR clone 107490 (TRBV4-1, TRBJ1-1)
CASSQVQGAGTEAFF

SEQ ID NO: 214981 - protein, 15 aa, Homo sapiens
  CDR3 for alpha chain variable domain of TCR clone 107491 (TRAV16, TRAJ16)
CALQGGGSDGQKLLS

SEQ ID NO: 214982 - protein, 14 aa, Homo sapiens
  CDR3 for beta chain variable domain of TCR clone 107491 (TRBV6-1, TRBJ2-7)
CASSERVNPYEQYF

SEQ ID NO: 214983 - protein, 11 aa, Homo sapiens
  CDR3 for alpha chain variable domain of TCR clone 107492 (TRAV3, TRAJ13)
CAVTSDQKVTF

SEQ ID NO: 214984 - protein, 15 aa, Homo sapiens
  CDR3 for beta chain variable domain of TCR clone 107492 (TRBV7-9, TRBJ2-7)
CASSSSGLAVYEQYF

SEQ ID NO: 214985 - protein, 13 aa, Homo sapiens
  CDR3 for alpha chain variable domain of TCR clone 107493 (TRAV23/DV6, TRAJ22)
CAPYSGSARHLTF

SEQ ID NO: 214986 - protein, 15 aa, Homo sapiens
  CDR3 for beta chain variable domain of TCR clone 107493 (TRBV11-2, TRBJ1-6)
CASSLDPWAVSPLHF

SEQ ID NO: 214987 - protein, 16 aa, Homo sapiens
  CDR3 for alpha chain variable domain of TCR clone 107494 (TRAV12-3, TRAJ53)
CAMSPGSGGSNYKLTF

SEQ ID NO: 214988 - protein, 13 aa, Homo sapiens
  CDR3 for beta chain variable domain of TCR clone 107494 (TRBV27, TRBJ2-7)
CASSLTTGYEQYF

SEQ ID NO: 214989 - protein, 14 aa, Homo sapiens
  CDR3 for alpha chain variable domain of TCR clone 107495 (TRAV35, TRAJ50)
SAGHRKTSYDKVIF

SEQ ID NO: 214990 - protein, 13 aa, Homo sapiens
  CDR3 for beta chain variable domain of TCR clone 107495 (TRBV7-7, TRBJ2-3)
CASSLSRADTQYF

SEQ ID NO: 214991 - protein, 14 aa, Homo sapiens
  CDR3 for alpha chain variable domain of TCR clone 107496 (TRAV26-1, TRAJ44)
CIVRPTGTASKLTF

SEQ ID NO: 214992 - protein, 13 aa, Homo sapiens
  CDR3 for beta chain variable domain of TCR clone 107496 (TRBV12-4, TRBJ1-1)
CASSPGTGFEAFF

SEQ ID NO: 214993 - protein, 13 aa, Homo sapiens
  CDR3 for alpha chain variable domain of TCR clone 107497 (TRAV27, TRAJ41)
CAGEGNSGYALNF

SEQ ID NO: 214994 - protein, 14 aa, Homo sapiens
  CDR3 for beta chain variable domain of TCR clone 107497 (TRBV3-1, TRBJ2-5)
CASSQAGPPETQYF

SEQ ID NO: 214995 - protein, 13 aa, Homo sapiens
  CDR3 for alpha chain variable domain of TCR clone 107498 (TRAV8-4, TRAJ29)
CAVSATGNTPLVF

SEQ ID NO: 214996 - protein, 14 aa, Homo sapiens
  CDR3 for beta chain variable domain of TCR clone 107498 (TRBV7-9, TRBJ2-1)
CASRPTGLRNEQFF

SEQ ID NO: 214997 - protein, 13 aa, Homo sapiens
  CDR3 for alpha chain variable domain of TCR clone 107499 (TRAV8-3, TRAJ4)
WVFYSCGYNKLIF

SEQ ID NO: 214998 - protein, 14 aa, Homo sapiens
  CDR3 for beta chain variable domain of TCR clone 107499 (TRBV7-9, TRBJ2-3)
CASSLEDGTDTQYF

SEQ ID NO: 214999 - protein, 14 aa, Homo sapiens
  CDR3 for alpha chain variable domain of TCR clone 107500 (TRAV12-1, TRAJ9)
CVVTGCTGGFKTIF

SEQ ID NO: 215000 - protein, 13 aa, Homo sapiens
  CDR3 for beta chain variable domain of TCR clone 107500 (TRBV20-1, TRBJ1-1)
CSARAGGNTEAFF

SEQ ID NO: 215001 - protein, 12 aa, Homo sapiens
  CDR3 for alpha chain variable domain of TCR clone 107501 (TRAV2, TRAJ34)
CAVERNTDKLIF

SEQ ID NO: 215002 - protein, 15 aa, Homo sapiens
  CDR3 for beta chain variable domain of TCR clone 107501 (TRBV19, TRBJ1-1)
CASTSGQIQNTEAFF

SEQ ID NO: 215003 - protein, 14 aa, Homo sapiens
  CDR3 for alpha chain variable domain of TCR clone 107502 (TRAV1-2, TRAJ16)
CAVNRFSDGHKLLF

SEQ ID NO: 215004 - protein, 12 aa, Homo sapiens
  CDR3 for beta chain variable domain of TCR clone 107502 (TRBV5-1, TRBJ2-7)
CASSSTTYEQYF

SEQ ID NO: 215005 - protein, 15 aa, Homo sapiens
  CDR3 for alpha chain variable domain of TCR clone 107503 (TRAV21, TRAJ52)
CAVRGGGTSYGKLTF

SEQ ID NO: 215006 - protein, 15 aa, Homo sapiens
  CDR3 for beta chain variable domain of TCR clone 107503 (TRBV18, TRBJ1-5)
CASSPSDRSNQPQRF

SEQ ID NO: 215007 - protein, 14 aa, Homo sapiens
  CDR3 for alpha chain variable domain of TCR clone 107504 (TRAV12-3, TRAJ10)
SHLPLTGGGNKLTF

SEQ ID NO: 215008 - protein, 13 aa, Homo sapiens
  CDR3 for beta chain variable domain of TCR clone 107504 (TRBV4-1, TRBJ1-1)
CASSRKMNTEAFF

SEQ ID NO: 215009 - protein, 10 aa, Homo sapiens
  CDR3 for alpha chain variable domain of TCR clone 107505 (TRAV36/DV7, TRAJ48)
CAVGNEKLTF

SEQ ID NO: 215010 - protein, 15 aa, Homo sapiens
  CDR3 for beta chain variable domain of TCR clone 107505 (TRBV7-9, TRBJ1-6)
CASSSPGRGNSPLHF

SEQ ID NO: 215011 - protein, 14 aa, Homo sapiens
  CDR3 for alpha chain variable domain of TCR clone 107506 (TRAV8-1, TRAJ10)
CAVIFTGGGNKLTF

SEQ ID NO: 215012 - protein, 16 aa, Homo sapiens
  CDR3 for beta chain variable domain of TCR clone 107506 (TRBV11-1, TRBJ2-1)
CASSFWGGSSYNEQFF

SEQ ID NO: 215013 - protein, 16 aa, Homo sapiens
  CDR3 for alpha chain variable domain of TCR clone 107507 (TRAV41, TRAJ53)
CAVRFGSGGSNYKLTF

SEQ ID NO: 215014 - protein, 11 aa, Homo sapiens
  CDR3 for beta chain variable domain of TCR clone 107507 (TRBV20-1, TRBJ2-7)
CSARLSYEQYF

SEQ ID NO: 215015 - protein, 12 aa, Homo sapiens
  CDR3 for alpha chain variable domain of TCR clone 107508 (TRAV12-2, TRAJ10)
WGVTGGGIKLTF

SEQ ID NO: 215016 - protein, 16 aa, Homo sapiens
  CDR3 for beta chain variable domain of TCR clone 107508 (TRBV6-4, TRBJ1-2)
CASSEAVGDPNYGYTF

SEQ ID NO: 215017 - protein, 16 aa, Homo sapiens
  CDR3 for alpha chain variable domain of TCR clone 107509 (TRAV3, TRAJ10)
CAVRDMRAGGGNKLTF

SEQ ID NO: 215018 - protein, 15 aa, Homo sapiens
  CDR3 for beta chain variable domain of TCR clone 107509 (TRBV11-2, TRBJ1-6)
CASTGFGTAASPLHF

SEQ ID NO: 215019 - protein, 14 aa, Homo sapiens
  CDR3 for alpha chain variable domain of TCR clone 107510 (TRAV13-1, TRAJ40)
CAASMTSGTYKYIF

SEQ ID NO: 215020 - protein, 15 aa, Homo sapiens
  CDR3 for beta chain variable domain of TCR clone 107510 (TRBV7-3, TRBJ2-1)
CASSPTGGGEVEQIF

SEQ ID NO: 215021 - protein, 15 aa, Homo sapiens
  CDR3 for alpha chain variable domain of TCR clone 107511 (TRAV3, TRAJ3)
CAVRDRDSSASKIIF

SEQ ID NO: 215022 - protein, 18 aa, Homo sapiens
  CDR3 for beta chain variable domain of TCR clone 107511 (TRBV25-1, TRBJ1-2)
CAGSGLQNGQGLIFGYTF

SEQ ID NO: 215023 - protein, 14 aa, Homo sapiens
  CDR3 for alpha chain variable domain of TCR clone 107512 (TRAV1-2, TRAJ16)
CAVNRFSDGQKLLF

SEQ ID NO: 215024 - protein, 13 aa, Homo sapiens
  CDR3 for beta chain variable domain of TCR clone 107512 (TRBV6-1, TRBJ1-1)
CASSQQGNTEAFF

SEQ ID NO: 215025 - protein, 16 aa, Homo sapiens
  CDR3 for alpha chain variable domain of TCR clone 107513 (TRAV35, TRAJ28)
CAGQKYSGAGSYQLTF

SEQ ID NO: 215026 - protein, 15 aa, Homo sapiens
  CDR3 for beta chain variable domain of TCR clone 107513 (TRBV18, TRBJ2-7)
CASSPRGGKGYEQYF

SEQ ID NO: 215027 - protein, 14 aa, Homo sapiens
  CDR3 for alpha chain variable domain of TCR clone 107514 (TRAV16, TRAJ57)
CALSGQGGSEKLVL

SEQ ID NO: 215028 - protein, 13 aa, Homo sapiens
  CDR3 for beta chain variable domain of TCR clone 107514 (TRBV5-4, TRBJ2-1)
CASSLQGPREQFF

SEQ ID NO: 215029 - protein, 14 aa, Homo sapiens
  CDR3 for alpha chain variable domain of TCR clone 107515 (TRAV12-1, TRAJ42)
CVVIYVGSQGNLIF

SEQ ID NO: 215030 - protein, 13 aa, Homo sapiens
  CDR3 for beta chain variable domain of TCR clone 107515 (TRBV18, TRBJ2-5)
CASSPPGKETQYF

SEQ ID NO: 215031 - protein, 14 aa, Homo sapiens
  CDR3 for alpha chain variable domain of TCR clone 107516 (TRAV1-2, TRAJ8)
CAVREDTGFQKLVF

SEQ ID NO: 215032 - protein, 17 aa, Homo sapiens
  CDR3 for beta chain variable domain of TCR clone 107516 (TRBV24-1, TRBJ2-3)
CATSDLPSGEDTDTQYF

SEQ ID NO: 215033 - protein, 14 aa, Homo sapiens
  CDR3 for alpha chain variable domain of TCR clone 107517 (TRAV16, TRAJ39)
CALSKNNAGNMLTF

SEQ ID NO: 215034 - protein, 16 aa, Homo sapiens
  CDR3 for beta chain variable domain of TCR clone 107517 (TRBV16, TRBJ2-7)
CASSRPAGGSSYEQYF

SEQ ID NO: 215035 - protein, 13 aa, Homo sapiens
  CDR3 for alpha chain variable domain of TCR clone 107518 (TRAV29/DV5, TRAJ31)
CAASRNNNARLMF

SEQ ID NO: 215036 - protein, 20 aa, Homo sapiens
  CDR3 for beta chain variable domain of TCR clone 107518 (TRBV7-9, TRBJ2-1)
CASSSPRAPRTRSSYNEQFF

SEQ ID NO: 215037 - protein, 14 aa, Homo sapiens
  CDR3 for alpha chain variable domain of TCR clone 107519 (TRAV8-1, TRAJ49)
CASSIANTGNQFYF

SEQ ID NO: 215038 - protein, 14 aa, Homo sapiens
  CDR3 for beta chain variable domain of TCR clone 107519 (TRBV4-2, TRBJ2-1)
CASGLDRAYNEQFF

SEQ ID NO: 215039 - protein, 13 aa, Homo sapiens
  CDR3 for alpha chain variable domain of TCR clone 107520 (TRAV2, TRAJ40)
CAVVTSGTYKYIF

SEQ ID NO: 215040 - protein, 14 aa, Homo sapiens
  CDR3 for beta chain variable domain of TCR clone 107520 (TRBV5-7, TRBJ2-1)
CASSSVANYNEQFF

SEQ ID NO: 215041 - protein, 13 aa, Homo sapiens
  CDR3 for alpha chain variable domain of TCR clone 107521 (TRAV3, TRAJ21)
CAVREPDFNKFYF

SEQ ID NO: 215042 - protein, 15 aa, Homo sapiens
  CDR3 for beta chain variable domain of TCR clone 107521 (TRBV5-1, TRBJ1-1)
CASSLSDLGGTEAFF

SEQ ID NO: 215043 - protein, 14 aa, Homo sapiens
  CDR3 for alpha chain variable domain of TCR clone 107522 (TRAV3, TRAJ9)
CAVRLNTGGFKTIF

SEQ ID NO: 215044 - protein, 19 aa, Homo sapiens
  CDR3 for beta chain variable domain of TCR clone 107522 (TRBV25-1, TRBJ2-2)
CAILVYRVDRGRKTGELFF

SEQ ID NO: 215045 - protein, 15 aa, Homo sapiens
  CDR3 for alpha chain variable domain of TCR clone 107523 (TRAV26-2, TRAJ45)
CILRDRVDQEEGLTD

SEQ ID NO: 215046 - protein, 15 aa, Homo sapiens
  CDR3 for beta chain variable domain of TCR clone 107523 (TRBV7-6, TRBJ2-5)
CASSKPTGPQETQYF

SEQ ID NO: 215047 - protein, 13 aa, Homo sapiens
  CDR3 for alpha chain variable domain of TCR clone 107524 (TRAV8-4, TRAJ39)
STPPSDAGNMLTF

SEQ ID NO: 215048 - protein, 13 aa, Homo sapiens
  CDR3 for beta chain variable domain of TCR clone 107524 (TRBV12-4, TRBJ2-7)
CASSPTETYEQYV

SEQ ID NO: 215049 - protein, 14 aa, Homo sapiens
  CDR3 for alpha chain variable domain of TCR clone 107525 (TRAV12-1, TRAJ30)
CVVNIGGREDKIIF

SEQ ID NO: 215050 - protein, 15 aa, Homo sapiens
  CDR3 for beta chain variable domain of TCR clone 107525 (TRBV18, TRBJ1-2)
CASSPSNTPNYGYTF

SEQ ID NO: 215051 - protein, 13 aa, Homo sapiens
  CDR3 for alpha chain variable domain of TCR clone 107526 (TRAV13-1, TRAJ23)
CAASSYQGGKLIF

SEQ ID NO: 215052 - protein, 16 aa, Homo sapiens
  CDR3 for beta chain variable domain of TCR clone 107526 (TRBV20-1, TRBJ2-1)
CSANPRLAGTYNGQFF

SEQ ID NO: 215053 - protein, 15 aa, Homo sapiens
  CDR3 for alpha chain variable domain of TCR clone 107527 (TRAV23/DV6, TRAJ13)
CAAWPGGGGYQKVTF

SEQ ID NO: 215054 - protein, 16 aa, Homo sapiens
  CDR3 for beta chain variable domain of TCR clone 107527 (TRBV3-1, TRBJ2-5)
CASSPGQFNGFGTQYF

SEQ ID NO: 215055 - protein, 14 aa, Homo sapiens
  CDR3 for alpha chain variable domain of TCR clone 107528 (TRAV21, TRAJ28)
CAVGSVAGSYQLTF

SEQ ID NO: 215056 - protein, 14 aa, Homo sapiens
  CDR3 for beta chain variable domain of TCR clone 107528 (TRBV18, TRBJ1-4)
CASSPGPNGEKLFF

SEQ ID NO: 215057 - protein, 17 aa, Homo sapiens
  CDR3 for alpha chain variable domain of TCR clone 107529 (TRAV21, TRAJ52)
CCEAFPAGGTSYGKLTF

SEQ ID NO: 215058 - protein, 13 aa, Homo sapiens
  CDR3 for beta chain variable domain of TCR clone 107529 (TRBV2, TRBJ1-5)
CATAGPGNQPQHF

SEQ ID NO: 215059 - protein, 15 aa, Homo sapiens
  CDR3 for alpha chain variable domain of TCR clone 107530 (TRAV3, TRAJ5)
FAVRDRKTGRRALTF

SEQ ID NO: 215060 - protein, 15 aa, Homo sapiens
  CDR3 for beta chain variable domain of TCR clone 107530 (TRBV7-9, TRBJ2-2)
CASGPLDTFPGELFF

SEQ ID NO: 215061 - protein, 14 aa, Homo sapiens
  CDR3 for alpha chain variable domain of TCR clone 107531 (TRAV17, TRAJ34)
CATDSLEGTDKRIF

SEQ ID NO: 215062 - protein, 13 aa, Homo sapiens
  CDR3 for beta chain variable domain of TCR clone 107531 (TRBV11-2, TRBJ2-7)
CASSGTRPYEQYF

SEQ ID NO: 215063 - protein, 10 aa, Homo sapiens
  CDR3 for alpha chain variable domain of TCR clone 107532 (TRAV12-3, TRAJ18)
CAMSAEAQPW

SEQ ID NO: 215064 - protein, 13 aa, Homo sapiens
  CDR3 for beta chain variable domain of TCR clone 107532 (TRBV15, TRBJ1-6)
CATSGGLNSPLHL

SEQ ID NO: 215065 - protein, 13 aa, Homo sapiens
  CDR3 for alpha chain variable domain of TCR clone 107533 (TRAV30, TRAJ26)
CGTEIPLGQNFVF

SEQ ID NO: 215066 - protein, 14 aa, Homo sapiens
  CDR3 for beta chain variable domain of TCR clone 107533 (TRBV7-2, TRBJ2-7)
CASSPKTSFYEQYF

SEQ ID NO: 215067 - protein, 16 aa, Homo sapiens
  CDR3 for alpha chain variable domain of TCR clone 107534 (TRAV30, TRAJ24)
CGTEIVDADSWGKFQF

SEQ ID NO: 215068 - protein, 13 aa, Homo sapiens
  CDR3 for beta chain variable domain of TCR clone 107534 (TRBV11-2, TRBJ2-5)
CASSRGPSETQYF

SEQ ID NO: 215069 - protein, 14 aa, Homo sapiens
  CDR3 for alpha chain variable domain of TCR clone 107535 (TRAV26-2, TRAJ31)
CILIPGNNNARPMF

SEQ ID NO: 215070 - protein, 16 aa, Homo sapiens
  CDR3 for beta chain variable domain of TCR clone 107535 (TRBV7-3, TRBJ2-1)
CASSLVSGSSNNEQFF

SEQ ID NO: 215071 - protein, 23 aa, Homo sapiens
  CDR3 for alpha chain variable domain of TCR clone 107536 (TRAV1-1, TRAJ29)
LLHELQMKDSASYFLGGNTPLVF

SEQ ID NO: 215072 - protein, 13 aa, Homo sapiens
  CDR3 for beta chain variable domain of TCR clone 107536 (TRBV25-1, TRBJ2-7)
CASSEDGDYEQYF

SEQ ID NO: 215073 - protein, 11 aa, Homo sapiens
  CDR3 for alpha chain variable domain of TCR clone 107537 (TRAV8-3, TRAJ16)
RAVVPCQKLLF

SEQ ID NO: 215074 - protein, 12 aa, Homo sapiens
  CDR3 for beta chain variable domain of TCR clone 107537 (TRBV3-1, TRBJ1-1)
CASSQDPTEAFF

SEQ ID NO: 215075 - protein, 19 aa, Homo sapiens
  CDR3 for alpha chain variable domain of TCR clone 107538 (TRAV26-1, TRAJ22)
CCVLLHRWVFSGSARQLTF

SEQ ID NO: 215076 - protein, 19 aa, Homo sapiens
  CDR3 for beta chain variable domain of TCR clone 107538 (TRBV19, TRBJ2-5)
CASSIGRVTDFFLGETQYF

SEQ ID NO: 215077 - protein, 18 aa, Homo sapiens
  CDR3 for alpha chain variable domain of TCR clone 107539 (TRAV21, TRAJ52)
CAVRPSPAGGTSYGKLTF

SEQ ID NO: 215078 - protein, 12 aa, Homo sapiens
  CDR3 for beta chain variable domain of TCR clone 107539 (TRBV11-2, TRBJ2-2)
CASGLGGGELFF

SEQ ID NO: 215079 - protein, 22 aa, Homo sapiens
  CDR3 for alpha chain variable domain of TCR clone 107540 (TRAV23/DV6, TRAJ9)
PSLETQPPTSVHPNTEGFKTIF

SEQ ID NO: 215080 - protein, 14 aa, Homo sapiens
  CDR3 for beta chain variable domain of TCR clone 107540 (TRBV6-1, TRBJ2-7)
CASTRTGDYYEQYF

SEQ ID NO: 215081 - protein, 10 aa, Homo sapiens
  CDR3 for alpha chain variable domain of TCR clone 107541 (TRAV36/DV7, TRAJ48)
CAVGNEKLTF

SEQ ID NO: 215082 - protein, 15 aa, Homo sapiens
  CDR3 for beta chain variable domain of TCR clone 107541 (TRBV3-1, TRBJ2-7)
CASSQAPSGSYEQYF

SEQ ID NO: 215083 - protein, 17 aa, Homo sapiens
  CDR3 for alpha chain variable domain of TCR clone 107542 (TRAV17, TRAJ52)
CATERPSGGTSYGELTF

SEQ ID NO: 215084 - protein, 15 aa, Homo sapiens
  CDR3 for beta chain variable domain of TCR clone 107542 (TRBV5-1, TRBJ2-1)
CASSLVANSYNEQFF

SEQ ID NO: 215085 - protein, 12 aa, Homo sapiens
  CDR3 for alpha chain variable domain of TCR clone 107543 (TRAV13-1, TRAJ53)
CAAGGSNYKLTF

SEQ ID NO: 215086 - protein, 20 aa, Homo sapiens
  CDR3 for beta chain variable domain of TCR clone 107543 (TRBV28, TRBJ2-1)
CASTPIGRSPGLAGGNEQFF

SEQ ID NO: 215087 - protein, 14 aa, Homo sapiens
  CDR3 for alpha chain variable domain of TCR clone 107544 (TRAV35, TRAJ13)
CAGRSPGGYQKVTF

SEQ ID NO: 215088 - protein, 14 aa, Homo sapiens
  CDR3 for beta chain variable domain of TCR clone 107544 (TRBV19, TRBJ2-2)
CASCMVGLSGELFF

SEQ ID NO: 215089 - protein, 14 aa, Homo sapiens
  CDR3 for alpha chain variable domain of TCR clone 107545 (TRAV26-1, TRAJ34)
CIVRVAYNTDKLIF

SEQ ID NO: 215090 - protein, 15 aa, Homo sapiens
  CDR3 for beta chain variable domain of TCR clone 107545 (TRBV20-1, TRBJ2-7)
CSARVPAAYFYEHYF

SEQ ID NO: 215091 - protein, 14 aa, Homo sapiens
  CDR3 for alpha chain variable domain of TCR clone 107546 (TRAV12-2, TRAJ13)
CAVKKTGGYQKVTF

SEQ ID NO: 215092 - protein, 13 aa, Homo sapiens
  CDR3 for beta chain variable domain of TCR clone 107546 (TRBV4-2, TRBJ2-3)
CASSQGNTDTQYF

SEQ ID NO: 215093 - protein, 13 aa, Homo sapiens
  CDR3 for alpha chain variable domain of TCR clone 107547 (TRAV12-1, TRAJ40)
CVVPTSGTYKYIF

SEQ ID NO: 215094 - protein, 15 aa, Homo sapiens
  CDR3 for beta chain variable domain of TCR clone 107547 (TRBV6-3, TRBJ2-7)
CASSSPGTVFYEQYF

SEQ ID NO: 215095 - protein, 14 aa, Homo sapiens
  CDR3 for alpha chain variable domain of TCR clone 107548 (TRAV26-1, TRAJ38)
CIADNAGNNRKLSW

SEQ ID NO: 215096 - protein, 15 aa, Homo sapiens
  CDR3 for beta chain variable domain of TCR clone 107548 (TRBV4-1, TRBJ1-1)
CASSQEWGHYTEAFF

SEQ ID NO: 215097 - protein, 13 aa, Homo sapiens
  CDR3 for alpha chain variable domain of TCR clone 107549 (TRAV3, TRAJ21)
CAVREPDFNKFYF

SEQ ID NO: 215098 - protein, 15 aa, Homo sapiens
  CDR3 for beta chain variable domain of TCR clone 107549 (TRBV2, TRBJ2-1)
CSSSELAGGYNEQFF

SEQ ID NO: 215099 - protein, 12 aa, Homo sapiens
  CDR3 for alpha chain variable domain of TCR clone 107550 (TRAV23/DV6, TRAJ30)
CAASKGDDKTIF

SEQ ID NO: 215100 - protein, 18 aa, Homo sapiens
  CDR3 for beta chain variable domain of TCR clone 107550 (TRBV10-3, TRBJ2-3)
CAISESRVGPMRGDTQYF

SEQ ID NO: 215101 - protein, 14 aa, Homo sapiens
  CDR3 for alpha chain variable domain of TCR clone 107551 (TRAV23/DV6, TRAJ40)
CAASLTSGTYKYIF

SEQ ID NO: 215102 - protein, 23 aa, Homo sapiens
  CDR3 for beta chain variable domain of TCR clone 107551 (TRBV5-1, TRBJ2-3)
GAGGLGPLSLRQQPGQGGGTQYF

SEQ ID NO: 215103 - protein, 16 aa, Homo sapiens
  CDR3 for alpha chain variable domain of TCR clone 107552 (TRAV17, TRAJ52)
CATSNAGGTSYGKLTF

SEQ ID NO: 215104 - protein, 13 aa, Homo sapiens
  CDR3 for beta chain variable domain of TCR clone 107552 (TRBV27, TRBJ1-6)
CVSSLVLVSPLHF

SEQ ID NO: 215105 - protein, 14 aa, Homo sapiens
  CDR3 for alpha chain variable domain of TCR clone 107553 (TRAV26-1, TRAJ39)
CIVRGSRAGNMLTF

SEQ ID NO: 215106 - protein, 14 aa, Homo sapiens
  CDR3 for beta chain variable domain of TCR clone 107553 (TRBV7-9, TRBJ1-5)
CQQPRSPANQPQHF

SEQ ID NO: 215107 - protein, 10 aa, Homo sapiens
  CDR3 for alpha chain variable domain of TCR clone 107554 (TRAV26-1, TRAJ22)
CIVSLTFFWF

SEQ ID NO: 215108 - protein, 15 aa, Homo sapiens
  CDR3 for beta chain variable domain of TCR clone 107554 (TRBV4-2, TRBJ1-2)
CASSQRTGGRDGYTF

SEQ ID NO: 215109 - protein, 12 aa, Homo sapiens
  CDR3 for alpha chain variable domain of TCR clone 107555 (TRAV27, TRAJ35)
CAGADFGNVLHC

SEQ ID NO: 215110 - protein, 14 aa, Homo sapiens
  CDR3 for beta chain variable domain of TCR clone 107555 (TRBV7-9, TRBJ2-1)
CASSPRDSLYEQFF

SEQ ID NO: 215111 - protein, 12 aa, Homo sapiens
  CDR3 for alpha chain variable domain of TCR clone 107556 (TRAV12-2, TRAJ10)
WGVTGGGNKLTF

SEQ ID NO: 215112 - protein, 13 aa, Homo sapiens
  CDR3 for beta chain variable domain of TCR clone 107556 (TRBV20-1, TRBJ2-7)
CSATPWRRYEQYF

SEQ ID NO: 215113 - protein, 15 aa, Homo sapiens
  CDR3 for alpha chain variable domain of TCR clone 107557 (TRAV21, TRAJ53)
CATLNSGGSNYKLTF

SEQ ID NO: 215114 - protein, 18 aa, Homo sapiens
  CDR3 for beta chain variable domain of TCR clone 107557 (TRBV20-1, TRBJ2-6)
CSAETTPTHGSGANVLTF

SEQ ID NO: 215115 - protein, 14 aa, Homo sapiens
  CDR3 for alpha chain variable domain of TCR clone 107558 (TRAV14/DV4, TRAJ34)
CAMREGRPHRQAHL

SEQ ID NO: 215116 - protein, 16 aa, Homo sapiens
  CDR3 for beta chain variable domain of TCR clone 107558 (TRBV15, TRBJ1-2)
CATSRGPRTGGGGYTF

SEQ ID NO: 215117 - protein, 19 aa, Homo sapiens
  CDR3 for alpha chain variable domain of TCR clone 107559 (TRAV13-1, TRAJ52)
CAASPYQNAGGTSYGKLTF

SEQ ID NO: 215118 - protein, 14 aa, Homo sapiens
  CDR3 for beta chain variable domain of TCR clone 107559 (TRBV19, TRBJ2-7)
RASTVQGRPYEQYF

SEQ ID NO: 215119 - protein, 14 aa, Homo sapiens
  CDR3 for alpha chain variable domain of TCR clone 107560 (TRAV3, TRAJ8)
CAALMNTGFQKLLF

SEQ ID NO: 215120 - protein, 15 aa, Homo sapiens
  CDR3 for beta chain variable domain of TCR clone 107560 (TRBV28, TRBJ2-5)
CASSLGLGNQETQYF

SEQ ID NO: 215121 - protein, 18 aa, Homo sapiens
  CDR3 for alpha chain variable domain of TCR clone 107561 (TRAV21, TRAJ52)
CAVRPSPAGGTRYGKLTF

SEQ ID NO: 215122 - protein, 13 aa, Homo sapiens
  CDR3 for beta chain variable domain of TCR clone 107561 (TRBV20-1, TRBJ2-5)
CSAREAFQETQYF

SEQ ID NO: 215123 - protein, 10 aa, Homo sapiens
  CDR3 for alpha chain variable domain of TCR clone 107562 (TRAV23/DV6, TRAJ57)
CAARSTLSQG

SEQ ID NO: 215124 - protein, 14 aa, Homo sapiens
  CDR3 for beta chain variable domain of TCR clone 107562 (TRBV7-8, TRBJ2-5)
CASSATGGQETQYF

SEQ ID NO: 215125 - protein, 16 aa, Homo sapiens
  CDR3 for alpha chain variable domain of TCR clone 107563 (TRAV3, TRAJ4)
CAVRPSPSGGYNKLNF

SEQ ID NO: 215126 - protein, 12 aa, Homo sapiens
  CDR3 for beta chain variable domain of TCR clone 107563 (TRBV7-9, TRBJ2-7)
CASSQGVYEQYF

SEQ ID NO: 215127 - protein, 13 aa, Homo sapiens
  CDR3 for alpha chain variable domain of TCR clone 107564 (TRAV12-2, TRAJ15)
CAVFNQAGTALIF

SEQ ID NO: 215128 - protein, 14 aa, Homo sapiens
  CDR3 for beta chain variable domain of TCR clone 107564 (TRBV7-8, TRBJ1-5)
CQQPGGGADQTQHF

SEQ ID NO: 215129 - protein, 16 aa, Homo sapiens
  CDR3 for alpha chain variable domain of TCR clone 107565 (TRAV12-3, TRAJ53)
CAMSPGSGGSNYKLTF

SEQ ID NO: 215130 - protein, 13 aa, Homo sapiens
  CDR3 for beta chain variable domain of TCR clone 107565 (TRBV12-4, TRBJ2-1)
CASSLSPSNEQFF

SEQ ID NO: 215131 - protein, 18 aa, Homo sapiens
  CDR3 for alpha chain variable domain of TCR clone 107566 (TRAV12-3, TRAJ52)
CAMSRTNAGGTSYGKLTF

SEQ ID NO: 215132 - protein, 17 aa, Homo sapiens
  CDR3 for beta chain variable domain of TCR clone 107566 (TRBV7-3, TRBJ2-3)
GASSLMKRMRGADTQYF

SEQ ID NO: 215133 - protein, 17 aa, Homo sapiens
  CDR3 for alpha chain variable domain of TCR clone 107567 (TRAV4, TRAJ13)
CVVGVQGSSGGYQKVTF

SEQ ID NO: 215134 - protein, 18 aa, Homo sapiens
  CDR3 for beta chain variable domain of TCR clone 107567 (TRBV15, TRBJ2-3)
CATSRDGARSWDTDTQYF

SEQ ID NO: 215135 - protein, 12 aa, Homo sapiens
  CDR3 for alpha chain variable domain of TCR clone 107568 (TRAV12-1, TRAJ3)
CGEPRGASKIIF

SEQ ID NO: 215136 - protein, 13 aa, Homo sapiens
  CDR3 for beta chain variable domain of TCR clone 107568 (TRBV28, TRBJ1-5)
CASSDRGNQPQHF

SEQ ID NO: 215137 - protein, 16 aa, Homo sapiens
  CDR3 for alpha chain variable domain of TCR clone 107569 (TRAV26-1, TRAJ52)
CIVSNAGGTSYGKLTF

SEQ ID NO: 215138 - protein, 14 aa, Homo sapiens
  CDR3 for beta chain variable domain of TCR clone 107569 (TRBV19, TRBJ2-1)
CASPTFVLSGEQFF

SEQ ID NO: 215139 - protein, 15 aa, Homo sapiens
  CDR3 for alpha chain variable domain of TCR clone 107570 (TRAV26-1, TRAJ22)
CIVRVSFWFCKATDL

SEQ ID NO: 215140 - protein, 13 aa, Homo sapiens
  CDR3 for beta chain variable domain of TCR clone 107570 (TRBV24-1, TRBJ2-1)
CATSAGPYNEQFF

SEQ ID NO: 215141 - protein, 14 aa, Homo sapiens
  CDR3 for alpha chain variable domain of TCR clone 107571 (TRAV24, TRAJ39)
CAFPSSQCRQHAHL

SEQ ID NO: 215142 - protein, 14 aa, Homo sapiens
  CDR3 for beta chain variable domain of TCR clone 107571 (TRBV4-1, TRBJ2-2)
CASSQAVNTGELFF

SEQ ID NO: 215143 - protein, 17 aa, Homo sapiens
  CDR3 for alpha chain variable domain of TCR clone 107572 (TRAV3, TRAJ6)
CAVRDGPTAGGSYITTF

SEQ ID NO: 215144 - protein, 14 aa, Homo sapiens
  CDR3 for beta chain variable domain of TCR clone 107572 (TRBV7-2, TRBJ2-7)
CASSPKTSFYEQYF

SEQ ID NO: 215145 - protein, 12 aa, Homo sapiens
  CDR3 for alpha chain variable domain of TCR clone 107573 (TRAV8-6, TRAJ36)
CAVSDWLGQTTS

SEQ ID NO: 215146 - protein, 17 aa, Homo sapiens
  CDR3 for beta chain variable domain of TCR clone 107573 (TRBV19, TRBJ2-6)
CASSTGQVFSGANVLTF

SEQ ID NO: 215147 - protein, 15 aa, Homo sapiens
  CDR3 for alpha chain variable domain of TCR clone 107574 (TRAV27, TRAJ38)
CAARRNAGNNRKLIW

SEQ ID NO: 215148 - protein, 10 aa, Homo sapiens
  CDR3 for beta chain variable domain of TCR clone 107574 (TRBV7-9, TRBJ1-1)
CASSFTEAFF

SEQ ID NO: 215149 - protein, 12 aa, Homo sapiens
  CDR3 for alpha chain variable domain of TCR clone 107575 (TRAV20, TRAJ4)
CRASGGYNKLIF

SEQ ID NO: 215150 - protein, 18 aa, Homo sapiens
  CDR3 for beta chain variable domain of TCR clone 107575 (TRBV19, TRBJ1-5)
CASSKGQVSIHSNQTQHF

SEQ ID NO: 215151 - protein, 13 aa, Homo sapiens
  CDR3 for alpha chain variable domain of TCR clone 107576 (TRAV21, TRAJ29)
CAAPNSGNTPLVF

SEQ ID NO: 215152 - protein, 15 aa, Homo sapiens
  CDR3 for beta chain variable domain of TCR clone 107576 (TRBV20-1, TRBJ1-1)
CSASWDRFLNTEAFF

SEQ ID NO: 215153 - protein, 12 aa, Homo sapiens
  CDR3 for alpha chain variable domain of TCR clone 107577 (TRAV12-3, TRAJ20)
CAMVRGDYKPSF

SEQ ID NO: 215154 - protein, 14 aa, Homo sapiens
  CDR3 for beta chain variable domain of TCR clone 107577 (TRBV20-1, TRBJ2-7)
CSAISREASYEQYF

SEQ ID NO: 215155 - protein, 13 aa, Homo sapiens
  CDR3 for alpha chain variable domain of TCR clone 107578 (TRAV26-1, TRAJ30)
CIFRVESNDKIIF

SEQ ID NO: 215156 - protein, 17 aa, Homo sapiens
  CDR3 for beta chain variable domain of TCR clone 107578 (TRBV13, TRBJ2-3)
CASSLSRVAGGRNTQYF

SEQ ID NO: 215157 - protein, 17 aa, Homo sapiens
  CDR3 for alpha chain variable domain of TCR clone 107579 (TRAV12-2, TRAJ42)
CAVNILNYGGSQGNLTF

SEQ ID NO: 215158 - protein, 13 aa, Homo sapiens
  CDR3 for beta chain variable domain of TCR clone 107579 (TRBV3-1, TRBJ1-5)
CASSQDLDQPQHF

SEQ ID NO: 215159 - protein, 15 aa, Homo sapiens
  CDR3 for alpha chain variable domain of TCR clone 107580 (TRAV8-4, TRAJ13)
CAVRDRGGGYQKVTF

SEQ ID NO: 215160 - protein, 16 aa, Homo sapiens
  CDR3 for beta chain variable domain of TCR clone 107580 (TRBV6-4, TRBJ1-2)
CASSEAVGDPNYGYTF

SEQ ID NO: 215161 - protein, 12 aa, Homo sapiens
  CDR3 for alpha chain variable domain of TCR clone 107581 (TRAV3, TRAJ43)
CAVRDPNNDMRF

SEQ ID NO: 215162 - protein, 16 aa, Homo sapiens
  CDR3 for beta chain variable domain of TCR clone 107581 (TRBV19, TRBJ2-1)
CASSKAGPSSYNEQFF

SEQ ID NO: 215163 - protein, 12 aa, Homo sapiens
  CDR3 for alpha chain variable domain of TCR clone 107582 (TRAV12-3, TRAJ20)
CAMVRGDYKLNF

SEQ ID NO: 215164 - protein, 12 aa, Homo sapiens
  CDR3 for beta chain variable domain of TCR clone 107582 (TRBV6-1, TRBJ2-7)
CASSDYSYEQYF

SEQ ID NO: 215165 - protein, 11 aa, Homo sapiens
  CDR3 for alpha chain variable domain of TCR clone 107583 (TRAV1-2, TRAJ31)
CAVNNNARLMF

SEQ ID NO: 215166 - protein, 14 aa, Homo sapiens
  CDR3 for beta chain variable domain of TCR clone 107583 (TRBV7-6, TRBJ2-3)
CASSLGTVTDTQYF

SEQ ID NO: 215167 - protein, 13 aa, Homo sapiens
  CDR3 for alpha chain variable domain of TCR clone 107584 (TRAV1-1, TRAJ5)
CAVRQAGRRALTF

SEQ ID NO: 215168 - protein, 15 aa, Homo sapiens
  CDR3 for beta chain variable domain of TCR clone 107584 (TRBV4-1, TRBJ1-4)
CASSDTGGTNEKLLF

SEQ ID NO: 215169 - protein, 15 aa, Homo sapiens
  CDR3 for alpha chain variable domain of TCR clone 107585 (TRAV23/DV6, TRAJ17)
CARGSCRQQANFCRR

SEQ ID NO: 215170 - protein, 14 aa, Homo sapiens
  CDR3 for beta chain variable domain of TCR clone 107585 (TRBV7-2, TRBJ1-2)
CASSQTGSTYGYTF

SEQ ID NO: 215171 - protein, 13 aa, Homo sapiens
  CDR3 for alpha chain variable domain of TCR clone 107586 (TRAV13-1, TRAJ20)
CAARVSNDYKLSF

SEQ ID NO: 215172 - protein, 13 aa, Homo sapiens
  CDR3 for beta chain variable domain of TCR clone 107586 (TRBV7-6, TRBJ2-7)
CASSLDHTHEQYF

SEQ ID NO: 215173 - protein, 14 aa, Homo sapiens
  CDR3 for alpha chain variable domain of TCR clone 107587 (TRAV17, TRAJ32)
CATDPGGATNKLIF

SEQ ID NO: 215174 - protein, 14 aa, Homo sapiens
  CDR3 for beta chain variable domain of TCR clone 107587 (TRBV2, TRBJ1-5)
CASSENRGGQHQHF

SEQ ID NO: 215175 - protein, 13 aa, Homo sapiens
  CDR3 for alpha chain variable domain of TCR clone 107588 (TRAV12-1, TRAJ4)
CVVSLGGYNKLIF

SEQ ID NO: 215176 - protein, 13 aa, Homo sapiens
  CDR3 for beta chain variable domain of TCR clone 107588 (TRBV4-2, TRBJ1-1)
CASSQAGNTEAFF

SEQ ID NO: 215177 - protein, 14 aa, Homo sapiens
  CDR3 for alpha chain variable domain of TCR clone 107589 (TRAV12-2, TRAJ40)
CAVKIPSGTYKYFF

SEQ ID NO: 215178 - protein, 17 aa, Homo sapiens
  CDR3 for beta chain variable domain of TCR clone 107589 (TRBV20-1, TRBJ2-1)
CSAFSGTSGSLYNEQFF

SEQ ID NO: 215179 - protein, 13 aa, Homo sapiens
  CDR3 for alpha chain variable domain of TCR clone 107590 (TRAV1-1, TRAJ13)
CAVNSGGYQNVTF

SEQ ID NO: 215180 - protein, 12 aa, Homo sapiens
  CDR3 for beta chain variable domain of TCR clone 107590 (TRBV28, TRBJ2-1)
CASSVQINEQFF

SEQ ID NO: 215181 - protein, 15 aa, Homo sapiens
  CDR3 for alpha chain variable domain of TCR clone 107591 (TRAV8-4, TRAJ13)
CAVSDWGGGYQKVTF

SEQ ID NO: 215182 - protein, 15 aa, Homo sapiens
  CDR3 for beta chain variable domain of TCR clone 107591 (TRBV25-1, TRBJ1-4)
CASSPGDSTNEKLFL

SEQ ID NO: 215183 - protein, 16 aa, Homo sapiens
  CDR3 for alpha chain variable domain of TCR clone 107592 (TRAV12-1, TRAJ8)
CVVNGRGNTGFQKLVF

SEQ ID NO: 215184 - protein, 14 aa, Homo sapiens
  CDR3 for beta chain variable domain of TCR clone 107592 (TRBV20-1, TRBJ2-1)
CSAQIGGSANEQFF

SEQ ID NO: 215185 - protein, 13 aa, Homo sapiens
  CDR3 for alpha chain variable domain of TCR clone 107593 (TRAV1-2, TRAJ9)
CAALNTGGFKTIS

SEQ ID NO: 215186 - protein, 20 aa, Homo sapiens
  CDR3 for beta chain variable domain of TCR clone 107593 (TRBV28, TRBJ2-1)
CASTPIGRSPGLAGGNEQFF

SEQ ID NO: 215187 - protein, 13 aa, Homo sapiens
  CDR3 for alpha chain variable domain of TCR clone 107594 (TRAV12-2, TRAJ49)
CAVKPNTGNQFYF

SEQ ID NO: 215188 - protein, 15 aa, Homo sapiens
  CDR3 for beta chain variable domain of TCR clone 107594 (TRBV5-1, TRBJ2-3)
CASSVTSGSTDTQYF

SEQ ID NO: 215189 - protein, 13 aa, Homo sapiens
  CDR3 for alpha chain variable domain of TCR clone 107595 (TRAV3, TRAJ27)
CAVRPLGAGKSTF

SEQ ID NO: 215190 - protein, 16 aa, Homo sapiens
  CDR3 for beta chain variable domain of TCR clone 107595 (TRBV2, TRBJ2-5)
CASSETQGVGEETQYF

SEQ ID NO: 215191 - protein, 11 aa, Homo sapiens
  CDR3 for alpha chain variable domain of TCR clone 107596 (TRAV2, TRAJ31)
CAAGLPARLMF

SEQ ID NO: 215192 - protein, 13 aa, Homo sapiens
  CDR3 for beta chain variable domain of TCR clone 107596 (TRBV4-1, TRBJ2-3)
CASSQPPTDTQYF

SEQ ID NO: 215193 - protein, 14 aa, Homo sapiens
  CDR3 for alpha chain variable domain of TCR clone 107597 (TRAV8-6, TRAJ5)
CAVSVDTGRRALTF

SEQ ID NO: 215194 - protein, 11 aa, Homo sapiens
  CDR3 for beta chain variable domain of TCR clone 107597 (TRBV7-3, TRBJ2-5)
CASSLSETQYL

SEQ ID NO: 215195 - protein, 13 aa, Homo sapiens
  CDR3 for alpha chain variable domain of TCR clone 107598 (TRAV13-2, TRAJ11)
CAENYSGYSTLTF

SEQ ID NO: 215196 - protein, 14 aa, Homo sapiens
  CDR3 for beta chain variable domain of TCR clone 107598 (TRBV15, TRBJ2-5)
CATSGDRGQETQYF

SEQ ID NO: 215197 - protein, 14 aa, Homo sapiens
  CDR3 for alpha chain variable domain of TCR clone 107599 (TRAV30, TRAJ26)
CGTEIVSYGQNFVF

SEQ ID NO: 215198 - protein, 13 aa, Homo sapiens
  CDR3 for beta chain variable domain of TCR clone 107599 (TRBV24-1, TRBJ2-2)
CATSDRSTGELFF

SEQ ID NO: 215199 - protein, 13 aa, Homo sapiens
  CDR3 for alpha chain variable domain of TCR clone 107600 (TRAV13-1, TRAJ6)
CAASSGGSYIPTF

SEQ ID NO: 215200 - protein, 15 aa, Homo sapiens
  CDR3 for beta chain variable domain of TCR clone 107600 (TRBV12-4, TRBJ2-5)
SASSPPTGLQETQYF

SEQ ID NO: 215201 - protein, 14 aa, Homo sapiens
  CDR3 for alpha chain variable domain of TCR clone 107601 (TRAV8-3, TRAJ4)
CAVGAAGGYNKLIF

SEQ ID NO: 215202 - protein, 19 aa, Homo sapiens
  CDR3 for beta chain variable domain of TCR clone 107601 (TRBV2, TRBJ2-7)
CASSDDETSGRANDYEQYF

SEQ ID NO: 215203 - protein, 15 aa, Homo sapiens
  CDR3 for alpha chain variable domain of TCR clone 107602 (TRAV12-3, TRAJ10)
CASYILTGGGNKHTF

SEQ ID NO: 215204 - protein, 15 aa, Homo sapiens
  CDR3 for beta chain variable domain of TCR clone 107602 (TRBV7-2, TRBJ1-6)
CASSLGPDRGMPLHF

SEQ ID NO: 215205 - protein, 14 aa, Homo sapiens
  CDR3 for alpha chain variable domain of TCR clone 107603 (TRAV1-2, TRAJ16)
CAVNRFSDGQKLLF

SEQ ID NO: 215206 - protein, 14 aa, Homo sapiens
  CDR3 for beta chain variable domain of TCR clone 107603 (TRBV18, TRBJ2-2)
CASSPPGRAGELFF

SEQ ID NO: 215207 - protein, 14 aa, Homo sapiens
  CDR3 for alpha chain variable domain of TCR clone 107604 (TRAV1-2, TRAJ16)
CAVNRFSDGQKLLF

SEQ ID NO: 215208 - protein, 15 aa, Homo sapiens
  CDR3 for beta chain variable domain of TCR clone 107604 (TRBV7-2, TRBJ1-2)
CASSQYDRVNYGYTF

SEQ ID NO: 215209 - protein, 16 aa, Homo sapiens
  CDR3 for alpha chain variable domain of TCR clone 107605 (TRAV38-2/DV8, TRAJ42)
CAYRAFYGGSQGNLIF

SEQ ID NO: 215210 - protein, 16 aa, Homo sapiens
  CDR3 for beta chain variable domain of TCR clone 107605 (TRBV7-3, TRBJ2-2)
CASSLKRGTLSGELFF

SEQ ID NO: 215211 - protein, 14 aa, Homo sapiens
  CDR3 for alpha chain variable domain of TCR clone 107606 (TRAV2, TRAJ37)
CAVDFASNTGKLIF

SEQ ID NO: 215212 - protein, 13 aa, Homo sapiens
  CDR3 for beta chain variable domain of TCR clone 107606 (TRBV19, TRBJ2-7)
CASSKTGTHEQYF

SEQ ID NO: 215213 - protein, 15 aa, Homo sapiens
  CDR3 for alpha chain variable domain of TCR clone 107607 (TRAV8-3, TRAJ45)
CASSYSGGGADGLTF

SEQ ID NO: 215214 - protein, 13 aa, Homo sapiens
  CDR3 for beta chain variable domain of TCR clone 107607 (TRBV11-2, TRBJ2-5)
CASSRGPSETQYF

SEQ ID NO: 215215 - protein, 13 aa, Homo sapiens
  CDR3 for alpha chain variable domain of TCR clone 107608 (TRAV13-2, TRAJ53)
CAENMGSNYKLTF

SEQ ID NO: 215216 - protein, 15 aa, Homo sapiens
  CDR3 for beta chain variable domain of TCR clone 107608 (TRBV19, TRBJ2-2)
CASSPRTGWTGELFF

SEQ ID NO: 215217 - protein, 12 aa, Homo sapiens
  CDR3 for alpha chain variable domain of TCR clone 107609 (TRAV21, TRAJ31)
CAVWGNNARLMF

SEQ ID NO: 215218 - protein, 17 aa, Homo sapiens
  CDR3 for beta chain variable domain of TCR clone 107609 (TRBV20-1, TRBJ2-2)
CSASGSGQGGLTGELFF

SEQ ID NO: 215219 - protein, 16 aa, Homo sapiens
  CDR3 for alpha chain variable domain of TCR clone 107610 (TRAV14/DV4, TRAJ20)
CAMREGRSRDDYKPSF

SEQ ID NO: 215220 - protein, 17 aa, Homo sapiens
  CDR3 for beta chain variable domain of TCR clone 107610 (TRBV15, TRBJ1-1)
CATSRVGGADGDTEAFF

SEQ ID NO: 215221 - protein, 15 aa, Homo sapiens
  CDR3 for alpha chain variable domain of TCR clone 107611 (TRAV14/DV4, TRAJ26)
CSMREGQNYGQNFVF

SEQ ID NO: 215222 - protein, 13 aa, Homo sapiens
  CDR3 for beta chain variable domain of TCR clone 107611 (TRBV24-1, TRBJ2-2)
CATSDWSTGELFF

SEQ ID NO: 215223 - protein, 14 aa, Homo sapiens
  CDR3 for alpha chain variable domain of TCR clone 107612 (TRAV1-2, TRAJ8)
CAVREDTGFQKLVF

SEQ ID NO: 215224 - protein, 14 aa, Homo sapiens
  CDR3 for beta chain variable domain of TCR clone 107612 (TRBV27, TRBJ1-1)
CASSLLSGLSEAFF

SEQ ID NO: 215225 - protein, 11 aa, Homo sapiens
  CDR3 for alpha chain variable domain of TCR clone 107613 (TRAV13-1, TRAJ24)
CAASGWGKLQF

SEQ ID NO: 215226 - protein, 13 aa, Homo sapiens
  CDR3 for beta chain variable domain of TCR clone 107613 (TRBV11-2, TRBJ2-5)
CASSSTGEETQYF

SEQ ID NO: 215227 - protein, 14 aa, Homo sapiens
  CDR3 for alpha chain variable domain of TCR clone 107614 (TRAV12-1, TRAJ23)
CVVIVYNQGGKIIF

SEQ ID NO: 215228 - protein, 15 aa, Homo sapiens
  CDR3 for beta chain variable domain of TCR clone 107614 (TRBV20-1, TRBJ1-5)
CSAKPPGQGPQPQHF

SEQ ID NO: 215229 - protein, 15 aa, Homo sapiens
  CDR3 for alpha chain variable domain of TCR clone 107615 (TRAV17, TRAJ35)
CATAFVIGFGKVLHC

SEQ ID NO: 215230 - protein, 16 aa, Homo sapiens
  CDR3 for beta chain variable domain of TCR clone 107615 (TRBV11-2, TRBJ2-7)
CASSPLAGGPRYEQYF

SEQ ID NO: 215231 - protein, 13 aa, Homo sapiens
  CDR3 for alpha chain variable domain of TCR clone 107616 (TRAV2, TRAJ40)
CAVATSGTYKYIF

SEQ ID NO: 215232 - protein, 17 aa, Homo sapiens
  CDR3 for beta chain variable domain of TCR clone 107616 (TRBV7-3, TRBJ2-3)
CASSLMKRMRGADTQYF

SEQ ID NO: 215233 - protein, 14 aa, Homo sapiens
  CDR3 for alpha chain variable domain of TCR clone 107617 (TRAV38-1, TRAJ29)
CAFITPSGNTPLVF

SEQ ID NO: 215234 - protein, 13 aa, Homo sapiens
  CDR3 for beta chain variable domain of TCR clone 107617 (TRBV2, TRBJ2-2)
CASNRQNTGELFF

SEQ ID NO: 215235 - protein, 13 aa, Homo sapiens
  CDR3 for alpha chain variable domain of TCR clone 107618 (TRAV21, TRAJ36)
CAVIKTGANNLFF

SEQ ID NO: 215236 - protein, 14 aa, Homo sapiens
  CDR3 for beta chain variable domain of TCR clone 107618 (TRBV29-1, TRBJ2-3)
SAAQRGGGRDTQYF

SEQ ID NO: 215237 - protein, 14 aa, Homo sapiens
  CDR3 for alpha chain variable domain of TCR clone 107619 (TRAV38-1, TRAJ40)
CALRPTSGTYIYIF

SEQ ID NO: 215238 - protein, 14 aa, Homo sapiens
  CDR3 for beta chain variable domain of TCR clone 107619 (TRBV25-1, TRBJ1-1)
CASTHLGGNTEAFF

SEQ ID NO: 215239 - protein, 22 aa, Homo sapiens
  CDR3 for alpha chain variable domain of TCR clone 107620 (TRAV12-2, TRAJ53)
SPVIQPPTSVPTILSSNYKLTF

SEQ ID NO: 215240 - protein, 13 aa, Homo sapiens
  CDR3 for beta chain variable domain of TCR clone 107620 (TRBV7-7, TRBJ2-3)
CASSLSRADTQYF

SEQ ID NO: 215241 - protein, 14 aa, Homo sapiens
  CDR3 for alpha chain variable domain of TCR clone 107621 (TRAV8-3, TRAJ4)
CAVGASGGYNKLIF

SEQ ID NO: 215242 - protein, 16 aa, Homo sapiens
  CDR3 for beta chain variable domain of TCR clone 107621 (TRBV4-3, TRBJ2-2)
CASSHLQGSRTGELFF

SEQ ID NO: 215243 - protein, 14 aa, Homo sapiens
  CDR3 for alpha chain variable domain of TCR clone 107622 (TRAV16, TRAJ32)
CALKSGGATNRPIF

SEQ ID NO: 215244 - protein, 13 aa, Homo sapiens
  CDR3 for beta chain variable domain of TCR clone 107622 (TRBV15, TRBJ1-6)
CATSGGLNSPLHF

SEQ ID NO: 215245 - protein, 15 aa, Homo sapiens
  CDR3 for alpha chain variable domain of TCR clone 107623 (TRAV4, TRAJ39)
CLVGPNNKAGNMLTF

SEQ ID NO: 215246 - protein, 13 aa, Homo sapiens
  CDR3 for beta chain variable domain of TCR clone 107623 (TRBV11-2, TRBJ2-5)
CASSSTGEETQYF

SEQ ID NO: 215247 - protein, 11 aa, Homo sapiens
  CDR3 for alpha chain variable domain of TCR clone 107624 (TRAV12-2, TRAJ48)
CASNEKLTFGT

SEQ ID NO: 215248 - protein, 14 aa, Homo sapiens
  CDR3 for beta chain variable domain of TCR clone 107624 (TRBV5-1, TRBJ2-5)
CASSLAGKQETQYF

SEQ ID NO: 215249 - protein, 17 aa, Homo sapiens
  CDR3 for alpha chain variable domain of TCR clone 107625 (TRAV8-6, TRAJ58)
CAVSSWVGETSGSRLTF

SEQ ID NO: 215250 - protein, 12 aa, Homo sapiens
  CDR3 for beta chain variable domain of TCR clone 107625 (TRBV12-4, TRBJ2-7)
CASSLGGYEQYF

SEQ ID NO: 215251 - protein, 16 aa, Homo sapiens
  CDR3 for alpha chain variable domain of TCR clone 107626 (TRAV25, TRAJ24)
CAQRRGTTDSWGKLHF

SEQ ID NO: 215252 - protein, 17 aa, Homo sapiens
  CDR3 for beta chain variable domain of TCR clone 107626 (TRBV15, TRBJ2-4)
CATSRDNPQTGLDIQYF

SEQ ID NO: 215253 - protein, 12 aa, Homo sapiens
  CDR3 for alpha chain variable domain of TCR clone 107627 (TRAV1-2, TRAJ29)
CAVPSGNTPLVF

SEQ ID NO: 215254 - protein, 14 aa, Homo sapiens
  CDR3 for beta chain variable domain of TCR clone 107627 (TRBV7-6, TRBJ2-1)
CAGSLGGGADEQFF

SEQ ID NO: 215255 - protein, 13 aa, Homo sapiens
  CDR3 for alpha chain variable domain of TCR clone 107628 (TRAV8-4, TRAJ48)
CAVSLFRNEKLTF

SEQ ID NO: 215256 - protein, 15 aa, Homo sapiens
  CDR3 for beta chain variable domain of TCR clone 107628 (TRBV20-1, TRBJ2-7)
CSARKGLAESYEQYF

SEQ ID NO: 215257 - protein, 10 aa, Homo sapiens
  CDR3 for alpha chain variable domain of TCR clone 107629 (TRAV23/DV6, TRAJ31)
CARGGARLMF

SEQ ID NO: 215258 - protein, 14 aa, Homo sapiens
  CDR3 for beta chain variable domain of TCR clone 107629 (TRBV7-8, TRBJ1-2)
CASSPDSLSYGYAF

SEQ ID NO: 215259 - protein, 15 aa, Homo sapiens
  CDR3 for alpha chain variable domain of TCR clone 107630 (TRAV20, TRAJ6)
CAVRLQSGGCYIPTF

SEQ ID NO: 215260 - protein, 14 aa, Homo sapiens
  CDR3 for beta chain variable domain of TCR clone 107630 (TRBV12-4, TRBJ2-7)
CASSASGGWYEQYF

SEQ ID NO: 215261 - protein, 11 aa, Homo sapiens
  CDR3 for alpha chain variable domain of TCR clone 107631 (TRAV12-3, TRAJ43)
CAMSVSNDMRF

SEQ ID NO: 215262 - protein, 16 aa, Homo sapiens
  CDR3 for beta chain variable domain of TCR clone 107631 (TRBV20-1, TRBJ2-1)
YSARDSLGAVYNEQFF

SEQ ID NO: 215263 - protein, 15 aa, Homo sapiens
  CDR3 for alpha chain variable domain of TCR clone 107632 (TRAV17, TRAJ22)
CATVAPSGSARQLTF

SEQ ID NO: 215264 - protein, 16 aa, Homo sapiens
  CDR3 for beta chain variable domain of TCR clone 107632 (TRBV27, TRBJ2-2)
CASSFRGLVRTGELFF

SEQ ID NO: 215265 - protein, 14 aa, Homo sapiens
  CDR3 for alpha chain variable domain of TCR clone 107633 (TRAV1-2, TRAJ8)
CAVRGDTGFQKLVF

SEQ ID NO: 215266 - protein, 12 aa, Homo sapiens
  CDR3 for beta chain variable domain of TCR clone 107633 (TRBV11-2, TRBJ2-1)
CASSPGNNEQFF

SEQ ID NO: 215267 - protein, 14 aa, Homo sapiens
  CDR3 for alpha chain variable domain of TCR clone 107634 (TRAV26-1, TRAJ38)
CIADNAGNNRKLIW

SEQ ID NO: 215268 - protein, 12 aa, Homo sapiens
  CDR3 for beta chain variable domain of TCR clone 107634 (TRBV5-1, TRBJ2-3)
CASSILTDTQYF

SEQ ID NO: 215269 - protein, 13 aa, Homo sapiens
  CDR3 for alpha chain variable domain of TCR clone 107635 (TRAV1-1, TRAJ38)
CASNAGNSRKLIW

SEQ ID NO: 215270 - protein, 14 aa, Homo sapiens
  CDR3 for beta chain variable domain of TCR clone 107635 (TRBV15, TRBJ2-1)
CATSGVEDYNEQFF

SEQ ID NO: 215271 - protein, 14 aa, Homo sapiens
  CDR3 for alpha chain variable domain of TCR clone 107636 (TRAV26-1, TRAJ34)
CIVRVAYNTDKLIF

SEQ ID NO: 215272 - protein, 15 aa, Homo sapiens
  CDR3 for beta chain variable domain of TCR clone 107636 (TRBV20-1, TRBJ2-7)
CSARVPAAYFYEQHF

SEQ ID NO: 215273 - protein, 13 aa, Homo sapiens
  CDR3 for alpha chain variable domain of TCR clone 107637 (TRAV12-3, TRAJ7)
CAMSASGNNRLAF

SEQ ID NO: 215274 - protein, 14 aa, Homo sapiens
  CDR3 for beta chain variable domain of TCR clone 107637 (TRBV13, TRBJ2-5)
CASSLVPRGETQYF

SEQ ID NO: 215275 - protein, 12 aa, Homo sapiens
  CDR3 for alpha chain variable domain of TCR clone 107638 (TRAV27, TRAJ45)
CAGAQEEVLTHL

SEQ ID NO: 215276 - protein, 17 aa, Homo sapiens
  CDR3 for beta chain variable domain of TCR clone 107638 (TRBV11-2, TRBJ2-1)
CASSLYPPGVEYNEQFF

SEQ ID NO: 215277 - protein, 17 aa, Homo sapiens
  CDR3 for alpha chain variable domain of TCR clone 107639 (TRAV4, TRAJ42)
CLVGFLNYGGSQGNLIF

SEQ ID NO: 215278 - protein, 12 aa, Homo sapiens
  CDR3 for beta chain variable domain of TCR clone 107639 (TRBV20-1, TRBJ2-1)
CSAQYTYNEQFF

SEQ ID NO: 215279 - protein, 15 aa, Homo sapiens
  CDR3 for alpha chain variable domain of TCR clone 107640 (TRAV27, TRAJ38)
CAARRNAGNNRKLIG

SEQ ID NO: 215280 - protein, 13 aa, Homo sapiens
  CDR3 for beta chain variable domain of TCR clone 107640 (TRBV12-5, TRBJ2-3)
CASGDRQSDTQYL

SEQ ID NO: 215281 - protein, 19 aa, Homo sapiens
  CDR3 for alpha chain variable domain of TCR clone 107641 (TRAV26-1, TRAJ50)
CCVLLHRQNPKTSYDKVIF

SEQ ID NO: 215282 - protein, 14 aa, Homo sapiens
  CDR3 for beta chain variable domain of TCR clone 107641 (TRBV25-1, TRBJ1-1)
CASTHLGGNTEAFF

SEQ ID NO: 215283 - protein, 12 aa, Homo sapiens
  CDR3 for alpha chain variable domain of TCR clone 107642 (TRAV1-2, TRAJ29)
CAVPSRNTPLVF

SEQ ID NO: 215284 - protein, 12 aa, Homo sapiens
  CDR3 for beta chain variable domain of TCR clone 107642 (TRBV7-9, TRBJ2-7)
CASSFGSYEQYF

SEQ ID NO: 215285 - protein, 13 aa, Homo sapiens
  CDR3 for alpha chain variable domain of TCR clone 107643 (TRAV12-3, TRAJ13)
CAMSSGGYQKVTF

SEQ ID NO: 215286 - protein, 15 aa, Homo sapiens
  CDR3 for beta chain variable domain of TCR clone 107643 (TRBV6-3, TRBJ2-2)
CASSFLATLTGELFF

SEQ ID NO: 215287 - protein, 14 aa, Homo sapiens
  CDR3 for alpha chain variable domain of TCR clone 107644 (TRAV13-1, TRAJ35)
CAASKGGFGNVLHC

SEQ ID NO: 215288 - protein, 13 aa, Homo sapiens
  CDR3 for beta chain variable domain of TCR clone 107644 (TRBV4-1, TRBJ2-1)
CASSQEVQYEQFF

SEQ ID NO: 215289 - protein, 13 aa, Homo sapiens
  CDR3 for alpha chain variable domain of TCR clone 107645 (TRAV21, TRAJ26)
CAVLDNYGQNFVF

SEQ ID NO: 215290 - protein, 16 aa, Homo sapiens
  CDR3 for beta chain variable domain of TCR clone 107645 (TRBV29-1, TRBJ2-2)
CSVETSASGNTGELFF

SEQ ID NO: 215291 - protein, 15 aa, Homo sapiens
  CDR3 for alpha chain variable domain of TCR clone 107646 (TRAV21, TRAJ38)
CAVRQDAGNNRKLIW

SEQ ID NO: 215292 - protein, 16 aa, Homo sapiens
  CDR3 for beta chain variable domain of TCR clone 107646 (TRBV4-2, TRBJ1-1)
CASRPLDGGGDTEDFF

SEQ ID NO: 215293 - protein, 11 aa, Homo sapiens
  CDR3 for alpha chain variable domain of TCR clone 107647 (TRAV24, TRAJ43)
CAFSNNNDMRF

SEQ ID NO: 215294 - protein, 14 aa, Homo sapiens
  CDR3 for beta chain variable domain of TCR clone 107647 (TRBV12-4, TRBJ1-1)
CASSLGTGGTEAFF

SEQ ID NO: 215295 - protein, 13 aa, Homo sapiens
  CDR3 for alpha chain variable domain of TCR clone 107648 (TRAV36/DV7, TRAJ7)
CAGTRYGNNRLAF

SEQ ID NO: 215296 - protein, 15 aa, Homo sapiens
  CDR3 for beta chain variable domain of TCR clone 107648 (TRBV7-2, TRBJ2-1)
CASTHGTGIYNEQFF

SEQ ID NO: 215297 - protein, 14 aa, Homo sapiens
  CDR3 for alpha chain variable domain of TCR clone 107649 (TRAV12-2, TRAJ13)
CAVKRTGGYQKVTF

SEQ ID NO: 215298 - protein, 15 aa, Homo sapiens
  CDR3 for beta chain variable domain of TCR clone 107649 (TRBV7-2, TRBJ1-3)
CASSPQGGSGNTIYF

SEQ ID NO: 215299 - protein, 14 aa, Homo sapiens
  CDR3 for alpha chain variable domain of TCR clone 107650 (TRAV1-2, TRAJ16)
CAVHRFSDGQKLLF

SEQ ID NO: 215300 - protein, 13 aa, Homo sapiens
  CDR3 for beta chain variable domain of TCR clone 107650 (TRBV7-9, TRBJ1-2)
CASSLKQNYGYTF

SEQ ID NO: 215301 - protein, 14 aa, Homo sapiens
  CDR3 for alpha chain variable domain of TCR clone 107651 (TRAV1-2, TRAJ16)
CAVNRFSDGQKLLF

SEQ ID NO: 215302 - protein, 13 aa, Homo sapiens
  CDR3 for beta chain variable domain of TCR clone 107651 (TRBV19, TRBJ2-7)
CASRKAGGSEQHF

SEQ ID NO: 215303 - protein, 10 aa, Homo sapiens
  CDR3 for alpha chain variable domain of TCR clone 107652 (TRAV12-2, TRAJ49)
CAVRRNQFYF

SEQ ID NO: 215304 - protein, 15 aa, Homo sapiens
  CDR3 for beta chain variable domain of TCR clone 107652 (TRBV18, TRBJ1-1)
CASSPRQGENTEAFF

SEQ ID NO: 215305 - protein, 11 aa, Homo sapiens
  CDR3 for alpha chain variable domain of TCR clone 107653 (TRAV39, TRAJ49)
CAVDISTQFYF

SEQ ID NO: 215306 - protein, 16 aa, Homo sapiens
  CDR3 for beta chain variable domain of TCR clone 107653 (TRBV6-1, TRBJ2-5)
CASSETLDRGAETQYF

SEQ ID NO: 215307 - protein, 15 aa, Homo sapiens
  CDR3 for alpha chain variable domain of TCR clone 107654 (TRAV21, TRAJ10)
CAVRGLTGGGNKLTF

SEQ ID NO: 215308 - protein, 14 aa, Homo sapiens
  CDR3 for beta chain variable domain of TCR clone 107654 (TRBV5-1, TRBJ2-7)
CASSLTQGLREQYF

SEQ ID NO: 215309 - protein, 13 aa, Homo sapiens
  CDR3 for alpha chain variable domain of TCR clone 107655 (TRAV2, TRAJ40)
CAVVTSGTYKYIF

SEQ ID NO: 215310 - protein, 14 aa, Homo sapiens
  CDR3 for beta chain variable domain of TCR clone 107655 (TRBV19, TRBJ2-1)
CASPTFVLSDDQFF

SEQ ID NO: 215311 - protein, 14 aa, Homo sapiens
  CDR3 for alpha chain variable domain of TCR clone 107656 (TRAV17, TRAJ57)
CATDPQGGSEKLVF

SEQ ID NO: 215312 - protein, 12 aa, Homo sapiens
  CDR3 for beta chain variable domain of TCR clone 107656 (TRBV29-1, TRBJ2-3)
CSVTGGADTQYF

SEQ ID NO: 215313 - protein, 13 aa, Homo sapiens
  CDR3 for alpha chain variable domain of TCR clone 107657 (TRAV3, TRAJ27)
CAVRPLGAGKSTF

SEQ ID NO: 215314 - protein, 13 aa, Homo sapiens
  CDR3 for beta chain variable domain of TCR clone 107657 (TRBV7-9, TRBJ2-3)
CASSPGSKDTQYF

SEQ ID NO: 215315 - protein, 14 aa, Homo sapiens
  CDR3 for alpha chain variable domain of TCR clone 107658 (TRAV3, TRAJ34)
CAVRTPGNTDKLIF

SEQ ID NO: 215316 - protein, 17 aa, Homo sapiens
  CDR3 for beta chain variable domain of TCR clone 107658 (TRBV20-1, TRBJ2-7)
CSAAPGLARGISYEQYF

SEQ ID NO: 215317 - protein, 14 aa, Homo sapiens
  CDR3 for alpha chain variable domain of TCR clone 107659 (TRAV38-1, TRAJ40)
CALRPTYGTYKYIF

SEQ ID NO: 215318 - protein, 14 aa, Homo sapiens
  CDR3 for beta chain variable domain of TCR clone 107659 (TRBV25-1, TRBJ1-1)
CASTHLGGNTEAFF

SEQ ID NO: 215319 - protein, 13 aa, Homo sapiens
  CDR3 for alpha chain variable domain of TCR clone 107660 (TRAV27, TRAJ42)
CAGARGSQGNLIF

SEQ ID NO: 215320 - protein, 15 aa, Homo sapiens
  CDR3 for beta chain variable domain of TCR clone 107660 (TRBV10-3, TRBJ2-2)
CAIRTDREDTGELFF

SEQ ID NO: 215321 - protein, 16 aa, Homo sapiens
  CDR3 for alpha chain variable domain of TCR clone 107661 (TRAV16, TRAJ4)
CAISRMFSGGYNKLIF

SEQ ID NO: 215322 - protein, 16 aa, Homo sapiens
  CDR3 for beta chain variable domain of TCR clone 107661 (TRBV24-1, TRBJ2-3)
CATSDPGTGATDTQYF

SEQ ID NO: 215323 - protein, 12 aa, Homo sapiens
  CDR3 for alpha chain variable domain of TCR clone 107662 (TRAV3, TRAJ43)
RAVRDPNNDMRF

SEQ ID NO: 215324 - protein, 15 aa, Homo sapiens
  CDR3 for beta chain variable domain of TCR clone 107662 (TRBV27, TRBJ1-5)
CASSPGTGFDQPQHF

SEQ ID NO: 215325 - protein, 14 aa, Homo sapiens
  CDR3 for alpha chain variable domain of TCR clone 107663 (TRAV38-1, TRAJ40)
CGLRPTSGTYKYIF

SEQ ID NO: 215326 - protein, 14 aa, Homo sapiens
  CDR3 for beta chain variable domain of TCR clone 107663 (TRBV25-1, TRBJ1-1)
CASTHLGGNTEAFF

SEQ ID NO: 215327 - protein, 12 aa, Homo sapiens
  CDR3 for alpha chain variable domain of TCR clone 107664 (TRAV12-3, TRAJ17)
CAMTLTGNKLTF

SEQ ID NO: 215328 - protein, 16 aa, Homo sapiens
  CDR3 for beta chain variable domain of TCR clone 107664 (TRBV7-2, TRBJ1-4)
CASSLAPGRRDEKLFF

SEQ ID NO: 215329 - protein, 13 aa, Homo sapiens
  CDR3 for alpha chain variable domain of TCR clone 107665 (TRAV26-2, TRAJ43)
CILRAVNNNAMRF

SEQ ID NO: 215330 - protein, 15 aa, Homo sapiens
  CDR3 for beta chain variable domain of TCR clone 107665 (TRBV7-2, TRBJ2-1)
CASTHGTGIYNEQFF

SEQ ID NO: 215331 - protein, 14 aa, Homo sapiens
  CDR3 for alpha chain variable domain of TCR clone 107666 (TRAV35, TRAJ13)
CAGSPSGCYQKVTF

SEQ ID NO: 215332 - protein, 17 aa, Homo sapiens
  CDR3 for beta chain variable domain of TCR clone 107666 (TRBV7-6, TRBJ2-5)
CASSPGLADPWGETQYF

SEQ ID NO: 215333 - protein, 18 aa, Homo sapiens
  CDR3 for alpha chain variable domain of TCR clone 107667 (TRAV26-1, TRAJ52)
CVARVEGAGGTSYGKLTF

SEQ ID NO: 215334 - protein, 13 aa, Homo sapiens
  CDR3 for beta chain variable domain of TCR clone 107667 (TRBV7-3, TRBJ1-2)
CASSLKRGYGYTF

SEQ ID NO: 215335 - protein, 17 aa, Homo sapiens
  CDR3 for alpha chain variable domain of TCR clone 107668 (TRAV3, TRAJ12)
CAVRDGGRMDSSSKLIF

SEQ ID NO: 215336 - protein, 16 aa, Homo sapiens
  CDR3 for beta chain variable domain of TCR clone 107668 (TRBV9, TRBJ2-2)
CASSAMGKGNTGELFF

SEQ ID NO: 215337 - protein, 10 aa, Homo sapiens
  CDR3 for alpha chain variable domain of TCR clone 107669 (TRAV26-1, TRAJ28)
CIVRVAHAYS

SEQ ID NO: 215338 - protein, 17 aa, Homo sapiens
  CDR3 for beta chain variable domain of TCR clone 107669 (TRBV4-1, TRBJ1-4)
CASSQEGPRGVEEKLFF

SEQ ID NO: 215339 - protein, 16 aa, Homo sapiens
  CDR3 for alpha chain variable domain of TCR clone 107670 (TRAV1-2, TRAJ33)
CAVRAISMDSNYQLIW

SEQ ID NO: 215340 - protein, 13 aa, Homo sapiens
  CDR3 for beta chain variable domain of TCR clone 107670 (TRBV20-1, TRBJ1-1)
CSARGGGNTEAFF

SEQ ID NO: 215341 - protein, 13 aa, Homo sapiens
  CDR3 for alpha chain variable domain of TCR clone 107671 (TRAV19, TRAJ57)
CALLQGGSEKLVF

SEQ ID NO: 215342 - protein, 16 aa, Homo sapiens
  CDR3 for beta chain variable domain of TCR clone 107671 (TRBV24-1, TRBJ2-2)
CATSDTGQGGTGELFF

SEQ ID NO: 215343 - protein, 11 aa, Homo sapiens
  CDR3 for alpha chain variable domain of TCR clone 107672 (TRAV21, TRAJ48)
RAVDGNEKLTF

SEQ ID NO: 215344 - protein, 16 aa, Homo sapiens
  CDR3 for beta chain variable domain of TCR clone 107672 (TRBV19, TRBJ2-1)
CASSSKGTRSYNEQFF

SEQ ID NO: 215345 - protein, 14 aa, Homo sapiens
  CDR3 for alpha chain variable domain of TCR clone 107673 (TRAV16, TRAJ3)
CALSQHSSASKIIF

SEQ ID NO: 215346 - protein, 14 aa, Homo sapiens
  CDR3 for beta chain variable domain of TCR clone 107673 (TRBV6-3, TRBJ2-1)
CASLHSAYYNEQFF

SEQ ID NO: 215347 - protein, 15 aa, Homo sapiens
  CDR3 for alpha chain variable domain of TCR clone 107674 (TRAV4, TRAJ39)
CLVGPNNNAGNMLTL

SEQ ID NO: 215348 - protein, 15 aa, Homo sapiens
  CDR3 for beta chain variable domain of TCR clone 107674 (TRBV19, TRBJ1-1)
CASTSGQIQNTEAFF

SEQ ID NO: 215349 - protein, 15 aa, Homo sapiens
  CDR3 for alpha chain variable domain of TCR clone 107675 (TRAV12-3, TRAJ27)
CAMRAYNTNAGKSTF

SEQ ID NO: 215350 - protein, 13 aa, Homo sapiens
  CDR3 for beta chain variable domain of TCR clone 107675 (TRBV7-9, TRBJ2-2)
CASSLDPTGELFF

SEQ ID NO: 215351 - protein, 15 aa, Homo sapiens
  CDR3 for alpha chain variable domain of TCR clone 107676 (TRAV3, TRAJ40)
CAVSDVTSGTYKYIF

SEQ ID NO: 215352 - protein, 13 aa, Homo sapiens
  CDR3 for beta chain variable domain of TCR clone 107676 (TRBV7-9, TRBJ1-2)
CASSLKQNYGYTF

SEQ ID NO: 215353 - protein, 12 aa, Homo sapiens
  CDR3 for alpha chain variable domain of TCR clone 107677 (TRAV1-1, TRAJ39)
CAVPVVGNMLTF

SEQ ID NO: 215354 - protein, 13 aa, Homo sapiens
  CDR3 for beta chain variable domain of TCR clone 107677 (TRBV7-3, TRBJ2-1)
CASSLDSYNEQFF

SEQ ID NO: 215355 - protein, 13 aa, Homo sapiens
  CDR3 for alpha chain variable domain of TCR clone 107678 (TRAV12-3, TRAJ9)
CAMSADGGFKTIF

SEQ ID NO: 215356 - protein, 15 aa, Homo sapiens
  CDR3 for beta chain variable domain of TCR clone 107678 (TRBV7-3, TRBJ2-1)
CASSLTSGSYNEQFF

SEQ ID NO: 215357 - protein, 14 aa, Homo sapiens
  CDR3 for alpha chain variable domain of TCR clone 107679 (TRAV8-4, TRAJ8)
CAVSEDTGFQKLVF

SEQ ID NO: 215358 - protein, 17 aa, Homo sapiens
  CDR3 for beta chain variable domain of TCR clone 107679 (TRBV20-1, TRBJ2-1)
CSAPPRLAGTRYNEQFF

SEQ ID NO: 215359 - protein, 14 aa, Homo sapiens
  CDR3 for alpha chain variable domain of TCR clone 107680 (TRAV16, TRAJ33)
CALSAMYSNYQLIW

SEQ ID NO: 215360 - protein, 17 aa, Homo sapiens
  CDR3 for beta chain variable domain of TCR clone 107680 (TRBV25-1, TRBJ2-7)
CASSDARVVFSSYEQYF

SEQ ID NO: 215361 - protein, 16 aa, Homo sapiens
  CDR3 for alpha chain variable domain of TCR clone 107681 (TRAV30, TRAJ24)
CGTEIVGADSWGKFQF

SEQ ID NO: 215362 - protein, 19 aa, Homo sapiens
  CDR3 for beta chain variable domain of TCR clone 107681 (TRBV7-2, TRBJ2-3)
CASSFLSRNWGGGTDTQYF

SEQ ID NO: 215363 - protein, 15 aa, Homo sapiens
  CDR3 for alpha chain variable domain of TCR clone 107682 (TRAV21, TRAJ24)
CAARSSTDSWGTLQF

SEQ ID NO: 215364 - protein, 11 aa, Homo sapiens
  CDR3 for beta chain variable domain of TCR clone 107682 (TRBV11-2, TRBJ2-2)
CASSLPGELFF

SEQ ID NO: 215365 - protein, 13 aa, Homo sapiens
  CDR3 for alpha chain variable domain of TCR clone 107683 (TRAV8-3, TRAJ28)
CAVGAVGSYQLTF

SEQ ID NO: 215366 - protein, 15 aa, Homo sapiens
  CDR3 for beta chain variable domain of TCR clone 107683 (TRBV7-9, TRBJ1-5)
CASSQGNQPSQPQHF

SEQ ID NO: 215367 - protein, 12 aa, Homo sapiens
  CDR3 for alpha chain variable domain of TCR clone 107684 (TRAV1-2, TRAJ9)
CAGYAGGFKTIF

SEQ ID NO: 215368 - protein, 15 aa, Homo sapiens
  CDR3 for beta chain variable domain of TCR clone 107684 (TRBV11-2, TRBJ2-1)
CASSPAGQSLNEQFF

SEQ ID NO: 215369 - protein, 14 aa, Homo sapiens
  CDR3 for alpha chain variable domain of TCR clone 107685 (TRAV13-1, TRAJ44)
CAAKATGSASKLTF

SEQ ID NO: 215370 - protein, 15 aa, Homo sapiens
  CDR3 for beta chain variable domain of TCR clone 107685 (TRBV10-3, TRBJ2-1)
CAISDVQDRAYEQFF

SEQ ID NO: 215371 - protein, 16 aa, Homo sapiens
  CDR3 for alpha chain variable domain of TCR clone 107686 (TRAV13-1, TRAJ37)
CAAGSLGSSNTGKLIF

SEQ ID NO: 215372 - protein, 12 aa, Homo sapiens
  CDR3 for beta chain variable domain of TCR clone 107686 (TRBV6-1, TRBJ2-5)
CASSEGRETQYF

SEQ ID NO: 215373 - protein, 15 aa, Homo sapiens
  CDR3 for alpha chain variable domain of TCR clone 107687 (TRAV21, TRAJ53)
YATLNSGGSNYKLTF

SEQ ID NO: 215374 - protein, 16 aa, Homo sapiens
  CDR3 for beta chain variable domain of TCR clone 107687 (TRBV9, TRBJ2-1)
CASSVGGGGNYNEQFF

SEQ ID NO: 215375 - protein, 12 aa, Homo sapiens
  CDR3 for alpha chain variable domain of TCR clone 107688 (TRAV35, TRAJ49)
CAGWDTGNQFYF

SEQ ID NO: 215376 - protein, 16 aa, Homo sapiens
  CDR3 for beta chain variable domain of TCR clone 107688 (TRBV5-1, TRBJ2-2)
CASSLWDTTNTGELFF

SEQ ID NO: 215377 - protein, 14 aa, Homo sapiens
  CDR3 for alpha chain variable domain of TCR clone 107689 (TRAV26-1, TRAJ45)
CIEVTGGGADGLTF

SEQ ID NO: 215378 - protein, 10 aa, Homo sapiens
  CDR3 for beta chain variable domain of TCR clone 107689 (TRBV19, TRBJ2-2)
CASTRPGLAG

SEQ ID NO: 215379 - protein, 11 aa, Homo sapiens
  CDR3 for alpha chain variable domain of TCR clone 107690 (TRAV16, TRAJ31)
CALFNNARLMF

SEQ ID NO: 215380 - protein, 12 aa, Homo sapiens
  CDR3 for beta chain variable domain of TCR clone 107690 (TRBV12-4, TRBJ2-7)
CASSLGGYEQYF

SEQ ID NO: 215381 - protein, 12 aa, Homo sapiens
  CDR3 for alpha chain variable domain of TCR clone 107691 (TRAV12-3, TRAJ20)
CAMVRGDYKLSF

SEQ ID NO: 215382 - protein, 14 aa, Homo sapiens
  CDR3 for beta chain variable domain of TCR clone 107691 (TRBV5-5, TRBJ1-5)
CASSGQGVDKPQHF

SEQ ID NO: 215383 - protein, 14 aa, Homo sapiens
  CDR3 for alpha chain variable domain of TCR clone 107692 (TRAV13-1, TRAJ44)
CAAKATGTASKLSF

SEQ ID NO: 215384 - protein, 17 aa, Homo sapiens
  CDR3 for beta chain variable domain of TCR clone 107692 (TRBV7-3, TRBJ2-3)
CASSLMKRMRGADTQYF

SEQ ID NO: 215385 - protein, 15 aa, Homo sapiens
  CDR3 for alpha chain variable domain of TCR clone 107693 (TRAV12-1, TRAJ42)
CVVKTGGGSQGNLIF

SEQ ID NO: 215386 - protein, 13 aa, Homo sapiens
  CDR3 for beta chain variable domain of TCR clone 107693 (TRBV20-1, TRBJ1-1)
CSARGGGNTEAFF

SEQ ID NO: 215387 - protein, 11 aa, Homo sapiens
  CDR3 for alpha chain variable domain of TCR clone 107694 (TRAV12-3, TRAJ20)
CAMSYDYKLSF

SEQ ID NO: 215388 - protein, 14 aa, Homo sapiens
  CDR3 for beta chain variable domain of TCR clone 107694 (TRBV7-2, TRBJ2-7)
CASSPKTSFYGQYF

SEQ ID NO: 215389 - protein, 13 aa, Homo sapiens
  CDR3 for alpha chain variable domain of TCR clone 107695 (TRAV20, TRAJ29)
CAVQAVGNTPPVF

SEQ ID NO: 215390 - protein, 15 aa, Homo sapiens
  CDR3 for beta chain variable domain of TCR clone 107695 (TRBV10-2, TRBJ2-5)
CASRGSGGPQETQYF

SEQ ID NO: 215391 - protein, 13 aa, Homo sapiens
  CDR3 for alpha chain variable domain of TCR clone 107696 (TRAV12-2, TRAJ20)
CAVYPSNDYKLSF

SEQ ID NO: 215392 - protein, 15 aa, Homo sapiens
  CDR3 for beta chain variable domain of TCR clone 107696 (TRBV27, TRBJ2-5)
CASSLYPRGVETQYF

SEQ ID NO: 215393 - protein, 10 aa, Homo sapiens
  CDR3 for alpha chain variable domain of TCR clone 107697 (TRAV16, TRAJ22)
SAMYLRQLTF

SEQ ID NO: 215394 - protein, 15 aa, Homo sapiens
  CDR3 for beta chain variable domain of TCR clone 107697 (TRBV7-9, TRBJ1-6)
CASSSPGRGNSPIHF

SEQ ID NO: 215395 - protein, 14 aa, Homo sapiens
  CDR3 for alpha chain variable domain of TCR clone 107698 (TRAV1-2, TRAJ8)
CAVREDTGFQKLVF

SEQ ID NO: 215396 - protein, 15 aa, Homo sapiens
  CDR3 for beta chain variable domain of TCR clone 107698 (TRBV7-9, TRBJ2-2)
CAGGPLDTFPGELFF

SEQ ID NO: 215397 - protein, 13 aa, Homo sapiens
  CDR3 for alpha chain variable domain of TCR clone 107699 (TRAV17, TRAJ5)
CAPMDTGRRALTF

SEQ ID NO: 215398 - protein, 15 aa, Homo sapiens
  CDR3 for beta chain variable domain of TCR clone 107699 (TRBV6-1, TRBJ1-3)
CASSEWGGSGNTIYF

SEQ ID NO: 215399 - protein, 13 aa, Homo sapiens
  CDR3 for alpha chain variable domain of TCR clone 107700 (TRAV17, TRAJ21)
CATDGGNFNKFYF

SEQ ID NO: 215400 - protein, 20 aa, Homo sapiens
  CDR3 for beta chain variable domain of TCR clone 107700 (TRBV28, TRBJ2-1)
CASTPIGRSPGLAGGNEQFF

SEQ ID NO: 215401 - protein, 17 aa, Homo sapiens
  CDR3 for alpha chain variable domain of TCR clone 107701 (TRAV3, TRAJ6)
CAVRDCPRAGGSYIPTF

SEQ ID NO: 215402 - protein, 14 aa, Homo sapiens
  CDR3 for beta chain variable domain of TCR clone 107701 (TRBV5-1, TRBJ2-7)
CASSFASGVNEQYF

SEQ ID NO: 215403 - protein, 12 aa, Homo sapiens
  CDR3 for alpha chain variable domain of TCR clone 107702 (TRAV12-3, TRAJ17)
CAMTLTGNKLTF

SEQ ID NO: 215404 - protein, 15 aa, Homo sapiens
  CDR3 for beta chain variable domain of TCR clone 107702 (TRBV27, TRBJ2-7)
CASSTAGTGSYEQYF

SEQ ID NO: 215405 - protein, 14 aa, Homo sapiens
  CDR3 for alpha chain variable domain of TCR clone 107703 (TRAV12-2, TRAJ40)
CAVKIPSGTYKYIF

SEQ ID NO: 215406 - protein, 17 aa, Homo sapiens
  CDR3 for beta chain variable domain of TCR clone 107703 (TRBV19, TRBJ1-1)
CASSIAGRGLMNTEAFF

SEQ ID NO: 215407 - protein, 15 aa, Homo sapiens
  CDR3 for alpha chain variable domain of TCR clone 107704 (TRAV8-3, TRAJ44)
CAVGAGSGTASKLTF

SEQ ID NO: 215408 - protein, 12 aa, Homo sapiens
  CDR3 for beta chain variable domain of TCR clone 107704 (TRBV7-8, TRBJ2-4)
CASSLGGNIQYF

SEQ ID NO: 215409 - protein, 14 aa, Homo sapiens
  CDR3 for alpha chain variable domain of TCR clone 107705 (TRAV12-1, TRAJ43)
CVVNGRSNNNDMRF

SEQ ID NO: 215410 - protein, 13 aa, Homo sapiens
  CDR3 for beta chain variable domain of TCR clone 107705 (TRBV20-1, TRBJ2-7)
CSATHTSGYEQYF

SEQ ID NO: 215411 - protein, 16 aa, Homo sapiens
  CDR3 for alpha chain variable domain of TCR clone 107706 (TRAV13-1, TRAJ48)
CAASIFGNFGNEKLTF

SEQ ID NO: 215412 - protein, 18 aa, Homo sapiens
  CDR3 for beta chain variable domain of TCR clone 107706 (TRBV20-1, TRBJ2-6)
CSAETTPTHGSGANVLTF

SEQ ID NO: 215413 - protein, 14 aa, Homo sapiens
  CDR3 for alpha chain variable domain of TCR clone 107707 (TRAV1-2, TRAJ16)
CAVNRFSDGQKLLF

SEQ ID NO: 215414 - protein, 14 aa, Homo sapiens
  CDR3 for beta chain variable domain of TCR clone 107707 (TRBV4-3, TRBJ1-1)
CASSQGWTPARAFF

SEQ ID NO: 215415 - protein, 16 aa, Homo sapiens
  CDR3 for alpha chain variable domain of TCR clone 107708 (TRAV12-1, TRAJ42)
CVVTPYYGGSQGNLIF

SEQ ID NO: 215416 - protein, 11 aa, Homo sapiens
  CDR3 for beta chain variable domain of TCR clone 107708 (TRBV29-1, TRBJ2-5)
CSEDRTGTQYF

SEQ ID NO: 215417 - protein, 14 aa, Homo sapiens
  CDR3 for alpha chain variable domain of TCR clone 107709 (TRAV1-1, TRAJ27)
CAVIYNTNAGKSTF

SEQ ID NO: 215418 - protein, 16 aa, Homo sapiens
  CDR3 for beta chain variable domain of TCR clone 107709 (TRBV18, TRBJ1-5)
CASSPYRVEGNQPQHF

SEQ ID NO: 215419 - protein, 12 aa, Homo sapiens
  CDR3 for alpha chain variable domain of TCR clone 107710 (TRAV1-1, TRAJ15)
CAVGQAGTALLF

SEQ ID NO: 215420 - protein, 16 aa, Homo sapiens
  CDR3 for beta chain variable domain of TCR clone 107710 (TRBV12-4, TRBJ2-7)
CASSPEGQGSSYEQYF

SEQ ID NO: 215421 - protein, 16 aa, Homo sapiens
  CDR3 for alpha chain variable domain of TCR clone 107711 (TRAV16, TRAJ42)
CARKMNYGGSQGNIIF

SEQ ID NO: 215422 - protein, 13 aa, Homo sapiens
  CDR3 for beta chain variable domain of TCR clone 107711 (TRBV20-1, TRBJ2-7)
CSASPPSSYEQYF

SEQ ID NO: 215423 - protein, 14 aa, Homo sapiens
  CDR3 for alpha chain variable domain of TCR clone 107712 (TRAV1-2, TRAJ16)
CAVNRFSDGQKLLF

SEQ ID NO: 215424 - protein, 19 aa, Homo sapiens
  CDR3 for beta chain variable domain of TCR clone 107712 (TRBV6-3, TRBJ1-2)
CASSYSKGRTGPPNYSYTF

SEQ ID NO: 215425 - protein, 16 aa, Homo sapiens
  CDR3 for alpha chain variable domain of TCR clone 107713 (TRAV1-2, TRAJ10)
CAVRGVLTGGGNKLAF

SEQ ID NO: 215426 - protein, 15 aa, Homo sapiens
  CDR3 for beta chain variable domain of TCR clone 107713 (TRBV7-6, TRBJ1-5)
CASSQSSGINQPQHF

SEQ ID NO: 215427 - protein, 12 aa, Homo sapiens
  CDR3 for alpha chain variable domain of TCR clone 107714 (TRAV12-2, TRAJ21)
CAVRYNFNKFYF

SEQ ID NO: 215428 - protein, 14 aa, Homo sapiens
  CDR3 for beta chain variable domain of TCR clone 107714 (TRBV28, TRBJ2-1)
CAGSYYTAYNEQFF

SEQ ID NO: 215429 - protein, 14 aa, Homo sapiens
  CDR3 for alpha chain variable domain of TCR clone 107715 (TRAV9-2, TRAJ39)
CALYIYNAGNMLTF

SEQ ID NO: 215430 - protein, 14 aa, Homo sapiens
  CDR3 for beta chain variable domain of TCR clone 107715 (TRBV6-1, TRBJ1-3)
CSSVQGGGGNTIYF

SEQ ID NO: 215431 - protein, 12 aa, Homo sapiens
  CDR3 for alpha chain variable domain of TCR clone 107716 (TRAV21, TRAJ49)
CAVNDGGNQFYF

SEQ ID NO: 215432 - protein, 14 aa, Homo sapiens
  CDR3 for beta chain variable domain of TCR clone 107716 (TRBV18, TRBJ2-7)
CASSPRGGPYEQYF

SEQ ID NO: 215433 - protein, 14 aa, Homo sapiens
  CDR3 for alpha chain variable domain of TCR clone 107717 (TRAV1-2, TRAJ16)
CAVNRFSDGQKLLF

SEQ ID NO: 215434 - protein, 15 aa, Homo sapiens
  CDR3 for beta chain variable domain of TCR clone 107717 (TRBV7-9, TRBJ1-6)
CASSSPGRGNSTLDF

SEQ ID NO: 215435 - protein, 15 aa, Homo sapiens
  CDR3 for alpha chain variable domain of TCR clone 107718 (TRAV12-3, TRAJ6)
CAMSAASGGSYIPTF

SEQ ID NO: 215436 - protein, 13 aa, Homo sapiens
  CDR3 for beta chain variable domain of TCR clone 107718 (TRBV20-1, TRBJ1-2)
CSASPEFNYGYIF

SEQ ID NO: 215437 - protein, 17 aa, Homo sapiens
  CDR3 for alpha chain variable domain of TCR clone 107719 (TRAV3, TRAJ6)
CAVRDVPRAGGSYIPPF

SEQ ID NO: 215438 - protein, 14 aa, Homo sapiens
  CDR3 for beta chain variable domain of TCR clone 107719 (TRBV7-2, TRBJ2-7)
CASSPKTSFYEQYF

SEQ ID NO: 215439 - protein, 14 aa, Homo sapiens
  CDR3 for alpha chain variable domain of TCR clone 107720 (TRAV12-2, TRAJ8)
CAVKENTGFQKLVF

SEQ ID NO: 215440 - protein, 13 aa, Homo sapiens
  CDR3 for beta chain variable domain of TCR clone 107720 (TRBV18, TRBJ1-2)
CASSASATEGDTF

SEQ ID NO: 215441 - protein, 14 aa, Homo sapiens
  CDR3 for alpha chain variable domain of TCR clone 107721 (TRAV12-2, TRAJ13)
CAVEKTGGYQKVTF

SEQ ID NO: 215442 - protein, 12 aa, Homo sapiens
  CDR3 for beta chain variable domain of TCR clone 107721 (TRBV12-4, TRBJ1-2)
CASSFIWLHLRF

SEQ ID NO: 215443 - protein, 14 aa, Homo sapiens
  CDR3 for alpha chain variable domain of TCR clone 107722 (TRAV12-2, TRAJ13)
CAVKKTGGYQKVTF

SEQ ID NO: 215444 - protein, 16 aa, Homo sapiens
  CDR3 for beta chain variable domain of TCR clone 107722 (TRBV7-2, TRBJ2-5)
CASSSKWLSGQETQYF

SEQ ID NO: 215445 - protein, 14 aa, Homo sapiens
  CDR3 for alpha chain variable domain of TCR clone 107723 (TRAV1-2, TRAJ8)
CAVREDTGFQKLVF

SEQ ID NO: 215446 - protein, 11 aa, Homo sapiens
  CDR3 for beta chain variable domain of TCR clone 107723 (TRBV7-2, TRBJ2-3)
CASSSSDTQYF

SEQ ID NO: 215447 - protein, 10 aa, Homo sapiens
  CDR3 for alpha chain variable domain of TCR clone 107724 (TRAV30, TRAJ34)
CGTNPDKLIF

SEQ ID NO: 215448 - protein, 12 aa, Homo sapiens
  CDR3 for beta chain variable domain of TCR clone 107724 (TRBV19, TRBJ1-1)
CASRLSDTEAFF

SEQ ID NO: 215449 - protein, 13 aa, Homo sapiens
  CDR3 for alpha chain variable domain of TCR clone 107725 (TRAV2, TRAJ40)
CAVVTSGTYKYIF

SEQ ID NO: 215450 - protein, 14 aa, Homo sapiens
  CDR3 for beta chain variable domain of TCR clone 107725 (TRBV19, TRBJ2-1)
CASLTFALSGEQFF

SEQ ID NO: 215451 - protein, 14 aa, Homo sapiens
  CDR3 for alpha chain variable domain of TCR clone 107726 (TRAV12-1, TRAJ20)
CVVNPLSNDYKLSF

SEQ ID NO: 215452 - protein, 13 aa, Homo sapiens
  CDR3 for beta chain variable domain of TCR clone 107726 (TRBV24-1, TRBJ2-2)
CATSDWSTGELFF

SEQ ID NO: 215453 - protein, 16 aa, Homo sapiens
  CDR3 for alpha chain variable domain of TCR clone 107727 (TRAV12-2, TRAJ28)
CAVITDSGAGSYQPTF

SEQ ID NO: 215454 - protein, 14 aa, Homo sapiens
  CDR3 for beta chain variable domain of TCR clone 107727 (TRBV25-1, TRBJ1-1)
CASTHLGGNTEAFF

SEQ ID NO: 215455 - protein, 14 aa, Homo sapiens
  CDR3 for alpha chain variable domain of TCR clone 107728 (TRAV1-2, TRAJ8)
CAVREDTGFQKLVF

SEQ ID NO: 215456 - protein, 15 aa, Homo sapiens
  CDR3 for beta chain variable domain of TCR clone 107728 (TRBV20-1, TRBJ2-7)
CSAGEGRDSLYEQYF

SEQ ID NO: 215457 - protein, 11 aa, Homo sapiens
  CDR3 for alpha chain variable domain of TCR clone 107729 (TRAV23/DV6, TRAJ58)
CAARLLRGETS

SEQ ID NO: 215458 - protein, 12 aa, Homo sapiens
  CDR3 for beta chain variable domain of TCR clone 107729 (TRBV11-2, TRBJ2-2)
CASSLGGGELFF

SEQ ID NO: 215459 - protein, 14 aa, Homo sapiens
  CDR3 for alpha chain variable domain of TCR clone 107730 (TRAV27, TRAJ13)
CRSSNSGGYQKVTF

SEQ ID NO: 215460 - protein, 14 aa, Homo sapiens
  CDR3 for beta chain variable domain of TCR clone 107730 (TRBV25-1, TRBJ1-1)
CASTHLGGNTEAFF

SEQ ID NO: 215461 - protein, 15 aa, Homo sapiens
  CDR3 for alpha chain variable domain of TCR clone 107731 (TRAV8-1, TRAJ34)
CAVNSRTYNTDKLIF

SEQ ID NO: 215462 - protein, 14 aa, Homo sapiens
  CDR3 for beta chain variable domain of TCR clone 107731 (TRBV7-2, TRBJ2-7)
CASRSQGAAYEQYF

SEQ ID NO: 215463 - protein, 12 aa, Homo sapiens
  CDR3 for alpha chain variable domain of TCR clone 107732 (TRAV21, TRAJ20)
CAAGLTTTSSAF

SEQ ID NO: 215464 - protein, 15 aa, Homo sapiens
  CDR3 for beta chain variable domain of TCR clone 107732 (TRBV2, TRBJ2-2)
CASSRQGPNTGELFF

SEQ ID NO: 215465 - protein, 13 aa, Homo sapiens
  CDR3 for alpha chain variable domain of TCR clone 107733 (TRAV36/DV7, TRAJ49)
CAVEANTGNQFYF

SEQ ID NO: 215466 - protein, 14 aa, Homo sapiens
  CDR3 for beta chain variable domain of TCR clone 107733 (TRBV20-1, TRBJ2-5)
RSASSGRAAETQYF

SEQ ID NO: 215467 - protein, 14 aa, Homo sapiens
  CDR3 for alpha chain variable domain of TCR clone 107734 (TRAV13-1, TRAJ44)
CAAKATGTASKLTF

SEQ ID NO: 215468 - protein, 17 aa, Homo sapiens
  CDR3 for beta chain variable domain of TCR clone 107734 (TRBV7-3, TRBJ2-3)
RVSSLMKRMRGADTQYF

SEQ ID NO: 215469 - protein, 13 aa, Homo sapiens
  CDR3 for alpha chain variable domain of TCR clone 107735 (TRAV17, TRAJ21)
CATDGGNFNKFYF

SEQ ID NO: 215470 - protein, 13 aa, Homo sapiens
  CDR3 for beta chain variable domain of TCR clone 107735 (TRBV15, TRBJ1-6)
CATSGGLNSPLHF

SEQ ID NO: 215471 - protein, 11 aa, Homo sapiens
  CDR3 for alpha chain variable domain of TCR clone 107736 (TRAV21, TRAJ34)
CAHYNTDKLIF

SEQ ID NO: 215472 - protein, 13 aa, Homo sapiens
  CDR3 for beta chain variable domain of TCR clone 107736 (TRBV7-6, TRBJ1-2)
CASSLVAEYGYTF

SEQ ID NO: 215473 - protein, 15 aa, Homo sapiens
  CDR3 for alpha chain variable domain of TCR clone 107737 (TRAV12-1, TRAJ45)
CVVLSGGGGADGLTF

SEQ ID NO: 215474 - protein, 11 aa, Homo sapiens
  CDR3 for beta chain variable domain of TCR clone 107737 (TRBV11-2, TRBJ2-2)
CASSLPGELFF

SEQ ID NO: 215475 - protein, 12 aa, Homo sapiens
  CDR3 for alpha chain variable domain of TCR clone 107738 (TRAV29/DV5, TRAJ15)
CASNQAGTALIF

SEQ ID NO: 215476 - protein, 15 aa, Homo sapiens
  CDR3 for beta chain variable domain of TCR clone 107738 (TRBV11-2, TRBJ2-2)
CASSSDRVNAGELFV

SEQ ID NO: 215477 - protein, 12 aa, Homo sapiens
  CDR3 for alpha chain variable domain of TCR clone 107739 (TRAV4, TRAJ6)
CLAPGGSYIPTF

SEQ ID NO: 215478 - protein, 13 aa, Homo sapiens
  CDR3 for beta chain variable domain of TCR clone 107739 (TRBV12-4, TRBJ2-2)
CASSITGSGELFF

SEQ ID NO: 215479 - protein, 14 aa, Homo sapiens
  CDR3 for alpha chain variable domain of TCR clone 107740 (TRAV17, TRAJ57)
CATDPQGGSEKLVF

SEQ ID NO: 215480 - protein, 15 aa, Homo sapiens
  CDR3 for beta chain variable domain of TCR clone 107740 (TRBV7-3, TRBJ2-2)
CASSETGQGTGELFF

SEQ ID NO: 215481 - protein, 11 aa, Homo sapiens
  CDR3 for alpha chain variable domain of TCR clone 107741 (TRAV1-2, TRAJ20)
CAVGNDYKLSF

SEQ ID NO: 215482 - protein, 18 aa, Homo sapiens
  CDR3 for beta chain variable domain of TCR clone 107741 (TRBV20-1, TRBJ2-6)
CSAETTPTHGSGANVLTF

SEQ ID NO: 215483 - protein, 16 aa, Homo sapiens
  CDR3 for alpha chain variable domain of TCR clone 107742 (TRAV17, TRAJ53)
CATDALGGGSNYKLTF

SEQ ID NO: 215484 - protein, 12 aa, Homo sapiens
  CDR3 for beta chain variable domain of TCR clone 107742 (TRBV5-1, TRBJ2-7)
CASSFRGYEQYF

SEQ ID NO: 215485 - protein, 12 aa, Homo sapiens
  CDR3 for alpha chain variable domain of TCR clone 107743 (TRAV2, TRAJ10)
CASTGGGKKLTF

SEQ ID NO: 215486 - protein, 14 aa, Homo sapiens
  CDR3 for beta chain variable domain of TCR clone 107743 (TRBV7-2, TRBJ2-2)
CASRGQGAAGELFF

SEQ ID NO: 215487 - protein, 14 aa, Homo sapiens
  CDR3 for alpha chain variable domain of TCR clone 107744 (TRAV12-3, TRAJ10)
SHLPLPGGGNKLTF

SEQ ID NO: 215488 - protein, 15 aa, Homo sapiens
  CDR3 for beta chain variable domain of TCR clone 107744 (TRBV9, TRBJ1-6)
CASSVAGTGDSPLHF

SEQ ID NO: 215489 - protein, 14 aa, Homo sapiens
  CDR3 for alpha chain variable domain of TCR clone 107745 (TRAV1-2, TRAJ16)
CAVNRVSDGQKLLF

SEQ ID NO: 215490 - protein, 15 aa, Homo sapiens
  CDR3 for beta chain variable domain of TCR clone 107745 (TRBV19, TRBJ1-5)
CASSIVWADNQPQHF

SEQ ID NO: 215491 - protein, 15 aa, Homo sapiens
  CDR3 for alpha chain variable domain of TCR clone 107746 (TRAV26-1, TRAJ44)
CIVRIGTGTASKLNF

SEQ ID NO: 215492 - protein, 15 aa, Homo sapiens
  CDR3 for beta chain variable domain of TCR clone 107746 (TRBV7-6, TRBJ2-1)
CASSSLAGEGNEQFF

SEQ ID NO: 215493 - protein, 15 aa, Homo sapiens
  CDR3 for alpha chain variable domain of TCR clone 107747 (TRAV13-1, TRAJ44)
CAASRGGGTASKLTF

SEQ ID NO: 215494 - protein, 14 aa, Homo sapiens
  CDR3 for beta chain variable domain of TCR clone 107747 (TRBV7-2, TRBJ2-5)
CASRPRGSSETQYF

SEQ ID NO: 215495 - protein, 11 aa, Homo sapiens
  CDR3 for alpha chain variable domain of TCR clone 107748 (TRAV12-2, TRAJ39)
CAVNNMLTFGG

SEQ ID NO: 215496 - protein, 13 aa, Homo sapiens
  CDR3 for beta chain variable domain of TCR clone 107748 (TRBV7-2, TRBJ2-7)
CASSSPSGSEQYF

SEQ ID NO: 215497 - protein, 16 aa, Homo sapiens
  CDR3 for alpha chain variable domain of TCR clone 107749 (TRAV26-1, TRAJ32)
CIVRTNYGGATNKLIF

SEQ ID NO: 215498 - protein, 14 aa, Homo sapiens
  CDR3 for beta chain variable domain of TCR clone 107749 (TRBV12-4, TRBJ2-7)
CASTFGLSTYEQYF

SEQ ID NO: 215499 - protein, 14 aa, Homo sapiens
  CDR3 for alpha chain variable domain of TCR clone 107750 (TRAV36/DV7, TRAJ40)
CAVETTSGTYKYIF

SEQ ID NO: 215500 - protein, 12 aa, Homo sapiens
  CDR3 for beta chain variable domain of TCR clone 107750 (TRBV28, TRBJ2-3)
CASSLYRDTQYF

SEQ ID NO: 215501 - protein, 16 aa, Homo sapiens
  CDR3 for alpha chain variable domain of TCR clone 107751 (TRAV3, TRAJ10)
CAVRDMRAGGGNKLTF

SEQ ID NO: 215502 - protein, 13 aa, Homo sapiens
  CDR3 for beta chain variable domain of TCR clone 107751 (TRBV7-3, TRBJ1-1)
CASSQDWGAEAFF

SEQ ID NO: 215503 - protein, 11 aa, Homo sapiens
  CDR3 for alpha chain variable domain of TCR clone 107752 (TRAV2, TRAJ13)
CASGGYQKVTF

SEQ ID NO: 215504 - protein, 16 aa, Homo sapiens
  CDR3 for beta chain variable domain of TCR clone 107752 (TRBV24-1, TRBJ2-3)
CATSDPGTGATDTQYF

SEQ ID NO: 215505 - protein, 14 aa, Homo sapiens
  CDR3 for alpha chain variable domain of TCR clone 107753 (TRAV35, TRAJ50)
CAGHRKTSYDKVIF

SEQ ID NO: 215506 - protein, 13 aa, Homo sapiens
  CDR3 for beta chain variable domain of TCR clone 107753 (TRBV4-2, TRBJ1-1)
CASSQAGNTEAFF

SEQ ID NO: 215507 - protein, 14 aa, Homo sapiens
  CDR3 for alpha chain variable domain of TCR clone 107754 (TRAV13-1, TRAJ35)
CAASKGGFGNVLHC

SEQ ID NO: 215508 - protein, 15 aa, Homo sapiens
  CDR3 for beta chain variable domain of TCR clone 107754 (TRBV7-2, TRBJ2-7)
CASSWGQGAIYEQYF

SEQ ID NO: 215509 - protein, 16 aa, Homo sapiens
  CDR3 for alpha chain variable domain of TCR clone 107755 (TRAV3, TRAJ37)
CAVRGKGSGNTGKLIF

SEQ ID NO: 215510 - protein, 20 aa, Homo sapiens
  CDR3 for beta chain variable domain of TCR clone 107755 (TRBV7-8, TRBJ2-2)
CASSHLFPGPSIHITGELFF

SEQ ID NO: 215511 - protein, 15 aa, Homo sapiens
  CDR3 for alpha chain variable domain of TCR clone 107756 (TRAV10, TRAJ3)
CVVSVRYSSASKIIF

SEQ ID NO: 215512 - protein, 14 aa, Homo sapiens
  CDR3 for beta chain variable domain of TCR clone 107756 (TRBV19, TRBJ2-7)
CASSIRLGDHEQYF

SEQ ID NO: 215513 - protein, 14 aa, Homo sapiens
  CDR3 for alpha chain variable domain of TCR clone 107757 (TRAV40, TRAJ44)
CLLVDTGTASKLTF

SEQ ID NO: 215514 - protein, 16 aa, Homo sapiens
  CDR3 for beta chain variable domain of TCR clone 107757 (TRBV7-8, TRBJ2-1)
CASSLQGTGRYNEQFF

SEQ ID NO: 215515 - protein, 14 aa, Homo sapiens
  CDR3 for alpha chain variable domain of TCR clone 107758 (TRAV2, TRAJ9)
CAVEDRSGGFKTIF

SEQ ID NO: 215516 - protein, 15 aa, Homo sapiens
  CDR3 for beta chain variable domain of TCR clone 107758 (TRBV5-1, TRBJ2-5)
CASSLSQGVVATQYF

SEQ ID NO: 215517 - protein, 10 aa, Homo sapiens
  CDR3 for alpha chain variable domain of TCR clone 107759 (TRAV23/DV6, TRAJ43)
CAAAVAALEQ

SEQ ID NO: 215518 - protein, 16 aa, Homo sapiens
  CDR3 for beta chain variable domain of TCR clone 107759 (TRBV18, TRBJ1-2)
CASSPPERVTIYDYTF

SEQ ID NO: 215519 - protein, 14 aa, Homo sapiens
  CDR3 for alpha chain variable domain of TCR clone 107760 (TRAV26-1, TRAJ39)
CIVRGSRAGNMLTF

SEQ ID NO: 215520 - protein, 15 aa, Homo sapiens
  CDR3 for beta chain variable domain of TCR clone 107760 (TRBV7-9, TRBJ1-5)
CASSQGHQPYQPQHF

SEQ ID NO: 215521 - protein, 13 aa, Homo sapiens
  CDR3 for alpha chain variable domain of TCR clone 107761 (TRAV3, TRAJ41)
CAVSPNSGYALNF

SEQ ID NO: 215522 - protein, 14 aa, Homo sapiens
  CDR3 for beta chain variable domain of TCR clone 107761 (TRBV7-2, TRBJ2-7)
CASSPKTSFYEQYF

SEQ ID NO: 215523 - protein, 15 aa, Homo sapiens
  CDR3 for alpha chain variable domain of TCR clone 107762 (TRAV17, TRAJ52)
CATEAGGTSYGKLTF

SEQ ID NO: 215524 - protein, 14 aa, Homo sapiens
  CDR3 for beta chain variable domain of TCR clone 107762 (TRBV28, TRBJ1-5)
CASSLGVLVKPRHF

SEQ ID NO: 215525 - protein, 15 aa, Homo sapiens
  CDR3 for alpha chain variable domain of TCR clone 107763 (TRAV8-6, TRAJ6)
CAMSFTSGGSYIPTF

SEQ ID NO: 215526 - protein, 13 aa, Homo sapiens
  CDR3 for beta chain variable domain of TCR clone 107763 (TRBV10-3, TRBJ2-7)
CASKLAVNYEQYF

SEQ ID NO: 215527 - protein, 14 aa, Homo sapiens
  CDR3 for alpha chain variable domain of TCR clone 107764 (TRAV23/DV6, TRAJ4)
CAANLSGGYNKLIF

SEQ ID NO: 215528 - protein, 15 aa, Homo sapiens
  CDR3 for beta chain variable domain of TCR clone 107764 (TRBV20-1, TRBJ2-7)
CSARDRVSGMDEQYF

SEQ ID NO: 215529 - protein, 11 aa, Homo sapiens
  CDR3 for alpha chain variable domain of TCR clone 107765 (TRAV21, TRAJ9)
CTVPGGFKTIF

SEQ ID NO: 215530 - protein, 12 aa, Homo sapiens
  CDR3 for beta chain variable domain of TCR clone 107765 (TRBV20-1, TRBJ2-3)
CSARVGTDTQYF

SEQ ID NO: 215531 - protein, 16 aa, Homo sapiens
  CDR3 for alpha chain variable domain of TCR clone 107766 (TRAV26-1, TRAJ45)
CIVEKYSGGGADGRTF

SEQ ID NO: 215532 - protein, 15 aa, Homo sapiens
  CDR3 for beta chain variable domain of TCR clone 107766 (TRBV15, TRBJ2-7)
CHQQRPIQQAYEQYF

SEQ ID NO: 215533 - protein, 15 aa, Homo sapiens
  CDR3 for alpha chain variable domain of TCR clone 107767 (TRAV4, TRAJ39)
CLVGPSNNAGNMLTF

SEQ ID NO: 215534 - protein, 13 aa, Homo sapiens
  CDR3 for beta chain variable domain of TCR clone 107767 (TRBV11-2, TRBJ2-5)
CASSATGEETQYF

SEQ ID NO: 215535 - protein, 16 aa, Homo sapiens
  CDR3 for alpha chain variable domain of TCR clone 107768 (TRAV30, TRAJ24)
CGTEIVDADSWGKFQF

SEQ ID NO: 215536 - protein, 19 aa, Homo sapiens
  CDR3 for beta chain variable domain of TCR clone 107768 (TRBV7-2, TRBJ2-3)
CASSSQGGPRLAGADTQYF

SEQ ID NO: 215537 - protein, 15 aa, Homo sapiens
  CDR3 for alpha chain variable domain of TCR clone 107769 (TRAV13-2, TRAJ10)
CSENRDTGGGNKLTF

SEQ ID NO: 215538 - protein, 16 aa, Homo sapiens
  CDR3 for beta chain variable domain of TCR clone 107769 (TRBV2, TRBJ1-3)
CASSRTGGSTGNTIYF

SEQ ID NO: 215539 - protein, 13 aa, Homo sapiens
  CDR3 for alpha chain variable domain of TCR clone 107770 (TRAV8-4, TRAJ10)
CAAFTGGGNKLTF

SEQ ID NO: 215540 - protein, 14 aa, Homo sapiens
  CDR3 for beta chain variable domain of TCR clone 107770 (TRBV7-3, TRBJ2-1)
CASSLAGGTNEQFF

SEQ ID NO: 215541 - protein, 14 aa, Homo sapiens
  CDR3 for alpha chain variable domain of TCR clone 107771 (TRAV29/DV5, TRAJ36)
CAARRKTGANNLFF

SEQ ID NO: 215542 - protein, 14 aa, Homo sapiens
  CDR3 for beta chain variable domain of TCR clone 107771 (TRBV12-5, TRBJ2-5)
CASGSRTHQKTQYF

SEQ ID NO: 215543 - protein, 14 aa, Homo sapiens
  CDR3 for alpha chain variable domain of TCR clone 107772 (TRAV12-2, TRAJ3)
CAVNLYSSASKIIF

SEQ ID NO: 215544 - protein, 14 aa, Homo sapiens
  CDR3 for beta chain variable domain of TCR clone 107772 (TRBV27, TRBJ2-1)
CAGSIAETYNEQFF

SEQ ID NO: 215545 - protein, 17 aa, Homo sapiens
  CDR3 for alpha chain variable domain of TCR clone 107773 (TRAV3, TRAJ42)
WAVRDRDYGGSQGNLIF

SEQ ID NO: 215546 - protein, 14 aa, Homo sapiens
  CDR3 for beta chain variable domain of TCR clone 107773 (TRBV7-2, TRBJ2-5)
CASSPRGSSETQYF

SEQ ID NO: 215547 - protein, 12 aa, Homo sapiens
  CDR3 for alpha chain variable domain of TCR clone 107774 (TRAV36/DV7, TRAJ54)
CAVVRGARKLVF

SEQ ID NO: 215548 - protein, 14 aa, Homo sapiens
  CDR3 for beta chain variable domain of TCR clone 107774 (TRBV7-3, TRBJ1-1)
CASSLKGGNTEAFF

SEQ ID NO: 215549 - protein, 11 aa, Homo sapiens
  CDR3 for alpha chain variable domain of TCR clone 107775 (TRAV1-1, TRAJ23)
CAVRQGGKLIF

SEQ ID NO: 215550 - protein, 17 aa, Homo sapiens
  CDR3 for beta chain variable domain of TCR clone 107775 (TRBV11-2, TRBJ1-6)
CQQLSFRDRGLCSPLHF

SEQ ID NO: 215551 - protein, 14 aa, Homo sapiens
  CDR3 for alpha chain variable domain of TCR clone 107776 (TRAV12-3, TRAJ13)
CAMRNSGGYQKVTF

SEQ ID NO: 215552 - protein, 14 aa, Homo sapiens
  CDR3 for beta chain variable domain of TCR clone 107776 (TRBV4-1, TRBJ1-6)
CASSPGSDSSPLDF

SEQ ID NO: 215553 - protein, 11 aa, Homo sapiens
  CDR3 for alpha chain variable domain of TCR clone 107777 (TRAV2, TRAJ33)
CAVDSNYQLIW

SEQ ID NO: 215554 - protein, 16 aa, Homo sapiens
  CDR3 for beta chain variable domain of TCR clone 107777 (TRBV5-4, TRBJ2-1)
CASSLVGSGQDNEQFF

SEQ ID NO: 215555 - protein, 14 aa, Homo sapiens
  CDR3 for alpha chain variable domain of TCR clone 107778 (TRAV12-2, TRAJ44)
CAVNPAGTASKLTF

SEQ ID NO: 215556 - protein, 13 aa, Homo sapiens
  CDR3 for beta chain variable domain of TCR clone 107778 (TRBV7-3, TRBJ1-1)
CASSQDWGAGAFF

SEQ ID NO: 215557 - protein, 17 aa, Homo sapiens
  CDR3 for alpha chain variable domain of TCR clone 107779 (TRAV8-3, TRAJ42)
CAVGNPEERRSQGNLIF

SEQ ID NO: 215558 - protein, 15 aa, Homo sapiens
  CDR3 for beta chain variable domain of TCR clone 107779 (TRBV7-2, TRBJ2-1)
CASTHGTGIYNEQFF

SEQ ID NO: 215559 - protein, 17 aa, Homo sapiens
  CDR3 for alpha chain variable domain of TCR clone 107780 (TRAV8-6, TRAJ58)
CAVSSWVGETSGARLTF

SEQ ID NO: 215560 - protein, 14 aa, Homo sapiens
  CDR3 for beta chain variable domain of TCR clone 107780 (TRBV4-2, TRBJ2-1)
CASGPDRAYNEQFF

SEQ ID NO: 215561 - protein, 15 aa, Homo sapiens
  CDR3 for alpha chain variable domain of TCR clone 107781 (TRAV12-1, TRAJ9)
CVVSFGDTGGFKAIF

SEQ ID NO: 215562 - protein, 13 aa, Homo sapiens
  CDR3 for beta chain variable domain of TCR clone 107781 (TRBV2, TRBJ1-4)
CASSERAGEKLFF

SEQ ID NO: 215563 - protein, 14 aa, Homo sapiens
  CDR3 for alpha chain variable domain of TCR clone 107782 (TRAV20, TRAJ42)
CAVQAGGSQGNLIF

SEQ ID NO: 215564 - protein, 14 aa, Homo sapiens
  CDR3 for beta chain variable domain of TCR clone 107782 (TRBV28, TRBJ1-2)
CASSIQGANYGYTF

SEQ ID NO: 215565 - protein, 13 aa, Homo sapiens
  CDR3 for alpha chain variable domain of TCR clone 107783 (TRAV3, TRAJ21)
CAVREPDFNKFYF

SEQ ID NO: 215566 - protein, 15 aa, Homo sapiens
  CDR3 for beta chain variable domain of TCR clone 107783 (TRBV7-9, TRBJ1-1)
CASSLLEQGGTEAFF

SEQ ID NO: 215567 - protein, 14 aa, Homo sapiens
  CDR3 for alpha chain variable domain of TCR clone 107784 (TRAV13-2, TRAJ22)
CADGTLGSARQLTF

SEQ ID NO: 215568 - protein, 13 aa, Homo sapiens
  CDR3 for beta chain variable domain of TCR clone 107784 (TRBV19, TRBJ2-7)
CASRKAGGSEQYF

SEQ ID NO: 215569 - protein, 11 aa, Homo sapiens
  CDR3 for alpha chain variable domain of TCR clone 107785 (TRAV12-2, TRAJ31)
CAVTRWARLMF

SEQ ID NO: 215570 - protein, 15 aa, Homo sapiens
  CDR3 for beta chain variable domain of TCR clone 107785 (TRBV19, TRBJ2-7)
CARSIGGGLVNEQYF

SEQ ID NO: 215571 - protein, 14 aa, Homo sapiens
  CDR3 for alpha chain variable domain of TCR clone 107786 (TRAV16, TRAJ33)
CALSAMDSNYQLIW

SEQ ID NO: 215572 - protein, 16 aa, Homo sapiens
  CDR3 for beta chain variable domain of TCR clone 107786 (TRBV7-9, TRBJ1-2)
CASSLGFSSGEDGYTF

SEQ ID NO: 215573 - protein, 13 aa, Homo sapiens
  CDR3 for alpha chain variable domain of TCR clone 107787 (TRAV22, TRAJ29)
CAVGGLGNTPLVF

SEQ ID NO: 215574 - protein, 13 aa, Homo sapiens
  CDR3 for beta chain variable domain of TCR clone 107787 (TRBV4-2, TRBJ1-1)
CASSQAGNTEAFF

SEQ ID NO: 215575 - protein, 13 aa, Homo sapiens
  CDR3 for alpha chain variable domain of TCR clone 107788 (TRAV12-2, TRAJ4)
CAVRSGCYNKLIF

SEQ ID NO: 215576 - protein, 15 aa, Homo sapiens
  CDR3 for beta chain variable domain of TCR clone 107788 (TRBV10-3, TRBJ2-1)
CAISDVQDRAYEQFF

SEQ ID NO: 215577 - protein, 14 aa, Homo sapiens
  CDR3 for alpha chain variable domain of TCR clone 107789 (TRAV12-2, TRAJ44)
CAVNPAGTASKLTF

SEQ ID NO: 215578 - protein, 15 aa, Homo sapiens
  CDR3 for beta chain variable domain of TCR clone 107789 (TRBV20-1, TRBJ2-7)
CSAESGTSGAYEQYF

SEQ ID NO: 215579 - protein, 14 aa, Homo sapiens
  CDR3 for alpha chain variable domain of TCR clone 107790 (TRAV13-1, TRAJ29)
CAANSNSGNTPLVF

SEQ ID NO: 215580 - protein, 13 aa, Homo sapiens
  CDR3 for beta chain variable domain of TCR clone 107790 (TRBV10-2, TRBJ1-1)
CASNDQMNTEAFF

SEQ ID NO: 215581 - protein, 13 aa, Homo sapiens
  CDR3 for alpha chain variable domain of TCR clone 107791 (TRAV12-3, TRAJ33)
CAMSVNSNYQLIW

SEQ ID NO: 215582 - protein, 17 aa, Homo sapiens
  CDR3 for beta chain variable domain of TCR clone 107791 (TRBV27, TRBJ1-6)
CASSLDQLSSYNSPLHF

SEQ ID NO: 215583 - protein, 17 aa, Homo sapiens
  CDR3 for alpha chain variable domain of TCR clone 107792 (TRAV3, TRAJ6)
CAVRDGPRAGGSYIPTF

SEQ ID NO: 215584 - protein, 14 aa, Homo sapiens
  CDR3 for beta chain variable domain of TCR clone 107792 (TRBV13, TRBJ2-5)
CASSLERVGETQYF

SEQ ID NO: 215585 - protein, 14 aa, Homo sapiens
  CDR3 for alpha chain variable domain of TCR clone 107793 (TRAV12-2, TRAJ45)
CAVNIGGGADGLTF

SEQ ID NO: 215586 - protein, 17 aa, Homo sapiens
  CDR3 for beta chain variable domain of TCR clone 107793 (TRBV7-8, TRBJ2-6)
CASSAPCPGAGANVLTF

SEQ ID NO: 215587 - protein, 12 aa, Homo sapiens
  CDR3 for alpha chain variable domain of TCR clone 107794 (TRAV27, TRAJ9)
CAGESGGFKTIF

SEQ ID NO: 215588 - protein, 18 aa, Homo sapiens
  CDR3 for beta chain variable domain of TCR clone 107794 (TRBV10-2, TRBJ2-2)
CISAPAVDRQADAGELFF

SEQ ID NO: 215589 - protein, 12 aa, Homo sapiens
  CDR3 for alpha chain variable domain of TCR clone 107795 (TRAV12-3, TRAJ17)
CAMTLTGNKLTF

SEQ ID NO: 215590 - protein, 13 aa, Homo sapiens
  CDR3 for beta chain variable domain of TCR clone 107795 (TRBV12-4, TRBJ2-3)
CASSSPLGGTQYF

SEQ ID NO: 215591 - protein, 13 aa, Homo sapiens
  CDR3 for alpha chain variable domain of TCR clone 107796 (TRAV12-2, TRAJ39)
CAVNNNAGNMLTF

SEQ ID NO: 215592 - protein, 13 aa, Homo sapiens
  CDR3 for beta chain variable domain of TCR clone 107796 (TRBV20-1, TRBJ1-1)
CSAPLGGGTEAFL

SEQ ID NO: 215593 - protein, 14 aa, Homo sapiens
  CDR3 for alpha chain variable domain of TCR clone 107797 (TRAV12-2, TRAJ13)
CAVKKTGGYQKFTF

SEQ ID NO: 215594 - protein, 15 aa, Homo sapiens
  CDR3 for beta chain variable domain of TCR clone 107797 (TRBV20-1, TRBJ2-1)
CSARGIGGTYNEQFF

SEQ ID NO: 215595 - protein, 13 aa, Homo sapiens
  CDR3 for alpha chain variable domain of TCR clone 107798 (TRAV12-3, TRAJ9)
CAMRNTGGFNTIF

SEQ ID NO: 215596 - protein, 15 aa, Homo sapiens
  CDR3 for beta chain variable domain of TCR clone 107798 (TRBV20-1, TRBJ2-7)
CSARDRVSGMDEQYF

SEQ ID NO: 215597 - protein, 18 aa, Homo sapiens
  CDR3 for alpha chain variable domain of TCR clone 107799 (TRAV21, TRAJ52)
CAVRPSPAGGTSYGKLTF

SEQ ID NO: 215598 - protein, 15 aa, Homo sapiens
  CDR3 for beta chain variable domain of TCR clone 107799 (TRBV5-8, TRBJ1-2)
CASSVGTGSRRGYTF

SEQ ID NO: 215599 - protein, 14 aa, Homo sapiens
  CDR3 for alpha chain variable domain of TCR clone 107800 (TRAV27, TRAJ39)
CAGRPTGAGNMLTF

SEQ ID NO: 215600 - protein, 12 aa, Homo sapiens
  CDR3 for beta chain variable domain of TCR clone 107800 (TRBV7-8, TRBJ2-7)
CASSLGDREQYF

SEQ ID NO: 215601 - protein, 14 aa, Homo sapiens
  CDR3 for alpha chain variable domain of TCR clone 107801 (TRAV13-1, TRAJ39)
CAASKNNAGNMLTF

SEQ ID NO: 215602 - protein, 15 aa, Homo sapiens
  CDR3 for beta chain variable domain of TCR clone 107801 (TRBV7-9, TRBJ1-6)
CASSSTGRGNSPLHF

SEQ ID NO: 215603 - protein, 17 aa, Homo sapiens
  CDR3 for alpha chain variable domain of TCR clone 107802 (TRAV13-1, TRAJ52)
CAASSGAGGTSYGKLTF

SEQ ID NO: 215604 - protein, 15 aa, Homo sapiens
  CDR3 for beta chain variable domain of TCR clone 107802 (TRBV7-3, TRBJ2-7)
CASSPEEGSSYEQYF

SEQ ID NO: 215605 - protein, 13 aa, Homo sapiens
  CDR3 for alpha chain variable domain of TCR clone 107803 (TRAV3, TRAJ21)
CAVREPDFNKFYF

SEQ ID NO: 215606 - protein, 13 aa, Homo sapiens
  CDR3 for beta chain variable domain of TCR clone 107803 (TRBV4-1, TRBJ2-2)
CASSQENTGELFF

SEQ ID NO: 215607 - protein, 17 aa, Homo sapiens
  CDR3 for alpha chain variable domain of TCR clone 107804 (TRAV8-4, )
CAISRSLTLPCTSCETL

SEQ ID NO: 215608 - protein, 14 aa, Homo sapiens
  CDR3 for beta chain variable domain of TCR clone 107804 (TRBV4-2, TRBJ2-1)
CASGLDRAYNEQFF

SEQ ID NO: 215609 - protein, 18 aa, Homo sapiens
  CDR3 for alpha chain variable domain of TCR clone 107805 (TRAV21, TRAJ52)
CAVRPSPAGGTSYGKLTF

SEQ ID NO: 215610 - protein, 17 aa, Homo sapiens
  CDR3 for beta chain variable domain of TCR clone 107805 (TRBV13, TRBJ2-3)
CASSLSRVPGGRNTQYF

SEQ ID NO: 215611 - protein, 12 aa, Homo sapiens
  CDR3 for alpha chain variable domain of TCR clone 107806 (TRAV13-1, TRAJ42)
SVLRGSQGNLIF

SEQ ID NO: 215612 - protein, 16 aa, Homo sapiens
  CDR3 for beta chain variable domain of TCR clone 107806 (TRBV20-1, TRBJ1-4)
CSAPGQGLLTNEKLFF

SEQ ID NO: 215613 - protein, 12 aa, Homo sapiens
  CDR3 for alpha chain variable domain of TCR clone 107807 (TRAV12-3, TRAJ17)
CAMTLTGNKLTF

SEQ ID NO: 215614 - protein, 12 aa, Homo sapiens
  CDR3 for beta chain variable domain of TCR clone 107807 (TRBV7-2, TRBJ1-5)
CASSLWSQPQHF

SEQ ID NO: 215615 - protein, 17 aa, Homo sapiens
  CDR3 for alpha chain variable domain of TCR clone 107808 (TRAV3, TRAJ6)
CAVRDGPRAGGSYIPTF

SEQ ID NO: 215616 - protein, 13 aa, Homo sapiens
  CDR3 for beta chain variable domain of TCR clone 107808 (TRBV9, TRBJ2-7)
CASSVAEYYEQYF

SEQ ID NO: 215617 - protein, 12 aa, Homo sapiens
  CDR3 for alpha chain variable domain of TCR clone 107809 (TRAV30, TRAJ43)
CGTEERGNDMRF

SEQ ID NO: 215618 - protein, 13 aa, Homo sapiens
  CDR3 for beta chain variable domain of TCR clone 107809 (TRBV27, TRBJ2-7)
FASSFSQGYEQYF

SEQ ID NO: 215619 - protein, 12 aa, Homo sapiens
  CDR3 for alpha chain variable domain of TCR clone 107810 (TRAV12-3, TRAJ17)
CAMALTGNKLTF

SEQ ID NO: 215620 - protein, 15 aa, Homo sapiens
  CDR3 for beta chain variable domain of TCR clone 107810 (TRBV20-1, TRBJ2-7)
CSARDRVSGMDEQYL

SEQ ID NO: 215621 - protein, 17 aa, Homo sapiens
  CDR3 for alpha chain variable domain of TCR clone 107811 (TRAV27, TRAJ26)
CAGARAPLANYGQNFVF

SEQ ID NO: 215622 - protein, 15 aa, Homo sapiens
  CDR3 for beta chain variable domain of TCR clone 107811 (TRBV11-2, TRBJ2-5)
CASSPRSGGLETQYF

SEQ ID NO: 215623 - protein, 22 aa, Homo sapiens
  CDR3 for alpha chain variable domain of TCR clone 107812 (TRAV3, TRAJ38)
CAVRDCLNAGNNHIQNPDPAVY

SEQ ID NO: 215624 - protein, 16 aa, Homo sapiens
  CDR3 for beta chain variable domain of TCR clone 107812 (TRBV7-3, TRBJ2-2)
CASSLKRGTLSGELFF

SEQ ID NO: 215625 - protein, 15 aa, Homo sapiens
  CDR3 for alpha chain variable domain of TCR clone 107813 (TRAV13-1, TRAJ44)
CAESRGGGTASKLTF

SEQ ID NO: 215626 - protein, 14 aa, Homo sapiens
  CDR3 for beta chain variable domain of TCR clone 107813 (TRBV7-2, TRBJ2-5)
CASSPRGSSETQYF

SEQ ID NO: 215627 - protein, 15 aa, Homo sapiens
  CDR3 for alpha chain variable domain of TCR clone 107814 (TRAV29/DV5, TRAJ57)
CAASLLRGGSEKLVF

SEQ ID NO: 215628 - protein, 15 aa, Homo sapiens
  CDR3 for beta chain variable domain of TCR clone 107814 (TRBV5-1, TRBJ1-3)
GASSLEGGSGNTIYF

SEQ ID NO: 215629 - protein, 13 aa, Homo sapiens
  CDR3 for alpha chain variable domain of TCR clone 107815 (TRAV27, TRAJ57)
CMSAQGGSEKLVF

SEQ ID NO: 215630 - protein, 11 aa, Homo sapiens
  CDR3 for beta chain variable domain of TCR clone 107815 (TRBV11-2, TRBJ1-1)
CASSINTEAFF

SEQ ID NO: 215631 - protein, 14 aa, Homo sapiens
  CDR3 for alpha chain variable domain of TCR clone 107816 (TRAV2, TRAJ9)
CAVEDRSGGFKTIF

SEQ ID NO: 215632 - protein, 14 aa, Homo sapiens
  CDR3 for beta chain variable domain of TCR clone 107816 (TRBV15, TRBJ2-7)
CATSRVARGYEQYF

SEQ ID NO: 215633 - protein, 15 aa, Homo sapiens
  CDR3 for alpha chain variable domain of TCR clone 107817 (TRAV3, TRAJ8)
CAVRDNETGFQKLVF

SEQ ID NO: 215634 - protein, 15 aa, Homo sapiens
  CDR3 for beta chain variable domain of TCR clone 107817 (TRBV4-1, TRBJ2-5)
CASSQWDLCQETQYF

SEQ ID NO: 215635 - protein, 17 aa, Homo sapiens
  CDR3 for alpha chain variable domain of TCR clone 107818 (TRAV14/DV4, TRAJ4)
CAMREASGRGGYNKLIF

SEQ ID NO: 215636 - protein, 22 aa, Homo sapiens
  CDR3 for beta chain variable domain of TCR clone 107818 (TRBV6-1, TRBJ1-3)
CASVQGGGWKHHIFWRGKLAHC

SEQ ID NO: 215637 - protein, 14 aa, Homo sapiens
  CDR3 for alpha chain variable domain of TCR clone 107819 (TRAV21, TRAJ45)
CAVSSGGGADGLTF

SEQ ID NO: 215638 - protein, 13 aa, Homo sapiens
  CDR3 for beta chain variable domain of TCR clone 107819 (TRBV10-3, TRBJ1-2)
CAINADLNYGYTF

SEQ ID NO: 215639 - protein, 16 aa, Homo sapiens
  CDR3 for alpha chain variable domain of TCR clone 107820 (TRAV1-2, TRAJ10)
CAVRGVLTGGGNKLTF

SEQ ID NO: 215640 - protein, 15 aa, Homo sapiens
  CDR3 for beta chain variable domain of TCR clone 107820 (TRBV7-9, TRBJ1-6)
CASSSPGRGNSPLLF

SEQ ID NO: 215641 - protein, 17 aa, Homo sapiens
  CDR3 for alpha chain variable domain of TCR clone 107821 (TRAV36/DV7, TRAJ52)
CAVAQRAGGTSYGKLRF

SEQ ID NO: 215642 - protein, 15 aa, Homo sapiens
  CDR3 for beta chain variable domain of TCR clone 107821 (TRBV6-5, TRBJ1-2)
CASSYSQAFNYGYTF

SEQ ID NO: 215643 - protein, 14 aa, Homo sapiens
  CDR3 for alpha chain variable domain of TCR clone 107822 (TRAV38-1, TRAJ29)
CAFITPSGNTPFVF

SEQ ID NO: 215644 - protein, 14 aa, Homo sapiens
  CDR3 for beta chain variable domain of TCR clone 107822 (TRBV18, TRBJ2-7)
CASSPRGGAYEQYF

SEQ ID NO: 215645 - protein, 14 aa, Homo sapiens
  CDR3 for alpha chain variable domain of TCR clone 107823 (TRAV12-3, TRAJ10)
SHLPLTGGGNKLTF

SEQ ID NO: 215646 - protein, 13 aa, Homo sapiens
  CDR3 for beta chain variable domain of TCR clone 107823 (TRBV20-1, TRBJ1-1)
CSARLGQGTEAFF

SEQ ID NO: 215647 - protein, 12 aa, Homo sapiens
  CDR3 for alpha chain variable domain of TCR clone 107824 (TRAV12-2, TRAJ36)
SATLERANNLFF

SEQ ID NO: 215648 - protein, 17 aa, Homo sapiens
  CDR3 for beta chain variable domain of TCR clone 107824 (TRBV3-1, TRBJ2-3)
CASSQLLDRGHTDTQYF

SEQ ID NO: 215649 - protein, 17 aa, Homo sapiens
  CDR3 for alpha chain variable domain of TCR clone 107825 (TRAV26-1, TRAJ27)
CIVSTPWINTNAGKSTC

SEQ ID NO: 215650 - protein, 16 aa, Homo sapiens
  CDR3 for beta chain variable domain of TCR clone 107825 (TRBV7-9, TRBJ2-1)
CASSLDPGLAIDEQFF

SEQ ID NO: 215651 - protein, 15 aa, Homo sapiens
  CDR3 for alpha chain variable domain of TCR clone 107826 (TRAV20, TRAJ6)
CAVRLQSGGSYIPTV

SEQ ID NO: 215652 - protein, 14 aa, Homo sapiens
  CDR3 for beta chain variable domain of TCR clone 107826 (TRBV12-4, TRBJ2-7)
CASSASGGWYEQYF

SEQ ID NO: 215653 - protein, 13 aa, Homo sapiens
  CDR3 for alpha chain variable domain of TCR clone 107827 (TRAV27, TRAJ45)
CRSSGGGADGLTF

SEQ ID NO: 215654 - protein, 13 aa, Homo sapiens
  CDR3 for beta chain variable domain of TCR clone 107827 (TRBV11-2, TRBJ2-2)
CASGRDREEELFF

SEQ ID NO: 215655 - protein, 14 aa, Homo sapiens
  CDR3 for alpha chain variable domain of TCR clone 107828 (TRAV8-4, TRAJ34)
CAVSDPGDTDTLIF

SEQ ID NO: 215656 - protein, 13 aa, Homo sapiens
  CDR3 for beta chain variable domain of TCR clone 107828 (TRBV7-9, TRBJ2-5)
CASLSPGQETQYF

SEQ ID NO: 215657 - protein, 14 aa, Homo sapiens
  CDR3 for alpha chain variable domain of TCR clone 107829 (TRAV8-4, TRAJ34)
CAVSDPGATDKLIF

SEQ ID NO: 215658 - protein, 13 aa, Homo sapiens
  CDR3 for beta chain variable domain of TCR clone 107829 (TRBV7-9, TRBJ2-5)
CASLSPGQETQYF

SEQ ID NO: 215659 - protein, 15 aa, Homo sapiens
  CDR3 for alpha chain variable domain of TCR clone 107830 (TRAV2, TRAJ9)
CAVAALNTGGFKTIF

SEQ ID NO: 215660 - protein, 13 aa, Homo sapiens
  CDR3 for beta chain variable domain of TCR clone 107830 (TRBV19, TRBJ2-1)
CATSRGVYNEQFF

SEQ ID NO: 215661 - protein, 17 aa, Homo sapiens
  CDR3 for alpha chain variable domain of TCR clone 107831 (TRAV3, TRAJ42)
CAVRDRDYGGSQGNLIF

SEQ ID NO: 215662 - protein, 16 aa, Homo sapiens
  CDR3 for beta chain variable domain of TCR clone 107831 (TRBV9, TRBJ2-1)
CASSVGGGGNYSEQFF

SEQ ID NO: 215663 - protein, 14 aa, Homo sapiens
  CDR3 for alpha chain variable domain of TCR clone 107832 (TRAV20, TRAJ56)
CAVLFGGANSKLTF

SEQ ID NO: 215664 - protein, 14 aa, Homo sapiens
  CDR3 for beta chain variable domain of TCR clone 107832 (TRBV20-1, TRBJ2-7)
CSAKRGRSSYEQYF

SEQ ID NO: 215665 - protein, 10 aa, Homo sapiens
  CDR3 for alpha chain variable domain of TCR clone 107833 (TRAV21, TRAJ49)
CAVTGNQSYF

SEQ ID NO: 215666 - protein, 15 aa, Homo sapiens
  CDR3 for beta chain variable domain of TCR clone 107833 (TRBV6-1, TRBJ2-3)
CASTTLAGHTDTQYF

SEQ ID NO: 215667 - protein, 14 aa, Homo sapiens
  CDR3 for alpha chain variable domain of TCR clone 107834 (TRAV12-2, TRAJ40)
CAVKIPSGTSKYIF

SEQ ID NO: 215668 - protein, 20 aa, Homo sapiens
  CDR3 for beta chain variable domain of TCR clone 107834 (TRBV28, TRBJ2-1)
CASTPIGRSPGLAGGNEQFF

SEQ ID NO: 215669 - protein, 12 aa, Homo sapiens
  CDR3 for alpha chain variable domain of TCR clone 107835 (TRAV12-3, TRAJ20)
CAMVRGDYKLSF

SEQ ID NO: 215670 - protein, 15 aa, Homo sapiens
  CDR3 for beta chain variable domain of TCR clone 107835 (TRBV6-5, TRBJ2-1)
CASSYDAGAGNEQFF

SEQ ID NO: 215671 - protein, 16 aa, Homo sapiens
  CDR3 for alpha chain variable domain of TCR clone 107836 (TRAV13-1, TRAJ35)
CAASKGGFGNVLHCVS

SEQ ID NO: 215672 - protein, 13 aa, Homo sapiens
  CDR3 for beta chain variable domain of TCR clone 107836 (TRBV7-3, TRBJ1-1)
CASSQDWGAEAFF

SEQ ID NO: 215673 - protein, 11 aa, Homo sapiens
  CDR3 for alpha chain variable domain of TCR clone 107837 (TRAV12-1, TRAJ15)
CVVNAGTALIF

SEQ ID NO: 215674 - protein, 18 aa, Homo sapiens
  CDR3 for beta chain variable domain of TCR clone 107837 (TRBV25-1, TRBJ1-2)
CASSGLQNGQGLIFGYTF

SEQ ID NO: 215675 - protein, 13 aa, Homo sapiens
  CDR3 for alpha chain variable domain of TCR clone 107838 (TRAV12-1, TRAJ6)
CVVFPGGSYIPTF

SEQ ID NO: 215676 - protein, 13 aa, Homo sapiens
  CDR3 for beta chain variable domain of TCR clone 107838 (TRBV7-9, TRBJ1-2)
CASSLKQNYGYTC

SEQ ID NO: 215677 - protein, 13 aa, Homo sapiens
  CDR3 for alpha chain variable domain of TCR clone 107839 (TRAV8-3, TRAJ28)
CAVGAVGSYQLTF

SEQ ID NO: 215678 - protein, 13 aa, Homo sapiens
  CDR3 for beta chain variable domain of TCR clone 107839 (TRBV3-1, TRBJ1-2)
CASSQRAPGGYTF

SEQ ID NO: 215679 - protein, 14 aa, Homo sapiens
  CDR3 for alpha chain variable domain of TCR clone 107840 (TRAV25, TRAJ42)
CAGNYGGSQGNLIF

SEQ ID NO: 215680 - protein, 15 aa, Homo sapiens
  CDR3 for beta chain variable domain of TCR clone 107840 (TRBV6-1, TRBJ2-6)
CASTGPRSGANVLTF

SEQ ID NO: 215681 - protein, 12 aa, Homo sapiens
  CDR3 for alpha chain variable domain of TCR clone 107841 (TRAV17, TRAJ36)
CATLTGANNLFF

SEQ ID NO: 215682 - protein, 15 aa, Homo sapiens
  CDR3 for beta chain variable domain of TCR clone 107841 (TRBV19, TRBJ1-2)
CASRTKTDTNYGYTF

SEQ ID NO: 215683 - protein, 14 aa, Homo sapiens
  CDR3 for alpha chain variable domain of TCR clone 107842 (TRAV9-2, TRAJ39)
CALYIYNAGNMLTF

SEQ ID NO: 215684 - protein, 13 aa, Homo sapiens
  CDR3 for beta chain variable domain of TCR clone 107842 (TRBV7-9, TRBJ2-7)
CASSFAGAYEQYF

SEQ ID NO: 215685 - protein, 13 aa, Homo sapiens
  CDR3 for alpha chain variable domain of TCR clone 107843 (TRAV8-3, TRAJ30)
CAVGGWRDDKSIF

SEQ ID NO: 215686 - protein, 14 aa, Homo sapiens
  CDR3 for beta chain variable domain of TCR clone 107843 (TRBV20-1, TRBJ1-1)
CSAPPADMNTEAFF

SEQ ID NO: 215687 - protein, 14 aa, Homo sapiens
  CDR3 for alpha chain variable domain of TCR clone 107844 (TRAV8-4, TRAJ13)
CAVTLSGGYRTVTF

SEQ ID NO: 215688 - protein, 14 aa, Homo sapiens
  CDR3 for beta chain variable domain of TCR clone 107844 (TRBV7-2, TRBJ1-2)
CASSQTGSTYGYTF

SEQ ID NO: 215689 - protein, 14 aa, Homo sapiens
  CDR3 for alpha chain variable domain of TCR clone 107845 (TRAV35, TRAJ13)
CAGSPSGGYQKVTF

SEQ ID NO: 215690 - protein, 20 aa, Homo sapiens
  CDR3 for beta chain variable domain of TCR clone 107845 (TRBV28, TRBJ2-1)
CASTPIGRSPGLAGGNEQFF

SEQ ID NO: 215691 - protein, 12 aa, Homo sapiens
  CDR3 for alpha chain variable domain of TCR clone 107846 (TRAV13-1, TRAJ21)
CAAKEGFNKFYF

SEQ ID NO: 215692 - protein, 14 aa, Homo sapiens
  CDR3 for beta chain variable domain of TCR clone 107846 (TRBV12-4, TRBJ2-2)
CASSLEQDTGELFF

SEQ ID NO: 215693 - protein, 15 aa, Homo sapiens
  CDR3 for alpha chain variable domain of TCR clone 107847 (TRAV12-2, TRAJ53)
CAVNGGGGSNYKLTF

SEQ ID NO: 215694 - protein, 17 aa, Homo sapiens
  CDR3 for beta chain variable domain of TCR clone 107847 (TRBV7-3, TRBJ2-3)
RASSLMKRLRGADTQYF

SEQ ID NO: 215695 - protein, 15 aa, Homo sapiens
  CDR3 for alpha chain variable domain of TCR clone 107848 (TRAV21, TRAJ53)
CATLNSGGSNYKLTF

SEQ ID NO: 215696 - protein, 17 aa, Homo sapiens
  CDR3 for beta chain variable domain of TCR clone 107848 (TRBV15, TRBJ1-5)
CATSRAPPGTRNQPQHF

SEQ ID NO: 215697 - protein, 12 aa, Homo sapiens
  CDR3 for alpha chain variable domain of TCR clone 107849 (TRAV13-1, TRAJ21)
CAAKEGFNNFYF

SEQ ID NO: 215698 - protein, 15 aa, Homo sapiens
  CDR3 for beta chain variable domain of TCR clone 107849 (TRBV25-1, TRBJ1-4)
CASSPGDSTNEKLFF

SEQ ID NO: 215699 - protein, 14 aa, Homo sapiens
  CDR3 for alpha chain variable domain of TCR clone 107850 (TRAV4, TRAJ17)
CLVGDMAAGNKLTF

SEQ ID NO: 215700 - protein, 14 aa, Homo sapiens
  CDR3 for beta chain variable domain of TCR clone 107850 (TRBV4-1, TRBJ2-7)
CASSPVAGGDEQYF

SEQ ID NO: 215701 - protein, 15 aa, Homo sapiens
  CDR3 for alpha chain variable domain of TCR clone 107851 (TRAV1-1, TRAJ20)
CAVRDNVANDYKLSF

SEQ ID NO: 215702 - protein, 13 aa, Homo sapiens
  CDR3 for beta chain variable domain of TCR clone 107851 (TRBV7-2, TRBJ2-1)
CTSSRQGYNEQFF

SEQ ID NO: 215703 - protein, 11 aa, Homo sapiens
  CDR3 for alpha chain variable domain of TCR clone 107852 (TRAV12-1, TRAJ21)
CVVYNFNKFYF

SEQ ID NO: 215704 - protein, 15 aa, Homo sapiens
  CDR3 for beta chain variable domain of TCR clone 107852 (TRBV12-4, TRBJ2-5)
CASSPPTGLQETQYF

SEQ ID NO: 215705 - protein, 13 aa, Homo sapiens
  CDR3 for alpha chain variable domain of TCR clone 107853 (TRAV26-1, TRAJ43)
CIVRVAFNNDMRF

SEQ ID NO: 215706 - protein, 14 aa, Homo sapiens
  CDR3 for beta chain variable domain of TCR clone 107853 (TRBV7-2, TRBJ2-7)
CASSLYPGRYEQYF

SEQ ID NO: 215707 - protein, 14 aa, Homo sapiens
  CDR3 for alpha chain variable domain of TCR clone 107854 (TRAV1-2, TRAJ16)
CAVNRFSDGQKLLF

SEQ ID NO: 215708 - protein, 13 aa, Homo sapiens
  CDR3 for beta chain variable domain of TCR clone 107854 (TRBV19, TRBJ1-1)
CASSFGRNTEAFF

SEQ ID NO: 215709 - protein, 13 aa, Homo sapiens
  CDR3 for alpha chain variable domain of TCR clone 107855 (TRAV4, TRAJ28)
CLFIWGWELPTHF

SEQ ID NO: 215710 - protein, 14 aa, Homo sapiens
  CDR3 for beta chain variable domain of TCR clone 107855 (TRBV7-9, TRBJ2-5)
CASSLDTAQETHYF

SEQ ID NO: 215711 - protein, 19 aa, Homo sapiens
  CDR3 for alpha chain variable domain of TCR clone 107856 (TRAV40, )
CLPIPDIQNPDPAVYQLID

SEQ ID NO: 215712 - protein, 15 aa, Homo sapiens
  CDR3 for beta chain variable domain of TCR clone 107856 (TRBV2, TRBJ1-2)
CASSEIGGANYGYTF

SEQ ID NO: 215713 - protein, 16 aa, Homo sapiens
  CDR3 for alpha chain variable domain of TCR clone 107857 (TRAV3, TRAJ10)
CAVRDMRAEGGNKLTF

SEQ ID NO: 215714 - protein, 15 aa, Homo sapiens
  CDR3 for beta chain variable domain of TCR clone 107857 (TRBV20-1, TRBJ2-7)
CSARDRVSGMDEQYF

SEQ ID NO: 215715 - protein, 13 aa, Homo sapiens
  CDR3 for alpha chain variable domain of TCR clone 107858 (TRAV35, TRAJ32)
CAGVGGATNKLIF

SEQ ID NO: 215716 - protein, 14 aa, Homo sapiens
  CDR3 for beta chain variable domain of TCR clone 107858 (TRBV7-9, TRBJ1-1)
CASSLGGANTEAFF

SEQ ID NO: 215717 - protein, 14 aa, Homo sapiens
  CDR3 for alpha chain variable domain of TCR clone 107859 (TRAV12-1, TRAJ39)
CVVSLNNAGNMLTL

SEQ ID NO: 215718 - protein, 13 aa, Homo sapiens
  CDR3 for beta chain variable domain of TCR clone 107859 (TRBV9, TRBJ2-7)
CASSVLQAGEQYF

SEQ ID NO: 215719 - protein, 13 aa, Homo sapiens
  CDR3 for alpha chain variable domain of TCR clone 107860 (TRAV13-1, TRAJ21)
CAASIYNFNKFYF

SEQ ID NO: 215720 - protein, 15 aa, Homo sapiens
  CDR3 for beta chain variable domain of TCR clone 107860 (TRBV5-1, TRBJ2-1)
CASSPPRAPYNEQFF

SEQ ID NO: 215721 - protein, 17 aa, Homo sapiens
  CDR3 for alpha chain variable domain of TCR clone 107861 (TRAV26-1, TRAJ53)
CIVRVDDSGGSNYKLTF

SEQ ID NO: 215722 - protein, 10 aa, Homo sapiens
  CDR3 for beta chain variable domain of TCR clone 107861 (TRBV20-1, TRBJ2-7)
SAAYFYEQYF

SEQ ID NO: 215723 - protein, 18 aa, Homo sapiens
  CDR3 for alpha chain variable domain of TCR clone 107862 (TRAV21, TRAJ52)
CAVRPPPAGGTSYGKLTF

SEQ ID NO: 215724 - protein, 15 aa, Homo sapiens
  CDR3 for beta chain variable domain of TCR clone 107862 (TRBV7-9, TRBJ1-6)
CASSSPGRGNSPLHF

SEQ ID NO: 215725 - protein, 13 aa, Homo sapiens
  CDR3 for alpha chain variable domain of TCR clone 107863 (TRAV21, TRAJ57)
CAVTQGGSEKLVF

SEQ ID NO: 215726 - protein, 14 aa, Homo sapiens
  CDR3 for beta chain variable domain of TCR clone 107863 (TRBV5-1, TRBJ2-1)
CASSALWAGNGQFF

SEQ ID NO: 215727 - protein, 14 aa, Homo sapiens
  CDR3 for alpha chain variable domain of TCR clone 107864 (TRAV27, TRAJ36)
CAGPPKSGANNLFF

SEQ ID NO: 215728 - protein, 15 aa, Homo sapiens
  CDR3 for beta chain variable domain of TCR clone 107864 (TRBV18, TRBJ2-7)
CASSPASTPNYEQYF

SEQ ID NO: 215729 - protein, 15 aa, Homo sapiens
  CDR3 for alpha chain variable domain of TCR clone 107865 (TRAV12-3, TRAJ6)
CAMSATSGGSYIPTF

SEQ ID NO: 215730 - protein, 13 aa, Homo sapiens
  CDR3 for beta chain variable domain of TCR clone 107865 (TRBV7-9, TRBJ1-2)
CASSLEQNYGYTF

SEQ ID NO: 215731 - protein, 11 aa, Homo sapiens
  CDR3 for alpha chain variable domain of TCR clone 107866 (TRAV17, TRAJ9)
CGFTGGFKTIF

SEQ ID NO: 215732 - protein, 14 aa, Homo sapiens
  CDR3 for beta chain variable domain of TCR clone 107866 (TRBV25-1, TRBJ1-1)
CASTHLGGNTEAFF

SEQ ID NO: 215733 - protein, 15 aa, Homo sapiens
  CDR3 for alpha chain variable domain of TCR clone 107867 (TRAV13-2, TRAJ45)
CAEHHSGGGADGLTF

SEQ ID NO: 215734 - protein, 17 aa, Homo sapiens
  CDR3 for beta chain variable domain of TCR clone 107867 (TRBV13, TRBJ2-3)
CASSLSRVAGGRNTQYF

SEQ ID NO: 215735 - protein, 15 aa, Homo sapiens
  CDR3 for alpha chain variable domain of TCR clone 107868 (TRAV8-4, TRAJ15)
CAVSDPVQAGTALIF

SEQ ID NO: 215736 - protein, 14 aa, Homo sapiens
  CDR3 for beta chain variable domain of TCR clone 107868 (TRBV7-2, TRBJ1-3)
CASSLSRAGNTIYF

SEQ ID NO: 215737 - protein, 14 aa, Homo sapiens
  CDR3 for alpha chain variable domain of TCR clone 107869 (TRAV35, TRAJ22)
CAGLRPGSARQLTF

SEQ ID NO: 215738 - protein, 18 aa, Homo sapiens
  CDR3 for beta chain variable domain of TCR clone 107869 (TRBV12-4, TRBJ2-2)
CASSLVAGTRGRTGELFF

SEQ ID NO: 215739 - protein, 18 aa, Homo sapiens
  CDR3 for alpha chain variable domain of TCR clone 107870 (TRAV29/DV5, TRAJ52)
CAAGFRGAGGTSYGKLTF

SEQ ID NO: 215740 - protein, 16 aa, Homo sapiens
  CDR3 for beta chain variable domain of TCR clone 107870 (TRBV7-3, TRBJ2-2)
CASSLKRGTLSGKLFF

SEQ ID NO: 215741 - protein, 16 aa, Homo sapiens
  CDR3 for alpha chain variable domain of TCR clone 107871 (TRAV8-3, TRAJ10)
CALLGGLTGGGNKLTF

SEQ ID NO: 215742 - protein, 14 aa, Homo sapiens
  CDR3 for beta chain variable domain of TCR clone 107871 (TRBV7-2, TRBJ2-7)
CASRSQGAAYEQYF

SEQ ID NO: 215743 - protein, 14 aa, Homo sapiens
  CDR3 for alpha chain variable domain of TCR clone 107872 (TRAV8-3, TRAJ4)
CAVGAAGGYNKLIF

SEQ ID NO: 215744 - protein, 15 aa, Homo sapiens
  CDR3 for beta chain variable domain of TCR clone 107872 (TRBV11-3, TRBJ2-3)
CASLKGGREGDTQYF

SEQ ID NO: 215745 - protein, 15 aa, Homo sapiens
  CDR3 for alpha chain variable domain of TCR clone 107873 (TRAV12-2, TRAJ13)
CRESLGSGGYQQVTF

SEQ ID NO: 215746 - protein, 15 aa, Homo sapiens
  CDR3 for beta chain variable domain of TCR clone 107873 (TRBV6-5, TRBJ2-1)
CASRRAQLSYNEQFF

SEQ ID NO: 215747 - protein, 20 aa, Homo sapiens
  CDR3 for alpha chain variable domain of TCR clone 107874 (TRAV12-3, TRAJ41)
SLFIRDSQPSDSATPEALNF

SEQ ID NO: 215748 - protein, 15 aa, Homo sapiens
  CDR3 for beta chain variable domain of TCR clone 107874 (TRBV5-1, TRBJ2-7)
CDSSLDLTSSYEQYF

SEQ ID NO: 215749 - protein, 15 aa, Homo sapiens
  CDR3 for alpha chain variable domain of TCR clone 107875 (TRAV3, TRAJ5)
CAVRDLDTGRRALTF

SEQ ID NO: 215750 - protein, 13 aa, Homo sapiens
  CDR3 for beta chain variable domain of TCR clone 107875 (TRBV7-6, TRBJ1-2)
CASSLVADYGYTF

SEQ ID NO: 215751 - protein, 12 aa, Homo sapiens
  CDR3 for alpha chain variable domain of TCR clone 107876 (TRAV12-1, TRAJ34)
CVVAGATDKLIF

SEQ ID NO: 215752 - protein, 16 aa, Homo sapiens
  CDR3 for beta chain variable domain of TCR clone 107876 (TRBV7-2, TRBJ1-2)
CASSSNQDRRGHGYSF

SEQ ID NO: 215753 - protein, 12 aa, Homo sapiens
  CDR3 for alpha chain variable domain of TCR clone 107877 (TRAV2, TRAJ10)
SASTGGGNKLTF

SEQ ID NO: 215754 - protein, 14 aa, Homo sapiens
  CDR3 for beta chain variable domain of TCR clone 107877 (TRBV7-2, TRBJ2-2)
CASRGQGAAGELFF

SEQ ID NO: 215755 - protein, 17 aa, Homo sapiens
  CDR3 for alpha chain variable domain of TCR clone 107878 (TRAV26-1, TRAJ53)
CIVRVDDSGGSNYKMTF

SEQ ID NO: 215756 - protein, 15 aa, Homo sapiens
  CDR3 for beta chain variable domain of TCR clone 107878 (TRBV20-1, TRBJ2-7)
CSARDRVSGMDEQYF

SEQ ID NO: 215757 - protein, 14 aa, Homo sapiens
  CDR3 for alpha chain variable domain of TCR clone 107879 (TRAV26-1, TRAJ38)
CIADNAGNNRKLIW

SEQ ID NO: 215758 - protein, 17 aa, Homo sapiens
  CDR3 for beta chain variable domain of TCR clone 107879 (TRBV7-9, TRBJ2-3)
CASSPSVAGDLTDTQYF

SEQ ID NO: 215759 - protein, 15 aa, Homo sapiens
  CDR3 for alpha chain variable domain of TCR clone 107880 (TRAV20, TRAJ52)
CAVQAGGTSYGKLTF

SEQ ID NO: 215760 - protein, 13 aa, Homo sapiens
  CDR3 for beta chain variable domain of TCR clone 107880 (TRBV7-7, TRBJ2-3)
CASSLSRADTQYF

SEQ ID NO: 215761 - protein, 15 aa, Homo sapiens
  CDR3 for alpha chain variable domain of TCR clone 107881 (TRAV3, TRAJ3)
CAVRDMSSSASKIIV

SEQ ID NO: 215762 - protein, 14 aa, Homo sapiens
  CDR3 for beta chain variable domain of TCR clone 107881 (TRBV19, TRBJ2-1)
CASPTFVLSGEQFF

SEQ ID NO: 215763 - protein, 10 aa, Homo sapiens
  CDR3 for alpha chain variable domain of TCR clone 107882 (TRAV1-2, TRAJ23)
CAGQGGKLIF

SEQ ID NO: 215764 - protein, 15 aa, Homo sapiens
  CDR3 for beta chain variable domain of TCR clone 107882 (TRBV6-3, TRBJ2-7)
CASSSPGTVFYEQYF

SEQ ID NO: 215765 - protein, 13 aa, Homo sapiens
  CDR3 for alpha chain variable domain of TCR clone 107883 (TRAV1-1, TRAJ9)
CAAKNTGGFKTIF

SEQ ID NO: 215766 - protein, 14 aa, Homo sapiens
  CDR3 for beta chain variable domain of TCR clone 107883 (TRBV20-1, TRBJ2-1)
CSGQIGGSANEQFF

SEQ ID NO: 215767 - protein, 17 aa, Homo sapiens
  CDR3 for alpha chain variable domain of TCR clone 107884 (TRAV3, TRAJ42)
CAVRDRDYGGSQGNLIF

SEQ ID NO: 215768 - protein, 16 aa, Homo sapiens
  CDR3 for beta chain variable domain of TCR clone 107884 (TRBV4-1, TRBJ2-3)
CASSQSTSGAEDTQYF

SEQ ID NO: 215769 - protein, 18 aa, Homo sapiens
  CDR3 for alpha chain variable domain of TCR clone 107885 (TRAV21, TRAJ53)
CAVKGGENSGGSNYKMTF

SEQ ID NO: 215770 - protein, 13 aa, Homo sapiens
  CDR3 for beta chain variable domain of TCR clone 107885 (TRBV9, TRBJ2-1)
CASSPSGGSEQFF

SEQ ID NO: 215771 - protein, 15 aa, Homo sapiens
  CDR3 for alpha chain variable domain of TCR clone 107886 (TRAV3, TRAJ24)
CAVREKMTAGGDCSL

SEQ ID NO: 215772 - protein, 14 aa, Homo sapiens
  CDR3 for beta chain variable domain of TCR clone 107886 (TRBV7-2, TRBJ2-3)
CASSQTGSSYTQYF

SEQ ID NO: 215773 - protein, 13 aa, Homo sapiens
  CDR3 for alpha chain variable domain of TCR clone 107887 (TRAV12-3, TRAJ33)
CAMSLNSNYQLIW

SEQ ID NO: 215774 - protein, 15 aa, Homo sapiens
  CDR3 for beta chain variable domain of TCR clone 107887 (TRBV20-1, TRBJ2-7)
CSTESGTSGAYEQYF

SEQ ID NO: 215775 - protein, 13 aa, Homo sapiens
  CDR3 for alpha chain variable domain of TCR clone 107888 (TRAV21, TRAJ20)
CAVGVFADYKLSF

SEQ ID NO: 215776 - protein, 12 aa, Homo sapiens
  CDR3 for beta chain variable domain of TCR clone 107888 (TRBV11-2, TRBJ2-1)
CASSPGNNEQFF

SEQ ID NO: 215777 - protein, 14 aa, Homo sapiens
  CDR3 for alpha chain variable domain of TCR clone 107889 (TRAV20, TRAJ32)
CCGRYGGATNKLIF

SEQ ID NO: 215778 - protein, 12 aa, Homo sapiens
  CDR3 for beta chain variable domain of TCR clone 107889 (TRBV28, TRBJ2-3)
CASSLYRDTQYF

SEQ ID NO: 215779 - protein, 13 aa, Homo sapiens
  CDR3 for alpha chain variable domain of TCR clone 107890 (TRAV12-3, TRAJ33)
CAMSVNSNYQLIW

SEQ ID NO: 215780 - protein, 14 aa, Homo sapiens
  CDR3 for beta chain variable domain of TCR clone 107890 (TRBV5-1, TRBJ1-1)
CASSLTRRSTEAFF

SEQ ID NO: 215781 - protein, 11 aa, Homo sapiens
  CDR3 for alpha chain variable domain of TCR clone 107891 (TRAV13-1, TRAJ48)
CSKLGNEKLTF

SEQ ID NO: 215782 - protein, 13 aa, Homo sapiens
  CDR3 for beta chain variable domain of TCR clone 107891 (TRBV7-3, TRBJ1-1)
CASSQDWGAEAFF

SEQ ID NO: 215783 - protein, 12 aa, Homo sapiens
  CDR3 for alpha chain variable domain of TCR clone 107892 (TRAV12-3, TRAJ17)
CAMTLTGNRLTF

SEQ ID NO: 215784 - protein, 15 aa, Homo sapiens
  CDR3 for beta chain variable domain of TCR clone 107892 (TRBV20-1, TRBJ2-7)
CSARDRVSGMDEQHF

SEQ ID NO: 215785 - protein, 15 aa, Homo sapiens
  CDR3 for alpha chain variable domain of TCR clone 107893 (TRAV8-1, TRAJ37)
CAVKRGSGNTGKLIF

SEQ ID NO: 215786 - protein, 17 aa, Homo sapiens
  CDR3 for beta chain variable domain of TCR clone 107893 (TRBV12-4, TRBJ1-1)
CASSLSGFRTMNTEAFF

SEQ ID NO: 215787 - protein, 15 aa, Homo sapiens
  CDR3 for alpha chain variable domain of TCR clone 107894 (TRAV17, TRAJ57)
CATGPSQGGSEKLVF

SEQ ID NO: 215788 - protein, 15 aa, Homo sapiens
  CDR3 for beta chain variable domain of TCR clone 107894 (TRBV12-4, TRBJ1-5)
CQQPTVGGSNQPQHF

SEQ ID NO: 215789 - protein, 14 aa, Homo sapiens
  CDR3 for alpha chain variable domain of TCR clone 107895 (TRAV3, TRAJ36)
CAVRDGTGANNLFF

SEQ ID NO: 215790 - protein, 14 aa, Homo sapiens
  CDR3 for beta chain variable domain of TCR clone 107895 (TRBV9, TRBJ1-2)
CASSVSTRSYGYTF

SEQ ID NO: 215791 - protein, 16 aa, Homo sapiens
  CDR3 for alpha chain variable domain of TCR clone 107896 (TRAV12-1, TRAJ12)
CVVNTLLMDSSYKLIF

SEQ ID NO: 215792 - protein, 13 aa, Homo sapiens
  CDR3 for beta chain variable domain of TCR clone 107896 (TRBV11-2, TRBJ2-1)
CASSSEANNEQFF

SEQ ID NO: 215793 - protein, 14 aa, Homo sapiens
  CDR3 for alpha chain variable domain of TCR clone 107897 (TRAV12-3, TRAJ10)
SHLPLTGVGNKLTF

SEQ ID NO: 215794 - protein, 14 aa, Homo sapiens
  CDR3 for beta chain variable domain of TCR clone 107897 (TRBV19, TRBJ2-7)
CASTVQGRPYEQYF

SEQ ID NO: 215795 - protein, 16 aa, Homo sapiens
  CDR3 for alpha chain variable domain of TCR clone 107898 (TRAV4, TRAJ37)
CLVGWFGSSNTGKLIF

SEQ ID NO: 215796 - protein, 15 aa, Homo sapiens
  CDR3 for beta chain variable domain of TCR clone 107898 (TRBV7-9, TRBJ1-5)
CASSQGHQPNQPQHF

SEQ ID NO: 215797 - protein, 12 aa, Homo sapiens
  CDR3 for alpha chain variable domain of TCR clone 107899 (TRAV35, TRAJ49)
CAGWNTGNQFYF

SEQ ID NO: 215798 - protein, 14 aa, Homo sapiens
  CDR3 for beta chain variable domain of TCR clone 107899 (TRBV19, TRBJ2-1)
CASPTFVLSGEQFF

SEQ ID NO: 215799 - protein, 13 aa, Homo sapiens
  CDR3 for alpha chain variable domain of TCR clone 107900 (TRAV2, TRAJ40)
CAVATSGAYKYIF

SEQ ID NO: 215800 - protein, 14 aa, Homo sapiens
  CDR3 for beta chain variable domain of TCR clone 107900 (TRBV19, TRBJ2-1)
CASPTFVLSGEQFF

SEQ ID NO: 215801 - protein, 17 aa, Homo sapiens
  CDR3 for alpha chain variable domain of TCR clone 107901 (TRAV38-2/DV8, TRAJ54)
CAYRRGWGSQGAQKLGF

SEQ ID NO: 215802 - protein, 14 aa, Homo sapiens
  CDR3 for beta chain variable domain of TCR clone 107901 (TRBV20-1, TRBJ2-3)
CSARDGVGTDTQYF

SEQ ID NO: 215803 - protein, 14 aa, Homo sapiens
  CDR3 for alpha chain variable domain of TCR clone 107902 (TRAV17, TRAJ42)
CATAGGGSHGNLIF

SEQ ID NO: 215804 - protein, 14 aa, Homo sapiens
  CDR3 for beta chain variable domain of TCR clone 107902 (TRBV7-2, TRBJ2-3)
CASRFSRPSDTQYF

SEQ ID NO: 215805 - protein, 14 aa, Homo sapiens
  CDR3 for alpha chain variable domain of TCR clone 107903 (TRAV26-1, TRAJ38)
CIADNAGNNRKLIW

SEQ ID NO: 215806 - protein, 16 aa, Homo sapiens
  CDR3 for beta chain variable domain of TCR clone 107903 (TRBV5-1, TRBJ2-3)
CASSLGLAVYTDTQYF

SEQ ID NO: 215807 - protein, 14 aa, Homo sapiens
  CDR3 for alpha chain variable domain of TCR clone 107904 (TRAV1-2, TRAJ16)
CAVNRFSDGQKLLF

SEQ ID NO: 215808 - protein, 13 aa, Homo sapiens
  CDR3 for beta chain variable domain of TCR clone 107904 (TRBV3-1, TRBJ1-5)
CASSQDLDQPQHF

SEQ ID NO: 215809 - protein, 13 aa, Homo sapiens
  CDR3 for alpha chain variable domain of TCR clone 107905 (TRAV8-2, TRAJ49)
CVVTPNTGNQFYF

SEQ ID NO: 215810 - protein, 15 aa, Homo sapiens
  CDR3 for beta chain variable domain of TCR clone 107905 (TRBV6-3, TRBJ2-7)
CASSSPGTVFYEQYF

SEQ ID NO: 215811 - protein, 16 aa, Homo sapiens
  CDR3 for alpha chain variable domain of TCR clone 107906 (TRAV30, TRAJ24)
CGTEIVDADSWGKFQF

SEQ ID NO: 215812 - protein, 16 aa, Homo sapiens
  CDR3 for beta chain variable domain of TCR clone 107906 (TRBV12-5, TRBJ2-5)
CASGPRTSGNQETQYV

SEQ ID NO: 215813 - protein, 21 aa, Homo sapiens
  CDR3 for alpha chain variable domain of TCR clone 107907 (TRAV36/DV7, TRAJ39)
TATQTGDSAIYLPNAGNMLTF

SEQ ID NO: 215814 - protein, 13 aa, Homo sapiens
  CDR3 for beta chain variable domain of TCR clone 107907 (TRBV7-9, TRBJ2-3)
CASSPGSTDTQYF

SEQ ID NO: 215815 - protein, 13 aa, Homo sapiens
  CDR3 for alpha chain variable domain of TCR clone 107908 (TRAV3, TRAJ20)
CCEAFCNDYRLSF

SEQ ID NO: 215816 - protein, 15 aa, Homo sapiens
  CDR3 for beta chain variable domain of TCR clone 107908 (TRBV19, TRBJ2-6)
CASVRRDSGANVLTF

SEQ ID NO: 215817 - protein, 12 aa, Homo sapiens
  CDR3 for alpha chain variable domain of TCR clone 107909 (TRAV13-1, TRAJ42)
VNDGGSQGNLIF

SEQ ID NO: 215818 - protein, 15 aa, Homo sapiens
  CDR3 for beta chain variable domain of TCR clone 107909 (TRBV20-1, TRBJ2-1)
CSASSAGSSYNEQFF

SEQ ID NO: 215819 - protein, 15 aa, Homo sapiens
  CDR3 for alpha chain variable domain of TCR clone 107910 (TRAV38-2/DV8, TRAJ48)
CAYRSGGFGNEKLTF

SEQ ID NO: 215820 - protein, 18 aa, Homo sapiens
  CDR3 for beta chain variable domain of TCR clone 107910 (TRBV28, TRBJ2-7)
CASSPWVATGTFHSTSGR

SEQ ID NO: 215821 - protein, 12 aa, Homo sapiens
  CDR3 for alpha chain variable domain of TCR clone 107911 (TRAV25, TRAJ31)
CAGHLNNARLMF

SEQ ID NO: 215822 - protein, 16 aa, Homo sapiens
  CDR3 for beta chain variable domain of TCR clone 107911 (TRBV7-8, TRBJ2-4)
CASSAERTLAKNIQYF

SEQ ID NO: 215823 - protein, 12 aa, Homo sapiens
  CDR3 for alpha chain variable domain of TCR clone 107912 (TRAV16, TRAJ22)
CDLEVSARQLTF

SEQ ID NO: 215824 - protein, 14 aa, Homo sapiens
  CDR3 for beta chain variable domain of TCR clone 107912 (TRBV11-2, TRBJ2-3)
CASSSIASTDTQYF

SEQ ID NO: 215825 - protein, 14 aa, Homo sapiens
  CDR3 for alpha chain variable domain of TCR clone 107913 (TRAV17, TRAJ16)
CATSDFSDGQKLLF

SEQ ID NO: 215826 - protein, 15 aa, Homo sapiens
  CDR3 for beta chain variable domain of TCR clone 107913 (TRBV18, TRBJ2-1)
CASSPPSASYNEQFF

SEQ ID NO: 215827 - protein, 14 aa, Homo sapiens
  CDR3 for alpha chain variable domain of TCR clone 107914 (TRAV1-2, TRAJ17)
CALRRGAAGTKLTF

SEQ ID NO: 215828 - protein, 13 aa, Homo sapiens
  CDR3 for beta chain variable domain of TCR clone 107914 (TRBV9, TRBJ2-1)
CASSVGQGGEQFF

SEQ ID NO: 215829 - protein, 14 aa, Homo sapiens
  CDR3 for alpha chain variable domain of TCR clone 107915 (TRAV12-1, TRAJ22)
CVVTTSGSARQLTF

SEQ ID NO: 215830 - protein, 14 aa, Homo sapiens
  CDR3 for beta chain variable domain of TCR clone 107915 (TRBV12-5, TRBJ2-5)
CASGSRTHQETQYF

SEQ ID NO: 215831 - protein, 15 aa, Homo sapiens
  CDR3 for alpha chain variable domain of TCR clone 107916 (TRAV27, TRAJ38)
CAARRNAGNNRKLIW

SEQ ID NO: 215832 - protein, 14 aa, Homo sapiens
  CDR3 for beta chain variable domain of TCR clone 107916 (TRBV6-1, TRBJ2-2)
CASVEHIESGELFF

SEQ ID NO: 215833 - protein, 11 aa, Homo sapiens
  CDR3 for alpha chain variable domain of TCR clone 107917 (TRAV21, TRAJ11)
CAVNGYSTLTF

SEQ ID NO: 215834 - protein, 15 aa, Homo sapiens
  CDR3 for beta chain variable domain of TCR clone 107917 (TRBV3-1, TRBJ2-2)
CASSQAVRETGELFF

SEQ ID NO: 215835 - protein, 15 aa, Homo sapiens
  CDR3 for alpha chain variable domain of TCR clone 107918 (TRAV13-1, TRAJ50)
CAAKGSETSYDKVIF

SEQ ID NO: 215836 - protein, 18 aa, Homo sapiens
  CDR3 for beta chain variable domain of TCR clone 107918 (TRBV10-3, TRBJ2-1)
CTSVPSVSLRGGVDGQFF

SEQ ID NO: 215837 - protein, 13 aa, Homo sapiens
  CDR3 for alpha chain variable domain of TCR clone 107919 (TRAV13-1, TRAJ39)
CAARIWAGNMLTF

SEQ ID NO: 215838 - protein, 15 aa, Homo sapiens
  CDR3 for beta chain variable domain of TCR clone 107919 (TRBV7-9, TRBJ1-1)
CASSLLEQGGTEAFF

SEQ ID NO: 215839 - protein, 15 aa, Homo sapiens
  CDR3 for alpha chain variable domain of TCR clone 107920 (TRAV3, TRAJ5)
CAVRDLDTGRRALTF

SEQ ID NO: 215840 - protein, 13 aa, Homo sapiens
  CDR3 for beta chain variable domain of TCR clone 107920 (TRBV20-1, TRBJ2-5)
CSARESKQATQYF

SEQ ID NO: 215841 - protein, 16 aa, Homo sapiens
  CDR3 for alpha chain variable domain of TCR clone 107921 (TRAV14/DV4, TRAJ54)
CAMREGRIQGAQKLVF

SEQ ID NO: 215842 - protein, 14 aa, Homo sapiens
  CDR3 for beta chain variable domain of TCR clone 107921 (TRBV19, TRBJ2-1)
CASPTFVLSGEQSF

SEQ ID NO: 215843 - protein, 21 aa, Homo sapiens
  CDR3 for alpha chain variable domain of TCR clone 107922 (TRAV1-1, TRAJ22)
CLLLLRCERSGSSGSARQLTF

SEQ ID NO: 215844 - protein, 15 aa, Homo sapiens
  CDR3 for beta chain variable domain of TCR clone 107922 (TRBV6-3, TRBJ2-7)
CASSSPGTVFYEQYF

SEQ ID NO: 215845 - protein, 13 aa, Homo sapiens
  CDR3 for alpha chain variable domain of TCR clone 107923 (TRAV13-2, TRAJ45)
QRVTGGGADGLTF

SEQ ID NO: 215846 - protein, 17 aa, Homo sapiens
  CDR3 for beta chain variable domain of TCR clone 107923 (TRBV19, TRBJ1-1)
CASSIAGRGLMNTEAFF

SEQ ID NO: 215847 - protein, 14 aa, Homo sapiens
  CDR3 for alpha chain variable domain of TCR clone 107924 (TRAV12-3, TRAJ58)
CAMSTETSSSRLTF

SEQ ID NO: 215848 - protein, 11 aa, Homo sapiens
  CDR3 for beta chain variable domain of TCR clone 107924 (TRBV29-1, TRBJ2-5)
CSEDRTGTQYF

SEQ ID NO: 215849 - protein, 15 aa, Homo sapiens
  CDR3 for alpha chain variable domain of TCR clone 107925 (TRAV8-1, TRAJ6)
CAVNTPPGGSYIPTF

SEQ ID NO: 215850 - protein, 15 aa, Homo sapiens
  CDR3 for beta chain variable domain of TCR clone 107925 (TRBV11-2, TRBJ2-2)
CASSSDRVNAGEPFF

SEQ ID NO: 215851 - protein, 17 aa, Homo sapiens
  CDR3 for alpha chain variable domain of TCR clone 107926 (TRAV4, TRAJ24)
CTTASGMTTDSWGKFQF

SEQ ID NO: 215852 - protein, 19 aa, Homo sapiens
  CDR3 for beta chain variable domain of TCR clone 107926 (TRBV25-1, TRBJ2-2)
CAILVYRVDRGRKTGELFF

SEQ ID NO: 215853 - protein, 15 aa, Homo sapiens
  CDR3 for alpha chain variable domain of TCR clone 107927 (TRAV3, TRAJ3)
CAVRDRDSSASKIIF

SEQ ID NO: 215854 - protein, 16 aa, Homo sapiens
  CDR3 for beta chain variable domain of TCR clone 107927 (TRBV27, TRBJ2-2)
CASSFRGLVRTGELFF

SEQ ID NO: 215855 - protein, 21 aa, Homo sapiens
  CDR3 for alpha chain variable domain of TCR clone 107928 (TRAV35, TRAJ52)
CWAGYADGPNAGGTSYGKLTS

SEQ ID NO: 215856 - protein, 12 aa, Homo sapiens
  CDR3 for beta chain variable domain of TCR clone 107928 (TRBV5-1, TRBJ2-7)
CASSFRGYEQYF

SEQ ID NO: 215857 - protein, 13 aa, Homo sapiens
  CDR3 for alpha chain variable domain of TCR clone 107929 (TRAV16, TRAJ58)
CALSIPSGSRLTF

SEQ ID NO: 215858 - protein, 14 aa, Homo sapiens
  CDR3 for beta chain variable domain of TCR clone 107929 (TRBV19, TRBJ2-1)
CASPTFVLSGEQFF

SEQ ID NO: 215859 - protein, 13 aa, Homo sapiens
  CDR3 for alpha chain variable domain of TCR clone 107930 (TRAV27, TRAJ45)
CRGGGGCADGLTF

SEQ ID NO: 215860 - protein, 13 aa, Homo sapiens
  CDR3 for beta chain variable domain of TCR clone 107930 (TRBV20-1, TRBJ1-1)
CSAPEGGNTEAFF

SEQ ID NO: 215861 - protein, 15 aa, Homo sapiens
  CDR3 for alpha chain variable domain of TCR clone 107931 (TRAV27, TRAJ39)
ASTSVQENAGNMLTF

SEQ ID NO: 215862 - protein, 14 aa, Homo sapiens
  CDR3 for beta chain variable domain of TCR clone 107931 (TRBV15, TRBJ2-7)
CDTSPDRGLYEQYF

SEQ ID NO: 215863 - protein, 21 aa, Homo sapiens
  CDR3 for alpha chain variable domain of TCR clone 107932 (TRAV1-1, TRAJ6)
CLLLLRCERLERTGGSYKPTF

SEQ ID NO: 215864 - protein, 13 aa, Homo sapiens
  CDR3 for beta chain variable domain of TCR clone 107932 (TRBV10-2, TRBJ2-7)
CASGASGGYEQYF

SEQ ID NO: 215865 - protein, 15 aa, Homo sapiens
  CDR3 for alpha chain variable domain of TCR clone 107933 (TRAV12-2, TRAJ43)
CAFDMRFGAGTRLTV

SEQ ID NO: 215866 - protein, 19 aa, Homo sapiens
  CDR3 for beta chain variable domain of TCR clone 107933 (TRBV7-2, TRBJ2-3)
CASSFLSRNWGGGTDTQYF

SEQ ID NO: 215867 - protein, 15 aa, Homo sapiens
  CDR3 for alpha chain variable domain of TCR clone 107934 (TRAV8-3, TRAJ45)
CASSYSGGGADRLTF

SEQ ID NO: 215868 - protein, 18 aa, Homo sapiens
  CDR3 for beta chain variable domain of TCR clone 107934 (TRBV18, TRBJ1-3)
CASSPRGGAGPSGNTIYF

SEQ ID NO: 215869 - protein, 15 aa, Homo sapiens
  CDR3 for alpha chain variable domain of TCR clone 107935 (TRAV17, TRAJ35)
CATAFVIGFGNVLHC

SEQ ID NO: 215870 - protein, 15 aa, Homo sapiens
  CDR3 for beta chain variable domain of TCR clone 107935 (TRBV7-9, TRBJ2-7)
CASSLALAEDYEQYF

SEQ ID NO: 215871 - protein, 15 aa, Homo sapiens
  CDR3 for alpha chain variable domain of TCR clone 107936 (TRAV3, TRAJ10)
CSVRDGTGGGNKLTF

SEQ ID NO: 215872 - protein, 15 aa, Homo sapiens
  CDR3 for beta chain variable domain of TCR clone 107936 (TRBV4-2, TRBJ1-4)
CASSLVQREVEKLFF

SEQ ID NO: 215873 - protein, 12 aa, Homo sapiens
  CDR3 for alpha chain variable domain of TCR clone 107937 (TRAV21, TRAJ13)
PGPSGGYQKVTF

SEQ ID NO: 215874 - protein, 14 aa, Homo sapiens
  CDR3 for beta chain variable domain of TCR clone 107937 (TRBV12-5, TRBJ2-5)
CASGSRTHQETQYF

SEQ ID NO: 215875 - protein, 13 aa, Homo sapiens
  CDR3 for alpha chain variable domain of TCR clone 107938 (TRAV8-4, TRAJ10)
CAAFTGGGNTLTF

SEQ ID NO: 215876 - protein, 15 aa, Homo sapiens
  CDR3 for beta chain variable domain of TCR clone 107938 (TRBV2, TRBJ2-3)
CASSDFEKATDTQYF

SEQ ID NO: 215877 - protein, 13 aa, Homo sapiens
  CDR3 for alpha chain variable domain of TCR clone 107939 (TRAV12-2, TRAJ22)
CALYSGSARQLTF

SEQ ID NO: 215878 - protein, 13 aa, Homo sapiens
  CDR3 for beta chain variable domain of TCR clone 107939 (TRBV19, TRBJ2-1)
CASMEFRSNEQFL

SEQ ID NO: 215879 - protein, 14 aa, Homo sapiens
  CDR3 for alpha chain variable domain of TCR clone 107940 (TRAV12-3, TRAJ4)
CAMSATGGYNKLIF

SEQ ID NO: 215880 - protein, 14 aa, Homo sapiens
  CDR3 for beta chain variable domain of TCR clone 107940 (TRBV12-5, TRBJ2-5)
CASGSRTHQETQYF

SEQ ID NO: 215881 - protein, 17 aa, Homo sapiens
  CDR3 for alpha chain variable domain of TCR clone 107941 (TRAV3, TRAJ12)
CAVRDGGRMDSSYKSIF

SEQ ID NO: 215882 - protein, 15 aa, Homo sapiens
  CDR3 for beta chain variable domain of TCR clone 107941 (TRBV19, TRBJ1-1)
CASTSGQIQNTEAFF

SEQ ID NO: 215883 - protein, 15 aa, Homo sapiens
  CDR3 for alpha chain variable domain of TCR clone 107942 (TRAV13-1, TRAJ36)
CAASIRQTGANNLLF

SEQ ID NO: 215884 - protein, 14 aa, Homo sapiens
  CDR3 for beta chain variable domain of TCR clone 107942 (TRBV6-1, TRBJ1-3)
CASVQGGGGNTIYF

SEQ ID NO: 215885 - protein, 13 aa, Homo sapiens
  CDR3 for alpha chain variable domain of TCR clone 107943 (TRAV8-4, TRAJ48)
CAVSLFGNEELTF

SEQ ID NO: 215886 - protein, 15 aa, Homo sapiens
  CDR3 for beta chain variable domain of TCR clone 107943 (TRBV20-1, TRBJ2-7)
CSARKGLAESYEQYF

SEQ ID NO: 215887 - protein, 12 aa, Homo sapiens
  CDR3 for alpha chain variable domain of TCR clone 107944 (TRAV3, TRAJ20)
CAVRDPDYKLSF

SEQ ID NO: 215888 - protein, 13 aa, Homo sapiens
  CDR3 for beta chain variable domain of TCR clone 107944 (TRBV12-4, TRBJ2-7)
CASSPTETYEQYF

SEQ ID NO: 215889 - protein, 14 aa, Homo sapiens
  CDR3 for alpha chain variable domain of TCR clone 107945 (TRAV1-2, TRAJ16)
CAVNRFSDGQKLLL

SEQ ID NO: 215890 - protein, 19 aa, Homo sapiens
  CDR3 for beta chain variable domain of TCR clone 107945 (TRBV6-3, TRBJ1-2)
CASSYSKGRTGPPNYGYTF

SEQ ID NO: 215891 - protein, 14 aa, Homo sapiens
  CDR3 for alpha chain variable domain of TCR clone 107946 (TRAV12-3, TRAJ29)
CAMSPYSGNTPLAF

SEQ ID NO: 215892 - protein, 15 aa, Homo sapiens
  CDR3 for beta chain variable domain of TCR clone 107946 (TRBV27, TRBJ2-1)
CASSNGGGSSNEQFF

SEQ ID NO: 215893 - protein, 15 aa, Homo sapiens
  CDR3 for alpha chain variable domain of TCR clone 107947 (TRAV13-1, TRAJ11)
CAASNRNSGYSTLTF

SEQ ID NO: 215894 - protein, 15 aa, Homo sapiens
  CDR3 for beta chain variable domain of TCR clone 107947 (TRBV5-1, TRBJ2-7)
CASSLGDFTTYEQYF

SEQ ID NO: 215895 - protein, 17 aa, Homo sapiens
  CDR3 for alpha chain variable domain of TCR clone 107948 (TRAV12-3, TRAJ6)
CAMSARGEAGGSYIPTF

SEQ ID NO: 215896 - protein, 12 aa, Homo sapiens
  CDR3 for beta chain variable domain of TCR clone 107948 (TRBV12-4, TRBJ2-3)
CASSTLPDTQYF

SEQ ID NO: 215897 - protein, 11 aa, Homo sapiens
  CDR3 for alpha chain variable domain of TCR clone 107949 (TRAV12-2, TRAJ31)
CAVTRWSRLMF

SEQ ID NO: 215898 - protein, 15 aa, Homo sapiens
  CDR3 for beta chain variable domain of TCR clone 107949 (TRBV19, TRBJ2-7)
CASSIGGGLVNEQYF

SEQ ID NO: 215899 - protein, 14 aa, Homo sapiens
  CDR3 for alpha chain variable domain of TCR clone 107950 (TRAV12-2, TRAJ13)
CAVKKTGGYQKVTL

SEQ ID NO: 215900 - protein, 17 aa, Homo sapiens
  CDR3 for beta chain variable domain of TCR clone 107950 (TRBV20-1, TRBJ2-2)
CSASGSGQGGLTGELFF

SEQ ID NO: 215901 - protein, 12 aa, Homo sapiens
  CDR3 for alpha chain variable domain of TCR clone 107951 (TRAV17, TRAJ28)
WDSGAGSHQLTF

SEQ ID NO: 215902 - protein, 13 aa, Homo sapiens
  CDR3 for beta chain variable domain of TCR clone 107951 (TRBV11-3, TRBJ1-1)
CASSRQPNTEAFF

SEQ ID NO: 215903 - protein, 14 aa, Homo sapiens
  CDR3 for alpha chain variable domain of TCR clone 107952 (TRAV29/DV5, TRAJ20)
CAATIRSNDYKLSF

SEQ ID NO: 215904 - protein, 14 aa, Homo sapiens
  CDR3 for beta chain variable domain of TCR clone 107952 (TRBV12-5, TRBJ2-5)
CASGSRTHQETQYF

SEQ ID NO: 215905 - protein, 15 aa, Homo sapiens
  CDR3 for alpha chain variable domain of TCR clone 107953 (TRAV26-1, TRAJ29)
CIVRVEGSGNTPLVF

SEQ ID NO: 215906 - protein, 15 aa, Homo sapiens
  CDR3 for beta chain variable domain of TCR clone 107953 (TRBV6-6, TRBJ2-7)
CASSYSYGGSYEQYF

SEQ ID NO: 215907 - protein, 12 aa, Homo sapiens
  CDR3 for alpha chain variable domain of TCR clone 107954 (TRAV13-1, TRAJ15)
CAASRAGTALIF

SEQ ID NO: 215908 - protein, 12 aa, Homo sapiens
  CDR3 for beta chain variable domain of TCR clone 107954 (TRBV25-1, TRBJ2-7)
VTGTGWTYEQYF

SEQ ID NO: 215909 - protein, 14 aa, Homo sapiens
  CDR3 for alpha chain variable domain of TCR clone 107955 (TRAV8-4, TRAJ16)
CAVSPVGRWPEADL

SEQ ID NO: 215910 - protein, 15 aa, Homo sapiens
  CDR3 for beta chain variable domain of TCR clone 107955 (TRBV11-3, TRBJ2-7)
CASSPGPASSYEQYF

SEQ ID NO: 215911 - protein, 12 aa, Homo sapiens
  CDR3 for alpha chain variable domain of TCR clone 107956 (TRAV26-1, TRAJ13)
CIVSRGYQKVTF

SEQ ID NO: 215912 - protein, 16 aa, Homo sapiens
  CDR3 for beta chain variable domain of TCR clone 107956 (TRBV27, TRBJ2-1)
CASSLPKGFGLDEQFF

SEQ ID NO: 215913 - protein, 15 aa, Homo sapiens
  CDR3 for alpha chain variable domain of TCR clone 107957 (TRAV12-2, TRAJ53)
CAVNGGGGSNYKLTF

SEQ ID NO: 215914 - protein, 17 aa, Homo sapiens
  CDR3 for beta chain variable domain of TCR clone 107957 (TRBV7-3, TRBJ2-3)
CANSLMKRMRGADTQYF

SEQ ID NO: 215915 - protein, 18 aa, Homo sapiens
  CDR3 for alpha chain variable domain of TCR clone 107958 (TRAV12-2, )
CAVEDIQNPDPAVYQLRD

SEQ ID NO: 215916 - protein, 15 aa, Homo sapiens
  CDR3 for beta chain variable domain of TCR clone 107958 (TRBV11-2, TRBJ2-7)
CASSLVGGRGYEQYF

SEQ ID NO: 215917 - protein, 14 aa, Homo sapiens
  CDR3 for alpha chain variable domain of TCR clone 107959 (TRAV1-2, TRAJ8)
CAVREDTGFQKLVF

SEQ ID NO: 215918 - protein, 12 aa, Homo sapiens
  CDR3 for beta chain variable domain of TCR clone 107959 (TRBV28, TRBJ2-1)
CASSFYRHEQFF

SEQ ID NO: 215919 - protein, 12 aa, Homo sapiens
  CDR3 for alpha chain variable domain of TCR clone 107960 (TRAV8-4, TRAJ31)
CAVSDSNARLMF

SEQ ID NO: 215920 - protein, 15 aa, Homo sapiens
  CDR3 for beta chain variable domain of TCR clone 107960 (TRBV27, TRBJ2-7)
CASRSWGQGADEQYF

SEQ ID NO: 215921 - protein, 16 aa, Homo sapiens
  CDR3 for alpha chain variable domain of TCR clone 107961 (TRAV30, TRAJ24)
CGTEIVDADSWGKFQF

SEQ ID NO: 215922 - protein, 15 aa, Homo sapiens
  CDR3 for beta chain variable domain of TCR clone 107961 (TRBV5-7, TRBJ2-7)
CASSPYFEGSYEQYF

SEQ ID NO: 215923 - protein, 12 aa, Homo sapiens
  CDR3 for alpha chain variable domain of TCR clone 107962 (TRAV16, TRAJ56)
CAPTGANSKLTF

SEQ ID NO: 215924 - protein, 17 aa, Homo sapiens
  CDR3 for beta chain variable domain of TCR clone 107962 (TRBV27, TRBJ2-6)
RASSLTGFASGANVLTS

SEQ ID NO: 215925 - protein, 12 aa, Homo sapiens
  CDR3 for alpha chain variable domain of TCR clone 107963 (TRAV12-3, TRAJ17)
CAMTLTGNKLTF

SEQ ID NO: 215926 - protein, 18 aa, Homo sapiens
  CDR3 for beta chain variable domain of TCR clone 107963 (TRBV10-3, TRBJ2-3)
CAISESRVGPMRGDTQYF

SEQ ID NO: 215927 - protein, 15 aa, Homo sapiens
  CDR3 for alpha chain variable domain of TCR clone 107964 (TRAV25, TRAJ52)
CAVTSGGTSYGKLTF

SEQ ID NO: 215928 - protein, 16 aa, Homo sapiens
  CDR3 for beta chain variable domain of TCR clone 107964 (TRBV15, TRBJ1-2)
CATSRGPRTGGGGYTF

SEQ ID NO: 215929 - protein, 15 aa, Homo sapiens
  CDR3 for alpha chain variable domain of TCR clone 107965 (TRAV26-1, TRAJ48)
CIVRVGDFGNEKLTF

SEQ ID NO: 215930 - protein, 16 aa, Homo sapiens
  CDR3 for beta chain variable domain of TCR clone 107965 (TRBV4-1, TRBJ2-3)
CASSQRAGGPTDTQYF

SEQ ID NO: 215931 - protein, 12 aa, Homo sapiens
  CDR3 for alpha chain variable domain of TCR clone 107966 (TRAV12-3, TRAJ17)
CAMTLTGNKLTF

SEQ ID NO: 215932 - protein, 13 aa, Homo sapiens
  CDR3 for beta chain variable domain of TCR clone 107966 (TRBV7-3, TRBJ1-1)
CASSQDWGSEAFF

SEQ ID NO: 215933 - protein, 13 aa, Homo sapiens
  CDR3 for alpha chain variable domain of TCR clone 107967 (TRAV14/DV4, TRAJ20)
CAMRESNDYKLSF

SEQ ID NO: 215934 - protein, 14 aa, Homo sapiens
  CDR3 for beta chain variable domain of TCR clone 107967 (TRBV2, TRBJ2-7)
CASSLTSGGYEQYF

SEQ ID NO: 215935 - protein, 14 aa, Homo sapiens
  CDR3 for alpha chain variable domain of TCR clone 107968 (TRAV12-1, TRAJ38)
CVVHNAGNNRKLIW

SEQ ID NO: 215936 - protein, 13 aa, Homo sapiens
  CDR3 for beta chain variable domain of TCR clone 107968 (TRBV19, TRBJ2-1)
CATSRGVYNEQFL

SEQ ID NO: 215937 - protein, 16 aa, Homo sapiens
  CDR3 for alpha chain variable domain of TCR clone 107969 (TRAV27, TRAJ52)
CAGAPAGGTSYGKLTF

SEQ ID NO: 215938 - protein, 12 aa, Homo sapiens
  CDR3 for beta chain variable domain of TCR clone 107969 (TRBV27, TRBJ2-1)
CASRGFYTEQFF

SEQ ID NO: 215939 - protein, 15 aa, Homo sapiens
  CDR3 for alpha chain variable domain of TCR clone 107970 (TRAV17, TRAJ37)
CATDGGASNTGKLIF

SEQ ID NO: 215940 - protein, 15 aa, Homo sapiens
  CDR3 for beta chain variable domain of TCR clone 107970 (TRBV28, TRBJ2-5)
CASSSGRTIQETQYF

SEQ ID NO: 215941 - protein, 23 aa, Homo sapiens
  CDR3 for alpha chain variable domain of TCR clone 107971 (TRAV26-1, TRAJ38)
CIADNAGNNHIQNPDPAVYQLRD

SEQ ID NO: 215942 - protein, 19 aa, Homo sapiens
  CDR3 for beta chain variable domain of TCR clone 107971 (TRBV25-1, TRBJ2-2)
CAILVYRVDRGRKTGELFF

SEQ ID NO: 215943 - protein, 14 aa, Homo sapiens
  CDR3 for alpha chain variable domain of TCR clone 107972 (TRAV1-2, TRAJ8)
CAVREDTGFQKLVF

SEQ ID NO: 215944 - protein, 15 aa, Homo sapiens
  CDR3 for beta chain variable domain of TCR clone 107972 (TRBV6-6, TRBJ1-5)
CASSSIQGTNQPQHF

SEQ ID NO: 215945 - protein, 13 aa, Homo sapiens
  CDR3 for alpha chain variable domain of TCR clone 107973 (TRAV30, TRAJ24)
CGTVTDSWGKLQF

SEQ ID NO: 215946 - protein, 15 aa, Homo sapiens
  CDR3 for beta chain variable domain of TCR clone 107973 (TRBV7-2, TRBJ2-1)
CASTHGTGIYNEQFF

SEQ ID NO: 215947 - protein, 17 aa, Homo sapiens
  CDR3 for alpha chain variable domain of TCR clone 107974 (TRAV3, TRAJ42)
CAVRARDYGGSQGNLIF

SEQ ID NO: 215948 - protein, 14 aa, Homo sapiens
  CDR3 for beta chain variable domain of TCR clone 107974 (TRBV7-2, TRBJ2-5)
CASSPRGSSETQYF

SEQ ID NO: 215949 - protein, 13 aa, Homo sapiens
  CDR3 for alpha chain variable domain of TCR clone 107975 (TRAV38-1, TRAJ42)
CARWGGSQGNLIF

SEQ ID NO: 215950 - protein, 10 aa, Homo sapiens
  CDR3 for beta chain variable domain of TCR clone 107975 (TRBV2, TRBJ2-5)
CASSAATQYC

SEQ ID NO: 215951 - protein, 12 aa, Homo sapiens
  CDR3 for alpha chain variable domain of TCR clone 107976 (TRAV13-1, TRAJ42)
VNSGGSQGNLIF

SEQ ID NO: 215952 - protein, 15 aa, Homo sapiens
  CDR3 for beta chain variable domain of TCR clone 107976 (TRBV20-1, TRBJ2-1)
CSASSAGSSYNEQFF

SEQ ID NO: 215953 - protein, 22 aa, Homo sapiens
  CDR3 for alpha chain variable domain of TCR clone 107977 (TRAV8-2, TRAJ45)
HLTKPSAHMSDAAEYSADGLTF

SEQ ID NO: 215954 - protein, 13 aa, Homo sapiens
  CDR3 for beta chain variable domain of TCR clone 107977 (TRBV7-3, TRBJ2-1)
CASSPVSYNEQFF

SEQ ID NO: 215955 - protein, 14 aa, Homo sapiens
  CDR3 for alpha chain variable domain of TCR clone 107978 (TRAV12-2, TRAJ13)
CAVKKTGGYQKVTF

SEQ ID NO: 215956 - protein, 13 aa, Homo sapiens
  CDR3 for beta chain variable domain of TCR clone 107978 (TRBV20-1, TRBJ1-1)
CNARLGQGTEAFF

SEQ ID NO: 215957 - protein, 16 aa, Homo sapiens
  CDR3 for alpha chain variable domain of TCR clone 107979 (TRAV30, TRAJ24)
CGTAIVDADSWGKFQF

SEQ ID NO: 215958 - protein, 14 aa, Homo sapiens
  CDR3 for beta chain variable domain of TCR clone 107979 (TRBV12-5, TRBJ2-5)
CASGSRTHQETRYF

SEQ ID NO: 215959 - protein, 18 aa, Homo sapiens
  CDR3 for alpha chain variable domain of TCR clone 107980 (TRAV26-1, TRAJ5)
CIVRVVPPRDTGRRALTF

SEQ ID NO: 215960 - protein, 15 aa, Homo sapiens
  CDR3 for beta chain variable domain of TCR clone 107980 (TRBV7-9, TRBJ2-7)
CASSLPMGQSNEQYF

SEQ ID NO: 215961 - protein, 13 aa, Homo sapiens
  CDR3 for alpha chain variable domain of TCR clone 107981 (TRAV8-6, TRAJ21)
CAVSPSSLNKFYF

SEQ ID NO: 215962 - protein, 14 aa, Homo sapiens
  CDR3 for beta chain variable domain of TCR clone 107981 (TRBV7-9, TRBJ2-5)
CASSLDTAQETQFF

SEQ ID NO: 215963 - protein, 14 aa, Homo sapiens
  CDR3 for alpha chain variable domain of TCR clone 107982 (TRAV13-1, TRAJ44)
CAAKATGTASKLTF

SEQ ID NO: 215964 - protein, 17 aa, Homo sapiens
  CDR3 for beta chain variable domain of TCR clone 107982 (TRBV7-3, TRBJ2-3)
RASSLIKRMRGADTQYF

SEQ ID NO: 215965 - protein, 17 aa, Homo sapiens
  CDR3 for alpha chain variable domain of TCR clone 107983 (TRAV9-2, TRAJ45)
CALSGYYSGGGADGLTF

SEQ ID NO: 215966 - protein, 12 aa, Homo sapiens
  CDR3 for beta chain variable domain of TCR clone 107983 (TRBV11-2, TRBJ2-2)
CASSLGGGELFF

SEQ ID NO: 215967 - protein, 12 aa, Homo sapiens
  CDR3 for alpha chain variable domain of TCR clone 107984 (TRAV21, TRAJ33)
CAKMDSNYQLIW

SEQ ID NO: 215968 - protein, 22 aa, Homo sapiens
  CDR3 for beta chain variable domain of TCR clone 107984 (TRBV11-2, TRBJ1-4)
CASSLDITRRGIPRKDNEKLFF

SEQ ID NO: 215969 - protein, 18 aa, Homo sapiens
  CDR3 for alpha chain variable domain of TCR clone 107985 (TRAV13-1, TRAJ52)
CAAKNPNAGGTSYGKLTF

SEQ ID NO: 215970 - protein, 15 aa, Homo sapiens
  CDR3 for beta chain variable domain of TCR clone 107985 (TRBV19, TRBJ2-1)
CASTPVGGGYNEQFF

SEQ ID NO: 215971 - protein, 12 aa, Homo sapiens
  CDR3 for alpha chain variable domain of TCR clone 107986 (TRAV13-1, TRAJ48)
CAANFGNEKLTF

SEQ ID NO: 215972 - protein, 12 aa, Homo sapiens
  CDR3 for beta chain variable domain of TCR clone 107986 (TRBV7-9, TRBJ2-7)
CASSIKREEQYF

SEQ ID NO: 215973 - protein, 15 aa, Homo sapiens
  CDR3 for alpha chain variable domain of TCR clone 107987 (TRAV12-2, TRAJ57)
CAVSRGQGGSEKLVF

SEQ ID NO: 215974 - protein, 14 aa, Homo sapiens
  CDR3 for beta chain variable domain of TCR clone 107987 (TRBV20-1, TRBJ2-1)
CSAHPGLPYNEQFL

SEQ ID NO: 215975 - protein, 15 aa, Homo sapiens
  CDR3 for alpha chain variable domain of TCR clone 107988 (TRAV3, TRAJ13)
CAVRVYSGGYQKVTF

SEQ ID NO: 215976 - protein, 14 aa, Homo sapiens
  CDR3 for beta chain variable domain of TCR clone 107988 (TRBV28, TRBJ1-5)
CASSGQALYQPQHF

SEQ ID NO: 215977 - protein, 19 aa, Homo sapiens
  CDR3 for alpha chain variable domain of TCR clone 107989 (TRAV1-2, TRAJ26)
CLLPLCCERPDNYGQNFVF

SEQ ID NO: 215978 - protein, 17 aa, Homo sapiens
  CDR3 for beta chain variable domain of TCR clone 107989 (TRBV7-2, TRBJ2-3)
CASSLAGGLAGTAGQYF

SEQ ID NO: 215979 - protein, 12 aa, Homo sapiens
  CDR3 for alpha chain variable domain of TCR clone 107990 (TRAV23/DV6, TRAJ30)
CVASKGDDKIIF

SEQ ID NO: 215980 - protein, 18 aa, Homo sapiens
  CDR3 for beta chain variable domain of TCR clone 107990 (TRBV10-3, TRBJ2-3)
CAISESRVGPMRGDTQYF

SEQ ID NO: 215981 - protein, 12 aa, Homo sapiens
  CDR3 for alpha chain variable domain of TCR clone 107991 (TRAV25, TRAJ11)
CAGASGYSTLTF

SEQ ID NO: 215982 - protein, 14 aa, Homo sapiens
  CDR3 for beta chain variable domain of TCR clone 107991 (TRBV19, TRBJ2-5)
CASSMTGQQETQYF

SEQ ID NO: 215983 - protein, 19 aa, Homo sapiens
  CDR3 for alpha chain variable domain of TCR clone 107992 (TRAV2, TRAJ32)
TTVLSTPPSQGGATTKLIF

SEQ ID NO: 215984 - protein, 12 aa, Homo sapiens
  CDR3 for beta chain variable domain of TCR clone 107992 (TRBV20-1, TRBJ2-7)
CSAITPTKEQYF

SEQ ID NO: 215985 - protein, 14 aa, Homo sapiens
  CDR3 for alpha chain variable domain of TCR clone 107993 (TRAV1-2, TRAJ8)
CAVREDTGFQKLVF

SEQ ID NO: 215986 - protein, 16 aa, Homo sapiens
  CDR3 for beta chain variable domain of TCR clone 107993 (TRBV20-1, TRBJ1-5)
CSASRGTGYSNQPQHF

SEQ ID NO: 215987 - protein, 14 aa, Homo sapiens
  CDR3 for alpha chain variable domain of TCR clone 107994 (TRAV12-3, TRAJ10)
SHLPLTGGGNKLTF

SEQ ID NO: 215988 - protein, 12 aa, Homo sapiens
  CDR3 for beta chain variable domain of TCR clone 107994 (TRBV20-1, TRBJ2-1)
CSARLGTDEQFF

SEQ ID NO: 215989 - protein, 15 aa, Homo sapiens
  CDR3 for alpha chain variable domain of TCR clone 107995 (TRAV12-2, TRAJ53)
CAVNGGGGSNYKPTF

SEQ ID NO: 215990 - protein, 17 aa, Homo sapiens
  CDR3 for beta chain variable domain of TCR clone 107995 (TRBV7-3, TRBJ2-3)
RASSLMKRMRGADTQYF

SEQ ID NO: 215991 - protein, 15 aa, Homo sapiens
  CDR3 for alpha chain variable domain of TCR clone 107996 (TRAV26-1, TRAJ40)
CIDRYATSGTYKYIF

SEQ ID NO: 215992 - protein, 11 aa, Homo sapiens
  CDR3 for beta chain variable domain of TCR clone 107996 (TRBV7-9, TRBJ2-1)
CASSSQNGQFF

SEQ ID NO: 215993 - protein, 10 aa, Homo sapiens
  CDR3 for alpha chain variable domain of TCR clone 107997 (TRAV36/DV7, TRAJ48)
CAVGNEKLTF

SEQ ID NO: 215994 - protein, 16 aa, Homo sapiens
  CDR3 for beta chain variable domain of TCR clone 107997 (TRBV19, TRBJ1-6)
CASSVAPVAGNSPLHF

SEQ ID NO: 215995 - protein, 11 aa, Homo sapiens
  CDR3 for alpha chain variable domain of TCR clone 107998 (TRAV21, TRAJ33)
CSVLSNYQLIW

SEQ ID NO: 215996 - protein, 15 aa, Homo sapiens
  CDR3 for beta chain variable domain of TCR clone 107998 (TRBV11-2, TRBJ2-7)
CASSLMVGGSYEQYF

SEQ ID NO: 215997 - protein, 15 aa, Homo sapiens
  CDR3 for alpha chain variable domain of TCR clone 107999 (TRAV26-1, TRAJ17)
CIVRVVKAAGNKLTF

SEQ ID NO: 215998 - protein, 16 aa, Homo sapiens
  CDR3 for beta chain variable domain of TCR clone 107999 (TRBV7-9, TRBJ2-1)
CASSLGSGPSYNEQFF

SEQ ID NO: 215999 - protein, 18 aa, Homo sapiens
  CDR3 for alpha chain variable domain of TCR clone 108000 (TRAV13-1, TRAJ52)
CAAKNPNAGGTSYGKLTF

SEQ ID NO: 216000 - protein, 17 aa, Homo sapiens
  CDR3 for beta chain variable domain of TCR clone 108000 (TRBV20-1, TRBJ2-1)
CSARDPLAGVWDNEQFF

SEQ ID NO: 216001 - protein, 12 aa, Homo sapiens
  CDR3 for alpha chain variable domain of TCR clone 108001 (TRAV12-2, TRAJ20)
CAVRPSDYKLSF

SEQ ID NO: 216002 - protein, 14 aa, Homo sapiens
  CDR3 for beta chain variable domain of TCR clone 108001 (TRBV25-1, TRBJ1-1)
CASTHLGGNTEAFF

SEQ ID NO: 216003 - protein, 12 aa, Homo sapiens
  CDR3 for alpha chain variable domain of TCR clone 108002 (TRAV1-2, TRAJ26)
CAVRYYGQNFVF

SEQ ID NO: 216004 - protein, 17 aa, Homo sapiens
  CDR3 for beta chain variable domain of TCR clone 108002 (TRBV7-2, TRBJ2-3)
CASSSYSGTRRADTQYF

SEQ ID NO: 216005 - protein, 12 aa, Homo sapiens
  CDR3 for alpha chain variable domain of TCR clone 108003 (TRAV12-3, TRAJ17)
CVMTLTGNKLTF

SEQ ID NO: 216006 - protein, 15 aa, Homo sapiens
  CDR3 for beta chain variable domain of TCR clone 108003 (TRBV20-1, TRBJ2-7)
CGARDRVSGMDEQYF

SEQ ID NO: 216007 - protein, 13 aa, Homo sapiens
  CDR3 for alpha chain variable domain of TCR clone 108004 (TRAV8-6, TRAJ49)
CAVITNTGNQFYF

SEQ ID NO: 216008 - protein, 18 aa, Homo sapiens
  CDR3 for beta chain variable domain of TCR clone 108004 (TRBV18, TRBJ2-3)
CASSYTSGAAGGTDTQYF

SEQ ID NO: 216009 - protein, 15 aa, Homo sapiens
  CDR3 for alpha chain variable domain of TCR clone 108005 (TRAV17, TRAJ45)
TSVLRTGGGADGLTF

SEQ ID NO: 216010 - protein, 15 aa, Homo sapiens
  CDR3 for beta chain variable domain of TCR clone 108005 (TRBV5-7, TRBJ1-5)
CASSYCKLWDQPQHF

SEQ ID NO: 216011 - protein, 14 aa, Homo sapiens
  CDR3 for alpha chain variable domain of TCR clone 108006 (TRAV17, TRAJ57)
CATDPQGGSEKLVF

SEQ ID NO: 216012 - protein, 14 aa, Homo sapiens
  CDR3 for beta chain variable domain of TCR clone 108006 (TRBV20-1, TRBJ2-3)
RTSGGPGTTDTQYF

SEQ ID NO: 216013 - protein, 16 aa, Homo sapiens
  CDR3 for alpha chain variable domain of TCR clone 108007 (TRAV38-1, TRAJ49)
CAFMKHVSGPGNQFYF

SEQ ID NO: 216014 - protein, 14 aa, Homo sapiens
  CDR3 for beta chain variable domain of TCR clone 108007 (TRBV7-9, TRBJ2-1)
CASRGTGAYNEQFF

SEQ ID NO: 216015 - protein, 13 aa, Homo sapiens
  CDR3 for alpha chain variable domain of TCR clone 108008 (TRAV8-3, TRAJ37)
CALPSSNTGKLIF

SEQ ID NO: 216016 - protein, 12 aa, Homo sapiens
  CDR3 for beta chain variable domain of TCR clone 108008 (TRBV11-2, TRBJ2-1)
CASSPGNNEQFF

SEQ ID NO: 216017 - protein, 14 aa, Homo sapiens
  CDR3 for alpha chain variable domain of TCR clone 108009 (TRAV26-1, TRAJ52)
CIPAGGTSYGKLTF

SEQ ID NO: 216018 - protein, 13 aa, Homo sapiens
  CDR3 for beta chain variable domain of TCR clone 108009 (TRBV7-2, TRBJ2-7)
CASSSPSGSEQYF

SEQ ID NO: 216019 - protein, 12 aa, Homo sapiens
  CDR3 for alpha chain variable domain of TCR clone 108010 (TRAV26-1, TRAJ31)
CIVRSINARLMF

SEQ ID NO: 216020 - protein, 14 aa, Homo sapiens
  CDR3 for beta chain variable domain of TCR clone 108010 (TRBV6-3, TRBJ1-1)
CASSYQRRDTEAFF

SEQ ID NO: 216021 - protein, 14 aa, Homo sapiens
  CDR3 for alpha chain variable domain of TCR clone 108011 (TRAV12-2, TRAJ13)
CAAKKTGGYQKVTF

SEQ ID NO: 216022 - protein, 16 aa, Homo sapiens
  CDR3 for beta chain variable domain of TCR clone 108011 (TRBV20-1, TRBJ1-2)
CSASMGQGVANYGYTF

SEQ ID NO: 216023 - protein, 14 aa, Homo sapiens
  CDR3 for alpha chain variable domain of TCR clone 108012 (TRAV8-6, TRAJ13)
CAVFSSGGYQKVTF

SEQ ID NO: 216024 - protein, 14 aa, Homo sapiens
  CDR3 for beta chain variable domain of TCR clone 108012 (TRBV7-2, TRBJ2-5)
CASSPRGSSETQYF

SEQ ID NO: 216025 - protein, 14 aa, Homo sapiens
  CDR3 for alpha chain variable domain of TCR clone 108013 (TRAV38-1, TRAJ40)
CALRPTSGTYKYIF

SEQ ID NO: 216026 - protein, 16 aa, Homo sapiens
  CDR3 for beta chain variable domain of TCR clone 108013 (TRBV2, TRBJ1-4)
CASNLLQGATNEKLFF

SEQ ID NO: 216027 - protein, 13 aa, Homo sapiens
  CDR3 for alpha chain variable domain of TCR clone 108014 (TRAV13-1, TRAJ43)
CAASKNNNNEMRF

SEQ ID NO: 216028 - protein, 14 aa, Homo sapiens
  CDR3 for beta chain variable domain of TCR clone 108014 (TRBV14, TRBJ2-1)
CASSQVQGRGEQFF

SEQ ID NO: 216029 - protein, 14 aa, Homo sapiens
  CDR3 for alpha chain variable domain of TCR clone 108015 (TRAV1-2, TRAJ8)
CAVREDTGFQKLVF

SEQ ID NO: 216030 - protein, 18 aa, Homo sapiens
  CDR3 for beta chain variable domain of TCR clone 108015 (TRBV11-2, TRBJ2-3)
CAGSLGGASRGAPNTQYF

SEQ ID NO: 216031 - protein, 15 aa, Homo sapiens
  CDR3 for alpha chain variable domain of TCR clone 108016 (TRAV3, TRAJ9)
CAVRARNTGGFKTIF

SEQ ID NO: 216032 - protein, 13 aa, Homo sapiens
  CDR3 for beta chain variable domain of TCR clone 108016 (TRBV19, TRBJ1-2)
CASSVPGQDGYTF

SEQ ID NO: 216033 - protein, 12 aa, Homo sapiens
  CDR3 for alpha chain variable domain of TCR clone 108017 (TRAV21, TRAJ27)
CAANTNAGKSTF

SEQ ID NO: 216034 - protein, 13 aa, Homo sapiens
  CDR3 for beta chain variable domain of TCR clone 108017 (TRBV7-3, TRBJ1-1)
CASSQDWGAEASF

SEQ ID NO: 216035 - protein, 13 aa, Homo sapiens
  CDR3 for alpha chain variable domain of TCR clone 108018 (TRAV26-2, TRAJ43)
CILRAVNNNDMRF

SEQ ID NO: 216036 - protein, 15 aa, Homo sapiens
  CDR3 for beta chain variable domain of TCR clone 108018 (TRBV7-2, TRBJ2-1)
CASTHGTGIYYEQFF

SEQ ID NO: 216037 - protein, 14 aa, Homo sapiens
  CDR3 for alpha chain variable domain of TCR clone 108019 (TRAV1-2, TRAJ16)
CAVNRFSDGQKLLF

SEQ ID NO: 216038 - protein, 11 aa, Homo sapiens
  CDR3 for beta chain variable domain of TCR clone 108019 (TRBV11-2, TRBJ2-2)
CASSLPGEPFF

SEQ ID NO: 216039 - protein, 12 aa, Homo sapiens
  CDR3 for alpha chain variable domain of TCR clone 108020 (TRAV21, TRAJ29)
CAVTSGNTPLVF

SEQ ID NO: 216040 - protein, 15 aa, Homo sapiens
  CDR3 for beta chain variable domain of TCR clone 108020 (TRBV12-4, TRBJ1-2)
CASRLGVAGKYGYTF

SEQ ID NO: 216041 - protein, 13 aa, Homo sapiens
  CDR3 for alpha chain variable domain of TCR clone 108021 (TRAV12-3, TRAJ9)
SAMRNTGGFKTIF

SEQ ID NO: 216042 - protein, 14 aa, Homo sapiens
  CDR3 for beta chain variable domain of TCR clone 108021 (TRBV11-2, TRBJ2-7)
CASSSTGEGYEQYF

SEQ ID NO: 216043 - protein, 14 aa, Homo sapiens
  CDR3 for alpha chain variable domain of TCR clone 108022 (TRAV23/DV6, TRAJ4)
CAANLSGGYNQLIF

SEQ ID NO: 216044 - protein, 11 aa, Homo sapiens
  CDR3 for beta chain variable domain of TCR clone 108022 (TRBV7-9, TRBJ2-3)
CASSPTDTQYF

SEQ ID NO: 216045 - protein, 17 aa, Homo sapiens
  CDR3 for alpha chain variable domain of TCR clone 108023 (TRAV17, TRAJ7)
CATLGRLAFGKGNQVVV

SEQ ID NO: 216046 - protein, 13 aa, Homo sapiens
  CDR3 for beta chain variable domain of TCR clone 108023 (TRBV12-4, TRBJ2-7)
CASSLERVRGQYF

SEQ ID NO: 216047 - protein, 14 aa, Homo sapiens
  CDR3 for alpha chain variable domain of TCR clone 108024 (TRAV12-2, TRAJ13)
CAVKKTGGYQKVTF

SEQ ID NO: 216048 - protein, 12 aa, Homo sapiens
  CDR3 for beta chain variable domain of TCR clone 108024 (TRBV28, TRBJ2-7)
CASSFSSYEQYF

SEQ ID NO: 216049 - protein, 18 aa, Homo sapiens
  CDR3 for alpha chain variable domain of TCR clone 108025 (TRAV21, TRAJ52)
CAVRPSPAGGTSYGKLTF

SEQ ID NO: 216050 - protein, 13 aa, Homo sapiens
  CDR3 for beta chain variable domain of TCR clone 108025 (TRBV10-3, TRBJ2-7)
CASKLAMNYEQYF

SEQ ID NO: 216051 - protein, 14 aa, Homo sapiens
  CDR3 for alpha chain variable domain of TCR clone 108026 (TRAV8-4, TRAJ13)
CAVTLSGGYQKVTF

SEQ ID NO: 216052 - protein, 15 aa, Homo sapiens
  CDR3 for beta chain variable domain of TCR clone 108026 (TRBV15, TRBJ1-4)
CATSRDMGSYEKLFF

SEQ ID NO: 216053 - protein, 14 aa, Homo sapiens
  CDR3 for alpha chain variable domain of TCR clone 108027 (TRAV17, TRAJ57)
CATDPQGGSEKLVF

SEQ ID NO: 216054 - protein, 13 aa, Homo sapiens
  CDR3 for beta chain variable domain of TCR clone 108027 (TRBV6-1, TRBJ1-1)
CASSRQGNTEAFF

SEQ ID NO: 216055 - protein, 13 aa, Homo sapiens
  CDR3 for alpha chain variable domain of TCR clone 108028 (TRAV13-1, TRAJ12)
CAASPDSSYNLIF

SEQ ID NO: 216056 - protein, 16 aa, Homo sapiens
  CDR3 for beta chain variable domain of TCR clone 108028 (TRBV15, TRBJ2-1)
CATSRERLAGAYEQFF

SEQ ID NO: 216057 - protein, 11 aa, Homo sapiens
  CDR3 for alpha chain variable domain of TCR clone 108029 (TRAV13-2, TRAJ15)
CVLRAGTALIF

SEQ ID NO: 216058 - protein, 16 aa, Homo sapiens
  CDR3 for beta chain variable domain of TCR clone 108029 (TRBV24-1, TRBJ2-2)
CATSDSSPGLGVELFF

SEQ ID NO: 216059 - protein, 11 aa, Homo sapiens
  CDR3 for alpha chain variable domain of TCR clone 108030 (TRAV1-1, TRAJ23)
CAVRQGGKLIF

SEQ ID NO: 216060 - protein, 20 aa, Homo sapiens
  CDR3 for beta chain variable domain of TCR clone 108030 (TRBV7-8, TRBJ2-2)
CASSHLFPGPAIHITGEPFF

SEQ ID NO: 216061 - protein, 15 aa, Homo sapiens
  CDR3 for alpha chain variable domain of TCR clone 108031 (TRAV13-1, TRAJ8)
CAASIPNTGFQKLVF

SEQ ID NO: 216062 - protein, 16 aa, Homo sapiens
  CDR3 for beta chain variable domain of TCR clone 108031 (TRBV11-2, TRBJ2-7)
CASSPLAGGPRYEQYF

SEQ ID NO: 216063 - protein, 13 aa, Homo sapiens
  CDR3 for alpha chain variable domain of TCR clone 108032 (TRAV8-3, TRAJ36)
CAVGATGAHNLFF

SEQ ID NO: 216064 - protein, 15 aa, Homo sapiens
  CDR3 for beta chain variable domain of TCR clone 108032 (TRBV27, TRBJ1-5)
CASTFNRGSNQPQHF

SEQ ID NO: 216065 - protein, 12 aa, Homo sapiens
  CDR3 for alpha chain variable domain of TCR clone 108033 (TRAV12-2, TRAJ7)
CAVMRGSNRLAF

SEQ ID NO: 216066 - protein, 12 aa, Homo sapiens
  CDR3 for beta chain variable domain of TCR clone 108033 (TRBV7-8, TRBJ2-7)
CASSLGDREQYF

SEQ ID NO: 216067 - protein, 14 aa, Homo sapiens
  CDR3 for alpha chain variable domain of TCR clone 108034 (TRAV1-2, TRAJ16)
CAVNRFSDGQKLLF

SEQ ID NO: 216068 - protein, 15 aa, Homo sapiens
  CDR3 for beta chain variable domain of TCR clone 108034 (TRBV7-9, TRBJ2-7)
CASSPGGGLTYEQYF

SEQ ID NO: 216069 - protein, 11 aa, Homo sapiens
  CDR3 for alpha chain variable domain of TCR clone 108035 (TRAV21, TRAJ48)
CAVDGNEKLTF

SEQ ID NO: 216070 - protein, 15 aa, Homo sapiens
  CDR3 for beta chain variable domain of TCR clone 108035 (TRBV5-1, TRBJ2-5)
CASSFKGGDQETQYF

SEQ ID NO: 216071 - protein, 11 aa, Homo sapiens
  CDR3 for alpha chain variable domain of TCR clone 108036 (TRAV2, TRAJ13)
CASGGYQKVTF

SEQ ID NO: 216072 - protein, 15 aa, Homo sapiens
  CDR3 for beta chain variable domain of TCR clone 108036 (TRBV11-3, TRBJ2-5)
CASSDTSGGIETQYF

SEQ ID NO: 216073 - protein, 11 aa, Homo sapiens
  CDR3 for alpha chain variable domain of TCR clone 108037 (TRAV4, TRAJ28)
CLVGDDRAETL

SEQ ID NO: 216074 - protein, 13 aa, Homo sapiens
  CDR3 for beta chain variable domain of TCR clone 108037 (TRBV20-1, TRBJ2-7)
CSATHTSGYEQYF

SEQ ID NO: 216075 - protein, 15 aa, Homo sapiens
  CDR3 for alpha chain variable domain of TCR clone 108038 (TRAV12-3, TRAJ27)
CAMRAYNTNAGKSTF

SEQ ID NO: 216076 - protein, 19 aa, Homo sapiens
  CDR3 for beta chain variable domain of TCR clone 108038 (TRBV25-1, TRBJ2-2)
CAILVYRVDRGRKTGELFF

SEQ ID NO: 216077 - protein, 15 aa, Homo sapiens
  CDR3 for alpha chain variable domain of TCR clone 108039 (TRAV13-1, TRAJ32)
CAASIYGGATNKLIL

SEQ ID NO: 216078 - protein, 17 aa, Homo sapiens
  CDR3 for beta chain variable domain of TCR clone 108039 (TRBV7-3, TRBJ2-5)
CASSLGSGRSGSETQYF

SEQ ID NO: 216079 - protein, 13 aa, Homo sapiens
  CDR3 for alpha chain variable domain of TCR clone 108040 (TRAV8-6, TRAJ8)
CAVSNTGFQKLVF

SEQ ID NO: 216080 - protein, 14 aa, Homo sapiens
  CDR3 for beta chain variable domain of TCR clone 108040 (TRBV20-1, TRBJ2-5)
CSARDGRAGETQYF

SEQ ID NO: 216081 - protein, 15 aa, Homo sapiens
  CDR3 for alpha chain variable domain of TCR clone 108041 (TRAV3, TRAJ47)
CAVRDIGEYGNKLVF

SEQ ID NO: 216082 - protein, 17 aa, Homo sapiens
  CDR3 for beta chain variable domain of TCR clone 108041 (TRBV11-2, TRBJ2-1)
CASSLYPPGVEYNEQFF

SEQ ID NO: 216083 - protein, 14 aa, Homo sapiens
  CDR3 for alpha chain variable domain of TCR clone 108042 (TRAV26-1, TRAJ38)
CIADNAGNNRKLIW

SEQ ID NO: 216084 - protein, 15 aa, Homo sapiens
  CDR3 for beta chain variable domain of TCR clone 108042 (TRBV9, TRBJ2-1)
CARSLAGSSYNEQFF

SEQ ID NO: 216085 - protein, 19 aa, Homo sapiens
  CDR3 for alpha chain variable domain of TCR clone 108043 (TRAV2, TRAJ20)
ILQVREADAAVYRDCKLSF

SEQ ID NO: 216086 - protein, 14 aa, Homo sapiens
  CDR3 for beta chain variable domain of TCR clone 108043 (TRBV6-1, TRBJ1-3)
CASVQGGGGNTMYF

SEQ ID NO: 216087 - protein, 11 aa, Homo sapiens
  CDR3 for alpha chain variable domain of TCR clone 108044 (TRAV21, TRAJ34)
CAVTNTDKLIF

SEQ ID NO: 216088 - protein, 15 aa, Homo sapiens
  CDR3 for beta chain variable domain of TCR clone 108044 (TRBV7-2, TRBJ2-5)
CASSFLRGGEETQYF

SEQ ID NO: 216089 - protein, 14 aa, Homo sapiens
  CDR3 for alpha chain variable domain of TCR clone 108045 (TRAV1-2, TRAJ16)
CAVNRVSDGQKLLF

SEQ ID NO: 216090 - protein, 14 aa, Homo sapiens
  CDR3 for beta chain variable domain of TCR clone 108045 (TRBV13, TRBJ2-5)
CASSLGRGQETQYF

SEQ ID NO: 216091 - protein, 15 aa, Homo sapiens
  CDR3 for alpha chain variable domain of TCR clone 108046 (TRAV38-1, TRAJ37)
CAFIHGSGNTGELIF

SEQ ID NO: 216092 - protein, 12 aa, Homo sapiens
  CDR3 for beta chain variable domain of TCR clone 108046 (TRBV7-9, TRBJ2-7)
CASSFGSYEQYF

SEQ ID NO: 216093 - protein, 13 aa, Homo sapiens
  CDR3 for alpha chain variable domain of TCR clone 108047 (TRAV3, TRAJ27)
CAVRPLGAGKSTF

SEQ ID NO: 216094 - protein, 14 aa, Homo sapiens
  CDR3 for beta chain variable domain of TCR clone 108047 (TRBV4-1, TRBJ2-2)
CASSQAVNTGELFF

SEQ ID NO: 216095 - protein, 15 aa, Homo sapiens
  CDR3 for alpha chain variable domain of TCR clone 108048 (TRAV12-2, TRAJ53)
CAVNGGGGSNYKLTF

SEQ ID NO: 216096 - protein, 12 aa, Homo sapiens
  CDR3 for beta chain variable domain of TCR clone 108048 (TRBV11-2, TRBJ2-2)
CASSLGGGELFS

SEQ ID NO: 216097 - protein, 15 aa, Homo sapiens
  CDR3 for alpha chain variable domain of TCR clone 108049 (TRAV26-1, TRAJ56)
CIVRVATGANSKLTF

SEQ ID NO: 216098 - protein, 15 aa, Homo sapiens
  CDR3 for beta chain variable domain of TCR clone 108049 (TRBV27, TRBJ2-7)
CASSPQRGGQREQYF

SEQ ID NO: 216099 - protein, 10 aa, Homo sapiens
  CDR3 for alpha chain variable domain of TCR clone 108050 (TRAV2, TRAJ15)
RGQAGTALIF

SEQ ID NO: 216100 - protein, 14 aa, Homo sapiens
  CDR3 for beta chain variable domain of TCR clone 108050 (TRBV2, TRBJ2-3)
CASSEGQNTDTQYF

SEQ ID NO: 216101 - protein, 12 aa, Homo sapiens
  CDR3 for alpha chain variable domain of TCR clone 108051 (TRAV8-3, TRAJ26)
CAGDNYGQNFAF

SEQ ID NO: 216102 - protein, 13 aa, Homo sapiens
  CDR3 for beta chain variable domain of TCR clone 108051 (TRBV20-1, TRBJ1-1)
CSAPLGGGTEAFF

SEQ ID NO: 216103 - protein, 18 aa, Homo sapiens
  CDR3 for alpha chain variable domain of TCR clone 108052 (TRAV21, TRAJ52)
CAVRPSPAGGTSYGKLTF

SEQ ID NO: 216104 - protein, 17 aa, Homo sapiens
  CDR3 for beta chain variable domain of TCR clone 108052 (TRBV15, TRBJ1-5)
CATSRAPPGTRNQPQHF

SEQ ID NO: 216105 - protein, 15 aa, Homo sapiens
  CDR3 for alpha chain variable domain of TCR clone 108053 (TRAV12-1, TRAJ41)
CVVNGASNSGYALNF

SEQ ID NO: 216106 - protein, 15 aa, Homo sapiens
  CDR3 for beta chain variable domain of TCR clone 108053 (TRBV7-2, TRBJ1-5)
CASSSTGVDNRPQHF

SEQ ID NO: 216107 - protein, 14 aa, Homo sapiens
  CDR3 for alpha chain variable domain of TCR clone 108054 (TRAV13-1, TRAJ22)
CAASYSGSARQLTF

SEQ ID NO: 216108 - protein, 13 aa, Homo sapiens
  CDR3 for beta chain variable domain of TCR clone 108054 (TRBV6-3, TRBJ1-2)
CASSLTGDYGYAF

SEQ ID NO: 216109 - protein, 15 aa, Homo sapiens
  CDR3 for alpha chain variable domain of TCR clone 108055 (TRAV12-2, TRAJ57)
CAVSRGKGGSEKLVF

SEQ ID NO: 216110 - protein, 14 aa, Homo sapiens
  CDR3 for beta chain variable domain of TCR clone 108055 (TRBV20-1, TRBJ2-1)
CSAHPGLPYNEQFF

SEQ ID NO: 216111 - protein, 15 aa, Homo sapiens
  CDR3 for alpha chain variable domain of TCR clone 108056 (TRAV16, TRAJ12)
CSKWPLRDSSYKLIF

SEQ ID NO: 216112 - protein, 14 aa, Homo sapiens
  CDR3 for beta chain variable domain of TCR clone 108056 (TRBV25-1, TRBJ1-1)
CASTHLGGNTEAFF

SEQ ID NO: 216113 - protein, 16 aa, Homo sapiens
  CDR3 for alpha chain variable domain of TCR clone 108057 (TRAV12-3, TRAJ53)
CAMSPGSGGSNYKLTF

SEQ ID NO: 216114 - protein, 14 aa, Homo sapiens
  CDR3 for beta chain variable domain of TCR clone 108057 (TRBV7-2, TRBJ1-1)
CASSFLTGTTGAFF

SEQ ID NO: 216115 - protein, 15 aa, Homo sapiens
  CDR3 for alpha chain variable domain of TCR clone 108058 (TRAV26-1, TRAJ42)
CIVIVKGGSQGNLIF

SEQ ID NO: 216116 - protein, 14 aa, Homo sapiens
  CDR3 for beta chain variable domain of TCR clone 108058 (TRBV19, TRBJ2-2)
CATTGHANTGELFF

SEQ ID NO: 216117 - protein, 13 aa, Homo sapiens
  CDR3 for alpha chain variable domain of TCR clone 108059 (TRAV23/DV6, TRAJ12)
CSPRVDSSYKLIF

SEQ ID NO: 216118 - protein, 12 aa, Homo sapiens
  CDR3 for beta chain variable domain of TCR clone 108059 (TRBV7-6, TRBJ2-5)
CASSLSQETQYF

SEQ ID NO: 216119 - protein, 14 aa, Homo sapiens
  CDR3 for alpha chain variable domain of TCR clone 108060 (TRAV3, TRAJ21)
CAVRDAYNFNKFYF

SEQ ID NO: 216120 - protein, 17 aa, Homo sapiens
  CDR3 for beta chain variable domain of TCR clone 108060 (TRBV20-1, TRBJ1-6)
CSARGGCTFSYNSPLHF

SEQ ID NO: 216121 - protein, 11 aa, Homo sapiens
  CDR3 for alpha chain variable domain of TCR clone 108061 (TRAV2, TRAJ33)
CAEESNYQLIW

SEQ ID NO: 216122 - protein, 15 aa, Homo sapiens
  CDR3 for beta chain variable domain of TCR clone 108061 (TRBV19, TRBJ1-1)
CASTSGQIQNTEAFF

SEQ ID NO: 216123 - protein, 14 aa, Homo sapiens
  CDR3 for alpha chain variable domain of TCR clone 108062 (TRAV1-2, TRAJ8)
CAMREDTGFQKLVF

SEQ ID NO: 216124 - protein, 15 aa, Homo sapiens
  CDR3 for beta chain variable domain of TCR clone 108062 (TRBV6-3, TRBJ2-7)
CASSSPGTAFYEQYF

SEQ ID NO: 216125 - protein, 12 aa, Homo sapiens
  CDR3 for alpha chain variable domain of TCR clone 108063 (TRAV16, TRAJ27)
CALNHQCRQINL

SEQ ID NO: 216126 - protein, 14 aa, Homo sapiens
  CDR3 for beta chain variable domain of TCR clone 108063 (TRBV11-2, TRBJ1-5)
CDSSLDRGRQPQHF

SEQ ID NO: 216127 - protein, 13 aa, Homo sapiens
  CDR3 for alpha chain variable domain of TCR clone 108064 (TRAV12-2, TRAJ6)
CAVNVSRKLHTYL

SEQ ID NO: 216128 - protein, 12 aa, Homo sapiens
  CDR3 for beta chain variable domain of TCR clone 108064 (TRBV29-1, TRBJ2-3)
CSVTGGADTQYF

SEQ ID NO: 216129 - protein, 15 aa, Homo sapiens
  CDR3 for alpha chain variable domain of TCR clone 108065 (TRAV8-3, TRAJ45)
CASSYSGGGADGLTF

SEQ ID NO: 216130 - protein, 17 aa, Homo sapiens
  CDR3 for beta chain variable domain of TCR clone 108065 (TRBV7-8, TRBJ1-2)
CASSLRTLQGHLYGYTF

SEQ ID NO: 216131 - protein, 14 aa, Homo sapiens
  CDR3 for alpha chain variable domain of TCR clone 108066 (TRAV27, TRAJ36)
GAGPPKRGANNLFF

SEQ ID NO: 216132 - protein, 15 aa, Homo sapiens
  CDR3 for beta chain variable domain of TCR clone 108066 (TRBV18, TRBJ2-7)
CASSPASTPNYEQYF

SEQ ID NO: 216133 - protein, 16 aa, Homo sapiens
  CDR3 for alpha chain variable domain of TCR clone 108067 (TRAV12-3, TRAJ53)
CAMSPGSGGSNYKLTF

SEQ ID NO: 216134 - protein, 16 aa, Homo sapiens
  CDR3 for beta chain variable domain of TCR clone 108067 (TRBV4-2, TRBJ1-1)
CAGSQAGFGMNTEAFF

SEQ ID NO: 216135 - protein, 15 aa, Homo sapiens
  CDR3 for alpha chain variable domain of TCR clone 108068 (TRAV8-3, TRAJ45)
CASSYSGGGADGLTF

SEQ ID NO: 216136 - protein, 14 aa, Homo sapiens
  CDR3 for beta chain variable domain of TCR clone 108068 (TRBV7-2, TRBJ2-5)
CASSLGQGVKTQYF

SEQ ID NO: 216137 - protein, 14 aa, Homo sapiens
  CDR3 for alpha chain variable domain of TCR clone 108069 (TRAV35, TRAJ50)
CAGHRKPSYDKVIF

SEQ ID NO: 216138 - protein, 13 aa, Homo sapiens
  CDR3 for beta chain variable domain of TCR clone 108069 (TRBV7-7, TRBJ2-3)
CASSLSRADTQYF

SEQ ID NO: 216139 - protein, 15 aa, Homo sapiens
  CDR3 for alpha chain variable domain of TCR clone 108070 (TRAV8-4, TRAJ7)
CAVSGGNYGNNRLAF

SEQ ID NO: 216140 - protein, 18 aa, Homo sapiens
  CDR3 for beta chain variable domain of TCR clone 108070 (TRBV12-4, TRBJ2-2)
CASSLVAGTRGRTGELFF

SEQ ID NO: 216141 - protein, 16 aa, Homo sapiens
  CDR3 for alpha chain variable domain of TCR clone 108071 (TRAV12-2, TRAJ32)
CAVNMNYGGAANKLIF

SEQ ID NO: 216142 - protein, 16 aa, Homo sapiens
  CDR3 for beta chain variable domain of TCR clone 108071 (TRBV7-8, TRBJ2-3)
CASSTEGQRETDTQYF

SEQ ID NO: 216143 - protein, 13 aa, Homo sapiens
  CDR3 for alpha chain variable domain of TCR clone 108072 (TRAV12-2, TRAJ42)
CAVKIGSQGNLIF

SEQ ID NO: 216144 - protein, 16 aa, Homo sapiens
  CDR3 for beta chain variable domain of TCR clone 108072 (TRBV9, TRBJ2-2)
CASSAMGKGNTGELFF

SEQ ID NO: 216145 - protein, 16 aa, Homo sapiens
  CDR3 for alpha chain variable domain of TCR clone 108073 (TRAV20, TRAJ53)
CAVQGNSGGSNYKLKF

SEQ ID NO: 216146 - protein, 14 aa, Homo sapiens
  CDR3 for beta chain variable domain of TCR clone 108073 (TRBV6-5, TRBJ2-7)
CASSPHRGLREQYF

SEQ ID NO: 216147 - protein, 11 aa, Homo sapiens
  CDR3 for alpha chain variable domain of TCR clone 108074 (TRAV1-2, TRAJ20)
CAVANDYKLSF

SEQ ID NO: 216148 - protein, 12 aa, Homo sapiens
  CDR3 for beta chain variable domain of TCR clone 108074 (TRBV29-1, TRBJ2-3)
CSVTGGADTQYF

SEQ ID NO: 216149 - protein, 13 aa, Homo sapiens
  CDR3 for alpha chain variable domain of TCR clone 108075 (TRAV2, TRAJ15)
CAVEAQAGTALIF

SEQ ID NO: 216150 - protein, 15 aa, Homo sapiens
  CDR3 for beta chain variable domain of TCR clone 108075 (TRBV4-1, TRBJ1-6)
CASSAGQGYNSPLHF

SEQ ID NO: 216151 - protein, 15 aa, Homo sapiens
  CDR3 for alpha chain variable domain of TCR clone 108076 (TRAV3, TRAJ5)
CAVRHRKTGRRALTF

SEQ ID NO: 216152 - protein, 15 aa, Homo sapiens
  CDR3 for beta chain variable domain of TCR clone 108076 (TRBV7-8, TRBJ2-1)
CASSLADSLYNEQFF

SEQ ID NO: 216153 - protein, 11 aa, Homo sapiens
  CDR3 for alpha chain variable domain of TCR clone 108077 (TRAV2, TRAJ13)
CASGGYQKVTF

SEQ ID NO: 216154 - protein, 15 aa, Homo sapiens
  CDR3 for beta chain variable domain of TCR clone 108077 (TRBV2, TRBJ2-1)
CASTPTGSSYNEQFF

SEQ ID NO: 216155 - protein, 15 aa, Homo sapiens
  CDR3 for alpha chain variable domain of TCR clone 108078 (TRAV13-1, TRAJ10)
CAATILTGGGNKLTF

SEQ ID NO: 216156 - protein, 15 aa, Homo sapiens
  CDR3 for beta chain variable domain of TCR clone 108078 (TRBV2, TRBJ2-7)
RASTLLGSGATEQYF

SEQ ID NO: 216157 - protein, 13 aa, Homo sapiens
  CDR3 for alpha chain variable domain of TCR clone 108079 (TRAV35, TRAJ42)
CAGFPGSQGNLIF

SEQ ID NO: 216158 - protein, 15 aa, Homo sapiens
  CDR3 for beta chain variable domain of TCR clone 108079 (TRBV6-3, TRBJ2-7)
CASSSPGTVFYEQYF

SEQ ID NO: 216159 - protein, 23 aa, Homo sapiens
  CDR3 for alpha chain variable domain of TCR clone 108080 (TRAV26-1, )
CIADDAGNNHIQNPDPAVYQLRD

SEQ ID NO: 216160 - protein, 13 aa, Homo sapiens
  CDR3 for beta chain variable domain of TCR clone 108080 (TRBV20-1, TRBJ1-1)
CSARGGGNTETFF

SEQ ID NO: 216161 - protein, 13 aa, Homo sapiens
  CDR3 for alpha chain variable domain of TCR clone 108081 (TRAV12-2, TRAJ18)
CAVRGSTLGRLSF

SEQ ID NO: 216162 - protein, 20 aa, Homo sapiens
  CDR3 for beta chain variable domain of TCR clone 108081 (TRBV7-8, TRBJ2-2)
CASSHLFPGPTIHITGELFF

SEQ ID NO: 216163 - protein, 14 aa, Homo sapiens
  CDR3 for alpha chain variable domain of TCR clone 108082 (TRAV26-1, TRAJ38)
CIADNAGNNRKLIW

SEQ ID NO: 216164 - protein, 15 aa, Homo sapiens
  CDR3 for beta chain variable domain of TCR clone 108082 (TRBV20-1, TRBJ1-1)
CSASRGVTGNTEAFF

SEQ ID NO: 216165 - protein, 15 aa, Homo sapiens
  CDR3 for alpha chain variable domain of TCR clone 108083 (TRAV13-2, TRAJ37)
CREYEDPGNTGKLIF

SEQ ID NO: 216166 - protein, 13 aa, Homo sapiens
  CDR3 for beta chain variable domain of TCR clone 108083 (TRBV20-1, TRBJ2-7)
CSARSGHPYERYF

SEQ ID NO: 216167 - protein, 14 aa, Homo sapiens
  CDR3 for alpha chain variable domain of TCR clone 108084 (TRAV12-3, TRAJ10)
SHLPLTGGGNKLSF

SEQ ID NO: 216168 - protein, 13 aa, Homo sapiens
  CDR3 for beta chain variable domain of TCR clone 108084 (TRBV9, TRBJ2-1)
CASSPSGGNEQFF

SEQ ID NO: 216169 - protein, 14 aa, Homo sapiens
  CDR3 for alpha chain variable domain of TCR clone 108085 (TRAV23/DV6, TRAJ6)
CAASRSGGSYIPTF

SEQ ID NO: 216170 - protein, 14 aa, Homo sapiens
  CDR3 for beta chain variable domain of TCR clone 108085 (TRBV7-2, TRBJ2-7)
CASSPKTSFYEQYF

SEQ ID NO: 216171 - protein, 13 aa, Homo sapiens
  CDR3 for alpha chain variable domain of TCR clone 108086 (TRAV3, TRAJ20)
CAVRDTPRYKLSF

SEQ ID NO: 216172 - protein, 15 aa, Homo sapiens
  CDR3 for beta chain variable domain of TCR clone 108086 (TRBV20-1, TRBJ2-7)
CSARDRVSGMDEQYF

SEQ ID NO: 216173 - protein, 12 aa, Homo sapiens
  CDR3 for alpha chain variable domain of TCR clone 108087 (TRAV23/DV6, TRAJ24)
CAANDSGGKLQF

SEQ ID NO: 216174 - protein, 16 aa, Homo sapiens
  CDR3 for beta chain variable domain of TCR clone 108087 (TRBV12-4, TRBJ2-5)
CASSLSTSGGKETQYF

SEQ ID NO: 216175 - protein, 10 aa, Homo sapiens
  CDR3 for alpha chain variable domain of TCR clone 108088 (TRAV21, TRAJ43)
CAVRIGDMRF

SEQ ID NO: 216176 - protein, 16 aa, Homo sapiens
  CDR3 for beta chain variable domain of TCR clone 108088 (TRBV7-9, TRBJ2-1)
CASSLGADLSYNEQFF

SEQ ID NO: 216177 - protein, 14 aa, Homo sapiens
  CDR3 for alpha chain variable domain of TCR clone 108089 (TRAV17, TRAJ56)
CATVPAGANSKLTF

SEQ ID NO: 216178 - protein, 12 aa, Homo sapiens
  CDR3 for beta chain variable domain of TCR clone 108089 (TRBV11-2, TRBJ2-2)
CASSLGGGELFF

SEQ ID NO: 216179 - protein, 11 aa, Homo sapiens
  CDR3 for alpha chain variable domain of TCR clone 108090 (TRAV1-2, TRAJ20)
CAVANDYKLSF

SEQ ID NO: 216180 - protein, 16 aa, Homo sapiens
  CDR3 for beta chain variable domain of TCR clone 108090 (TRBV27, TRBJ2-2)
CASSFRGLVRTGELFF

SEQ ID NO: 216181 - protein, 19 aa, Homo sapiens
  CDR3 for alpha chain variable domain of TCR clone 108091 (TRAV26-1, TRAJ22)
CCVLLHRWVFSGSARQLTF

SEQ ID NO: 216182 - protein, 19 aa, Homo sapiens
  CDR3 for beta chain variable domain of TCR clone 108091 (TRBV19, TRBJ2-5)
CASSIGQVTDFLLGETQYF

SEQ ID NO: 216183 - protein, 16 aa, Homo sapiens
  CDR3 for alpha chain variable domain of TCR clone 108092 (TRAV22, TRAJ45)
CAVERGKRGGSDGLTF

SEQ ID NO: 216184 - protein, 13 aa, Homo sapiens
  CDR3 for beta chain variable domain of TCR clone 108092 (TRBV27, TRBJ1-1)
CASSLSIGAEAFF

SEQ ID NO: 216185 - protein, 15 aa, Homo sapiens
  CDR3 for alpha chain variable domain of TCR clone 108093 (TRAV13-2, TRAJ24)
CAEILTTDSWGKLQF

SEQ ID NO: 216186 - protein, 15 aa, Homo sapiens
  CDR3 for beta chain variable domain of TCR clone 108093 (TRBV28, TRBJ2-5)
CASSSGRTIQETQYF

SEQ ID NO: 216187 - protein, 15 aa, Homo sapiens
  CDR3 for alpha chain variable domain of TCR clone 108094 (TRAV13-1, TRAJ17)
CAASIERAAGNKLTF

SEQ ID NO: 216188 - protein, 16 aa, Homo sapiens
  CDR3 for beta chain variable domain of TCR clone 108094 (TRBV12-5, TRBJ2-5)
CASGPRTSGNQETQYF

SEQ ID NO: 216189 - protein, 14 aa, Homo sapiens
  CDR3 for alpha chain variable domain of TCR clone 108095 (TRAV12-1, TRAJ23)
CVVIVYNQGGKLIF

SEQ ID NO: 216190 - protein, 14 aa, Homo sapiens
  CDR3 for beta chain variable domain of TCR clone 108095 (TRBV7-2, TRBJ2-5)
CASSPRGSSETQYF

SEQ ID NO: 216191 - protein, 12 aa, Homo sapiens
  CDR3 for alpha chain variable domain of TCR clone 108096 (TRAV36/DV7, TRAJ26)
CAVDNYGQNFVF

SEQ ID NO: 216192 - protein, 15 aa, Homo sapiens
  CDR3 for beta chain variable domain of TCR clone 108096 (TRBV4-1, TRBJ1-6)
CASSAGQGYNSPLHF

SEQ ID NO: 216193 - protein, 14 aa, Homo sapiens
  CDR3 for alpha chain variable domain of TCR clone 108097 (TRAV38-1, TRAJ29)
CAFITPSGNTPLVC

SEQ ID NO: 216194 - protein, 14 aa, Homo sapiens
  CDR3 for beta chain variable domain of TCR clone 108097 (TRBV18, TRBJ2-7)
CASSPRGGAYEQYF

SEQ ID NO: 216195 - protein, 18 aa, Homo sapiens
  CDR3 for alpha chain variable domain of TCR clone 108098 (TRAV21, TRAJ52)
CAVRPSPAGGTSYGKLTF

SEQ ID NO: 216196 - protein, 12 aa, Homo sapiens
  CDR3 for beta chain variable domain of TCR clone 108098 (TRBV11-2, TRBJ2-3)
CASRPGTDTQYF

SEQ ID NO: 216197 - protein, 14 aa, Homo sapiens
  CDR3 for alpha chain variable domain of TCR clone 108099 (TRAV9-2, TRAJ39)
CALYIYNAGNMLTF

SEQ ID NO: 216198 - protein, 20 aa, Homo sapiens
  CDR3 for beta chain variable domain of TCR clone 108099 (TRBV11-2, TRBJ1-6)
CASSLVFATGGSVHPSTLGT

SEQ ID NO: 216199 - protein, 12 aa, Homo sapiens
  CDR3 for alpha chain variable domain of TCR clone 108100 (TRAV8-3, TRAJ20)
CAVGANDYKLSF

SEQ ID NO: 216200 - protein, 13 aa, Homo sapiens
  CDR3 for beta chain variable domain of TCR clone 108100 (TRBV27, TRBJ2-7)
CASSLTTGYEQYF

SEQ ID NO: 216201 - protein, 15 aa, Homo sapiens
  CDR3 for alpha chain variable domain of TCR clone 108101 (TRAV3, TRAJ17)
CAVSPKEAAGNKLTF

SEQ ID NO: 216202 - protein, 14 aa, Homo sapiens
  CDR3 for beta chain variable domain of TCR clone 108101 (TRBV19, TRBJ2-2)
CATTGHANTGELFF

SEQ ID NO: 216203 - protein, 15 aa, Homo sapiens
  CDR3 for alpha chain variable domain of TCR clone 108102 (TRAV8-3, TRAJ45)
CASSYSGGGADGLTF

SEQ ID NO: 216204 - protein, 12 aa, Homo sapiens
  CDR3 for beta chain variable domain of TCR clone 108102 (TRBV6-3, TRBJ2-7)
CASSYNPLEQYF

SEQ ID NO: 216205 - protein, 13 aa, Homo sapiens
  CDR3 for alpha chain variable domain of TCR clone 108103 (TRAV35, TRAJ36)
CAGPRIGANNLFF

SEQ ID NO: 216206 - protein, 15 aa, Homo sapiens
  CDR3 for beta chain variable domain of TCR clone 108103 (TRBV28, TRBJ2-7)
CASSPPWSYQETQYF

SEQ ID NO: 216207 - protein, 15 aa, Homo sapiens
  CDR3 for alpha chain variable domain of TCR clone 108104 (TRAV27, TRAJ38)
CAARRNAGNNRKLIW

SEQ ID NO: 216208 - protein, 15 aa, Homo sapiens
  CDR3 for beta chain variable domain of TCR clone 108104 (TRBV29-1, TRBJ2-1)
CSGRDRKSSYNEQFF

SEQ ID NO: 216209 - protein, 12 aa, Homo sapiens
  CDR3 for alpha chain variable domain of TCR clone 108105 (TRAV2, TRAJ36)
CAELTGANNLFF

SEQ ID NO: 216210 - protein, 18 aa, Homo sapiens
  CDR3 for beta chain variable domain of TCR clone 108105 (TRBV19, TRBJ1-1)
CASIIAGGDYTGNTEAFF

SEQ ID NO: 216211 - protein, 12 aa, Homo sapiens
  CDR3 for alpha chain variable domain of TCR clone 108106 (TRAV13-2, TRAJ20)
CAENICRPQAQL

SEQ ID NO: 216212 - protein, 15 aa, Homo sapiens
  CDR3 for beta chain variable domain of TCR clone 108106 (TRBV29-1, TRBJ2-1)
CSGRDRKSSYNEQFF

SEQ ID NO: 216213 - protein, 10 aa, Homo sapiens
  CDR3 for alpha chain variable domain of TCR clone 108107 (TRAV8-1, TRAJ31)
CAVKDARLMF

SEQ ID NO: 216214 - protein, 19 aa, Homo sapiens
  CDR3 for beta chain variable domain of TCR clone 108107 (TRBV7-2, TRBJ2-3)
CASSFLSRNWGGGTDTQYF

SEQ ID NO: 216215 - protein, 12 aa, Homo sapiens
  CDR3 for alpha chain variable domain of TCR clone 108108 (TRAV2, TRAJ33)
CAFMDSNYQLIW

SEQ ID NO: 216216 - protein, 16 aa, Homo sapiens
  CDR3 for beta chain variable domain of TCR clone 108108 (TRBV2, TRBJ2-7)
CASSEPWTGPSYEQYF

SEQ ID NO: 216217 - protein, 15 aa, Homo sapiens
  CDR3 for alpha chain variable domain of TCR clone 108109 (TRAV8-2, TRAJ15)
CVVTMGNQAGTALIF

SEQ ID NO: 216218 - protein, 18 aa, Homo sapiens
  CDR3 for beta chain variable domain of TCR clone 108109 (TRBV7-8, TRBJ2-1)
CASSPYLGQRGSNNEQFF

SEQ ID NO: 216219 - protein, 13 aa, Homo sapiens
  CDR3 for alpha chain variable domain of TCR clone 108110 (TRAV4, TRAJ22)
CLGGSGSARQLTF

SEQ ID NO: 216220 - protein, 15 aa, Homo sapiens
  CDR3 for beta chain variable domain of TCR clone 108110 (TRBV7-9, TRBJ1-6)
CASSSPGRGNSPLLF

SEQ ID NO: 216221 - protein, 13 aa, Homo sapiens
  CDR3 for alpha chain variable domain of TCR clone 108111 (TRAV8-3, TRAJ43)
CAVVPYNNNDMRF

SEQ ID NO: 216222 - protein, 12 aa, Homo sapiens
  CDR3 for beta chain variable domain of TCR clone 108111 (TRBV14, TRBJ2-5)
CASSQLKETQYF

SEQ ID NO: 216223 - protein, 16 aa, Homo sapiens
  CDR3 for alpha chain variable domain of TCR clone 108112 (TRAV30, TRAJ24)
CGTEIVDADSWGKFQF

SEQ ID NO: 216224 - protein, 15 aa, Homo sapiens
  CDR3 for beta chain variable domain of TCR clone 108112 (TRBV7-8, TRBJ1-5)
CASSRGGGADQPQHF

SEQ ID NO: 216225 - protein, 12 aa, Homo sapiens
  CDR3 for alpha chain variable domain of TCR clone 108113 (TRAV17, TRAJ30)
CVPERRDDKIIF

SEQ ID NO: 216226 - protein, 14 aa, Homo sapiens
  CDR3 for beta chain variable domain of TCR clone 108113 (TRBV7-7, TRBJ2-2)
CASSRDRSNGELFF

SEQ ID NO: 216227 - protein, 13 aa, Homo sapiens
  CDR3 for alpha chain variable domain of TCR clone 108114 (TRAV21, TRAJ27)
CAARPGDAGKSTF

SEQ ID NO: 216228 - protein, 14 aa, Homo sapiens
  CDR3 for beta chain variable domain of TCR clone 108114 (TRBV11-2, TRBJ2-7)
CASSLGAGAYEQYF

SEQ ID NO: 216229 - protein, 17 aa, Homo sapiens
  CDR3 for alpha chain variable domain of TCR clone 108115 (TRAV1-2, TRAJ23)
CAVRPHSIYNQGGKLVF

SEQ ID NO: 216230 - protein, 17 aa, Homo sapiens
  CDR3 for beta chain variable domain of TCR clone 108115 (TRBV7-8, TRBJ2-6)
CASSAGTGGAGANVLTF

SEQ ID NO: 216231 - protein, 15 aa, Homo sapiens
  CDR3 for alpha chain variable domain of TCR clone 108116 (TRAV2, TRAJ22)
CAVPSRGGSARQLTF

SEQ ID NO: 216232 - protein, 14 aa, Homo sapiens
  CDR3 for beta chain variable domain of TCR clone 108116 (TRBV7-3, TRBJ1-1)
CASSLKGGNTEAFF

SEQ ID NO: 216233 - protein, 15 aa, Homo sapiens
  CDR3 for alpha chain variable domain of TCR clone 108117 (TRAV17, TRAJ57)
CATGPSQGGSQKLVF

SEQ ID NO: 216234 - protein, 16 aa, Homo sapiens
  CDR3 for beta chain variable domain of TCR clone 108117 (TRBV12-4, TRBJ1-5)
CASSRPVGGSNQPQHF

SEQ ID NO: 216235 - protein, 13 aa, Homo sapiens
  CDR3 for alpha chain variable domain of TCR clone 108118 (TRAV20, TRAJ29)
CAVQAVGNTPLVF

SEQ ID NO: 216236 - protein, 15 aa, Homo sapiens
  CDR3 for beta chain variable domain of TCR clone 108118 (TRBV7-2, TRBJ1-1)
CASSFEGRVNTEAFF

SEQ ID NO: 216237 - protein, 14 aa, Homo sapiens
  CDR3 for alpha chain variable domain of TCR clone 108119 (TRAV29/DV5, TRAJ49)
CAASAQNTGNQFYF

SEQ ID NO: 216238 - protein, 14 aa, Homo sapiens
  CDR3 for beta chain variable domain of TCR clone 108119 (TRBV20-1, TRBJ2-7)
CSASEAGEKYEQYF

SEQ ID NO: 216239 - protein, 11 aa, Homo sapiens
  CDR3 for alpha chain variable domain of TCR clone 108120 (TRAV8-6, TRAJ13)
CALGIYQKVTF

SEQ ID NO: 216240 - protein, 15 aa, Homo sapiens
  CDR3 for beta chain variable domain of TCR clone 108120 (TRBV5-1, TRBJ2-7)
CASSLNGGHAREQYF

SEQ ID NO: 216241 - protein, 15 aa, Homo sapiens
  CDR3 for alpha chain variable domain of TCR clone 108121 (TRAV26-2, TRAJ13)
CILRDLSGGNQKVTF

SEQ ID NO: 216242 - protein, 11 aa, Homo sapiens
  CDR3 for beta chain variable domain of TCR clone 108121 (TRBV7-9, TRBJ2-5)
CASSLSATQYF

SEQ ID NO: 216243 - protein, 14 aa, Homo sapiens
  CDR3 for alpha chain variable domain of TCR clone 108122 (TRAV27, TRAJ15)
CAGFDNQAGTALIF

SEQ ID NO: 216244 - protein, 11 aa, Homo sapiens
  CDR3 for beta chain variable domain of TCR clone 108122 (TRBV29-1, TRBJ1-1)
CSVEVGTRNFF

SEQ ID NO: 216245 - protein, 12 aa, Homo sapiens
  CDR3 for alpha chain variable domain of TCR clone 108123 (TRAV12-2, TRAJ43)
CAVNVNNNDMRF

SEQ ID NO: 216246 - protein, 14 aa, Homo sapiens
  CDR3 for beta chain variable domain of TCR clone 108123 (TRBV25-1, TRBJ2-2)
CASSEVGLPGELFF

SEQ ID NO: 216247 - protein, 13 aa, Homo sapiens
  CDR3 for alpha chain variable domain of TCR clone 108124 (TRAV12-1, TRAJ47)
CVVNPGYGNKLVF

SEQ ID NO: 216248 - protein, 13 aa, Homo sapiens
  CDR3 for beta chain variable domain of TCR clone 108124 (TRBV7-9, TRBJ1-2)
CASSLKQNYGYTF

SEQ ID NO: 216249 - protein, 16 aa, Homo sapiens
  CDR3 for alpha chain variable domain of TCR clone 108125 (TRAV30, TRAJ24)
CGTEIVDADSWGKFQF

SEQ ID NO: 216250 - protein, 13 aa, Homo sapiens
  CDR3 for beta chain variable domain of TCR clone 108125 (TRBV18, TRBJ1-2)
CASSASATESYTF

SEQ ID NO: 216251 - protein, 11 aa, Homo sapiens
  CDR3 for alpha chain variable domain of TCR clone 108126 (TRAV17, TRAJ36)
CAPTGADNLFF

SEQ ID NO: 216252 - protein, 13 aa, Homo sapiens
  CDR3 for beta chain variable domain of TCR clone 108126 (TRBV20-1, TRBJ1-1)
CSAPPGGHTEAFF

SEQ ID NO: 216253 - protein, 16 aa, Homo sapiens
  CDR3 for alpha chain variable domain of TCR clone 108127 (TRAV12-2, TRAJ45)
CAVIFLSGGGADGLTF

SEQ ID NO: 216254 - protein, 19 aa, Homo sapiens
  CDR3 for beta chain variable domain of TCR clone 108127 (TRBV28, TRBJ2-4)
CASSFQPGGPAHSKNIQYS

SEQ ID NO: 216255 - protein, 16 aa, Homo sapiens
  CDR3 for alpha chain variable domain of TCR clone 108128 (TRAV1-2, TRAJ10)
CAVRGVLTGGGNKLTF

SEQ ID NO: 216256 - protein, 12 aa, Homo sapiens
  CDR3 for beta chain variable domain of TCR clone 108128 (TRBV11-2, TRBJ2-1)
RASSPGNNEQFF

SEQ ID NO: 216257 - protein, 14 aa, Homo sapiens
  CDR3 for alpha chain variable domain of TCR clone 108129 (TRAV36/DV7, TRAJ33)
CAVLPRDSNYQLIC

SEQ ID NO: 216258 - protein, 17 aa, Homo sapiens
  CDR3 for beta chain variable domain of TCR clone 108129 (TRBV23-1, TRBJ2-5)
CASSPTLNVIGVETQYF

SEQ ID NO: 216259 - protein, 15 aa, Homo sapiens
  CDR3 for alpha chain variable domain of TCR clone 108130 (TRAV25, TRAJ52)
CAGRPGGTSYGKLTF

SEQ ID NO: 216260 - protein, 18 aa, Homo sapiens
  CDR3 for beta chain variable domain of TCR clone 108130 (TRBV4-1, TRBJ1-5)
CASSQDPRGQGLNQPQHF

SEQ ID NO: 216261 - protein, 14 aa, Homo sapiens
  CDR3 for alpha chain variable domain of TCR clone 108131 (TRAV16, TRAJ42)
CALLAGGSQGNLIF

SEQ ID NO: 216262 - protein, 11 aa, Homo sapiens
  CDR3 for beta chain variable domain of TCR clone 108131 (TRBV7-8, TRBJ2-7)
CASSLSLEQYF

SEQ ID NO: 216263 - protein, 15 aa, Homo sapiens
  CDR3 for alpha chain variable domain of TCR clone 108132 (TRAV2, TRAJ15)
CAVEDRGQAGAALIF

SEQ ID NO: 216264 - protein, 13 aa, Homo sapiens
  CDR3 for beta chain variable domain of TCR clone 108132 (TRBV12-4, TRBJ2-5)
CASSLGGSRTQYF

SEQ ID NO: 216265 - protein, 15 aa, Homo sapiens
  CDR3 for alpha chain variable domain of TCR clone 108133 (TRAV8-1, TRAJ23)
CAVNSHYNQGGKLIF

SEQ ID NO: 216266 - protein, 15 aa, Homo sapiens
  CDR3 for beta chain variable domain of TCR clone 108133 (TRBV11-1, TRBJ2-7)
CASSRGRFKTYEQYF

SEQ ID NO: 216267 - protein, 14 aa, Homo sapiens
  CDR3 for alpha chain variable domain of TCR clone 108134 (TRAV20, TRAJ42)
CAVQAGGSQGNLIF

SEQ ID NO: 216268 - protein, 14 aa, Homo sapiens
  CDR3 for beta chain variable domain of TCR clone 108134 (TRBV28, TRBJ1-2)
CASRIQGANYGDTV

SEQ ID NO: 216269 - protein, 15 aa, Homo sapiens
  CDR3 for alpha chain variable domain of TCR clone 108135 (TRAV13-1, TRAJ48)
CAAGTGGFGNEKLTF

SEQ ID NO: 216270 - protein, 14 aa, Homo sapiens
  CDR3 for beta chain variable domain of TCR clone 108135 (TRBV24-1, TRBJ2-2)
CATGGLGNTGELFF

SEQ ID NO: 216271 - protein, 14 aa, Homo sapiens
  CDR3 for alpha chain variable domain of TCR clone 108136 (TRAV35, TRAJ38)
CAGSNAGNNRKLIW

SEQ ID NO: 216272 - protein, 19 aa, Homo sapiens
  CDR3 for beta chain variable domain of TCR clone 108136 (TRBV25-1, TRBJ2-2)
CAILVYRVDRGRKTGELFF

SEQ ID NO: 216273 - protein, 13 aa, Homo sapiens
  CDR3 for alpha chain variable domain of TCR clone 108137 (TRAV8-4, TRAJ30)
CAVSVNRDDKIIF

SEQ ID NO: 216274 - protein, 15 aa, Homo sapiens
  CDR3 for beta chain variable domain of TCR clone 108137 (TRBV7-3, TRBJ2-1)
CASSPTGGGEVEQFF

SEQ ID NO: 216275 - protein, 11 aa, Homo sapiens
  CDR3 for alpha chain variable domain of TCR clone 108138 (TRAV12-3, TRAJ43)
CAMSVSNDMRF

SEQ ID NO: 216276 - protein, 16 aa, Homo sapiens
  CDR3 for beta chain variable domain of TCR clone 108138 (TRBV5-1, TRBJ2-3)
CASSLGLAVYTDTQYF

SEQ ID NO: 216277 - protein, 18 aa, Homo sapiens
  CDR3 for alpha chain variable domain of TCR clone 108139 (TRAV26-1, TRAJ23)
CIVRVGLEVWNQGGKLIF

SEQ ID NO: 216278 - protein, 15 aa, Homo sapiens
  CDR3 for beta chain variable domain of TCR clone 108139 (TRBV7-9, TRBJ2-2)
CASSPETGAGGELFF

SEQ ID NO: 216279 - protein, 12 aa, Homo sapiens
  CDR3 for alpha chain variable domain of TCR clone 108140 (TRAV12-3, TRAJ17)
CAMTLTGNKLTF

SEQ ID NO: 216280 - protein, 15 aa, Homo sapiens
  CDR3 for beta chain variable domain of TCR clone 108140 (TRBV20-1, TRBJ2-7)
CSARDWVSRMDEQYF

SEQ ID NO: 216281 - protein, 16 aa, Homo sapiens
  CDR3 for alpha chain variable domain of TCR clone 108141 (TRAV1-2, TRAJ10)
CAVRGVLTGGGNKLTF

SEQ ID NO: 216282 - protein, 14 aa, Homo sapiens
  CDR3 for beta chain variable domain of TCR clone 108141 (TRBV11-1, TRBJ2-7)
CASTFAVPSYEQYF

SEQ ID NO: 216283 - protein, 13 aa, Homo sapiens
  CDR3 for alpha chain variable domain of TCR clone 108142 (TRAV23/DV6, TRAJ10)
ASVLTGGGNKLTF

SEQ ID NO: 216284 - protein, 13 aa, Homo sapiens
  CDR3 for beta chain variable domain of TCR clone 108142 (TRBV11-1, TRBJ1-2)
CASVGSWGYGDTF

SEQ ID NO: 216285 - protein, 11 aa, Homo sapiens
  CDR3 for alpha chain variable domain of TCR clone 108143 (TRAV21, TRAJ34)
CAVTNTDKLIF

SEQ ID NO: 216286 - protein, 14 aa, Homo sapiens
  CDR3 for beta chain variable domain of TCR clone 108143 (TRBV7-2, TRBJ2-7)
CASSPKTSFYEQYF

SEQ ID NO: 216287 - protein, 17 aa, Homo sapiens
  CDR3 for alpha chain variable domain of TCR clone 108144 (TRAV26-1, TRAJ37)
CIVRVITVSSNTGKLIF

SEQ ID NO: 216288 - protein, 14 aa, Homo sapiens
  CDR3 for beta chain variable domain of TCR clone 108144 (TRBV25-1, TRBJ1-1)
CASTHLGGNTEAFF

SEQ ID NO: 216289 - protein, 14 aa, Homo sapiens
  CDR3 for alpha chain variable domain of TCR clone 108145 (TRAV26-1, TRAJ38)
CIADNAGNNRRLIW

SEQ ID NO: 216290 - protein, 13 aa, Homo sapiens
  CDR3 for beta chain variable domain of TCR clone 108145 (TRBV20-1, TRBJ1-1)
CSARGGGNTVAFF

SEQ ID NO: 216291 - protein, 12 aa, Homo sapiens
  CDR3 for alpha chain variable domain of TCR clone 108146 (TRAV12-1, TRAJ40)
CVVYSGTYKYIF

SEQ ID NO: 216292 - protein, 17 aa, Homo sapiens
  CDR3 for beta chain variable domain of TCR clone 108146 (TRBV15, TRBJ1-2)
CATSGREIDVVNYGYTF

SEQ ID NO: 216293 - protein, 14 aa, Homo sapiens
  CDR3 for alpha chain variable domain of TCR clone 108147 (TRAV12-3, TRAJ29)
CAMILLSGNTPLVF

SEQ ID NO: 216294 - protein, 15 aa, Homo sapiens
  CDR3 for beta chain variable domain of TCR clone 108147 (TRBV19, TRBJ2-7)
CASRPTPGLSIEQYF

SEQ ID NO: 216295 - protein, 11 aa, Homo sapiens
  CDR3 for alpha chain variable domain of TCR clone 108148 (TRAV1-1, TRAJ23)
CAVRQGGKLIF

SEQ ID NO: 216296 - protein, 12 aa, Homo sapiens
  CDR3 for beta chain variable domain of TCR clone 108148 (TRBV7-3, TRBJ2-5)
CASSSPGGTQYF

SEQ ID NO: 216297 - protein, 11 aa, Homo sapiens
  CDR3 for alpha chain variable domain of TCR clone 108149 (TRAV2, TRAJ13)
CASGGYQKVTF

SEQ ID NO: 216298 - protein, 18 aa, Homo sapiens
  CDR3 for beta chain variable domain of TCR clone 108149 (TRBV7-9, TRBJ2-7)
CASSLTTSGSRTWYEQYF

SEQ ID NO: 216299 - protein, 11 aa, Homo sapiens
  CDR3 for alpha chain variable domain of TCR clone 108150 (TRAV17, TRAJ31)
CATSNNARLMV

SEQ ID NO: 216300 - protein, 16 aa, Homo sapiens
  CDR3 for beta chain variable domain of TCR clone 108150 (TRBV7-8, TRBJ2-4)
CASSAERTLAKNIQYF

SEQ ID NO: 216301 - protein, 14 aa, Homo sapiens
  CDR3 for alpha chain variable domain of TCR clone 108151 (TRAV26-1, TRAJ39)
CIVRGSRAGNMLTF

SEQ ID NO: 216302 - protein, 13 aa, Homo sapiens
  CDR3 for beta chain variable domain of TCR clone 108151 (TRBV7-3, TRBJ2-1)
CASSLDSYNEQFF

SEQ ID NO: 216303 - protein, 14 aa, Homo sapiens
  CDR3 for alpha chain variable domain of TCR clone 108152 (TRAV29/DV5, TRAJ45)
CAASFRGGADGLTF

SEQ ID NO: 216304 - protein, 16 aa, Homo sapiens
  CDR3 for beta chain variable domain of TCR clone 108152 (TRBV11-2, TRBJ2-3)
CASSSRTSGGAGTQYF

SEQ ID NO: 216305 - protein, 14 aa, Homo sapiens
  CDR3 for alpha chain variable domain of TCR clone 108153 (TRAV12-2, TRAJ9)
CAVNLNTGGFKTIF

SEQ ID NO: 216306 - protein, 15 aa, Homo sapiens
  CDR3 for beta chain variable domain of TCR clone 108153 (TRBV9, TRBJ1-6)
CASSVAGTGDSPLHF

SEQ ID NO: 216307 - protein, 16 aa, Homo sapiens
  CDR3 for alpha chain variable domain of TCR clone 108154 (TRAV8-3, TRAJ13)
CAVVLMNSGGYQKVIF

SEQ ID NO: 216308 - protein, 15 aa, Homo sapiens
  CDR3 for beta chain variable domain of TCR clone 108154 (TRBV5-4, TRBJ2-5)
CASSLAGGAKETQYF

SEQ ID NO: 216309 - protein, 17 aa, Homo sapiens
  CDR3 for alpha chain variable domain of TCR clone 108155 (TRAV13-1, TRAJ52)
CAAGRNAGGTSYGKLTF

SEQ ID NO: 216310 - protein, 13 aa, Homo sapiens
  CDR3 for beta chain variable domain of TCR clone 108155 (TRBV7-2, TRBJ1-1)
CASNLKGAKGAFF

SEQ ID NO: 216311 - protein, 17 aa, Homo sapiens
  CDR3 for alpha chain variable domain of TCR clone 108156 (TRAV3, TRAJ42)
CAVRDRDYGGSQGNLIF

SEQ ID NO: 216312 - protein, 14 aa, Homo sapiens
  CDR3 for beta chain variable domain of TCR clone 108156 (TRBV19, TRBJ2-5)
CASSMTGQQETRYF

SEQ ID NO: 216313 - protein, 14 aa, Homo sapiens
  CDR3 for alpha chain variable domain of TCR clone 108157 (TRAV29/DV5, TRAJ36)
CAARRKTGANNPFF

SEQ ID NO: 216314 - protein, 15 aa, Homo sapiens
  CDR3 for beta chain variable domain of TCR clone 108157 (TRBV20-1, TRBJ2-2)
CSARGGQGNTGELFF

SEQ ID NO: 216315 - protein, 12 aa, Homo sapiens
  CDR3 for alpha chain variable domain of TCR clone 108158 (TRAV27, TRAJ42)
CAGGGSQGTLIF

SEQ ID NO: 216316 - protein, 13 aa, Homo sapiens
  CDR3 for beta chain variable domain of TCR clone 108158 (TRBV19, TRBJ2-7)
CASSIRSSYEQYF

SEQ ID NO: 216317 - protein, 13 aa, Homo sapiens
  CDR3 for alpha chain variable domain of TCR clone 108159 (TRAV17, TRAJ5)
CALRGTGRRTLTF

SEQ ID NO: 216318 - protein, 13 aa, Homo sapiens
  CDR3 for beta chain variable domain of TCR clone 108159 (TRBV4-2, TRBJ1-1)
CASSQAGNTEAFF

SEQ ID NO: 216319 - protein, 15 aa, Homo sapiens
  CDR3 for alpha chain variable domain of TCR clone 108160 (TRAV26-1, TRAJ23)
CIVRVSGYQGGKLIF

SEQ ID NO: 216320 - protein, 18 aa, Homo sapiens
  CDR3 for beta chain variable domain of TCR clone 108160 (TRBV28, TRBJ2-1)
CASSSTSGRANSYNEQFF

SEQ ID NO: 216321 - protein, 12 aa, Homo sapiens
  CDR3 for alpha chain variable domain of TCR clone 108161 (TRAV13-1, TRAJ21)
CAAKEGSNKFYF

SEQ ID NO: 216322 - protein, 15 aa, Homo sapiens
  CDR3 for beta chain variable domain of TCR clone 108161 (TRBV20-1, TRBJ2-7)
CSARDRVSGMDEQYF

SEQ ID NO: 216323 - protein, 16 aa, Homo sapiens
  CDR3 for alpha chain variable domain of TCR clone 108162 (TRAV1-1, TRAJ22)
CAVNDALSGSARQLTF

SEQ ID NO: 216324 - protein, 14 aa, Homo sapiens
  CDR3 for beta chain variable domain of TCR clone 108162 (TRBV19, TRBJ2-1)
CASPTFVLSGEQFF

SEQ ID NO: 216325 - protein, 15 aa, Homo sapiens
  CDR3 for alpha chain variable domain of TCR clone 108163 (TRAV2, TRAJ32)
CAVANYGGATNKLIF

SEQ ID NO: 216326 - protein, 13 aa, Homo sapiens
  CDR3 for beta chain variable domain of TCR clone 108163 (TRBV10-3, TRBJ2-7)
CASKLAVNYEQYF

SEQ ID NO: 216327 - protein, 11 aa, Homo sapiens
  CDR3 for alpha chain variable domain of TCR clone 108164 (TRAV13-1, TRAJ8)
CAARGFQKLVF

SEQ ID NO: 216328 - protein, 16 aa, Homo sapiens
  CDR3 for beta chain variable domain of TCR clone 108164 (TRBV19, TRBJ1-5)
CASSTRGTRGNQPQHF

SEQ ID NO: 216329 - protein, 14 aa, Homo sapiens
  CDR3 for alpha chain variable domain of TCR clone 108165 (TRAV12-2, TRAJ45)
CAVNIGGGADGLTF

SEQ ID NO: 216330 - protein, 13 aa, Homo sapiens
  CDR3 for beta chain variable domain of TCR clone 108165 (TRBV19, TRBJ2-2)
CASSIWSTGDLFF

SEQ ID NO: 216331 - protein, 12 aa, Homo sapiens
  CDR3 for alpha chain variable domain of TCR clone 108166 (TRAV9-2, TRAJ36)
CALKKGANNPFF

SEQ ID NO: 216332 - protein, 13 aa, Homo sapiens
  CDR3 for beta chain variable domain of TCR clone 108166 (TRBV27, TRBJ1-1)
CASSLSIGAEAFF

SEQ ID NO: 216333 - protein, 10 aa, Homo sapiens
  CDR3 for alpha chain variable domain of TCR clone 108167 (TRAV5, TRAJ34)
CAEYTDKLIF

SEQ ID NO: 216334 - protein, 12 aa, Homo sapiens
  CDR3 for beta chain variable domain of TCR clone 108167 (TRBV11-2, TRBJ2-2)
CASSLGGGELFF

SEQ ID NO: 216335 - protein, 12 aa, Homo sapiens
  CDR3 for alpha chain variable domain of TCR clone 108168 (TRAV16, TRAJ27)
CALNHQCRQINL

SEQ ID NO: 216336 - protein, 15 aa, Homo sapiens
  CDR3 for beta chain variable domain of TCR clone 108168 (TRBV19, TRBJ2-4)
CASRGPRRGENIQYF

SEQ ID NO: 216337 - protein, 14 aa, Homo sapiens
  CDR3 for alpha chain variable domain of TCR clone 108169 (TRAV12-3, TRAJ10)
SHLPLKGGGNKLTF

SEQ ID NO: 216338 - protein, 13 aa, Homo sapiens
  CDR3 for beta chain variable domain of TCR clone 108169 (TRBV7-9, TRBJ1-2)
CASSLKQNYGYTF

SEQ ID NO: 216339 - protein, 12 aa, Homo sapiens
  CDR3 for alpha chain variable domain of TCR clone 108170 (TRAV12-2, TRAJ42)
CAGGGSQGNLIF

SEQ ID NO: 216340 - protein, 16 aa, Homo sapiens
  CDR3 for beta chain variable domain of TCR clone 108170 (TRBV7-3, TRBJ2-2)
CASSLKRGTLSGELFF

SEQ ID NO: 216341 - protein, 16 aa, Homo sapiens
  CDR3 for alpha chain variable domain of TCR clone 108171 (TRAV27, TRAJ53)
CAAPEGSGGINYKLTF

SEQ ID NO: 216342 - protein, 14 aa, Homo sapiens
  CDR3 for beta chain variable domain of TCR clone 108171 (TRBV4-3, TRBJ1-5)
CASSQGGQGWPQHF

SEQ ID NO: 216343 - protein, 17 aa, Homo sapiens
  CDR3 for alpha chain variable domain of TCR clone 108172 (TRAV17, TRAJ28)
CATDPRRCGAGSYQLTF

SEQ ID NO: 216344 - protein, 16 aa, Homo sapiens
  CDR3 for beta chain variable domain of TCR clone 108172 (TRBV25-1, TRBJ1-1)
CASSGDRDRGRIEAFF

SEQ ID NO: 216345 - protein, 18 aa, Homo sapiens
  CDR3 for alpha chain variable domain of TCR clone 108173 (TRAV26-1, TRAJ22)
CIVRVALISSGSARQLTF

SEQ ID NO: 216346 - protein, 13 aa, Homo sapiens
  CDR3 for beta chain variable domain of TCR clone 108173 (TRBV13, TRBJ2-5)
CASSPEVGETRYF

SEQ ID NO: 216347 - protein, 13 aa, Homo sapiens
  CDR3 for alpha chain variable domain of TCR clone 108174 (TRAV6, TRAJ20)
CALAVANDYKLSF

SEQ ID NO: 216348 - protein, 16 aa, Homo sapiens
  CDR3 for beta chain variable domain of TCR clone 108174 (TRBV7-9, TRBJ2-1)
CASSDVAGGSYNEQFF

SEQ ID NO: 216349 - protein, 14 aa, Homo sapiens
  CDR3 for alpha chain variable domain of TCR clone 108175 (TRAV10, TRAJ32)
CGEPRGGATNKLIF

SEQ ID NO: 216350 - protein, 14 aa, Homo sapiens
  CDR3 for beta chain variable domain of TCR clone 108175 (TRBV5-4, TRBJ2-2)
CTSRLDGGTGELFF

SEQ ID NO: 216351 - protein, 14 aa, Homo sapiens
  CDR3 for alpha chain variable domain of TCR clone 108176 (TRAV12-2, TRAJ6)
CASKWGGGSYIPTF

SEQ ID NO: 216352 - protein, 13 aa, Homo sapiens
  CDR3 for beta chain variable domain of TCR clone 108176 (TRBV2, TRBJ1-1)
CTSSEGGNTEAFF

SEQ ID NO: 216353 - protein, 12 aa, Homo sapiens
  CDR3 for alpha chain variable domain of TCR clone 108177 (TRAV12-3, TRAJ17)
CAMTLTGDKLTF

SEQ ID NO: 216354 - protein, 15 aa, Homo sapiens
  CDR3 for beta chain variable domain of TCR clone 108177 (TRBV20-1, TRBJ2-7)
RSARDRVSGMDEQYF

SEQ ID NO: 216355 - protein, 19 aa, Homo sapiens
  CDR3 for alpha chain variable domain of TCR clone 108178 (TRAV1-2, TRAJ26)
CLLPLCCERPDNYGQNFVF

SEQ ID NO: 216356 - protein, 14 aa, Homo sapiens
  CDR3 for beta chain variable domain of TCR clone 108178 (TRBV12-4, TRBJ1-6)
CASNLQGKGSTLHF

SEQ ID NO: 216357 - protein, 13 aa, Homo sapiens
  CDR3 for alpha chain variable domain of TCR clone 108179 (TRAV27, TRAJ53)
CAGQGGGNYKLTF

SEQ ID NO: 216358 - protein, 13 aa, Homo sapiens
  CDR3 for beta chain variable domain of TCR clone 108179 (TRBV29-1, TRBJ1-1)
CSVESGFGTEAFF

SEQ ID NO: 216359 - protein, 11 aa, Homo sapiens
  CDR3 for alpha chain variable domain of TCR clone 108180 (TRAV39, TRAJ49)
CAVDISTQFYF

SEQ ID NO: 216360 - protein, 11 aa, Homo sapiens
  CDR3 for beta chain variable domain of TCR clone 108180 (TRBV7-8, TRBJ2-7)
CASRLSLEQYF

SEQ ID NO: 216361 - protein, 15 aa, Homo sapiens
  CDR3 for alpha chain variable domain of TCR clone 108181 (TRAV8-3, TRAJ27)
CAVGPSKTNAGKSTF

SEQ ID NO: 216362 - protein, 15 aa, Homo sapiens
  CDR3 for beta chain variable domain of TCR clone 108181 (TRBV7-2, TRBJ2-1)
CASSSGLAGGNEKFF

SEQ ID NO: 216363 - protein, 10 aa, Homo sapiens
  CDR3 for alpha chain variable domain of TCR clone 108182 (TRAV16, TRAJ26)
CAPEELCSEF

SEQ ID NO: 216364 - protein, 15 aa, Homo sapiens
  CDR3 for beta chain variable domain of TCR clone 108182 (TRBV7-2, TRBJ2-3)
CASSLTGTSTDTQYF

SEQ ID NO: 216365 - protein, 14 aa, Homo sapiens
  CDR3 for alpha chain variable domain of TCR clone 108183 (TRAV12-1, TRAJ13)
CVVIDSVGYQKVTF

SEQ ID NO: 216366 - protein, 12 aa, Homo sapiens
  CDR3 for beta chain variable domain of TCR clone 108183 (TRBV29-1, TRBJ2-3)
CSVTGGADTQYF

SEQ ID NO: 216367 - protein, 12 aa, Homo sapiens
  CDR3 for alpha chain variable domain of TCR clone 108184 (TRAV16, TRAJ22)
CALEVSARQLTF

SEQ ID NO: 216368 - protein, 14 aa, Homo sapiens
  CDR3 for beta chain variable domain of TCR clone 108184 (TRBV11-2, TRBJ2-3)
YASSSIASTDTQYF

SEQ ID NO: 216369 - protein, 16 aa, Homo sapiens
  CDR3 for alpha chain variable domain of TCR clone 108185 (TRAV3, TRAJ37)
CAVRPHGSGNTGKLIF

SEQ ID NO: 216370 - protein, 17 aa, Homo sapiens
  CDR3 for beta chain variable domain of TCR clone 108185 (TRBV28, TRBJ2-5)
CASSTPEGDALQETQYF

SEQ ID NO: 216371 - protein, 19 aa, Homo sapiens
  CDR3 for alpha chain variable domain of TCR clone 108186 (TRAV26-1, TRAJ32)
CCVLLHRQTFGGATNKLIF

SEQ ID NO: 216372 - protein, 13 aa, Homo sapiens
  CDR3 for beta chain variable domain of TCR clone 108186 (TRBV5-1, TRBJ2-1)
CASSLGSYNEQFF

SEQ ID NO: 216373 - protein, 16 aa, Homo sapiens
  CDR3 for alpha chain variable domain of TCR clone 108187 (TRAV12-3, TRAJ53)
CAMSPGSGGSNYKLTF

SEQ ID NO: 216374 - protein, 17 aa, Homo sapiens
  CDR3 for beta chain variable domain of TCR clone 108187 (TRBV28, TRBJ2-7)
CASSPLHRASGVYEQYF

SEQ ID NO: 216375 - protein, 13 aa, Homo sapiens
  CDR3 for alpha chain variable domain of TCR clone 108188 (TRAV12-3, TRAJ13)
CAMSSGGYQKVTF

SEQ ID NO: 216376 - protein, 13 aa, Homo sapiens
  CDR3 for beta chain variable domain of TCR clone 108188 (TRBV20-1, TRBJ1-1)
CSARPGGHTEAFF

SEQ ID NO: 216377 - protein, 15 aa, Homo sapiens
  CDR3 for alpha chain variable domain of TCR clone 108189 (TRAV21, TRAJ52)
CAVRGGGTSYGKMTF

SEQ ID NO: 216378 - protein, 15 aa, Homo sapiens
  CDR3 for beta chain variable domain of TCR clone 108189 (TRBV18, TRBJ1-5)
CASSPSDRSNQPQHF

SEQ ID NO: 216379 - protein, 20 aa, Homo sapiens
  CDR3 for alpha chain variable domain of TCR clone 108190 (TRAV12-3, TRAJ41)
SLFIRDSQPSDSATPEALNF

SEQ ID NO: 216380 - protein, 18 aa, Homo sapiens
  CDR3 for beta chain variable domain of TCR clone 108190 (TRBV7-9, TRBJ2-7)
CASSLTTSGSRTWYEQYF

SEQ ID NO: 216381 - protein, 13 aa, Homo sapiens
  CDR3 for alpha chain variable domain of TCR clone 108191 (TRAV13-1, TRAJ21)
CAASIYNFNKFYF

SEQ ID NO: 216382 - protein, 12 aa, Homo sapiens
  CDR3 for beta chain variable domain of TCR clone 108191 (TRBV29-1, TRBJ2-3)
CSVTGGADTQYF

SEQ ID NO: 216383 - protein, 16 aa, Homo sapiens
  CDR3 for alpha chain variable domain of TCR clone 108192 (TRAV8-3, TRAJ13)
CAVGAYPSGGYQKVTF

SEQ ID NO: 216384 - protein, 11 aa, Homo sapiens
  CDR3 for beta chain variable domain of TCR clone 108192 (TRBV19, TRBJ1-1)
CASSIGSEAFF

SEQ ID NO: 216385 - protein, 13 aa, Homo sapiens
  CDR3 for alpha chain variable domain of TCR clone 108193 (TRAV13-1, TRAJ20)
CAARVSNDYKLSF

SEQ ID NO: 216386 - protein, 16 aa, Homo sapiens
  CDR3 for beta chain variable domain of TCR clone 108193 (TRBV11-1, TRBJ1-1)
CATNTRDRAFNTEAFF

SEQ ID NO: 216387 - protein, 13 aa, Homo sapiens
  CDR3 for alpha chain variable domain of TCR clone 108194 (TRAV12-3, TRAJ23)
CAMRNNQGGKLIF

SEQ ID NO: 216388 - protein, 14 aa, Homo sapiens
  CDR3 for beta chain variable domain of TCR clone 108194 (TRBV7-2, TRBJ2-5)
CASSPRGSSETQYF

SEQ ID NO: 216389 - protein, 12 aa, Homo sapiens
  CDR3 for alpha chain variable domain of TCR clone 108195 (TRAV17, TRAJ4)
CATDGGYNKLIF

SEQ ID NO: 216390 - protein, 13 aa, Homo sapiens
  CDR3 for beta chain variable domain of TCR clone 108195 (TRBV29-1, TRBJ2-2)
CSTTGVNTGEMFF

SEQ ID NO: 216391 - protein, 15 aa, Homo sapiens
  CDR3 for alpha chain variable domain of TCR clone 108196 (TRAV25, TRAJ53)
CAATGGGGSNYKLTF

SEQ ID NO: 216392 - protein, 19 aa, Homo sapiens
  CDR3 for beta chain variable domain of TCR clone 108196 (TRBV7-2, TRBJ2-3)
CASSFLSRNCGGGTDTQYF

SEQ ID NO: 216393 - protein, 14 aa, Homo sapiens
  CDR3 for alpha chain variable domain of TCR clone 108197 (TRAV12-1, TRAJ3)
CVVNPGGSASKIIF

SEQ ID NO: 216394 - protein, 14 aa, Homo sapiens
  CDR3 for beta chain variable domain of TCR clone 108197 (TRBV20-1, TRBJ2-3)
CSARGGTSTDTQYF

SEQ ID NO: 216395 - protein, 13 aa, Homo sapiens
  CDR3 for alpha chain variable domain of TCR clone 108198 (TRAV13-1, TRAJ13)
CAASKGGYQKVTF

SEQ ID NO: 216396 - protein, 16 aa, Homo sapiens
  CDR3 for beta chain variable domain of TCR clone 108198 (TRBV18, TRBJ1-2)
CASSPPESVTIYGYTF

SEQ ID NO: 216397 - protein, 13 aa, Homo sapiens
  CDR3 for alpha chain variable domain of TCR clone 108199 (TRAV13-1, TRAJ33)
CAASRAGNYQLIW

SEQ ID NO: 216398 - protein, 16 aa, Homo sapiens
  CDR3 for beta chain variable domain of TCR clone 108199 (TRBV2, TRBJ2-7)
CASSEQYFGPDTRLTV

SEQ ID NO: 216399 - protein, 14 aa, Homo sapiens
  CDR3 for alpha chain variable domain of TCR clone 108200 (TRAV1-2, TRAJ16)
CAVNRFSDGQKLPF

SEQ ID NO: 216400 - protein, 13 aa, Homo sapiens
  CDR3 for beta chain variable domain of TCR clone 108200 (TRBV7-3, TRBJ1-1)
CASSQDWGAEAFF

SEQ ID NO: 216401 - protein, 13 aa, Homo sapiens
  CDR3 for alpha chain variable domain of TCR clone 108201 (TRAV12-2, TRAJ11)
CAVPNSGYSTLTF

SEQ ID NO: 216402 - protein, 14 aa, Homo sapiens
  CDR3 for beta chain variable domain of TCR clone 108201 (TRBV4-1, TRBJ2-2)
CASSQAVNTGELFS

SEQ ID NO: 216403 - protein, 14 aa, Homo sapiens
  CDR3 for alpha chain variable domain of TCR clone 108202 (TRAV16, TRAJ44)
CALSTTGTASKLTF

SEQ ID NO: 216404 - protein, 12 aa, Homo sapiens
  CDR3 for beta chain variable domain of TCR clone 108202 (TRBV11-2, TRBJ2-1)
CASSPGNNEQFF

SEQ ID NO: 216405 - protein, 12 aa, Homo sapiens
  CDR3 for alpha chain variable domain of TCR clone 108203 (TRAV25, TRAJ38)
RAGTGNNRKLIW

SEQ ID NO: 216406 - protein, 14 aa, Homo sapiens
  CDR3 for beta chain variable domain of TCR clone 108203 (TRBV5-4, TRBJ1-1)
CASSLDSRRDEAFF

SEQ ID NO: 216407 - protein, 12 aa, Homo sapiens
  CDR3 for alpha chain variable domain of TCR clone 108204 (TRAV13-1, TRAJ20)
CAARQNDYKLSF

SEQ ID NO: 216408 - protein, 12 aa, Homo sapiens
  CDR3 for beta chain variable domain of TCR clone 108204 (TRBV7-8, TRBJ2-7)
CASSLGDREQYF

SEQ ID NO: 216409 - protein, 15 aa, Homo sapiens
  CDR3 for alpha chain variable domain of TCR clone 108205 (TRAV26-1, TRAJ40)
SIVRVTTSGTYKYIF

SEQ ID NO: 216410 - protein, 12 aa, Homo sapiens
  CDR3 for beta chain variable domain of TCR clone 108205 (TRBV7-9, TRBJ1-4)
CASSTDREKLFF

SEQ ID NO: 216411 - protein, 11 aa, Homo sapiens
  CDR3 for alpha chain variable domain of TCR clone 108206 (TRAV1-2, TRAJ20)
CAVANDYKLSF

SEQ ID NO: 216412 - protein, 15 aa, Homo sapiens
  CDR3 for beta chain variable domain of TCR clone 108206 (TRBV12-4, TRBJ2-5)
CASSPPTGLQETQYF

SEQ ID NO: 216413 - protein, 11 aa, Homo sapiens
  CDR3 for alpha chain variable domain of TCR clone 108207 (TRAV23/DV6, TRAJ17)
CKWAAGNKLTF

SEQ ID NO: 216414 - protein, 13 aa, Homo sapiens
  CDR3 for beta chain variable domain of TCR clone 108207 (TRBV28, TRBJ2-7)
CASRSSGVYEQYF

SEQ ID NO: 216415 - protein, 10 aa, Homo sapiens
  CDR3 for alpha chain variable domain of TCR clone 108208 (TRAV12-3, TRAJ49)
CAVHGNRFYF

SEQ ID NO: 216416 - protein, 12 aa, Homo sapiens
  CDR3 for beta chain variable domain of TCR clone 108208 (TRBV24-1, TRBJ2-7)
CATSDPGYEQYF

SEQ ID NO: 216417 - protein, 14 aa, Homo sapiens
  CDR3 for alpha chain variable domain of TCR clone 108209 (TRAV1-2, TRAJ16)
YAVNRFSDGQKLLF

SEQ ID NO: 216418 - protein, 14 aa, Homo sapiens
  CDR3 for beta chain variable domain of TCR clone 108209 (TRBV19, TRBJ2-1)
CASPTFVLSGEQFF

SEQ ID NO: 216419 - protein, 14 aa, Homo sapiens
  CDR3 for alpha chain variable domain of TCR clone 108210 (TRAV35, TRAJ33)
CVGSSQDSNYQLIW

SEQ ID NO: 216420 - protein, 15 aa, Homo sapiens
  CDR3 for beta chain variable domain of TCR clone 108210 (TRBV5-1, TRBJ1-4)
FAPAAWKDGNEKLFF

SEQ ID NO: 216421 - protein, 14 aa, Homo sapiens
  CDR3 for alpha chain variable domain of TCR clone 108211 (TRAV26-1, TRAJ38)
CIADNAGNNRKLIW

SEQ ID NO: 216422 - protein, 19 aa, Homo sapiens
  CDR3 for beta chain variable domain of TCR clone 108211 (TRBV7-2, TRBJ2-3)
CASSLVLSAYISRPDTQYF

SEQ ID NO: 216423 - protein, 15 aa, Homo sapiens
  CDR3 for alpha chain variable domain of TCR clone 108212 (TRAV12-1, TRAJ48)
CVVNPLGFGNEKLTF

SEQ ID NO: 216424 - protein, 11 aa, Homo sapiens
  CDR3 for beta chain variable domain of TCR clone 108212 (TRBV6-1, TRBJ2-7)
CASSDLYEQYF

SEQ ID NO: 216425 - protein, 15 aa, Homo sapiens
  CDR3 for alpha chain variable domain of TCR clone 108213 (TRAV21, TRAJ53)
CATLNSGGSNYKLTF

SEQ ID NO: 216426 - protein, 17 aa, Homo sapiens
  CDR3 for beta chain variable domain of TCR clone 108213 (TRBV20-1, TRBJ2-2)
CSASGSGQGGLTRELFF

SEQ ID NO: 216427 - protein, 16 aa, Homo sapiens
  CDR3 for alpha chain variable domain of TCR clone 108214 (TRAV29/DV5, TRAJ52)
CSKREAGGTSYGKLTF

SEQ ID NO: 216428 - protein, 13 aa, Homo sapiens
  CDR3 for beta chain variable domain of TCR clone 108214 (TRBV27, TRBJ1-4)
CASSLMGDEKLFF

SEQ ID NO: 216429 - protein, 15 aa, Homo sapiens
  CDR3 for alpha chain variable domain of TCR clone 108215 (TRAV8-3, TRAJ27)
CAVGPSKTNAGKSTF

SEQ ID NO: 216430 - protein, 15 aa, Homo sapiens
  CDR3 for beta chain variable domain of TCR clone 108215 (TRBV7-2, TRBJ2-1)
CASSSGLAGGKEQFF

SEQ ID NO: 216431 - protein, 14 aa, Homo sapiens
  CDR3 for alpha chain variable domain of TCR clone 108216 (TRAV17, TRAJ35)
CATDRPGFGNVLPC

SEQ ID NO: 216432 - protein, 19 aa, Homo sapiens
  CDR3 for beta chain variable domain of TCR clone 108216 (TRBV11-3, TRBJ2-2)
CASSTRPGAKTTNTGELFF

SEQ ID NO: 216433 - protein, 23 aa, Homo sapiens
  CDR3 for alpha chain variable domain of TCR clone 108217 (TRAV26-1, TRAJ38)
CIADNAGNNHIQDPDPAVYQLRD

SEQ ID NO: 216434 - protein, 12 aa, Homo sapiens
  CDR3 for beta chain variable domain of TCR clone 108217 (TRBV11-2, TRBJ2-2)
CASSLGGGELFF

SEQ ID NO: 216435 - protein, 14 aa, Homo sapiens
  CDR3 for alpha chain variable domain of TCR clone 108218 (TRAV1-2, TRAJ16)
CAVNRFSDGQKLLF

SEQ ID NO: 216436 - protein, 13 aa, Homo sapiens
  CDR3 for beta chain variable domain of TCR clone 108218 (TRBV10-3, TRBJ2-7)
CASKLAVNCEQYF

SEQ ID NO: 216437 - protein, 14 aa, Homo sapiens
  CDR3 for alpha chain variable domain of TCR clone 108219 (TRAV2, TRAJ9)
CAVEDRSGGFKTIF

SEQ ID NO: 216438 - protein, 13 aa, Homo sapiens
  CDR3 for beta chain variable domain of TCR clone 108219 (TRBV7-3, TRBJ2-5)
CASSVRGGETQYF

SEQ ID NO: 216439 - protein, 15 aa, Homo sapiens
  CDR3 for alpha chain variable domain of TCR clone 108220 (TRAV26-1, TRAJ9)
CIVRESNTRGFKTIF

SEQ ID NO: 216440 - protein, 11 aa, Homo sapiens
  CDR3 for beta chain variable domain of TCR clone 108220 (TRBV7-6, TRBJ2-5)
CASSFQETQYF

SEQ ID NO: 216441 - protein, 13 aa, Homo sapiens
  CDR3 for alpha chain variable domain of TCR clone 108221 (TRAV26-2, TRAJ43)
CILRAVNNNDMRF

SEQ ID NO: 216442 - protein, 15 aa, Homo sapiens
  CDR3 for beta chain variable domain of TCR clone 108221 (TRBV13, TRBJ1-2)
CASSLGRQPGYGYTF

SEQ ID NO: 216443 - protein, 13 aa, Homo sapiens
  CDR3 for alpha chain variable domain of TCR clone 108222 (TRAV26-1, TRAJ30)
CIVNMNRDDKIIF

SEQ ID NO: 216444 - protein, 13 aa, Homo sapiens
  CDR3 for beta chain variable domain of TCR clone 108222 (TRBV7-2, TRBJ2-2)
CASSLAVTGELFF

SEQ ID NO: 216445 - protein, 16 aa, Homo sapiens
  CDR3 for alpha chain variable domain of TCR clone 108223 (TRAV12-2, TRAJ45)
CAVKRNPGGGADGLTF

SEQ ID NO: 216446 - protein, 12 aa, Homo sapiens
  CDR3 for beta chain variable domain of TCR clone 108223 (TRBV6-1, TRBJ2-5)
CASSEGRETQYV

SEQ ID NO: 216447 - protein, 12 aa, Homo sapiens
  CDR3 for alpha chain variable domain of TCR clone 108224 (TRAV12-1, TRAJ29)
CVADSGNKPLVF

SEQ ID NO: 216448 - protein, 12 aa, Homo sapiens
  CDR3 for beta chain variable domain of TCR clone 108224 (TRBV2, TRBJ2-7)
CASKRGSYEQYF

SEQ ID NO: 216449 - protein, 12 aa, Homo sapiens
  CDR3 for alpha chain variable domain of TCR clone 108225 (TRAV29/DV5, TRAJ54)
CATSRGAQKLVF

SEQ ID NO: 216450 - protein, 13 aa, Homo sapiens
  CDR3 for beta chain variable domain of TCR clone 108225 (TRBV7-9, TRBJ1-2)
CASSLKQNYGYTF

SEQ ID NO: 216451 - protein, 12 aa, Homo sapiens
  CDR3 for alpha chain variable domain of TCR clone 108226 (TRAV3, TRAJ20)
CAVRDPDYKLSF

SEQ ID NO: 216452 - protein, 14 aa, Homo sapiens
  CDR3 for beta chain variable domain of TCR clone 108226 (TRBV7-2, TRBJ2-7)
CASSGLAGRGEQYF

SEQ ID NO: 216453 - protein, 15 aa, Homo sapiens
  CDR3 for alpha chain variable domain of TCR clone 108227 (TRAV26-1, TRAJ29)
CIVRVEGSGNTPLVF

SEQ ID NO: 216454 - protein, 12 aa, Homo sapiens
  CDR3 for beta chain variable domain of TCR clone 108227 (TRBV7-2, TRBJ2-3)
CASSLIGETQYF

SEQ ID NO: 216455 - protein, 15 aa, Homo sapiens
  CDR3 for alpha chain variable domain of TCR clone 108228 (TRAV3, TRAJ32)
CAVSSYGGATNKLIF

SEQ ID NO: 216456 - protein, 14 aa, Homo sapiens
  CDR3 for beta chain variable domain of TCR clone 108228 (TRBV12-5, TRBJ2-5)
CASGSRTHQETQYF

SEQ ID NO: 216457 - protein, 14 aa, Homo sapiens
  CDR3 for alpha chain variable domain of TCR clone 108229 (TRAV12-2, TRAJ24)
CAVTPADSWGKLPF

SEQ ID NO: 216458 - protein, 15 aa, Homo sapiens
  CDR3 for beta chain variable domain of TCR clone 108229 (TRBV27, TRBJ2-1)
CASSNGGGSSNEQFF

SEQ ID NO: 216459 - protein, 16 aa, Homo sapiens
  CDR3 for alpha chain variable domain of TCR clone 108230 (TRAV14/DV4, TRAJ20)
CAMREGRSRDDCKLSF

SEQ ID NO: 216460 - protein, 17 aa, Homo sapiens
  CDR3 for beta chain variable domain of TCR clone 108230 (TRBV15, TRBJ1-1)
CATSRVGGADGDTEAFF

SEQ ID NO: 216461 - protein, 15 aa, Homo sapiens
  CDR3 for alpha chain variable domain of TCR clone 108231 (TRAV25, TRAJ53)
CPTSNSGGSNYKLTF

SEQ ID NO: 216462 - protein, 13 aa, Homo sapiens
  CDR3 for beta chain variable domain of TCR clone 108231 (TRBV7-3, TRBJ1-1)
CASSQDWGAEAFF

SEQ ID NO: 216463 - protein, 16 aa, Homo sapiens
  CDR3 for alpha chain variable domain of TCR clone 108232 (TRAV17, TRAJ52)
CATGIMGGTSYGKLTF

SEQ ID NO: 216464 - protein, 12 aa, Homo sapiens
  CDR3 for beta chain variable domain of TCR clone 108232 (TRBV7-3, TRBJ2-1)
CASSFINNEQFF

SEQ ID NO: 216465 - protein, 13 aa, Homo sapiens
  CDR3 for alpha chain variable domain of TCR clone 108233 (TRAV21, TRAJ27)
CASRPGNAGKSTF

SEQ ID NO: 216466 - protein, 12 aa, Homo sapiens
  CDR3 for beta chain variable domain of TCR clone 108233 (TRBV11-2, TRBJ2-2)
CASSLGGGELFF

SEQ ID NO: 216467 - protein, 11 aa, Homo sapiens
  CDR3 for alpha chain variable domain of TCR clone 108234 (TRAV12-1, TRAJ21)
CVVNNFNKFYF

SEQ ID NO: 216468 - protein, 12 aa, Homo sapiens
  CDR3 for beta chain variable domain of TCR clone 108234 (TRBV28, TRBJ2-1)
CASSVQINEQFF

SEQ ID NO: 216469 - protein, 17 aa, Homo sapiens
  CDR3 for alpha chain variable domain of TCR clone 108235 (TRAV3, TRAJ42)
CAVRDMDYGGSQGNLIF

SEQ ID NO: 216470 - protein, 15 aa, Homo sapiens
  CDR3 for beta chain variable domain of TCR clone 108235 (TRBV2, TRBJ2-7)
CASSEGLARSYEQYF

SEQ ID NO: 216471 - protein, 18 aa, Homo sapiens
  CDR3 for alpha chain variable domain of TCR clone 108236 (TRAV21, TRAJ52)
CAVRPSTAGGTSYGKLTF

SEQ ID NO: 216472 - protein, 17 aa, Homo sapiens
  CDR3 for beta chain variable domain of TCR clone 108236 (TRBV13, TRBJ2-3)
YASSLSRVAGGRNTQYF

SEQ ID NO: 216473 - protein, 13 aa, Homo sapiens
  CDR3 for alpha chain variable domain of TCR clone 108237 (TRAV3, TRAJ27)
CAVRPLGAGKSTF

SEQ ID NO: 216474 - protein, 16 aa, Homo sapiens
  CDR3 for beta chain variable domain of TCR clone 108237 (TRBV19, TRBJ2-2)
CASRSPGTGATGELFF

SEQ ID NO: 216475 - protein, 13 aa, Homo sapiens
  CDR3 for alpha chain variable domain of TCR clone 108238 (TRAV21, TRAJ57)
CAVTQGGSEKLVF

SEQ ID NO: 216476 - protein, 15 aa, Homo sapiens
  CDR3 for beta chain variable domain of TCR clone 108238 (TRBV2, TRBJ2-3)
CASSERSGHTDTQYF

SEQ ID NO: 216477 - protein, 15 aa, Homo sapiens
  CDR3 for alpha chain variable domain of TCR clone 108239 (TRAV8-3, TRAJ45)
CASSSSGGGADGLTF

SEQ ID NO: 216478 - protein, 16 aa, Homo sapiens
  CDR3 for beta chain variable domain of TCR clone 108239 (TRBV7-9, TRBJ2-2)
CASSGFGGANTGELFF

SEQ ID NO: 216479 - protein, 15 aa, Homo sapiens
  CDR3 for alpha chain variable domain of TCR clone 108240 (TRAV16, TRAJ52)
CSKCSCGTSYGKLTF

SEQ ID NO: 216480 - protein, 12 aa, Homo sapiens
  CDR3 for beta chain variable domain of TCR clone 108240 (TRBV12-4, TRBJ1-3)
CASSFSGNTIYF

SEQ ID NO: 216481 - protein, 14 aa, Homo sapiens
  CDR3 for alpha chain variable domain of TCR clone 108241 (TRAV1-2, TRAJ16)
CAVNRFSDAQKLLF

SEQ ID NO: 216482 - protein, 15 aa, Homo sapiens
  CDR3 for beta chain variable domain of TCR clone 108241 (TRBV9, TRBJ1-6)
CASSVAGTGDSPLHF

SEQ ID NO: 216483 - protein, 18 aa, Homo sapiens
  CDR3 for alpha chain variable domain of TCR clone 108242 (TRAV8-6, TRAJ36)
CAVSDGLRDWGKQPLLWD

SEQ ID NO: 216484 - protein, 16 aa, Homo sapiens
  CDR3 for beta chain variable domain of TCR clone 108242 (TRBV28, TRBJ2-1)
CASSSPEYPRGNEQFF

SEQ ID NO: 216485 - protein, 12 aa, Homo sapiens
  CDR3 for alpha chain variable domain of TCR clone 108243 (TRAV8-3, TRAJ43)
CAVVDNNNDMRF

SEQ ID NO: 216486 - protein, 17 aa, Homo sapiens
  CDR3 for beta chain variable domain of TCR clone 108243 (TRBV11-2, TRBJ2-1)
CASSLYPPGVEYNEQFF

SEQ ID NO: 216487 - protein, 17 aa, Homo sapiens
  CDR3 for alpha chain variable domain of TCR clone 108244 (TRAV23/DV6, TRAJ12)
CAAIDLGAMDSSYKLIF

SEQ ID NO: 216488 - protein, 12 aa, Homo sapiens
  CDR3 for beta chain variable domain of TCR clone 108244 (TRBV10-3, TRBJ2-2)
CAIRENTGELLF

SEQ ID NO: 216489 - protein, 15 aa, Homo sapiens
  CDR3 for alpha chain variable domain of TCR clone 108245 (TRAV2, TRAJ24)
CAVVRLKNSWGKLQF

SEQ ID NO: 216490 - protein, 19 aa, Homo sapiens
  CDR3 for beta chain variable domain of TCR clone 108245 (TRBV7-7, TRBJ2-3)
CIAVPAAQGLAGGRNTQYF

SEQ ID NO: 216491 - protein, 11 aa, Homo sapiens
  CDR3 for alpha chain variable domain of TCR clone 108246 (TRAV2, TRAJ33)
CAVESNYQLIW

SEQ ID NO: 216492 - protein, 15 aa, Homo sapiens
  CDR3 for beta chain variable domain of TCR clone 108246 (TRBV19, TRBJ1-1)
FASTSGQIQNTEAFF

SEQ ID NO: 216493 - protein, 17 aa, Homo sapiens
  CDR3 for alpha chain variable domain of TCR clone 108247 (TRAV8-3, TRAJ34)
CAIPGKLIFGTVTRLQV

SEQ ID NO: 216494 - protein, 15 aa, Homo sapiens
  CDR3 for beta chain variable domain of TCR clone 108247 (TRBV5-7, TRBJ2-1)
CASSRRLAGDNEQFF

SEQ ID NO: 216495 - protein, 13 aa, Homo sapiens
  CDR3 for alpha chain variable domain of TCR clone 108248 (TRAV8-3, TRAJ44)
CAVVPGTASKLTF

SEQ ID NO: 216496 - protein, 16 aa, Homo sapiens
  CDR3 for beta chain variable domain of TCR clone 108248 (TRBV7-9, TRBJ2-3)
CASSPWREVGTDTQYF

SEQ ID NO: 216497 - protein, 17 aa, Homo sapiens
  CDR3 for alpha chain variable domain of TCR clone 108249 (TRAV17, TRAJ24)
CATANSMTTDSWGKLQF

SEQ ID NO: 216498 - protein, 15 aa, Homo sapiens
  CDR3 for beta chain variable domain of TCR clone 108249 (TRBV18, TRBJ2-5)
CASSPDPGLQETQYF

SEQ ID NO: 216499 - protein, 14 aa, Homo sapiens
  CDR3 for alpha chain variable domain of TCR clone 108250 (TRAV26-1, TRAJ45)
CIEVTGGGADGLPF

SEQ ID NO: 216500 - protein, 13 aa, Homo sapiens
  CDR3 for beta chain variable domain of TCR clone 108250 (TRBV7-6, TRBJ1-2)
CASSLVADYGYAF

SEQ ID NO: 216501 - protein, 14 aa, Homo sapiens
  CDR3 for alpha chain variable domain of TCR clone 108251 (TRAV12-3, TRAJ21)
CAATDLYNFNKFYF

SEQ ID NO: 216502 - protein, 13 aa, Homo sapiens
  CDR3 for beta chain variable domain of TCR clone 108251 (TRBV19, TRBJ2-2)
CASSSKNTGELFC

SEQ ID NO: 216503 - protein, 12 aa, Homo sapiens
  CDR3 for alpha chain variable domain of TCR clone 108252 (TRAV13-1, TRAJ36)
WRGGAGATNLFF

SEQ ID NO: 216504 - protein, 16 aa, Homo sapiens
  CDR3 for beta chain variable domain of TCR clone 108252 (TRBV7-9, TRBJ2-5)
CASRLEIGTRKETQYF

SEQ ID NO: 216505 - protein, 15 aa, Homo sapiens
  CDR3 for alpha chain variable domain of TCR clone 108253 (TRAV3, TRAJ36)
CAVRASQTGANNLFF

SEQ ID NO: 216506 - protein, 13 aa, Homo sapiens
  CDR3 for beta chain variable domain of TCR clone 108253 (TRBV7-2, TRBJ2-7)
CASRTSSSWEQYF

SEQ ID NO: 216507 - protein, 14 aa, Homo sapiens
  CDR3 for alpha chain variable domain of TCR clone 108254 (TRAV17, TRAJ57)
CATDPQGGSEKLVF

SEQ ID NO: 216508 - protein, 11 aa, Homo sapiens
  CDR3 for beta chain variable domain of TCR clone 108254 (TRBV2, TRBJ1-1)
CASREGTEAFF

SEQ ID NO: 216509 - protein, 17 aa, Homo sapiens
  CDR3 for alpha chain variable domain of TCR clone 108255 (TRAV3, TRAJ42)
CAVRDRDYGGSQGSLIF

SEQ ID NO: 216510 - protein, 20 aa, Homo sapiens
  CDR3 for beta chain variable domain of TCR clone 108255 (TRBV28, TRBJ2-1)
CASTPIGRSPGLAGGNEQFF

SEQ ID NO: 216511 - protein, 14 aa, Homo sapiens
  CDR3 for alpha chain variable domain of TCR clone 108256 (TRAV26-1, TRAJ39)
CIVRANNAGNMLTF

SEQ ID NO: 216512 - protein, 11 aa, Homo sapiens
  CDR3 for beta chain variable domain of TCR clone 108256 (TRBV19, TRBJ1-2)
CASSISSGYTF

SEQ ID NO: 216513 - protein, 11 aa, Homo sapiens
  CDR3 for alpha chain variable domain of TCR clone 108257 (TRAV2, TRAJ13)
CASGGYQKVTF

SEQ ID NO: 216514 - protein, 15 aa, Homo sapiens
  CDR3 for beta chain variable domain of TCR clone 108257 (TRBV6-1, TRBJ2-2)
CASSRLRGDTGELFS

SEQ ID NO: 216515 - protein, 18 aa, Homo sapiens
  CDR3 for alpha chain variable domain of TCR clone 108258 (TRAV21, TRAJ52)
CAVRPSPASGTSYGKLTF

SEQ ID NO: 216516 - protein, 15 aa, Homo sapiens
  CDR3 for beta chain variable domain of TCR clone 108258 (TRBV6-6, TRBJ2-7)
CASSCSYGGSYEQYF

SEQ ID NO: 216517 - protein, 12 aa, Homo sapiens
  CDR3 for alpha chain variable domain of TCR clone 108259 (TRAV12-1, TRAJ34)
CVVAGATDKLTF

SEQ ID NO: 216518 - protein, 12 aa, Homo sapiens
  CDR3 for beta chain variable domain of TCR clone 108259 (TRBV7-9, TRBJ1-1)
CASSLVRGEAFF

SEQ ID NO: 216519 - protein, 13 aa, Homo sapiens
  CDR3 for alpha chain variable domain of TCR clone 108260 (TRAV13-2, TRAJ16)
CADARTDGQKLLF

SEQ ID NO: 216520 - protein, 15 aa, Homo sapiens
  CDR3 for beta chain variable domain of TCR clone 108260 (TRBV29-1, TRBJ2-1)
CSVEAPRGSPNEKFF

SEQ ID NO: 216521 - protein, 14 aa, Homo sapiens
  CDR3 for alpha chain variable domain of TCR clone 108261 (TRAV12-2, TRAJ40)
CAVKIPSGTYKNIF

SEQ ID NO: 216522 - protein, 15 aa, Homo sapiens
  CDR3 for beta chain variable domain of TCR clone 108261 (TRBV6-3, TRBJ2-7)
CASSSPGTVFYEQYF

SEQ ID NO: 216523 - protein, 14 aa, Homo sapiens
  CDR3 for alpha chain variable domain of TCR clone 108262 (TRAV12-3, TRAJ10)
SHLPLTGGGNRLTF

SEQ ID NO: 216524 - protein, 15 aa, Homo sapiens
  CDR3 for beta chain variable domain of TCR clone 108262 (TRBV29-1, TRBJ2-7)
CSVEFFDRGSYEQYF

SEQ ID NO: 216525 - protein, 14 aa, Homo sapiens
  CDR3 for alpha chain variable domain of TCR clone 108263 (TRAV20, TRAJ56)
CAVQFGGANSKLTF

SEQ ID NO: 216526 - protein, 14 aa, Homo sapiens
  CDR3 for beta chain variable domain of TCR clone 108263 (TRBV20-1, TRBJ2-7)
CSAKRGRSSYVQYF

SEQ ID NO: 216527 - protein, 11 aa, Homo sapiens
  CDR3 for alpha chain variable domain of TCR clone 108264 (TRAV16, TRAJ29)
LAPSGNTPLVF

SEQ ID NO: 216528 - protein, 15 aa, Homo sapiens
  CDR3 for beta chain variable domain of TCR clone 108264 (TRBV5-7, TRBJ2-7)
CASSPYFEGSYEQYF

SEQ ID NO: 216529 - protein, 11 aa, Homo sapiens
  CDR3 for alpha chain variable domain of TCR clone 108265 (TRAV1-2, TRAJ20)
CAVANDYKLSF

SEQ ID NO: 216530 - protein, 15 aa, Homo sapiens
  CDR3 for beta chain variable domain of TCR clone 108265 (TRBV7-2, TRBJ2-1)
CASSLVGSSCNEQFF

SEQ ID NO: 216531 - protein, 12 aa, Homo sapiens
  CDR3 for alpha chain variable domain of TCR clone 108266 (TRAV26-2, TRAJ21)
CILKGNFNKFYF

SEQ ID NO: 216532 - protein, 14 aa, Homo sapiens
  CDR3 for beta chain variable domain of TCR clone 108266 (TRBV18, TRBJ2-5)
CASSPGVSQETQYF

SEQ ID NO: 216533 - protein, 17 aa, Homo sapiens
  CDR3 for alpha chain variable domain of TCR clone 108267 (TRAV3, TRAJ6)
CAVIDGPRAGGSYIPTF

SEQ ID NO: 216534 - protein, 12 aa, Homo sapiens
  CDR3 for beta chain variable domain of TCR clone 108267 (TRBV29-1, TRBJ2-3)
CSVTGGADTQYF

SEQ ID NO: 216535 - protein, 15 aa, Homo sapiens
  CDR3 for alpha chain variable domain of TCR clone 108268 (TRAV3, TRAJ22)
CAVRDRGGSARQLTF

SEQ ID NO: 216536 - protein, 20 aa, Homo sapiens
  CDR3 for beta chain variable domain of TCR clone 108268 (TRBV28, TRBJ2-1)
CASTPIGRSPGLAGGNEQFF

SEQ ID NO: 216537 - protein, 16 aa, Homo sapiens
  CDR3 for alpha chain variable domain of TCR clone 108269 (TRAV30, TRAJ24)
CGTEIVDADSWGKFQF

SEQ ID NO: 216538 - protein, 15 aa, Homo sapiens
  CDR3 for beta chain variable domain of TCR clone 108269 (TRBV28, TRBJ2-5)
CASSPPWSYQETQYF

SEQ ID NO: 216539 - protein, 12 aa, Homo sapiens
  CDR3 for alpha chain variable domain of TCR clone 108270 (TRAV20, TRAJ54)
CAVQEGAQKLVF

SEQ ID NO: 216540 - protein, 17 aa, Homo sapiens
  CDR3 for beta chain variable domain of TCR clone 108270 (TRBV13, TRBJ2-3)
CASGLSRVAGGRNTQYF

SEQ ID NO: 216541 - protein, 18 aa, Homo sapiens
  CDR3 for alpha chain variable domain of TCR clone 108271 (TRAV12-2, )
CAVEDIQNPDPAVYQLRD

SEQ ID NO: 216542 - protein, 15 aa, Homo sapiens
  CDR3 for beta chain variable domain of TCR clone 108271 (TRBV11-1, TRBJ2-7)
CAGSLNYGASYEQYF

SEQ ID NO: 216543 - protein, 16 aa, Homo sapiens
  CDR3 for alpha chain variable domain of TCR clone 108272 (TRAV8-2, TRAJ45)
CVVSEGTGGGADGLTF

SEQ ID NO: 216544 - protein, 15 aa, Homo sapiens
  CDR3 for beta chain variable domain of TCR clone 108272 (TRBV7-9, TRBJ2-5)
CASSLVVGGLETQYF

SEQ ID NO: 216545 - protein, 14 aa, Homo sapiens
  CDR3 for alpha chain variable domain of TCR clone 108273 (TRAV16, TRAJ44)
CALSTTGTASKLTF

SEQ ID NO: 216546 - protein, 16 aa, Homo sapiens
  CDR3 for beta chain variable domain of TCR clone 108273 (TRBV2, TRBJ2-7)
CASSEPWTGPSYEQYF

SEQ ID NO: 216547 - protein, 11 aa, Homo sapiens
  CDR3 for alpha chain variable domain of TCR clone 108274 (TRAV4, TRAJ31)
CLVGLNAILMF

SEQ ID NO: 216548 - protein, 16 aa, Homo sapiens
  CDR3 for beta chain variable domain of TCR clone 108274 (TRBV15, TRBJ2-6)
CATSVNGGFLANVLTF

SEQ ID NO: 216549 - protein, 17 aa, Homo sapiens
  CDR3 for alpha chain variable domain of TCR clone 108275 (TRAV35, TRAJ52)
CAGQLAAGGTSYGKLKF

SEQ ID NO: 216550 - protein, 12 aa, Homo sapiens
  CDR3 for beta chain variable domain of TCR clone 108275 (TRBV20-1, TRBJ2-7)
CSAGRRQSEQYF

SEQ ID NO: 216551 - protein, 12 aa, Homo sapiens
  CDR3 for alpha chain variable domain of TCR clone 108276 (TRAV20, TRAJ23)
CAVHNQGGKLIF

SEQ ID NO: 216552 - protein, 14 aa, Homo sapiens
  CDR3 for beta chain variable domain of TCR clone 108276 (TRBV4-1, TRBJ2-2)
CASSQAVNTGELFF

SEQ ID NO: 216553 - protein, 13 aa, Homo sapiens
  CDR3 for alpha chain variable domain of TCR clone 108277 (TRAV1-2, TRAJ9)
CAALNTGGFKTIF

SEQ ID NO: 216554 - protein, 16 aa, Homo sapiens
  CDR3 for beta chain variable domain of TCR clone 108277 (TRBV4-3, TRBJ2-1)
CASSPALDRGVNEQFF

SEQ ID NO: 216555 - protein, 13 aa, Homo sapiens
  CDR3 for alpha chain variable domain of TCR clone 108278 (TRAV12-1, TRAJ11)
CVVTRGGYSTLTF

SEQ ID NO: 216556 - protein, 14 aa, Homo sapiens
  CDR3 for beta chain variable domain of TCR clone 108278 (TRBV7-2, TRBJ2-7)
CASRSQGAAYEQYF

SEQ ID NO: 216557 - protein, 12 aa, Homo sapiens
  CDR3 for alpha chain variable domain of TCR clone 108279 (TRAV12-3, TRAJ17)
CAMTLTDNKLTF

SEQ ID NO: 216558 - protein, 17 aa, Homo sapiens
  CDR3 for beta chain variable domain of TCR clone 108279 (TRBV20-1, TRBJ2-7)
CSATRAGGVAGVEEQYF

SEQ ID NO: 216559 - protein, 18 aa, Homo sapiens
  CDR3 for alpha chain variable domain of TCR clone 108280 (TRAV26-2, TRAJ45)
CILRVDKYSGGGSDGLTF

SEQ ID NO: 216560 - protein, 16 aa, Homo sapiens
  CDR3 for beta chain variable domain of TCR clone 108280 (TRBV2, TRBJ1-4)
CASNLLQGATNEKLFF

SEQ ID NO: 216561 - protein, 17 aa, Homo sapiens
  CDR3 for alpha chain variable domain of TCR clone 108281 (TRAV3, TRAJ42)
CAVRDRNYGGSQGNLIF

SEQ ID NO: 216562 - protein, 16 aa, Homo sapiens
  CDR3 for beta chain variable domain of TCR clone 108281 (TRBV9, TRBJ2-1)
CASSVGGGGNYNEQFF

SEQ ID NO: 216563 - protein, 13 aa, Homo sapiens
  CDR3 for alpha chain variable domain of TCR clone 108282 (TRAV12-3, TRAJ43)
CAMIRPNNNDMRF

SEQ ID NO: 216564 - protein, 12 aa, Homo sapiens
  CDR3 for beta chain variable domain of TCR clone 108282 (TRBV11-2, TRBJ2-5)
YASSLGQETQYF

SEQ ID NO: 216565 - protein, 14 aa, Homo sapiens
  CDR3 for alpha chain variable domain of TCR clone 108283 (TRAV38-1, TRAJ45)
CASHSGGGADGLIF

SEQ ID NO: 216566 - protein, 13 aa, Homo sapiens
  CDR3 for beta chain variable domain of TCR clone 108283 (TRBV10-3, TRBJ1-2)
CAISERDSYGYTF

SEQ ID NO: 216567 - protein, 17 aa, Homo sapiens
  CDR3 for alpha chain variable domain of TCR clone 108284 (TRAV8-6, TRAJ58)
CAVSSWVGETSGPRLTF

SEQ ID NO: 216568 - protein, 15 aa, Homo sapiens
  CDR3 for beta chain variable domain of TCR clone 108284 (TRBV20-1, TRBJ2-7)
CSARDRVSGMDEQYF

SEQ ID NO: 216569 - protein, 14 aa, Homo sapiens
  CDR3 for alpha chain variable domain of TCR clone 108285 (TRAV12-2, TRAJ13)
CAVKKTGGYQKVTF

SEQ ID NO: 216570 - protein, 12 aa, Homo sapiens
  CDR3 for beta chain variable domain of TCR clone 108285 (TRBV3-1, TRBJ2-1)
CASSQGSSGQFF

SEQ ID NO: 216571 - protein, 16 aa, Homo sapiens
  CDR3 for alpha chain variable domain of TCR clone 108286 (TRAV23/DV6, TRAJ9)
CAASIGGNTGGFKTIF

SEQ ID NO: 216572 - protein, 15 aa, Homo sapiens
  CDR3 for beta chain variable domain of TCR clone 108286 (TRBV6-5, TRBJ2-1)
CASSYDAGAGNEQFF

SEQ ID NO: 216573 - protein, 13 aa, Homo sapiens
  CDR3 for alpha chain variable domain of TCR clone 108287 (TRAV27, TRAJ41)
CAGEGNSGYALNF

SEQ ID NO: 216574 - protein, 16 aa, Homo sapiens
  CDR3 for beta chain variable domain of TCR clone 108287 (TRBV7-2, TRBJ1-1)
CASSFLTGTTELSLDK

SEQ ID NO: 216575 - protein, 13 aa, Homo sapiens
  CDR3 for alpha chain variable domain of TCR clone 108288 (TRAV41, TRAJ45)
CAVRSGGADGLTF

SEQ ID NO: 216576 - protein, 14 aa, Homo sapiens
  CDR3 for beta chain variable domain of TCR clone 108288 (TRBV3-1, TRBJ2-1)
CASSQAVYLGEQFF

SEQ ID NO: 216577 - protein, 16 aa, Homo sapiens
  CDR3 for alpha chain variable domain of TCR clone 108289 (TRAV30, TRAJ24)
CGTEIVDADSWGKFQF

SEQ ID NO: 216578 - protein, 15 aa, Homo sapiens
  CDR3 for beta chain variable domain of TCR clone 108289 (TRBV20-1, TRBJ2-6)
CSARDRGPGANVLSF

SEQ ID NO: 216579 - protein, 12 aa, Homo sapiens
  CDR3 for alpha chain variable domain of TCR clone 108290 (TRAV9-2, TRAJ26)
CALRGYGQNFVF

SEQ ID NO: 216580 - protein, 12 aa, Homo sapiens
  CDR3 for beta chain variable domain of TCR clone 108290 (TRBV29-1, TRBJ2-3)
CSVTGGAYTQYF

SEQ ID NO: 216581 - protein, 14 aa, Homo sapiens
  CDR3 for alpha chain variable domain of TCR clone 108291 (TRAV2, TRAJ9)
CAVEDRSGGFKTIF

SEQ ID NO: 216582 - protein, 16 aa, Homo sapiens
  CDR3 for beta chain variable domain of TCR clone 108291 (TRBV7-3, TRBJ2-1)
CASSLEGYRSYNDQFF

SEQ ID NO: 216583 - protein, 13 aa, Homo sapiens
  CDR3 for alpha chain variable domain of TCR clone 108292 (TRAV21, TRAJ37)
CAVSSGNTGKLIF

SEQ ID NO: 216584 - protein, 13 aa, Homo sapiens
  CDR3 for beta chain variable domain of TCR clone 108292 (TRBV7-6, TRBJ1-2)
CASSLVADYGYTF

SEQ ID NO: 216585 - protein, 12 aa, Homo sapiens
  CDR3 for alpha chain variable domain of TCR clone 108293 (TRAV12-3, TRAJ17)
CAMTLTGNKLTF

SEQ ID NO: 216586 - protein, 16 aa, Homo sapiens
  CDR3 for beta chain variable domain of TCR clone 108293 (TRBV12-4, TRBJ2-5)
CASSFCVRGRQETQYF

SEQ ID NO: 216587 - protein, 12 aa, Homo sapiens
  CDR3 for alpha chain variable domain of TCR clone 108294 (TRAV29/DV5, TRAJ15)
CASNQAGTAMIF

SEQ ID NO: 216588 - protein, 15 aa, Homo sapiens
  CDR3 for beta chain variable domain of TCR clone 108294 (TRBV11-2, TRBJ2-2)
CASSSDRVNAGELFF

SEQ ID NO: 216589 - protein, 16 aa, Homo sapiens
  CDR3 for alpha chain variable domain of TCR clone 108295 (TRAV3, TRAJ10)
CAVRDMRAGGGNKLAF

SEQ ID NO: 216590 - protein, 14 aa, Homo sapiens
  CDR3 for beta chain variable domain of TCR clone 108295 (TRBV7-7, TRBJ2-2)
CASRAGLNTGELFF

SEQ ID NO: 216591 - protein, 16 aa, Homo sapiens
  CDR3 for alpha chain variable domain of TCR clone 108296 (TRAV26-1, TRAJ32)
CIVRTNYGGATNELIF

SEQ ID NO: 216592 - protein, 16 aa, Homo sapiens
  CDR3 for beta chain variable domain of TCR clone 108296 (TRBV6-1, TRBJ1-3)
CASVQGGVETPYILER

SEQ ID NO: 216593 - protein, 14 aa, Homo sapiens
  CDR3 for alpha chain variable domain of TCR clone 108297 (TRAV26-1, TRAJ38)
CIADNAGNNRKLIW

SEQ ID NO: 216594 - protein, 13 aa, Homo sapiens
  CDR3 for beta chain variable domain of TCR clone 108297 (TRBV15, TRBJ1-6)
CATSGGLNSPPHF

SEQ ID NO: 216595 - protein, 12 aa, Homo sapiens
  CDR3 for alpha chain variable domain of TCR clone 108298 (TRAV2, TRAJ31)
CAVEEGNARRMF

SEQ ID NO: 216596 - protein, 18 aa, Homo sapiens
  CDR3 for beta chain variable domain of TCR clone 108298 (TRBV7-9, TRBJ2-3)
CASSLDLAGLATPDTQYF

SEQ ID NO: 216597 - protein, 14 aa, Homo sapiens
  CDR3 for alpha chain variable domain of TCR clone 108299 (TRAV27, TRAJ22)
CAGLPSGSARQLTF

SEQ ID NO: 216598 - protein, 14 aa, Homo sapiens
  CDR3 for beta chain variable domain of TCR clone 108299 (TRBV7-9, TRBJ1-6)
CASSLGPSNSPLHF

SEQ ID NO: 216599 - protein, 13 aa, Homo sapiens
  CDR3 for alpha chain variable domain of TCR clone 108300 (TRAV26-2, TRAJ43)
CFLRAVNNNDMRF

SEQ ID NO: 216600 - protein, 15 aa, Homo sapiens
  CDR3 for beta chain variable domain of TCR clone 108300 (TRBV7-2, TRBJ2-1)
CASTHGTGIYNEQFF

SEQ ID NO: 216601 - protein, 12 aa, Homo sapiens
  CDR3 for alpha chain variable domain of TCR clone 108301 (TRAV12-3, TRAJ40)
CVVYSGTYKYIF

SEQ ID NO: 216602 - protein, 18 aa, Homo sapiens
  CDR3 for beta chain variable domain of TCR clone 108301 (TRBV11-2, TRBJ2-3)
CASSLGGASRGAPNTQYF

SEQ ID NO: 216603 - protein, 15 aa, Homo sapiens
  CDR3 for alpha chain variable domain of TCR clone 108302 (TRAV3, TRAJ22)
CAVRDRGGSARKLTF

SEQ ID NO: 216604 - protein, 13 aa, Homo sapiens
  CDR3 for beta chain variable domain of TCR clone 108302 (TRBV20-1, TRBJ1-1)
CSARVGGNTEAFF

SEQ ID NO: 216605 - protein, 14 aa, Homo sapiens
  CDR3 for alpha chain variable domain of TCR clone 108303 (TRAV12-2, TRAJ45)
CAAHSGGGADGLTF

SEQ ID NO: 216606 - protein, 15 aa, Homo sapiens
  CDR3 for beta chain variable domain of TCR clone 108303 (TRBV5-1, TRBJ2-7)
CASSLGDFTTYEQYF

SEQ ID NO: 216607 - protein, 15 aa, Homo sapiens
  CDR3 for alpha chain variable domain of TCR clone 108304 (TRAV25, TRAJ52)
CAGRPGGTSYGKLTF

SEQ ID NO: 216608 - protein, 14 aa, Homo sapiens
  CDR3 for beta chain variable domain of TCR clone 108304 (TRBV11-2, TRBJ2-1)
CASSLEPSGGGSSS

SEQ ID NO: 216609 - protein, 15 aa, Homo sapiens
  CDR3 for alpha chain variable domain of TCR clone 108305 (TRAV3, TRAJ13)
CAVRVYSGGYQKVTF

SEQ ID NO: 216610 - protein, 15 aa, Homo sapiens
  CDR3 for beta chain variable domain of TCR clone 108305 (TRBV15, TRBJ1-5)
CATSRDPVSNQPQHF

SEQ ID NO: 216611 - protein, 12 aa, Homo sapiens
  CDR3 for alpha chain variable domain of TCR clone 108306 (TRAV12-3, TRAJ40)
CEMSSGTYKYIF

SEQ ID NO: 216612 - protein, 15 aa, Homo sapiens
  CDR3 for beta chain variable domain of TCR clone 108306 (TRBV7-3, TRBJ2-2)
CASSETGQGTGELFF

SEQ ID NO: 216613 - protein, 13 aa, Homo sapiens
  CDR3 for alpha chain variable domain of TCR clone 108307 (TRAV13-1, TRAJ20)
CAARVSNDYKLSS

SEQ ID NO: 216614 - protein, 12 aa, Homo sapiens
  CDR3 for beta chain variable domain of TCR clone 108307 (TRBV20-1, TRBJ2-1)
CSARLGTDEQFF

SEQ ID NO: 216615 - protein, 14 aa, Homo sapiens
  CDR3 for alpha chain variable domain of TCR clone 108308 (TRAV27, TRAJ37)
RAGERSSNTGKLIF

SEQ ID NO: 216616 - protein, 15 aa, Homo sapiens
  CDR3 for beta chain variable domain of TCR clone 108308 (TRBV11-3, TRBJ1-6)
CASSLDWGANSPLHF

SEQ ID NO: 216617 - protein, 14 aa, Homo sapiens
  CDR3 for alpha chain variable domain of TCR clone 108309 (TRAV8-3, TRAJ4)
CAVAAAGGYNKLIF

SEQ ID NO: 216618 - protein, 15 aa, Homo sapiens
  CDR3 for beta chain variable domain of TCR clone 108309 (TRBV6-5, TRBJ2-1)
CASSYDAGAGNEQFF

SEQ ID NO: 216619 - protein, 13 aa, Homo sapiens
  CDR3 for alpha chain variable domain of TCR clone 108310 (TRAV3, TRAJ8)
YAVRFTGFQKLVF

SEQ ID NO: 216620 - protein, 15 aa, Homo sapiens
  CDR3 for beta chain variable domain of TCR clone 108310 (TRBV20-1, TRBJ2-7)
CSARDRVSGMDEQYF

SEQ ID NO: 216621 - protein, 12 aa, Homo sapiens
  CDR3 for alpha chain variable domain of TCR clone 108311 (TRAV3, TRAJ31)
CAVRPLGPRLMF

SEQ ID NO: 216622 - protein, 17 aa, Homo sapiens
  CDR3 for beta chain variable domain of TCR clone 108311 (TRBV7-9, TRBJ1-5)
CASSASQGGYSNQPQHF

SEQ ID NO: 216623 - protein, 15 aa, Homo sapiens
  CDR3 for alpha chain variable domain of TCR clone 108312 (TRAV1-1, TRAJ4)
CAVRAFSGGYNKLIF

SEQ ID NO: 216624 - protein, 16 aa, Homo sapiens
  CDR3 for beta chain variable domain of TCR clone 108312 (TRBV7-2, TRBJ2-6)
CAILSGVSSGANDLTF

SEQ ID NO: 216625 - protein, 15 aa, Homo sapiens
  CDR3 for alpha chain variable domain of TCR clone 108313 (TRAV12-2, TRAJ43)
CAFDMRFGAGTRLTV

SEQ ID NO: 216626 - protein, 18 aa, Homo sapiens
  CDR3 for beta chain variable domain of TCR clone 108313 (TRBV20-1, TRBJ2-3)
CSASGLAPGPGTTDTQYF

SEQ ID NO: 216627 - protein, 11 aa, Homo sapiens
  CDR3 for alpha chain variable domain of TCR clone 108314 (TRAV8-3, TRAJ42)
NYGGSQGNLIF

SEQ ID NO: 216628 - protein, 16 aa, Homo sapiens
  CDR3 for beta chain variable domain of TCR clone 108314 (TRBV27, TRBJ2-5)
CASSYGPGGQKETQYF

SEQ ID NO: 216629 - protein, 14 aa, Homo sapiens
  CDR3 for alpha chain variable domain of TCR clone 108315 (TRAV38-1, TRAJ40)
CALRPTSGTYKYIF

SEQ ID NO: 216630 - protein, 14 aa, Homo sapiens
  CDR3 for beta chain variable domain of TCR clone 108315 (TRBV25-1, TRBJ1-1)
CASTDLGGNTEAFF

SEQ ID NO: 216631 - protein, 15 aa, Homo sapiens
  CDR3 for alpha chain variable domain of TCR clone 108316 (TRAV3, TRAJ3)
CAVRDGHSSASKIIF

SEQ ID NO: 216632 - protein, 14 aa, Homo sapiens
  CDR3 for beta chain variable domain of TCR clone 108316 (TRBV28, TRBJ1-4)
CASSFGTFDEKLLF

SEQ ID NO: 216633 - protein, 12 aa, Homo sapiens
  CDR3 for alpha chain variable domain of TCR clone 108317 (TRAV12-3, TRAJ17)
CAITLTGNKLTF

SEQ ID NO: 216634 - protein, 15 aa, Homo sapiens
  CDR3 for beta chain variable domain of TCR clone 108317 (TRBV19, TRBJ2-1)
CASSILGEGRNEQFF

SEQ ID NO: 216635 - protein, 13 aa, Homo sapiens
  CDR3 for alpha chain variable domain of TCR clone 108318 (TRAV27, TRAJ29)
CAGAHSGNTPLVF

SEQ ID NO: 216636 - protein, 13 aa, Homo sapiens
  CDR3 for beta chain variable domain of TCR clone 108318 (TRBV7-2, TRBJ2-2)
CASSLAVTGELFF

SEQ ID NO: 216637 - protein, 17 aa, Homo sapiens
  CDR3 for alpha chain variable domain of TCR clone 108319 (TRAV8-6, TRAJ58)
CAVSSWVGETSGSRLTF

SEQ ID NO: 216638 - protein, 15 aa, Homo sapiens
  CDR3 for beta chain variable domain of TCR clone 108319 (TRBV19, TRBJ2-1)
CASSSPGVPLDEQFF

SEQ ID NO: 216639 - protein, 14 aa, Homo sapiens
  CDR3 for alpha chain variable domain of TCR clone 108320 (TRAV8-3, TRAJ4)
CAVGASGGYNKLIF

SEQ ID NO: 216640 - protein, 15 aa, Homo sapiens
  CDR3 for beta chain variable domain of TCR clone 108320 (TRBV19, TRBJ2-7)
CASSPAGSGEALRYF

SEQ ID NO: 216641 - protein, 14 aa, Homo sapiens
  CDR3 for alpha chain variable domain of TCR clone 108321 (TRAV12-3, TRAJ10)
SHLPLTGGGNKLTF

SEQ ID NO: 216642 - protein, 14 aa, Homo sapiens
  CDR3 for beta chain variable domain of TCR clone 108321 (TRBV19, TRBJ2-1)
CASSMGSGATEQFF

SEQ ID NO: 216643 - protein, 15 aa, Homo sapiens
  CDR3 for alpha chain variable domain of TCR clone 108322 (TRAV26-2, TRAJ13)
CILRDLSGGYQKVTF

SEQ ID NO: 216644 - protein, 11 aa, Homo sapiens
  CDR3 for beta chain variable domain of TCR clone 108322 (TRBV7-9, TRBJ2-5)
CASSLSATKYF

SEQ ID NO: 216645 - protein, 12 aa, Homo sapiens
  CDR3 for alpha chain variable domain of TCR clone 108323 (TRAV12-1, TRAJ40)
CVVTSGTYKYIF

SEQ ID NO: 216646 - protein, 17 aa, Homo sapiens
  CDR3 for beta chain variable domain of TCR clone 108323 (TRBV19, TRBJ2-6)
CASSTGQVFSGANVLTF

SEQ ID NO: 216647 - protein, 17 aa, Homo sapiens
  CDR3 for alpha chain variable domain of TCR clone 108324 (TRAV8-6, TRAJ8)
CAVKEGIENTGFQKLVV

SEQ ID NO: 216648 - protein, 12 aa, Homo sapiens
  CDR3 for beta chain variable domain of TCR clone 108324 (TRBV19, TRBJ1-4)
CASKDWPGGLFF

SEQ ID NO: 216649 - protein, 13 aa, Homo sapiens
  CDR3 for alpha chain variable domain of TCR clone 108325 (TRAV8-3, TRAJ43)
CAVVPYNNNDMRF

SEQ ID NO: 216650 - protein, 14 aa, Homo sapiens
  CDR3 for beta chain variable domain of TCR clone 108325 (TRBV11-2, TRBJ2-5)
CASSRTGGIETQYF

SEQ ID NO: 216651 - protein, 12 aa, Homo sapiens
  CDR3 for alpha chain variable domain of TCR clone 108326 (TRAV12-3, TRAJ17)
CAMTLTGNKLTF

SEQ ID NO: 216652 - protein, 13 aa, Homo sapiens
  CDR3 for beta chain variable domain of TCR clone 108326 (TRBV12-4, TRBJ1-5)
CASSPDRAQPQHF

SEQ ID NO: 216653 - protein, 14 aa, Homo sapiens
  CDR3 for alpha chain variable domain of TCR clone 108327 (TRAV3, TRAJ28)
CAVRRGAGSYQLTF

SEQ ID NO: 216654 - protein, 16 aa, Homo sapiens
  CDR3 for beta chain variable domain of TCR clone 108327 (TRBV4-1, TRBJ2-7)
CASSQEWTSGPFEQYF

SEQ ID NO: 216655 - protein, 13 aa, Homo sapiens
  CDR3 for alpha chain variable domain of TCR clone 108328 (TRAV13-1, TRAJ5)
CAAEHTGRRALTF

SEQ ID NO: 216656 - protein, 15 aa, Homo sapiens
  CDR3 for beta chain variable domain of TCR clone 108328 (TRBV2, TRBJ1-4)
CASNRGTNEKLFLAV

SEQ ID NO: 216657 - protein, 10 aa, Homo sapiens
  CDR3 for alpha chain variable domain of TCR clone 108329 (TRAV21, TRAJ31)
CAVDNARLMF

SEQ ID NO: 216658 - protein, 14 aa, Homo sapiens
  CDR3 for beta chain variable domain of TCR clone 108329 (TRBV7-8, TRBJ2-3)
CASSLEAGTDTQYF

SEQ ID NO: 216659 - protein, 14 aa, Homo sapiens
  CDR3 for alpha chain variable domain of TCR clone 108330 (TRAV9-2, TRAJ39)
CALYIYNAGNMLTF

SEQ ID NO: 216660 - protein, 14 aa, Homo sapiens
  CDR3 for beta chain variable domain of TCR clone 108330 (TRBV7-3, TRBJ2-1)
CASSLSGSYNEQFF

SEQ ID NO: 216661 - protein, 13 aa, Homo sapiens
  CDR3 for alpha chain variable domain of TCR clone 108331 (TRAV2, TRAJ40)
CAVVTSGTYKYIF

SEQ ID NO: 216662 - protein, 16 aa, Homo sapiens
  CDR3 for beta chain variable domain of TCR clone 108331 (TRBV4-3, TRBJ2-1)
CASSPALDRGVNEQFF

SEQ ID NO: 216663 - protein, 13 aa, Homo sapiens
  CDR3 for alpha chain variable domain of TCR clone 108332 (TRAV17, TRAJ4)
CATKSGGYTKLIF

SEQ ID NO: 216664 - protein, 14 aa, Homo sapiens
  CDR3 for beta chain variable domain of TCR clone 108332 (TRBV20-1, TRBJ1-5)
CSARDDRGNQPQHF

SEQ ID NO: 216665 - protein, 13 aa, Homo sapiens
  CDR3 for alpha chain variable domain of TCR clone 108333 (TRAV12-2, TRAJ34)
CAVRGYNTDKLIF

SEQ ID NO: 216666 - protein, 15 aa, Homo sapiens
  CDR3 for beta chain variable domain of TCR clone 108333 (TRBV28, TRBJ2-1)
CASWTGAGVIARQFF

SEQ ID NO: 216667 - protein, 15 aa, Homo sapiens
  CDR3 for alpha chain variable domain of TCR clone 108334 (TRAV17, TRAJ57)
CATGPSQGGSEKLIF

SEQ ID NO: 216668 - protein, 16 aa, Homo sapiens
  CDR3 for beta chain variable domain of TCR clone 108334 (TRBV12-4, TRBJ1-5)
CASSRPVGGSNQPQHF

SEQ ID NO: 216669 - protein, 13 aa, Homo sapiens
  CDR3 for alpha chain variable domain of TCR clone 108335 (TRAV26-1, TRAJ29)
CIVRRSGNTPLVF

SEQ ID NO: 216670 - protein, 15 aa, Homo sapiens
  CDR3 for beta chain variable domain of TCR clone 108335 (TRBV7-3, TRBJ2-1)
CASSPTGGGEVEQFF

SEQ ID NO: 216671 - protein, 13 aa, Homo sapiens
  CDR3 for alpha chain variable domain of TCR clone 108336 (TRAV30, TRAJ18)
CGTEASTLGGLYF

SEQ ID NO: 216672 - protein, 15 aa, Homo sapiens
  CDR3 for beta chain variable domain of TCR clone 108336 (TRBV7-3, TRBJ2-1)
CASSRIGTGSSEQFF

SEQ ID NO: 216673 - protein, 12 aa, Homo sapiens
  CDR3 for alpha chain variable domain of TCR clone 108337 (TRAV12-3, TRAJ17)
CAITLTGNKLTF

SEQ ID NO: 216674 - protein, 14 aa, Homo sapiens
  CDR3 for beta chain variable domain of TCR clone 108337 (TRBV20-1, TRBJ2-1)
CSAQIGGSANEQFF

SEQ ID NO: 216675 - protein, 15 aa, Homo sapiens
  CDR3 for alpha chain variable domain of TCR clone 108338 (TRAV3, TRAJ3)
CAVRDMSSSSSKIIF

SEQ ID NO: 216676 - protein, 14 aa, Homo sapiens
  CDR3 for beta chain variable domain of TCR clone 108338 (TRBV19, TRBJ2-1)
CASPTFVLSGEQFF

SEQ ID NO: 216677 - protein, 14 aa, Homo sapiens
  CDR3 for alpha chain variable domain of TCR clone 108339 (TRAV12-1, TRAJ8)
CVVNSNTGFQKLVF

SEQ ID NO: 216678 - protein, 16 aa, Homo sapiens
  CDR3 for beta chain variable domain of TCR clone 108339 (TRBV18, TRBJ1-2)
CASSPPERVTIYGYTF

SEQ ID NO: 216679 - protein, 18 aa, Homo sapiens
  CDR3 for alpha chain variable domain of TCR clone 108340 (TRAV21, TRAJ52)
CAVRPSPAGGTSYGKLTF

SEQ ID NO: 216680 - protein, 15 aa, Homo sapiens
  CDR3 for beta chain variable domain of TCR clone 108340 (TRBV20-1, TRBJ1-1)
CSASRGVTGNTEAFF

SEQ ID NO: 216681 - protein, 15 aa, Homo sapiens
  CDR3 for alpha chain variable domain of TCR clone 108341 (TRAV12-3, TRAJ6)
CAMSATTGGSYIPTF

SEQ ID NO: 216682 - protein, 12 aa, Homo sapiens
  CDR3 for beta chain variable domain of TCR clone 108341 (TRBV12-4, TRBJ2-1)
CASSPGRNEQFF

SEQ ID NO: 216683 - protein, 13 aa, Homo sapiens
  CDR3 for alpha chain variable domain of TCR clone 108342 (TRAV36/DV7, TRAJ7)
CAVERYGNNRLAF

SEQ ID NO: 216684 - protein, 13 aa, Homo sapiens
  CDR3 for beta chain variable domain of TCR clone 108342 (TRBV10-2, TRBJ2-5)
CASGRLARETQYF

SEQ ID NO: 216685 - protein, 15 aa, Homo sapiens
  CDR3 for alpha chain variable domain of TCR clone 108343 (TRAV8-3, TRAJ6)
CAVGPLGGGSYIPTF

SEQ ID NO: 216686 - protein, 14 aa, Homo sapiens
  CDR3 for beta chain variable domain of TCR clone 108343 (TRBV19, TRBJ2-2)
CASITGQGAGELFF

SEQ ID NO: 216687 - protein, 13 aa, Homo sapiens
  CDR3 for alpha chain variable domain of TCR clone 108344 (TRAV8-6, TRAJ16)
CAVSRWVGQKLLF

SEQ ID NO: 216688 - protein, 15 aa, Homo sapiens
  CDR3 for beta chain variable domain of TCR clone 108344 (TRBV12-4, TRBJ2-1)
CVSSLSTGVSNEQFF

SEQ ID NO: 216689 - protein, 13 aa, Homo sapiens
  CDR3 for alpha chain variable domain of TCR clone 108345 (TRAV13-1, TRAJ21)
CAASKGNFNKFYF

SEQ ID NO: 216690 - protein, 16 aa, Homo sapiens
  CDR3 for beta chain variable domain of TCR clone 108345 (TRBV5-4, TRBJ2-3)
CASSRGTSGGTDTQYF

SEQ ID NO: 216691 - protein, 12 aa, Homo sapiens
  CDR3 for alpha chain variable domain of TCR clone 108346 (TRAV12-3, TRAJ20)
CAMVRGDYKLSF

SEQ ID NO: 216692 - protein, 11 aa, Homo sapiens
  CDR3 for beta chain variable domain of TCR clone 108346 (TRBV7-8, TRBJ2-7)
CASSLSLEQYF

SEQ ID NO: 216693 - protein, 17 aa, Homo sapiens
  CDR3 for alpha chain variable domain of TCR clone 108347 (TRAV3, TRAJ6)
CAVRDGPRAGGSYIPTF

SEQ ID NO: 216694 - protein, 16 aa, Homo sapiens
  CDR3 for beta chain variable domain of TCR clone 108347 (TRBV7-6, TRBJ2-1)
CASSAPGPSSYNEQFF

SEQ ID NO: 216695 - protein, 17 aa, Homo sapiens
  CDR3 for alpha chain variable domain of TCR clone 108348 (TRAV13-1, TRAJ5)
CSNPSLSRDTGRRALNF

SEQ ID NO: 216696 - protein, 17 aa, Homo sapiens
  CDR3 for beta chain variable domain of TCR clone 108348 (TRBV24-1, TRBJ2-1)
CATSDVSTSGTYNEQFF

SEQ ID NO: 216697 - protein, 13 aa, Homo sapiens
  CDR3 for alpha chain variable domain of TCR clone 108349 (TRAV21, TRAJ36)
CAVIKTGANNLFL

SEQ ID NO: 216698 - protein, 13 aa, Homo sapiens
  CDR3 for beta chain variable domain of TCR clone 108349 (TRBV29-1, TRBJ2-3)
CSATRGGRDTQYF

SEQ ID NO: 216699 - protein, 13 aa, Homo sapiens
  CDR3 for alpha chain variable domain of TCR clone 108350 (TRAV16, TRAJ11)
CALTQSRYSTLTF

SEQ ID NO: 216700 - protein, 14 aa, Homo sapiens
  CDR3 for beta chain variable domain of TCR clone 108350 (TRBV19, TRBJ2-7)
CASSTTRSSYEQYF

SEQ ID NO: 216701 - protein, 14 aa, Homo sapiens
  CDR3 for alpha chain variable domain of TCR clone 108351 (TRAV8-6, TRAJ47)
CAVIRWEYGNKLVF

SEQ ID NO: 216702 - protein, 14 aa, Homo sapiens
  CDR3 for beta chain variable domain of TCR clone 108351 (TRBV4-1, TRBJ2-7)
CASSPVAGGDEQYF

SEQ ID NO: 216703 - protein, 13 aa, Homo sapiens
  CDR3 for alpha chain variable domain of TCR clone 108352 (TRAV12-2, TRAJ24)
CAVSTDSWGKLQF

SEQ ID NO: 216704 - protein, 12 aa, Homo sapiens
  CDR3 for beta chain variable domain of TCR clone 108352 (TRBV7-6, TRBJ2-7)
CASSSADSEQYF

SEQ ID NO: 216705 - protein, 14 aa, Homo sapiens
  CDR3 for alpha chain variable domain of TCR clone 108353 (TRAV13-1, TRAJ44)
CAAKATGIASKLTF

SEQ ID NO: 216706 - protein, 14 aa, Homo sapiens
  CDR3 for beta chain variable domain of TCR clone 108353 (TRBV20-1, TRBJ2-3)
CSALGLEGADTQYF

SEQ ID NO: 216707 - protein, 11 aa, Homo sapiens
  CDR3 for alpha chain variable domain of TCR clone 108354 (TRAV1-2, TRAJ40)
CAVPGTYKYIF

SEQ ID NO: 216708 - protein, 16 aa, Homo sapiens
  CDR3 for beta chain variable domain of TCR clone 108354 (TRBV29-1, TRBJ2-7)
CGVEVVGTSGSYEQYF

SEQ ID NO: 216709 - protein, 14 aa, Homo sapiens
  CDR3 for alpha chain variable domain of TCR clone 108355 (TRAV12-1, TRAJ5)
CVVNERTGRRALTF

SEQ ID NO: 216710 - protein, 12 aa, Homo sapiens
  CDR3 for beta chain variable domain of TCR clone 108355 (TRBV11-2, TRBJ2-2)
CASSLGGGELFF

SEQ ID NO: 216711 - protein, 13 aa, Homo sapiens
  CDR3 for alpha chain variable domain of TCR clone 108356 (TRAV29/DV5, TRAJ31)
CAASRNNNARLMF

SEQ ID NO: 216712 - protein, 15 aa, Homo sapiens
  CDR3 for beta chain variable domain of TCR clone 108356 (TRBV11-2, TRBJ1-2)
CASSLEGVQRNGYTF

SEQ ID NO: 216713 - protein, 14 aa, Homo sapiens
  CDR3 for alpha chain variable domain of TCR clone 108357 (TRAV12-2, TRAJ45)
CALPERGGADGLTF

SEQ ID NO: 216714 - protein, 14 aa, Homo sapiens
  CDR3 for beta chain variable domain of TCR clone 108357 (TRBV18, TRBJ1-5)
CASSPGNSNQPHHF

SEQ ID NO: 216715 - protein, 14 aa, Homo sapiens
  CDR3 for alpha chain variable domain of TCR clone 108358 (TRAV17, TRAJ49)
CATDARDTGNQFYF

SEQ ID NO: 216716 - protein, 14 aa, Homo sapiens
  CDR3 for beta chain variable domain of TCR clone 108358 (TRBV19, TRBJ2-2)
CASSTLHRSGELFF

SEQ ID NO: 216717 - protein, 10 aa, Homo sapiens
  CDR3 for alpha chain variable domain of TCR clone 108359 (TRAV12-1, TRAJ43)
CVVNPHRFGA

SEQ ID NO: 216718 - protein, 13 aa, Homo sapiens
  CDR3 for beta chain variable domain of TCR clone 108359 (TRBV12-4, TRBJ1-2)
CASSSGPNYGYTF

SEQ ID NO: 216719 - protein, 12 aa, Homo sapiens
  CDR3 for alpha chain variable domain of TCR clone 108360 (TRAV12-1, TRAJ40)
CVVSSGTYKYIF

SEQ ID NO: 216720 - protein, 17 aa, Homo sapiens
  CDR3 for beta chain variable domain of TCR clone 108360 (TRBV20-1, TRBJ2-2)
CSASGSGQGGLTGELFF

SEQ ID NO: 216721 - protein, 10 aa, Homo sapiens
  CDR3 for alpha chain variable domain of TCR clone 108361 (TRAV17, TRAJ36)
CATVAGNLFF

SEQ ID NO: 216722 - protein, 14 aa, Homo sapiens
  CDR3 for beta chain variable domain of TCR clone 108361 (TRBV20-1, TRBJ2-1)
CSARVPTSYNEQFF

SEQ ID NO: 216723 - protein, 12 aa, Homo sapiens
  CDR3 for alpha chain variable domain of TCR clone 108362 (TRAV16, TRAJ10)
CSRTGGGNKLTF

SEQ ID NO: 216724 - protein, 13 aa, Homo sapiens
  CDR3 for beta chain variable domain of TCR clone 108362 (TRBV7-7, TRBJ1-1)
CASSVGANTEAFF

SEQ ID NO: 216725 - protein, 15 aa, Homo sapiens
  CDR3 for alpha chain variable domain of TCR clone 108363 (TRAV23/DV6, TRAJ10)
CAARGFTGGGNKLTF

SEQ ID NO: 216726 - protein, 14 aa, Homo sapiens
  CDR3 for beta chain variable domain of TCR clone 108363 (TRBV11-3, TRBJ2-1)
CASSATTSGSIQFF

SEQ ID NO: 216727 - protein, 17 aa, Homo sapiens
  CDR3 for alpha chain variable domain of TCR clone 108364 (TRAV3, TRAJ42)
CAVRDRDYGGSKGNLIF

SEQ ID NO: 216728 - protein, 15 aa, Homo sapiens
  CDR3 for beta chain variable domain of TCR clone 108364 (TRBV6-5, TRBJ2-1)
CASSYDAGAGNEQFF

SEQ ID NO: 216729 - protein, 13 aa, Homo sapiens
  CDR3 for alpha chain variable domain of TCR clone 108365 (TRAV12-1, TRAJ31)
CVVIPNNNARLMF

SEQ ID NO: 216730 - protein, 17 aa, Homo sapiens
  CDR3 for beta chain variable domain of TCR clone 108365 (TRBV7-8, TRBJ2-6)
CASSAGTGGAGANVLTF

SEQ ID NO: 216731 - protein, 14 aa, Homo sapiens
  CDR3 for alpha chain variable domain of TCR clone 108366 (TRAV16, TRAJ33)
CALSAMDSNYQLIW

SEQ ID NO: 216732 - protein, 14 aa, Homo sapiens
  CDR3 for beta chain variable domain of TCR clone 108366 (TRBV11-2, TRBJ2-3)
CASSRLARTDTQYF

SEQ ID NO: 216733 - protein, 13 aa, Homo sapiens
  CDR3 for alpha chain variable domain of TCR clone 108367 (TRAV12-3, TRAJ33)
CAMSVNSNYQLIW

SEQ ID NO: 216734 - protein, 14 aa, Homo sapiens
  CDR3 for beta chain variable domain of TCR clone 108367 (TRBV18, TRBJ2-7)
CASSPRGGAYEQYF

SEQ ID NO: 216735 - protein, 13 aa, Homo sapiens
  CDR3 for alpha chain variable domain of TCR clone 108368 (TRAV2, TRAJ40)
CAVVTSGTYKYIF

SEQ ID NO: 216736 - protein, 16 aa, Homo sapiens
  CDR3 for beta chain variable domain of TCR clone 108368 (TRBV7-9, TRBJ1-3)
CGSSLGAGSSGNTIYF

SEQ ID NO: 216737 - protein, 14 aa, Homo sapiens
  CDR3 for alpha chain variable domain of TCR clone 108369 (TRAV23/DV6, TRAJ36)
CAASLQTGANNLFF

SEQ ID NO: 216738 - protein, 13 aa, Homo sapiens
  CDR3 for beta chain variable domain of TCR clone 108369 (TRBV28, TRBJ2-5)
CASSFAGGETQYF

SEQ ID NO: 216739 - protein, 10 aa, Homo sapiens
  CDR3 for alpha chain variable domain of TCR clone 108370 (TRAV23/DV6, TRAJ4)
CAARDFWSRD

SEQ ID NO: 216740 - protein, 15 aa, Homo sapiens
  CDR3 for beta chain variable domain of TCR clone 108370 (TRBV11-2, TRBJ2-7)
CASSLSQGSSYEQYF

SEQ ID NO: 216741 - protein, 14 aa, Homo sapiens
  CDR3 for alpha chain variable domain of TCR clone 108371 (TRAV16, TRAJ15)
CALSGPQAGTALIF

SEQ ID NO: 216742 - protein, 12 aa, Homo sapiens
  CDR3 for beta chain variable domain of TCR clone 108371 (TRBV18, TRBJ2-5)
CASSPSKETHYF

SEQ ID NO: 216743 - protein, 11 aa, Homo sapiens
  CDR3 for alpha chain variable domain of TCR clone 108372 (TRAV13-1, TRAJ39)
CASHAGNMLTF

SEQ ID NO: 216744 - protein, 19 aa, Homo sapiens
  CDR3 for beta chain variable domain of TCR clone 108372 (TRBV7-2, TRBJ2-3)
CASSFLSRNWGGGTDTQYF

SEQ ID NO: 216745 - protein, 13 aa, Homo sapiens
  CDR3 for alpha chain variable domain of TCR clone 108373 (TRAV1-2, TRAJ9)
CAALNTGGFKTIF

SEQ ID NO: 216746 - protein, 20 aa, Homo sapiens
  CDR3 for beta chain variable domain of TCR clone 108373 (TRBV28, TRBJ2-1)
CASTPIGRSPGLAGGNEQLF

SEQ ID NO: 216747 - protein, 14 aa, Homo sapiens
  CDR3 for alpha chain variable domain of TCR clone 108374 (TRAV3, TRAJ21)
FAVESQANFNKFYF

SEQ ID NO: 216748 - protein, 18 aa, Homo sapiens
  CDR3 for beta chain variable domain of TCR clone 108374 (TRBV7-9, TRBJ2-1)
CASSLAVSGTSGRNEQFF

SEQ ID NO: 216749 - protein, 17 aa, Homo sapiens
  CDR3 for alpha chain variable domain of TCR clone 108375 (TRAV9-2, TRAJ45)
CALSGYYSGGGADGLTF

SEQ ID NO: 216750 - protein, 15 aa, Homo sapiens
  CDR3 for beta chain variable domain of TCR clone 108375 (TRBV9, TRBJ1-6)
CASSVAGTGDSPLHF

SEQ ID NO: 216751 - protein, 14 aa, Homo sapiens
  CDR3 for alpha chain variable domain of TCR clone 108376 (TRAV21, TRAJ15)
CAVSLNQAGTALIY

SEQ ID NO: 216752 - protein, 11 aa, Homo sapiens
  CDR3 for beta chain variable domain of TCR clone 108376 (TRBV20-1, TRBJ2-7)
CSARTSYEQYF

SEQ ID NO: 216753 - protein, 14 aa, Homo sapiens
  CDR3 for alpha chain variable domain of TCR clone 108377 (TRAV12-2, TRAJ53)
CRERGGGSNYKLTF

SEQ ID NO: 216754 - protein, 14 aa, Homo sapiens
  CDR3 for beta chain variable domain of TCR clone 108377 (TRBV6-1, TRBJ1-3)
CASVQGGGGNTIYF

SEQ ID NO: 216755 - protein, 12 aa, Homo sapiens
  CDR3 for alpha chain variable domain of TCR clone 108378 (TRAV30, TRAJ43)
CGTEGRGNDMRF

SEQ ID NO: 216756 - protein, 17 aa, Homo sapiens
  CDR3 for beta chain variable domain of TCR clone 108378 (TRBV7-8, TRBJ2-6)
CASSAGTGGAGANVLTF

SEQ ID NO: 216757 - protein, 10 aa, Homo sapiens
  CDR3 for alpha chain variable domain of TCR clone 108379 (TRAV23/DV6, TRAJ31)
CARGGARLMF

SEQ ID NO: 216758 - protein, 14 aa, Homo sapiens
  CDR3 for beta chain variable domain of TCR clone 108379 (TRBV7-8, TRBJ1-2)
CASSPDSLSYGYTS

SEQ ID NO: 216759 - protein, 12 aa, Homo sapiens
  CDR3 for alpha chain variable domain of TCR clone 108380 (TRAV8-3, TRAJ41)
CAVALSGYALNF

SEQ ID NO: 216760 - protein, 13 aa, Homo sapiens
  CDR3 for beta chain variable domain of TCR clone 108380 (TRBV19, TRBJ2-1)
CASNGGVFSEQFF

SEQ ID NO: 216761 - protein, 23 aa, Homo sapiens
  CDR3 for alpha chain variable domain of TCR clone 108381 (TRAV41, TRAJ32)
CAVRIMVVLQTSSSWELALCLLS

SEQ ID NO: 216762 - protein, 15 aa, Homo sapiens
  CDR3 for beta chain variable domain of TCR clone 108381 (TRBV11-2, TRBJ2-1)
CASSKNRGLIYEQFF

SEQ ID NO: 216763 - protein, 13 aa, Homo sapiens
  CDR3 for alpha chain variable domain of TCR clone 108382 (TRAV21, TRAJ15)
CAVANQAGTALIL

SEQ ID NO: 216764 - protein, 16 aa, Homo sapiens
  CDR3 for beta chain variable domain of TCR clone 108382 (TRBV3-1, TRBJ1-6)
CASSQEFQGSYSPLHF

SEQ ID NO: 216765 - protein, 12 aa, Homo sapiens
  CDR3 for alpha chain variable domain of TCR clone 108383 (TRAV3, TRAJ43)
CAVRDPNNDMRF

SEQ ID NO: 216766 - protein, 16 aa, Homo sapiens
  CDR3 for beta chain variable domain of TCR clone 108383 (TRBV28, TRBJ2-1)
CASSLVLMREYNEQFF

SEQ ID NO: 216767 - protein, 14 aa, Homo sapiens
  CDR3 for alpha chain variable domain of TCR clone 108384 (TRAV1-2, TRAJ16)
CAVNRFSDGQKLLF

SEQ ID NO: 216768 - protein, 13 aa, Homo sapiens
  CDR3 for beta chain variable domain of TCR clone 108384 (TRBV5-1, TRBJ1-4)
CASSLNSGEKLFF

SEQ ID NO: 216769 - protein, 13 aa, Homo sapiens
  CDR3 for alpha chain variable domain of TCR clone 108385 (TRAV17, TRAJ26)
CATVDNYGQNFVF

SEQ ID NO: 216770 - protein, 13 aa, Homo sapiens
  CDR3 for beta chain variable domain of TCR clone 108385 (TRBV12-4, TRBJ1-1)
CASSPGTGFEAFF

SEQ ID NO: 216771 - protein, 15 aa, Homo sapiens
  CDR3 for alpha chain variable domain of TCR clone 108386 (TRAV3, TRAJ3)
CAVRDRDSSASKIIF

SEQ ID NO: 216772 - protein, 11 aa, Homo sapiens
  CDR3 for beta chain variable domain of TCR clone 108386 (TRBV7-9, TRBJ2-3)
CASSPTDTQYF

SEQ ID NO: 216773 - protein, 10 aa, Homo sapiens
  CDR3 for alpha chain variable domain of TCR clone 108387 (TRAV12-3, TRAJ18)
CAMSAEAQPW

SEQ ID NO: 216774 - protein, 15 aa, Homo sapiens
  CDR3 for beta chain variable domain of TCR clone 108387 (TRBV9, TRBJ1-6)
CASSVAGTGDSPLHF

SEQ ID NO: 216775 - protein, 12 aa, Homo sapiens
  CDR3 for alpha chain variable domain of TCR clone 108388 (TRAV12-1, TRAJ16)
CVVFRDGQKLLF

SEQ ID NO: 216776 - protein, 13 aa, Homo sapiens
  CDR3 for beta chain variable domain of TCR clone 108388 (TRBV7-9, TRBJ1-1)
CASSLSGETEAFF

SEQ ID NO: 216777 - protein, 16 aa, Homo sapiens
  CDR3 for alpha chain variable domain of TCR clone 108389 (TRAV3, TRAJ21)
CAVRDIERGNFNKFYF

SEQ ID NO: 216778 - protein, 15 aa, Homo sapiens
  CDR3 for beta chain variable domain of TCR clone 108389 (TRBV5-7, TRBJ2-7)
CASSLGPGRGHEQYF

SEQ ID NO: 216779 - protein, 13 aa, Homo sapiens
  CDR3 for alpha chain variable domain of TCR clone 108390 (TRAV2, TRAJ40)
CAVVTSGTYKYIF

SEQ ID NO: 216780 - protein, 17 aa, Homo sapiens
  CDR3 for beta chain variable domain of TCR clone 108390 (TRBV19, TRBJ2-7)
CASSISFYDSYPYEQYF

SEQ ID NO: 216781 - protein, 12 aa, Homo sapiens
  CDR3 for alpha chain variable domain of TCR clone 108391 (TRAV21, TRAJ11)
CAATSGYSTLTF

SEQ ID NO: 216782 - protein, 18 aa, Homo sapiens
  CDR3 for beta chain variable domain of TCR clone 108391 (TRBV19, TRBJ2-6)
CASSADRAGSSGANVLTF

SEQ ID NO: 216783 - protein, 13 aa, Homo sapiens
  CDR3 for alpha chain variable domain of TCR clone 108392 (TRAV3, TRAJ20)
CAVRDTPRYKLSF

SEQ ID NO: 216784 - protein, 16 aa, Homo sapiens
  CDR3 for beta chain variable domain of TCR clone 108392 (TRBV20-1, TRBJ2-7)
CSARAQGLALSYEQYF

SEQ ID NO: 216785 - protein, 13 aa, Homo sapiens
  CDR3 for alpha chain variable domain of TCR clone 108393 (TRAV13-1, TRAJ40)
CAASKGGTYKYIF

SEQ ID NO: 216786 - protein, 13 aa, Homo sapiens
  CDR3 for beta chain variable domain of TCR clone 108393 (TRBV7-6, TRBJ1-2)
CANSLVADYGYTF

SEQ ID NO: 216787 - protein, 15 aa, Homo sapiens
  CDR3 for alpha chain variable domain of TCR clone 108394 (TRAV27, TRAJ56)
CTGRDGIGANSKLTF

SEQ ID NO: 216788 - protein, 15 aa, Homo sapiens
  CDR3 for beta chain variable domain of TCR clone 108394 (TRBV29-1, TRBJ2-6)
CSVGDRGSGANVLTL

SEQ ID NO: 216789 - protein, 14 aa, Homo sapiens
  CDR3 for alpha chain variable domain of TCR clone 108395 (TRAV12-3, TRAJ22)
CAMSLFGSARQLTF

SEQ ID NO: 216790 - protein, 11 aa, Homo sapiens
  CDR3 for beta chain variable domain of TCR clone 108395 (TRBV29-1, TRBJ2-5)
CSEDRTGTQYF

SEQ ID NO: 216791 - protein, 14 aa, Homo sapiens
  CDR3 for alpha chain variable domain of TCR clone 108396 (TRAV23/DV6, TRAJ45)
SAASWGGGADGLTF

SEQ ID NO: 216792 - protein, 15 aa, Homo sapiens
  CDR3 for beta chain variable domain of TCR clone 108396 (TRBV4-2, TRBJ1-2)
CASSRNTGAGYGYTF

SEQ ID NO: 216793 - protein, 23 aa, Homo sapiens
  CDR3 for alpha chain variable domain of TCR clone 108397 (TRAV12-2, TRAJ36)
SLLIRDSQPSDSATLERANNLFF

SEQ ID NO: 216794 - protein, 16 aa, Homo sapiens
  CDR3 for beta chain variable domain of TCR clone 108397 (TRBV7-6, TRBJ2-3)
CASSLWREMGPDTQYF

SEQ ID NO: 216795 - protein, 13 aa, Homo sapiens
  CDR3 for alpha chain variable domain of TCR clone 108398 (TRAV21, TRAJ57)
CAVTQGGSEKLVF

SEQ ID NO: 216796 - protein, 15 aa, Homo sapiens
  CDR3 for beta chain variable domain of TCR clone 108398 (TRBV4-1, TRBJ1-4)
CASSDTGGTNEKLFF

SEQ ID NO: 216797 - protein, 14 aa, Homo sapiens
  CDR3 for alpha chain variable domain of TCR clone 108399 (TRAV9-2, TRAJ39)
CALYIYNAGNMLTF

SEQ ID NO: 216798 - protein, 17 aa, Homo sapiens
  CDR3 for beta chain variable domain of TCR clone 108399 (TRBV20-1, TRBJ1-5)
CSASLSPGQGGNQPQHF

SEQ ID NO: 216799 - protein, 14 aa, Homo sapiens
  CDR3 for alpha chain variable domain of TCR clone 108400 (TRAV12-2, TRAJ45)
CAVYSGGGADGLTF

SEQ ID NO: 216800 - protein, 14 aa, Homo sapiens
  CDR3 for beta chain variable domain of TCR clone 108400 (TRBV7-9, TRBJ2-2)
CASSGLADTGELFF

SEQ ID NO: 216801 - protein, 16 aa, Homo sapiens
  CDR3 for alpha chain variable domain of TCR clone 108401 (TRAV16, TRAJ52)
CALCGVGGTSYGKLTF

SEQ ID NO: 216802 - protein, 14 aa, Homo sapiens
  CDR3 for beta chain variable domain of TCR clone 108401 (TRBV19, TRBJ1-2)
CASSLQGQAYGYTF

SEQ ID NO: 216803 - protein, 12 aa, Homo sapiens
  CDR3 for alpha chain variable domain of TCR clone 108402 (TRAV13-1, TRAJ21)
CAAKEGFNKFYF

SEQ ID NO: 216804 - protein, 18 aa, Homo sapiens
  CDR3 for beta chain variable domain of TCR clone 108402 (TRBV20-1, TRBJ2-6)
CSADTTPTHGSGANVLTF

SEQ ID NO: 216805 - protein, 11 aa, Homo sapiens
  CDR3 for alpha chain variable domain of TCR clone 108403 (TRAV1-1, TRAJ23)
CAVSQGGKLIF

SEQ ID NO: 216806 - protein, 20 aa, Homo sapiens
  CDR3 for beta chain variable domain of TCR clone 108403 (TRBV7-8, TRBJ2-2)
CASSHLFPGPTLHITGELFF

SEQ ID NO: 216807 - protein, 17 aa, Homo sapiens
  CDR3 for alpha chain variable domain of TCR clone 108404 (TRAV17, TRAJ28)
CATDPRRGGAGSYQLTF

SEQ ID NO: 216808 - protein, 16 aa, Homo sapiens
  CDR3 for beta chain variable domain of TCR clone 108404 (TRBV25-1, TRBJ1-1)
CASSGDRDRGRIEAVF

SEQ ID NO: 216809 - protein, 17 aa, Homo sapiens
  CDR3 for alpha chain variable domain of TCR clone 108405 (TRAV20, TRAJ4)
CAVQLVLFSGGYNKLIF

SEQ ID NO: 216810 - protein, 12 aa, Homo sapiens
  CDR3 for beta chain variable domain of TCR clone 108405 (TRBV7-8, TRBJ2-7)
CASSLGDREQYF

SEQ ID NO: 216811 - protein, 15 aa, Homo sapiens
  CDR3 for alpha chain variable domain of TCR clone 108406 (TRAV3, TRAJ3)
CAVRDRDSSASKIIF

SEQ ID NO: 216812 - protein, 11 aa, Homo sapiens
  CDR3 for beta chain variable domain of TCR clone 108406 (TRBV29-1, TRBJ1-1)
CSVEILTEAFF

SEQ ID NO: 216813 - protein, 14 aa, Homo sapiens
  CDR3 for alpha chain variable domain of TCR clone 108407 (TRAV23/DV6, TRAJ37)
CAASTSSNTGKLIF

SEQ ID NO: 216814 - protein, 17 aa, Homo sapiens
  CDR3 for beta chain variable domain of TCR clone 108407 (TRBV7-8, TRBJ2-6)
CASSAGTGGAGANVLTF

SEQ ID NO: 216815 - protein, 13 aa, Homo sapiens
  CDR3 for alpha chain variable domain of TCR clone 108408 (TRAV12-2, TRAJ34)
CAVRGYNTDQLIF

SEQ ID NO: 216816 - protein, 15 aa, Homo sapiens
  CDR3 for beta chain variable domain of TCR clone 108408 (TRBV28, TRBJ2-1)
CASRTGAGVIARQFF

SEQ ID NO: 216817 - protein, 14 aa, Homo sapiens
  CDR3 for alpha chain variable domain of TCR clone 108409 (TRAV17, TRAJ12)
CATDEKDSSYKLSF

SEQ ID NO: 216818 - protein, 16 aa, Homo sapiens
  CDR3 for beta chain variable domain of TCR clone 108409 (TRBV11-2, TRBJ2-1)
CASSPRLAGVYNEQFF

SEQ ID NO: 216819 - protein, 19 aa, Homo sapiens
  CDR3 for alpha chain variable domain of TCR clone 108410 (TRAV29/DV5, TRAJ49)
CSVLLCSKLTVDTGNQFYF

SEQ ID NO: 216820 - protein, 16 aa, Homo sapiens
  CDR3 for beta chain variable domain of TCR clone 108410 (TRBV2, TRBJ2-3)
CASSTSVEGVTDTQYF

SEQ ID NO: 216821 - protein, 13 aa, Homo sapiens
  CDR3 for alpha chain variable domain of TCR clone 108411 (TRAV1-1, TRAJ9)
CAAKNTGGFKTIF

SEQ ID NO: 216822 - protein, 14 aa, Homo sapiens
  CDR3 for beta chain variable domain of TCR clone 108411 (TRBV7-3, TRBJ2-1)
CASSLAGGTNEQFF

SEQ ID NO: 216823 - protein, 15 aa, Homo sapiens
  CDR3 for alpha chain variable domain of TCR clone 108412 (TRAV3, TRAJ22)
CAVRDRGGSVRQLTF

SEQ ID NO: 216824 - protein, 14 aa, Homo sapiens
  CDR3 for beta chain variable domain of TCR clone 108412 (TRBV20-1, TRBJ1-1)
CSAQTRIGGTEAFF

SEQ ID NO: 216825 - protein, 14 aa, Homo sapiens
  CDR3 for alpha chain variable domain of TCR clone 108413 (TRAV1-2, TRAJ8)
CAVREDTVFQKLVF

SEQ ID NO: 216826 - protein, 15 aa, Homo sapiens
  CDR3 for beta chain variable domain of TCR clone 108413 (TRBV9, TRBJ1-6)
CASSVAGTGDSPLHF

SEQ ID NO: 216827 - protein, 14 aa, Homo sapiens
  CDR3 for alpha chain variable domain of TCR clone 108414 (TRAV1-2, TRAJ16)
CAVNRFSDGQKLLF

SEQ ID NO: 216828 - protein, 13 aa, Homo sapiens
  CDR3 for beta chain variable domain of TCR clone 108414 (TRBV6-5, TRBJ1-1)
QTSVYFCALRAFL

SEQ ID NO: 216829 - protein, 11 aa, Homo sapiens
  CDR3 for alpha chain variable domain of TCR clone 108415 (TRAV2, TRAJ13)
CASGGYQKVTF

SEQ ID NO: 216830 - protein, 12 aa, Homo sapiens
  CDR3 for beta chain variable domain of TCR clone 108415 (TRBV7-2, TRBJ1-5)
CASSLWSQPQHF

SEQ ID NO: 216831 - protein, 15 aa, Homo sapiens
  CDR3 for alpha chain variable domain of TCR clone 108416 (TRAV3, TRAJ5)
CAVRDRKTGRRALTF

SEQ ID NO: 216832 - protein, 14 aa, Homo sapiens
  CDR3 for beta chain variable domain of TCR clone 108416 (TRBV6-1, TRBJ1-3)
CASVQGGGGNTIYF

SEQ ID NO: 216833 - protein, 14 aa, Homo sapiens
  CDR3 for alpha chain variable domain of TCR clone 108417 (TRAV8-1, TRAJ34)
CAVNPSYNTDKLIF

SEQ ID NO: 216834 - protein, 16 aa, Homo sapiens
  CDR3 for beta chain variable domain of TCR clone 108417 (TRBV7-2, TRBJ2-6)
CASSLAGSSGANVLTF

SEQ ID NO: 216835 - protein, 18 aa, Homo sapiens
  CDR3 for alpha chain variable domain of TCR clone 108418 (TRAV13-1, TRAJ52)
CAAKNPNAGGTSYGKLTF

SEQ ID NO: 216836 - protein, 12 aa, Homo sapiens
  CDR3 for beta chain variable domain of TCR clone 108418 (TRBV28, TRBJ2-7)
CASSLLSYEQYF

SEQ ID NO: 216837 - protein, 13 aa, Homo sapiens
  CDR3 for alpha chain variable domain of TCR clone 108419 (TRAV25, TRAJ26)
CAGMDNYGQNFVF

SEQ ID NO: 216838 - protein, 12 aa, Homo sapiens
  CDR3 for beta chain variable domain of TCR clone 108419 (TRBV14, TRBJ2-7)
CASSRLKGEQYF

SEQ ID NO: 216839 - protein, 17 aa, Homo sapiens
  CDR3 for alpha chain variable domain of TCR clone 108420 (TRAV3, TRAJ6)
CAVRDGPRVGGSYIPTF

SEQ ID NO: 216840 - protein, 12 aa, Homo sapiens
  CDR3 for beta chain variable domain of TCR clone 108420 (TRBV11-2, TRBJ2-2)
CAGSLGGGELFI

SEQ ID NO: 216841 - protein, 12 aa, Homo sapiens
  CDR3 for alpha chain variable domain of TCR clone 108421 (TRAV8-4, TRAJ43)
CAVSVNNNDMLF

SEQ ID NO: 216842 - protein, 14 aa, Homo sapiens
  CDR3 for beta chain variable domain of TCR clone 108421 (TRBV11-2, TRBJ1-2)
CASSLGTANYGYTF

SEQ ID NO: 216843 - protein, 13 aa, Homo sapiens
  CDR3 for alpha chain variable domain of TCR clone 108422 (TRAV3, TRAJ21)
CAVREPDFNKFYF

SEQ ID NO: 216844 - protein, 13 aa, Homo sapiens
  CDR3 for beta chain variable domain of TCR clone 108422 (TRBV27, TRBJ1-1)
CASSLSIGAEAFF

SEQ ID NO: 216845 - protein, 16 aa, Homo sapiens
  CDR3 for alpha chain variable domain of TCR clone 108423 (TRAV16, TRAJ57)
CAPYLITQGGSEKLVF

SEQ ID NO: 216846 - protein, 17 aa, Homo sapiens
  CDR3 for beta chain variable domain of TCR clone 108423 (TRBV24-1, TRBJ2-4)
CATSDAEARGVRNIRYF

SEQ ID NO: 216847 - protein, 20 aa, Homo sapiens
  CDR3 for alpha chain variable domain of TCR clone 108424 (TRAV12-2, TRAJ52)
SPVIQPPARAGGTSYGKLTF

SEQ ID NO: 216848 - protein, 16 aa, Homo sapiens
  CDR3 for beta chain variable domain of TCR clone 108424 (TRBV15, TRBJ1-2)
CATSRGPRTGGGGYTV

SEQ ID NO: 216849 - protein, 15 aa, Homo sapiens
  CDR3 for alpha chain variable domain of TCR clone 108425 (TRAV38-2/DV8, TRAJ47)
CAYRSAKGHGNKLVF

SEQ ID NO: 216850 - protein, 15 aa, Homo sapiens
  CDR3 for beta chain variable domain of TCR clone 108425 (TRBV6-6, TRBJ2-7)
CASSYSYGGSYEQYF

SEQ ID NO: 216851 - protein, 12 aa, Homo sapiens
  CDR3 for alpha chain variable domain of TCR clone 108426 (TRAV12-2, TRAJ8)
CAVATGFQKLVF

SEQ ID NO: 216852 - protein, 13 aa, Homo sapiens
  CDR3 for beta chain variable domain of TCR clone 108426 (TRBV7-9, TRBJ1-2)
CASSLKQNYGYTF

SEQ ID NO: 216853 - protein, 14 aa, Homo sapiens
  CDR3 for alpha chain variable domain of TCR clone 108427 (TRAV8-3, TRAJ4)
CAVGAAGGYNKLIF

SEQ ID NO: 216854 - protein, 13 aa, Homo sapiens
  CDR3 for beta chain variable domain of TCR clone 108427 (TRBV12-4, TRBJ1-2)
CASSSGLTVISTF

SEQ ID NO: 216855 - protein, 15 aa, Homo sapiens
  CDR3 for alpha chain variable domain of TCR clone 108428 (TRAV12-2, TRAJ23)
CAVKPIYNQGGKLIF

SEQ ID NO: 216856 - protein, 15 aa, Homo sapiens
  CDR3 for beta chain variable domain of TCR clone 108428 (TRBV5-1, TRBJ1-2)
CASSLVGRQSQGYTF

SEQ ID NO: 216857 - protein, 13 aa, Homo sapiens
  CDR3 for alpha chain variable domain of TCR clone 108429 (TRAV8-4, TRAJ48)
CAVSLFGNEKLTF

SEQ ID NO: 216858 - protein, 15 aa, Homo sapiens
  CDR3 for beta chain variable domain of TCR clone 108429 (TRBV7-9, TRBJ1-2)
CASSSVDRSNYGYTF

SEQ ID NO: 216859 - protein, 15 aa, Homo sapiens
  CDR3 for alpha chain variable domain of TCR clone 108430 (TRAV8-3, TRAJ23)
CAVGDRYNQVGKLIF

SEQ ID NO: 216860 - protein, 22 aa, Homo sapiens
  CDR3 for beta chain variable domain of TCR clone 108430 (TRBV29-1, TRBJ2-5)
TVSNMSPEDSSIYLCSAGTQYF

SEQ ID NO: 216861 - protein, 20 aa, Homo sapiens
  CDR3 for alpha chain variable domain of TCR clone 108431 (TRAV25, TRAJ21)
TATQTTDVGTYPLSFNKFYF

SEQ ID NO: 216862 - protein, 14 aa, Homo sapiens
  CDR3 for beta chain variable domain of TCR clone 108431 (TRBV6-1, TRBJ2-1)
CASAKDGFYNEQFL

SEQ ID NO: 216863 - protein, 14 aa, Homo sapiens
  CDR3 for alpha chain variable domain of TCR clone 108432 (TRAV26-1, TRAJ9)
CIVNPLAGGFKTIF

SEQ ID NO: 216864 - protein, 14 aa, Homo sapiens
  CDR3 for beta chain variable domain of TCR clone 108432 (TRBV5-4, TRBJ1-1)
CASSLDSRRDEAFF

SEQ ID NO: 216865 - protein, 14 aa, Homo sapiens
  CDR3 for alpha chain variable domain of TCR clone 108433 (TRAV12-2, TRAJ3)
CAVKGYSSASKIIL

SEQ ID NO: 216866 - protein, 14 aa, Homo sapiens
  CDR3 for beta chain variable domain of TCR clone 108433 (TRBV6-3, TRBJ1-2)
CASSEGGGSYGYTF

SEQ ID NO: 216867 - protein, 14 aa, Homo sapiens
  CDR3 for alpha chain variable domain of TCR clone 108434 (TRAV26-1, TRAJ45)
CIVRVVGGADGRTF

SEQ ID NO: 216868 - protein, 16 aa, Homo sapiens
  CDR3 for beta chain variable domain of TCR clone 108434 (TRBV7-9, TRBJ1-1)
CASSLTQVRSNTEAFF

SEQ ID NO: 216869 - protein, 14 aa, Homo sapiens
  CDR3 for alpha chain variable domain of TCR clone 108435 (TRAV26-1, TRAJ38)
CIADNAGNNRKLIW

SEQ ID NO: 216870 - protein, 15 aa, Homo sapiens
  CDR3 for beta chain variable domain of TCR clone 108435 (TRBV4-1, TRBJ1-4)
CASSDTGGTNEKLFF

SEQ ID NO: 216871 - protein, 13 aa, Homo sapiens
  CDR3 for alpha chain variable domain of TCR clone 108436 (TRAV20, TRAJ20)
CAVRWVRDYKLSF

SEQ ID NO: 216872 - protein, 16 aa, Homo sapiens
  CDR3 for beta chain variable domain of TCR clone 108436 (TRBV7-3, TRBJ2-2)
CASSLKRGTLSGELFF

SEQ ID NO: 216873 - protein, 17 aa, Homo sapiens
  CDR3 for alpha chain variable domain of TCR clone 108437 (TRAV3, TRAJ6)
CAVRDGPMAGGSYIPTS

SEQ ID NO: 216874 - protein, 14 aa, Homo sapiens
  CDR3 for beta chain variable domain of TCR clone 108437 (TRBV7-2, TRBJ2-7)
CASSPKTSFYEQYF

SEQ ID NO: 216875 - protein, 14 aa, Homo sapiens
  CDR3 for alpha chain variable domain of TCR clone 108438 (TRAV17, TRAJ39)
CATDPVRAGNMLTF

SEQ ID NO: 216876 - protein, 15 aa, Homo sapiens
  CDR3 for beta chain variable domain of TCR clone 108438 (TRBV13, TRBJ1-5)
CASSFGQGGVQPRHF

SEQ ID NO: 216877 - protein, 13 aa, Homo sapiens
  CDR3 for alpha chain variable domain of TCR clone 108439 (TRAV3, TRAJ20)
CAVRDTPLYKLSF

SEQ ID NO: 216878 - protein, 14 aa, Homo sapiens
  CDR3 for beta chain variable domain of TCR clone 108439 (TRBV11-1, TRBJ2-7)
CASTFAVPSYEQYF

SEQ ID NO: 216879 - protein, 16 aa, Homo sapiens
  CDR3 for alpha chain variable domain of TCR clone 108440 (TRAV22, TRAJ45)
CAVERGKRGGADGLTF

SEQ ID NO: 216880 - protein, 13 aa, Homo sapiens
  CDR3 for beta chain variable domain of TCR clone 108440 (TRBV27, TRBJ1-1)
CASSLSIAAEAFF

SEQ ID NO: 216881 - protein, 11 aa, Homo sapiens
  CDR3 for alpha chain variable domain of TCR clone 108441 (TRAV12-2, TRAJ39)
CAVNNMLTFGG

SEQ ID NO: 216882 - protein, 16 aa, Homo sapiens
  CDR3 for beta chain variable domain of TCR clone 108441 (TRBV9, TRBJ2-7)
CASSAGPDRSPYEQYV

SEQ ID NO: 216883 - protein, 16 aa, Homo sapiens
  CDR3 for alpha chain variable domain of TCR clone 108442 (TRAV38-1, TRAJ56)
CAFMKRQTGANSKLTF

SEQ ID NO: 216884 - protein, 14 aa, Homo sapiens
  CDR3 for beta chain variable domain of TCR clone 108442 (TRBV7-3, TRBJ1-1)
CASSLKGGNTEAFF

SEQ ID NO: 216885 - protein, 17 aa, Homo sapiens
  CDR3 for alpha chain variable domain of TCR clone 108443 (TRAV35, TRAJ28)
CAGLQVYSGSGSYQLTF

SEQ ID NO: 216886 - protein, 15 aa, Homo sapiens
  CDR3 for beta chain variable domain of TCR clone 108443 (TRBV2, TRBJ1-2)
CASSEIGGANYGYTF

SEQ ID NO: 216887 - protein, 12 aa, Homo sapiens
  CDR3 for alpha chain variable domain of TCR clone 108444 (TRAV10, TRAJ43)
CVVVRVVNDMRF

SEQ ID NO: 216888 - protein, 15 aa, Homo sapiens
  CDR3 for beta chain variable domain of TCR clone 108444 (TRBV2, TRBJ2-7)
CASSEGLARSYEQYF

SEQ ID NO: 216889 - protein, 11 aa, Homo sapiens
  CDR3 for alpha chain variable domain of TCR clone 108445 (TRAV17, TRAJ39)
CATGAGKMLTF

SEQ ID NO: 216890 - protein, 16 aa, Homo sapiens
  CDR3 for beta chain variable domain of TCR clone 108445 (TRBV5-1, TRBJ2-1)
CASSFGVSGSYNEQFF

SEQ ID NO: 216891 - protein, 14 aa, Homo sapiens
  CDR3 for alpha chain variable domain of TCR clone 108446 (TRAV12-1, TRAJ17)
CVVNYKAAGNKLTF

SEQ ID NO: 216892 - protein, 15 aa, Homo sapiens
  CDR3 for beta chain variable domain of TCR clone 108446 (TRBV6-6, TRBJ2-7)
CASSYSYGGSYKQYF

SEQ ID NO: 216893 - protein, 14 aa, Homo sapiens
  CDR3 for alpha chain variable domain of TCR clone 108447 (TRAV12-2, TRAJ13)
CAVKKTGGYQKVTF

SEQ ID NO: 216894 - protein, 16 aa, Homo sapiens
  CDR3 for beta chain variable domain of TCR clone 108447 (TRBV7-8, TRBJ2-4)
CASSAERTLAKNIQYF

SEQ ID NO: 216895 - protein, 13 aa, Homo sapiens
  CDR3 for alpha chain variable domain of TCR clone 108448 (TRAV21, TRAJ20)
CAVGLRVDYKLSF

SEQ ID NO: 216896 - protein, 16 aa, Homo sapiens
  CDR3 for beta chain variable domain of TCR clone 108448 (TRBV11-2, TRBJ1-2)
CASSLDTGGADYGYTF

SEQ ID NO: 216897 - protein, 15 aa, Homo sapiens
  CDR3 for alpha chain variable domain of TCR clone 108449 (TRAV26-1, TRAJ29)
CIVRVEGSGNTPLVF

SEQ ID NO: 216898 - protein, 14 aa, Homo sapiens
  CDR3 for beta chain variable domain of TCR clone 108449 (TRBV25-1, TRBJ1-1)
CASTHLGGNAEAFF

SEQ ID NO: 216899 - protein, 12 aa, Homo sapiens
  CDR3 for alpha chain variable domain of TCR clone 108450 (TRAV3, TRAJ20)
CAVRDGDYKLSF

SEQ ID NO: 216900 - protein, 14 aa, Homo sapiens
  CDR3 for beta chain variable domain of TCR clone 108450 (TRBV18, TRBJ2-5)
CASSPGVSQETQYF

SEQ ID NO: 216901 - protein, 16 aa, Homo sapiens
  CDR3 for alpha chain variable domain of TCR clone 108451 (TRAV3, TRAJ10)
CAVRDMRAGGGNKLTF

SEQ ID NO: 216902 - protein, 17 aa, Homo sapiens
  CDR3 for beta chain variable domain of TCR clone 108451 (TRBV20-1, TRBJ2-2)
CSASESGQGGLTGELFF

SEQ ID NO: 216903 - protein, 20 aa, Homo sapiens
  CDR3 for alpha chain variable domain of TCR clone 108452 (TRAV26-1, TRAJ42)
CCVLLHRQTYYGGSQGNLIF

SEQ ID NO: 216904 - protein, 16 aa, Homo sapiens
  CDR3 for beta chain variable domain of TCR clone 108452 (TRBV7-3, TRBJ2-2)
CASILKRGTLSGELFF

SEQ ID NO: 216905 - protein, 14 aa, Homo sapiens
  CDR3 for alpha chain variable domain of TCR clone 108453 (TRAV2, TRAJ23)
CAVGLRNQGGKLIF

SEQ ID NO: 216906 - protein, 13 aa, Homo sapiens
  CDR3 for beta chain variable domain of TCR clone 108453 (TRBV12-4, TRBJ2-5)
CASSPGTEETQYL

SEQ ID NO: 216907 - protein, 15 aa, Homo sapiens
  CDR3 for alpha chain variable domain of TCR clone 108454 (TRAV8-3, TRAJ7)
CAVGSISYGNNRLSF

SEQ ID NO: 216908 - protein, 15 aa, Homo sapiens
  CDR3 for beta chain variable domain of TCR clone 108454 (TRBV4-2, TRBJ1-1)
CASSQEDLPRTEAFF

SEQ ID NO: 216909 - protein, 14 aa, Homo sapiens
  CDR3 for alpha chain variable domain of TCR clone 108455 (TRAV1-2, TRAJ8)
CAVREDTGFQKLVF

SEQ ID NO: 216910 - protein, 15 aa, Homo sapiens
  CDR3 for beta chain variable domain of TCR clone 108455 (TRBV5-1, TRBJ2-2)
CASSTFNINTGELFF

SEQ ID NO: 216911 - protein, 11 aa, Homo sapiens
  CDR3 for alpha chain variable domain of TCR clone 108456 (TRAV12-1, TRAJ21)
CVVYNFNKFYF

SEQ ID NO: 216912 - protein, 14 aa, Homo sapiens
  CDR3 for beta chain variable domain of TCR clone 108456 (TRBV7-2, TRBJ2-7)
CASSPKTSFYEQYF

SEQ ID NO: 216913 - protein, 13 aa, Homo sapiens
  CDR3 for alpha chain variable domain of TCR clone 108457 (TRAV8-3, TRAJ44)
CAVVPGTASKLTF

SEQ ID NO: 216914 - protein, 14 aa, Homo sapiens
  CDR3 for beta chain variable domain of TCR clone 108457 (TRBV4-1, TRBJ2-2)
CASSQAVNTGELFF

SEQ ID NO: 216915 - protein, 14 aa, Homo sapiens
  CDR3 for alpha chain variable domain of TCR clone 108458 (TRAV30, TRAJ33)
CGTVAPRSNYQLIR

SEQ ID NO: 216916 - protein, 16 aa, Homo sapiens
  CDR3 for beta chain variable domain of TCR clone 108458 (TRBV3-1, TRBJ2-5)
CASSPGQFNGFGTQYF

SEQ ID NO: 216917 - protein, 16 aa, Homo sapiens
  CDR3 for alpha chain variable domain of TCR clone 108459 (TRAV13-1, TRAJ18)
CAASRMRGSTLGRLYF

SEQ ID NO: 216918 - protein, 16 aa, Homo sapiens
  CDR3 for beta chain variable domain of TCR clone 108459 (TRBV12-4, TRBJ1-1)
CASSSRGRTGYTEAFF

SEQ ID NO: 216919 - protein, 13 aa, Homo sapiens
  CDR3 for alpha chain variable domain of TCR clone 108460 (TRAV12-1, TRAJ21)
FVVTLYNFNKFYF

SEQ ID NO: 216920 - protein, 20 aa, Homo sapiens
  CDR3 for beta chain variable domain of TCR clone 108460 (TRBV7-8, TRBJ2-1)
CASSLAHRLAGVRSYNEQFF

SEQ ID NO: 216921 - protein, 15 aa, Homo sapiens
  CDR3 for alpha chain variable domain of TCR clone 108461 (TRAV26-1, TRAJ29)
CIVRVEGSGNTPLVF

SEQ ID NO: 216922 - protein, 13 aa, Homo sapiens
  CDR3 for beta chain variable domain of TCR clone 108461 (TRBV18, TRBJ2-5)
CASSPGVSQTQYF

SEQ ID NO: 216923 - protein, 14 aa, Homo sapiens
  CDR3 for alpha chain variable domain of TCR clone 108462 (TRAV12-2, TRAJ13)
CAVKKTGGYQKVTF

SEQ ID NO: 216924 - protein, 15 aa, Homo sapiens
  CDR3 for beta chain variable domain of TCR clone 108462 (TRBV7-2, TRBJ1-2)
CASSLVSGGDYGYTF

SEQ ID NO: 216925 - protein, 12 aa, Homo sapiens
  CDR3 for alpha chain variable domain of TCR clone 108463 (TRAV1-1, TRAJ43)
CAPRVSSNDMRF

SEQ ID NO: 216926 - protein, 16 aa, Homo sapiens
  CDR3 for beta chain variable domain of TCR clone 108463 (TRBV6-1, TRBJ1-3)
CASVQGGVETPYILER

SEQ ID NO: 216927 - protein, 14 aa, Homo sapiens
  CDR3 for alpha chain variable domain of TCR clone 108464 (TRAV13-1, TRAJ13)
CAASRVGGYQKVTF

SEQ ID NO: 216928 - protein, 14 aa, Homo sapiens
  CDR3 for beta chain variable domain of TCR clone 108464 (TRBV5-1, TRBJ2-7)
CASSRGESLYEQYF

SEQ ID NO: 216929 - protein, 13 aa, Homo sapiens
  CDR3 for alpha chain variable domain of TCR clone 108465 (TRAV23/DV6, TRAJ15)
CAALPAGRNCSDL

SEQ ID NO: 216930 - protein, 14 aa, Homo sapiens
  CDR3 for beta chain variable domain of TCR clone 108465 (TRBV7-9, TRBJ1-2)
FASSRQGANYGYTF

SEQ ID NO: 216931 - protein, 15 aa, Homo sapiens
  CDR3 for alpha chain variable domain of TCR clone 108466 (TRAV12-3, TRAJ42)
CAMSGHGGSQGNLIF

SEQ ID NO: 216932 - protein, 16 aa, Homo sapiens
  CDR3 for beta chain variable domain of TCR clone 108466 (TRBV12-5, TRBJ2-5)
CASGPRTSGNQETQYF

SEQ ID NO: 216933 - protein, 13 aa, Homo sapiens
  CDR3 for alpha chain variable domain of TCR clone 108467 (TRAV27, TRAJ41)
CAGEGNSGYALNF

SEQ ID NO: 216934 - protein, 12 aa, Homo sapiens
  CDR3 for beta chain variable domain of TCR clone 108467 (TRBV27, TRBJ2-1)
CASRGSYNEQFF

SEQ ID NO: 216935 - protein, 12 aa, Homo sapiens
  CDR3 for alpha chain variable domain of TCR clone 108468 (TRAV21, TRAJ49)
CAVTNTGSQFYF

SEQ ID NO: 216936 - protein, 17 aa, Homo sapiens
  CDR3 for beta chain variable domain of TCR clone 108468 (TRBV13, TRBJ2-3)
CASSLSRVAGGRNTQYF

SEQ ID NO: 216937 - protein, 17 aa, Homo sapiens
  CDR3 for alpha chain variable domain of TCR clone 108469 (TRAV3, TRAJ42)
CAVRDRDYGGSQGNPIF

SEQ ID NO: 216938 - protein, 15 aa, Homo sapiens
  CDR3 for beta chain variable domain of TCR clone 108469 (TRBV3-1, TRBJ2-1)
CASSQVVDDGEEQFF

SEQ ID NO: 216939 - protein, 19 aa, Homo sapiens
  CDR3 for alpha chain variable domain of TCR clone 108470 (TRAV3, TRAJ6)
CAVREAPGQEEATYLHLEE

SEQ ID NO: 216940 - protein, 14 aa, Homo sapiens
  CDR3 for beta chain variable domain of TCR clone 108470 (TRBV7-2, TRBJ2-7)
CASSPKTSFYEQYF

SEQ ID NO: 216941 - protein, 17 aa, Homo sapiens
  CDR3 for alpha chain variable domain of TCR clone 108471 (TRAV13-1, TRAJ28)
CAASPPYSGAGSYQLTF

SEQ ID NO: 216942 - protein, 12 aa, Homo sapiens
  CDR3 for beta chain variable domain of TCR clone 108471 (TRBV11-2, TRBJ2-2)
CASNLPTGELFF

SEQ ID NO: 216943 - protein, 16 aa, Homo sapiens
  CDR3 for alpha chain variable domain of TCR clone 108472 (TRAV8-3, TRAJ8)
CAVPRDGNTGFQKLVF

SEQ ID NO: 216944 - protein, 15 aa, Homo sapiens
  CDR3 for beta chain variable domain of TCR clone 108472 (TRBV19, TRBJ1-5)
CASGIVWADNQPQHF

SEQ ID NO: 216945 - protein, 12 aa, Homo sapiens
  CDR3 for alpha chain variable domain of TCR clone 108473 (TRAV21, TRAJ33)
CAKMDSNYQLIW

SEQ ID NO: 216946 - protein, 13 aa, Homo sapiens
  CDR3 for beta chain variable domain of TCR clone 108473 (TRBV2, TRBJ1-1)
CASSEGGNTEAFF

SEQ ID NO: 216947 - protein, 14 aa, Homo sapiens
  CDR3 for alpha chain variable domain of TCR clone 108474 (TRAV23/DV6, TRAJ27)
CAASRDPNAGKSTF

SEQ ID NO: 216948 - protein, 13 aa, Homo sapiens
  CDR3 for beta chain variable domain of TCR clone 108474 (TRBV20-1, TRBJ1-5)
CSASGRGNQPQHF

SEQ ID NO: 216949 - protein, 12 aa, Homo sapiens
  CDR3 for alpha chain variable domain of TCR clone 108475 (TRAV13-2, TRAJ23)
CAERHRGGKLIF

SEQ ID NO: 216950 - protein, 12 aa, Homo sapiens
  CDR3 for beta chain variable domain of TCR clone 108475 (TRBV2, TRBJ2-1)
CAKREGYNEQFF

SEQ ID NO: 216951 - protein, 16 aa, Homo sapiens
  CDR3 for alpha chain variable domain of TCR clone 108476 (TRAV35, TRAJ28)
CAGYLYSGAGSYQLTF

SEQ ID NO: 216952 - protein, 16 aa, Homo sapiens
  CDR3 for beta chain variable domain of TCR clone 108476 (TRBV5-1, TRBJ2-1)
CASSRGLAGPQNEQFF

SEQ ID NO: 216953 - protein, 10 aa, Homo sapiens
  CDR3 for alpha chain variable domain of TCR clone 108477 (TRAV8-3, TRAJ45)
SGGGADGLTF

SEQ ID NO: 216954 - protein, 12 aa, Homo sapiens
  CDR3 for beta chain variable domain of TCR clone 108477 (TRBV11-2, TRBJ2-3)
CASRPGTDTQYF

SEQ ID NO: 216955 - protein, 12 aa, Homo sapiens
  CDR3 for alpha chain variable domain of TCR clone 108478 (TRAV13-1, TRAJ21)
CAAKEGFNKFYF

SEQ ID NO: 216956 - protein, 14 aa, Homo sapiens
  CDR3 for beta chain variable domain of TCR clone 108478 (TRBV11-2, TRBJ2-7)
CASSSTGEGYEQYF

SEQ ID NO: 216957 - protein, 12 aa, Homo sapiens
  CDR3 for alpha chain variable domain of TCR clone 108479 (TRAV16, TRAJ8)
CAPLGGFQKLVF

SEQ ID NO: 216958 - protein, 15 aa, Homo sapiens
  CDR3 for beta chain variable domain of TCR clone 108479 (TRBV11-2, TRBJ2-1)
CASSRNRGLMYEQFF

SEQ ID NO: 216959 - protein, 13 aa, Homo sapiens
  CDR3 for alpha chain variable domain of TCR clone 108480 (TRAV21, TRAJ37)
CAVSSGNTGKLIF

SEQ ID NO: 216960 - protein, 14 aa, Homo sapiens
  CDR3 for beta chain variable domain of TCR clone 108480 (TRBV13, TRBJ2-5)
CASSLERVGETQYF

SEQ ID NO: 216961 - protein, 15 aa, Homo sapiens
  CDR3 for alpha chain variable domain of TCR clone 108481 (TRAV17, TRAJ57)
CATGPSQGGSEKLVF

SEQ ID NO: 216962 - protein, 14 aa, Homo sapiens
  CDR3 for beta chain variable domain of TCR clone 108481 (TRBV2, TRBJ1-5)
CASSEAAGGQPQHF

SEQ ID NO: 216963 - protein, 14 aa, Homo sapiens
  CDR3 for alpha chain variable domain of TCR clone 108482 (TRAV12-2, TRAJ40)
CAVKIPSGTYKYIF

SEQ ID NO: 216964 - protein, 15 aa, Homo sapiens
  CDR3 for beta chain variable domain of TCR clone 108482 (TRBV7-2, TRBJ2-1)
CASSLVGSSYNEQFF

SEQ ID NO: 216965 - protein, 13 aa, Homo sapiens
  CDR3 for alpha chain variable domain of TCR clone 108483 (TRAV22, TRAJ48)
CAVPNFGNEKLTF

SEQ ID NO: 216966 - protein, 16 aa, Homo sapiens
  CDR3 for beta chain variable domain of TCR clone 108483 (TRBV6-1, TRBJ2-5)
CASSETLDRGAETQYF

SEQ ID NO: 216967 - protein, 13 aa, Homo sapiens
  CDR3 for alpha chain variable domain of TCR clone 108484 (TRAV12-3, TRAJ33)
CAMSVNSNYQLIW

SEQ ID NO: 216968 - protein, 12 aa, Homo sapiens
  CDR3 for beta chain variable domain of TCR clone 108484 (TRBV29-1, TRBJ2-3)
CSGAPPADTQYF

SEQ ID NO: 216969 - protein, 14 aa, Homo sapiens
  CDR3 for alpha chain variable domain of TCR clone 108485 (TRAV12-1, TRAJ30)
CVVNIGGRAGKIIF

SEQ ID NO: 216970 - protein, 14 aa, Homo sapiens
  CDR3 for beta chain variable domain of TCR clone 108485 (TRBV7-6, TRBJ2-3)
CASSLGTVTDTQYF

SEQ ID NO: 216971 - protein, 11 aa, Homo sapiens
  CDR3 for alpha chain variable domain of TCR clone 108486 (TRAV12-2, TRAJ31)
CAVTRWARLMF

SEQ ID NO: 216972 - protein, 15 aa, Homo sapiens
  CDR3 for beta chain variable domain of TCR clone 108486 (TRBV7-9, TRBJ1-5)
CASSQGHQPNQPQHF

SEQ ID NO: 216973 - protein, 14 aa, Homo sapiens
  CDR3 for alpha chain variable domain of TCR clone 108487 (TRAV1-2, TRAJ16)
CAVNRFSDGQKLLF

SEQ ID NO: 216974 - protein, 14 aa, Homo sapiens
  CDR3 for beta chain variable domain of TCR clone 108487 (TRBV5-1, TRBJ1-1)
CASSLQGASTEAFF

SEQ ID NO: 216975 - protein, 14 aa, Homo sapiens
  CDR3 for alpha chain variable domain of TCR clone 108488 (TRAV9-2, TRAJ39)
CALYIYNAGNMLPF

SEQ ID NO: 216976 - protein, 12 aa, Homo sapiens
  CDR3 for beta chain variable domain of TCR clone 108488 (TRBV7-2, TRBJ2-5)
CASSQYQETQYF

SEQ ID NO: 216977 - protein, 12 aa, Homo sapiens
  CDR3 for alpha chain variable domain of TCR clone 108489 (TRAV12-3, TRAJ17)
CAMTLTGNKLTF

SEQ ID NO: 216978 - protein, 17 aa, Homo sapiens
  CDR3 for beta chain variable domain of TCR clone 108489 (TRBV12-4, TRBJ2-3)
CASSGPGLAGGADTQYF

SEQ ID NO: 216979 - protein, 22 aa, Homo sapiens
  CDR3 for alpha chain variable domain of TCR clone 108490 (TRAV8-3, TRAJ32)
CAVEVVLQTSSSLELALCLLSS

SEQ ID NO: 216980 - protein, 12 aa, Homo sapiens
  CDR3 for beta chain variable domain of TCR clone 108490 (TRBV7-8, TRBJ2-7)
CASSPGDREQYF

SEQ ID NO: 216981 - protein, 13 aa, Homo sapiens
  CDR3 for alpha chain variable domain of TCR clone 108491 (TRAV1-2, TRAJ34)
CAVRDEATDKLIF

SEQ ID NO: 216982 - protein, 16 aa, Homo sapiens
  CDR3 for beta chain variable domain of TCR clone 108491 (TRBV27, TRBJ2-1)
SMNVEPGTSGDNEQFF

SEQ ID NO: 216983 - protein, 12 aa, Homo sapiens
  CDR3 for alpha chain variable domain of TCR clone 108492 (TRAV35, TRAJ30)
CAGQLADAKIIF

SEQ ID NO: 216984 - protein, 17 aa, Homo sapiens
  CDR3 for beta chain variable domain of TCR clone 108492 (TRBV4-2, TRBJ2-5)
CASSPGRWRNFQETQYF

SEQ ID NO: 216985 - protein, 14 aa, Homo sapiens
  CDR3 for alpha chain variable domain of TCR clone 108493 (TRAV35, TRAJ13)
CAGRSPGGYQKVTF

SEQ ID NO: 216986 - protein, 14 aa, Homo sapiens
  CDR3 for beta chain variable domain of TCR clone 108493 (TRBV19, TRBJ2-2)
CARSMVGLSGELFF

SEQ ID NO: 216987 - protein, 16 aa, Homo sapiens
  CDR3 for alpha chain variable domain of TCR clone 108494 (TRAV38-1, TRAJ37)
CAFKGDGSSNTGKLIF

SEQ ID NO: 216988 - protein, 13 aa, Homo sapiens
  CDR3 for beta chain variable domain of TCR clone 108494 (TRBV12-4, TRBJ2-5)
CASSLFRRDTQYF

SEQ ID NO: 216989 - protein, 13 aa, Homo sapiens
  CDR3 for alpha chain variable domain of TCR clone 108495 (TRAV12-1, TRAJ29)
CVVRNSGNTPIVF

SEQ ID NO: 216990 - protein, 14 aa, Homo sapiens
  CDR3 for beta chain variable domain of TCR clone 108495 (TRBV7-2, TRBJ2-7)
CASRSQGAAYEQYF

SEQ ID NO: 216991 - protein, 14 aa, Homo sapiens
  CDR3 for alpha chain variable domain of TCR clone 108496 (TRAV13-2, TRAJ17)
CAENSKAAGNKLTL

SEQ ID NO: 216992 - protein, 11 aa, Homo sapiens
  CDR3 for beta chain variable domain of TCR clone 108496 (TRBV6-3, TRBJ2-3)
CATGQADTQYF

SEQ ID NO: 216993 - protein, 15 aa, Homo sapiens
  CDR3 for alpha chain variable domain of TCR clone 108497 (TRAV3, TRAJ3)
CAVRDRDSSASKIIF

SEQ ID NO: 216994 - protein, 18 aa, Homo sapiens
  CDR3 for beta chain variable domain of TCR clone 108497 (TRBV25-1, TRBJ1-2)
CASSGLQNGQGLIFGDTF

SEQ ID NO: 216995 - protein, 14 aa, Homo sapiens
  CDR3 for alpha chain variable domain of TCR clone 108498 (TRAV2, TRAJ3)
CAVDRYSSASKIIF

SEQ ID NO: 216996 - protein, 12 aa, Homo sapiens
  CDR3 for beta chain variable domain of TCR clone 108498 (TRBV12-4, TRBJ2-1)
CASSKDRRWQFF

SEQ ID NO: 216997 - protein, 14 aa, Homo sapiens
  CDR3 for alpha chain variable domain of TCR clone 108499 (TRAV9-2, TRAJ36)
CALPWRTWANNLFF

SEQ ID NO: 216998 - protein, 14 aa, Homo sapiens
  CDR3 for beta chain variable domain of TCR clone 108499 (TRBV2, TRBJ1-2)
CASSELQVNYGYTF

SEQ ID NO: 216999 - protein, 12 aa, Homo sapiens
  CDR3 for alpha chain variable domain of TCR clone 108500 (TRAV3, TRAJ39)
CSVIEWSNMLTF

SEQ ID NO: 217000 - protein, 14 aa, Homo sapiens
  CDR3 for beta chain variable domain of TCR clone 108500 (TRBV7-8, TRBJ2-3)
CASSFPDGQDTQYF

SEQ ID NO: 217001 - protein, 12 aa, Homo sapiens
  CDR3 for alpha chain variable domain of TCR clone 108501 (TRAV13-1, TRAJ15)
CAASQAGTALLF

SEQ ID NO: 217002 - protein, 14 aa, Homo sapiens
  CDR3 for beta chain variable domain of TCR clone 108501 (TRBV19, TRBJ2-1)
CASPTFVLSGEQFF

SEQ ID NO: 217003 - protein, 14 aa, Homo sapiens
  CDR3 for alpha chain variable domain of TCR clone 108502 (TRAV12-2, TRAJ15)
CAPHTGQAGTALIF

SEQ ID NO: 217004 - protein, 14 aa, Homo sapiens
  CDR3 for beta chain variable domain of TCR clone 108502 (TRBV7-9, TRBJ2-1)
CASSPRDSLYEQFF

SEQ ID NO: 217005 - protein, 16 aa, Homo sapiens
  CDR3 for alpha chain variable domain of TCR clone 108503 (TRAV3, TRAJ21)
CAVRDVERGNFNKFYF

SEQ ID NO: 217006 - protein, 13 aa, Homo sapiens
  CDR3 for beta chain variable domain of TCR clone 108503 (TRBV4-2, TRBJ1-1)
CASSQAGNTEAFF

SEQ ID NO: 217007 - protein, 16 aa, Homo sapiens
  CDR3 for alpha chain variable domain of TCR clone 108504 (TRAV20, TRAJ22)
CAVQASSSGSARQLTF

SEQ ID NO: 217008 - protein, 16 aa, Homo sapiens
  CDR3 for beta chain variable domain of TCR clone 108504 (TRBV19, TRBJ2-1)
CASSKAGPSSYNEQFF

SEQ ID NO: 217009 - protein, 17 aa, Homo sapiens
  CDR3 for alpha chain variable domain of TCR clone 108505 (TRAV12-2, TRAJ22)
CAVNRIPFPGSARQLTF

SEQ ID NO: 217010 - protein, 13 aa, Homo sapiens
  CDR3 for beta chain variable domain of TCR clone 108505 (TRBV11-3, TRBJ1-1)
CASSSNRDTEAFF

SEQ ID NO: 217011 - protein, 12 aa, Homo sapiens
  CDR3 for alpha chain variable domain of TCR clone 108506 (TRAV27, TRAJ13)
CAGAGGYQKVTF

SEQ ID NO: 217012 - protein, 13 aa, Homo sapiens
  CDR3 for beta chain variable domain of TCR clone 108506 (TRBV7-2, TRBJ2-2)
CASSLAVTGELFF

SEQ ID NO: 217013 - protein, 14 aa, Homo sapiens
  CDR3 for alpha chain variable domain of TCR clone 108507 (TRAV12-2, TRAJ44)
CAVNPAGTASKLTF

SEQ ID NO: 217014 - protein, 13 aa, Homo sapiens
  CDR3 for beta chain variable domain of TCR clone 108507 (TRBV7-3, TRBJ1-1)
CASSQDWGAEAFF

SEQ ID NO: 217015 - protein, 12 aa, Homo sapiens
  CDR3 for alpha chain variable domain of TCR clone 108508 (TRAV29/DV5, TRAJ34)
CAARHNTDKLIF

SEQ ID NO: 217016 - protein, 13 aa, Homo sapiens
  CDR3 for beta chain variable domain of TCR clone 108508 (TRBV4-2, TRBJ1-1)
CASSQAGNTEAFF

SEQ ID NO: 217017 - protein, 16 aa, Homo sapiens
  CDR3 for alpha chain variable domain of TCR clone 108509 (TRAV8-6, TRAJ22)
CAVSPISSGSAMQLTF

SEQ ID NO: 217018 - protein, 14 aa, Homo sapiens
  CDR3 for beta chain variable domain of TCR clone 108509 (TRBV2, TRBJ2-1)
CASSARAAYNEQFF

SEQ ID NO: 217019 - protein, 12 aa, Homo sapiens
  CDR3 for alpha chain variable domain of TCR clone 108510 (TRAV12-3, TRAJ41)
CAMSYSGYALNF

SEQ ID NO: 217020 - protein, 13 aa, Homo sapiens
  CDR3 for beta chain variable domain of TCR clone 108510 (TRBV7-3, TRBJ2-1)
CASSLGSYNEQFF

SEQ ID NO: 217021 - protein, 13 aa, Homo sapiens
  CDR3 for alpha chain variable domain of TCR clone 108511 (TRAV12-2, TRAJ34)
CAVRGYNTDKLIF

SEQ ID NO: 217022 - protein, 15 aa, Homo sapiens
  CDR3 for beta chain variable domain of TCR clone 108511 (TRBV28, TRBJ2-1)
CTSRTGAGVIARQFF

SEQ ID NO: 217023 - protein, 12 aa, Homo sapiens
  CDR3 for alpha chain variable domain of TCR clone 108512 (TRAV25, TRAJ29)
CAWPRGNTPLVF

SEQ ID NO: 217024 - protein, 15 aa, Homo sapiens
  CDR3 for beta chain variable domain of TCR clone 108512 (TRBV7-3, TRBJ2-1)
CQQLQTSGRYNEQFF

SEQ ID NO: 217025 - protein, 15 aa, Homo sapiens
  CDR3 for alpha chain variable domain of TCR clone 108513 (TRAV17, TRAJ57)
CATGPSQGGSEKLVF

SEQ ID NO: 217026 - protein, 15 aa, Homo sapiens
  CDR3 for beta chain variable domain of TCR clone 108513 (TRBV19, TRBJ1-1)
CASTSGQIQNTEAFF

SEQ ID NO: 217027 - protein, 14 aa, Homo sapiens
  CDR3 for alpha chain variable domain of TCR clone 108514 (TRAV1-2, TRAJ16)
CAVNRFSDGQKLLF

SEQ ID NO: 217028 - protein, 16 aa, Homo sapiens
  CDR3 for beta chain variable domain of TCR clone 108514 (TRBV5-1, TRBJ2-3)
CASSSIGAGSTDTQYF

SEQ ID NO: 217029 - protein, 14 aa, Homo sapiens
  CDR3 for alpha chain variable domain of TCR clone 108515 (TRAV13-1, TRAJ35)
CAASKGGFGNVLHC

SEQ ID NO: 217030 - protein, 13 aa, Homo sapiens
  CDR3 for beta chain variable domain of TCR clone 108515 (TRBV2, TRBJ2-7)
CASSEGGQFEQYF

SEQ ID NO: 217031 - protein, 12 aa, Homo sapiens
  CDR3 for alpha chain variable domain of TCR clone 108516 (TRAV21, TRAJ33)
CAKMDSNYQLIW

SEQ ID NO: 217032 - protein, 14 aa, Homo sapiens
  CDR3 for beta chain variable domain of TCR clone 108516 (TRBV7-8, TRBJ2-3)
CASSLEAGTDTQYF

SEQ ID NO: 217033 - protein, 14 aa, Homo sapiens
  CDR3 for alpha chain variable domain of TCR clone 108517 (TRAV35, TRAJ22)
CAGLRPGSARQLAF

SEQ ID NO: 217034 - protein, 13 aa, Homo sapiens
  CDR3 for beta chain variable domain of TCR clone 108517 (TRBV20-1, TRBJ1-1)
CSARGGGNTEAFF

SEQ ID NO: 217035 - protein, 15 aa, Homo sapiens
  CDR3 for alpha chain variable domain of TCR clone 108518 (TRAV26-1, TRAJ22)
CIVRVFFWFCKATDL

SEQ ID NO: 217036 - protein, 13 aa, Homo sapiens
  CDR3 for beta chain variable domain of TCR clone 108518 (TRBV7-9, TRBJ1-2)
CASSLKQNYGYTF

SEQ ID NO: 217037 - protein, 14 aa, Homo sapiens
  CDR3 for alpha chain variable domain of TCR clone 108519 (TRAV26-2, TRAJ31)
CILITGNNNARLMF

SEQ ID NO: 217038 - protein, 16 aa, Homo sapiens
  CDR3 for beta chain variable domain of TCR clone 108519 (TRBV7-3, TRBJ2-1)
CASSLVSGSSNNEQFF

SEQ ID NO: 217039 - protein, 13 aa, Homo sapiens
  CDR3 for alpha chain variable domain of TCR clone 108520 (TRAV36/DV7, TRAJ49)
CAVEANTGHQFYF

SEQ ID NO: 217040 - protein, 14 aa, Homo sapiens
  CDR3 for beta chain variable domain of TCR clone 108520 (TRBV20-1, TRBJ2-5)
CSASSGRAAETQYF

SEQ ID NO: 217041 - protein, 14 aa, Homo sapiens
  CDR3 for alpha chain variable domain of TCR clone 108521 (TRAV12-1, TRAJ27)
CGEHISTNAGKSTF

SEQ ID NO: 217042 - protein, 15 aa, Homo sapiens
  CDR3 for beta chain variable domain of TCR clone 108521 (TRBV19, TRBJ1-1)
CASTSGQIQNTEAFF

SEQ ID NO: 217043 - protein, 15 aa, Homo sapiens
  CDR3 for alpha chain variable domain of TCR clone 108522 (TRAV26-2, TRAJ13)
CILRDLSGGYQKVTF

SEQ ID NO: 217044 - protein, 12 aa, Homo sapiens
  CDR3 for beta chain variable domain of TCR clone 108522 (TRBV7-9, TRBJ2-7)
CASSLSLYEQYF

SEQ ID NO: 217045 - protein, 12 aa, Homo sapiens
  CDR3 for alpha chain variable domain of TCR clone 108523 (TRAV41, TRAJ58)
CAVEASGSRLTF

SEQ ID NO: 217046 - protein, 15 aa, Homo sapiens
  CDR3 for beta chain variable domain of TCR clone 108523 (TRBV29-1, TRBJ2-6)
CSVGDRGSGANVLTF

SEQ ID NO: 217047 - protein, 16 aa, Homo sapiens
  CDR3 for alpha chain variable domain of TCR clone 108524 (TRAV30, TRAJ24)
CGTEIVDADSWGKFKF

SEQ ID NO: 217048 - protein, 14 aa, Homo sapiens
  CDR3 for beta chain variable domain of TCR clone 108524 (TRBV12-5, TRBJ2-5)
CASGSRRHQETQYF

SEQ ID NO: 217049 - protein, 16 aa, Homo sapiens
  CDR3 for alpha chain variable domain of TCR clone 108525 (TRAV12-3, TRAJ20)
CAMDKLSFGAGTTVTV

SEQ ID NO: 217050 - protein, 15 aa, Homo sapiens
  CDR3 for beta chain variable domain of TCR clone 108525 (TRBV28, TRBJ2-5)
CASSPGQGSIETQYF

SEQ ID NO: 217051 - protein, 15 aa, Homo sapiens
  CDR3 for alpha chain variable domain of TCR clone 108526 (TRAV21, TRAJ53)
CATLNSGGSNYKLTF

SEQ ID NO: 217052 - protein, 16 aa, Homo sapiens
  CDR3 for beta chain variable domain of TCR clone 108526 (TRBV20-1, TRBJ1-1)
CSARALTQGMNTEAFF

SEQ ID NO: 217053 - protein, 13 aa, Homo sapiens
  CDR3 for alpha chain variable domain of TCR clone 108527 (TRAV12-1, TRAJ16)
CVVNGPEGQKLLF

SEQ ID NO: 217054 - protein, 13 aa, Homo sapiens
  CDR3 for beta chain variable domain of TCR clone 108527 (TRBV2, TRBJ1-1)
CARNPTGGFHAFF

SEQ ID NO: 217055 - protein, 11 aa, Homo sapiens
  CDR3 for alpha chain variable domain of TCR clone 108528 (TRAV1-1, TRAJ23)
CAVRQGGKLIF

SEQ ID NO: 217056 - protein, 14 aa, Homo sapiens
  CDR3 for beta chain variable domain of TCR clone 108528 (TRBV19, TRBJ2-1)
CANPTFVLSGEQFF

SEQ ID NO: 217057 - protein, 18 aa, Homo sapiens
  CDR3 for alpha chain variable domain of TCR clone 108529 (TRAV21, TRAJ52)
CAVRPSPAGGTSYGKLTF

SEQ ID NO: 217058 - protein, 17 aa, Homo sapiens
  CDR3 for beta chain variable domain of TCR clone 108529 (TRBV19, TRBJ1-1)
CASSIAGRGLMNTEAFF

SEQ ID NO: 217059 - protein, 12 aa, Homo sapiens
  CDR3 for alpha chain variable domain of TCR clone 108530 (TRAV22, TRAJ22)
CAPGGSARQLTF

SEQ ID NO: 217060 - protein, 13 aa, Homo sapiens
  CDR3 for beta chain variable domain of TCR clone 108530 (TRBV11-2, TRBJ1-2)
CASSLDSPSGYTF

SEQ ID NO: 217061 - protein, 14 aa, Homo sapiens
  CDR3 for alpha chain variable domain of TCR clone 108531 (TRAV2, TRAJ9)
CAVEDRSGGVKTIF

SEQ ID NO: 217062 - protein, 15 aa, Homo sapiens
  CDR3 for beta chain variable domain of TCR clone 108531 (TRBV7-2, TRBJ2-1)
CASSSGLAGGNEQFF

SEQ ID NO: 217063 - protein, 18 aa, Homo sapiens
  CDR3 for alpha chain variable domain of TCR clone 108532 (TRAV21, TRAJ52)
CAVGPSPAGGTSYGKLTF

SEQ ID NO: 217064 - protein, 15 aa, Homo sapiens
  CDR3 for beta chain variable domain of TCR clone 108532 (TRBV20-1, TRBJ2-1)
CSATSSGTSGGEQFF

SEQ ID NO: 217065 - protein, 15 aa, Homo sapiens
  CDR3 for alpha chain variable domain of TCR clone 108533 (TRAV12-1, TRAJ44)
CVVDTPRGTASKLTF

SEQ ID NO: 217066 - protein, 13 aa, Homo sapiens
  CDR3 for beta chain variable domain of TCR clone 108533 (TRBV27, TRBJ2-1)
CASSSGSYNEQFF

SEQ ID NO: 217067 - protein, 15 aa, Homo sapiens
  CDR3 for alpha chain variable domain of TCR clone 108534 (TRAV3, TRAJ32)
CAVSSHGGATNKLIF

SEQ ID NO: 217068 - protein, 13 aa, Homo sapiens
  CDR3 for beta chain variable domain of TCR clone 108534 (TRBV20-1, TRBJ2-7)
CSARPSTNYEQYF

SEQ ID NO: 217069 - protein, 15 aa, Homo sapiens
  CDR3 for alpha chain variable domain of TCR clone 108535 (TRAV30, TRAJ57)
CGTAIPQGGSEKLVF

SEQ ID NO: 217070 - protein, 13 aa, Homo sapiens
  CDR3 for beta chain variable domain of TCR clone 108535 (TRBV7-9, TRBJ1-2)
CASSPSNFWGYSF

SEQ ID NO: 217071 - protein, 14 aa, Homo sapiens
  CDR3 for alpha chain variable domain of TCR clone 108536 (TRAV26-1, TRAJ48)
CIVRVGFGIEKLTF

SEQ ID NO: 217072 - protein, 13 aa, Homo sapiens
  CDR3 for beta chain variable domain of TCR clone 108536 (TRBV11-3, TRBJ2-3)
CASSHDTKDTQYF

SEQ ID NO: 217073 - protein, 14 aa, Homo sapiens
  CDR3 for alpha chain variable domain of TCR clone 108537 (TRAV26-1, TRAJ40)
CIVRLPSGTYKYIF

SEQ ID NO: 217074 - protein, 10 aa, Homo sapiens
  CDR3 for beta chain variable domain of TCR clone 108537 (TRBV15, TRBJ2-7)
AETGGYEQYF

SEQ ID NO: 217075 - protein, 14 aa, Homo sapiens
  CDR3 for alpha chain variable domain of TCR clone 108538 (TRAV26-1, TRAJ48)
CIVRVGFGNEKLTF

SEQ ID NO: 217076 - protein, 13 aa, Homo sapiens
  CDR3 for beta chain variable domain of TCR clone 108538 (TRBV11-3, TRBJ2-3)
CASSHDTKGTQYF

SEQ ID NO: 217077 - protein, 14 aa, Homo sapiens
  CDR3 for alpha chain variable domain of TCR clone 108539 (TRAV20, TRAJ29)
CAVQAWVGNTPLVF

SEQ ID NO: 217078 - protein, 15 aa, Homo sapiens
  CDR3 for beta chain variable domain of TCR clone 108539 (TRBV29-1, TRBJ2-7)
CSVEFFDRGSYGQYF

SEQ ID NO: 217079 - protein, 15 aa, Homo sapiens
  CDR3 for alpha chain variable domain of TCR clone 108540 (TRAV13-1, TRAJ52)
SYYNAGGTSYGKLTF

SEQ ID NO: 217080 - protein, 11 aa, Homo sapiens
  CDR3 for beta chain variable domain of TCR clone 108540 (TRBV12-4, TRBJ2-2)
CASSSDGELFF

SEQ ID NO: 217081 - protein, 15 aa, Homo sapiens
  CDR3 for alpha chain variable domain of TCR clone 108541 (TRAV2, TRAJ15)
CAVEDREQEGTALIF

SEQ ID NO: 217082 - protein, 13 aa, Homo sapiens
  CDR3 for beta chain variable domain of TCR clone 108541 (TRBV10-2, TRBJ2-3)
CASSESGDHTQYF

SEQ ID NO: 217083 - protein, 14 aa, Homo sapiens
  CDR3 for alpha chain variable domain of TCR clone 108542 (TRAV8-4, TRAJ9)
CAVRINTGGFKTIF

SEQ ID NO: 217084 - protein, 16 aa, Homo sapiens
  CDR3 for beta chain variable domain of TCR clone 108542 (TRBV4-3, TRBJ2-2)
CASSHLQGSGTGELFF

SEQ ID NO: 217085 - protein, 14 aa, Homo sapiens
  CDR3 for alpha chain variable domain of TCR clone 108543 (TRAV1-2, TRAJ16)
CAVNRVSDGQKLLF

SEQ ID NO: 217086 - protein, 15 aa, Homo sapiens
  CDR3 for beta chain variable domain of TCR clone 108543 (TRBV29-1, TRBJ2-7)
CSVEFFDRGSYEQYF

SEQ ID NO: 217087 - protein, 16 aa, Homo sapiens
  CDR3 for alpha chain variable domain of TCR clone 108544 (TRAV30, TRAJ24)
CGTEIVDANSWGKFQF

SEQ ID NO: 217088 - protein, 11 aa, Homo sapiens
  CDR3 for beta chain variable domain of TCR clone 108544 (TRBV7-8, TRBJ2-7)
CASSLSLEQYF

SEQ ID NO: 217089 - protein, 14 aa, Homo sapiens
  CDR3 for alpha chain variable domain of TCR clone 108545 (TRAV1-2, TRAJ16)
CAVNRFSDGQKLLF

SEQ ID NO: 217090 - protein, 13 aa, Homo sapiens
  CDR3 for beta chain variable domain of TCR clone 108545 (TRBV11-2, TRBJ2-5)
CASSLSSQETQYF

SEQ ID NO: 217091 - protein, 15 aa, Homo sapiens
  CDR3 for alpha chain variable domain of TCR clone 108546 (TRAV17, TRAJ4)
CATGTWSGGYNKLIF

SEQ ID NO: 217092 - protein, 15 aa, Homo sapiens
  CDR3 for beta chain variable domain of TCR clone 108546 (TRBV9, TRBJ1-6)
CASSVAGTGDSPLHF

SEQ ID NO: 217093 - protein, 13 aa, Homo sapiens
  CDR3 for alpha chain variable domain of TCR clone 108547 (TRAV27, TRAJ41)
CAGEGNSGYALNF

SEQ ID NO: 217094 - protein, 15 aa, Homo sapiens
  CDR3 for beta chain variable domain of TCR clone 108547 (TRBV5-1, TRBJ2-1)
CASTGSGRTYNEQFF

SEQ ID NO: 217095 - protein, 13 aa, Homo sapiens
  CDR3 for alpha chain variable domain of TCR clone 108548 (TRAV9-2, TRAJ9)
CALSKAGGFKTIF

SEQ ID NO: 217096 - protein, 14 aa, Homo sapiens
  CDR3 for beta chain variable domain of TCR clone 108548 (TRBV7-6, TRBJ2-3)
CASSLGTVTDTQYF

SEQ ID NO: 217097 - protein, 15 aa, Homo sapiens
  CDR3 for alpha chain variable domain of TCR clone 108549 (TRAV2, TRAJ15)
CAVEDRGQAGTALIF

SEQ ID NO: 217098 - protein, 18 aa, Homo sapiens
  CDR3 for beta chain variable domain of TCR clone 108549 (TRBV12-4, TRBJ2-5)
CASSLGGIQDPVLRARHA

SEQ ID NO: 217099 - protein, 13 aa, Homo sapiens
  CDR3 for alpha chain variable domain of TCR clone 108550 (TRAV13-2, TRAJ13)
CAEIPGGYQKVTF

SEQ ID NO: 217100 - protein, 14 aa, Homo sapiens
  CDR3 for beta chain variable domain of TCR clone 108550 (TRBV23-1, TRBJ2-5)
CASSFLRSQETQYF

SEQ ID NO: 217101 - protein, 14 aa, Homo sapiens
  CDR3 for alpha chain variable domain of TCR clone 108551 (TRAV8-4, TRAJ9)
CAVRINTGGFKTIF

SEQ ID NO: 217102 - protein, 15 aa, Homo sapiens
  CDR3 for beta chain variable domain of TCR clone 108551 (TRBV18, TRBJ2-1)
CASSPPSAPYNEQFF

SEQ ID NO: 217103 - protein, 14 aa, Homo sapiens
  CDR3 for alpha chain variable domain of TCR clone 108552 (TRAV26-1, TRAJ38)
CIADNAGNNRKLIW

SEQ ID NO: 217104 - protein, 13 aa, Homo sapiens
  CDR3 for beta chain variable domain of TCR clone 108552 (TRBV7-9, TRBJ1-2)
CASSLKQNYGYIF

SEQ ID NO: 217105 - protein, 13 aa, Homo sapiens
  CDR3 for alpha chain variable domain of TCR clone 108553 (TRAV13-2, TRAJ53)
CAENMGSNYKLTF

SEQ ID NO: 217106 - protein, 13 aa, Homo sapiens
  CDR3 for beta chain variable domain of TCR clone 108553 (TRBV4-1, TRBJ2-2)
CASSQEKTGELFF

SEQ ID NO: 217107 - protein, 15 aa, Homo sapiens
  CDR3 for alpha chain variable domain of TCR clone 108554 (TRAV17, TRAJ16)
CATALRFSDGQKLLF

SEQ ID NO: 217108 - protein, 15 aa, Homo sapiens
  CDR3 for beta chain variable domain of TCR clone 108554 (TRBV7-9, TRBJ2-2)
CASGPLDTFPGELFF

SEQ ID NO: 217109 - protein, 12 aa, Homo sapiens
  CDR3 for alpha chain variable domain of TCR clone 108555 (TRAV13-1, TRAJ53)
AASGGSNYKLPF

SEQ ID NO: 217110 - protein, 16 aa, Homo sapiens
  CDR3 for beta chain variable domain of TCR clone 108555 (TRBV28, TRBJ2-6)
CASSNRRGSGANVLTF

SEQ ID NO: 217111 - protein, 13 aa, Homo sapiens
  CDR3 for alpha chain variable domain of TCR clone 108556 (TRAV23/DV6, TRAJ27)
CAASKPMQANQPF

SEQ ID NO: 217112 - protein, 14 aa, Homo sapiens
  CDR3 for beta chain variable domain of TCR clone 108556 (TRBV5-4, TRBJ1-1)
CASSLDSRRDEAFF

SEQ ID NO: 217113 - protein, 14 aa, Homo sapiens
  CDR3 for alpha chain variable domain of TCR clone 108557 (TRAV13-1, TRAJ44)
CAAKATGTASKLTF

SEQ ID NO: 217114 - protein, 13 aa, Homo sapiens
  CDR3 for beta chain variable domain of TCR clone 108557 (TRBV5-5, TRBJ1-2)
CASSFWRGENYTF

SEQ ID NO: 217115 - protein, 12 aa, Homo sapiens
  CDR3 for alpha chain variable domain of TCR clone 108558 (TRAV8-3, TRAJ27)
CAVGAGAGKSTF

SEQ ID NO: 217116 - protein, 14 aa, Homo sapiens
  CDR3 for beta chain variable domain of TCR clone 108558 (TRBV2, TRBJ2-1)
CASRLIVGHDEQFF

SEQ ID NO: 217117 - protein, 15 aa, Homo sapiens
  CDR3 for alpha chain variable domain of TCR clone 108559 (TRAV25, TRAJ52)
CAGRPGGTSYGKLTF

SEQ ID NO: 217118 - protein, 17 aa, Homo sapiens
  CDR3 for beta chain variable domain of TCR clone 108559 (TRBV5-5, TRBJ1-2)
CASSLGSLDGQSEGYTF

SEQ ID NO: 217119 - protein, 14 aa, Homo sapiens
  CDR3 for alpha chain variable domain of TCR clone 108560 (TRAV1-2, TRAJ8)
CAVREDTGFQQLVF

SEQ ID NO: 217120 - protein, 15 aa, Homo sapiens
  CDR3 for beta chain variable domain of TCR clone 108560 (TRBV5-5, TRBJ1-5)
CASSSTPGSNQPQHF

SEQ ID NO: 217121 - protein, 13 aa, Homo sapiens
  CDR3 for alpha chain variable domain of TCR clone 108561 (TRAV12-1, TRAJ17)
CVVSKAAGNKLTF

SEQ ID NO: 217122 - protein, 17 aa, Homo sapiens
  CDR3 for beta chain variable domain of TCR clone 108561 (TRBV4-1, TRBJ2-5)
CASSQGPSGGPQETQYF

SEQ ID NO: 217123 - protein, 14 aa, Homo sapiens
  CDR3 for alpha chain variable domain of TCR clone 108562 (TRAV2, TRAJ9)
CAVEDRSGGFKTIF

SEQ ID NO: 217124 - protein, 15 aa, Homo sapiens
  CDR3 for beta chain variable domain of TCR clone 108562 (TRBV6-6, TRBJ2-7)
CASSYSYGGSYEQCF

SEQ ID NO: 217125 - protein, 14 aa, Homo sapiens
  CDR3 for alpha chain variable domain of TCR clone 108563 (TRAV23/DV6, TRAJ41)
CAASMENSGYALNF

SEQ ID NO: 217126 - protein, 12 aa, Homo sapiens
  CDR3 for beta chain variable domain of TCR clone 108563 (TRBV6-5, TRBJ2-7)
CASSDRQNEQYF

SEQ ID NO: 217127 - protein, 14 aa, Homo sapiens
  CDR3 for alpha chain variable domain of TCR clone 108564 (TRAV26-1, TRAJ38)
CIVVGAGNNRKLLW

SEQ ID NO: 217128 - protein, 12 aa, Homo sapiens
  CDR3 for beta chain variable domain of TCR clone 108564 (TRBV5-1, TRBJ2-5)
CASSWDQETQYF

SEQ ID NO: 217129 - protein, 11 aa, Homo sapiens
  CDR3 for alpha chain variable domain of TCR clone 108565 (TRAV17, TRAJ39)
CATGAGNMPTF

SEQ ID NO: 217130 - protein, 16 aa, Homo sapiens
  CDR3 for beta chain variable domain of TCR clone 108565 (TRBV5-1, TRBJ2-1)
CASSFGVSGSYNEQFF

SEQ ID NO: 217131 - protein, 14 aa, Homo sapiens
  CDR3 for alpha chain variable domain of TCR clone 108566 (TRAV9-2, TRAJ39)
CALYIYNAGNMLTF

SEQ ID NO: 217132 - protein, 16 aa, Homo sapiens
  CDR3 for beta chain variable domain of TCR clone 108566 (TRBV7-9, TRBJ2-1)
CASSLDPGLAIDEQFF

SEQ ID NO: 217133 - protein, 16 aa, Homo sapiens
  CDR3 for alpha chain variable domain of TCR clone 108567 (TRAV4, TRAJ22)
CLVGDLYSGSARQLTF

SEQ ID NO: 217134 - protein, 13 aa, Homo sapiens
  CDR3 for beta chain variable domain of TCR clone 108567 (TRBV20-1, TRBJ1-1)
CSAPLGGGTEAFF

SEQ ID NO: 217135 - protein, 14 aa, Homo sapiens
  CDR3 for alpha chain variable domain of TCR clone 108568 (TRAV1-2, TRAJ16)
CAVNRFSDGQKLLF

SEQ ID NO: 217136 - protein, 14 aa, Homo sapiens
  CDR3 for beta chain variable domain of TCR clone 108568 (TRBV4-2, TRBJ2-3)
CASRETRAPGMQYF

SEQ ID NO: 217137 - protein, 14 aa, Homo sapiens
  CDR3 for alpha chain variable domain of TCR clone 108569 (TRAV12-1, TRAJ9)
CVVTGDTGGYKTIF

SEQ ID NO: 217138 - protein, 16 aa, Homo sapiens
  CDR3 for beta chain variable domain of TCR clone 108569 (TRBV29-1, TRBJ1-2)
CSVEANRDIANYGYTF

SEQ ID NO: 217139 - protein, 12 aa, Homo sapiens
  CDR3 for alpha chain variable domain of TCR clone 108570 (TRAV8-3, TRAJ26)
CAGDNYGQNFVF

SEQ ID NO: 217140 - protein, 12 aa, Homo sapiens
  CDR3 for beta chain variable domain of TCR clone 108570 (TRBV7-9, TRBJ2-7)
CASSLEGYEQYF

SEQ ID NO: 217141 - protein, 14 aa, Homo sapiens
  CDR3 for alpha chain variable domain of TCR clone 108571 (TRAV1-2, TRAJ8)
CAVREDTGFQKLVF

SEQ ID NO: 217142 - protein, 14 aa, Homo sapiens
  CDR3 for beta chain variable domain of TCR clone 108571 (TRBV7-8, TRBJ2-3)
CASSLGAGTDTQYF

SEQ ID NO: 217143 - protein, 14 aa, Homo sapiens
  CDR3 for alpha chain variable domain of TCR clone 108572 (TRAV38-2/DV8, TRAJ39)
CAYEGWNAGNMLTF

SEQ ID NO: 217144 - protein, 13 aa, Homo sapiens
  CDR3 for beta chain variable domain of TCR clone 108572 (TRBV20-1, TRBJ1-6)
CSAPLGVGSPLHF

SEQ ID NO: 217145 - protein, 16 aa, Homo sapiens
  CDR3 for alpha chain variable domain of TCR clone 108573 (TRAV14/DV4, TRAJ53)
CAMREGGGGSNYKLTF

SEQ ID NO: 217146 - protein, 17 aa, Homo sapiens
  CDR3 for beta chain variable domain of TCR clone 108573 (TRBV4-2, TRBJ1-1)
CASTQFGGGSGNTEAFF

SEQ ID NO: 217147 - protein, 13 aa, Homo sapiens
  CDR3 for alpha chain variable domain of TCR clone 108574 (TRAV21, TRAJ27)
CAARPGNAGKSTL

SEQ ID NO: 217148 - protein, 13 aa, Homo sapiens
  CDR3 for beta chain variable domain of TCR clone 108574 (TRBV18, TRBJ2-7)
CASQSGGGYEQYF

SEQ ID NO: 217149 - protein, 14 aa, Homo sapiens
  CDR3 for alpha chain variable domain of TCR clone 108575 (TRAV8-6, TRAJ10)
CAVTSTGGGNKLTF

SEQ ID NO: 217150 - protein, 18 aa, Homo sapiens
  CDR3 for beta chain variable domain of TCR clone 108575 (TRBV5-7, TRBJ2-5)
CASRSSGGGDPVLRARHA

SEQ ID NO: 217151 - protein, 12 aa, Homo sapiens
  CDR3 for alpha chain variable domain of TCR clone 108576 (TRAV27, TRAJ42)
CAGGGSQGNLIF

SEQ ID NO: 217152 - protein, 13 aa, Homo sapiens
  CDR3 for beta chain variable domain of TCR clone 108576 (TRBV10-3, TRBJ2-7)
CASKLAVNYEQYF

SEQ ID NO: 217153 - protein, 15 aa, Homo sapiens
  CDR3 for alpha chain variable domain of TCR clone 108577 (TRAV17, TRAJ28)
CATVDSGAGSYQLTF

SEQ ID NO: 217154 - protein, 16 aa, Homo sapiens
  CDR3 for beta chain variable domain of TCR clone 108577 (TRBV7-3, TRBJ2-2)
CASSLKRGTLSGELFF

SEQ ID NO: 217155 - protein, 12 aa, Homo sapiens
  CDR3 for alpha chain variable domain of TCR clone 108578 (TRAV1-1, TRAJ8)
CAGGTGFQKLVF

SEQ ID NO: 217156 - protein, 15 aa, Homo sapiens
  CDR3 for beta chain variable domain of TCR clone 108578 (TRBV7-9, TRBJ1-4)
CASSRIGGFNEKLFF

SEQ ID NO: 217157 - protein, 15 aa, Homo sapiens
  CDR3 for alpha chain variable domain of TCR clone 108579 (TRAV3, TRAJ47)
CAVRDIGEYGNILVF

SEQ ID NO: 217158 - protein, 14 aa, Homo sapiens
  CDR3 for beta chain variable domain of TCR clone 108579 (TRBV13, TRBJ2-5)
CASSLERVGETQYF

SEQ ID NO: 217159 - protein, 15 aa, Homo sapiens
  CDR3 for alpha chain variable domain of TCR clone 108580 (TRAV12-2, TRAJ43)
CAFDMRFGAGTRLTV

SEQ ID NO: 217160 - protein, 18 aa, Homo sapiens
  CDR3 for beta chain variable domain of TCR clone 108580 (TRBV20-1, TRBJ2-3)
CSASGLAGGPGTTDTKYF

SEQ ID NO: 217161 - protein, 14 aa, Homo sapiens
  CDR3 for alpha chain variable domain of TCR clone 108581 (TRAV27, TRAJ12)
CAGARMDSSYKLIF

SEQ ID NO: 217162 - protein, 18 aa, Homo sapiens
  CDR3 for beta chain variable domain of TCR clone 108581 (TRBV10-3, TRBJ2-7)
CAISESGKPSGGRVEQYF

SEQ ID NO: 217163 - protein, 15 aa, Homo sapiens
  CDR3 for alpha chain variable domain of TCR clone 108582 (TRAV12-2, TRAJ52)
CAVTSGGTSYGKLTF

SEQ ID NO: 217164 - protein, 13 aa, Homo sapiens
  CDR3 for beta chain variable domain of TCR clone 108582 (TRBV12-4, TRBJ1-2)
CASSLRQGKGYTF

SEQ ID NO: 217165 - protein, 12 aa, Homo sapiens
  CDR3 for alpha chain variable domain of TCR clone 108583 (TRAV3, TRAJ39)
YAVIEWSNMLTF

SEQ ID NO: 217166 - protein, 14 aa, Homo sapiens
  CDR3 for beta chain variable domain of TCR clone 108583 (TRBV7-8, TRBJ2-3)
CASSFPDGQDTQYF

SEQ ID NO: 217167 - protein, 12 aa, Homo sapiens
  CDR3 for alpha chain variable domain of TCR clone 108584 (TRAV21, TRAJ13)
PGPSGGYQKVTF

SEQ ID NO: 217168 - protein, 15 aa, Homo sapiens
  CDR3 for beta chain variable domain of TCR clone 108584 (TRBV7-9, TRBJ1-6)
CTSSSPGRGNSPLHF

SEQ ID NO: 217169 - protein, 14 aa, Homo sapiens
  CDR3 for alpha chain variable domain of TCR clone 108585 (TRAV8-6, TRAJ20)
CAVSDRRVRDKLSF

SEQ ID NO: 217170 - protein, 14 aa, Homo sapiens
  CDR3 for beta chain variable domain of TCR clone 108585 (TRBV6-1, TRBJ1-3)
CASVQGGGGNTIYF

SEQ ID NO: 217171 - protein, 13 aa, Homo sapiens
  CDR3 for alpha chain variable domain of TCR clone 108586 (TRAV3, TRAJ21)
CAVREPDFNKFYF

SEQ ID NO: 217172 - protein, 13 aa, Homo sapiens
  CDR3 for beta chain variable domain of TCR clone 108586 (TRBV4-1, TRBJ1-1)
CASSRKMNTEAFF

SEQ ID NO: 217173 - protein, 13 aa, Homo sapiens
  CDR3 for alpha chain variable domain of TCR clone 108587 (TRAV8-3, TRAJ43)
CAVGIYNNNDMRF

SEQ ID NO: 217174 - protein, 16 aa, Homo sapiens
  CDR3 for beta chain variable domain of TCR clone 108587 (TRBV7-2, TRBJ2-5)
CASSLVLWTKQETQYF

SEQ ID NO: 217175 - protein, 17 aa, Homo sapiens
  CDR3 for alpha chain variable domain of TCR clone 108588 (TRAV26-1, TRAJ53)
CIVRVDDSGGSNYKLTF

SEQ ID NO: 217176 - protein, 14 aa, Homo sapiens
  CDR3 for beta chain variable domain of TCR clone 108588 (TRBV11-2, TRBJ2-5)
CASSRTGGIETQYF

SEQ ID NO: 217177 - protein, 14 aa, Homo sapiens
  CDR3 for alpha chain variable domain of TCR clone 108589 (TRAV1-2, TRAJ16)
CAVNRFPDGQKLLF

SEQ ID NO: 217178 - protein, 12 aa, Homo sapiens
  CDR3 for beta chain variable domain of TCR clone 108589 (TRBV24-1, TRBJ1-4)
CATSDPNEKLFF

SEQ ID NO: 217179 - protein, 14 aa, Homo sapiens
  CDR3 for alpha chain variable domain of TCR clone 108590 (TRAV1-2, TRAJ8)
CAVGEDTGFQKLVF

SEQ ID NO: 217180 - protein, 15 aa, Homo sapiens
  CDR3 for beta chain variable domain of TCR clone 108590 (TRBV9, TRBJ2-1)
CASSLAGSSYNEQFF

SEQ ID NO: 217181 - protein, 12 aa, Homo sapiens
  CDR3 for alpha chain variable domain of TCR clone 108591 (TRAV13-1, TRAJ21)
CAAKEGLNKFYF

SEQ ID NO: 217182 - protein, 20 aa, Homo sapiens
  CDR3 for beta chain variable domain of TCR clone 108591 (TRBV28, TRBJ2-1)
CASTPIGRSPGLAGGNEQFF

SEQ ID NO: 217183 - protein, 12 aa, Homo sapiens
  CDR3 for alpha chain variable domain of TCR clone 108592 (TRAV17, TRAJ57)
CATDGGSEKLVF

SEQ ID NO: 217184 - protein, 17 aa, Homo sapiens
  CDR3 for beta chain variable domain of TCR clone 108592 (TRBV11-2, TRBJ2-1)
CASSLYPPGVEYNEQFF

SEQ ID NO: 217185 - protein, 13 aa, Homo sapiens
  CDR3 for alpha chain variable domain of TCR clone 108593 (TRAV12-3, TRAJ33)
CAMSVNSNYQLIW

SEQ ID NO: 217186 - protein, 15 aa, Homo sapiens
  CDR3 for beta chain variable domain of TCR clone 108593 (TRBV20-1, TRBJ1-1)
CSASRGVTGNTEAFF

SEQ ID NO: 217187 - protein, 15 aa, Homo sapiens
  CDR3 for alpha chain variable domain of TCR clone 108594 (TRAV3, TRAJ22)
CAVRDRGGSARQLTF

SEQ ID NO: 217188 - protein, 15 aa, Homo sapiens
  CDR3 for beta chain variable domain of TCR clone 108594 (TRBV5-1, TRBJ2-5)
CASSLSQGVVATQYF

SEQ ID NO: 217189 - protein, 18 aa, Homo sapiens
  CDR3 for alpha chain variable domain of TCR clone 108595 (TRAV8-4, TRAJ52)
CAVTRANAVGTSYGKLTF

SEQ ID NO: 217190 - protein, 12 aa, Homo sapiens
  CDR3 for beta chain variable domain of TCR clone 108595 (TRBV12-4, TRBJ2-7)
CASSLGGYEQYF

SEQ ID NO: 217191 - protein, 15 aa, Homo sapiens
  CDR3 for alpha chain variable domain of TCR clone 108596 (TRAV14/DV4, TRAJ10)
CAMRELTGGGNKLTF

SEQ ID NO: 217192 - protein, 18 aa, Homo sapiens
  CDR3 for beta chain variable domain of TCR clone 108596 (TRBV7-9, TRBJ2-7)
CSSSLTTSGSRTWYEQYF

SEQ ID NO: 217193 - protein, 14 aa, Homo sapiens
  CDR3 for alpha chain variable domain of TCR clone 108597 (TRAV26-1, TRAJ21)
CIVRVGHKFNKFYF

SEQ ID NO: 217194 - protein, 15 aa, Homo sapiens
  CDR3 for beta chain variable domain of TCR clone 108597 (TRBV4-3, TRBJ2-1)
CASSQGLAGSNEQFF

SEQ ID NO: 217195 - protein, 12 aa, Homo sapiens
  CDR3 for alpha chain variable domain of TCR clone 108598 (TRAV21, TRAJ33)
CAVQDSNYQLIW

SEQ ID NO: 217196 - protein, 14 aa, Homo sapiens
  CDR3 for beta chain variable domain of TCR clone 108598 (TRBV25-1, TRBJ1-2)
CASSDTTGVVGYTF

SEQ ID NO: 217197 - protein, 11 aa, Homo sapiens
  CDR3 for alpha chain variable domain of TCR clone 108599 (TRAV2, TRAJ13)
CASGGYQKVTF

SEQ ID NO: 217198 - protein, 14 aa, Homo sapiens
  CDR3 for beta chain variable domain of TCR clone 108599 (TRBV19, TRBJ2-2)
CASSIAGAFGELFF

SEQ ID NO: 217199 - protein, 13 aa, Homo sapiens
  CDR3 for alpha chain variable domain of TCR clone 108600 (TRAV2, TRAJ40)
CAVVTSGTYKYIF

SEQ ID NO: 217200 - protein, 12 aa, Homo sapiens
  CDR3 for beta chain variable domain of TCR clone 108600 (TRBV7-2, TRBJ2-5)
CASSQYQETQYF

SEQ ID NO: 217201 - protein, 11 aa, Homo sapiens
  CDR3 for alpha chain variable domain of TCR clone 108601 (TRAV21, TRAJ34)
CTHYNTDKLIF

SEQ ID NO: 217202 - protein, 16 aa, Homo sapiens
  CDR3 for beta chain variable domain of TCR clone 108601 (TRBV19, TRBJ2-1)
CASSKAGPSSYNEQFF

SEQ ID NO: 217203 - protein, 13 aa, Homo sapiens
  CDR3 for alpha chain variable domain of TCR clone 108602 (TRAV35, TRAJ42)
CAGFPGSQRNLIF

SEQ ID NO: 217204 - protein, 14 aa, Homo sapiens
  CDR3 for beta chain variable domain of TCR clone 108602 (TRBV19, TRBJ2-1)
CASPTFVLSGEQFF

SEQ ID NO: 217205 - protein, 13 aa, Homo sapiens
  CDR3 for alpha chain variable domain of TCR clone 108603 (TRAV27, TRAJ41)
CAGEGNSGYALNF

SEQ ID NO: 217206 - protein, 12 aa, Homo sapiens
  CDR3 for beta chain variable domain of TCR clone 108603 (TRBV12-4, TRBJ2-7)
CASSLGGYEQYF

SEQ ID NO: 217207 - protein, 12 aa, Homo sapiens
  CDR3 for alpha chain variable domain of TCR clone 108604 (TRAV12-1, TRAJ34)
CVVAGATGKLIF

SEQ ID NO: 217208 - protein, 12 aa, Homo sapiens
  CDR3 for beta chain variable domain of TCR clone 108604 (TRBV7-9, TRBJ1-1)
CASSLVRGEAFF

SEQ ID NO: 217209 - protein, 14 aa, Homo sapiens
  CDR3 for alpha chain variable domain of TCR clone 108605 (TRAV23/DV6, TRAJ13)
CAASETGGYQKVTF

SEQ ID NO: 217210 - protein, 16 aa, Homo sapiens
  CDR3 for beta chain variable domain of TCR clone 108605 (TRBV5-1, TRBJ1-3)
CASSPWAPSSGNTIYS

SEQ ID NO: 217211 - protein, 17 aa, Homo sapiens
  CDR3 for alpha chain variable domain of TCR clone 108606 (TRAV3, TRAJ6)
CAVRDGPTAGGSYIPTF

SEQ ID NO: 217212 - protein, 15 aa, Homo sapiens
  CDR3 for beta chain variable domain of TCR clone 108606 (TRBV20-1, TRBJ1-1)
CSASWDRFLNTEAFF

SEQ ID NO: 217213 - protein, 12 aa, Homo sapiens
  CDR3 for alpha chain variable domain of TCR clone 108607 (TRAV1-1, TRAJ43)
CAPRVSSNDMRF

SEQ ID NO: 217214 - protein, 13 aa, Homo sapiens
  CDR3 for beta chain variable domain of TCR clone 108607 (TRBV10-3, TRBJ2-7)
CASKLAVNYEQYF

SEQ ID NO: 217215 - protein, 15 aa, Homo sapiens
  CDR3 for alpha chain variable domain of TCR clone 108608 (TRAV2, TRAJ9)
CAVEDRGTGGFKTIF

SEQ ID NO: 217216 - protein, 17 aa, Homo sapiens
  CDR3 for beta chain variable domain of TCR clone 108608 (TRBV4-1, TRBJ2-7)
CASSRDPLGVRGGEQYF

SEQ ID NO: 217217 - protein, 12 aa, Homo sapiens
  CDR3 for alpha chain variable domain of TCR clone 108609 (TRAV12-2, TRAJ31)
CAVNTPDASLMF

SEQ ID NO: 217218 - protein, 15 aa, Homo sapiens
  CDR3 for beta chain variable domain of TCR clone 108609 (TRBV20-1, TRBJ2-7)
CSAESGTSGAYEQYF

SEQ ID NO: 217219 - protein, 14 aa, Homo sapiens
  CDR3 for alpha chain variable domain of TCR clone 108610 (TRAV13-1, TRAJ35)
CAASKGGFGNVLHC

SEQ ID NO: 217220 - protein, 16 aa, Homo sapiens
  CDR3 for beta chain variable domain of TCR clone 108610 (TRBV7-9, TRBJ2-1)
CASSDVAGGSYNEQFF

SEQ ID NO: 217221 - protein, 13 aa, Homo sapiens
  CDR3 for alpha chain variable domain of TCR clone 108611 (TRAV12-1, TRAJ39)
CGDDNNAGNMLTF

SEQ ID NO: 217222 - protein, 12 aa, Homo sapiens
  CDR3 for beta chain variable domain of TCR clone 108611 (TRBV11-2, TRBJ2-2)
CASSLGGGELFF

SEQ ID NO: 217223 - protein, 14 aa, Homo sapiens
  CDR3 for alpha chain variable domain of TCR clone 108612 (TRAV19, TRAJ5)
CALKKDTGRRALTF

SEQ ID NO: 217224 - protein, 15 aa, Homo sapiens
  CDR3 for beta chain variable domain of TCR clone 108612 (TRBV2, TRBJ2-5)
CASSEAGTRKETQYF

SEQ ID NO: 217225 - protein, 14 aa, Homo sapiens
  CDR3 for alpha chain variable domain of TCR clone 108613 (TRAV12-1, TRAJ23)
CVVMIYNQGGKLIF

SEQ ID NO: 217226 - protein, 13 aa, Homo sapiens
  CDR3 for beta chain variable domain of TCR clone 108613 (TRBV12-4, TRBJ2-7)
CASSPTETYEQYF

SEQ ID NO: 217227 - protein, 17 aa, Homo sapiens
  CDR3 for alpha chain variable domain of TCR clone 108614 (TRAV3, TRAJ6)
CAVRDGPRAGGSYIPKF

SEQ ID NO: 217228 - protein, 18 aa, Homo sapiens
  CDR3 for beta chain variable domain of TCR clone 108614 (TRBV25-1, TRBJ1-2)
CASSGLQNGQGLIFGYTF

SEQ ID NO: 217229 - protein, 11 aa, Homo sapiens
  CDR3 for alpha chain variable domain of TCR clone 108615 (TRAV17, TRAJ36)
CAPTGANNLFF

SEQ ID NO: 217230 - protein, 12 aa, Homo sapiens
  CDR3 for beta chain variable domain of TCR clone 108615 (TRBV29-1, TRBJ2-3)
RSVTGGADTQYF

SEQ ID NO: 217231 - protein, 16 aa, Homo sapiens
  CDR3 for alpha chain variable domain of TCR clone 108616 (TRAV3, TRAJ5)
CAVRNLMDTGRRALTF

SEQ ID NO: 217232 - protein, 16 aa, Homo sapiens
  CDR3 for beta chain variable domain of TCR clone 108616 (TRBV4-2, TRBJ2-7)
CASSQQGLANSYEQYF

SEQ ID NO: 217233 - protein, 14 aa, Homo sapiens
  CDR3 for alpha chain variable domain of TCR clone 108617 (TRAV38-1, TRAJ27)
CAFIHNTNAGKSTF

SEQ ID NO: 217234 - protein, 12 aa, Homo sapiens
  CDR3 for beta chain variable domain of TCR clone 108617 (TRBV7-8, TRBJ2-7)
CASSLGGREQYF

SEQ ID NO: 217235 - protein, 16 aa, Homo sapiens
  CDR3 for alpha chain variable domain of TCR clone 108618 (TRAV12-2, TRAJ18)
CAVTTDRGSTLGRLSF

SEQ ID NO: 217236 - protein, 15 aa, Homo sapiens
  CDR3 for beta chain variable domain of TCR clone 108618 (TRBV9, TRBJ1-6)
CASSVAGTGDSPLHF

SEQ ID NO: 217237 - protein, 15 aa, Homo sapiens
  CDR3 for alpha chain variable domain of TCR clone 108619 (TRAV27, TRAJ38)
CAARRNAANNRKLIW

SEQ ID NO: 217238 - protein, 13 aa, Homo sapiens
  CDR3 for beta chain variable domain of TCR clone 108619 (TRBV12-5, TRBJ2-3)
CASGDRQSDTQYF

SEQ ID NO: 217239 - protein, 15 aa, Homo sapiens
  CDR3 for alpha chain variable domain of TCR clone 108620 (TRAV3, TRAJ20)
CAVRDIKLSDYNLSF

SEQ ID NO: 217240 - protein, 18 aa, Homo sapiens
  CDR3 for beta chain variable domain of TCR clone 108620 (TRBV20-1, TRBJ2-5)
CSQTGDSGRLGGKETQYF

SEQ ID NO: 217241 - protein, 12 aa, Homo sapiens
  CDR3 for alpha chain variable domain of TCR clone 108621 (TRAV23/DV6, TRAJ30)
CAASKGDDKTIF

SEQ ID NO: 217242 - protein, 13 aa, Homo sapiens
  CDR3 for beta chain variable domain of TCR clone 108621 (TRBV19, TRBJ1-2)
CASSVPGQDGYTF

SEQ ID NO: 217243 - protein, 12 aa, Homo sapiens
  CDR3 for alpha chain variable domain of TCR clone 108622 (TRAV21, TRAJ15)
CAVNQAGTALIF

SEQ ID NO: 217244 - protein, 13 aa, Homo sapiens
  CDR3 for beta chain variable domain of TCR clone 108622 (TRBV11-2, TRBJ2-5)
CASRSTGEETQYF

SEQ ID NO: 217245 - protein, 15 aa, Homo sapiens
  CDR3 for alpha chain variable domain of TCR clone 108623 (TRAV17, TRAJ57)
CATGPSQGGSEKQVF

SEQ ID NO: 217246 - protein, 14 aa, Homo sapiens
  CDR3 for beta chain variable domain of TCR clone 108623 (TRBV12-5, TRBJ2-5)
CASGSRTHQETQYF

SEQ ID NO: 217247 - protein, 12 aa, Homo sapiens
  CDR3 for alpha chain variable domain of TCR clone 108624 (TRAV8-3, TRAJ20)
CAVGANDYKLSF

SEQ ID NO: 217248 - protein, 15 aa, Homo sapiens
  CDR3 for beta chain variable domain of TCR clone 108624 (TRBV2, TRBJ2-2)
CASSGFGAGTGELFF

SEQ ID NO: 217249 - protein, 11 aa, Homo sapiens
  CDR3 for alpha chain variable domain of TCR clone 108625 (TRAV35, TRAJ30)
CAGSGDDKIIF

SEQ ID NO: 217250 - protein, 14 aa, Homo sapiens
  CDR3 for beta chain variable domain of TCR clone 108625 (TRBV7-6, TRBJ1-6)
CASSQAGGGSPLHF

SEQ ID NO: 217251 - protein, 14 aa, Homo sapiens
  CDR3 for alpha chain variable domain of TCR clone 108626 (TRAV12-3, TRAJ10)
SHLPLTGGGNKLTF

SEQ ID NO: 217252 - protein, 13 aa, Homo sapiens
  CDR3 for beta chain variable domain of TCR clone 108626 (TRBV24-1, TRBJ2-1)
CATSRGARNEQFF

SEQ ID NO: 217253 - protein, 15 aa, Homo sapiens
  CDR3 for alpha chain variable domain of TCR clone 108627 (TRAV3, TRAJ9)
CAMRARNTGGFKTIF

SEQ ID NO: 217254 - protein, 12 aa, Homo sapiens
  CDR3 for beta chain variable domain of TCR clone 108627 (TRBV11-2, TRBJ2-7)
CASSLPTYEQYF

SEQ ID NO: 217255 - protein, 15 aa, Homo sapiens
  CDR3 for alpha chain variable domain of TCR clone 108628 (TRAV4, TRAJ39)
CLVGPNNNADNMLTF

SEQ ID NO: 217256 - protein, 13 aa, Homo sapiens
  CDR3 for beta chain variable domain of TCR clone 108628 (TRBV11-2, TRBJ2-5)
CASSSTGEETQYF

SEQ ID NO: 217257 - protein, 18 aa, Homo sapiens
  CDR3 for alpha chain variable domain of TCR clone 108629 (TRAV38-2/DV8, TRAJ42)
CAYRSADLTGGSQGNHIF

SEQ ID NO: 217258 - protein, 12 aa, Homo sapiens
  CDR3 for beta chain variable domain of TCR clone 108629 (TRBV11-2, TRBJ2-2)
CASSLGGGELFF

SEQ ID NO: 217259 - protein, 11 aa, Homo sapiens
  CDR3 for alpha chain variable domain of TCR clone 108630 (TRAV21, TRAJ9)
CAVPGGLKTIF

SEQ ID NO: 217260 - protein, 17 aa, Homo sapiens
  CDR3 for beta chain variable domain of TCR clone 108630 (TRBV7-9, TRBJ2-5)
CATSGGARDPVLRARHA

SEQ ID NO: 217261 - protein, 14 aa, Homo sapiens
  CDR3 for alpha chain variable domain of TCR clone 108631 (TRAV13-1, TRAJ40)
CAASMTSGTYKYIF

SEQ ID NO: 217262 - protein, 13 aa, Homo sapiens
  CDR3 for beta chain variable domain of TCR clone 108631 (TRBV4-1, TRBJ2-5)
CSSSQEVQETQYF

SEQ ID NO: 217263 - protein, 12 aa, Homo sapiens
  CDR3 for alpha chain variable domain of TCR clone 108632 (TRAV12-2, TRAJ52)
IGGGTSHGKLTF

SEQ ID NO: 217264 - protein, 13 aa, Homo sapiens
  CDR3 for beta chain variable domain of TCR clone 108632 (TRBV15, TRBJ2-7)
CATSTTGHYEQYF

SEQ ID NO: 217265 - protein, 13 aa, Homo sapiens
  CDR3 for alpha chain variable domain of TCR clone 108633 (TRAV13-1, TRAJ10)
RAATAGGGNKLTF

SEQ ID NO: 217266 - protein, 14 aa, Homo sapiens
  CDR3 for beta chain variable domain of TCR clone 108633 (TRBV12-4, TRBJ2-7)
CASSPAGLKYEQYF

SEQ ID NO: 217267 - protein, 16 aa, Homo sapiens
  CDR3 for alpha chain variable domain of TCR clone 108634 (TRAV12-3, TRAJ53)
CAMSPGSGGINYKLTF

SEQ ID NO: 217268 - protein, 15 aa, Homo sapiens
  CDR3 for beta chain variable domain of TCR clone 108634 (TRBV25-1, TRBJ1-4)
CASSKRIATNEKLFF

SEQ ID NO: 217269 - protein, 14 aa, Homo sapiens
  CDR3 for alpha chain variable domain of TCR clone 108635 (TRAV8-2, TRAJ37)
CVVSISGNTGKLIF

SEQ ID NO: 217270 - protein, 16 aa, Homo sapiens
  CDR3 for beta chain variable domain of TCR clone 108635 (TRBV12-5, TRBJ2-5)
CASGPRTSGNQETQYF

SEQ ID NO: 217271 - protein, 15 aa, Homo sapiens
  CDR3 for alpha chain variable domain of TCR clone 108636 (TRAV21, TRAJ24)
CAARSSTDGWGKLQF

SEQ ID NO: 217272 - protein, 15 aa, Homo sapiens
  CDR3 for beta chain variable domain of TCR clone 108636 (TRBV4-1, TRBJ2-7)
CASSQNTGRLYEQYF

SEQ ID NO: 217273 - protein, 23 aa, Homo sapiens
  CDR3 for alpha chain variable domain of TCR clone 108637 (TRAV12-1, TRAJ23)
SSVIQPPTSVWWYGDNQGGKLIF

SEQ ID NO: 217274 - protein, 16 aa, Homo sapiens
  CDR3 for beta chain variable domain of TCR clone 108637 (TRBV20-1, TRBJ1-4)
CSARPYGGELNGKLFF

SEQ ID NO: 217275 - protein, 19 aa, Homo sapiens
  CDR3 for alpha chain variable domain of TCR clone 108638 (TRAV26-1, TRAJ52)
CIVRAHRNAGGTSYEKLTF

SEQ ID NO: 217276 - protein, 15 aa, Homo sapiens
  CDR3 for beta chain variable domain of TCR clone 108638 (TRBV29-1, TRBJ2-1)
CSGRDRKSSYNEKFF

SEQ ID NO: 217277 - protein, 10 aa, Homo sapiens
  CDR3 for alpha chain variable domain of TCR clone 108639 (TRAV1-2, TRAJ20)
CACNDYKLSF

SEQ ID NO: 217278 - protein, 16 aa, Homo sapiens
  CDR3 for beta chain variable domain of TCR clone 108639 (TRBV20-1, TRBJ2-1)
CNARDLKQGMNNEQFF

SEQ ID NO: 217279 - protein, 13 aa, Homo sapiens
  CDR3 for alpha chain variable domain of TCR clone 108640 (TRAV27, TRAJ3)
ASLRGSSASKIIF

SEQ ID NO: 217280 - protein, 16 aa, Homo sapiens
  CDR3 for beta chain variable domain of TCR clone 108640 (TRBV13, TRBJ2-2)
CASSPRTGEHTGELFF

SEQ ID NO: 217281 - protein, 14 aa, Homo sapiens
  CDR3 for alpha chain variable domain of TCR clone 108641 (TRAV1-1, TRAJ23)
CAVSIYNQGGKLIF

SEQ ID NO: 217282 - protein, 15 aa, Homo sapiens
  CDR3 for beta chain variable domain of TCR clone 108641 (TRBV5-8, TRBJ2-2)
CASSLDRGVTGELFF

SEQ ID NO: 217283 - protein, 13 aa, Homo sapiens
  CDR3 for alpha chain variable domain of TCR clone 108642 (TRAV8-3, TRAJ28)
CAVGAVGSYQLTF

SEQ ID NO: 217284 - protein, 19 aa, Homo sapiens
  CDR3 for beta chain variable domain of TCR clone 108642 (TRBV25-1, TRBJ2-2)
CAILVYRVDRGRKTGELFF

SEQ ID NO: 217285 - protein, 12 aa, Homo sapiens
  CDR3 for alpha chain variable domain of TCR clone 108643 (TRAV12-2, TRAJ10)
WGVTGGGNKLTF

SEQ ID NO: 217286 - protein, 16 aa, Homo sapiens
  CDR3 for beta chain variable domain of TCR clone 108643 (TRBV6-4, TRBJ1-2)
CASSEAVGDPNYDYTF

SEQ ID NO: 217287 - protein, 11 aa, Homo sapiens
  CDR3 for alpha chain variable domain of TCR clone 108644 (TRAV16, TRAJ26)
CALTRWSEFCL

SEQ ID NO: 217288 - protein, 13 aa, Homo sapiens
  CDR3 for beta chain variable domain of TCR clone 108644 (TRBV4-1, TRBJ2-2)
CASSQEDTGELFF

SEQ ID NO: 217289 - protein, 14 aa, Homo sapiens
  CDR3 for alpha chain variable domain of TCR clone 108645 (TRAV26-1, TRAJ34)
CIVRVAYNTDKLIF

SEQ ID NO: 217290 - protein, 15 aa, Homo sapiens
  CDR3 for beta chain variable domain of TCR clone 108645 (TRBV20-1, TRBJ2-7)
CSAIVPAAYFYEQYF

SEQ ID NO: 217291 - protein, 15 aa, Homo sapiens
  CDR3 for alpha chain variable domain of TCR clone 108646 (TRAV40, TRAJ45)
CLLGDLGGGSDGLTF

SEQ ID NO: 217292 - protein, 13 aa, Homo sapiens
  CDR3 for beta chain variable domain of TCR clone 108646 (TRBV7-9, TRBJ1-2)
CASSLKQNYGYTF

SEQ ID NO: 217293 - protein, 14 aa, Homo sapiens
  CDR3 for alpha chain variable domain of TCR clone 108647 (TRAV17, TRAJ57)
CSTDPQGGSEKLVF

SEQ ID NO: 217294 - protein, 14 aa, Homo sapiens
  CDR3 for beta chain variable domain of TCR clone 108647 (TRBV7-8, TRBJ2-7)
CASSPRDRVYEQYF

SEQ ID NO: 217295 - protein, 10 aa, Homo sapiens
  CDR3 for alpha chain variable domain of TCR clone 108648 (TRAV21, TRAJ31)
CAVDNARLMF

SEQ ID NO: 217296 - protein, 17 aa, Homo sapiens
  CDR3 for beta chain variable domain of TCR clone 108648 (TRBV4-2, TRBJ1-1)
CASSQVATGGMNTEAFF

SEQ ID NO: 217297 - protein, 16 aa, Homo sapiens
  CDR3 for alpha chain variable domain of TCR clone 108649 (TRAV3, TRAJ10)
CAVRDMRAGGGNKLTF

SEQ ID NO: 217298 - protein, 13 aa, Homo sapiens
  CDR3 for beta chain variable domain of TCR clone 108649 (TRBV29-1, TRBJ2-1)
CSVEGGRVNEQFF

SEQ ID NO: 217299 - protein, 12 aa, Homo sapiens
  CDR3 for alpha chain variable domain of TCR clone 108650 (TRAV22, TRAJ43)
CAVELNNNDMRF

SEQ ID NO: 217300 - protein, 13 aa, Homo sapiens
  CDR3 for beta chain variable domain of TCR clone 108650 (TRBV11-3, TRBJ1-1)
CASTGSLNTEAFF

SEQ ID NO: 217301 - protein, 13 aa, Homo sapiens
  CDR3 for alpha chain variable domain of TCR clone 108651 (TRAV38-2/DV8, TRAJ34)
CAYRTWNTDKLIF

SEQ ID NO: 217302 - protein, 15 aa, Homo sapiens
  CDR3 for beta chain variable domain of TCR clone 108651 (TRBV7-3, TRBJ2-2)
CASSETGQGTGELFF

SEQ ID NO: 217303 - protein, 22 aa, Homo sapiens
  CDR3 for alpha chain variable domain of TCR clone 108652 (TRAV13-1, TRAJ35)
CAASKGGFGNVLHCRSGAQVIV

SEQ ID NO: 217304 - protein, 13 aa, Homo sapiens
  CDR3 for beta chain variable domain of TCR clone 108652 (TRBV7-3, TRBJ1-1)
CASSQDWGAEAFF

SEQ ID NO: 217305 - protein, 17 aa, Homo sapiens
  CDR3 for alpha chain variable domain of TCR clone 108653 (TRAV23/DV6, TRAJ58)
CAARLLRGETSGSRLTF

SEQ ID NO: 217306 - protein, 12 aa, Homo sapiens
  CDR3 for beta chain variable domain of TCR clone 108653 (TRBV7-8, TRBJ2-1)
CASSLGHNEQFF

SEQ ID NO: 217307 - protein, 13 aa, Homo sapiens
  CDR3 for alpha chain variable domain of TCR clone 108654 (TRAV12-3, TRAJ53)
CAMRGGSNYKLTY

SEQ ID NO: 217308 - protein, 15 aa, Homo sapiens
  CDR3 for beta chain variable domain of TCR clone 108654 (TRBV2, TRBJ2-1)
CATQARLVMIGEQFF

SEQ ID NO: 217309 - protein, 16 aa, Homo sapiens
  CDR3 for alpha chain variable domain of TCR clone 108655 (TRAV30, TRAJ24)
CGTEIVDADSWGKFQF

SEQ ID NO: 217310 - protein, 17 aa, Homo sapiens
  CDR3 for beta chain variable domain of TCR clone 108655 (TRBV20-1, TRBJ2-2)
CSASGSGQGGLTVELFF

SEQ ID NO: 217311 - protein, 10 aa, Homo sapiens
  CDR3 for alpha chain variable domain of TCR clone 108656 (TRAV8-4, TRAJ43)
CAVSADDMRF

SEQ ID NO: 217312 - protein, 13 aa, Homo sapiens
  CDR3 for beta chain variable domain of TCR clone 108656 (TRBV19, TRBJ1-1)
CASSIGPQAEAFF

SEQ ID NO: 217313 - protein, 17 aa, Homo sapiens
  CDR3 for alpha chain variable domain of TCR clone 108657 (TRAV3, TRAJ28)
CAVREAYSGAGSYRLTF

SEQ ID NO: 217314 - protein, 15 aa, Homo sapiens
  CDR3 for beta chain variable domain of TCR clone 108657 (TRBV6-6, TRBJ2-7)
CASSYSYGGSYEQYF

SEQ ID NO: 217315 - protein, 14 aa, Homo sapiens
  CDR3 for alpha chain variable domain of TCR clone 108658 (TRAV35, TRAJ22)
CAGLRPGSARQLTF

SEQ ID NO: 217316 - protein, 14 aa, Homo sapiens
  CDR3 for beta chain variable domain of TCR clone 108658 (TRBV7-8, TRBJ2-3)
CASSLEAGTDTQYF

SEQ ID NO: 217317 - protein, 15 aa, Homo sapiens
  CDR3 for alpha chain variable domain of TCR clone 108659 (TRAV4, TRAJ39)
CLVGPNDNAGNMLTF

SEQ ID NO: 217318 - protein, 13 aa, Homo sapiens
  CDR3 for beta chain variable domain of TCR clone 108659 (TRBV11-3, TRBJ2-5)
CASSSTGEETQYF

SEQ ID NO: 217319 - protein, 14 aa, Homo sapiens
  CDR3 for alpha chain variable domain of TCR clone 108660 (TRAV35, TRAJ42)
CAGRYGGSQGNLIF

SEQ ID NO: 217320 - protein, 15 aa, Homo sapiens
  CDR3 for beta chain variable domain of TCR clone 108660 (TRBV7-9, TRBJ2-1)
CASSLGWGRADEQFF

SEQ ID NO: 217321 - protein, 15 aa, Homo sapiens
  CDR3 for alpha chain variable domain of TCR clone 108661 (TRAV23/DV6, TRAJ18)
CAARYRGSTLGRQYF

SEQ ID NO: 217322 - protein, 13 aa, Homo sapiens
  CDR3 for beta chain variable domain of TCR clone 108661 (TRBV7-2, TRBJ2-7)
CASSSPSGSEQYF

SEQ ID NO: 217323 - protein, 14 aa, Homo sapiens
  CDR3 for alpha chain variable domain of TCR clone 108662 (TRAV17, TRAJ35)
CATDRPGFGNVLHC

SEQ ID NO: 217324 - protein, 14 aa, Homo sapiens
  CDR3 for beta chain variable domain of TCR clone 108662 (TRBV19, TRBJ2-1)
CASPTFVLSGEQFF

SEQ ID NO: 217325 - protein, 18 aa, Homo sapiens
  CDR3 for alpha chain variable domain of TCR clone 108663 (TRAV13-1, TRAJ52)
CAASKRSAGGTSYGKLTF

SEQ ID NO: 217326 - protein, 13 aa, Homo sapiens
  CDR3 for beta chain variable domain of TCR clone 108663 (TRBV12-4, TRBJ1-5)
CASSPRQYQPQHF

SEQ ID NO: 217327 - protein, 13 aa, Homo sapiens
  CDR3 for alpha chain variable domain of TCR clone 108664 (TRAV2, TRAJ10)
CAVETGGGNKLTF

SEQ ID NO: 217328 - protein, 13 aa, Homo sapiens
  CDR3 for beta chain variable domain of TCR clone 108664 (TRBV20-1, TRBJ2-3)
QCWGRRGTDTQYF

SEQ ID NO: 217329 - protein, 15 aa, Homo sapiens
  CDR3 for alpha chain variable domain of TCR clone 108665 (TRAV26-2, TRAJ13)
FILRDLSGGYQKVTF

SEQ ID NO: 217330 - protein, 11 aa, Homo sapiens
  CDR3 for beta chain variable domain of TCR clone 108665 (TRBV7-9, TRBJ2-5)
CASSLSATQYF

SEQ ID NO: 217331 - protein, 12 aa, Homo sapiens
  CDR3 for alpha chain variable domain of TCR clone 108666 (TRAV29/DV5, TRAJ49)
CAATDTGNQFYF

SEQ ID NO: 217332 - protein, 19 aa, Homo sapiens
  CDR3 for beta chain variable domain of TCR clone 108666 (TRBV25-1, TRBJ2-2)
CAILVYRVDRGRKTGELFC

SEQ ID NO: 217333 - protein, 23 aa, Homo sapiens
  CDR3 for alpha chain variable domain of TCR clone 108667 (TRAV8-3, TRAJ38)
CAVGASNAGNNHIQNPDPAMYQL

SEQ ID NO: 217334 - protein, 15 aa, Homo sapiens
  CDR3 for beta chain variable domain of TCR clone 108667 (TRBV11-3, TRBJ1-3)
CASSLFGPSGNTIYF

SEQ ID NO: 217335 - protein, 11 aa, Homo sapiens
  CDR3 for alpha chain variable domain of TCR clone 108668 (TRAV2, TRAJ27)
CAVSNAGKSTF

SEQ ID NO: 217336 - protein, 17 aa, Homo sapiens
  CDR3 for beta chain variable domain of TCR clone 108668 (TRBV15, TRBJ1-4)
CATSRYGTGDPNEKLFF

SEQ ID NO: 217337 - protein, 14 aa, Homo sapiens
  CDR3 for alpha chain variable domain of TCR clone 108669 (TRAV16, TRAJ39)
CALSKNNAGNMLTF

SEQ ID NO: 217338 - protein, 15 aa, Homo sapiens
  CDR3 for beta chain variable domain of TCR clone 108669 (TRBV11-2, TRBJ1-3)
CASSAHSSSGNTIYF

SEQ ID NO: 217339 - protein, 14 aa, Homo sapiens
  CDR3 for alpha chain variable domain of TCR clone 108670 (TRAV38-1, TRAJ29)
CAFITPSGNTPLDF

SEQ ID NO: 217340 - protein, 14 aa, Homo sapiens
  CDR3 for beta chain variable domain of TCR clone 108670 (TRBV18, TRBJ2-7)
CASSPRGGAYEQYF

SEQ ID NO: 217341 - protein, 11 aa, Homo sapiens
  CDR3 for alpha chain variable domain of TCR clone 108671 (TRAV12-2, TRAJ33)
CAVTSNYQLIW

SEQ ID NO: 217342 - protein, 13 aa, Homo sapiens
  CDR3 for beta chain variable domain of TCR clone 108671 (TRBV5-1, TRBJ1-2)
CASSSTGVYGYTF

SEQ ID NO: 217343 - protein, 15 aa, Homo sapiens
  CDR3 for alpha chain variable domain of TCR clone 108672 (TRAV13-1, TRAJ53)
YAAHSPGGSNYKLTF

SEQ ID NO: 217344 - protein, 13 aa, Homo sapiens
  CDR3 for beta chain variable domain of TCR clone 108672 (TRBV2, TRBJ1-4)
CASSERAGEKLFF

SEQ ID NO: 217345 - protein, 13 aa, Homo sapiens
  CDR3 for alpha chain variable domain of TCR clone 108673 (TRAV13-1, TRAJ9)
CAARGTGGFKTIF

SEQ ID NO: 217346 - protein, 13 aa, Homo sapiens
  CDR3 for beta chain variable domain of TCR clone 108673 (TRBV12-4, TRBJ2-7)
CASSLERVREQYF

SEQ ID NO: 217347 - protein, 14 aa, Homo sapiens
  CDR3 for alpha chain variable domain of TCR clone 108674 (TRAV8-6, TRAJ49)
CAVSVRYTGNQFYF

SEQ ID NO: 217348 - protein, 12 aa, Homo sapiens
  CDR3 for beta chain variable domain of TCR clone 108674 (TRBV12-4, TRBJ2-7)
CASSLGGYEQYF

SEQ ID NO: 217349 - protein, 14 aa, Homo sapiens
  CDR3 for alpha chain variable domain of TCR clone 108675 (TRAV9-2, TRAJ39)
CALYIYNAGNMLTF

SEQ ID NO: 217350 - protein, 15 aa, Homo sapiens
  CDR3 for beta chain variable domain of TCR clone 108675 (TRBV4-1, TRBJ1-4)
CASSDTGGTNEELFF

SEQ ID NO: 217351 - protein, 16 aa, Homo sapiens
  CDR3 for alpha chain variable domain of TCR clone 108676 (TRAV13-1, TRAJ10)
CAAGYILTGGGNKRTF

SEQ ID NO: 217352 - protein, 15 aa, Homo sapiens
  CDR3 for beta chain variable domain of TCR clone 108676 (TRBV12-4, TRBJ2-7)
CASSQTGAISYEQYF

SEQ ID NO: 217353 - protein, 16 aa, Homo sapiens
  CDR3 for alpha chain variable domain of TCR clone 108677 (TRAV30, TRAJ24)
CGTEIVDADSWGKFQF

SEQ ID NO: 217354 - protein, 16 aa, Homo sapiens
  CDR3 for beta chain variable domain of TCR clone 108677 (TRBV7-2, TRBJ2-7)
CASSLVMGVGSYEQYF

SEQ ID NO: 217355 - protein, 15 aa, Homo sapiens
  CDR3 for alpha chain variable domain of TCR clone 108678 (TRAV17, TRAJ37)
CATDHGSSNTGKLLF

SEQ ID NO: 217356 - protein, 14 aa, Homo sapiens
  CDR3 for beta chain variable domain of TCR clone 108678 (TRBV7-2, TRBJ2-3)
CASSRTSGADTQYF

SEQ ID NO: 217357 - protein, 14 aa, Homo sapiens
  CDR3 for alpha chain variable domain of TCR clone 108679 (TRAV12-3, TRAJ10)
SHLPLTGGGNKLTF

SEQ ID NO: 217358 - protein, 12 aa, Homo sapiens
  CDR3 for beta chain variable domain of TCR clone 108679 (TRBV12-4, TRBJ2-7)
CASSLGGYERYF

SEQ ID NO: 217359 - protein, 14 aa, Homo sapiens
  CDR3 for alpha chain variable domain of TCR clone 108680 (TRAV29/DV5, TRAJ45)
CAASFRGGADGLTF

SEQ ID NO: 217360 - protein, 16 aa, Homo sapiens
  CDR3 for beta chain variable domain of TCR clone 108680 (TRBV12-4, TRBJ1-5)
CASSRPVGGSNQPQHF

SEQ ID NO: 217361 - protein, 13 aa, Homo sapiens
  CDR3 for alpha chain variable domain of TCR clone 108681 (TRAV27, TRAJ29)
CAGALSGNTPLVF

SEQ ID NO: 217362 - protein, 14 aa, Homo sapiens
  CDR3 for beta chain variable domain of TCR clone 108681 (TRBV7-9, TRBJ2-7)
CASSIGQGAGEQYF

SEQ ID NO: 217363 - protein, 14 aa, Homo sapiens
  CDR3 for alpha chain variable domain of TCR clone 108682 (TRAV8-4, TRAJ15)
CAVTIREAGTALIF

SEQ ID NO: 217364 - protein, 13 aa, Homo sapiens
  CDR3 for beta chain variable domain of TCR clone 108682 (TRBV19, TRBJ1-2)
CASSVPGQDGYTF

SEQ ID NO: 217365 - protein, 11 aa, Homo sapiens
  CDR3 for alpha chain variable domain of TCR clone 108683 (TRAV1-1, TRAJ23)
CAVRQGGKLIF

SEQ ID NO: 217366 - protein, 20 aa, Homo sapiens
  CDR3 for beta chain variable domain of TCR clone 108683 (TRBV7-8, TRBJ2-2)
CASSHLFPGPTIHITGELFY

SEQ ID NO: 217367 - protein, 15 aa, Homo sapiens
  CDR3 for alpha chain variable domain of TCR clone 108684 (TRAV3, TRAJ22)
CAVRDRGGSARHLTF

SEQ ID NO: 217368 - protein, 13 aa, Homo sapiens
  CDR3 for beta chain variable domain of TCR clone 108684 (TRBV20-1, TRBJ1-1)
CSARVGGNTEAFF

SEQ ID NO: 217369 - protein, 15 aa, Homo sapiens
  CDR3 for alpha chain variable domain of TCR clone 108685 (TRAV21, TRAJ53)
CATLNSGGSNYKLTF

SEQ ID NO: 217370 - protein, 13 aa, Homo sapiens
  CDR3 for beta chain variable domain of TCR clone 108685 (TRBV11-2, TRBJ1-1)
CASSLTENTEAFF

SEQ ID NO: 217371 - protein, 13 aa, Homo sapiens
  CDR3 for alpha chain variable domain of TCR clone 108686 (TRAV21, TRAJ57)
CAVTQGGSEKLVF

SEQ ID NO: 217372 - protein, 14 aa, Homo sapiens
  CDR3 for beta chain variable domain of TCR clone 108686 (TRBV4-2, TRBJ2-3)
CASRETRAPGMQYF

SEQ ID NO: 217373 - protein, 14 aa, Homo sapiens
  CDR3 for alpha chain variable domain of TCR clone 108687 (TRAV12-1, TRAJ3)
CVVNPGSSASKLIF

SEQ ID NO: 217374 - protein, 14 aa, Homo sapiens
  CDR3 for beta chain variable domain of TCR clone 108687 (TRBV20-1, TRBJ2-3)
CSARGGTSTDTQYF

SEQ ID NO: 217375 - protein, 17 aa, Homo sapiens
  CDR3 for alpha chain variable domain of TCR clone 108688 (TRAV3, TRAJ38)
CAVRDCLNAGNNRKLIW

SEQ ID NO: 217376 - protein, 15 aa, Homo sapiens
  CDR3 for beta chain variable domain of TCR clone 108688 (TRBV19, TRBJ1-1)
CASTSGQIQNTEAFF

SEQ ID NO: 217377 - protein, 15 aa, Homo sapiens
  CDR3 for alpha chain variable domain of TCR clone 108689 (TRAV2, TRAJ15)
CAVEDRNQAGTALVF

SEQ ID NO: 217378 - protein, 13 aa, Homo sapiens
  CDR3 for beta chain variable domain of TCR clone 108689 (TRBV10-2, TRBJ2-1)
CASGASGDAKQFF

SEQ ID NO: 217379 - protein, 14 aa, Homo sapiens
  CDR3 for alpha chain variable domain of TCR clone 108690 (TRAV16, TRAJ39)
CVLSKNNAGNMLTF

SEQ ID NO: 217380 - protein, 16 aa, Homo sapiens
  CDR3 for beta chain variable domain of TCR clone 108690 (TRBV6-6, TRBJ2-1)
CASSYSFSGSYNEQFF

SEQ ID NO: 217381 - protein, 23 aa, Homo sapiens
  CDR3 for alpha chain variable domain of TCR clone 108691 (TRAV26-1, TRAJ38)
CIAGNAGNNHIQNPDPAVYQLRD

SEQ ID NO: 217382 - protein, 13 aa, Homo sapiens
  CDR3 for beta chain variable domain of TCR clone 108691 (TRBV20-1, TRBJ1-1)
CSARGGGNDEAFF

SEQ ID NO: 217383 - protein, 14 aa, Homo sapiens
  CDR3 for alpha chain variable domain of TCR clone 108692 (TRAV12-2, TRAJ40)
CAVKIPSGTYKYIF

SEQ ID NO: 217384 - protein, 15 aa, Homo sapiens
  CDR3 for beta chain variable domain of TCR clone 108692 (TRBV11-2, TRBJ2-1)
CASSLGTSGLNEQFF

SEQ ID NO: 217385 - protein, 12 aa, Homo sapiens
  CDR3 for alpha chain variable domain of TCR clone 108693 (TRAV17, TRAJ30)
CATDARDDKIIF

SEQ ID NO: 217386 - protein, 15 aa, Homo sapiens
  CDR3 for beta chain variable domain of TCR clone 108693 (TRBV4-1, TRBJ2-1)
CASSQGGELCNEQFF

SEQ ID NO: 217387 - protein, 14 aa, Homo sapiens
  CDR3 for alpha chain variable domain of TCR clone 108694 (TRAV27, TRAJ15)
CAGLDNQAGTALIF

SEQ ID NO: 217388 - protein, 11 aa, Homo sapiens
  CDR3 for beta chain variable domain of TCR clone 108694 (TRBV29-1, TRBJ1-1)
CSVEVGTRTFF

SEQ ID NO: 217389 - protein, 13 aa, Homo sapiens
  CDR3 for alpha chain variable domain of TCR clone 108695 (TRAV13-1, TRAJ39)
CSKYSNAGNMLTF

SEQ ID NO: 217390 - protein, 16 aa, Homo sapiens
  CDR3 for beta chain variable domain of TCR clone 108695 (TRBV7-2, TRBJ2-3)
CASSLVALYSTYTQYF

SEQ ID NO: 217391 - protein, 14 aa, Homo sapiens
  CDR3 for alpha chain variable domain of TCR clone 108696 (TRAV12-3, TRAJ6)
CAMSATGGSYIPTV

SEQ ID NO: 217392 - protein, 16 aa, Homo sapiens
  CDR3 for beta chain variable domain of TCR clone 108696 (TRBV4-2, TRBJ2-1)
CASSPRAGQGANEQFF

SEQ ID NO: 217393 - protein, 12 aa, Homo sapiens
  CDR3 for alpha chain variable domain of TCR clone 108697 (TRAV2, TRAJ10)
CASMGGGNKLTF

SEQ ID NO: 217394 - protein, 14 aa, Homo sapiens
  CDR3 for beta chain variable domain of TCR clone 108697 (TRBV7-2, TRBJ2-2)
CASRGQGAAGELFF

SEQ ID NO: 217395 - protein, 11 aa, Homo sapiens
  CDR3 for alpha chain variable domain of TCR clone 108698 (TRAV21, TRAJ11)
CAVNGYSALTF

SEQ ID NO: 217396 - protein, 15 aa, Homo sapiens
  CDR3 for beta chain variable domain of TCR clone 108698 (TRBV6-3, TRBJ2-7)
CASSSPGTVFYEQYF

SEQ ID NO: 217397 - protein, 13 aa, Homo sapiens
  CDR3 for alpha chain variable domain of TCR clone 108699 (TRAV21, TRAJ27)
CAARPGNAGKPTF

SEQ ID NO: 217398 - protein, 14 aa, Homo sapiens
  CDR3 for beta chain variable domain of TCR clone 108699 (TRBV20-1, TRBJ2-1)
CSAAGSGEYNEQFF

SEQ ID NO: 217399 - protein, 19 aa, Homo sapiens
  CDR3 for alpha chain variable domain of TCR clone 108700 (TRAV2, )
CAVEEDIQNPDPAVYQMRD

SEQ ID NO: 217400 - protein, 14 aa, Homo sapiens
  CDR3 for beta chain variable domain of TCR clone 108700 (TRBV19, TRBJ1-2)
CASNPGQAPYGYTF

SEQ ID NO: 217401 - protein, 12 aa, Homo sapiens
  CDR3 for alpha chain variable domain of TCR clone 108701 (TRAV8-3, TRAJ20)
CAVGANDYKLSF

SEQ ID NO: 217402 - protein, 15 aa, Homo sapiens
  CDR3 for beta chain variable domain of TCR clone 108701 (TRBV6-3, TRBJ2-2)
CASSFLATLTGELFF

SEQ ID NO: 217403 - protein, 14 aa, Homo sapiens
  CDR3 for alpha chain variable domain of TCR clone 108702 (TRAV12-2, TRAJ41)
CAVNRANSGYALSF

SEQ ID NO: 217404 - protein, 13 aa, Homo sapiens
  CDR3 for beta chain variable domain of TCR clone 108702 (TRBV7-9, TRBJ1-2)
CASSLKQNYGYTF

SEQ ID NO: 217405 - protein, 13 aa, Homo sapiens
  CDR3 for alpha chain variable domain of TCR clone 108703 (TRAV3, TRAJ20)
CAVRDWAAGKLSF

SEQ ID NO: 217406 - protein, 16 aa, Homo sapiens
  CDR3 for beta chain variable domain of TCR clone 108703 (TRBV7-7, TRBJ2-1)
CASSLASGTSYNEQFF

SEQ ID NO: 217407 - protein, 13 aa, Homo sapiens
  CDR3 for alpha chain variable domain of TCR clone 108704 (TRAV2, TRAJ40)
CAVVPSGTYKSIF

SEQ ID NO: 217408 - protein, 14 aa, Homo sapiens
  CDR3 for beta chain variable domain of TCR clone 108704 (TRBV19, TRBJ2-1)
CASPTFVLSGEQFF

SEQ ID NO: 217409 - protein, 16 aa, Homo sapiens
  CDR3 for alpha chain variable domain of TCR clone 108705 (TRAV21, TRAJ37)
CAVRPRGSSNTGKLIF

SEQ ID NO: 217410 - protein, 17 aa, Homo sapiens
  CDR3 for beta chain variable domain of TCR clone 108705 (TRBV13, TRBJ2-3)
CASSLSRVAGGRNTQYF

SEQ ID NO: 217411 - protein, 19 aa, Homo sapiens
  CDR3 for alpha chain variable domain of TCR clone 108706 (TRAV29/DV5, TRAJ49)
CSVLLCSKLTVDTGNQFSF

SEQ ID NO: 217412 - protein, 17 aa, Homo sapiens
  CDR3 for beta chain variable domain of TCR clone 108706 (TRBV13, TRBJ2-3)
CASSLSRVAGGRNTQYF

SEQ ID NO: 217413 - protein, 14 aa, Homo sapiens
  CDR3 for alpha chain variable domain of TCR clone 108707 (TRAV12-3, TRAJ43)
CAMSLGGAGARLTV

SEQ ID NO: 217414 - protein, 13 aa, Homo sapiens
  CDR3 for beta chain variable domain of TCR clone 108707 (TRBV7-9, TRBJ1-2)
CASSLKQNYGYTF

SEQ ID NO: 217415 - protein, 16 aa, Homo sapiens
  CDR3 for alpha chain variable domain of TCR clone 108708 (TRAV8-3, TRAJ10)
CAVGPILTGGGNKLTF

SEQ ID NO: 217416 - protein, 16 aa, Homo sapiens
  CDR3 for beta chain variable domain of TCR clone 108708 (TRBV7-2, TRBJ2-5)
CASSSKWLSGEETQYF

SEQ ID NO: 217417 - protein, 11 aa, Homo sapiens
  CDR3 for alpha chain variable domain of TCR clone 108709 (TRAV2, TRAJ13)
CASGGYQKVTF

SEQ ID NO: 217418 - protein, 16 aa, Homo sapiens
  CDR3 for beta chain variable domain of TCR clone 108709 (TRBV6-1, TRBJ2-5)
CASSQTLDRGAETQYF

SEQ ID NO: 217419 - protein, 13 aa, Homo sapiens
  CDR3 for alpha chain variable domain of TCR clone 108710 (TRAV1-2, TRAJ9)
CAALNTGGFKTIF

SEQ ID NO: 217420 - protein, 16 aa, Homo sapiens
  CDR3 for beta chain variable domain of TCR clone 108710 (TRBV19, TRBJ1-3)
CASSMDRALPGNTIYF

SEQ ID NO: 217421 - protein, 17 aa, Homo sapiens
  CDR3 for alpha chain variable domain of TCR clone 108711 (TRAV3, TRAJ6)
CAVRDGPRAGGSYIPTF

SEQ ID NO: 217422 - protein, 14 aa, Homo sapiens
  CDR3 for beta chain variable domain of TCR clone 108711 (TRBV7-8, TRBJ2-3)
CASSSRDSTDTQYF

SEQ ID NO: 217423 - protein, 12 aa, Homo sapiens
  CDR3 for alpha chain variable domain of TCR clone 108712 (TRAV17, TRAJ39)
CATGAAGNMLTF

SEQ ID NO: 217424 - protein, 16 aa, Homo sapiens
  CDR3 for beta chain variable domain of TCR clone 108712 (TRBV5-4, TRBJ2-5)
CASSLGLAGGRETQYF

SEQ ID NO: 217425 - protein, 12 aa, Homo sapiens
  CDR3 for alpha chain variable domain of TCR clone 108713 (TRAV12-1, TRAJ34)
CVVAGATDKLIF

SEQ ID NO: 217426 - protein, 16 aa, Homo sapiens
  CDR3 for beta chain variable domain of TCR clone 108713 (TRBV7-2, TRBJ1-2)
CASSSNQDGRGHGYTF

SEQ ID NO: 217427 - protein, 18 aa, Homo sapiens
  CDR3 for alpha chain variable domain of TCR clone 108714 (TRAV3, )
CAVRPTPDIQNPDPAVYQ

SEQ ID NO: 217428 - protein, 15 aa, Homo sapiens
  CDR3 for beta chain variable domain of TCR clone 108714 (TRBV11-3, TRBJ2-5)
CASSDTSGGIETQYF

SEQ ID NO: 217429 - protein, 11 aa, Homo sapiens
  CDR3 for alpha chain variable domain of TCR clone 108715 (TRAV12-1, TRAJ30)
CVVNGQDKIIF

SEQ ID NO: 217430 - protein, 12 aa, Homo sapiens
  CDR3 for beta chain variable domain of TCR clone 108715 (TRBV24-1, TRBJ2-2)
CASKLFTGELFF

SEQ ID NO: 217431 - protein, 16 aa, Homo sapiens
  CDR3 for alpha chain variable domain of TCR clone 108716 (TRAV30, TRAJ24)
CGTEIVDADSWGKFQF

SEQ ID NO: 217432 - protein, 15 aa, Homo sapiens
  CDR3 for beta chain variable domain of TCR clone 108716 (TRBV5-5, TRBJ1-5)
CASSLKGGGEQPQHF

SEQ ID NO: 217433 - protein, 14 aa, Homo sapiens
  CDR3 for alpha chain variable domain of TCR clone 108717 (TRAV12-3, TRAJ58)
CAMSTETSGSRLTL

SEQ ID NO: 217434 - protein, 12 aa, Homo sapiens
  CDR3 for beta chain variable domain of TCR clone 108717 (TRBV7-8, TRBJ2-7)
CASSLGDREQYF

SEQ ID NO: 217435 - protein, 14 aa, Homo sapiens
  CDR3 for alpha chain variable domain of TCR clone 108718 (TRAV12-1, TRAJ23)
CVVMIYNQGGKLIF

SEQ ID NO: 217436 - protein, 23 aa, Homo sapiens
  CDR3 for beta chain variable domain of TCR clone 108718 (TRBV7-3, TRBJ1-6)
CASSLTSRDEASDSSSYNSPLHF

SEQ ID NO: 217437 - protein, 15 aa, Homo sapiens
  CDR3 for alpha chain variable domain of TCR clone 108719 (TRAV3, TRAJ32)
CAVSSYGGATNKLIF

SEQ ID NO: 217438 - protein, 11 aa, Homo sapiens
  CDR3 for beta chain variable domain of TCR clone 108719 (TRBV5-1, TRBJ2-5)
VVSGSQETQYF

SEQ ID NO: 217439 - protein, 13 aa, Homo sapiens
  CDR3 for alpha chain variable domain of TCR clone 108720 (TRAV17, TRAJ5)
CAPMDTGRRALTF

SEQ ID NO: 217440 - protein, 15 aa, Homo sapiens
  CDR3 for beta chain variable domain of TCR clone 108720 (TRBV6-6, TRBJ2-5)
CASSPGGGVEETQYF

SEQ ID NO: 217441 - protein, 11 aa, Homo sapiens
  CDR3 for alpha chain variable domain of TCR clone 108721 (TRAV3, TRAJ21)
CAVGNFNKFYF

SEQ ID NO: 217442 - protein, 16 aa, Homo sapiens
  CDR3 for beta chain variable domain of TCR clone 108721 (TRBV7-2, TRBJ2-1)
CASSLRWGRENNEQFF

SEQ ID NO: 217443 - protein, 12 aa, Homo sapiens
  CDR3 for alpha chain variable domain of TCR clone 108722 (TRAV30, TRAJ43)
CGTEERGNDMRF

SEQ ID NO: 217444 - protein, 13 aa, Homo sapiens
  CDR3 for beta chain variable domain of TCR clone 108722 (TRBV12-4, TRBJ1-2)
CASSPGSKDGYTF

SEQ ID NO: 217445 - protein, 12 aa, Homo sapiens
  CDR3 for alpha chain variable domain of TCR clone 108723 (TRAV1-1, TRAJ8)
CAGGTGFQKLVF

SEQ ID NO: 217446 - protein, 11 aa, Homo sapiens
  CDR3 for beta chain variable domain of TCR clone 108723 (TRBV11-3, TRBJ2-7)
CASSRTYEQYF

SEQ ID NO: 217447 - protein, 20 aa, Homo sapiens
  CDR3 for alpha chain variable domain of TCR clone 108724 (TRAV12-1, TRAJ42)
SSVIQPPTSVKGGSQGNLIF

SEQ ID NO: 217448 - protein, 14 aa, Homo sapiens
  CDR3 for beta chain variable domain of TCR clone 108724 (TRBV25-1, TRBJ1-1)
CASTHLGGNTEAFF

SEQ ID NO: 217449 - protein, 17 aa, Homo sapiens
  CDR3 for alpha chain variable domain of TCR clone 108725 (TRAV3, TRAJ6)
CAVRDGPRAGGSYIPTF

SEQ ID NO: 217450 - protein, 14 aa, Homo sapiens
  CDR3 for beta chain variable domain of TCR clone 108725 (TRBV7-2, TRBJ2-7)
CASSTKTSVYEQYF

SEQ ID NO: 217451 - protein, 14 aa, Homo sapiens
  CDR3 for alpha chain variable domain of TCR clone 108726 (TRAV30, TRAJ33)
CGTERRFSNYQLIW

SEQ ID NO: 217452 - protein, 16 aa, Homo sapiens
  CDR3 for beta chain variable domain of TCR clone 108726 (TRBV7-3, TRBJ2-2)
CASSLKRGTVSGELFF

SEQ ID NO: 217453 - protein, 16 aa, Homo sapiens
  CDR3 for alpha chain variable domain of TCR clone 108727 (TRAV4, TRAJ18)
CCVLLIGGSTLGRLYF

SEQ ID NO: 217454 - protein, 14 aa, Homo sapiens
  CDR3 for beta chain variable domain of TCR clone 108727 (TRBV24-1, TRBJ1-1)
CATSIPRGDTEAFF

SEQ ID NO: 217455 - protein, 12 aa, Homo sapiens
  CDR3 for alpha chain variable domain of TCR clone 108728 (TRAV8-4, TRAJ37)
CANSSNTGKLIF

SEQ ID NO: 217456 - protein, 15 aa, Homo sapiens
  CDR3 for beta chain variable domain of TCR clone 108728 (TRBV7-9, TRBJ2-7)
CASSSSGLAVYEQYF

SEQ ID NO: 217457 - protein, 15 aa, Homo sapiens
  CDR3 for alpha chain variable domain of TCR clone 108729 (TRAV23/DV6, TRAJ45)
CAASARGGGADGLTF

SEQ ID NO: 217458 - protein, 16 aa, Homo sapiens
  CDR3 for beta chain variable domain of TCR clone 108729 (TRBV28, TRBJ2-1)
CASSLGGSGSYNEQFF

SEQ ID NO: 217459 - protein, 12 aa, Homo sapiens
  CDR3 for alpha chain variable domain of TCR clone 108730 (TRAV17, TRAJ57)
CATDGGSEKLVF

SEQ ID NO: 217460 - protein, 13 aa, Homo sapiens
  CDR3 for beta chain variable domain of TCR clone 108730 (TRBV6-5, TRBJ2-5)
CASSPQGGETQYF

SEQ ID NO: 217461 - protein, 15 aa, Homo sapiens
  CDR3 for alpha chain variable domain of TCR clone 108731 (TRAV8-4, TRAJ8)
CAVSDLNTGLQKLVF

SEQ ID NO: 217462 - protein, 14 aa, Homo sapiens
  CDR3 for beta chain variable domain of TCR clone 108731 (TRBV7-2, TRBJ2-3)
CASSQTGSSYTQYF

SEQ ID NO: 217463 - protein, 14 aa, Homo sapiens
  CDR3 for alpha chain variable domain of TCR clone 108732 (TRAV1-1, TRAJ28)
CVAPSGAGSYQLTF

SEQ ID NO: 217464 - protein, 15 aa, Homo sapiens
  CDR3 for beta chain variable domain of TCR clone 108732 (TRBV7-2, TRBJ1-2)
CASSLVSGGDYGYTF

SEQ ID NO: 217465 - protein, 13 aa, Homo sapiens
  CDR3 for alpha chain variable domain of TCR clone 108733 (TRAV12-1, TRAJ47)
CVVNMEYGNKLVF

SEQ ID NO: 217466 - protein, 14 aa, Homo sapiens
  CDR3 for beta chain variable domain of TCR clone 108733 (TRBV7-9, TRBJ2-4)
CASSLAMGGNIQYF

SEQ ID NO: 217467 - protein, 14 aa, Homo sapiens
  CDR3 for alpha chain variable domain of TCR clone 108734 (TRAV29/DV5, TRAJ40)
CAAAVASGTSKYIF

SEQ ID NO: 217468 - protein, 13 aa, Homo sapiens
  CDR3 for beta chain variable domain of TCR clone 108734 (TRBV7-9, TRBJ2-7)
CASSFAGAYEQYF

SEQ ID NO: 217469 - protein, 13 aa, Homo sapiens
  CDR3 for alpha chain variable domain of TCR clone 108735 (TRAV20, TRAJ20)
CAVRDFNDYKLSF

SEQ ID NO: 217470 - protein, 12 aa, Homo sapiens
  CDR3 for beta chain variable domain of TCR clone 108735 (TRBV9, TRBJ2-1)
CASSITYNEQLF

SEQ ID NO: 217471 - protein, 13 aa, Homo sapiens
  CDR3 for alpha chain variable domain of TCR clone 108736 (TRAV8-6, TRAJ9)
CAVWDTGGFKTIF

SEQ ID NO: 217472 - protein, 14 aa, Homo sapiens
  CDR3 for beta chain variable domain of TCR clone 108736 (TRBV2, TRBJ2-1)
CASSEALIYNEQFL

SEQ ID NO: 217473 - protein, 18 aa, Homo sapiens
  CDR3 for alpha chain variable domain of TCR clone 108737 (TRAV12-3, TRAJ52)
CAMSVGGAGGTSYGKLTF

SEQ ID NO: 217474 - protein, 16 aa, Homo sapiens
  CDR3 for beta chain variable domain of TCR clone 108737 (TRBV18, TRBJ2-7)
CASSPLQSGTHYEQYF

SEQ ID NO: 217475 - protein, 13 aa, Homo sapiens
  CDR3 for alpha chain variable domain of TCR clone 108738 (TRAV1-1, TRAJ9)
CAAKNTGGFKTIF

SEQ ID NO: 217476 - protein, 14 aa, Homo sapiens
  CDR3 for beta chain variable domain of TCR clone 108738 (TRBV19, TRBJ2-1)
CASPTFVLSGEQFL

SEQ ID NO: 217477 - protein, 11 aa, Homo sapiens
  CDR3 for alpha chain variable domain of TCR clone 108739 (TRAV12-1, TRAJ30)
CVVNGQDKIIF

SEQ ID NO: 217478 - protein, 12 aa, Homo sapiens
  CDR3 for beta chain variable domain of TCR clone 108739 (TRBV27, TRBJ2-2)
CASKLFTWELFF

SEQ ID NO: 217479 - protein, 12 aa, Homo sapiens
  CDR3 for alpha chain variable domain of TCR clone 108740 (TRAV12-3, TRAJ20)
CAMVRGDYKLSF

SEQ ID NO: 217480 - protein, 14 aa, Homo sapiens
  CDR3 for beta chain variable domain of TCR clone 108740 (TRBV12-5, TRBJ2-5)
CASGSRTHQETQYF

SEQ ID NO: 217481 - protein, 19 aa, Homo sapiens
  CDR3 for alpha chain variable domain of TCR clone 108741 (TRAV1-2, TRAJ26)
CLLPLCCERPDNYGQNFVF

SEQ ID NO: 217482 - protein, 16 aa, Homo sapiens
  CDR3 for beta chain variable domain of TCR clone 108741 (TRBV5-4, TRBJ2-3)
CASQQPGAGGADTQYF

SEQ ID NO: 217483 - protein, 12 aa, Homo sapiens
  CDR3 for alpha chain variable domain of TCR clone 108742 (TRAV2, TRAJ33)
CAVPGSNYQLIW

SEQ ID NO: 217484 - protein, 20 aa, Homo sapiens
  CDR3 for beta chain variable domain of TCR clone 108742 (TRBV19, TRBJ2-1)
CASSISRTVTSTRLNNEQFF

SEQ ID NO: 217485 - protein, 14 aa, Homo sapiens
  CDR3 for alpha chain variable domain of TCR clone 108743 (TRAV12-2, TRAJ45)
CAVYSGGGADGLTF

SEQ ID NO: 217486 - protein, 14 aa, Homo sapiens
  CDR3 for beta chain variable domain of TCR clone 108743 (TRBV28, TRBJ1-2)
CASRIQGANYGYTF

SEQ ID NO: 217487 - protein, 14 aa, Homo sapiens
  CDR3 for alpha chain variable domain of TCR clone 108744 (TRAV27, TRAJ50)
CAGGRKTSYDKVIF

SEQ ID NO: 217488 - protein, 14 aa, Homo sapiens
  CDR3 for beta chain variable domain of TCR clone 108744 (TRBV7-6, TRBJ2-3)
CASSLGTVTDTQYF

SEQ ID NO: 217489 - protein, 14 aa, Homo sapiens
  CDR3 for alpha chain variable domain of TCR clone 108745 (TRAV21, TRAJ45)
CAVVSGGGADGPTF

SEQ ID NO: 217490 - protein, 14 aa, Homo sapiens
  CDR3 for beta chain variable domain of TCR clone 108745 (TRBV20-1, TRBJ2-3)
CSALGLEGADTQYF

SEQ ID NO: 217491 - protein, 11 aa, Homo sapiens
  CDR3 for alpha chain variable domain of TCR clone 108746 (TRAV12-3, TRAJ43)
CAMSVSNDMRF

SEQ ID NO: 217492 - protein, 14 aa, Homo sapiens
  CDR3 for beta chain variable domain of TCR clone 108746 (TRBV7-8, TRBJ2-3)
CASSLEAGADTQYF

SEQ ID NO: 217493 - protein, 16 aa, Homo sapiens
  CDR3 for alpha chain variable domain of TCR clone 108747 (TRAV2, TRAJ4)
CAVEDRFFGGYNKLIF

SEQ ID NO: 217494 - protein, 13 aa, Homo sapiens
  CDR3 for beta chain variable domain of TCR clone 108747 (TRBV7-7, TRBJ2-5)
CASSRSGQETQYF

SEQ ID NO: 217495 - protein, 12 aa, Homo sapiens
  CDR3 for alpha chain variable domain of TCR clone 108748 (TRAV13-2, TRAJ23)
CAERHRGGKLIF

SEQ ID NO: 217496 - protein, 13 aa, Homo sapiens
  CDR3 for beta chain variable domain of TCR clone 108748 (TRBV7-7, TRBJ2-3)
CASSLSRANTQYF

SEQ ID NO: 217497 - protein, 15 aa, Homo sapiens
  CDR3 for alpha chain variable domain of TCR clone 108749 (TRAV17, TRAJ28)
CATVDSGAGSYQLPF

SEQ ID NO: 217498 - protein, 13 aa, Homo sapiens
  CDR3 for beta chain variable domain of TCR clone 108749 (TRBV5-4, TRBJ2-5)
CASSRQEGETQYF

SEQ ID NO: 217499 - protein, 18 aa, Homo sapiens
  CDR3 for alpha chain variable domain of TCR clone 108750 (TRAV21, TRAJ52)
CAVRPSPAGGTSYGKLTL

SEQ ID NO: 217500 - protein, 15 aa, Homo sapiens
  CDR3 for beta chain variable domain of TCR clone 108750 (TRBV7-9, TRBJ2-7)
CASSSSGLAVYEQYF

SEQ ID NO: 217501 - protein, 15 aa, Homo sapiens
  CDR3 for alpha chain variable domain of TCR clone 108751 (TRAV35, TRAJ52)
CAGPRGGTSYGKLTF

SEQ ID NO: 217502 - protein, 14 aa, Homo sapiens
  CDR3 for beta chain variable domain of TCR clone 108751 (TRBV11-3, TRBJ2-1)
CASSATTSGSIQFF

SEQ ID NO: 217503 - protein, 18 aa, Homo sapiens
  CDR3 for alpha chain variable domain of TCR clone 108752 (TRAV21, TRAJ52)
CAVGPSPAGGTSYGKLTF

SEQ ID NO: 217504 - protein, 15 aa, Homo sapiens
  CDR3 for beta chain variable domain of TCR clone 108752 (TRBV20-1, TRBJ2-3)
CSAEPLAGHGDTQYF

SEQ ID NO: 217505 - protein, 13 aa, Homo sapiens
  CDR3 for alpha chain variable domain of TCR clone 108753 (TRAV23/DV6, TRAJ15)
CAALPAGRNCSDL

SEQ ID NO: 217506 - protein, 14 aa, Homo sapiens
  CDR3 for beta chain variable domain of TCR clone 108753 (TRBV7-9, TRBJ1-2)
CASSRQGANYGCTF

SEQ ID NO: 217507 - protein, 13 aa, Homo sapiens
  CDR3 for alpha chain variable domain of TCR clone 108754 (TRAV1-2, TRAJ13)
CAVTSGGYQKVTF

SEQ ID NO: 217508 - protein, 14 aa, Homo sapiens
  CDR3 for beta chain variable domain of TCR clone 108754 (TRBV4-1, TRBJ1-5)
CASSPKGDNQPQHF

SEQ ID NO: 217509 - protein, 12 aa, Homo sapiens
  CDR3 for alpha chain variable domain of TCR clone 108755 (TRAV12-2, TRAJ31)
CAVNTPDARLML

SEQ ID NO: 217510 - protein, 15 aa, Homo sapiens
  CDR3 for beta chain variable domain of TCR clone 108755 (TRBV4-2, TRBJ1-1)
CASSQDQGLNTEAFF

SEQ ID NO: 217511 - protein, 17 aa, Homo sapiens
  CDR3 for alpha chain variable domain of TCR clone 108756 (TRAV4, TRAJ18)
CLVGERSVGSTLGRLYC

SEQ ID NO: 217512 - protein, 14 aa, Homo sapiens
  CDR3 for beta chain variable domain of TCR clone 108756 (TRBV6-5, TRBJ1-2)
CASSYDGTGGGYTF

SEQ ID NO: 217513 - protein, 14 aa, Homo sapiens
  CDR3 for alpha chain variable domain of TCR clone 108757 (TRAV3, TRAJ9)
CAVRDDTGGFKTIF

SEQ ID NO: 217514 - protein, 18 aa, Homo sapiens
  CDR3 for beta chain variable domain of TCR clone 108757 (TRBV20-1, TRBJ2-6)
CSAETTPTHGSGANVLAF

SEQ ID NO: 217515 - protein, 12 aa, Homo sapiens
  CDR3 for alpha chain variable domain of TCR clone 108758 (TRAV12-3, TRAJ17)
CAMTLTGNKLTF

SEQ ID NO: 217516 - protein, 15 aa, Homo sapiens
  CDR3 for beta chain variable domain of TCR clone 108758 (TRBV20-1, TRBJ2-7)
CSARDRVAGMDDQYF

SEQ ID NO: 217517 - protein, 13 aa, Homo sapiens
  CDR3 for alpha chain variable domain of TCR clone 108759 (TRAV27, TRAJ11)
CAGARSGYSTLTF

SEQ ID NO: 217518 - protein, 13 aa, Homo sapiens
  CDR3 for beta chain variable domain of TCR clone 108759 (TRBV7-6, TRBJ1-2)
CASSLVADYGYTF

SEQ ID NO: 217519 - protein, 16 aa, Homo sapiens
  CDR3 for alpha chain variable domain of TCR clone 108760 (TRAV21, TRAJ17)
CAVRPGEEAACNKLTF

SEQ ID NO: 217520 - protein, 16 aa, Homo sapiens
  CDR3 for beta chain variable domain of TCR clone 108760 (TRBV2, TRBJ2-7)
CASSEPWTGPSYEQYF

SEQ ID NO: 217521 - protein, 13 aa, Homo sapiens
  CDR3 for alpha chain variable domain of TCR clone 108761 (TRAV12-2, TRAJ10)
CAVPTGGGNKLTF

SEQ ID NO: 217522 - protein, 14 aa, Homo sapiens
  CDR3 for beta chain variable domain of TCR clone 108761 (TRBV25-1, TRBJ1-1)
CASTHLGGNTEALF

SEQ ID NO: 217523 - protein, 14 aa, Homo sapiens
  CDR3 for alpha chain variable domain of TCR clone 108762 (TRAV13-1, TRAJ35)
CAASKGGFGNVLHC

SEQ ID NO: 217524 - protein, 15 aa, Homo sapiens
  CDR3 for beta chain variable domain of TCR clone 108762 (TRBV27, TRBJ2-1)
CASSNVGGSSNEQFF

SEQ ID NO: 217525 - protein, 14 aa, Homo sapiens
  CDR3 for alpha chain variable domain of TCR clone 108763 (TRAV8-2, TRAJ4)
CVVSPSGGYNKLIF

SEQ ID NO: 217526 - protein, 13 aa, Homo sapiens
  CDR3 for beta chain variable domain of TCR clone 108763 (TRBV12-4, TRBJ2-5)
CASSLFRRETQYF

SEQ ID NO: 217527 - protein, 17 aa, Homo sapiens
  CDR3 for alpha chain variable domain of TCR clone 108764 (TRAV3, TRAJ6)
CAVRDGPRAGGSYIPTF

SEQ ID NO: 217528 - protein, 13 aa, Homo sapiens
  CDR3 for beta chain variable domain of TCR clone 108764 (TRBV27, TRBJ1-1)
CASSLSIGAEASF

SEQ ID NO: 217529 - protein, 15 aa, Homo sapiens
  CDR3 for alpha chain variable domain of TCR clone 108765 (TRAV13-1, TRAJ44)
CAASRGCGTASKLTF

SEQ ID NO: 217530 - protein, 14 aa, Homo sapiens
  CDR3 for beta chain variable domain of TCR clone 108765 (TRBV7-2, TRBJ2-5)
CASSPRGSSETQYF

SEQ ID NO: 217531 - protein, 16 aa, Homo sapiens
  CDR3 for alpha chain variable domain of TCR clone 108766 (TRAV30, TRAJ24)
CGTEIVDADSWGKFQF

SEQ ID NO: 217532 - protein, 15 aa, Homo sapiens
  CDR3 for beta chain variable domain of TCR clone 108766 (TRBV28, TRBJ1-5)
CASSRPRTGNQPQHF

SEQ ID NO: 217533 - protein, 14 aa, Homo sapiens
  CDR3 for alpha chain variable domain of TCR clone 108767 (TRAV1-2, TRAJ8)
CAVREDTGFQKLVF

SEQ ID NO: 217534 - protein, 15 aa, Homo sapiens
  CDR3 for beta chain variable domain of TCR clone 108767 (TRBV6-3, TRBJ2-7)
CGSSSPGTVFYEQYF

SEQ ID NO: 217535 - protein, 13 aa, Homo sapiens
  CDR3 for alpha chain variable domain of TCR clone 108768 (TRAV8-3, TRAJ43)
CAVGPDNNNDMRF

SEQ ID NO: 217536 - protein, 12 aa, Homo sapiens
  CDR3 for beta chain variable domain of TCR clone 108768 (TRBV7-2, TRBJ1-6)
CASSLSSSPLHC

SEQ ID NO: 217537 - protein, 15 aa, Homo sapiens
  CDR3 for alpha chain variable domain of TCR clone 108769 (TRAV25, TRAJ52)
CAGTSGGTSHGKLTF

SEQ ID NO: 217538 - protein, 16 aa, Homo sapiens
  CDR3 for beta chain variable domain of TCR clone 108769 (TRBV15, TRBJ1-2)
CATSRGPRTGGGGYTF

SEQ ID NO: 217539 - protein, 18 aa, Homo sapiens
  CDR3 for alpha chain variable domain of TCR clone 108770 (TRAV8-4, TRAJ52)
CAVTRANAGGTSYGKLTL

SEQ ID NO: 217540 - protein, 20 aa, Homo sapiens
  CDR3 for beta chain variable domain of TCR clone 108770 (TRBV19, TRBJ2-1)
CASSISRTVTSTRLNNEQFF

SEQ ID NO: 217541 - protein, 20 aa, Homo sapiens
  CDR3 for alpha chain variable domain of TCR clone 108771 (TRAV12-1, TRAJ42)
SSVIQPPTSVKGGSQGNLIF

SEQ ID NO: 217542 - protein, 13 aa, Homo sapiens
  CDR3 for beta chain variable domain of TCR clone 108771 (TRBV7-8, TRBJ2-7)
CASSFEITYEQYF

SEQ ID NO: 217543 - protein, 18 aa, Homo sapiens
  CDR3 for alpha chain variable domain of TCR clone 108772 (TRAV12-3, TRAJ52)
CAMSRPNAGGTSYGKLTF

SEQ ID NO: 217544 - protein, 17 aa, Homo sapiens
  CDR3 for beta chain variable domain of TCR clone 108772 (TRBV7-3, TRBJ2-3)
CASSLMKRMRGADTQYF

SEQ ID NO: 217545 - protein, 11 aa, Homo sapiens
  CDR3 for alpha chain variable domain of TCR clone 108773 (TRAV2, TRAJ13)
CASGGYQKVTF

SEQ ID NO: 217546 - protein, 16 aa, Homo sapiens
  CDR3 for beta chain variable domain of TCR clone 108773 (TRBV19, TRBJ2-1)
CACSMGGGSSYNEQFF

SEQ ID NO: 217547 - protein, 14 aa, Homo sapiens
  CDR3 for alpha chain variable domain of TCR clone 108774 (TRAV17, TRAJ15)
CATGPNQAGTALIF

SEQ ID NO: 217548 - protein, 15 aa, Homo sapiens
  CDR3 for beta chain variable domain of TCR clone 108774 (TRBV11-2, TRBJ2-2)
CASSSDKVNAGELFF

SEQ ID NO: 217549 - protein, 14 aa, Homo sapiens
  CDR3 for alpha chain variable domain of TCR clone 108775 (TRAV12-1, TRAJ13)
CVVIDSGGYQKVTF

SEQ ID NO: 217550 - protein, 16 aa, Homo sapiens
  CDR3 for beta chain variable domain of TCR clone 108775 (TRBV27, TRBJ2-2)
CASSFRGLVRTGELFF

SEQ ID NO: 217551 - protein, 15 aa, Homo sapiens
  CDR3 for alpha chain variable domain of TCR clone 108776 (TRAV14/DV4, TRAJ22)
CAMREGWTTARQLTF

SEQ ID NO: 217552 - protein, 14 aa, Homo sapiens
  CDR3 for beta chain variable domain of TCR clone 108776 (TRBV5-5, TRBJ1-5)
CASSGQGVGQPQHF

SEQ ID NO: 217553 - protein, 11 aa, Homo sapiens
  CDR3 for alpha chain variable domain of TCR clone 108777 (TRAV12-3, TRAJ49)
CAANTGNQSYF

SEQ ID NO: 217554 - protein, 12 aa, Homo sapiens
  CDR3 for beta chain variable domain of TCR clone 108777 (TRBV6-3, TRBJ2-7)
CASSEPGFEQYF

SEQ ID NO: 217555 - protein, 16 aa, Homo sapiens
  CDR3 for alpha chain variable domain of TCR clone 108778 (TRAV8-2, TRAJ7)
CVVSEGPYYGNNRLAF

SEQ ID NO: 217556 - protein, 17 aa, Homo sapiens
  CDR3 for beta chain variable domain of TCR clone 108778 (TRBV13, TRBJ2-3)
CASSLSRVAGGRNTQYF

SEQ ID NO: 217557 - protein, 15 aa, Homo sapiens
  CDR3 for alpha chain variable domain of TCR clone 108779 (TRAV8-3, TRAJ7)
CAVGSISYGNNRLAF

SEQ ID NO: 217558 - protein, 13 aa, Homo sapiens
  CDR3 for beta chain variable domain of TCR clone 108779 (TRBV7-3, TRBJ1-1)
CASSQDWGAEAFF

SEQ ID NO: 217559 - protein, 15 aa, Homo sapiens
  CDR3 for alpha chain variable domain of TCR clone 108780 (TRAV17, TRAJ57)
CATGPSQGGSEKLVF

SEQ ID NO: 217560 - protein, 16 aa, Homo sapiens
  CDR3 for beta chain variable domain of TCR clone 108780 (TRBV12-4, TRBJ1-5)
CASSRPVGGSHQPQHF

SEQ ID NO: 217561 - protein, 10 aa, Homo sapiens
  CDR3 for alpha chain variable domain of TCR clone 108781 (TRAV23/DV6, TRAJ9)
CASKYWRLQS

SEQ ID NO: 217562 - protein, 14 aa, Homo sapiens
  CDR3 for beta chain variable domain of TCR clone 108781 (TRBV6-1, TRBJ2-7)
CASTRTGDYYEQYF

SEQ ID NO: 217563 - protein, 15 aa, Homo sapiens
  CDR3 for alpha chain variable domain of TCR clone 108782 (TRAV29/DV5, TRAJ29)
CAASERSSGNTPLVF

SEQ ID NO: 217564 - protein, 17 aa, Homo sapiens
  CDR3 for beta chain variable domain of TCR clone 108782 (TRBV4-1, TRBJ1-4)
CASSQEGPRGVEEKLFL

SEQ ID NO: 217565 - protein, 13 aa, Homo sapiens
  CDR3 for alpha chain variable domain of TCR clone 108783 (TRAV2, TRAJ10)
CAVETGGGNKITF

SEQ ID NO: 217566 - protein, 14 aa, Homo sapiens
  CDR3 for beta chain variable domain of TCR clone 108783 (TRBV20-1, TRBJ2-3)
CSAGGRRGTDTQYF

SEQ ID NO: 217567 - protein, 15 aa, Homo sapiens
  CDR3 for alpha chain variable domain of TCR clone 108784 (TRAV2, TRAJ9)
CAVEDRGTGGFKTIF

SEQ ID NO: 217568 - protein, 16 aa, Homo sapiens
  CDR3 for beta chain variable domain of TCR clone 108784 (TRBV24-1, TRBJ2-3)
CATSDPGTGATDTQYF

SEQ ID NO: 217569 - protein, 16 aa, Homo sapiens
  CDR3 for alpha chain variable domain of TCR clone 108785 (TRAV16, TRAJ4)
CALSRMFSGGYNKLIF

SEQ ID NO: 217570 - protein, 16 aa, Homo sapiens
  CDR3 for beta chain variable domain of TCR clone 108785 (TRBV20-1, TRBJ1-2)
CSASMGQGVANYGYTF

SEQ ID NO: 217571 - protein, 18 aa, Homo sapiens
  CDR3 for alpha chain variable domain of TCR clone 108786 (TRAV29/DV5, TRAJ52)
CAAGFRGAGGTSYGKLTF

SEQ ID NO: 217572 - protein, 16 aa, Homo sapiens
  CDR3 for beta chain variable domain of TCR clone 108786 (TRBV7-3, TRBJ2-2)
CAISLKRGTLSGELFF

SEQ ID NO: 217573 - protein, 15 aa, Homo sapiens
  CDR3 for alpha chain variable domain of TCR clone 108787 (TRAV3, TRAJ17)
CAVSPKEAAGNKLTF

SEQ ID NO: 217574 - protein, 14 aa, Homo sapiens
  CDR3 for beta chain variable domain of TCR clone 108787 (TRBV5-1, TRBJ2-3)
CASSVFGPTDTQYF

SEQ ID NO: 217575 - protein, 13 aa, Homo sapiens
  CDR3 for alpha chain variable domain of TCR clone 108788 (TRAV12-2, TRAJ42)
CAVKRGSKGNLIF

SEQ ID NO: 217576 - protein, 16 aa, Homo sapiens
  CDR3 for beta chain variable domain of TCR clone 108788 (TRBV9, TRBJ2-2)
CASSAMGKGNTGELFF

SEQ ID NO: 217577 - protein, 14 aa, Homo sapiens
  CDR3 for alpha chain variable domain of TCR clone 108789 (TRAV12-1, TRAJ12)
CVVISMDSSYKLIF

SEQ ID NO: 217578 - protein, 13 aa, Homo sapiens
  CDR3 for beta chain variable domain of TCR clone 108789 (TRBV10-1, TRBJ2-1)
CASSAGPDNEQFF

SEQ ID NO: 217579 - protein, 14 aa, Homo sapiens
  CDR3 for alpha chain variable domain of TCR clone 108790 (TRAV1-2, TRAJ8)
CAVREDTGFQKLLF

SEQ ID NO: 217580 - protein, 12 aa, Homo sapiens
  CDR3 for beta chain variable domain of TCR clone 108790 (TRBV27, TRBJ2-2)
CASKLFTGELFF

SEQ ID NO: 217581 - protein, 15 aa, Homo sapiens
  CDR3 for alpha chain variable domain of TCR clone 108791 (TRAV12-3, TRAJ6)
CAMSATTGGSYIPTF

SEQ ID NO: 217582 - protein, 17 aa, Homo sapiens
  CDR3 for beta chain variable domain of TCR clone 108791 (TRBV4-1, TRBJ2-3)
CASSQGYVSGGTDTQYF

SEQ ID NO: 217583 - protein, 13 aa, Homo sapiens
  CDR3 for alpha chain variable domain of TCR clone 108792 (TRAV14/DV4, TRAJ16)
CAMRGTDGQKLLF

SEQ ID NO: 217584 - protein, 18 aa, Homo sapiens
  CDR3 for beta chain variable domain of TCR clone 108792 (TRBV4-1, TRBJ2-3)
CASSHKLAGGRSTDTQYF

SEQ ID NO: 217585 - protein, 16 aa, Homo sapiens
  CDR3 for alpha chain variable domain of TCR clone 108793 (TRAV3, TRAJ37)
CAVRGKGYGNTGKLIF

SEQ ID NO: 217586 - protein, 16 aa, Homo sapiens
  CDR3 for beta chain variable domain of TCR clone 108793 (TRBV12-5, TRBJ2-5)
CASGPRTSGSQETQYF

SEQ ID NO: 217587 - protein, 15 aa, Homo sapiens
  CDR3 for alpha chain variable domain of TCR clone 108794 (TRAV2, TRAJ11)
CAVGGRNSGYSTLTF

SEQ ID NO: 217588 - protein, 15 aa, Homo sapiens
  CDR3 for beta chain variable domain of TCR clone 108794 (TRBV2, TRBJ2-3)
CASSDFEKATDTQYF

SEQ ID NO: 217589 - protein, 12 aa, Homo sapiens
  CDR3 for alpha chain variable domain of TCR clone 108795 (TRAV12-1, )
CVVNSWISRTLT

SEQ ID NO: 217590 - protein, 14 aa, Homo sapiens
  CDR3 for beta chain variable domain of TCR clone 108795 (TRBV7-6, TRBJ2-3)
CASSLGTVTDTQYF

SEQ ID NO: 217591 - protein, 16 aa, Homo sapiens
  CDR3 for alpha chain variable domain of TCR clone 108796 (TRAV3, TRAJ3)
CAVRDRAKISASKIIF

SEQ ID NO: 217592 - protein, 16 aa, Homo sapiens
  CDR3 for beta chain variable domain of TCR clone 108796 (TRBV20-1, TRBJ2-4)
CSATSLAELAKNIQYF

SEQ ID NO: 217593 - protein, 13 aa, Homo sapiens
  CDR3 for alpha chain variable domain of TCR clone 108797 (TRAV26-1, TRAJ30)
CIVNMDRDDKIIF

SEQ ID NO: 217594 - protein, 16 aa, Homo sapiens
  CDR3 for beta chain variable domain of TCR clone 108797 (TRBV16, TRBJ2-7)
CASSRPAGGSSYEQYF

SEQ ID NO: 217595 - protein, 12 aa, Homo sapiens
  CDR3 for alpha chain variable domain of TCR clone 108798 (TRAV12-3, TRAJ17)
CAMTLTGNKLTF

SEQ ID NO: 217596 - protein, 14 aa, Homo sapiens
  CDR3 for beta chain variable domain of TCR clone 108798 (TRBV11-2, TRBJ2-7)
CASSGQGALDEQYF

SEQ ID NO: 217597 - protein, 14 aa, Homo sapiens
  CDR3 for alpha chain variable domain of TCR clone 108799 (TRAV17, TRAJ45)
CATASGGGVDGLTF

SEQ ID NO: 217598 - protein, 15 aa, Homo sapiens
  CDR3 for beta chain variable domain of TCR clone 108799 (TRBV11-2, TRBJ2-1)
CASSRNRGLMYEQFF

SEQ ID NO: 217599 - protein, 13 aa, Homo sapiens
  CDR3 for alpha chain variable domain of TCR clone 108800 (TRAV12-3, TRAJ5)
CAMIYTGRSALTF

SEQ ID NO: 217600 - protein, 12 aa, Homo sapiens
  CDR3 for beta chain variable domain of TCR clone 108800 (TRBV18, TRBJ1-4)
CASSPSREKLFF

SEQ ID NO: 217601 - protein, 14 aa, Homo sapiens
  CDR3 for alpha chain variable domain of TCR clone 108801 (TRAV12-2, TRAJ40)
CAVKIPSGTYQYIF

SEQ ID NO: 217602 - protein, 14 aa, Homo sapiens
  CDR3 for beta chain variable domain of TCR clone 108801 (TRBV7-8, TRBJ2-7)
CASSPRDRVYEQYF

SEQ ID NO: 217603 - protein, 16 aa, Homo sapiens
  CDR3 for alpha chain variable domain of TCR clone 108802 (TRAV27, TRAJ53)
CAAPEGSGGSNYKLTF

SEQ ID NO: 217604 - protein, 15 aa, Homo sapiens
  CDR3 for beta chain variable domain of TCR clone 108802 (TRBV20-1, TRBJ1-1)
CSASRGVTGNTEALF

SEQ ID NO: 217605 - protein, 19 aa, Homo sapiens
  CDR3 for alpha chain variable domain of TCR clone 108803 (TRAV26-1, TRAJ50)
CCVLLHRQHPKTSYDKVIF

SEQ ID NO: 217606 - protein, 17 aa, Homo sapiens
  CDR3 for beta chain variable domain of TCR clone 108803 (TRBV4-1, TRBJ1-4)
CASSQEGPRGVEEKLFF

SEQ ID NO: 217607 - protein, 10 aa, Homo sapiens
  CDR3 for alpha chain variable domain of TCR clone 108804 (TRAV21, TRAJ31)
CAVDNARLMF

SEQ ID NO: 217608 - protein, 13 aa, Homo sapiens
  CDR3 for beta chain variable domain of TCR clone 108804 (TRBV4-1, TRBJ1-1)
CASSRKMNSEAFF

SEQ ID NO: 217609 - protein, 14 aa, Homo sapiens
  CDR3 for alpha chain variable domain of TCR clone 108805 (TRAV8-3, TRAJ12)
CAVGARDSSYKLIF

SEQ ID NO: 217610 - protein, 13 aa, Homo sapiens
  CDR3 for beta chain variable domain of TCR clone 108805 (TRBV20-1, TRBJ1-1)
CSARGGGNTEAFF

SEQ ID NO: 217611 - protein, 12 aa, Homo sapiens
  CDR3 for alpha chain variable domain of TCR clone 108806 (TRAV2, TRAJ34)
CAVERNTDKLIF

SEQ ID NO: 217612 - protein, 14 aa, Homo sapiens
  CDR3 for beta chain variable domain of TCR clone 108806 (TRBV7-9, TRBJ2-1)
CASSYNSGYNEQFF

SEQ ID NO: 217613 - protein, 15 aa, Homo sapiens
  CDR3 for alpha chain variable domain of TCR clone 108807 (TRAV3, TRAJ32)
CAVSSYGGATNKLVF

SEQ ID NO: 217614 - protein, 13 aa, Homo sapiens
  CDR3 for beta chain variable domain of TCR clone 108807 (TRBV20-1, TRBJ2-7)
CSARPSTNYEQYF

SEQ ID NO: 217615 - protein, 15 aa, Homo sapiens
  CDR3 for alpha chain variable domain of TCR clone 108808 (TRAV13-1, TRAJ32)
CAARNGWWCYKQAHL

SEQ ID NO: 217616 - protein, 17 aa, Homo sapiens
  CDR3 for beta chain variable domain of TCR clone 108808 (TRBV15, TRBJ1-2)
CATSGREIDVVNYGYTF

SEQ ID NO: 217617 - protein, 18 aa, Homo sapiens
  CDR3 for alpha chain variable domain of TCR clone 108809 (TRAV13-1, TRAJ52)
CAASKRSAGGTSYGKLTF

SEQ ID NO: 217618 - protein, 13 aa, Homo sapiens
  CDR3 for beta chain variable domain of TCR clone 108809 (TRBV12-4, TRBJ1-2)
CASSLRQGKCYTF

SEQ ID NO: 217619 - protein, 15 aa, Homo sapiens
  CDR3 for alpha chain variable domain of TCR clone 108810 (TRAV8-1, TRAJ23)
CAVNSHYNQGGELIF

SEQ ID NO: 217620 - protein, 15 aa, Homo sapiens
  CDR3 for beta chain variable domain of TCR clone 108810 (TRBV11-2, TRBJ1-6)
CASTLRGTGNSPLHF

SEQ ID NO: 217621 - protein, 12 aa, Homo sapiens
  CDR3 for alpha chain variable domain of TCR clone 108811 (TRAV8-3, TRAJ26)
CAGDNYGQNFVF

SEQ ID NO: 217622 - protein, 14 aa, Homo sapiens
  CDR3 for beta chain variable domain of TCR clone 108811 (TRBV20-1, TRBJ1-1)
SAVLHLGGGTEAFF

SEQ ID NO: 217623 - protein, 16 aa, Homo sapiens
  CDR3 for alpha chain variable domain of TCR clone 108812 (TRAV30, TRAJ24)
CGTEIVDADSWGKFQF

SEQ ID NO: 217624 - protein, 13 aa, Homo sapiens
  CDR3 for beta chain variable domain of TCR clone 108812 (TRBV3-1, TRBJ1-1)
CASSPGVITEAFF

SEQ ID NO: 217625 - protein, 11 aa, Homo sapiens
  CDR3 for alpha chain variable domain of TCR clone 108813 (TRAV13-1, TRAJ6)
CATLGSYIPTF

SEQ ID NO: 217626 - protein, 15 aa, Homo sapiens
  CDR3 for beta chain variable domain of TCR clone 108813 (TRBV19, TRBJ1-1)
CASTSGQIQNTEAFF

SEQ ID NO: 217627 - protein, 19 aa, Homo sapiens
  CDR3 for alpha chain variable domain of TCR clone 108814 (TRAV17, TRAJ40)
TASRAADTASYFCASKYIF

SEQ ID NO: 217628 - protein, 17 aa, Homo sapiens
  CDR3 for beta chain variable domain of TCR clone 108814 (TRBV11-2, TRBJ2-4)
CASSFLARGGAGDIQYF

SEQ ID NO: 217629 - protein, 14 aa, Homo sapiens
  CDR3 for alpha chain variable domain of TCR clone 108815 (TRAV12-2, TRAJ17)
CAVLFKAAGNKLTF

SEQ ID NO: 217630 - protein, 15 aa, Homo sapiens
  CDR3 for beta chain variable domain of TCR clone 108815 (TRBV28, TRBJ2-5)
CASSPGQGSIETQYF

SEQ ID NO: 217631 - protein, 13 aa, Homo sapiens
  CDR3 for alpha chain variable domain of TCR clone 108816 (TRAV3, TRAJ3)
CAVADSSSSKIIF

SEQ ID NO: 217632 - protein, 16 aa, Homo sapiens
  CDR3 for beta chain variable domain of TCR clone 108816 (TRBV5-1, TRBJ2-3)
CASSLGLAVYTDTQYF

SEQ ID NO: 217633 - protein, 13 aa, Homo sapiens
  CDR3 for alpha chain variable domain of TCR clone 108817 (TRAV17, TRAJ5)
CALRGTGRRALTF

SEQ ID NO: 217634 - protein, 17 aa, Homo sapiens
  CDR3 for beta chain variable domain of TCR clone 108817 (TRBV3-1, TRBJ2-2)
CASSQFRDKVDTGELFF

SEQ ID NO: 217635 - protein, 15 aa, Homo sapiens
  CDR3 for alpha chain variable domain of TCR clone 108818 (TRAV27, TRAJ38)
CAARRNAGNNRKLIW

SEQ ID NO: 217636 - protein, 13 aa, Homo sapiens
  CDR3 for beta chain variable domain of TCR clone 108818 (TRBV12-5, TRBJ2-3)
CASGDRESDTQYF

SEQ ID NO: 217637 - protein, 14 aa, Homo sapiens
  CDR3 for alpha chain variable domain of TCR clone 108819 (TRAV23/DV6, TRAJ24)
CAAILSDSWGKLQF

SEQ ID NO: 217638 - protein, 16 aa, Homo sapiens
  CDR3 for beta chain variable domain of TCR clone 108819 (TRBV7-9, TRBJ2-6)
CASSLKGPLRANVLTF

SEQ ID NO: 217639 - protein, 15 aa, Homo sapiens
  CDR3 for alpha chain variable domain of TCR clone 108820 (TRAV12-3, TRAJ13)
CAMSARSGGYQKVTF

SEQ ID NO: 217640 - protein, 16 aa, Homo sapiens
  CDR3 for beta chain variable domain of TCR clone 108820 (TRBV12-4, TRBJ1-4)
CASSLKGIGHGEKLFF

SEQ ID NO: 217641 - protein, 13 aa, Homo sapiens
  CDR3 for alpha chain variable domain of TCR clone 108821 (TRAV14/DV4, TRAJ22)
CAMRDLSAGQLTF

SEQ ID NO: 217642 - protein, 18 aa, Homo sapiens
  CDR3 for beta chain variable domain of TCR clone 108821 (TRBV19, TRBJ1-5)
CASSKGQVSIHSNQPQHF

SEQ ID NO: 217643 - protein, 13 aa, Homo sapiens
  CDR3 for alpha chain variable domain of TCR clone 108822 (TRAV8-3, TRAJ48)
CAVVPFGNEKLTF

SEQ ID NO: 217644 - protein, 15 aa, Homo sapiens
  CDR3 for beta chain variable domain of TCR clone 108822 (TRBV11-2, TRBJ2-1)
CASSYPSTRYNEQFF

SEQ ID NO: 217645 - protein, 15 aa, Homo sapiens
  CDR3 for alpha chain variable domain of TCR clone 108823 (TRAV21, TRAJ37)
CAVRPTLSNTGKLIF

SEQ ID NO: 217646 - protein, 17 aa, Homo sapiens
  CDR3 for beta chain variable domain of TCR clone 108823 (TRBV25-1, TRBJ2-1)
CASSAYGQGRGVYEQFF

SEQ ID NO: 217647 - protein, 11 aa, Homo sapiens
  CDR3 for alpha chain variable domain of TCR clone 108824 (TRAV2, TRAJ33)
CAVDSNYQLIW

SEQ ID NO: 217648 - protein, 11 aa, Homo sapiens
  CDR3 for beta chain variable domain of TCR clone 108824 (TRBV6-5, TRBJ1-6)
CASSPRDPQFT

SEQ ID NO: 217649 - protein, 11 aa, Homo sapiens
  CDR3 for alpha chain variable domain of TCR clone 108825 (TRAV1-2, TRAJ20)
CAVANDYKLSF

SEQ ID NO: 217650 - protein, 16 aa, Homo sapiens
  CDR3 for beta chain variable domain of TCR clone 108825 (TRBV13, TRBJ2-2)
CASSPRTGEHTGELFF

SEQ ID NO: 217651 - protein, 14 aa, Homo sapiens
  CDR3 for alpha chain variable domain of TCR clone 108826 (TRAV8-1, TRAJ23)
CAVGTYNQGGKLIF

SEQ ID NO: 217652 - protein, 16 aa, Homo sapiens
  CDR3 for beta chain variable domain of TCR clone 108826 (TRBV18, TRBJ1-5)
CASSPSTGNSYQPQHF

SEQ ID NO: 217653 - protein, 15 aa, Homo sapiens
  CDR3 for alpha chain variable domain of TCR clone 108827 (TRAV12-2, TRAJ53)
CAVNGGGGSNYKLTF

SEQ ID NO: 217654 - protein, 12 aa, Homo sapiens
  CDR3 for beta chain variable domain of TCR clone 108827 (TRBV7-9, TRBJ2-7)
CATRTDAYEQYF

SEQ ID NO: 217655 - protein, 16 aa, Homo sapiens
  CDR3 for alpha chain variable domain of TCR clone 108828 (TRAV16, TRAJ4)
CALSRMFSGGYNKLIF

SEQ ID NO: 217656 - protein, 15 aa, Homo sapiens
  CDR3 for beta chain variable domain of TCR clone 108828 (TRBV11-2, TRBJ1-1)
CASSSRSSLLLSLDK

SEQ ID NO: 217657 - protein, 17 aa, Homo sapiens
  CDR3 for alpha chain variable domain of TCR clone 108829 (TRAV21, TRAJ52)
CAVGANAGGTSYGKLTF

SEQ ID NO: 217658 - protein, 13 aa, Homo sapiens
  CDR3 for beta chain variable domain of TCR clone 108829 (TRBV5-1, TRBJ1-2)
CASSLQGNYGYTL

SEQ ID NO: 217659 - protein, 15 aa, Homo sapiens
  CDR3 for alpha chain variable domain of TCR clone 108830 (TRAV21, TRAJ53)
CATLNSGGSNYKLTF

SEQ ID NO: 217660 - protein, 14 aa, Homo sapiens
  CDR3 for beta chain variable domain of TCR clone 108830 (TRBV5-7, TRBJ2-4)
CASTLSGVKNIQYF

SEQ ID NO: 217661 - protein, 14 aa, Homo sapiens
  CDR3 for alpha chain variable domain of TCR clone 108831 (TRAV12-3, TRAJ9)
CAMSPNTGGFKTIF

SEQ ID NO: 217662 - protein, 12 aa, Homo sapiens
  CDR3 for beta chain variable domain of TCR clone 108831 (TRBV18, TRBJ2-3)
CASSPLSDTQYF

SEQ ID NO: 217663 - protein, 14 aa, Homo sapiens
  CDR3 for alpha chain variable domain of TCR clone 108832 (TRAV23/DV6, TRAJ6)
CAASRSGGSYIPTF

SEQ ID NO: 217664 - protein, 17 aa, Homo sapiens
  CDR3 for beta chain variable domain of TCR clone 108832 (TRBV20-1, TRBJ2-1)
CSASASGLAGSYNEQSF

SEQ ID NO: 217665 - protein, 15 aa, Homo sapiens
  CDR3 for alpha chain variable domain of TCR clone 108833 (TRAV8-3, TRAJ11)
CAVGLLNSGYSTLPF

SEQ ID NO: 217666 - protein, 15 aa, Homo sapiens
  CDR3 for beta chain variable domain of TCR clone 108833 (TRBV13, TRBJ2-1)
CASSLLSGLNNEQFF

SEQ ID NO: 217667 - protein, 15 aa, Homo sapiens
  CDR3 for alpha chain variable domain of TCR clone 108834 (TRAV12-1, TRAJ37)
CVVNIMGGNTGKLIF

SEQ ID NO: 217668 - protein, 14 aa, Homo sapiens
  CDR3 for beta chain variable domain of TCR clone 108834 (TRBV12-4, TRBJ1-1)
CASSPGTGGTEAFF

SEQ ID NO: 217669 - protein, 15 aa, Homo sapiens
  CDR3 for alpha chain variable domain of TCR clone 108835 (TRAV8-3, TRAJ15)
CAVGAPNQAGTALIC

SEQ ID NO: 217670 - protein, 14 aa, Homo sapiens
  CDR3 for beta chain variable domain of TCR clone 108835 (TRBV20-1, TRBJ2-1)
CSPNDEASYNEQFF

SEQ ID NO: 217671 - protein, 12 aa, Homo sapiens
  CDR3 for alpha chain variable domain of TCR clone 108836 (TRAV13-2, TRAJ8)
CAPWLGFQKLVF

SEQ ID NO: 217672 - protein, 14 aa, Homo sapiens
  CDR3 for beta chain variable domain of TCR clone 108836 (TRBV18, TRBJ1-5)
CASSRQQRNQPQHY

SEQ ID NO: 217673 - protein, 16 aa, Homo sapiens
  CDR3 for alpha chain variable domain of TCR clone 108837 (TRAV8-3, TRAJ10)
CAVCPGVTGGGNKLTF

SEQ ID NO: 217674 - protein, 13 aa, Homo sapiens
  CDR3 for beta chain variable domain of TCR clone 108837 (TRBV18, TRBJ1-1)
CASSPGPSGEAFF

SEQ ID NO: 217675 - protein, 13 aa, Homo sapiens
  CDR3 for alpha chain variable domain of TCR clone 108838 (TRAV26-2, TRAJ37)
CIRGSSNTGKLIF

SEQ ID NO: 217676 - protein, 15 aa, Homo sapiens
  CDR3 for beta chain variable domain of TCR clone 108838 (TRBV9, TRBJ1-6)
CASSVAGTGDSPLHF

SEQ ID NO: 217677 - protein, 14 aa, Homo sapiens
  CDR3 for alpha chain variable domain of TCR clone 108839 (TRAV13-1, TRAJ35)
CAASKGGFGTVLHC

SEQ ID NO: 217678 - protein, 13 aa, Homo sapiens
  CDR3 for beta chain variable domain of TCR clone 108839 (TRBV7-3, TRBJ1-1)
CASSQDWGAEAFF

SEQ ID NO: 217679 - protein, 12 aa, Homo sapiens
  CDR3 for alpha chain variable domain of TCR clone 108840 (TRAV22, TRAJ29)
CAPPSGNTPLAF

SEQ ID NO: 217680 - protein, 14 aa, Homo sapiens
  CDR3 for beta chain variable domain of TCR clone 108840 (TRBV11-2, TRBJ2-7)
CASSLGAGAYEQYF

SEQ ID NO: 217681 - protein, 14 aa, Homo sapiens
  CDR3 for alpha chain variable domain of TCR clone 108841 (TRAV8-6, TRAJ29)
CAVGRASGNTPLVF

SEQ ID NO: 217682 - protein, 13 aa, Homo sapiens
  CDR3 for beta chain variable domain of TCR clone 108841 (TRBV19, TRBJ1-5)
CASSEGSNQPQHF

SEQ ID NO: 217683 - protein, 14 aa, Homo sapiens
  CDR3 for alpha chain variable domain of TCR clone 108842 (TRAV12-2, TRAJ13)
CAVKKTGGYQKATF

SEQ ID NO: 217684 - protein, 18 aa, Homo sapiens
  CDR3 for beta chain variable domain of TCR clone 108842 (TRBV24-1, TRBJ2-2)
CATSDSGQGTANTGELFF

SEQ ID NO: 217685 - protein, 13 aa, Homo sapiens
  CDR3 for alpha chain variable domain of TCR clone 108843 (TRAV8-6, TRAJ16)
CAVSSPDGQKLLF

SEQ ID NO: 217686 - protein, 16 aa, Homo sapiens
  CDR3 for beta chain variable domain of TCR clone 108843 (TRBV5-7, TRBJ2-3)
CASSSLGGAITDTQYC

SEQ ID NO: 217687 - protein, 14 aa, Homo sapiens
  CDR3 for alpha chain variable domain of TCR clone 108844 (TRAV12-3, TRAJ10)
SHLPLTGGGNKLTF

SEQ ID NO: 217688 - protein, 15 aa, Homo sapiens
  CDR3 for beta chain variable domain of TCR clone 108844 (TRBV5-4, TRBJ2-2)
CASSRRGGGTGELFF

SEQ ID NO: 217689 - protein, 22 aa, Homo sapiens
  CDR3 for alpha chain variable domain of TCR clone 108845 (TRAV1-2, TRAJ6)
CAVSLSGGSYVPTLEEEPALLF

SEQ ID NO: 217690 - protein, 15 aa, Homo sapiens
  CDR3 for beta chain variable domain of TCR clone 108845 (TRBV28, TRBJ2-7)
CASSPGGRGFYEQYF

SEQ ID NO: 217691 - protein, 14 aa, Homo sapiens
  CDR3 for alpha chain variable domain of TCR clone 108846 (TRAV9-2, TRAJ39)
CALYIYNAGNMLTF

SEQ ID NO: 217692 - protein, 12 aa, Homo sapiens
  CDR3 for beta chain variable domain of TCR clone 108846 (TRBV7-9, TRBJ1-5)
CASSPQGQPQHF

SEQ ID NO: 217693 - protein, 19 aa, Homo sapiens
  CDR3 for alpha chain variable domain of TCR clone 108847 (TRAV8-3, TRAJ8)
LSTSVLWDPMNTGFQQLVF

SEQ ID NO: 217694 - protein, 13 aa, Homo sapiens
  CDR3 for beta chain variable domain of TCR clone 108847 (TRBV10-2, TRBJ2-3)
CASSESGDHTQYF

SEQ ID NO: 217695 - protein, 17 aa, Homo sapiens
  CDR3 for alpha chain variable domain of TCR clone 108848 (TRAV26-1, TRAJ53)
CIVRVDDSGGSNYKLTF

SEQ ID NO: 217696 - protein, 15 aa, Homo sapiens
  CDR3 for beta chain variable domain of TCR clone 108848 (TRBV20-1, TRBJ2-7)
CSARVPAAYFYELYF

SEQ ID NO: 217697 - protein, 13 aa, Homo sapiens
  CDR3 for alpha chain variable domain of TCR clone 108849 (TRAV12-3, TRAJ33)
CAMSVNSNYQLIW

SEQ ID NO: 217698 - protein, 18 aa, Homo sapiens
  CDR3 for beta chain variable domain of TCR clone 108849 (TRBV9, TRBJ2-7)
CASSSPGLRTGINYEQYF

SEQ ID NO: 217699 - protein, 12 aa, Homo sapiens
  CDR3 for alpha chain variable domain of TCR clone 108850 (TRAV35, TRAJ49)
CAGWNTGNQFYF

SEQ ID NO: 217700 - protein, 16 aa, Homo sapiens
  CDR3 for beta chain variable domain of TCR clone 108850 (TRBV5-1, TRBJ2-2)
CASSLWDTTNTGELVF

SEQ ID NO: 217701 - protein, 16 aa, Homo sapiens
  CDR3 for alpha chain variable domain of TCR clone 108851 (TRAV12-2, TRAJ47)
CAVNREKEEYGNKLVF

SEQ ID NO: 217702 - protein, 11 aa, Homo sapiens
  CDR3 for beta chain variable domain of TCR clone 108851 (TRBV29-1, TRBJ2-5)
CSEDRTGTQYF

SEQ ID NO: 217703 - protein, 11 aa, Homo sapiens
  CDR3 for alpha chain variable domain of TCR clone 108852 (TRAV12-2, TRAJ33)
CAVGSSYQLIW

SEQ ID NO: 217704 - protein, 13 aa, Homo sapiens
  CDR3 for beta chain variable domain of TCR clone 108852 (TRBV10-3, TRBJ2-7)
CASKLAVNYEQYF

SEQ ID NO: 217705 - protein, 15 aa, Homo sapiens
  CDR3 for alpha chain variable domain of TCR clone 108853 (TRAV29/DV5, TRAJ29)
CAASERSSGNTPLVF

SEQ ID NO: 217706 - protein, 17 aa, Homo sapiens
  CDR3 for beta chain variable domain of TCR clone 108853 (TRBV4-1, TRBJ1-4)
CASSQEGPRGVEETLFF

SEQ ID NO: 217707 - protein, 14 aa, Homo sapiens
  CDR3 for alpha chain variable domain of TCR clone 108854 (TRAV12-2, TRAJ13)
CAVKKTGGYQKVTF

SEQ ID NO: 217708 - protein, 17 aa, Homo sapiens
  CDR3 for beta chain variable domain of TCR clone 108854 (TRBV20-1, TRBJ2-2)
CSASGSVQGGLTGELFF

SEQ ID NO: 217709 - protein, 14 aa, Homo sapiens
  CDR3 for alpha chain variable domain of TCR clone 108855 (TRAV34, TRAJ44)
CGADGTGTASKLTF

SEQ ID NO: 217710 - protein, 14 aa, Homo sapiens
  CDR3 for beta chain variable domain of TCR clone 108855 (TRBV11-2, TRBJ2-5)
CASSRTGGIETQYF

SEQ ID NO: 217711 - protein, 14 aa, Homo sapiens
  CDR3 for alpha chain variable domain of TCR clone 108856 (TRAV25, TRAJ27)
CAGEHLTNAGKSTF

SEQ ID NO: 217712 - protein, 15 aa, Homo sapiens
  CDR3 for beta chain variable domain of TCR clone 108856 (TRBV15, TRBJ1-1)
RATSLQGGRNTEAFF

SEQ ID NO: 217713 - protein, 15 aa, Homo sapiens
  CDR3 for alpha chain variable domain of TCR clone 108857 (TRAV17, TRAJ6)
CATDLPSGGSYIPTF

SEQ ID NO: 217714 - protein, 16 aa, Homo sapiens
  CDR3 for beta chain variable domain of TCR clone 108857 (TRBV4-1, TRBJ2-7)
CASSHDPTGYSYEQYF

SEQ ID NO: 217715 - protein, 11 aa, Homo sapiens
  CDR3 for alpha chain variable domain of TCR clone 108858 (TRAV21, TRAJ41)
CAVRSGYALNF

SEQ ID NO: 217716 - protein, 13 aa, Homo sapiens
  CDR3 for beta chain variable domain of TCR clone 108858 (TRBV7-9, TRBJ1-2)
CASSLKQNYGCTF

SEQ ID NO: 217717 - protein, 14 aa, Homo sapiens
  CDR3 for alpha chain variable domain of TCR clone 108859 (TRAV8-1, TRAJ5)
CAVRTDTGRRALTS

SEQ ID NO: 217718 - protein, 15 aa, Homo sapiens
  CDR3 for beta chain variable domain of TCR clone 108859 (TRBV7-3, TRBJ2-1)
CASSPTGGGEVEQFF

SEQ ID NO: 217719 - protein, 14 aa, Homo sapiens
  CDR3 for alpha chain variable domain of TCR clone 108860 (TRAV4, TRAJ9)
CLVGSGTGGFKPIF

SEQ ID NO: 217720 - protein, 15 aa, Homo sapiens
  CDR3 for beta chain variable domain of TCR clone 108860 (TRBV7-2, TRBJ2-1)
CASSLASGRVNEQFF

SEQ ID NO: 217721 - protein, 12 aa, Homo sapiens
  CDR3 for alpha chain variable domain of TCR clone 108861 (TRAV1-1, TRAJ39)
CAVPVVGNMLTF

SEQ ID NO: 217722 - protein, 15 aa, Homo sapiens
  CDR3 for beta chain variable domain of TCR clone 108861 (TRBV7-3, TRBJ2-2)
GASSETGQGTGELFF

SEQ ID NO: 217723 - protein, 13 aa, Homo sapiens
  CDR3 for alpha chain variable domain of TCR clone 108862 (TRAV12-3, TRAJ13)
CAMTSGGYQKVTF

SEQ ID NO: 217724 - protein, 13 aa, Homo sapiens
  CDR3 for beta chain variable domain of TCR clone 108862 (TRBV20-1, TRBJ2-2)
CSALSGGAGELFL

SEQ ID NO: 217725 - protein, 13 aa, Homo sapiens
  CDR3 for alpha chain variable domain of TCR clone 108863 (TRAV8-3, TRAJ28)
CAVGAVGSYQLTF

SEQ ID NO: 217726 - protein, 14 aa, Homo sapiens
  CDR3 for beta chain variable domain of TCR clone 108863 (TRBV25-1, TRBJ1-1)
CASTHLGGNTEAVF

SEQ ID NO: 217727 - protein, 14 aa, Homo sapiens
  CDR3 for alpha chain variable domain of TCR clone 108864 (TRAV1-2, TRAJ16)
CAVNRFSDGQQLLF

SEQ ID NO: 217728 - protein, 11 aa, Homo sapiens
  CDR3 for beta chain variable domain of TCR clone 108864 (TRBV4-1, TRBJ2-2)
CASEHTGELFF

SEQ ID NO: 217729 - protein, 16 aa, Homo sapiens
  CDR3 for alpha chain variable domain of TCR clone 108865 (TRAV12-3, TRAJ53)
CAMSPGSGGSNYKLTF

SEQ ID NO: 217730 - protein, 20 aa, Homo sapiens
  CDR3 for beta chain variable domain of TCR clone 108865 (TRBV7-8, TRBJ2-2)
CASSHLFHGPTIHITGELFF

SEQ ID NO: 217731 - protein, 16 aa, Homo sapiens
  CDR3 for alpha chain variable domain of TCR clone 108866 (TRAV36/DV7, TRAJ33)
WRPGNKMQDSNYQLIW

SEQ ID NO: 217732 - protein, 15 aa, Homo sapiens
  CDR3 for beta chain variable domain of TCR clone 108866 (TRBV29-1, TRBJ2-1)
CSVGRHALFYNEQFF

SEQ ID NO: 217733 - protein, 16 aa, Homo sapiens
  CDR3 for alpha chain variable domain of TCR clone 108867 (TRAV26-1, TRAJ58)
IASSESGETSGSRLTF

SEQ ID NO: 217734 - protein, 14 aa, Homo sapiens
  CDR3 for beta chain variable domain of TCR clone 108867 (TRBV9, TRBJ2-1)
CASSVDPRGKGQFF

SEQ ID NO: 217735 - protein, 16 aa, Homo sapiens
  CDR3 for alpha chain variable domain of TCR clone 108868 (TRAV20, TRAJ10)
CAVLRGLTGGGNKLTF

SEQ ID NO: 217736 - protein, 14 aa, Homo sapiens
  CDR3 for beta chain variable domain of TCR clone 108868 (TRBV19, TRBJ1-5)
CASRAPDSFLSQYF

SEQ ID NO: 217737 - protein, 17 aa, Homo sapiens
  CDR3 for alpha chain variable domain of TCR clone 108869 (TRAV3, TRAJ6)
CAVRDGPRAGGSYIPTF

SEQ ID NO: 217738 - protein, 15 aa, Homo sapiens
  CDR3 for beta chain variable domain of TCR clone 108869 (TRBV7-2, TRBJ2-3)
CASSLRGGSTDTQYF

SEQ ID NO: 217739 - protein, 14 aa, Homo sapiens
  CDR3 for alpha chain variable domain of TCR clone 108870 (TRAV1-2, TRAJ8)
CAVREDTGFKKLVF

SEQ ID NO: 217740 - protein, 13 aa, Homo sapiens
  CDR3 for beta chain variable domain of TCR clone 108870 (TRBV4-2, TRBJ2-2)
CASEDRGTGELFF

SEQ ID NO: 217741 - protein, 12 aa, Homo sapiens
  CDR3 for alpha chain variable domain of TCR clone 108871 (TRAV12-2, TRAJ47)
CAVAEYGNKLVF

SEQ ID NO: 217742 - protein, 16 aa, Homo sapiens
  CDR3 for beta chain variable domain of TCR clone 108871 (TRBV12-5, TRBJ2-5)
CASGPRTSGNQETQYF

SEQ ID NO: 217743 - protein, 14 aa, Homo sapiens
  CDR3 for alpha chain variable domain of TCR clone 108872 (TRAV1-2, TRAJ8)
CAVREDTGFQKLVF

SEQ ID NO: 217744 - protein, 15 aa, Homo sapiens
  CDR3 for beta chain variable domain of TCR clone 108872 (TRBV10-3, TRBJ2-1)
CAIRNGTSGHNEQFF

SEQ ID NO: 217745 - protein, 14 aa, Homo sapiens
  CDR3 for alpha chain variable domain of TCR clone 108873 (TRAV38-1, TRAJ29)
CAFITPSGNTPLVL

SEQ ID NO: 217746 - protein, 13 aa, Homo sapiens
  CDR3 for beta chain variable domain of TCR clone 108873 (TRBV7-9, TRBJ1-2)
CASSLKRNYGYTF

SEQ ID NO: 217747 - protein, 14 aa, Homo sapiens
  CDR3 for alpha chain variable domain of TCR clone 108874 (TRAV12-1, TRAJ12)
CVVTRMDSSYQLIF

SEQ ID NO: 217748 - protein, 13 aa, Homo sapiens
  CDR3 for beta chain variable domain of TCR clone 108874 (TRBV20-1, TRBJ1-1)
CSARGGGNTEAFF

SEQ ID NO: 217749 - protein, 17 aa, Homo sapiens
  CDR3 for alpha chain variable domain of TCR clone 108875 (TRAV3, TRAJ22)
CAVRPFISSGSARQLTF

SEQ ID NO: 217750 - protein, 14 aa, Homo sapiens
  CDR3 for beta chain variable domain of TCR clone 108875 (TRBV19, TRBJ2-1)
CASKDPGLANEQFF

SEQ ID NO: 217751 - protein, 16 aa, Homo sapiens
  CDR3 for alpha chain variable domain of TCR clone 108876 (TRAV4, TRAJ22)
CLVGDLYSGSARQLTF

SEQ ID NO: 217752 - protein, 16 aa, Homo sapiens
  CDR3 for beta chain variable domain of TCR clone 108876 (TRBV7-9, TRBJ2-1)
CASSDVAGGSFNEQFF

SEQ ID NO: 217753 - protein, 16 aa, Homo sapiens
  CDR3 for alpha chain variable domain of TCR clone 108877 (TRAV30, TRAJ24)
CGTEIVDADSWGKFQL

SEQ ID NO: 217754 - protein, 18 aa, Homo sapiens
  CDR3 for beta chain variable domain of TCR clone 108877 (TRBV18, TRBJ1-3)
CASSPRGGAGPSGNTIYF

SEQ ID NO: 217755 - protein, 15 aa, Homo sapiens
  CDR3 for alpha chain variable domain of TCR clone 108878 (TRAV12-3, TRAJ48)
CAVNAKNFGNEKLTF

SEQ ID NO: 217756 - protein, 14 aa, Homo sapiens
  CDR3 for beta chain variable domain of TCR clone 108878 (TRBV2, TRBJ1-6)
CASSESRNNSPLHF

SEQ ID NO: 217757 - protein, 12 aa, Homo sapiens
  CDR3 for alpha chain variable domain of TCR clone 108879 (TRAV17, TRAJ57)
CATDGGSEKLVL

SEQ ID NO: 217758 - protein, 15 aa, Homo sapiens
  CDR3 for beta chain variable domain of TCR clone 108879 (TRBV6-3, TRBJ2-2)
CASSFLATLTGELFF

SEQ ID NO: 217759 - protein, 16 aa, Homo sapiens
  CDR3 for alpha chain variable domain of TCR clone 108880 (TRAV23/DV6, TRAJ9)
CAASIGGNTGGFKTIF

SEQ ID NO: 217760 - protein, 13 aa, Homo sapiens
  CDR3 for beta chain variable domain of TCR clone 108880 (TRBV7-9, TRBJ1-2)
CASSLKQNYGDTF

SEQ ID NO: 217761 - protein, 15 aa, Homo sapiens
  CDR3 for alpha chain variable domain of TCR clone 108881 (TRAV29/DV5, TRAJ42)
CAAKTDGGSQGNLIV

SEQ ID NO: 217762 - protein, 15 aa, Homo sapiens
  CDR3 for beta chain variable domain of TCR clone 108881 (TRBV5-1, TRBJ2-2)
CASSSQGGNTGELFF

SEQ ID NO: 217763 - protein, 12 aa, Homo sapiens
  CDR3 for alpha chain variable domain of TCR clone 108882 (TRAV13-1, TRAJ21)
CAAKEGFNKFYF

SEQ ID NO: 217764 - protein, 17 aa, Homo sapiens
  CDR3 for beta chain variable domain of TCR clone 108882 (TRBV7-6, TRBJ2-5)
CASSSPQAGDPSETQYF

SEQ ID NO: 217765 - protein, 12 aa, Homo sapiens
  CDR3 for alpha chain variable domain of TCR clone 108883 (TRAV12-1, TRAJ40)
CVFYSGTYKYIF

SEQ ID NO: 217766 - protein, 14 aa, Homo sapiens
  CDR3 for beta chain variable domain of TCR clone 108883 (TRBV20-1, TRBJ1-1)
CSAQTRIGGTEAFF

SEQ ID NO: 217767 - protein, 14 aa, Homo sapiens
  CDR3 for alpha chain variable domain of TCR clone 108884 (TRAV1-2, TRAJ16)
CSVNRFSDGQKLLF

SEQ ID NO: 217768 - protein, 17 aa, Homo sapiens
  CDR3 for beta chain variable domain of TCR clone 108884 (TRBV20-1, TRBJ2-1)
CSASSSGLAGSYNEQFF

SEQ ID NO: 217769 - protein, 13 aa, Homo sapiens
  CDR3 for alpha chain variable domain of TCR clone 108885 (TRAV12-3, TRAJ54)
CAMFAQGAQKLEF

SEQ ID NO: 217770 - protein, 16 aa, Homo sapiens
  CDR3 for beta chain variable domain of TCR clone 108885 (TRBV7-6, TRBJ2-3)
CASSPRRGGLGDTQYF

SEQ ID NO: 217771 - protein, 14 aa, Homo sapiens
  CDR3 for alpha chain variable domain of TCR clone 108886 (TRAV1-2, TRAJ8)
CDVRDPPGFQKLVF

SEQ ID NO: 217772 - protein, 14 aa, Homo sapiens
  CDR3 for beta chain variable domain of TCR clone 108886 (TRBV4-2, TRBJ2-7)
CASSHRTGEYEQYF

SEQ ID NO: 217773 - protein, 15 aa, Homo sapiens
  CDR3 for alpha chain variable domain of TCR clone 108887 (TRAV16, TRAJ12)
CSKWPLRDSSYKLIF

SEQ ID NO: 217774 - protein, 17 aa, Homo sapiens
  CDR3 for beta chain variable domain of TCR clone 108887 (TRBV11-2, TRBJ2-1)
CASSLYPPGVEYNEQFF

SEQ ID NO: 217775 - protein, 21 aa, Homo sapiens
  CDR3 for alpha chain variable domain of TCR clone 108888 (TRAV1-1, TRAJ6)
CLLLLRCERLERTGENYIPTF

SEQ ID NO: 217776 - protein, 13 aa, Homo sapiens
  CDR3 for beta chain variable domain of TCR clone 108888 (TRBV10-2, TRBJ2-7)
CASGASGGYEQYF

SEQ ID NO: 217777 - protein, 13 aa, Homo sapiens
  CDR3 for alpha chain variable domain of TCR clone 108889 (TRAV21, TRAJ57)
CAVTQGGSEQLVF

SEQ ID NO: 217778 - protein, 16 aa, Homo sapiens
  CDR3 for beta chain variable domain of TCR clone 108889 (TRBV29-1, TRBJ2-7)
CSVEDAEDSTAYEQYF

SEQ ID NO: 217779 - protein, 15 aa, Homo sapiens
  CDR3 for alpha chain variable domain of TCR clone 108890 (TRAV26-1, TRAJ40)
CIVRVTTSGTYKYIF

SEQ ID NO: 217780 - protein, 14 aa, Homo sapiens
  CDR3 for beta chain variable domain of TCR clone 108890 (TRBV7-9, TRBJ1-4)
CASSTDRENCFLAV

SEQ ID NO: 217781 - protein, 14 aa, Homo sapiens
  CDR3 for alpha chain variable domain of TCR clone 108891 (TRAV16, TRAJ44)
CALSTTGTASKLAF

SEQ ID NO: 217782 - protein, 14 aa, Homo sapiens
  CDR3 for beta chain variable domain of TCR clone 108891 (TRBV20-1, TRBJ2-7)
CSAISREASYEQYF

SEQ ID NO: 217783 - protein, 15 aa, Homo sapiens
  CDR3 for alpha chain variable domain of TCR clone 108892 (TRAV17, TRAJ56)
CATGPFTGANSKLTF

SEQ ID NO: 217784 - protein, 15 aa, Homo sapiens
  CDR3 for beta chain variable domain of TCR clone 108892 (TRBV28, TRBJ1-5)
CASSRTGGYVQPQHF

SEQ ID NO: 217785 - protein, 16 aa, Homo sapiens
  CDR3 for alpha chain variable domain of TCR clone 108893 (TRAV21, TRAJ52)
CAMTNAGGTSYGKLTF

SEQ ID NO: 217786 - protein, 13 aa, Homo sapiens
  CDR3 for beta chain variable domain of TCR clone 108893 (TRBV20-1, TRBJ2-3)
CSARLAGTDTQYF

SEQ ID NO: 217787 - protein, 15 aa, Homo sapiens
  CDR3 for alpha chain variable domain of TCR clone 108894 (TRAV12-1, TRAJ42)
CVVKRDGGSQGNLIF

SEQ ID NO: 217788 - protein, 14 aa, Homo sapiens
  CDR3 for beta chain variable domain of TCR clone 108894 (TRBV11-2, TRBJ2-3)
CASSLGGGANTQYF

SEQ ID NO: 217789 - protein, 15 aa, Homo sapiens
  CDR3 for alpha chain variable domain of TCR clone 108895 (TRAV21, TRAJ53)
CATLNSGGSNYKLTF

SEQ ID NO: 217790 - protein, 13 aa, Homo sapiens
  CDR3 for beta chain variable domain of TCR clone 108895 (TRBV2, TRBJ1-4)
CASSERAGEKLFF

SEQ ID NO: 217791 - protein, 15 aa, Homo sapiens
  CDR3 for alpha chain variable domain of TCR clone 108896 (TRAV12-3, TRAJ48)
CAMNAKNFGNEKLTF

SEQ ID NO: 217792 - protein, 14 aa, Homo sapiens
  CDR3 for beta chain variable domain of TCR clone 108896 (TRBV2, TRBJ1-6)
CASSESRNNSHLHF

SEQ ID NO: 217793 - protein, 10 aa, Homo sapiens
  CDR3 for alpha chain variable domain of TCR clone 108897 (TRAV23/DV6, TRAJ9)
CASKYCRLQN

SEQ ID NO: 217794 - protein, 14 aa, Homo sapiens
  CDR3 for beta chain variable domain of TCR clone 108897 (TRBV6-1, TRBJ2-7)
CASTRTGDYYEQYF

SEQ ID NO: 217795 - protein, 14 aa, Homo sapiens
  CDR3 for alpha chain variable domain of TCR clone 108898 (TRAV1-2, TRAJ8)
CAVREDTGFQKLGF

SEQ ID NO: 217796 - protein, 14 aa, Homo sapiens
  CDR3 for beta chain variable domain of TCR clone 108898 (TRBV7-9, TRBJ1-1)
CASSLGGANTEAFF

SEQ ID NO: 217797 - protein, 11 aa, Homo sapiens
  CDR3 for alpha chain variable domain of TCR clone 108899 (TRAV35, TRAJ34)
CWARNTDKLIF

SEQ ID NO: 217798 - protein, 17 aa, Homo sapiens
  CDR3 for beta chain variable domain of TCR clone 108899 (TRBV15, TRBJ1-5)
CATSRAPPGTRNQPQHF

SEQ ID NO: 217799 - protein, 20 aa, Homo sapiens
  CDR3 for alpha chain variable domain of TCR clone 108900 (TRAV1-1, TRAJ4)
CLLLLRCECFLSGGYNKLIF

SEQ ID NO: 217800 - protein, 16 aa, Homo sapiens
  CDR3 for beta chain variable domain of TCR clone 108900 (TRBV28, TRBJ1-4)
CASSPPYRGRSEKLFF

SEQ ID NO: 217801 - protein, 14 aa, Homo sapiens
  CDR3 for alpha chain variable domain of TCR clone 108901 (TRAV12-3, TRAJ10)
SHLPLTGGGNKLTF

SEQ ID NO: 217802 - protein, 14 aa, Homo sapiens
  CDR3 for beta chain variable domain of TCR clone 108901 (TRBV20-1, TRBJ2-4)
CSARDRGQGGIQYF

SEQ ID NO: 217803 - protein, 12 aa, Homo sapiens
  CDR3 for alpha chain variable domain of TCR clone 108902 (TRAV12-2, TRAJ21)
CAVNRNFNKFYF

SEQ ID NO: 217804 - protein, 14 aa, Homo sapiens
  CDR3 for beta chain variable domain of TCR clone 108902 (TRBV12-4, TRBJ2-3)
CASSLSGATDTQCF

SEQ ID NO: 217805 - protein, 13 aa, Homo sapiens
  CDR3 for alpha chain variable domain of TCR clone 108903 (TRAV13-1, TRAJ23)
CAASGRGGGKLIF

SEQ ID NO: 217806 - protein, 13 aa, Homo sapiens
  CDR3 for beta chain variable domain of TCR clone 108903 (TRBV7-3, TRBJ1-1)
CASSQDWGAEAFF

SEQ ID NO: 217807 - protein, 12 aa, Homo sapiens
  CDR3 for alpha chain variable domain of TCR clone 108904 (TRAV1-2, TRAJ33)
CAALDSNYQLIW

SEQ ID NO: 217808 - protein, 14 aa, Homo sapiens
  CDR3 for beta chain variable domain of TCR clone 108904 (TRBV19, TRBJ2-3)
CASSAPRGTDTQYS

SEQ ID NO: 217809 - protein, 12 aa, Homo sapiens
  CDR3 for alpha chain variable domain of TCR clone 108905 (TRAV12-1, TRAJ20)
CVVNPDDYKLSF

SEQ ID NO: 217810 - protein, 12 aa, Homo sapiens
  CDR3 for beta chain variable domain of TCR clone 108905 (TRBV11-2, TRBJ2-2)
CASCLGGGELFF

SEQ ID NO: 217811 - protein, 12 aa, Homo sapiens
  CDR3 for alpha chain variable domain of TCR clone 108906 (TRAV21, TRAJ33)
CAKMDSNYQLIW

SEQ ID NO: 217812 - protein, 14 aa, Homo sapiens
  CDR3 for beta chain variable domain of TCR clone 108906 (TRBV11-2, TRBJ2-7)
CASSLTSGGYEQYF

SEQ ID NO: 217813 - protein, 11 aa, Homo sapiens
  CDR3 for alpha chain variable domain of TCR clone 108907 (TRAV35, TRAJ30)
CAPGGDDKIIF

SEQ ID NO: 217814 - protein, 14 aa, Homo sapiens
  CDR3 for beta chain variable domain of TCR clone 108907 (TRBV19, TRBJ2-1)
CARGARSFQWEQFF

SEQ ID NO: 217815 - protein, 13 aa, Homo sapiens
  CDR3 for alpha chain variable domain of TCR clone 108908 (TRAV27, TRAJ6)
CAGGARGSYIPTF

SEQ ID NO: 217816 - protein, 13 aa, Homo sapiens
  CDR3 for beta chain variable domain of TCR clone 108908 (TRBV4-1, TRBJ2-2)
CASSQENTGELFF

SEQ ID NO: 217817 - protein, 15 aa, Homo sapiens
  CDR3 for alpha chain variable domain of TCR clone 108909 (TRAV3, TRAJ4)
CAVRDGTGGYNKLIF

SEQ ID NO: 217818 - protein, 16 aa, Homo sapiens
  CDR3 for beta chain variable domain of TCR clone 108909 (TRBV27, TRBJ2-2)
CASSSSGVSNTGELFS

SEQ ID NO: 217819 - protein, 16 aa, Homo sapiens
  CDR3 for alpha chain variable domain of TCR clone 108910 (TRAV30, TRAJ24)
CGTEIVDADSWGKFQF

SEQ ID NO: 217820 - protein, 15 aa, Homo sapiens
  CDR3 for beta chain variable domain of TCR clone 108910 (TRBV20-1, TRBJ2-7)
CSARKGLAESYEQYF

SEQ ID NO: 217821 - protein, 12 aa, Homo sapiens
  CDR3 for alpha chain variable domain of TCR clone 108911 (TRAV12-2, TRAJ36)
CAAPRGANHLFF

SEQ ID NO: 217822 - protein, 12 aa, Homo sapiens
  CDR3 for beta chain variable domain of TCR clone 108911 (TRBV6-3, TRBJ2-7)
CASSLTPYEQYF

SEQ ID NO: 217823 - protein, 14 aa, Homo sapiens
  CDR3 for alpha chain variable domain of TCR clone 108912 (TRAV2, TRAJ37)
CAVAFTSNTGKLIF

SEQ ID NO: 217824 - protein, 16 aa, Homo sapiens
  CDR3 for beta chain variable domain of TCR clone 108912 (TRBV27, TRBJ2-7)
CASSSERRDSAYEQYF

SEQ ID NO: 217825 - protein, 12 aa, Homo sapiens
  CDR3 for alpha chain variable domain of TCR clone 108913 (TRAV16, TRAJ27)
CALNTNAGKSTF

SEQ ID NO: 217826 - protein, 14 aa, Homo sapiens
  CDR3 for beta chain variable domain of TCR clone 108913 (TRBV4-3, TRBJ1-4)
CASSPLQRNEKLFF

SEQ ID NO: 217827 - protein, 14 aa, Homo sapiens
  CDR3 for alpha chain variable domain of TCR clone 108914 (TRAV12-3, TRAJ12)
CAMSEVDSSYKLIS

SEQ ID NO: 217828 - protein, 12 aa, Homo sapiens
  CDR3 for beta chain variable domain of TCR clone 108914 (TRBV18, TRBJ1-4)
CASSPSREKLFF

SEQ ID NO: 217829 - protein, 17 aa, Homo sapiens
  CDR3 for alpha chain variable domain of TCR clone 108915 (TRAV1-2, TRAJ27)
CAVRDKAGDTNAGKSTF

SEQ ID NO: 217830 - protein, 12 aa, Homo sapiens
  CDR3 for beta chain variable domain of TCR clone 108915 (TRBV11-2, TRBJ2-1)
CASSPGNNEQFF

SEQ ID NO: 217831 - protein, 15 aa, Homo sapiens
  CDR3 for alpha chain variable domain of TCR clone 108916 (TRAV21, TRAJ53)
CATLNSGGSNYKLTF

SEQ ID NO: 217832 - protein, 13 aa, Homo sapiens
  CDR3 for beta chain variable domain of TCR clone 108916 (TRBV7-9, TRBJ2-1)
CASSWESYNEQFF

SEQ ID NO: 217833 - protein, 13 aa, Homo sapiens
  CDR3 for alpha chain variable domain of TCR clone 108917 (TRAV8-3, TRAJ44)
CAVVPGTASKLTF

SEQ ID NO: 217834 - protein, 14 aa, Homo sapiens
  CDR3 for beta chain variable domain of TCR clone 108917 (TRBV11-2, TRBJ2-3)
CARSRLARTDTQYF

SEQ ID NO: 217835 - protein, 15 aa, Homo sapiens
  CDR3 for alpha chain variable domain of TCR clone 108918 (TRAV20, TRAJ6)
CAVRLQLGGSYVPTF

SEQ ID NO: 217836 - protein, 14 aa, Homo sapiens
  CDR3 for beta chain variable domain of TCR clone 108918 (TRBV12-4, TRBJ2-7)
CASSASGGWYEQYF

SEQ ID NO: 217837 - protein, 14 aa, Homo sapiens
  CDR3 for alpha chain variable domain of TCR clone 108919 (TRAV1-2, TRAJ8)
CAVREDTGFQKLVF

SEQ ID NO: 217838 - protein, 14 aa, Homo sapiens
  CDR3 for beta chain variable domain of TCR clone 108919 (TRBV20-1, TRBJ2-1)
CSPNDEASYNEQFF

SEQ ID NO: 217839 - protein, 14 aa, Homo sapiens
  CDR3 for alpha chain variable domain of TCR clone 108920 (TRAV23/DV6, TRAJ4)
CAANLSGGYNKLIF

SEQ ID NO: 217840 - protein, 17 aa, Homo sapiens
  CDR3 for beta chain variable domain of TCR clone 108920 (TRBV4-1, TRBJ1-3)
CASSPQRGIRFGNAIYF

SEQ ID NO: 217841 - protein, 11 aa, Homo sapiens
  CDR3 for alpha chain variable domain of TCR clone 108921 (TRAV12-3, TRAJ26)
CAMSHGQNFVF

SEQ ID NO: 217842 - protein, 12 aa, Homo sapiens
  CDR3 for beta chain variable domain of TCR clone 108921 (TRBV11-2, TRBJ2-2)
CASSLGGGELFF

SEQ ID NO: 217843 - protein, 15 aa, Homo sapiens
  CDR3 for alpha chain variable domain of TCR clone 108922 (TRAV26-1, TRAJ22)
CIVRVSFWFCKATDL

SEQ ID NO: 217844 - protein, 12 aa, Homo sapiens
  CDR3 for beta chain variable domain of TCR clone 108922 (TRBV12-4, TRBJ2-7)
CASSLGGYEQYF

SEQ ID NO: 217845 - protein, 14 aa, Homo sapiens
  CDR3 for alpha chain variable domain of TCR clone 108923 (TRAV8-3, TRAJ35)
CAVVPQGFGNVLHC

SEQ ID NO: 217846 - protein, 15 aa, Homo sapiens
  CDR3 for beta chain variable domain of TCR clone 108923 (TRBV6-1, TRBJ2-2)
CASSAGKGYTGELFF

SEQ ID NO: 217847 - protein, 17 aa, Homo sapiens
  CDR3 for alpha chain variable domain of TCR clone 108924 (TRAV26-2, TRAJ28)
CILRPLLIVAGSYQLTF

SEQ ID NO: 217848 - protein, 15 aa, Homo sapiens
  CDR3 for beta chain variable domain of TCR clone 108924 (TRBV7-9, TRBJ1-6)
CASSSPGRGNSPLHF

SEQ ID NO: 217849 - protein, 13 aa, Homo sapiens
  CDR3 for alpha chain variable domain of TCR clone 108925 (TRAV22, TRAJ48)
CAVERFGNEKLTF

SEQ ID NO: 217850 - protein, 13 aa, Homo sapiens
  CDR3 for beta chain variable domain of TCR clone 108925 (TRBV12-4, TRBJ1-2)
CASSLRQGKGYTF

SEQ ID NO: 217851 - protein, 13 aa, Homo sapiens
  CDR3 for alpha chain variable domain of TCR clone 108926 (TRAV8-3, TRAJ48)
CAVVPFGNEKLTF

SEQ ID NO: 217852 - protein, 19 aa, Homo sapiens
  CDR3 for beta chain variable domain of TCR clone 108926 (TRBV25-1, TRBJ2-2)
CAILVYRVDRGRRTGELFF

SEQ ID NO: 217853 - protein, 11 aa, Homo sapiens
  CDR3 for alpha chain variable domain of TCR clone 108927 (TRAV4, TRAJ23)
CLVAPGGKLIF

SEQ ID NO: 217854 - protein, 15 aa, Homo sapiens
  CDR3 for beta chain variable domain of TCR clone 108927 (TRBV7-2, TRBJ2-1)
YASSFQADEYNEQFF

SEQ ID NO: 217855 - protein, 14 aa, Homo sapiens
  CDR3 for alpha chain variable domain of TCR clone 108928 (TRAV17, TRAJ54)
CATDANQGAQKLVI

SEQ ID NO: 217856 - protein, 12 aa, Homo sapiens
  CDR3 for beta chain variable domain of TCR clone 108928 (TRBV6-3, TRBJ2-1)
CASSGSYNEQFF

SEQ ID NO: 217857 - protein, 12 aa, Homo sapiens
  CDR3 for alpha chain variable domain of TCR clone 108929 (TRAV1-1, TRAJ39)
CAVPVVGNMITF

SEQ ID NO: 217858 - protein, 15 aa, Homo sapiens
  CDR3 for beta chain variable domain of TCR clone 108929 (TRBV19, TRBJ1-6)
CASSTQGAVGSPLHF

SEQ ID NO: 217859 - protein, 13 aa, Homo sapiens
  CDR3 for alpha chain variable domain of TCR clone 108930 (TRAV12-2, TRAJ4)
CAVFSGGYNKLLF

SEQ ID NO: 217860 - protein, 13 aa, Homo sapiens
  CDR3 for beta chain variable domain of TCR clone 108930 (TRBV19, TRBJ1-5)
CASSIDRDQPQHF

SEQ ID NO: 217861 - protein, 12 aa, Homo sapiens
  CDR3 for alpha chain variable domain of TCR clone 108931 (TRAV12-3, TRAJ17)
CAMTLTGDKLTF

SEQ ID NO: 217862 - protein, 15 aa, Homo sapiens
  CDR3 for beta chain variable domain of TCR clone 108931 (TRBV20-1, TRBJ2-7)
CSARDRVSGMDERYF

SEQ ID NO: 217863 - protein, 11 aa, Homo sapiens
  CDR3 for alpha chain variable domain of TCR clone 108932 (TRAV6, TRAJ29)
PLCSTITPLVF

SEQ ID NO: 217864 - protein, 12 aa, Homo sapiens
  CDR3 for beta chain variable domain of TCR clone 108932 (TRBV2, TRBJ2-1)
CAKREGYNEQFF

SEQ ID NO: 217865 - protein, 13 aa, Homo sapiens
  CDR3 for alpha chain variable domain of TCR clone 108933 (TRAV8-6, TRAJ49)
CAVITNTGNQFYF

SEQ ID NO: 217866 - protein, 13 aa, Homo sapiens
  CDR3 for beta chain variable domain of TCR clone 108933 (TRBV7-9, TRBJ1-2)
CASSLKQNYGYTV

SEQ ID NO: 217867 - protein, 13 aa, Homo sapiens
  CDR3 for alpha chain variable domain of TCR clone 108934 (TRAV20, TRAJ54)
CAVQAGGAQKLVF

SEQ ID NO: 217868 - protein, 13 aa, Homo sapiens
  CDR3 for beta chain variable domain of TCR clone 108934 (TRBV7-9, TRBJ1-2)
CASSLKQNYGYTF

SEQ ID NO: 217869 - protein, 19 aa, Homo sapiens
  CDR3 for alpha chain variable domain of TCR clone 108935 (TRAV1-2, TRAJ26)
CLLPLCCERPDNYGQNFVF

SEQ ID NO: 217870 - protein, 16 aa, Homo sapiens
  CDR3 for beta chain variable domain of TCR clone 108935 (TRBV5-1, TRBJ1-1)
CASSSGGNSLNTEAFF

SEQ ID NO: 217871 - protein, 14 aa, Homo sapiens
  CDR3 for alpha chain variable domain of TCR clone 108936 (TRAV1-1, TRAJ28)
CSAPSGAGSYQLTF

SEQ ID NO: 217872 - protein, 15 aa, Homo sapiens
  CDR3 for beta chain variable domain of TCR clone 108936 (TRBV7-2, TRBJ1-2)
CASSLVSGGDYGYTF

SEQ ID NO: 217873 - protein, 16 aa, Homo sapiens
  CDR3 for alpha chain variable domain of TCR clone 108937 (TRAV12-3, TRAJ53)
CAMSPGSGGSNYKLTF

SEQ ID NO: 217874 - protein, 17 aa, Homo sapiens
  CDR3 for beta chain variable domain of TCR clone 108937 (TRBV28, TRBJ2-5)
CASSTPEGDARQETQYF

SEQ ID NO: 217875 - protein, 13 aa, Homo sapiens
  CDR3 for alpha chain variable domain of TCR clone 108938 (TRAV1-1, TRAJ29)
CAATLSGNTPLVF

SEQ ID NO: 217876 - protein, 13 aa, Homo sapiens
  CDR3 for beta chain variable domain of TCR clone 108938 (TRBV6-4, TRBJ1-5)
CASSADLNQPQHF

SEQ ID NO: 217877 - protein, 13 aa, Homo sapiens
  CDR3 for alpha chain variable domain of TCR clone 108939 (TRAV2, TRAJ40)
CAVVTSGTYKYIF

SEQ ID NO: 217878 - protein, 15 aa, Homo sapiens
  CDR3 for beta chain variable domain of TCR clone 108939 (TRBV27, TRBJ2-7)
CASSLFGTGLDGQYF

SEQ ID NO: 217879 - protein, 15 aa, Homo sapiens
  CDR3 for alpha chain variable domain of TCR clone 108940 (TRAV12-3, TRAJ18)
CAVSGGGSTLGRLYF

SEQ ID NO: 217880 - protein, 16 aa, Homo sapiens
  CDR3 for beta chain variable domain of TCR clone 108940 (TRBV7-3, TRBJ2-2)
CASSLKRGTLSGELFF

SEQ ID NO: 217881 - protein, 16 aa, Homo sapiens
  CDR3 for alpha chain variable domain of TCR clone 108941 (TRAV16, TRAJ4)
CALSRMFSGGYNKLIF

SEQ ID NO: 217882 - protein, 16 aa, Homo sapiens
  CDR3 for beta chain variable domain of TCR clone 108941 (TRBV11-2, TRBJ1-2)
CASSPSGREANYGYTF

SEQ ID NO: 217883 - protein, 17 aa, Homo sapiens
  CDR3 for alpha chain variable domain of TCR clone 108942 (TRAV8-4, TRAJ53)
CAVSGPRREGSNYKLTF

SEQ ID NO: 217884 - protein, 14 aa, Homo sapiens
  CDR3 for beta chain variable domain of TCR clone 108942 (TRBV7-3, TRBJ2-1)
CASSALAGGPERFF

SEQ ID NO: 217885 - protein, 11 aa, Homo sapiens
  CDR3 for alpha chain variable domain of TCR clone 108943 (TRAV3, TRAJ39)
CCDRVSNMLTF

SEQ ID NO: 217886 - protein, 14 aa, Homo sapiens
  CDR3 for beta chain variable domain of TCR clone 108943 (TRBV7-8, TRBJ2-3)
CASSFPDGQDTQYF

SEQ ID NO: 217887 - protein, 15 aa, Homo sapiens
  CDR3 for alpha chain variable domain of TCR clone 108944 (TRAV21, TRAJ53)
CATLNSGGSNYQLTF

SEQ ID NO: 217888 - protein, 13 aa, Homo sapiens
  CDR3 for beta chain variable domain of TCR clone 108944 (TRBV11-2, TRBJ2-5)
CASSSTGEETQYF

SEQ ID NO: 217889 - protein, 14 aa, Homo sapiens
  CDR3 for alpha chain variable domain of TCR clone 108945 (TRAV38-1, TRAJ57)
CAFMNTGGSEKLVF

SEQ ID NO: 217890 - protein, 12 aa, Homo sapiens
  CDR3 for beta chain variable domain of TCR clone 108945 (TRBV20-1, TRBJ1-5)
CSTSQGKQPQHF

SEQ ID NO: 217891 - protein, 14 aa, Homo sapiens
  CDR3 for alpha chain variable domain of TCR clone 108946 (TRAV9-2, TRAJ39)
CALYIYNAGNMLTF

SEQ ID NO: 217892 - protein, 16 aa, Homo sapiens
  CDR3 for beta chain variable domain of TCR clone 108946 (TRBV5-4, TRBJ2-1)
CASSLVGSGQDNEQFF

SEQ ID NO: 217893 - protein, 15 aa, Homo sapiens
  CDR3 for alpha chain variable domain of TCR clone 108947 (TRAV25, TRAJ53)
CPKSNSGGSNYKLTF

SEQ ID NO: 217894 - protein, 14 aa, Homo sapiens
  CDR3 for beta chain variable domain of TCR clone 108947 (TRBV11-2, TRBJ2-3)
CASSRLARTDTQYF

SEQ ID NO: 217895 - protein, 15 aa, Homo sapiens
  CDR3 for alpha chain variable domain of TCR clone 108948 (TRAV8-3, TRAJ27)
CAVGPSKTNAGKSTV

SEQ ID NO: 217896 - protein, 12 aa, Homo sapiens
  CDR3 for beta chain variable domain of TCR clone 108948 (TRBV11-2, TRBJ2-2)
CASSLGGGELFF

SEQ ID NO: 217897 - protein, 15 aa, Homo sapiens
  CDR3 for alpha chain variable domain of TCR clone 108949 (TRAV3, TRAJ20)
CAVRDIKLSDYKLSF

SEQ ID NO: 217898 - protein, 14 aa, Homo sapiens
  CDR3 for beta chain variable domain of TCR clone 108949 (TRBV19, TRBJ2-1)
CASPTFVLSGEQFF

SEQ ID NO: 217899 - protein, 23 aa, Homo sapiens
  CDR3 for alpha chain variable domain of TCR clone 108950 (TRAV12-2, TRAJ36)
SLLIRDSQPSDSATLERANNLFF

SEQ ID NO: 217900 - protein, 15 aa, Homo sapiens
  CDR3 for beta chain variable domain of TCR clone 108950 (TRBV28, TRBJ2-5)
CASSSGRTIQETQYF

SEQ ID NO: 217901 - protein, 14 aa, Homo sapiens
  CDR3 for alpha chain variable domain of TCR clone 108951 (TRAV12-1, TRAJ23)
CVVNIPNQGGKLIF

SEQ ID NO: 217902 - protein, 20 aa, Homo sapiens
  CDR3 for beta chain variable domain of TCR clone 108951 (TRBV28, TRBJ2-1)
CASTPIGRSPGLAGGNEQFF

SEQ ID NO: 217903 - protein, 14 aa, Homo sapiens
  CDR3 for alpha chain variable domain of TCR clone 108952 (TRAV14/DV4, TRAJ54)
CAVREAPGAQKLVF

SEQ ID NO: 217904 - protein, 13 aa, Homo sapiens
  CDR3 for beta chain variable domain of TCR clone 108952 (TRBV27, TRBJ1-1)
CASSLSIGAEAFF

SEQ ID NO: 217905 - protein, 11 aa, Homo sapiens
  CDR3 for alpha chain variable domain of TCR clone 108953 (TRAV3, TRAJ21)
CAVGNFNKFYF

SEQ ID NO: 217906 - protein, 15 aa, Homo sapiens
  CDR3 for beta chain variable domain of TCR clone 108953 (TRBV5-1, TRBJ2-1)
CASSLVANSYNEQFV

SEQ ID NO: 217907 - protein, 10 aa, Homo sapiens
  CDR3 for alpha chain variable domain of TCR clone 108954 (TRAV8-4, TRAJ43)
CAVSADDIRF

SEQ ID NO: 217908 - protein, 16 aa, Homo sapiens
  CDR3 for beta chain variable domain of TCR clone 108954 (TRBV12-5, TRBJ2-5)
CASGPRTSGNQETQYF

SEQ ID NO: 217909 - protein, 16 aa, Homo sapiens
  CDR3 for alpha chain variable domain of TCR clone 108955 (TRAV30, TRAJ24)
CGTESVDADSWGKFQV

SEQ ID NO: 217910 - protein, 14 aa, Homo sapiens
  CDR3 for beta chain variable domain of TCR clone 108955 (TRBV12-5, TRBJ2-5)
CASGSRTHQETQYF

SEQ ID NO: 217911 - protein, 14 aa, Homo sapiens
  CDR3 for alpha chain variable domain of TCR clone 108956 (TRAV1-2, TRAJ8)
CAVREDTGFQKPVF

SEQ ID NO: 217912 - protein, 12 aa, Homo sapiens
  CDR3 for beta chain variable domain of TCR clone 108956 (TRBV11-2, TRBJ2-2)
CASSLGGGELFF

SEQ ID NO: 217913 - protein, 14 aa, Homo sapiens
  CDR3 for alpha chain variable domain of TCR clone 108957 (TRAV12-2, TRAJ45)
CAVYSGGGADGLTF

SEQ ID NO: 217914 - protein, 13 aa, Homo sapiens
  CDR3 for beta chain variable domain of TCR clone 108957 (TRBV7-3, TRBJ2-5)
CASSSDREETQYF

SEQ ID NO: 217915 - protein, 13 aa, Homo sapiens
  CDR3 for alpha chain variable domain of TCR clone 108958 (TRAV38-2/DV8, TRAJ34)
CAYRTWNTDKLIF

SEQ ID NO: 217916 - protein, 14 aa, Homo sapiens
  CDR3 for beta chain variable domain of TCR clone 108958 (TRBV12-5, TRBJ2-5)
CASGSRTHQETQYF

SEQ ID NO: 217917 - protein, 13 aa, Homo sapiens
  CDR3 for alpha chain variable domain of TCR clone 108959 (TRAV29/DV5, TRAJ31)
CAASRNNNARPMF

SEQ ID NO: 217918 - protein, 15 aa, Homo sapiens
  CDR3 for beta chain variable domain of TCR clone 108959 (TRBV2, TRBJ2-1)
CASSELAGSYNEQFF

SEQ ID NO: 217919 - protein, 14 aa, Homo sapiens
  CDR3 for alpha chain variable domain of TCR clone 108960 (TRAV29/DV5, TRAJ44)
CAAFLVGTASKFTF

SEQ ID NO: 217920 - protein, 15 aa, Homo sapiens
  CDR3 for beta chain variable domain of TCR clone 108960 (TRBV7-3, TRBJ2-2)
CASSETGQGTGELFF

SEQ ID NO: 217921 - protein, 14 aa, Homo sapiens
  CDR3 for alpha chain variable domain of TCR clone 108961 (TRAV13-1, TRAJ44)
CAAKATGTASKLTF

SEQ ID NO: 217922 - protein, 13 aa, Homo sapiens
  CDR3 for beta chain variable domain of TCR clone 108961 (TRBV15, TRBJ1-6)
CATSGGLDSPLHF

SEQ ID NO: 217923 - protein, 12 aa, Homo sapiens
  CDR3 for alpha chain variable domain of TCR clone 108962 (TRAV30, TRAJ43)
CGTEERGNDMRF

SEQ ID NO: 217924 - protein, 15 aa, Homo sapiens
  CDR3 for beta chain variable domain of TCR clone 108962 (TRBV7-9, TRBJ1-4)
CASSARTGGNEKLFF

SEQ ID NO: 217925 - protein, 11 aa, Homo sapiens
  CDR3 for alpha chain variable domain of TCR clone 108963 (TRAV21, TRAJ39)
LLVNAGNMLTF

SEQ ID NO: 217926 - protein, 17 aa, Homo sapiens
  CDR3 for beta chain variable domain of TCR clone 108963 (TRBV7-8, TRBJ2-6)
CASSAGTGGAGANDLTF

SEQ ID NO: 217927 - protein, 14 aa, Homo sapiens
  CDR3 for alpha chain variable domain of TCR clone 108964 (TRAV2, TRAJ9)
CAVEDRSGGFKTIF

SEQ ID NO: 217928 - protein, 13 aa, Homo sapiens
  CDR3 for beta chain variable domain of TCR clone 108964 (TRBV14, TRBJ1-1)
CASSREFGTEAFF

SEQ ID NO: 217929 - protein, 15 aa, Homo sapiens
  CDR3 for alpha chain variable domain of TCR clone 108965 (TRAV8-6, TRAJ6)
CAVSGESGGSYIPTF

SEQ ID NO: 217930 - protein, 14 aa, Homo sapiens
  CDR3 for beta chain variable domain of TCR clone 108965 (TRBV7-9, TRBJ2-1)
CASSSMAGFGEQFF

SEQ ID NO: 217931 - protein, 18 aa, Homo sapiens
  CDR3 for alpha chain variable domain of TCR clone 108966 (TRAV12-3, TRAJ52)
CAMSVGEAGGTSYGKLTF

SEQ ID NO: 217932 - protein, 15 aa, Homo sapiens
  CDR3 for beta chain variable domain of TCR clone 108966 (TRBV27, TRBJ1-6)
CASSFDRGLGSPLHF

SEQ ID NO: 217933 - protein, 17 aa, Homo sapiens
  CDR3 for alpha chain variable domain of TCR clone 108967 (TRAV3, TRAJ6)
CAVRDGPRAGGSYIPTF

SEQ ID NO: 217934 - protein, 15 aa, Homo sapiens
  CDR3 for beta chain variable domain of TCR clone 108967 (TRBV7-9, TRBJ1-6)
CASSSPGRGNSTLHF

SEQ ID NO: 217935 - protein, 15 aa, Homo sapiens
  CDR3 for alpha chain variable domain of TCR clone 108968 (TRAV14/DV4, TRAJ10)
CAMRELTGGGNKLTF

SEQ ID NO: 217936 - protein, 18 aa, Homo sapiens
  CDR3 for beta chain variable domain of TCR clone 108968 (TRBV7-9, TRBJ2-7)
CASSLTISGSRTWYEQYF

SEQ ID NO: 217937 - protein, 14 aa, Homo sapiens
  CDR3 for alpha chain variable domain of TCR clone 108969 (TRAV12-3, TRAJ24)
SHLPLTGGGNKLTF

SEQ ID NO: 217938 - protein, 17 aa, Homo sapiens
  CDR3 for beta chain variable domain of TCR clone 108969 (TRBV20-1, TRBJ2-1)
CSASSSGLAGSYNEQFF

SEQ ID NO: 217939 - protein, 11 aa, Homo sapiens
  CDR3 for alpha chain variable domain of TCR clone 108970 (TRAV2, TRAJ4)
CAVGWYIKLIF

SEQ ID NO: 217940 - protein, 15 aa, Homo sapiens
  CDR3 for beta chain variable domain of TCR clone 108970 (TRBV7-2, TRBJ2-2)
CASSFQRGETGELFF

SEQ ID NO: 217941 - protein, 14 aa, Homo sapiens
  CDR3 for alpha chain variable domain of TCR clone 108971 (TRAV12-2, TRAJ13)
CAVKKTGGYQKVTF

SEQ ID NO: 217942 - protein, 16 aa, Homo sapiens
  CDR3 for beta chain variable domain of TCR clone 108971 (TRBV2, TRBJ2-1)
RASRSPAGGKYNEQFF

SEQ ID NO: 217943 - protein, 16 aa, Homo sapiens
  CDR3 for alpha chain variable domain of TCR clone 108972 (TRAV30, TRAJ24)
CGTEIVYADSWGKFQF

SEQ ID NO: 217944 - protein, 13 aa, Homo sapiens
  CDR3 for beta chain variable domain of TCR clone 108972 (TRBV7-2, TRBJ1-1)
CASNLKGAKVAFF

SEQ ID NO: 217945 - protein, 15 aa, Homo sapiens
  CDR3 for alpha chain variable domain of TCR clone 108973 (TRAV20, TRAJ50)
CAVRQMKTSYDKVIF

SEQ ID NO: 217946 - protein, 14 aa, Homo sapiens
  CDR3 for beta chain variable domain of TCR clone 108973 (TRBV7-2, TRBJ1-1)
CASSFLTGTTEAFF

SEQ ID NO: 217947 - protein, 13 aa, Homo sapiens
  CDR3 for alpha chain variable domain of TCR clone 108974 (TRAV12-3, TRAJ13)
CAMSSGGYQKVTF

SEQ ID NO: 217948 - protein, 13 aa, Homo sapiens
  CDR3 for beta chain variable domain of TCR clone 108974 (TRBV20-1, TRBJ1-1)
CSAPPGGHTEAFI

SEQ ID NO: 217949 - protein, 14 aa, Homo sapiens
  CDR3 for alpha chain variable domain of TCR clone 108975 (TRAV12-3, TRAJ10)
SHLPLTGGGNKLTF

SEQ ID NO: 217950 - protein, 13 aa, Homo sapiens
  CDR3 for beta chain variable domain of TCR clone 108975 (TRBV27, TRBJ1-1)
CASSLAIGAEAFF

SEQ ID NO: 217951 - protein, 17 aa, Homo sapiens
  CDR3 for alpha chain variable domain of TCR clone 108976 (TRAV13-1, TRAJ28)
CAANPPYSGAGSYQLTF

SEQ ID NO: 217952 - protein, 13 aa, Homo sapiens
  CDR3 for beta chain variable domain of TCR clone 108976 (TRBV12-5, TRBJ2-3)
CASGDRQSDTQYF

SEQ ID NO: 217953 - protein, 14 aa, Homo sapiens
  CDR3 for alpha chain variable domain of TCR clone 108977 (TRAV38-1, TRAJ45)
CASHSGGGADGLTF

SEQ ID NO: 217954 - protein, 13 aa, Homo sapiens
  CDR3 for beta chain variable domain of TCR clone 108977 (TRBV4-1, TRBJ2-2)
CASSQENTGELFF

SEQ ID NO: 217955 - protein, 13 aa, Homo sapiens
  CDR3 for alpha chain variable domain of TCR clone 108978 (TRAV2, TRAJ40)
CAVVTSGTYKYIF

SEQ ID NO: 217956 - protein, 14 aa, Homo sapiens
  CDR3 for beta chain variable domain of TCR clone 108978 (TRBV7-2, TRBJ1-1)
CASSLLTGTTEAFF

SEQ ID NO: 217957 - protein, 13 aa, Homo sapiens
  CDR3 for alpha chain variable domain of TCR clone 108979 (TRAV8-3, TRAJ4)
WVFYSGGDNKLIF

SEQ ID NO: 217958 - protein, 14 aa, Homo sapiens
  CDR3 for beta chain variable domain of TCR clone 108979 (TRBV7-9, TRBJ2-3)
CASSLEDGTDTQYF

SEQ ID NO: 217959 - protein, 13 aa, Homo sapiens
  CDR3 for alpha chain variable domain of TCR clone 108980 (TRAV12-3, TRAJ33)
FAMSVNSNYQLIW

SEQ ID NO: 217960 - protein, 13 aa, Homo sapiens
  CDR3 for beta chain variable domain of TCR clone 108980 (TRBV7-2, TRBJ2-2)
CASSLAVTGELFF

SEQ ID NO: 217961 - protein, 15 aa, Homo sapiens
  CDR3 for alpha chain variable domain of TCR clone 108981 (TRAV8-3, TRAJ27)
CAVGPSKTNAGKTTF

SEQ ID NO: 217962 - protein, 15 aa, Homo sapiens
  CDR3 for beta chain variable domain of TCR clone 108981 (TRBV7-2, TRBJ2-1)
CASSSGLAGGNEQFF

SEQ ID NO: 217963 - protein, 17 aa, Homo sapiens
  CDR3 for alpha chain variable domain of TCR clone 108982 (TRAV3, TRAJ6)
CAVRDGPRAGGSYIPTF

SEQ ID NO: 217964 - protein, 18 aa, Homo sapiens
  CDR3 for beta chain variable domain of TCR clone 108982 (TRBV25-1, TRBJ1-2)
CASSGLQNGQGLTFGYTF

SEQ ID NO: 217965 - protein, 18 aa, Homo sapiens
  CDR3 for alpha chain variable domain of TCR clone 108983 (TRAV26-1, TRAJ22)
CIVRVALISSGSAMQLTF

SEQ ID NO: 217966 - protein, 13 aa, Homo sapiens
  CDR3 for beta chain variable domain of TCR clone 108983 (TRBV13, TRBJ2-5)
CASSPEVGETQYF

SEQ ID NO: 217967 - protein, 14 aa, Homo sapiens
  CDR3 for alpha chain variable domain of TCR clone 108984 (TRAV29/DV5, TRAJ45)
CAASFRGGADGLTF

SEQ ID NO: 217968 - protein, 15 aa, Homo sapiens
  CDR3 for beta chain variable domain of TCR clone 108984 (TRBV7-3, TRBJ2-2)
CASSETGQGTGELFF

SEQ ID NO: 217969 - protein, 17 aa, Homo sapiens
  CDR3 for alpha chain variable domain of TCR clone 108985 (TRAV3, TRAJ38)
CAVRDCLNAGNNRTLIC

SEQ ID NO: 217970 - protein, 13 aa, Homo sapiens
  CDR3 for beta chain variable domain of TCR clone 108985 (TRBV23-1, TRBJ1-4)
CASRGKFNEKLFF

SEQ ID NO: 217971 - protein, 10 aa, Homo sapiens
  CDR3 for alpha chain variable domain of TCR clone 108986 (TRAV30, TRAJ32)
CGTERDMVVL

SEQ ID NO: 217972 - protein, 13 aa, Homo sapiens
  CDR3 for beta chain variable domain of TCR clone 108986 (TRBV10-3, TRBJ2-7)
CASKLAVNYEQYF

SEQ ID NO: 217973 - protein, 13 aa, Homo sapiens
  CDR3 for alpha chain variable domain of TCR clone 108987 (TRAV25, TRAJ30)
CAGRVDRDDKIIF

SEQ ID NO: 217974 - protein, 17 aa, Homo sapiens
  CDR3 for beta chain variable domain of TCR clone 108987 (TRBV7-9, TRBJ2-6)
CASSFGAGYSGANVLTS

SEQ ID NO: 217975 - protein, 12 aa, Homo sapiens
  CDR3 for alpha chain variable domain of TCR clone 108988 (TRAV12-3, TRAJ40)
CAMSSGTYKYIF

SEQ ID NO: 217976 - protein, 15 aa, Homo sapiens
  CDR3 for beta chain variable domain of TCR clone 108988 (TRBV7-3, TRBJ2-2)
CVSSETGQGTGELFF

SEQ ID NO: 217977 - protein, 13 aa, Homo sapiens
  CDR3 for alpha chain variable domain of TCR clone 108989 (TRAV12-1, TRAJ29)
CVVNGPGNTPLVF

SEQ ID NO: 217978 - protein, 12 aa, Homo sapiens
  CDR3 for beta chain variable domain of TCR clone 108989 (TRBV7-8, TRBJ2-7)
CASSLGDREQYF

SEQ ID NO: 217979 - protein, 14 aa, Homo sapiens
  CDR3 for alpha chain variable domain of TCR clone 108990 (TRAV8-2, TRAJ4)
CVVSPSGGYNKLIF

SEQ ID NO: 217980 - protein, 15 aa, Homo sapiens
  CDR3 for beta chain variable domain of TCR clone 108990 (TRBV4-1, TRBJ1-4)
CASSDTGGTNAKLFF

SEQ ID NO: 217981 - protein, 11 aa, Homo sapiens
  CDR3 for alpha chain variable domain of TCR clone 108991 (TRAV12-3, TRAJ43)
CAMSVSNDMRF

SEQ ID NO: 217982 - protein, 18 aa, Homo sapiens
  CDR3 for beta chain variable domain of TCR clone 108991 (TRBV20-1, TRBJ2-6)
CSAETTPTHGSGANVLTF

SEQ ID NO: 217983 - protein, 15 aa, Homo sapiens
  CDR3 for alpha chain variable domain of TCR clone 108992 (TRAV8-2, TRAJ40)
CVVLGTTSGTYKYIF

SEQ ID NO: 217984 - protein, 16 aa, Homo sapiens
  CDR3 for beta chain variable domain of TCR clone 108992 (TRBV7-3, TRBJ2-1)
CASSLEGYRSYKEQFF

SEQ ID NO: 217985 - protein, 14 aa, Homo sapiens
  CDR3 for alpha chain variable domain of TCR clone 108993 (TRAV12-2, TRAJ40)
CAVKIPSGTYKYIF

SEQ ID NO: 217986 - protein, 12 aa, Homo sapiens
  CDR3 for beta chain variable domain of TCR clone 108993 (TRBV11-2, TRBJ2-2)
CASSLGGGELFL

SEQ ID NO: 217987 - protein, 16 aa, Homo sapiens
  CDR3 for alpha chain variable domain of TCR clone 108994 (TRAV23/DV6, TRAJ9)
CAASIGGNTGGFKTIF

SEQ ID NO: 217988 - protein, 15 aa, Homo sapiens
  CDR3 for beta chain variable domain of TCR clone 108994 (TRBV6-3, TRBJ2-7)
SASSSPGTVLYEQYF

SEQ ID NO: 217989 - protein, 15 aa, Homo sapiens
  CDR3 for alpha chain variable domain of TCR clone 108995 (TRAV8-3, TRAJ27)
CAVGPSKTNAGKSTF

SEQ ID NO: 217990 - protein, 15 aa, Homo sapiens
  CDR3 for beta chain variable domain of TCR clone 108995 (TRBV7-2, TRBJ2-1)
CASSSGLAGGNAQFF

SEQ ID NO: 217991 - protein, 11 aa, Homo sapiens
  CDR3 for alpha chain variable domain of TCR clone 108996 (TRAV16, TRAJ42)
CALASQGNLIF

SEQ ID NO: 217992 - protein, 13 aa, Homo sapiens
  CDR3 for beta chain variable domain of TCR clone 108996 (TRBV7-3, TRBJ2-7)
CASSQAGGYEQYF

SEQ ID NO: 217993 - protein, 11 aa, Homo sapiens
  CDR3 for alpha chain variable domain of TCR clone 108997 (TRAV2, TRAJ33)
CAVDSNYQLIW

SEQ ID NO: 217994 - protein, 14 aa, Homo sapiens
  CDR3 for beta chain variable domain of TCR clone 108997 (TRBV11-2, TRBJ2-3)
CASSRIARTDTQYF

SEQ ID NO: 217995 - protein, 13 aa, Homo sapiens
  CDR3 for alpha chain variable domain of TCR clone 108998 (TRAV12-3, TRAJ33)
CAMSVNSNYQLIW

SEQ ID NO: 217996 - protein, 15 aa, Homo sapiens
  CDR3 for beta chain variable domain of TCR clone 108998 (TRBV2, TRBJ2-7)
CASSEGLARSYEQYF

SEQ ID NO: 217997 - protein, 13 aa, Homo sapiens
  CDR3 for alpha chain variable domain of TCR clone 108999 (TRAV12-3, TRAJ26)
CAMSEPRGQNFVF

SEQ ID NO: 217998 - protein, 14 aa, Homo sapiens
  CDR3 for beta chain variable domain of TCR clone 108999 (TRBV6-1, TRBJ1-3)
CASVQGGGGNTIYF

SEQ ID NO: 217999 - protein, 12 aa, Homo sapiens
  CDR3 for alpha chain variable domain of TCR clone 109000 (TRAV26-1, TRAJ53)
CIEGGSNYKLTF

SEQ ID NO: 218000 - protein, 15 aa, Homo sapiens
  CDR3 for beta chain variable domain of TCR clone 109000 (TRBV5-1, TRBJ2-2)
RASSLLQGRPGELFF

SEQ ID NO: 218001 - protein, 14 aa, Homo sapiens
  CDR3 for alpha chain variable domain of TCR clone 109001 (TRAV16, TRAJ13)
CALRRSGGYQKVTF

SEQ ID NO: 218002 - protein, 13 aa, Homo sapiens
  CDR3 for beta chain variable domain of TCR clone 109001 (TRBV7-2, TRBJ2-1)
CASNRDRWNEQFF

SEQ ID NO: 218003 - protein, 16 aa, Homo sapiens
  CDR3 for alpha chain variable domain of TCR clone 109002 (TRAV12-2, TRAJ32)
CAVNLGQGGATNKLSF

SEQ ID NO: 218004 - protein, 15 aa, Homo sapiens
  CDR3 for beta chain variable domain of TCR clone 109002 (TRBV20-1, TRBJ2-7)
CSARGPLAGGREQYF

SEQ ID NO: 218005 - protein, 17 aa, Homo sapiens
  CDR3 for alpha chain variable domain of TCR clone 109003 (TRAV1-2, TRAJ8)
CAVRDPDENTGFQELVF

SEQ ID NO: 218006 - protein, 16 aa, Homo sapiens
  CDR3 for beta chain variable domain of TCR clone 109003 (TRBV7-9, TRBJ2-2)
CASSGFGGANTGELFF

SEQ ID NO: 218007 - protein, 13 aa, Homo sapiens
  CDR3 for alpha chain variable domain of TCR clone 109004 (TRAV35, TRAJ58)
CAGLETSGSRLAF

SEQ ID NO: 218008 - protein, 15 aa, Homo sapiens
  CDR3 for beta chain variable domain of TCR clone 109004 (TRBV20-1, TRBJ2-1)
CSARFSAGGLNEQFF

SEQ ID NO: 218009 - protein, 14 aa, Homo sapiens
  CDR3 for alpha chain variable domain of TCR clone 109005 (TRAV17, TRAJ16)
CATADFSDGQKLLF

SEQ ID NO: 218010 - protein, 15 aa, Homo sapiens
  CDR3 for beta chain variable domain of TCR clone 109005 (TRBV18, TRBJ2-1)
CASSPPSATYNEQFF

SEQ ID NO: 218011 - protein, 10 aa, Homo sapiens
  CDR3 for alpha chain variable domain of TCR clone 109006 (TRAV1-1, TRAJ33)
CAAPNYQLIW

SEQ ID NO: 218012 - protein, 12 aa, Homo sapiens
  CDR3 for beta chain variable domain of TCR clone 109006 (TRBV12-4, TRBJ2-3)
CASSSTTDTQYF

SEQ ID NO: 218013 - protein, 16 aa, Homo sapiens
  CDR3 for alpha chain variable domain of TCR clone 109007 (TRAV12-3, TRAJ53)
CAMSPGSGGSNYKLTF

SEQ ID NO: 218014 - protein, 14 aa, Homo sapiens
  CDR3 for beta chain variable domain of TCR clone 109007 (TRBV7-9, TRBJ2-1)
CASSPRDSLYEQFF

SEQ ID NO: 218015 - protein, 12 aa, Homo sapiens
  CDR3 for alpha chain variable domain of TCR clone 109008 (TRAV1-1, TRAJ8)
CAGGTGFQKLVF

SEQ ID NO: 218016 - protein, 13 aa, Homo sapiens
  CDR3 for beta chain variable domain of TCR clone 109008 (TRBV7-2, TRBJ2-2)
CASSLAVTGELFF

SEQ ID NO: 218017 - protein, 15 aa, Homo sapiens
  CDR3 for alpha chain variable domain of TCR clone 109009 (TRAV3, TRAJ36)
CAVRASQTGANNLFF

SEQ ID NO: 218018 - protein, 15 aa, Homo sapiens
  CDR3 for beta chain variable domain of TCR clone 109009 (TRBV3-1, TRBJ2-1)
CASSHDYTPRGEQFF

SEQ ID NO: 218019 - protein, 17 aa, Homo sapiens
  CDR3 for alpha chain variable domain of TCR clone 109010 (TRAV13-1, TRAJ52)
CAAGRNAGGTSYGRLTF

SEQ ID NO: 218020 - protein, 12 aa, Homo sapiens
  CDR3 for beta chain variable domain of TCR clone 109010 (TRBV29-1, TRBJ1-3)
CSTRDSGNTIYF

SEQ ID NO: 218021 - protein, 12 aa, Homo sapiens
  CDR3 for alpha chain variable domain of TCR clone 109011 (TRAV21, TRAJ33)
CAKMDSNYQLIW

SEQ ID NO: 218022 - protein, 14 aa, Homo sapiens
  CDR3 for beta chain variable domain of TCR clone 109011 (TRBV7-9, TRBJ1-6)
CASRPGTVNSPLHF

SEQ ID NO: 218023 - protein, 16 aa, Homo sapiens
  CDR3 for alpha chain variable domain of TCR clone 109012 (TRAV26-1, TRAJ36)
CIVRVSYQTGANNLFF

SEQ ID NO: 218024 - protein, 14 aa, Homo sapiens
  CDR3 for beta chain variable domain of TCR clone 109012 (TRBV7-6, TRBJ2-3)
CASSLGTVTDTQYF

SEQ ID NO: 218025 - protein, 13 aa, Homo sapiens
  CDR3 for alpha chain variable domain of TCR clone 109013 (TRAV29/DV5, TRAJ39)
CAASDNACNMLTF

SEQ ID NO: 218026 - protein, 17 aa, Homo sapiens
  CDR3 for beta chain variable domain of TCR clone 109013 (TRBV7-9, TRBJ2-3)
CASSLEEAGAYPDTQYF

SEQ ID NO: 218027 - protein, 12 aa, Homo sapiens
  CDR3 for alpha chain variable domain of TCR clone 109014 (TRAV1-1, TRAJ30)
CAVRGRDDKIIF

SEQ ID NO: 218028 - protein, 13 aa, Homo sapiens
  CDR3 for beta chain variable domain of TCR clone 109014 (TRBV11-3, TRBJ2-7)
CAISLDKLYEQYF

SEQ ID NO: 218029 - protein, 16 aa, Homo sapiens
  CDR3 for alpha chain variable domain of TCR clone 109015 (TRAV30, TRAJ24)
CGTEIVDADSWGKFQF

SEQ ID NO: 218030 - protein, 14 aa, Homo sapiens
  CDR3 for beta chain variable domain of TCR clone 109015 (TRBV7-2, TRBJ2-7)
CPSSPKTSFYEQYF

SEQ ID NO: 218031 - protein, 13 aa, Homo sapiens
  CDR3 for alpha chain variable domain of TCR clone 109016 (TRAV12-3, TRAJ54)
CAMFAQGAQKLVF

SEQ ID NO: 218032 - protein, 16 aa, Homo sapiens
  CDR3 for beta chain variable domain of TCR clone 109016 (TRBV7-6, TRBJ2-3)
CASSPRRGGLGGTQYF

SEQ ID NO: 218033 - protein, 12 aa, Homo sapiens
  CDR3 for alpha chain variable domain of TCR clone 109017 (TRAV13-1, TRAJ21)
CAAKEGFNKFYF

SEQ ID NO: 218034 - protein, 14 aa, Homo sapiens
  CDR3 for beta chain variable domain of TCR clone 109017 (TRBV2, TRBJ2-7)
CASSLTSGGYEQYF

SEQ ID NO: 218035 - protein, 14 aa, Homo sapiens
  CDR3 for alpha chain variable domain of TCR clone 109018 (TRAV1-2, TRAJ16)
CAVNRFSDGQKLLS

SEQ ID NO: 218036 - protein, 14 aa, Homo sapiens
  CDR3 for beta chain variable domain of TCR clone 109018 (TRBV7-3, TRBJ1-1)
CASSLGTGYTEAFF

SEQ ID NO: 218037 - protein, 15 aa, Homo sapiens
  CDR3 for alpha chain variable domain of TCR clone 109019 (TRAV8-6, TRAJ6)
CSVRDASGGSYIPTF

SEQ ID NO: 218038 - protein, 13 aa, Homo sapiens
  CDR3 for beta chain variable domain of TCR clone 109019 (TRBV2, TRBJ2-2)
CASRAWRTGELFF

SEQ ID NO: 218039 - protein, 13 aa, Homo sapiens
  CDR3 for alpha chain variable domain of TCR clone 109020 (TRAV35, TRAJ42)
CAWFPGSQGNLIF

SEQ ID NO: 218040 - protein, 14 aa, Homo sapiens
  CDR3 for beta chain variable domain of TCR clone 109020 (TRBV19, TRBJ2-1)
CASPTFVLSGEQFF

SEQ ID NO: 218041 - protein, 19 aa, Homo sapiens
  CDR3 for alpha chain variable domain of TCR clone 109021 (TRAV26-1, TRAJ50)
CCVLLHRQNPKTSYDKVIF

SEQ ID NO: 218042 - protein, 18 aa, Homo sapiens
  CDR3 for beta chain variable domain of TCR clone 109021 (TRBV7-2, TRBJ2-3)
CASSLETSRGRKADTQYF

SEQ ID NO: 218043 - protein, 18 aa, Homo sapiens
  CDR3 for alpha chain variable domain of TCR clone 109022 (TRAV13-1, TRAJ52)
CAASKRSAGGTSYGKMTF

SEQ ID NO: 218044 - protein, 14 aa, Homo sapiens
  CDR3 for beta chain variable domain of TCR clone 109022 (TRBV19, TRBJ2-1)
CASPTFVLSGEQFF

SEQ ID NO: 218045 - protein, 13 aa, Homo sapiens
  CDR3 for alpha chain variable domain of TCR clone 109023 (TRAV3, TRAJ21)
CLWATSTNFTLDL

SEQ ID NO: 218046 - protein, 16 aa, Homo sapiens
  CDR3 for beta chain variable domain of TCR clone 109023 (TRBV19, TRBJ2-1)
CASSKAGPSSYNEQFF

SEQ ID NO: 218047 - protein, 17 aa, Homo sapiens
  CDR3 for alpha chain variable domain of TCR clone 109024 (TRAV3, TRAJ42)
CAVRDRDHGGSQGNLIF

SEQ ID NO: 218048 - protein, 15 aa, Homo sapiens
  CDR3 for beta chain variable domain of TCR clone 109024 (TRBV7-2, TRBJ2-7)
CASSWGQGAIYEQYF

SEQ ID NO: 218049 - protein, 14 aa, Homo sapiens
  CDR3 for alpha chain variable domain of TCR clone 109025 (TRAV2, TRAJ9)
CAVEDRSGGFKTIF

SEQ ID NO: 218050 - protein, 18 aa, Homo sapiens
  CDR3 for beta chain variable domain of TCR clone 109025 (TRBV11-2, TRBJ2-3)
CAGSLGGASRGAPNTQYF

SEQ ID NO: 218051 - protein, 17 aa, Homo sapiens
  CDR3 for alpha chain variable domain of TCR clone 109026 (TRAV36/DV7, TRAJ52)
CAVAQRAGSTSYGKLTF

SEQ ID NO: 218052 - protein, 14 aa, Homo sapiens
  CDR3 for beta chain variable domain of TCR clone 109026 (TRBV20-1, TRBJ1-1)
CSAQTRIGGTEAFF

SEQ ID NO: 218053 - protein, 10 aa, Homo sapiens
  CDR3 for alpha chain variable domain of TCR clone 109027 (TRAV23/DV6, TRAJ31)
YARGGARLMF

SEQ ID NO: 218054 - protein, 14 aa, Homo sapiens
  CDR3 for beta chain variable domain of TCR clone 109027 (TRBV7-8, TRBJ1-2)
CASSPDSLSYGYTF

SEQ ID NO: 218055 - protein, 20 aa, Homo sapiens
  CDR3 for alpha chain variable domain of TCR clone 109028 (TRAV12-2, TRAJ52)
SPVIQPPARAGGTSYGKLTF

SEQ ID NO: 218056 - protein, 13 aa, Homo sapiens
  CDR3 for beta chain variable domain of TCR clone 109028 (TRBV19, TRBJ1-5)
CASSEGSNQPQHF

SEQ ID NO: 218057 - protein, 23 aa, Homo sapiens
  CDR3 for alpha chain variable domain of TCR clone 109029 (TRAV26-1, TRAJ38)
CIADNAGNNHIQNPDPAVYELRD

SEQ ID NO: 218058 - protein, 13 aa, Homo sapiens
  CDR3 for beta chain variable domain of TCR clone 109029 (TRBV20-1, TRBJ1-1)
CSARGGGNTEAFF

SEQ ID NO: 218059 - protein, 17 aa, Homo sapiens
  CDR3 for alpha chain variable domain of TCR clone 109030 (TRAV26-2, TRAJ32)
ERCCCLGYGGATNKLIF

SEQ ID NO: 218060 - protein, 14 aa, Homo sapiens
  CDR3 for beta chain variable domain of TCR clone 109030 (TRBV4-2, TRBJ2-1)
CASGLDRAYNEQFF

SEQ ID NO: 218061 - protein, 15 aa, Homo sapiens
  CDR3 for alpha chain variable domain of TCR clone 109031 (TRAV12-1, TRAJ41)
CVVNGASNSRYALNF

SEQ ID NO: 218062 - protein, 15 aa, Homo sapiens
  CDR3 for beta chain variable domain of TCR clone 109031 (TRBV7-2, TRBJ1-5)
CASGSTGVDNQPQHF

SEQ ID NO: 218063 - protein, 17 aa, Homo sapiens
  CDR3 for alpha chain variable domain of TCR clone 109032 (TRAV3, TRAJ6)
CAVRDGPRAGGSYLPTF

SEQ ID NO: 218064 - protein, 12 aa, Homo sapiens
  CDR3 for beta chain variable domain of TCR clone 109032 (TRBV11-2, TRBJ2-1)
CASSPGNNEQFF

SEQ ID NO: 218065 - protein, 14 aa, Homo sapiens
  CDR3 for alpha chain variable domain of TCR clone 109033 (TRAV1-2, TRAJ16)
CAVNRFSDGQKLLL

SEQ ID NO: 218066 - protein, 12 aa, Homo sapiens
  CDR3 for beta chain variable domain of TCR clone 109033 (TRBV7-6, TRBJ2-7)
CASSLADSEQYF

SEQ ID NO: 218067 - protein, 16 aa, Homo sapiens
  CDR3 for alpha chain variable domain of TCR clone 109034 (TRAV27, TRAJ53)
CAAPEGSGGSNYKLTF

SEQ ID NO: 218068 - protein, 14 aa, Homo sapiens
  CDR3 for beta chain variable domain of TCR clone 109034 (TRBV19, TRBJ2-1)
CASSRLASINEQFF

SEQ ID NO: 218069 - protein, 23 aa, Homo sapiens
  CDR3 for alpha chain variable domain of TCR clone 109035 (TRAV26-1, TRAJ38)
CIVSPLNAGNNHIQNPDPAVYQL

SEQ ID NO: 218070 - protein, 13 aa, Homo sapiens
  CDR3 for beta chain variable domain of TCR clone 109035 (TRBV18, TRBJ1-1)
CASSPNGDTEAFF

SEQ ID NO: 218071 - protein, 10 aa, Homo sapiens
  CDR3 for alpha chain variable domain of TCR clone 109036 (TRAV26-1, TRAJ40)
CIAGTYKYIF

SEQ ID NO: 218072 - protein, 15 aa, Homo sapiens
  CDR3 for beta chain variable domain of TCR clone 109036 (TRBV19, TRBJ2-1)
CAGRSPGVPLDEQFF

SEQ ID NO: 218073 - protein, 15 aa, Homo sapiens
  CDR3 for alpha chain variable domain of TCR clone 109037 (TRAV12-3, TRAJ6)
CAMSPASGGSYIPTF

SEQ ID NO: 218074 - protein, 14 aa, Homo sapiens
  CDR3 for beta chain variable domain of TCR clone 109037 (TRBV25-1, TRBJ1-1)
CASTHLGGNTEAFF

SEQ ID NO: 218075 - protein, 13 aa, Homo sapiens
  CDR3 for alpha chain variable domain of TCR clone 109038 (TRAV12-2, TRAJ42)
CAVKRGSQGNLIF

SEQ ID NO: 218076 - protein, 11 aa, Homo sapiens
  CDR3 for beta chain variable domain of TCR clone 109038 (TRBV12-4, TRBJ2-2)
CASSSAGELFF

SEQ ID NO: 218077 - protein, 13 aa, Homo sapiens
  CDR3 for alpha chain variable domain of TCR clone 109039 (TRAV13-1, TRAJ43)
CAASLSNNNDMRF

SEQ ID NO: 218078 - protein, 17 aa, Homo sapiens
  CDR3 for beta chain variable domain of TCR clone 109039 (TRBV5-3, TRBJ2-1)
CARSPRTSGSSYNEQFF

SEQ ID NO: 218079 - protein, 14 aa, Homo sapiens
  CDR3 for alpha chain variable domain of TCR clone 109040 (TRAV13-1, TRAJ44)
CAAKATGTASKLTF

SEQ ID NO: 218080 - protein, 14 aa, Homo sapiens
  CDR3 for beta chain variable domain of TCR clone 109040 (TRBV7-9, TRBJ2-5)
CASSLVGGEETQYF

SEQ ID NO: 218081 - protein, 13 aa, Homo sapiens
  CDR3 for alpha chain variable domain of TCR clone 109041 (TRAV17, TRAJ9)
CATGSTGGFKTIL

SEQ ID NO: 218082 - protein, 14 aa, Homo sapiens
  CDR3 for beta chain variable domain of TCR clone 109041 (TRBV7-8, TRBJ2-7)
CASTFRGGPNEQYF

SEQ ID NO: 218083 - protein, 14 aa, Homo sapiens
  CDR3 for alpha chain variable domain of TCR clone 109042 (TRAV1-2, TRAJ17)
CAVGLGAAGNKLTF

SEQ ID NO: 218084 - protein, 15 aa, Homo sapiens
  CDR3 for beta chain variable domain of TCR clone 109042 (TRBV19, TRBJ1-1)
CASTSGQIQNTEAFF

SEQ ID NO: 218085 - protein, 14 aa, Homo sapiens
  CDR3 for alpha chain variable domain of TCR clone 109043 (TRAV12-3, TRAJ10)
SHLPLTGGGNKLTF

SEQ ID NO: 218086 - protein, 12 aa, Homo sapiens
  CDR3 for beta chain variable domain of TCR clone 109043 (TRBV7-9, TRBJ2-7)
RATRTDAYEQYF

SEQ ID NO: 218087 - protein, 15 aa, Homo sapiens
  CDR3 for alpha chain variable domain of TCR clone 109044 (TRAV35, TRAJ58)
CAGRRQETSGSRLTF

SEQ ID NO: 218088 - protein, 16 aa, Homo sapiens
  CDR3 for beta chain variable domain of TCR clone 109044 (TRBV2, TRBJ2-1)
CASSVGGSLSYSEQFF

SEQ ID NO: 218089 - protein, 11 aa, Homo sapiens
  CDR3 for alpha chain variable domain of TCR clone 109045 (TRAV8-3, TRAJ42)
NYGGSQGNLIF

SEQ ID NO: 218090 - protein, 14 aa, Homo sapiens
  CDR3 for beta chain variable domain of TCR clone 109045 (TRBV25-1, TRBJ1-1)
CASTHLGGNTEAFF

SEQ ID NO: 218091 - protein, 13 aa, Homo sapiens
  CDR3 for alpha chain variable domain of TCR clone 109046 (TRAV36/DV7, TRAJ49)
CAVEANTGSQFYF

SEQ ID NO: 218092 - protein, 13 aa, Homo sapiens
  CDR3 for beta chain variable domain of TCR clone 109046 (TRBV10-3, TRBJ2-7)
CASKLAVNYEQYF

SEQ ID NO: 218093 - protein, 12 aa, Homo sapiens
  CDR3 for alpha chain variable domain of TCR clone 109047 (TRAV38-1, TRAJ47)
CAFETYGNKLVF

SEQ ID NO: 218094 - protein, 16 aa, Homo sapiens
  CDR3 for beta chain variable domain of TCR clone 109047 (TRBV7-3, TRBJ2-2)
CASSLKRGTLSGELFF

SEQ ID NO: 218095 - protein, 11 aa, Homo sapiens
  CDR3 for alpha chain variable domain of TCR clone 109048 (TRAV13-1, TRAJ52)
PGGTSYGKLTF

SEQ ID NO: 218096 - protein, 16 aa, Homo sapiens
  CDR3 for beta chain variable domain of TCR clone 109048 (TRBV28, TRBJ2-7)
CASSPWVATGDISQYF

SEQ ID NO: 218097 - protein, 13 aa, Homo sapiens
  CDR3 for alpha chain variable domain of TCR clone 109049 (TRAV26-1, TRAJ36)
CIVVGTGANNLFF

SEQ ID NO: 218098 - protein, 14 aa, Homo sapiens
  CDR3 for beta chain variable domain of TCR clone 109049 (TRBV6-1, TRBJ1-3)
CASVQGGGGNTIYF

SEQ ID NO: 218099 - protein, 14 aa, Homo sapiens
  CDR3 for alpha chain variable domain of TCR clone 109050 (TRAV3, TRAJ21)
CAVESPANFNKFYF

SEQ ID NO: 218100 - protein, 18 aa, Homo sapiens
  CDR3 for beta chain variable domain of TCR clone 109050 (TRBV7-9, TRBJ2-1)
CASSLAVSGTSGRNEQFF

SEQ ID NO: 218101 - protein, 14 aa, Homo sapiens
  CDR3 for alpha chain variable domain of TCR clone 109051 (TRAV4, TRAJ17)
CLVGPRAAGNKLTF

SEQ ID NO: 218102 - protein, 16 aa, Homo sapiens
  CDR3 for beta chain variable domain of TCR clone 109051 (TRBV5-1, TRBJ2-7)
CASSWGTGGRAWEQYF

SEQ ID NO: 218103 - protein, 14 aa, Homo sapiens
  CDR3 for alpha chain variable domain of TCR clone 109052 (TRAV12-3, TRAJ42)
CVMNYGGSQGNLIF

SEQ ID NO: 218104 - protein, 15 aa, Homo sapiens
  CDR3 for beta chain variable domain of TCR clone 109052 (TRBV5-7, TRBJ1-5)
CASSYGKLWDQPQHF

SEQ ID NO: 218105 - protein, 14 aa, Homo sapiens
  CDR3 for alpha chain variable domain of TCR clone 109053 (TRAV12-2, TRAJ5)
CAVNRSTGRKALTF

SEQ ID NO: 218106 - protein, 12 aa, Homo sapiens
  CDR3 for beta chain variable domain of TCR clone 109053 (TRBV19, TRBJ1-5)
CASSIAQQPQHF

SEQ ID NO: 218107 - protein, 11 aa, Homo sapiens
  CDR3 for alpha chain variable domain of TCR clone 109054 (TRAV3, TRAJ21)
CAVGNFNKFYF

SEQ ID NO: 218108 - protein, 14 aa, Homo sapiens
  CDR3 for beta chain variable domain of TCR clone 109054 (TRBV11-2, TRBJ2-5)
CASRPLAGRETQYF

SEQ ID NO: 218109 - protein, 13 aa, Homo sapiens
  CDR3 for alpha chain variable domain of TCR clone 109055 (TRAV26-1, TRAJ30)
CTVNMNRDDKIIF

SEQ ID NO: 218110 - protein, 16 aa, Homo sapiens
  CDR3 for beta chain variable domain of TCR clone 109055 (TRBV16, TRBJ2-7)
CASSRPAGESSYEQYF

SEQ ID NO: 218111 - protein, 15 aa, Homo sapiens
  CDR3 for alpha chain variable domain of TCR clone 109056 (TRAV3, TRAJ5)
CAVRDLDTGRRALTF

SEQ ID NO: 218112 - protein, 16 aa, Homo sapiens
  CDR3 for beta chain variable domain of TCR clone 109056 (TRBV5-4, TRBJ2-1)
CASSLVGSGQDNEQFF

SEQ ID NO: 218113 - protein, 13 aa, Homo sapiens
  CDR3 for alpha chain variable domain of TCR clone 109057 (TRAV12-3, TRAJ13)
CAMSSGGYQKVTF

SEQ ID NO: 218114 - protein, 16 aa, Homo sapiens
  CDR3 for beta chain variable domain of TCR clone 109057 (TRBV7-9, TRBJ1-2)
CASSPGGGAINYGYTF

SEQ ID NO: 218115 - protein, 15 aa, Homo sapiens
  CDR3 for alpha chain variable domain of TCR clone 109058 (TRAV2, TRAJ22)
CAVSSRGGSARQLTF

SEQ ID NO: 218116 - protein, 11 aa, Homo sapiens
  CDR3 for beta chain variable domain of TCR clone 109058 (TRBV27, TRBJ2-3)
CASSLGDTQYF

SEQ ID NO: 218117 - protein, 16 aa, Homo sapiens
  CDR3 for alpha chain variable domain of TCR clone 109059 (TRAV4, TRAJ9)
CLVGDPNRPGGFKPIF

SEQ ID NO: 218118 - protein, 14 aa, Homo sapiens
  CDR3 for beta chain variable domain of TCR clone 109059 (TRBV20-1, TRBJ1-1)
CSAQTRIGGTEAFF

SEQ ID NO: 218119 - protein, 15 aa, Homo sapiens
  CDR3 for alpha chain variable domain of TCR clone 109060 (TRAV20, TRAJ53)
CAVQASGGSNYKLTF

SEQ ID NO: 218120 - protein, 14 aa, Homo sapiens
  CDR3 for beta chain variable domain of TCR clone 109060 (TRBV7-2, TRBJ2-7)
CASSPKTSFYEQYF

SEQ ID NO: 218121 - protein, 19 aa, Homo sapiens
  CDR3 for alpha chain variable domain of TCR clone 109061 (TRAV2, TRAJ20)
ILQVREADAAVYRDCKLSF

SEQ ID NO: 218122 - protein, 14 aa, Homo sapiens
  CDR3 for beta chain variable domain of TCR clone 109061 (TRBV7-8, TRBJ2-7)
CASSVGQGAYEQYF

SEQ ID NO: 218123 - protein, 14 aa, Homo sapiens
  CDR3 for alpha chain variable domain of TCR clone 109062 (TRAV9-2, TRAJ24)
CALNPRGSWGKLQF

SEQ ID NO: 218124 - protein, 12 aa, Homo sapiens
  CDR3 for beta chain variable domain of TCR clone 109062 (TRBV11-2, TRBJ2-1)
CASSPGNNEQFF

SEQ ID NO: 218125 - protein, 13 aa, Homo sapiens
  CDR3 for alpha chain variable domain of TCR clone 109063 (TRAV26-1, TRAJ48)
CIVRVVGDEKLTF

SEQ ID NO: 218126 - protein, 15 aa, Homo sapiens
  CDR3 for beta chain variable domain of TCR clone 109063 (TRBV7-2, TRBJ2-3)
CASSLVVRGPDTQYF

SEQ ID NO: 218127 - protein, 12 aa, Homo sapiens
  CDR3 for alpha chain variable domain of TCR clone 109064 (TRAV21, TRAJ27)
CAANTNAGKSTF

SEQ ID NO: 218128 - protein, 16 aa, Homo sapiens
  CDR3 for beta chain variable domain of TCR clone 109064 (TRBV12-4, TRBJ1-5)
CASSRPVGGSNQPQHF

SEQ ID NO: 218129 - protein, 14 aa, Homo sapiens
  CDR3 for alpha chain variable domain of TCR clone 109065 (TRAV8-4, TRAJ13)
CAVTLSGGYQKVTF

SEQ ID NO: 218130 - protein, 16 aa, Homo sapiens
  CDR3 for beta chain variable domain of TCR clone 109065 (TRBV27, TRBJ2-5)
CASSFGPGGTKETQYF

SEQ ID NO: 218131 - protein, 17 aa, Homo sapiens
  CDR3 for alpha chain variable domain of TCR clone 109066 (TRAV2, TRAJ22)
ILQVREADAAEQRQLTF

SEQ ID NO: 218132 - protein, 17 aa, Homo sapiens
  CDR3 for beta chain variable domain of TCR clone 109066 (TRBV7-3, TRBJ2-3)
CASSPRGQGYGTDTQYF

SEQ ID NO: 218133 - protein, 14 aa, Homo sapiens
  CDR3 for alpha chain variable domain of TCR clone 109067 (TRAV9-2, TRAJ39)
CALYIYNAGNMLTF

SEQ ID NO: 218134 - protein, 15 aa, Homo sapiens
  CDR3 for beta chain variable domain of TCR clone 109067 (TRBV4-1, TRBJ2-7)
CASSQNTGRLYEQYF

SEQ ID NO: 218135 - protein, 14 aa, Homo sapiens
  CDR3 for alpha chain variable domain of TCR clone 109068 (TRAV12-1, TRAJ9)
CVVTGDTVGFKTIF

SEQ ID NO: 218136 - protein, 16 aa, Homo sapiens
  CDR3 for beta chain variable domain of TCR clone 109068 (TRBV29-1, TRBJ1-2)
CSVEANRDIANYGYTF

SEQ ID NO: 218137 - protein, 15 aa, Homo sapiens
  CDR3 for alpha chain variable domain of TCR clone 109069 (TRAV3, TRAJ47)
CAVRDIGEYGHKLVF

SEQ ID NO: 218138 - protein, 14 aa, Homo sapiens
  CDR3 for beta chain variable domain of TCR clone 109069 (TRBV13, TRBJ2-5)
CASSLERVGETQYF

SEQ ID NO: 218139 - protein, 16 aa, Homo sapiens
  CDR3 for alpha chain variable domain of TCR clone 109070 (TRAV2, TRAJ20)
TTVLWSFRSNDYKLSF

SEQ ID NO: 218140 - protein, 15 aa, Homo sapiens
  CDR3 for beta chain variable domain of TCR clone 109070 (TRBV4-1, TRBJ2-5)
CASSQWDLYQETQYF

SEQ ID NO: 218141 - protein, 16 aa, Homo sapiens
  CDR3 for alpha chain variable domain of TCR clone 109071 (TRAV30, TRAJ24)
CGTEIVDADSGGKFQF

SEQ ID NO: 218142 - protein, 13 aa, Homo sapiens
  CDR3 for beta chain variable domain of TCR clone 109071 (TRBV7-2, TRBJ1-4)
CASSLAGLEKLFF

SEQ ID NO: 218143 - protein, 13 aa, Homo sapiens
  CDR3 for alpha chain variable domain of TCR clone 109072 (TRAV3, TRAJ21)
CAVREPDFNKFYF

SEQ ID NO: 218144 - protein, 13 aa, Homo sapiens
  CDR3 for beta chain variable domain of TCR clone 109072 (TRBV7-7, TRBJ2-3)
CASSLSRADTQYF

SEQ ID NO: 218145 - protein, 14 aa, Homo sapiens
  CDR3 for alpha chain variable domain of TCR clone 109073 (TRAV17, TRAJ57)
CATDPQGGSEKLVF

SEQ ID NO: 218146 - protein, 17 aa, Homo sapiens
  CDR3 for beta chain variable domain of TCR clone 109073 (TRBV5-1, TRBJ2-2)
CDSSLAGLSGGTGELFF

SEQ ID NO: 218147 - protein, 16 aa, Homo sapiens
  CDR3 for alpha chain variable domain of TCR clone 109074 (TRAV36/DV7, TRAJ33)
WRPGNKVLDSNHQLIW

SEQ ID NO: 218148 - protein, 15 aa, Homo sapiens
  CDR3 for beta chain variable domain of TCR clone 109074 (TRBV29-1, TRBJ2-1)
CSVGRHALFYNEQFF

SEQ ID NO: 218149 - protein, 15 aa, Homo sapiens
  CDR3 for alpha chain variable domain of TCR clone 109075 (TRAV29/DV5, TRAJ24)
CAASGPTDSWGKFQF

SEQ ID NO: 218150 - protein, 12 aa, Homo sapiens
  CDR3 for beta chain variable domain of TCR clone 109075 (TRBV11-2, TRBJ2-2)
CASSLPTGELFF

SEQ ID NO: 218151 - protein, 14 aa, Homo sapiens
  CDR3 for alpha chain variable domain of TCR clone 109076 (TRAV12-1, TRAJ42)
CVVIYGGSQGNLIF

SEQ ID NO: 218152 - protein, 13 aa, Homo sapiens
  CDR3 for beta chain variable domain of TCR clone 109076 (TRBV18, TRBJ2-5)
CASSPPDKETQYF

SEQ ID NO: 218153 - protein, 14 aa, Homo sapiens
  CDR3 for alpha chain variable domain of TCR clone 109077 (TRAV1-2, TRAJ16)
CAVNRFSDGQKLLF

SEQ ID NO: 218154 - protein, 12 aa, Homo sapiens
  CDR3 for beta chain variable domain of TCR clone 109077 (TRBV27, TRBJ2-2)
CASKLFTGELFF

SEQ ID NO: 218155 - protein, 15 aa, Homo sapiens
  CDR3 for alpha chain variable domain of TCR clone 109078 (TRAV17, TRAJ57)
CATGPSQGGSEKLVF

SEQ ID NO: 218156 - protein, 14 aa, Homo sapiens
  CDR3 for beta chain variable domain of TCR clone 109078 (TRBV12-5, TRBJ2-5)
CAIGSRTHQETQYF

SEQ ID NO: 218157 - protein, 11 aa, Homo sapiens
  CDR3 for alpha chain variable domain of TCR clone 109079 (TRAV1-2, TRAJ11)
CAVRGYSTLTF

SEQ ID NO: 218158 - protein, 17 aa, Homo sapiens
  CDR3 for beta chain variable domain of TCR clone 109079 (TRBV13, TRBJ2-3)
CASSLSRVAGGRNTQYF

SEQ ID NO: 218159 - protein, 12 aa, Homo sapiens
  CDR3 for alpha chain variable domain of TCR clone 109080 (TRAV13-2, TRAJ23)
CAERHRGGKLIF

SEQ ID NO: 218160 - protein, 12 aa, Homo sapiens
  CDR3 for beta chain variable domain of TCR clone 109080 (TRBV11-2, TRBJ2-2)
CASSLGGGELFF

SEQ ID NO: 218161 - protein, 14 aa, Homo sapiens
  CDR3 for alpha chain variable domain of TCR clone 109081 (TRAV12-1, TRAJ24)
CVVRSTDSWGKFQF

SEQ ID NO: 218162 - protein, 13 aa, Homo sapiens
  CDR3 for beta chain variable domain of TCR clone 109081 (TRBV2, TRBJ2-3)
CASILAGGQEQYF

SEQ ID NO: 218163 - protein, 17 aa, Homo sapiens
  CDR3 for alpha chain variable domain of TCR clone 109082 (TRAV3, TRAJ6)
CAVRDGPRAGGSYKPTF

SEQ ID NO: 218164 - protein, 16 aa, Homo sapiens
  CDR3 for beta chain variable domain of TCR clone 109082 (TRBV7-8, TRBJ2-3)
CASSTEGQRETDTQYF

SEQ ID NO: 218165 - protein, 14 aa, Homo sapiens
  CDR3 for alpha chain variable domain of TCR clone 109083 (TRAV8-1, TRAJ24)
CAVNAADSWGKLQF

SEQ ID NO: 218166 - protein, 13 aa, Homo sapiens
  CDR3 for beta chain variable domain of TCR clone 109083 (TRBV4-2, TRBJ1-1)
CASSQAGNTEAFF

SEQ ID NO: 218167 - protein, 15 aa, Homo sapiens
  CDR3 for alpha chain variable domain of TCR clone 109084 (TRAV3, TRAJ9)
CAVRARNTGGFKTIF

SEQ ID NO: 218168 - protein, 16 aa, Homo sapiens
  CDR3 for beta chain variable domain of TCR clone 109084 (TRBV20-1, TRBJ1-4)
CSAPGQGLLTNEKLFF

SEQ ID NO: 218169 - protein, 14 aa, Homo sapiens
  CDR3 for alpha chain variable domain of TCR clone 109085 (TRAV8-4, TRAJ8)
CAVSVVTGFQKLVF

SEQ ID NO: 218170 - protein, 15 aa, Homo sapiens
  CDR3 for beta chain variable domain of TCR clone 109085 (TRBV2, TRBJ2-3)
CASSGEGTGTDTQYF

SEQ ID NO: 218171 - protein, 14 aa, Homo sapiens
  CDR3 for alpha chain variable domain of TCR clone 109086 (TRAV1-2, TRAJ16)
CAVNRFSGGQKLLF

SEQ ID NO: 218172 - protein, 13 aa, Homo sapiens
  CDR3 for beta chain variable domain of TCR clone 109086 (TRBV19, TRBJ1-2)
CASSVPGQDGYTF

SEQ ID NO: 218173 - protein, 16 aa, Homo sapiens
  CDR3 for alpha chain variable domain of TCR clone 109087 (TRAV3, TRAJ5)
CAVRNLMDTRRRALTF

SEQ ID NO: 218174 - protein, 16 aa, Homo sapiens
  CDR3 for beta chain variable domain of TCR clone 109087 (TRBV4-2, TRBJ2-7)
CASSQEGLANSYEQYF

SEQ ID NO: 218175 - protein, 13 aa, Homo sapiens
  CDR3 for alpha chain variable domain of TCR clone 109088 (TRAV8-3, TRAJ40)
CAVGAQYLRNLQI

SEQ ID NO: 218176 - protein, 17 aa, Homo sapiens
  CDR3 for beta chain variable domain of TCR clone 109088 (TRBV4-1, TRBJ1-4)
CASSQEGPRGVEEKLFF

SEQ ID NO: 218177 - protein, 18 aa, Homo sapiens
  CDR3 for alpha chain variable domain of TCR clone 109089 (TRAV26-2, TRAJ33)
CCVLLHPEEPASNYQLIW

SEQ ID NO: 218178 - protein, 17 aa, Homo sapiens
  CDR3 for beta chain variable domain of TCR clone 109089 (TRBV19, TRBJ2-6)
CASSTGQVFSGANVLTF

SEQ ID NO: 218179 - protein, 10 aa, Homo sapiens
  CDR3 for alpha chain variable domain of TCR clone 109090 (TRAV23/DV6, TRAJ57)
CAASSTLSQG

SEQ ID NO: 218180 - protein, 14 aa, Homo sapiens
  CDR3 for beta chain variable domain of TCR clone 109090 (TRBV25-1, TRBJ1-1)
CASTHPGGNTGAFF

SEQ ID NO: 218181 - protein, 14 aa, Homo sapiens
  CDR3 for alpha chain variable domain of TCR clone 109091 (TRAV10, TRAJ34)
CVVSRGGDTDKLIF

SEQ ID NO: 218182 - protein, 17 aa, Homo sapiens
  CDR3 for beta chain variable domain of TCR clone 109091 (TRBV6-3, TRBJ2-3)
CASRRPLGGGGTDTQYF

SEQ ID NO: 218183 - protein, 16 aa, Homo sapiens
  CDR3 for alpha chain variable domain of TCR clone 109092 (TRAV3, TRAJ37)
CAVRGKGSGNTGKLIF

SEQ ID NO: 218184 - protein, 13 aa, Homo sapiens
  CDR3 for beta chain variable domain of TCR clone 109092 (TRBV11-2, TRBJ2-5)
CASSSTGEETQYF

SEQ ID NO: 218185 - protein, 11 aa, Homo sapiens
  CDR3 for alpha chain variable domain of TCR clone 109093 (TRAV17, TRAJ36)
CAPTGANNLFF

SEQ ID NO: 218186 - protein, 12 aa, Homo sapiens
  CDR3 for beta chain variable domain of TCR clone 109093 (TRBV29-1, TRBJ2-3)
CSFTGGADTQYF

SEQ ID NO: 218187 - protein, 14 aa, Homo sapiens
  CDR3 for alpha chain variable domain of TCR clone 109094 (TRAV13-1, TRAJ9)
CAASALTGGLKTIF

SEQ ID NO: 218188 - protein, 16 aa, Homo sapiens
  CDR3 for beta chain variable domain of TCR clone 109094 (TRBV12-4, TRBJ2-3)
CASSFGTGGISDTQYF

SEQ ID NO: 218189 - protein, 16 aa, Homo sapiens
  CDR3 for alpha chain variable domain of TCR clone 109095 (TRAV26-1, TRAJ37)
CIVRGDGSGNTGKLIF

SEQ ID NO: 218190 - protein, 14 aa, Homo sapiens
  CDR3 for beta chain variable domain of TCR clone 109095 (TRBV11-2, TRBJ2-5)
CDSSRTGGIETQYF

SEQ ID NO: 218191 - protein, 10 aa, Homo sapiens
  CDR3 for alpha chain variable domain of TCR clone 109096 (TRAV12-3, TRAJ49)
CAMNDDQFYF

SEQ ID NO: 218192 - protein, 15 aa, Homo sapiens
  CDR3 for beta chain variable domain of TCR clone 109096 (TRBV12-4, TRBJ2-2)
CASGRLGGNTGELFF

SEQ ID NO: 218193 - protein, 17 aa, Homo sapiens
  CDR3 for alpha chain variable domain of TCR clone 109097 (TRAV3, TRAJ38)
CAVRDCLNAGNNRKLIW

SEQ ID NO: 218194 - protein, 12 aa, Homo sapiens
  CDR3 for beta chain variable domain of TCR clone 109097 (TRBV11-2, TRBJ2-2)
CASSLGGGELFF

SEQ ID NO: 218195 - protein, 13 aa, Homo sapiens
  CDR3 for alpha chain variable domain of TCR clone 109098 (TRAV12-1, TRAJ6)
CVVFPGGIYIPTF

SEQ ID NO: 218196 - protein, 14 aa, Homo sapiens
  CDR3 for beta chain variable domain of TCR clone 109098 (TRBV20-1, TRBJ1-3)
CSASPTGAGNTIYF

SEQ ID NO: 218197 - protein, 13 aa, Homo sapiens
  CDR3 for alpha chain variable domain of TCR clone 109099 (TRAV36/DV7, TRAJ34)
CAGRPYNTDKPIF

SEQ ID NO: 218198 - protein, 15 aa, Homo sapiens
  CDR3 for beta chain variable domain of TCR clone 109099 (TRBV27, TRBJ1-6)
CASSFDRGLGSPLHF

SEQ ID NO: 218199 - protein, 16 aa, Homo sapiens
  CDR3 for alpha chain variable domain of TCR clone 109100 (TRAV30, TRAJ24)
CGAEIVDADSWGKFQF

SEQ ID NO: 218200 - protein, 16 aa, Homo sapiens
  CDR3 for beta chain variable domain of TCR clone 109100 (TRBV4-1, TRBJ1-2)
CASSQESRGGSYGYTF

SEQ ID NO: 218201 - protein, 16 aa, Homo sapiens
  CDR3 for alpha chain variable domain of TCR clone 109101 (TRAV12-3, TRAJ53)
CAMSPGSGGSNYKLTF

SEQ ID NO: 218202 - protein, 15 aa, Homo sapiens
  CDR3 for beta chain variable domain of TCR clone 109101 (TRBV7-2, TRBJ2-1)
CASTHGTGIYNEQFF

SEQ ID NO: 218203 - protein, 17 aa, Homo sapiens
  CDR3 for alpha chain variable domain of TCR clone 109102 (TRAV12-3, TRAJ26)
CAMSGGRWDNYGQNFVF

SEQ ID NO: 218204 - protein, 12 aa, Homo sapiens
  CDR3 for beta chain variable domain of TCR clone 109102 (TRBV19, TRBJ1-1)
CASSTSGIEAFF

SEQ ID NO: 218205 - protein, 14 aa, Homo sapiens
  CDR3 for alpha chain variable domain of TCR clone 109103 (TRAV23/DV6, TRAJ37)
CAASTSSNTGKLIF

SEQ ID NO: 218206 - protein, 14 aa, Homo sapiens
  CDR3 for beta chain variable domain of TCR clone 109103 (TRBV28, TRBJ1-2)
CASRIQGANYGYTF

SEQ ID NO: 218207 - protein, 13 aa, Homo sapiens
  CDR3 for alpha chain variable domain of TCR clone 109104 (TRAV12-2, TRAJ42)
CAVKRGSQGNLIF

SEQ ID NO: 218208 - protein, 14 aa, Homo sapiens
  CDR3 for beta chain variable domain of TCR clone 109104 (TRBV28, TRBJ2-1)
CASSYYTAYNEQFF

SEQ ID NO: 218209 - protein, 12 aa, Homo sapiens
  CDR3 for alpha chain variable domain of TCR clone 109105 (TRAV23/DV6, TRAJ30)
CAASKGDEKIIF

SEQ ID NO: 218210 - protein, 15 aa, Homo sapiens
  CDR3 for beta chain variable domain of TCR clone 109105 (TRBV20-1, TRBJ2-7)
CSARDRVSGMDEQYF

SEQ ID NO: 218211 - protein, 14 aa, Homo sapiens
  CDR3 for alpha chain variable domain of TCR clone 109106 (TRAV1-2, TRAJ8)
CAVREDTGFQKLVF

SEQ ID NO: 218212 - protein, 15 aa, Homo sapiens
  CDR3 for beta chain variable domain of TCR clone 109106 (TRBV4-1, TRBJ2-7)
CASSQNTRRLYEQYF

SEQ ID NO: 218213 - protein, 14 aa, Homo sapiens
  CDR3 for alpha chain variable domain of TCR clone 109107 (TRAV26-1, TRAJ38)
CIADNAGNNRKLIG

SEQ ID NO: 218214 - protein, 15 aa, Homo sapiens
  CDR3 for beta chain variable domain of TCR clone 109107 (TRBV4-1, TRBJ1-1)
CASSQEWGHYTEAFF

SEQ ID NO: 218215 - protein, 15 aa, Homo sapiens
  CDR3 for alpha chain variable domain of TCR clone 109108 (TRAV13-1, TRAJ52)
CAANAGGTSYGKLTF

SEQ ID NO: 218216 - protein, 12 aa, Homo sapiens
  CDR3 for beta chain variable domain of TCR clone 109108 (TRBV19, TRBJ1-5)
CASSIAQQPQHF

SEQ ID NO: 218217 - protein, 16 aa, Homo sapiens
  CDR3 for alpha chain variable domain of TCR clone 109109 (TRAV12-2, TRAJ10)
CAVNRVPTGGGNKLTF

SEQ ID NO: 218218 - protein, 16 aa, Homo sapiens
  CDR3 for beta chain variable domain of TCR clone 109109 (TRBV12-5, TRBJ2-5)
CASGPRTSGNQETQYF

SEQ ID NO: 218219 - protein, 14 aa, Homo sapiens
  CDR3 for alpha chain variable domain of TCR clone 109110 (TRAV12-3, TRAJ10)
SHLPLTGGGNELTF

SEQ ID NO: 218220 - protein, 13 aa, Homo sapiens
  CDR3 for beta chain variable domain of TCR clone 109110 (TRBV27, TRBJ1-1)
CASSLSIGAEAFF

SEQ ID NO: 218221 - protein, 15 aa, Homo sapiens
  CDR3 for alpha chain variable domain of TCR clone 109111 (TRAV3, TRAJ5)
CAVRDLDTGRRALTF

SEQ ID NO: 218222 - protein, 14 aa, Homo sapiens
  CDR3 for beta chain variable domain of TCR clone 109111 (TRBV18, TRBJ2-7)
CASSPRGGAYEQYF

SEQ ID NO: 218223 - protein, 16 aa, Homo sapiens
  CDR3 for alpha chain variable domain of TCR clone 109112 (TRAV12-2, TRAJ43)
CAGDDMRFGAGTRLTV

SEQ ID NO: 218224 - protein, 12 aa, Homo sapiens
  CDR3 for beta chain variable domain of TCR clone 109112 (TRBV7-6, TRBJ2-7)
CASSLADSEQYF

SEQ ID NO: 218225 - protein, 16 aa, Homo sapiens
  CDR3 for alpha chain variable domain of TCR clone 109113 (TRAV3, TRAJ10)
CAVRAMRAGGGNKLTF

SEQ ID NO: 218226 - protein, 14 aa, Homo sapiens
  CDR3 for beta chain variable domain of TCR clone 109113 (TRBV25-1, TRBJ1-1)
CASTHLGGNTEAFF

SEQ ID NO: 218227 - protein, 12 aa, Homo sapiens
  CDR3 for alpha chain variable domain of TCR clone 109114 (TRAV13-1, TRAJ15)
CAASQAGTALIF

SEQ ID NO: 218228 - protein, 11 aa, Homo sapiens
  CDR3 for beta chain variable domain of TCR clone 109114 (TRBV19, TRBJ1-1)
CASSIGSEAFF

SEQ ID NO: 218229 - protein, 17 aa, Homo sapiens
  CDR3 for alpha chain variable domain of TCR clone 109115 (TRAV17, TRAJ40)
CFLLLCYGPGGTYKYIF

SEQ ID NO: 218230 - protein, 12 aa, Homo sapiens
  CDR3 for beta chain variable domain of TCR clone 109115 (TRBV2, TRBJ1-5)
CASSENRTPQHF

SEQ ID NO: 218231 - protein, 15 aa, Homo sapiens
  CDR3 for alpha chain variable domain of TCR clone 109116 (TRAV26-1, TRAJ48)
CIVRVGDFGNEKLTY

SEQ ID NO: 218232 - protein, 16 aa, Homo sapiens
  CDR3 for beta chain variable domain of TCR clone 109116 (TRBV4-1, TRBJ2-3)
CASSQRAGGLTDTQYF

SEQ ID NO: 218233 - protein, 11 aa, Homo sapiens
  CDR3 for alpha chain variable domain of TCR clone 109117 (TRAV1-1, TRAJ23)
CAVRQGGKLIF

SEQ ID NO: 218234 - protein, 12 aa, Homo sapiens
  CDR3 for beta chain variable domain of TCR clone 109117 (TRBV19, TRBJ1-5)
CASSIAQRPQHF

SEQ ID NO: 218235 - protein, 16 aa, Homo sapiens
  CDR3 for alpha chain variable domain of TCR clone 109118 (TRAV12-1, TRAJ53)
CVVTSVAGGSNYKLTF

SEQ ID NO: 218236 - protein, 13 aa, Homo sapiens
  CDR3 for beta chain variable domain of TCR clone 109118 (TRBV7-3, TRBJ1-1)
CASSQDWGAEAFF

SEQ ID NO: 218237 - protein, 14 aa, Homo sapiens
  CDR3 for alpha chain variable domain of TCR clone 109119 (TRAV26-1, TRAJ38)
CLADNAGNNRKLIW

SEQ ID NO: 218238 - protein, 17 aa, Homo sapiens
  CDR3 for beta chain variable domain of TCR clone 109119 (TRBV7-9, TRBJ2-3)
CASSPTVAGDLTDTQYF

SEQ ID NO: 218239 - protein, 14 aa, Homo sapiens
  CDR3 for alpha chain variable domain of TCR clone 109120 (TRAV1-2, TRAJ16)
CAVNRFSDGKKLLF

SEQ ID NO: 218240 - protein, 15 aa, Homo sapiens
  CDR3 for beta chain variable domain of TCR clone 109120 (TRBV11-3, TRBJ2-5)
CASSDTSGGIETQYF

SEQ ID NO: 218241 - protein, 14 aa, Homo sapiens
  CDR3 for alpha chain variable domain of TCR clone 109121 (TRAV12-3, TRAJ10)
SHLPLTGGGNKLTF

SEQ ID NO: 218242 - protein, 13 aa, Homo sapiens
  CDR3 for beta chain variable domain of TCR clone 109121 (TRBV12-4, TRBJ1-2)
CASSSGLTVISTF

SEQ ID NO: 218243 - protein, 14 aa, Homo sapiens
  CDR3 for alpha chain variable domain of TCR clone 109122 (TRAV34, TRAJ22)
CGADTSGSARQLTF

SEQ ID NO: 218244 - protein, 13 aa, Homo sapiens
  CDR3 for beta chain variable domain of TCR clone 109122 (TRBV4-2, TRBJ2-2)
CASEDRGTGELFF

SEQ ID NO: 218245 - protein, 13 aa, Homo sapiens
  CDR3 for alpha chain variable domain of TCR clone 109123 (TRAV21, TRAJ42)
CAVGGGSQGNLIF

SEQ ID NO: 218246 - protein, 13 aa, Homo sapiens
  CDR3 for beta chain variable domain of TCR clone 109123 (TRBV7-2, TRBJ2-5)
CASSPDRGENQYF

SEQ ID NO: 218247 - protein, 13 aa, Homo sapiens
  CDR3 for alpha chain variable domain of TCR clone 109124 (TRAV3, TRAJ20)
CAVRDTPRYKLSF

SEQ ID NO: 218248 - protein, 16 aa, Homo sapiens
  CDR3 for beta chain variable domain of TCR clone 109124 (TRBV13, TRBJ2-2)
CASSPRTGEHTGELFF

SEQ ID NO: 218249 - protein, 12 aa, Homo sapiens
  CDR3 for alpha chain variable domain of TCR clone 109125 (TRAV12-1, TRAJ40)
CVVYSGTYKYIF

SEQ ID NO: 218250 - protein, 15 aa, Homo sapiens
  CDR3 for beta chain variable domain of TCR clone 109125 (TRBV7-9, TRBJ1-6)
CASSSPRRGNSPLHF

SEQ ID NO: 218251 - protein, 18 aa, Homo sapiens
  CDR3 for alpha chain variable domain of TCR clone 109126 (TRAV17, TRAJ45)
CATSLDLYSGGGADGLTC

SEQ ID NO: 218252 - protein, 13 aa, Homo sapiens
  CDR3 for beta chain variable domain of TCR clone 109126 (TRBV10-3, TRBJ2-7)
CASKLAVNYEQYF

SEQ ID NO: 218253 - protein, 12 aa, Homo sapiens
  CDR3 for alpha chain variable domain of TCR clone 109127 (TRAV12-3, TRAJ42)
CAPGGSQGNLIF

SEQ ID NO: 218254 - protein, 16 aa, Homo sapiens
  CDR3 for beta chain variable domain of TCR clone 109127 (TRBV19, TRBJ2-1)
CASSKAGPSSYNEQFF

SEQ ID NO: 218255 - protein, 11 aa, Homo sapiens
  CDR3 for alpha chain variable domain of TCR clone 109128 (TRAV12-2, TRAJ54)
CAVEGAQKLVF

SEQ ID NO: 218256 - protein, 17 aa, Homo sapiens
  CDR3 for beta chain variable domain of TCR clone 109128 (TRBV18, TRBJ1-3)
CASSPYPTGPSGNTIYC

SEQ ID NO: 218257 - protein, 15 aa, Homo sapiens
  CDR3 for alpha chain variable domain of TCR clone 109129 (TRAV2, TRAJ9)
CAVAALNTGGFKTIF

SEQ ID NO: 218258 - protein, 14 aa, Homo sapiens
  CDR3 for beta chain variable domain of TCR clone 109129 (TRBV7-8, TRBJ2-5)
CASSATGGQETRYF

SEQ ID NO: 218259 - protein, 12 aa, Homo sapiens
  CDR3 for alpha chain variable domain of TCR clone 109130 (TRAV9-2, TRAJ36)
CALKEGANNLFF

SEQ ID NO: 218260 - protein, 13 aa, Homo sapiens
  CDR3 for beta chain variable domain of TCR clone 109130 (TRBV27, TRBJ1-1)
CASSLSIGAEAFF

SEQ ID NO: 218261 - protein, 18 aa, Homo sapiens
  CDR3 for alpha chain variable domain of TCR clone 109131 (TRAV13-1, TRAJ52)
CAASKRSAGGTSYGKLTF

SEQ ID NO: 218262 - protein, 13 aa, Homo sapiens
  CDR3 for beta chain variable domain of TCR clone 109131 (TRBV10-3, TRBJ2-7)
CASELAVNYEQYF

SEQ ID NO: 218263 - protein, 14 aa, Homo sapiens
  CDR3 for alpha chain variable domain of TCR clone 109132 (TRAV12-2, TRAJ17)
CAVLFKAAGNKLTF

SEQ ID NO: 218264 - protein, 16 aa, Homo sapiens
  CDR3 for beta chain variable domain of TCR clone 109132 (TRBV18, TRBJ1-1)
CASSPGVGGRGGEAFF

SEQ ID NO: 218265 - protein, 22 aa, Homo sapiens
  CDR3 for alpha chain variable domain of TCR clone 109133 (TRAV12-2, TRAJ53)
CSSETPSPVIQPPRGSNYKLTF

SEQ ID NO: 218266 - protein, 14 aa, Homo sapiens
  CDR3 for beta chain variable domain of TCR clone 109133 (TRBV11-2, TRBJ2-5)
CASRPLAGRETQYF

SEQ ID NO: 218267 - protein, 16 aa, Homo sapiens
  CDR3 for alpha chain variable domain of TCR clone 109134 (TRAV3, TRAJ37)
CAVRGKGSGNTGKLIF

SEQ ID NO: 218268 - protein, 20 aa, Homo sapiens
  CDR3 for beta chain variable domain of TCR clone 109134 (TRBV15, TRBJ2-1)
WGTQPCTCVPPAEVDTARFF

SEQ ID NO: 218269 - protein, 12 aa, Homo sapiens
  CDR3 for alpha chain variable domain of TCR clone 109135 (TRAV27, TRAJ9)
CAGESGGFKTIF

SEQ ID NO: 218270 - protein, 14 aa, Homo sapiens
  CDR3 for beta chain variable domain of TCR clone 109135 (TRBV7-2, TRBJ2-7)
CASRSQGAAYEQYF

SEQ ID NO: 218271 - protein, 14 aa, Homo sapiens
  CDR3 for alpha chain variable domain of TCR clone 109136 (TRAV1-2, TRAJ16)
CAVNRFSDGQKLLF

SEQ ID NO: 218272 - protein, 11 aa, Homo sapiens
  CDR3 for beta chain variable domain of TCR clone 109136 (TRBV10-3, TRBJ2-7)
CAIREVDEQYF

SEQ ID NO: 218273 - protein, 14 aa, Homo sapiens
  CDR3 for alpha chain variable domain of TCR clone 109137 (TRAV1-2, TRAJ16)
CAVNRVSDGQKLLF

SEQ ID NO: 218274 - protein, 13 aa, Homo sapiens
  CDR3 for beta chain variable domain of TCR clone 109137 (TRBV18, TRBJ2-5)
CASSPAGKETQYF

SEQ ID NO: 218275 - protein, 14 aa, Homo sapiens
  CDR3 for alpha chain variable domain of TCR clone 109138 (TRAV8-3, TRAJ6)
CAVGASGGSYIPTF

SEQ ID NO: 218276 - protein, 17 aa, Homo sapiens
  CDR3 for beta chain variable domain of TCR clone 109138 (TRBV18, TRBJ2-2)
CSSSPSDPWQNTGELFF

SEQ ID NO: 218277 - protein, 15 aa, Homo sapiens
  CDR3 for alpha chain variable domain of TCR clone 109139 (TRAV12-2, TRAJ9)
CAVNNERTGGFKTIF

SEQ ID NO: 218278 - protein, 14 aa, Homo sapiens
  CDR3 for beta chain variable domain of TCR clone 109139 (TRBV4-1, TRBJ1-4)
CASSQERKNEKLVF

SEQ ID NO: 218279 - protein, 14 aa, Homo sapiens
  CDR3 for alpha chain variable domain of TCR clone 109140 (TRAV12-2, TRAJ17)
CAVLFKAAGNELTF

SEQ ID NO: 218280 - protein, 15 aa, Homo sapiens
  CDR3 for beta chain variable domain of TCR clone 109140 (TRBV6-1, TRBJ2-3)
CASSERGGITDTQYF

SEQ ID NO: 218281 - protein, 13 aa, Homo sapiens
  CDR3 for alpha chain variable domain of TCR clone 109141 (TRAV1-1, TRAJ9)
CAAKNTGGFKTIF

SEQ ID NO: 218282 - protein, 14 aa, Homo sapiens
  CDR3 for beta chain variable domain of TCR clone 109141 (TRBV20-1, TRBJ2-1)
CSAQIGGSANEPFF

SEQ ID NO: 218283 - protein, 15 aa, Homo sapiens
  CDR3 for alpha chain variable domain of TCR clone 109142 (TRAV3, TRAJ4)
CAVRDGTGGYNKLIF

SEQ ID NO: 218284 - protein, 16 aa, Homo sapiens
  CDR3 for beta chain variable domain of TCR clone 109142 (TRBV4-3, TRBJ2-2)
CASSHLQGSGTGELFF

SEQ ID NO: 218285 - protein, 12 aa, Homo sapiens
  CDR3 for alpha chain variable domain of TCR clone 109143 (TRAV12-2, TRAJ9)
CAVYNGGFKTIF

SEQ ID NO: 218286 - protein, 15 aa, Homo sapiens
  CDR3 for beta chain variable domain of TCR clone 109143 (TRBV19, TRBJ1-1)
CASTSGQIQNTEAFF

SEQ ID NO: 218287 - protein, 20 aa, Homo sapiens
  CDR3 for alpha chain variable domain of TCR clone 109144 (TRAV25, TRAJ21)
TATQTTDVGTYPLSFNKFYF

SEQ ID NO: 218288 - protein, 12 aa, Homo sapiens
  CDR3 for beta chain variable domain of TCR clone 109144 (TRBV20-1, TRBJ2-1)
CSARLGTDEQFF

SEQ ID NO: 218289 - protein, 12 aa, Homo sapiens
  CDR3 for alpha chain variable domain of TCR clone 109145 (TRAV12-1, TRAJ40)
CVVYSGTYKYIF

SEQ ID NO: 218290 - protein, 16 aa, Homo sapiens
  CDR3 for beta chain variable domain of TCR clone 109145 (TRBV15, TRBJ2-5)
CATSRARGLGQETQYF

SEQ ID NO: 218291 - protein, 15 aa, Homo sapiens
  CDR3 for alpha chain variable domain of TCR clone 109146 (TRAV2, TRAJ15)
CAVEDRGQAGIALIF

SEQ ID NO: 218292 - protein, 13 aa, Homo sapiens
  CDR3 for beta chain variable domain of TCR clone 109146 (TRBV10-2, TRBJ2-7)
CASGASGGYEQYF

SEQ ID NO: 218293 - protein, 12 aa, Homo sapiens
  CDR3 for alpha chain variable domain of TCR clone 109147 (TRAV8-3, TRAJ26)
CAGDNYGQNFVF

SEQ ID NO: 218294 - protein, 18 aa, Homo sapiens
  CDR3 for beta chain variable domain of TCR clone 109147 (TRBV12-4, TRBJ2-2)
CASSLVAGTRGRTGGLFF

SEQ ID NO: 218295 - protein, 18 aa, Homo sapiens
  CDR3 for alpha chain variable domain of TCR clone 109148 (TRAV12-3, TRAJ52)
CAMSRTNAGGTSYGKLTF

SEQ ID NO: 218296 - protein, 15 aa, Homo sapiens
  CDR3 for beta chain variable domain of TCR clone 109148 (TRBV19, TRBJ1-2)
CVSSVGQVLNYGYTF

SEQ ID NO: 218297 - protein, 17 aa, Homo sapiens
  CDR3 for alpha chain variable domain of TCR clone 109149 (TRAV12-3, TRAJ26)
CAMSGGRWDNYGQNFVF

SEQ ID NO: 218298 - protein, 12 aa, Homo sapiens
  CDR3 for beta chain variable domain of TCR clone 109149 (TRBV19, TRBJ1-1)
CASSTTGVEAFF

SEQ ID NO: 218299 - protein, 14 aa, Homo sapiens
  CDR3 for alpha chain variable domain of TCR clone 109150 (TRAV12-1, TRAJ13)
CVVIDAGGYQKVTF

SEQ ID NO: 218300 - protein, 12 aa, Homo sapiens
  CDR3 for beta chain variable domain of TCR clone 109150 (TRBV29-1, TRBJ2-3)
CSVTGGADTQYF

SEQ ID NO: 218301 - protein, 13 aa, Homo sapiens
  CDR3 for alpha chain variable domain of TCR clone 109151 (TRAV3, TRAJ21)
CAVREPDYNKFYF

SEQ ID NO: 218302 - protein, 13 aa, Homo sapiens
  CDR3 for beta chain variable domain of TCR clone 109151 (TRBV9, TRBJ2-1)
CASSPSGGNEQFF

SEQ ID NO: 218303 - protein, 11 aa, Homo sapiens
  CDR3 for alpha chain variable domain of TCR clone 109152 (TRAV12-3, TRAJ43)
CAMSVSNDMRF

SEQ ID NO: 218304 - protein, 15 aa, Homo sapiens
  CDR3 for beta chain variable domain of TCR clone 109152 (TRBV5-1, TRBJ2-1)
CASSPQRAPYNEQFF

SEQ ID NO: 218305 - protein, 17 aa, Homo sapiens
  CDR3 for alpha chain variable domain of TCR clone 109153 (TRAV3, TRAJ6)
CAVRDGPRAGGRYIPTF

SEQ ID NO: 218306 - protein, 14 aa, Homo sapiens
  CDR3 for beta chain variable domain of TCR clone 109153 (TRBV7-2, TRBJ2-7)
CASSPKTSFYERYF

SEQ ID NO: 218307 - protein, 12 aa, Homo sapiens
  CDR3 for alpha chain variable domain of TCR clone 109154 (TRAV12-3, TRAJ40)
CAMSSGTYKYIF

SEQ ID NO: 218308 - protein, 14 aa, Homo sapiens
  CDR3 for beta chain variable domain of TCR clone 109154 (TRBV7-3, TRBJ2-1)
CASSLAGGTNEQFF

SEQ ID NO: 218309 - protein, 14 aa, Homo sapiens
  CDR3 for alpha chain variable domain of TCR clone 109155 (TRAV12-2, TRAJ36)
CAVKISTWANNLFF

SEQ ID NO: 218310 - protein, 14 aa, Homo sapiens
  CDR3 for beta chain variable domain of TCR clone 109155 (TRBV25-1, TRBJ1-2)
CASSDTTGVVGYTF

SEQ ID NO: 218311 - protein, 17 aa, Homo sapiens
  CDR3 for alpha chain variable domain of TCR clone 109156 (TRAV3, TRAJ6)
CAVRDGPRAGGSDIPTF

SEQ ID NO: 218312 - protein, 15 aa, Homo sapiens
  CDR3 for beta chain variable domain of TCR clone 109156 (TRBV11-3, TRBJ2-7)
CASSPGPASSYEQYF

SEQ ID NO: 218313 - protein, 13 aa, Homo sapiens
  CDR3 for alpha chain variable domain of TCR clone 109157 (TRAV35, TRAJ44)
CAGLSGTASKLTF

SEQ ID NO: 218314 - protein, 20 aa, Homo sapiens
  CDR3 for beta chain variable domain of TCR clone 109157 (TRBV28, TRBJ2-1)
CASTPIGRSPGLAGGNEQFF

SEQ ID NO: 218315 - protein, 16 aa, Homo sapiens
  CDR3 for alpha chain variable domain of TCR clone 109158 (TRAV38-1, TRAJ56)
CAFMKRQTGANSKLTF

SEQ ID NO: 218316 - protein, 11 aa, Homo sapiens
  CDR3 for beta chain variable domain of TCR clone 109158 (TRBV19, TRBJ1-1)
CASSIGSEASF

SEQ ID NO: 218317 - protein, 13 aa, Homo sapiens
  CDR3 for alpha chain variable domain of TCR clone 109159 (TRAV8-3, TRAJ44)
CAVVPGTASKLTF

SEQ ID NO: 218318 - protein, 19 aa, Homo sapiens
  CDR3 for beta chain variable domain of TCR clone 109159 (TRBV25-1, TRBJ2-2)
CAILVYRVDRGRKTGELFF

SEQ ID NO: 218319 - protein, 14 aa, Homo sapiens
  CDR3 for alpha chain variable domain of TCR clone 109160 (TRAV21, TRAJ38)
CAVLGAGNNRKLIW

SEQ ID NO: 218320 - protein, 13 aa, Homo sapiens
  CDR3 for beta chain variable domain of TCR clone 109160 (TRBV7-3, TRBJ2-5)
CASSIGFFETQYF

SEQ ID NO: 218321 - protein, 19 aa, Homo sapiens
  CDR3 for alpha chain variable domain of TCR clone 109161 (TRAV2, TRAJ20)
ILQVREADAADYRDCKLSF

SEQ ID NO: 218322 - protein, 13 aa, Homo sapiens
  CDR3 for beta chain variable domain of TCR clone 109161 (TRBV15, TRBJ1-6)
CATSGGLNSPLHF

SEQ ID NO: 218323 - protein, 14 aa, Homo sapiens
  CDR3 for alpha chain variable domain of TCR clone 109162 (TRAV4, TRAJ17)
CLVGDMAAGNQLTF

SEQ ID NO: 218324 - protein, 14 aa, Homo sapiens
  CDR3 for beta chain variable domain of TCR clone 109162 (TRBV7-6, TRBJ2-3)
CASSLGTVTDTQYF

SEQ ID NO: 218325 - protein, 14 aa, Homo sapiens
  CDR3 for alpha chain variable domain of TCR clone 109163 (TRAV4, TRAJ26)
CLVGPHNYGQNFVF

SEQ ID NO: 218326 - protein, 13 aa, Homo sapiens
  CDR3 for beta chain variable domain of TCR clone 109163 (TRBV4-2, TRBJ1-1)
CASSQAGNTEAFF

SEQ ID NO: 218327 - protein, 12 aa, Homo sapiens
  CDR3 for alpha chain variable domain of TCR clone 109164 (TRAV3, TRAJ39)
CAVIEWSNMITF

SEQ ID NO: 218328 - protein, 14 aa, Homo sapiens
  CDR3 for beta chain variable domain of TCR clone 109164 (TRBV7-8, TRBJ2-3)
CASSFPDGQDTQYF

SEQ ID NO: 218329 - protein, 12 aa, Homo sapiens
  CDR3 for alpha chain variable domain of TCR clone 109165 (TRAV1-1, TRAJ39)
CAVPVVGNMHTF

SEQ ID NO: 218330 - protein, 15 aa, Homo sapiens
  CDR3 for beta chain variable domain of TCR clone 109165 (TRBV19, TRBJ1-6)
CASSTQGAVGSPLHF

SEQ ID NO: 218331 - protein, 15 aa, Homo sapiens
  CDR3 for alpha chain variable domain of TCR clone 109166 (TRAV17, TRAJ13)
CATDAGSGGYLKVTF

SEQ ID NO: 218332 - protein, 17 aa, Homo sapiens
  CDR3 for beta chain variable domain of TCR clone 109166 (TRBV11-2, TRBJ2-1)
CASSLYPPGVEYNEQFF

SEQ ID NO: 218333 - protein, 11 aa, Homo sapiens
  CDR3 for alpha chain variable domain of TCR clone 109167 (TRAV30, TRAJ24)
WMLTAGGKFQF

SEQ ID NO: 218334 - protein, 12 aa, Homo sapiens
  CDR3 for beta chain variable domain of TCR clone 109167 (TRBV11-2, TRBJ2-2)
CASSLGGGELFF

SEQ ID NO: 218335 - protein, 14 aa, Homo sapiens
  CDR3 for alpha chain variable domain of TCR clone 109168 (TRAV1-2, TRAJ16)
CAVNRFSDGQKLLF

SEQ ID NO: 218336 - protein, 13 aa, Homo sapiens
  CDR3 for beta chain variable domain of TCR clone 109168 (TRBV19, TRBJ1-5)
CASSMRGYQPQHF

SEQ ID NO: 218337 - protein, 13 aa, Homo sapiens
  CDR3 for alpha chain variable domain of TCR clone 109169 (TRAV21, TRAJ27)
CAARPGNAGKSTF

SEQ ID NO: 218338 - protein, 14 aa, Homo sapiens
  CDR3 for beta chain variable domain of TCR clone 109169 (TRBV7-9, TRBJ2-5)
CASSLDTAHETQYF

SEQ ID NO: 218339 - protein, 13 aa, Homo sapiens
  CDR3 for alpha chain variable domain of TCR clone 109170 (TRAV17, TRAJ15)
CATDARAGTALLF

SEQ ID NO: 218340 - protein, 15 aa, Homo sapiens
  CDR3 for beta chain variable domain of TCR clone 109170 (TRBV20-1, TRBJ2-7)
CSARDRVSGMDEQYF

SEQ ID NO: 218341 - protein, 15 aa, Homo sapiens
  CDR3 for alpha chain variable domain of TCR clone 109171 (TRAV26-1, TRAJ29)
CIVRVEGSGNPPLVF

SEQ ID NO: 218342 - protein, 15 aa, Homo sapiens
  CDR3 for beta chain variable domain of TCR clone 109171 (TRBV7-9, TRBJ1-5)
CASSQGHQPNQTQHF

SEQ ID NO: 218343 - protein, 11 aa, Homo sapiens
  CDR3 for alpha chain variable domain of TCR clone 109172 (TRAV35, TRAJ12)
RRMDSSYKLIF

SEQ ID NO: 218344 - protein, 17 aa, Homo sapiens
  CDR3 for beta chain variable domain of TCR clone 109172 (TRBV7-3, TRBJ2-3)
CASSLMKRMRGADTQYF

SEQ ID NO: 218345 - protein, 13 aa, Homo sapiens
  CDR3 for alpha chain variable domain of TCR clone 109173 (TRAV12-1, TRAJ6)
CVLASGGSYIPTF

SEQ ID NO: 218346 - protein, 11 aa, Homo sapiens
  CDR3 for beta chain variable domain of TCR clone 109173 (TRBV29-1, TRBJ2-5)
YSEDRTGTQYF

SEQ ID NO: 218347 - protein, 12 aa, Homo sapiens
  CDR3 for alpha chain variable domain of TCR clone 109174 (TRAV26-1, TRAJ26)
CIVYNYGQNFVF

SEQ ID NO: 218348 - protein, 15 aa, Homo sapiens
  CDR3 for beta chain variable domain of TCR clone 109174 (TRBV7-2, TRBJ2-1)
CASSSGLAGGNEQFF

SEQ ID NO: 218349 - protein, 14 aa, Homo sapiens
  CDR3 for alpha chain variable domain of TCR clone 109175 (TRAV20, TRAJ29)
CAVQESFRKHTSCL

SEQ ID NO: 218350 - protein, 16 aa, Homo sapiens
  CDR3 for beta chain variable domain of TCR clone 109175 (TRBV7-2, TRBJ2-7)
CASSLDSSGGAYEQYF

SEQ ID NO: 218351 - protein, 11 aa, Homo sapiens
  CDR3 for alpha chain variable domain of TCR clone 109176 (TRAV35, TRAJ30)
CAGERDDKIIF

SEQ ID NO: 218352 - protein, 14 aa, Homo sapiens
  CDR3 for beta chain variable domain of TCR clone 109176 (TRBV15, TRBJ2-5)
CATSGDRGQETQCF

SEQ ID NO: 218353 - protein, 15 aa, Homo sapiens
  CDR3 for alpha chain variable domain of TCR clone 109177 (TRAV17, TRAJ10)
CATDASGGGGDKLTF

SEQ ID NO: 218354 - protein, 14 aa, Homo sapiens
  CDR3 for beta chain variable domain of TCR clone 109177 (TRBV20-1, TRBJ2-5)
CSVPYRGRAETQYF

SEQ ID NO: 218355 - protein, 14 aa, Homo sapiens
  CDR3 for alpha chain variable domain of TCR clone 109178 (TRAV1-2, TRAJ24)
YAVLTTDNWGKFQF

SEQ ID NO: 218356 - protein, 15 aa, Homo sapiens
  CDR3 for beta chain variable domain of TCR clone 109178 (TRBV6-6, TRBJ2-7)
CASSYSYGGSYEQYF

SEQ ID NO: 218357 - protein, 14 aa, Homo sapiens
  CDR3 for alpha chain variable domain of TCR clone 109179 (TRAV1-2, TRAJ29)
RAVRELTSATPLVF

SEQ ID NO: 218358 - protein, 14 aa, Homo sapiens
  CDR3 for beta chain variable domain of TCR clone 109179 (TRBV3-1, TRBJ2-5)
CASSQGPDQETQYF

SEQ ID NO: 218359 - protein, 16 aa, Homo sapiens
  CDR3 for alpha chain variable domain of TCR clone 109180 (TRAV8-1, TRAJ39)
CAVNVPSYSAGNMLTF

SEQ ID NO: 218360 - protein, 15 aa, Homo sapiens
  CDR3 for beta chain variable domain of TCR clone 109180 (TRBV4-1, TRBJ2-3)
CASRSTRAGTDTQYF

SEQ ID NO: 218361 - protein, 14 aa, Homo sapiens
  CDR3 for alpha chain variable domain of TCR clone 109181 (TRAV12-3, TRAJ42)
CAMNYGGSQGNLIF

SEQ ID NO: 218362 - protein, 13 aa, Homo sapiens
  CDR3 for beta chain variable domain of TCR clone 109181 (TRBV10-3, TRBJ2-7)
CASKLAVNYEQYF

SEQ ID NO: 218363 - protein, 11 aa, Homo sapiens
  CDR3 for alpha chain variable domain of TCR clone 109182 (TRAV2, TRAJ33)
CAVDSNYQLIW

SEQ ID NO: 218364 - protein, 14 aa, Homo sapiens
  CDR3 for beta chain variable domain of TCR clone 109182 (TRBV11-2, TRBJ2-3)
CASSRLAHTDTQYF

SEQ ID NO: 218365 - protein, 16 aa, Homo sapiens
  CDR3 for alpha chain variable domain of TCR clone 109183 (TRAV1-2, TRAJ10)
CAVRGVLTGGGNKLTF

SEQ ID NO: 218366 - protein, 11 aa, Homo sapiens
  CDR3 for beta chain variable domain of TCR clone 109183 (TRBV19, TRBJ2-7)
CASGNSYEQYF

SEQ ID NO: 218367 - protein, 15 aa, Homo sapiens
  CDR3 for alpha chain variable domain of TCR clone 109184 (TRAV3, TRAJ9)
CAVRARNTGGFKTIF

SEQ ID NO: 218368 - protein, 14 aa, Homo sapiens
  CDR3 for beta chain variable domain of TCR clone 109184 (TRBV2, TRBJ2-7)
CASSLTSGGYEQYF

SEQ ID NO: 218369 - protein, 13 aa, Homo sapiens
  CDR3 for alpha chain variable domain of TCR clone 109185 (TRAV21, TRAJ15)
CAVANQAGTALIF

SEQ ID NO: 218370 - protein, 16 aa, Homo sapiens
  CDR3 for beta chain variable domain of TCR clone 109185 (TRBV6-5, TRBJ2-7)
CASSPGGREWTYEQYF

SEQ ID NO: 218371 - protein, 14 aa, Homo sapiens
  CDR3 for alpha chain variable domain of TCR clone 109186 (TRAV1-2, TRAJ6)
CAVSLSGGSYIPTF

SEQ ID NO: 218372 - protein, 15 aa, Homo sapiens
  CDR3 for beta chain variable domain of TCR clone 109186 (TRBV28, TRBJ2-7)
CTSSPGGRGFYEQYF

SEQ ID NO: 218373 - protein, 12 aa, Homo sapiens
  CDR3 for alpha chain variable domain of TCR clone 109187 (TRAV1-1, TRAJ43)
CAPRVSSNDMRF

SEQ ID NO: 218374 - protein, 13 aa, Homo sapiens
  CDR3 for beta chain variable domain of TCR clone 109187 (TRBV12-4, TRBJ2-5)
CASSLFRRETQYF

SEQ ID NO: 218375 - protein, 18 aa, Homo sapiens
  CDR3 for alpha chain variable domain of TCR clone 109188 (TRAV26-1, TRAJ52)
CIVRVEGAGGTSYGKLTF

SEQ ID NO: 218376 - protein, 15 aa, Homo sapiens
  CDR3 for beta chain variable domain of TCR clone 109188 (TRBV20-1, TRBJ2-7)
CSAESGTSGAYEQYF

SEQ ID NO: 218377 - protein, 14 aa, Homo sapiens
  CDR3 for alpha chain variable domain of TCR clone 109189 (TRAV12-3, TRAJ10)
SHPPLTGGGNKLTF

SEQ ID NO: 218378 - protein, 13 aa, Homo sapiens
  CDR3 for beta chain variable domain of TCR clone 109189 (TRBV7-9, TRBJ2-3)
CASSPGSTDTQYF

SEQ ID NO: 218379 - protein, 16 aa, Homo sapiens
  CDR3 for alpha chain variable domain of TCR clone 109190 (TRAV16, TRAJ4)
CALSRMFSGGYNKLIF

SEQ ID NO: 218380 - protein, 12 aa, Homo sapiens
  CDR3 for beta chain variable domain of TCR clone 109190 (TRBV20-1, TRBJ2-1)
CSARLGTDEQFF

SEQ ID NO: 218381 - protein, 14 aa, Homo sapiens
  CDR3 for alpha chain variable domain of TCR clone 109191 (TRAV8-3, TRAJ3)
CAVVPRSSASKIIF

SEQ ID NO: 218382 - protein, 14 aa, Homo sapiens
  CDR3 for beta chain variable domain of TCR clone 109191 (TRBV7-2, TRBJ2-7)
CASSPKTSFYEQYF

SEQ ID NO: 218383 - protein, 14 aa, Homo sapiens
  CDR3 for alpha chain variable domain of TCR clone 109192 (TRAV12-3, TRAJ10)
SHLPLSGGGNKLTF

SEQ ID NO: 218384 - protein, 14 aa, Homo sapiens
  CDR3 for beta chain variable domain of TCR clone 109192 (TRBV6-1, TRBJ1-3)
CASVQGGGGNTIYF

SEQ ID NO: 218385 - protein, 13 aa, Homo sapiens
  CDR3 for alpha chain variable domain of TCR clone 109193 (TRAV3, TRAJ15)
CAVRDQAGTALIF

SEQ ID NO: 218386 - protein, 13 aa, Homo sapiens
  CDR3 for beta chain variable domain of TCR clone 109193 (TRBV18, TRBJ1-2)
CASSASATEGYTF

SEQ ID NO: 218387 - protein, 15 aa, Homo sapiens
  CDR3 for alpha chain variable domain of TCR clone 109194 (TRAV2, TRAJ23)
CAVEDRDNQGGKLIF

SEQ ID NO: 218388 - protein, 15 aa, Homo sapiens
  CDR3 for beta chain variable domain of TCR clone 109194 (TRBV7-2, TRBJ2-1)
CASSSGLAGGNEQFF

SEQ ID NO: 218389 - protein, 13 aa, Homo sapiens
  CDR3 for alpha chain variable domain of TCR clone 109195 (TRAV20, TRAJ37)
CAGCSSNTGKLIF

SEQ ID NO: 218390 - protein, 17 aa, Homo sapiens
  CDR3 for beta chain variable domain of TCR clone 109195 (TRBV28, TRBJ2-5)
CACSRQGGLAGAETQYF

SEQ ID NO: 218391 - protein, 13 aa, Homo sapiens
  CDR3 for alpha chain variable domain of TCR clone 109196 (TRAV12-3, TRAJ33)
CSMSVNSNYQLIW

SEQ ID NO: 218392 - protein, 13 aa, Homo sapiens
  CDR3 for beta chain variable domain of TCR clone 109196 (TRBV7-9, TRBJ1-2)
CASSLKQNYGYTF

SEQ ID NO: 218393 - protein, 14 aa, Homo sapiens
  CDR3 for alpha chain variable domain of TCR clone 109197 (TRAV12-2, TRAJ5)
CAVNRSTGRRALTF

SEQ ID NO: 218394 - protein, 14 aa, Homo sapiens
  CDR3 for beta chain variable domain of TCR clone 109197 (TRBV7-9, TRBJ2-4)
CASSLAMGGNIQYF

SEQ ID NO: 218395 - protein, 17 aa, Homo sapiens
  CDR3 for alpha chain variable domain of TCR clone 109198 (TRAV26-1, TRAJ28)
CIVRVPDSVAGSYQLTF

SEQ ID NO: 218396 - protein, 17 aa, Homo sapiens
  CDR3 for beta chain variable domain of TCR clone 109198 (TRBV28, TRBJ2-7)
CASSPLPAGGKSYEQYF

SEQ ID NO: 218397 - protein, 12 aa, Homo sapiens
  CDR3 for alpha chain variable domain of TCR clone 109199 (TRAV13-2, TRAJ8)
CAPWLGFQKLVF

SEQ ID NO: 218398 - protein, 14 aa, Homo sapiens
  CDR3 for beta chain variable domain of TCR clone 109199 (TRBV19, TRBJ2-5)
CASSMTGQQETQYF

SEQ ID NO: 218399 - protein, 13 aa, Homo sapiens
  CDR3 for alpha chain variable domain of TCR clone 109200 (TRAV8-3, TRAJ21)
CAVGTYNFNKFYF

SEQ ID NO: 218400 - protein, 16 aa, Homo sapiens
  CDR3 for beta chain variable domain of TCR clone 109200 (TRBV19, TRBJ2-1)
CASSMGGGSSYNEQFF

SEQ ID NO: 218401 - protein, 15 aa, Homo sapiens
  CDR3 for alpha chain variable domain of TCR clone 109201 (TRAV35, TRAJ50)
CAGQLRKTSYDKVIF

SEQ ID NO: 218402 - protein, 15 aa, Homo sapiens
  CDR3 for beta chain variable domain of TCR clone 109201 (TRBV19, TRBJ1-2)
CASSVGQVLNYGYTF

SEQ ID NO: 218403 - protein, 14 aa, Homo sapiens
  CDR3 for alpha chain variable domain of TCR clone 109202 (TRAV29/DV5, TRAJ45)
CAASFRGGADGLTF

SEQ ID NO: 218404 - protein, 18 aa, Homo sapiens
  CDR3 for beta chain variable domain of TCR clone 109202 (TRBV7-9, TRBJ2-7)
CASSLTTSGSRTWYEQYF

SEQ ID NO: 218405 - protein, 12 aa, Homo sapiens
  CDR3 for alpha chain variable domain of TCR clone 109203 (TRAV12-3, TRAJ17)
CAMTLTGNKLTF

SEQ ID NO: 218406 - protein, 15 aa, Homo sapiens
  CDR3 for beta chain variable domain of TCR clone 109203 (TRBV20-1, TRBJ2-7)
CSARGRVSRMDEQYF

SEQ ID NO: 218407 - protein, 15 aa, Homo sapiens
  CDR3 for alpha chain variable domain of TCR clone 109204 (TRAV12-2, TRAJ53)
CAVNGEGGSNYKLTF

SEQ ID NO: 218408 - protein, 15 aa, Homo sapiens
  CDR3 for beta chain variable domain of TCR clone 109204 (TRBV12-4, TRBJ2-5)
CASSPPTGLQETQYF

SEQ ID NO: 218409 - protein, 14 aa, Homo sapiens
  CDR3 for alpha chain variable domain of TCR clone 109205 (TRAV35, TRAJ22)
CAGLRRGSARQLTF

SEQ ID NO: 218410 - protein, 15 aa, Homo sapiens
  CDR3 for beta chain variable domain of TCR clone 109205 (TRBV12-4, TRBJ2-5)
CASSPPTGLQETQYF

SEQ ID NO: 218411 - protein, 18 aa, Homo sapiens
  CDR3 for alpha chain variable domain of TCR clone 109206 (TRAV12-3, TRAJ52)
CAMSRTNAGGTSYGKLTF

SEQ ID NO: 218412 - protein, 15 aa, Homo sapiens
  CDR3 for beta chain variable domain of TCR clone 109206 (TRBV7-9, TRBJ1-6)
CASSSPGRGNSPLHF

SEQ ID NO: 218413 - protein, 13 aa, Homo sapiens
  CDR3 for alpha chain variable domain of TCR clone 109207 (TRAV35, TRAJ36)
CAGPRIGANNLFF

SEQ ID NO: 218414 - protein, 16 aa, Homo sapiens
  CDR3 for beta chain variable domain of TCR clone 109207 (TRBV12-4, TRBJ1-5)
CASSRPVGGSNQPQHF

SEQ ID NO: 218415 - protein, 11 aa, Homo sapiens
  CDR3 for alpha chain variable domain of TCR clone 109208 (TRAV12-2, TRAJ49)
CAVWAGNQFYF

SEQ ID NO: 218416 - protein, 15 aa, Homo sapiens
  CDR3 for beta chain variable domain of TCR clone 109208 (TRBV27, TRBJ2-1)
CASSNGGGSSNEQFF

SEQ ID NO: 218417 - protein, 15 aa, Homo sapiens
  CDR3 for alpha chain variable domain of TCR clone 109209 (TRAV3, TRAJ23)
CAVRDRGNQGGKLIF

SEQ ID NO: 218418 - protein, 14 aa, Homo sapiens
  CDR3 for beta chain variable domain of TCR clone 109209 (TRBV19, TRBJ2-1)
CASPTFVLSGEQFF

SEQ ID NO: 218419 - protein, 15 aa, Homo sapiens
  CDR3 for alpha chain variable domain of TCR clone 109210 (TRAV1-2, TRAJ30)
CAVRPHGNRDAKIIF

SEQ ID NO: 218420 - protein, 13 aa, Homo sapiens
  CDR3 for beta chain variable domain of TCR clone 109210 (TRBV4-1, TRBJ2-7)
CASSQGQAYEQYF

SEQ ID NO: 218421 - protein, 16 aa, Homo sapiens
  CDR3 for alpha chain variable domain of TCR clone 109211 (TRAV30, TRAJ24)
CGTEIVDADSWGKFQF

SEQ ID NO: 218422 - protein, 12 aa, Homo sapiens
  CDR3 for beta chain variable domain of TCR clone 109211 (TRBV11-3, TRBJ1-1)
CASSHRQGEAFF

SEQ ID NO: 218423 - protein, 14 aa, Homo sapiens
  CDR3 for alpha chain variable domain of TCR clone 109212 (TRAV23/DV6, TRAJ57)
CAARNQGGSEKLVF

SEQ ID NO: 218424 - protein, 13 aa, Homo sapiens
  CDR3 for beta chain variable domain of TCR clone 109212 (TRBV11-2, TRBJ2-7)
CASSSYPSYEQYF

SEQ ID NO: 218425 - protein, 13 aa, Homo sapiens
  CDR3 for alpha chain variable domain of TCR clone 109213 (TRAV21, TRAJ20)
CAVGLRVDYKLSF

SEQ ID NO: 218426 - protein, 14 aa, Homo sapiens
  CDR3 for beta chain variable domain of TCR clone 109213 (TRBV7-2, TRBJ2-2)
CASRGQGAAGELFF

SEQ ID NO: 218427 - protein, 12 aa, Homo sapiens
  CDR3 for alpha chain variable domain of TCR clone 109214 (TRAV21, TRAJ29)
CAVTSGNTPLVF

SEQ ID NO: 218428 - protein, 15 aa, Homo sapiens
  CDR3 for beta chain variable domain of TCR clone 109214 (TRBV12-4, TRBJ2-2)
CASGPGQLNTGELFF

SEQ ID NO: 218429 - protein, 15 aa, Homo sapiens
  CDR3 for alpha chain variable domain of TCR clone 109215 (TRAV12-3, TRAJ6)
CAMSATTGGSHIPTF

SEQ ID NO: 218430 - protein, 16 aa, Homo sapiens
  CDR3 for beta chain variable domain of TCR clone 109215 (TRBV20-1, TRBJ1-2)
CSASMGQGVANYGDTF
